United States Patent Application Publication US 2015/0232836 A1 - sequence listing, part 42

SEQ ID NO: 1662291 - DNA, 15 bp, Homo sapiens
gtggattgatgggct

SEQ ID NO: 1662292 - DNA, 15 bp, Homo sapiens
tggattgatgggctt

SEQ ID NO: 1662293 - DNA, 15 bp, Homo sapiens
ggattgatgggctta

SEQ ID NO: 1662294 - DNA, 15 bp, Homo sapiens
gattgatgggcttaa

SEQ ID NO: 1662295 - DNA, 15 bp, Homo sapiens
attgatgggcttaag

SEQ ID NO: 1662296 - DNA, 15 bp, Homo sapiens
ttgatgggcttaagg

SEQ ID NO: 1662297 - DNA, 15 bp, Homo sapiens
tgatgggcttaaggc

SEQ ID NO: 1662298 - DNA, 15 bp, Homo sapiens
gatgggcttaaggcc

SEQ ID NO: 1662299 - DNA, 15 bp, Homo sapiens
atgggcttaaggcca

SEQ ID NO: 1662300 - DNA, 15 bp, Homo sapiens
tgggcttaaggccag

SEQ ID NO: 1662301 - DNA, 15 bp, Homo sapiens
gggcttaaggccaga

SEQ ID NO: 1662302 - DNA, 15 bp, Homo sapiens
ggcttaaggccagac

SEQ ID NO: 1662303 - DNA, 15 bp, Homo sapiens
gcttaaggccagacc

SEQ ID NO: 1662304 - DNA, 15 bp, Homo sapiens
cttaaggccagacca

SEQ ID NO: 1662305 - DNA, 15 bp, Homo sapiens
ttaaggccagaccac

SEQ ID NO: 1662306 - DNA, 15 bp, Homo sapiens
taaggccagaccaca

SEQ ID NO: 1662307 - DNA, 15 bp, Homo sapiens
aaggccagaccacag

SEQ ID NO: 1662308 - DNA, 15 bp, Homo sapiens
aggccagaccacagc

SEQ ID NO: 1662309 - DNA, 15 bp, Homo sapiens
ggccagaccacagct

SEQ ID NO: 1662310 - DNA, 15 bp, Homo sapiens
gccagaccacagctg

SEQ ID NO: 1662311 - DNA, 15 bp, Homo sapiens
ccagaccacagctgc

SEQ ID NO: 1662312 - DNA, 15 bp, Homo sapiens
cagaccacagctgca

SEQ ID NO: 1662313 - DNA, 15 bp, Homo sapiens
agaccacagctgcaa

SEQ ID NO: 1662314 - DNA, 15 bp, Homo sapiens
gaccacagctgcaat

SEQ ID NO: 1662315 - DNA, 15 bp, Homo sapiens
accacagctgcaatg

SEQ ID NO: 1662316 - DNA, 15 bp, Homo sapiens
ccacagctgcaatgg

SEQ ID NO: 1662317 - DNA, 15 bp, Homo sapiens
cacagctgcaatggc

SEQ ID NO: 1662318 - DNA, 15 bp, Homo sapiens
acagctgcaatggct

SEQ ID NO: 1662319 - DNA, 15 bp, Homo sapiens
cagctgcaatggctc

SEQ ID NO: 1662320 - DNA, 15 bp, Homo sapiens
agctgcaatggctca

SEQ ID NO: 1662321 - DNA, 15 bp, Homo sapiens
gctgcaatggctcac

SEQ ID NO: 1662322 - DNA, 15 bp, Homo sapiens
ctgcaatggctcacc

SEQ ID NO: 1662323 - DNA, 15 bp, Homo sapiens
tgcaatggctcacct

SEQ ID NO: 1662324 - DNA, 15 bp, Homo sapiens
gcaatggctcacctc

SEQ ID NO: 1662325 - DNA, 15 bp, Homo sapiens
caatggctcacctct

SEQ ID NO: 1662326 - DNA, 15 bp, Homo sapiens
aatggctcacctctg

SEQ ID NO: 1662327 - DNA, 15 bp, Homo sapiens
atggctcacctctgc

SEQ ID NO: 1662328 - DNA, 15 bp, Homo sapiens
tggctcacctctgcc

SEQ ID NO: 1662329 - DNA, 15 bp, Homo sapiens
ggctcacctctgcca

SEQ ID NO: 1662330 - DNA, 15 bp, Homo sapiens
gctcacctctgccaa

SEQ ID NO: 1662331 - DNA, 15 bp, Homo sapiens
ctcacctctgccaaa

SEQ ID NO: 1662332 - DNA, 15 bp, Homo sapiens
tcacctctgccaaag

SEQ ID NO: 1662333 - DNA, 15 bp, Homo sapiens
cacctctgccaaagg

SEQ ID NO: 1662334 - DNA, 15 bp, Homo sapiens
acctctgccaaaggc

SEQ ID NO: 1662335 - DNA, 15 bp, Homo sapiens
cctctgccaaaggcc

SEQ ID NO: 1662336 - DNA, 15 bp, Homo sapiens
ctctgccaaaggcca

SEQ ID NO: 1662337 - DNA, 15 bp, Homo sapiens
tctgccaaaggccag

SEQ ID NO: 1662338 - DNA, 15 bp, Homo sapiens
ctgccaaaggccagg

SEQ ID NO: 1662339 - DNA, 15 bp, Homo sapiens
tgccaaaggccaggc

SEQ ID NO: 1662340 - DNA, 15 bp, Homo sapiens
gccaaaggccaggct

SEQ ID NO: 1662341 - DNA, 15 bp, Homo sapiens
ccaaaggccaggctc

SEQ ID NO: 1662342 - DNA, 15 bp, Homo sapiens
aaaggccaggctcgt

SEQ ID NO: 1662343 - DNA, 15 bp, Homo sapiens
aaggccaggctcgtt

SEQ ID NO: 1662344 - DNA, 15 bp, Homo sapiens
aggccaggctcgttg

SEQ ID NO: 1662345 - DNA, 15 bp, Homo sapiens
ggccaggctcgttgg

SEQ ID NO: 1662346 - DNA, 15 bp, Homo sapiens
gccaggctcgttggg

SEQ ID NO: 1662347 - DNA, 15 bp, Homo sapiens
ccaggctcgttgggg

SEQ ID NO: 1662348 - DNA, 15 bp, Homo sapiens
caggctcgttggggc

SEQ ID NO: 1662349 - DNA, 15 bp, Homo sapiens
aggctcgttggggca

SEQ ID NO: 1662350 - DNA, 15 bp, Homo sapiens
ggctcgttggggcag

SEQ ID NO: 1662351 - DNA, 15 bp, Homo sapiens
gctcgttggggcaga

SEQ ID NO: 1662352 - DNA, 15 bp, Homo sapiens
ctcgttggggcagag

SEQ ID NO: 1662353 - DNA, 15 bp, Homo sapiens
tcgttggggcagaga

SEQ ID NO: 1662354 - DNA, 15 bp, Homo sapiens
cgttggggcagagac

SEQ ID NO: 1662355 - DNA, 15 bp, Homo sapiens
gttggggcagagacc

SEQ ID NO: 1662356 - DNA, 15 bp, Homo sapiens
ttggggcagagacct

SEQ ID NO: 1662357 - DNA, 15 bp, Homo sapiens
tggggcagagaccta

SEQ ID NO: 1662358 - DNA, 15 bp, Homo sapiens
ggggcagagacctat

SEQ ID NO: 1662359 - DNA, 15 bp, Homo sapiens
gggcagagacctatt

SEQ ID NO: 1662360 - DNA, 15 bp, Homo sapiens
ggcagagacctattc

SEQ ID NO: 1662361 - DNA, 15 bp, Homo sapiens
gcagagacctattcc

SEQ ID NO: 1662362 - DNA, 15 bp, Homo sapiens
cagagacctattccg

SEQ ID NO: 1662363 - DNA, 15 bp, Homo sapiens
agagacctattccgg

SEQ ID NO: 1662364 - DNA, 15 bp, Homo sapiens
gagacctattccgga

SEQ ID NO: 1662365 - DNA, 15 bp, Homo sapiens
agacctattccggac

SEQ ID NO: 1662366 - DNA, 15 bp, Homo sapiens
gacctattccggact

SEQ ID NO: 1662367 - DNA, 15 bp, Homo sapiens
acctattccggactg

SEQ ID NO: 1662368 - DNA, 15 bp, Homo sapiens
cctattccggactga

SEQ ID NO: 1662369 - DNA, 15 bp, Homo sapiens
ctattccggactgag

SEQ ID NO: 1662370 - DNA, 15 bp, Homo sapiens
tattccggactgagc

SEQ ID NO: 1662371 - DNA, 15 bp, Homo sapiens
attccggactgagcc

SEQ ID NO: 1662372 - DNA, 15 bp, Homo sapiens
ttccggactgagcct

SEQ ID NO: 1662373 - DNA, 15 bp, Homo sapiens
tccggactgagcctc

SEQ ID NO: 1662374 - DNA, 15 bp, Homo sapiens
ccggactgagcctcc

SEQ ID NO: 1662375 - DNA, 15 bp, Homo sapiens
cggactgagcctcct

SEQ ID NO: 1662376 - DNA, 15 bp, Homo sapiens
ggactgagcctcctg

SEQ ID NO: 1662377 - DNA, 15 bp, Homo sapiens
gactgagcctcctgg

SEQ ID NO: 1662378 - DNA, 15 bp, Homo sapiens
actgagcctcctggt

SEQ ID NO: 1662379 - DNA, 15 bp, Homo sapiens
ctgagcctcctggtg

SEQ ID NO: 1662380 - DNA, 15 bp, Homo sapiens
tgagcctcctggtga

SEQ ID NO: 1662381 - DNA, 15 bp, Homo sapiens
gagcctcctggtgaa

SEQ ID NO: 1662382 - DNA, 15 bp, Homo sapiens
agcctcctggtgaat

SEQ ID NO: 1662383 - DNA, 15 bp, Homo sapiens
gcctcctggtgaatt

SEQ ID NO: 1662384 - DNA, 15 bp, Homo sapiens
cctcctggtgaatta

SEQ ID NO: 1662385 - DNA, 15 bp, Homo sapiens
ctcctggtgaattag

SEQ ID NO: 1662386 - DNA, 15 bp, Homo sapiens
tcctggtgaattaga

SEQ ID NO: 1662387 - DNA, 15 bp, Homo sapiens
cctggtgaattagag

SEQ ID NO: 1662388 - DNA, 15 bp, Homo sapiens
ctggtgaattagaga

SEQ ID NO: 1662389 - DNA, 15 bp, Homo sapiens
tggtgaattagagag

SEQ ID NO: 1662390 - DNA, 15 bp, Homo sapiens
ggtgaattagagagg

SEQ ID NO: 1662391 - DNA, 15 bp, Homo sapiens
gtgaattagagaggt

SEQ ID NO: 1662392 - DNA, 15 bp, Homo sapiens
tgaattagagaggta

SEQ ID NO: 1662393 - DNA, 15 bp, Homo sapiens
gaattagagaggtag

SEQ ID NO: 1662394 - DNA, 15 bp, Homo sapiens
aattagagaggtaga

SEQ ID NO: 1662395 - DNA, 15 bp, Homo sapiens
attagagaggtagaa

SEQ ID NO: 1662396 - DNA, 15 bp, Homo sapiens
ttagagaggtagaaa

SEQ ID NO: 1662397 - DNA, 15 bp, Homo sapiens
tagagaggtagaaaa

SEQ ID NO: 1662398 - DNA, 15 bp, Homo sapiens
agagaggtagaaaat

SEQ ID NO: 1662399 - DNA, 15 bp, Homo sapiens
gagaggtagaaaatg

SEQ ID NO: 1662400 - DNA, 15 bp, Homo sapiens
agaggtagaaaatgg

SEQ ID NO: 1662401 - DNA, 15 bp, Homo sapiens
gaggtagaaaatggg

SEQ ID NO: 1662402 - DNA, 15 bp, Homo sapiens
aggtagaaaatggga

SEQ ID NO: 1662403 - DNA, 15 bp, Homo sapiens
ggtagaaaatgggag

SEQ ID NO: 1662404 - DNA, 15 bp, Homo sapiens
gtagaaaatgggagg

SEQ ID NO: 1662405 - DNA, 15 bp, Homo sapiens
tagaaaatgggagga

SEQ ID NO: 1662406 - DNA, 15 bp, Homo sapiens
agaaaatgggaggac

SEQ ID NO: 1662407 - DNA, 15 bp, Homo sapiens
gaaaatgggaggacg

SEQ ID NO: 1662408 - DNA, 15 bp, Homo sapiens
aaaatgggaggacgg

SEQ ID NO: 1662409 - DNA, 15 bp, Homo sapiens
aaatgggaggacggg

SEQ ID NO: 1662410 - DNA, 15 bp, Homo sapiens
aatgggaggacgggg

SEQ ID NO: 1662411 - DNA, 15 bp, Homo sapiens
atgggaggacggggg

SEQ ID NO: 1662412 - DNA, 15 bp, Homo sapiens
tgggaggacgggggc

SEQ ID NO: 1662413 - DNA, 15 bp, Homo sapiens
gggaggacgggggca

SEQ ID NO: 1662414 - DNA, 15 bp, Homo sapiens
ggaggacgggggcag

SEQ ID NO: 1662415 - DNA, 15 bp, Homo sapiens
gaggacgggggcagg

SEQ ID NO: 1662416 - DNA, 15 bp, Homo sapiens
aggacgggggcaggt

SEQ ID NO: 1662417 - DNA, 15 bp, Homo sapiens
ggacgggggcaggtg

SEQ ID NO: 1662418 - DNA, 15 bp, Homo sapiens
gacgggggcaggtgg

SEQ ID NO: 1662419 - DNA, 15 bp, Homo sapiens
acgggggcaggtggg

SEQ ID NO: 1662420 - DNA, 15 bp, Homo sapiens
cgggggcaggtgggc

SEQ ID NO: 1662421 - DNA, 15 bp, Homo sapiens
gggggcaggtgggct

SEQ ID NO: 1662422 - DNA, 15 bp, Homo sapiens
ggggcaggtgggcta

SEQ ID NO: 1662423 - DNA, 15 bp, Homo sapiens
gggcaggtgggctat

SEQ ID NO: 1662424 - DNA, 15 bp, Homo sapiens
ggcaggtgggctatt

SEQ ID NO: 1662425 - DNA, 15 bp, Homo sapiens
gcaggtgggctatta

SEQ ID NO: 1662426 - DNA, 15 bp, Homo sapiens
caggtgggctattac

SEQ ID NO: 1662427 - DNA, 15 bp, Homo sapiens
aggtgggctattaca

SEQ ID NO: 1662428 - DNA, 15 bp, Homo sapiens
ggtgggctattacag

SEQ ID NO: 1662429 - DNA, 15 bp, Homo sapiens
gtgggctattacagc

SEQ ID NO: 1662430 - DNA, 15 bp, Homo sapiens
tgggctattacagcg

SEQ ID NO: 1662431 - DNA, 15 bp, Homo sapiens
gggctattacagcga

SEQ ID NO: 1662432 - DNA, 15 bp, Homo sapiens
ggctattacagcgag

SEQ ID NO: 1662433 - DNA, 15 bp, Homo sapiens
gctattacagcgagg

SEQ ID NO: 1662434 - DNA, 15 bp, Homo sapiens
ctattacagcgagga

SEQ ID NO: 1662435 - DNA, 15 bp, Homo sapiens
tattacagcgaggaa

SEQ ID NO: 1662436 - DNA, 15 bp, Homo sapiens
attacagcgaggaaa

SEQ ID NO: 1662437 - DNA, 15 bp, Homo sapiens
ttacagcgaggaaaa

SEQ ID NO: 1662438 - DNA, 15 bp, Homo sapiens
tacagcgaggaaaat

SEQ ID NO: 1662439 - DNA, 15 bp, Homo sapiens
acagcgaggaaaatg

SEQ ID NO: 1662440 - DNA, 15 bp, Homo sapiens
cagcgaggaaaatgc

SEQ ID NO: 1662441 - DNA, 15 bp, Homo sapiens
agcgaggaaaatgcc

SEQ ID NO: 1662442 - DNA, 15 bp, Homo sapiens
gcgaggaaaatgccc

SEQ ID NO: 1662443 - DNA, 15 bp, Homo sapiens
cgaggaaaatgccca

SEQ ID NO: 1662444 - DNA, 15 bp, Homo sapiens
gaggaaaatgcccac

SEQ ID NO: 1662445 - DNA, 15 bp, Homo sapiens
aggaaaatgcccacc

SEQ ID NO: 1662446 - DNA, 15 bp, Homo sapiens
ggaaaatgcccaccc

SEQ ID NO: 1662447 - DNA, 15 bp, Homo sapiens
gaaaatgcccaccct

SEQ ID NO: 1662448 - DNA, 15 bp, Homo sapiens
aaaatgcccaccctg

SEQ ID NO: 1662449 - DNA, 15 bp, Homo sapiens
aaatgcccaccctga

SEQ ID NO: 1662450 - DNA, 15 bp, Homo sapiens
aatgcccaccctgag

SEQ ID NO: 1662451 - DNA, 15 bp, Homo sapiens
atgcccaccctgagt

SEQ ID NO: 1662452 - DNA, 15 bp, Homo sapiens
tgcccaccctgagtt

SEQ ID NO: 1662453 - DNA, 15 bp, Homo sapiens
gcccaccctgagttg

SEQ ID NO: 1662454 - DNA, 15 bp, Homo sapiens
cccaccctgagttgt

SEQ ID NO: 1662455 - DNA, 15 bp, Homo sapiens
ccaccctgagttgta

SEQ ID NO: 1662456 - DNA, 15 bp, Homo sapiens
caccctgagttgtat

SEQ ID NO: 1662457 - DNA, 15 bp, Homo sapiens
accctgagttgtatt

SEQ ID NO: 1662458 - DNA, 15 bp, Homo sapiens
ccctgagttgtatta

SEQ ID NO: 1662459 - DNA, 15 bp, Homo sapiens
cctgagttgtattag

SEQ ID NO: 1662460 - DNA, 15 bp, Homo sapiens
ctgagttgtattaga

SEQ ID NO: 1662461 - DNA, 15 bp, Homo sapiens
tgagttgtattagat

SEQ ID NO: 1662462 - DNA, 15 bp, Homo sapiens
gagttgtattagata

SEQ ID NO: 1662463 - DNA, 15 bp, Homo sapiens
agttgtattagataa

SEQ ID NO: 1662464 - DNA, 15 bp, Homo sapiens
gttgtattagataac

SEQ ID NO: 1662465 - DNA, 15 bp, Homo sapiens
ttgtattagataact

SEQ ID NO: 1662466 - DNA, 15 bp, Homo sapiens
tgtattagataactt

SEQ ID NO: 1662467 - DNA, 15 bp, Homo sapiens
gtattagataacttt

SEQ ID NO: 1662468 - DNA, 15 bp, Homo sapiens
tattagataactttg

SEQ ID NO: 1662469 - DNA, 15 bp, Homo sapiens
attagataactttgg

SEQ ID NO: 1662470 - DNA, 15 bp, Homo sapiens
ttagataactttggg

SEQ ID NO: 1662471 - DNA, 15 bp, Homo sapiens
tagataactttggga

SEQ ID NO: 1662472 - DNA, 15 bp, Homo sapiens
agataactttgggag

SEQ ID NO: 1662473 - DNA, 15 bp, Homo sapiens
gataactttgggagt

SEQ ID NO: 1662474 - DNA, 15 bp, Homo sapiens
ataactttgggagtt

SEQ ID NO: 1662475 - DNA, 15 bp, Homo sapiens
taactttgggagttc

SEQ ID NO: 1662476 - DNA, 15 bp, Homo sapiens
aactttgggagttca

SEQ ID NO: 1662477 - DNA, 15 bp, Homo sapiens
actttgggagttcag

SEQ ID NO: 1662478 - DNA, 15 bp, Homo sapiens
ctttgggagttcagg

SEQ ID NO: 1662479 - DNA, 15 bp, Homo sapiens
tttgggagttcagga

SEQ ID NO: 1662480 - DNA, 15 bp, Homo sapiens
ttgggagttcaggaa

SEQ ID NO: 1662481 - DNA, 15 bp, Homo sapiens
tgggagttcaggaac

SEQ ID NO: 1662482 - DNA, 15 bp, Homo sapiens
gggagttcaggaact

SEQ ID NO: 1662483 - DNA, 15 bp, Homo sapiens
ggagttcaggaactt

SEQ ID NO: 1662484 - DNA, 15 bp, Homo sapiens
gagttcaggaacttt

SEQ ID NO: 1662485 - DNA, 15 bp, Homo sapiens
agttcaggaactttc

SEQ ID NO: 1662486 - DNA, 15 bp, Homo sapiens
gttcaggaactttcc

SEQ ID NO: 1662487 - DNA, 15 bp, Homo sapiens
ttcaggaactttcca

SEQ ID NO: 1662488 - DNA, 15 bp, Homo sapiens
tcaggaactttccaa

SEQ ID NO: 1662489 - DNA, 15 bp, Homo sapiens
caggaactttccaat

SEQ ID NO: 1662490 - DNA, 15 bp, Homo sapiens
aggaactttccaata

SEQ ID NO: 1662491 - DNA, 15 bp, Homo sapiens
ggaactttccaataa

SEQ ID NO: 1662492 - DNA, 15 bp, Homo sapiens
gaactttccaataaa

SEQ ID NO: 1662493 - DNA, 15 bp, Homo sapiens
aactttccaataaag

SEQ ID NO: 1662494 - DNA, 15 bp, Homo sapiens
actttccaataaagt

SEQ ID NO: 1662495 - DNA, 15 bp, Homo sapiens
ctttccaataaagtg

SEQ ID NO: 1662496 - DNA, 15 bp, Homo sapiens
tttccaataaagtgg

SEQ ID NO: 1662497 - DNA, 15 bp, Homo sapiens
ttccaataaagtggg

SEQ ID NO: 1662498 - DNA, 15 bp, Homo sapiens
tccaataaagtgggt

SEQ ID NO: 1662499 - DNA, 15 bp, Homo sapiens
ccaataaagtgggtt

SEQ ID NO: 1662500 - DNA, 15 bp, Homo sapiens
caataaagtgggttc

SEQ ID NO: 1662501 - DNA, 15 bp, Homo sapiens
aataaagtgggttcc

SEQ ID NO: 1662502 - DNA, 15 bp, Homo sapiens
ataaagtgggttcca

SEQ ID NO: 1662503 - DNA, 15 bp, Homo sapiens
taaagtgggttccac

SEQ ID NO: 1662504 - DNA, 15 bp, Homo sapiens
aaagtgggttccaca

SEQ ID NO: 1662505 - DNA, 15 bp, Homo sapiens
aagtgggttccacag

SEQ ID NO: 1662506 - DNA, 15 bp, Homo sapiens
agtgggttccacagc

SEQ ID NO: 1662507 - DNA, 15 bp, Homo sapiens
gtgggttccacagca

SEQ ID NO: 1662508 - DNA, 15 bp, Homo sapiens
tgggttccacagcag

SEQ ID NO: 1662509 - DNA, 15 bp, Homo sapiens
gggttccacagcagg

SEQ ID NO: 1662510 - DNA, 15 bp, Homo sapiens
ggttccacagcagga

SEQ ID NO: 1662511 - DNA, 15 bp, Homo sapiens
gttccacagcaggat

SEQ ID NO: 1662512 - DNA, 15 bp, Homo sapiens
ttccacagcaggatt

SEQ ID NO: 1662513 - DNA, 15 bp, Homo sapiens
tccacagcaggatta

SEQ ID NO: 1662514 - DNA, 15 bp, Homo sapiens
ccacagcaggattac

SEQ ID NO: 1662515 - DNA, 15 bp, Homo sapiens
cacagcaggattact

SEQ ID NO: 1662516 - DNA, 15 bp, Homo sapiens
acagcaggattactt

SEQ ID NO: 1662517 - DNA, 15 bp, Homo sapiens
cagcaggattactta

SEQ ID NO: 1662518 - DNA, 15 bp, Homo sapiens
agcaggattacttac

SEQ ID NO: 1662519 - DNA, 15 bp, Homo sapiens
gcaggattacttact

SEQ ID NO: 1662520 - DNA, 15 bp, Homo sapiens
caggattacttactg

SEQ ID NO: 1662521 - DNA, 15 bp, Homo sapiens
aggattacttactga

SEQ ID NO: 1662522 - DNA, 15 bp, Homo sapiens
ggattacttactgac

SEQ ID NO: 1662523 - DNA, 15 bp, Homo sapiens
gattacttactgact

SEQ ID NO: 1662524 - DNA, 15 bp, Homo sapiens
attacttactgactc

SEQ ID NO: 1662525 - DNA, 15 bp, Homo sapiens
ttacttactgactcc

SEQ ID NO: 1662526 - DNA, 15 bp, Homo sapiens
tacttactgactccc

SEQ ID NO: 1662527 - DNA, 15 bp, Homo sapiens
acttactgactccct

SEQ ID NO: 1662528 - DNA, 15 bp, Homo sapiens
cttactgactcccta

SEQ ID NO: 1662529 - DNA, 15 bp, Homo sapiens
ttactgactccctaa

SEQ ID NO: 1662530 - DNA, 15 bp, Homo sapiens
tactgactccctaat

SEQ ID NO: 1662531 - DNA, 15 bp, Homo sapiens
actgactccctaata

SEQ ID NO: 1662532 - DNA, 15 bp, Homo sapiens
ctgactccctaatag

SEQ ID NO: 1662533 - DNA, 15 bp, Homo sapiens
tgactccctaataga

SEQ ID NO: 1662534 - DNA, 15 bp, Homo sapiens
gactccctaatagaa

SEQ ID NO: 1662535 - DNA, 15 bp, Homo sapiens
actccctaatagaaa

SEQ ID NO: 1662536 - DNA, 15 bp, Homo sapiens
ctccctaatagaaag

SEQ ID NO: 1662537 - DNA, 15 bp, Homo sapiens
tccctaatagaaaga

SEQ ID NO: 1662538 - DNA, 15 bp, Homo sapiens
ccctaatagaaagaa

SEQ ID NO: 1662539 - DNA, 15 bp, Homo sapiens
cctaatagaaagaag

SEQ ID NO: 1662540 - DNA, 15 bp, Homo sapiens
ctaatagaaagaagg

SEQ ID NO: 1662541 - DNA, 15 bp, Homo sapiens
taatagaaagaaggc

SEQ ID NO: 1662542 - DNA, 15 bp, Homo sapiens
aatagaaagaaggca

SEQ ID NO: 1662543 - DNA, 15 bp, Homo sapiens
atagaaagaaggcag

SEQ ID NO: 1662544 - DNA, 15 bp, Homo sapiens
tagaaagaaggcagg

SEQ ID NO: 1662545 - DNA, 15 bp, Homo sapiens
agaaagaaggcaggc

SEQ ID NO: 1662546 - DNA, 15 bp, Homo sapiens
gaaagaaggcaggca

SEQ ID NO: 1662547 - DNA, 15 bp, Homo sapiens
aaagaaggcaggcac

SEQ ID NO: 1662548 - DNA, 15 bp, Homo sapiens
aagaaggcaggcaca

SEQ ID NO: 1662549 - DNA, 15 bp, Homo sapiens
agaaggcaggcacag

SEQ ID NO: 1662550 - DNA, 15 bp, Homo sapiens
gaaggcaggcacagg

SEQ ID NO: 1662551 - DNA, 15 bp, Homo sapiens
aaggcaggcacaggc

SEQ ID NO: 1662552 - DNA, 15 bp, Homo sapiens
aggcaggcacaggcc

SEQ ID NO: 1662553 - DNA, 15 bp, Homo sapiens
ggcaggcacaggccg

SEQ ID NO: 1662554 - DNA, 15 bp, Homo sapiens
gcaggcacaggccgg

SEQ ID NO: 1662555 - DNA, 15 bp, Homo sapiens
caggcacaggccggg

SEQ ID NO: 1662556 - DNA, 15 bp, Homo sapiens
aggcacaggccgggc

SEQ ID NO: 1662557 - DNA, 15 bp, Homo sapiens
ggcacaggccgggcg

SEQ ID NO: 1662558 - DNA, 15 bp, Homo sapiens
gcacaggccgggcgt

SEQ ID NO: 1662559 - DNA, 15 bp, Homo sapiens
cacaggccgggcgtg

SEQ ID NO: 1662560 - DNA, 15 bp, Homo sapiens
acaggccgggcgtgt

SEQ ID NO: 1662561 - DNA, 15 bp, Homo sapiens
caggccgggcgtgtt

SEQ ID NO: 1662562 - DNA, 15 bp, Homo sapiens
aggccgggcgtgttg

SEQ ID NO: 1662563 - DNA, 15 bp, Homo sapiens
ggccgggcgtgttgg

SEQ ID NO: 1662564 - DNA, 15 bp, Homo sapiens
gccgggcgtgttggc

SEQ ID NO: 1662565 - DNA, 15 bp, Homo sapiens
ccgggcgtgttggct

SEQ ID NO: 1662566 - DNA, 15 bp, Homo sapiens
cgggcgtgttggctc

SEQ ID NO: 1662567 - DNA, 15 bp, Homo sapiens
gggcgtgttggctca

SEQ ID NO: 1662568 - DNA, 15 bp, Homo sapiens
ggcgtgttggctcat

SEQ ID NO: 1662569 - DNA, 15 bp, Homo sapiens
gcgtgttggctcatg

SEQ ID NO: 1662570 - DNA, 15 bp, Homo sapiens
cgtgttggctcatgt

SEQ ID NO: 1662571 - DNA, 15 bp, Homo sapiens
gtgttggctcatgtc

SEQ ID NO: 1662572 - DNA, 15 bp, Homo sapiens
tgttggctcatgtct

SEQ ID NO: 1662573 - DNA, 15 bp, Homo sapiens
gttggctcatgtctg

SEQ ID NO: 1662574 - DNA, 15 bp, Homo sapiens
ttggctcatgtctgt

SEQ ID NO: 1662575 - DNA, 15 bp, Homo sapiens
tggctcatgtctgta

SEQ ID NO: 1662576 - DNA, 15 bp, Homo sapiens
ggctcatgtctgtaa

SEQ ID NO: 1662577 - DNA, 15 bp, Homo sapiens
gctcatgtctgtaat

SEQ ID NO: 1662578 - DNA, 15 bp, Homo sapiens
ctcatgtctgtaatc

SEQ ID NO: 1662579 - DNA, 15 bp, Homo sapiens
tcatgtctgtaatcc

SEQ ID NO: 1662580 - DNA, 15 bp, Homo sapiens
ccagcacgttgggag

SEQ ID NO: 1662581 - DNA, 15 bp, Homo sapiens
cagcacgttgggagg

SEQ ID NO: 1662582 - DNA, 15 bp, Homo sapiens
agcacgttgggaggc

SEQ ID NO: 1662583 - DNA, 15 bp, Homo sapiens
gcacgttgggaggct

SEQ ID NO: 1662584 - DNA, 15 bp, Homo sapiens
cacgttgggaggctg

SEQ ID NO: 1662585 - DNA, 15 bp, Homo sapiens
acgttgggaggctga

SEQ ID NO: 1662586 - DNA, 15 bp, Homo sapiens
cgttgggaggctgag

SEQ ID NO: 1662587 - DNA, 15 bp, Homo sapiens
gttgggaggctgagg

SEQ ID NO: 1662588 - DNA, 15 bp, Homo sapiens
aaggtcaggagatcc

SEQ ID NO: 1662589 - DNA, 15 bp, Homo sapiens
aggtcaggagatcca

SEQ ID NO: 1662590 - DNA, 15 bp, Homo sapiens
ggtcaggagatccag

SEQ ID NO: 1662591 - DNA, 15 bp, Homo sapiens
gtcaggagatccaga

SEQ ID NO: 1662592 - DNA, 15 bp, Homo sapiens
tcaggagatccagac

SEQ ID NO: 1662593 - DNA, 15 bp, Homo sapiens
caggagatccagacc

SEQ ID NO: 1662594 - DNA, 15 bp, Homo sapiens
aggagatccagacca

SEQ ID NO: 1662595 - DNA, 15 bp, Homo sapiens
ggagatccagaccat

SEQ ID NO: 1662596 - DNA, 15 bp, Homo sapiens
gagatccagaccatc

SEQ ID NO: 1662597 - DNA, 15 bp, Homo sapiens
agatccagaccatcc

SEQ ID NO: 1662598 - DNA, 15 bp, Homo sapiens
gatccagaccatcct

SEQ ID NO: 1662599 - DNA, 15 bp, Homo sapiens
atccagaccatcctg

SEQ ID NO: 1662600 - DNA, 15 bp, Homo sapiens
tccagaccatcctgg

SEQ ID NO: 1662601 - DNA, 15 bp, Homo sapiens
ccagaccatcctggc

SEQ ID NO: 1662602 - DNA, 15 bp, Homo sapiens
cagaccatcctggct

SEQ ID NO: 1662603 - DNA, 15 bp, Homo sapiens
catcctggctaacaa

SEQ ID NO: 1662604 - DNA, 15 bp, Homo sapiens
atcctggctaacaaa

SEQ ID NO: 1662605 - DNA, 15 bp, Homo sapiens
tcctggctaacaaag

SEQ ID NO: 1662606 - DNA, 15 bp, Homo sapiens
cctggctaacaaagt

SEQ ID NO: 1662607 - DNA, 15 bp, Homo sapiens
ctggctaacaaagtg

SEQ ID NO: 1662608 - DNA, 15 bp, Homo sapiens
tggctaacaaagtga

SEQ ID NO: 1662609 - DNA, 15 bp, Homo sapiens
ggctaacaaagtgaa

SEQ ID NO: 1662610 - DNA, 15 bp, Homo sapiens
gctaacaaagtgaaa

SEQ ID NO: 1662611 - DNA, 15 bp, Homo sapiens
ctaacaaagtgaaac

SEQ ID NO: 1662612 - DNA, 15 bp, Homo sapiens
taacaaagtgaaacc

SEQ ID NO: 1662613 - DNA, 15 bp, Homo sapiens
aacaaagtgaaaccc

SEQ ID NO: 1662614 - DNA, 15 bp, Homo sapiens
acaaagtgaaacccc

SEQ ID NO: 1662615 - DNA, 15 bp, Homo sapiens
caaagtgaaaccccg

SEQ ID NO: 1662616 - DNA, 15 bp, Homo sapiens
aaagtgaaaccccgt

SEQ ID NO: 1662617 - DNA, 15 bp, Homo sapiens
aagtgaaaccccgtc

SEQ ID NO: 1662618 - DNA, 15 bp, Homo sapiens
atacaaaaaattagg

SEQ ID NO: 1662619 - DNA, 15 bp, Homo sapiens
tacaaaaaattaggc

SEQ ID NO: 1662620 - DNA, 15 bp, Homo sapiens
acaaaaaattaggct

SEQ ID NO: 1662621 - DNA, 15 bp, Homo sapiens
caaaaaattaggctg

SEQ ID NO: 1662622 - DNA, 15 bp, Homo sapiens
aaaaaattaggctgg

SEQ ID NO: 1662623 - DNA, 15 bp, Homo sapiens
aaaaattaggctggg

SEQ ID NO: 1662624 - DNA, 15 bp, Homo sapiens
aaaattaggctgggc

SEQ ID NO: 1662625 - DNA, 15 bp, Homo sapiens
aaattaggctgggcg

SEQ ID NO: 1662626 - DNA, 15 bp, Homo sapiens
aattaggctgggcgt

SEQ ID NO: 1662627 - DNA, 15 bp, Homo sapiens
attaggctgggcgtg

SEQ ID NO: 1662628 - DNA, 15 bp, Homo sapiens
ttaggctgggcgtgg

SEQ ID NO: 1662629 - DNA, 15 bp, Homo sapiens
taggctgggcgtggt

SEQ ID NO: 1662630 - DNA, 15 bp, Homo sapiens
aggctgggcgtggtg

SEQ ID NO: 1662631 - DNA, 15 bp, Homo sapiens
gggcgtggtggctcg

SEQ ID NO: 1662632 - DNA, 15 bp, Homo sapiens
ggcgtggtggctcgt

SEQ ID NO: 1662633 - DNA, 15 bp, Homo sapiens
gcgtggtggctcgtg

SEQ ID NO: 1662634 - DNA, 15 bp, Homo sapiens
cgtggtggctcgtgc

SEQ ID NO: 1662635 - DNA, 15 bp, Homo sapiens
gtggtggctcgtgcc

SEQ ID NO: 1662636 - DNA, 15 bp, Homo sapiens
tggtggctcgtgcct

SEQ ID NO: 1662637 - DNA, 15 bp, Homo sapiens
ggtggctcgtgcctg

SEQ ID NO: 1662638 - DNA, 15 bp, Homo sapiens
gtggctcgtgcctgt

SEQ ID NO: 1662639 - DNA, 15 bp, Homo sapiens
aggagatcgagaccg

SEQ ID NO: 1662640 - DNA, 15 bp, Homo sapiens
ggagatcgagaccgt

SEQ ID NO: 1662641 - DNA, 15 bp, Homo sapiens
gagatcgagaccgtc

SEQ ID NO: 1662642 - DNA, 15 bp, Homo sapiens
agatcgagaccgtcc

SEQ ID NO: 1662643 - DNA, 15 bp, Homo sapiens
gatcgagaccgtcct

SEQ ID NO: 1662644 - DNA, 15 bp, Homo sapiens
atcgagaccgtcctg

SEQ ID NO: 1662645 - DNA, 15 bp, Homo sapiens
tcgagaccgtcctgg

SEQ ID NO: 1662646 - DNA, 15 bp, Homo sapiens
cgagaccgtcctggc

SEQ ID NO: 1662647 - DNA, 15 bp, Homo sapiens
gagaccgtcctggct

SEQ ID NO: 1662648 - DNA, 15 bp, Homo sapiens
agaccgtcctggcta

SEQ ID NO: 1662649 - DNA, 15 bp, Homo sapiens
gaccgtcctggctaa

SEQ ID NO: 1662650 - DNA, 15 bp, Homo sapiens
accgtcctggctaac

SEQ ID NO: 1662651 - DNA, 15 bp, Homo sapiens
ccgtcctggctaaca

SEQ ID NO: 1662652 - DNA, 15 bp, Homo sapiens
cgtcctggctaacac

SEQ ID NO: 1662653 - DNA, 15 bp, Homo sapiens
gtcctggctaacacg

SEQ ID NO: 1662654 - DNA, 15 bp, Homo sapiens
ctggctaacacggta

SEQ ID NO: 1662655 - DNA, 15 bp, Homo sapiens
tggctaacacggtaa

SEQ ID NO: 1662656 - DNA, 15 bp, Homo sapiens
ggctaacacggtaaa

SEQ ID NO: 1662657 - DNA, 15 bp, Homo sapiens
gctaacacggtaaaa

SEQ ID NO: 1662658 - DNA, 15 bp, Homo sapiens
ctaacacggtaaaac

SEQ ID NO: 1662659 - DNA, 15 bp, Homo sapiens
taacacggtaaaacc

SEQ ID NO: 1662660 - DNA, 15 bp, Homo sapiens
aacacggtaaaaccc

SEQ ID NO: 1662661 - DNA, 15 bp, Homo sapiens
acacggtaaaacccc

SEQ ID NO: 1662662 - DNA, 15 bp, Homo sapiens
cacggtaaaacccca

SEQ ID NO: 1662663 - DNA, 15 bp, Homo sapiens
acggtaaaaccccat

SEQ ID NO: 1662664 - DNA, 15 bp, Homo sapiens
cggtaaaaccccatc

SEQ ID NO: 1662665 - DNA, 15 bp, Homo sapiens
aaacatacaaaaaaa

SEQ ID NO: 1662666 - DNA, 15 bp, Homo sapiens
aacatacaaaaaaaa

SEQ ID NO: 1662667 - DNA, 15 bp, Homo sapiens
acatacaaaaaaaaa

SEQ ID NO: 1662668 - DNA, 15 bp, Homo sapiens
atacaaaaaaaaatt

SEQ ID NO: 1662669 - DNA, 15 bp, Homo sapiens
aggcaggagagtggt

SEQ ID NO: 1662670 - DNA, 15 bp, Homo sapiens
ggcaggagagtggtg

SEQ ID NO: 1662671 - DNA, 15 bp, Homo sapiens
gcaggagagtggtgt

SEQ ID NO: 1662672 - DNA, 15 bp, Homo sapiens
caggagagtggtgtg

SEQ ID NO: 1662673 - DNA, 15 bp, Homo sapiens
aggagagtggtgtga

SEQ ID NO: 1662674 - DNA, 15 bp, Homo sapiens
ggagagtggtgtgaa

SEQ ID NO: 1662675 - DNA, 15 bp, Homo sapiens
gagagtggtgtgaac

SEQ ID NO: 1662676 - DNA, 15 bp, Homo sapiens
agagtggtgtgaact

SEQ ID NO: 1662677 - DNA, 15 bp, Homo sapiens
gagtggtgtgaactc

SEQ ID NO: 1662678 - DNA, 15 bp, Homo sapiens
agtggtgtgaactcg

SEQ ID NO: 1662679 - DNA, 15 bp, Homo sapiens
gtggtgtgaactcgg

SEQ ID NO: 1662680 - DNA, 15 bp, Homo sapiens
tggtgtgaactcggg

SEQ ID NO: 1662681 - DNA, 15 bp, Homo sapiens
ggtgtgaactcggga

SEQ ID NO: 1662682 - DNA, 15 bp, Homo sapiens
gtgtgaactcgggag

SEQ ID NO: 1662683 - DNA, 15 bp, Homo sapiens
tgtgaactcgggagg

SEQ ID NO: 1662684 - DNA, 15 bp, Homo sapiens
gtgaactcgggaggc

SEQ ID NO: 1662685 - DNA, 15 bp, Homo sapiens
gaactcgggaggcgc

SEQ ID NO: 1662686 - DNA, 15 bp, Homo sapiens
aactcgggaggcgca

SEQ ID NO: 1662687 - DNA, 15 bp, Homo sapiens
actcgggaggcgcag

SEQ ID NO: 1662688 - DNA, 15 bp, Homo sapiens
ctcgggaggcgcagc

SEQ ID NO: 1662689 - DNA, 15 bp, Homo sapiens
tcgggaggcgcagct

SEQ ID NO: 1662690 - DNA, 15 bp, Homo sapiens
cgggaggcgcagctt

SEQ ID NO: 1662691 - DNA, 15 bp, Homo sapiens
gggaggcgcagcttg

SEQ ID NO: 1662692 - DNA, 15 bp, Homo sapiens
ggaggcgcagcttgc

SEQ ID NO: 1662693 - DNA, 15 bp, Homo sapiens
gaggcgcagcttgca

SEQ ID NO: 1662694 - DNA, 15 bp, Homo sapiens
aggcgcagcttgcag

SEQ ID NO: 1662695 - DNA, 15 bp, Homo sapiens
ggcgcagcttgcagt

SEQ ID NO: 1662696 - DNA, 15 bp, Homo sapiens
gcgcagcttgcagtg

SEQ ID NO: 1662697 - DNA, 15 bp, Homo sapiens
cgcagcttgcagtga

SEQ ID NO: 1662698 - DNA, 15 bp, Homo sapiens
gcagcttgcagtgag

SEQ ID NO: 1662699 - DNA, 15 bp, Homo sapiens
gtgagccgagactgc

SEQ ID NO: 1662700 - DNA, 15 bp, Homo sapiens
tgagccgagactgcg

SEQ ID NO: 1662701 - DNA, 15 bp, Homo sapiens
gagccgagactgcgc

SEQ ID NO: 1662702 - DNA, 15 bp, Homo sapiens
agccgagactgcgcc

SEQ ID NO: 1662703 - DNA, 15 bp, Homo sapiens
gccgagactgcgcca

SEQ ID NO: 1662704 - DNA, 15 bp, Homo sapiens
ccgagactgcgccac

SEQ ID NO: 1662705 - DNA, 15 bp, Homo sapiens
cgagactgcgccact

SEQ ID NO: 1662706 - DNA, 15 bp, Homo sapiens
gagactgcgccactg

SEQ ID NO: 1662707 - DNA, 15 bp, Homo sapiens
agactgcgccactgc

SEQ ID NO: 1662708 - DNA, 15 bp, Homo sapiens
gactgcgccactgca

SEQ ID NO: 1662709 - DNA, 15 bp, Homo sapiens
actgcgccactgcac

SEQ ID NO: 1662710 - DNA, 15 bp, Homo sapiens
ctgcgccactgcact

SEQ ID NO: 1662711 - DNA, 15 bp, Homo sapiens
gcctgggcaacagac

SEQ ID NO: 1662712 - DNA, 15 bp, Homo sapiens
cctgggcaacagaca

SEQ ID NO: 1662713 - DNA, 15 bp, Homo sapiens
ctgggcaacagacag

SEQ ID NO: 1662714 - DNA, 15 bp, Homo sapiens
tgggcaacagacaga

SEQ ID NO: 1662715 - DNA, 15 bp, Homo sapiens
gggcaacagacagag

SEQ ID NO: 1662716 - DNA, 15 bp, Homo sapiens
ggcaacagacagaga

SEQ ID NO: 1662717 - DNA, 15 bp, Homo sapiens
gcaacagacagagac

SEQ ID NO: 1662718 - DNA, 15 bp, Homo sapiens
caacagacagagact

SEQ ID NO: 1662719 - DNA, 15 bp, Homo sapiens
aacagacagagactc

SEQ ID NO: 1662720 - DNA, 15 bp, Homo sapiens
acagacagagactcc

SEQ ID NO: 1662721 - DNA, 15 bp, Homo sapiens
cagacagagactccg

SEQ ID NO: 1662722 - DNA, 15 bp, Homo sapiens
agacagagactccgt

SEQ ID NO: 1662723 - DNA, 15 bp, Homo sapiens
gacagagactccgtc

SEQ ID NO: 1662724 - DNA, 15 bp, Homo sapiens
acagagactccgtct

SEQ ID NO: 1662725 - DNA, 15 bp, Homo sapiens
cagagactccgtctc

SEQ ID NO: 1662726 - DNA, 15 bp, Homo sapiens
aaaaaatacaaaaaa

SEQ ID NO: 1662727 - DNA, 15 bp, Homo sapiens
aggcgtggtggcacg

SEQ ID NO: 1662728 - DNA, 15 bp, Homo sapiens
ggcgtggtggcacgt

SEQ ID NO: 1662729 - DNA, 15 bp, Homo sapiens
gcgtggtggcacgtg

SEQ ID NO: 1662730 - DNA, 15 bp, Homo sapiens
cgtggtggcacgtgc

SEQ ID NO: 1662731 - DNA, 15 bp, Homo sapiens
gtggtggcacgtgca

SEQ ID NO: 1662732 - DNA, 15 bp, Homo sapiens
tggtggcacgtgcac

SEQ ID NO: 1662733 - DNA, 15 bp, Homo sapiens
ggtggcacgtgcacg

SEQ ID NO: 1662734 - DNA, 15 bp, Homo sapiens
gtggcacgtgcacgt

SEQ ID NO: 1662735 - DNA, 15 bp, Homo sapiens
tggcacgtgcacgtg

SEQ ID NO: 1662736 - DNA, 15 bp, Homo sapiens
ggcacgtgcacgtga

SEQ ID NO: 1662737 - DNA, 15 bp, Homo sapiens
gcacgtgcacgtgac

SEQ ID NO: 1662738 - DNA, 15 bp, Homo sapiens
cacgtgcacgtgact

SEQ ID NO: 1662739 - DNA, 15 bp, Homo sapiens
acgtgcacgtgactg

SEQ ID NO: 1662740 - DNA, 15 bp, Homo sapiens
cgtgcacgtgactgt

SEQ ID NO: 1662741 - DNA, 15 bp, Homo sapiens
gtgcacgtgactgta

SEQ ID NO: 1662742 - DNA, 15 bp, Homo sapiens
tgcacgtgactgtag

SEQ ID NO: 1662743 - DNA, 15 bp, Homo sapiens
gcacgtgactgtagt

SEQ ID NO: 1662744 - DNA, 15 bp, Homo sapiens
cacgtgactgtagtc

SEQ ID NO: 1662745 - DNA, 15 bp, Homo sapiens
acgtgactgtagtcc

SEQ ID NO: 1662746 - DNA, 15 bp, Homo sapiens
cgtgactgtagtccc

SEQ ID NO: 1662747 - DNA, 15 bp, Homo sapiens
gtgactgtagtccca

SEQ ID NO: 1662748 - DNA, 15 bp, Homo sapiens
tgactgtagtcccag

SEQ ID NO: 1662749 - DNA, 15 bp, Homo sapiens
gactgtagtcccagc

SEQ ID NO: 1662750 - DNA, 15 bp, Homo sapiens
actgtagtcccagct

SEQ ID NO: 1662751 - DNA, 15 bp, Homo sapiens
aggcaggagaattgt

SEQ ID NO: 1662752 - DNA, 15 bp, Homo sapiens
ggcaggagaattgtt

SEQ ID NO: 1662753 - DNA, 15 bp, Homo sapiens
gcaggagaattgttt

SEQ ID NO: 1662754 - DNA, 15 bp, Homo sapiens
caggagaattgtttg

SEQ ID NO: 1662755 - DNA, 15 bp, Homo sapiens
aggagaattgtttga

SEQ ID NO: 1662756 - DNA, 15 bp, Homo sapiens
ggagaattgtttgaa

SEQ ID NO: 1662757 - DNA, 15 bp, Homo sapiens
agaattgtttgaacc

SEQ ID NO: 1662758 - DNA, 15 bp, Homo sapiens
gaattgtttgaaccc

SEQ ID NO: 1662759 - DNA, 15 bp, Homo sapiens
aattgtttgaacccg

SEQ ID NO: 1662760 - DNA, 15 bp, Homo sapiens
attgtttgaacccgg

SEQ ID NO: 1662761 - DNA, 15 bp, Homo sapiens
ttgtttgaacccggg

SEQ ID NO: 1662762 - DNA, 15 bp, Homo sapiens
tgtttgaacccggga

SEQ ID NO: 1662763 - DNA, 15 bp, Homo sapiens
gtttgaacccgggag

SEQ ID NO: 1662764 - DNA, 15 bp, Homo sapiens
tttgaacccgggaga

SEQ ID NO: 1662765 - DNA, 15 bp, Homo sapiens
ttgaacccgggagac

SEQ ID NO: 1662766 - DNA, 15 bp, Homo sapiens
cccgggagacggagg

SEQ ID NO: 1662767 - DNA, 15 bp, Homo sapiens
ccgggagacggaggt

SEQ ID NO: 1662768 - DNA, 15 bp, Homo sapiens
cgggagacggaggtt

SEQ ID NO: 1662769 - DNA, 15 bp, Homo sapiens
gagacggaggttgca

SEQ ID NO: 1662770 - DNA, 15 bp, Homo sapiens
agacggaggttgcag

SEQ ID NO: 1662771 - DNA, 15 bp, Homo sapiens
gacggaggttgcagt

SEQ ID NO: 1662772 - DNA, 15 bp, Homo sapiens
acggaggttgcagtg

SEQ ID NO: 1662773 - DNA, 15 bp, Homo sapiens
ctgggtgacagagct

SEQ ID NO: 1662774 - DNA, 15 bp, Homo sapiens
tgggtgacagagcta

SEQ ID NO: 1662775 - DNA, 15 bp, Homo sapiens
gggtgacagagctag

SEQ ID NO: 1662776 - DNA, 15 bp, Homo sapiens
ggtgacagagctaga

SEQ ID NO: 1662777 - DNA, 15 bp, Homo sapiens
gtgacagagctagac

SEQ ID NO: 1662778 - DNA, 15 bp, Homo sapiens
tgacagagctagact

SEQ ID NO: 1662779 - DNA, 15 bp, Homo sapiens
agctagactccgtca

SEQ ID NO: 1662780 - DNA, 15 bp, Homo sapiens
gctagactccgtcaa

SEQ ID NO: 1662781 - DNA, 15 bp, Homo sapiens
ctagactccgtcaaa

SEQ ID NO: 1662782 - DNA, 15 bp, Homo sapiens
tagactccgtcaaaa

SEQ ID NO: 1662783 - DNA, 15 bp, Homo sapiens
agactccgtcaaaaa

SEQ ID NO: 1662784 - DNA, 15 bp, Homo sapiens
gactccgtcaaaaaa

SEQ ID NO: 1662785 - DNA, 15 bp, Homo sapiens
actccgtcaaaaaac

SEQ ID NO: 1662786 - DNA, 15 bp, Homo sapiens
ctccgtcaaaaaaca

SEQ ID NO: 1662787 - DNA, 15 bp, Homo sapiens
tccgtcaaaaaacaa

SEQ ID NO: 1662788 - DNA, 15 bp, Homo sapiens
ccgtcaaaaaacaaa

SEQ ID NO: 1662789 - DNA, 15 bp, Homo sapiens
cgtcaaaaaacaaaa

SEQ ID NO: 1662790 - DNA, 15 bp, Homo sapiens
gtcaaaaaacaaaaa

SEQ ID NO: 1662791 - DNA, 15 bp, Homo sapiens
tcaaaaaacaaaaaa

SEQ ID NO: 1662792 - DNA, 15 bp, Homo sapiens
caaaaaacaaaaaac

SEQ ID NO: 1662793 - DNA, 15 bp, Homo sapiens
aaaaaacaaaaaaca

SEQ ID NO: 1662794 - DNA, 15 bp, Homo sapiens
aaaaacaaaaaacaa

SEQ ID NO: 1662795 - DNA, 15 bp, Homo sapiens
aaacaaaaaacaaaa

SEQ ID NO: 1662796 - DNA, 15 bp, Homo sapiens
aacaaaaaacaaaaa

SEQ ID NO: 1662797 - DNA, 15 bp, Homo sapiens
acaaaaaacaaaaaa

SEQ ID NO: 1662798 - DNA, 15 bp, Homo sapiens
caaaaaacaaaaaaa

SEQ ID NO: 1662799 - DNA, 15 bp, Homo sapiens
aaaaaacaaaaaaac

SEQ ID NO: 1662800 - DNA, 15 bp, Homo sapiens
aaaaacaaaaaaaca

SEQ ID NO: 1662801 - DNA, 15 bp, Homo sapiens
aaaacaaaaaaacaa

SEQ ID NO: 1662802 - DNA, 15 bp, Homo sapiens
aaacaaaaaaacaaa

SEQ ID NO: 1662803 - DNA, 15 bp, Homo sapiens
aacaaaaaaacaaaa

SEQ ID NO: 1662804 - DNA, 15 bp, Homo sapiens
acaaaaaaacaaaaa

SEQ ID NO: 1662805 - DNA, 15 bp, Homo sapiens
aacaaaaaaaaaaaa

SEQ ID NO: 1662806 - DNA, 15 bp, Homo sapiens
aaaaaaaaaaaacag

SEQ ID NO: 1662807 - DNA, 15 bp, Homo sapiens
aaaaaaaaaaacagc

SEQ ID NO: 1662808 - DNA, 15 bp, Homo sapiens
aaaaaaaaaacagca

SEQ ID NO: 1662809 - DNA, 15 bp, Homo sapiens
aaaaaaaaacagcag

SEQ ID NO: 1662810 - DNA, 15 bp, Homo sapiens
aaaaaaaacagcagg

SEQ ID NO: 1662811 - DNA, 15 bp, Homo sapiens
aaaaaaacagcagga

SEQ ID NO: 1662812 - DNA, 15 bp, Homo sapiens
aaaaaacagcaggaa

SEQ ID NO: 1662813 - DNA, 15 bp, Homo sapiens
aaaaacagcaggaac

SEQ ID NO: 1662814 - DNA, 15 bp, Homo sapiens
aaaacagcaggaact

SEQ ID NO: 1662815 - DNA, 15 bp, Homo sapiens
aaacagcaggaactg

SEQ ID NO: 1662816 - DNA, 15 bp, Homo sapiens
aacagcaggaactgg

SEQ ID NO: 1662817 - DNA, 15 bp, Homo sapiens
acagcaggaactggc

SEQ ID NO: 1662818 - DNA, 15 bp, Homo sapiens
cagcaggaactggca

SEQ ID NO: 1662819 - DNA, 15 bp, Homo sapiens
agcaggaactggcag

SEQ ID NO: 1662820 - DNA, 15 bp, Homo sapiens
gcaggaactggcagg

SEQ ID NO: 1662821 - DNA, 15 bp, Homo sapiens
caggaactggcaggt

SEQ ID NO: 1662822 - DNA, 15 bp, Homo sapiens
aggaactggcaggtc

SEQ ID NO: 1662823 - DNA, 15 bp, Homo sapiens
ggaactggcaggtct

SEQ ID NO: 1662824 - DNA, 15 bp, Homo sapiens
gaactggcaggtctt

SEQ ID NO: 1662825 - DNA, 15 bp, Homo sapiens
aactggcaggtcttc

SEQ ID NO: 1662826 - DNA, 15 bp, Homo sapiens
actggcaggtcttcc

SEQ ID NO: 1662827 - DNA, 15 bp, Homo sapiens
ctggcaggtcttccc

SEQ ID NO: 1662828 - DNA, 15 bp, Homo sapiens
tggcaggtcttccct

SEQ ID NO: 1662829 - DNA, 15 bp, Homo sapiens
ggcaggtcttccctg

SEQ ID NO: 1662830 - DNA, 15 bp, Homo sapiens
gcaggtcttccctga

SEQ ID NO: 1662831 - DNA, 15 bp, Homo sapiens
caggtcttccctgaa

SEQ ID NO: 1662832 - DNA, 15 bp, Homo sapiens
aggtcttccctgaag

SEQ ID NO: 1662833 - DNA, 15 bp, Homo sapiens
ggtcttccctgaaga

SEQ ID NO: 1662834 - DNA, 15 bp, Homo sapiens
gtcttccctgaagag

SEQ ID NO: 1662835 - DNA, 15 bp, Homo sapiens
tcttccctgaagaga

SEQ ID NO: 1662836 - DNA, 15 bp, Homo sapiens
cttccctgaagagat

SEQ ID NO: 1662837 - DNA, 15 bp, Homo sapiens
ttccctgaagagata

SEQ ID NO: 1662838 - DNA, 15 bp, Homo sapiens
tccctgaagagataa

SEQ ID NO: 1662839 - DNA, 15 bp, Homo sapiens
ccctgaagagataaa

SEQ ID NO: 1662840 - DNA, 15 bp, Homo sapiens
cctgaagagataaaa

SEQ ID NO: 1662841 - DNA, 15 bp, Homo sapiens
ctgaagagataaaaa

SEQ ID NO: 1662842 - DNA, 15 bp, Homo sapiens
tgaagagataaaaaa

SEQ ID NO: 1662843 - DNA, 15 bp, Homo sapiens
gaagagataaaaaaa

SEQ ID NO: 1662844 - DNA, 15 bp, Homo sapiens
aagagataaaaaaaa

SEQ ID NO: 1662845 - DNA, 15 bp, Homo sapiens
agagataaaaaaaaa

SEQ ID NO: 1662846 - DNA, 15 bp, Homo sapiens
gagataaaaaaaaaa

SEQ ID NO: 1662847 - DNA, 15 bp, Homo sapiens
agataaaaaaaaaaa

SEQ ID NO: 1662848 - DNA, 15 bp, Homo sapiens
gataaaaaaaaaaaa

SEQ ID NO: 1662849 - DNA, 15 bp, Homo sapiens
aaaaaaaaaaaatgc

SEQ ID NO: 1662850 - DNA, 15 bp, Homo sapiens
aaaaaaaaaaatgca

SEQ ID NO: 1662851 - DNA, 15 bp, Homo sapiens
aaaaaaaaaatgcag

SEQ ID NO: 1662852 - DNA, 15 bp, Homo sapiens
aaaaaaaaatgcagt

SEQ ID NO: 1662853 - DNA, 15 bp, Homo sapiens
aaaaaaaatgcagtt

SEQ ID NO: 1662854 - DNA, 15 bp, Homo sapiens
aaaaaaatgcagttg

SEQ ID NO: 1662855 - DNA, 15 bp, Homo sapiens
aaaaaatgcagttgc

SEQ ID NO: 1662856 - DNA, 15 bp, Homo sapiens
aaaaatgcagttgca

SEQ ID NO: 1662857 - DNA, 15 bp, Homo sapiens
aaaatgcagttgcaa

SEQ ID NO: 1662858 - DNA, 15 bp, Homo sapiens
aaatgcagttgcaac

SEQ ID NO: 1662859 - DNA, 15 bp, Homo sapiens
aatgcagttgcaaca

SEQ ID NO: 1662860 - DNA, 15 bp, Homo sapiens
atgcagttgcaacac

SEQ ID NO: 1662861 - DNA, 15 bp, Homo sapiens
tgcagttgcaacaca

SEQ ID NO: 1662862 - DNA, 15 bp, Homo sapiens
gcagttgcaacacaa

SEQ ID NO: 1662863 - DNA, 15 bp, Homo sapiens
cagttgcaacacaaa

SEQ ID NO: 1662864 - DNA, 15 bp, Homo sapiens
agttgcaacacaaaa

SEQ ID NO: 1662865 - DNA, 15 bp, Homo sapiens
gttgcaacacaaaag

SEQ ID NO: 1662866 - DNA, 15 bp, Homo sapiens
ttgcaacacaaaagc

SEQ ID NO: 1662867 - DNA, 15 bp, Homo sapiens
tgcaacacaaaagca

SEQ ID NO: 1662868 - DNA, 15 bp, Homo sapiens
gcaacacaaaagcag

SEQ ID NO: 1662869 - DNA, 15 bp, Homo sapiens
caacacaaaagcagc

SEQ ID NO: 1662870 - DNA, 15 bp, Homo sapiens
aacacaaaagcagcc

SEQ ID NO: 1662871 - DNA, 15 bp, Homo sapiens
acacaaaagcagcca

SEQ ID NO: 1662872 - DNA, 15 bp, Homo sapiens
cacaaaagcagccac

SEQ ID NO: 1662873 - DNA, 15 bp, Homo sapiens
acaaaagcagccaca

SEQ ID NO: 1662874 - DNA, 15 bp, Homo sapiens
aaagcagccacagag

SEQ ID NO: 1662875 - DNA, 15 bp, Homo sapiens
aagcagccacagaga

SEQ ID NO: 1662876 - DNA, 15 bp, Homo sapiens
agcagccacagagaa

SEQ ID NO: 1662877 - DNA, 15 bp, Homo sapiens
gcagccacagagaaa

SEQ ID NO: 1662878 - DNA, 15 bp, Homo sapiens
cagccacagagaaaa

SEQ ID NO: 1662879 - DNA, 15 bp, Homo sapiens
agccacagagaaaag

SEQ ID NO: 1662880 - DNA, 15 bp, Homo sapiens
gccacagagaaaagc

SEQ ID NO: 1662881 - DNA, 15 bp, Homo sapiens
ccacagagaaaagca

SEQ ID NO: 1662882 - DNA, 15 bp, Homo sapiens
cacagagaaaagcaa

SEQ ID NO: 1662883 - DNA, 15 bp, Homo sapiens
acagagaaaagcaaa

SEQ ID NO: 1662884 - DNA, 15 bp, Homo sapiens
cagagaaaagcaaac

SEQ ID NO: 1662885 - DNA, 15 bp, Homo sapiens
agagaaaagcaaacc

SEQ ID NO: 1662886 - DNA, 15 bp, Homo sapiens
gagaaaagcaaaccc

SEQ ID NO: 1662887 - DNA, 15 bp, Homo sapiens
agaaaagcaaaccca

SEQ ID NO: 1662888 - DNA, 15 bp, Homo sapiens
gaaaagcaaacccat

SEQ ID NO: 1662889 - DNA, 15 bp, Homo sapiens
aaaagcaaacccata

SEQ ID NO: 1662890 - DNA, 15 bp, Homo sapiens
aaagcaaacccatat

SEQ ID NO: 1662891 - DNA, 15 bp, Homo sapiens
aagcaaacccatata

SEQ ID NO: 1662892 - DNA, 15 bp, Homo sapiens
agcaaacccatatat

SEQ ID NO: 1662893 - DNA, 15 bp, Homo sapiens
gcaaacccatatatg

SEQ ID NO: 1662894 - DNA, 15 bp, Homo sapiens
caaacccatatatgg

SEQ ID NO: 1662895 - DNA, 15 bp, Homo sapiens
aaacccatatatggt

SEQ ID NO: 1662896 - DNA, 15 bp, Homo sapiens
aacccatatatggta

SEQ ID NO: 1662897 - DNA, 15 bp, Homo sapiens
acccatatatggtat

SEQ ID NO: 1662898 - DNA, 15 bp, Homo sapiens
cccatatatggtatt

SEQ ID NO: 1662899 - DNA, 15 bp, Homo sapiens
ccatatatggtattt

SEQ ID NO: 1662900 - DNA, 15 bp, Homo sapiens
catatatggtattta

SEQ ID NO: 1662901 - DNA, 15 bp, Homo sapiens
atatatggtatttat

SEQ ID NO: 1662902 - DNA, 15 bp, Homo sapiens
tatatggtatttatt

SEQ ID NO: 1662903 - DNA, 15 bp, Homo sapiens
atatggtatttatta

SEQ ID NO: 1662904 - DNA, 15 bp, Homo sapiens
tatggtatttattat

SEQ ID NO: 1662905 - DNA, 15 bp, Homo sapiens
atggtatttattatg

SEQ ID NO: 1662906 - DNA, 15 bp, Homo sapiens
tggtatttattatgc

SEQ ID NO: 1662907 - DNA, 15 bp, Homo sapiens
ggtatttattatgca

SEQ ID NO: 1662908 - DNA, 15 bp, Homo sapiens
gtatttattatgcac

SEQ ID NO: 1662909 - DNA, 15 bp, Homo sapiens
tatttattatgcacc

SEQ ID NO: 1662910 - DNA, 15 bp, Homo sapiens
atttattatgcaccg

SEQ ID NO: 1662911 - DNA, 15 bp, Homo sapiens
tttattatgcaccga

SEQ ID NO: 1662912 - DNA, 15 bp, Homo sapiens
ttattatgcaccgag

SEQ ID NO: 1662913 - DNA, 15 bp, Homo sapiens
tattatgcaccgagt

SEQ ID NO: 1662914 - DNA, 15 bp, Homo sapiens
attatgcaccgagtg

SEQ ID NO: 1662915 - DNA, 15 bp, Homo sapiens
ttatgcaccgagtgt

SEQ ID NO: 1662916 - DNA, 15 bp, Homo sapiens
tatgcaccgagtgtg

SEQ ID NO: 1662917 - DNA, 15 bp, Homo sapiens
atgcaccgagtgtgg

SEQ ID NO: 1662918 - DNA, 15 bp, Homo sapiens
tgcaccgagtgtggc

SEQ ID NO: 1662919 - DNA, 15 bp, Homo sapiens
gcaccgagtgtggct

SEQ ID NO: 1662920 - DNA, 15 bp, Homo sapiens
caccgagtgtggctc

SEQ ID NO: 1662921 - DNA, 15 bp, Homo sapiens
accgagtgtggctct

SEQ ID NO: 1662922 - DNA, 15 bp, Homo sapiens
ccgagtgtggctcta

SEQ ID NO: 1662923 - DNA, 15 bp, Homo sapiens
cgagtgtggctctaa

SEQ ID NO: 1662924 - DNA, 15 bp, Homo sapiens
gagtgtggctctaat

SEQ ID NO: 1662925 - DNA, 15 bp, Homo sapiens
agtgtggctctaatc

SEQ ID NO: 1662926 - DNA, 15 bp, Homo sapiens
gtgtggctctaatca

SEQ ID NO: 1662927 - DNA, 15 bp, Homo sapiens
tgtggctctaatcac

SEQ ID NO: 1662928 - DNA, 15 bp, Homo sapiens
gtggctctaatcact

SEQ ID NO: 1662929 - DNA, 15 bp, Homo sapiens
tggctctaatcactt

SEQ ID NO: 1662930 - DNA, 15 bp, Homo sapiens
ggctctaatcacttt

SEQ ID NO: 1662931 - DNA, 15 bp, Homo sapiens
gctctaatcactttt

SEQ ID NO: 1662932 - DNA, 15 bp, Homo sapiens
ctctaatcacttttt

SEQ ID NO: 1662933 - DNA, 15 bp, Homo sapiens
tctaatcactttttt

SEQ ID NO: 1662934 - DNA, 15 bp, Homo sapiens
ctaatcacttttttt

SEQ ID NO: 1662935 - DNA, 15 bp, Homo sapiens
taatcactttttttt

SEQ ID NO: 1662936 - DNA, 15 bp, Homo sapiens
aatcacttttttttt

SEQ ID NO: 1662937 - DNA, 15 bp, Homo sapiens
atcactttttttttt

SEQ ID NO: 1662938 - DNA, 15 bp, Homo sapiens
tcacttttttttttt

SEQ ID NO: 1662939 - DNA, 15 bp, Homo sapiens
tttttttttaattga

SEQ ID NO: 1662940 - DNA, 15 bp, Homo sapiens
ttttttttaattgag

SEQ ID NO: 1662941 - DNA, 15 bp, Homo sapiens
tttttttaattgaga

SEQ ID NO: 1662942 - DNA, 15 bp, Homo sapiens
ttttttaattgagag

SEQ ID NO: 1662943 - DNA, 15 bp, Homo sapiens
tttttaattgagaga

SEQ ID NO: 1662944 - DNA, 15 bp, Homo sapiens
ttttaattgagagac

SEQ ID NO: 1662945 - DNA, 15 bp, Homo sapiens
tttaattgagagaca

SEQ ID NO: 1662946 - DNA, 15 bp, Homo sapiens
ttaattgagagacag

SEQ ID NO: 1662947 - DNA, 15 bp, Homo sapiens
taattgagagacagc

SEQ ID NO: 1662948 - DNA, 15 bp, Homo sapiens
aattgagagacagcc

SEQ ID NO: 1662949 - DNA, 15 bp, Homo sapiens
attgagagacagcct

SEQ ID NO: 1662950 - DNA, 15 bp, Homo sapiens
ttgagagacagcctg

SEQ ID NO: 1662951 - DNA, 15 bp, Homo sapiens
tgagagacagcctgg

SEQ ID NO: 1662952 - DNA, 15 bp, Homo sapiens
gagagacagcctggc

SEQ ID NO: 1662953 - DNA, 15 bp, Homo sapiens
agagacagcctggct

SEQ ID NO: 1662954 - DNA, 15 bp, Homo sapiens
gagacagcctggctc

SEQ ID NO: 1662955 - DNA, 15 bp, Homo sapiens
agacagcctggctct

SEQ ID NO: 1662956 - DNA, 15 bp, Homo sapiens
gacagcctggctctg

SEQ ID NO: 1662957 - DNA, 15 bp, Homo sapiens
acagcctggctctgt

SEQ ID NO: 1662958 - DNA, 15 bp, Homo sapiens
cagcctggctctgtt

SEQ ID NO: 1662959 - DNA, 15 bp, Homo sapiens
agcctggctctgttg

SEQ ID NO: 1662960 - DNA, 15 bp, Homo sapiens
gcctggctctgttga

SEQ ID NO: 1662961 - DNA, 15 bp, Homo sapiens
cctggctctgttgat

SEQ ID NO: 1662962 - DNA, 15 bp, Homo sapiens
ctggctctgttgatt

SEQ ID NO: 1662963 - DNA, 15 bp, Homo sapiens
tggctctgttgattg

SEQ ID NO: 1662964 - DNA, 15 bp, Homo sapiens
ggctctgttgattgg

SEQ ID NO: 1662965 - DNA, 15 bp, Homo sapiens
gctctgttgattggg

SEQ ID NO: 1662966 - DNA, 15 bp, Homo sapiens
ctctgttgattgggc

SEQ ID NO: 1662967 - DNA, 15 bp, Homo sapiens
tctgttgattgggct

SEQ ID NO: 1662968 - DNA, 15 bp, Homo sapiens
ctgttgattgggctg

SEQ ID NO: 1662969 - DNA, 15 bp, Homo sapiens
tgttgattgggctgg

SEQ ID NO: 1662970 - DNA, 15 bp, Homo sapiens
gttgattgggctgga

SEQ ID NO: 1662971 - DNA, 15 bp, Homo sapiens
ttgattgggctggag

SEQ ID NO: 1662972 - DNA, 15 bp, Homo sapiens
tgattgggctggagt

SEQ ID NO: 1662973 - DNA, 15 bp, Homo sapiens
gattgggctggagtg

SEQ ID NO: 1662974 - DNA, 15 bp, Homo sapiens
attgggctggagtgc

SEQ ID NO: 1662975 - DNA, 15 bp, Homo sapiens
ttgggctggagtgca

SEQ ID NO: 1662976 - DNA, 15 bp, Homo sapiens
gtgcagtggcgcgac

SEQ ID NO: 1662977 - DNA, 15 bp, Homo sapiens
tgcagtggcgcgacc

SEQ ID NO: 1662978 - DNA, 15 bp, Homo sapiens
gcagtggcgcgaccg

SEQ ID NO: 1662979 - DNA, 15 bp, Homo sapiens
cagtggcgcgaccgt

SEQ ID NO: 1662980 - DNA, 15 bp, Homo sapiens
agtggcgcgaccgta

SEQ ID NO: 1662981 - DNA, 15 bp, Homo sapiens
gtggcgcgaccgtag

SEQ ID NO: 1662982 - DNA, 15 bp, Homo sapiens
tggcgcgaccgtagc

SEQ ID NO: 1662983 - DNA, 15 bp, Homo sapiens
ggcgcgaccgtagct

SEQ ID NO: 1662984 - DNA, 15 bp, Homo sapiens
gcgcgaccgtagctc

SEQ ID NO: 1662985 - DNA, 15 bp, Homo sapiens
cgcgaccgtagctca

SEQ ID NO: 1662986 - DNA, 15 bp, Homo sapiens
gcgaccgtagctcat

SEQ ID NO: 1662987 - DNA, 15 bp, Homo sapiens
cgaccgtagctcatt

SEQ ID NO: 1662988 - DNA, 15 bp, Homo sapiens
gaccgtagctcattg

SEQ ID NO: 1662989 - DNA, 15 bp, Homo sapiens
accgtagctcattgc

SEQ ID NO: 1662990 - DNA, 15 bp, Homo sapiens
ccgtagctcattgca

SEQ ID NO: 1662991 - DNA, 15 bp, Homo sapiens
cgtagctcattgcag

SEQ ID NO: 1662992 - DNA, 15 bp, Homo sapiens
gtagctcattgcagc

SEQ ID NO: 1662993 - DNA, 15 bp, Homo sapiens
tagctcattgcagcc

SEQ ID NO: 1662994 - DNA, 15 bp, Homo sapiens
agctcattgcagcct

SEQ ID NO: 1662995 - DNA, 15 bp, Homo sapiens
ctcattgcagcctca

SEQ ID NO: 1662996 - DNA, 15 bp, Homo sapiens
tcattgcagcctcaa

SEQ ID NO: 1662997 - DNA, 15 bp, Homo sapiens
cattgcagcctcaac

SEQ ID NO: 1662998 - DNA, 15 bp, Homo sapiens
attgcagcctcaacc

SEQ ID NO: 1662999 - DNA, 15 bp, Homo sapiens
ttgcagcctcaacct

SEQ ID NO: 1663000 - DNA, 15 bp, Homo sapiens
agcctcaacctcctt

SEQ ID NO: 1663001 - DNA, 15 bp, Homo sapiens
gcctcaacctccttg

SEQ ID NO: 1663002 - DNA, 15 bp, Homo sapiens
cctcaacctccttgg

SEQ ID NO: 1663003 - DNA, 15 bp, Homo sapiens
ctcaacctccttggc

SEQ ID NO: 1663004 - DNA, 15 bp, Homo sapiens
tcaacctccttggct

SEQ ID NO: 1663005 - DNA, 15 bp, Homo sapiens
caacctccttggctc

SEQ ID NO: 1663006 - DNA, 15 bp, Homo sapiens
aacctccttggctca

SEQ ID NO: 1663007 - DNA, 15 bp, Homo sapiens
acctccttggctcaa

SEQ ID NO: 1663008 - DNA, 15 bp, Homo sapiens
cctccttggctcaag

SEQ ID NO: 1663009 - DNA, 15 bp, Homo sapiens
ctccttggctcaagc

SEQ ID NO: 1663010 - DNA, 15 bp, Homo sapiens
tccttggctcaagca

SEQ ID NO: 1663011 - DNA, 15 bp, Homo sapiens
ccttggctcaagcaa

SEQ ID NO: 1663012 - DNA, 15 bp, Homo sapiens
cttggctcaagcaat

SEQ ID NO: 1663013 - DNA, 15 bp, Homo sapiens
ttggctcaagcaatc

SEQ ID NO: 1663014 - DNA, 15 bp, Homo sapiens
tggctcaagcaatcc

SEQ ID NO: 1663015 - DNA, 15 bp, Homo sapiens
caagcaatcctccta

SEQ ID NO: 1663016 - DNA, 15 bp, Homo sapiens
aagcaatcctcctac

SEQ ID NO: 1663017 - DNA, 15 bp, Homo sapiens
agcaatcctcctacc

SEQ ID NO: 1663018 - DNA, 15 bp, Homo sapiens
gcaatcctcctacct

SEQ ID NO: 1663019 - DNA, 15 bp, Homo sapiens
caatcctcctacctc

SEQ ID NO: 1663020 - DNA, 15 bp, Homo sapiens
tacctcagcctcctg

SEQ ID NO: 1663021 - DNA, 15 bp, Homo sapiens
ggaccacaggtgtga

SEQ ID NO: 1663022 - DNA, 15 bp, Homo sapiens
gaccacaggtgtgag

SEQ ID NO: 1663023 - DNA, 15 bp, Homo sapiens
accacaggtgtgagc

SEQ ID NO: 1663024 - DNA, 15 bp, Homo sapiens
ccacaggtgtgagcc

SEQ ID NO: 1663025 - DNA, 15 bp, Homo sapiens
cacaggtgtgagcca

SEQ ID NO: 1663026 - DNA, 15 bp, Homo sapiens
acgcctggctaattg

SEQ ID NO: 1663027 - DNA, 15 bp, Homo sapiens
cgcctggctaattgt

SEQ ID NO: 1663028 - DNA, 15 bp, Homo sapiens
gcctggctaattgtt

SEQ ID NO: 1663029 - DNA, 15 bp, Homo sapiens
cctggctaattgttt

SEQ ID NO: 1663030 - DNA, 15 bp, Homo sapiens
ctggctaattgtttt

SEQ ID NO: 1663031 - DNA, 15 bp, Homo sapiens
tggctaattgttttt

SEQ ID NO: 1663032 - DNA, 15 bp, Homo sapiens
gctaattgttttttt

SEQ ID NO: 1663033 - DNA, 15 bp, Homo sapiens
ctaattgtttttttt

SEQ ID NO: 1663034 - DNA, 15 bp, Homo sapiens
taattgttttttttt

SEQ ID NO: 1663035 - DNA, 15 bp, Homo sapiens
aattgtttttttttt

SEQ ID NO: 1663036 - DNA, 15 bp, Homo sapiens
attgttttttttttt

SEQ ID NO: 1663037 - DNA, 15 bp, Homo sapiens
tttttttttgtagag

SEQ ID NO: 1663038 - DNA, 15 bp, Homo sapiens
tttttttgtagagac

SEQ ID NO: 1663039 - DNA, 15 bp, Homo sapiens
cagggtctcactatg

SEQ ID NO: 1663040 - DNA, 15 bp, Homo sapiens
gggtctcactatgtg

SEQ ID NO: 1663041 - DNA, 15 bp, Homo sapiens
ggtctcactatgtgg

SEQ ID NO: 1663042 - DNA, 15 bp, Homo sapiens
gtctcactatgtggc

SEQ ID NO: 1663043 - DNA, 15 bp, Homo sapiens
tctcactatgtggcc

SEQ ID NO: 1663044 - DNA, 15 bp, Homo sapiens
ctcactatgtggccc

SEQ ID NO: 1663045 - DNA, 15 bp, Homo sapiens
tcactatgtggccca

SEQ ID NO: 1663046 - DNA, 15 bp, Homo sapiens
cactatgtggcccag

SEQ ID NO: 1663047 - DNA, 15 bp, Homo sapiens
actatgtggcccagg

SEQ ID NO: 1663048 - DNA, 15 bp, Homo sapiens
ctatgtggcccaggc

SEQ ID NO: 1663049 - DNA, 15 bp, Homo sapiens
tatgtggcccaggct

SEQ ID NO: 1663050 - DNA, 15 bp, Homo sapiens
atgtggcccaggctg

SEQ ID NO: 1663051 - DNA, 15 bp, Homo sapiens
gtggcccaggctggt

SEQ ID NO: 1663052 - DNA, 15 bp, Homo sapiens
tggcccaggctggtt

SEQ ID NO: 1663053 - DNA, 15 bp, Homo sapiens
ggcccaggctggttt

SEQ ID NO: 1663054 - DNA, 15 bp, Homo sapiens
cccaggctggtttcc

SEQ ID NO: 1663055 - DNA, 15 bp, Homo sapiens
ccaggctggtttcca

SEQ ID NO: 1663056 - DNA, 15 bp, Homo sapiens
caggctggtttccaa

SEQ ID NO: 1663057 - DNA, 15 bp, Homo sapiens
aggctggtttccaac

SEQ ID NO: 1663058 - DNA, 15 bp, Homo sapiens
ggctggtttccaact

SEQ ID NO: 1663059 - DNA, 15 bp, Homo sapiens
gctggtttccaactc

SEQ ID NO: 1663060 - DNA, 15 bp, Homo sapiens
ctggtttccaactcc

SEQ ID NO: 1663061 - DNA, 15 bp, Homo sapiens
tggtttccaactcct

SEQ ID NO: 1663062 - DNA, 15 bp, Homo sapiens
ggtttccaactcctg

SEQ ID NO: 1663063 - DNA, 15 bp, Homo sapiens
gtttccaactcctgg

SEQ ID NO: 1663064 - DNA, 15 bp, Homo sapiens
tttccaactcctggg

SEQ ID NO: 1663065 - DNA, 15 bp, Homo sapiens
ttccaactcctgggc

SEQ ID NO: 1663066 - DNA, 15 bp, Homo sapiens
gatcctcccacctct

SEQ ID NO: 1663067 - DNA, 15 bp, Homo sapiens
atcctcccacctctg

SEQ ID NO: 1663068 - DNA, 15 bp, Homo sapiens
tcctcccacctctgc

SEQ ID NO: 1663069 - DNA, 15 bp, Homo sapiens
cctcccacctctgcc

SEQ ID NO: 1663070 - DNA, 15 bp, Homo sapiens
ctcccacctctgcct

SEQ ID NO: 1663071 - DNA, 15 bp, Homo sapiens
tcccacctctgcctc

SEQ ID NO: 1663072 - DNA, 15 bp, Homo sapiens
cccacctctgcctcc

SEQ ID NO: 1663073 - DNA, 15 bp, Homo sapiens
cacctctgcctccca

SEQ ID NO: 1663074 - DNA, 15 bp, Homo sapiens
acctctgcctcccaa

SEQ ID NO: 1663075 - DNA, 15 bp, Homo sapiens
cctctgcctcccaaa

SEQ ID NO: 1663076 - DNA, 15 bp, Homo sapiens
tctgcctcccaaagt

SEQ ID NO: 1663077 - DNA, 15 bp, Homo sapiens
ctgcctcccaaagtg

SEQ ID NO: 1663078 - DNA, 15 bp, Homo sapiens
tgcctcccaaagtgc

SEQ ID NO: 1663079 - DNA, 15 bp, Homo sapiens
ccaaagtgctgggga

SEQ ID NO: 1663080 - DNA, 15 bp, Homo sapiens
caaagtgctggggat

SEQ ID NO: 1663081 - DNA, 15 bp, Homo sapiens
aaagtgctggggatt

SEQ ID NO: 1663082 - DNA, 15 bp, Homo sapiens
aagtgctggggatta

SEQ ID NO: 1663083 - DNA, 15 bp, Homo sapiens
agtgctggggattac

SEQ ID NO: 1663084 - DNA, 15 bp, Homo sapiens
gtgctggggattaca

SEQ ID NO: 1663085 - DNA, 15 bp, Homo sapiens
tgctggggattacag

SEQ ID NO: 1663086 - DNA, 15 bp, Homo sapiens
gctggggattacagg

SEQ ID NO: 1663087 - DNA, 15 bp, Homo sapiens
ctggggattacaggc

SEQ ID NO: 1663088 - DNA, 15 bp, Homo sapiens
tggggattacaggca

SEQ ID NO: 1663089 - DNA, 15 bp, Homo sapiens
ggggattacaggcat

SEQ ID NO: 1663090 - DNA, 15 bp, Homo sapiens
aggcatgagccacct

SEQ ID NO: 1663091 - DNA, 15 bp, Homo sapiens
ggcatgagccacctc

SEQ ID NO: 1663092 - DNA, 15 bp, Homo sapiens
gcatgagccacctcg

SEQ ID NO: 1663093 - DNA, 15 bp, Homo sapiens
catgagccacctcgc

SEQ ID NO: 1663094 - DNA, 15 bp, Homo sapiens
atgagccacctcgcc

SEQ ID NO: 1663095 - DNA, 15 bp, Homo sapiens
tgagccacctcgcct

SEQ ID NO: 1663096 - DNA, 15 bp, Homo sapiens
gagccacctcgcctg

SEQ ID NO: 1663097 - DNA, 15 bp, Homo sapiens
agccacctcgcctgg

SEQ ID NO: 1663098 - DNA, 15 bp, Homo sapiens
gccacctcgcctggc

SEQ ID NO: 1663099 - DNA, 15 bp, Homo sapiens
ccacctcgcctggcc

SEQ ID NO: 1663100 - DNA, 15 bp, Homo sapiens
cacctcgcctggcct

SEQ ID NO: 1663101 - DNA, 15 bp, Homo sapiens
acctcgcctggcctc

SEQ ID NO: 1663102 - DNA, 15 bp, Homo sapiens
cctcgcctggcctct

SEQ ID NO: 1663103 - DNA, 15 bp, Homo sapiens
ctcgcctggcctcta

SEQ ID NO: 1663104 - DNA, 15 bp, Homo sapiens
tcgcctggcctctag

SEQ ID NO: 1663105 - DNA, 15 bp, Homo sapiens
cgcctggcctctagt

SEQ ID NO: 1663106 - DNA, 15 bp, Homo sapiens
gcctggcctctagtc

SEQ ID NO: 1663107 - DNA, 15 bp, Homo sapiens
cctggcctctagtcg

SEQ ID NO: 1663108 - DNA, 15 bp, Homo sapiens
ctggcctctagtcgc

SEQ ID NO: 1663109 - DNA, 15 bp, Homo sapiens
tggcctctagtcgct

SEQ ID NO: 1663110 - DNA, 15 bp, Homo sapiens
ggcctctagtcgctt

SEQ ID NO: 1663111 - DNA, 15 bp, Homo sapiens
gcctctagtcgcttt

SEQ ID NO: 1663112 - DNA, 15 bp, Homo sapiens
cctctagtcgcttta

SEQ ID NO: 1663113 - DNA, 15 bp, Homo sapiens
ctctagtcgctttat

SEQ ID NO: 1663114 - DNA, 15 bp, Homo sapiens
tctagtcgctttata

SEQ ID NO: 1663115 - DNA, 15 bp, Homo sapiens
ctagtcgctttatat

SEQ ID NO: 1663116 - DNA, 15 bp, Homo sapiens
tagtcgctttatata

SEQ ID NO: 1663117 - DNA, 15 bp, Homo sapiens
agtcgctttatatat

SEQ ID NO: 1663118 - DNA, 15 bp, Homo sapiens
gtcgctttatatatt

SEQ ID NO: 1663119 - DNA, 15 bp, Homo sapiens
tcgctttatatattt

SEQ ID NO: 1663120 - DNA, 15 bp, Homo sapiens
cgctttatatatttt

SEQ ID NO: 1663121 - DNA, 15 bp, Homo sapiens
gctttatatatttta

SEQ ID NO: 1663122 - DNA, 15 bp, Homo sapiens
ctttatatattttaa

SEQ ID NO: 1663123 - DNA, 15 bp, Homo sapiens
tttatatattttaac

SEQ ID NO: 1663124 - DNA, 15 bp, Homo sapiens
ttatatattttaact

SEQ ID NO: 1663125 - DNA, 15 bp, Homo sapiens
tatatattttaactt

SEQ ID NO: 1663126 - DNA, 15 bp, Homo sapiens
atatattttaactta

SEQ ID NO: 1663127 - DNA, 15 bp, Homo sapiens
tatattttaacttaa

SEQ ID NO: 1663128 - DNA, 15 bp, Homo sapiens
atattttaacttaat

SEQ ID NO: 1663129 - DNA, 15 bp, Homo sapiens
tattttaacttaatc

SEQ ID NO: 1663130 - DNA, 15 bp, Homo sapiens
attttaacttaatcc

SEQ ID NO: 1663131 - DNA, 15 bp, Homo sapiens
ttttaacttaatcct

SEQ ID NO: 1663132 - DNA, 15 bp, Homo sapiens
tttaacttaatcctt

SEQ ID NO: 1663133 - DNA, 15 bp, Homo sapiens
ttaacttaatcctta

SEQ ID NO: 1663134 - DNA, 15 bp, Homo sapiens
taacttaatccttac

SEQ ID NO: 1663135 - DNA, 15 bp, Homo sapiens
aacttaatccttaca

SEQ ID NO: 1663136 - DNA, 15 bp, Homo sapiens
acttaatccttacaa

SEQ ID NO: 1663137 - DNA, 15 bp, Homo sapiens
cttaatccttacaag

SEQ ID NO: 1663138 - DNA, 15 bp, Homo sapiens
ttaatccttacaaga

SEQ ID NO: 1663139 - DNA, 15 bp, Homo sapiens
taatccttacaagag

SEQ ID NO: 1663140 - DNA, 15 bp, Homo sapiens
aatccttacaagagc

SEQ ID NO: 1663141 - DNA, 15 bp, Homo sapiens
atccttacaagagcc

SEQ ID NO: 1663142 - DNA, 15 bp, Homo sapiens
tccttacaagagccc

SEQ ID NO: 1663143 - DNA, 15 bp, Homo sapiens
ccttacaagagccct

SEQ ID NO: 1663144 - DNA, 15 bp, Homo sapiens
cttacaagagccctg

SEQ ID NO: 1663145 - DNA, 15 bp, Homo sapiens
ttacaagagccctgt

SEQ ID NO: 1663146 - DNA, 15 bp, Homo sapiens
tacaagagccctgtg

SEQ ID NO: 1663147 - DNA, 15 bp, Homo sapiens
acaagagccctgtga

SEQ ID NO: 1663148 - DNA, 15 bp, Homo sapiens
caagagccctgtgag

SEQ ID NO: 1663149 - DNA, 15 bp, Homo sapiens
aagagccctgtgagc

SEQ ID NO: 1663150 - DNA, 15 bp, Homo sapiens
agagccctgtgagct

SEQ ID NO: 1663151 - DNA, 15 bp, Homo sapiens
gagccctgtgagcta

SEQ ID NO: 1663152 - DNA, 15 bp, Homo sapiens
agccctgtgagctag

SEQ ID NO: 1663153 - DNA, 15 bp, Homo sapiens
gccctgtgagctagt

SEQ ID NO: 1663154 - DNA, 15 bp, Homo sapiens
ccctgtgagctagtt

SEQ ID NO: 1663155 - DNA, 15 bp, Homo sapiens
cctgtgagctagtta

SEQ ID NO: 1663156 - DNA, 15 bp, Homo sapiens
ctgtgagctagttac

SEQ ID NO: 1663157 - DNA, 15 bp, Homo sapiens
tgtgagctagttaca

SEQ ID NO: 1663158 - DNA, 15 bp, Homo sapiens
gtgagctagttacag

SEQ ID NO: 1663159 - DNA, 15 bp, Homo sapiens
tgagctagttacagg

SEQ ID NO: 1663160 - DNA, 15 bp, Homo sapiens
gagctagttacagga

SEQ ID NO: 1663161 - DNA, 15 bp, Homo sapiens
agctagttacaggag

SEQ ID NO: 1663162 - DNA, 15 bp, Homo sapiens
gctagttacaggagc

SEQ ID NO: 1663163 - DNA, 15 bp, Homo sapiens
ctagttacaggagca

SEQ ID NO: 1663164 - DNA, 15 bp, Homo sapiens
tagttacaggagcac

SEQ ID NO: 1663165 - DNA, 15 bp, Homo sapiens
agttacaggagcaca

SEQ ID NO: 1663166 - DNA, 15 bp, Homo sapiens
gttacaggagcacaa

SEQ ID NO: 1663167 - DNA, 15 bp, Homo sapiens
ttacaggagcacaaa

SEQ ID NO: 1663168 - DNA, 15 bp, Homo sapiens
tacaggagcacaaat

SEQ ID NO: 1663169 - DNA, 15 bp, Homo sapiens
acaggagcacaaatg

SEQ ID NO: 1663170 - DNA, 15 bp, Homo sapiens
caggagcacaaatgg

SEQ ID NO: 1663171 - DNA, 15 bp, Homo sapiens
aggagcacaaatgga

SEQ ID NO: 1663172 - DNA, 15 bp, Homo sapiens
ggagcacaaatggaa

SEQ ID NO: 1663173 - DNA, 15 bp, Homo sapiens
gagcacaaatggaaa

SEQ ID NO: 1663174 - DNA, 15 bp, Homo sapiens
agcacaaatggaaac

SEQ ID NO: 1663175 - DNA, 15 bp, Homo sapiens
gcacaaatggaaacc

SEQ ID NO: 1663176 - DNA, 15 bp, Homo sapiens
cacaaatggaaacca

SEQ ID NO: 1663177 - DNA, 15 bp, Homo sapiens
acaaatggaaaccaa

SEQ ID NO: 1663178 - DNA, 15 bp, Homo sapiens
caaatggaaaccaag

SEQ ID NO: 1663179 - DNA, 15 bp, Homo sapiens
aaatggaaaccaaga

SEQ ID NO: 1663180 - DNA, 15 bp, Homo sapiens
aatggaaaccaagaa

SEQ ID NO: 1663181 - DNA, 15 bp, Homo sapiens
atggaaaccaagaaa

SEQ ID NO: 1663182 - DNA, 15 bp, Homo sapiens
tggaaaccaagaaac

SEQ ID NO: 1663183 - DNA, 15 bp, Homo sapiens
ggaaaccaagaaaca

SEQ ID NO: 1663184 - DNA, 15 bp, Homo sapiens
gaaaccaagaaacag

SEQ ID NO: 1663185 - DNA, 15 bp, Homo sapiens
aaaccaagaaacaga

SEQ ID NO: 1663186 - DNA, 15 bp, Homo sapiens
aaccaagaaacagaa

SEQ ID NO: 1663187 - DNA, 15 bp, Homo sapiens
accaagaaacagaaa

SEQ ID NO: 1663188 - DNA, 15 bp, Homo sapiens
ccaagaaacagaaaa

SEQ ID NO: 1663189 - DNA, 15 bp, Homo sapiens
caagaaacagaaaaa

SEQ ID NO: 1663190 - DNA, 15 bp, Homo sapiens
aagaaacagaaaaat

SEQ ID NO: 1663191 - DNA, 15 bp, Homo sapiens
agaaacagaaaaatt

SEQ ID NO: 1663192 - DNA, 15 bp, Homo sapiens
gaaacagaaaaattt

SEQ ID NO: 1663193 - DNA, 15 bp, Homo sapiens
aaacagaaaaattta

SEQ ID NO: 1663194 - DNA, 15 bp, Homo sapiens
aacagaaaaatttat

SEQ ID NO: 1663195 - DNA, 15 bp, Homo sapiens
acagaaaaatttatc

SEQ ID NO: 1663196 - DNA, 15 bp, Homo sapiens
cagaaaaatttatca

SEQ ID NO: 1663197 - DNA, 15 bp, Homo sapiens
agaaaaatttatcag

SEQ ID NO: 1663198 - DNA, 15 bp, Homo sapiens
gaaaaatttatcagc

SEQ ID NO: 1663199 - DNA, 15 bp, Homo sapiens
aaaaatttatcagca

SEQ ID NO: 1663200 - DNA, 15 bp, Homo sapiens
aaaatttatcagcat

SEQ ID NO: 1663201 - DNA, 15 bp, Homo sapiens
aaatttatcagcatg

SEQ ID NO: 1663202 - DNA, 15 bp, Homo sapiens
aatttatcagcatga

SEQ ID NO: 1663203 - DNA, 15 bp, Homo sapiens
atttatcagcatgac

SEQ ID NO: 1663204 - DNA, 15 bp, Homo sapiens
tttatcagcatgact

SEQ ID NO: 1663205 - DNA, 15 bp, Homo sapiens
ttatcagcatgactc

SEQ ID NO: 1663206 - DNA, 15 bp, Homo sapiens
tatcagcatgactca

SEQ ID NO: 1663207 - DNA, 15 bp, Homo sapiens
atcagcatgactcag

SEQ ID NO: 1663208 - DNA, 15 bp, Homo sapiens
tcagcatgactcagt

SEQ ID NO: 1663209 - DNA, 15 bp, Homo sapiens
cagcatgactcagtc

SEQ ID NO: 1663210 - DNA, 15 bp, Homo sapiens
agcatgactcagtcc

SEQ ID NO: 1663211 - DNA, 15 bp, Homo sapiens
gcatgactcagtcct

SEQ ID NO: 1663212 - DNA, 15 bp, Homo sapiens
catgactcagtcctc

SEQ ID NO: 1663213 - DNA, 15 bp, Homo sapiens
atgactcagtcctca

SEQ ID NO: 1663214 - DNA, 15 bp, Homo sapiens
tgactcagtcctcag

SEQ ID NO: 1663215 - DNA, 15 bp, Homo sapiens
gactcagtcctcaga

SEQ ID NO: 1663216 - DNA, 15 bp, Homo sapiens
actcagtcctcagag

SEQ ID NO: 1663217 - DNA, 15 bp, Homo sapiens
ctcagtcctcagagc

SEQ ID NO: 1663218 - DNA, 15 bp, Homo sapiens
tcagtcctcagagcc

SEQ ID NO: 1663219 - DNA, 15 bp, Homo sapiens
cagtcctcagagcca

SEQ ID NO: 1663220 - DNA, 15 bp, Homo sapiens
agtcctcagagccat

SEQ ID NO: 1663221 - DNA, 15 bp, Homo sapiens
gtcctcagagccatg

SEQ ID NO: 1663222 - DNA, 15 bp, Homo sapiens
tcctcagagccatgt

SEQ ID NO: 1663223 - DNA, 15 bp, Homo sapiens
cctcagagccatgta

SEQ ID NO: 1663224 - DNA, 15 bp, Homo sapiens
ctcagagccatgtat

SEQ ID NO: 1663225 - DNA, 15 bp, Homo sapiens
tcagagccatgtatg

SEQ ID NO: 1663226 - DNA, 15 bp, Homo sapiens
cagagccatgtatgg

SEQ ID NO: 1663227 - DNA, 15 bp, Homo sapiens
agagccatgtatggc

SEQ ID NO: 1663228 - DNA, 15 bp, Homo sapiens
gagccatgtatggcc

SEQ ID NO: 1663229 - DNA, 15 bp, Homo sapiens
agccatgtatggccg

SEQ ID NO: 1663230 - DNA, 15 bp, Homo sapiens
gccatgtatggccgt

SEQ ID NO: 1663231 - DNA, 15 bp, Homo sapiens
ccatgtatggccgtg

SEQ ID NO: 1663232 - DNA, 15 bp, Homo sapiens
catgtatggccgtgt

SEQ ID NO: 1663233 - DNA, 15 bp, Homo sapiens
atgtatggccgtgtc

SEQ ID NO: 1663234 - DNA, 15 bp, Homo sapiens
tgtatggccgtgtcc

SEQ ID NO: 1663235 - DNA, 15 bp, Homo sapiens
gtatggccgtgtccg

SEQ ID NO: 1663236 - DNA, 15 bp, Homo sapiens
tatggccgtgtccgt

SEQ ID NO: 1663237 - DNA, 15 bp, Homo sapiens
atggccgtgtccgtg

SEQ ID NO: 1663238 - DNA, 15 bp, Homo sapiens
tggccgtgtccgtgc

SEQ ID NO: 1663239 - DNA, 15 bp, Homo sapiens
ggccgtgtccgtgca

SEQ ID NO: 1663240 - DNA, 15 bp, Homo sapiens
gccgtgtccgtgcat

SEQ ID NO: 1663241 - DNA, 15 bp, Homo sapiens
ccgtgtccgtgcatg

SEQ ID NO: 1663242 - DNA, 15 bp, Homo sapiens
cgtgtccgtgcatgg

SEQ ID NO: 1663243 - DNA, 15 bp, Homo sapiens
gtgtccgtgcatggc

SEQ ID NO: 1663244 - DNA, 15 bp, Homo sapiens
tgtccgtgcatggca

SEQ ID NO: 1663245 - DNA, 15 bp, Homo sapiens
gtccgtgcatggcag

SEQ ID NO: 1663246 - DNA, 15 bp, Homo sapiens
tccgtgcatggcagg

SEQ ID NO: 1663247 - DNA, 15 bp, Homo sapiens
ccgtgcatggcaggc

SEQ ID NO: 1663248 - DNA, 15 bp, Homo sapiens
cgtgcatggcaggca

SEQ ID NO: 1663249 - DNA, 15 bp, Homo sapiens
gtgcatggcaggcag

SEQ ID NO: 1663250 - DNA, 15 bp, Homo sapiens
tgcatggcaggcagg

SEQ ID NO: 1663251 - DNA, 15 bp, Homo sapiens
gcatggcaggcaggt

SEQ ID NO: 1663252 - DNA, 15 bp, Homo sapiens
catggcaggcaggtc

SEQ ID NO: 1663253 - DNA, 15 bp, Homo sapiens
atggcaggcaggtca

SEQ ID NO: 1663254 - DNA, 15 bp, Homo sapiens
tggcaggcaggtcag

SEQ ID NO: 1663255 - DNA, 15 bp, Homo sapiens
ggcaggcaggtcagg

SEQ ID NO: 1663256 - DNA, 15 bp, Homo sapiens
gcaggcaggtcaggg

SEQ ID NO: 1663257 - DNA, 15 bp, Homo sapiens
caggcaggtcagggg

SEQ ID NO: 1663258 - DNA, 15 bp, Homo sapiens
aggcaggtcaggggc

SEQ ID NO: 1663259 - DNA, 15 bp, Homo sapiens
ggcaggtcaggggcc

SEQ ID NO: 1663260 - DNA, 15 bp, Homo sapiens
gcaggtcaggggcct

SEQ ID NO: 1663261 - DNA, 15 bp, Homo sapiens
caggtcaggggcctg

SEQ ID NO: 1663262 - DNA, 15 bp, Homo sapiens
aggtcaggggcctgg

SEQ ID NO: 1663263 - DNA, 15 bp, Homo sapiens
ggtcaggggcctggg

SEQ ID NO: 1663264 - DNA, 15 bp, Homo sapiens
gtcaggggcctgggg

SEQ ID NO: 1663265 - DNA, 15 bp, Homo sapiens
tcaggggcctgggga

SEQ ID NO: 1663266 - DNA, 15 bp, Homo sapiens
caggggcctggggaa

SEQ ID NO: 1663267 - DNA, 15 bp, Homo sapiens
aggggcctggggaac

SEQ ID NO: 1663268 - DNA, 15 bp, Homo sapiens
ggggcctggggaacg

SEQ ID NO: 1663269 - DNA, 15 bp, Homo sapiens
gggcctggggaacgc

SEQ ID NO: 1663270 - DNA, 15 bp, Homo sapiens
ggcctggggaacgct

SEQ ID NO: 1663271 - DNA, 15 bp, Homo sapiens
gcctggggaacgctg

SEQ ID NO: 1663272 - DNA, 15 bp, Homo sapiens
cctggggaacgctgt

SEQ ID NO: 1663273 - DNA, 15 bp, Homo sapiens
ctggggaacgctgtt

SEQ ID NO: 1663274 - DNA, 15 bp, Homo sapiens
tggggaacgctgttc

SEQ ID NO: 1663275 - DNA, 15 bp, Homo sapiens
ggggaacgctgttct

SEQ ID NO: 1663276 - DNA, 15 bp, Homo sapiens
gggaacgctgttctg

SEQ ID NO: 1663277 - DNA, 15 bp, Homo sapiens
ggaacgctgttctgg

SEQ ID NO: 1663278 - DNA, 15 bp, Homo sapiens
gaacgctgttctgga

SEQ ID NO: 1663279 - DNA, 15 bp, Homo sapiens
aacgctgttctggaa

SEQ ID NO: 1663280 - DNA, 15 bp, Homo sapiens
acgctgttctggaaa

SEQ ID NO: 1663281 - DNA, 15 bp, Homo sapiens
cgctgttctggaaac

SEQ ID NO: 1663282 - DNA, 15 bp, Homo sapiens
gctgttctggaaacc

SEQ ID NO: 1663283 - DNA, 15 bp, Homo sapiens
ctgttctggaaacct

SEQ ID NO: 1663284 - DNA, 15 bp, Homo sapiens
tgttctggaaacctt

SEQ ID NO: 1663285 - DNA, 15 bp, Homo sapiens
gttctggaaaccttg

SEQ ID NO: 1663286 - DNA, 15 bp, Homo sapiens
ttctggaaaccttgg

SEQ ID NO: 1663287 - DNA, 15 bp, Homo sapiens
tctggaaaccttggc

SEQ ID NO: 1663288 - DNA, 15 bp, Homo sapiens
ctggaaaccttggcc

SEQ ID NO: 1663289 - DNA, 15 bp, Homo sapiens
tggaaaccttggcca

SEQ ID NO: 1663290 - DNA, 15 bp, Homo sapiens
ggaaaccttggccag

SEQ ID NO: 1663291 - DNA, 15 bp, Homo sapiens
gaaaccttggccagg

SEQ ID NO: 1663292 - DNA, 15 bp, Homo sapiens
aaaccttggccaggc

SEQ ID NO: 1663293 - DNA, 15 bp, Homo sapiens
aaccttggccaggcc

SEQ ID NO: 1663294 - DNA, 15 bp, Homo sapiens
accttggccaggcct

SEQ ID NO: 1663295 - DNA, 15 bp, Homo sapiens
ccttggccaggcctt

SEQ ID NO: 1663296 - DNA, 15 bp, Homo sapiens
cttggccaggccttg

SEQ ID NO: 1663297 - DNA, 15 bp, Homo sapiens
ttggccaggccttgg

SEQ ID NO: 1663298 - DNA, 15 bp, Homo sapiens
tggccaggccttggc

SEQ ID NO: 1663299 - DNA, 15 bp, Homo sapiens
ggccaggccttggca

SEQ ID NO: 1663300 - DNA, 15 bp, Homo sapiens
gccaggccttggcac

SEQ ID NO: 1663301 - DNA, 15 bp, Homo sapiens
ccaggccttggcacc

SEQ ID NO: 1663302 - DNA, 15 bp, Homo sapiens
caggccttggcaccc

SEQ ID NO: 1663303 - DNA, 15 bp, Homo sapiens
aggccttggcacccg

SEQ ID NO: 1663304 - DNA, 15 bp, Homo sapiens
ggccttggcacccga

SEQ ID NO: 1663305 - DNA, 15 bp, Homo sapiens
gccttggcacccgag

SEQ ID NO: 1663306 - DNA, 15 bp, Homo sapiens
ccttggcacccgagg

SEQ ID NO: 1663307 - DNA, 15 bp, Homo sapiens
cttggcacccgagga

SEQ ID NO: 1663308 - DNA, 15 bp, Homo sapiens
ttggcacccgaggaa

SEQ ID NO: 1663309 - DNA, 15 bp, Homo sapiens
tggcacccgaggaat

SEQ ID NO: 1663310 - DNA, 15 bp, Homo sapiens
ggcacccgaggaatg

SEQ ID NO: 1663311 - DNA, 15 bp, Homo sapiens
gcacccgaggaatgt

SEQ ID NO: 1663312 - DNA, 15 bp, Homo sapiens
cacccgaggaatgtg

SEQ ID NO: 1663313 - DNA, 15 bp, Homo sapiens
acccgaggaatgtgc

SEQ ID NO: 1663314 - DNA, 15 bp, Homo sapiens
cccgaggaatgtgct

SEQ ID NO: 1663315 - DNA, 15 bp, Homo sapiens
ccgaggaatgtgctt

SEQ ID NO: 1663316 - DNA, 15 bp, Homo sapiens
cgaggaatgtgcttt

SEQ ID NO: 1663317 - DNA, 15 bp, Homo sapiens
gaggaatgtgctttt

SEQ ID NO: 1663318 - DNA, 15 bp, Homo sapiens
aggaatgtgcttttc

SEQ ID NO: 1663319 - DNA, 15 bp, Homo sapiens
ggaatgtgcttttca

SEQ ID NO: 1663320 - DNA, 15 bp, Homo sapiens
gaatgtgcttttcag

SEQ ID NO: 1663321 - DNA, 15 bp, Homo sapiens
aatgtgcttttcaga

SEQ ID NO: 1663322 - DNA, 15 bp, Homo sapiens
atgtgcttttcagag

SEQ ID NO: 1663323 - DNA, 15 bp, Homo sapiens
tgtgcttttcagagt

SEQ ID NO: 1663324 - DNA, 15 bp, Homo sapiens
gtgcttttcagagtt

SEQ ID NO: 1663325 - DNA, 15 bp, Homo sapiens
tgcttttcagagttt

SEQ ID NO: 1663326 - DNA, 15 bp, Homo sapiens
gcttttcagagtttt

SEQ ID NO: 1663327 - DNA, 15 bp, Homo sapiens
cttttcagagttttt

SEQ ID NO: 1663328 - DNA, 15 bp, Homo sapiens
ttttcagagtttttg

SEQ ID NO: 1663329 - DNA, 15 bp, Homo sapiens
tttcagagtttttgt

SEQ ID NO: 1663330 - DNA, 15 bp, Homo sapiens
ttcagagtttttgtg

SEQ ID NO: 1663331 - DNA, 15 bp, Homo sapiens
tcagagtttttgtgg

SEQ ID NO: 1663332 - DNA, 15 bp, Homo sapiens
cagagtttttgtggc

SEQ ID NO: 1663333 - DNA, 15 bp, Homo sapiens
agagtttttgtggct

SEQ ID NO: 1663334 - DNA, 15 bp, Homo sapiens
gagtttttgtggctc

SEQ ID NO: 1663335 - DNA, 15 bp, Homo sapiens
agtttttgtggctct

SEQ ID NO: 1663336 - DNA, 15 bp, Homo sapiens
gtttttgtggctctt

SEQ ID NO: 1663337 - DNA, 15 bp, Homo sapiens
tttttgtggctcttt

SEQ ID NO: 1663338 - DNA, 15 bp, Homo sapiens
ttttgtggctctttt

SEQ ID NO: 1663339 - DNA, 15 bp, Homo sapiens
tttgtggctcttttc

SEQ ID NO: 1663340 - DNA, 15 bp, Homo sapiens
ttgtggctcttttcc

SEQ ID NO: 1663341 - DNA, 15 bp, Homo sapiens
tgtggctcttttcca

SEQ ID NO: 1663342 - DNA, 15 bp, Homo sapiens
gtggctcttttccag

SEQ ID NO: 1663343 - DNA, 15 bp, Homo sapiens
tggctcttttccaga

SEQ ID NO: 1663344 - DNA, 15 bp, Homo sapiens
ggctcttttccagac

SEQ ID NO: 1663345 - DNA, 15 bp, Homo sapiens
gctcttttccagacc

SEQ ID NO: 1663346 - DNA, 15 bp, Homo sapiens
ctcttttccagacct

SEQ ID NO: 1663347 - DNA, 15 bp, Homo sapiens
tcttttccagacctg

SEQ ID NO: 1663348 - DNA, 15 bp, Homo sapiens
cttttccagacctgc

SEQ ID NO: 1663349 - DNA, 15 bp, Homo sapiens
ttttccagacctgcc

SEQ ID NO: 1663350 - DNA, 15 bp, Homo sapiens
tttccagacctgccc

SEQ ID NO: 1663351 - DNA, 15 bp, Homo sapiens
ttccagacctgccct

SEQ ID NO: 1663352 - DNA, 15 bp, Homo sapiens
tccagacctgccctg

SEQ ID NO: 1663353 - DNA, 15 bp, Homo sapiens
ccagacctgccctga

SEQ ID NO: 1663354 - DNA, 15 bp, Homo sapiens
cagacctgccctgac

SEQ ID NO: 1663355 - DNA, 15 bp, Homo sapiens
agacctgccctgacc

SEQ ID NO: 1663356 - DNA, 15 bp, Homo sapiens
gacctgccctgacct

SEQ ID NO: 1663357 - DNA, 15 bp, Homo sapiens
acctgccctgacctc

SEQ ID NO: 1663358 - DNA, 15 bp, Homo sapiens
cctgccctgacctct

SEQ ID NO: 1663359 - DNA, 15 bp, Homo sapiens
ctgccctgacctcta

SEQ ID NO: 1663360 - DNA, 15 bp, Homo sapiens
tgccctgacctctag

SEQ ID NO: 1663361 - DNA, 15 bp, Homo sapiens
gccctgacctctagc

SEQ ID NO: 1663362 - DNA, 15 bp, Homo sapiens
ccctgacctctagct

SEQ ID NO: 1663363 - DNA, 15 bp, Homo sapiens
cctgacctctagctc

SEQ ID NO: 1663364 - DNA, 15 bp, Homo sapiens
ctgacctctagctct

SEQ ID NO: 1663365 - DNA, 15 bp, Homo sapiens
tgacctctagctctg

SEQ ID NO: 1663366 - DNA, 15 bp, Homo sapiens
gacctctagctctgg

SEQ ID NO: 1663367 - DNA, 15 bp, Homo sapiens
acctctagctctggg

SEQ ID NO: 1663368 - DNA, 15 bp, Homo sapiens
cctctagctctggga

SEQ ID NO: 1663369 - DNA, 15 bp, Homo sapiens
ctctagctctgggaa

SEQ ID NO: 1663370 - DNA, 15 bp, Homo sapiens
tctagctctgggaac

SEQ ID NO: 1663371 - DNA, 15 bp, Homo sapiens
ctagctctgggaact

SEQ ID NO: 1663372 - DNA, 15 bp, Homo sapiens
tagctctgggaacta

SEQ ID NO: 1663373 - DNA, 15 bp, Homo sapiens
agctctgggaactat

SEQ ID NO: 1663374 - DNA, 15 bp, Homo sapiens
gctctgggaactatg

SEQ ID NO: 1663375 - DNA, 15 bp, Homo sapiens
ctctgggaactatgt

SEQ ID NO: 1663376 - DNA, 15 bp, Homo sapiens
tctgggaactatgta

SEQ ID NO: 1663377 - DNA, 15 bp, Homo sapiens
ctgggaactatgtaa

SEQ ID NO: 1663378 - DNA, 15 bp, Homo sapiens
tgggaactatgtaag

SEQ ID NO: 1663379 - DNA, 15 bp, Homo sapiens
gggaactatgtaagc

SEQ ID NO: 1663380 - DNA, 15 bp, Homo sapiens
ggaactatgtaagcc

SEQ ID NO: 1663381 - DNA, 15 bp, Homo sapiens
gaactatgtaagcca

SEQ ID NO: 1663382 - DNA, 15 bp, Homo sapiens
aactatgtaagccaa

SEQ ID NO: 1663383 - DNA, 15 bp, Homo sapiens
actatgtaagccaag

SEQ ID NO: 1663384 - DNA, 15 bp, Homo sapiens
ctatgtaagccaagt

SEQ ID NO: 1663385 - DNA, 15 bp, Homo sapiens
tatgtaagccaagtg

SEQ ID NO: 1663386 - DNA, 15 bp, Homo sapiens
atgtaagccaagtgc

SEQ ID NO: 1663387 - DNA, 15 bp, Homo sapiens
tgtaagccaagtgcc

SEQ ID NO: 1663388 - DNA, 15 bp, Homo sapiens
gtaagccaagtgcct

SEQ ID NO: 1663389 - DNA, 15 bp, Homo sapiens
taagccaagtgcctt

SEQ ID NO: 1663390 - DNA, 15 bp, Homo sapiens
aagccaagtgccttc

SEQ ID NO: 1663391 - DNA, 15 bp, Homo sapiens
agccaagtgccttcc

SEQ ID NO: 1663392 - DNA, 15 bp, Homo sapiens
gccaagtgccttccg

SEQ ID NO: 1663393 - DNA, 15 bp, Homo sapiens
ccaagtgccttccgg

SEQ ID NO: 1663394 - DNA, 15 bp, Homo sapiens
caagtgccttccggg

SEQ ID NO: 1663395 - DNA, 15 bp, Homo sapiens
aagtgccttccggga

SEQ ID NO: 1663396 - DNA, 15 bp, Homo sapiens
agtgccttccgggaa

SEQ ID NO: 1663397 - DNA, 15 bp, Homo sapiens
gtgccttccgggaag

SEQ ID NO: 1663398 - DNA, 15 bp, Homo sapiens
tgccttccgggaagg

SEQ ID NO: 1663399 - DNA, 15 bp, Homo sapiens
gccttccgggaaggg

SEQ ID NO: 1663400 - DNA, 15 bp, Homo sapiens
ccttccgggaaggga

SEQ ID NO: 1663401 - DNA, 15 bp, Homo sapiens
cttccgggaagggag

SEQ ID NO: 1663402 - DNA, 15 bp, Homo sapiens
ttccgggaagggagt

SEQ ID NO: 1663403 - DNA, 15 bp, Homo sapiens
tccgggaagggagtc

SEQ ID NO: 1663404 - DNA, 15 bp, Homo sapiens
ccgggaagggagtcc

SEQ ID NO: 1663405 - DNA, 15 bp, Homo sapiens
cgggaagggagtccc

SEQ ID NO: 1663406 - DNA, 15 bp, Homo sapiens
gggaagggagtccct

SEQ ID NO: 1663407 - DNA, 15 bp, Homo sapiens
ggaagggagtccctc

SEQ ID NO: 1663408 - DNA, 15 bp, Homo sapiens
gaagggagtccctct

SEQ ID NO: 1663409 - DNA, 15 bp, Homo sapiens
aagggagtccctctc

SEQ ID NO: 1663410 - DNA, 15 bp, Homo sapiens
agggagtccctctcc

SEQ ID NO: 1663411 - DNA, 15 bp, Homo sapiens
gggagtccctctcct

SEQ ID NO: 1663412 - DNA, 15 bp, Homo sapiens
ggagtccctctcctg

SEQ ID NO: 1663413 - DNA, 15 bp, Homo sapiens
gagtccctctcctgg

SEQ ID NO: 1663414 - DNA, 15 bp, Homo sapiens
agtccctctcctggt

SEQ ID NO: 1663415 - DNA, 15 bp, Homo sapiens
gtccctctcctggta

SEQ ID NO: 1663416 - DNA, 15 bp, Homo sapiens
tccctctcctggtaa

SEQ ID NO: 1663417 - DNA, 15 bp, Homo sapiens
ccctctcctggtaac

SEQ ID NO: 1663418 - DNA, 15 bp, Homo sapiens
cctctcctggtaact

SEQ ID NO: 1663419 - DNA, 15 bp, Homo sapiens
ctctcctggtaactc

SEQ ID NO: 1663420 - DNA, 15 bp, Homo sapiens
tctcctggtaactct

SEQ ID NO: 1663421 - DNA, 15 bp, Homo sapiens
ctcctggtaactctt

SEQ ID NO: 1663422 - DNA, 15 bp, Homo sapiens
tcctggtaactcttt

SEQ ID NO: 1663423 - DNA, 15 bp, Homo sapiens
cctggtaactctttc

SEQ ID NO: 1663424 - DNA, 15 bp, Homo sapiens
ctggtaactctttct

SEQ ID NO: 1663425 - DNA, 15 bp, Homo sapiens
tggtaactctttctg

SEQ ID NO: 1663426 - DNA, 15 bp, Homo sapiens
ggtaactctttctgg

SEQ ID NO: 1663427 - DNA, 15 bp, Homo sapiens
gtaactctttctggg

SEQ ID NO: 1663428 - DNA, 15 bp, Homo sapiens
taactctttctgggt

SEQ ID NO: 1663429 - DNA, 15 bp, Homo sapiens
aactctttctgggta

SEQ ID NO: 1663430 - DNA, 15 bp, Homo sapiens
actctttctgggtaa

SEQ ID NO: 1663431 - DNA, 15 bp, Homo sapiens
ctctttctgggtaac

SEQ ID NO: 1663432 - DNA, 15 bp, Homo sapiens
tctttctgggtaacc

SEQ ID NO: 1663433 - DNA, 15 bp, Homo sapiens
ctttctgggtaacca

SEQ ID NO: 1663434 - DNA, 15 bp, Homo sapiens
tttctgggtaaccag

SEQ ID NO: 1663435 - DNA, 15 bp, Homo sapiens
ttctgggtaaccaga

SEQ ID NO: 1663436 - DNA, 15 bp, Homo sapiens
tctgggtaaccagat

SEQ ID NO: 1663437 - DNA, 15 bp, Homo sapiens
ctgggtaaccagatg

SEQ ID NO: 1663438 - DNA, 15 bp, Homo sapiens
tgggtaaccagatgt

SEQ ID NO: 1663439 - DNA, 15 bp, Homo sapiens
gggtaaccagatgtg

SEQ ID NO: 1663440 - DNA, 15 bp, Homo sapiens
ggtaaccagatgtgg

SEQ ID NO: 1663441 - DNA, 15 bp, Homo sapiens
gtaaccagatgtgga

SEQ ID NO: 1663442 - DNA, 15 bp, Homo sapiens
taaccagatgtggac

SEQ ID NO: 1663443 - DNA, 15 bp, Homo sapiens
aaccagatgtggact

SEQ ID NO: 1663444 - DNA, 15 bp, Homo sapiens
accagatgtggactc

SEQ ID NO: 1663445 - DNA, 15 bp, Homo sapiens
ccagatgtggactca

SEQ ID NO: 1663446 - DNA, 15 bp, Homo sapiens
cagatgtggactcat

SEQ ID NO: 1663447 - DNA, 15 bp, Homo sapiens
agatgtggactcatg

SEQ ID NO: 1663448 - DNA, 15 bp, Homo sapiens
gatgtggactcatga

SEQ ID NO: 1663449 - DNA, 15 bp, Homo sapiens
atgtggactcatgac

SEQ ID NO: 1663450 - DNA, 15 bp, Homo sapiens
tgtggactcatgaca

SEQ ID NO: 1663451 - DNA, 15 bp, Homo sapiens
gtggactcatgacac

SEQ ID NO: 1663452 - DNA, 15 bp, Homo sapiens
tggactcatgacaca

SEQ ID NO: 1663453 - DNA, 15 bp, Homo sapiens
ggactcatgacacac

SEQ ID NO: 1663454 - DNA, 15 bp, Homo sapiens
gactcatgacacaca

SEQ ID NO: 1663455 - DNA, 15 bp, Homo sapiens
actcatgacacacac

SEQ ID NO: 1663456 - DNA, 15 bp, Homo sapiens
ctcatgacacacact

SEQ ID NO: 1663457 - DNA, 15 bp, Homo sapiens
tcatgacacacactg

SEQ ID NO: 1663458 - DNA, 15 bp, Homo sapiens
catgacacacactga

SEQ ID NO: 1663459 - DNA, 15 bp, Homo sapiens
atgacacacactgag

SEQ ID NO: 1663460 - DNA, 15 bp, Homo sapiens
tgacacacactgagc

SEQ ID NO: 1663461 - DNA, 15 bp, Homo sapiens
gacacacactgagcc

SEQ ID NO: 1663462 - DNA, 15 bp, Homo sapiens
acacacactgagcct

SEQ ID NO: 1663463 - DNA, 15 bp, Homo sapiens
cacacactgagccta

SEQ ID NO: 1663464 - DNA, 15 bp, Homo sapiens
acacactgagcctac

SEQ ID NO: 1663465 - DNA, 15 bp, Homo sapiens
cacactgagcctacg

SEQ ID NO: 1663466 - DNA, 15 bp, Homo sapiens
acactgagcctacgt

SEQ ID NO: 1663467 - DNA, 15 bp, Homo sapiens
cactgagcctacgtc

SEQ ID NO: 1663468 - DNA, 15 bp, Homo sapiens
actgagcctacgtct

SEQ ID NO: 1663469 - DNA, 15 bp, Homo sapiens
ctgagcctacgtctt

SEQ ID NO: 1663470 - DNA, 15 bp, Homo sapiens
tgagcctacgtctta

SEQ ID NO: 1663471 - DNA, 15 bp, Homo sapiens
gagcctacgtcttat

SEQ ID NO: 1663472 - DNA, 15 bp, Homo sapiens
agcctacgtcttata

SEQ ID NO: 1663473 - DNA, 15 bp, Homo sapiens
gcctacgtcttataa

SEQ ID NO: 1663474 - DNA, 15 bp, Homo sapiens
cctacgtcttataat

SEQ ID NO: 1663475 - DNA, 15 bp, Homo sapiens
ctacgtcttataatt

SEQ ID NO: 1663476 - DNA, 15 bp, Homo sapiens
tacgtcttataattt

SEQ ID NO: 1663477 - DNA, 15 bp, Homo sapiens
acgtcttataatttt

SEQ ID NO: 1663478 - DNA, 15 bp, Homo sapiens
cgtcttataattttt

SEQ ID NO: 1663479 - DNA, 15 bp, Homo sapiens
gtcttataatttttt

SEQ ID NO: 1663480 - DNA, 15 bp, Homo sapiens
tcttataattttttg

SEQ ID NO: 1663481 - DNA, 15 bp, Homo sapiens
cttataattttttgt

SEQ ID NO: 1663482 - DNA, 15 bp, Homo sapiens
ttataattttttgtt

SEQ ID NO: 1663483 - DNA, 15 bp, Homo sapiens
tataattttttgttt

SEQ ID NO: 1663484 - DNA, 15 bp, Homo sapiens
ataattttttgtttt

SEQ ID NO: 1663485 - DNA, 15 bp, Homo sapiens
taattttttgttttt

SEQ ID NO: 1663486 - DNA, 15 bp, Homo sapiens
aattttttgtttttg

SEQ ID NO: 1663487 - DNA, 15 bp, Homo sapiens
attttttgtttttgt

SEQ ID NO: 1663488 - DNA, 15 bp, Homo sapiens
tgtttttgtttttga

SEQ ID NO: 1663489 - DNA, 15 bp, Homo sapiens
gtttttgtttttgag

SEQ ID NO: 1663490 - DNA, 15 bp, Homo sapiens
tgtttttgagacagt

SEQ ID NO: 1663491 - DNA, 15 bp, Homo sapiens
gtttttgagacagtt

SEQ ID NO: 1663492 - DNA, 15 bp, Homo sapiens
tttgagacagtttcg

SEQ ID NO: 1663493 - DNA, 15 bp, Homo sapiens
ttgagacagtttcgg

SEQ ID NO: 1663494 - DNA, 15 bp, Homo sapiens
tgagacagtttcggt

SEQ ID NO: 1663495 - DNA, 15 bp, Homo sapiens
gagacagtttcggtc

SEQ ID NO: 1663496 - DNA, 15 bp, Homo sapiens
agacagtttcggtct

SEQ ID NO: 1663497 - DNA, 15 bp, Homo sapiens
gacagtttcggtctt

SEQ ID NO: 1663498 - DNA, 15 bp, Homo sapiens
acagtttcggtcttc

SEQ ID NO: 1663499 - DNA, 15 bp, Homo sapiens
cagtttcggtcttct

SEQ ID NO: 1663500 - DNA, 15 bp, Homo sapiens
agtttcggtcttctt

SEQ ID NO: 1663501 - DNA, 15 bp, Homo sapiens
gtttcggtcttcttg

SEQ ID NO: 1663502 - DNA, 15 bp, Homo sapiens
tttcggtcttcttgc

SEQ ID NO: 1663503 - DNA, 15 bp, Homo sapiens
ttcggtcttcttgcc

SEQ ID NO: 1663504 - DNA, 15 bp, Homo sapiens
tcggtcttcttgccc

SEQ ID NO: 1663505 - DNA, 15 bp, Homo sapiens
cggtcttcttgccca

SEQ ID NO: 1663506 - DNA, 15 bp, Homo sapiens
ggtcttcttgcccag

SEQ ID NO: 1663507 - DNA, 15 bp, Homo sapiens
gtcttcttgcccagg

SEQ ID NO: 1663508 - DNA, 15 bp, Homo sapiens
tcttcttgcccaggc

SEQ ID NO: 1663509 - DNA, 15 bp, Homo sapiens
cttcttgcccaggct

SEQ ID NO: 1663510 - DNA, 15 bp, Homo sapiens
ttcttgcccaggctg

SEQ ID NO: 1663511 - DNA, 15 bp, Homo sapiens
gagtgcaatggtgcg

SEQ ID NO: 1663512 - DNA, 15 bp, Homo sapiens
agtgcaatggtgcga

SEQ ID NO: 1663513 - DNA, 15 bp, Homo sapiens
gtgcaatggtgcgat

SEQ ID NO: 1663514 - DNA, 15 bp, Homo sapiens
tgcaatggtgcgatc

SEQ ID NO: 1663515 - DNA, 15 bp, Homo sapiens
gcaatggtgcgatct

SEQ ID NO: 1663516 - DNA, 15 bp, Homo sapiens
caatggtgcgatctc

SEQ ID NO: 1663517 - DNA, 15 bp, Homo sapiens
aatggtgcgatctcg

SEQ ID NO: 1663518 - DNA, 15 bp, Homo sapiens
tgcctcagcctccct

SEQ ID NO: 1663519 - DNA, 15 bp, Homo sapiens
gcctcagcctcccta

SEQ ID NO: 1663520 - DNA, 15 bp, Homo sapiens
cctcagcctccctag

SEQ ID NO: 1663521 - DNA, 15 bp, Homo sapiens
ctcagcctccctagt

SEQ ID NO: 1663522 - DNA, 15 bp, Homo sapiens
tcagcctccctagta

SEQ ID NO: 1663523 - DNA, 15 bp, Homo sapiens
cagcctccctagtag

SEQ ID NO: 1663524 - DNA, 15 bp, Homo sapiens
agcctccctagtagc

SEQ ID NO: 1663525 - DNA, 15 bp, Homo sapiens
gcctccctagtagct

SEQ ID NO: 1663526 - DNA, 15 bp, Homo sapiens
cctccctagtagctg

SEQ ID NO: 1663527 - DNA, 15 bp, Homo sapiens
ctccctagtagctgg

SEQ ID NO: 1663528 - DNA, 15 bp, Homo sapiens
tccctagtagctgga

SEQ ID NO: 1663529 - DNA, 15 bp, Homo sapiens
ccctagtagctggaa

SEQ ID NO: 1663530 - DNA, 15 bp, Homo sapiens
cctagtagctggaat

SEQ ID NO: 1663531 - DNA, 15 bp, Homo sapiens
ctagtagctggaatt

SEQ ID NO: 1663532 - DNA, 15 bp, Homo sapiens
tagtagctggaattg

SEQ ID NO: 1663533 - DNA, 15 bp, Homo sapiens
agtagctggaattgc

SEQ ID NO: 1663534 - DNA, 15 bp, Homo sapiens
gtagctggaattgca

SEQ ID NO: 1663535 - DNA, 15 bp, Homo sapiens
tagctggaattgcag

SEQ ID NO: 1663536 - DNA, 15 bp, Homo sapiens
agctggaattgcagg

SEQ ID NO: 1663537 - DNA, 15 bp, Homo sapiens
gctggaattgcaggc

SEQ ID NO: 1663538 - DNA, 15 bp, Homo sapiens
ctggaattgcaggca

SEQ ID NO: 1663539 - DNA, 15 bp, Homo sapiens
tggaattgcaggcat

SEQ ID NO: 1663540 - DNA, 15 bp, Homo sapiens
ggaattgcaggcatg

SEQ ID NO: 1663541 - DNA, 15 bp, Homo sapiens
gaattgcaggcatgc

SEQ ID NO: 1663542 - DNA, 15 bp, Homo sapiens
aattgcaggcatgcg

SEQ ID NO: 1663543 - DNA, 15 bp, Homo sapiens
attgcaggcatgcgc

SEQ ID NO: 1663544 - DNA, 15 bp, Homo sapiens
ttgcaggcatgcgcc

SEQ ID NO: 1663545 - DNA, 15 bp, Homo sapiens
tgcaggcatgcgcca

SEQ ID NO: 1663546 - DNA, 15 bp, Homo sapiens
gcaggcatgcgccac

SEQ ID NO: 1663547 - DNA, 15 bp, Homo sapiens
tgcgccaccacgcct

SEQ ID NO: 1663548 - DNA, 15 bp, Homo sapiens
gcgccaccacgcctg

SEQ ID NO: 1663549 - DNA, 15 bp, Homo sapiens
tttttgtattttttt

SEQ ID NO: 1663550 - DNA, 15 bp, Homo sapiens
ttttgtatttttttt

SEQ ID NO: 1663551 - DNA, 15 bp, Homo sapiens
tttgtattttttttt

SEQ ID NO: 1663552 - DNA, 15 bp, Homo sapiens
ttgtatttttttttt

SEQ ID NO: 1663553 - DNA, 15 bp, Homo sapiens
gtatttttttttttt

SEQ ID NO: 1663554 - DNA, 15 bp, Homo sapiens
ttttttttttttagt

SEQ ID NO: 1663555 - DNA, 15 bp, Homo sapiens
tttttttttttagta

SEQ ID NO: 1663556 - DNA, 15 bp, Homo sapiens
ttttttttagtagaa

SEQ ID NO: 1663557 - DNA, 15 bp, Homo sapiens
tttttttagtagaaa

SEQ ID NO: 1663558 - DNA, 15 bp, Homo sapiens
ttttttagtagaaac

SEQ ID NO: 1663559 - DNA, 15 bp, Homo sapiens
agaaacggggtttca

SEQ ID NO: 1663560 - DNA, 15 bp, Homo sapiens
gaaacggggtttcac

SEQ ID NO: 1663561 - DNA, 15 bp, Homo sapiens
aaacggggtttcacc

SEQ ID NO: 1663562 - DNA, 15 bp, Homo sapiens
aacggggtttcacct

SEQ ID NO: 1663563 - DNA, 15 bp, Homo sapiens
acggggtttcacctt

SEQ ID NO: 1663564 - DNA, 15 bp, Homo sapiens
cggggtttcaccttg

SEQ ID NO: 1663565 - DNA, 15 bp, Homo sapiens
ccttgttagccaggc

SEQ ID NO: 1663566 - DNA, 15 bp, Homo sapiens
cttgttagccaggct

SEQ ID NO: 1663567 - DNA, 15 bp, Homo sapiens
ttgttagccaggctg

SEQ ID NO: 1663568 - DNA, 15 bp, Homo sapiens
tagccaggctggtca

SEQ ID NO: 1663569 - DNA, 15 bp, Homo sapiens
agccaggctggtcac

SEQ ID NO: 1663570 - DNA, 15 bp, Homo sapiens
gccaggctggtcacc

SEQ ID NO: 1663571 - DNA, 15 bp, Homo sapiens
ccaggctggtcacca

SEQ ID NO: 1663572 - DNA, 15 bp, Homo sapiens
caggctggtcaccaa

SEQ ID NO: 1663573 - DNA, 15 bp, Homo sapiens
aggctggtcaccaac

SEQ ID NO: 1663574 - DNA, 15 bp, Homo sapiens
ggctggtcaccaact

SEQ ID NO: 1663575 - DNA, 15 bp, Homo sapiens
gctggtcaccaactc

SEQ ID NO: 1663576 - DNA, 15 bp, Homo sapiens
ctggtcaccaactcc

SEQ ID NO: 1663577 - DNA, 15 bp, Homo sapiens
tggtcaccaactcct

SEQ ID NO: 1663578 - DNA, 15 bp, Homo sapiens
ggtcaccaactcctg

SEQ ID NO: 1663579 - DNA, 15 bp, Homo sapiens
gtcaccaactcctga

SEQ ID NO: 1663580 - DNA, 15 bp, Homo sapiens
tcaccaactcctgac

SEQ ID NO: 1663581 - DNA, 15 bp, Homo sapiens
caccaactcctgacc

SEQ ID NO: 1663582 - DNA, 15 bp, Homo sapiens
accaactcctgacct

SEQ ID NO: 1663583 - DNA, 15 bp, Homo sapiens
gatccgcccacctct

SEQ ID NO: 1663584 - DNA, 15 bp, Homo sapiens
atccgcccacctctg

SEQ ID NO: 1663585 - DNA, 15 bp, Homo sapiens
tccgcccacctctgc

SEQ ID NO: 1663586 - DNA, 15 bp, Homo sapiens
cgcccacctctgcct

SEQ ID NO: 1663587 - DNA, 15 bp, Homo sapiens
gcccacctctgcctc

SEQ ID NO: 1663588 - DNA, 15 bp, Homo sapiens
attacaggtgtgaga

SEQ ID NO: 1663589 - DNA, 15 bp, Homo sapiens
ttacaggtgtgagac

SEQ ID NO: 1663590 - DNA, 15 bp, Homo sapiens
tacaggtgtgagaca

SEQ ID NO: 1663591 - DNA, 15 bp, Homo sapiens
acaggtgtgagacag

SEQ ID NO: 1663592 - DNA, 15 bp, Homo sapiens
caggtgtgagacagc

SEQ ID NO: 1663593 - DNA, 15 bp, Homo sapiens
aggtgtgagacagct

SEQ ID NO: 1663594 - DNA, 15 bp, Homo sapiens
ggtgtgagacagctg

SEQ ID NO: 1663595 - DNA, 15 bp, Homo sapiens
gtgtgagacagctgt

SEQ ID NO: 1663596 - DNA, 15 bp, Homo sapiens
tgtgagacagctgtg

SEQ ID NO: 1663597 - DNA, 15 bp, Homo sapiens
gtgagacagctgtga

SEQ ID NO: 1663598 - DNA, 15 bp, Homo sapiens
tgagacagctgtgag

SEQ ID NO: 1663599 - DNA, 15 bp, Homo sapiens
gagacagctgtgagc

SEQ ID NO: 1663600 - DNA, 15 bp, Homo sapiens
agacagctgtgagcc

SEQ ID NO: 1663601 - DNA, 15 bp, Homo sapiens
gacagctgtgagcca

SEQ ID NO: 1663602 - DNA, 15 bp, Homo sapiens
acagctgtgagccac

SEQ ID NO: 1663603 - DNA, 15 bp, Homo sapiens
cagctgtgagccacc

SEQ ID NO: 1663604 - DNA, 15 bp, Homo sapiens
agctgtgagccacca

SEQ ID NO: 1663605 - DNA, 15 bp, Homo sapiens
gctgtgagccaccac

SEQ ID NO: 1663606 - DNA, 15 bp, Homo sapiens
ctgtgagccaccacg

SEQ ID NO: 1663607 - DNA, 15 bp, Homo sapiens
gagccaccacgcccg

SEQ ID NO: 1663608 - DNA, 15 bp, Homo sapiens
agccaccacgcccgg

SEQ ID NO: 1663609 - DNA, 15 bp, Homo sapiens
ccaccacgcccggcg

SEQ ID NO: 1663610 - DNA, 15 bp, Homo sapiens
caccacgcccggcgc

SEQ ID NO: 1663611 - DNA, 15 bp, Homo sapiens
accacgcccggcgca

SEQ ID NO: 1663612 - DNA, 15 bp, Homo sapiens
ccacgcccggcgcat

SEQ ID NO: 1663613 - DNA, 15 bp, Homo sapiens
cacgcccggcgcatt

SEQ ID NO: 1663614 - DNA, 15 bp, Homo sapiens
acgcccggcgcattt

SEQ ID NO: 1663615 - DNA, 15 bp, Homo sapiens
cgcccggcgcatttt

SEQ ID NO: 1663616 - DNA, 15 bp, Homo sapiens
gcccggcgcattttt

SEQ ID NO: 1663617 - DNA, 15 bp, Homo sapiens
cccggcgcatttttt

SEQ ID NO: 1663618 - DNA, 15 bp, Homo sapiens
ccggcgcattttttt

SEQ ID NO: 1663619 - DNA, 15 bp, Homo sapiens
cggcgcatttttttt

SEQ ID NO: 1663620 - DNA, 15 bp, Homo sapiens
ggcgcattttttttt

SEQ ID NO: 1663621 - DNA, 15 bp, Homo sapiens
gcgcatttttttttt

SEQ ID NO: 1663622 - DNA, 15 bp, Homo sapiens
cgcattttttttttc

SEQ ID NO: 1663623 - DNA, 15 bp, Homo sapiens
gcattttttttttct

SEQ ID NO: 1663624 - DNA, 15 bp, Homo sapiens
cattttttttttctt

SEQ ID NO: 1663625 - DNA, 15 bp, Homo sapiens
ttttcttttttttca

SEQ ID NO: 1663626 - DNA, 15 bp, Homo sapiens
tttcttttttttcag

SEQ ID NO: 1663627 - DNA, 15 bp, Homo sapiens
ttcttttttttcaga

SEQ ID NO: 1663628 - DNA, 15 bp, Homo sapiens
tcttttttttcagag

SEQ ID NO: 1663629 - DNA, 15 bp, Homo sapiens
cttttttttcagagg

SEQ ID NO: 1663630 - DNA, 15 bp, Homo sapiens
ttttttttcagaggg

SEQ ID NO: 1663631 - DNA, 15 bp, Homo sapiens
tttttttcagaggga

SEQ ID NO: 1663632 - DNA, 15 bp, Homo sapiens
ttttttcagagggag

SEQ ID NO: 1663633 - DNA, 15 bp, Homo sapiens
tttttcagagggagt

SEQ ID NO: 1663634 - DNA, 15 bp, Homo sapiens
ttttcagagggagtg

SEQ ID NO: 1663635 - DNA, 15 bp, Homo sapiens
tttcagagggagtgt

SEQ ID NO: 1663636 - DNA, 15 bp, Homo sapiens
ttcagagggagtgtc

SEQ ID NO: 1663637 - DNA, 15 bp, Homo sapiens
tcagagggagtgtcc

SEQ ID NO: 1663638 - DNA, 15 bp, Homo sapiens
cagagggagtgtccc

SEQ ID NO: 1663639 - DNA, 15 bp, Homo sapiens
agagggagtgtccct

SEQ ID NO: 1663640 - DNA, 15 bp, Homo sapiens
gagggagtgtccctc

SEQ ID NO: 1663641 - DNA, 15 bp, Homo sapiens
agggagtgtccctct

SEQ ID NO: 1663642 - DNA, 15 bp, Homo sapiens
gggagtgtccctctg

SEQ ID NO: 1663643 - DNA, 15 bp, Homo sapiens
ggagtgtccctctgt

SEQ ID NO: 1663644 - DNA, 15 bp, Homo sapiens
gagtgtccctctgtc

SEQ ID NO: 1663645 - DNA, 15 bp, Homo sapiens
agtgtccctctgtca

SEQ ID NO: 1663646 - DNA, 15 bp, Homo sapiens
gtgtccctctgtcac

SEQ ID NO: 1663647 - DNA, 15 bp, Homo sapiens
tgtccctctgtcacc

SEQ ID NO: 1663648 - DNA, 15 bp, Homo sapiens
gtccctctgtcaccc

SEQ ID NO: 1663649 - DNA, 15 bp, Homo sapiens
caggctgaagtgtag

SEQ ID NO: 1663650 - DNA, 15 bp, Homo sapiens
aggctgaagtgtagt

SEQ ID NO: 1663651 - DNA, 15 bp, Homo sapiens
ggctgaagtgtagtg

SEQ ID NO: 1663652 - DNA, 15 bp, Homo sapiens
gctgaagtgtagtgg

SEQ ID NO: 1663653 - DNA, 15 bp, Homo sapiens
ctgaagtgtagtggc

SEQ ID NO: 1663654 - DNA, 15 bp, Homo sapiens
tgaagtgtagtggcg

SEQ ID NO: 1663655 - DNA, 15 bp, Homo sapiens
gaagtgtagtggcgt

SEQ ID NO: 1663656 - DNA, 15 bp, Homo sapiens
aagtgtagtggcgtg

SEQ ID NO: 1663657 - DNA, 15 bp, Homo sapiens
agtgtagtggcgtga

SEQ ID NO: 1663658 - DNA, 15 bp, Homo sapiens
gtgtagtggcgtgat

SEQ ID NO: 1663659 - DNA, 15 bp, Homo sapiens
tgtagtggcgtgatc

SEQ ID NO: 1663660 - DNA, 15 bp, Homo sapiens
gtagtggcgtgatct

SEQ ID NO: 1663661 - DNA, 15 bp, Homo sapiens
tagtggcgtgatctc

SEQ ID NO: 1663662 - DNA, 15 bp, Homo sapiens
ggcgtgatctcggcc

SEQ ID NO: 1663663 - DNA, 15 bp, Homo sapiens
gcgtgatctcggccc

SEQ ID NO: 1663664 - DNA, 15 bp, Homo sapiens
cgtgatctcggccca

SEQ ID NO: 1663665 - DNA, 15 bp, Homo sapiens
gtgatctcggcccac

SEQ ID NO: 1663666 - DNA, 15 bp, Homo sapiens
tgatctcggcccact

SEQ ID NO: 1663667 - DNA, 15 bp, Homo sapiens
gatctcggcccactg

SEQ ID NO: 1663668 - DNA, 15 bp, Homo sapiens
atctcggcccactgt

SEQ ID NO: 1663669 - DNA, 15 bp, Homo sapiens
tctcggcccactgta

SEQ ID NO: 1663670 - DNA, 15 bp, Homo sapiens
ctcggcccactgtaa

SEQ ID NO: 1663671 - DNA, 15 bp, Homo sapiens
tcggcccactgtaac

SEQ ID NO: 1663672 - DNA, 15 bp, Homo sapiens
cggcccactgtaacc

SEQ ID NO: 1663673 - DNA, 15 bp, Homo sapiens
ggcccactgtaacct

SEQ ID NO: 1663674 - DNA, 15 bp, Homo sapiens
gcccactgtaacctc

SEQ ID NO: 1663675 - DNA, 15 bp, Homo sapiens
cccactgtaacctct

SEQ ID NO: 1663676 - DNA, 15 bp, Homo sapiens
ccactgtaacctcta

SEQ ID NO: 1663677 - DNA, 15 bp, Homo sapiens
cactgtaacctctat

SEQ ID NO: 1663678 - DNA, 15 bp, Homo sapiens
actgtaacctctatc

SEQ ID NO: 1663679 - DNA, 15 bp, Homo sapiens
ctgtaacctctatct

SEQ ID NO: 1663680 - DNA, 15 bp, Homo sapiens
tgtaacctctatctc

SEQ ID NO: 1663681 - DNA, 15 bp, Homo sapiens
gtaacctctatctcc

SEQ ID NO: 1663682 - DNA, 15 bp, Homo sapiens
taacctctatctccc

SEQ ID NO: 1663683 - DNA, 15 bp, Homo sapiens
aacctctatctccca

SEQ ID NO: 1663684 - DNA, 15 bp, Homo sapiens
acctctatctcccag

SEQ ID NO: 1663685 - DNA, 15 bp, Homo sapiens
cctctatctcccagg

SEQ ID NO: 1663686 - DNA, 15 bp, Homo sapiens
ctctatctcccaggt

SEQ ID NO: 1663687 - DNA, 15 bp, Homo sapiens
tctatctcccaggtt

SEQ ID NO: 1663688 - DNA, 15 bp, Homo sapiens
ctatctcccaggttc

SEQ ID NO: 1663689 - DNA, 15 bp, Homo sapiens
tatctcccaggttca

SEQ ID NO: 1663690 - DNA, 15 bp, Homo sapiens
aagtgattctcctga

SEQ ID NO: 1663691 - DNA, 15 bp, Homo sapiens
agtgattctcctgac

SEQ ID NO: 1663692 - DNA, 15 bp, Homo sapiens
gtgattctcctgact

SEQ ID NO: 1663693 - DNA, 15 bp, Homo sapiens
tgattctcctgactc

SEQ ID NO: 1663694 - DNA, 15 bp, Homo sapiens
ctacaggcgcctgct

SEQ ID NO: 1663695 - DNA, 15 bp, Homo sapiens
tacaggcgcctgcta

SEQ ID NO: 1663696 - DNA, 15 bp, Homo sapiens
acaggcgcctgctac

SEQ ID NO: 1663697 - DNA, 15 bp, Homo sapiens
caggcgcctgctacc

SEQ ID NO: 1663698 - DNA, 15 bp, Homo sapiens
aggcgcctgctacca

SEQ ID NO: 1663699 - DNA, 15 bp, Homo sapiens
ggcgcctgctaccat

SEQ ID NO: 1663700 - DNA, 15 bp, Homo sapiens
gcgcctgctaccatg

SEQ ID NO: 1663701 - DNA, 15 bp, Homo sapiens
cgcctgctaccatgc

SEQ ID NO: 1663702 - DNA, 15 bp, Homo sapiens
gcctgctaccatgcc

SEQ ID NO: 1663703 - DNA, 15 bp, Homo sapiens
cctgctaccatgcct

SEQ ID NO: 1663704 - DNA, 15 bp, Homo sapiens
gtagttttagtagaa

SEQ ID NO: 1663705 - DNA, 15 bp, Homo sapiens
tagttttagtagaaa

SEQ ID NO: 1663706 - DNA, 15 bp, Homo sapiens
agttttagtagaaac

SEQ ID NO: 1663707 - DNA, 15 bp, Homo sapiens
gttttagtagaaacc

SEQ ID NO: 1663708 - DNA, 15 bp, Homo sapiens
ttttagtagaaaccg

SEQ ID NO: 1663709 - DNA, 15 bp, Homo sapiens
tttagtagaaaccgg

SEQ ID NO: 1663710 - DNA, 15 bp, Homo sapiens
ttagtagaaaccggg

SEQ ID NO: 1663711 - DNA, 15 bp, Homo sapiens
tagtagaaaccgggt

SEQ ID NO: 1663712 - DNA, 15 bp, Homo sapiens
agtagaaaccgggtt

SEQ ID NO: 1663713 - DNA, 15 bp, Homo sapiens
gtagaaaccgggttt

SEQ ID NO: 1663714 - DNA, 15 bp, Homo sapiens
tagaaaccgggtttt

SEQ ID NO: 1663715 - DNA, 15 bp, Homo sapiens
agaaaccgggttttg

SEQ ID NO: 1663716 - DNA, 15 bp, Homo sapiens
gaaaccgggttttgc

SEQ ID NO: 1663717 - DNA, 15 bp, Homo sapiens
aaaccgggttttgcc

SEQ ID NO: 1663718 - DNA, 15 bp, Homo sapiens
aaccgggttttgcca

SEQ ID NO: 1663719 - DNA, 15 bp, Homo sapiens
accgggttttgccat

SEQ ID NO: 1663720 - DNA, 15 bp, Homo sapiens
ccgggttttgccatg

SEQ ID NO: 1663721 - DNA, 15 bp, Homo sapiens
cgggttttgccatgt

SEQ ID NO: 1663722 - DNA, 15 bp, Homo sapiens
ctcaaactcttgact

SEQ ID NO: 1663723 - DNA, 15 bp, Homo sapiens
tcaaactcttgactt

SEQ ID NO: 1663724 - DNA, 15 bp, Homo sapiens
caaactcttgacttc

SEQ ID NO: 1663725 - DNA, 15 bp, Homo sapiens
aaactcttgacttca

SEQ ID NO: 1663726 - DNA, 15 bp, Homo sapiens
aactcttgacttcag

SEQ ID NO: 1663727 - DNA, 15 bp, Homo sapiens
actcttgacttcagg

SEQ ID NO: 1663728 - DNA, 15 bp, Homo sapiens
ctcttgacttcaggt

SEQ ID NO: 1663729 - DNA, 15 bp, Homo sapiens
tcttgacttcaggtg

SEQ ID NO: 1663730 - DNA, 15 bp, Homo sapiens
cttgacttcaggtga

SEQ ID NO: 1663731 - DNA, 15 bp, Homo sapiens
ttgacttcaggtgat

SEQ ID NO: 1663732 - DNA, 15 bp, Homo sapiens
cacctgccttggcct

SEQ ID NO: 1663733 - DNA, 15 bp, Homo sapiens
acctgccttggcctt

SEQ ID NO: 1663734 - DNA, 15 bp, Homo sapiens
cctgccttggccttc

SEQ ID NO: 1663735 - DNA, 15 bp, Homo sapiens
ctgccttggccttct

SEQ ID NO: 1663736 - DNA, 15 bp, Homo sapiens
tgccttggccttctg

SEQ ID NO: 1663737 - DNA, 15 bp, Homo sapiens
gccttggccttctga

SEQ ID NO: 1663738 - DNA, 15 bp, Homo sapiens
ccttggccttctgaa

SEQ ID NO: 1663739 - DNA, 15 bp, Homo sapiens
cttggccttctgaag

SEQ ID NO: 1663740 - DNA, 15 bp, Homo sapiens
ttggccttctgaagt

SEQ ID NO: 1663741 - DNA, 15 bp, Homo sapiens
tggccttctgaagtg

SEQ ID NO: 1663742 - DNA, 15 bp, Homo sapiens
ggccttctgaagtgc

SEQ ID NO: 1663743 - DNA, 15 bp, Homo sapiens
gccttctgaagtgct

SEQ ID NO: 1663744 - DNA, 15 bp, Homo sapiens
ccttctgaagtgctg

SEQ ID NO: 1663745 - DNA, 15 bp, Homo sapiens
cttctgaagtgctgg

SEQ ID NO: 1663746 - DNA, 15 bp, Homo sapiens
ttctgaagtgctggg

SEQ ID NO: 1663747 - DNA, 15 bp, Homo sapiens
tctgaagtgctggga

SEQ ID NO: 1663748 - DNA, 15 bp, Homo sapiens
ctgaagtgctgggat

SEQ ID NO: 1663749 - DNA, 15 bp, Homo sapiens
tgaagtgctgggatt

SEQ ID NO: 1663750 - DNA, 15 bp, Homo sapiens
gctgggattataggg

SEQ ID NO: 1663751 - DNA, 15 bp, Homo sapiens
ctgggattatagggc

SEQ ID NO: 1663752 - DNA, 15 bp, Homo sapiens
tgggattatagggca

SEQ ID NO: 1663753 - DNA, 15 bp, Homo sapiens
gggattatagggcat

SEQ ID NO: 1663754 - DNA, 15 bp, Homo sapiens
ggattatagggcatg

SEQ ID NO: 1663755 - DNA, 15 bp, Homo sapiens
gattatagggcatga

SEQ ID NO: 1663756 - DNA, 15 bp, Homo sapiens
attatagggcatgag

SEQ ID NO: 1663757 - DNA, 15 bp, Homo sapiens
ttatagggcatgagc

SEQ ID NO: 1663758 - DNA, 15 bp, Homo sapiens
tatagggcatgagcc

SEQ ID NO: 1663759 - DNA, 15 bp, Homo sapiens
atagggcatgagcca

SEQ ID NO: 1663760 - DNA, 15 bp, Homo sapiens
tagggcatgagccac

SEQ ID NO: 1663761 - DNA, 15 bp, Homo sapiens
agggcatgagccact

SEQ ID NO: 1663762 - DNA, 15 bp, Homo sapiens
gggcatgagccactg

SEQ ID NO: 1663763 - DNA, 15 bp, Homo sapiens
catgagccactgtga

SEQ ID NO: 1663764 - DNA, 15 bp, Homo sapiens
atgagccactgtgac

SEQ ID NO: 1663765 - DNA, 15 bp, Homo sapiens
tgagccactgtgact

SEQ ID NO: 1663766 - DNA, 15 bp, Homo sapiens
gagccactgtgactg

SEQ ID NO: 1663767 - DNA, 15 bp, Homo sapiens
agccactgtgactgg

SEQ ID NO: 1663768 - DNA, 15 bp, Homo sapiens
gccactgtgactggc

SEQ ID NO: 1663769 - DNA, 15 bp, Homo sapiens
ccactgtgactggcc

SEQ ID NO: 1663770 - DNA, 15 bp, Homo sapiens
cactgtgactggcca

SEQ ID NO: 1663771 - DNA, 15 bp, Homo sapiens
actgtgactggccat

SEQ ID NO: 1663772 - DNA, 15 bp, Homo sapiens
ctgtgactggccatc

SEQ ID NO: 1663773 - DNA, 15 bp, Homo sapiens
tgtgactggccatct

SEQ ID NO: 1663774 - DNA, 15 bp, Homo sapiens
gtgactggccatctt

SEQ ID NO: 1663775 - DNA, 15 bp, Homo sapiens
tgactggccatctta

SEQ ID NO: 1663776 - DNA, 15 bp, Homo sapiens
gactggccatcttaa

SEQ ID NO: 1663777 - DNA, 15 bp, Homo sapiens
actggccatcttaaa

SEQ ID NO: 1663778 - DNA, 15 bp, Homo sapiens
ctggccatcttaaat

SEQ ID NO: 1663779 - DNA, 15 bp, Homo sapiens
tggccatcttaaatt

SEQ ID NO: 1663780 - DNA, 15 bp, Homo sapiens
ggccatcttaaattt

SEQ ID NO: 1663781 - DNA, 15 bp, Homo sapiens
gccatcttaaatttt

SEQ ID NO: 1663782 - DNA, 15 bp, Homo sapiens
ccatcttaaattttt

SEQ ID NO: 1663783 - DNA, 15 bp, Homo sapiens
catcttaaatttttt

SEQ ID NO: 1663784 - DNA, 15 bp, Homo sapiens
atcttaaattttttt

SEQ ID NO: 1663785 - DNA, 15 bp, Homo sapiens
tcttaaatttttttt

SEQ ID NO: 1663786 - DNA, 15 bp, Homo sapiens
cttaaattttttttt

SEQ ID NO: 1663787 - DNA, 15 bp, Homo sapiens
ttttgagacagggtt

SEQ ID NO: 1663788 - DNA, 15 bp, Homo sapiens
tttgagacagggttt

SEQ ID NO: 1663789 - DNA, 15 bp, Homo sapiens
ttgagacagggtttc

SEQ ID NO: 1663790 - DNA, 15 bp, Homo sapiens
tgagacagggtttca

SEQ ID NO: 1663791 - DNA, 15 bp, Homo sapiens
gacagggtttcactc

SEQ ID NO: 1663792 - DNA, 15 bp, Homo sapiens
acagggtttcactct

SEQ ID NO: 1663793 - DNA, 15 bp, Homo sapiens
cagggtttcactctg

SEQ ID NO: 1663794 - DNA, 15 bp, Homo sapiens
ggtttcactctgtcg

SEQ ID NO: 1663795 - DNA, 15 bp, Homo sapiens
gtttcactctgtcgc

SEQ ID NO: 1663796 - DNA, 15 bp, Homo sapiens
tttcactctgtcgcc

SEQ ID NO: 1663797 - DNA, 15 bp, Homo sapiens
ttcactctgtcgccc

SEQ ID NO: 1663798 - DNA, 15 bp, Homo sapiens
aggctggagtgcaaa

SEQ ID NO: 1663799 - DNA, 15 bp, Homo sapiens
ggctggagtgcaaag

SEQ ID NO: 1663800 - DNA, 15 bp, Homo sapiens
gctggagtgcaaagg

SEQ ID NO: 1663801 - DNA, 15 bp, Homo sapiens
ctggagtgcaaaggc

SEQ ID NO: 1663802 - DNA, 15 bp, Homo sapiens
tggagtgcaaaggcg

SEQ ID NO: 1663803 - DNA, 15 bp, Homo sapiens
ggagtgcaaaggcgc

SEQ ID NO: 1663804 - DNA, 15 bp, Homo sapiens
gagtgcaaaggcgcg

SEQ ID NO: 1663805 - DNA, 15 bp, Homo sapiens
agtgcaaaggcgcga

SEQ ID NO: 1663806 - DNA, 15 bp, Homo sapiens
gtgcaaaggcgcgat

SEQ ID NO: 1663807 - DNA, 15 bp, Homo sapiens
tgcaaaggcgcgatc

SEQ ID NO: 1663808 - DNA, 15 bp, Homo sapiens
gcaaaggcgcgatct

SEQ ID NO: 1663809 - DNA, 15 bp, Homo sapiens
caaaggcgcgatctt

SEQ ID NO: 1663810 - DNA, 15 bp, Homo sapiens
aaaggcgcgatcttg

SEQ ID NO: 1663811 - DNA, 15 bp, Homo sapiens
aaggcgcgatcttgg

SEQ ID NO: 1663812 - DNA, 15 bp, Homo sapiens
aggcgcgatcttggt

SEQ ID NO: 1663813 - DNA, 15 bp, Homo sapiens
ggcgcgatcttggtt

SEQ ID NO: 1663814 - DNA, 15 bp, Homo sapiens
gcgcgatcttggttc

SEQ ID NO: 1663815 - DNA, 15 bp, Homo sapiens
cgcgatcttggttca

SEQ ID NO: 1663816 - DNA, 15 bp, Homo sapiens
gcgatcttggttcac

SEQ ID NO: 1663817 - DNA, 15 bp, Homo sapiens
cgatcttggttcact

SEQ ID NO: 1663818 - DNA, 15 bp, Homo sapiens
caagctccgcctcct

SEQ ID NO: 1663819 - DNA, 15 bp, Homo sapiens
cattctcctgcctct

SEQ ID NO: 1663820 - DNA, 15 bp, Homo sapiens
attctcctgcctctg

SEQ ID NO: 1663821 - DNA, 15 bp, Homo sapiens
ttctcctgcctctgc

SEQ ID NO: 1663822 - DNA, 15 bp, Homo sapiens
tctcctgcctctgcc

SEQ ID NO: 1663823 - DNA, 15 bp, Homo sapiens
ctcctgcctctgcct

SEQ ID NO: 1663824 - DNA, 15 bp, Homo sapiens
tcctgcctctgcctc

SEQ ID NO: 1663825 - DNA, 15 bp, Homo sapiens
cctgcctctgcctca

SEQ ID NO: 1663826 - DNA, 15 bp, Homo sapiens
ctgcctctgcctcat

SEQ ID NO: 1663827 - DNA, 15 bp, Homo sapiens
tgcctctgcctcatg

SEQ ID NO: 1663828 - DNA, 15 bp, Homo sapiens
gcctctgcctcatga

SEQ ID NO: 1663829 - DNA, 15 bp, Homo sapiens
cctctgcctcatgag

SEQ ID NO: 1663830 - DNA, 15 bp, Homo sapiens
ctctgcctcatgagt

SEQ ID NO: 1663831 - DNA, 15 bp, Homo sapiens
tctgcctcatgagta

SEQ ID NO: 1663832 - DNA, 15 bp, Homo sapiens
ctgcctcatgagtaa

SEQ ID NO: 1663833 - DNA, 15 bp, Homo sapiens
tgcctcatgagtaac

SEQ ID NO: 1663834 - DNA, 15 bp, Homo sapiens
gcctcatgagtaact

SEQ ID NO: 1663835 - DNA, 15 bp, Homo sapiens
cctcatgagtaactg

SEQ ID NO: 1663836 - DNA, 15 bp, Homo sapiens
ctcatgagtaactga

SEQ ID NO: 1663837 - DNA, 15 bp, Homo sapiens
tcatgagtaactgag

SEQ ID NO: 1663838 - DNA, 15 bp, Homo sapiens
catgagtaactgaga

SEQ ID NO: 1663839 - DNA, 15 bp, Homo sapiens
atgagtaactgagac

SEQ ID NO: 1663840 - DNA, 15 bp, Homo sapiens
tgagtaactgagact

SEQ ID NO: 1663841 - DNA, 15 bp, Homo sapiens
gagtaactgagacta

SEQ ID NO: 1663842 - DNA, 15 bp, Homo sapiens
agtaactgagactac

SEQ ID NO: 1663843 - DNA, 15 bp, Homo sapiens
gtaactgagactaca

SEQ ID NO: 1663844 - DNA, 15 bp, Homo sapiens
taactgagactacag

SEQ ID NO: 1663845 - DNA, 15 bp, Homo sapiens
aactgagactacagg

SEQ ID NO: 1663846 - DNA, 15 bp, Homo sapiens
actgagactacaggc

SEQ ID NO: 1663847 - DNA, 15 bp, Homo sapiens
ctgagactacaggcg

SEQ ID NO: 1663848 - DNA, 15 bp, Homo sapiens
tgagactacaggcgc

SEQ ID NO: 1663849 - DNA, 15 bp, Homo sapiens
gagactacaggcgcc

SEQ ID NO: 1663850 - DNA, 15 bp, Homo sapiens
agactacaggcgccc

SEQ ID NO: 1663851 - DNA, 15 bp, Homo sapiens
tcgtgatccacccgt

SEQ ID NO: 1663852 - DNA, 15 bp, Homo sapiens
cgtgatccacccgtc

SEQ ID NO: 1663853 - DNA, 15 bp, Homo sapiens
gtgatccacccgtct

SEQ ID NO: 1663854 - DNA, 15 bp, Homo sapiens
tgatccacccgtctc

SEQ ID NO: 1663855 - DNA, 15 bp, Homo sapiens
gatccacccgtctcg

SEQ ID NO: 1663856 - DNA, 15 bp, Homo sapiens
atccacccgtctcgg

SEQ ID NO: 1663857 - DNA, 15 bp, Homo sapiens
tccacccgtctcggc

SEQ ID NO: 1663858 - DNA, 15 bp, Homo sapiens
ccacccgtctcggcc

SEQ ID NO: 1663859 - DNA, 15 bp, Homo sapiens
cacccgtctcggcct

SEQ ID NO: 1663860 - DNA, 15 bp, Homo sapiens
acccgtctcggcctc

SEQ ID NO: 1663861 - DNA, 15 bp, Homo sapiens
cccgtctcggcctcc

SEQ ID NO: 1663862 - DNA, 15 bp, Homo sapiens
ccgtctcggcctccc

SEQ ID NO: 1663863 - DNA, 15 bp, Homo sapiens
cgtctcggcctccca

SEQ ID NO: 1663864 - DNA, 15 bp, Homo sapiens
gtctcggcctcccaa

SEQ ID NO: 1663865 - DNA, 15 bp, Homo sapiens
tctcggcctcccaaa

SEQ ID NO: 1663866 - DNA, 15 bp, Homo sapiens
ctcggcctcccaaaa

SEQ ID NO: 1663867 - DNA, 15 bp, Homo sapiens
tcggcctcccaaaat

SEQ ID NO: 1663868 - DNA, 15 bp, Homo sapiens
cggcctcccaaaatg

SEQ ID NO: 1663869 - DNA, 15 bp, Homo sapiens
tcccaaaatgctggc

SEQ ID NO: 1663870 - DNA, 15 bp, Homo sapiens
cccaaaatgctggca

SEQ ID NO: 1663871 - DNA, 15 bp, Homo sapiens
ccaaaatgctggcat

SEQ ID NO: 1663872 - DNA, 15 bp, Homo sapiens
caaaatgctggcatt

SEQ ID NO: 1663873 - DNA, 15 bp, Homo sapiens
aaaatgctggcatta

SEQ ID NO: 1663874 - DNA, 15 bp, Homo sapiens
aaatgctggcattac

SEQ ID NO: 1663875 - DNA, 15 bp, Homo sapiens
aatgctggcattaca

SEQ ID NO: 1663876 - DNA, 15 bp, Homo sapiens
atgctggcattacag

SEQ ID NO: 1663877 - DNA, 15 bp, Homo sapiens
ccgcacccagcctta

SEQ ID NO: 1663878 - DNA, 15 bp, Homo sapiens
cgcacccagccttaa

SEQ ID NO: 1663879 - DNA, 15 bp, Homo sapiens
gcacccagccttaaa

SEQ ID NO: 1663880 - DNA, 15 bp, Homo sapiens
cacccagccttaaat

SEQ ID NO: 1663881 - DNA, 15 bp, Homo sapiens
acccagccttaaatt

SEQ ID NO: 1663882 - DNA, 15 bp, Homo sapiens
cccagccttaaattt

SEQ ID NO: 1663883 - DNA, 15 bp, Homo sapiens
ccagccttaaatttt

SEQ ID NO: 1663884 - DNA, 15 bp, Homo sapiens
cagccttaaattttt

SEQ ID NO: 1663885 - DNA, 15 bp, Homo sapiens
agccttaaatttttt

SEQ ID NO: 1663886 - DNA, 15 bp, Homo sapiens
gccttaaattttttt

SEQ ID NO: 1663887 - DNA, 15 bp, Homo sapiens
ccttaaatttttttt

SEQ ID NO: 1663888 - DNA, 15 bp, Homo sapiens
ttaaattttttttta

SEQ ID NO: 1663889 - DNA, 15 bp, Homo sapiens
taaatttttttttaa

SEQ ID NO: 1663890 - DNA, 15 bp, Homo sapiens
aaatttttttttaag

SEQ ID NO: 1663891 - DNA, 15 bp, Homo sapiens
aatttttttttaagg

SEQ ID NO: 1663892 - DNA, 15 bp, Homo sapiens
atttttttttaaggg

SEQ ID NO: 1663893 - DNA, 15 bp, Homo sapiens
tttttttttaaggga

SEQ ID NO: 1663894 - DNA, 15 bp, Homo sapiens
ttttttttaagggaa

SEQ ID NO: 1663895 - DNA, 15 bp, Homo sapiens
tttttttaagggaaa

SEQ ID NO: 1663896 - DNA, 15 bp, Homo sapiens
ttttttaagggaaat

SEQ ID NO: 1663897 - DNA, 15 bp, Homo sapiens
tttttaagggaaatc

SEQ ID NO: 1663898 - DNA, 15 bp, Homo sapiens
ttttaagggaaatca

SEQ ID NO: 1663899 - DNA, 15 bp, Homo sapiens
tttaagggaaatcaa

SEQ ID NO: 1663900 - DNA, 15 bp, Homo sapiens
ttaagggaaatcaaa

SEQ ID NO: 1663901 - DNA, 15 bp, Homo sapiens
taagggaaatcaaac

SEQ ID NO: 1663902 - DNA, 15 bp, Homo sapiens
aagggaaatcaaacc

SEQ ID NO: 1663903 - DNA, 15 bp, Homo sapiens
agggaaatcaaaccc

SEQ ID NO: 1663904 - DNA, 15 bp, Homo sapiens
gggaaatcaaaccca

SEQ ID NO: 1663905 - DNA, 15 bp, Homo sapiens
ggaaatcaaacccag

SEQ ID NO: 1663906 - DNA, 15 bp, Homo sapiens
gaaatcaaacccagt

SEQ ID NO: 1663907 - DNA, 15 bp, Homo sapiens
aaatcaaacccagtg

SEQ ID NO: 1663908 - DNA, 15 bp, Homo sapiens
aatcaaacccagtga

SEQ ID NO: 1663909 - DNA, 15 bp, Homo sapiens
atcaaacccagtgat

SEQ ID NO: 1663910 - DNA, 15 bp, Homo sapiens
tcaaacccagtgata

SEQ ID NO: 1663911 - DNA, 15 bp, Homo sapiens
caaacccagtgatat

SEQ ID NO: 1663912 - DNA, 15 bp, Homo sapiens
aaacccagtgatatt

SEQ ID NO: 1663913 - DNA, 15 bp, Homo sapiens
aacccagtgatattg

SEQ ID NO: 1663914 - DNA, 15 bp, Homo sapiens
acccagtgatattgg

SEQ ID NO: 1663915 - DNA, 15 bp, Homo sapiens
cccagtgatattggg

SEQ ID NO: 1663916 - DNA, 15 bp, Homo sapiens
ccagtgatattgggc

SEQ ID NO: 1663917 - DNA, 15 bp, Homo sapiens
cagtgatattgggcc

SEQ ID NO: 1663918 - DNA, 15 bp, Homo sapiens
agtgatattgggcca

SEQ ID NO: 1663919 - DNA, 15 bp, Homo sapiens
gtgatattgggccag

SEQ ID NO: 1663920 - DNA, 15 bp, Homo sapiens
tgatattgggccagt

SEQ ID NO: 1663921 - DNA, 15 bp, Homo sapiens
gatattgggccagta

SEQ ID NO: 1663922 - DNA, 15 bp, Homo sapiens
atattgggccagtac

SEQ ID NO: 1663923 - DNA, 15 bp, Homo sapiens
tattgggccagtaca

SEQ ID NO: 1663924 - DNA, 15 bp, Homo sapiens
attgggccagtacag

SEQ ID NO: 1663925 - DNA, 15 bp, Homo sapiens
ttgggccagtacagt

SEQ ID NO: 1663926 - DNA, 15 bp, Homo sapiens
tgggccagtacagtg

SEQ ID NO: 1663927 - DNA, 15 bp, Homo sapiens
gggccagtacagtgg

SEQ ID NO: 1663928 - DNA, 15 bp, Homo sapiens
ggccagtacagtggc

SEQ ID NO: 1663929 - DNA, 15 bp, Homo sapiens
gccagtacagtggct

SEQ ID NO: 1663930 - DNA, 15 bp, Homo sapiens
ccagtacagtggctc

SEQ ID NO: 1663931 - DNA, 15 bp, Homo sapiens
cagtacagtggctca

SEQ ID NO: 1663932 - DNA, 15 bp, Homo sapiens
agtacagtggctcac

SEQ ID NO: 1663933 - DNA, 15 bp, Homo sapiens
gtacagtggctcaca

SEQ ID NO: 1663934 - DNA, 15 bp, Homo sapiens
tacagtggctcacac

SEQ ID NO: 1663935 - DNA, 15 bp, Homo sapiens
ctcacacctgtaatt

SEQ ID NO: 1663936 - DNA, 15 bp, Homo sapiens
cacctgtaattccac

SEQ ID NO: 1663937 - DNA, 15 bp, Homo sapiens
acctgtaattccacc

SEQ ID NO: 1663938 - DNA, 15 bp, Homo sapiens
cctgtaattccacca

SEQ ID NO: 1663939 - DNA, 15 bp, Homo sapiens
ctgtaattccaccac

SEQ ID NO: 1663940 - DNA, 15 bp, Homo sapiens
tgtaattccaccact

SEQ ID NO: 1663941 - DNA, 15 bp, Homo sapiens
gtaattccaccactt

SEQ ID NO: 1663942 - DNA, 15 bp, Homo sapiens
taattccaccacttt

SEQ ID NO: 1663943 - DNA, 15 bp, Homo sapiens
aattccaccactttg

SEQ ID NO: 1663944 - DNA, 15 bp, Homo sapiens
attccaccactttgg

SEQ ID NO: 1663945 - DNA, 15 bp, Homo sapiens
ttccaccactttggg

SEQ ID NO: 1663946 - DNA, 15 bp, Homo sapiens
tccaccactttggga

SEQ ID NO: 1663947 - DNA, 15 bp, Homo sapiens
ccaccactttgggag

SEQ ID NO: 1663948 - DNA, 15 bp, Homo sapiens
caccactttgggagg

SEQ ID NO: 1663949 - DNA, 15 bp, Homo sapiens
accactttgggaggc

SEQ ID NO: 1663950 - DNA, 15 bp, Homo sapiens
ccactttgggaggct

SEQ ID NO: 1663951 - DNA, 15 bp, Homo sapiens
ggctgaggcaggtga

SEQ ID NO: 1663952 - DNA, 15 bp, Homo sapiens
gctgaggcaggtgaa

SEQ ID NO: 1663953 - DNA, 15 bp, Homo sapiens
ctgaggcaggtgaat

SEQ ID NO: 1663954 - DNA, 15 bp, Homo sapiens
tgaggcaggtgaatc

SEQ ID NO: 1663955 - DNA, 15 bp, Homo sapiens
gaggcaggtgaatca

SEQ ID NO: 1663956 - DNA, 15 bp, Homo sapiens
aggcaggtgaatcac

SEQ ID NO: 1663957 - DNA, 15 bp, Homo sapiens
ggcaggtgaatcacc

SEQ ID NO: 1663958 - DNA, 15 bp, Homo sapiens
gcaggtgaatcacct

SEQ ID NO: 1663959 - DNA, 15 bp, Homo sapiens
caggtgaatcacctg

SEQ ID NO: 1663960 - DNA, 15 bp, Homo sapiens
aggtgaatcacctga

SEQ ID NO: 1663961 - DNA, 15 bp, Homo sapiens
ggtgaatcacctgag

SEQ ID NO: 1663962 - DNA, 15 bp, Homo sapiens
gtgaatcacctgagg

SEQ ID NO: 1663963 - DNA, 15 bp, Homo sapiens
tgaatcacctgaggt

SEQ ID NO: 1663964 - DNA, 15 bp, Homo sapiens
gaatcacctgaggtc

SEQ ID NO: 1663965 - DNA, 15 bp, Homo sapiens
aatcacctgaggtca

SEQ ID NO: 1663966 - DNA, 15 bp, Homo sapiens
gttcgagaccagccc

SEQ ID NO: 1663967 - DNA, 15 bp, Homo sapiens
ttcgagaccagcccg

SEQ ID NO: 1663968 - DNA, 15 bp, Homo sapiens
tcgagaccagcccgg

SEQ ID NO: 1663969 - DNA, 15 bp, Homo sapiens
cgagaccagcccggc

SEQ ID NO: 1663970 - DNA, 15 bp, Homo sapiens
gagaccagcccggca

SEQ ID NO: 1663971 - DNA, 15 bp, Homo sapiens
agaccagcccggcaa

SEQ ID NO: 1663972 - DNA, 15 bp, Homo sapiens
gaccagcccggcaaa

SEQ ID NO: 1663973 - DNA, 15 bp, Homo sapiens
accagcccggcaaac

SEQ ID NO: 1663974 - DNA, 15 bp, Homo sapiens
ccagcccggcaaaca

SEQ ID NO: 1663975 - DNA, 15 bp, Homo sapiens
cagcccggcaaacat

SEQ ID NO: 1663976 - DNA, 15 bp, Homo sapiens
agcccggcaaacatg

SEQ ID NO: 1663977 - DNA, 15 bp, Homo sapiens
gcccggcaaacatgg

SEQ ID NO: 1663978 - DNA, 15 bp, Homo sapiens
cccggcaaacatggc

SEQ ID NO: 1663979 - DNA, 15 bp, Homo sapiens
ccggcaaacatggcg

SEQ ID NO: 1663980 - DNA, 15 bp, Homo sapiens
cggcaaacatggcga

SEQ ID NO: 1663981 - DNA, 15 bp, Homo sapiens
ggcaaacatggcgaa

SEQ ID NO: 1663982 - DNA, 15 bp, Homo sapiens
gcaaacatggcgaaa

SEQ ID NO: 1663983 - DNA, 15 bp, Homo sapiens
caaacatggcgaaac

SEQ ID NO: 1663984 - DNA, 15 bp, Homo sapiens
aaacatggcgaaacc

SEQ ID NO: 1663985 - DNA, 15 bp, Homo sapiens
tctactaaaaataag

SEQ ID NO: 1663986 - DNA, 15 bp, Homo sapiens
ctactaaaaataaga

SEQ ID NO: 1663987 - DNA, 15 bp, Homo sapiens
tactaaaaataagaa

SEQ ID NO: 1663988 - DNA, 15 bp, Homo sapiens
actaaaaataagaaa

SEQ ID NO: 1663989 - DNA, 15 bp, Homo sapiens
ctaaaaataagaaaa

SEQ ID NO: 1663990 - DNA, 15 bp, Homo sapiens
taaaaataagaaaat

SEQ ID NO: 1663991 - DNA, 15 bp, Homo sapiens
aaaaataagaaaatt

SEQ ID NO: 1663992 - DNA, 15 bp, Homo sapiens
aaaataagaaaatta

SEQ ID NO: 1663993 - DNA, 15 bp, Homo sapiens
aaataagaaaattag

SEQ ID NO: 1663994 - DNA, 15 bp, Homo sapiens
aataagaaaattagc

SEQ ID NO: 1663995 - DNA, 15 bp, Homo sapiens
ataagaaaattagcc

SEQ ID NO: 1663996 - DNA, 15 bp, Homo sapiens
taagaaaattagccg

SEQ ID NO: 1663997 - DNA, 15 bp, Homo sapiens
aagaaaattagccgg

SEQ ID NO: 1663998 - DNA, 15 bp, Homo sapiens
agaaaattagccggg

SEQ ID NO: 1663999 - DNA, 15 bp, Homo sapiens
gaaaattagccgggc

SEQ ID NO: 1664000 - DNA, 15 bp, Homo sapiens
ccgggcgtagtggca

SEQ ID NO: 1664001 - DNA, 15 bp, Homo sapiens
cgggcgtagtggcat

SEQ ID NO: 1664002 - DNA, 15 bp, Homo sapiens
gggcgtagtggcatg

SEQ ID NO: 1664003 - DNA, 15 bp, Homo sapiens
ggcgtagtggcatgc

SEQ ID NO: 1664004 - DNA, 15 bp, Homo sapiens
gcgtagtggcatgca

SEQ ID NO: 1664005 - DNA, 15 bp, Homo sapiens
cgtagtggcatgcac

SEQ ID NO: 1664006 - DNA, 15 bp, Homo sapiens
gtagtggcatgcacc

SEQ ID NO: 1664007 - DNA, 15 bp, Homo sapiens
ggcatgcacctgtaa

SEQ ID NO: 1664008 - DNA, 15 bp, Homo sapiens
gcatgcacctgtaat

SEQ ID NO: 1664009 - DNA, 15 bp, Homo sapiens
atgcacctgtaatct

SEQ ID NO: 1664010 - DNA, 15 bp, Homo sapiens
tgcacctgtaatctc

SEQ ID NO: 1664011 - DNA, 15 bp, Homo sapiens
tcagctactcgggaa

SEQ ID NO: 1664012 - DNA, 15 bp, Homo sapiens
gctgaggcatgagaa

SEQ ID NO: 1664013 - DNA, 15 bp, Homo sapiens
ctgaggcatgagaat

SEQ ID NO: 1664014 - DNA, 15 bp, Homo sapiens
ttgaacctgggagca

SEQ ID NO: 1664015 - DNA, 15 bp, Homo sapiens
tgaacctgggagcag

SEQ ID NO: 1664016 - DNA, 15 bp, Homo sapiens
gaacctgggagcagg

SEQ ID NO: 1664017 - DNA, 15 bp, Homo sapiens
aacctgggagcagga

SEQ ID NO: 1664018 - DNA, 15 bp, Homo sapiens
acctgggagcaggat

SEQ ID NO: 1664019 - DNA, 15 bp, Homo sapiens
cctgggagcaggatg

SEQ ID NO: 1664020 - DNA, 15 bp, Homo sapiens
ctgggagcaggatgt

SEQ ID NO: 1664021 - DNA, 15 bp, Homo sapiens
tgggagcaggatgtt

SEQ ID NO: 1664022 - DNA, 15 bp, Homo sapiens
gggagcaggatgttg

SEQ ID NO: 1664023 - DNA, 15 bp, Homo sapiens
ggagcaggatgttgc

SEQ ID NO: 1664024 - DNA, 15 bp, Homo sapiens
gagcaggatgttgca

SEQ ID NO: 1664025 - DNA, 15 bp, Homo sapiens
agcaggatgttgcag

SEQ ID NO: 1664026 - DNA, 15 bp, Homo sapiens
gcaggatgttgcagt

SEQ ID NO: 1664027 - DNA, 15 bp, Homo sapiens
caggatgttgcagtg

SEQ ID NO: 1664028 - DNA, 15 bp, Homo sapiens
aggatgttgcagtga

SEQ ID NO: 1664029 - DNA, 15 bp, Homo sapiens
ggatgttgcagtgaa

SEQ ID NO: 1664030 - DNA, 15 bp, Homo sapiens
gatgttgcagtgaac

SEQ ID NO: 1664031 - DNA, 15 bp, Homo sapiens
atgttgcagtgaacc

SEQ ID NO: 1664032 - DNA, 15 bp, Homo sapiens
tgttgcagtgaaccg

SEQ ID NO: 1664033 - DNA, 15 bp, Homo sapiens
ttgcagtgaaccgat

SEQ ID NO: 1664034 - DNA, 15 bp, Homo sapiens
tgcagtgaaccgata

SEQ ID NO: 1664035 - DNA, 15 bp, Homo sapiens
gcagtgaaccgatat

SEQ ID NO: 1664036 - DNA, 15 bp, Homo sapiens
cagtgaaccgatatc

SEQ ID NO: 1664037 - DNA, 15 bp, Homo sapiens
agtgaaccgatatca

SEQ ID NO: 1664038 - DNA, 15 bp, Homo sapiens
gtgaaccgatatcac

SEQ ID NO: 1664039 - DNA, 15 bp, Homo sapiens
tgaaccgatatcaca

SEQ ID NO: 1664040 - DNA, 15 bp, Homo sapiens
gaaccgatatcacac

SEQ ID NO: 1664041 - DNA, 15 bp, Homo sapiens
aaccgatatcacacc

SEQ ID NO: 1664042 - DNA, 15 bp, Homo sapiens
accgatatcacacca

SEQ ID NO: 1664043 - DNA, 15 bp, Homo sapiens
ccgatatcacaccac

SEQ ID NO: 1664044 - DNA, 15 bp, Homo sapiens
cgatatcacaccact

SEQ ID NO: 1664045 - DNA, 15 bp, Homo sapiens
gatatcacaccactg

SEQ ID NO: 1664046 - DNA, 15 bp, Homo sapiens
atatcacaccactgc

SEQ ID NO: 1664047 - DNA, 15 bp, Homo sapiens
tatcacaccactgca

SEQ ID NO: 1664048 - DNA, 15 bp, Homo sapiens
ctcaaaaaaaaaaag

SEQ ID NO: 1664049 - DNA, 15 bp, Homo sapiens
tcaaaaaaaaaaaga

SEQ ID NO: 1664050 - DNA, 15 bp, Homo sapiens
caaaaaaaaaaagaa

SEQ ID NO: 1664051 - DNA, 15 bp, Homo sapiens
aaagaaaaaaaaatc

SEQ ID NO: 1664052 - DNA, 15 bp, Homo sapiens
aagaaaaaaaaatcc

SEQ ID NO: 1664053 - DNA, 15 bp, Homo sapiens
agaaaaaaaaatcca

SEQ ID NO: 1664054 - DNA, 15 bp, Homo sapiens
gaaaaaaaaatccag

SEQ ID NO: 1664055 - DNA, 15 bp, Homo sapiens
aaaaaaatccagtga

SEQ ID NO: 1664056 - DNA, 15 bp, Homo sapiens
aaaaaatccagtgat

SEQ ID NO: 1664057 - DNA, 15 bp, Homo sapiens
aaaaatccagtgata

SEQ ID NO: 1664058 - DNA, 15 bp, Homo sapiens
aaaatccagtgatac

SEQ ID NO: 1664059 - DNA, 15 bp, Homo sapiens
aaatccagtgatact

SEQ ID NO: 1664060 - DNA, 15 bp, Homo sapiens
aatccagtgatactt

SEQ ID NO: 1664061 - DNA, 15 bp, Homo sapiens
atccagtgatactta

SEQ ID NO: 1664062 - DNA, 15 bp, Homo sapiens
tccagtgatacttac

SEQ ID NO: 1664063 - DNA, 15 bp, Homo sapiens
ccagtgatacttact

SEQ ID NO: 1664064 - DNA, 15 bp, Homo sapiens
cagtgatacttactt

SEQ ID NO: 1664065 - DNA, 15 bp, Homo sapiens
agtgatacttacttt

SEQ ID NO: 1664066 - DNA, 15 bp, Homo sapiens
gtgatacttactttt

SEQ ID NO: 1664067 - DNA, 15 bp, Homo sapiens
tgatacttacttttt

SEQ ID NO: 1664068 - DNA, 15 bp, Homo sapiens
gatacttacttttta

SEQ ID NO: 1664069 - DNA, 15 bp, Homo sapiens
atacttactttttaa

SEQ ID NO: 1664070 - DNA, 15 bp, Homo sapiens
tacttactttttaaa

SEQ ID NO: 1664071 - DNA, 15 bp, Homo sapiens
acttactttttaaat

SEQ ID NO: 1664072 - DNA, 15 bp, Homo sapiens
ttactttttaaattt

SEQ ID NO: 1664073 - DNA, 15 bp, Homo sapiens
tactttttaaatttt

SEQ ID NO: 1664074 - DNA, 15 bp, Homo sapiens
actttttaaattttt

SEQ ID NO: 1664075 - DNA, 15 bp, Homo sapiens
ctttttaaattttta

SEQ ID NO: 1664076 - DNA, 15 bp, Homo sapiens
taaatttttatttac

SEQ ID NO: 1664077 - DNA, 15 bp, Homo sapiens
aaatttttatttact

SEQ ID NO: 1664078 - DNA, 15 bp, Homo sapiens
aatttttatttactt

SEQ ID NO: 1664079 - DNA, 15 bp, Homo sapiens
ttatttacttatttt

SEQ ID NO: 1664080 - DNA, 15 bp, Homo sapiens
tatttacttattttt

SEQ ID NO: 1664081 - DNA, 15 bp, Homo sapiens
atttacttatttttt

SEQ ID NO: 1664082 - DNA, 15 bp, Homo sapiens
tttacttattttttg

SEQ ID NO: 1664083 - DNA, 15 bp, Homo sapiens
ttacttattttttgc

SEQ ID NO: 1664084 - DNA, 15 bp, Homo sapiens
tacttattttttgct

SEQ ID NO: 1664085 - DNA, 15 bp, Homo sapiens
acttattttttgctt

SEQ ID NO: 1664086 - DNA, 15 bp, Homo sapiens
cttattttttgcttt

SEQ ID NO: 1664087 - DNA, 15 bp, Homo sapiens
ttattttttgcttta

SEQ ID NO: 1664088 - DNA, 15 bp, Homo sapiens
tattttttgctttaa

SEQ ID NO: 1664089 - DNA, 15 bp, Homo sapiens
attttttgctttaag

SEQ ID NO: 1664090 - DNA, 15 bp, Homo sapiens
ttttttgctttaagt

SEQ ID NO: 1664091 - DNA, 15 bp, Homo sapiens
tttttgctttaagtt

SEQ ID NO: 1664092 - DNA, 15 bp, Homo sapiens
ttttgctttaagttg

SEQ ID NO: 1664093 - DNA, 15 bp, Homo sapiens
tttgctttaagttga

SEQ ID NO: 1664094 - DNA, 15 bp, Homo sapiens
ttgctttaagttgaa

SEQ ID NO: 1664095 - DNA, 15 bp, Homo sapiens
tgctttaagttgaat

SEQ ID NO: 1664096 - DNA, 15 bp, Homo sapiens
gctttaagttgaatc

SEQ ID NO: 1664097 - DNA, 15 bp, Homo sapiens
ctttaagttgaatct

SEQ ID NO: 1664098 - DNA, 15 bp, Homo sapiens
tttaagttgaatctt

SEQ ID NO: 1664099 - DNA, 15 bp, Homo sapiens
ttaagttgaatcttt

SEQ ID NO: 1664100 - DNA, 15 bp, Homo sapiens
taagttgaatcttta

SEQ ID NO: 1664101 - DNA, 15 bp, Homo sapiens
aagttgaatctttaa

SEQ ID NO: 1664102 - DNA, 15 bp, Homo sapiens
agttgaatctttaaa

SEQ ID NO: 1664103 - DNA, 15 bp, Homo sapiens
gttgaatctttaaac

SEQ ID NO: 1664104 - DNA, 15 bp, Homo sapiens
ttgaatctttaaact

SEQ ID NO: 1664105 - DNA, 15 bp, Homo sapiens
tgaatctttaaactt

SEQ ID NO: 1664106 - DNA, 15 bp, Homo sapiens
gaatctttaaactta

SEQ ID NO: 1664107 - DNA, 15 bp, Homo sapiens
aatctttaaacttat

SEQ ID NO: 1664108 - DNA, 15 bp, Homo sapiens
atctttaaacttatc

SEQ ID NO: 1664109 - DNA, 15 bp, Homo sapiens
tctttaaacttatct

SEQ ID NO: 1664110 - DNA, 15 bp, Homo sapiens
ctttaaacttatctt

SEQ ID NO: 1664111 - DNA, 15 bp, Homo sapiens
tttaaacttatcttt

SEQ ID NO: 1664112 - DNA, 15 bp, Homo sapiens
ttaaacttatcttta

SEQ ID NO: 1664113 - DNA, 15 bp, Homo sapiens
taaacttatctttat

SEQ ID NO: 1664114 - DNA, 15 bp, Homo sapiens
aaacttatctttatt

SEQ ID NO: 1664115 - DNA, 15 bp, Homo sapiens
aacttatctttattt

SEQ ID NO: 1664116 - DNA, 15 bp, Homo sapiens
acttatctttatttt

SEQ ID NO: 1664117 - DNA, 15 bp, Homo sapiens
cttatctttattttt

SEQ ID NO: 1664118 - DNA, 15 bp, Homo sapiens
ttatctttatttttg

SEQ ID NO: 1664119 - DNA, 15 bp, Homo sapiens
tatctttatttttga

SEQ ID NO: 1664120 - DNA, 15 bp, Homo sapiens
atctttatttttgag

SEQ ID NO: 1664121 - DNA, 15 bp, Homo sapiens
tctttatttttgaga

SEQ ID NO: 1664122 - DNA, 15 bp, Homo sapiens
ctttatttttgagac

SEQ ID NO: 1664123 - DNA, 15 bp, Homo sapiens
ttatttttgagacac

SEQ ID NO: 1664124 - DNA, 15 bp, Homo sapiens
tatttttgagacaca

SEQ ID NO: 1664125 - DNA, 15 bp, Homo sapiens
atttttgagacacag

SEQ ID NO: 1664126 - DNA, 15 bp, Homo sapiens
tttttgagacacagt

SEQ ID NO: 1664127 - DNA, 15 bp, Homo sapiens
ttttgagacacagtc

SEQ ID NO: 1664128 - DNA, 15 bp, Homo sapiens
tttgagacacagtct

SEQ ID NO: 1664129 - DNA, 15 bp, Homo sapiens
ttgagacacagtctc

SEQ ID NO: 1664130 - DNA, 15 bp, Homo sapiens
gtgcagtggtacaac

SEQ ID NO: 1664131 - DNA, 15 bp, Homo sapiens
tgcagtggtacaacc

SEQ ID NO: 1664132 - DNA, 15 bp, Homo sapiens
gcagtggtacaacca

SEQ ID NO: 1664133 - DNA, 15 bp, Homo sapiens
cagtggtacaaccac

SEQ ID NO: 1664134 - DNA, 15 bp, Homo sapiens
agtggtacaaccaca

SEQ ID NO: 1664135 - DNA, 15 bp, Homo sapiens
gtggtacaaccacag

SEQ ID NO: 1664136 - DNA, 15 bp, Homo sapiens
tggtacaaccacagc

SEQ ID NO: 1664137 - DNA, 15 bp, Homo sapiens
ggtacaaccacagct

SEQ ID NO: 1664138 - DNA, 15 bp, Homo sapiens
gtacaaccacagctc

SEQ ID NO: 1664139 - DNA, 15 bp, Homo sapiens
tacaaccacagctca

SEQ ID NO: 1664140 - DNA, 15 bp, Homo sapiens
acaaccacagctcag

SEQ ID NO: 1664141 - DNA, 15 bp, Homo sapiens
caaccacagctcagt

SEQ ID NO: 1664142 - DNA, 15 bp, Homo sapiens
aaccacagctcagtg

SEQ ID NO: 1664143 - DNA, 15 bp, Homo sapiens
accacagctcagtgc

SEQ ID NO: 1664144 - DNA, 15 bp, Homo sapiens
ccacagctcagtgca

SEQ ID NO: 1664145 - DNA, 15 bp, Homo sapiens
cacagctcagtgcag

SEQ ID NO: 1664146 - DNA, 15 bp, Homo sapiens
acagctcagtgcagc

SEQ ID NO: 1664147 - DNA, 15 bp, Homo sapiens
cagctcagtgcagcg

SEQ ID NO: 1664148 - DNA, 15 bp, Homo sapiens
agctcagtgcagcgt

SEQ ID NO: 1664149 - DNA, 15 bp, Homo sapiens
gctcagtgcagcgtt

SEQ ID NO: 1664150 - DNA, 15 bp, Homo sapiens
ctcagtgcagcgttg

SEQ ID NO: 1664151 - DNA, 15 bp, Homo sapiens
tcagtgcagcgttga

SEQ ID NO: 1664152 - DNA, 15 bp, Homo sapiens
cagtgcagcgttgac

SEQ ID NO: 1664153 - DNA, 15 bp, Homo sapiens
agtgcagcgttgacc

SEQ ID NO: 1664154 - DNA, 15 bp, Homo sapiens
gtgcagcgttgacct

SEQ ID NO: 1664155 - DNA, 15 bp, Homo sapiens
tgcagcgttgacctc

SEQ ID NO: 1664156 - DNA, 15 bp, Homo sapiens
gcagcgttgacctcc

SEQ ID NO: 1664157 - DNA, 15 bp, Homo sapiens
cagcgttgacctcct

SEQ ID NO: 1664158 - DNA, 15 bp, Homo sapiens
agcgttgacctcctg

SEQ ID NO: 1664159 - DNA, 15 bp, Homo sapiens
gcgttgacctcctgg

SEQ ID NO: 1664160 - DNA, 15 bp, Homo sapiens
cgttgacctcctggg

SEQ ID NO: 1664161 - DNA, 15 bp, Homo sapiens
gttgacctcctgggc

SEQ ID NO: 1664162 - DNA, 15 bp, Homo sapiens
caagccatcctcccg

SEQ ID NO: 1664163 - DNA, 15 bp, Homo sapiens
aagccatcctcccgc

SEQ ID NO: 1664164 - DNA, 15 bp, Homo sapiens
agccatcctcccgcc

SEQ ID NO: 1664165 - DNA, 15 bp, Homo sapiens
gccatcctcccgcct

SEQ ID NO: 1664166 - DNA, 15 bp, Homo sapiens
ccatcctcccgcctc

SEQ ID NO: 1664167 - DNA, 15 bp, Homo sapiens
catcctcccgcctca

SEQ ID NO: 1664168 - DNA, 15 bp, Homo sapiens
ctacaggcgcacaca

SEQ ID NO: 1664169 - DNA, 15 bp, Homo sapiens
tacaggcgcacacaa

SEQ ID NO: 1664170 - DNA, 15 bp, Homo sapiens
acaggcgcacacaac

SEQ ID NO: 1664171 - DNA, 15 bp, Homo sapiens
caggcgcacacaacc

SEQ ID NO: 1664172 - DNA, 15 bp, Homo sapiens
aggcgcacacaacca

SEQ ID NO: 1664173 - DNA, 15 bp, Homo sapiens
ggcgcacacaaccat

SEQ ID NO: 1664174 - DNA, 15 bp, Homo sapiens
gcgcacacaaccatg

SEQ ID NO: 1664175 - DNA, 15 bp, Homo sapiens
cgcacacaaccatgt

SEQ ID NO: 1664176 - DNA, 15 bp, Homo sapiens
gcacacaaccatgtc

SEQ ID NO: 1664177 - DNA, 15 bp, Homo sapiens
cacacaaccatgtcc

SEQ ID NO: 1664178 - DNA, 15 bp, Homo sapiens
acacaaccatgtcca

SEQ ID NO: 1664179 - DNA, 15 bp, Homo sapiens
cacaaccatgtccag

SEQ ID NO: 1664180 - DNA, 15 bp, Homo sapiens
acaaccatgtccagc

SEQ ID NO: 1664181 - DNA, 15 bp, Homo sapiens
caaccatgtccagct

SEQ ID NO: 1664182 - DNA, 15 bp, Homo sapiens
aaccatgtccagctt

SEQ ID NO: 1664183 - DNA, 15 bp, Homo sapiens
accatgtccagctta

SEQ ID NO: 1664184 - DNA, 15 bp, Homo sapiens
ccatgtccagcttat

SEQ ID NO: 1664185 - DNA, 15 bp, Homo sapiens
catgtccagcttatt

SEQ ID NO: 1664186 - DNA, 15 bp, Homo sapiens
atgtccagcttattt

SEQ ID NO: 1664187 - DNA, 15 bp, Homo sapiens
tgtccagcttatttt

SEQ ID NO: 1664188 - DNA, 15 bp, Homo sapiens
gtccagcttattttt

SEQ ID NO: 1664189 - DNA, 15 bp, Homo sapiens
tccagcttatttttg

SEQ ID NO: 1664190 - DNA, 15 bp, Homo sapiens
ccagcttatttttgt

SEQ ID NO: 1664191 - DNA, 15 bp, Homo sapiens
cagcttatttttgta

SEQ ID NO: 1664192 - DNA, 15 bp, Homo sapiens
agcttatttttgtat

SEQ ID NO: 1664193 - DNA, 15 bp, Homo sapiens
gcttatttttgtatt

SEQ ID NO: 1664194 - DNA, 15 bp, Homo sapiens
cttatttttgtattt

SEQ ID NO: 1664195 - DNA, 15 bp, Homo sapiens
ttatttttgtatttt

SEQ ID NO: 1664196 - DNA, 15 bp, Homo sapiens
tatttttgtattttt

SEQ ID NO: 1664197 - DNA, 15 bp, Homo sapiens
gtagagacagggtcc

SEQ ID NO: 1664198 - DNA, 15 bp, Homo sapiens
tagagacagggtccc

SEQ ID NO: 1664199 - DNA, 15 bp, Homo sapiens
agagacagggtccca

SEQ ID NO: 1664200 - DNA, 15 bp, Homo sapiens
gacagggtcccactg

SEQ ID NO: 1664201 - DNA, 15 bp, Homo sapiens
acagggtcccactgt

SEQ ID NO: 1664202 - DNA, 15 bp, Homo sapiens
cagggtcccactgtg

SEQ ID NO: 1664203 - DNA, 15 bp, Homo sapiens
agggtcccactgtgt

SEQ ID NO: 1664204 - DNA, 15 bp, Homo sapiens
gggtcccactgtgtt

SEQ ID NO: 1664205 - DNA, 15 bp, Homo sapiens
ggtcccactgtgttg

SEQ ID NO: 1664206 - DNA, 15 bp, Homo sapiens
gtcccactgtgttgc

SEQ ID NO: 1664207 - DNA, 15 bp, Homo sapiens
tcccactgtgttgcc

SEQ ID NO: 1664208 - DNA, 15 bp, Homo sapiens
cccactgtgttgccc

SEQ ID NO: 1664209 - DNA, 15 bp, Homo sapiens
ccactgtgttgccct

SEQ ID NO: 1664210 - DNA, 15 bp, Homo sapiens
cactgtgttgccctg

SEQ ID NO: 1664211 - DNA, 15 bp, Homo sapiens
actgtgttgccctgg

SEQ ID NO: 1664212 - DNA, 15 bp, Homo sapiens
ctgtgttgccctggc

SEQ ID NO: 1664213 - DNA, 15 bp, Homo sapiens
tgtgttgccctggct

SEQ ID NO: 1664214 - DNA, 15 bp, Homo sapiens
gtgttgccctggctt

SEQ ID NO: 1664215 - DNA, 15 bp, Homo sapiens
tgttgccctggcttg

SEQ ID NO: 1664216 - DNA, 15 bp, Homo sapiens
gttgccctggcttgt

SEQ ID NO: 1664217 - DNA, 15 bp, Homo sapiens
ttgccctggcttgtt

SEQ ID NO: 1664218 - DNA, 15 bp, Homo sapiens
tgccctggcttgttc

SEQ ID NO: 1664219 - DNA, 15 bp, Homo sapiens
gccctggcttgttct

SEQ ID NO: 1664220 - DNA, 15 bp, Homo sapiens
ccctggcttgttctg

SEQ ID NO: 1664221 - DNA, 15 bp, Homo sapiens
cctggcttgttctga

SEQ ID NO: 1664222 - DNA, 15 bp, Homo sapiens
ctggcttgttctgaa

SEQ ID NO: 1664223 - DNA, 15 bp, Homo sapiens
tggcttgttctgaac

SEQ ID NO: 1664224 - DNA, 15 bp, Homo sapiens
ggcttgttctgaact

SEQ ID NO: 1664225 - DNA, 15 bp, Homo sapiens
gcttgttctgaactc

SEQ ID NO: 1664226 - DNA, 15 bp, Homo sapiens
cttgttctgaactcc

SEQ ID NO: 1664227 - DNA, 15 bp, Homo sapiens
ttgttctgaactcct

SEQ ID NO: 1664228 - DNA, 15 bp, Homo sapiens
tgttctgaactccta

SEQ ID NO: 1664229 - DNA, 15 bp, Homo sapiens
gttctgaactcctag

SEQ ID NO: 1664230 - DNA, 15 bp, Homo sapiens
ttctgaactcctagg

SEQ ID NO: 1664231 - DNA, 15 bp, Homo sapiens
tctgaactcctaggc

SEQ ID NO: 1664232 - DNA, 15 bp, Homo sapiens
ctgaactcctaggct

SEQ ID NO: 1664233 - DNA, 15 bp, Homo sapiens
tgaactcctaggctc

SEQ ID NO: 1664234 - DNA, 15 bp, Homo sapiens
gaactcctaggctca

SEQ ID NO: 1664235 - DNA, 15 bp, Homo sapiens
ctcctaggctcaagt

SEQ ID NO: 1664236 - DNA, 15 bp, Homo sapiens
tcctaggctcaagtg

SEQ ID NO: 1664237 - DNA, 15 bp, Homo sapiens
cctaggctcaagtga

SEQ ID NO: 1664238 - DNA, 15 bp, Homo sapiens
ctaggctcaagtgat

SEQ ID NO: 1664239 - DNA, 15 bp, Homo sapiens
taggctcaagtgatc

SEQ ID NO: 1664240 - DNA, 15 bp, Homo sapiens
ggctcaagtgatccc

SEQ ID NO: 1664241 - DNA, 15 bp, Homo sapiens
tcaagtgatcccccc

SEQ ID NO: 1664242 - DNA, 15 bp, Homo sapiens
caagtgatccccccg

SEQ ID NO: 1664243 - DNA, 15 bp, Homo sapiens
aagtgatccccccgc

SEQ ID NO: 1664244 - DNA, 15 bp, Homo sapiens
agtgatccccccgcc

SEQ ID NO: 1664245 - DNA, 15 bp, Homo sapiens
gtgatccccccgcct

SEQ ID NO: 1664246 - DNA, 15 bp, Homo sapiens
tgatccccccgcctc

SEQ ID NO: 1664247 - DNA, 15 bp, Homo sapiens
gatccccccgcctca

SEQ ID NO: 1664248 - DNA, 15 bp, Homo sapiens
atccccccgcctcac

SEQ ID NO: 1664249 - DNA, 15 bp, Homo sapiens
tccccccgcctcacc

SEQ ID NO: 1664250 - DNA, 15 bp, Homo sapiens
ccccccgcctcaccc

SEQ ID NO: 1664251 - DNA, 15 bp, Homo sapiens
cccccgcctcaccct

SEQ ID NO: 1664252 - DNA, 15 bp, Homo sapiens
ccccgcctcaccctc

SEQ ID NO: 1664253 - DNA, 15 bp, Homo sapiens
cccgcctcaccctcc

SEQ ID NO: 1664254 - DNA, 15 bp, Homo sapiens
ccgcctcaccctccc

SEQ ID NO: 1664255 - DNA, 15 bp, Homo sapiens
cgcctcaccctccca

SEQ ID NO: 1664256 - DNA, 15 bp, Homo sapiens
catgagccaccacat

SEQ ID NO: 1664257 - DNA, 15 bp, Homo sapiens
atgagccaccacatc

SEQ ID NO: 1664258 - DNA, 15 bp, Homo sapiens
tgagccaccacatcc

SEQ ID NO: 1664259 - DNA, 15 bp, Homo sapiens
gagccaccacatcca

SEQ ID NO: 1664260 - DNA, 15 bp, Homo sapiens
agccaccacatccag

SEQ ID NO: 1664261 - DNA, 15 bp, Homo sapiens
gccaccacatccaga

SEQ ID NO: 1664262 - DNA, 15 bp, Homo sapiens
ccaccacatccagac

SEQ ID NO: 1664263 - DNA, 15 bp, Homo sapiens
caccacatccagact

SEQ ID NO: 1664264 - DNA, 15 bp, Homo sapiens
accacatccagactt

SEQ ID NO: 1664265 - DNA, 15 bp, Homo sapiens
ccacatccagacttc

SEQ ID NO: 1664266 - DNA, 15 bp, Homo sapiens
cacatccagacttca

SEQ ID NO: 1664267 - DNA, 15 bp, Homo sapiens
acatccagacttcac

SEQ ID NO: 1664268 - DNA, 15 bp, Homo sapiens
catccagacttcact

SEQ ID NO: 1664269 - DNA, 15 bp, Homo sapiens
atccagacttcactt

SEQ ID NO: 1664270 - DNA, 15 bp, Homo sapiens
tccagacttcacttt

SEQ ID NO: 1664271 - DNA, 15 bp, Homo sapiens
ccagacttcactttt

SEQ ID NO: 1664272 - DNA, 15 bp, Homo sapiens
cagacttcacttttt

SEQ ID NO: 1664273 - DNA, 15 bp, Homo sapiens
agacttcactttttt

SEQ ID NO: 1664274 - DNA, 15 bp, Homo sapiens
gacttcacttttttg

SEQ ID NO: 1664275 - DNA, 15 bp, Homo sapiens
acttcacttttttgt

SEQ ID NO: 1664276 - DNA, 15 bp, Homo sapiens
cttcacttttttgtt

SEQ ID NO: 1664277 - DNA, 15 bp, Homo sapiens
ttcacttttttgttt

SEQ ID NO: 1664278 - DNA, 15 bp, Homo sapiens
tcacttttttgttta

SEQ ID NO: 1664279 - DNA, 15 bp, Homo sapiens
cacttttttgtttaa

SEQ ID NO: 1664280 - DNA, 15 bp, Homo sapiens
acttttttgtttaat

SEQ ID NO: 1664281 - DNA, 15 bp, Homo sapiens
cttttttgtttaatg

SEQ ID NO: 1664282 - DNA, 15 bp, Homo sapiens
ttttttgtttaatgt

SEQ ID NO: 1664283 - DNA, 15 bp, Homo sapiens
tttttgtttaatgtc

SEQ ID NO: 1664284 - DNA, 15 bp, Homo sapiens
ttttgtttaatgtcg

SEQ ID NO: 1664285 - DNA, 15 bp, Homo sapiens
tttgtttaatgtcgc

SEQ ID NO: 1664286 - DNA, 15 bp, Homo sapiens
ttgtttaatgtcgca

SEQ ID NO: 1664287 - DNA, 15 bp, Homo sapiens
tgtttaatgtcgcaa

SEQ ID NO: 1664288 - DNA, 15 bp, Homo sapiens
gtttaatgtcgcaaa

SEQ ID NO: 1664289 - DNA, 15 bp, Homo sapiens
tttaatgtcgcaaat

SEQ ID NO: 1664290 - DNA, 15 bp, Homo sapiens
ttaatgtcgcaaatg

SEQ ID NO: 1664291 - DNA, 15 bp, Homo sapiens
taatgtcgcaaatgg

SEQ ID NO: 1664292 - DNA, 15 bp, Homo sapiens
aatgtcgcaaatggc

SEQ ID NO: 1664293 - DNA, 15 bp, Homo sapiens
atgtcgcaaatggca

SEQ ID NO: 1664294 - DNA, 15 bp, Homo sapiens
tgtcgcaaatggcat

SEQ ID NO: 1664295 - DNA, 15 bp, Homo sapiens
gtcgcaaatggcata

SEQ ID NO: 1664296 - DNA, 15 bp, Homo sapiens
tcgcaaatggcataa

SEQ ID NO: 1664297 - DNA, 15 bp, Homo sapiens
cgcaaatggcataag

SEQ ID NO: 1664298 - DNA, 15 bp, Homo sapiens
gcaaatggcataagg

SEQ ID NO: 1664299 - DNA, 15 bp, Homo sapiens
caaatggcataagga

SEQ ID NO: 1664300 - DNA, 15 bp, Homo sapiens
aaatggcataaggaa

SEQ ID NO: 1664301 - DNA, 15 bp, Homo sapiens
aatggcataaggaat

SEQ ID NO: 1664302 - DNA, 15 bp, Homo sapiens
atggcataaggaatg

SEQ ID NO: 1664303 - DNA, 15 bp, Homo sapiens
tggcataaggaatgg

SEQ ID NO: 1664304 - DNA, 15 bp, Homo sapiens
ggcataaggaatggg

SEQ ID NO: 1664305 - DNA, 15 bp, Homo sapiens
gcataaggaatggga

SEQ ID NO: 1664306 - DNA, 15 bp, Homo sapiens
cataaggaatgggat

SEQ ID NO: 1664307 - DNA, 15 bp, Homo sapiens
ataaggaatgggatt

SEQ ID NO: 1664308 - DNA, 15 bp, Homo sapiens
taaggaatgggattc

SEQ ID NO: 1664309 - DNA, 15 bp, Homo sapiens
ggaatgggattcaat

SEQ ID NO: 1664310 - DNA, 15 bp, Homo sapiens
gaatgggattcaatg

SEQ ID NO: 1664311 - DNA, 15 bp, Homo sapiens
aatgggattcaatgg

SEQ ID NO: 1664312 - DNA, 15 bp, Homo sapiens
atgggattcaatggg

SEQ ID NO: 1664313 - DNA, 15 bp, Homo sapiens
tgggattcaatgggg

SEQ ID NO: 1664314 - DNA, 15 bp, Homo sapiens
gggattcaatgggga

SEQ ID NO: 1664315 - DNA, 15 bp, Homo sapiens
ggattcaatggggac

SEQ ID NO: 1664316 - DNA, 15 bp, Homo sapiens
gattcaatggggaca

SEQ ID NO: 1664317 - DNA, 15 bp, Homo sapiens
attcaatggggacac

SEQ ID NO: 1664318 - DNA, 15 bp, Homo sapiens
ttcaatggggacaca

SEQ ID NO: 1664319 - DNA, 15 bp, Homo sapiens
tcaatggggacacat

SEQ ID NO: 1664320 - DNA, 15 bp, Homo sapiens
caatggggacacatt

SEQ ID NO: 1664321 - DNA, 15 bp, Homo sapiens
aatggggacacattt

SEQ ID NO: 1664322 - DNA, 15 bp, Homo sapiens
atggggacacattta

SEQ ID NO: 1664323 - DNA, 15 bp, Homo sapiens
tggggacacatttat

SEQ ID NO: 1664324 - DNA, 15 bp, Homo sapiens
ggggacacatttata

SEQ ID NO: 1664325 - DNA, 15 bp, Homo sapiens
gggacacatttataa

SEQ ID NO: 1664326 - DNA, 15 bp, Homo sapiens
ggacacatttataaa

SEQ ID NO: 1664327 - DNA, 15 bp, Homo sapiens
gacacatttataaac

SEQ ID NO: 1664328 - DNA, 15 bp, Homo sapiens
acacatttataaacg

SEQ ID NO: 1664329 - DNA, 15 bp, Homo sapiens
cacatttataaacgt

SEQ ID NO: 1664330 - DNA, 15 bp, Homo sapiens
acatttataaacgtt

SEQ ID NO: 1664331 - DNA, 15 bp, Homo sapiens
catttataaacgttg

SEQ ID NO: 1664332 - DNA, 15 bp, Homo sapiens
atttataaacgttgc

SEQ ID NO: 1664333 - DNA, 15 bp, Homo sapiens
tttataaacgttgca

SEQ ID NO: 1664334 - DNA, 15 bp, Homo sapiens
ttataaacgttgcag

SEQ ID NO: 1664335 - DNA, 15 bp, Homo sapiens
tataaacgttgcagc

SEQ ID NO: 1664336 - DNA, 15 bp, Homo sapiens
ataaacgttgcagca

SEQ ID NO: 1664337 - DNA, 15 bp, Homo sapiens
taaacgttgcagcag

SEQ ID NO: 1664338 - DNA, 15 bp, Homo sapiens
aaacgttgcagcagc

SEQ ID NO: 1664339 - DNA, 15 bp, Homo sapiens
aacgttgcagcagct

SEQ ID NO: 1664340 - DNA, 15 bp, Homo sapiens
acgttgcagcagctc

SEQ ID NO: 1664341 - DNA, 15 bp, Homo sapiens
cgttgcagcagctcc

SEQ ID NO: 1664342 - DNA, 15 bp, Homo sapiens
gttgcagcagctcct

SEQ ID NO: 1664343 - DNA, 15 bp, Homo sapiens
ttgcagcagctccta

SEQ ID NO: 1664344 - DNA, 15 bp, Homo sapiens
tgcagcagctcctag

SEQ ID NO: 1664345 - DNA, 15 bp, Homo sapiens
gcagcagctcctaga

SEQ ID NO: 1664346 - DNA, 15 bp, Homo sapiens
cagcagctcctagaa

SEQ ID NO: 1664347 - DNA, 15 bp, Homo sapiens
agcagctcctagaac

SEQ ID NO: 1664348 - DNA, 15 bp, Homo sapiens
gcagctcctagaact

SEQ ID NO: 1664349 - DNA, 15 bp, Homo sapiens
cagctcctagaactt

SEQ ID NO: 1664350 - DNA, 15 bp, Homo sapiens
agctcctagaacttg

SEQ ID NO: 1664351 - DNA, 15 bp, Homo sapiens
gctcctagaacttgc

SEQ ID NO: 1664352 - DNA, 15 bp, Homo sapiens
ctcctagaacttgcc

SEQ ID NO: 1664353 - DNA, 15 bp, Homo sapiens
tcctagaacttgcct

SEQ ID NO: 1664354 - DNA, 15 bp, Homo sapiens
cctagaacttgccta

SEQ ID NO: 1664355 - DNA, 15 bp, Homo sapiens
ctagaacttgcctat

SEQ ID NO: 1664356 - DNA, 15 bp, Homo sapiens
tagaacttgcctatc

SEQ ID NO: 1664357 - DNA, 15 bp, Homo sapiens
agaacttgcctatcc

SEQ ID NO: 1664358 - DNA, 15 bp, Homo sapiens
gaacttgcctatcct

SEQ ID NO: 1664359 - DNA, 15 bp, Homo sapiens
aacttgcctatcctt

SEQ ID NO: 1664360 - DNA, 15 bp, Homo sapiens
acttgcctatccttg

SEQ ID NO: 1664361 - DNA, 15 bp, Homo sapiens
cttgcctatccttgt

SEQ ID NO: 1664362 - DNA, 15 bp, Homo sapiens
ttgcctatccttgta

SEQ ID NO: 1664363 - DNA, 15 bp, Homo sapiens
tgcctatccttgtaa

SEQ ID NO: 1664364 - DNA, 15 bp, Homo sapiens
gcctatccttgtaaa

SEQ ID NO: 1664365 - DNA, 15 bp, Homo sapiens
cctatccttgtaaac

SEQ ID NO: 1664366 - DNA, 15 bp, Homo sapiens
ctatccttgtaaact

SEQ ID NO: 1664367 - DNA, 15 bp, Homo sapiens
tatccttgtaaactt

SEQ ID NO: 1664368 - DNA, 15 bp, Homo sapiens
atccttgtaaacttc

SEQ ID NO: 1664369 - DNA, 15 bp, Homo sapiens
tccttgtaaacttct

SEQ ID NO: 1664370 - DNA, 15 bp, Homo sapiens
ccttgtaaacttctc

SEQ ID NO: 1664371 - DNA, 15 bp, Homo sapiens
cttgtaaacttctct

SEQ ID NO: 1664372 - DNA, 15 bp, Homo sapiens
ttgtaaacttctcta

SEQ ID NO: 1664373 - DNA, 15 bp, Homo sapiens
tgtaaacttctctag

SEQ ID NO: 1664374 - DNA, 15 bp, Homo sapiens
gtaaacttctctagg

SEQ ID NO: 1664375 - DNA, 15 bp, Homo sapiens
taaacttctctaggt

SEQ ID NO: 1664376 - DNA, 15 bp, Homo sapiens
aaacttctctaggtg

SEQ ID NO: 1664377 - DNA, 15 bp, Homo sapiens
aacttctctaggtga

SEQ ID NO: 1664378 - DNA, 15 bp, Homo sapiens
acttctctaggtgat

SEQ ID NO: 1664379 - DNA, 15 bp, Homo sapiens
cttctctaggtgatt

SEQ ID NO: 1664380 - DNA, 15 bp, Homo sapiens
ttctctaggtgattg

SEQ ID NO: 1664381 - DNA, 15 bp, Homo sapiens
tctctaggtgattgc

SEQ ID NO: 1664382 - DNA, 15 bp, Homo sapiens
ctctaggtgattgct

SEQ ID NO: 1664383 - DNA, 15 bp, Homo sapiens
tctaggtgattgcta

SEQ ID NO: 1664384 - DNA, 15 bp, Homo sapiens
ctaggtgattgctaa

SEQ ID NO: 1664385 - DNA, 15 bp, Homo sapiens
taggtgattgctaat

SEQ ID NO: 1664386 - DNA, 15 bp, Homo sapiens
aggtgattgctaatt

SEQ ID NO: 1664387 - DNA, 15 bp, Homo sapiens
ggtgattgctaatta

SEQ ID NO: 1664388 - DNA, 15 bp, Homo sapiens
gtgattgctaattac

SEQ ID NO: 1664389 - DNA, 15 bp, Homo sapiens
tgattgctaattact

SEQ ID NO: 1664390 - DNA, 15 bp, Homo sapiens
gattgctaattactt

SEQ ID NO: 1664391 - DNA, 15 bp, Homo sapiens
attgctaattacttc

SEQ ID NO: 1664392 - DNA, 15 bp, Homo sapiens
ttgctaattacttct

SEQ ID NO: 1664393 - DNA, 15 bp, Homo sapiens
tgctaattacttctt

SEQ ID NO: 1664394 - DNA, 15 bp, Homo sapiens
gctaattacttcttt

SEQ ID NO: 1664395 - DNA, 15 bp, Homo sapiens
ctaattacttctttt

SEQ ID NO: 1664396 - DNA, 15 bp, Homo sapiens
taattacttcttttt

SEQ ID NO: 1664397 - DNA, 15 bp, Homo sapiens
aattacttctttttt

SEQ ID NO: 1664398 - DNA, 15 bp, Homo sapiens
attacttcttttttt

SEQ ID NO: 1664399 - DNA, 15 bp, Homo sapiens
ttacttctttttttt

SEQ ID NO: 1664400 - DNA, 15 bp, Homo sapiens
tacttcttttttttt

SEQ ID NO: 1664401 - DNA, 15 bp, Homo sapiens
acttctttttttttt

SEQ ID NO: 1664402 - DNA, 15 bp, Homo sapiens
gagtacagtggcgca

SEQ ID NO: 1664403 - DNA, 15 bp, Homo sapiens
agtacagtggcgcaa

SEQ ID NO: 1664404 - DNA, 15 bp, Homo sapiens
gtacagtggcgcaat

SEQ ID NO: 1664405 - DNA, 15 bp, Homo sapiens
tacagtggcgcaatc

SEQ ID NO: 1664406 - DNA, 15 bp, Homo sapiens
acagtggcgcaatct

SEQ ID NO: 1664407 - DNA, 15 bp, Homo sapiens
gtggcgcaatctcgt

SEQ ID NO: 1664408 - DNA, 15 bp, Homo sapiens
tggcgcaatctcgtc

SEQ ID NO: 1664409 - DNA, 15 bp, Homo sapiens
ggcgcaatctcgtct

SEQ ID NO: 1664410 - DNA, 15 bp, Homo sapiens
gcgcaatctcgtctc

SEQ ID NO: 1664411 - DNA, 15 bp, Homo sapiens
cgcaatctcgtctca

SEQ ID NO: 1664412 - DNA, 15 bp, Homo sapiens
gcaatctcgtctcac

SEQ ID NO: 1664413 - DNA, 15 bp, Homo sapiens
tctcgtctcactgca

SEQ ID NO: 1664414 - DNA, 15 bp, Homo sapiens
ctcgtctcactgcaa

SEQ ID NO: 1664415 - DNA, 15 bp, Homo sapiens
tcgtctcactgcaaa

SEQ ID NO: 1664416 - DNA, 15 bp, Homo sapiens
cgtctcactgcaaac

SEQ ID NO: 1664417 - DNA, 15 bp, Homo sapiens
gtctcactgcaaact

SEQ ID NO: 1664418 - DNA, 15 bp, Homo sapiens
tctcactgcaaactc

SEQ ID NO: 1664419 - DNA, 15 bp, Homo sapiens
aaactccacctcccg

SEQ ID NO: 1664420 - DNA, 15 bp, Homo sapiens
aactccacctcccgg

SEQ ID NO: 1664421 - DNA, 15 bp, Homo sapiens
actccacctcccggg

SEQ ID NO: 1664422 - DNA, 15 bp, Homo sapiens
gtccccggtttccgc

SEQ ID NO: 1664423 - DNA, 15 bp, Homo sapiens
tccccggtttccgct

SEQ ID NO: 1664424 - DNA, 15 bp, Homo sapiens
ccccggtttccgctg

SEQ ID NO: 1664425 - DNA, 15 bp, Homo sapiens
cccggtttccgctgt

SEQ ID NO: 1664426 - DNA, 15 bp, Homo sapiens
ccggtttccgctgtg

SEQ ID NO: 1664427 - DNA, 15 bp, Homo sapiens
cggtttccgctgtgc

SEQ ID NO: 1664428 - DNA, 15 bp, Homo sapiens
ggtttccgctgtgct

SEQ ID NO: 1664429 - DNA, 15 bp, Homo sapiens
gtttccgctgtgctc

SEQ ID NO: 1664430 - DNA, 15 bp, Homo sapiens
tttccgctgtgctct

SEQ ID NO: 1664431 - DNA, 15 bp, Homo sapiens
ttccgctgtgctctg

SEQ ID NO: 1664432 - DNA, 15 bp, Homo sapiens
tccgctgtgctctgt

SEQ ID NO: 1664433 - DNA, 15 bp, Homo sapiens
ccgctgtgctctgtg

SEQ ID NO: 1664434 - DNA, 15 bp, Homo sapiens
cgctgtgctctgtgg

SEQ ID NO: 1664435 - DNA, 15 bp, Homo sapiens
gctgtgctctgtggc

SEQ ID NO: 1664436 - DNA, 15 bp, Homo sapiens
ctgtgctctgtggcg

SEQ ID NO: 1664437 - DNA, 15 bp, Homo sapiens
tgtgctctgtggcga

SEQ ID NO: 1664438 - DNA, 15 bp, Homo sapiens
gtgctctgtggcgac

SEQ ID NO: 1664439 - DNA, 15 bp, Homo sapiens
tgctctgtggcgaca

SEQ ID NO: 1664440 - DNA, 15 bp, Homo sapiens
gctctgtggcgacac

SEQ ID NO: 1664441 - DNA, 15 bp, Homo sapiens
ctctgtggcgacacc

SEQ ID NO: 1664442 - DNA, 15 bp, Homo sapiens
tctgtggcgacacct

SEQ ID NO: 1664443 - DNA, 15 bp, Homo sapiens
ctgtggcgacacctc

SEQ ID NO: 1664444 - DNA, 15 bp, Homo sapiens
tgtggcgacacctcc

SEQ ID NO: 1664445 - DNA, 15 bp, Homo sapiens
gtggcgacacctccg

SEQ ID NO: 1664446 - DNA, 15 bp, Homo sapiens
tggcgacacctccgt

SEQ ID NO: 1664447 - DNA, 15 bp, Homo sapiens
ggcgacacctccgtc

SEQ ID NO: 1664448 - DNA, 15 bp, Homo sapiens
gcgacacctccgtcc

SEQ ID NO: 1664449 - DNA, 15 bp, Homo sapiens
cgacacctccgtccc

SEQ ID NO: 1664450 - DNA, 15 bp, Homo sapiens
gacacctccgtcccc

SEQ ID NO: 1664451 - DNA, 15 bp, Homo sapiens
acacctccgtcccca

SEQ ID NO: 1664452 - DNA, 15 bp, Homo sapiens
cacctccgtccccac

SEQ ID NO: 1664453 - DNA, 15 bp, Homo sapiens
acctccgtccccacc

SEQ ID NO: 1664454 - DNA, 15 bp, Homo sapiens
cctccgtccccacct

SEQ ID NO: 1664455 - DNA, 15 bp, Homo sapiens
ctccgtccccacctt

SEQ ID NO: 1664456 - DNA, 15 bp, Homo sapiens
tccgtccccaccttg

SEQ ID NO: 1664457 - DNA, 15 bp, Homo sapiens
ccgtccccaccttgt

SEQ ID NO: 1664458 - DNA, 15 bp, Homo sapiens
cgtccccaccttgtc

SEQ ID NO: 1664459 - DNA, 15 bp, Homo sapiens
gtccccaccttgtcc

SEQ ID NO: 1664460 - DNA, 15 bp, Homo sapiens
tccccaccttgtcct

SEQ ID NO: 1664461 - DNA, 15 bp, Homo sapiens
ccccaccttgtcctg

SEQ ID NO: 1664462 - DNA, 15 bp, Homo sapiens
cccaccttgtcctgg

SEQ ID NO: 1664463 - DNA, 15 bp, Homo sapiens
ccaccttgtcctggg

SEQ ID NO: 1664464 - DNA, 15 bp, Homo sapiens
caccttgtcctgggg

SEQ ID NO: 1664465 - DNA, 15 bp, Homo sapiens
accttgtcctggggg

SEQ ID NO: 1664466 - DNA, 15 bp, Homo sapiens
ccttgtcctgggggg

SEQ ID NO: 1664467 - DNA, 15 bp, Homo sapiens
cttgtcctggggggc

SEQ ID NO: 1664468 - DNA, 15 bp, Homo sapiens
ttgtcctggggggcg

SEQ ID NO: 1664469 - DNA, 15 bp, Homo sapiens
tgtcctggggggcgc

SEQ ID NO: 1664470 - DNA, 15 bp, Homo sapiens
gtcctggggggcgcc

SEQ ID NO: 1664471 - DNA, 15 bp, Homo sapiens
tcctggggggcgccc

SEQ ID NO: 1664472 - DNA, 15 bp, Homo sapiens
cctggggggcgccct

SEQ ID NO: 1664473 - DNA, 15 bp, Homo sapiens
ctggggggcgccctc

SEQ ID NO: 1664474 - DNA, 15 bp, Homo sapiens
tggggggcgccctcg

SEQ ID NO: 1664475 - DNA, 15 bp, Homo sapiens
ggggggcgccctcgc

SEQ ID NO: 1664476 - DNA, 15 bp, Homo sapiens
gggggcgccctcgcc

SEQ ID NO: 1664477 - DNA, 15 bp, Homo sapiens
ggggcgccctcgccc

SEQ ID NO: 1664478 - DNA, 15 bp, Homo sapiens
gggcgccctcgcccc

SEQ ID NO: 1664479 - DNA, 15 bp, Homo sapiens
ggcgccctcgcccca

SEQ ID NO: 1664480 - DNA, 15 bp, Homo sapiens
cgccctcgccccacc

SEQ ID NO: 1664481 - DNA, 15 bp, Homo sapiens
gccctcgccccacca

SEQ ID NO: 1664482 - DNA, 15 bp, Homo sapiens
ccctcgccccaccag

SEQ ID NO: 1664483 - DNA, 15 bp, Homo sapiens
cctcgccccaccagc

SEQ ID NO: 1664484 - DNA, 15 bp, Homo sapiens
ctcgccccaccagcc

SEQ ID NO: 1664485 - DNA, 15 bp, Homo sapiens
tcgccccaccagccc

SEQ ID NO: 1664486 - DNA, 15 bp, Homo sapiens
cgccccaccagcccc

SEQ ID NO: 1664487 - DNA, 15 bp, Homo sapiens
gccccaccagccccg

SEQ ID NO: 1664488 - DNA, 15 bp, Homo sapiens
ccccaccagccccga

SEQ ID NO: 1664489 - DNA, 15 bp, Homo sapiens
cccaccagccccgat

SEQ ID NO: 1664490 - DNA, 15 bp, Homo sapiens
ccaccagccccgatc

SEQ ID NO: 1664491 - DNA, 15 bp, Homo sapiens
caccagccccgatca

SEQ ID NO: 1664492 - DNA, 15 bp, Homo sapiens
accagccccgatcaa

SEQ ID NO: 1664493 - DNA, 15 bp, Homo sapiens
ccagccccgatcaag

SEQ ID NO: 1664494 - DNA, 15 bp, Homo sapiens
cagccccgatcaagt

SEQ ID NO: 1664495 - DNA, 15 bp, Homo sapiens
agccccgatcaagtt

SEQ ID NO: 1664496 - DNA, 15 bp, Homo sapiens
gccccgatcaagttc

SEQ ID NO: 1664497 - DNA, 15 bp, Homo sapiens
ccccgatcaagttca

SEQ ID NO: 1664498 - DNA, 15 bp, Homo sapiens
cccgatcaagttcac

SEQ ID NO: 1664499 - DNA, 15 bp, Homo sapiens
ccgatcaagttcaca

SEQ ID NO: 1664500 - DNA, 15 bp, Homo sapiens
cgatcaagttcacag

SEQ ID NO: 1664501 - DNA, 15 bp, Homo sapiens
gatcaagttcacaga

SEQ ID NO: 1664502 - DNA, 15 bp, Homo sapiens
atcaagttcacagag

SEQ ID NO: 1664503 - DNA, 15 bp, Homo sapiens
tcaagttcacagagg

SEQ ID NO: 1664504 - DNA, 15 bp, Homo sapiens
caagttcacagaggg

SEQ ID NO: 1664505 - DNA, 15 bp, Homo sapiens
aagttcacagagggg

SEQ ID NO: 1664506 - DNA, 15 bp, Homo sapiens
agttcacagaggggc

SEQ ID NO: 1664507 - DNA, 15 bp, Homo sapiens
gttcacagaggggcc

SEQ ID NO: 1664508 - DNA, 15 bp, Homo sapiens
ttcacagaggggccc

SEQ ID NO: 1664509 - DNA, 15 bp, Homo sapiens
tcacagaggggcccc

SEQ ID NO: 1664510 - DNA, 15 bp, Homo sapiens
cacagaggggccccc

SEQ ID NO: 1664511 - DNA, 15 bp, Homo sapiens
acagaggggcccccg

SEQ ID NO: 1664512 - DNA, 15 bp, Homo sapiens
cagaggggcccccgg

SEQ ID NO: 1664513 - DNA, 15 bp, Homo sapiens
agaggggcccccggc

SEQ ID NO: 1664514 - DNA, 15 bp, Homo sapiens
gaggggcccccggcc

SEQ ID NO: 1664515 - DNA, 15 bp, Homo sapiens
aggggcccccggcca

SEQ ID NO: 1664516 - DNA, 15 bp, Homo sapiens
ggggcccccggccac

SEQ ID NO: 1664517 - DNA, 15 bp, Homo sapiens
gggcccccggccacc

SEQ ID NO: 1664518 - DNA, 15 bp, Homo sapiens
ggcccccggccaccc

SEQ ID NO: 1664519 - DNA, 15 bp, Homo sapiens
gcccccggccaccct

SEQ ID NO: 1664520 - DNA, 15 bp, Homo sapiens
cccccggccaccctc

SEQ ID NO: 1664521 - DNA, 15 bp, Homo sapiens
ccccggccaccctca

SEQ ID NO: 1664522 - DNA, 15 bp, Homo sapiens
cccggccaccctcaa

SEQ ID NO: 1664523 - DNA, 15 bp, Homo sapiens
ccggccaccctcaag

SEQ ID NO: 1664524 - DNA, 15 bp, Homo sapiens
cggccaccctcaagg

SEQ ID NO: 1664525 - DNA, 15 bp, Homo sapiens
ggccaccctcaaggc

SEQ ID NO: 1664526 - DNA, 15 bp, Homo sapiens
gccaccctcaaggcc

SEQ ID NO: 1664527 - DNA, 15 bp, Homo sapiens
ccaccctcaaggcct

SEQ ID NO: 1664528 - DNA, 15 bp, Homo sapiens
caccctcaaggcctc

SEQ ID NO: 1664529 - DNA, 15 bp, Homo sapiens
accctcaaggcctcg

SEQ ID NO: 1664530 - DNA, 15 bp, Homo sapiens
ccctcaaggcctcgg

SEQ ID NO: 1664531 - DNA, 15 bp, Homo sapiens
cctcaaggcctcggt

SEQ ID NO: 1664532 - DNA, 15 bp, Homo sapiens
ctcaaggcctcggtt

SEQ ID NO: 1664533 - DNA, 15 bp, Homo sapiens
tcaaggcctcggttc

SEQ ID NO: 1664534 - DNA, 15 bp, Homo sapiens
caaggcctcggttcc

SEQ ID NO: 1664535 - DNA, 15 bp, Homo sapiens
aaggcctcggttcct

SEQ ID NO: 1664536 - DNA, 15 bp, Homo sapiens
aggcctcggttcctt

SEQ ID NO: 1664537 - DNA, 15 bp, Homo sapiens
ggcctcggttcctta

SEQ ID NO: 1664538 - DNA, 15 bp, Homo sapiens
gcctcggttccttac

SEQ ID NO: 1664539 - DNA, 15 bp, Homo sapiens
cctcggttccttacg

SEQ ID NO: 1664540 - DNA, 15 bp, Homo sapiens
ctcggttccttacga

SEQ ID NO: 1664541 - DNA, 15 bp, Homo sapiens
tcggttccttacgag

SEQ ID NO: 1664542 - DNA, 15 bp, Homo sapiens
cggttccttacgagg

SEQ ID NO: 1664543 - DNA, 15 bp, Homo sapiens
ggttccttacgaggt

SEQ ID NO: 1664544 - DNA, 15 bp, Homo sapiens
gttccttacgaggtt

SEQ ID NO: 1664545 - DNA, 15 bp, Homo sapiens
ttccttacgaggttg

SEQ ID NO: 1664546 - DNA, 15 bp, Homo sapiens
tccttacgaggttga

SEQ ID NO: 1664547 - DNA, 15 bp, Homo sapiens
ccttacgaggttgaa

SEQ ID NO: 1664548 - DNA, 15 bp, Homo sapiens
cttacgaggttgaaa

SEQ ID NO: 1664549 - DNA, 15 bp, Homo sapiens
ttacgaggttgaaac

SEQ ID NO: 1664550 - DNA, 15 bp, Homo sapiens
tacgaggttgaaacg

SEQ ID NO: 1664551 - DNA, 15 bp, Homo sapiens
acgaggttgaaacgt

SEQ ID NO: 1664552 - DNA, 15 bp, Homo sapiens
cgaggttgaaacgtt

SEQ ID NO: 1664553 - DNA, 15 bp, Homo sapiens
gaggttgaaacgttg

SEQ ID NO: 1664554 - DNA, 15 bp, Homo sapiens
aggttgaaacgttgc

SEQ ID NO: 1664555 - DNA, 15 bp, Homo sapiens
ggttgaaacgttgcc

SEQ ID NO: 1664556 - DNA, 15 bp, Homo sapiens
gttgaaacgttgcct

SEQ ID NO: 1664557 - DNA, 15 bp, Homo sapiens
ttgaaacgttgcctc

SEQ ID NO: 1664558 - DNA, 15 bp, Homo sapiens
tgaaacgttgcctca

SEQ ID NO: 1664559 - DNA, 15 bp, Homo sapiens
gaaacgttgcctcag

SEQ ID NO: 1664560 - DNA, 15 bp, Homo sapiens
aaacgttgcctcaga

SEQ ID NO: 1664561 - DNA, 15 bp, Homo sapiens
aacgttgcctcagaa

SEQ ID NO: 1664562 - DNA, 15 bp, Homo sapiens
acgttgcctcagaat

SEQ ID NO: 1664563 - DNA, 15 bp, Homo sapiens
cgttgcctcagaatc

SEQ ID NO: 1664564 - DNA, 15 bp, Homo sapiens
gttgcctcagaatct

SEQ ID NO: 1664565 - DNA, 15 bp, Homo sapiens
ttgcctcagaatctc

SEQ ID NO: 1664566 - DNA, 15 bp, Homo sapiens
tgcctcagaatctcc

SEQ ID NO: 1664567 - DNA, 15 bp, Homo sapiens
gcctcagaatctccc

SEQ ID NO: 1664568 - DNA, 15 bp, Homo sapiens
cctcagaatctcccc

SEQ ID NO: 1664569 - DNA, 15 bp, Homo sapiens
ctcagaatctccccg

SEQ ID NO: 1664570 - DNA, 15 bp, Homo sapiens
tcagaatctccccgc

SEQ ID NO: 1664571 - DNA, 15 bp, Homo sapiens
cagaatctccccgcc

SEQ ID NO: 1664572 - DNA, 15 bp, Homo sapiens
agaatctccccgccc

SEQ ID NO: 1664573 - DNA, 15 bp, Homo sapiens
gaatctccccgcccc

SEQ ID NO: 1664574 - DNA, 15 bp, Homo sapiens
aatctccccgcccct

SEQ ID NO: 1664575 - DNA, 15 bp, Homo sapiens
atctccccgcccctc

SEQ ID NO: 1664576 - DNA, 15 bp, Homo sapiens
tctccccgcccctcc

SEQ ID NO: 1664577 - DNA, 15 bp, Homo sapiens
ctccccgcccctcct

SEQ ID NO: 1664578 - DNA, 15 bp, Homo sapiens
tccccgcccctcctt

SEQ ID NO: 1664579 - DNA, 15 bp, Homo sapiens
ccccgcccctccttg

SEQ ID NO: 1664580 - DNA, 15 bp, Homo sapiens
cccgcccctccttgg

SEQ ID NO: 1664581 - DNA, 15 bp, Homo sapiens
ccgcccctccttggt

SEQ ID NO: 1664582 - DNA, 15 bp, Homo sapiens
cgcccctccttggtc

SEQ ID NO: 1664583 - DNA, 15 bp, Homo sapiens
gcccctccttggtct

SEQ ID NO: 1664584 - DNA, 15 bp, Homo sapiens
cccctccttggtctg

SEQ ID NO: 1664585 - DNA, 15 bp, Homo sapiens
ccctccttggtctgc

SEQ ID NO: 1664586 - DNA, 15 bp, Homo sapiens
cctccttggtctgca

SEQ ID NO: 1664587 - DNA, 15 bp, Homo sapiens
ctccttggtctgcag

SEQ ID NO: 1664588 - DNA, 15 bp, Homo sapiens
tccttggtctgcagc

SEQ ID NO: 1664589 - DNA, 15 bp, Homo sapiens
ccttggtctgcagcc

SEQ ID NO: 1664590 - DNA, 15 bp, Homo sapiens
cttggtctgcagccg

SEQ ID NO: 1664591 - DNA, 15 bp, Homo sapiens
ttggtctgcagccga

SEQ ID NO: 1664592 - DNA, 15 bp, Homo sapiens
tggtctgcagccgag

SEQ ID NO: 1664593 - DNA, 15 bp, Homo sapiens
ggtctgcagccgaga

SEQ ID NO: 1664594 - DNA, 15 bp, Homo sapiens
gtctgcagccgagat

SEQ ID NO: 1664595 - DNA, 15 bp, Homo sapiens
tctgcagccgagatc

SEQ ID NO: 1664596 - DNA, 15 bp, Homo sapiens
ctgcagccgagatct

SEQ ID NO: 1664597 - DNA, 15 bp, Homo sapiens
tgcagccgagatctt

SEQ ID NO: 1664598 - DNA, 15 bp, Homo sapiens
gcagccgagatcttc

SEQ ID NO: 1664599 - DNA, 15 bp, Homo sapiens
cagccgagatcttca

SEQ ID NO: 1664600 - DNA, 15 bp, Homo sapiens
agccgagatcttcag

SEQ ID NO: 1664601 - DNA, 15 bp, Homo sapiens
gccgagatcttcagc

SEQ ID NO: 1664602 - DNA, 15 bp, Homo sapiens
ccgagatcttcagcc

SEQ ID NO: 1664603 - DNA, 15 bp, Homo sapiens
cgagatcttcagcca

SEQ ID NO: 1664604 - DNA, 15 bp, Homo sapiens
gagatcttcagccac

SEQ ID NO: 1664605 - DNA, 15 bp, Homo sapiens
agatcttcagccacg

SEQ ID NO: 1664606 - DNA, 15 bp, Homo sapiens
gatcttcagccacgg

SEQ ID NO: 1664607 - DNA, 15 bp, Homo sapiens
atcttcagccacggt

SEQ ID NO: 1664608 - DNA, 15 bp, Homo sapiens
tcttcagccacggtg

SEQ ID NO: 1664609 - DNA, 15 bp, Homo sapiens
cttcagccacggtgg

SEQ ID NO: 1664610 - DNA, 15 bp, Homo sapiens
ttcagccacggtggg

SEQ ID NO: 1664611 - DNA, 15 bp, Homo sapiens
tcagccacggtgggg

SEQ ID NO: 1664612 - DNA, 15 bp, Homo sapiens
cagccacggtggggc

SEQ ID NO: 1664613 - DNA, 15 bp, Homo sapiens
agccacggtggggca

SEQ ID NO: 1664614 - DNA, 15 bp, Homo sapiens
gccacggtggggcag

SEQ ID NO: 1664615 - DNA, 15 bp, Homo sapiens
ccacggtggggcagc

SEQ ID NO: 1664616 - DNA, 15 bp, Homo sapiens
cacggtggggcagct

SEQ ID NO: 1664617 - DNA, 15 bp, Homo sapiens
acggtggggcagcta

SEQ ID NO: 1664618 - DNA, 15 bp, Homo sapiens
cggtggggcagctat

SEQ ID NO: 1664619 - DNA, 15 bp, Homo sapiens
ggtggggcagctatc

SEQ ID NO: 1664620 - DNA, 15 bp, Homo sapiens
gtggggcagctatcc

SEQ ID NO: 1664621 - DNA, 15 bp, Homo sapiens
tggggcagctatccc

SEQ ID NO: 1664622 - DNA, 15 bp, Homo sapiens
ggggcagctatcccc

SEQ ID NO: 1664623 - DNA, 15 bp, Homo sapiens
gggcagctatccccc

SEQ ID NO: 1664624 - DNA, 15 bp, Homo sapiens
ggcagctatcccccg

SEQ ID NO: 1664625 - DNA, 15 bp, Homo sapiens
gcagctatcccccgg

SEQ ID NO: 1664626 - DNA, 15 bp, Homo sapiens
cagctatcccccggg

SEQ ID NO: 1664627 - DNA, 15 bp, Homo sapiens
agctatcccccggga

SEQ ID NO: 1664628 - DNA, 15 bp, Homo sapiens
gctatcccccgggac

SEQ ID NO: 1664629 - DNA, 15 bp, Homo sapiens
ctatcccccgggacc

SEQ ID NO: 1664630 - DNA, 15 bp, Homo sapiens
tatcccccgggaccg

SEQ ID NO: 1664631 - DNA, 15 bp, Homo sapiens
atcccccgggaccga

SEQ ID NO: 1664632 - DNA, 15 bp, Homo sapiens
tcccccgggaccgac

SEQ ID NO: 1664633 - DNA, 15 bp, Homo sapiens
cccccgggaccgacc

SEQ ID NO: 1664634 - DNA, 15 bp, Homo sapiens
ccccgggaccgaccc

SEQ ID NO: 1664635 - DNA, 15 bp, Homo sapiens
cccgggaccgacccc

SEQ ID NO: 1664636 - DNA, 15 bp, Homo sapiens
ccgggaccgaccccc

SEQ ID NO: 1664637 - DNA, 15 bp, Homo sapiens
cgggaccgaccccct

SEQ ID NO: 1664638 - DNA, 15 bp, Homo sapiens
gggaccgaccccctg

SEQ ID NO: 1664639 - DNA, 15 bp, Homo sapiens
ggaccgaccccctgg

SEQ ID NO: 1664640 - DNA, 15 bp, Homo sapiens
gaccgaccccctggg

SEQ ID NO: 1664641 - DNA, 15 bp, Homo sapiens
accgaccccctgggg

SEQ ID NO: 1664642 - DNA, 15 bp, Homo sapiens
ccgaccccctggggt

SEQ ID NO: 1664643 - DNA, 15 bp, Homo sapiens
cgaccccctggggtg

SEQ ID NO: 1664644 - DNA, 15 bp, Homo sapiens
gaccccctggggtgg

SEQ ID NO: 1664645 - DNA, 15 bp, Homo sapiens
accccctggggtggc

SEQ ID NO: 1664646 - DNA, 15 bp, Homo sapiens
ccccctggggtggcc

SEQ ID NO: 1664647 - DNA, 15 bp, Homo sapiens
cccctggggtggcct

SEQ ID NO: 1664648 - DNA, 15 bp, Homo sapiens
ccctggggtggcctc

SEQ ID NO: 1664649 - DNA, 15 bp, Homo sapiens
cctggggtggcctcg

SEQ ID NO: 1664650 - DNA, 15 bp, Homo sapiens
ctggggtggcctcgc

SEQ ID NO: 1664651 - DNA, 15 bp, Homo sapiens
tggggtggcctcgct

SEQ ID NO: 1664652 - DNA, 15 bp, Homo sapiens
ggggtggcctcgctt

SEQ ID NO: 1664653 - DNA, 15 bp, Homo sapiens
gggtggcctcgcttc

SEQ ID NO: 1664654 - DNA, 15 bp, Homo sapiens
ggtggcctcgcttct

SEQ ID NO: 1664655 - DNA, 15 bp, Homo sapiens
gtggcctcgcttctt

SEQ ID NO: 1664656 - DNA, 15 bp, Homo sapiens
tggcctcgcttcttc

SEQ ID NO: 1664657 - DNA, 15 bp, Homo sapiens
ggcctcgcttcttca

SEQ ID NO: 1664658 - DNA, 15 bp, Homo sapiens
gcctcgcttcttcag

SEQ ID NO: 1664659 - DNA, 15 bp, Homo sapiens
cctcgcttcttcaga

SEQ ID NO: 1664660 - DNA, 15 bp, Homo sapiens
ctcgcttcttcagag

SEQ ID NO: 1664661 - DNA, 15 bp, Homo sapiens
tcgcttcttcagagg

SEQ ID NO: 1664662 - DNA, 15 bp, Homo sapiens
cgcttcttcagaggc

SEQ ID NO: 1664663 - DNA, 15 bp, Homo sapiens
gcttcttcagaggct

SEQ ID NO: 1664664 - DNA, 15 bp, Homo sapiens
cttcttcagaggctg

SEQ ID NO: 1664665 - DNA, 15 bp, Homo sapiens
ttcttcagaggctgt

SEQ ID NO: 1664666 - DNA, 15 bp, Homo sapiens
tcttcagaggctgtg

SEQ ID NO: 1664667 - DNA, 15 bp, Homo sapiens
cttcagaggctgtga

SEQ ID NO: 1664668 - DNA, 15 bp, Homo sapiens
ttcagaggctgtgaa

SEQ ID NO: 1664669 - DNA, 15 bp, Homo sapiens
tcagaggctgtgaat

SEQ ID NO: 1664670 - DNA, 15 bp, Homo sapiens
cagaggctgtgaatg

SEQ ID NO: 1664671 - DNA, 15 bp, Homo sapiens
agaggctgtgaatgg

SEQ ID NO: 1664672 - DNA, 15 bp, Homo sapiens
gaggctgtgaatggc

SEQ ID NO: 1664673 - DNA, 15 bp, Homo sapiens
aggctgtgaatggct

SEQ ID NO: 1664674 - DNA, 15 bp, Homo sapiens
ggctgtgaatggctt

SEQ ID NO: 1664675 - DNA, 15 bp, Homo sapiens
gctgtgaatggcttc

SEQ ID NO: 1664676 - DNA, 15 bp, Homo sapiens
ctgtgaatggcttcg

SEQ ID NO: 1664677 - DNA, 15 bp, Homo sapiens
tgtgaatggcttcgg

SEQ ID NO: 1664678 - DNA, 15 bp, Homo sapiens
gtgaatggcttcggt

SEQ ID NO: 1664679 - DNA, 15 bp, Homo sapiens
tgaatggcttcggtt

SEQ ID NO: 1664680 - DNA, 15 bp, Homo sapiens
gaatggcttcggttc

SEQ ID NO: 1664681 - DNA, 15 bp, Homo sapiens
aatggcttcggttca

SEQ ID NO: 1664682 - DNA, 15 bp, Homo sapiens
atggcttcggttcag

SEQ ID NO: 1664683 - DNA, 15 bp, Homo sapiens
tggcttcggttcagc

SEQ ID NO: 1664684 - DNA, 15 bp, Homo sapiens
ggcttcggttcagct

SEQ ID NO: 1664685 - DNA, 15 bp, Homo sapiens
gcttcggttcagctg

SEQ ID NO: 1664686 - DNA, 15 bp, Homo sapiens
cttcggttcagctgt

SEQ ID NO: 1664687 - DNA, 15 bp, Homo sapiens
ttcggttcagctgtc

SEQ ID NO: 1664688 - DNA, 15 bp, Homo sapiens
tcggttcagctgtcc

SEQ ID NO: 1664689 - DNA, 15 bp, Homo sapiens
cggttcagctgtcca

SEQ ID NO: 1664690 - DNA, 15 bp, Homo sapiens
ggttcagctgtccaa

SEQ ID NO: 1664691 - DNA, 15 bp, Homo sapiens
gttcagctgtccaag

SEQ ID NO: 1664692 - DNA, 15 bp, Homo sapiens
ttcagctgtccaagc

SEQ ID NO: 1664693 - DNA, 15 bp, Homo sapiens
tcagctgtccaagcg

SEQ ID NO: 1664694 - DNA, 15 bp, Homo sapiens
cagctgtccaagcgg

SEQ ID NO: 1664695 - DNA, 15 bp, Homo sapiens
agctgtccaagcggc

SEQ ID NO: 1664696 - DNA, 15 bp, Homo sapiens
gctgtccaagcggcg

SEQ ID NO: 1664697 - DNA, 15 bp, Homo sapiens
ctgtccaagcggcga

SEQ ID NO: 1664698 - DNA, 15 bp, Homo sapiens
tgtccaagcggcgat

SEQ ID NO: 1664699 - DNA, 15 bp, Homo sapiens
gtccaagcggcgatt

SEQ ID NO: 1664700 - DNA, 15 bp, Homo sapiens
tccaagcggcgattt

SEQ ID NO: 1664701 - DNA, 15 bp, Homo sapiens
ccaagcggcgatttt

SEQ ID NO: 1664702 - DNA, 15 bp, Homo sapiens
caagcggcgattttt

SEQ ID NO: 1664703 - DNA, 15 bp, Homo sapiens
aagcggcgatttttc

SEQ ID NO: 1664704 - DNA, 15 bp, Homo sapiens
agcggcgatttttcc

SEQ ID NO: 1664705 - DNA, 15 bp, Homo sapiens
gcggcgatttttcct

SEQ ID NO: 1664706 - DNA, 15 bp, Homo sapiens
cggcgatttttcctc

SEQ ID NO: 1664707 - DNA, 15 bp, Homo sapiens
ggcgatttttcctct

SEQ ID NO: 1664708 - DNA, 15 bp, Homo sapiens
gcgatttttcctctg

SEQ ID NO: 1664709 - DNA, 15 bp, Homo sapiens
cgatttttcctctgg

SEQ ID NO: 1664710 - DNA, 15 bp, Homo sapiens
gatttttcctctggg

SEQ ID NO: 1664711 - DNA, 15 bp, Homo sapiens
atttttcctctgggt

SEQ ID NO: 1664712 - DNA, 15 bp, Homo sapiens
tttttcctctgggtg

SEQ ID NO: 1664713 - DNA, 15 bp, Homo sapiens
ttttcctctgggtga

SEQ ID NO: 1664714 - DNA, 15 bp, Homo sapiens
tttcctctgggtgaa

SEQ ID NO: 1664715 - DNA, 15 bp, Homo sapiens
ttcctctgggtgaaa

SEQ ID NO: 1664716 - DNA, 15 bp, Homo sapiens
tcctctgggtgaaat

SEQ ID NO: 1664717 - DNA, 15 bp, Homo sapiens
cctctgggtgaaatg

SEQ ID NO: 1664718 - DNA, 15 bp, Homo sapiens
ctctgggtgaaatgg

SEQ ID NO: 1664719 - DNA, 15 bp, Homo sapiens
tctgggtgaaatgga

SEQ ID NO: 1664720 - DNA, 15 bp, Homo sapiens
ctgggtgaaatggat

SEQ ID NO: 1664721 - DNA, 15 bp, Homo sapiens
tgggtgaaatggatt

SEQ ID NO: 1664722 - DNA, 15 bp, Homo sapiens
gggtgaaatggatta

SEQ ID NO: 1664723 - DNA, 15 bp, Homo sapiens
ggtgaaatggattag

SEQ ID NO: 1664724 - DNA, 15 bp, Homo sapiens
gtgaaatggattaga

SEQ ID NO: 1664725 - DNA, 15 bp, Homo sapiens
tgaaatggattagat

SEQ ID NO: 1664726 - DNA, 15 bp, Homo sapiens
gaaatggattagatt

SEQ ID NO: 1664727 - DNA, 15 bp, Homo sapiens
aaatggattagattt

SEQ ID NO: 1664728 - DNA, 15 bp, Homo sapiens
aatggattagatttt

SEQ ID NO: 1664729 - DNA, 15 bp, Homo sapiens
atggattagatttta

SEQ ID NO: 1664730 - DNA, 15 bp, Homo sapiens
tggattagattttag

SEQ ID NO: 1664731 - DNA, 15 bp, Homo sapiens
ggattagattttaga

SEQ ID NO: 1664732 - DNA, 15 bp, Homo sapiens
gattagattttagat

SEQ ID NO: 1664733 - DNA, 15 bp, Homo sapiens
attagattttagatt

SEQ ID NO: 1664734 - DNA, 15 bp, Homo sapiens
ttagattttagattt

SEQ ID NO: 1664735 - DNA, 15 bp, Homo sapiens
tagattttagatttc

SEQ ID NO: 1664736 - DNA, 15 bp, Homo sapiens
agattttagatttcc

SEQ ID NO: 1664737 - DNA, 15 bp, Homo sapiens
gattttagatttcca

SEQ ID NO: 1664738 - DNA, 15 bp, Homo sapiens
attttagatttccac

SEQ ID NO: 1664739 - DNA, 15 bp, Homo sapiens
ttttagatttccaca

SEQ ID NO: 1664740 - DNA, 15 bp, Homo sapiens
tttagatttccacaa

SEQ ID NO: 1664741 - DNA, 15 bp, Homo sapiens
ttagatttccacaag

SEQ ID NO: 1664742 - DNA, 15 bp, Homo sapiens
tagatttccacaaga

SEQ ID NO: 1664743 - DNA, 15 bp, Homo sapiens
agatttccacaagag

SEQ ID NO: 1664744 - DNA, 15 bp, Homo sapiens
gatttccacaagagg

SEQ ID NO: 1664745 - DNA, 15 bp, Homo sapiens
atttccacaagaggc

SEQ ID NO: 1664746 - DNA, 15 bp, Homo sapiens
tttccacaagaggct

SEQ ID NO: 1664747 - DNA, 15 bp, Homo sapiens
ttccacaagaggctg

SEQ ID NO: 1664748 - DNA, 15 bp, Homo sapiens
tccacaagaggctgg

SEQ ID NO: 1664749 - DNA, 15 bp, Homo sapiens
ccacaagaggctggt

SEQ ID NO: 1664750 - DNA, 15 bp, Homo sapiens
cacaagaggctggtt

SEQ ID NO: 1664751 - DNA, 15 bp, Homo sapiens
acaagaggctggtta

SEQ ID NO: 1664752 - DNA, 15 bp, Homo sapiens
caagaggctggttag

SEQ ID NO: 1664753 - DNA, 15 bp, Homo sapiens
aagaggctggttagt

SEQ ID NO: 1664754 - DNA, 15 bp, Homo sapiens
agaggctggttagtg

SEQ ID NO: 1664755 - DNA, 15 bp, Homo sapiens
gaggctggttagtgc

SEQ ID NO: 1664756 - DNA, 15 bp, Homo sapiens
aggctggttagtgca

SEQ ID NO: 1664757 - DNA, 15 bp, Homo sapiens
ggctggttagtgcat

SEQ ID NO: 1664758 - DNA, 15 bp, Homo sapiens
gctggttagtgcatg

SEQ ID NO: 1664759 - DNA, 15 bp, Homo sapiens
ctggttagtgcatga

SEQ ID NO: 1664760 - DNA, 15 bp, Homo sapiens
tggttagtgcatgat

SEQ ID NO: 1664761 - DNA, 15 bp, Homo sapiens
ggttagtgcatgatc

SEQ ID NO: 1664762 - DNA, 15 bp, Homo sapiens
gttagtgcatgatcc

SEQ ID NO: 1664763 - DNA, 15 bp, Homo sapiens
ttagtgcatgatcct

SEQ ID NO: 1664764 - DNA, 15 bp, Homo sapiens
tagtgcatgatcctg

SEQ ID NO: 1664765 - DNA, 15 bp, Homo sapiens
agtgcatgatcctga

SEQ ID NO: 1664766 - DNA, 15 bp, Homo sapiens
gtgcatgatcctgag

SEQ ID NO: 1664767 - DNA, 15 bp, Homo sapiens
tgcatgatcctgagt

SEQ ID NO: 1664768 - DNA, 15 bp, Homo sapiens
gcatgatcctgagtt

SEQ ID NO: 1664769 - DNA, 15 bp, Homo sapiens
catgatcctgagtta

SEQ ID NO: 1664770 - DNA, 15 bp, Homo sapiens
atgatcctgagttag

SEQ ID NO: 1664771 - DNA, 15 bp, Homo sapiens
tgatcctgagttaga

SEQ ID NO: 1664772 - DNA, 15 bp, Homo sapiens
gatcctgagttagag

SEQ ID NO: 1664773 - DNA, 15 bp, Homo sapiens
atcctgagttagagc

SEQ ID NO: 1664774 - DNA, 15 bp, Homo sapiens
tcctgagttagagct

SEQ ID NO: 1664775 - DNA, 15 bp, Homo sapiens
cctgagttagagctt

SEQ ID NO: 1664776 - DNA, 15 bp, Homo sapiens
ctgagttagagcttt

SEQ ID NO: 1664777 - DNA, 15 bp, Homo sapiens
tgagttagagctttt

SEQ ID NO: 1664778 - DNA, 15 bp, Homo sapiens
gagttagagcttttt

SEQ ID NO: 1664779 - DNA, 15 bp, Homo sapiens
agttagagcttttta

SEQ ID NO: 1664780 - DNA, 15 bp, Homo sapiens
gttagagctttttag

SEQ ID NO: 1664781 - DNA, 15 bp, Homo sapiens
ttagagctttttagg

SEQ ID NO: 1664782 - DNA, 15 bp, Homo sapiens
tagagctttttaggt

SEQ ID NO: 1664783 - DNA, 15 bp, Homo sapiens
agagctttttaggtg

SEQ ID NO: 1664784 - DNA, 15 bp, Homo sapiens
gagctttttaggtgg

SEQ ID NO: 1664785 - DNA, 15 bp, Homo sapiens
agctttttaggtggc

SEQ ID NO: 1664786 - DNA, 15 bp, Homo sapiens
gctttttaggtggct

SEQ ID NO: 1664787 - DNA, 15 bp, Homo sapiens
ctttttaggtggctt

SEQ ID NO: 1664788 - DNA, 15 bp, Homo sapiens
tttttaggtggcttt

SEQ ID NO: 1664789 - DNA, 15 bp, Homo sapiens
ttttaggtggcttta

SEQ ID NO: 1664790 - DNA, 15 bp, Homo sapiens
tttaggtggctttaa

SEQ ID NO: 1664791 - DNA, 15 bp, Homo sapiens
ttaggtggctttaaa

SEQ ID NO: 1664792 - DNA, 15 bp, Homo sapiens
taggtggctttaaat

SEQ ID NO: 1664793 - DNA, 15 bp, Homo sapiens
aggtggctttaaatt

SEQ ID NO: 1664794 - DNA, 15 bp, Homo sapiens
ggtggctttaaatta

SEQ ID NO: 1664795 - DNA, 15 bp, Homo sapiens
gtggctttaaattag

SEQ ID NO: 1664796 - DNA, 15 bp, Homo sapiens
tggctttaaattagt

SEQ ID NO: 1664797 - DNA, 15 bp, Homo sapiens
ggctttaaattagtt

SEQ ID NO: 1664798 - DNA, 15 bp, Homo sapiens
gctttaaattagttg

SEQ ID NO: 1664799 - DNA, 15 bp, Homo sapiens
ctttaaattagttgc

SEQ ID NO: 1664800 - DNA, 15 bp, Homo sapiens
tttaaattagttgca

SEQ ID NO: 1664801 - DNA, 15 bp, Homo sapiens
ttaaattagttgcag

SEQ ID NO: 1664802 - DNA, 15 bp, Homo sapiens
taaattagttgcaga

SEQ ID NO: 1664803 - DNA, 15 bp, Homo sapiens
aaattagttgcagag

SEQ ID NO: 1664804 - DNA, 15 bp, Homo sapiens
aattagttgcagaga

SEQ ID NO: 1664805 - DNA, 15 bp, Homo sapiens
attagttgcagagag

SEQ ID NO: 1664806 - DNA, 15 bp, Homo sapiens
ttagttgcagagaga

SEQ ID NO: 1664807 - DNA, 15 bp, Homo sapiens
tagttgcagagagac

SEQ ID NO: 1664808 - DNA, 15 bp, Homo sapiens
agttgcagagagaca

SEQ ID NO: 1664809 - DNA, 15 bp, Homo sapiens
gttgcagagagacag

SEQ ID NO: 1664810 - DNA, 15 bp, Homo sapiens
ttgcagagagacagc

SEQ ID NO: 1664811 - DNA, 15 bp, Homo sapiens
tgcagagagacagcc

SEQ ID NO: 1664812 - DNA, 15 bp, Homo sapiens
gcagagagacagcct

SEQ ID NO: 1664813 - DNA, 15 bp, Homo sapiens
cagagagacagcctc

SEQ ID NO: 1664814 - DNA, 15 bp, Homo sapiens
agagagacagcctcg

SEQ ID NO: 1664815 - DNA, 15 bp, Homo sapiens
gagagacagcctcgc

SEQ ID NO: 1664816 - DNA, 15 bp, Homo sapiens
agagacagcctcgcc

SEQ ID NO: 1664817 - DNA, 15 bp, Homo sapiens
gagacagcctcgccc

SEQ ID NO: 1664818 - DNA, 15 bp, Homo sapiens
agacagcctcgccct

SEQ ID NO: 1664819 - DNA, 15 bp, Homo sapiens
gacagcctcgcccta

SEQ ID NO: 1664820 - DNA, 15 bp, Homo sapiens
acagcctcgccctag

SEQ ID NO: 1664821 - DNA, 15 bp, Homo sapiens
cagcctcgccctaga

SEQ ID NO: 1664822 - DNA, 15 bp, Homo sapiens
agcctcgccctagac

SEQ ID NO: 1664823 - DNA, 15 bp, Homo sapiens
gcctcgccctagaca

SEQ ID NO: 1664824 - DNA, 15 bp, Homo sapiens
cctcgccctagacaa

SEQ ID NO: 1664825 - DNA, 15 bp, Homo sapiens
ctcgccctagacaac

SEQ ID NO: 1664826 - DNA, 15 bp, Homo sapiens
tcgccctagacaaca

SEQ ID NO: 1664827 - DNA, 15 bp, Homo sapiens
cgccctagacaacag

SEQ ID NO: 1664828 - DNA, 15 bp, Homo sapiens
gccctagacaacagc

SEQ ID NO: 1664829 - DNA, 15 bp, Homo sapiens
ccctagacaacagct

SEQ ID NO: 1664830 - DNA, 15 bp, Homo sapiens
cctagacaacagcta

SEQ ID NO: 1664831 - DNA, 15 bp, Homo sapiens
ctagacaacagctac

SEQ ID NO: 1664832 - DNA, 15 bp, Homo sapiens
tagacaacagctaca

SEQ ID NO: 1664833 - DNA, 15 bp, Homo sapiens
agacaacagctacat

SEQ ID NO: 1664834 - DNA, 15 bp, Homo sapiens
gacaacagctacatg

SEQ ID NO: 1664835 - DNA, 15 bp, Homo sapiens
acaacagctacatgg

SEQ ID NO: 1664836 - DNA, 15 bp, Homo sapiens
caacagctacatggc

SEQ ID NO: 1664837 - DNA, 15 bp, Homo sapiens
aacagctacatggcc

SEQ ID NO: 1664838 - DNA, 15 bp, Homo sapiens
acagctacatggccc

SEQ ID NO: 1664839 - DNA, 15 bp, Homo sapiens
cagctacatggccct

SEQ ID NO: 1664840 - DNA, 15 bp, Homo sapiens
agctacatggccctt

SEQ ID NO: 1664841 - DNA, 15 bp, Homo sapiens
gctacatggcccttt

SEQ ID NO: 1664842 - DNA, 15 bp, Homo sapiens
ctacatggccctttc

SEQ ID NO: 1664843 - DNA, 15 bp, Homo sapiens
tacatggccctttcc

SEQ ID NO: 1664844 - DNA, 15 bp, Homo sapiens
acatggccctttccc

SEQ ID NO: 1664845 - DNA, 15 bp, Homo sapiens
ggccctttccctcct

SEQ ID NO: 1664846 - DNA, 15 bp, Homo sapiens
gccctttccctcctg

SEQ ID NO: 1664847 - DNA, 15 bp, Homo sapiens
ccctttccctcctga

SEQ ID NO: 1664848 - DNA, 15 bp, Homo sapiens
cctttccctcctgag

SEQ ID NO: 1664849 - DNA, 15 bp, Homo sapiens
ctttccctcctgaga

SEQ ID NO: 1664850 - DNA, 15 bp, Homo sapiens
tttccctcctgagaa

SEQ ID NO: 1664851 - DNA, 15 bp, Homo sapiens
ttccctcctgagaac

SEQ ID NO: 1664852 - DNA, 15 bp, Homo sapiens
tccctcctgagaacc

SEQ ID NO: 1664853 - DNA, 15 bp, Homo sapiens
ccctcctgagaacca

SEQ ID NO: 1664854 - DNA, 15 bp, Homo sapiens
cctcctgagaaccag

SEQ ID NO: 1664855 - DNA, 15 bp, Homo sapiens
ctcctgagaaccagc

SEQ ID NO: 1664856 - DNA, 15 bp, Homo sapiens
tcctgagaaccagcc

SEQ ID NO: 1664857 - DNA, 15 bp, Homo sapiens
cctgagaaccagcct

SEQ ID NO: 1664858 - DNA, 15 bp, Homo sapiens
ctgagaaccagccta

SEQ ID NO: 1664859 - DNA, 15 bp, Homo sapiens
tgagaaccagcctag

SEQ ID NO: 1664860 - DNA, 15 bp, Homo sapiens
gagaaccagcctagc

SEQ ID NO: 1664861 - DNA, 15 bp, Homo sapiens
agaaccagcctagcc

SEQ ID NO: 1664862 - DNA, 15 bp, Homo sapiens
gaaccagcctagcct

SEQ ID NO: 1664863 - DNA, 15 bp, Homo sapiens
aaccagcctagccta

SEQ ID NO: 1664864 - DNA, 15 bp, Homo sapiens
accagcctagcctag

SEQ ID NO: 1664865 - DNA, 15 bp, Homo sapiens
ccagcctagcctaga

SEQ ID NO: 1664866 - DNA, 15 bp, Homo sapiens
cagcctagcctagaa

SEQ ID NO: 1664867 - DNA, 15 bp, Homo sapiens
agcctagcctagaaa

SEQ ID NO: 1664868 - DNA, 15 bp, Homo sapiens
gcctagcctagaaaa

SEQ ID NO: 1664869 - DNA, 15 bp, Homo sapiens
cctagcctagaaaag

SEQ ID NO: 1664870 - DNA, 15 bp, Homo sapiens
ctagcctagaaaagg

SEQ ID NO: 1664871 - DNA, 15 bp, Homo sapiens
tagcctagaaaagga

SEQ ID NO: 1664872 - DNA, 15 bp, Homo sapiens
agcctagaaaaggat

SEQ ID NO: 1664873 - DNA, 15 bp, Homo sapiens
gcctagaaaaggatt

SEQ ID NO: 1664874 - DNA, 15 bp, Homo sapiens
cctagaaaaggattg

SEQ ID NO: 1664875 - DNA, 15 bp, Homo sapiens
ctagaaaaggattgg

SEQ ID NO: 1664876 - DNA, 15 bp, Homo sapiens
tagaaaaggattggg

SEQ ID NO: 1664877 - DNA, 15 bp, Homo sapiens
agaaaaggattggga

SEQ ID NO: 1664878 - DNA, 15 bp, Homo sapiens
gaaaaggattgggat

SEQ ID NO: 1664879 - DNA, 15 bp, Homo sapiens
aaaaggattgggatt

SEQ ID NO: 1664880 - DNA, 15 bp, Homo sapiens
aaaggattgggattg

SEQ ID NO: 1664881 - DNA, 15 bp, Homo sapiens
aaggattgggattgc

SEQ ID NO: 1664882 - DNA, 15 bp, Homo sapiens
aggattgggattgcc

SEQ ID NO: 1664883 - DNA, 15 bp, Homo sapiens
ggattgggattgcct

SEQ ID NO: 1664884 - DNA, 15 bp, Homo sapiens
gattgggattgcctg

SEQ ID NO: 1664885 - DNA, 15 bp, Homo sapiens
attgggattgcctga

SEQ ID NO: 1664886 - DNA, 15 bp, Homo sapiens
ttgggattgcctgat

SEQ ID NO: 1664887 - DNA, 15 bp, Homo sapiens
tgggattgcctgatg

SEQ ID NO: 1664888 - DNA, 15 bp, Homo sapiens
gggattgcctgatga

SEQ ID NO: 1664889 - DNA, 15 bp, Homo sapiens
ggattgcctgatgaa

SEQ ID NO: 1664890 - DNA, 15 bp, Homo sapiens
gattgcctgatgaac

SEQ ID NO: 1664891 - DNA, 15 bp, Homo sapiens
attgcctgatgaaca

SEQ ID NO: 1664892 - DNA, 15 bp, Homo sapiens
ttgcctgatgaacac

SEQ ID NO: 1664893 - DNA, 15 bp, Homo sapiens
tgcctgatgaacaca

SEQ ID NO: 1664894 - DNA, 15 bp, Homo sapiens
gcctgatgaacacaa

SEQ ID NO: 1664895 - DNA, 15 bp, Homo sapiens
cctgatgaacacaag

SEQ ID NO: 1664896 - DNA, 15 bp, Homo sapiens
ctgatgaacacaagg

SEQ ID NO: 1664897 - DNA, 15 bp, Homo sapiens
tgatgaacacaagga

SEQ ID NO: 1664898 - DNA, 15 bp, Homo sapiens
gatgaacacaaggat

SEQ ID NO: 1664899 - DNA, 15 bp, Homo sapiens
atgaacacaaggatt

SEQ ID NO: 1664900 - DNA, 15 bp, Homo sapiens
tgaacacaaggattg

SEQ ID NO: 1664901 - DNA, 15 bp, Homo sapiens
gaacacaaggattgc

SEQ ID NO: 1664902 - DNA, 15 bp, Homo sapiens
aacacaaggattgca

SEQ ID NO: 1664903 - DNA, 15 bp, Homo sapiens
acacaaggattgcag

SEQ ID NO: 1664904 - DNA, 15 bp, Homo sapiens
cacaaggattgcagg

SEQ ID NO: 1664905 - DNA, 15 bp, Homo sapiens
acaaggattgcagga

SEQ ID NO: 1664906 - DNA, 15 bp, Homo sapiens
caaggattgcaggaa

SEQ ID NO: 1664907 - DNA, 15 bp, Homo sapiens
aaggattgcaggaaa

SEQ ID NO: 1664908 - DNA, 15 bp, Homo sapiens
aggattgcaggaaac

SEQ ID NO: 1664909 - DNA, 15 bp, Homo sapiens
ggattgcaggaaact

SEQ ID NO: 1664910 - DNA, 15 bp, Homo sapiens
gattgcaggaaactt

SEQ ID NO: 1664911 - DNA, 15 bp, Homo sapiens
attgcaggaaacttt

SEQ ID NO: 1664912 - DNA, 15 bp, Homo sapiens
ttgcaggaaactttt

SEQ ID NO: 1664913 - DNA, 15 bp, Homo sapiens
tgcaggaaacttttt

SEQ ID NO: 1664914 - DNA, 15 bp, Homo sapiens
gcaggaaactttttt

SEQ ID NO: 1664915 - DNA, 15 bp, Homo sapiens
caggaaacttttttt

SEQ ID NO: 1664916 - DNA, 15 bp, Homo sapiens
aggaaactttttttt

SEQ ID NO: 1664917 - DNA, 15 bp, Homo sapiens
ggaaacttttttttt

SEQ ID NO: 1664918 - DNA, 15 bp, Homo sapiens
gaaacttttttttta

SEQ ID NO: 1664919 - DNA, 15 bp, Homo sapiens
aaactttttttttaa

SEQ ID NO: 1664920 - DNA, 15 bp, Homo sapiens
aactttttttttaat

SEQ ID NO: 1664921 - DNA, 15 bp, Homo sapiens
actttttttttaatt

SEQ ID NO: 1664922 - DNA, 15 bp, Homo sapiens
ctttttttttaattg

SEQ ID NO: 1664923 - DNA, 15 bp, Homo sapiens
tttttttttaattgg

SEQ ID NO: 1664924 - DNA, 15 bp, Homo sapiens
ttttttttaattggc

SEQ ID NO: 1664925 - DNA, 15 bp, Homo sapiens
tttttttaattggca

SEQ ID NO: 1664926 - DNA, 15 bp, Homo sapiens
ttttttaattggcaa

SEQ ID NO: 1664927 - DNA, 15 bp, Homo sapiens
tttttaattggcaag

SEQ ID NO: 1664928 - DNA, 15 bp, Homo sapiens
ttttaattggcaagg

SEQ ID NO: 1664929 - DNA, 15 bp, Homo sapiens
tttaattggcaaggg

SEQ ID NO: 1664930 - DNA, 15 bp, Homo sapiens
ttaattggcaagggg

SEQ ID NO: 1664931 - DNA, 15 bp, Homo sapiens
taattggcaaggggg

SEQ ID NO: 1664932 - DNA, 15 bp, Homo sapiens
aattggcaagggggt

SEQ ID NO: 1664933 - DNA, 15 bp, Homo sapiens
attggcaagggggtt

SEQ ID NO: 1664934 - DNA, 15 bp, Homo sapiens
ttggcaagggggttg

SEQ ID NO: 1664935 - DNA, 15 bp, Homo sapiens
tggcaagggggttgg

SEQ ID NO: 1664936 - DNA, 15 bp, Homo sapiens
ggcaagggggttggc

SEQ ID NO: 1664937 - DNA, 15 bp, Homo sapiens
gcaagggggttggct

SEQ ID NO: 1664938 - DNA, 15 bp, Homo sapiens
caagggggttggctt

SEQ ID NO: 1664939 - DNA, 15 bp, Homo sapiens
aagggggttggcttt

SEQ ID NO: 1664940 - DNA, 15 bp, Homo sapiens
agggggttggctttg

SEQ ID NO: 1664941 - DNA, 15 bp, Homo sapiens
gggggttggctttga

SEQ ID NO: 1664942 - DNA, 15 bp, Homo sapiens
ggggttggctttgac

SEQ ID NO: 1664943 - DNA, 15 bp, Homo sapiens
gggttggctttgact

SEQ ID NO: 1664944 - DNA, 15 bp, Homo sapiens
ggttggctttgactg

SEQ ID NO: 1664945 - DNA, 15 bp, Homo sapiens
gttggctttgactgg

SEQ ID NO: 1664946 - DNA, 15 bp, Homo sapiens
ttggctttgactgga

SEQ ID NO: 1664947 - DNA, 15 bp, Homo sapiens
tggctttgactggat

SEQ ID NO: 1664948 - DNA, 15 bp, Homo sapiens
ggctttgactggatg

SEQ ID NO: 1664949 - DNA, 15 bp, Homo sapiens
gctttgactggatgg

SEQ ID NO: 1664950 - DNA, 15 bp, Homo sapiens
ctttgactggatgga

SEQ ID NO: 1664951 - DNA, 15 bp, Homo sapiens
tttgactggatggag

SEQ ID NO: 1664952 - DNA, 15 bp, Homo sapiens
ttgactggatggaga

SEQ ID NO: 1664953 - DNA, 15 bp, Homo sapiens
tgactggatggagag

SEQ ID NO: 1664954 - DNA, 15 bp, Homo sapiens
gactggatggagagc

SEQ ID NO: 1664955 - DNA, 15 bp, Homo sapiens
actggatggagagct

SEQ ID NO: 1664956 - DNA, 15 bp, Homo sapiens
ctggatggagagctt

SEQ ID NO: 1664957 - DNA, 15 bp, Homo sapiens
tggatggagagcttt

SEQ ID NO: 1664958 - DNA, 15 bp, Homo sapiens
ggatggagagctttg

SEQ ID NO: 1664959 - DNA, 15 bp, Homo sapiens
gatggagagctttga

SEQ ID NO: 1664960 - DNA, 15 bp, Homo sapiens
atggagagctttgaa

SEQ ID NO: 1664961 - DNA, 15 bp, Homo sapiens
tggagagctttgaac

SEQ ID NO: 1664962 - DNA, 15 bp, Homo sapiens
ggagagctttgaact

SEQ ID NO: 1664963 - DNA, 15 bp, Homo sapiens
gagagctttgaactg

SEQ ID NO: 1664964 - DNA, 15 bp, Homo sapiens
agagctttgaactgc

SEQ ID NO: 1664965 - DNA, 15 bp, Homo sapiens
gagctttgaactgcc

SEQ ID NO: 1664966 - DNA, 15 bp, Homo sapiens
agctttgaactgcct

SEQ ID NO: 1664967 - DNA, 15 bp, Homo sapiens
gctttgaactgcctt

SEQ ID NO: 1664968 - DNA, 15 bp, Homo sapiens
ctttgaactgccttg

SEQ ID NO: 1664969 - DNA, 15 bp, Homo sapiens
tttgaactgccttga

SEQ ID NO: 1664970 - DNA, 15 bp, Homo sapiens
ttgaactgccttgaa

SEQ ID NO: 1664971 - DNA, 15 bp, Homo sapiens
tgaactgccttgaaa

SEQ ID NO: 1664972 - DNA, 15 bp, Homo sapiens
gaactgccttgaaat

SEQ ID NO: 1664973 - DNA, 15 bp, Homo sapiens
aactgccttgaaatt

SEQ ID NO: 1664974 - DNA, 15 bp, Homo sapiens
actgccttgaaattc

SEQ ID NO: 1664975 - DNA, 15 bp, Homo sapiens
ctgccttgaaattca

SEQ ID NO: 1664976 - DNA, 15 bp, Homo sapiens
tgccttgaaattcac

SEQ ID NO: 1664977 - DNA, 15 bp, Homo sapiens
gccttgaaattcacg

SEQ ID NO: 1664978 - DNA, 15 bp, Homo sapiens
ccttgaaattcacgc

SEQ ID NO: 1664979 - DNA, 15 bp, Homo sapiens
cttgaaattcacgct

SEQ ID NO: 1664980 - DNA, 15 bp, Homo sapiens
ttgaaattcacgctg

SEQ ID NO: 1664981 - DNA, 15 bp, Homo sapiens
tgaaattcacgctgt

SEQ ID NO: 1664982 - DNA, 15 bp, Homo sapiens
gaaattcacgctgta

SEQ ID NO: 1664983 - DNA, 15 bp, Homo sapiens
aaattcacgctgtaa

SEQ ID NO: 1664984 - DNA, 15 bp, Homo sapiens
aattcacgctgtaac

SEQ ID NO: 1664985 - DNA, 15 bp, Homo sapiens
attcacgctgtaact

SEQ ID NO: 1664986 - DNA, 15 bp, Homo sapiens
ttcacgctgtaacta

SEQ ID NO: 1664987 - DNA, 15 bp, Homo sapiens
tcacgctgtaactaa

SEQ ID NO: 1664988 - DNA, 15 bp, Homo sapiens
cacgctgtaactaac

SEQ ID NO: 1664989 - DNA, 15 bp, Homo sapiens
acgctgtaactaaca

SEQ ID NO: 1664990 - DNA, 15 bp, Homo sapiens
cgctgtaactaacac

SEQ ID NO: 1664991 - DNA, 15 bp, Homo sapiens
gctgtaactaacaca

SEQ ID NO: 1664992 - DNA, 15 bp, Homo sapiens
ctgtaactaacacac

SEQ ID NO: 1664993 - DNA, 15 bp, Homo sapiens
tgtaactaacacacc

SEQ ID NO: 1664994 - DNA, 15 bp, Homo sapiens
gtaactaacacacca

SEQ ID NO: 1664995 - DNA, 15 bp, Homo sapiens
taactaacacaccag

SEQ ID NO: 1664996 - DNA, 15 bp, Homo sapiens
aactaacacaccagt

SEQ ID NO: 1664997 - DNA, 15 bp, Homo sapiens
actaacacaccagtt

SEQ ID NO: 1664998 - DNA, 15 bp, Homo sapiens
ctaacacaccagttt

SEQ ID NO: 1664999 - DNA, 15 bp, Homo sapiens
taacacaccagtttc

SEQ ID NO: 1665000 - DNA, 15 bp, Homo sapiens
aacacaccagtttcc

SEQ ID NO: 1665001 - DNA, 15 bp, Homo sapiens
acacaccagtttcct

SEQ ID NO: 1665002 - DNA, 15 bp, Homo sapiens
cacaccagtttcctc

SEQ ID NO: 1665003 - DNA, 15 bp, Homo sapiens
acaccagtttcctct

SEQ ID NO: 1665004 - DNA, 15 bp, Homo sapiens
caccagtttcctctg

SEQ ID NO: 1665005 - DNA, 15 bp, Homo sapiens
accagtttcctctgg

SEQ ID NO: 1665006 - DNA, 15 bp, Homo sapiens
ccagtttcctctggg

SEQ ID NO: 1665007 - DNA, 15 bp, Homo sapiens
cagtttcctctggga

SEQ ID NO: 1665008 - DNA, 15 bp, Homo sapiens
agtttcctctgggag

SEQ ID NO: 1665009 - DNA, 15 bp, Homo sapiens
gtttcctctgggagg

SEQ ID NO: 1665010 - DNA, 15 bp, Homo sapiens
tttcctctgggaggc

SEQ ID NO: 1665011 - DNA, 15 bp, Homo sapiens
ttcctctgggaggcc

SEQ ID NO: 1665012 - DNA, 15 bp, Homo sapiens
tcctctgggaggcca

SEQ ID NO: 1665013 - DNA, 15 bp, Homo sapiens
cctctgggaggccag

SEQ ID NO: 1665014 - DNA, 15 bp, Homo sapiens
ctctgggaggccaga

SEQ ID NO: 1665015 - DNA, 15 bp, Homo sapiens
tctgggaggccagag

SEQ ID NO: 1665016 - DNA, 15 bp, Homo sapiens
ctgggaggccagaga

SEQ ID NO: 1665017 - DNA, 15 bp, Homo sapiens
tgggaggccagagag

SEQ ID NO: 1665018 - DNA, 15 bp, Homo sapiens
gggaggccagagagg

SEQ ID NO: 1665019 - DNA, 15 bp, Homo sapiens
ggaggccagagaggg

SEQ ID NO: 1665020 - DNA, 15 bp, Homo sapiens
gaggccagagaggga

SEQ ID NO: 1665021 - DNA, 15 bp, Homo sapiens
aggccagagagggag

SEQ ID NO: 1665022 - DNA, 15 bp, Homo sapiens
ggccagagagggagg

SEQ ID NO: 1665023 - DNA, 15 bp, Homo sapiens
gccagagagggaggg

SEQ ID NO: 1665024 - DNA, 15 bp, Homo sapiens
ccagagagggaggga

SEQ ID NO: 1665025 - DNA, 15 bp, Homo sapiens
cagagagggagggag

SEQ ID NO: 1665026 - DNA, 15 bp, Homo sapiens
agagagggagggagg

SEQ ID NO: 1665027 - DNA, 15 bp, Homo sapiens
gagagggagggaggg

SEQ ID NO: 1665028 - DNA, 15 bp, Homo sapiens
agagggagggagggt

SEQ ID NO: 1665029 - DNA, 15 bp, Homo sapiens
agggagggagggtgt

SEQ ID NO: 1665030 - DNA, 15 bp, Homo sapiens
gggagggagggtgta

SEQ ID NO: 1665031 - DNA, 15 bp, Homo sapiens
ggagggagggtgtaa

SEQ ID NO: 1665032 - DNA, 15 bp, Homo sapiens
gagggagggtgtaat

SEQ ID NO: 1665033 - DNA, 15 bp, Homo sapiens
agggagggtgtaatg

SEQ ID NO: 1665034 - DNA, 15 bp, Homo sapiens
gggagggtgtaatga

SEQ ID NO: 1665035 - DNA, 15 bp, Homo sapiens
ggagggtgtaatgaa

SEQ ID NO: 1665036 - DNA, 15 bp, Homo sapiens
gagggtgtaatgaaa

SEQ ID NO: 1665037 - DNA, 15 bp, Homo sapiens
agggtgtaatgaaat

SEQ ID NO: 1665038 - DNA, 15 bp, Homo sapiens
gggtgtaatgaaata

SEQ ID NO: 1665039 - DNA, 15 bp, Homo sapiens
ggtgtaatgaaatac

SEQ ID NO: 1665040 - DNA, 15 bp, Homo sapiens
gtgtaatgaaatacg

SEQ ID NO: 1665041 - DNA, 15 bp, Homo sapiens
tgtaatgaaatacgg

SEQ ID NO: 1665042 - DNA, 15 bp, Homo sapiens
gtaatgaaatacgga

SEQ ID NO: 1665043 - DNA, 15 bp, Homo sapiens
taatgaaatacggat

SEQ ID NO: 1665044 - DNA, 15 bp, Homo sapiens
aatgaaatacggatg

SEQ ID NO: 1665045 - DNA, 15 bp, Homo sapiens
atgaaatacggatga

SEQ ID NO: 1665046 - DNA, 15 bp, Homo sapiens
tgaaatacggatgat

SEQ ID NO: 1665047 - DNA, 15 bp, Homo sapiens
gaaatacggatgatt

SEQ ID NO: 1665048 - DNA, 15 bp, Homo sapiens
aaatacggatgattg

SEQ ID NO: 1665049 - DNA, 15 bp, Homo sapiens
aatacggatgattgt

SEQ ID NO: 1665050 - DNA, 15 bp, Homo sapiens
atacggatgattgtt

SEQ ID NO: 1665051 - DNA, 15 bp, Homo sapiens
tacggatgattgttc

SEQ ID NO: 1665052 - DNA, 15 bp, Homo sapiens
acggatgattgttct

SEQ ID NO: 1665053 - DNA, 15 bp, Homo sapiens
cggatgattgttctt

SEQ ID NO: 1665054 - DNA, 15 bp, Homo sapiens
ggatgattgttcttt

SEQ ID NO: 1665055 - DNA, 15 bp, Homo sapiens
gatgattgttctttt

SEQ ID NO: 1665056 - DNA, 15 bp, Homo sapiens
atgattgttctttta

SEQ ID NO: 1665057 - DNA, 15 bp, Homo sapiens
tgattgttcttttat

SEQ ID NO: 1665058 - DNA, 15 bp, Homo sapiens
gattgttcttttatt

SEQ ID NO: 1665059 - DNA, 15 bp, Homo sapiens
attgttcttttattt

SEQ ID NO: 1665060 - DNA, 15 bp, Homo sapiens
ttgttcttttatttt

SEQ ID NO: 1665061 - DNA, 15 bp, Homo sapiens
tgttcttttattttt

SEQ ID NO: 1665062 - DNA, 15 bp, Homo sapiens
gttcttttattttta

SEQ ID NO: 1665063 - DNA, 15 bp, Homo sapiens
ttcttttatttttat

SEQ ID NO: 1665064 - DNA, 15 bp, Homo sapiens
cttatttatttttta

SEQ ID NO: 1665065 - DNA, 15 bp, Homo sapiens
ttatttattttttaa

SEQ ID NO: 1665066 - DNA, 15 bp, Homo sapiens
tatttattttttaac

SEQ ID NO: 1665067 - DNA, 15 bp, Homo sapiens
atttattttttaact

SEQ ID NO: 1665068 - DNA, 15 bp, Homo sapiens
tttattttttaactt

SEQ ID NO: 1665069 - DNA, 15 bp, Homo sapiens
ttattttttaacttt

SEQ ID NO: 1665070 - DNA, 15 bp, Homo sapiens
tattttttaactttt

SEQ ID NO: 1665071 - DNA, 15 bp, Homo sapiens
attttttaacttttt

SEQ ID NO: 1665072 - DNA, 15 bp, Homo sapiens
ttttttaactttttg

SEQ ID NO: 1665073 - DNA, 15 bp, Homo sapiens
tttttaactttttgt

SEQ ID NO: 1665074 - DNA, 15 bp, Homo sapiens
ttttaactttttgta

SEQ ID NO: 1665075 - DNA, 15 bp, Homo sapiens
tttaactttttgtag

SEQ ID NO: 1665076 - DNA, 15 bp, Homo sapiens
ttaactttttgtaga

SEQ ID NO: 1665077 - DNA, 15 bp, Homo sapiens
taactttttgtagag

SEQ ID NO: 1665078 - DNA, 15 bp, Homo sapiens
aactttttgtagaga

SEQ ID NO: 1665079 - DNA, 15 bp, Homo sapiens
tgtagagatgaggtc

SEQ ID NO: 1665080 - DNA, 15 bp, Homo sapiens
gtagagatgaggtct

SEQ ID NO: 1665081 - DNA, 15 bp, Homo sapiens
tagagatgaggtctc

SEQ ID NO: 1665082 - DNA, 15 bp, Homo sapiens
agagatgaggtctcg

SEQ ID NO: 1665083 - DNA, 15 bp, Homo sapiens
gagatgaggtctcgc

SEQ ID NO: 1665084 - DNA, 15 bp, Homo sapiens
agatgaggtctcgct

SEQ ID NO: 1665085 - DNA, 15 bp, Homo sapiens
gatgaggtctcgctt

SEQ ID NO: 1665086 - DNA, 15 bp, Homo sapiens
atgaggtctcgcttg

SEQ ID NO: 1665087 - DNA, 15 bp, Homo sapiens
tgaggtctcgcttgg

SEQ ID NO: 1665088 - DNA, 15 bp, Homo sapiens
gaggtctcgcttggt

SEQ ID NO: 1665089 - DNA, 15 bp, Homo sapiens
aggtctcgcttggtt

SEQ ID NO: 1665090 - DNA, 15 bp, Homo sapiens
ggtctcgcttggttg

SEQ ID NO: 1665091 - DNA, 15 bp, Homo sapiens
gtctcgcttggttgc

SEQ ID NO: 1665092 - DNA, 15 bp, Homo sapiens
tctcgcttggttgct

SEQ ID NO: 1665093 - DNA, 15 bp, Homo sapiens
ctcgcttggttgctc

SEQ ID NO: 1665094 - DNA, 15 bp, Homo sapiens
tcgcttggttgctca

SEQ ID NO: 1665095 - DNA, 15 bp, Homo sapiens
cgcttggttgctcag

SEQ ID NO: 1665096 - DNA, 15 bp, Homo sapiens
gcttggttgctcagg

SEQ ID NO: 1665097 - DNA, 15 bp, Homo sapiens
cttggttgctcaggc

SEQ ID NO: 1665098 - DNA, 15 bp, Homo sapiens
ttggttgctcaggct

SEQ ID NO: 1665099 - DNA, 15 bp, Homo sapiens
tggttgctcaggctg

SEQ ID NO: 1665100 - DNA, 15 bp, Homo sapiens
ggttgctcaggctgg

SEQ ID NO: 1665101 - DNA, 15 bp, Homo sapiens
gttgctcaggctggt

SEQ ID NO: 1665102 - DNA, 15 bp, Homo sapiens
ttgctcaggctggtc

SEQ ID NO: 1665103 - DNA, 15 bp, Homo sapiens
tgctcaggctggtct

SEQ ID NO: 1665104 - DNA, 15 bp, Homo sapiens
gctcaggctggtctt

SEQ ID NO: 1665105 - DNA, 15 bp, Homo sapiens
ctcaggctggtcttg

SEQ ID NO: 1665106 - DNA, 15 bp, Homo sapiens
caagcgatcctccta

SEQ ID NO: 1665107 - DNA, 15 bp, Homo sapiens
aagcgatcctcctac

SEQ ID NO: 1665108 - DNA, 15 bp, Homo sapiens
agcgatcctcctacc

SEQ ID NO: 1665109 - DNA, 15 bp, Homo sapiens
gcgatcctcctacct

SEQ ID NO: 1665110 - DNA, 15 bp, Homo sapiens
cgatcctcctacctc

SEQ ID NO: 1665111 - DNA, 15 bp, Homo sapiens
gttgggattacagga

SEQ ID NO: 1665112 - DNA, 15 bp, Homo sapiens
ttgggattacaggag

SEQ ID NO: 1665113 - DNA, 15 bp, Homo sapiens
tgggattacaggagt

SEQ ID NO: 1665114 - DNA, 15 bp, Homo sapiens
gggattacaggagtg

SEQ ID NO: 1665115 - DNA, 15 bp, Homo sapiens
ggattacaggagtga

SEQ ID NO: 1665116 - DNA, 15 bp, Homo sapiens
attacaggagtgagc

SEQ ID NO: 1665117 - DNA, 15 bp, Homo sapiens
ttacaggagtgagcc

SEQ ID NO: 1665118 - DNA, 15 bp, Homo sapiens
tacaggagtgagcca

SEQ ID NO: 1665119 - DNA, 15 bp, Homo sapiens
gagccaccgcgcccc

SEQ ID NO: 1665120 - DNA, 15 bp, Homo sapiens
agccaccgcgcccca

SEQ ID NO: 1665121 - DNA, 15 bp, Homo sapiens
gccaccgcgccccac

SEQ ID NO: 1665122 - DNA, 15 bp, Homo sapiens
ccaccgcgccccacc

SEQ ID NO: 1665123 - DNA, 15 bp, Homo sapiens
caccgcgccccaccg

SEQ ID NO: 1665124 - DNA, 15 bp, Homo sapiens
accgcgccccaccgg

SEQ ID NO: 1665125 - DNA, 15 bp, Homo sapiens
ccgcgccccaccggg

SEQ ID NO: 1665126 - DNA, 15 bp, Homo sapiens
cgcgccccaccgggg

SEQ ID NO: 1665127 - DNA, 15 bp, Homo sapiens
gcgccccaccgggga

SEQ ID NO: 1665128 - DNA, 15 bp, Homo sapiens
cgccccaccggggat

SEQ ID NO: 1665129 - DNA, 15 bp, Homo sapiens
gccccaccggggatg

SEQ ID NO: 1665130 - DNA, 15 bp, Homo sapiens
ccccaccggggatga

SEQ ID NO: 1665131 - DNA, 15 bp, Homo sapiens
cccaccggggatgat

SEQ ID NO: 1665132 - DNA, 15 bp, Homo sapiens
ccaccggggatgatg

SEQ ID NO: 1665133 - DNA, 15 bp, Homo sapiens
caccggggatgatga

SEQ ID NO: 1665134 - DNA, 15 bp, Homo sapiens
accggggatgatgat

SEQ ID NO: 1665135 - DNA, 15 bp, Homo sapiens
ccggggatgatgatg

SEQ ID NO: 1665136 - DNA, 15 bp, Homo sapiens
cggggatgatgatga

SEQ ID NO: 1665137 - DNA, 15 bp, Homo sapiens
ggggatgatgatgat

SEQ ID NO: 1665138 - DNA, 15 bp, Homo sapiens
gggatgatgatgatt

SEQ ID NO: 1665139 - DNA, 15 bp, Homo sapiens
ggatgatgatgattg

SEQ ID NO: 1665140 - DNA, 15 bp, Homo sapiens
gatgatgatgattgc

SEQ ID NO: 1665141 - DNA, 15 bp, Homo sapiens
atgatgatgattgca

SEQ ID NO: 1665142 - DNA, 15 bp, Homo sapiens
tgatgatgattgcaa

SEQ ID NO: 1665143 - DNA, 15 bp, Homo sapiens
gatgatgattgcaaa

SEQ ID NO: 1665144 - DNA, 15 bp, Homo sapiens
atgatgattgcaaac

SEQ ID NO: 1665145 - DNA, 15 bp, Homo sapiens
tgatgattgcaaaca

SEQ ID NO: 1665146 - DNA, 15 bp, Homo sapiens
gatgattgcaaacat

SEQ ID NO: 1665147 - DNA, 15 bp, Homo sapiens
atgattgcaaacatt

SEQ ID NO: 1665148 - DNA, 15 bp, Homo sapiens
tgattgcaaacattc

SEQ ID NO: 1665149 - DNA, 15 bp, Homo sapiens
gattgcaaacattct

SEQ ID NO: 1665150 - DNA, 15 bp, Homo sapiens
attgcaaacattctg

SEQ ID NO: 1665151 - DNA, 15 bp, Homo sapiens
ttgcaaacattctgc

SEQ ID NO: 1665152 - DNA, 15 bp, Homo sapiens
tgcaaacattctgcc

SEQ ID NO: 1665153 - DNA, 15 bp, Homo sapiens
gcaaacattctgcca

SEQ ID NO: 1665154 - DNA, 15 bp, Homo sapiens
caaacattctgccac

SEQ ID NO: 1665155 - DNA, 15 bp, Homo sapiens
aaacattctgccact

SEQ ID NO: 1665156 - DNA, 15 bp, Homo sapiens
aacattctgccactc

SEQ ID NO: 1665157 - DNA, 15 bp, Homo sapiens
acattctgccactca

SEQ ID NO: 1665158 - DNA, 15 bp, Homo sapiens
cattctgccactcag

SEQ ID NO: 1665159 - DNA, 15 bp, Homo sapiens
attctgccactcagt

SEQ ID NO: 1665160 - DNA, 15 bp, Homo sapiens
ttctgccactcagtt

SEQ ID NO: 1665161 - DNA, 15 bp, Homo sapiens
tctgccactcagttt

SEQ ID NO: 1665162 - DNA, 15 bp, Homo sapiens
ctgccactcagtttt

SEQ ID NO: 1665163 - DNA, 15 bp, Homo sapiens
tgccactcagtttta

SEQ ID NO: 1665164 - DNA, 15 bp, Homo sapiens
gccactcagttttac

SEQ ID NO: 1665165 - DNA, 15 bp, Homo sapiens
ccactcagttttaca

SEQ ID NO: 1665166 - DNA, 15 bp, Homo sapiens
cactcagttttacaa

SEQ ID NO: 1665167 - DNA, 15 bp, Homo sapiens
actcagttttacaaa

SEQ ID NO: 1665168 - DNA, 15 bp, Homo sapiens
ctcagttttacaaaa

SEQ ID NO: 1665169 - DNA, 15 bp, Homo sapiens
tcagttttacaaaag

SEQ ID NO: 1665170 - DNA, 15 bp, Homo sapiens
cagttttacaaaaga

SEQ ID NO: 1665171 - DNA, 15 bp, Homo sapiens
agttttacaaaagaa

SEQ ID NO: 1665172 - DNA, 15 bp, Homo sapiens
gttttacaaaagaaa

SEQ ID NO: 1665173 - DNA, 15 bp, Homo sapiens
ttttacaaaagaaag

SEQ ID NO: 1665174 - DNA, 15 bp, Homo sapiens
tttacaaaagaaaga

SEQ ID NO: 1665175 - DNA, 15 bp, Homo sapiens
ttacaaaagaaagag

SEQ ID NO: 1665176 - DNA, 15 bp, Homo sapiens
tacaaaagaaagaga

SEQ ID NO: 1665177 - DNA, 15 bp, Homo sapiens
acaaaagaaagagag

SEQ ID NO: 1665178 - DNA, 15 bp, Homo sapiens
caaaagaaagagagg

SEQ ID NO: 1665179 - DNA, 15 bp, Homo sapiens
aaaagaaagagaggc

SEQ ID NO: 1665180 - DNA, 15 bp, Homo sapiens
aaagaaagagaggca

SEQ ID NO: 1665181 - DNA, 15 bp, Homo sapiens
aagaaagagaggcac

SEQ ID NO: 1665182 - DNA, 15 bp, Homo sapiens
agaaagagaggcact

SEQ ID NO: 1665183 - DNA, 15 bp, Homo sapiens
gaaagagaggcactg

SEQ ID NO: 1665184 - DNA, 15 bp, Homo sapiens
aaagagaggcactgg

SEQ ID NO: 1665185 - DNA, 15 bp, Homo sapiens
aagagaggcactgga

SEQ ID NO: 1665186 - DNA, 15 bp, Homo sapiens
agagaggcactggat

SEQ ID NO: 1665187 - DNA, 15 bp, Homo sapiens
gagaggcactggatt

SEQ ID NO: 1665188 - DNA, 15 bp, Homo sapiens
agaggcactggatta

SEQ ID NO: 1665189 - DNA, 15 bp, Homo sapiens
gaggcactggattaa

SEQ ID NO: 1665190 - DNA, 15 bp, Homo sapiens
aggcactggattaat

SEQ ID NO: 1665191 - DNA, 15 bp, Homo sapiens
ggcactggattaatg

SEQ ID NO: 1665192 - DNA, 15 bp, Homo sapiens
gcactggattaatgt

SEQ ID NO: 1665193 - DNA, 15 bp, Homo sapiens
cactggattaatgtg

SEQ ID NO: 1665194 - DNA, 15 bp, Homo sapiens
actggattaatgtgt

SEQ ID NO: 1665195 - DNA, 15 bp, Homo sapiens
ctggattaatgtgta

SEQ ID NO: 1665196 - DNA, 15 bp, Homo sapiens
tggattaatgtgtat

SEQ ID NO: 1665197 - DNA, 15 bp, Homo sapiens
ggattaatgtgtatc

SEQ ID NO: 1665198 - DNA, 15 bp, Homo sapiens
gattaatgtgtatct

SEQ ID NO: 1665199 - DNA, 15 bp, Homo sapiens
attaatgtgtatctc

SEQ ID NO: 1665200 - DNA, 15 bp, Homo sapiens
ttaatgtgtatctca

SEQ ID NO: 1665201 - DNA, 15 bp, Homo sapiens
taatgtgtatctcac

SEQ ID NO: 1665202 - DNA, 15 bp, Homo sapiens
aatgtgtatctcact

SEQ ID NO: 1665203 - DNA, 15 bp, Homo sapiens
atgtgtatctcactc

SEQ ID NO: 1665204 - DNA, 15 bp, Homo sapiens
tgtgtatctcactca

SEQ ID NO: 1665205 - DNA, 15 bp, Homo sapiens
gtgtatctcactcac

SEQ ID NO: 1665206 - DNA, 15 bp, Homo sapiens
tgtatctcactcacc

SEQ ID NO: 1665207 - DNA, 15 bp, Homo sapiens
gtatctcactcacca

SEQ ID NO: 1665208 - DNA, 15 bp, Homo sapiens
tatctcactcaccaa

SEQ ID NO: 1665209 - DNA, 15 bp, Homo sapiens
atctcactcaccaat

SEQ ID NO: 1665210 - DNA, 15 bp, Homo sapiens
tctcactcaccaatc

SEQ ID NO: 1665211 - DNA, 15 bp, Homo sapiens
ctcactcaccaatca

SEQ ID NO: 1665212 - DNA, 15 bp, Homo sapiens
tcactcaccaatcaa

SEQ ID NO: 1665213 - DNA, 15 bp, Homo sapiens
cactcaccaatcaac

SEQ ID NO: 1665214 - DNA, 15 bp, Homo sapiens
actcaccaatcaacc

SEQ ID NO: 1665215 - DNA, 15 bp, Homo sapiens
ctcaccaatcaacct

SEQ ID NO: 1665216 - DNA, 15 bp, Homo sapiens
tcaccaatcaacctc

SEQ ID NO: 1665217 - DNA, 15 bp, Homo sapiens
caccaatcaacctct

SEQ ID NO: 1665218 - DNA, 15 bp, Homo sapiens
accaatcaacctctt

SEQ ID NO: 1665219 - DNA, 15 bp, Homo sapiens
ccaatcaacctcttc

SEQ ID NO: 1665220 - DNA, 15 bp, Homo sapiens
caatcaacctcttcc

SEQ ID NO: 1665221 - DNA, 15 bp, Homo sapiens
aatcaacctcttcct

SEQ ID NO: 1665222 - DNA, 15 bp, Homo sapiens
atcaacctcttcctt

SEQ ID NO: 1665223 - DNA, 15 bp, Homo sapiens
tcaacctcttcctta

SEQ ID NO: 1665224 - DNA, 15 bp, Homo sapiens
caacctcttccttaa

SEQ ID NO: 1665225 - DNA, 15 bp, Homo sapiens
aacctcttccttaag

SEQ ID NO: 1665226 - DNA, 15 bp, Homo sapiens
acctcttccttaaga

SEQ ID NO: 1665227 - DNA, 15 bp, Homo sapiens
cctcttccttaagag

SEQ ID NO: 1665228 - DNA, 15 bp, Homo sapiens
ctcttccttaagaga

SEQ ID NO: 1665229 - DNA, 15 bp, Homo sapiens
tcttccttaagagaa

SEQ ID NO: 1665230 - DNA, 15 bp, Homo sapiens
cttccttaagagaaa

SEQ ID NO: 1665231 - DNA, 15 bp, Homo sapiens
ttccttaagagaaaa

SEQ ID NO: 1665232 - DNA, 15 bp, Homo sapiens
tccttaagagaaaat

SEQ ID NO: 1665233 - DNA, 15 bp, Homo sapiens
ccttaagagaaaatg

SEQ ID NO: 1665234 - DNA, 15 bp, Homo sapiens
cttaagagaaaatgt

SEQ ID NO: 1665235 - DNA, 15 bp, Homo sapiens
ttaagagaaaatgtt

SEQ ID NO: 1665236 - DNA, 15 bp, Homo sapiens
taagagaaaatgtta

SEQ ID NO: 1665237 - DNA, 15 bp, Homo sapiens
aagagaaaatgttaa

SEQ ID NO: 1665238 - DNA, 15 bp, Homo sapiens
agagaaaatgttaag

SEQ ID NO: 1665239 - DNA, 15 bp, Homo sapiens
gagaaaatgttaagg

SEQ ID NO: 1665240 - DNA, 15 bp, Homo sapiens
agaaaatgttaagga

SEQ ID NO: 1665241 - DNA, 15 bp, Homo sapiens
gaaaatgttaaggaa

SEQ ID NO: 1665242 - DNA, 15 bp, Homo sapiens
aaaatgttaaggaag

SEQ ID NO: 1665243 - DNA, 15 bp, Homo sapiens
aaatgttaaggaagt

SEQ ID NO: 1665244 - DNA, 15 bp, Homo sapiens
aatgttaaggaagtc

SEQ ID NO: 1665245 - DNA, 15 bp, Homo sapiens
atgttaaggaagtct

SEQ ID NO: 1665246 - DNA, 15 bp, Homo sapiens
tgttaaggaagtctt

SEQ ID NO: 1665247 - DNA, 15 bp, Homo sapiens
gttaaggaagtctta

SEQ ID NO: 1665248 - DNA, 15 bp, Homo sapiens
ttaaggaagtcttag

SEQ ID NO: 1665249 - DNA, 15 bp, Homo sapiens
taaggaagtcttagg

SEQ ID NO: 1665250 - DNA, 15 bp, Homo sapiens
aaggaagtcttaggc

SEQ ID NO: 1665251 - DNA, 15 bp, Homo sapiens
aggaagtcttaggca

SEQ ID NO: 1665252 - DNA, 15 bp, Homo sapiens
ggaagtcttaggcaa

SEQ ID NO: 1665253 - DNA, 15 bp, Homo sapiens
gaagtcttaggcaag

SEQ ID NO: 1665254 - DNA, 15 bp, Homo sapiens
aagtcttaggcaagg

SEQ ID NO: 1665255 - DNA, 15 bp, Homo sapiens
agtcttaggcaaggc

SEQ ID NO: 1665256 - DNA, 15 bp, Homo sapiens
gtcttaggcaaggcc

SEQ ID NO: 1665257 - DNA, 15 bp, Homo sapiens
tcttaggcaaggcct

SEQ ID NO: 1665258 - DNA, 15 bp, Homo sapiens
cttaggcaaggcctt

SEQ ID NO: 1665259 - DNA, 15 bp, Homo sapiens
ttaggcaaggccttg

SEQ ID NO: 1665260 - DNA, 15 bp, Homo sapiens
taggcaaggccttgt

SEQ ID NO: 1665261 - DNA, 15 bp, Homo sapiens
aggcaaggccttgtt

SEQ ID NO: 1665262 - DNA, 15 bp, Homo sapiens
ggcaaggccttgttt

SEQ ID NO: 1665263 - DNA, 15 bp, Homo sapiens
gcaaggccttgtttg

SEQ ID NO: 1665264 - DNA, 15 bp, Homo sapiens
caaggccttgtttgt

SEQ ID NO: 1665265 - DNA, 15 bp, Homo sapiens
aaggccttgtttgtt

SEQ ID NO: 1665266 - DNA, 15 bp, Homo sapiens
aggccttgtttgttc

SEQ ID NO: 1665267 - DNA, 15 bp, Homo sapiens
ggccttgtttgttca

SEQ ID NO: 1665268 - DNA, 15 bp, Homo sapiens
gccttgtttgttcat

SEQ ID NO: 1665269 - DNA, 15 bp, Homo sapiens
ccttgtttgttcatc

SEQ ID NO: 1665270 - DNA, 15 bp, Homo sapiens
cttgtttgttcatca

SEQ ID NO: 1665271 - DNA, 15 bp, Homo sapiens
ttgtttgttcatcac

SEQ ID NO: 1665272 - DNA, 15 bp, Homo sapiens
tgtttgttcatcact

SEQ ID NO: 1665273 - DNA, 15 bp, Homo sapiens
gtttgttcatcactt

SEQ ID NO: 1665274 - DNA, 15 bp, Homo sapiens
tttgttcatcacttt

SEQ ID NO: 1665275 - DNA, 15 bp, Homo sapiens
ttgttcatcacttta

SEQ ID NO: 1665276 - DNA, 15 bp, Homo sapiens
tgttcatcactttag

SEQ ID NO: 1665277 - DNA, 15 bp, Homo sapiens
gttcatcactttagt

SEQ ID NO: 1665278 - DNA, 15 bp, Homo sapiens
ttcatcactttagtt

SEQ ID NO: 1665279 - DNA, 15 bp, Homo sapiens
tcatcactttagttt

SEQ ID NO: 1665280 - DNA, 15 bp, Homo sapiens
catcactttagtttc

SEQ ID NO: 1665281 - DNA, 15 bp, Homo sapiens
atcactttagtttct

SEQ ID NO: 1665282 - DNA, 15 bp, Homo sapiens
tcactttagtttctc

SEQ ID NO: 1665283 - DNA, 15 bp, Homo sapiens
cactttagtttctct

SEQ ID NO: 1665284 - DNA, 15 bp, Homo sapiens
actttagtttctctc

SEQ ID NO: 1665285 - DNA, 15 bp, Homo sapiens
ctttagtttctctct

SEQ ID NO: 1665286 - DNA, 15 bp, Homo sapiens
tttagtttctctctc

SEQ ID NO: 1665287 - DNA, 15 bp, Homo sapiens
ttagtttctctctcc

SEQ ID NO: 1665288 - DNA, 15 bp, Homo sapiens
tagtttctctctccc

SEQ ID NO: 1665289 - DNA, 15 bp, Homo sapiens
agtttctctctcccg

SEQ ID NO: 1665290 - DNA, 15 bp, Homo sapiens
gtttctctctcccgg

SEQ ID NO: 1665291 - DNA, 15 bp, Homo sapiens
tttctctctcccggg

SEQ ID NO: 1665292 - DNA, 15 bp, Homo sapiens
ttctctctcccggga

SEQ ID NO: 1665293 - DNA, 15 bp, Homo sapiens
tctctctcccgggat

SEQ ID NO: 1665294 - DNA, 15 bp, Homo sapiens
ctctctcccgggatg

SEQ ID NO: 1665295 - DNA, 15 bp, Homo sapiens
tctctcccgggatgg

SEQ ID NO: 1665296 - DNA, 15 bp, Homo sapiens
ctctcccgggatggc

SEQ ID NO: 1665297 - DNA, 15 bp, Homo sapiens
tctcccgggatggct

SEQ ID NO: 1665298 - DNA, 15 bp, Homo sapiens
ctcccgggatggctg

SEQ ID NO: 1665299 - DNA, 15 bp, Homo sapiens
tcccgggatggctga

SEQ ID NO: 1665300 - DNA, 15 bp, Homo sapiens
cccgggatggctgag

SEQ ID NO: 1665301 - DNA, 15 bp, Homo sapiens
ccgggatggctgaga

SEQ ID NO: 1665302 - DNA, 15 bp, Homo sapiens
cgggatggctgagaa

SEQ ID NO: 1665303 - DNA, 15 bp, Homo sapiens
gggatggctgagaat

SEQ ID NO: 1665304 - DNA, 15 bp, Homo sapiens
ggatggctgagaatg

SEQ ID NO: 1665305 - DNA, 15 bp, Homo sapiens
gatggctgagaatgt

SEQ ID NO: 1665306 - DNA, 15 bp, Homo sapiens
atggctgagaatgtg

SEQ ID NO: 1665307 - DNA, 15 bp, Homo sapiens
tggctgagaatgtga

SEQ ID NO: 1665308 - DNA, 15 bp, Homo sapiens
ggctgagaatgtgat

SEQ ID NO: 1665309 - DNA, 15 bp, Homo sapiens
gctgagaatgtgatg

SEQ ID NO: 1665310 - DNA, 15 bp, Homo sapiens
ctgagaatgtgatgt

SEQ ID NO: 1665311 - DNA, 15 bp, Homo sapiens
tgagaatgtgatgtt

SEQ ID NO: 1665312 - DNA, 15 bp, Homo sapiens
gagaatgtgatgttt

SEQ ID NO: 1665313 - DNA, 15 bp, Homo sapiens
agaatgtgatgtttc

SEQ ID NO: 1665314 - DNA, 15 bp, Homo sapiens
gaatgtgatgtttcc

SEQ ID NO: 1665315 - DNA, 15 bp, Homo sapiens
aatgtgatgtttcct

SEQ ID NO: 1665316 - DNA, 15 bp, Homo sapiens
atgtgatgtttcctc

SEQ ID NO: 1665317 - DNA, 15 bp, Homo sapiens
tgtgatgtttcctct

SEQ ID NO: 1665318 - DNA, 15 bp, Homo sapiens
gtgatgtttcctctg

SEQ ID NO: 1665319 - DNA, 15 bp, Homo sapiens
tgatgtttcctctgt

SEQ ID NO: 1665320 - DNA, 15 bp, Homo sapiens
gatgtttcctctgtt

SEQ ID NO: 1665321 - DNA, 15 bp, Homo sapiens
atgtttcctctgttg

SEQ ID NO: 1665322 - DNA, 15 bp, Homo sapiens
tgtttcctctgttgt

SEQ ID NO: 1665323 - DNA, 15 bp, Homo sapiens
gtttcctctgttgtc

SEQ ID NO: 1665324 - DNA, 15 bp, Homo sapiens
tttcctctgttgtca

SEQ ID NO: 1665325 - DNA, 15 bp, Homo sapiens
ttcctctgttgtcaa

SEQ ID NO: 1665326 - DNA, 15 bp, Homo sapiens
tcctctgttgtcaag

SEQ ID NO: 1665327 - DNA, 15 bp, Homo sapiens
cctctgttgtcaagg

SEQ ID NO: 1665328 - DNA, 15 bp, Homo sapiens
ctctgttgtcaagga

SEQ ID NO: 1665329 - DNA, 15 bp, Homo sapiens
tctgttgtcaaggag

SEQ ID NO: 1665330 - DNA, 15 bp, Homo sapiens
ctgttgtcaaggaga

SEQ ID NO: 1665331 - DNA, 15 bp, Homo sapiens
tgttgtcaaggagac

SEQ ID NO: 1665332 - DNA, 15 bp, Homo sapiens
gttgtcaaggagact

SEQ ID NO: 1665333 - DNA, 15 bp, Homo sapiens
ttgtcaaggagacta

SEQ ID NO: 1665334 - DNA, 15 bp, Homo sapiens
tgtcaaggagactac

SEQ ID NO: 1665335 - DNA, 15 bp, Homo sapiens
gtcaaggagactaca

SEQ ID NO: 1665336 - DNA, 15 bp, Homo sapiens
tcaaggagactacac

SEQ ID NO: 1665337 - DNA, 15 bp, Homo sapiens
caaggagactacacc

SEQ ID NO: 1665338 - DNA, 15 bp, Homo sapiens
aaggagactacaccc

SEQ ID NO: 1665339 - DNA, 15 bp, Homo sapiens
aggagactacacccc

SEQ ID NO: 1665340 - DNA, 15 bp, Homo sapiens
ggagactacacccct

SEQ ID NO: 1665341 - DNA, 15 bp, Homo sapiens
gagactacacccctg

SEQ ID NO: 1665342 - DNA, 15 bp, Homo sapiens
agactacacccctga

SEQ ID NO: 1665343 - DNA, 15 bp, Homo sapiens
gactacacccctgat

SEQ ID NO: 1665344 - DNA, 15 bp, Homo sapiens
actacacccctgatg

SEQ ID NO: 1665345 - DNA, 15 bp, Homo sapiens
ctacacccctgatgt

SEQ ID NO: 1665346 - DNA, 15 bp, Homo sapiens
tacacccctgatgtt

SEQ ID NO: 1665347 - DNA, 15 bp, Homo sapiens
acacccctgatgttt

SEQ ID NO: 1665348 - DNA, 15 bp, Homo sapiens
cacccctgatgtttt

SEQ ID NO: 1665349 - DNA, 15 bp, Homo sapiens
acccctgatgttttc

SEQ ID NO: 1665350 - DNA, 15 bp, Homo sapiens
cccctgatgttttcc

SEQ ID NO: 1665351 - DNA, 15 bp, Homo sapiens
ccctgatgttttcct

SEQ ID NO: 1665352 - DNA, 15 bp, Homo sapiens
cctgatgttttcctc

SEQ ID NO: 1665353 - DNA, 15 bp, Homo sapiens
ctgatgttttcctcc

SEQ ID NO: 1665354 - DNA, 15 bp, Homo sapiens
tgatgttttcctcca

SEQ ID NO: 1665355 - DNA, 15 bp, Homo sapiens
gatgttttcctccag

SEQ ID NO: 1665356 - DNA, 15 bp, Homo sapiens
atgttttcctccaga

SEQ ID NO: 1665357 - DNA, 15 bp, Homo sapiens
tgttttcctccagac

SEQ ID NO: 1665358 - DNA, 15 bp, Homo sapiens
gttttcctccagact

SEQ ID NO: 1665359 - DNA, 15 bp, Homo sapiens
ttttcctccagactt

SEQ ID NO: 1665360 - DNA, 15 bp, Homo sapiens
tttcctccagacttc

SEQ ID NO: 1665361 - DNA, 15 bp, Homo sapiens
ttcctccagacttct

SEQ ID NO: 1665362 - DNA, 15 bp, Homo sapiens
tcctccagacttctg

SEQ ID NO: 1665363 - DNA, 15 bp, Homo sapiens
cctccagacttctga

SEQ ID NO: 1665364 - DNA, 15 bp, Homo sapiens
ctccagacttctgag

SEQ ID NO: 1665365 - DNA, 15 bp, Homo sapiens
tccagacttctgaga

SEQ ID NO: 1665366 - DNA, 15 bp, Homo sapiens
ccagacttctgagag

SEQ ID NO: 1665367 - DNA, 15 bp, Homo sapiens
cagacttctgagagc

SEQ ID NO: 1665368 - DNA, 15 bp, Homo sapiens
agacttctgagagct

SEQ ID NO: 1665369 - DNA, 15 bp, Homo sapiens
gacttctgagagctg

SEQ ID NO: 1665370 - DNA, 15 bp, Homo sapiens
acttctgagagctgg

SEQ ID NO: 1665371 - DNA, 15 bp, Homo sapiens
cttctgagagctggt

SEQ ID NO: 1665372 - DNA, 15 bp, Homo sapiens
ttctgagagctggtg

SEQ ID NO: 1665373 - DNA, 15 bp, Homo sapiens
tctgagagctggtgt

SEQ ID NO: 1665374 - DNA, 15 bp, Homo sapiens
ctgagagctggtgtg

SEQ ID NO: 1665375 - DNA, 15 bp, Homo sapiens
tgagagctggtgtgt

SEQ ID NO: 1665376 - DNA, 15 bp, Homo sapiens
gagagctggtgtgtg

SEQ ID NO: 1665377 - DNA, 15 bp, Homo sapiens
agagctggtgtgtgt

SEQ ID NO: 1665378 - DNA, 15 bp, Homo sapiens
gagctggtgtgtgtt

SEQ ID NO: 1665379 - DNA, 15 bp, Homo sapiens
agctggtgtgtgttt

SEQ ID NO: 1665380 - DNA, 15 bp, Homo sapiens
gctggtgtgtgtttc

SEQ ID NO: 1665381 - DNA, 15 bp, Homo sapiens
ctggtgtgtgtttct

SEQ ID NO: 1665382 - DNA, 15 bp, Homo sapiens
gtgtgtgtttctagc

SEQ ID NO: 1665383 - DNA, 15 bp, Homo sapiens
tgtgtgtttctagca

SEQ ID NO: 1665384 - DNA, 15 bp, Homo sapiens
gtgtgtttctagcac

SEQ ID NO: 1665385 - DNA, 15 bp, Homo sapiens
tgtgtttctagcact

SEQ ID NO: 1665386 - DNA, 15 bp, Homo sapiens
gtgtttctagcactt

SEQ ID NO: 1665387 - DNA, 15 bp, Homo sapiens
tgtttctagcacttt

SEQ ID NO: 1665388 - DNA, 15 bp, Homo sapiens
gtttctagcactttc

SEQ ID NO: 1665389 - DNA, 15 bp, Homo sapiens
tttctagcactttct

SEQ ID NO: 1665390 - DNA, 15 bp, Homo sapiens
ttctagcactttcta

SEQ ID NO: 1665391 - DNA, 15 bp, Homo sapiens
tctagcactttctag

SEQ ID NO: 1665392 - DNA, 15 bp, Homo sapiens
ctagcactttctagc

SEQ ID NO: 1665393 - DNA, 15 bp, Homo sapiens
tagcactttctagct

SEQ ID NO: 1665394 - DNA, 15 bp, Homo sapiens
agcactttctagctg

SEQ ID NO: 1665395 - DNA, 15 bp, Homo sapiens
gcactttctagctgc

SEQ ID NO: 1665396 - DNA, 15 bp, Homo sapiens
cactttctagctgca

SEQ ID NO: 1665397 - DNA, 15 bp, Homo sapiens
actttctagctgcac

SEQ ID NO: 1665398 - DNA, 15 bp, Homo sapiens
ctttctagctgcacc

SEQ ID NO: 1665399 - DNA, 15 bp, Homo sapiens
tttctagctgcacca

SEQ ID NO: 1665400 - DNA, 15 bp, Homo sapiens
ttctagctgcaccac

SEQ ID NO: 1665401 - DNA, 15 bp, Homo sapiens
tctagctgcaccacc

SEQ ID NO: 1665402 - DNA, 15 bp, Homo sapiens
ctagctgcaccacct

SEQ ID NO: 1665403 - DNA, 15 bp, Homo sapiens
tagctgcaccacctc

SEQ ID NO: 1665404 - DNA, 15 bp, Homo sapiens
agctgcaccacctca

SEQ ID NO: 1665405 - DNA, 15 bp, Homo sapiens
gctgcaccacctcac

SEQ ID NO: 1665406 - DNA, 15 bp, Homo sapiens
ctgcaccacctcacg

SEQ ID NO: 1665407 - DNA, 15 bp, Homo sapiens
tgcaccacctcacgc

SEQ ID NO: 1665408 - DNA, 15 bp, Homo sapiens
gcaccacctcacgct

SEQ ID NO: 1665409 - DNA, 15 bp, Homo sapiens
caccacctcacgctg

SEQ ID NO: 1665410 - DNA, 15 bp, Homo sapiens
accacctcacgctgt

SEQ ID NO: 1665411 - DNA, 15 bp, Homo sapiens
ccacctcacgctgta

SEQ ID NO: 1665412 - DNA, 15 bp, Homo sapiens
cacctcacgctgtag

SEQ ID NO: 1665413 - DNA, 15 bp, Homo sapiens
acctcacgctgtagc

SEQ ID NO: 1665414 - DNA, 15 bp, Homo sapiens
cctcacgctgtagct

SEQ ID NO: 1665415 - DNA, 15 bp, Homo sapiens
ctcacgctgtagctg

SEQ ID NO: 1665416 - DNA, 15 bp, Homo sapiens
tcacgctgtagctgg

SEQ ID NO: 1665417 - DNA, 15 bp, Homo sapiens
cacgctgtagctggc

SEQ ID NO: 1665418 - DNA, 15 bp, Homo sapiens
acgctgtagctggct

SEQ ID NO: 1665419 - DNA, 15 bp, Homo sapiens
cgctgtagctggctt

SEQ ID NO: 1665420 - DNA, 15 bp, Homo sapiens
gctgtagctggcttc

SEQ ID NO: 1665421 - DNA, 15 bp, Homo sapiens
ctgtagctggcttca

SEQ ID NO: 1665422 - DNA, 15 bp, Homo sapiens
tgtagctggcttcaa

SEQ ID NO: 1665423 - DNA, 15 bp, Homo sapiens
gtagctggcttcaag

SEQ ID NO: 1665424 - DNA, 15 bp, Homo sapiens
tagctggcttcaagg

SEQ ID NO: 1665425 - DNA, 15 bp, Homo sapiens
agctggcttcaaggc

SEQ ID NO: 1665426 - DNA, 15 bp, Homo sapiens
gctggcttcaaggca

SEQ ID NO: 1665427 - DNA, 15 bp, Homo sapiens
ctggcttcaaggcat

SEQ ID NO: 1665428 - DNA, 15 bp, Homo sapiens
tggcttcaaggcata

SEQ ID NO: 1665429 - DNA, 15 bp, Homo sapiens
ggcttcaaggcatat

SEQ ID NO: 1665430 - DNA, 15 bp, Homo sapiens
gcttcaaggcatatc

SEQ ID NO: 1665431 - DNA, 15 bp, Homo sapiens
cttcaaggcatatcc

SEQ ID NO: 1665432 - DNA, 15 bp, Homo sapiens
ttcaaggcatatcca

SEQ ID NO: 1665433 - DNA, 15 bp, Homo sapiens
tcaaggcatatccag

SEQ ID NO: 1665434 - DNA, 15 bp, Homo sapiens
caaggcatatccagg

SEQ ID NO: 1665435 - DNA, 15 bp, Homo sapiens
aaggcatatccaggg

SEQ ID NO: 1665436 - DNA, 15 bp, Homo sapiens
aggcatatccagggg

SEQ ID NO: 1665437 - DNA, 15 bp, Homo sapiens
ggcatatccaggggg

SEQ ID NO: 1665438 - DNA, 15 bp, Homo sapiens
gcatatccagggggg

SEQ ID NO: 1665439 - DNA, 15 bp, Homo sapiens
catatccagggggga

SEQ ID NO: 1665440 - DNA, 15 bp, Homo sapiens
atatccaggggggag

SEQ ID NO: 1665441 - DNA, 15 bp, Homo sapiens
tatccaggggggagt

SEQ ID NO: 1665442 - DNA, 15 bp, Homo sapiens
atccaggggggagtt

SEQ ID NO: 1665443 - DNA, 15 bp, Homo sapiens
tccaggggggagttt

SEQ ID NO: 1665444 - DNA, 15 bp, Homo sapiens
ccaggggggagtttc

SEQ ID NO: 1665445 - DNA, 15 bp, Homo sapiens
caggggggagtttct

SEQ ID NO: 1665446 - DNA, 15 bp, Homo sapiens
aggggggagtttctt

SEQ ID NO: 1665447 - DNA, 15 bp, Homo sapiens
ggggggagtttcttg

SEQ ID NO: 1665448 - DNA, 15 bp, Homo sapiens
gggggagtttcttgt

SEQ ID NO: 1665449 - DNA, 15 bp, Homo sapiens
ggggagtttcttgtc

SEQ ID NO: 1665450 - DNA, 15 bp, Homo sapiens
gggagtttcttgtcc

SEQ ID NO: 1665451 - DNA, 15 bp, Homo sapiens
ggagtttcttgtcca

SEQ ID NO: 1665452 - DNA, 15 bp, Homo sapiens
gagtttcttgtccat

SEQ ID NO: 1665453 - DNA, 15 bp, Homo sapiens
agtttcttgtccatt

SEQ ID NO: 1665454 - DNA, 15 bp, Homo sapiens
gtttcttgtccattt

SEQ ID NO: 1665455 - DNA, 15 bp, Homo sapiens
tttcttgtccatttc

SEQ ID NO: 1665456 - DNA, 15 bp, Homo sapiens
ttcttgtccatttcc

SEQ ID NO: 1665457 - DNA, 15 bp, Homo sapiens
tcttgtccatttcct

SEQ ID NO: 1665458 - DNA, 15 bp, Homo sapiens
cttgtccatttcctt

SEQ ID NO: 1665459 - DNA, 15 bp, Homo sapiens
ttgtccatttccttt

SEQ ID NO: 1665460 - DNA, 15 bp, Homo sapiens
tgtccatttccttta

SEQ ID NO: 1665461 - DNA, 15 bp, Homo sapiens
gtccatttcctttac

SEQ ID NO: 1665462 - DNA, 15 bp, Homo sapiens
tccatttcctttaca

SEQ ID NO: 1665463 - DNA, 15 bp, Homo sapiens
ccatttcctttacaa

SEQ ID NO: 1665464 - DNA, 15 bp, Homo sapiens
catttcctttacaaa

SEQ ID NO: 1665465 - DNA, 15 bp, Homo sapiens
atttcctttacaaag

SEQ ID NO: 1665466 - DNA, 15 bp, Homo sapiens
tttcctttacaaagg

SEQ ID NO: 1665467 - DNA, 15 bp, Homo sapiens
ttcctttacaaaggg

SEQ ID NO: 1665468 - DNA, 15 bp, Homo sapiens
tcctttacaaaggga

SEQ ID NO: 1665469 - DNA, 15 bp, Homo sapiens
cctttacaaagggaa

SEQ ID NO: 1665470 - DNA, 15 bp, Homo sapiens
ctttacaaagggaag

SEQ ID NO: 1665471 - DNA, 15 bp, Homo sapiens
tttacaaagggaagt

SEQ ID NO: 1665472 - DNA, 15 bp, Homo sapiens
ttacaaagggaagtt

SEQ ID NO: 1665473 - DNA, 15 bp, Homo sapiens
tacaaagggaagttg

SEQ ID NO: 1665474 - DNA, 15 bp, Homo sapiens
acaaagggaagttgt

SEQ ID NO: 1665475 - DNA, 15 bp, Homo sapiens
caaagggaagttgtt

SEQ ID NO: 1665476 - DNA, 15 bp, Homo sapiens
aaagggaagttgttg

SEQ ID NO: 1665477 - DNA, 15 bp, Homo sapiens
aagggaagttgttgg

SEQ ID NO: 1665478 - DNA, 15 bp, Homo sapiens
agggaagttgttgga

SEQ ID NO: 1665479 - DNA, 15 bp, Homo sapiens
gggaagttgttggaa

SEQ ID NO: 1665480 - DNA, 15 bp, Homo sapiens
ggaagttgttggaat

SEQ ID NO: 1665481 - DNA, 15 bp, Homo sapiens
gaagttgttggaatc

SEQ ID NO: 1665482 - DNA, 15 bp, Homo sapiens
aagttgttggaatct

SEQ ID NO: 1665483 - DNA, 15 bp, Homo sapiens
agttgttggaatctg

SEQ ID NO: 1665484 - DNA, 15 bp, Homo sapiens
gttgttggaatctga

SEQ ID NO: 1665485 - DNA, 15 bp, Homo sapiens
ttgttggaatctgaa

SEQ ID NO: 1665486 - DNA, 15 bp, Homo sapiens
tgttggaatctgaac

SEQ ID NO: 1665487 - DNA, 15 bp, Homo sapiens
gttggaatctgaacc

SEQ ID NO: 1665488 - DNA, 15 bp, Homo sapiens
ttggaatctgaaccg

SEQ ID NO: 1665489 - DNA, 15 bp, Homo sapiens
tggaatctgaaccgc

SEQ ID NO: 1665490 - DNA, 15 bp, Homo sapiens
ggaatctgaaccgca

SEQ ID NO: 1665491 - DNA, 15 bp, Homo sapiens
gaatctgaaccgcaa

SEQ ID NO: 1665492 - DNA, 15 bp, Homo sapiens
aatctgaaccgcaag

SEQ ID NO: 1665493 - DNA, 15 bp, Homo sapiens
atctgaaccgcaagc

SEQ ID NO: 1665494 - DNA, 15 bp, Homo sapiens
tctgaaccgcaagcc

SEQ ID NO: 1665495 - DNA, 15 bp, Homo sapiens
ctgaaccgcaagcct

SEQ ID NO: 1665496 - DNA, 15 bp, Homo sapiens
tgaaccgcaagcctt

SEQ ID NO: 1665497 - DNA, 15 bp, Homo sapiens
gaaccgcaagccttc

SEQ ID NO: 1665498 - DNA, 15 bp, Homo sapiens
aaccgcaagccttca

SEQ ID NO: 1665499 - DNA, 15 bp, Homo sapiens
accgcaagccttcac

SEQ ID NO: 1665500 - DNA, 15 bp, Homo sapiens
ccgcaagccttcact

SEQ ID NO: 1665501 - DNA, 15 bp, Homo sapiens
cgcaagccttcactt

SEQ ID NO: 1665502 - DNA, 15 bp, Homo sapiens
gcaagccttcactta

SEQ ID NO: 1665503 - DNA, 15 bp, Homo sapiens
caagccttcacttag

SEQ ID NO: 1665504 - DNA, 15 bp, Homo sapiens
aagccttcacttaga

SEQ ID NO: 1665505 - DNA, 15 bp, Homo sapiens
agccttcacttagac

SEQ ID NO: 1665506 - DNA, 15 bp, Homo sapiens
gccttcacttagacc

SEQ ID NO: 1665507 - DNA, 15 bp, Homo sapiens
ccttcacttagacca

SEQ ID NO: 1665508 - DNA, 15 bp, Homo sapiens
cttcacttagaccaa

SEQ ID NO: 1665509 - DNA, 15 bp, Homo sapiens
ttcacttagaccaaa

SEQ ID NO: 1665510 - DNA, 15 bp, Homo sapiens
tcacttagaccaaaa

SEQ ID NO: 1665511 - DNA, 15 bp, Homo sapiens
cacttagaccaaaat

SEQ ID NO: 1665512 - DNA, 15 bp, Homo sapiens
acttagaccaaaatc

SEQ ID NO: 1665513 - DNA, 15 bp, Homo sapiens
cttagaccaaaatca

SEQ ID NO: 1665514 - DNA, 15 bp, Homo sapiens
ttagaccaaaatcag

SEQ ID NO: 1665515 - DNA, 15 bp, Homo sapiens
tagaccaaaatcagg

SEQ ID NO: 1665516 - DNA, 15 bp, Homo sapiens
agaccaaaatcaggc

SEQ ID NO: 1665517 - DNA, 15 bp, Homo sapiens
gaccaaaatcaggca

SEQ ID NO: 1665518 - DNA, 15 bp, Homo sapiens
accaaaatcaggcaa

SEQ ID NO: 1665519 - DNA, 15 bp, Homo sapiens
ccaaaatcaggcaac

SEQ ID NO: 1665520 - DNA, 15 bp, Homo sapiens
caaaatcaggcaaca

SEQ ID NO: 1665521 - DNA, 15 bp, Homo sapiens
aaaatcaggcaacag

SEQ ID NO: 1665522 - DNA, 15 bp, Homo sapiens
aaatcaggcaacagc

SEQ ID NO: 1665523 - DNA, 15 bp, Homo sapiens
aatcaggcaacagcg

SEQ ID NO: 1665524 - DNA, 15 bp, Homo sapiens
atcaggcaacagcgg

SEQ ID NO: 1665525 - DNA, 15 bp, Homo sapiens
tcaggcaacagcggt

SEQ ID NO: 1665526 - DNA, 15 bp, Homo sapiens
caggcaacagcggtg

SEQ ID NO: 1665527 - DNA, 15 bp, Homo sapiens
aggcaacagcggtga

SEQ ID NO: 1665528 - DNA, 15 bp, Homo sapiens
ggcaacagcggtgag

SEQ ID NO: 1665529 - DNA, 15 bp, Homo sapiens
gcaacagcggtgagc

SEQ ID NO: 1665530 - DNA, 15 bp, Homo sapiens
caacagcggtgagcg

SEQ ID NO: 1665531 - DNA, 15 bp, Homo sapiens
aacagcggtgagcgc

SEQ ID NO: 1665532 - DNA, 15 bp, Homo sapiens
acagcggtgagcgca

SEQ ID NO: 1665533 - DNA, 15 bp, Homo sapiens
cagcggtgagcgcag

SEQ ID NO: 1665534 - DNA, 15 bp, Homo sapiens
agcggtgagcgcagc

SEQ ID NO: 1665535 - DNA, 15 bp, Homo sapiens
gcggtgagcgcagct

SEQ ID NO: 1665536 - DNA, 15 bp, Homo sapiens
cggtgagcgcagctc

SEQ ID NO: 1665537 - DNA, 15 bp, Homo sapiens
ggtgagcgcagctcc

SEQ ID NO: 1665538 - DNA, 15 bp, Homo sapiens
gtgagcgcagctcca

SEQ ID NO: 1665539 - DNA, 15 bp, Homo sapiens
tgagcgcagctccaa

SEQ ID NO: 1665540 - DNA, 15 bp, Homo sapiens
gagcgcagctccaaa

SEQ ID NO: 1665541 - DNA, 15 bp, Homo sapiens
agcgcagctccaaac

SEQ ID NO: 1665542 - DNA, 15 bp, Homo sapiens
gcgcagctccaaacg

SEQ ID NO: 1665543 - DNA, 15 bp, Homo sapiens
cgcagctccaaacgt

SEQ ID NO: 1665544 - DNA, 15 bp, Homo sapiens
gcagctccaaacgtg

SEQ ID NO: 1665545 - DNA, 15 bp, Homo sapiens
cagctccaaacgtgt

SEQ ID NO: 1665546 - DNA, 15 bp, Homo sapiens
agctccaaacgtgtc

SEQ ID NO: 1665547 - DNA, 15 bp, Homo sapiens
gctccaaacgtgtca

SEQ ID NO: 1665548 - DNA, 15 bp, Homo sapiens
ctccaaacgtgtcaa

SEQ ID NO: 1665549 - DNA, 15 bp, Homo sapiens
tccaaacgtgtcaat

SEQ ID NO: 1665550 - DNA, 15 bp, Homo sapiens
ccaaacgtgtcaatg

SEQ ID NO: 1665551 - DNA, 15 bp, Homo sapiens
caaacgtgtcaatga

SEQ ID NO: 1665552 - DNA, 15 bp, Homo sapiens
aaacgtgtcaatgac

SEQ ID NO: 1665553 - DNA, 15 bp, Homo sapiens
aacgtgtcaatgact

SEQ ID NO: 1665554 - DNA, 15 bp, Homo sapiens
acgtgtcaatgactc

SEQ ID NO: 1665555 - DNA, 15 bp, Homo sapiens
cgtgtcaatgactca

SEQ ID NO: 1665556 - DNA, 15 bp, Homo sapiens
gtgtcaatgactcac

SEQ ID NO: 1665557 - DNA, 15 bp, Homo sapiens
tgtcaatgactcacc

SEQ ID NO: 1665558 - DNA, 15 bp, Homo sapiens
gtcaatgactcaccc

SEQ ID NO: 1665559 - DNA, 15 bp, Homo sapiens
tcaatgactcaccca

SEQ ID NO: 1665560 - DNA, 15 bp, Homo sapiens
caatgactcacccaa

SEQ ID NO: 1665561 - DNA, 15 bp, Homo sapiens
aatgactcacccaaa

SEQ ID NO: 1665562 - DNA, 15 bp, Homo sapiens
atgactcacccaaat

SEQ ID NO: 1665563 - DNA, 15 bp, Homo sapiens
tgactcacccaaatt

SEQ ID NO: 1665564 - DNA, 15 bp, Homo sapiens
gactcacccaaattt

SEQ ID NO: 1665565 - DNA, 15 bp, Homo sapiens
actcacccaaatttg

SEQ ID NO: 1665566 - DNA, 15 bp, Homo sapiens
ctcacccaaatttga

SEQ ID NO: 1665567 - DNA, 15 bp, Homo sapiens
tcacccaaatttgag

SEQ ID NO: 1665568 - DNA, 15 bp, Homo sapiens
cacccaaatttgagt

SEQ ID NO: 1665569 - DNA, 15 bp, Homo sapiens
acccaaatttgagta

SEQ ID NO: 1665570 - DNA, 15 bp, Homo sapiens
cccaaatttgagtaa

SEQ ID NO: 1665571 - DNA, 15 bp, Homo sapiens
ccaaatttgagtaag

SEQ ID NO: 1665572 - DNA, 15 bp, Homo sapiens
caaatttgagtaagg

SEQ ID NO: 1665573 - DNA, 15 bp, Homo sapiens
aaatttgagtaaggg

SEQ ID NO: 1665574 - DNA, 15 bp, Homo sapiens
aatttgagtaaggga

SEQ ID NO: 1665575 - DNA, 15 bp, Homo sapiens
atttgagtaagggag

SEQ ID NO: 1665576 - DNA, 15 bp, Homo sapiens
tttgagtaagggagt

SEQ ID NO: 1665577 - DNA, 15 bp, Homo sapiens
ttgagtaagggagtt

SEQ ID NO: 1665578 - DNA, 15 bp, Homo sapiens
tgagtaagggagttg

SEQ ID NO: 1665579 - DNA, 15 bp, Homo sapiens
gagtaagggagttgg

SEQ ID NO: 1665580 - DNA, 15 bp, Homo sapiens
agtaagggagttggc

SEQ ID NO: 1665581 - DNA, 15 bp, Homo sapiens
gtaagggagttggct

SEQ ID NO: 1665582 - DNA, 15 bp, Homo sapiens
taagggagttggctg

SEQ ID NO: 1665583 - DNA, 15 bp, Homo sapiens
aagggagttggctgc

SEQ ID NO: 1665584 - DNA, 15 bp, Homo sapiens
agggagttggctgct

SEQ ID NO: 1665585 - DNA, 15 bp, Homo sapiens
gggagttggctgctt

SEQ ID NO: 1665586 - DNA, 15 bp, Homo sapiens
ggagttggctgcttt

SEQ ID NO: 1665587 - DNA, 15 bp, Homo sapiens
gagttggctgcttta

SEQ ID NO: 1665588 - DNA, 15 bp, Homo sapiens
agttggctgctttaa

SEQ ID NO: 1665589 - DNA, 15 bp, Homo sapiens
gttggctgctttaac

SEQ ID NO: 1665590 - DNA, 15 bp, Homo sapiens
ttggctgctttaacg

SEQ ID NO: 1665591 - DNA, 15 bp, Homo sapiens
tggctgctttaacga

SEQ ID NO: 1665592 - DNA, 15 bp, Homo sapiens
ggctgctttaacgag

SEQ ID NO: 1665593 - DNA, 15 bp, Homo sapiens
gctgctttaacgagc

SEQ ID NO: 1665594 - DNA, 15 bp, Homo sapiens
ctgctttaacgagcc

SEQ ID NO: 1665595 - DNA, 15 bp, Homo sapiens
tgctttaacgagccg

SEQ ID NO: 1665596 - DNA, 15 bp, Homo sapiens
gctttaacgagccgc

SEQ ID NO: 1665597 - DNA, 15 bp, Homo sapiens
ctttaacgagccgca

SEQ ID NO: 1665598 - DNA, 15 bp, Homo sapiens
tttaacgagccgcag

SEQ ID NO: 1665599 - DNA, 15 bp, Homo sapiens
ttaacgagccgcagg

SEQ ID NO: 1665600 - DNA, 15 bp, Homo sapiens
taacgagccgcaggg

SEQ ID NO: 1665601 - DNA, 15 bp, Homo sapiens
aacgagccgcagggt

SEQ ID NO: 1665602 - DNA, 15 bp, Homo sapiens
acgagccgcagggtg

SEQ ID NO: 1665603 - DNA, 15 bp, Homo sapiens
cgagccgcagggtga

SEQ ID NO: 1665604 - DNA, 15 bp, Homo sapiens
gagccgcagggtgat

SEQ ID NO: 1665605 - DNA, 15 bp, Homo sapiens
agccgcagggtgatt

SEQ ID NO: 1665606 - DNA, 15 bp, Homo sapiens
gccgcagggtgattc

SEQ ID NO: 1665607 - DNA, 15 bp, Homo sapiens
ccgcagggtgattcc

SEQ ID NO: 1665608 - DNA, 15 bp, Homo sapiens
cgcagggtgattccc

SEQ ID NO: 1665609 - DNA, 15 bp, Homo sapiens
gcagggtgattccct

SEQ ID NO: 1665610 - DNA, 15 bp, Homo sapiens
cagggtgattccctt

SEQ ID NO: 1665611 - DNA, 15 bp, Homo sapiens
agggtgattcccttg

SEQ ID NO: 1665612 - DNA, 15 bp, Homo sapiens
gggtgattcccttgt

SEQ ID NO: 1665613 - DNA, 15 bp, Homo sapiens
ggtgattcccttgtc

SEQ ID NO: 1665614 - DNA, 15 bp, Homo sapiens
gtgattcccttgtca

SEQ ID NO: 1665615 - DNA, 15 bp, Homo sapiens
tgattcccttgtcat

SEQ ID NO: 1665616 - DNA, 15 bp, Homo sapiens
gattcccttgtcatt

SEQ ID NO: 1665617 - DNA, 15 bp, Homo sapiens
attcccttgtcattt

SEQ ID NO: 1665618 - DNA, 15 bp, Homo sapiens
ttcccttgtcatttc

SEQ ID NO: 1665619 - DNA, 15 bp, Homo sapiens
tcccttgtcatttcc

SEQ ID NO: 1665620 - DNA, 15 bp, Homo sapiens
cccttgtcatttccg

SEQ ID NO: 1665621 - DNA, 15 bp, Homo sapiens
ccttgtcatttccgg

SEQ ID NO: 1665622 - DNA, 15 bp, Homo sapiens
cttgtcatttccgga

SEQ ID NO: 1665623 - DNA, 15 bp, Homo sapiens
ttgtcatttccggaa

SEQ ID NO: 1665624 - DNA, 15 bp, Homo sapiens
tgtcatttccggaaa

SEQ ID NO: 1665625 - DNA, 15 bp, Homo sapiens
gtcatttccggaaat

SEQ ID NO: 1665626 - DNA, 15 bp, Homo sapiens
tcatttccggaaata

SEQ ID NO: 1665627 - DNA, 15 bp, Homo sapiens
catttccggaaatac

SEQ ID NO: 1665628 - DNA, 15 bp, Homo sapiens
atttccggaaatacc

SEQ ID NO: 1665629 - DNA, 15 bp, Homo sapiens
tttccggaaatacct

SEQ ID NO: 1665630 - DNA, 15 bp, Homo sapiens
ttccggaaataccta

SEQ ID NO: 1665631 - DNA, 15 bp, Homo sapiens
tccggaaatacctat

SEQ ID NO: 1665632 - DNA, 15 bp, Homo sapiens
ccggaaatacctatc

SEQ ID NO: 1665633 - DNA, 15 bp, Homo sapiens
cggaaatacctatct

SEQ ID NO: 1665634 - DNA, 15 bp, Homo sapiens
ggaaatacctatctt

SEQ ID NO: 1665635 - DNA, 15 bp, Homo sapiens
gaaatacctatcttc

SEQ ID NO: 1665636 - DNA, 15 bp, Homo sapiens
aaatacctatcttcc

SEQ ID NO: 1665637 - DNA, 15 bp, Homo sapiens
aatacctatcttcca

SEQ ID NO: 1665638 - DNA, 15 bp, Homo sapiens
atacctatcttccag

SEQ ID NO: 1665639 - DNA, 15 bp, Homo sapiens
tacctatcttccagg

SEQ ID NO: 1665640 - DNA, 15 bp, Homo sapiens
acctatcttccaggg

SEQ ID NO: 1665641 - DNA, 15 bp, Homo sapiens
cctatcttccaggga

SEQ ID NO: 1665642 - DNA, 15 bp, Homo sapiens
ctatcttccagggaa

SEQ ID NO: 1665643 - DNA, 15 bp, Homo sapiens
tatcttccagggaac

SEQ ID NO: 1665644 - DNA, 15 bp, Homo sapiens
atcttccagggaaca

SEQ ID NO: 1665645 - DNA, 15 bp, Homo sapiens
tcttccagggaacac

SEQ ID NO: 1665646 - DNA, 15 bp, Homo sapiens
cttccagggaacact

SEQ ID NO: 1665647 - DNA, 15 bp, Homo sapiens
ttccagggaacactg

SEQ ID NO: 1665648 - DNA, 15 bp, Homo sapiens
tccagggaacactgg

SEQ ID NO: 1665649 - DNA, 15 bp, Homo sapiens
ccagggaacactggg

SEQ ID NO: 1665650 - DNA, 15 bp, Homo sapiens
cagggaacactggga

SEQ ID NO: 1665651 - DNA, 15 bp, Homo sapiens
agggaacactgggaa

SEQ ID NO: 1665652 - DNA, 15 bp, Homo sapiens
gggaacactgggaaa

SEQ ID NO: 1665653 - DNA, 15 bp, Homo sapiens
ggaacactgggaaaa

SEQ ID NO: 1665654 - DNA, 15 bp, Homo sapiens
gaacactgggaaaaa

SEQ ID NO: 1665655 - DNA, 15 bp, Homo sapiens
aacactgggaaaaaa

SEQ ID NO: 1665656 - DNA, 15 bp, Homo sapiens
acactgggaaaaaac

SEQ ID NO: 1665657 - DNA, 15 bp, Homo sapiens
cactgggaaaaaaca

SEQ ID NO: 1665658 - DNA, 15 bp, Homo sapiens
actgggaaaaaacag

SEQ ID NO: 1665659 - DNA, 15 bp, Homo sapiens
ctgggaaaaaacagg

SEQ ID NO: 1665660 - DNA, 15 bp, Homo sapiens
tgggaaaaaacaggg

SEQ ID NO: 1665661 - DNA, 15 bp, Homo sapiens
gggaaaaaacaggga

SEQ ID NO: 1665662 - DNA, 15 bp, Homo sapiens
ggaaaaaacagggag

SEQ ID NO: 1665663 - DNA, 15 bp, Homo sapiens
gaaaaaacagggaga

SEQ ID NO: 1665664 - DNA, 15 bp, Homo sapiens
aaaaaacagggagac

SEQ ID NO: 1665665 - DNA, 15 bp, Homo sapiens
aaaaacagggagacc

SEQ ID NO: 1665666 - DNA, 15 bp, Homo sapiens
aaaacagggagacct

SEQ ID NO: 1665667 - DNA, 15 bp, Homo sapiens
aaacagggagacctt

SEQ ID NO: 1665668 - DNA, 15 bp, Homo sapiens
aacagggagaccttt

SEQ ID NO: 1665669 - DNA, 15 bp, Homo sapiens
acagggagacctttg

SEQ ID NO: 1665670 - DNA, 15 bp, Homo sapiens
cagggagacctttgt

SEQ ID NO: 1665671 - DNA, 15 bp, Homo sapiens
agggagacctttgtt

SEQ ID NO: 1665672 - DNA, 15 bp, Homo sapiens
gggagacctttgttg

SEQ ID NO: 1665673 - DNA, 15 bp, Homo sapiens
ggagacctttgttga

SEQ ID NO: 1665674 - DNA, 15 bp, Homo sapiens
gagacctttgttgag

SEQ ID NO: 1665675 - DNA, 15 bp, Homo sapiens
agacctttgttgaga

SEQ ID NO: 1665676 - DNA, 15 bp, Homo sapiens
gacctttgttgagac

SEQ ID NO: 1665677 - DNA, 15 bp, Homo sapiens
acctttgttgagaca

SEQ ID NO: 1665678 - DNA, 15 bp, Homo sapiens
cctttgttgagacag

SEQ ID NO: 1665679 - DNA, 15 bp, Homo sapiens
ctttgttgagacaga

SEQ ID NO: 1665680 - DNA, 15 bp, Homo sapiens
tttgttgagacagaa

SEQ ID NO: 1665681 - DNA, 15 bp, Homo sapiens
ttgttgagacagaaa

SEQ ID NO: 1665682 - DNA, 15 bp, Homo sapiens
tgttgagacagaaaa

SEQ ID NO: 1665683 - DNA, 15 bp, Homo sapiens
gttgagacagaaaac

SEQ ID NO: 1665684 - DNA, 15 bp, Homo sapiens
ttgagacagaaaacc

SEQ ID NO: 1665685 - DNA, 15 bp, Homo sapiens
tgagacagaaaacct

SEQ ID NO: 1665686 - DNA, 15 bp, Homo sapiens
gagacagaaaacctg

SEQ ID NO: 1665687 - DNA, 15 bp, Homo sapiens
agacagaaaacctgt

SEQ ID NO: 1665688 - DNA, 15 bp, Homo sapiens
gacagaaaacctgta

SEQ ID NO: 1665689 - DNA, 15 bp, Homo sapiens
acagaaaacctgtag

SEQ ID NO: 1665690 - DNA, 15 bp, Homo sapiens
cagaaaacctgtagg

SEQ ID NO: 1665691 - DNA, 15 bp, Homo sapiens
agaaaacctgtaggg

SEQ ID NO: 1665692 - DNA, 15 bp, Homo sapiens
gaaaacctgtagggg

SEQ ID NO: 1665693 - DNA, 15 bp, Homo sapiens
aaaacctgtagggga

SEQ ID NO: 1665694 - DNA, 15 bp, Homo sapiens
aaacctgtaggggaa

SEQ ID NO: 1665695 - DNA, 15 bp, Homo sapiens
aacctgtaggggaat

SEQ ID NO: 1665696 - DNA, 15 bp, Homo sapiens
acctgtaggggaatt

SEQ ID NO: 1665697 - DNA, 15 bp, Homo sapiens
cctgtaggggaattc

SEQ ID NO: 1665698 - DNA, 15 bp, Homo sapiens
ctgtaggggaattct

SEQ ID NO: 1665699 - DNA, 15 bp, Homo sapiens
tgtaggggaattctg

SEQ ID NO: 1665700 - DNA, 15 bp, Homo sapiens
gtaggggaattctgt

SEQ ID NO: 1665701 - DNA, 15 bp, Homo sapiens
taggggaattctgtt

SEQ ID NO: 1665702 - DNA, 15 bp, Homo sapiens
aggggaattctgttc

SEQ ID NO: 1665703 - DNA, 15 bp, Homo sapiens
ggggaattctgttcc

SEQ ID NO: 1665704 - DNA, 15 bp, Homo sapiens
gggaattctgttcct

SEQ ID NO: 1665705 - DNA, 15 bp, Homo sapiens
ggaattctgttcctc

SEQ ID NO: 1665706 - DNA, 15 bp, Homo sapiens
gaattctgttcctca

SEQ ID NO: 1665707 - DNA, 15 bp, Homo sapiens
aattctgttcctcat

SEQ ID NO: 1665708 - DNA, 15 bp, Homo sapiens
attctgttcctcatt

SEQ ID NO: 1665709 - DNA, 15 bp, Homo sapiens
ttctgttcctcattc

SEQ ID NO: 1665710 - DNA, 15 bp, Homo sapiens
tctgttcctcattcc

SEQ ID NO: 1665711 - DNA, 15 bp, Homo sapiens
ctgttcctcattcct

SEQ ID NO: 1665712 - DNA, 15 bp, Homo sapiens
tgttcctcattcctg

SEQ ID NO: 1665713 - DNA, 15 bp, Homo sapiens
gttcctcattcctgc

SEQ ID NO: 1665714 - DNA, 15 bp, Homo sapiens
ttcctcattcctgct

SEQ ID NO: 1665715 - DNA, 15 bp, Homo sapiens
tcctcattcctgctc

SEQ ID NO: 1665716 - DNA, 15 bp, Homo sapiens
cctcattcctgctct

SEQ ID NO: 1665717 - DNA, 15 bp, Homo sapiens
ctcattcctgctctt

SEQ ID NO: 1665718 - DNA, 15 bp, Homo sapiens
tcattcctgctctta

SEQ ID NO: 1665719 - DNA, 15 bp, Homo sapiens
cattcctgctcttat

SEQ ID NO: 1665720 - DNA, 15 bp, Homo sapiens
attcctgctcttatc

SEQ ID NO: 1665721 - DNA, 15 bp, Homo sapiens
ttcctgctcttatct

SEQ ID NO: 1665722 - DNA, 15 bp, Homo sapiens
tcctgctcttatctg

SEQ ID NO: 1665723 - DNA, 15 bp, Homo sapiens
cctgctcttatctgt

SEQ ID NO: 1665724 - DNA, 15 bp, Homo sapiens
ctgctcttatctgta

SEQ ID NO: 1665725 - DNA, 15 bp, Homo sapiens
tgctcttatctgtag

SEQ ID NO: 1665726 - DNA, 15 bp, Homo sapiens
gctcttatctgtaga

SEQ ID NO: 1665727 - DNA, 15 bp, Homo sapiens
ctcttatctgtagac

SEQ ID NO: 1665728 - DNA, 15 bp, Homo sapiens
tcttatctgtagact

SEQ ID NO: 1665729 - DNA, 15 bp, Homo sapiens
cttatctgtagactt

SEQ ID NO: 1665730 - DNA, 15 bp, Homo sapiens
ttatctgtagacttc

SEQ ID NO: 1665731 - DNA, 15 bp, Homo sapiens
tatctgtagacttcc

SEQ ID NO: 1665732 - DNA, 15 bp, Homo sapiens
atctgtagacttcct

SEQ ID NO: 1665733 - DNA, 15 bp, Homo sapiens
tctgtagacttcctc

SEQ ID NO: 1665734 - DNA, 15 bp, Homo sapiens
ctgtagacttcctcc

SEQ ID NO: 1665735 - DNA, 15 bp, Homo sapiens
tgtagacttcctccc

SEQ ID NO: 1665736 - DNA, 15 bp, Homo sapiens
gtagacttcctccct

SEQ ID NO: 1665737 - DNA, 15 bp, Homo sapiens
tagacttcctccctg

SEQ ID NO: 1665738 - DNA, 15 bp, Homo sapiens
agacttcctccctga

SEQ ID NO: 1665739 - DNA, 15 bp, Homo sapiens
gacttcctccctgat

SEQ ID NO: 1665740 - DNA, 15 bp, Homo sapiens
acttcctccctgata

SEQ ID NO: 1665741 - DNA, 15 bp, Homo sapiens
cttcctccctgataa

SEQ ID NO: 1665742 - DNA, 15 bp, Homo sapiens
ttcctccctgataag

SEQ ID NO: 1665743 - DNA, 15 bp, Homo sapiens
tcctccctgataaga

SEQ ID NO: 1665744 - DNA, 15 bp, Homo sapiens
cctccctgataagat

SEQ ID NO: 1665745 - DNA, 15 bp, Homo sapiens
ctccctgataagatc

SEQ ID NO: 1665746 - DNA, 15 bp, Homo sapiens
tccctgataagatcc

SEQ ID NO: 1665747 - DNA, 15 bp, Homo sapiens
ccctgataagatcca

SEQ ID NO: 1665748 - DNA, 15 bp, Homo sapiens
cctgataagatccaa

SEQ ID NO: 1665749 - DNA, 15 bp, Homo sapiens
ctgataagatccaat

SEQ ID NO: 1665750 - DNA, 15 bp, Homo sapiens
tgataagatccaatt

SEQ ID NO: 1665751 - DNA, 15 bp, Homo sapiens
gataagatccaattc

SEQ ID NO: 1665752 - DNA, 15 bp, Homo sapiens
ataagatccaattct

SEQ ID NO: 1665753 - DNA, 15 bp, Homo sapiens
taagatccaattcta

SEQ ID NO: 1665754 - DNA, 15 bp, Homo sapiens
aagatccaattctag

SEQ ID NO: 1665755 - DNA, 15 bp, Homo sapiens
agatccaattctaga

SEQ ID NO: 1665756 - DNA, 15 bp, Homo sapiens
gatccaattctagat

SEQ ID NO: 1665757 - DNA, 15 bp, Homo sapiens
atccaattctagatg

SEQ ID NO: 1665758 - DNA, 15 bp, Homo sapiens
tccaattctagatgg

SEQ ID NO: 1665759 - DNA, 15 bp, Homo sapiens
ccaattctagatggg

SEQ ID NO: 1665760 - DNA, 15 bp, Homo sapiens
caattctagatgggt

SEQ ID NO: 1665761 - DNA, 15 bp, Homo sapiens
aattctagatgggtc

SEQ ID NO: 1665762 - DNA, 15 bp, Homo sapiens
attctagatgggtcg

SEQ ID NO: 1665763 - DNA, 15 bp, Homo sapiens
ttctagatgggtcgg

SEQ ID NO: 1665764 - DNA, 15 bp, Homo sapiens
tctagatgggtcggt

SEQ ID NO: 1665765 - DNA, 15 bp, Homo sapiens
ctagatgggtcggtt

SEQ ID NO: 1665766 - DNA, 15 bp, Homo sapiens
tagatgggtcggttg

SEQ ID NO: 1665767 - DNA, 15 bp, Homo sapiens
agatgggtcggttgc

SEQ ID NO: 1665768 - DNA, 15 bp, Homo sapiens
gatgggtcggttgct

SEQ ID NO: 1665769 - DNA, 15 bp, Homo sapiens
atgggtcggttgctc

SEQ ID NO: 1665770 - DNA, 15 bp, Homo sapiens
tgggtcggttgctcc

SEQ ID NO: 1665771 - DNA, 15 bp, Homo sapiens
gggtcggttgctcct

SEQ ID NO: 1665772 - DNA, 15 bp, Homo sapiens
ggtcggttgctcctt

SEQ ID NO: 1665773 - DNA, 15 bp, Homo sapiens
gtcggttgctccttg

SEQ ID NO: 1665774 - DNA, 15 bp, Homo sapiens
tcggttgctccttgc

SEQ ID NO: 1665775 - DNA, 15 bp, Homo sapiens
cggttgctccttgct

SEQ ID NO: 1665776 - DNA, 15 bp, Homo sapiens
ggttgctccttgctt

SEQ ID NO: 1665777 - DNA, 15 bp, Homo sapiens
gttgctccttgcttt

SEQ ID NO: 1665778 - DNA, 15 bp, Homo sapiens
ttgctccttgctttg

SEQ ID NO: 1665779 - DNA, 15 bp, Homo sapiens
tgctccttgctttga

SEQ ID NO: 1665780 - DNA, 15 bp, Homo sapiens
gctccttgctttgat

SEQ ID NO: 1665781 - DNA, 15 bp, Homo sapiens
ctccttgctttgatg

SEQ ID NO: 1665782 - DNA, 15 bp, Homo sapiens
tccttgctttgatgg

SEQ ID NO: 1665783 - DNA, 15 bp, Homo sapiens
ccttgctttgatggg

SEQ ID NO: 1665784 - DNA, 15 bp, Homo sapiens
cttgctttgatgggt

SEQ ID NO: 1665785 - DNA, 15 bp, Homo sapiens
ttgctttgatgggtg

SEQ ID NO: 1665786 - DNA, 15 bp, Homo sapiens
tgctttgatgggtgc

SEQ ID NO: 1665787 - DNA, 15 bp, Homo sapiens
gctttgatgggtgct

SEQ ID NO: 1665788 - DNA, 15 bp, Homo sapiens
ctttgatgggtgctt

SEQ ID NO: 1665789 - DNA, 15 bp, Homo sapiens
tttgatgggtgcttt

SEQ ID NO: 1665790 - DNA, 15 bp, Homo sapiens
ttgatgggtgctttg

SEQ ID NO: 1665791 - DNA, 15 bp, Homo sapiens
tgatgggtgctttga

SEQ ID NO: 1665792 - DNA, 15 bp, Homo sapiens
gatgggtgctttgat

SEQ ID NO: 1665793 - DNA, 15 bp, Homo sapiens
atgggtgctttgatg

SEQ ID NO: 1665794 - DNA, 15 bp, Homo sapiens
tgggtgctttgatgg

SEQ ID NO: 1665795 - DNA, 15 bp, Homo sapiens
gggtgctttgatggg

SEQ ID NO: 1665796 - DNA, 15 bp, Homo sapiens
ggtgctttgatgggc

SEQ ID NO: 1665797 - DNA, 15 bp, Homo sapiens
gtgctttgatgggct

SEQ ID NO: 1665798 - DNA, 15 bp, Homo sapiens
tgctttgatgggctt

SEQ ID NO: 1665799 - DNA, 15 bp, Homo sapiens
gctttgatgggcttt

SEQ ID NO: 1665800 - DNA, 15 bp, Homo sapiens
ctttgatgggcttta

SEQ ID NO: 1665801 - DNA, 15 bp, Homo sapiens
tttgatgggctttat

SEQ ID NO: 1665802 - DNA, 15 bp, Homo sapiens
ttgatgggctttatt

SEQ ID NO: 1665803 - DNA, 15 bp, Homo sapiens
tgatgggctttatta

SEQ ID NO: 1665804 - DNA, 15 bp, Homo sapiens
gatgggctttattat

SEQ ID NO: 1665805 - DNA, 15 bp, Homo sapiens
atgggctttattatt

SEQ ID NO: 1665806 - DNA, 15 bp, Homo sapiens
tgggctttattatta

SEQ ID NO: 1665807 - DNA, 15 bp, Homo sapiens
gggctttattattat

SEQ ID NO: 1665808 - DNA, 15 bp, Homo sapiens
ggctttattattatt

SEQ ID NO: 1665809 - DNA, 15 bp, Homo sapiens
gctttattattatta

SEQ ID NO: 1665810 - DNA, 15 bp, Homo sapiens
ctttattattattat

SEQ ID NO: 1665811 - DNA, 15 bp, Homo sapiens
attattattattttg

SEQ ID NO: 1665812 - DNA, 15 bp, Homo sapiens
ttattattattttga

SEQ ID NO: 1665813 - DNA, 15 bp, Homo sapiens
tattattattttgat

SEQ ID NO: 1665814 - DNA, 15 bp, Homo sapiens
attattattttgatg

SEQ ID NO: 1665815 - DNA, 15 bp, Homo sapiens
ttattattttgatgg

SEQ ID NO: 1665816 - DNA, 15 bp, Homo sapiens
tattattttgatggg

SEQ ID NO: 1665817 - DNA, 15 bp, Homo sapiens
attattttgatgggc

SEQ ID NO: 1665818 - DNA, 15 bp, Homo sapiens
ttattttgatgggct

SEQ ID NO: 1665819 - DNA, 15 bp, Homo sapiens
tattttgatgggctt

SEQ ID NO: 1665820 - DNA, 15 bp, Homo sapiens
attttgatgggcttt

SEQ ID NO: 1665821 - DNA, 15 bp, Homo sapiens
ttttgatgggctttt

SEQ ID NO: 1665822 - DNA, 15 bp, Homo sapiens
tttgatgggcttttt

SEQ ID NO: 1665823 - DNA, 15 bp, Homo sapiens
ttgatgggctttttg

SEQ ID NO: 1665824 - DNA, 15 bp, Homo sapiens
tgatgggctttttga

SEQ ID NO: 1665825 - DNA, 15 bp, Homo sapiens
gatgggctttttgat

SEQ ID NO: 1665826 - DNA, 15 bp, Homo sapiens
atgggctttttgatg

SEQ ID NO: 1665827 - DNA, 15 bp, Homo sapiens
tgggctttttgatgt

SEQ ID NO: 1665828 - DNA, 15 bp, Homo sapiens
gggctttttgatgtc

SEQ ID NO: 1665829 - DNA, 15 bp, Homo sapiens
ggctttttgatgtcc

SEQ ID NO: 1665830 - DNA, 15 bp, Homo sapiens
gctttttgatgtccc

SEQ ID NO: 1665831 - DNA, 15 bp, Homo sapiens
ctttttgatgtccct

SEQ ID NO: 1665832 - DNA, 15 bp, Homo sapiens
tttttgatgtccctt

SEQ ID NO: 1665833 - DNA, 15 bp, Homo sapiens
ttttgatgtcccttt

SEQ ID NO: 1665834 - DNA, 15 bp, Homo sapiens
tttgatgtccctttt

SEQ ID NO: 1665835 - DNA, 15 bp, Homo sapiens
ttgatgtcccttttc

SEQ ID NO: 1665836 - DNA, 15 bp, Homo sapiens
tgatgtcccttttcc

SEQ ID NO: 1665837 - DNA, 15 bp, Homo sapiens
gatgtcccttttcct

SEQ ID NO: 1665838 - DNA, 15 bp, Homo sapiens
atgtcccttttcctt

SEQ ID NO: 1665839 - DNA, 15 bp, Homo sapiens
tgtcccttttccttc

SEQ ID NO: 1665840 - DNA, 15 bp, Homo sapiens
gtcccttttccttcc

SEQ ID NO: 1665841 - DNA, 15 bp, Homo sapiens
tcccttttccttcca

SEQ ID NO: 1665842 - DNA, 15 bp, Homo sapiens
cccttttccttccac

SEQ ID NO: 1665843 - DNA, 15 bp, Homo sapiens
ccttttccttccaca

SEQ ID NO: 1665844 - DNA, 15 bp, Homo sapiens
cttttccttccacac

SEQ ID NO: 1665845 - DNA, 15 bp, Homo sapiens
ttttccttccacact

SEQ ID NO: 1665846 - DNA, 15 bp, Homo sapiens
tttccttccacactc

SEQ ID NO: 1665847 - DNA, 15 bp, Homo sapiens
ttccttccacactct

SEQ ID NO: 1665848 - DNA, 15 bp, Homo sapiens
tccttccacactctg

SEQ ID NO: 1665849 - DNA, 15 bp, Homo sapiens
ccttccacactctgt

SEQ ID NO: 1665850 - DNA, 15 bp, Homo sapiens
cttccacactctgtc

SEQ ID NO: 1665851 - DNA, 15 bp, Homo sapiens
ttccacactctgtcc

SEQ ID NO: 1665852 - DNA, 15 bp, Homo sapiens
tccacactctgtccc

SEQ ID NO: 1665853 - DNA, 15 bp, Homo sapiens
ccacactctgtccca

SEQ ID NO: 1665854 - DNA, 15 bp, Homo sapiens
cacactctgtcccaa

SEQ ID NO: 1665855 - DNA, 15 bp, Homo sapiens
acactctgtcccaac

SEQ ID NO: 1665856 - DNA, 15 bp, Homo sapiens
cactctgtcccaact

SEQ ID NO: 1665857 - DNA, 15 bp, Homo sapiens
actctgtcccaactg

SEQ ID NO: 1665858 - DNA, 15 bp, Homo sapiens
ctctgtcccaactgt

SEQ ID NO: 1665859 - DNA, 15 bp, Homo sapiens
tctgtcccaactgtc

SEQ ID NO: 1665860 - DNA, 15 bp, Homo sapiens
ctgtcccaactgtca

SEQ ID NO: 1665861 - DNA, 15 bp, Homo sapiens
tgtcccaactgtcaa

SEQ ID NO: 1665862 - DNA, 15 bp, Homo sapiens
gtcccaactgtcaag

SEQ ID NO: 1665863 - DNA, 15 bp, Homo sapiens
tcccaactgtcaagc

SEQ ID NO: 1665864 - DNA, 15 bp, Homo sapiens
cccaactgtcaagca

SEQ ID NO: 1665865 - DNA, 15 bp, Homo sapiens
ccaactgtcaagcaa

SEQ ID NO: 1665866 - DNA, 15 bp, Homo sapiens
caactgtcaagcaaa

SEQ ID NO: 1665867 - DNA, 15 bp, Homo sapiens
aactgtcaagcaaat

SEQ ID NO: 1665868 - DNA, 15 bp, Homo sapiens
actgtcaagcaaata

SEQ ID NO: 1665869 - DNA, 15 bp, Homo sapiens
ctgtcaagcaaatag

SEQ ID NO: 1665870 - DNA, 15 bp, Homo sapiens
tgtcaagcaaatagc

SEQ ID NO: 1665871 - DNA, 15 bp, Homo sapiens
gtcaagcaaatagcc

SEQ ID NO: 1665872 - DNA, 15 bp, Homo sapiens
tcaagcaaatagcct

SEQ ID NO: 1665873 - DNA, 15 bp, Homo sapiens
caagcaaatagcctt

SEQ ID NO: 1665874 - DNA, 15 bp, Homo sapiens
aagcaaatagccttt

SEQ ID NO: 1665875 - DNA, 15 bp, Homo sapiens
agcaaatagcctttt

SEQ ID NO: 1665876 - DNA, 15 bp, Homo sapiens
gcaaatagccttttg

SEQ ID NO: 1665877 - DNA, 15 bp, Homo sapiens
caaatagccttttgt

SEQ ID NO: 1665878 - DNA, 15 bp, Homo sapiens
aaatagccttttgtt

SEQ ID NO: 1665879 - DNA, 15 bp, Homo sapiens
aatagccttttgttg

SEQ ID NO: 1665880 - DNA, 15 bp, Homo sapiens
atagccttttgttgc

SEQ ID NO: 1665881 - DNA, 15 bp, Homo sapiens
tagccttttgttgct

SEQ ID NO: 1665882 - DNA, 15 bp, Homo sapiens
agccttttgttgcta

SEQ ID NO: 1665883 - DNA, 15 bp, Homo sapiens
gccttttgttgctaa

SEQ ID NO: 1665884 - DNA, 15 bp, Homo sapiens
ccttttgttgctaag

SEQ ID NO: 1665885 - DNA, 15 bp, Homo sapiens
cttttgttgctaaga

SEQ ID NO: 1665886 - DNA, 15 bp, Homo sapiens
ttttgttgctaagag

SEQ ID NO: 1665887 - DNA, 15 bp, Homo sapiens
tttgttgctaagaga

SEQ ID NO: 1665888 - DNA, 15 bp, Homo sapiens
ttgttgctaagagac

SEQ ID NO: 1665889 - DNA, 15 bp, Homo sapiens
tgttgctaagagact

SEQ ID NO: 1665890 - DNA, 15 bp, Homo sapiens
gttgctaagagactg

SEQ ID NO: 1665891 - DNA, 15 bp, Homo sapiens
ttgctaagagactgc

SEQ ID NO: 1665892 - DNA, 15 bp, Homo sapiens
tgctaagagactgca

SEQ ID NO: 1665893 - DNA, 15 bp, Homo sapiens
gctaagagactgcag

SEQ ID NO: 1665894 - DNA, 15 bp, Homo sapiens
ctaagagactgcaga

SEQ ID NO: 1665895 - DNA, 15 bp, Homo sapiens
taagagactgcagat

SEQ ID NO: 1665896 - DNA, 15 bp, Homo sapiens
aagagactgcagatg

SEQ ID NO: 1665897 - DNA, 15 bp, Homo sapiens
agagactgcagatgt

SEQ ID NO: 1665898 - DNA, 15 bp, Homo sapiens
gagactgcagatgta

SEQ ID NO: 1665899 - DNA, 15 bp, Homo sapiens
agactgcagatgtaa

SEQ ID NO: 1665900 - DNA, 15 bp, Homo sapiens
gactgcagatgtaac

SEQ ID NO: 1665901 - DNA, 15 bp, Homo sapiens
actgcagatgtaacc

SEQ ID NO: 1665902 - DNA, 15 bp, Homo sapiens
ctgcagatgtaaccg

SEQ ID NO: 1665903 - DNA, 15 bp, Homo sapiens
tgcagatgtaaccga

SEQ ID NO: 1665904 - DNA, 15 bp, Homo sapiens
gcagatgtaaccgac

SEQ ID NO: 1665905 - DNA, 15 bp, Homo sapiens
cagatgtaaccgacc

SEQ ID NO: 1665906 - DNA, 15 bp, Homo sapiens
agatgtaaccgacca

SEQ ID NO: 1665907 - DNA, 15 bp, Homo sapiens
gatgtaaccgaccag

SEQ ID NO: 1665908 - DNA, 15 bp, Homo sapiens
atgtaaccgaccagc

SEQ ID NO: 1665909 - DNA, 15 bp, Homo sapiens
tgtaaccgaccagca

SEQ ID NO: 1665910 - DNA, 15 bp, Homo sapiens
gtaaccgaccagcag

SEQ ID NO: 1665911 - DNA, 15 bp, Homo sapiens
taaccgaccagcagc

SEQ ID NO: 1665912 - DNA, 15 bp, Homo sapiens
aaccgaccagcagca

SEQ ID NO: 1665913 - DNA, 15 bp, Homo sapiens
accgaccagcagcaa

SEQ ID NO: 1665914 - DNA, 15 bp, Homo sapiens
ccgaccagcagcaaa

SEQ ID NO: 1665915 - DNA, 15 bp, Homo sapiens
cgaccagcagcaaac

SEQ ID NO: 1665916 - DNA, 15 bp, Homo sapiens
gaccagcagcaaaca

SEQ ID NO: 1665917 - DNA, 15 bp, Homo sapiens
accagcagcaaacag

SEQ ID NO: 1665918 - DNA, 15 bp, Homo sapiens
ccagcagcaaacagt

SEQ ID NO: 1665919 - DNA, 15 bp, Homo sapiens
cagcagcaaacagtg

SEQ ID NO: 1665920 - DNA, 15 bp, Homo sapiens
agcagcaaacagtga

SEQ ID NO: 1665921 - DNA, 15 bp, Homo sapiens
gcagcaaacagtgag

SEQ ID NO: 1665922 - DNA, 15 bp, Homo sapiens
cagcaaacagtgagt

SEQ ID NO: 1665923 - DNA, 15 bp, Homo sapiens
agcaaacagtgagtc

SEQ ID NO: 1665924 - DNA, 15 bp, Homo sapiens
gcaaacagtgagtca

SEQ ID NO: 1665925 - DNA, 15 bp, Homo sapiens
caaacagtgagtcag

SEQ ID NO: 1665926 - DNA, 15 bp, Homo sapiens
aaacagtgagtcagg

SEQ ID NO: 1665927 - DNA, 15 bp, Homo sapiens
aacagtgagtcaggc

SEQ ID NO: 1665928 - DNA, 15 bp, Homo sapiens
acagtgagtcaggct

SEQ ID NO: 1665929 - DNA, 15 bp, Homo sapiens
cagtgagtcaggctc

SEQ ID NO: 1665930 - DNA, 15 bp, Homo sapiens
agtgagtcaggctct

SEQ ID NO: 1665931 - DNA, 15 bp, Homo sapiens
gtgagtcaggctctc

SEQ ID NO: 1665932 - DNA, 15 bp, Homo sapiens
tgagtcaggctctct

SEQ ID NO: 1665933 - DNA, 15 bp, Homo sapiens
gagtcaggctctctc

SEQ ID NO: 1665934 - DNA, 15 bp, Homo sapiens
agtcaggctctctct

SEQ ID NO: 1665935 - DNA, 15 bp, Homo sapiens
gtcaggctctctctt

SEQ ID NO: 1665936 - DNA, 15 bp, Homo sapiens
tcaggctctctcttc

SEQ ID NO: 1665937 - DNA, 15 bp, Homo sapiens
caggctctctcttcc

SEQ ID NO: 1665938 - DNA, 15 bp, Homo sapiens
aggctctctcttccg

SEQ ID NO: 1665939 - DNA, 15 bp, Homo sapiens
ggctctctcttccgg

SEQ ID NO: 1665940 - DNA, 15 bp, Homo sapiens
gctctctcttccgga

SEQ ID NO: 1665941 - DNA, 15 bp, Homo sapiens
ctctctcttccggaa

SEQ ID NO: 1665942 - DNA, 15 bp, Homo sapiens
tctctcttccggaag

SEQ ID NO: 1665943 - DNA, 15 bp, Homo sapiens
ctctcttccggaagc

SEQ ID NO: 1665944 - DNA, 15 bp, Homo sapiens
tctcttccggaagca

SEQ ID NO: 1665945 - DNA, 15 bp, Homo sapiens
ctcttccggaagcaa

SEQ ID NO: 1665946 - DNA, 15 bp, Homo sapiens
tcttccggaagcaaa

SEQ ID NO: 1665947 - DNA, 15 bp, Homo sapiens
cttccggaagcaaaa

SEQ ID NO: 1665948 - DNA, 15 bp, Homo sapiens
ttccggaagcaaaat

SEQ ID NO: 1665949 - DNA, 15 bp, Homo sapiens
tccggaagcaaaatc

SEQ ID NO: 1665950 - DNA, 15 bp, Homo sapiens
ccggaagcaaaatca

SEQ ID NO: 1665951 - DNA, 15 bp, Homo sapiens
cggaagcaaaatcaa

SEQ ID NO: 1665952 - DNA, 15 bp, Homo sapiens
ggaagcaaaatcaat

SEQ ID NO: 1665953 - DNA, 15 bp, Homo sapiens
gaagcaaaatcaatt

SEQ ID NO: 1665954 - DNA, 15 bp, Homo sapiens
aagcaaaatcaattg

SEQ ID NO: 1665955 - DNA, 15 bp, Homo sapiens
agcaaaatcaattgc

SEQ ID NO: 1665956 - DNA, 15 bp, Homo sapiens
gcaaaatcaattgct

SEQ ID NO: 1665957 - DNA, 15 bp, Homo sapiens
caaaatcaattgctg

SEQ ID NO: 1665958 - DNA, 15 bp, Homo sapiens
aaaatcaattgctga

SEQ ID NO: 1665959 - DNA, 15 bp, Homo sapiens
aaatcaattgctgag

SEQ ID NO: 1665960 - DNA, 15 bp, Homo sapiens
aatcaattgctgaga

SEQ ID NO: 1665961 - DNA, 15 bp, Homo sapiens
atcaattgctgagat

SEQ ID NO: 1665962 - DNA, 15 bp, Homo sapiens
tcaattgctgagatc

SEQ ID NO: 1665963 - DNA, 15 bp, Homo sapiens
caattgctgagatca

SEQ ID NO: 1665964 - DNA, 15 bp, Homo sapiens
aattgctgagatcac

SEQ ID NO: 1665965 - DNA, 15 bp, Homo sapiens
attgctgagatcact

SEQ ID NO: 1665966 - DNA, 15 bp, Homo sapiens
ttgctgagatcactc

SEQ ID NO: 1665967 - DNA, 15 bp, Homo sapiens
tgctgagatcactct

SEQ ID NO: 1665968 - DNA, 15 bp, Homo sapiens
gctgagatcactctg

SEQ ID NO: 1665969 - DNA, 15 bp, Homo sapiens
ctgagatcactctgg

SEQ ID NO: 1665970 - DNA, 15 bp, Homo sapiens
tgagatcactctggg

SEQ ID NO: 1665971 - DNA, 15 bp, Homo sapiens
gagatcactctgggg

SEQ ID NO: 1665972 - DNA, 15 bp, Homo sapiens
agatcactctgggga

SEQ ID NO: 1665973 - DNA, 15 bp, Homo sapiens
gatcactctggggaa

SEQ ID NO: 1665974 - DNA, 15 bp, Homo sapiens
atcactctggggaaa

SEQ ID NO: 1665975 - DNA, 15 bp, Homo sapiens
tcactctggggaaaa

SEQ ID NO: 1665976 - DNA, 15 bp, Homo sapiens
cactctggggaaaat

SEQ ID NO: 1665977 - DNA, 15 bp, Homo sapiens
actctggggaaaata

SEQ ID NO: 1665978 - DNA, 15 bp, Homo sapiens
ctctggggaaaatac

SEQ ID NO: 1665979 - DNA, 15 bp, Homo sapiens
tctggggaaaatacc

SEQ ID NO: 1665980 - DNA, 15 bp, Homo sapiens
ctggggaaaataccc

SEQ ID NO: 1665981 - DNA, 15 bp, Homo sapiens
tggggaaaataccca

SEQ ID NO: 1665982 - DNA, 15 bp, Homo sapiens
ggggaaaatacccac

SEQ ID NO: 1665983 - DNA, 15 bp, Homo sapiens
gggaaaatacccacc

SEQ ID NO: 1665984 - DNA, 15 bp, Homo sapiens
ggaaaatacccacct

SEQ ID NO: 1665985 - DNA, 15 bp, Homo sapiens
gaaaatacccacctt

SEQ ID NO: 1665986 - DNA, 15 bp, Homo sapiens
aaaatacccacctta

SEQ ID NO: 1665987 - DNA, 15 bp, Homo sapiens
aaatacccaccttat

SEQ ID NO: 1665988 - DNA, 15 bp, Homo sapiens
aatacccaccttatt

SEQ ID NO: 1665989 - DNA, 15 bp, Homo sapiens
atacccaccttattt

SEQ ID NO: 1665990 - DNA, 15 bp, Homo sapiens
tacccaccttatttg

SEQ ID NO: 1665991 - DNA, 15 bp, Homo sapiens
acccaccttatttgg

SEQ ID NO: 1665992 - DNA, 15 bp, Homo sapiens
cccaccttatttgga

SEQ ID NO: 1665993 - DNA, 15 bp, Homo sapiens
ccaccttatttggaa

SEQ ID NO: 1665994 - DNA, 15 bp, Homo sapiens
caccttatttggaaa

SEQ ID NO: 1665995 - DNA, 15 bp, Homo sapiens
accttatttggaaag

SEQ ID NO: 1665996 - DNA, 15 bp, Homo sapiens
ccttatttggaaaga

SEQ ID NO: 1665997 - DNA, 15 bp, Homo sapiens
cttatttggaaagaa

SEQ ID NO: 1665998 - DNA, 15 bp, Homo sapiens
ttatttggaaagaag

SEQ ID NO: 1665999 - DNA, 15 bp, Homo sapiens
tatttggaaagaagc

SEQ ID NO: 1666000 - DNA, 15 bp, Homo sapiens
atttggaaagaagca

SEQ ID NO: 1666001 - DNA, 15 bp, Homo sapiens
tttggaaagaagcac

SEQ ID NO: 1666002 - DNA, 15 bp, Homo sapiens
ttggaaagaagcact

SEQ ID NO: 1666003 - DNA, 15 bp, Homo sapiens
tggaaagaagcactg

SEQ ID NO: 1666004 - DNA, 15 bp, Homo sapiens
ggaaagaagcactga

SEQ ID NO: 1666005 - DNA, 15 bp, Homo sapiens
gaaagaagcactgat

SEQ ID NO: 1666006 - DNA, 15 bp, Homo sapiens
aaagaagcactgatc

SEQ ID NO: 1666007 - DNA, 15 bp, Homo sapiens
aagaagcactgatca

SEQ ID NO: 1666008 - DNA, 15 bp, Homo sapiens
agaagcactgatcaa

SEQ ID NO: 1666009 - DNA, 15 bp, Homo sapiens
gaagcactgatcaat

SEQ ID NO: 1666010 - DNA, 15 bp, Homo sapiens
aagcactgatcaatt

SEQ ID NO: 1666011 - DNA, 15 bp, Homo sapiens
agcactgatcaattg

SEQ ID NO: 1666012 - DNA, 15 bp, Homo sapiens
gcactgatcaattga

SEQ ID NO: 1666013 - DNA, 15 bp, Homo sapiens
cactgatcaattgat

SEQ ID NO: 1666014 - DNA, 15 bp, Homo sapiens
actgatcaattgatg

SEQ ID NO: 1666015 - DNA, 15 bp, Homo sapiens
ctgatcaattgatgt

SEQ ID NO: 1666016 - DNA, 15 bp, Homo sapiens
tgatcaattgatgtc

SEQ ID NO: 1666017 - DNA, 15 bp, Homo sapiens
gatcaattgatgtct

SEQ ID NO: 1666018 - DNA, 15 bp, Homo sapiens
atcaattgatgtcta

SEQ ID NO: 1666019 - DNA, 15 bp, Homo sapiens
tcaattgatgtctat

SEQ ID NO: 1666020 - DNA, 15 bp, Homo sapiens
caattgatgtctatt

SEQ ID NO: 1666021 - DNA, 15 bp, Homo sapiens
aattgatgtctattt

SEQ ID NO: 1666022 - DNA, 15 bp, Homo sapiens
attgatgtctatttt

SEQ ID NO: 1666023 - DNA, 15 bp, Homo sapiens
ttgatgtctattttt

SEQ ID NO: 1666024 - DNA, 15 bp, Homo sapiens
tgatgtctatttttt

SEQ ID NO: 1666025 - DNA, 15 bp, Homo sapiens
gatgtctattttttt

SEQ ID NO: 1666026 - DNA, 15 bp, Homo sapiens
atgtctatttttttt

SEQ ID NO: 1666027 - DNA, 15 bp, Homo sapiens
tgtctattttttttt

SEQ ID NO: 1666028 - DNA, 15 bp, Homo sapiens
gtctatttttttttt

SEQ ID NO: 1666029 - DNA, 15 bp, Homo sapiens
ttttttttttgagtt

SEQ ID NO: 1666030 - DNA, 15 bp, Homo sapiens
tttttttttgagttg

SEQ ID NO: 1666031 - DNA, 15 bp, Homo sapiens
ttttttttgagttgg

SEQ ID NO: 1666032 - DNA, 15 bp, Homo sapiens
tttttttgagttgga

SEQ ID NO: 1666033 - DNA, 15 bp, Homo sapiens
ttttttgagttggag

SEQ ID NO: 1666034 - DNA, 15 bp, Homo sapiens
tttttgagttggagt

SEQ ID NO: 1666035 - DNA, 15 bp, Homo sapiens
ttttgagttggagtc

SEQ ID NO: 1666036 - DNA, 15 bp, Homo sapiens
tttgagttggagtct

SEQ ID NO: 1666037 - DNA, 15 bp, Homo sapiens
ttgagttggagtctc

SEQ ID NO: 1666038 - DNA, 15 bp, Homo sapiens
tgagttggagtctcg

SEQ ID NO: 1666039 - DNA, 15 bp, Homo sapiens
gagttggagtctcgc

SEQ ID NO: 1666040 - DNA, 15 bp, Homo sapiens
agttggagtctcgcc

SEQ ID NO: 1666041 - DNA, 15 bp, Homo sapiens
gttggagtctcgccc

SEQ ID NO: 1666042 - DNA, 15 bp, Homo sapiens
ttggagtctcgccct

SEQ ID NO: 1666043 - DNA, 15 bp, Homo sapiens
tggagtctcgccctg

SEQ ID NO: 1666044 - DNA, 15 bp, Homo sapiens
ggagtctcgccctgt

SEQ ID NO: 1666045 - DNA, 15 bp, Homo sapiens
gagtctcgccctgtc

SEQ ID NO: 1666046 - DNA, 15 bp, Homo sapiens
agtctcgccctgtca

SEQ ID NO: 1666047 - DNA, 15 bp, Homo sapiens
gtctcgccctgtcac

SEQ ID NO: 1666048 - DNA, 15 bp, Homo sapiens
tctcgccctgtcacc

SEQ ID NO: 1666049 - DNA, 15 bp, Homo sapiens
ctcgccctgtcaccc

SEQ ID NO: 1666050 - DNA, 15 bp, Homo sapiens
tcgccctgtcaccca

SEQ ID NO: 1666051 - DNA, 15 bp, Homo sapiens
cgccctgtcacccag

SEQ ID NO: 1666052 - DNA, 15 bp, Homo sapiens
gccctgtcacccagg

SEQ ID NO: 1666053 - DNA, 15 bp, Homo sapiens
ccctgtcacccaggc

SEQ ID NO: 1666054 - DNA, 15 bp, Homo sapiens
cctgtcacccaggct

SEQ ID NO: 1666055 - DNA, 15 bp, Homo sapiens
gagtgcaatggcata

SEQ ID NO: 1666056 - DNA, 15 bp, Homo sapiens
agtgcaatggcataa

SEQ ID NO: 1666057 - DNA, 15 bp, Homo sapiens
gtgcaatggcataat

SEQ ID NO: 1666058 - DNA, 15 bp, Homo sapiens
tgcaatggcataatc

SEQ ID NO: 1666059 - DNA, 15 bp, Homo sapiens
gcaatggcataatct

SEQ ID NO: 1666060 - DNA, 15 bp, Homo sapiens
caatggcataatctc

SEQ ID NO: 1666061 - DNA, 15 bp, Homo sapiens
aatggcataatctcg

SEQ ID NO: 1666062 - DNA, 15 bp, Homo sapiens
atggcataatctcgc

SEQ ID NO: 1666063 - DNA, 15 bp, Homo sapiens
tggcataatctcgcc

SEQ ID NO: 1666064 - DNA, 15 bp, Homo sapiens
ggcataatctcgcct

SEQ ID NO: 1666065 - DNA, 15 bp, Homo sapiens
gcataatctcgcctc

SEQ ID NO: 1666066 - DNA, 15 bp, Homo sapiens
cataatctcgcctca

SEQ ID NO: 1666067 - DNA, 15 bp, Homo sapiens
ataatctcgcctcac

SEQ ID NO: 1666068 - DNA, 15 bp, Homo sapiens
taatctcgcctcact

SEQ ID NO: 1666069 - DNA, 15 bp, Homo sapiens
aatctcgcctcactg

SEQ ID NO: 1666070 - DNA, 15 bp, Homo sapiens
atctcgcctcactgc

SEQ ID NO: 1666071 - DNA, 15 bp, Homo sapiens
tctcgcctcactgca

SEQ ID NO: 1666072 - DNA, 15 bp, Homo sapiens
ctcgcctcactgcaa

SEQ ID NO: 1666073 - DNA, 15 bp, Homo sapiens
tcgcctcactgcaat

SEQ ID NO: 1666074 - DNA, 15 bp, Homo sapiens
cgcctcactgcaatc

SEQ ID NO: 1666075 - DNA, 15 bp, Homo sapiens
gcctcactgcaatcc

SEQ ID NO: 1666076 - DNA, 15 bp, Homo sapiens
cctcactgcaatccc

SEQ ID NO: 1666077 - DNA, 15 bp, Homo sapiens
ctcactgcaatcccc

SEQ ID NO: 1666078 - DNA, 15 bp, Homo sapiens
tcactgcaatccccg

SEQ ID NO: 1666079 - DNA, 15 bp, Homo sapiens
cactgcaatccccgc

SEQ ID NO: 1666080 - DNA, 15 bp, Homo sapiens
actgcaatccccgcc

SEQ ID NO: 1666081 - DNA, 15 bp, Homo sapiens
ctgcaatccccgcct

SEQ ID NO: 1666082 - DNA, 15 bp, Homo sapiens
tgcaatccccgcctc

SEQ ID NO: 1666083 - DNA, 15 bp, Homo sapiens
gcaatccccgcctcc

SEQ ID NO: 1666084 - DNA, 15 bp, Homo sapiens
caatccccgcctccc

SEQ ID NO: 1666085 - DNA, 15 bp, Homo sapiens
aatccccgcctcccg

SEQ ID NO: 1666086 - DNA, 15 bp, Homo sapiens
atccccgcctcccgg

SEQ ID NO: 1666087 - DNA, 15 bp, Homo sapiens
tccccgcctcccggg

SEQ ID NO: 1666088 - DNA, 15 bp, Homo sapiens
ccccgcctcccgggt

SEQ ID NO: 1666089 - DNA, 15 bp, Homo sapiens
cccgcctcccgggtt

SEQ ID NO: 1666090 - DNA, 15 bp, Homo sapiens
cgcctcccgggttcc

SEQ ID NO: 1666091 - DNA, 15 bp, Homo sapiens
ctcccgggttccagc

SEQ ID NO: 1666092 - DNA, 15 bp, Homo sapiens
tcccgggttccagca

SEQ ID NO: 1666093 - DNA, 15 bp, Homo sapiens
cccgggttccagcaa

SEQ ID NO: 1666094 - DNA, 15 bp, Homo sapiens
ccgggttccagcaat

SEQ ID NO: 1666095 - DNA, 15 bp, Homo sapiens
cgggttccagcaatt

SEQ ID NO: 1666096 - DNA, 15 bp, Homo sapiens
gggttccagcaattc

SEQ ID NO: 1666097 - DNA, 15 bp, Homo sapiens
ggttccagcaattct

SEQ ID NO: 1666098 - DNA, 15 bp, Homo sapiens
gttccagcaattctc

SEQ ID NO: 1666099 - DNA, 15 bp, Homo sapiens
ttccagcaattctcc

SEQ ID NO: 1666100 - DNA, 15 bp, Homo sapiens
tccagcaattctcct

SEQ ID NO: 1666101 - DNA, 15 bp, Homo sapiens
ccagcaattctcctg

SEQ ID NO: 1666102 - DNA, 15 bp, Homo sapiens
cagcaattctcctgc

SEQ ID NO: 1666103 - DNA, 15 bp, Homo sapiens
ctggaattataggcg

SEQ ID NO: 1666104 - DNA, 15 bp, Homo sapiens
tggaattataggcgc

SEQ ID NO: 1666105 - DNA, 15 bp, Homo sapiens
ggaattataggcgcc

SEQ ID NO: 1666106 - DNA, 15 bp, Homo sapiens
gaattataggcgcct

SEQ ID NO: 1666107 - DNA, 15 bp, Homo sapiens
aattataggcgcctg

SEQ ID NO: 1666108 - DNA, 15 bp, Homo sapiens
attataggcgcctgc

SEQ ID NO: 1666109 - DNA, 15 bp, Homo sapiens
ttataggcgcctgcc

SEQ ID NO: 1666110 - DNA, 15 bp, Homo sapiens
tataggcgcctgcca

SEQ ID NO: 1666111 - DNA, 15 bp, Homo sapiens
ataggcgcctgccac

SEQ ID NO: 1666112 - DNA, 15 bp, Homo sapiens
taggcgcctgccaca

SEQ ID NO: 1666113 - DNA, 15 bp, Homo sapiens
aggcgcctgccacaa

SEQ ID NO: 1666114 - DNA, 15 bp, Homo sapiens
ggcgcctgccacaac

SEQ ID NO: 1666115 - DNA, 15 bp, Homo sapiens
gcgcctgccacaaca

SEQ ID NO: 1666116 - DNA, 15 bp, Homo sapiens
cgcctgccacaacac

SEQ ID NO: 1666117 - DNA, 15 bp, Homo sapiens
gcctgccacaacacc

SEQ ID NO: 1666118 - DNA, 15 bp, Homo sapiens
cctgccacaacaccc

SEQ ID NO: 1666119 - DNA, 15 bp, Homo sapiens
ctgccacaacacccg

SEQ ID NO: 1666120 - DNA, 15 bp, Homo sapiens
tgccacaacacccgg

SEQ ID NO: 1666121 - DNA, 15 bp, Homo sapiens
gccacaacacccggc

SEQ ID NO: 1666122 - DNA, 15 bp, Homo sapiens
ccacaacacccggct

SEQ ID NO: 1666123 - DNA, 15 bp, Homo sapiens
cacaacacccggcta

SEQ ID NO: 1666124 - DNA, 15 bp, Homo sapiens
acaacacccggctaa

SEQ ID NO: 1666125 - DNA, 15 bp, Homo sapiens
caacacccggctaat

SEQ ID NO: 1666126 - DNA, 15 bp, Homo sapiens
aacacccggctaatt

SEQ ID NO: 1666127 - DNA, 15 bp, Homo sapiens
taatttttgtatttg

SEQ ID NO: 1666128 - DNA, 15 bp, Homo sapiens
aatttttgtatttgt

SEQ ID NO: 1666129 - DNA, 15 bp, Homo sapiens
atttttgtatttgta

SEQ ID NO: 1666130 - DNA, 15 bp, Homo sapiens
tttttgtatttgtag

SEQ ID NO: 1666131 - DNA, 15 bp, Homo sapiens
ttttgtatttgtagt

SEQ ID NO: 1666132 - DNA, 15 bp, Homo sapiens
tttgtatttgtagta

SEQ ID NO: 1666133 - DNA, 15 bp, Homo sapiens
ttgtatttgtagtag

SEQ ID NO: 1666134 - DNA, 15 bp, Homo sapiens
tgtatttgtagtaga

SEQ ID NO: 1666135 - DNA, 15 bp, Homo sapiens
gtatttgtagtagag

SEQ ID NO: 1666136 - DNA, 15 bp, Homo sapiens
tatttgtagtagaga

SEQ ID NO: 1666137 - DNA, 15 bp, Homo sapiens
atttgtagtagagat

SEQ ID NO: 1666138 - DNA, 15 bp, Homo sapiens
tttgtagtagagatg

SEQ ID NO: 1666139 - DNA, 15 bp, Homo sapiens
ttgtagtagagatgg

SEQ ID NO: 1666140 - DNA, 15 bp, Homo sapiens
tgtagtagagatggg

SEQ ID NO: 1666141 - DNA, 15 bp, Homo sapiens
gtagtagagatgggg

SEQ ID NO: 1666142 - DNA, 15 bp, Homo sapiens
caccacgttggccag

SEQ ID NO: 1666143 - DNA, 15 bp, Homo sapiens
accacgttggccagg

SEQ ID NO: 1666144 - DNA, 15 bp, Homo sapiens
cagcctcccaaagtc

SEQ ID NO: 1666145 - DNA, 15 bp, Homo sapiens
agcctcccaaagtcc

SEQ ID NO: 1666146 - DNA, 15 bp, Homo sapiens
gcctcccaaagtcca

SEQ ID NO: 1666147 - DNA, 15 bp, Homo sapiens
cctcccaaagtccaa

SEQ ID NO: 1666148 - DNA, 15 bp, Homo sapiens
ctcccaaagtccaag

SEQ ID NO: 1666149 - DNA, 15 bp, Homo sapiens
tcccaaagtccaagg

SEQ ID NO: 1666150 - DNA, 15 bp, Homo sapiens
cccaaagtccaagga

SEQ ID NO: 1666151 - DNA, 15 bp, Homo sapiens
ccaaagtccaaggat

SEQ ID NO: 1666152 - DNA, 15 bp, Homo sapiens
caaagtccaaggatt

SEQ ID NO: 1666153 - DNA, 15 bp, Homo sapiens
aaagtccaaggattg

SEQ ID NO: 1666154 - DNA, 15 bp, Homo sapiens
aagtccaaggattgc

SEQ ID NO: 1666155 - DNA, 15 bp, Homo sapiens
agtccaaggattgca

SEQ ID NO: 1666156 - DNA, 15 bp, Homo sapiens
gtccaaggattgcag

SEQ ID NO: 1666157 - DNA, 15 bp, Homo sapiens
tccaaggattgcagg

SEQ ID NO: 1666158 - DNA, 15 bp, Homo sapiens
ccaaggattgcaggc

SEQ ID NO: 1666159 - DNA, 15 bp, Homo sapiens
caaggattgcaggcg

SEQ ID NO: 1666160 - DNA, 15 bp, Homo sapiens
aaggattgcaggcgt

SEQ ID NO: 1666161 - DNA, 15 bp, Homo sapiens
aggattgcaggcgtg

SEQ ID NO: 1666162 - DNA, 15 bp, Homo sapiens
ggattgcaggcgtga

SEQ ID NO: 1666163 - DNA, 15 bp, Homo sapiens
gattgcaggcgtgac

SEQ ID NO: 1666164 - DNA, 15 bp, Homo sapiens
attgcaggcgtgacc

SEQ ID NO: 1666165 - DNA, 15 bp, Homo sapiens
ttgcaggcgtgaccc

SEQ ID NO: 1666166 - DNA, 15 bp, Homo sapiens
tgcaggcgtgaccca

SEQ ID NO: 1666167 - DNA, 15 bp, Homo sapiens
gcaggcgtgacccac

SEQ ID NO: 1666168 - DNA, 15 bp, Homo sapiens
caggcgtgacccact

SEQ ID NO: 1666169 - DNA, 15 bp, Homo sapiens
aggcgtgacccactg

SEQ ID NO: 1666170 - DNA, 15 bp, Homo sapiens
ggcgtgacccactgt

SEQ ID NO: 1666171 - DNA, 15 bp, Homo sapiens
gcgtgacccactgtg

SEQ ID NO: 1666172 - DNA, 15 bp, Homo sapiens
cgtgacccactgtgc

SEQ ID NO: 1666173 - DNA, 15 bp, Homo sapiens
gtgacccactgtgcc

SEQ ID NO: 1666174 - DNA, 15 bp, Homo sapiens
tgacccactgtgcca

SEQ ID NO: 1666175 - DNA, 15 bp, Homo sapiens
gacccactgtgccag

SEQ ID NO: 1666176 - DNA, 15 bp, Homo sapiens
acccactgtgccagc

SEQ ID NO: 1666177 - DNA, 15 bp, Homo sapiens
cccactgtgccagcc

SEQ ID NO: 1666178 - DNA, 15 bp, Homo sapiens
ccactgtgccagcca

SEQ ID NO: 1666179 - DNA, 15 bp, Homo sapiens
cactgtgccagccaa

SEQ ID NO: 1666180 - DNA, 15 bp, Homo sapiens
actgtgccagccaat

SEQ ID NO: 1666181 - DNA, 15 bp, Homo sapiens
ctgtgccagccaatc

SEQ ID NO: 1666182 - DNA, 15 bp, Homo sapiens
tgtgccagccaatca

SEQ ID NO: 1666183 - DNA, 15 bp, Homo sapiens
gtgccagccaatcaa

SEQ ID NO: 1666184 - DNA, 15 bp, Homo sapiens
tgccagccaatcaat

SEQ ID NO: 1666185 - DNA, 15 bp, Homo sapiens
gccagccaatcaatt

SEQ ID NO: 1666186 - DNA, 15 bp, Homo sapiens
ccagccaatcaattg

SEQ ID NO: 1666187 - DNA, 15 bp, Homo sapiens
cagccaatcaattga

SEQ ID NO: 1666188 - DNA, 15 bp, Homo sapiens
agccaatcaattgat

SEQ ID NO: 1666189 - DNA, 15 bp, Homo sapiens
gccaatcaattgatt

SEQ ID NO: 1666190 - DNA, 15 bp, Homo sapiens
ccaatcaattgattt

SEQ ID NO: 1666191 - DNA, 15 bp, Homo sapiens
caatcaattgatttc

SEQ ID NO: 1666192 - DNA, 15 bp, Homo sapiens
aatcaattgatttct

SEQ ID NO: 1666193 - DNA, 15 bp, Homo sapiens
atcaattgatttctc

SEQ ID NO: 1666194 - DNA, 15 bp, Homo sapiens
tcaattgatttctca

SEQ ID NO: 1666195 - DNA, 15 bp, Homo sapiens
caattgatttctcat

SEQ ID NO: 1666196 - DNA, 15 bp, Homo sapiens
aattgatttctcatt

SEQ ID NO: 1666197 - DNA, 15 bp, Homo sapiens
attgatttctcattc

SEQ ID NO: 1666198 - DNA, 15 bp, Homo sapiens
ttgatttctcattca

SEQ ID NO: 1666199 - DNA, 15 bp, Homo sapiens
tgatttctcattcat

SEQ ID NO: 1666200 - DNA, 15 bp, Homo sapiens
gatttctcattcatt

SEQ ID NO: 1666201 - DNA, 15 bp, Homo sapiens
atttctcattcattt

SEQ ID NO: 1666202 - DNA, 15 bp, Homo sapiens
tttctcattcatttt

SEQ ID NO: 1666203 - DNA, 15 bp, Homo sapiens
ttctcattcattttc

SEQ ID NO: 1666204 - DNA, 15 bp, Homo sapiens
tctcattcattttca

SEQ ID NO: 1666205 - DNA, 15 bp, Homo sapiens
ctcattcattttcag

SEQ ID NO: 1666206 - DNA, 15 bp, Homo sapiens
tcattcattttcagc

SEQ ID NO: 1666207 - DNA, 15 bp, Homo sapiens
cattcattttcagct

SEQ ID NO: 1666208 - DNA, 15 bp, Homo sapiens
attcattttcagctg

SEQ ID NO: 1666209 - DNA, 15 bp, Homo sapiens
ttcattttcagctgg

SEQ ID NO: 1666210 - DNA, 15 bp, Homo sapiens
tcattttcagctggc

SEQ ID NO: 1666211 - DNA, 15 bp, Homo sapiens
cattttcagctggct

SEQ ID NO: 1666212 - DNA, 15 bp, Homo sapiens
attttcagctggctc

SEQ ID NO: 1666213 - DNA, 15 bp, Homo sapiens
ttttcagctggctct

SEQ ID NO: 1666214 - DNA, 15 bp, Homo sapiens
tttcagctggctctg

SEQ ID NO: 1666215 - DNA, 15 bp, Homo sapiens
ttcagctggctctgt

SEQ ID NO: 1666216 - DNA, 15 bp, Homo sapiens
tcagctggctctgtt

SEQ ID NO: 1666217 - DNA, 15 bp, Homo sapiens
cagctggctctgttc

SEQ ID NO: 1666218 - DNA, 15 bp, Homo sapiens
agctggctctgttcc

SEQ ID NO: 1666219 - DNA, 15 bp, Homo sapiens
gctggctctgttccc

SEQ ID NO: 1666220 - DNA, 15 bp, Homo sapiens
ctggctctgttccct

SEQ ID NO: 1666221 - DNA, 15 bp, Homo sapiens
tggctctgttccctt

SEQ ID NO: 1666222 - DNA, 15 bp, Homo sapiens
ggctctgttccctta

SEQ ID NO: 1666223 - DNA, 15 bp, Homo sapiens
gctctgttcccttaa

SEQ ID NO: 1666224 - DNA, 15 bp, Homo sapiens
ctctgttcccttaag

SEQ ID NO: 1666225 - DNA, 15 bp, Homo sapiens
tctgttcccttaagc

SEQ ID NO: 1666226 - DNA, 15 bp, Homo sapiens
ctgttcccttaagcc

SEQ ID NO: 1666227 - DNA, 15 bp, Homo sapiens
tgttcccttaagcca

SEQ ID NO: 1666228 - DNA, 15 bp, Homo sapiens
gttcccttaagccag

SEQ ID NO: 1666229 - DNA, 15 bp, Homo sapiens
ttcccttaagccagg

SEQ ID NO: 1666230 - DNA, 15 bp, Homo sapiens
tcccttaagccaggg

SEQ ID NO: 1666231 - DNA, 15 bp, Homo sapiens
cccttaagccagggg

SEQ ID NO: 1666232 - DNA, 15 bp, Homo sapiens
ccttaagccagggga

SEQ ID NO: 1666233 - DNA, 15 bp, Homo sapiens
cttaagccaggggat

SEQ ID NO: 1666234 - DNA, 15 bp, Homo sapiens
ttaagccaggggatt

SEQ ID NO: 1666235 - DNA, 15 bp, Homo sapiens
taagccaggggattt

SEQ ID NO: 1666236 - DNA, 15 bp, Homo sapiens
aagccaggggatttt

SEQ ID NO: 1666237 - DNA, 15 bp, Homo sapiens
agccaggggattttc

SEQ ID NO: 1666238 - DNA, 15 bp, Homo sapiens
gccaggggattttcg

SEQ ID NO: 1666239 - DNA, 15 bp, Homo sapiens
ccaggggattttcgt

SEQ ID NO: 1666240 - DNA, 15 bp, Homo sapiens
caggggattttcgtt

SEQ ID NO: 1666241 - DNA, 15 bp, Homo sapiens
aggggattttcgttt

SEQ ID NO: 1666242 - DNA, 15 bp, Homo sapiens
ggggattttcgtttg

SEQ ID NO: 1666243 - DNA, 15 bp, Homo sapiens
gggattttcgtttgt

SEQ ID NO: 1666244 - DNA, 15 bp, Homo sapiens
ggattttcgtttgtt

SEQ ID NO: 1666245 - DNA, 15 bp, Homo sapiens
gattttcgtttgttt

SEQ ID NO: 1666246 - DNA, 15 bp, Homo sapiens
attttcgtttgtttg

SEQ ID NO: 1666247 - DNA, 15 bp, Homo sapiens
ttttcgtttgtttgt

SEQ ID NO: 1666248 - DNA, 15 bp, Homo sapiens
tttcgtttgtttgtt

SEQ ID NO: 1666249 - DNA, 15 bp, Homo sapiens
ttcgtttgtttgttt

SEQ ID NO: 1666250 - DNA, 15 bp, Homo sapiens
tcgtttgtttgtttc

SEQ ID NO: 1666251 - DNA, 15 bp, Homo sapiens
cgtttgtttgtttcc

SEQ ID NO: 1666252 - DNA, 15 bp, Homo sapiens
gtttgtttgtttccc

SEQ ID NO: 1666253 - DNA, 15 bp, Homo sapiens
tttgtttgtttcccc

SEQ ID NO: 1666254 - DNA, 15 bp, Homo sapiens
ttgtttgtttcccct

SEQ ID NO: 1666255 - DNA, 15 bp, Homo sapiens
tgtttgtttcccctt

SEQ ID NO: 1666256 - DNA, 15 bp, Homo sapiens
gtttgtttccccttc

SEQ ID NO: 1666257 - DNA, 15 bp, Homo sapiens
tttgtttccccttca

SEQ ID NO: 1666258 - DNA, 15 bp, Homo sapiens
ttgtttccccttcaa

SEQ ID NO: 1666259 - DNA, 15 bp, Homo sapiens
tgtttccccttcaag

SEQ ID NO: 1666260 - DNA, 15 bp, Homo sapiens
gtttccccttcaagg

SEQ ID NO: 1666261 - DNA, 15 bp, Homo sapiens
tttccccttcaagga

SEQ ID NO: 1666262 - DNA, 15 bp, Homo sapiens
ttccccttcaaggaa

SEQ ID NO: 1666263 - DNA, 15 bp, Homo sapiens
tccccttcaaggaaa

SEQ ID NO: 1666264 - DNA, 15 bp, Homo sapiens
ccccttcaaggaaat

SEQ ID NO: 1666265 - DNA, 15 bp, Homo sapiens
cccttcaaggaaatg

SEQ ID NO: 1666266 - DNA, 15 bp, Homo sapiens
ccttcaaggaaatga

SEQ ID NO: 1666267 - DNA, 15 bp, Homo sapiens
cttcaaggaaatgat

SEQ ID NO: 1666268 - DNA, 15 bp, Homo sapiens
ttcaaggaaatgatt

SEQ ID NO: 1666269 - DNA, 15 bp, Homo sapiens
tcaaggaaatgattc

SEQ ID NO: 1666270 - DNA, 15 bp, Homo sapiens
caaggaaatgattct

SEQ ID NO: 1666271 - DNA, 15 bp, Homo sapiens
aaggaaatgattcta

SEQ ID NO: 1666272 - DNA, 15 bp, Homo sapiens
aggaaatgattctag

SEQ ID NO: 1666273 - DNA, 15 bp, Homo sapiens
ggaaatgattctagc

SEQ ID NO: 1666274 - DNA, 15 bp, Homo sapiens
gaaatgattctagct

SEQ ID NO: 1666275 - DNA, 15 bp, Homo sapiens
aaatgattctagcta

SEQ ID NO: 1666276 - DNA, 15 bp, Homo sapiens
aatgattctagctac

SEQ ID NO: 1666277 - DNA, 15 bp, Homo sapiens
atgattctagctaca

SEQ ID NO: 1666278 - DNA, 15 bp, Homo sapiens
tgattctagctacag

SEQ ID NO: 1666279 - DNA, 15 bp, Homo sapiens
gattctagctacagt

SEQ ID NO: 1666280 - DNA, 15 bp, Homo sapiens
attctagctacagtt

SEQ ID NO: 1666281 - DNA, 15 bp, Homo sapiens
ttctagctacagttt

SEQ ID NO: 1666282 - DNA, 15 bp, Homo sapiens
tctagctacagtttt

SEQ ID NO: 1666283 - DNA, 15 bp, Homo sapiens
ctagctacagttttg

SEQ ID NO: 1666284 - DNA, 15 bp, Homo sapiens
tagctacagttttga

SEQ ID NO: 1666285 - DNA, 15 bp, Homo sapiens
agctacagttttgat

SEQ ID NO: 1666286 - DNA, 15 bp, Homo sapiens
gctacagttttgatt

SEQ ID NO: 1666287 - DNA, 15 bp, Homo sapiens
ctacagttttgattt

SEQ ID NO: 1666288 - DNA, 15 bp, Homo sapiens
tacagttttgatttc

SEQ ID NO: 1666289 - DNA, 15 bp, Homo sapiens
acagttttgatttcc

SEQ ID NO: 1666290 - DNA, 15 bp, Homo sapiens
cagttttgatttcct

SEQ ID NO: 1666291 - DNA, 15 bp, Homo sapiens
agttttgatttcctt

SEQ ID NO: 1666292 - DNA, 15 bp, Homo sapiens
gttttgatttccttg

SEQ ID NO: 1666293 - DNA, 15 bp, Homo sapiens
ttttgatttccttgt

SEQ ID NO: 1666294 - DNA, 15 bp, Homo sapiens
tttgatttccttgta

SEQ ID NO: 1666295 - DNA, 15 bp, Homo sapiens
ttgatttccttgtac

SEQ ID NO: 1666296 - DNA, 15 bp, Homo sapiens
tgatttccttgtaca

SEQ ID NO: 1666297 - DNA, 15 bp, Homo sapiens
gatttccttgtacaa

SEQ ID NO: 1666298 - DNA, 15 bp, Homo sapiens
atttccttgtacaac

SEQ ID NO: 1666299 - DNA, 15 bp, Homo sapiens
tttccttgtacaact

SEQ ID NO: 1666300 - DNA, 15 bp, Homo sapiens
ttccttgtacaactg

SEQ ID NO: 1666301 - DNA, 15 bp, Homo sapiens
tccttgtacaactgt

SEQ ID NO: 1666302 - DNA, 15 bp, Homo sapiens
ccttgtacaactgtt

SEQ ID NO: 1666303 - DNA, 15 bp, Homo sapiens
cttgtacaactgttt

SEQ ID NO: 1666304 - DNA, 15 bp, Homo sapiens
ttgtacaactgtttt

SEQ ID NO: 1666305 - DNA, 15 bp, Homo sapiens
tgtacaactgttttc

SEQ ID NO: 1666306 - DNA, 15 bp, Homo sapiens
gtacaactgttttca

SEQ ID NO: 1666307 - DNA, 15 bp, Homo sapiens
tacaactgttttcag

SEQ ID NO: 1666308 - DNA, 15 bp, Homo sapiens
acaactgttttcagt

SEQ ID NO: 1666309 - DNA, 15 bp, Homo sapiens
caactgttttcagta

SEQ ID NO: 1666310 - DNA, 15 bp, Homo sapiens
aactgttttcagtag

SEQ ID NO: 1666311 - DNA, 15 bp, Homo sapiens
actgttttcagtagc

SEQ ID NO: 1666312 - DNA, 15 bp, Homo sapiens
ctgttttcagtagca

SEQ ID NO: 1666313 - DNA, 15 bp, Homo sapiens
tgttttcagtagcac

SEQ ID NO: 1666314 - DNA, 15 bp, Homo sapiens
gttttcagtagcaca

SEQ ID NO: 1666315 - DNA, 15 bp, Homo sapiens
ttttcagtagcacag

SEQ ID NO: 1666316 - DNA, 15 bp, Homo sapiens
tttcagtagcacagg

SEQ ID NO: 1666317 - DNA, 15 bp, Homo sapiens
ttcagtagcacaggg

SEQ ID NO: 1666318 - DNA, 15 bp, Homo sapiens
tcagtagcacaggga

SEQ ID NO: 1666319 - DNA, 15 bp, Homo sapiens
cagtagcacagggaa

SEQ ID NO: 1666320 - DNA, 15 bp, Homo sapiens
agtagcacagggaaa

SEQ ID NO: 1666321 - DNA, 15 bp, Homo sapiens
gtagcacagggaaag

SEQ ID NO: 1666322 - DNA, 15 bp, Homo sapiens
tagcacagggaaaga

SEQ ID NO: 1666323 - DNA, 15 bp, Homo sapiens
agcacagggaaagaa

SEQ ID NO: 1666324 - DNA, 15 bp, Homo sapiens
gcacagggaaagaaa

SEQ ID NO: 1666325 - DNA, 15 bp, Homo sapiens
cacagggaaagaaaa

SEQ ID NO: 1666326 - DNA, 15 bp, Homo sapiens
acagggaaagaaaac

SEQ ID NO: 1666327 - DNA, 15 bp, Homo sapiens
cagggaaagaaaaca

SEQ ID NO: 1666328 - DNA, 15 bp, Homo sapiens
agggaaagaaaacat

SEQ ID NO: 1666329 - DNA, 15 bp, Homo sapiens
gggaaagaaaacatc

SEQ ID NO: 1666330 - DNA, 15 bp, Homo sapiens
ggaaagaaaacatcg

SEQ ID NO: 1666331 - DNA, 15 bp, Homo sapiens
gaaagaaaacatcga

SEQ ID NO: 1666332 - DNA, 15 bp, Homo sapiens
aaagaaaacatcgaa

SEQ ID NO: 1666333 - DNA, 15 bp, Homo sapiens
aagaaaacatcgaaa

SEQ ID NO: 1666334 - DNA, 15 bp, Homo sapiens
agaaaacatcgaaag

SEQ ID NO: 1666335 - DNA, 15 bp, Homo sapiens
gaaaacatcgaaagc

SEQ ID NO: 1666336 - DNA, 15 bp, Homo sapiens
aaaacatcgaaagca

SEQ ID NO: 1666337 - DNA, 15 bp, Homo sapiens
aaacatcgaaagcat

SEQ ID NO: 1666338 - DNA, 15 bp, Homo sapiens
aacatcgaaagcatt

SEQ ID NO: 1666339 - DNA, 15 bp, Homo sapiens
acatcgaaagcattc

SEQ ID NO: 1666340 - DNA, 15 bp, Homo sapiens
catcgaaagcattca

SEQ ID NO: 1666341 - DNA, 15 bp, Homo sapiens
atcgaaagcattcac

SEQ ID NO: 1666342 - DNA, 15 bp, Homo sapiens
tcgaaagcattcacc

SEQ ID NO: 1666343 - DNA, 15 bp, Homo sapiens
cgaaagcattcacca

SEQ ID NO: 1666344 - DNA, 15 bp, Homo sapiens
gaaagcattcaccac

SEQ ID NO: 1666345 - DNA, 15 bp, Homo sapiens
aaagcattcaccacc

SEQ ID NO: 1666346 - DNA, 15 bp, Homo sapiens
aagcattcaccacct

SEQ ID NO: 1666347 - DNA, 15 bp, Homo sapiens
agcattcaccacctc

SEQ ID NO: 1666348 - DNA, 15 bp, Homo sapiens
gcattcaccacctca

SEQ ID NO: 1666349 - DNA, 15 bp, Homo sapiens
cattcaccacctcat

SEQ ID NO: 1666350 - DNA, 15 bp, Homo sapiens
attcaccacctcatt

SEQ ID NO: 1666351 - DNA, 15 bp, Homo sapiens
ttcaccacctcattt

SEQ ID NO: 1666352 - DNA, 15 bp, Homo sapiens
tcaccacctcatttg

SEQ ID NO: 1666353 - DNA, 15 bp, Homo sapiens
caccacctcatttgt

SEQ ID NO: 1666354 - DNA, 15 bp, Homo sapiens
accacctcatttgtg

SEQ ID NO: 1666355 - DNA, 15 bp, Homo sapiens
ccacctcatttgtgt

SEQ ID NO: 1666356 - DNA, 15 bp, Homo sapiens
cacctcatttgtgtg

SEQ ID NO: 1666357 - DNA, 15 bp, Homo sapiens
acctcatttgtgtgc

SEQ ID NO: 1666358 - DNA, 15 bp, Homo sapiens
cctcatttgtgtgct

SEQ ID NO: 1666359 - DNA, 15 bp, Homo sapiens
ctcatttgtgtgctg

SEQ ID NO: 1666360 - DNA, 15 bp, Homo sapiens
tcatttgtgtgctgg

SEQ ID NO: 1666361 - DNA, 15 bp, Homo sapiens
catttgtgtgctggg

SEQ ID NO: 1666362 - DNA, 15 bp, Homo sapiens
atttgtgtgctgggg

SEQ ID NO: 1666363 - DNA, 15 bp, Homo sapiens
tttgtgtgctggggg

SEQ ID NO: 1666364 - DNA, 15 bp, Homo sapiens
ttgtgtgctggggga

SEQ ID NO: 1666365 - DNA, 15 bp, Homo sapiens
tgtgtgctgggggaa

SEQ ID NO: 1666366 - DNA, 15 bp, Homo sapiens
gtgtgctgggggaaa

SEQ ID NO: 1666367 - DNA, 15 bp, Homo sapiens
tgtgctgggggaaaa

SEQ ID NO: 1666368 - DNA, 15 bp, Homo sapiens
gtgctgggggaaaaa

SEQ ID NO: 1666369 - DNA, 15 bp, Homo sapiens
tgctgggggaaaaag

SEQ ID NO: 1666370 - DNA, 15 bp, Homo sapiens
gctgggggaaaaagc

SEQ ID NO: 1666371 - DNA, 15 bp, Homo sapiens
ctgggggaaaaagca

SEQ ID NO: 1666372 - DNA, 15 bp, Homo sapiens
tgggggaaaaagcag

SEQ ID NO: 1666373 - DNA, 15 bp, Homo sapiens
gggggaaaaagcaga

SEQ ID NO: 1666374 - DNA, 15 bp, Homo sapiens
ggggaaaaagcagaa

SEQ ID NO: 1666375 - DNA, 15 bp, Homo sapiens
gggaaaaagcagaaa

SEQ ID NO: 1666376 - DNA, 15 bp, Homo sapiens
ggaaaaagcagaaat

SEQ ID NO: 1666377 - DNA, 15 bp, Homo sapiens
gaaaaagcagaaatg

SEQ ID NO: 1666378 - DNA, 15 bp, Homo sapiens
aaaaagcagaaatgt

SEQ ID NO: 1666379 - DNA, 15 bp, Homo sapiens
aaaagcagaaatgtg

SEQ ID NO: 1666380 - DNA, 15 bp, Homo sapiens
aaagcagaaatgtgt

SEQ ID NO: 1666381 - DNA, 15 bp, Homo sapiens
aagcagaaatgtgta

SEQ ID NO: 1666382 - DNA, 15 bp, Homo sapiens
agcagaaatgtgtat

SEQ ID NO: 1666383 - DNA, 15 bp, Homo sapiens
gcagaaatgtgtatt

SEQ ID NO: 1666384 - DNA, 15 bp, Homo sapiens
cagaaatgtgtattc

SEQ ID NO: 1666385 - DNA, 15 bp, Homo sapiens
agaaatgtgtattct

SEQ ID NO: 1666386 - DNA, 15 bp, Homo sapiens
gaaatgtgtattctc

SEQ ID NO: 1666387 - DNA, 15 bp, Homo sapiens
aaatgtgtattctct

SEQ ID NO: 1666388 - DNA, 15 bp, Homo sapiens
aatgtgtattctctt

SEQ ID NO: 1666389 - DNA, 15 bp, Homo sapiens
atgtgtattctcttt

SEQ ID NO: 1666390 - DNA, 15 bp, Homo sapiens
tgtgtattctctttt

SEQ ID NO: 1666391 - DNA, 15 bp, Homo sapiens
gtgtattctcttttt

SEQ ID NO: 1666392 - DNA, 15 bp, Homo sapiens
tgtattctctttttt

SEQ ID NO: 1666393 - DNA, 15 bp, Homo sapiens
gtattctcttttttt

SEQ ID NO: 1666394 - DNA, 15 bp, Homo sapiens
tattctctttttttg

SEQ ID NO: 1666395 - DNA, 15 bp, Homo sapiens
attctctttttttgt

SEQ ID NO: 1666396 - DNA, 15 bp, Homo sapiens
ttctctttttttgtt

SEQ ID NO: 1666397 - DNA, 15 bp, Homo sapiens
tctctttttttgttt

SEQ ID NO: 1666398 - DNA, 15 bp, Homo sapiens
ctctttttttgtttc

SEQ ID NO: 1666399 - DNA, 15 bp, Homo sapiens
tctttttttgtttcg

SEQ ID NO: 1666400 - DNA, 15 bp, Homo sapiens
ctttttttgtttcga

SEQ ID NO: 1666401 - DNA, 15 bp, Homo sapiens
tttttttgtttcgat

SEQ ID NO: 1666402 - DNA, 15 bp, Homo sapiens
ttttttgtttcgatg

SEQ ID NO: 1666403 - DNA, 15 bp, Homo sapiens
tttttgtttcgatga

SEQ ID NO: 1666404 - DNA, 15 bp, Homo sapiens
ttttgtttcgatgac

SEQ ID NO: 1666405 - DNA, 15 bp, Homo sapiens
tttgtttcgatgacc

SEQ ID NO: 1666406 - DNA, 15 bp, Homo sapiens
ttgtttcgatgacct

SEQ ID NO: 1666407 - DNA, 15 bp, Homo sapiens
tgtttcgatgacctt

SEQ ID NO: 1666408 - DNA, 15 bp, Homo sapiens
gtttcgatgaccttg

SEQ ID NO: 1666409 - DNA, 15 bp, Homo sapiens
tttcgatgaccttgt

SEQ ID NO: 1666410 - DNA, 15 bp, Homo sapiens
ttcgatgaccttgtt

SEQ ID NO: 1666411 - DNA, 15 bp, Homo sapiens
tcgatgaccttgttc

SEQ ID NO: 1666412 - DNA, 15 bp, Homo sapiens
cgatgaccttgttcc

SEQ ID NO: 1666413 - DNA, 15 bp, Homo sapiens
gatgaccttgttcct

SEQ ID NO: 1666414 - DNA, 15 bp, Homo sapiens
atgaccttgttcctg

SEQ ID NO: 1666415 - DNA, 15 bp, Homo sapiens
tgaccttgttcctga

SEQ ID NO: 1666416 - DNA, 15 bp, Homo sapiens
gaccttgttcctgac

SEQ ID NO: 1666417 - DNA, 15 bp, Homo sapiens
accttgttcctgact

SEQ ID NO: 1666418 - DNA, 15 bp, Homo sapiens
ccttgttcctgactt

SEQ ID NO: 1666419 - DNA, 15 bp, Homo sapiens
cttgttcctgacttg

SEQ ID NO: 1666420 - DNA, 15 bp, Homo sapiens
ttgttcctgacttgt

SEQ ID NO: 1666421 - DNA, 15 bp, Homo sapiens
tgttcctgacttgtt

SEQ ID NO: 1666422 - DNA, 15 bp, Homo sapiens
gttcctgacttgtta

SEQ ID NO: 1666423 - DNA, 15 bp, Homo sapiens
ttcctgacttgttac

SEQ ID NO: 1666424 - DNA, 15 bp, Homo sapiens
tcctgacttgttact

SEQ ID NO: 1666425 - DNA, 15 bp, Homo sapiens
cctgacttgttactc

SEQ ID NO: 1666426 - DNA, 15 bp, Homo sapiens
ctgacttgttactcg

SEQ ID NO: 1666427 - DNA, 15 bp, Homo sapiens
tgacttgttactcgt

SEQ ID NO: 1666428 - DNA, 15 bp, Homo sapiens
gacttgttactcgtg

SEQ ID NO: 1666429 - DNA, 15 bp, Homo sapiens
acttgttactcgtga

SEQ ID NO: 1666430 - DNA, 15 bp, Homo sapiens
cttgttactcgtgac

SEQ ID NO: 1666431 - DNA, 15 bp, Homo sapiens
ttgttactcgtgact

SEQ ID NO: 1666432 - DNA, 15 bp, Homo sapiens
tgttactcgtgactt

SEQ ID NO: 1666433 - DNA, 15 bp, Homo sapiens
gttactcgtgacttg

SEQ ID NO: 1666434 - DNA, 15 bp, Homo sapiens
ttactcgtgacttga

SEQ ID NO: 1666435 - DNA, 15 bp, Homo sapiens
tactcgtgacttgag

SEQ ID NO: 1666436 - DNA, 15 bp, Homo sapiens
actcgtgacttgaga

SEQ ID NO: 1666437 - DNA, 15 bp, Homo sapiens
ctcgtgacttgagag

SEQ ID NO: 1666438 - DNA, 15 bp, Homo sapiens
tcgtgacttgagaga

SEQ ID NO: 1666439 - DNA, 15 bp, Homo sapiens
cgtgacttgagagat

SEQ ID NO: 1666440 - DNA, 15 bp, Homo sapiens
gtgacttgagagatc

SEQ ID NO: 1666441 - DNA, 15 bp, Homo sapiens
tgacttgagagatca

SEQ ID NO: 1666442 - DNA, 15 bp, Homo sapiens
gacttgagagatcag

SEQ ID NO: 1666443 - DNA, 15 bp, Homo sapiens
acttgagagatcaga

SEQ ID NO: 1666444 - DNA, 15 bp, Homo sapiens
cttgagagatcagag

SEQ ID NO: 1666445 - DNA, 15 bp, Homo sapiens
ttgagagatcagagg

SEQ ID NO: 1666446 - DNA, 15 bp, Homo sapiens
tgagagatcagaggg

SEQ ID NO: 1666447 - DNA, 15 bp, Homo sapiens
gagagatcagagggc

SEQ ID NO: 1666448 - DNA, 15 bp, Homo sapiens
agagatcagagggct

SEQ ID NO: 1666449 - DNA, 15 bp, Homo sapiens
gagatcagagggcta

SEQ ID NO: 1666450 - DNA, 15 bp, Homo sapiens
agatcagagggctag

SEQ ID NO: 1666451 - DNA, 15 bp, Homo sapiens
gatcagagggctaga

SEQ ID NO: 1666452 - DNA, 15 bp, Homo sapiens
atcagagggctagag

SEQ ID NO: 1666453 - DNA, 15 bp, Homo sapiens
tcagagggctagagg

SEQ ID NO: 1666454 - DNA, 15 bp, Homo sapiens
cagagggctagagga

SEQ ID NO: 1666455 - DNA, 15 bp, Homo sapiens
agagggctagaggac

SEQ ID NO: 1666456 - DNA, 15 bp, Homo sapiens
gagggctagaggact

SEQ ID NO: 1666457 - DNA, 15 bp, Homo sapiens
agggctagaggacta

SEQ ID NO: 1666458 - DNA, 15 bp, Homo sapiens
gggctagaggactag

SEQ ID NO: 1666459 - DNA, 15 bp, Homo sapiens
ggctagaggactaga

SEQ ID NO: 1666460 - DNA, 15 bp, Homo sapiens
gctagaggactagaa

SEQ ID NO: 1666461 - DNA, 15 bp, Homo sapiens
ctagaggactagaat

SEQ ID NO: 1666462 - DNA, 15 bp, Homo sapiens
tagaggactagaatt

SEQ ID NO: 1666463 - DNA, 15 bp, Homo sapiens
agaggactagaattt

SEQ ID NO: 1666464 - DNA, 15 bp, Homo sapiens
gaggactagaattta

SEQ ID NO: 1666465 - DNA, 15 bp, Homo sapiens
aggactagaatttat

SEQ ID NO: 1666466 - DNA, 15 bp, Homo sapiens
ggactagaatttata

SEQ ID NO: 1666467 - DNA, 15 bp, Homo sapiens
gactagaatttatag

SEQ ID NO: 1666468 - DNA, 15 bp, Homo sapiens
actagaatttataga

SEQ ID NO: 1666469 - DNA, 15 bp, Homo sapiens
ctagaatttatagag

SEQ ID NO: 1666470 - DNA, 15 bp, Homo sapiens
tagaatttatagagg

SEQ ID NO: 1666471 - DNA, 15 bp, Homo sapiens
agaatttatagaggt

SEQ ID NO: 1666472 - DNA, 15 bp, Homo sapiens
gaatttatagaggtg

SEQ ID NO: 1666473 - DNA, 15 bp, Homo sapiens
aatttatagaggtgt

SEQ ID NO: 1666474 - DNA, 15 bp, Homo sapiens
atttatagaggtgtt

SEQ ID NO: 1666475 - DNA, 15 bp, Homo sapiens
tttatagaggtgttt

SEQ ID NO: 1666476 - DNA, 15 bp, Homo sapiens
ttatagaggtgtttt

SEQ ID NO: 1666477 - DNA, 15 bp, Homo sapiens
tatagaggtgttttt

SEQ ID NO: 1666478 - DNA, 15 bp, Homo sapiens
atagaggtgtttttt

SEQ ID NO: 1666479 - DNA, 15 bp, Homo sapiens
tagaggtgttttttt

SEQ ID NO: 1666480 - DNA, 15 bp, Homo sapiens
agaggtgtttttttt

SEQ ID NO: 1666481 - DNA, 15 bp, Homo sapiens
gaggtgttttttttg

SEQ ID NO: 1666482 - DNA, 15 bp, Homo sapiens
aggtgttttttttgt

SEQ ID NO: 1666483 - DNA, 15 bp, Homo sapiens
ggtgttttttttgtt

SEQ ID NO: 1666484 - DNA, 15 bp, Homo sapiens
gtgttttttttgttt

SEQ ID NO: 1666485 - DNA, 15 bp, Homo sapiens
tgttttttttgtttg

SEQ ID NO: 1666486 - DNA, 15 bp, Homo sapiens
gttttttttgtttgt

SEQ ID NO: 1666487 - DNA, 15 bp, Homo sapiens
ttttttgtttgttta

SEQ ID NO: 1666488 - DNA, 15 bp, Homo sapiens
tttttgtttgtttat

SEQ ID NO: 1666489 - DNA, 15 bp, Homo sapiens
ttttgtttgtttatt

SEQ ID NO: 1666490 - DNA, 15 bp, Homo sapiens
tttgtttgtttattt

SEQ ID NO: 1666491 - DNA, 15 bp, Homo sapiens
ttgtttgtttatttt

SEQ ID NO: 1666492 - DNA, 15 bp, Homo sapiens
tgtttgtttattttt

SEQ ID NO: 1666493 - DNA, 15 bp, Homo sapiens
gtttgtttatttttg

SEQ ID NO: 1666494 - DNA, 15 bp, Homo sapiens
tttgtttatttttgt

SEQ ID NO: 1666495 - DNA, 15 bp, Homo sapiens
ttgtttatttttgtt

SEQ ID NO: 1666496 - DNA, 15 bp, Homo sapiens
tgtttatttttgttc

SEQ ID NO: 1666497 - DNA, 15 bp, Homo sapiens
gtttatttttgttcg

SEQ ID NO: 1666498 - DNA, 15 bp, Homo sapiens
tttatttttgttcga

SEQ ID NO: 1666499 - DNA, 15 bp, Homo sapiens
ttatttttgttcgag

SEQ ID NO: 1666500 - DNA, 15 bp, Homo sapiens
tatttttgttcgagt

SEQ ID NO: 1666501 - DNA, 15 bp, Homo sapiens
atttttgttcgagtt

SEQ ID NO: 1666502 - DNA, 15 bp, Homo sapiens
tttttgttcgagttg

SEQ ID NO: 1666503 - DNA, 15 bp, Homo sapiens
ttttgttcgagttgc

SEQ ID NO: 1666504 - DNA, 15 bp, Homo sapiens
tttgttcgagttgcc

SEQ ID NO: 1666505 - DNA, 15 bp, Homo sapiens
ttgttcgagttgccc

SEQ ID NO: 1666506 - DNA, 15 bp, Homo sapiens
tgttcgagttgccca

SEQ ID NO: 1666507 - DNA, 15 bp, Homo sapiens
gttcgagttgcccag

SEQ ID NO: 1666508 - DNA, 15 bp, Homo sapiens
ttcgagttgcccagg

SEQ ID NO: 1666509 - DNA, 15 bp, Homo sapiens
tcgagttgcccaggc

SEQ ID NO: 1666510 - DNA, 15 bp, Homo sapiens
cgagttgcccaggct

SEQ ID NO: 1666511 - DNA, 15 bp, Homo sapiens
gagttgcccaggctg

SEQ ID NO: 1666512 - DNA, 15 bp, Homo sapiens
tggcgcaatctcggc

SEQ ID NO: 1666513 - DNA, 15 bp, Homo sapiens
ggcgcaatctcggct

SEQ ID NO: 1666514 - DNA, 15 bp, Homo sapiens
gcgcaatctcggctc

SEQ ID NO: 1666515 - DNA, 15 bp, Homo sapiens
cgcaatctcggctca

SEQ ID NO: 1666516 - DNA, 15 bp, Homo sapiens
tcaagcgattcttcg

SEQ ID NO: 1666517 - DNA, 15 bp, Homo sapiens
caagcgattcttcgg

SEQ ID NO: 1666518 - DNA, 15 bp, Homo sapiens
aagcgattcttcggc

SEQ ID NO: 1666519 - DNA, 15 bp, Homo sapiens
agcgattcttcggcc

SEQ ID NO: 1666520 - DNA, 15 bp, Homo sapiens
gcgattcttcggcct

SEQ ID NO: 1666521 - DNA, 15 bp, Homo sapiens
cgattcttcggcctc

SEQ ID NO: 1666522 - DNA, 15 bp, Homo sapiens
gattcttcggcctca

SEQ ID NO: 1666523 - DNA, 15 bp, Homo sapiens
attcttcggcctcag

SEQ ID NO: 1666524 - DNA, 15 bp, Homo sapiens
ttcttcggcctcagc

SEQ ID NO: 1666525 - DNA, 15 bp, Homo sapiens
tcttcggcctcagcc

SEQ ID NO: 1666526 - DNA, 15 bp, Homo sapiens
cttcggcctcagcct

SEQ ID NO: 1666527 - DNA, 15 bp, Homo sapiens
ttcggcctcagcctc

SEQ ID NO: 1666528 - DNA, 15 bp, Homo sapiens
tcggcctcagcctcc

SEQ ID NO: 1666529 - DNA, 15 bp, Homo sapiens
cggcctcagcctcct

SEQ ID NO: 1666530 - DNA, 15 bp, Homo sapiens
ggcctcagcctcctg

SEQ ID NO: 1666531 - DNA, 15 bp, Homo sapiens
tggaactacaggcgc

SEQ ID NO: 1666532 - DNA, 15 bp, Homo sapiens
ggaactacaggcgcc

SEQ ID NO: 1666533 - DNA, 15 bp, Homo sapiens
gaactacaggcgccc

SEQ ID NO: 1666534 - DNA, 15 bp, Homo sapiens
aactacaggcgcccg

SEQ ID NO: 1666535 - DNA, 15 bp, Homo sapiens
ccgccaccacaccca

SEQ ID NO: 1666536 - DNA, 15 bp, Homo sapiens
tttttgtatttttca

SEQ ID NO: 1666537 - DNA, 15 bp, Homo sapiens
ttttgtatttttcag

SEQ ID NO: 1666538 - DNA, 15 bp, Homo sapiens
tttgtatttttcagt

SEQ ID NO: 1666539 - DNA, 15 bp, Homo sapiens
ttgtatttttcagta

SEQ ID NO: 1666540 - DNA, 15 bp, Homo sapiens
tgtatttttcagtag

SEQ ID NO: 1666541 - DNA, 15 bp, Homo sapiens
gtatttttcagtaga

SEQ ID NO: 1666542 - DNA, 15 bp, Homo sapiens
tatttttcagtagag

SEQ ID NO: 1666543 - DNA, 15 bp, Homo sapiens
atttttcagtagaga

SEQ ID NO: 1666544 - DNA, 15 bp, Homo sapiens
tttttcagtagagat

SEQ ID NO: 1666545 - DNA, 15 bp, Homo sapiens
ttttcagtagagatg

SEQ ID NO: 1666546 - DNA, 15 bp, Homo sapiens
tttcagtagagatgg

SEQ ID NO: 1666547 - DNA, 15 bp, Homo sapiens
ttcagtagagatggg

SEQ ID NO: 1666548 - DNA, 15 bp, Homo sapiens
tcagtagagatggga

SEQ ID NO: 1666549 - DNA, 15 bp, Homo sapiens
cagtagagatgggat

SEQ ID NO: 1666550 - DNA, 15 bp, Homo sapiens
caccatattggtcaa

SEQ ID NO: 1666551 - DNA, 15 bp, Homo sapiens
accatattggtcaag

SEQ ID NO: 1666552 - DNA, 15 bp, Homo sapiens
ccatattggtcaagc

SEQ ID NO: 1666553 - DNA, 15 bp, Homo sapiens
catattggtcaagct

SEQ ID NO: 1666554 - DNA, 15 bp, Homo sapiens
atattggtcaagctg

SEQ ID NO: 1666555 - DNA, 15 bp, Homo sapiens
tattggtcaagctgg

SEQ ID NO: 1666556 - DNA, 15 bp, Homo sapiens
attggtcaagctggc

SEQ ID NO: 1666557 - DNA, 15 bp, Homo sapiens
ttggtcaagctggcc

SEQ ID NO: 1666558 - DNA, 15 bp, Homo sapiens
tggtcaagctggcct

SEQ ID NO: 1666559 - DNA, 15 bp, Homo sapiens
ggtcaagctggcctc

SEQ ID NO: 1666560 - DNA, 15 bp, Homo sapiens
gtcaagctggcctcg

SEQ ID NO: 1666561 - DNA, 15 bp, Homo sapiens
tcaagctggcctcga

SEQ ID NO: 1666562 - DNA, 15 bp, Homo sapiens
caagctggcctcgaa

SEQ ID NO: 1666563 - DNA, 15 bp, Homo sapiens
aagctggcctcgaac

SEQ ID NO: 1666564 - DNA, 15 bp, Homo sapiens
agctggcctcgaact

SEQ ID NO: 1666565 - DNA, 15 bp, Homo sapiens
gctggcctcgaactc

SEQ ID NO: 1666566 - DNA, 15 bp, Homo sapiens
ctggcctcgaactcc

SEQ ID NO: 1666567 - DNA, 15 bp, Homo sapiens
tggcctcgaactcct

SEQ ID NO: 1666568 - DNA, 15 bp, Homo sapiens
ggcctcgaactcctg

SEQ ID NO: 1666569 - DNA, 15 bp, Homo sapiens
gcctcgaactcctga

SEQ ID NO: 1666570 - DNA, 15 bp, Homo sapiens
cctcgaactcctgac

SEQ ID NO: 1666571 - DNA, 15 bp, Homo sapiens
tccacccgcctcagt

SEQ ID NO: 1666572 - DNA, 15 bp, Homo sapiens
ccacccgcctcagtt

SEQ ID NO: 1666573 - DNA, 15 bp, Homo sapiens
cacccgcctcagttt

SEQ ID NO: 1666574 - DNA, 15 bp, Homo sapiens
acccgcctcagtttc

SEQ ID NO: 1666575 - DNA, 15 bp, Homo sapiens
cccgcctcagtttcc

SEQ ID NO: 1666576 - DNA, 15 bp, Homo sapiens
ccgcctcagtttccc

SEQ ID NO: 1666577 - DNA, 15 bp, Homo sapiens
cgcctcagtttccca

SEQ ID NO: 1666578 - DNA, 15 bp, Homo sapiens
gcctcagtttcccaa

SEQ ID NO: 1666579 - DNA, 15 bp, Homo sapiens
cctcagtttcccaaa

SEQ ID NO: 1666580 - DNA, 15 bp, Homo sapiens
ctcagtttcccaaag

SEQ ID NO: 1666581 - DNA, 15 bp, Homo sapiens
tcagtttcccaaagt

SEQ ID NO: 1666582 - DNA, 15 bp, Homo sapiens
cagtttcccaaagtg

SEQ ID NO: 1666583 - DNA, 15 bp, Homo sapiens
agtttcccaaagtgc

SEQ ID NO: 1666584 - DNA, 15 bp, Homo sapiens
gtttcccaaagtgct

SEQ ID NO: 1666585 - DNA, 15 bp, Homo sapiens
tttcccaaagtgctg

SEQ ID NO: 1666586 - DNA, 15 bp, Homo sapiens
ccaaagtgctgggag

SEQ ID NO: 1666587 - DNA, 15 bp, Homo sapiens
caaagtgctgggagt

SEQ ID NO: 1666588 - DNA, 15 bp, Homo sapiens
aaagtgctgggagta

SEQ ID NO: 1666589 - DNA, 15 bp, Homo sapiens
aagtgctgggagtac

SEQ ID NO: 1666590 - DNA, 15 bp, Homo sapiens
agtgctgggagtaca

SEQ ID NO: 1666591 - DNA, 15 bp, Homo sapiens
gtgctgggagtacag

SEQ ID NO: 1666592 - DNA, 15 bp, Homo sapiens
tgctgggagtacagg

SEQ ID NO: 1666593 - DNA, 15 bp, Homo sapiens
ctgggagtacaggcg

SEQ ID NO: 1666594 - DNA, 15 bp, Homo sapiens
tgggagtacaggcgt

SEQ ID NO: 1666595 - DNA, 15 bp, Homo sapiens
gggagtacaggcgtg

SEQ ID NO: 1666596 - DNA, 15 bp, Homo sapiens
tacaggcgtgagccg

SEQ ID NO: 1666597 - DNA, 15 bp, Homo sapiens
acaggcgtgagccgc

SEQ ID NO: 1666598 - DNA, 15 bp, Homo sapiens
caggcgtgagccgcc

SEQ ID NO: 1666599 - DNA, 15 bp, Homo sapiens
ggcgtgagccgccgt

SEQ ID NO: 1666600 - DNA, 15 bp, Homo sapiens
gcgtgagccgccgtg

SEQ ID NO: 1666601 - DNA, 15 bp, Homo sapiens
cgtgagccgccgtgc

SEQ ID NO: 1666602 - DNA, 15 bp, Homo sapiens
gtgagccgccgtgcc

SEQ ID NO: 1666603 - DNA, 15 bp, Homo sapiens
tgagccgccgtgccc

SEQ ID NO: 1666604 - DNA, 15 bp, Homo sapiens
gagccgccgtgcccg

SEQ ID NO: 1666605 - DNA, 15 bp, Homo sapiens
agccgccgtgcccgg

SEQ ID NO: 1666606 - DNA, 15 bp, Homo sapiens
gccgccgtgcccggc

SEQ ID NO: 1666607 - DNA, 15 bp, Homo sapiens
ccgccgtgcccggcc

SEQ ID NO: 1666608 - DNA, 15 bp, Homo sapiens
cgccgtgcccggcct

SEQ ID NO: 1666609 - DNA, 15 bp, Homo sapiens
gccgtgcccggcctt

SEQ ID NO: 1666610 - DNA, 15 bp, Homo sapiens
ccgtgcccggccttt

SEQ ID NO: 1666611 - DNA, 15 bp, Homo sapiens
cgtgcccggcctttt

SEQ ID NO: 1666612 - DNA, 15 bp, Homo sapiens
gtgcccggccttttt

SEQ ID NO: 1666613 - DNA, 15 bp, Homo sapiens
tgcccggcctttttg

SEQ ID NO: 1666614 - DNA, 15 bp, Homo sapiens
gcccggcctttttgt

SEQ ID NO: 1666615 - DNA, 15 bp, Homo sapiens
cccggcctttttgtg

SEQ ID NO: 1666616 - DNA, 15 bp, Homo sapiens
ccggcctttttgtgt

SEQ ID NO: 1666617 - DNA, 15 bp, Homo sapiens
cggcctttttgtgtt

SEQ ID NO: 1666618 - DNA, 15 bp, Homo sapiens
ggcctttttgtgttt

SEQ ID NO: 1666619 - DNA, 15 bp, Homo sapiens
gcctttttgtgtttt

SEQ ID NO: 1666620 - DNA, 15 bp, Homo sapiens
cctttttgtgttttt

SEQ ID NO: 1666621 - DNA, 15 bp, Homo sapiens
ctttttgtgtttttg

SEQ ID NO: 1666622 - DNA, 15 bp, Homo sapiens
tttttgtgtttttgt

SEQ ID NO: 1666623 - DNA, 15 bp, Homo sapiens
ttttgtgtttttgtg

SEQ ID NO: 1666624 - DNA, 15 bp, Homo sapiens
tttgtgtttttgtgt

SEQ ID NO: 1666625 - DNA, 15 bp, Homo sapiens
ttgtgtttttgtgtt

SEQ ID NO: 1666626 - DNA, 15 bp, Homo sapiens
tgtgtttttgtgttt

SEQ ID NO: 1666627 - DNA, 15 bp, Homo sapiens
gtgtttttgtgtttt

SEQ ID NO: 1666628 - DNA, 15 bp, Homo sapiens
tgtttttgtgttttt

SEQ ID NO: 1666629 - DNA, 15 bp, Homo sapiens
gtttttgtgtttttg

SEQ ID NO: 1666630 - DNA, 15 bp, Homo sapiens
tttttgtgtttttga

SEQ ID NO: 1666631 - DNA, 15 bp, Homo sapiens
ttttgtgtttttgag

SEQ ID NO: 1666632 - DNA, 15 bp, Homo sapiens
tttgtgtttttgaga

SEQ ID NO: 1666633 - DNA, 15 bp, Homo sapiens
ttgtgtttttgagag

SEQ ID NO: 1666634 - DNA, 15 bp, Homo sapiens
tgtgtttttgagagg

SEQ ID NO: 1666635 - DNA, 15 bp, Homo sapiens
gtgtttttgagagga

SEQ ID NO: 1666636 - DNA, 15 bp, Homo sapiens
tgtttttgagaggag

SEQ ID NO: 1666637 - DNA, 15 bp, Homo sapiens
gtttttgagaggagc

SEQ ID NO: 1666638 - DNA, 15 bp, Homo sapiens
tttttgagaggagct

SEQ ID NO: 1666639 - DNA, 15 bp, Homo sapiens
ttttgagaggagctc

SEQ ID NO: 1666640 - DNA, 15 bp, Homo sapiens
tttgagaggagctca

SEQ ID NO: 1666641 - DNA, 15 bp, Homo sapiens
ttgagaggagctcat

SEQ ID NO: 1666642 - DNA, 15 bp, Homo sapiens
tgagaggagctcatt

SEQ ID NO: 1666643 - DNA, 15 bp, Homo sapiens
gagaggagctcattg

SEQ ID NO: 1666644 - DNA, 15 bp, Homo sapiens
agaggagctcattgc

SEQ ID NO: 1666645 - DNA, 15 bp, Homo sapiens
gaggagctcattgct

SEQ ID NO: 1666646 - DNA, 15 bp, Homo sapiens
aggagctcattgctt

SEQ ID NO: 1666647 - DNA, 15 bp, Homo sapiens
ggagctcattgcttt

SEQ ID NO: 1666648 - DNA, 15 bp, Homo sapiens
gagctcattgctttt

SEQ ID NO: 1666649 - DNA, 15 bp, Homo sapiens
agctcattgcttttt

SEQ ID NO: 1666650 - DNA, 15 bp, Homo sapiens
gctcattgcttttta

SEQ ID NO: 1666651 - DNA, 15 bp, Homo sapiens
ctcattgctttttag

SEQ ID NO: 1666652 - DNA, 15 bp, Homo sapiens
tcattgctttttagg

SEQ ID NO: 1666653 - DNA, 15 bp, Homo sapiens
cattgctttttaggc

SEQ ID NO: 1666654 - DNA, 15 bp, Homo sapiens
attgctttttaggct

SEQ ID NO: 1666655 - DNA, 15 bp, Homo sapiens
ttgctttttaggctt

SEQ ID NO: 1666656 - DNA, 15 bp, Homo sapiens
tgctttttaggcttc

SEQ ID NO: 1666657 - DNA, 15 bp, Homo sapiens
gctttttaggcttcc

SEQ ID NO: 1666658 - DNA, 15 bp, Homo sapiens
ctttttaggcttccc

SEQ ID NO: 1666659 - DNA, 15 bp, Homo sapiens
tttttaggcttccct

SEQ ID NO: 1666660 - DNA, 15 bp, Homo sapiens
ttttaggcttcccta

SEQ ID NO: 1666661 - DNA, 15 bp, Homo sapiens
tttaggcttccctag

SEQ ID NO: 1666662 - DNA, 15 bp, Homo sapiens
ttaggcttccctagc

SEQ ID NO: 1666663 - DNA, 15 bp, Homo sapiens
taggcttccctagcg

SEQ ID NO: 1666664 - DNA, 15 bp, Homo sapiens
aggcttccctagcgt

SEQ ID NO: 1666665 - DNA, 15 bp, Homo sapiens
ggcttccctagcgtg

SEQ ID NO: 1666666 - DNA, 15 bp, Homo sapiens
gcttccctagcgtga

SEQ ID NO: 1666667 - DNA, 15 bp, Homo sapiens
cttccctagcgtgag

SEQ ID NO: 1666668 - DNA, 15 bp, Homo sapiens
ttccctagcgtgaga

SEQ ID NO: 1666669 - DNA, 15 bp, Homo sapiens
tccctagcgtgagaa

SEQ ID NO: 1666670 - DNA, 15 bp, Homo sapiens
ccctagcgtgagaaa

SEQ ID NO: 1666671 - DNA, 15 bp, Homo sapiens
cctagcgtgagaaaa

SEQ ID NO: 1666672 - DNA, 15 bp, Homo sapiens
ctagcgtgagaaaat

SEQ ID NO: 1666673 - DNA, 15 bp, Homo sapiens
tagcgtgagaaaatc

SEQ ID NO: 1666674 - DNA, 15 bp, Homo sapiens
agcgtgagaaaatct

SEQ ID NO: 1666675 - DNA, 15 bp, Homo sapiens
gcgtgagaaaatctg

SEQ ID NO: 1666676 - DNA, 15 bp, Homo sapiens
cgtgagaaaatctgg

SEQ ID NO: 1666677 - DNA, 15 bp, Homo sapiens
gtgagaaaatctggg

SEQ ID NO: 1666678 - DNA, 15 bp, Homo sapiens
tgagaaaatctgggg

SEQ ID NO: 1666679 - DNA, 15 bp, Homo sapiens
gagaaaatctgggga

SEQ ID NO: 1666680 - DNA, 15 bp, Homo sapiens
agaaaatctggggat

SEQ ID NO: 1666681 - DNA, 15 bp, Homo sapiens
gaaaatctggggatc

SEQ ID NO: 1666682 - DNA, 15 bp, Homo sapiens
aaaatctggggatcc

SEQ ID NO: 1666683 - DNA, 15 bp, Homo sapiens
aaatctggggatcca

SEQ ID NO: 1666684 - DNA, 15 bp, Homo sapiens
aatctggggatccat

SEQ ID NO: 1666685 - DNA, 15 bp, Homo sapiens
atctggggatccatg

SEQ ID NO: 1666686 - DNA, 15 bp, Homo sapiens
tctggggatccatgc

SEQ ID NO: 1666687 - DNA, 15 bp, Homo sapiens
ctggggatccatgct

SEQ ID NO: 1666688 - DNA, 15 bp, Homo sapiens
tggggatccatgctc

SEQ ID NO: 1666689 - DNA, 15 bp, Homo sapiens
ggggatccatgctct

SEQ ID NO: 1666690 - DNA, 15 bp, Homo sapiens
gggatccatgctcta

SEQ ID NO: 1666691 - DNA, 15 bp, Homo sapiens
ggatccatgctctag

SEQ ID NO: 1666692 - DNA, 15 bp, Homo sapiens
gatccatgctctagt

SEQ ID NO: 1666693 - DNA, 15 bp, Homo sapiens
atccatgctctagtt

SEQ ID NO: 1666694 - DNA, 15 bp, Homo sapiens
tccatgctctagttt

SEQ ID NO: 1666695 - DNA, 15 bp, Homo sapiens
ccatgctctagttta

SEQ ID NO: 1666696 - DNA, 15 bp, Homo sapiens
catgctctagtttac

SEQ ID NO: 1666697 - DNA, 15 bp, Homo sapiens
atgctctagtttact

SEQ ID NO: 1666698 - DNA, 15 bp, Homo sapiens
tgctctagtttactt

SEQ ID NO: 1666699 - DNA, 15 bp, Homo sapiens
gctctagtttacttc

SEQ ID NO: 1666700 - DNA, 15 bp, Homo sapiens
ctctagtttacttcc

SEQ ID NO: 1666701 - DNA, 15 bp, Homo sapiens
tctagtttacttcct

SEQ ID NO: 1666702 - DNA, 15 bp, Homo sapiens
ctagtttacttcctt

SEQ ID NO: 1666703 - DNA, 15 bp, Homo sapiens
tagtttacttccttt

SEQ ID NO: 1666704 - DNA, 15 bp, Homo sapiens
agtttacttcctttt

SEQ ID NO: 1666705 - DNA, 15 bp, Homo sapiens
gtttacttccttttt

SEQ ID NO: 1666706 - DNA, 15 bp, Homo sapiens
tttacttcctttttt

SEQ ID NO: 1666707 - DNA, 15 bp, Homo sapiens
ttacttccttttttt

SEQ ID NO: 1666708 - DNA, 15 bp, Homo sapiens
tacttcctttttttt

SEQ ID NO: 1666709 - DNA, 15 bp, Homo sapiens
acttccttttttttt

SEQ ID NO: 1666710 - DNA, 15 bp, Homo sapiens
gatggagtctcgctt

SEQ ID NO: 1666711 - DNA, 15 bp, Homo sapiens
atggagtctcgctta

SEQ ID NO: 1666712 - DNA, 15 bp, Homo sapiens
tggagtctcgcttag

SEQ ID NO: 1666713 - DNA, 15 bp, Homo sapiens
ggagtctcgcttaga

SEQ ID NO: 1666714 - DNA, 15 bp, Homo sapiens
gagtctcgcttagat

SEQ ID NO: 1666715 - DNA, 15 bp, Homo sapiens
agtctcgcttagatt

SEQ ID NO: 1666716 - DNA, 15 bp, Homo sapiens
gtctcgcttagattg

SEQ ID NO: 1666717 - DNA, 15 bp, Homo sapiens
tctcgcttagattgc

SEQ ID NO: 1666718 - DNA, 15 bp, Homo sapiens
ctcgcttagattgcc

SEQ ID NO: 1666719 - DNA, 15 bp, Homo sapiens
tcgcttagattgcct

SEQ ID NO: 1666720 - DNA, 15 bp, Homo sapiens
cgcttagattgccta

SEQ ID NO: 1666721 - DNA, 15 bp, Homo sapiens
gcttagattgcctaa

SEQ ID NO: 1666722 - DNA, 15 bp, Homo sapiens
cttagattgcctaat

SEQ ID NO: 1666723 - DNA, 15 bp, Homo sapiens
ttagattgcctaatc

SEQ ID NO: 1666724 - DNA, 15 bp, Homo sapiens
tagattgcctaatct

SEQ ID NO: 1666725 - DNA, 15 bp, Homo sapiens
agattgcctaatctc

SEQ ID NO: 1666726 - DNA, 15 bp, Homo sapiens
gattgcctaatctca

SEQ ID NO: 1666727 - DNA, 15 bp, Homo sapiens
attgcctaatctcag

SEQ ID NO: 1666728 - DNA, 15 bp, Homo sapiens
ttgcctaatctcagc

SEQ ID NO: 1666729 - DNA, 15 bp, Homo sapiens
tgcctaatctcagct

SEQ ID NO: 1666730 - DNA, 15 bp, Homo sapiens
gcctaatctcagctc

SEQ ID NO: 1666731 - DNA, 15 bp, Homo sapiens
cctaatctcagctca

SEQ ID NO: 1666732 - DNA, 15 bp, Homo sapiens
ctaatctcagctcat

SEQ ID NO: 1666733 - DNA, 15 bp, Homo sapiens
taatctcagctcatt

SEQ ID NO: 1666734 - DNA, 15 bp, Homo sapiens
aatctcagctcattg

SEQ ID NO: 1666735 - DNA, 15 bp, Homo sapiens
ctcattgcaacttct

SEQ ID NO: 1666736 - DNA, 15 bp, Homo sapiens
tcattgcaacttctg

SEQ ID NO: 1666737 - DNA, 15 bp, Homo sapiens
cattgcaacttctgc

SEQ ID NO: 1666738 - DNA, 15 bp, Homo sapiens
attgcaacttctgcc

SEQ ID NO: 1666739 - DNA, 15 bp, Homo sapiens
ttgcaacttctgcct

SEQ ID NO: 1666740 - DNA, 15 bp, Homo sapiens
tgcaacttctgcctc

SEQ ID NO: 1666741 - DNA, 15 bp, Homo sapiens
gcaacttctgcctcc

SEQ ID NO: 1666742 - DNA, 15 bp, Homo sapiens
caacttctgcctccg

SEQ ID NO: 1666743 - DNA, 15 bp, Homo sapiens
aacttctgcctccgg

SEQ ID NO: 1666744 - DNA, 15 bp, Homo sapiens
acttctgcctccggg

SEQ ID NO: 1666745 - DNA, 15 bp, Homo sapiens
cttctgcctccgggg

SEQ ID NO: 1666746 - DNA, 15 bp, Homo sapiens
ttctgcctccggggt

SEQ ID NO: 1666747 - DNA, 15 bp, Homo sapiens
ctccggggttcaagg

SEQ ID NO: 1666748 - DNA, 15 bp, Homo sapiens
tccggggttcaaggg

SEQ ID NO: 1666749 - DNA, 15 bp, Homo sapiens
ccggggttcaaggga

SEQ ID NO: 1666750 - DNA, 15 bp, Homo sapiens
cggggttcaagggat

SEQ ID NO: 1666751 - DNA, 15 bp, Homo sapiens
ggggttcaagggatt

SEQ ID NO: 1666752 - DNA, 15 bp, Homo sapiens
ttcaagggattctcg

SEQ ID NO: 1666753 - DNA, 15 bp, Homo sapiens
tcaagggattctcgt

SEQ ID NO: 1666754 - DNA, 15 bp, Homo sapiens
caagggattctcgtg

SEQ ID NO: 1666755 - DNA, 15 bp, Homo sapiens
aagggattctcgtgt

SEQ ID NO: 1666756 - DNA, 15 bp, Homo sapiens
agggattctcgtgtc

SEQ ID NO: 1666757 - DNA, 15 bp, Homo sapiens
gggattctcgtgtct

SEQ ID NO: 1666758 - DNA, 15 bp, Homo sapiens
ggattctcgtgtctc

SEQ ID NO: 1666759 - DNA, 15 bp, Homo sapiens
gattctcgtgtctca

SEQ ID NO: 1666760 - DNA, 15 bp, Homo sapiens
attctcgtgtctcag

SEQ ID NO: 1666761 - DNA, 15 bp, Homo sapiens
ttctcgtgtctcagc

SEQ ID NO: 1666762 - DNA, 15 bp, Homo sapiens
tctcgtgtctcagcc

SEQ ID NO: 1666763 - DNA, 15 bp, Homo sapiens
ctcgtgtctcagcct

SEQ ID NO: 1666764 - DNA, 15 bp, Homo sapiens
tcgtgtctcagcctc

SEQ ID NO: 1666765 - DNA, 15 bp, Homo sapiens
cgtgtctcagcctcc

SEQ ID NO: 1666766 - DNA, 15 bp, Homo sapiens
gtgtctcagcctcct

SEQ ID NO: 1666767 - DNA, 15 bp, Homo sapiens
gtctcagcctcctgg

SEQ ID NO: 1666768 - DNA, 15 bp, Homo sapiens
tctcagcctcctggg

SEQ ID NO: 1666769 - DNA, 15 bp, Homo sapiens
cctcctgggtagcta

SEQ ID NO: 1666770 - DNA, 15 bp, Homo sapiens
ctcctgggtagctag

SEQ ID NO: 1666771 - DNA, 15 bp, Homo sapiens
tcctgggtagctagg

SEQ ID NO: 1666772 - DNA, 15 bp, Homo sapiens
cctgggtagctagga

SEQ ID NO: 1666773 - DNA, 15 bp, Homo sapiens
ctgggtagctaggat

SEQ ID NO: 1666774 - DNA, 15 bp, Homo sapiens
tgggtagctaggata

SEQ ID NO: 1666775 - DNA, 15 bp, Homo sapiens
gggtagctaggatac

SEQ ID NO: 1666776 - DNA, 15 bp, Homo sapiens
ggtagctaggatacg

SEQ ID NO: 1666777 - DNA, 15 bp, Homo sapiens
gtagctaggatacgg

SEQ ID NO: 1666778 - DNA, 15 bp, Homo sapiens
tagctaggatacggg

SEQ ID NO: 1666779 - DNA, 15 bp, Homo sapiens
agctaggatacgggc

SEQ ID NO: 1666780 - DNA, 15 bp, Homo sapiens
gctaggatacgggca

SEQ ID NO: 1666781 - DNA, 15 bp, Homo sapiens
ctaggatacgggcac

SEQ ID NO: 1666782 - DNA, 15 bp, Homo sapiens
taggatacgggcacc

SEQ ID NO: 1666783 - DNA, 15 bp, Homo sapiens
aggatacgggcaccc

SEQ ID NO: 1666784 - DNA, 15 bp, Homo sapiens
ggatacgggcacccg

SEQ ID NO: 1666785 - DNA, 15 bp, Homo sapiens
gatacgggcacccgc

SEQ ID NO: 1666786 - DNA, 15 bp, Homo sapiens
atacgggcacccgct

SEQ ID NO: 1666787 - DNA, 15 bp, Homo sapiens
tacgggcacccgcta

SEQ ID NO: 1666788 - DNA, 15 bp, Homo sapiens
acgggcacccgctac

SEQ ID NO: 1666789 - DNA, 15 bp, Homo sapiens
cgggcacccgctacc

SEQ ID NO: 1666790 - DNA, 15 bp, Homo sapiens
gggcacccgctacca

SEQ ID NO: 1666791 - DNA, 15 bp, Homo sapiens
ggcacccgctaccat

SEQ ID NO: 1666792 - DNA, 15 bp, Homo sapiens
gcacccgctaccatg

SEQ ID NO: 1666793 - DNA, 15 bp, Homo sapiens
cacccgctaccatgc

SEQ ID NO: 1666794 - DNA, 15 bp, Homo sapiens
acccgctaccatgcc

SEQ ID NO: 1666795 - DNA, 15 bp, Homo sapiens
cccgctaccatgcct

SEQ ID NO: 1666796 - DNA, 15 bp, Homo sapiens
ccgctaccatgcctg

SEQ ID NO: 1666797 - DNA, 15 bp, Homo sapiens
cgctaccatgcctgg

SEQ ID NO: 1666798 - DNA, 15 bp, Homo sapiens
tggctaattttgtac

SEQ ID NO: 1666799 - DNA, 15 bp, Homo sapiens
ggctaattttgtact

SEQ ID NO: 1666800 - DNA, 15 bp, Homo sapiens
gctaattttgtactt

SEQ ID NO: 1666801 - DNA, 15 bp, Homo sapiens
ctaattttgtacttt

SEQ ID NO: 1666802 - DNA, 15 bp, Homo sapiens
taattttgtactttt

SEQ ID NO: 1666803 - DNA, 15 bp, Homo sapiens
aattttgtactttta

SEQ ID NO: 1666804 - DNA, 15 bp, Homo sapiens
attttgtacttttag

SEQ ID NO: 1666805 - DNA, 15 bp, Homo sapiens
cttttagtagagaca

SEQ ID NO: 1666806 - DNA, 15 bp, Homo sapiens
agagacagggtttcg

SEQ ID NO: 1666807 - DNA, 15 bp, Homo sapiens
gagacagggtttcgc

SEQ ID NO: 1666808 - DNA, 15 bp, Homo sapiens
agacagggtttcgcc

SEQ ID NO: 1666809 - DNA, 15 bp, Homo sapiens
gacagggtttcgcca

SEQ ID NO: 1666810 - DNA, 15 bp, Homo sapiens
acagggtttcgccac

SEQ ID NO: 1666811 - DNA, 15 bp, Homo sapiens
cagggtttcgccacg

SEQ ID NO: 1666812 - DNA, 15 bp, Homo sapiens
agggtttcgccacgt

SEQ ID NO: 1666813 - DNA, 15 bp, Homo sapiens
ctgacctcaggtgag

SEQ ID NO: 1666814 - DNA, 15 bp, Homo sapiens
tgacctcaggtgagc

SEQ ID NO: 1666815 - DNA, 15 bp, Homo sapiens
gacctcaggtgagcc

SEQ ID NO: 1666816 - DNA, 15 bp, Homo sapiens
acctcaggtgagccg

SEQ ID NO: 1666817 - DNA, 15 bp, Homo sapiens
cctcaggtgagccgc

SEQ ID NO: 1666818 - DNA, 15 bp, Homo sapiens
ctcaggtgagccgcc

SEQ ID NO: 1666819 - DNA, 15 bp, Homo sapiens
tcaggtgagccgcct

SEQ ID NO: 1666820 - DNA, 15 bp, Homo sapiens
caggtgagccgcctg

SEQ ID NO: 1666821 - DNA, 15 bp, Homo sapiens
aggtgagccgcctgc

SEQ ID NO: 1666822 - DNA, 15 bp, Homo sapiens
ggtgagccgcctgcc

SEQ ID NO: 1666823 - DNA, 15 bp, Homo sapiens
gtgagccgcctgcct

SEQ ID NO: 1666824 - DNA, 15 bp, Homo sapiens
tgagccgcctgcctt

SEQ ID NO: 1666825 - DNA, 15 bp, Homo sapiens
gagccgcctgccttg

SEQ ID NO: 1666826 - DNA, 15 bp, Homo sapiens
agccgcctgccttgg

SEQ ID NO: 1666827 - DNA, 15 bp, Homo sapiens
gccgcctgccttggc

SEQ ID NO: 1666828 - DNA, 15 bp, Homo sapiens
tgagattacaggcgt

SEQ ID NO: 1666829 - DNA, 15 bp, Homo sapiens
gagattacaggcgtg

SEQ ID NO: 1666830 - DNA, 15 bp, Homo sapiens
agattacaggcgtga

SEQ ID NO: 1666831 - DNA, 15 bp, Homo sapiens
tgagccaccgcgctt

SEQ ID NO: 1666832 - DNA, 15 bp, Homo sapiens
gagccaccgcgcttg

SEQ ID NO: 1666833 - DNA, 15 bp, Homo sapiens
agccaccgcgcttgg

SEQ ID NO: 1666834 - DNA, 15 bp, Homo sapiens
gccaccgcgcttggc

SEQ ID NO: 1666835 - DNA, 15 bp, Homo sapiens
ccaccgcgcttggcc

SEQ ID NO: 1666836 - DNA, 15 bp, Homo sapiens
caccgcgcttggcct

SEQ ID NO: 1666837 - DNA, 15 bp, Homo sapiens
accgcgcttggccta

SEQ ID NO: 1666838 - DNA, 15 bp, Homo sapiens
ccgcgcttggcctaa

SEQ ID NO: 1666839 - DNA, 15 bp, Homo sapiens
cgcgcttggcctaat

SEQ ID NO: 1666840 - DNA, 15 bp, Homo sapiens
gcgcttggcctaatt

SEQ ID NO: 1666841 - DNA, 15 bp, Homo sapiens
cgcttggcctaattt

SEQ ID NO: 1666842 - DNA, 15 bp, Homo sapiens
gcttggcctaatttg

SEQ ID NO: 1666843 - DNA, 15 bp, Homo sapiens
cttggcctaatttgc

SEQ ID NO: 1666844 - DNA, 15 bp, Homo sapiens
ttggcctaatttgct

SEQ ID NO: 1666845 - DNA, 15 bp, Homo sapiens
tggcctaatttgctt

SEQ ID NO: 1666846 - DNA, 15 bp, Homo sapiens
ggcctaatttgcttt

SEQ ID NO: 1666847 - DNA, 15 bp, Homo sapiens
gcctaatttgctttt

SEQ ID NO: 1666848 - DNA, 15 bp, Homo sapiens
cctaatttgcttttc

SEQ ID NO: 1666849 - DNA, 15 bp, Homo sapiens
ctaatttgcttttcc

SEQ ID NO: 1666850 - DNA, 15 bp, Homo sapiens
taatttgcttttcct

SEQ ID NO: 1666851 - DNA, 15 bp, Homo sapiens
aatttgcttttcctg

SEQ ID NO: 1666852 - DNA, 15 bp, Homo sapiens
atttgcttttcctga

SEQ ID NO: 1666853 - DNA, 15 bp, Homo sapiens
tttgcttttcctgaa

SEQ ID NO: 1666854 - DNA, 15 bp, Homo sapiens
ttgcttttcctgaaa

SEQ ID NO: 1666855 - DNA, 15 bp, Homo sapiens
tgcttttcctgaaat

SEQ ID NO: 1666856 - DNA, 15 bp, Homo sapiens
gcttttcctgaaatt

SEQ ID NO: 1666857 - DNA, 15 bp, Homo sapiens
cttttcctgaaattc

SEQ ID NO: 1666858 - DNA, 15 bp, Homo sapiens
ttttcctgaaattca

SEQ ID NO: 1666859 - DNA, 15 bp, Homo sapiens
tttcctgaaattcaa

SEQ ID NO: 1666860 - DNA, 15 bp, Homo sapiens
ttcctgaaattcaaa

SEQ ID NO: 1666861 - DNA, 15 bp, Homo sapiens
tcctgaaattcaaat

SEQ ID NO: 1666862 - DNA, 15 bp, Homo sapiens
cctgaaattcaaatg

SEQ ID NO: 1666863 - DNA, 15 bp, Homo sapiens
ctgaaattcaaatgg

SEQ ID NO: 1666864 - DNA, 15 bp, Homo sapiens
tgaaattcaaatggt

SEQ ID NO: 1666865 - DNA, 15 bp, Homo sapiens
gaaattcaaatggtc

SEQ ID NO: 1666866 - DNA, 15 bp, Homo sapiens
aaattcaaatggtct

SEQ ID NO: 1666867 - DNA, 15 bp, Homo sapiens
aattcaaatggtcta

SEQ ID NO: 1666868 - DNA, 15 bp, Homo sapiens
attcaaatggtctaa

SEQ ID NO: 1666869 - DNA, 15 bp, Homo sapiens
ttcaaatggtctaat

SEQ ID NO: 1666870 - DNA, 15 bp, Homo sapiens
tcaaatggtctaata

SEQ ID NO: 1666871 - DNA, 15 bp, Homo sapiens
caaatggtctaatat

SEQ ID NO: 1666872 - DNA, 15 bp, Homo sapiens
aaatggtctaatatg

SEQ ID NO: 1666873 - DNA, 15 bp, Homo sapiens
aatggtctaatatga

SEQ ID NO: 1666874 - DNA, 15 bp, Homo sapiens
atggtctaatatgaa

SEQ ID NO: 1666875 - DNA, 15 bp, Homo sapiens
tggtctaatatgaaa

SEQ ID NO: 1666876 - DNA, 15 bp, Homo sapiens
ggtctaatatgaaaa

SEQ ID NO: 1666877 - DNA, 15 bp, Homo sapiens
gtctaatatgaaaaa

SEQ ID NO: 1666878 - DNA, 15 bp, Homo sapiens
tctaatatgaaaaac

SEQ ID NO: 1666879 - DNA, 15 bp, Homo sapiens
ctaatatgaaaaacg

SEQ ID NO: 1666880 - DNA, 15 bp, Homo sapiens
taatatgaaaaacgc

SEQ ID NO: 1666881 - DNA, 15 bp, Homo sapiens
aatatgaaaaacgcc

SEQ ID NO: 1666882 - DNA, 15 bp, Homo sapiens
atatgaaaaacgcca

SEQ ID NO: 1666883 - DNA, 15 bp, Homo sapiens
tatgaaaaacgccaa

SEQ ID NO: 1666884 - DNA, 15 bp, Homo sapiens
atgaaaaacgccaac

SEQ ID NO: 1666885 - DNA, 15 bp, Homo sapiens
tgaaaaacgccaacc

SEQ ID NO: 1666886 - DNA, 15 bp, Homo sapiens
gaaaaacgccaacct

SEQ ID NO: 1666887 - DNA, 15 bp, Homo sapiens
aaaaacgccaacctt

SEQ ID NO: 1666888 - DNA, 15 bp, Homo sapiens
aaaacgccaaccttg

SEQ ID NO: 1666889 - DNA, 15 bp, Homo sapiens
aaacgccaaccttgc

SEQ ID NO: 1666890 - DNA, 15 bp, Homo sapiens
aacgccaaccttgct

SEQ ID NO: 1666891 - DNA, 15 bp, Homo sapiens
acgccaaccttgctt

SEQ ID NO: 1666892 - DNA, 15 bp, Homo sapiens
cgccaaccttgcttg

SEQ ID NO: 1666893 - DNA, 15 bp, Homo sapiens
gccaaccttgcttga

SEQ ID NO: 1666894 - DNA, 15 bp, Homo sapiens
ccaaccttgcttgaa

SEQ ID NO: 1666895 - DNA, 15 bp, Homo sapiens
caaccttgcttgaaa

SEQ ID NO: 1666896 - DNA, 15 bp, Homo sapiens
aaccttgcttgaaag

SEQ ID NO: 1666897 - DNA, 15 bp, Homo sapiens
accttgcttgaaaga

SEQ ID NO: 1666898 - DNA, 15 bp, Homo sapiens
ccttgcttgaaagaa

SEQ ID NO: 1666899 - DNA, 15 bp, Homo sapiens
cttgcttgaaagaat

SEQ ID NO: 1666900 - DNA, 15 bp, Homo sapiens
ttgcttgaaagaata

SEQ ID NO: 1666901 - DNA, 15 bp, Homo sapiens
tgcttgaaagaataa

SEQ ID NO: 1666902 - DNA, 15 bp, Homo sapiens
gcttgaaagaataag

SEQ ID NO: 1666903 - DNA, 15 bp, Homo sapiens
cttgaaagaataaga

SEQ ID NO: 1666904 - DNA, 15 bp, Homo sapiens
ttgaaagaataagaa

SEQ ID NO: 1666905 - DNA, 15 bp, Homo sapiens
tgaaagaataagaaa

SEQ ID NO: 1666906 - DNA, 15 bp, Homo sapiens
gaaagaataagaaag

SEQ ID NO: 1666907 - DNA, 15 bp, Homo sapiens
aaagaataagaaaga

SEQ ID NO: 1666908 - DNA, 15 bp, Homo sapiens
aagaataagaaagag

SEQ ID NO: 1666909 - DNA, 15 bp, Homo sapiens
agaataagaaagagg

SEQ ID NO: 1666910 - DNA, 15 bp, Homo sapiens
gaataagaaagaggt

SEQ ID NO: 1666911 - DNA, 15 bp, Homo sapiens
aataagaaagaggtg

SEQ ID NO: 1666912 - DNA, 15 bp, Homo sapiens
ataagaaagaggtgc

SEQ ID NO: 1666913 - DNA, 15 bp, Homo sapiens
taagaaagaggtgcg

SEQ ID NO: 1666914 - DNA, 15 bp, Homo sapiens
aagaaagaggtgcgg

SEQ ID NO: 1666915 - DNA, 15 bp, Homo sapiens
agaaagaggtgcggt

SEQ ID NO: 1666916 - DNA, 15 bp, Homo sapiens
gaaagaggtgcggtt

SEQ ID NO: 1666917 - DNA, 15 bp, Homo sapiens
aaagaggtgcggttt

SEQ ID NO: 1666918 - DNA, 15 bp, Homo sapiens
aagaggtgcggtttc

SEQ ID NO: 1666919 - DNA, 15 bp, Homo sapiens
agaggtgcggtttcg

SEQ ID NO: 1666920 - DNA, 15 bp, Homo sapiens
gaggtgcggtttcgt

SEQ ID NO: 1666921 - DNA, 15 bp, Homo sapiens
aggtgcggtttcgtt

SEQ ID NO: 1666922 - DNA, 15 bp, Homo sapiens
ggtgcggtttcgttg

SEQ ID NO: 1666923 - DNA, 15 bp, Homo sapiens
gtgcggtttcgttgg

SEQ ID NO: 1666924 - DNA, 15 bp, Homo sapiens
tgcggtttcgttggg

SEQ ID NO: 1666925 - DNA, 15 bp, Homo sapiens
gcggtttcgttgggc

SEQ ID NO: 1666926 - DNA, 15 bp, Homo sapiens
cggtttcgttgggcc

SEQ ID NO: 1666927 - DNA, 15 bp, Homo sapiens
ggtttcgttgggccg

SEQ ID NO: 1666928 - DNA, 15 bp, Homo sapiens
gtttcgttgggccgt

SEQ ID NO: 1666929 - DNA, 15 bp, Homo sapiens
tttcgttgggccgtt

SEQ ID NO: 1666930 - DNA, 15 bp, Homo sapiens
ttcgttgggccgttg

SEQ ID NO: 1666931 - DNA, 15 bp, Homo sapiens
tcgttgggccgttga

SEQ ID NO: 1666932 - DNA, 15 bp, Homo sapiens
cgttgggccgttgat

SEQ ID NO: 1666933 - DNA, 15 bp, Homo sapiens
gttgggccgttgatg

SEQ ID NO: 1666934 - DNA, 15 bp, Homo sapiens
ttgggccgttgatgt

SEQ ID NO: 1666935 - DNA, 15 bp, Homo sapiens
tgggccgttgatgtt

SEQ ID NO: 1666936 - DNA, 15 bp, Homo sapiens
gggccgttgatgttt

SEQ ID NO: 1666937 - DNA, 15 bp, Homo sapiens
ggccgttgatgtttg

SEQ ID NO: 1666938 - DNA, 15 bp, Homo sapiens
gccgttgatgtttgg

SEQ ID NO: 1666939 - DNA, 15 bp, Homo sapiens
ccgttgatgtttgga

SEQ ID NO: 1666940 - DNA, 15 bp, Homo sapiens
cgttgatgtttggaa

SEQ ID NO: 1666941 - DNA, 15 bp, Homo sapiens
gttgatgtttggaac

SEQ ID NO: 1666942 - DNA, 15 bp, Homo sapiens
ttgatgtttggaaca

SEQ ID NO: 1666943 - DNA, 15 bp, Homo sapiens
tgatgtttggaacag

SEQ ID NO: 1666944 - DNA, 15 bp, Homo sapiens
gatgtttggaacagg

SEQ ID NO: 1666945 - DNA, 15 bp, Homo sapiens
atgtttggaacagga

SEQ ID NO: 1666946 - DNA, 15 bp, Homo sapiens
tgtttggaacaggac

SEQ ID NO: 1666947 - DNA, 15 bp, Homo sapiens
gtttggaacaggact

SEQ ID NO: 1666948 - DNA, 15 bp, Homo sapiens
tttggaacaggactg

SEQ ID NO: 1666949 - DNA, 15 bp, Homo sapiens
ttggaacaggactgg

SEQ ID NO: 1666950 - DNA, 15 bp, Homo sapiens
tggaacaggactggt

SEQ ID NO: 1666951 - DNA, 15 bp, Homo sapiens
ggaacaggactggtt

SEQ ID NO: 1666952 - DNA, 15 bp, Homo sapiens
gaacaggactggttt

SEQ ID NO: 1666953 - DNA, 15 bp, Homo sapiens
aacaggactggtttt

SEQ ID NO: 1666954 - DNA, 15 bp, Homo sapiens
acaggactggttttg

SEQ ID NO: 1666955 - DNA, 15 bp, Homo sapiens
caggactggttttgt

SEQ ID NO: 1666956 - DNA, 15 bp, Homo sapiens
aggactggttttgtc

SEQ ID NO: 1666957 - DNA, 15 bp, Homo sapiens
ggactggttttgtcc

SEQ ID NO: 1666958 - DNA, 15 bp, Homo sapiens
gactggttttgtccc

SEQ ID NO: 1666959 - DNA, 15 bp, Homo sapiens
actggttttgtcccc

SEQ ID NO: 1666960 - DNA, 15 bp, Homo sapiens
ctggttttgtcccct

SEQ ID NO: 1666961 - DNA, 15 bp, Homo sapiens
tggttttgtcccctt

SEQ ID NO: 1666962 - DNA, 15 bp, Homo sapiens
ggttttgtccccttg

SEQ ID NO: 1666963 - DNA, 15 bp, Homo sapiens
gttttgtccccttgc

SEQ ID NO: 1666964 - DNA, 15 bp, Homo sapiens
ttttgtccccttgct

SEQ ID NO: 1666965 - DNA, 15 bp, Homo sapiens
tttgtccccttgctc

SEQ ID NO: 1666966 - DNA, 15 bp, Homo sapiens
ttgtccccttgctcg

SEQ ID NO: 1666967 - DNA, 15 bp, Homo sapiens
tgtccccttgctcgg

SEQ ID NO: 1666968 - DNA, 15 bp, Homo sapiens
gtccccttgctcgga

SEQ ID NO: 1666969 - DNA, 15 bp, Homo sapiens
tccccttgctcggaa

SEQ ID NO: 1666970 - DNA, 15 bp, Homo sapiens
ccccttgctcggaaa

SEQ ID NO: 1666971 - DNA, 15 bp, Homo sapiens
cccttgctcggaaag

SEQ ID NO: 1666972 - DNA, 15 bp, Homo sapiens
ccttgctcggaaagg

SEQ ID NO: 1666973 - DNA, 15 bp, Homo sapiens
cttgctcggaaaggg

SEQ ID NO: 1666974 - DNA, 15 bp, Homo sapiens
ttgctcggaaagggc

SEQ ID NO: 1666975 - DNA, 15 bp, Homo sapiens
tgctcggaaagggca

SEQ ID NO: 1666976 - DNA, 15 bp, Homo sapiens
gctcggaaagggcag

SEQ ID NO: 1666977 - DNA, 15 bp, Homo sapiens
ctcggaaagggcagc

SEQ ID NO: 1666978 - DNA, 15 bp, Homo sapiens
tcggaaagggcagca

SEQ ID NO: 1666979 - DNA, 15 bp, Homo sapiens
cggaaagggcagcaa

SEQ ID NO: 1666980 - DNA, 15 bp, Homo sapiens
ggaaagggcagcaac

SEQ ID NO: 1666981 - DNA, 15 bp, Homo sapiens
gaaagggcagcaact

SEQ ID NO: 1666982 - DNA, 15 bp, Homo sapiens
aaagggcagcaactg

SEQ ID NO: 1666983 - DNA, 15 bp, Homo sapiens
aagggcagcaactgt

SEQ ID NO: 1666984 - DNA, 15 bp, Homo sapiens
agggcagcaactgtg

SEQ ID NO: 1666985 - DNA, 15 bp, Homo sapiens
gggcagcaactgtga

SEQ ID NO: 1666986 - DNA, 15 bp, Homo sapiens
ggcagcaactgtgag

SEQ ID NO: 1666987 - DNA, 15 bp, Homo sapiens
gcagcaactgtgagg

SEQ ID NO: 1666988 - DNA, 15 bp, Homo sapiens
cagcaactgtgagga

SEQ ID NO: 1666989 - DNA, 15 bp, Homo sapiens
agcaactgtgaggac

SEQ ID NO: 1666990 - DNA, 15 bp, Homo sapiens
gcaactgtgaggaca

SEQ ID NO: 1666991 - DNA, 15 bp, Homo sapiens
caactgtgaggacag

SEQ ID NO: 1666992 - DNA, 15 bp, Homo sapiens
aactgtgaggacagc

SEQ ID NO: 1666993 - DNA, 15 bp, Homo sapiens
actgtgaggacagct

SEQ ID NO: 1666994 - DNA, 15 bp, Homo sapiens
ctgtgaggacagctc

SEQ ID NO: 1666995 - DNA, 15 bp, Homo sapiens
tgtgaggacagctcc

SEQ ID NO: 1666996 - DNA, 15 bp, Homo sapiens
gtgaggacagctccc

SEQ ID NO: 1666997 - DNA, 15 bp, Homo sapiens
tgaggacagctccct

SEQ ID NO: 1666998 - DNA, 15 bp, Homo sapiens
gaggacagctccctg

SEQ ID NO: 1666999 - DNA, 15 bp, Homo sapiens
aggacagctccctga

SEQ ID NO: 1667000 - DNA, 15 bp, Homo sapiens
ggacagctccctgac

SEQ ID NO: 1667001 - DNA, 15 bp, Homo sapiens
gacagctccctgacg

SEQ ID NO: 1667002 - DNA, 15 bp, Homo sapiens
acagctccctgacgt

SEQ ID NO: 1667003 - DNA, 15 bp, Homo sapiens
cagctccctgacgtg

SEQ ID NO: 1667004 - DNA, 15 bp, Homo sapiens
agctccctgacgtgc

SEQ ID NO: 1667005 - DNA, 15 bp, Homo sapiens
gctccctgacgtgct

SEQ ID NO: 1667006 - DNA, 15 bp, Homo sapiens
ctccctgacgtgctc

SEQ ID NO: 1667007 - DNA, 15 bp, Homo sapiens
tccctgacgtgctct

SEQ ID NO: 1667008 - DNA, 15 bp, Homo sapiens
ccctgacgtgctctc

SEQ ID NO: 1667009 - DNA, 15 bp, Homo sapiens
cctgacgtgctctca

SEQ ID NO: 1667010 - DNA, 15 bp, Homo sapiens
ctgacgtgctctcac

SEQ ID NO: 1667011 - DNA, 15 bp, Homo sapiens
tgacgtgctctcact

SEQ ID NO: 1667012 - DNA, 15 bp, Homo sapiens
gacgtgctctcactc

SEQ ID NO: 1667013 - DNA, 15 bp, Homo sapiens
acgtgctctcactca

SEQ ID NO: 1667014 - DNA, 15 bp, Homo sapiens
cgtgctctcactcag

SEQ ID NO: 1667015 - DNA, 15 bp, Homo sapiens
gtgctctcactcagc

SEQ ID NO: 1667016 - DNA, 15 bp, Homo sapiens
tgctctcactcagca

SEQ ID NO: 1667017 - DNA, 15 bp, Homo sapiens
gctctcactcagcac

SEQ ID NO: 1667018 - DNA, 15 bp, Homo sapiens
ctctcactcagcact

SEQ ID NO: 1667019 - DNA, 15 bp, Homo sapiens
tctcactcagcactg

SEQ ID NO: 1667020 - DNA, 15 bp, Homo sapiens
ctcactcagcactgt

SEQ ID NO: 1667021 - DNA, 15 bp, Homo sapiens
tcactcagcactgtt

SEQ ID NO: 1667022 - DNA, 15 bp, Homo sapiens
cactcagcactgttc

SEQ ID NO: 1667023 - DNA, 15 bp, Homo sapiens
actcagcactgttcc

SEQ ID NO: 1667024 - DNA, 15 bp, Homo sapiens
ctcagcactgttccg

SEQ ID NO: 1667025 - DNA, 15 bp, Homo sapiens
tcagcactgttccgt

SEQ ID NO: 1667026 - DNA, 15 bp, Homo sapiens
cagcactgttccgtt

SEQ ID NO: 1667027 - DNA, 15 bp, Homo sapiens
agcactgttccgttc

SEQ ID NO: 1667028 - DNA, 15 bp, Homo sapiens
gcactgttccgttcc

SEQ ID NO: 1667029 - DNA, 15 bp, Homo sapiens
cactgttccgttcct

SEQ ID NO: 1667030 - DNA, 15 bp, Homo sapiens
actgttccgttcctg

SEQ ID NO: 1667031 - DNA, 15 bp, Homo sapiens
ctgttccgttcctga

SEQ ID NO: 1667032 - DNA, 15 bp, Homo sapiens
tgttccgttcctgag

SEQ ID NO: 1667033 - DNA, 15 bp, Homo sapiens
gttccgttcctgagc

SEQ ID NO: 1667034 - DNA, 15 bp, Homo sapiens
ttccgttcctgagca

SEQ ID NO: 1667035 - DNA, 15 bp, Homo sapiens
tccgttcctgagcac

SEQ ID NO: 1667036 - DNA, 15 bp, Homo sapiens
ccgttcctgagcact

SEQ ID NO: 1667037 - DNA, 15 bp, Homo sapiens
cgttcctgagcactg

SEQ ID NO: 1667038 - DNA, 15 bp, Homo sapiens
gttcctgagcactgt

SEQ ID NO: 1667039 - DNA, 15 bp, Homo sapiens
ttcctgagcactgtc

SEQ ID NO: 1667040 - DNA, 15 bp, Homo sapiens
tcctgagcactgtcc

SEQ ID NO: 1667041 - DNA, 15 bp, Homo sapiens
cctgagcactgtccc

SEQ ID NO: 1667042 - DNA, 15 bp, Homo sapiens
ctgagcactgtcccc

SEQ ID NO: 1667043 - DNA, 15 bp, Homo sapiens
tgagcactgtcccca

SEQ ID NO: 1667044 - DNA, 15 bp, Homo sapiens
gagcactgtccccac

SEQ ID NO: 1667045 - DNA, 15 bp, Homo sapiens
agcactgtccccact

SEQ ID NO: 1667046 - DNA, 15 bp, Homo sapiens
gcactgtccccacta

SEQ ID NO: 1667047 - DNA, 15 bp, Homo sapiens
cactgtccccactag

SEQ ID NO: 1667048 - DNA, 15 bp, Homo sapiens
actgtccccactagc

SEQ ID NO: 1667049 - DNA, 15 bp, Homo sapiens
ctgtccccactagct

SEQ ID NO: 1667050 - DNA, 15 bp, Homo sapiens
tgtccccactagcta

SEQ ID NO: 1667051 - DNA, 15 bp, Homo sapiens
gtccccactagctag

SEQ ID NO: 1667052 - DNA, 15 bp, Homo sapiens
tccccactagctagg

SEQ ID NO: 1667053 - DNA, 15 bp, Homo sapiens
ccccactagctaggc

SEQ ID NO: 1667054 - DNA, 15 bp, Homo sapiens
cccactagctaggcc

SEQ ID NO: 1667055 - DNA, 15 bp, Homo sapiens
ccactagctaggcca

SEQ ID NO: 1667056 - DNA, 15 bp, Homo sapiens
cactagctaggccaa

SEQ ID NO: 1667057 - DNA, 15 bp, Homo sapiens
actagctaggccaag

SEQ ID NO: 1667058 - DNA, 15 bp, Homo sapiens
ctagctaggccaagg

SEQ ID NO: 1667059 - DNA, 15 bp, Homo sapiens
tagctaggccaaggg

SEQ ID NO: 1667060 - DNA, 15 bp, Homo sapiens
agctaggccaaggga

SEQ ID NO: 1667061 - DNA, 15 bp, Homo sapiens
gctaggccaagggag

SEQ ID NO: 1667062 - DNA, 15 bp, Homo sapiens
ctaggccaagggagc

SEQ ID NO: 1667063 - DNA, 15 bp, Homo sapiens
taggccaagggagct

SEQ ID NO: 1667064 - DNA, 15 bp, Homo sapiens
aggccaagggagctc

SEQ ID NO: 1667065 - DNA, 15 bp, Homo sapiens
ggccaagggagctca

SEQ ID NO: 1667066 - DNA, 15 bp, Homo sapiens
gccaagggagctcat

SEQ ID NO: 1667067 - DNA, 15 bp, Homo sapiens
ccaagggagctcatt

SEQ ID NO: 1667068 - DNA, 15 bp, Homo sapiens
caagggagctcattt

SEQ ID NO: 1667069 - DNA, 15 bp, Homo sapiens
aagggagctcatttg

SEQ ID NO: 1667070 - DNA, 15 bp, Homo sapiens
agggagctcatttgg

SEQ ID NO: 1667071 - DNA, 15 bp, Homo sapiens
gggagctcatttggc

SEQ ID NO: 1667072 - DNA, 15 bp, Homo sapiens
ggagctcatttggca

SEQ ID NO: 1667073 - DNA, 15 bp, Homo sapiens
gagctcatttggcag

SEQ ID NO: 1667074 - DNA, 15 bp, Homo sapiens
agctcatttggcagg

SEQ ID NO: 1667075 - DNA, 15 bp, Homo sapiens
gctcatttggcaggc

SEQ ID NO: 1667076 - DNA, 15 bp, Homo sapiens
ctcatttggcaggca

SEQ ID NO: 1667077 - DNA, 15 bp, Homo sapiens
tcatttggcaggcaa

SEQ ID NO: 1667078 - DNA, 15 bp, Homo sapiens
catttggcaggcaac

SEQ ID NO: 1667079 - DNA, 15 bp, Homo sapiens
atttggcaggcaact

SEQ ID NO: 1667080 - DNA, 15 bp, Homo sapiens
tttggcaggcaactg

SEQ ID NO: 1667081 - DNA, 15 bp, Homo sapiens
ttggcaggcaactgc

SEQ ID NO: 1667082 - DNA, 15 bp, Homo sapiens
tggcaggcaactgct

SEQ ID NO: 1667083 - DNA, 15 bp, Homo sapiens
ggcaggcaactgctg

SEQ ID NO: 1667084 - DNA, 15 bp, Homo sapiens
gcaggcaactgctgt

SEQ ID NO: 1667085 - DNA, 15 bp, Homo sapiens
caggcaactgctgtc

SEQ ID NO: 1667086 - DNA, 15 bp, Homo sapiens
aggcaactgctgtct

SEQ ID NO: 1667087 - DNA, 15 bp, Homo sapiens
ggcaactgctgtctg

SEQ ID NO: 1667088 - DNA, 15 bp, Homo sapiens
gcaactgctgtctgg

SEQ ID NO: 1667089 - DNA, 15 bp, Homo sapiens
caactgctgtctggc

SEQ ID NO: 1667090 - DNA, 15 bp, Homo sapiens
aactgctgtctggct

SEQ ID NO: 1667091 - DNA, 15 bp, Homo sapiens
actgctgtctggctg

SEQ ID NO: 1667092 - DNA, 15 bp, Homo sapiens
ctgctgtctggctgc

SEQ ID NO: 1667093 - DNA, 15 bp, Homo sapiens
tgctgtctggctgcg

SEQ ID NO: 1667094 - DNA, 15 bp, Homo sapiens
gctgtctggctgcgc

SEQ ID NO: 1667095 - DNA, 15 bp, Homo sapiens
ctgtctggctgcgcc

SEQ ID NO: 1667096 - DNA, 15 bp, Homo sapiens
tgtctggctgcgcct

SEQ ID NO: 1667097 - DNA, 15 bp, Homo sapiens
gtctggctgcgcctg

SEQ ID NO: 1667098 - DNA, 15 bp, Homo sapiens
tctggctgcgcctgt

SEQ ID NO: 1667099 - DNA, 15 bp, Homo sapiens
ctggctgcgcctgtg

SEQ ID NO: 1667100 - DNA, 15 bp, Homo sapiens
tggctgcgcctgtgg

SEQ ID NO: 1667101 - DNA, 15 bp, Homo sapiens
ggctgcgcctgtggc

SEQ ID NO: 1667102 - DNA, 15 bp, Homo sapiens
gctgcgcctgtggca

SEQ ID NO: 1667103 - DNA, 15 bp, Homo sapiens
ctgcgcctgtggcag

SEQ ID NO: 1667104 - DNA, 15 bp, Homo sapiens
tgcgcctgtggcagt

SEQ ID NO: 1667105 - DNA, 15 bp, Homo sapiens
gcgcctgtggcagta

SEQ ID NO: 1667106 - DNA, 15 bp, Homo sapiens
cgcctgtggcagtaa

SEQ ID NO: 1667107 - DNA, 15 bp, Homo sapiens
gcctgtggcagtaaa

SEQ ID NO: 1667108 - DNA, 15 bp, Homo sapiens
cctgtggcagtaaaa

SEQ ID NO: 1667109 - DNA, 15 bp, Homo sapiens
ctgtggcagtaaaat

SEQ ID NO: 1667110 - DNA, 15 bp, Homo sapiens
tgtggcagtaaaatc

SEQ ID NO: 1667111 - DNA, 15 bp, Homo sapiens
gtggcagtaaaatct

SEQ ID NO: 1667112 - DNA, 15 bp, Homo sapiens
tggcagtaaaatctg

SEQ ID NO: 1667113 - DNA, 15 bp, Homo sapiens
ggcagtaaaatctgc

SEQ ID NO: 1667114 - DNA, 15 bp, Homo sapiens
gcagtaaaatctgcc

SEQ ID NO: 1667115 - DNA, 15 bp, Homo sapiens
cagtaaaatctgcct

SEQ ID NO: 1667116 - DNA, 15 bp, Homo sapiens
agtaaaatctgcctt

SEQ ID NO: 1667117 - DNA, 15 bp, Homo sapiens
gtaaaatctgccttt

SEQ ID NO: 1667118 - DNA, 15 bp, Homo sapiens
taaaatctgccttta

SEQ ID NO: 1667119 - DNA, 15 bp, Homo sapiens
aaaatctgcctttat

SEQ ID NO: 1667120 - DNA, 15 bp, Homo sapiens
aaatctgcctttatt

SEQ ID NO: 1667121 - DNA, 15 bp, Homo sapiens
aatctgcctttattt

SEQ ID NO: 1667122 - DNA, 15 bp, Homo sapiens
atctgcctttatttt

SEQ ID NO: 1667123 - DNA, 15 bp, Homo sapiens
tctgcctttattttt

SEQ ID NO: 1667124 - DNA, 15 bp, Homo sapiens
ctgcctttatttttt

SEQ ID NO: 1667125 - DNA, 15 bp, Homo sapiens
tgcctttattttttg

SEQ ID NO: 1667126 - DNA, 15 bp, Homo sapiens
gcctttattttttgg

SEQ ID NO: 1667127 - DNA, 15 bp, Homo sapiens
cctttattttttgga

SEQ ID NO: 1667128 - DNA, 15 bp, Homo sapiens
ctttattttttggag

SEQ ID NO: 1667129 - DNA, 15 bp, Homo sapiens
tttattttttggagg

SEQ ID NO: 1667130 - DNA, 15 bp, Homo sapiens
ttattttttggaggc

SEQ ID NO: 1667131 - DNA, 15 bp, Homo sapiens
tattttttggaggca

SEQ ID NO: 1667132 - DNA, 15 bp, Homo sapiens
attttttggaggcag

SEQ ID NO: 1667133 - DNA, 15 bp, Homo sapiens
ttttttggaggcagg

SEQ ID NO: 1667134 - DNA, 15 bp, Homo sapiens
tttttggaggcaggg

SEQ ID NO: 1667135 - DNA, 15 bp, Homo sapiens
ttttggaggcagggt

SEQ ID NO: 1667136 - DNA, 15 bp, Homo sapiens
tttggaggcagggtc

SEQ ID NO: 1667137 - DNA, 15 bp, Homo sapiens
ttggaggcagggtct

SEQ ID NO: 1667138 - DNA, 15 bp, Homo sapiens
tggaggcagggtctt

SEQ ID NO: 1667139 - DNA, 15 bp, Homo sapiens
ggaggcagggtcttg

SEQ ID NO: 1667140 - DNA, 15 bp, Homo sapiens
gaggcagggtcttgc

SEQ ID NO: 1667141 - DNA, 15 bp, Homo sapiens
aggcagggtcttgcc

SEQ ID NO: 1667142 - DNA, 15 bp, Homo sapiens
ggcagggtcttgccc

SEQ ID NO: 1667143 - DNA, 15 bp, Homo sapiens
gcagggtcttgccct

SEQ ID NO: 1667144 - DNA, 15 bp, Homo sapiens
cagggtcttgccctg

SEQ ID NO: 1667145 - DNA, 15 bp, Homo sapiens
agggtcttgccctgt

SEQ ID NO: 1667146 - DNA, 15 bp, Homo sapiens
ggtcttgccctgtcg

SEQ ID NO: 1667147 - DNA, 15 bp, Homo sapiens
gtcttgccctgtcgc

SEQ ID NO: 1667148 - DNA, 15 bp, Homo sapiens
tcttgccctgtcgct

SEQ ID NO: 1667149 - DNA, 15 bp, Homo sapiens
cttgccctgtcgctc

SEQ ID NO: 1667150 - DNA, 15 bp, Homo sapiens
ttgccctgtcgctca

SEQ ID NO: 1667151 - DNA, 15 bp, Homo sapiens
tgccctgtcgctcag

SEQ ID NO: 1667152 - DNA, 15 bp, Homo sapiens
gccctgtcgctcagg

SEQ ID NO: 1667153 - DNA, 15 bp, Homo sapiens
ccctgtcgctcaggc

SEQ ID NO: 1667154 - DNA, 15 bp, Homo sapiens
cctgtcgctcaggct

SEQ ID NO: 1667155 - DNA, 15 bp, Homo sapiens
tgtcgctcaggctga

SEQ ID NO: 1667156 - DNA, 15 bp, Homo sapiens
gtcgctcaggctgaa

SEQ ID NO: 1667157 - DNA, 15 bp, Homo sapiens
tcgctcaggctgaag

SEQ ID NO: 1667158 - DNA, 15 bp, Homo sapiens
cgctcaggctgaagt

SEQ ID NO: 1667159 - DNA, 15 bp, Homo sapiens
gctcaggctgaagtg

SEQ ID NO: 1667160 - DNA, 15 bp, Homo sapiens
ctcaggctgaagtgt

SEQ ID NO: 1667161 - DNA, 15 bp, Homo sapiens
tcaggctgaagtgtg

SEQ ID NO: 1667162 - DNA, 15 bp, Homo sapiens
caggctgaagtgtgc

SEQ ID NO: 1667163 - DNA, 15 bp, Homo sapiens
aggctgaagtgtgca

SEQ ID NO: 1667164 - DNA, 15 bp, Homo sapiens
ggctgaagtgtgcag

SEQ ID NO: 1667165 - DNA, 15 bp, Homo sapiens
gctgaagtgtgcagt

SEQ ID NO: 1667166 - DNA, 15 bp, Homo sapiens
ctgaagtgtgcagtt

SEQ ID NO: 1667167 - DNA, 15 bp, Homo sapiens
tgaagtgtgcagtta

SEQ ID NO: 1667168 - DNA, 15 bp, Homo sapiens
gaagtgtgcagttat

SEQ ID NO: 1667169 - DNA, 15 bp, Homo sapiens
aagtgtgcagttata

SEQ ID NO: 1667170 - DNA, 15 bp, Homo sapiens
agtgtgcagttatag

SEQ ID NO: 1667171 - DNA, 15 bp, Homo sapiens
gtgtgcagttatagc

SEQ ID NO: 1667172 - DNA, 15 bp, Homo sapiens
tgtgcagttatagct

SEQ ID NO: 1667173 - DNA, 15 bp, Homo sapiens
gtgcagttatagctc

SEQ ID NO: 1667174 - DNA, 15 bp, Homo sapiens
tgcagttatagctca

SEQ ID NO: 1667175 - DNA, 15 bp, Homo sapiens
gcagttatagctcac

SEQ ID NO: 1667176 - DNA, 15 bp, Homo sapiens
cagttatagctcact

SEQ ID NO: 1667177 - DNA, 15 bp, Homo sapiens
agttatagctcactg

SEQ ID NO: 1667178 - DNA, 15 bp, Homo sapiens
gttatagctcactgc

SEQ ID NO: 1667179 - DNA, 15 bp, Homo sapiens
ttatagctcactgca

SEQ ID NO: 1667180 - DNA, 15 bp, Homo sapiens
tatagctcactgcag

SEQ ID NO: 1667181 - DNA, 15 bp, Homo sapiens
cactgcagcctccag

SEQ ID NO: 1667182 - DNA, 15 bp, Homo sapiens
actgcagcctccagc

SEQ ID NO: 1667183 - DNA, 15 bp, Homo sapiens
ctgcagcctccagct

SEQ ID NO: 1667184 - DNA, 15 bp, Homo sapiens
tgcagcctccagctt

SEQ ID NO: 1667185 - DNA, 15 bp, Homo sapiens
gcagcctccagcttc

SEQ ID NO: 1667186 - DNA, 15 bp, Homo sapiens
cagcctccagcttct

SEQ ID NO: 1667187 - DNA, 15 bp, Homo sapiens
agcctccagcttctg

SEQ ID NO: 1667188 - DNA, 15 bp, Homo sapiens
gcctccagcttctgt

SEQ ID NO: 1667189 - DNA, 15 bp, Homo sapiens
cctccagcttctgta

SEQ ID NO: 1667190 - DNA, 15 bp, Homo sapiens
ctccagcttctgtac

SEQ ID NO: 1667191 - DNA, 15 bp, Homo sapiens
tccagcttctgtact

SEQ ID NO: 1667192 - DNA, 15 bp, Homo sapiens
ccagcttctgtactc

SEQ ID NO: 1667193 - DNA, 15 bp, Homo sapiens
cagcttctgtactca

SEQ ID NO: 1667194 - DNA, 15 bp, Homo sapiens
agcttctgtactcaa

SEQ ID NO: 1667195 - DNA, 15 bp, Homo sapiens
gcttctgtactcaac

SEQ ID NO: 1667196 - DNA, 15 bp, Homo sapiens
cttctgtactcaact

SEQ ID NO: 1667197 - DNA, 15 bp, Homo sapiens
ttctgtactcaactg

SEQ ID NO: 1667198 - DNA, 15 bp, Homo sapiens
tctgtactcaactga

SEQ ID NO: 1667199 - DNA, 15 bp, Homo sapiens
ctgtactcaactgat

SEQ ID NO: 1667200 - DNA, 15 bp, Homo sapiens
tgtactcaactgatc

SEQ ID NO: 1667201 - DNA, 15 bp, Homo sapiens
gtactcaactgatcc

SEQ ID NO: 1667202 - DNA, 15 bp, Homo sapiens
tactcaactgatcct

SEQ ID NO: 1667203 - DNA, 15 bp, Homo sapiens
actcaactgatcctc

SEQ ID NO: 1667204 - DNA, 15 bp, Homo sapiens
caactgatcctcctc

SEQ ID NO: 1667205 - DNA, 15 bp, Homo sapiens
aactgatcctcctct

SEQ ID NO: 1667206 - DNA, 15 bp, Homo sapiens
actgatcctcctctc

SEQ ID NO: 1667207 - DNA, 15 bp, Homo sapiens
ctgatcctcctctct

SEQ ID NO: 1667208 - DNA, 15 bp, Homo sapiens
tgatcctcctctctc

SEQ ID NO: 1667209 - DNA, 15 bp, Homo sapiens
gatcctcctctctca

SEQ ID NO: 1667210 - DNA, 15 bp, Homo sapiens
atcctcctctctcag

SEQ ID NO: 1667211 - DNA, 15 bp, Homo sapiens
tcctcctctctcagc

SEQ ID NO: 1667212 - DNA, 15 bp, Homo sapiens
cctcctctctcagcc

SEQ ID NO: 1667213 - DNA, 15 bp, Homo sapiens
ctctctcagcctcct

SEQ ID NO: 1667214 - DNA, 15 bp, Homo sapiens
tctctcagcctcctg

SEQ ID NO: 1667215 - DNA, 15 bp, Homo sapiens
ctctcagcctcctga

SEQ ID NO: 1667216 - DNA, 15 bp, Homo sapiens
tagctgggactatac

SEQ ID NO: 1667217 - DNA, 15 bp, Homo sapiens
agctgggactatacg

SEQ ID NO: 1667218 - DNA, 15 bp, Homo sapiens
gctgggactatacgc

SEQ ID NO: 1667219 - DNA, 15 bp, Homo sapiens
ctgggactatacgca

SEQ ID NO: 1667220 - DNA, 15 bp, Homo sapiens
tgggactatacgcac

SEQ ID NO: 1667221 - DNA, 15 bp, Homo sapiens
gggactatacgcacg

SEQ ID NO: 1667222 - DNA, 15 bp, Homo sapiens
ggactatacgcacgt

SEQ ID NO: 1667223 - DNA, 15 bp, Homo sapiens
gactatacgcacgtg

SEQ ID NO: 1667224 - DNA, 15 bp, Homo sapiens
actatacgcacgtgt

SEQ ID NO: 1667225 - DNA, 15 bp, Homo sapiens
ctatacgcacgtgtt

SEQ ID NO: 1667226 - DNA, 15 bp, Homo sapiens
tatacgcacgtgtta

SEQ ID NO: 1667227 - DNA, 15 bp, Homo sapiens
atacgcacgtgttac

SEQ ID NO: 1667228 - DNA, 15 bp, Homo sapiens
tacgcacgtgttacc

SEQ ID NO: 1667229 - DNA, 15 bp, Homo sapiens
acgcacgtgttacca

SEQ ID NO: 1667230 - DNA, 15 bp, Homo sapiens
cgcacgtgttaccac

SEQ ID NO: 1667231 - DNA, 15 bp, Homo sapiens
gcacgtgttaccact

SEQ ID NO: 1667232 - DNA, 15 bp, Homo sapiens
cacgtgttaccactc

SEQ ID NO: 1667233 - DNA, 15 bp, Homo sapiens
acgtgttaccactcc

SEQ ID NO: 1667234 - DNA, 15 bp, Homo sapiens
cgtgttaccactccc

SEQ ID NO: 1667235 - DNA, 15 bp, Homo sapiens
gtgttaccactccca

SEQ ID NO: 1667236 - DNA, 15 bp, Homo sapiens
tgttaccactcccac

SEQ ID NO: 1667237 - DNA, 15 bp, Homo sapiens
gttaccactcccacc

SEQ ID NO: 1667238 - DNA, 15 bp, Homo sapiens
ttaccactcccacct

SEQ ID NO: 1667239 - DNA, 15 bp, Homo sapiens
taccactcccacctc

SEQ ID NO: 1667240 - DNA, 15 bp, Homo sapiens
accactcccacctca

SEQ ID NO: 1667241 - DNA, 15 bp, Homo sapiens
ccactcccacctcag

SEQ ID NO: 1667242 - DNA, 15 bp, Homo sapiens
cactcccacctcagt

SEQ ID NO: 1667243 - DNA, 15 bp, Homo sapiens
actcccacctcagtt

SEQ ID NO: 1667244 - DNA, 15 bp, Homo sapiens
ctcccacctcagttt

SEQ ID NO: 1667245 - DNA, 15 bp, Homo sapiens
tcccacctcagtttg

SEQ ID NO: 1667246 - DNA, 15 bp, Homo sapiens
cccacctcagtttgt

SEQ ID NO: 1667247 - DNA, 15 bp, Homo sapiens
ccacctcagtttgtt

SEQ ID NO: 1667248 - DNA, 15 bp, Homo sapiens
cacctcagtttgttt

SEQ ID NO: 1667249 - DNA, 15 bp, Homo sapiens
acctcagtttgtttg

SEQ ID NO: 1667250 - DNA, 15 bp, Homo sapiens
cctcagtttgtttgt

SEQ ID NO: 1667251 - DNA, 15 bp, Homo sapiens
ctcagtttgtttgtt

SEQ ID NO: 1667252 - DNA, 15 bp, Homo sapiens
tcagtttgtttgttt

SEQ ID NO: 1667253 - DNA, 15 bp, Homo sapiens
cagtttgtttgttta

SEQ ID NO: 1667254 - DNA, 15 bp, Homo sapiens
agtttgtttgtttat

SEQ ID NO: 1667255 - DNA, 15 bp, Homo sapiens
gtttgtttgtttatt

SEQ ID NO: 1667256 - DNA, 15 bp, Homo sapiens
ttgtttgtttattta

SEQ ID NO: 1667257 - DNA, 15 bp, Homo sapiens
tgtttgtttatttat

SEQ ID NO: 1667258 - DNA, 15 bp, Homo sapiens
gtttgtttatttatt

SEQ ID NO: 1667259 - DNA, 15 bp, Homo sapiens
tttgtttatttattt

SEQ ID NO: 1667260 - DNA, 15 bp, Homo sapiens
ttgtttatttattta

SEQ ID NO: 1667261 - DNA, 15 bp, Homo sapiens
tttatttatttattg

SEQ ID NO: 1667262 - DNA, 15 bp, Homo sapiens
ttatttatttattga

SEQ ID NO: 1667263 - DNA, 15 bp, Homo sapiens
tatttatttattgag

SEQ ID NO: 1667264 - DNA, 15 bp, Homo sapiens
atttatttattgaga

SEQ ID NO: 1667265 - DNA, 15 bp, Homo sapiens
tttatttattgagat

SEQ ID NO: 1667266 - DNA, 15 bp, Homo sapiens
ttatttattgagatg

SEQ ID NO: 1667267 - DNA, 15 bp, Homo sapiens
tatttattgagatgg

SEQ ID NO: 1667268 - DNA, 15 bp, Homo sapiens
atttattgagatgga

SEQ ID NO: 1667269 - DNA, 15 bp, Homo sapiens
tttattgagatggag

SEQ ID NO: 1667270 - DNA, 15 bp, Homo sapiens
ttattgagatggagt

SEQ ID NO: 1667271 - DNA, 15 bp, Homo sapiens
tattgagatggagtt

SEQ ID NO: 1667272 - DNA, 15 bp, Homo sapiens
attgagatggagttt

SEQ ID NO: 1667273 - DNA, 15 bp, Homo sapiens
tgagatggagttttg

SEQ ID NO: 1667274 - DNA, 15 bp, Homo sapiens
gagttttgctcttgc

SEQ ID NO: 1667275 - DNA, 15 bp, Homo sapiens
agttttgctcttgct

SEQ ID NO: 1667276 - DNA, 15 bp, Homo sapiens
gttttgctcttgctg

SEQ ID NO: 1667277 - DNA, 15 bp, Homo sapiens
ttttgctcttgctgc

SEQ ID NO: 1667278 - DNA, 15 bp, Homo sapiens
tttgctcttgctgcc

SEQ ID NO: 1667279 - DNA, 15 bp, Homo sapiens
ttgctcttgctgccc

SEQ ID NO: 1667280 - DNA, 15 bp, Homo sapiens
tgctcttgctgccca

SEQ ID NO: 1667281 - DNA, 15 bp, Homo sapiens
gctcttgctgcccag

SEQ ID NO: 1667282 - DNA, 15 bp, Homo sapiens
ctcttgctgcccagg

SEQ ID NO: 1667283 - DNA, 15 bp, Homo sapiens
tcttgctgcccaggc

SEQ ID NO: 1667284 - DNA, 15 bp, Homo sapiens
cttgctgcccaggct

SEQ ID NO: 1667285 - DNA, 15 bp, Homo sapiens
ttgctgcccaggctg

SEQ ID NO: 1667286 - DNA, 15 bp, Homo sapiens
cgatctcggctcacc

SEQ ID NO: 1667287 - DNA, 15 bp, Homo sapiens
gatctcggctcaccg

SEQ ID NO: 1667288 - DNA, 15 bp, Homo sapiens
ggctcaccgcaacct

SEQ ID NO: 1667289 - DNA, 15 bp, Homo sapiens
tcaccgcaacctcca

SEQ ID NO: 1667290 - DNA, 15 bp, Homo sapiens
caccgcaacctccac

SEQ ID NO: 1667291 - DNA, 15 bp, Homo sapiens
accgcaacctccacc

SEQ ID NO: 1667292 - DNA, 15 bp, Homo sapiens
ccgcaacctccacct

SEQ ID NO: 1667293 - DNA, 15 bp, Homo sapiens
cgcaacctccacctc

SEQ ID NO: 1667294 - DNA, 15 bp, Homo sapiens
cctccacctcctggt

SEQ ID NO: 1667295 - DNA, 15 bp, Homo sapiens
ctccacctcctggtt

SEQ ID NO: 1667296 - DNA, 15 bp, Homo sapiens
tccacctcctggttc

SEQ ID NO: 1667297 - DNA, 15 bp, Homo sapiens
ccacctcctggttca

SEQ ID NO: 1667298 - DNA, 15 bp, Homo sapiens
cacctcctggttcaa

SEQ ID NO: 1667299 - DNA, 15 bp, Homo sapiens
acctcctggttcaag

SEQ ID NO: 1667300 - DNA, 15 bp, Homo sapiens
cctcctggttcaagc

SEQ ID NO: 1667301 - DNA, 15 bp, Homo sapiens
ctcctggttcaagcg

SEQ ID NO: 1667302 - DNA, 15 bp, Homo sapiens
tcctggttcaagcga

SEQ ID NO: 1667303 - DNA, 15 bp, Homo sapiens
cctggttcaagcgat

SEQ ID NO: 1667304 - DNA, 15 bp, Homo sapiens
ctggttcaagcgatt

SEQ ID NO: 1667305 - DNA, 15 bp, Homo sapiens
tggttcaagcgattc

SEQ ID NO: 1667306 - DNA, 15 bp, Homo sapiens
gcatgcaccaccacg

SEQ ID NO: 1667307 - DNA, 15 bp, Homo sapiens
catgcaccaccacgc

SEQ ID NO: 1667308 - DNA, 15 bp, Homo sapiens
atgcaccaccacgcc

SEQ ID NO: 1667309 - DNA, 15 bp, Homo sapiens
aattttgtatttttc

SEQ ID NO: 1667310 - DNA, 15 bp, Homo sapiens
attttgtatttttcg

SEQ ID NO: 1667311 - DNA, 15 bp, Homo sapiens
tttcgtagagatggg

SEQ ID NO: 1667312 - DNA, 15 bp, Homo sapiens
ttcgtagagatgggg

SEQ ID NO: 1667313 - DNA, 15 bp, Homo sapiens
tcgtagagatggggt

SEQ ID NO: 1667314 - DNA, 15 bp, Homo sapiens
cgtagagatggggtt

SEQ ID NO: 1667315 - DNA, 15 bp, Homo sapiens
agagatggggtttct

SEQ ID NO: 1667316 - DNA, 15 bp, Homo sapiens
atggggtttctccac

SEQ ID NO: 1667317 - DNA, 15 bp, Homo sapiens
tggggtttctccaca

SEQ ID NO: 1667318 - DNA, 15 bp, Homo sapiens
ggggtttctccacat

SEQ ID NO: 1667319 - DNA, 15 bp, Homo sapiens
gggtttctccacatt

SEQ ID NO: 1667320 - DNA, 15 bp, Homo sapiens
ggtttctccacattg

SEQ ID NO: 1667321 - DNA, 15 bp, Homo sapiens
gtttctccacattgg

SEQ ID NO: 1667322 - DNA, 15 bp, Homo sapiens
tttctccacattggt

SEQ ID NO: 1667323 - DNA, 15 bp, Homo sapiens
ttctccacattggtt

SEQ ID NO: 1667324 - DNA, 15 bp, Homo sapiens
tctccacattggttc

SEQ ID NO: 1667325 - DNA, 15 bp, Homo sapiens
ctccacattggttca

SEQ ID NO: 1667326 - DNA, 15 bp, Homo sapiens
tccacattggttcag

SEQ ID NO: 1667327 - DNA, 15 bp, Homo sapiens
ccacattggttcagg

SEQ ID NO: 1667328 - DNA, 15 bp, Homo sapiens
cacattggttcaggc

SEQ ID NO: 1667329 - DNA, 15 bp, Homo sapiens
acattggttcaggct

SEQ ID NO: 1667330 - DNA, 15 bp, Homo sapiens
cattggttcaggctg

SEQ ID NO: 1667331 - DNA, 15 bp, Homo sapiens
attggttcaggctgt

SEQ ID NO: 1667332 - DNA, 15 bp, Homo sapiens
ttggttcaggctgtt

SEQ ID NO: 1667333 - DNA, 15 bp, Homo sapiens
tggttcaggctgttc

SEQ ID NO: 1667334 - DNA, 15 bp, Homo sapiens
ggttcaggctgttct

SEQ ID NO: 1667335 - DNA, 15 bp, Homo sapiens
gttcaggctgttctc

SEQ ID NO: 1667336 - DNA, 15 bp, Homo sapiens
ttcaggctgttctcg

SEQ ID NO: 1667337 - DNA, 15 bp, Homo sapiens
tcaggctgttctcga

SEQ ID NO: 1667338 - DNA, 15 bp, Homo sapiens
caggctgttctcgaa

SEQ ID NO: 1667339 - DNA, 15 bp, Homo sapiens
aggctgttctcgaac

SEQ ID NO: 1667340 - DNA, 15 bp, Homo sapiens
ggctgttctcgaact

SEQ ID NO: 1667341 - DNA, 15 bp, Homo sapiens
ctgttctcgaactcc

SEQ ID NO: 1667342 - DNA, 15 bp, Homo sapiens
tgttctcgaactccc

SEQ ID NO: 1667343 - DNA, 15 bp, Homo sapiens
gttctcgaactccca

SEQ ID NO: 1667344 - DNA, 15 bp, Homo sapiens
ttctcgaactcccaa

SEQ ID NO: 1667345 - DNA, 15 bp, Homo sapiens
ctcgaactcccaacc

SEQ ID NO: 1667346 - DNA, 15 bp, Homo sapiens
tcgaactcccaacct

SEQ ID NO: 1667347 - DNA, 15 bp, Homo sapiens
cgaactcccaacctc

SEQ ID NO: 1667348 - DNA, 15 bp, Homo sapiens
gaactcccaacctca

SEQ ID NO: 1667349 - DNA, 15 bp, Homo sapiens
aactcccaacctcag

SEQ ID NO: 1667350 - DNA, 15 bp, Homo sapiens
actcccaacctcagg

SEQ ID NO: 1667351 - DNA, 15 bp, Homo sapiens
ctcccaacctcaggt

SEQ ID NO: 1667352 - DNA, 15 bp, Homo sapiens
tcccaacctcaggtg

SEQ ID NO: 1667353 - DNA, 15 bp, Homo sapiens
cccaacctcaggtga

SEQ ID NO: 1667354 - DNA, 15 bp, Homo sapiens
ccaacctcaggtgat

SEQ ID NO: 1667355 - DNA, 15 bp, Homo sapiens
caacctcaggtgatc

SEQ ID NO: 1667356 - DNA, 15 bp, Homo sapiens
aacctcaggtgatcc

SEQ ID NO: 1667357 - DNA, 15 bp, Homo sapiens
tataggcgtgagccc

SEQ ID NO: 1667358 - DNA, 15 bp, Homo sapiens
ataggcgtgagcccc

SEQ ID NO: 1667359 - DNA, 15 bp, Homo sapiens
taggcgtgagccccc

SEQ ID NO: 1667360 - DNA, 15 bp, Homo sapiens
aggcgtgagcccccg

SEQ ID NO: 1667361 - DNA, 15 bp, Homo sapiens
ggcgtgagcccccga

SEQ ID NO: 1667362 - DNA, 15 bp, Homo sapiens
gcgtgagcccccgaa

SEQ ID NO: 1667363 - DNA, 15 bp, Homo sapiens
cgtgagcccccgaac

SEQ ID NO: 1667364 - DNA, 15 bp, Homo sapiens
gtgagcccccgaacc

SEQ ID NO: 1667365 - DNA, 15 bp, Homo sapiens
tgagcccccgaaccc

SEQ ID NO: 1667366 - DNA, 15 bp, Homo sapiens
gagcccccgaacccg

SEQ ID NO: 1667367 - DNA, 15 bp, Homo sapiens
agcccccgaacccgg

SEQ ID NO: 1667368 - DNA, 15 bp, Homo sapiens
gcccccgaacccggc

SEQ ID NO: 1667369 - DNA, 15 bp, Homo sapiens
cccccgaacccggcc

SEQ ID NO: 1667370 - DNA, 15 bp, Homo sapiens
ccccgaacccggcca

SEQ ID NO: 1667371 - DNA, 15 bp, Homo sapiens
cccgaacccggccac

SEQ ID NO: 1667372 - DNA, 15 bp, Homo sapiens
ccgaacccggccact

SEQ ID NO: 1667373 - DNA, 15 bp, Homo sapiens
cgaacccggccactc

SEQ ID NO: 1667374 - DNA, 15 bp, Homo sapiens
gaacccggccactcc

SEQ ID NO: 1667375 - DNA, 15 bp, Homo sapiens
aacccggccactccc

SEQ ID NO: 1667376 - DNA, 15 bp, Homo sapiens
acccggccactccca

SEQ ID NO: 1667377 - DNA, 15 bp, Homo sapiens
cccggccactcccag

SEQ ID NO: 1667378 - DNA, 15 bp, Homo sapiens
ccggccactcccagc

SEQ ID NO: 1667379 - DNA, 15 bp, Homo sapiens
cggccactcccagct

SEQ ID NO: 1667380 - DNA, 15 bp, Homo sapiens
ggccactcccagcta

SEQ ID NO: 1667381 - DNA, 15 bp, Homo sapiens
gccactcccagctaa

SEQ ID NO: 1667382 - DNA, 15 bp, Homo sapiens
ccactcccagctaag

SEQ ID NO: 1667383 - DNA, 15 bp, Homo sapiens
cactcccagctaagt

SEQ ID NO: 1667384 - DNA, 15 bp, Homo sapiens
actcccagctaagtt

SEQ ID NO: 1667385 - DNA, 15 bp, Homo sapiens
ctcccagctaagttt

SEQ ID NO: 1667386 - DNA, 15 bp, Homo sapiens
tcccagctaagttta

SEQ ID NO: 1667387 - DNA, 15 bp, Homo sapiens
cccagctaagtttaa

SEQ ID NO: 1667388 - DNA, 15 bp, Homo sapiens
ccagctaagtttaaa

SEQ ID NO: 1667389 - DNA, 15 bp, Homo sapiens
cagctaagtttaaat

SEQ ID NO: 1667390 - DNA, 15 bp, Homo sapiens
agctaagtttaaatt

SEQ ID NO: 1667391 - DNA, 15 bp, Homo sapiens
gctaagtttaaattt

SEQ ID NO: 1667392 - DNA, 15 bp, Homo sapiens
ctaagtttaaatttt

SEQ ID NO: 1667393 - DNA, 15 bp, Homo sapiens
taagtttaaattttt

SEQ ID NO: 1667394 - DNA, 15 bp, Homo sapiens
aagtttaaatttttt

SEQ ID NO: 1667395 - DNA, 15 bp, Homo sapiens
agtttaaattttttg

SEQ ID NO: 1667396 - DNA, 15 bp, Homo sapiens
gtttaaattttttgt

SEQ ID NO: 1667397 - DNA, 15 bp, Homo sapiens
tttaaattttttgtt

SEQ ID NO: 1667398 - DNA, 15 bp, Homo sapiens
ttaaattttttgttt

SEQ ID NO: 1667399 - DNA, 15 bp, Homo sapiens
taaattttttgtttg

SEQ ID NO: 1667400 - DNA, 15 bp, Homo sapiens
aaattttttgtttgt

SEQ ID NO: 1667401 - DNA, 15 bp, Homo sapiens
aattttttgtttgtt

SEQ ID NO: 1667402 - DNA, 15 bp, Homo sapiens
ttgtttgtttgttcg

SEQ ID NO: 1667403 - DNA, 15 bp, Homo sapiens
tgtttgtttgttcgt

SEQ ID NO: 1667404 - DNA, 15 bp, Homo sapiens
gtttgtttgttcgtt

SEQ ID NO: 1667405 - DNA, 15 bp, Homo sapiens
tttgtttgttcgttt

SEQ ID NO: 1667406 - DNA, 15 bp, Homo sapiens
ttgtttgttcgtttg

SEQ ID NO: 1667407 - DNA, 15 bp, Homo sapiens
tgtttgttcgtttgt

SEQ ID NO: 1667408 - DNA, 15 bp, Homo sapiens
gtttgttcgtttgtt

SEQ ID NO: 1667409 - DNA, 15 bp, Homo sapiens
tttgttcgtttgttt

SEQ ID NO: 1667410 - DNA, 15 bp, Homo sapiens
ttgttcgtttgtttt

SEQ ID NO: 1667411 - DNA, 15 bp, Homo sapiens
tgttcgtttgttttt

SEQ ID NO: 1667412 - DNA, 15 bp, Homo sapiens
gttcgtttgttttta

SEQ ID NO: 1667413 - DNA, 15 bp, Homo sapiens
ttcgtttgtttttat

SEQ ID NO: 1667414 - DNA, 15 bp, Homo sapiens
tcgtttgtttttatt

SEQ ID NO: 1667415 - DNA, 15 bp, Homo sapiens
cgtttgtttttattt

SEQ ID NO: 1667416 - DNA, 15 bp, Homo sapiens
gtttgtttttatttt

SEQ ID NO: 1667417 - DNA, 15 bp, Homo sapiens
tttgtttttattttt

SEQ ID NO: 1667418 - DNA, 15 bp, Homo sapiens
ttgtttttatttttt

SEQ ID NO: 1667419 - DNA, 15 bp, Homo sapiens
tgtttttattttttg

SEQ ID NO: 1667420 - DNA, 15 bp, Homo sapiens
gtttttattttttga

SEQ ID NO: 1667421 - DNA, 15 bp, Homo sapiens
tttttattttttgag

SEQ ID NO: 1667422 - DNA, 15 bp, Homo sapiens
ttttattttttgaga

SEQ ID NO: 1667423 - DNA, 15 bp, Homo sapiens
attttttgagacaga

SEQ ID NO: 1667424 - DNA, 15 bp, Homo sapiens
tgagacagagtctcc

SEQ ID NO: 1667425 - DNA, 15 bp, Homo sapiens
gagacagagtctccc

SEQ ID NO: 1667426 - DNA, 15 bp, Homo sapiens
agacagagtctcccg

SEQ ID NO: 1667427 - DNA, 15 bp, Homo sapiens
gacagagtctcccgc

SEQ ID NO: 1667428 - DNA, 15 bp, Homo sapiens
acagagtctcccgcc

SEQ ID NO: 1667429 - DNA, 15 bp, Homo sapiens
cagagtctcccgccc

SEQ ID NO: 1667430 - DNA, 15 bp, Homo sapiens
agagtctcccgccca

SEQ ID NO: 1667431 - DNA, 15 bp, Homo sapiens
gagtctcccgcccag

SEQ ID NO: 1667432 - DNA, 15 bp, Homo sapiens
agtctcccgcccagg

SEQ ID NO: 1667433 - DNA, 15 bp, Homo sapiens
gtctcccgcccaggc

SEQ ID NO: 1667434 - DNA, 15 bp, Homo sapiens
tctcccgcccaggct

SEQ ID NO: 1667435 - DNA, 15 bp, Homo sapiens
ctcccgcccaggctg

SEQ ID NO: 1667436 - DNA, 15 bp, Homo sapiens
tcccgcccaggctgg

SEQ ID NO: 1667437 - DNA, 15 bp, Homo sapiens
cccgcccaggctgga

SEQ ID NO: 1667438 - DNA, 15 bp, Homo sapiens
ccgcccaggctggag

SEQ ID NO: 1667439 - DNA, 15 bp, Homo sapiens
cgcccaggctggagc

SEQ ID NO: 1667440 - DNA, 15 bp, Homo sapiens
caggctggagcgcag

SEQ ID NO: 1667441 - DNA, 15 bp, Homo sapiens
aggctggagcgcaga

SEQ ID NO: 1667442 - DNA, 15 bp, Homo sapiens
ggctggagcgcagat

SEQ ID NO: 1667443 - DNA, 15 bp, Homo sapiens
gctggagcgcagatc

SEQ ID NO: 1667444 - DNA, 15 bp, Homo sapiens
ctggagcgcagatca

SEQ ID NO: 1667445 - DNA, 15 bp, Homo sapiens
tggagcgcagatcac

SEQ ID NO: 1667446 - DNA, 15 bp, Homo sapiens
ggagcgcagatcact

SEQ ID NO: 1667447 - DNA, 15 bp, Homo sapiens
gagcgcagatcactg

SEQ ID NO: 1667448 - DNA, 15 bp, Homo sapiens
agcgcagatcactgc

SEQ ID NO: 1667449 - DNA, 15 bp, Homo sapiens
gcgcagatcactgca

SEQ ID NO: 1667450 - DNA, 15 bp, Homo sapiens
cgcagatcactgcat

SEQ ID NO: 1667451 - DNA, 15 bp, Homo sapiens
gcagatcactgcatc

SEQ ID NO: 1667452 - DNA, 15 bp, Homo sapiens
cagatcactgcatcc

SEQ ID NO: 1667453 - DNA, 15 bp, Homo sapiens
agatcactgcatcct

SEQ ID NO: 1667454 - DNA, 15 bp, Homo sapiens
gatcactgcatcctt

SEQ ID NO: 1667455 - DNA, 15 bp, Homo sapiens
atcactgcatccttg

SEQ ID NO: 1667456 - DNA, 15 bp, Homo sapiens
tcactgcatccttga

SEQ ID NO: 1667457 - DNA, 15 bp, Homo sapiens
cactgcatccttgac

SEQ ID NO: 1667458 - DNA, 15 bp, Homo sapiens
actgcatccttgacc

SEQ ID NO: 1667459 - DNA, 15 bp, Homo sapiens
ctgcatccttgacct

SEQ ID NO: 1667460 - DNA, 15 bp, Homo sapiens
tgcatccttgacctc

SEQ ID NO: 1667461 - DNA, 15 bp, Homo sapiens
gcatccttgacctcc

SEQ ID NO: 1667462 - DNA, 15 bp, Homo sapiens
catccttgacctccc

SEQ ID NO: 1667463 - DNA, 15 bp, Homo sapiens
atccttgacctccca

SEQ ID NO: 1667464 - DNA, 15 bp, Homo sapiens
tccttgacctcccag

SEQ ID NO: 1667465 - DNA, 15 bp, Homo sapiens
ccttgacctcccagg

SEQ ID NO: 1667466 - DNA, 15 bp, Homo sapiens
cttgacctcccaggc

SEQ ID NO: 1667467 - DNA, 15 bp, Homo sapiens
ttgacctcccaggct

SEQ ID NO: 1667468 - DNA, 15 bp, Homo sapiens
tgacctcccaggctt

SEQ ID NO: 1667469 - DNA, 15 bp, Homo sapiens
gacctcccaggctta

SEQ ID NO: 1667470 - DNA, 15 bp, Homo sapiens
acctcccaggcttaa

SEQ ID NO: 1667471 - DNA, 15 bp, Homo sapiens
cctcccaggcttaag

SEQ ID NO: 1667472 - DNA, 15 bp, Homo sapiens
ctcccaggcttaagc

SEQ ID NO: 1667473 - DNA, 15 bp, Homo sapiens
tcccaggcttaagcc

SEQ ID NO: 1667474 - DNA, 15 bp, Homo sapiens
cccaggcttaagcca

SEQ ID NO: 1667475 - DNA, 15 bp, Homo sapiens
ccaggcttaagccat

SEQ ID NO: 1667476 - DNA, 15 bp, Homo sapiens
caggcttaagccatc

SEQ ID NO: 1667477 - DNA, 15 bp, Homo sapiens
aggcttaagccatcc

SEQ ID NO: 1667478 - DNA, 15 bp, Homo sapiens
ggcttaagccatcct

SEQ ID NO: 1667479 - DNA, 15 bp, Homo sapiens
gcttaagccatcctc

SEQ ID NO: 1667480 - DNA, 15 bp, Homo sapiens
cttaagccatcctcc

SEQ ID NO: 1667481 - DNA, 15 bp, Homo sapiens
ttaagccatcctccc

SEQ ID NO: 1667482 - DNA, 15 bp, Homo sapiens
taagccatcctcccc

SEQ ID NO: 1667483 - DNA, 15 bp, Homo sapiens
aagccatcctcccca

SEQ ID NO: 1667484 - DNA, 15 bp, Homo sapiens
agccatcctccccac

SEQ ID NO: 1667485 - DNA, 15 bp, Homo sapiens
gccatcctccccact

SEQ ID NO: 1667486 - DNA, 15 bp, Homo sapiens
ccatcctccccactc

SEQ ID NO: 1667487 - DNA, 15 bp, Homo sapiens
catcctccccactca

SEQ ID NO: 1667488 - DNA, 15 bp, Homo sapiens
atcctccccactcag

SEQ ID NO: 1667489 - DNA, 15 bp, Homo sapiens
tcctccccactcagc

SEQ ID NO: 1667490 - DNA, 15 bp, Homo sapiens
cctccccactcagcc

SEQ ID NO: 1667491 - DNA, 15 bp, Homo sapiens
ctccccactcagcct

SEQ ID NO: 1667492 - DNA, 15 bp, Homo sapiens
tccccactcagcctc

SEQ ID NO: 1667493 - DNA, 15 bp, Homo sapiens
ccccactcagcctcc

SEQ ID NO: 1667494 - DNA, 15 bp, Homo sapiens
cccactcagcctccc

SEQ ID NO: 1667495 - DNA, 15 bp, Homo sapiens
ccactcagcctccca

SEQ ID NO: 1667496 - DNA, 15 bp, Homo sapiens
cactcagcctcccaa

SEQ ID NO: 1667497 - DNA, 15 bp, Homo sapiens
ggattacaggtgtgt

SEQ ID NO: 1667498 - DNA, 15 bp, Homo sapiens
gattacaggtgtgtg

SEQ ID NO: 1667499 - DNA, 15 bp, Homo sapiens
attacaggtgtgtgc

SEQ ID NO: 1667500 - DNA, 15 bp, Homo sapiens
ttacaggtgtgtgcc

SEQ ID NO: 1667501 - DNA, 15 bp, Homo sapiens
tacaggtgtgtgcca

SEQ ID NO: 1667502 - DNA, 15 bp, Homo sapiens
acaggtgtgtgccac

SEQ ID NO: 1667503 - DNA, 15 bp, Homo sapiens
caggtgtgtgccact

SEQ ID NO: 1667504 - DNA, 15 bp, Homo sapiens
aggtgtgtgccacta

SEQ ID NO: 1667505 - DNA, 15 bp, Homo sapiens
ggtgtgtgccactat

SEQ ID NO: 1667506 - DNA, 15 bp, Homo sapiens
gtgtgtgccactatg

SEQ ID NO: 1667507 - DNA, 15 bp, Homo sapiens
tgtgtgccactatgc

SEQ ID NO: 1667508 - DNA, 15 bp, Homo sapiens
gtgtgccactatgct

SEQ ID NO: 1667509 - DNA, 15 bp, Homo sapiens
tgtgccactatgctt

SEQ ID NO: 1667510 - DNA, 15 bp, Homo sapiens
gtgccactatgcttg

SEQ ID NO: 1667511 - DNA, 15 bp, Homo sapiens
tgccactatgcttgg

SEQ ID NO: 1667512 - DNA, 15 bp, Homo sapiens
gccactatgcttggc

SEQ ID NO: 1667513 - DNA, 15 bp, Homo sapiens
ccactatgcttggct

SEQ ID NO: 1667514 - DNA, 15 bp, Homo sapiens
cactatgcttggcta

SEQ ID NO: 1667515 - DNA, 15 bp, Homo sapiens
actatgcttggctaa

SEQ ID NO: 1667516 - DNA, 15 bp, Homo sapiens
ctatgcttggctaag

SEQ ID NO: 1667517 - DNA, 15 bp, Homo sapiens
tatgcttggctaagt

SEQ ID NO: 1667518 - DNA, 15 bp, Homo sapiens
atgcttggctaagtt

SEQ ID NO: 1667519 - DNA, 15 bp, Homo sapiens
tgcttggctaagttg

SEQ ID NO: 1667520 - DNA, 15 bp, Homo sapiens
gcttggctaagttgt

SEQ ID NO: 1667521 - DNA, 15 bp, Homo sapiens
cttggctaagttgtg

SEQ ID NO: 1667522 - DNA, 15 bp, Homo sapiens
ttggctaagttgtgt

SEQ ID NO: 1667523 - DNA, 15 bp, Homo sapiens
tggctaagttgtgta

SEQ ID NO: 1667524 - DNA, 15 bp, Homo sapiens
ggctaagttgtgtat

SEQ ID NO: 1667525 - DNA, 15 bp, Homo sapiens
gctaagttgtgtatt

SEQ ID NO: 1667526 - DNA, 15 bp, Homo sapiens
ctaagttgtgtattt

SEQ ID NO: 1667527 - DNA, 15 bp, Homo sapiens
taagttgtgtatttt

SEQ ID NO: 1667528 - DNA, 15 bp, Homo sapiens
aagttgtgtattttt

SEQ ID NO: 1667529 - DNA, 15 bp, Homo sapiens
agttgtgtatttttt

SEQ ID NO: 1667530 - DNA, 15 bp, Homo sapiens
gttgtgtattttttg

SEQ ID NO: 1667531 - DNA, 15 bp, Homo sapiens
ttgtgtattttttgt

SEQ ID NO: 1667532 - DNA, 15 bp, Homo sapiens
tgtgtattttttgta

SEQ ID NO: 1667533 - DNA, 15 bp, Homo sapiens
gtgtattttttgtag

SEQ ID NO: 1667534 - DNA, 15 bp, Homo sapiens
gtagagatggggttc

SEQ ID NO: 1667535 - DNA, 15 bp, Homo sapiens
tagagatggggttca

SEQ ID NO: 1667536 - DNA, 15 bp, Homo sapiens
agagatggggttcaa

SEQ ID NO: 1667537 - DNA, 15 bp, Homo sapiens
gagatggggttcaag

SEQ ID NO: 1667538 - DNA, 15 bp, Homo sapiens
agatggggttcaagg

SEQ ID NO: 1667539 - DNA, 15 bp, Homo sapiens
gatggggttcaaggg

SEQ ID NO: 1667540 - DNA, 15 bp, Homo sapiens
atggggttcaaggga

SEQ ID NO: 1667541 - DNA, 15 bp, Homo sapiens
tggggttcaagggat

SEQ ID NO: 1667542 - DNA, 15 bp, Homo sapiens
tcaagggattctcgc

SEQ ID NO: 1667543 - DNA, 15 bp, Homo sapiens
caagggattctcgct

SEQ ID NO: 1667544 - DNA, 15 bp, Homo sapiens
aagggattctcgctt

SEQ ID NO: 1667545 - DNA, 15 bp, Homo sapiens
agggattctcgcttt

SEQ ID NO: 1667546 - DNA, 15 bp, Homo sapiens
gggattctcgctttg

SEQ ID NO: 1667547 - DNA, 15 bp, Homo sapiens
ggattctcgctttgt

SEQ ID NO: 1667548 - DNA, 15 bp, Homo sapiens
gattctcgctttgtt

SEQ ID NO: 1667549 - DNA, 15 bp, Homo sapiens
attctcgctttgttg

SEQ ID NO: 1667550 - DNA, 15 bp, Homo sapiens
ttctcgctttgttgc

SEQ ID NO: 1667551 - DNA, 15 bp, Homo sapiens
tctcgctttgttgcc

SEQ ID NO: 1667552 - DNA, 15 bp, Homo sapiens
ctcgctttgttgcct

SEQ ID NO: 1667553 - DNA, 15 bp, Homo sapiens
tcgctttgttgcctc

SEQ ID NO: 1667554 - DNA, 15 bp, Homo sapiens
cgctttgttgcctcg

SEQ ID NO: 1667555 - DNA, 15 bp, Homo sapiens
gctttgttgcctcgg

SEQ ID NO: 1667556 - DNA, 15 bp, Homo sapiens
ctttgttgcctcggt

SEQ ID NO: 1667557 - DNA, 15 bp, Homo sapiens
tttgttgcctcggtt

SEQ ID NO: 1667558 - DNA, 15 bp, Homo sapiens
ttgttgcctcggttg

SEQ ID NO: 1667559 - DNA, 15 bp, Homo sapiens
tgttgcctcggttgg

SEQ ID NO: 1667560 - DNA, 15 bp, Homo sapiens
gttgcctcggttggt

SEQ ID NO: 1667561 - DNA, 15 bp, Homo sapiens
ttgcctcggttggtc

SEQ ID NO: 1667562 - DNA, 15 bp, Homo sapiens
tgcctcggttggtct

SEQ ID NO: 1667563 - DNA, 15 bp, Homo sapiens
gcctcggttggtctc

SEQ ID NO: 1667564 - DNA, 15 bp, Homo sapiens
cctcggttggtctca

SEQ ID NO: 1667565 - DNA, 15 bp, Homo sapiens
ctcggttggtctcaa

SEQ ID NO: 1667566 - DNA, 15 bp, Homo sapiens
tcggttggtctcaaa

SEQ ID NO: 1667567 - DNA, 15 bp, Homo sapiens
cggttggtctcaaac

SEQ ID NO: 1667568 - DNA, 15 bp, Homo sapiens
cctgggctcaagcag

SEQ ID NO: 1667569 - DNA, 15 bp, Homo sapiens
ctgggctcaagcagt

SEQ ID NO: 1667570 - DNA, 15 bp, Homo sapiens
tgggctcaagcagtc

SEQ ID NO: 1667571 - DNA, 15 bp, Homo sapiens
gggctcaagcagtcc

SEQ ID NO: 1667572 - DNA, 15 bp, Homo sapiens
ggctcaagcagtcct

SEQ ID NO: 1667573 - DNA, 15 bp, Homo sapiens
gctcaagcagtcctc

SEQ ID NO: 1667574 - DNA, 15 bp, Homo sapiens
tcaagcagtcctccc

SEQ ID NO: 1667575 - DNA, 15 bp, Homo sapiens
caagcagtcctccct

SEQ ID NO: 1667576 - DNA, 15 bp, Homo sapiens
aagcagtcctccctc

SEQ ID NO: 1667577 - DNA, 15 bp, Homo sapiens
agcagtcctccctcc

SEQ ID NO: 1667578 - DNA, 15 bp, Homo sapiens
gcagtcctccctcct

SEQ ID NO: 1667579 - DNA, 15 bp, Homo sapiens
cagtcctccctcctc

SEQ ID NO: 1667580 - DNA, 15 bp, Homo sapiens
agtcctccctcctca

SEQ ID NO: 1667581 - DNA, 15 bp, Homo sapiens
cccaaggtgctgggg

SEQ ID NO: 1667582 - DNA, 15 bp, Homo sapiens
ccaaggtgctgggga

SEQ ID NO: 1667583 - DNA, 15 bp, Homo sapiens
caaggtgctggggaa

SEQ ID NO: 1667584 - DNA, 15 bp, Homo sapiens
aaggtgctggggaaa

SEQ ID NO: 1667585 - DNA, 15 bp, Homo sapiens
aggtgctggggaaat

SEQ ID NO: 1667586 - DNA, 15 bp, Homo sapiens
ggtgctggggaaatc

SEQ ID NO: 1667587 - DNA, 15 bp, Homo sapiens
gtgctggggaaatcc

SEQ ID NO: 1667588 - DNA, 15 bp, Homo sapiens
tgctggggaaatcca

SEQ ID NO: 1667589 - DNA, 15 bp, Homo sapiens
gctggggaaatccac

SEQ ID NO: 1667590 - DNA, 15 bp, Homo sapiens
ctggggaaatccact

SEQ ID NO: 1667591 - DNA, 15 bp, Homo sapiens
tggggaaatccactt

SEQ ID NO: 1667592 - DNA, 15 bp, Homo sapiens
ggggaaatccacttt

SEQ ID NO: 1667593 - DNA, 15 bp, Homo sapiens
gggaaatccactttt

SEQ ID NO: 1667594 - DNA, 15 bp, Homo sapiens
ggaaatccacttttg

SEQ ID NO: 1667595 - DNA, 15 bp, Homo sapiens
gaaatccacttttga

SEQ ID NO: 1667596 - DNA, 15 bp, Homo sapiens
aaatccacttttgaa

SEQ ID NO: 1667597 - DNA, 15 bp, Homo sapiens
aatccacttttgaaa

SEQ ID NO: 1667598 - DNA, 15 bp, Homo sapiens
atccacttttgaaac

SEQ ID NO: 1667599 - DNA, 15 bp, Homo sapiens
tccacttttgaaaca

SEQ ID NO: 1667600 - DNA, 15 bp, Homo sapiens
ccacttttgaaacat

SEQ ID NO: 1667601 - DNA, 15 bp, Homo sapiens
cacttttgaaacatt

SEQ ID NO: 1667602 - DNA, 15 bp, Homo sapiens
acttttgaaacattg

SEQ ID NO: 1667603 - DNA, 15 bp, Homo sapiens
cttttgaaacattgt

SEQ ID NO: 1667604 - DNA, 15 bp, Homo sapiens
ttttgaaacattgtc

SEQ ID NO: 1667605 - DNA, 15 bp, Homo sapiens
tttgaaacattgtct

SEQ ID NO: 1667606 - DNA, 15 bp, Homo sapiens
ttgaaacattgtctg

SEQ ID NO: 1667607 - DNA, 15 bp, Homo sapiens
tgaaacattgtctgg

SEQ ID NO: 1667608 - DNA, 15 bp, Homo sapiens
gaaacattgtctgga

SEQ ID NO: 1667609 - DNA, 15 bp, Homo sapiens
aaacattgtctggag

SEQ ID NO: 1667610 - DNA, 15 bp, Homo sapiens
aacattgtctggaga

SEQ ID NO: 1667611 - DNA, 15 bp, Homo sapiens
acattgtctggagag

SEQ ID NO: 1667612 - DNA, 15 bp, Homo sapiens
cattgtctggagagt

SEQ ID NO: 1667613 - DNA, 15 bp, Homo sapiens
attgtctggagagtt

SEQ ID NO: 1667614 - DNA, 15 bp, Homo sapiens
ttgtctggagagttg

SEQ ID NO: 1667615 - DNA, 15 bp, Homo sapiens
tgtctggagagttgc

SEQ ID NO: 1667616 - DNA, 15 bp, Homo sapiens
gtctggagagttgcc

SEQ ID NO: 1667617 - DNA, 15 bp, Homo sapiens
tctggagagttgccc

SEQ ID NO: 1667618 - DNA, 15 bp, Homo sapiens
ctggagagttgccca

SEQ ID NO: 1667619 - DNA, 15 bp, Homo sapiens
tggagagttgcccag

SEQ ID NO: 1667620 - DNA, 15 bp, Homo sapiens
ggagagttgcccagg

SEQ ID NO: 1667621 - DNA, 15 bp, Homo sapiens
gagagttgcccaggt

SEQ ID NO: 1667622 - DNA, 15 bp, Homo sapiens
agagttgcccaggtg

SEQ ID NO: 1667623 - DNA, 15 bp, Homo sapiens
gagttgcccaggtgg

SEQ ID NO: 1667624 - DNA, 15 bp, Homo sapiens
agttgcccaggtggt

SEQ ID NO: 1667625 - DNA, 15 bp, Homo sapiens
gttgcccaggtggta

SEQ ID NO: 1667626 - DNA, 15 bp, Homo sapiens
ttgcccaggtggtag

SEQ ID NO: 1667627 - DNA, 15 bp, Homo sapiens
tgcccaggtggtaga

SEQ ID NO: 1667628 - DNA, 15 bp, Homo sapiens
gcccaggtggtagat

SEQ ID NO: 1667629 - DNA, 15 bp, Homo sapiens
cccaggtggtagatc

SEQ ID NO: 1667630 - DNA, 15 bp, Homo sapiens
ccaggtggtagatca

SEQ ID NO: 1667631 - DNA, 15 bp, Homo sapiens
caggtggtagatcac

SEQ ID NO: 1667632 - DNA, 15 bp, Homo sapiens
aggtggtagatcaca

SEQ ID NO: 1667633 - DNA, 15 bp, Homo sapiens
ggtggtagatcacag

SEQ ID NO: 1667634 - DNA, 15 bp, Homo sapiens
gtggtagatcacaga

SEQ ID NO: 1667635 - DNA, 15 bp, Homo sapiens
tggtagatcacagaa

SEQ ID NO: 1667636 - DNA, 15 bp, Homo sapiens
ggtagatcacagaaa

SEQ ID NO: 1667637 - DNA, 15 bp, Homo sapiens
gtagatcacagaaat

SEQ ID NO: 1667638 - DNA, 15 bp, Homo sapiens
tagatcacagaaata

SEQ ID NO: 1667639 - DNA, 15 bp, Homo sapiens
agatcacagaaatag

SEQ ID NO: 1667640 - DNA, 15 bp, Homo sapiens
gatcacagaaatagg

SEQ ID NO: 1667641 - DNA, 15 bp, Homo sapiens
atcacagaaataggt

SEQ ID NO: 1667642 - DNA, 15 bp, Homo sapiens
tcacagaaataggtc

SEQ ID NO: 1667643 - DNA, 15 bp, Homo sapiens
cacagaaataggtca

SEQ ID NO: 1667644 - DNA, 15 bp, Homo sapiens
acagaaataggtcat

SEQ ID NO: 1667645 - DNA, 15 bp, Homo sapiens
cagaaataggtcatc

SEQ ID NO: 1667646 - DNA, 15 bp, Homo sapiens
agaaataggtcatcg

SEQ ID NO: 1667647 - DNA, 15 bp, Homo sapiens
gaaataggtcatcgt

SEQ ID NO: 1667648 - DNA, 15 bp, Homo sapiens
aaataggtcatcgtg

SEQ ID NO: 1667649 - DNA, 15 bp, Homo sapiens
aataggtcatcgtgg

SEQ ID NO: 1667650 - DNA, 15 bp, Homo sapiens
ataggtcatcgtggg

SEQ ID NO: 1667651 - DNA, 15 bp, Homo sapiens
taggtcatcgtgggg

SEQ ID NO: 1667652 - DNA, 15 bp, Homo sapiens
aggtcatcgtggggt

SEQ ID NO: 1667653 - DNA, 15 bp, Homo sapiens
ggtcatcgtggggtc

SEQ ID NO: 1667654 - DNA, 15 bp, Homo sapiens
gtcatcgtggggtcc

SEQ ID NO: 1667655 - DNA, 15 bp, Homo sapiens
tcatcgtggggtcct

SEQ ID NO: 1667656 - DNA, 15 bp, Homo sapiens
catcgtggggtcctt

SEQ ID NO: 1667657 - DNA, 15 bp, Homo sapiens
atcgtggggtccttc

SEQ ID NO: 1667658 - DNA, 15 bp, Homo sapiens
tcgtggggtccttcc

SEQ ID NO: 1667659 - DNA, 15 bp, Homo sapiens
cgtggggtccttccc

SEQ ID NO: 1667660 - DNA, 15 bp, Homo sapiens
gtggggtccttccca

SEQ ID NO: 1667661 - DNA, 15 bp, Homo sapiens
tggggtccttcccat

SEQ ID NO: 1667662 - DNA, 15 bp, Homo sapiens
ggggtccttcccatg

SEQ ID NO: 1667663 - DNA, 15 bp, Homo sapiens
gggtccttcccatgg

SEQ ID NO: 1667664 - DNA, 15 bp, Homo sapiens
ggtccttcccatggg

SEQ ID NO: 1667665 - DNA, 15 bp, Homo sapiens
gtccttcccatgggt

SEQ ID NO: 1667666 - DNA, 15 bp, Homo sapiens
tccttcccatgggtg

SEQ ID NO: 1667667 - DNA, 15 bp, Homo sapiens
ccttcccatgggtgc

SEQ ID NO: 1667668 - DNA, 15 bp, Homo sapiens
cttcccatgggtgca

SEQ ID NO: 1667669 - DNA, 15 bp, Homo sapiens
ttcccatgggtgcag

SEQ ID NO: 1667670 - DNA, 15 bp, Homo sapiens
tcccatgggtgcagt

SEQ ID NO: 1667671 - DNA, 15 bp, Homo sapiens
cccatgggtgcagtc

SEQ ID NO: 1667672 - DNA, 15 bp, Homo sapiens
ccatgggtgcagtct

SEQ ID NO: 1667673 - DNA, 15 bp, Homo sapiens
catgggtgcagtctt

SEQ ID NO: 1667674 - DNA, 15 bp, Homo sapiens
atgggtgcagtcttg

SEQ ID NO: 1667675 - DNA, 15 bp, Homo sapiens
tgggtgcagtcttga

SEQ ID NO: 1667676 - DNA, 15 bp, Homo sapiens
gggtgcagtcttgag

SEQ ID NO: 1667677 - DNA, 15 bp, Homo sapiens
ggtgcagtcttgagc

SEQ ID NO: 1667678 - DNA, 15 bp, Homo sapiens
gtgcagtcttgagcc

SEQ ID NO: 1667679 - DNA, 15 bp, Homo sapiens
tgcagtcttgagcca

SEQ ID NO: 1667680 - DNA, 15 bp, Homo sapiens
gcagtcttgagccac

SEQ ID NO: 1667681 - DNA, 15 bp, Homo sapiens
cagtcttgagccacc

SEQ ID NO: 1667682 - DNA, 15 bp, Homo sapiens
agtcttgagccacct

SEQ ID NO: 1667683 - DNA, 15 bp, Homo sapiens
gtcttgagccacctg

SEQ ID NO: 1667684 - DNA, 15 bp, Homo sapiens
tcttgagccacctgt

SEQ ID NO: 1667685 - DNA, 15 bp, Homo sapiens
cttgagccacctgtg

SEQ ID NO: 1667686 - DNA, 15 bp, Homo sapiens
ttgagccacctgtgg

SEQ ID NO: 1667687 - DNA, 15 bp, Homo sapiens
tgagccacctgtggc

SEQ ID NO: 1667688 - DNA, 15 bp, Homo sapiens
gagccacctgtggcc

SEQ ID NO: 1667689 - DNA, 15 bp, Homo sapiens
agccacctgtggcca

SEQ ID NO: 1667690 - DNA, 15 bp, Homo sapiens
gccacctgtggccag

SEQ ID NO: 1667691 - DNA, 15 bp, Homo sapiens
ccacctgtggccagc

SEQ ID NO: 1667692 - DNA, 15 bp, Homo sapiens
cacctgtggccagca

SEQ ID NO: 1667693 - DNA, 15 bp, Homo sapiens
acctgtggccagcaa

SEQ ID NO: 1667694 - DNA, 15 bp, Homo sapiens
cctgtggccagcaaa

SEQ ID NO: 1667695 - DNA, 15 bp, Homo sapiens
ctgtggccagcaaat

SEQ ID NO: 1667696 - DNA, 15 bp, Homo sapiens
tgtggccagcaaata

SEQ ID NO: 1667697 - DNA, 15 bp, Homo sapiens
gtggccagcaaatat

SEQ ID NO: 1667698 - DNA, 15 bp, Homo sapiens
tggccagcaaatatt

SEQ ID NO: 1667699 - DNA, 15 bp, Homo sapiens
ggccagcaaatattt

SEQ ID NO: 1667700 - DNA, 15 bp, Homo sapiens
gccagcaaatatttg

SEQ ID NO: 1667701 - DNA, 15 bp, Homo sapiens
ccagcaaatatttgg

SEQ ID NO: 1667702 - DNA, 15 bp, Homo sapiens
cagcaaatatttgga

SEQ ID NO: 1667703 - DNA, 15 bp, Homo sapiens
agcaaatatttggag

SEQ ID NO: 1667704 - DNA, 15 bp, Homo sapiens
gcaaatatttggaga

SEQ ID NO: 1667705 - DNA, 15 bp, Homo sapiens
caaatatttggagaa

SEQ ID NO: 1667706 - DNA, 15 bp, Homo sapiens
aaatatttggagaat

SEQ ID NO: 1667707 - DNA, 15 bp, Homo sapiens
aatatttggagaata

SEQ ID NO: 1667708 - DNA, 15 bp, Homo sapiens
atatttggagaataa

SEQ ID NO: 1667709 - DNA, 15 bp, Homo sapiens
tatttggagaataat

SEQ ID NO: 1667710 - DNA, 15 bp, Homo sapiens
atttggagaataata

SEQ ID NO: 1667711 - DNA, 15 bp, Homo sapiens
tttggagaataatag

SEQ ID NO: 1667712 - DNA, 15 bp, Homo sapiens
ttggagaataatagt

SEQ ID NO: 1667713 - DNA, 15 bp, Homo sapiens
tggagaataatagtc

SEQ ID NO: 1667714 - DNA, 15 bp, Homo sapiens
ggagaataatagtca

SEQ ID NO: 1667715 - DNA, 15 bp, Homo sapiens
gagaataatagtcag

SEQ ID NO: 1667716 - DNA, 15 bp, Homo sapiens
agaataatagtcagg

SEQ ID NO: 1667717 - DNA, 15 bp, Homo sapiens
gaataatagtcaggg

SEQ ID NO: 1667718 - DNA, 15 bp, Homo sapiens
aataatagtcagggg

SEQ ID NO: 1667719 - DNA, 15 bp, Homo sapiens
ataatagtcagggga

SEQ ID NO: 1667720 - DNA, 15 bp, Homo sapiens
taatagtcaggggag

SEQ ID NO: 1667721 - DNA, 15 bp, Homo sapiens
aatagtcaggggaga

SEQ ID NO: 1667722 - DNA, 15 bp, Homo sapiens
atagtcaggggagag

SEQ ID NO: 1667723 - DNA, 15 bp, Homo sapiens
tagtcaggggagagc

SEQ ID NO: 1667724 - DNA, 15 bp, Homo sapiens
agtcaggggagagct

SEQ ID NO: 1667725 - DNA, 15 bp, Homo sapiens
gtcaggggagagctt

SEQ ID NO: 1667726 - DNA, 15 bp, Homo sapiens
tcaggggagagcttg

SEQ ID NO: 1667727 - DNA, 15 bp, Homo sapiens
caggggagagcttga

SEQ ID NO: 1667728 - DNA, 15 bp, Homo sapiens
aggggagagcttgag

SEQ ID NO: 1667729 - DNA, 15 bp, Homo sapiens
ggggagagcttgagg

SEQ ID NO: 1667730 - DNA, 15 bp, Homo sapiens
gggagagcttgaggt

SEQ ID NO: 1667731 - DNA, 15 bp, Homo sapiens
ggagagcttgaggtc

SEQ ID NO: 1667732 - DNA, 15 bp, Homo sapiens
gagagcttgaggtcc

SEQ ID NO: 1667733 - DNA, 15 bp, Homo sapiens
agagcttgaggtcca

SEQ ID NO: 1667734 - DNA, 15 bp, Homo sapiens
gagcttgaggtccag

SEQ ID NO: 1667735 - DNA, 15 bp, Homo sapiens
agcttgaggtccagg

SEQ ID NO: 1667736 - DNA, 15 bp, Homo sapiens
gcttgaggtccaggg

SEQ ID NO: 1667737 - DNA, 15 bp, Homo sapiens
cttgaggtccaggga

SEQ ID NO: 1667738 - DNA, 15 bp, Homo sapiens
ttgaggtccagggaa

SEQ ID NO: 1667739 - DNA, 15 bp, Homo sapiens
tgaggtccagggaaa

SEQ ID NO: 1667740 - DNA, 15 bp, Homo sapiens
gaggtccagggaaag

SEQ ID NO: 1667741 - DNA, 15 bp, Homo sapiens
aggtccagggaaagg

SEQ ID NO: 1667742 - DNA, 15 bp, Homo sapiens
ggtccagggaaaggt

SEQ ID NO: 1667743 - DNA, 15 bp, Homo sapiens
gtccagggaaaggtt

SEQ ID NO: 1667744 - DNA, 15 bp, Homo sapiens
tccagggaaaggttt

SEQ ID NO: 1667745 - DNA, 15 bp, Homo sapiens
ccagggaaaggtttt

SEQ ID NO: 1667746 - DNA, 15 bp, Homo sapiens
cagggaaaggttttg

SEQ ID NO: 1667747 - DNA, 15 bp, Homo sapiens
agggaaaggttttgt

SEQ ID NO: 1667748 - DNA, 15 bp, Homo sapiens
gggaaaggttttgtt

SEQ ID NO: 1667749 - DNA, 15 bp, Homo sapiens
ggaaaggttttgttt

SEQ ID NO: 1667750 - DNA, 15 bp, Homo sapiens
gaaaggttttgtttt

SEQ ID NO: 1667751 - DNA, 15 bp, Homo sapiens
aaggttttgtttttc

SEQ ID NO: 1667752 - DNA, 15 bp, Homo sapiens
aggttttgtttttct

SEQ ID NO: 1667753 - DNA, 15 bp, Homo sapiens
ggttttgtttttctt

SEQ ID NO: 1667754 - DNA, 15 bp, Homo sapiens
gttttgtttttcttc

SEQ ID NO: 1667755 - DNA, 15 bp, Homo sapiens
ttttgtttttcttca

SEQ ID NO: 1667756 - DNA, 15 bp, Homo sapiens
tttgtttttcttcag

SEQ ID NO: 1667757 - DNA, 15 bp, Homo sapiens
ttgtttttcttcagg

SEQ ID NO: 1667758 - DNA, 15 bp, Homo sapiens
tgtttttcttcaggg

SEQ ID NO: 1667759 - DNA, 15 bp, Homo sapiens
gtttttcttcaggga

SEQ ID NO: 1667760 - DNA, 15 bp, Homo sapiens
tttttcttcagggaa

SEQ ID NO: 1667761 - DNA, 15 bp, Homo sapiens
ttttcttcagggaaa

SEQ ID NO: 1667762 - DNA, 15 bp, Homo sapiens
tttcttcagggaaag

SEQ ID NO: 1667763 - DNA, 15 bp, Homo sapiens
ttcttcagggaaagg

SEQ ID NO: 1667764 - DNA, 15 bp, Homo sapiens
tcttcagggaaaggt

SEQ ID NO: 1667765 - DNA, 15 bp, Homo sapiens
cttcagggaaaggtt

SEQ ID NO: 1667766 - DNA, 15 bp, Homo sapiens
ttcagggaaaggttt

SEQ ID NO: 1667767 - DNA, 15 bp, Homo sapiens
tcagggaaaggtttt

SEQ ID NO: 1667768 - DNA, 15 bp, Homo sapiens
cagggaaaggttttt

SEQ ID NO: 1667769 - DNA, 15 bp, Homo sapiens
agggaaaggttttta

SEQ ID NO: 1667770 - DNA, 15 bp, Homo sapiens
gggaaaggtttttat

SEQ ID NO: 1667771 - DNA, 15 bp, Homo sapiens
ggaaaggtttttatt

SEQ ID NO: 1667772 - DNA, 15 bp, Homo sapiens
gaaaggtttttattg

SEQ ID NO: 1667773 - DNA, 15 bp, Homo sapiens
aaaggtttttattgt

SEQ ID NO: 1667774 - DNA, 15 bp, Homo sapiens
aaggtttttattgtt

SEQ ID NO: 1667775 - DNA, 15 bp, Homo sapiens
aggtttttattgttc

SEQ ID NO: 1667776 - DNA, 15 bp, Homo sapiens
ggtttttattgttct

SEQ ID NO: 1667777 - DNA, 15 bp, Homo sapiens
gtttttattgttctt

SEQ ID NO: 1667778 - DNA, 15 bp, Homo sapiens
tttttattgttcttt

SEQ ID NO: 1667779 - DNA, 15 bp, Homo sapiens
ttttattgttcttta

SEQ ID NO: 1667780 - DNA, 15 bp, Homo sapiens
tttattgttctttat

SEQ ID NO: 1667781 - DNA, 15 bp, Homo sapiens
ttattgttctttatc

SEQ ID NO: 1667782 - DNA, 15 bp, Homo sapiens
tattgttctttatcc

SEQ ID NO: 1667783 - DNA, 15 bp, Homo sapiens
attgttctttatccc

SEQ ID NO: 1667784 - DNA, 15 bp, Homo sapiens
ttgttctttatccct

SEQ ID NO: 1667785 - DNA, 15 bp, Homo sapiens
tgttctttatccctc

SEQ ID NO: 1667786 - DNA, 15 bp, Homo sapiens
gttctttatccctcc

SEQ ID NO: 1667787 - DNA, 15 bp, Homo sapiens
ttctttatccctcct

SEQ ID NO: 1667788 - DNA, 15 bp, Homo sapiens
tctttatccctcctt

SEQ ID NO: 1667789 - DNA, 15 bp, Homo sapiens
ctttatccctcctta

SEQ ID NO: 1667790 - DNA, 15 bp, Homo sapiens
tttatccctccttaa

SEQ ID NO: 1667791 - DNA, 15 bp, Homo sapiens
ttatccctccttaaa

SEQ ID NO: 1667792 - DNA, 15 bp, Homo sapiens
tatccctccttaaag

SEQ ID NO: 1667793 - DNA, 15 bp, Homo sapiens
atccctccttaaagg

SEQ ID NO: 1667794 - DNA, 15 bp, Homo sapiens
tccctccttaaagga

SEQ ID NO: 1667795 - DNA, 15 bp, Homo sapiens
ccctccttaaaggac

SEQ ID NO: 1667796 - DNA, 15 bp, Homo sapiens
cctccttaaaggacc

SEQ ID NO: 1667797 - DNA, 15 bp, Homo sapiens
ctccttaaaggacct

SEQ ID NO: 1667798 - DNA, 15 bp, Homo sapiens
tccttaaaggacctt

SEQ ID NO: 1667799 - DNA, 15 bp, Homo sapiens
ccttaaaggaccttc

SEQ ID NO: 1667800 - DNA, 15 bp, Homo sapiens
cttaaaggaccttca

SEQ ID NO: 1667801 - DNA, 15 bp, Homo sapiens
ttaaaggaccttcag

SEQ ID NO: 1667802 - DNA, 15 bp, Homo sapiens
taaaggaccttcagg

SEQ ID NO: 1667803 - DNA, 15 bp, Homo sapiens
aaaggaccttcaggt

SEQ ID NO: 1667804 - DNA, 15 bp, Homo sapiens
aaggaccttcaggtg

SEQ ID NO: 1667805 - DNA, 15 bp, Homo sapiens
aggaccttcaggtgt

SEQ ID NO: 1667806 - DNA, 15 bp, Homo sapiens
ggaccttcaggtgtt

SEQ ID NO: 1667807 - DNA, 15 bp, Homo sapiens
gaccttcaggtgtta

SEQ ID NO: 1667808 - DNA, 15 bp, Homo sapiens
accttcaggtgttac

SEQ ID NO: 1667809 - DNA, 15 bp, Homo sapiens
ccttcaggtgttact

SEQ ID NO: 1667810 - DNA, 15 bp, Homo sapiens
cttcaggtgttactg

SEQ ID NO: 1667811 - DNA, 15 bp, Homo sapiens
ttcaggtgttactga

SEQ ID NO: 1667812 - DNA, 15 bp, Homo sapiens
tcaggtgttactgac

SEQ ID NO: 1667813 - DNA, 15 bp, Homo sapiens
caggtgttactgaca

SEQ ID NO: 1667814 - DNA, 15 bp, Homo sapiens
aggtgttactgacat

SEQ ID NO: 1667815 - DNA, 15 bp, Homo sapiens
ggtgttactgacatt

SEQ ID NO: 1667816 - DNA, 15 bp, Homo sapiens
gtgttactgacattc

SEQ ID NO: 1667817 - DNA, 15 bp, Homo sapiens
tgttactgacattcc

SEQ ID NO: 1667818 - DNA, 15 bp, Homo sapiens
gttactgacattccc

SEQ ID NO: 1667819 - DNA, 15 bp, Homo sapiens
ttactgacattcccg

SEQ ID NO: 1667820 - DNA, 15 bp, Homo sapiens
tactgacattcccgg

SEQ ID NO: 1667821 - DNA, 15 bp, Homo sapiens
actgacattcccggt

SEQ ID NO: 1667822 - DNA, 15 bp, Homo sapiens
ctgacattcccggtc

SEQ ID NO: 1667823 - DNA, 15 bp, Homo sapiens
tgacattcccggtct

SEQ ID NO: 1667824 - DNA, 15 bp, Homo sapiens
gacattcccggtcta

SEQ ID NO: 1667825 - DNA, 15 bp, Homo sapiens
acattcccggtctac

SEQ ID NO: 1667826 - DNA, 15 bp, Homo sapiens
cattcccggtctacc

SEQ ID NO: 1667827 - DNA, 15 bp, Homo sapiens
attcccggtctaccc

SEQ ID NO: 1667828 - DNA, 15 bp, Homo sapiens
ttcccggtctaccca

SEQ ID NO: 1667829 - DNA, 15 bp, Homo sapiens
tcccggtctacccag

SEQ ID NO: 1667830 - DNA, 15 bp, Homo sapiens
cccggtctacccagt

SEQ ID NO: 1667831 - DNA, 15 bp, Homo sapiens
ccggtctacccagtg

SEQ ID NO: 1667832 - DNA, 15 bp, Homo sapiens
cggtctacccagtgg

SEQ ID NO: 1667833 - DNA, 15 bp, Homo sapiens
ggtctacccagtggc

SEQ ID NO: 1667834 - DNA, 15 bp, Homo sapiens
gtctacccagtggca

SEQ ID NO: 1667835 - DNA, 15 bp, Homo sapiens
tctacccagtggcac

SEQ ID NO: 1667836 - DNA, 15 bp, Homo sapiens
ctacccagtggcaca

SEQ ID NO: 1667837 - DNA, 15 bp, Homo sapiens
tacccagtggcacat

SEQ ID NO: 1667838 - DNA, 15 bp, Homo sapiens
acccagtggcacatt

SEQ ID NO: 1667839 - DNA, 15 bp, Homo sapiens
cccagtggcacattt

SEQ ID NO: 1667840 - DNA, 15 bp, Homo sapiens
ccagtggcacattta

SEQ ID NO: 1667841 - DNA, 15 bp, Homo sapiens
cagtggcacatttag

SEQ ID NO: 1667842 - DNA, 15 bp, Homo sapiens
agtggcacatttagt

SEQ ID NO: 1667843 - DNA, 15 bp, Homo sapiens
gtggcacatttagtt

SEQ ID NO: 1667844 - DNA, 15 bp, Homo sapiens
tggcacatttagttt

SEQ ID NO: 1667845 - DNA, 15 bp, Homo sapiens
ggcacatttagtttg

SEQ ID NO: 1667846 - DNA, 15 bp, Homo sapiens
gcacatttagtttgt

SEQ ID NO: 1667847 - DNA, 15 bp, Homo sapiens
cacatttagtttgta

SEQ ID NO: 1667848 - DNA, 15 bp, Homo sapiens
acatttagtttgtaa

SEQ ID NO: 1667849 - DNA, 15 bp, Homo sapiens
catttagtttgtaag

SEQ ID NO: 1667850 - DNA, 15 bp, Homo sapiens
atttagtttgtaagc

SEQ ID NO: 1667851 - DNA, 15 bp, Homo sapiens
tttagtttgtaagct

SEQ ID NO: 1667852 - DNA, 15 bp, Homo sapiens
ttagtttgtaagctg

SEQ ID NO: 1667853 - DNA, 15 bp, Homo sapiens
tagtttgtaagctgg

SEQ ID NO: 1667854 - DNA, 15 bp, Homo sapiens
agtttgtaagctggg

SEQ ID NO: 1667855 - DNA, 15 bp, Homo sapiens
gtttgtaagctgggc

SEQ ID NO: 1667856 - DNA, 15 bp, Homo sapiens
tttgtaagctgggcc

SEQ ID NO: 1667857 - DNA, 15 bp, Homo sapiens
ttgtaagctgggccc

SEQ ID NO: 1667858 - DNA, 15 bp, Homo sapiens
tgtaagctgggccct

SEQ ID NO: 1667859 - DNA, 15 bp, Homo sapiens
gtaagctgggccctc

SEQ ID NO: 1667860 - DNA, 15 bp, Homo sapiens
taagctgggccctcg

SEQ ID NO: 1667861 - DNA, 15 bp, Homo sapiens
aagctgggccctcgt

SEQ ID NO: 1667862 - DNA, 15 bp, Homo sapiens
agctgggccctcgta

SEQ ID NO: 1667863 - DNA, 15 bp, Homo sapiens
gctgggccctcgtac

SEQ ID NO: 1667864 - DNA, 15 bp, Homo sapiens
ctgggccctcgtaca

SEQ ID NO: 1667865 - DNA, 15 bp, Homo sapiens
tgggccctcgtacag

SEQ ID NO: 1667866 - DNA, 15 bp, Homo sapiens
gggccctcgtacaga

SEQ ID NO: 1667867 - DNA, 15 bp, Homo sapiens
ggccctcgtacagag

SEQ ID NO: 1667868 - DNA, 15 bp, Homo sapiens
gccctcgtacagagg

SEQ ID NO: 1667869 - DNA, 15 bp, Homo sapiens
ccctcgtacagaggt

SEQ ID NO: 1667870 - DNA, 15 bp, Homo sapiens
cctcgtacagaggta

SEQ ID NO: 1667871 - DNA, 15 bp, Homo sapiens
ctcgtacagaggtag

SEQ ID NO: 1667872 - DNA, 15 bp, Homo sapiens
tcgtacagaggtagg

SEQ ID NO: 1667873 - DNA, 15 bp, Homo sapiens
cgtacagaggtaggg

SEQ ID NO: 1667874 - DNA, 15 bp, Homo sapiens
gtacagaggtaggga

SEQ ID NO: 1667875 - DNA, 15 bp, Homo sapiens
tacagaggtagggag

SEQ ID NO: 1667876 - DNA, 15 bp, Homo sapiens
acagaggtagggagg

SEQ ID NO: 1667877 - DNA, 15 bp, Homo sapiens
cagaggtagggaggt

SEQ ID NO: 1667878 - DNA, 15 bp, Homo sapiens
agaggtagggaggtg

SEQ ID NO: 1667879 - DNA, 15 bp, Homo sapiens
gaggtagggaggtga

SEQ ID NO: 1667880 - DNA, 15 bp, Homo sapiens
aggtagggaggtgag

SEQ ID NO: 1667881 - DNA, 15 bp, Homo sapiens
ggtagggaggtgaga

SEQ ID NO: 1667882 - DNA, 15 bp, Homo sapiens
gtagggaggtgagag

SEQ ID NO: 1667883 - DNA, 15 bp, Homo sapiens
tagggaggtgagagc

SEQ ID NO: 1667884 - DNA, 15 bp, Homo sapiens
agggaggtgagagca

SEQ ID NO: 1667885 - DNA, 15 bp, Homo sapiens
gggaggtgagagcat

SEQ ID NO: 1667886 - DNA, 15 bp, Homo sapiens
ggaggtgagagcatt

SEQ ID NO: 1667887 - DNA, 15 bp, Homo sapiens
gaggtgagagcattg

SEQ ID NO: 1667888 - DNA, 15 bp, Homo sapiens
aggtgagagcattgg

SEQ ID NO: 1667889 - DNA, 15 bp, Homo sapiens
ggtgagagcattgga

SEQ ID NO: 1667890 - DNA, 15 bp, Homo sapiens
gtgagagcattggat

SEQ ID NO: 1667891 - DNA, 15 bp, Homo sapiens
tgagagcattggatt

SEQ ID NO: 1667892 - DNA, 15 bp, Homo sapiens
gagagcattggatta

SEQ ID NO: 1667893 - DNA, 15 bp, Homo sapiens
agagcattggattag

SEQ ID NO: 1667894 - DNA, 15 bp, Homo sapiens
gagcattggattagt

SEQ ID NO: 1667895 - DNA, 15 bp, Homo sapiens
agcattggattagtg

SEQ ID NO: 1667896 - DNA, 15 bp, Homo sapiens
gcattggattagtgg

SEQ ID NO: 1667897 - DNA, 15 bp, Homo sapiens
cattggattagtggt

SEQ ID NO: 1667898 - DNA, 15 bp, Homo sapiens
attggattagtggtc

SEQ ID NO: 1667899 - DNA, 15 bp, Homo sapiens
ttggattagtggtca

SEQ ID NO: 1667900 - DNA, 15 bp, Homo sapiens
tggattagtggtcac

SEQ ID NO: 1667901 - DNA, 15 bp, Homo sapiens
ggattagtggtcacc

SEQ ID NO: 1667902 - DNA, 15 bp, Homo sapiens
gattagtggtcacca

SEQ ID NO: 1667903 - DNA, 15 bp, Homo sapiens
attagtggtcaccaa

SEQ ID NO: 1667904 - DNA, 15 bp, Homo sapiens
ttagtggtcaccaaa

SEQ ID NO: 1667905 - DNA, 15 bp, Homo sapiens
tagtggtcaccaaag

SEQ ID NO: 1667906 - DNA, 15 bp, Homo sapiens
agtggtcaccaaagc

SEQ ID NO: 1667907 - DNA, 15 bp, Homo sapiens
gtggtcaccaaagct

SEQ ID NO: 1667908 - DNA, 15 bp, Homo sapiens
tggtcaccaaagctg

SEQ ID NO: 1667909 - DNA, 15 bp, Homo sapiens
ggtcaccaaagctgc

SEQ ID NO: 1667910 - DNA, 15 bp, Homo sapiens
gtcaccaaagctgcg

SEQ ID NO: 1667911 - DNA, 15 bp, Homo sapiens
tcaccaaagctgcgg

SEQ ID NO: 1667912 - DNA, 15 bp, Homo sapiens
caccaaagctgcggt

SEQ ID NO: 1667913 - DNA, 15 bp, Homo sapiens
accaaagctgcggtc

SEQ ID NO: 1667914 - DNA, 15 bp, Homo sapiens
ccaaagctgcggtca

SEQ ID NO: 1667915 - DNA, 15 bp, Homo sapiens
caaagctgcggtcac

SEQ ID NO: 1667916 - DNA, 15 bp, Homo sapiens
aaagctgcggtcacc

SEQ ID NO: 1667917 - DNA, 15 bp, Homo sapiens
aagctgcggtcacct

SEQ ID NO: 1667918 - DNA, 15 bp, Homo sapiens
agctgcggtcaccta

SEQ ID NO: 1667919 - DNA, 15 bp, Homo sapiens
gctgcggtcacctag

SEQ ID NO: 1667920 - DNA, 15 bp, Homo sapiens
ctgcggtcacctagt

SEQ ID NO: 1667921 - DNA, 15 bp, Homo sapiens
tgcggtcacctagtg

SEQ ID NO: 1667922 - DNA, 15 bp, Homo sapiens
gcggtcacctagtgg

SEQ ID NO: 1667923 - DNA, 15 bp, Homo sapiens
cggtcacctagtggg

SEQ ID NO: 1667924 - DNA, 15 bp, Homo sapiens
ggtcacctagtgggg

SEQ ID NO: 1667925 - DNA, 15 bp, Homo sapiens
gtcacctagtggggt

SEQ ID NO: 1667926 - DNA, 15 bp, Homo sapiens
tcacctagtggggtg

SEQ ID NO: 1667927 - DNA, 15 bp, Homo sapiens
cacctagtggggtga

SEQ ID NO: 1667928 - DNA, 15 bp, Homo sapiens
acctagtggggtgat

SEQ ID NO: 1667929 - DNA, 15 bp, Homo sapiens
cctagtggggtgatc

SEQ ID NO: 1667930 - DNA, 15 bp, Homo sapiens
ctagtggggtgatca

SEQ ID NO: 1667931 - DNA, 15 bp, Homo sapiens
tagtggggtgatcag

SEQ ID NO: 1667932 - DNA, 15 bp, Homo sapiens
agtggggtgatcaga

SEQ ID NO: 1667933 - DNA, 15 bp, Homo sapiens
gtggggtgatcagag

SEQ ID NO: 1667934 - DNA, 15 bp, Homo sapiens
tggggtgatcagagg

SEQ ID NO: 1667935 - DNA, 15 bp, Homo sapiens
ggggtgatcagaggc

SEQ ID NO: 1667936 - DNA, 15 bp, Homo sapiens
gggtgatcagaggct

SEQ ID NO: 1667937 - DNA, 15 bp, Homo sapiens
ggtgatcagaggctc

SEQ ID NO: 1667938 - DNA, 15 bp, Homo sapiens
gtgatcagaggctcc

SEQ ID NO: 1667939 - DNA, 15 bp, Homo sapiens
tgatcagaggctcct

SEQ ID NO: 1667940 - DNA, 15 bp, Homo sapiens
gatcagaggctcctc

SEQ ID NO: 1667941 - DNA, 15 bp, Homo sapiens
atcagaggctcctcc

SEQ ID NO: 1667942 - DNA, 15 bp, Homo sapiens
tcagaggctcctccc

SEQ ID NO: 1667943 - DNA, 15 bp, Homo sapiens
cagaggctcctccct

SEQ ID NO: 1667944 - DNA, 15 bp, Homo sapiens
agaggctcctccctt

SEQ ID NO: 1667945 - DNA, 15 bp, Homo sapiens
gaggctcctccctta

SEQ ID NO: 1667946 - DNA, 15 bp, Homo sapiens
aggctcctcccttaa

SEQ ID NO: 1667947 - DNA, 15 bp, Homo sapiens
ggctcctcccttaag

SEQ ID NO: 1667948 - DNA, 15 bp, Homo sapiens
gctcctcccttaaga

SEQ ID NO: 1667949 - DNA, 15 bp, Homo sapiens
ctcctcccttaagat

SEQ ID NO: 1667950 - DNA, 15 bp, Homo sapiens
tcctcccttaagatc

SEQ ID NO: 1667951 - DNA, 15 bp, Homo sapiens
cctcccttaagatct

SEQ ID NO: 1667952 - DNA, 15 bp, Homo sapiens
ctcccttaagatctt

SEQ ID NO: 1667953 - DNA, 15 bp, Homo sapiens
tcccttaagatcttg

SEQ ID NO: 1667954 - DNA, 15 bp, Homo sapiens
cccttaagatcttga

SEQ ID NO: 1667955 - DNA, 15 bp, Homo sapiens
ccttaagatcttgat

SEQ ID NO: 1667956 - DNA, 15 bp, Homo sapiens
cttaagatcttgatt

SEQ ID NO: 1667957 - DNA, 15 bp, Homo sapiens
ttaagatcttgattg

SEQ ID NO: 1667958 - DNA, 15 bp, Homo sapiens
taagatcttgattgc

SEQ ID NO: 1667959 - DNA, 15 bp, Homo sapiens
aagatcttgattgcc

SEQ ID NO: 1667960 - DNA, 15 bp, Homo sapiens
agatcttgattgcca

SEQ ID NO: 1667961 - DNA, 15 bp, Homo sapiens
gatcttgattgccaa

SEQ ID NO: 1667962 - DNA, 15 bp, Homo sapiens
atcttgattgccaac

SEQ ID NO: 1667963 - DNA, 15 bp, Homo sapiens
tcttgattgccaacg

SEQ ID NO: 1667964 - DNA, 15 bp, Homo sapiens
cttgattgccaacgc

SEQ ID NO: 1667965 - DNA, 15 bp, Homo sapiens
ttgattgccaacgcc

SEQ ID NO: 1667966 - DNA, 15 bp, Homo sapiens
tgattgccaacgcct

SEQ ID NO: 1667967 - DNA, 15 bp, Homo sapiens
gattgccaacgcctc

SEQ ID NO: 1667968 - DNA, 15 bp, Homo sapiens
attgccaacgcctct

SEQ ID NO: 1667969 - DNA, 15 bp, Homo sapiens
ttgccaacgcctctg

SEQ ID NO: 1667970 - DNA, 15 bp, Homo sapiens
tgccaacgcctctgg

SEQ ID NO: 1667971 - DNA, 15 bp, Homo sapiens
gccaacgcctctggc

SEQ ID NO: 1667972 - DNA, 15 bp, Homo sapiens
ccaacgcctctggcc

SEQ ID NO: 1667973 - DNA, 15 bp, Homo sapiens
caacgcctctggccc

SEQ ID NO: 1667974 - DNA, 15 bp, Homo sapiens
aacgcctctggccca

SEQ ID NO: 1667975 - DNA, 15 bp, Homo sapiens
acgcctctggcccaa

SEQ ID NO: 1667976 - DNA, 15 bp, Homo sapiens
cgcctctggcccaac

SEQ ID NO: 1667977 - DNA, 15 bp, Homo sapiens
gcctctggcccaact

SEQ ID NO: 1667978 - DNA, 15 bp, Homo sapiens
cctctggcccaactt

SEQ ID NO: 1667979 - DNA, 15 bp, Homo sapiens
ctctggcccaacttt

SEQ ID NO: 1667980 - DNA, 15 bp, Homo sapiens
tctggcccaactttc

SEQ ID NO: 1667981 - DNA, 15 bp, Homo sapiens
ctggcccaactttcc

SEQ ID NO: 1667982 - DNA, 15 bp, Homo sapiens
tggcccaactttcct

SEQ ID NO: 1667983 - DNA, 15 bp, Homo sapiens
ggcccaactttcctt

SEQ ID NO: 1667984 - DNA, 15 bp, Homo sapiens
gcccaactttccttt

SEQ ID NO: 1667985 - DNA, 15 bp, Homo sapiens
cccaactttcctttt

SEQ ID NO: 1667986 - DNA, 15 bp, Homo sapiens
ccaactttccttttt

SEQ ID NO: 1667987 - DNA, 15 bp, Homo sapiens
caactttccttttta

SEQ ID NO: 1667988 - DNA, 15 bp, Homo sapiens
aactttcctttttat

SEQ ID NO: 1667989 - DNA, 15 bp, Homo sapiens
actttcctttttatt

SEQ ID NO: 1667990 - DNA, 15 bp, Homo sapiens
ctttcctttttattt

SEQ ID NO: 1667991 - DNA, 15 bp, Homo sapiens
tttcctttttattta

SEQ ID NO: 1667992 - DNA, 15 bp, Homo sapiens
ttcctttttatttat

SEQ ID NO: 1667993 - DNA, 15 bp, Homo sapiens
tcctttttatttatc

SEQ ID NO: 1667994 - DNA, 15 bp, Homo sapiens
cctttttatttatcg

SEQ ID NO: 1667995 - DNA, 15 bp, Homo sapiens
ctttttatttatcgc

SEQ ID NO: 1667996 - DNA, 15 bp, Homo sapiens
tttttatttatcgca

SEQ ID NO: 1667997 - DNA, 15 bp, Homo sapiens
ttttatttatcgcaa

SEQ ID NO: 1667998 - DNA, 15 bp, Homo sapiens
tttatttatcgcaag

SEQ ID NO: 1667999 - DNA, 15 bp, Homo sapiens
ttatttatcgcaagc

SEQ ID NO: 1668000 - DNA, 15 bp, Homo sapiens
tatttatcgcaagcc

SEQ ID NO: 1668001 - DNA, 15 bp, Homo sapiens
atttatcgcaagcct

SEQ ID NO: 1668002 - DNA, 15 bp, Homo sapiens
tttatcgcaagcctc

SEQ ID NO: 1668003 - DNA, 15 bp, Homo sapiens
ttatcgcaagcctcc

SEQ ID NO: 1668004 - DNA, 15 bp, Homo sapiens
tatcgcaagcctcct

SEQ ID NO: 1668005 - DNA, 15 bp, Homo sapiens
atcgcaagcctcctg

SEQ ID NO: 1668006 - DNA, 15 bp, Homo sapiens
tcgcaagcctcctgg

SEQ ID NO: 1668007 - DNA, 15 bp, Homo sapiens
cgcaagcctcctgga

SEQ ID NO: 1668008 - DNA, 15 bp, Homo sapiens
gcaagcctcctggaa

SEQ ID NO: 1668009 - DNA, 15 bp, Homo sapiens
caagcctcctggaat

SEQ ID NO: 1668010 - DNA, 15 bp, Homo sapiens
aagcctcctggaatc

SEQ ID NO: 1668011 - DNA, 15 bp, Homo sapiens
agcctcctggaatct

SEQ ID NO: 1668012 - DNA, 15 bp, Homo sapiens
gcctcctggaatctc

SEQ ID NO: 1668013 - DNA, 15 bp, Homo sapiens
cctcctggaatctca

SEQ ID NO: 1668014 - DNA, 15 bp, Homo sapiens
ctcctggaatctcaa

SEQ ID NO: 1668015 - DNA, 15 bp, Homo sapiens
tcctggaatctcaat

SEQ ID NO: 1668016 - DNA, 15 bp, Homo sapiens
cctggaatctcaatt

SEQ ID NO: 1668017 - DNA, 15 bp, Homo sapiens
ctggaatctcaattg

SEQ ID NO: 1668018 - DNA, 15 bp, Homo sapiens
tggaatctcaattgc

SEQ ID NO: 1668019 - DNA, 15 bp, Homo sapiens
ggaatctcaattgct

SEQ ID NO: 1668020 - DNA, 15 bp, Homo sapiens
gaatctcaattgctt

SEQ ID NO: 1668021 - DNA, 15 bp, Homo sapiens
aatctcaattgcttt

SEQ ID NO: 1668022 - DNA, 15 bp, Homo sapiens
atctcaattgctttt

SEQ ID NO: 1668023 - DNA, 15 bp, Homo sapiens
tctcaattgcttttt

SEQ ID NO: 1668024 - DNA, 15 bp, Homo sapiens
ctcaattgctttttg

SEQ ID NO: 1668025 - DNA, 15 bp, Homo sapiens
tcaattgctttttgc

SEQ ID NO: 1668026 - DNA, 15 bp, Homo sapiens
caattgctttttgcc

SEQ ID NO: 1668027 - DNA, 15 bp, Homo sapiens
aattgctttttgccc

SEQ ID NO: 1668028 - DNA, 15 bp, Homo sapiens
attgctttttgccca

SEQ ID NO: 1668029 - DNA, 15 bp, Homo sapiens
ttgctttttgcccac

SEQ ID NO: 1668030 - DNA, 15 bp, Homo sapiens
tgctttttgcccacc

SEQ ID NO: 1668031 - DNA, 15 bp, Homo sapiens
gctttttgcccaccc

SEQ ID NO: 1668032 - DNA, 15 bp, Homo sapiens
ctttttgcccacccg

SEQ ID NO: 1668033 - DNA, 15 bp, Homo sapiens
tttttgcccacccgg

SEQ ID NO: 1668034 - DNA, 15 bp, Homo sapiens
ttttgcccacccggt

SEQ ID NO: 1668035 - DNA, 15 bp, Homo sapiens
tttgcccacccggtg

SEQ ID NO: 1668036 - DNA, 15 bp, Homo sapiens
ttgcccacccggtgt

SEQ ID NO: 1668037 - DNA, 15 bp, Homo sapiens
tgcccacccggtgtg

SEQ ID NO: 1668038 - DNA, 15 bp, Homo sapiens
gcccacccggtgtgt

SEQ ID NO: 1668039 - DNA, 15 bp, Homo sapiens
cccacccggtgtgtc

SEQ ID NO: 1668040 - DNA, 15 bp, Homo sapiens
ccacccggtgtgtca

SEQ ID NO: 1668041 - DNA, 15 bp, Homo sapiens
cacccggtgtgtcag

SEQ ID NO: 1668042 - DNA, 15 bp, Homo sapiens
acccggtgtgtcagc

SEQ ID NO: 1668043 - DNA, 15 bp, Homo sapiens
cccggtgtgtcagca

SEQ ID NO: 1668044 - DNA, 15 bp, Homo sapiens
ccggtgtgtcagcac

SEQ ID NO: 1668045 - DNA, 15 bp, Homo sapiens
cggtgtgtcagcaca

SEQ ID NO: 1668046 - DNA, 15 bp, Homo sapiens
ggtgtgtcagcacaa

SEQ ID NO: 1668047 - DNA, 15 bp, Homo sapiens
gtgtgtcagcacaag

SEQ ID NO: 1668048 - DNA, 15 bp, Homo sapiens
tgtgtcagcacaaga

SEQ ID NO: 1668049 - DNA, 15 bp, Homo sapiens
gtgtcagcacaagaa

SEQ ID NO: 1668050 - DNA, 15 bp, Homo sapiens
tgtcagcacaagaaa

SEQ ID NO: 1668051 - DNA, 15 bp, Homo sapiens
gtcagcacaagaaat

SEQ ID NO: 1668052 - DNA, 15 bp, Homo sapiens
tcagcacaagaaatg

SEQ ID NO: 1668053 - DNA, 15 bp, Homo sapiens
cagcacaagaaatga

SEQ ID NO: 1668054 - DNA, 15 bp, Homo sapiens
agcacaagaaatgag

SEQ ID NO: 1668055 - DNA, 15 bp, Homo sapiens
gcacaagaaatgagt

SEQ ID NO: 1668056 - DNA, 15 bp, Homo sapiens
cacaagaaatgagtc

SEQ ID NO: 1668057 - DNA, 15 bp, Homo sapiens
acaagaaatgagtca

SEQ ID NO: 1668058 - DNA, 15 bp, Homo sapiens
caagaaatgagtcat

SEQ ID NO: 1668059 - DNA, 15 bp, Homo sapiens
aagaaatgagtcatt

SEQ ID NO: 1668060 - DNA, 15 bp, Homo sapiens
agaaatgagtcattt

SEQ ID NO: 1668061 - DNA, 15 bp, Homo sapiens
gaaatgagtcatttc

SEQ ID NO: 1668062 - DNA, 15 bp, Homo sapiens
aaatgagtcatttcc

SEQ ID NO: 1668063 - DNA, 15 bp, Homo sapiens
aatgagtcatttcct

SEQ ID NO: 1668064 - DNA, 15 bp, Homo sapiens
atgagtcatttcctc

SEQ ID NO: 1668065 - DNA, 15 bp, Homo sapiens
tgagtcatttcctcc

SEQ ID NO: 1668066 - DNA, 15 bp, Homo sapiens
gagtcatttcctcct

SEQ ID NO: 1668067 - DNA, 15 bp, Homo sapiens
agtcatttcctcctt

SEQ ID NO: 1668068 - DNA, 15 bp, Homo sapiens
gtcatttcctccttt

SEQ ID NO: 1668069 - DNA, 15 bp, Homo sapiens
tcatttcctccttta

SEQ ID NO: 1668070 - DNA, 15 bp, Homo sapiens
catttcctcctttaa

SEQ ID NO: 1668071 - DNA, 15 bp, Homo sapiens
atttcctcctttaag

SEQ ID NO: 1668072 - DNA, 15 bp, Homo sapiens
tttcctcctttaagc

SEQ ID NO: 1668073 - DNA, 15 bp, Homo sapiens
ttcctcctttaagca

SEQ ID NO: 1668074 - DNA, 15 bp, Homo sapiens
tcctcctttaagcac

SEQ ID NO: 1668075 - DNA, 15 bp, Homo sapiens
cctcctttaagcaca

SEQ ID NO: 1668076 - DNA, 15 bp, Homo sapiens
ctcctttaagcacag

SEQ ID NO: 1668077 - DNA, 15 bp, Homo sapiens
tcctttaagcacagt

SEQ ID NO: 1668078 - DNA, 15 bp, Homo sapiens
cctttaagcacagtt

SEQ ID NO: 1668079 - DNA, 15 bp, Homo sapiens
ctttaagcacagttg

SEQ ID NO: 1668080 - DNA, 15 bp, Homo sapiens
tttaagcacagttga

SEQ ID NO: 1668081 - DNA, 15 bp, Homo sapiens
ttaagcacagttgaa

SEQ ID NO: 1668082 - DNA, 15 bp, Homo sapiens
taagcacagttgaaa

SEQ ID NO: 1668083 - DNA, 15 bp, Homo sapiens
aagcacagttgaaat

SEQ ID NO: 1668084 - DNA, 15 bp, Homo sapiens
agcacagttgaaatt

SEQ ID NO: 1668085 - DNA, 15 bp, Homo sapiens
gcacagttgaaattg

SEQ ID NO: 1668086 - DNA, 15 bp, Homo sapiens
cacagttgaaattga

SEQ ID NO: 1668087 - DNA, 15 bp, Homo sapiens
acagttgaaattgag

SEQ ID NO: 1668088 - DNA, 15 bp, Homo sapiens
cagttgaaattgagc

SEQ ID NO: 1668089 - DNA, 15 bp, Homo sapiens
agttgaaattgagct

SEQ ID NO: 1668090 - DNA, 15 bp, Homo sapiens
gttgaaattgagctg

SEQ ID NO: 1668091 - DNA, 15 bp, Homo sapiens
ttgaaattgagctgt

SEQ ID NO: 1668092 - DNA, 15 bp, Homo sapiens
tgaaattgagctgtg

SEQ ID NO: 1668093 - DNA, 15 bp, Homo sapiens
gaaattgagctgtga

SEQ ID NO: 1668094 - DNA, 15 bp, Homo sapiens
aaattgagctgtgag

SEQ ID NO: 1668095 - DNA, 15 bp, Homo sapiens
aattgagctgtgagt

SEQ ID NO: 1668096 - DNA, 15 bp, Homo sapiens
attgagctgtgagtc

SEQ ID NO: 1668097 - DNA, 15 bp, Homo sapiens
ttgagctgtgagtca

SEQ ID NO: 1668098 - DNA, 15 bp, Homo sapiens
tgagctgtgagtcag

SEQ ID NO: 1668099 - DNA, 15 bp, Homo sapiens
gagctgtgagtcagt

SEQ ID NO: 1668100 - DNA, 15 bp, Homo sapiens
agctgtgagtcagtg

SEQ ID NO: 1668101 - DNA, 15 bp, Homo sapiens
gctgtgagtcagtga

SEQ ID NO: 1668102 - DNA, 15 bp, Homo sapiens
ctgtgagtcagtgag

SEQ ID NO: 1668103 - DNA, 15 bp, Homo sapiens
tgtgagtcagtgagg

SEQ ID NO: 1668104 - DNA, 15 bp, Homo sapiens
gtgagtcagtgaggt

SEQ ID NO: 1668105 - DNA, 15 bp, Homo sapiens
tgagtcagtgaggtg

SEQ ID NO: 1668106 - DNA, 15 bp, Homo sapiens
gagtcagtgaggtgt

SEQ ID NO: 1668107 - DNA, 15 bp, Homo sapiens
agtcagtgaggtgtg

SEQ ID NO: 1668108 - DNA, 15 bp, Homo sapiens
gtcagtgaggtgtgt

SEQ ID NO: 1668109 - DNA, 15 bp, Homo sapiens
tcagtgaggtgtgta

SEQ ID NO: 1668110 - DNA, 15 bp, Homo sapiens
cagtgaggtgtgtac

SEQ ID NO: 1668111 - DNA, 15 bp, Homo sapiens
agtgaggtgtgtacg

SEQ ID NO: 1668112 - DNA, 15 bp, Homo sapiens
gtgaggtgtgtacga

SEQ ID NO: 1668113 - DNA, 15 bp, Homo sapiens
tgaggtgtgtacgat

SEQ ID NO: 1668114 - DNA, 15 bp, Homo sapiens
gaggtgtgtacgata

SEQ ID NO: 1668115 - DNA, 15 bp, Homo sapiens
aggtgtgtacgatat

SEQ ID NO: 1668116 - DNA, 15 bp, Homo sapiens
ggtgtgtacgatatt

SEQ ID NO: 1668117 - DNA, 15 bp, Homo sapiens
gtgtgtacgatattg

SEQ ID NO: 1668118 - DNA, 15 bp, Homo sapiens
tgtgtacgatattgt

SEQ ID NO: 1668119 - DNA, 15 bp, Homo sapiens
gtgtacgatattgtc

SEQ ID NO: 1668120 - DNA, 15 bp, Homo sapiens
tgtacgatattgtca

SEQ ID NO: 1668121 - DNA, 15 bp, Homo sapiens
gtacgatattgtcaa

SEQ ID NO: 1668122 - DNA, 15 bp, Homo sapiens
tacgatattgtcaaa

SEQ ID NO: 1668123 - DNA, 15 bp, Homo sapiens
acgatattgtcaaag

SEQ ID NO: 1668124 - DNA, 15 bp, Homo sapiens
cgatattgtcaaagc

SEQ ID NO: 1668125 - DNA, 15 bp, Homo sapiens
gatattgtcaaagcg

SEQ ID NO: 1668126 - DNA, 15 bp, Homo sapiens
atattgtcaaagcgg

SEQ ID NO: 1668127 - DNA, 15 bp, Homo sapiens
tattgtcaaagcggg

SEQ ID NO: 1668128 - DNA, 15 bp, Homo sapiens
attgtcaaagcgggg

SEQ ID NO: 1668129 - DNA, 15 bp, Homo sapiens
ttgtcaaagcggggt

SEQ ID NO: 1668130 - DNA, 15 bp, Homo sapiens
tgtcaaagcggggtg

SEQ ID NO: 1668131 - DNA, 15 bp, Homo sapiens
gtcaaagcggggtgt

SEQ ID NO: 1668132 - DNA, 15 bp, Homo sapiens
tcaaagcggggtgtg

SEQ ID NO: 1668133 - DNA, 15 bp, Homo sapiens
caaagcggggtgtgt

SEQ ID NO: 1668134 - DNA, 15 bp, Homo sapiens
aaagcggggtgtgta

SEQ ID NO: 1668135 - DNA, 15 bp, Homo sapiens
aagcggggtgtgtac

SEQ ID NO: 1668136 - DNA, 15 bp, Homo sapiens
agcggggtgtgtaca

SEQ ID NO: 1668137 - DNA, 15 bp, Homo sapiens
gcggggtgtgtacag

SEQ ID NO: 1668138 - DNA, 15 bp, Homo sapiens
cggggtgtgtacagt

SEQ ID NO: 1668139 - DNA, 15 bp, Homo sapiens
ggggtgtgtacagta

SEQ ID NO: 1668140 - DNA, 15 bp, Homo sapiens
gggtgtgtacagtat

SEQ ID NO: 1668141 - DNA, 15 bp, Homo sapiens
ggtgtgtacagtatt

SEQ ID NO: 1668142 - DNA, 15 bp, Homo sapiens
gtgtgtacagtattg

SEQ ID NO: 1668143 - DNA, 15 bp, Homo sapiens
tgtgtacagtattga

SEQ ID NO: 1668144 - DNA, 15 bp, Homo sapiens
gtgtacagtattgac

SEQ ID NO: 1668145 - DNA, 15 bp, Homo sapiens
tgtacagtattgaca

SEQ ID NO: 1668146 - DNA, 15 bp, Homo sapiens
gtacagtattgacag

SEQ ID NO: 1668147 - DNA, 15 bp, Homo sapiens
tacagtattgacaga

SEQ ID NO: 1668148 - DNA, 15 bp, Homo sapiens
acagtattgacagat

SEQ ID NO: 1668149 - DNA, 15 bp, Homo sapiens
cagtattgacagatc

SEQ ID NO: 1668150 - DNA, 15 bp, Homo sapiens
agtattgacagatct

SEQ ID NO: 1668151 - DNA, 15 bp, Homo sapiens
gtattgacagatctg

SEQ ID NO: 1668152 - DNA, 15 bp, Homo sapiens
tattgacagatctgt

SEQ ID NO: 1668153 - DNA, 15 bp, Homo sapiens
attgacagatctgta

SEQ ID NO: 1668154 - DNA, 15 bp, Homo sapiens
ttgacagatctgtag

SEQ ID NO: 1668155 - DNA, 15 bp, Homo sapiens
tgacagatctgtagt

SEQ ID NO: 1668156 - DNA, 15 bp, Homo sapiens
gacagatctgtagtt

SEQ ID NO: 1668157 - DNA, 15 bp, Homo sapiens
acagatctgtagttg

SEQ ID NO: 1668158 - DNA, 15 bp, Homo sapiens
cagatctgtagttgg

SEQ ID NO: 1668159 - DNA, 15 bp, Homo sapiens
agatctgtagttggg

SEQ ID NO: 1668160 - DNA, 15 bp, Homo sapiens
gatctgtagttgggc

SEQ ID NO: 1668161 - DNA, 15 bp, Homo sapiens
atctgtagttgggca

SEQ ID NO: 1668162 - DNA, 15 bp, Homo sapiens
tctgtagttgggcaa

SEQ ID NO: 1668163 - DNA, 15 bp, Homo sapiens
ctgtagttgggcaag

SEQ ID NO: 1668164 - DNA, 15 bp, Homo sapiens
tgtagttgggcaaga

SEQ ID NO: 1668165 - DNA, 15 bp, Homo sapiens
gtagttgggcaagag

SEQ ID NO: 1668166 - DNA, 15 bp, Homo sapiens
tagttgggcaagaga

SEQ ID NO: 1668167 - DNA, 15 bp, Homo sapiens
agttgggcaagagaa

SEQ ID NO: 1668168 - DNA, 15 bp, Homo sapiens
gttgggcaagagaat

SEQ ID NO: 1668169 - DNA, 15 bp, Homo sapiens
ttgggcaagagaatt

SEQ ID NO: 1668170 - DNA, 15 bp, Homo sapiens
tgggcaagagaatta

SEQ ID NO: 1668171 - DNA, 15 bp, Homo sapiens
gggcaagagaattat

SEQ ID NO: 1668172 - DNA, 15 bp, Homo sapiens
ggcaagagaattatc

SEQ ID NO: 1668173 - DNA, 15 bp, Homo sapiens
gcaagagaattatca

SEQ ID NO: 1668174 - DNA, 15 bp, Homo sapiens
caagagaattatcag

SEQ ID NO: 1668175 - DNA, 15 bp, Homo sapiens
aagagaattatcaga

SEQ ID NO: 1668176 - DNA, 15 bp, Homo sapiens
agagaattatcagag

SEQ ID NO: 1668177 - DNA, 15 bp, Homo sapiens
gagaattatcagagt

SEQ ID NO: 1668178 - DNA, 15 bp, Homo sapiens
agaattatcagagtt

SEQ ID NO: 1668179 - DNA, 15 bp, Homo sapiens
gaattatcagagttt

SEQ ID NO: 1668180 - DNA, 15 bp, Homo sapiens
aattatcagagtttg

SEQ ID NO: 1668181 - DNA, 15 bp, Homo sapiens
attatcagagtttgt

SEQ ID NO: 1668182 - DNA, 15 bp, Homo sapiens
ttatcagagtttgtg

SEQ ID NO: 1668183 - DNA, 15 bp, Homo sapiens
tatcagagtttgtga

SEQ ID NO: 1668184 - DNA, 15 bp, Homo sapiens
atcagagtttgtgac

SEQ ID NO: 1668185 - DNA, 15 bp, Homo sapiens
tcagagtttgtgacc

SEQ ID NO: 1668186 - DNA, 15 bp, Homo sapiens
cagagtttgtgacca

SEQ ID NO: 1668187 - DNA, 15 bp, Homo sapiens
agagtttgtgaccac

SEQ ID NO: 1668188 - DNA, 15 bp, Homo sapiens
gagtttgtgaccaca

SEQ ID NO: 1668189 - DNA, 15 bp, Homo sapiens
agtttgtgaccacag

SEQ ID NO: 1668190 - DNA, 15 bp, Homo sapiens
gtttgtgaccacagc

SEQ ID NO: 1668191 - DNA, 15 bp, Homo sapiens
tttgtgaccacagca

SEQ ID NO: 1668192 - DNA, 15 bp, Homo sapiens
ttgtgaccacagcag

SEQ ID NO: 1668193 - DNA, 15 bp, Homo sapiens
tgtgaccacagcaga

SEQ ID NO: 1668194 - DNA, 15 bp, Homo sapiens
gtgaccacagcagat

SEQ ID NO: 1668195 - DNA, 15 bp, Homo sapiens
tgaccacagcagatt

SEQ ID NO: 1668196 - DNA, 15 bp, Homo sapiens
gaccacagcagattc

SEQ ID NO: 1668197 - DNA, 15 bp, Homo sapiens
accacagcagattcc

SEQ ID NO: 1668198 - DNA, 15 bp, Homo sapiens
ccacagcagattcca

SEQ ID NO: 1668199 - DNA, 15 bp, Homo sapiens
cacagcagattccaa

SEQ ID NO: 1668200 - DNA, 15 bp, Homo sapiens
acagcagattccaaa

SEQ ID NO: 1668201 - DNA, 15 bp, Homo sapiens
cagcagattccaaag

SEQ ID NO: 1668202 - DNA, 15 bp, Homo sapiens
agcagattccaaagc

SEQ ID NO: 1668203 - DNA, 15 bp, Homo sapiens
gcagattccaaagct

SEQ ID NO: 1668204 - DNA, 15 bp, Homo sapiens
cagattccaaagctc

SEQ ID NO: 1668205 - DNA, 15 bp, Homo sapiens
agattccaaagctcg

SEQ ID NO: 1668206 - DNA, 15 bp, Homo sapiens
gattccaaagctcga

SEQ ID NO: 1668207 - DNA, 15 bp, Homo sapiens
attccaaagctcgac

SEQ ID NO: 1668208 - DNA, 15 bp, Homo sapiens
ttccaaagctcgact

SEQ ID NO: 1668209 - DNA, 15 bp, Homo sapiens
tccaaagctcgactc

SEQ ID NO: 1668210 - DNA, 15 bp, Homo sapiens
ccaaagctcgactca

SEQ ID NO: 1668211 - DNA, 15 bp, Homo sapiens
caaagctcgactcat

SEQ ID NO: 1668212 - DNA, 15 bp, Homo sapiens
aaagctcgactcatt

SEQ ID NO: 1668213 - DNA, 15 bp, Homo sapiens
aagctcgactcattt

SEQ ID NO: 1668214 - DNA, 15 bp, Homo sapiens
agctcgactcatttt

SEQ ID NO: 1668215 - DNA, 15 bp, Homo sapiens
gctcgactcattttc

SEQ ID NO: 1668216 - DNA, 15 bp, Homo sapiens
ctcgactcattttct

SEQ ID NO: 1668217 - DNA, 15 bp, Homo sapiens
tcgactcattttctt

SEQ ID NO: 1668218 - DNA, 15 bp, Homo sapiens
cgactcattttcttc

SEQ ID NO: 1668219 - DNA, 15 bp, Homo sapiens
gactcattttcttct

SEQ ID NO: 1668220 - DNA, 15 bp, Homo sapiens
actcattttcttctc

SEQ ID NO: 1668221 - DNA, 15 bp, Homo sapiens
ctcattttcttctct

SEQ ID NO: 1668222 - DNA, 15 bp, Homo sapiens
tcattttcttctctc

SEQ ID NO: 1668223 - DNA, 15 bp, Homo sapiens
cattttcttctctct

SEQ ID NO: 1668224 - DNA, 15 bp, Homo sapiens
attttcttctctctt

SEQ ID NO: 1668225 - DNA, 15 bp, Homo sapiens
ttttcttctctcttc

SEQ ID NO: 1668226 - DNA, 15 bp, Homo sapiens
tttcttctctcttcc

SEQ ID NO: 1668227 - DNA, 15 bp, Homo sapiens
ttcttctctcttcct

SEQ ID NO: 1668228 - DNA, 15 bp, Homo sapiens
tcttctctcttcctt

SEQ ID NO: 1668229 - DNA, 15 bp, Homo sapiens
cttctctcttccttc

SEQ ID NO: 1668230 - DNA, 15 bp, Homo sapiens
ttctctcttccttcc

SEQ ID NO: 1668231 - DNA, 15 bp, Homo sapiens
tctctcttccttccc

SEQ ID NO: 1668232 - DNA, 15 bp, Homo sapiens
tctcttccttccctt

SEQ ID NO: 1668233 - DNA, 15 bp, Homo sapiens
ctcttccttcccttt

SEQ ID NO: 1668234 - DNA, 15 bp, Homo sapiens
tcttccttccctttt

SEQ ID NO: 1668235 - DNA, 15 bp, Homo sapiens
cttccttcccttttt

SEQ ID NO: 1668236 - DNA, 15 bp, Homo sapiens
ttccttccctttttt

SEQ ID NO: 1668237 - DNA, 15 bp, Homo sapiens
tccttcccttttttc

SEQ ID NO: 1668238 - DNA, 15 bp, Homo sapiens
ccttcccttttttct

SEQ ID NO: 1668239 - DNA, 15 bp, Homo sapiens
cttcccttttttctt

SEQ ID NO: 1668240 - DNA, 15 bp, Homo sapiens
ttcccttttttcttt

SEQ ID NO: 1668241 - DNA, 15 bp, Homo sapiens
tcccttttttctttt

SEQ ID NO: 1668242 - DNA, 15 bp, Homo sapiens
cccttttttcttttc

SEQ ID NO: 1668243 - DNA, 15 bp, Homo sapiens
ccttttttcttttct

SEQ ID NO: 1668244 - DNA, 15 bp, Homo sapiens
cttttttcttttctt

SEQ ID NO: 1668245 - DNA, 15 bp, Homo sapiens
tttgacagagtctcg

SEQ ID NO: 1668246 - DNA, 15 bp, Homo sapiens
ttgacagagtctcgc

SEQ ID NO: 1668247 - DNA, 15 bp, Homo sapiens
tgacagagtctcgct

SEQ ID NO: 1668248 - DNA, 15 bp, Homo sapiens
cagtggcacaatctg

SEQ ID NO: 1668249 - DNA, 15 bp, Homo sapiens
agtggcacaatctgg

SEQ ID NO: 1668250 - DNA, 15 bp, Homo sapiens
gtggcacaatctggg

SEQ ID NO: 1668251 - DNA, 15 bp, Homo sapiens
tggcacaatctgggc

SEQ ID NO: 1668252 - DNA, 15 bp, Homo sapiens
ggcacaatctgggct

SEQ ID NO: 1668253 - DNA, 15 bp, Homo sapiens
gcacaatctgggctc

SEQ ID NO: 1668254 - DNA, 15 bp, Homo sapiens
cacaatctgggctca

SEQ ID NO: 1668255 - DNA, 15 bp, Homo sapiens
acaatctgggctcac

SEQ ID NO: 1668256 - DNA, 15 bp, Homo sapiens
ctgggctcactgcag

SEQ ID NO: 1668257 - DNA, 15 bp, Homo sapiens
tgggctcactgcagc

SEQ ID NO: 1668258 - DNA, 15 bp, Homo sapiens
gggctcactgcagcc

SEQ ID NO: 1668259 - DNA, 15 bp, Homo sapiens
ggctcactgcagccc

SEQ ID NO: 1668260 - DNA, 15 bp, Homo sapiens
ctcactgcagcccct

SEQ ID NO: 1668261 - DNA, 15 bp, Homo sapiens
tcactgcagcccctg

SEQ ID NO: 1668262 - DNA, 15 bp, Homo sapiens
cactgcagcccctgc

SEQ ID NO: 1668263 - DNA, 15 bp, Homo sapiens
actgcagcccctgcc

SEQ ID NO: 1668264 - DNA, 15 bp, Homo sapiens
ctgcagcccctgcct

SEQ ID NO: 1668265 - DNA, 15 bp, Homo sapiens
tgcagcccctgcctc

SEQ ID NO: 1668266 - DNA, 15 bp, Homo sapiens
gcagcccctgcctcc

SEQ ID NO: 1668267 - DNA, 15 bp, Homo sapiens
cagcccctgcctcct

SEQ ID NO: 1668268 - DNA, 15 bp, Homo sapiens
agcccctgcctcctg

SEQ ID NO: 1668269 - DNA, 15 bp, Homo sapiens
gcccctgcctcctgg

SEQ ID NO: 1668270 - DNA, 15 bp, Homo sapiens
cccctgcctcctggg

SEQ ID NO: 1668271 - DNA, 15 bp, Homo sapiens
ccctgcctcctgggt

SEQ ID NO: 1668272 - DNA, 15 bp, Homo sapiens
cctgcctcctgggtt

SEQ ID NO: 1668273 - DNA, 15 bp, Homo sapiens
ctcctgggttcaaat

SEQ ID NO: 1668274 - DNA, 15 bp, Homo sapiens
tcctgggttcaaatg

SEQ ID NO: 1668275 - DNA, 15 bp, Homo sapiens
cctgggttcaaatga

SEQ ID NO: 1668276 - DNA, 15 bp, Homo sapiens
ctgggttcaaatgat

SEQ ID NO: 1668277 - DNA, 15 bp, Homo sapiens
tgggttcaaatgatt

SEQ ID NO: 1668278 - DNA, 15 bp, Homo sapiens
gggttcaaatgattc

SEQ ID NO: 1668279 - DNA, 15 bp, Homo sapiens
ggttcaaatgattct

SEQ ID NO: 1668280 - DNA, 15 bp, Homo sapiens
gttcaaatgattctc

SEQ ID NO: 1668281 - DNA, 15 bp, Homo sapiens
ttcaaatgattctca

SEQ ID NO: 1668282 - DNA, 15 bp, Homo sapiens
tcaaatgattctcat

SEQ ID NO: 1668283 - DNA, 15 bp, Homo sapiens
caaatgattctcatg

SEQ ID NO: 1668284 - DNA, 15 bp, Homo sapiens
aaatgattctcatgt

SEQ ID NO: 1668285 - DNA, 15 bp, Homo sapiens
aatgattctcatgtt

SEQ ID NO: 1668286 - DNA, 15 bp, Homo sapiens
atgattctcatgttt

SEQ ID NO: 1668287 - DNA, 15 bp, Homo sapiens
tgattctcatgtttc

SEQ ID NO: 1668288 - DNA, 15 bp, Homo sapiens
gattctcatgtttca

SEQ ID NO: 1668289 - DNA, 15 bp, Homo sapiens
attctcatgtttcag

SEQ ID NO: 1668290 - DNA, 15 bp, Homo sapiens
ttctcatgtttcagc

SEQ ID NO: 1668291 - DNA, 15 bp, Homo sapiens
tctcatgtttcagcc

SEQ ID NO: 1668292 - DNA, 15 bp, Homo sapiens
ctcatgtttcagcct

SEQ ID NO: 1668293 - DNA, 15 bp, Homo sapiens
tcatgtttcagcctc

SEQ ID NO: 1668294 - DNA, 15 bp, Homo sapiens
catgtttcagcctcc

SEQ ID NO: 1668295 - DNA, 15 bp, Homo sapiens
atgtttcagcctccc

SEQ ID NO: 1668296 - DNA, 15 bp, Homo sapiens
tgtttcagcctcccg

SEQ ID NO: 1668297 - DNA, 15 bp, Homo sapiens
gtttcagcctcccga

SEQ ID NO: 1668298 - DNA, 15 bp, Homo sapiens
tttcagcctcccgag

SEQ ID NO: 1668299 - DNA, 15 bp, Homo sapiens
ttcagcctcccgagt

SEQ ID NO: 1668300 - DNA, 15 bp, Homo sapiens
ctcccgagtagctgc

SEQ ID NO: 1668301 - DNA, 15 bp, Homo sapiens
tcccgagtagctgca

SEQ ID NO: 1668302 - DNA, 15 bp, Homo sapiens
cccgagtagctgcaa

SEQ ID NO: 1668303 - DNA, 15 bp, Homo sapiens
ccgagtagctgcaat

SEQ ID NO: 1668304 - DNA, 15 bp, Homo sapiens
cgagtagctgcaatt

SEQ ID NO: 1668305 - DNA, 15 bp, Homo sapiens
gagtagctgcaatta

SEQ ID NO: 1668306 - DNA, 15 bp, Homo sapiens
agtagctgcaattac

SEQ ID NO: 1668307 - DNA, 15 bp, Homo sapiens
gtagctgcaattaca

SEQ ID NO: 1668308 - DNA, 15 bp, Homo sapiens
tagctgcaattacag

SEQ ID NO: 1668309 - DNA, 15 bp, Homo sapiens
agctgcaattacagg

SEQ ID NO: 1668310 - DNA, 15 bp, Homo sapiens
gctgcaattacaggc

SEQ ID NO: 1668311 - DNA, 15 bp, Homo sapiens
ctgcaattacaggca

SEQ ID NO: 1668312 - DNA, 15 bp, Homo sapiens
tgcaattacaggcat

SEQ ID NO: 1668313 - DNA, 15 bp, Homo sapiens
gcaattacaggcatt

SEQ ID NO: 1668314 - DNA, 15 bp, Homo sapiens
caattacaggcattc

SEQ ID NO: 1668315 - DNA, 15 bp, Homo sapiens
aattacaggcattcg

SEQ ID NO: 1668316 - DNA, 15 bp, Homo sapiens
attacaggcattcgg

SEQ ID NO: 1668317 - DNA, 15 bp, Homo sapiens
ttacaggcattcggg

SEQ ID NO: 1668318 - DNA, 15 bp, Homo sapiens
tacaggcattcgggt

SEQ ID NO: 1668319 - DNA, 15 bp, Homo sapiens
acaggcattcgggtt

SEQ ID NO: 1668320 - DNA, 15 bp, Homo sapiens
caggcattcgggttc

SEQ ID NO: 1668321 - DNA, 15 bp, Homo sapiens
aggcattcgggttca

SEQ ID NO: 1668322 - DNA, 15 bp, Homo sapiens
ggcattcgggttcaa

SEQ ID NO: 1668323 - DNA, 15 bp, Homo sapiens
gcattcgggttcaag

SEQ ID NO: 1668324 - DNA, 15 bp, Homo sapiens
cattcgggttcaagt

SEQ ID NO: 1668325 - DNA, 15 bp, Homo sapiens
attcgggttcaagtg

SEQ ID NO: 1668326 - DNA, 15 bp, Homo sapiens
ttcgggttcaagtga

SEQ ID NO: 1668327 - DNA, 15 bp, Homo sapiens
tcgggttcaagtgat

SEQ ID NO: 1668328 - DNA, 15 bp, Homo sapiens
ctcctgcctcagcca

SEQ ID NO: 1668329 - DNA, 15 bp, Homo sapiens
tcctgcctcagccac

SEQ ID NO: 1668330 - DNA, 15 bp, Homo sapiens
cctgcctcagccacc

SEQ ID NO: 1668331 - DNA, 15 bp, Homo sapiens
ctgcctcagccacct

SEQ ID NO: 1668332 - DNA, 15 bp, Homo sapiens
tgcctcagccacctg

SEQ ID NO: 1668333 - DNA, 15 bp, Homo sapiens
gcctcagccacctga

SEQ ID NO: 1668334 - DNA, 15 bp, Homo sapiens
cctcagccacctgag

SEQ ID NO: 1668335 - DNA, 15 bp, Homo sapiens
ctcagccacctgagc

SEQ ID NO: 1668336 - DNA, 15 bp, Homo sapiens
tcagccacctgagca

SEQ ID NO: 1668337 - DNA, 15 bp, Homo sapiens
cagccacctgagcag

SEQ ID NO: 1668338 - DNA, 15 bp, Homo sapiens
agccacctgagcagc

SEQ ID NO: 1668339 - DNA, 15 bp, Homo sapiens
gccacctgagcagct

SEQ ID NO: 1668340 - DNA, 15 bp, Homo sapiens
ccacctgagcagctg

SEQ ID NO: 1668341 - DNA, 15 bp, Homo sapiens
cacctgagcagctgg

SEQ ID NO: 1668342 - DNA, 15 bp, Homo sapiens
acctgagcagctggg

SEQ ID NO: 1668343 - DNA, 15 bp, Homo sapiens
ctgagcagctgggat

SEQ ID NO: 1668344 - DNA, 15 bp, Homo sapiens
tgagcagctgggatt

SEQ ID NO: 1668345 - DNA, 15 bp, Homo sapiens
tctcgaactcctgaa

SEQ ID NO: 1668346 - DNA, 15 bp, Homo sapiens
ctcgaactcctgaac

SEQ ID NO: 1668347 - DNA, 15 bp, Homo sapiens
tcgaactcctgaact

SEQ ID NO: 1668348 - DNA, 15 bp, Homo sapiens
cgaactcctgaactc

SEQ ID NO: 1668349 - DNA, 15 bp, Homo sapiens
gaactcctgaactca

SEQ ID NO: 1668350 - DNA, 15 bp, Homo sapiens
aactcctgaactcag

SEQ ID NO: 1668351 - DNA, 15 bp, Homo sapiens
actcctgaactcagg

SEQ ID NO: 1668352 - DNA, 15 bp, Homo sapiens
ctcctgaactcaggt

SEQ ID NO: 1668353 - DNA, 15 bp, Homo sapiens
tcctgaactcaggtg

SEQ ID NO: 1668354 - DNA, 15 bp, Homo sapiens
cctgaactcaggtga

SEQ ID NO: 1668355 - DNA, 15 bp, Homo sapiens
ctgaactcaggtgat

SEQ ID NO: 1668356 - DNA, 15 bp, Homo sapiens
tgaactcaggtgatc

SEQ ID NO: 1668357 - DNA, 15 bp, Homo sapiens
gaactcaggtgatcc

SEQ ID NO: 1668358 - DNA, 15 bp, Homo sapiens
aactcaggtgatccg

SEQ ID NO: 1668359 - DNA, 15 bp, Homo sapiens
actcaggtgatccgc

SEQ ID NO: 1668360 - DNA, 15 bp, Homo sapiens
ggtgatccgcccact

SEQ ID NO: 1668361 - DNA, 15 bp, Homo sapiens
gtgatccgcccactt

SEQ ID NO: 1668362 - DNA, 15 bp, Homo sapiens
tgatccgcccacttc

SEQ ID NO: 1668363 - DNA, 15 bp, Homo sapiens
gatccgcccacttcg

SEQ ID NO: 1668364 - DNA, 15 bp, Homo sapiens
atccgcccacttcgg

SEQ ID NO: 1668365 - DNA, 15 bp, Homo sapiens
tccgcccacttcggc

SEQ ID NO: 1668366 - DNA, 15 bp, Homo sapiens
ccgcccacttcggcc

SEQ ID NO: 1668367 - DNA, 15 bp, Homo sapiens
cgcccacttcggcct

SEQ ID NO: 1668368 - DNA, 15 bp, Homo sapiens
gcccacttcggcctc

SEQ ID NO: 1668369 - DNA, 15 bp, Homo sapiens
cccacttcggcctcc

SEQ ID NO: 1668370 - DNA, 15 bp, Homo sapiens
ccacttcggcctccc

SEQ ID NO: 1668371 - DNA, 15 bp, Homo sapiens
cacttcggcctccca

SEQ ID NO: 1668372 - DNA, 15 bp, Homo sapiens
acttcggcctcccaa

SEQ ID NO: 1668373 - DNA, 15 bp, Homo sapiens
cttcggcctcccaaa

SEQ ID NO: 1668374 - DNA, 15 bp, Homo sapiens
ttcggcctcccaaag

SEQ ID NO: 1668375 - DNA, 15 bp, Homo sapiens
tgctgagattacaga

SEQ ID NO: 1668376 - DNA, 15 bp, Homo sapiens
gctgagattacagac

SEQ ID NO: 1668377 - DNA, 15 bp, Homo sapiens
ctgagattacagacg

SEQ ID NO: 1668378 - DNA, 15 bp, Homo sapiens
tgagattacagacgt

SEQ ID NO: 1668379 - DNA, 15 bp, Homo sapiens
gagattacagacgtg

SEQ ID NO: 1668380 - DNA, 15 bp, Homo sapiens
agattacagacgtga

SEQ ID NO: 1668381 - DNA, 15 bp, Homo sapiens
cagacgtgagtcacc

SEQ ID NO: 1668382 - DNA, 15 bp, Homo sapiens
agacgtgagtcaccg

SEQ ID NO: 1668383 - DNA, 15 bp, Homo sapiens
gacgtgagtcaccgc

SEQ ID NO: 1668384 - DNA, 15 bp, Homo sapiens
acgtgagtcaccgcg

SEQ ID NO: 1668385 - DNA, 15 bp, Homo sapiens
cgtgagtcaccgcgc

SEQ ID NO: 1668386 - DNA, 15 bp, Homo sapiens
gtgagtcaccgcgcc

SEQ ID NO: 1668387 - DNA, 15 bp, Homo sapiens
tgagtcaccgcgccc

SEQ ID NO: 1668388 - DNA, 15 bp, Homo sapiens
gagtcaccgcgccca

SEQ ID NO: 1668389 - DNA, 15 bp, Homo sapiens
agtcaccgcgcccag

SEQ ID NO: 1668390 - DNA, 15 bp, Homo sapiens
gtcaccgcgcccagc

SEQ ID NO: 1668391 - DNA, 15 bp, Homo sapiens
tcaccgcgcccagcc

SEQ ID NO: 1668392 - DNA, 15 bp, Homo sapiens
gcgcccagcctgttc

SEQ ID NO: 1668393 - DNA, 15 bp, Homo sapiens
cgcccagcctgttct

SEQ ID NO: 1668394 - DNA, 15 bp, Homo sapiens
gcccagcctgttctg

SEQ ID NO: 1668395 - DNA, 15 bp, Homo sapiens
cccagcctgttctgt

SEQ ID NO: 1668396 - DNA, 15 bp, Homo sapiens
ccagcctgttctgtt

SEQ ID NO: 1668397 - DNA, 15 bp, Homo sapiens
cagcctgttctgttc

SEQ ID NO: 1668398 - DNA, 15 bp, Homo sapiens
agcctgttctgttct

SEQ ID NO: 1668399 - DNA, 15 bp, Homo sapiens
gcctgttctgttctt

SEQ ID NO: 1668400 - DNA, 15 bp, Homo sapiens
cctgttctgttcttt

SEQ ID NO: 1668401 - DNA, 15 bp, Homo sapiens
ctgttctgttcttta

SEQ ID NO: 1668402 - DNA, 15 bp, Homo sapiens
tgttctgttctttaa

SEQ ID NO: 1668403 - DNA, 15 bp, Homo sapiens
gttctgttctttaat

SEQ ID NO: 1668404 - DNA, 15 bp, Homo sapiens
ttctgttctttaatt

SEQ ID NO: 1668405 - DNA, 15 bp, Homo sapiens
tctgttctttaattc

SEQ ID NO: 1668406 - DNA, 15 bp, Homo sapiens
ctgttctttaattct

SEQ ID NO: 1668407 - DNA, 15 bp, Homo sapiens
tgttctttaattctc

SEQ ID NO: 1668408 - DNA, 15 bp, Homo sapiens
gttctttaattctca

SEQ ID NO: 1668409 - DNA, 15 bp, Homo sapiens
ttctttaattctcaa

SEQ ID NO: 1668410 - DNA, 15 bp, Homo sapiens
tctttaattctcaaa

SEQ ID NO: 1668411 - DNA, 15 bp, Homo sapiens
ctttaattctcaaaa

SEQ ID NO: 1668412 - DNA, 15 bp, Homo sapiens
tttaattctcaaaac

SEQ ID NO: 1668413 - DNA, 15 bp, Homo sapiens
ttaattctcaaaaca

SEQ ID NO: 1668414 - DNA, 15 bp, Homo sapiens
taattctcaaaacac

SEQ ID NO: 1668415 - DNA, 15 bp, Homo sapiens
aattctcaaaacacc

SEQ ID NO: 1668416 - DNA, 15 bp, Homo sapiens
attctcaaaacaccc

SEQ ID NO: 1668417 - DNA, 15 bp, Homo sapiens
ttctcaaaacaccct

SEQ ID NO: 1668418 - DNA, 15 bp, Homo sapiens
tctcaaaacaccctc

SEQ ID NO: 1668419 - DNA, 15 bp, Homo sapiens
ctcaaaacaccctct

SEQ ID NO: 1668420 - DNA, 15 bp, Homo sapiens
tcaaaacaccctcta

SEQ ID NO: 1668421 - DNA, 15 bp, Homo sapiens
caaaacaccctctag

SEQ ID NO: 1668422 - DNA, 15 bp, Homo sapiens
aaaacaccctctagg

SEQ ID NO: 1668423 - DNA, 15 bp, Homo sapiens
aaacaccctctagga

SEQ ID NO: 1668424 - DNA, 15 bp, Homo sapiens
aacaccctctaggaa

SEQ ID NO: 1668425 - DNA, 15 bp, Homo sapiens
acaccctctaggaag

SEQ ID NO: 1668426 - DNA, 15 bp, Homo sapiens
caccctctaggaagt

SEQ ID NO: 1668427 - DNA, 15 bp, Homo sapiens
accctctaggaagta

SEQ ID NO: 1668428 - DNA, 15 bp, Homo sapiens
ccctctaggaagtag

SEQ ID NO: 1668429 - DNA, 15 bp, Homo sapiens
cctctaggaagtaga

SEQ ID NO: 1668430 - DNA, 15 bp, Homo sapiens
ctctaggaagtagag

SEQ ID NO: 1668431 - DNA, 15 bp, Homo sapiens
tctaggaagtagaga

SEQ ID NO: 1668432 - DNA, 15 bp, Homo sapiens
ctaggaagtagagac

SEQ ID NO: 1668433 - DNA, 15 bp, Homo sapiens
taggaagtagagact

SEQ ID NO: 1668434 - DNA, 15 bp, Homo sapiens
aggaagtagagactg

SEQ ID NO: 1668435 - DNA, 15 bp, Homo sapiens
ggaagtagagactgc

SEQ ID NO: 1668436 - DNA, 15 bp, Homo sapiens
gaagtagagactgcc

SEQ ID NO: 1668437 - DNA, 15 bp, Homo sapiens
aagtagagactgcca

SEQ ID NO: 1668438 - DNA, 15 bp, Homo sapiens
agtagagactgccat

SEQ ID NO: 1668439 - DNA, 15 bp, Homo sapiens
gtagagactgccatt

SEQ ID NO: 1668440 - DNA, 15 bp, Homo sapiens
tagagactgccattc

SEQ ID NO: 1668441 - DNA, 15 bp, Homo sapiens
agagactgccattct

SEQ ID NO: 1668442 - DNA, 15 bp, Homo sapiens
gagactgccattctc

SEQ ID NO: 1668443 - DNA, 15 bp, Homo sapiens
agactgccattctcc

SEQ ID NO: 1668444 - DNA, 15 bp, Homo sapiens
gactgccattctccc

SEQ ID NO: 1668445 - DNA, 15 bp, Homo sapiens
actgccattctcccc

SEQ ID NO: 1668446 - DNA, 15 bp, Homo sapiens
ctgccattctccccc

SEQ ID NO: 1668447 - DNA, 15 bp, Homo sapiens
tgccattctccccca

SEQ ID NO: 1668448 - DNA, 15 bp, Homo sapiens
gccattctcccccat

SEQ ID NO: 1668449 - DNA, 15 bp, Homo sapiens
ccattctcccccatt

SEQ ID NO: 1668450 - DNA, 15 bp, Homo sapiens
cattctcccccattt

SEQ ID NO: 1668451 - DNA, 15 bp, Homo sapiens
attctcccccatttt

SEQ ID NO: 1668452 - DNA, 15 bp, Homo sapiens
ttctcccccatttta

SEQ ID NO: 1668453 - DNA, 15 bp, Homo sapiens
tctcccccattttac

SEQ ID NO: 1668454 - DNA, 15 bp, Homo sapiens
ctcccccattttaca

SEQ ID NO: 1668455 - DNA, 15 bp, Homo sapiens
tcccccattttacag

SEQ ID NO: 1668456 - DNA, 15 bp, Homo sapiens
cccattttacagatc

SEQ ID NO: 1668457 - DNA, 15 bp, Homo sapiens
ccattttacagatca

SEQ ID NO: 1668458 - DNA, 15 bp, Homo sapiens
cattttacagatcag

SEQ ID NO: 1668459 - DNA, 15 bp, Homo sapiens
attttacagatcagg

SEQ ID NO: 1668460 - DNA, 15 bp, Homo sapiens
tacagatcaggaaac

SEQ ID NO: 1668461 - DNA, 15 bp, Homo sapiens
acagatcaggaaact

SEQ ID NO: 1668462 - DNA, 15 bp, Homo sapiens
cagatcaggaaactg

SEQ ID NO: 1668463 - DNA, 15 bp, Homo sapiens
agatcaggaaactga

SEQ ID NO: 1668464 - DNA, 15 bp, Homo sapiens
gatcaggaaactgag

SEQ ID NO: 1668465 - DNA, 15 bp, Homo sapiens
atcaggaaactgagt

SEQ ID NO: 1668466 - DNA, 15 bp, Homo sapiens
tcaggaaactgagtc

SEQ ID NO: 1668467 - DNA, 15 bp, Homo sapiens
caggaaactgagtcc

SEQ ID NO: 1668468 - DNA, 15 bp, Homo sapiens
aggaaactgagtccc

SEQ ID NO: 1668469 - DNA, 15 bp, Homo sapiens
ggaaactgagtccca

SEQ ID NO: 1668470 - DNA, 15 bp, Homo sapiens
gaaactgagtcccag

SEQ ID NO: 1668471 - DNA, 15 bp, Homo sapiens
aaactgagtcccaga

SEQ ID NO: 1668472 - DNA, 15 bp, Homo sapiens
aactgagtcccagaa

SEQ ID NO: 1668473 - DNA, 15 bp, Homo sapiens
actgagtcccagaag

SEQ ID NO: 1668474 - DNA, 15 bp, Homo sapiens
ctgagtcccagaagg

SEQ ID NO: 1668475 - DNA, 15 bp, Homo sapiens
tgagtcccagaagga

SEQ ID NO: 1668476 - DNA, 15 bp, Homo sapiens
gagtcccagaaggat

SEQ ID NO: 1668477 - DNA, 15 bp, Homo sapiens
agtcccagaaggatt

SEQ ID NO: 1668478 - DNA, 15 bp, Homo sapiens
gtcccagaaggattt

SEQ ID NO: 1668479 - DNA, 15 bp, Homo sapiens
tcccagaaggattta

SEQ ID NO: 1668480 - DNA, 15 bp, Homo sapiens
cccagaaggatttag

SEQ ID NO: 1668481 - DNA, 15 bp, Homo sapiens
ccagaaggatttagt

SEQ ID NO: 1668482 - DNA, 15 bp, Homo sapiens
cagaaggatttagtc

SEQ ID NO: 1668483 - DNA, 15 bp, Homo sapiens
agaaggatttagtca

SEQ ID NO: 1668484 - DNA, 15 bp, Homo sapiens
gaaggatttagtcag

SEQ ID NO: 1668485 - DNA, 15 bp, Homo sapiens
aaggatttagtcagt

SEQ ID NO: 1668486 - DNA, 15 bp, Homo sapiens
aggatttagtcagtt

SEQ ID NO: 1668487 - DNA, 15 bp, Homo sapiens
ggatttagtcagtta

SEQ ID NO: 1668488 - DNA, 15 bp, Homo sapiens
gatttagtcagttac

SEQ ID NO: 1668489 - DNA, 15 bp, Homo sapiens
atttagtcagttacc

SEQ ID NO: 1668490 - DNA, 15 bp, Homo sapiens
tttagtcagttaccc

SEQ ID NO: 1668491 - DNA, 15 bp, Homo sapiens
ttagtcagttaccca

SEQ ID NO: 1668492 - DNA, 15 bp, Homo sapiens
tagtcagttacccaa

SEQ ID NO: 1668493 - DNA, 15 bp, Homo sapiens
agtcagttacccaag

SEQ ID NO: 1668494 - DNA, 15 bp, Homo sapiens
gtcagttacccaagt

SEQ ID NO: 1668495 - DNA, 15 bp, Homo sapiens
tcagttacccaagtt

SEQ ID NO: 1668496 - DNA, 15 bp, Homo sapiens
cagttacccaagttg

SEQ ID NO: 1668497 - DNA, 15 bp, Homo sapiens
agttacccaagttgt

SEQ ID NO: 1668498 - DNA, 15 bp, Homo sapiens
gttacccaagttgtt

SEQ ID NO: 1668499 - DNA, 15 bp, Homo sapiens
ttacccaagttgttc

SEQ ID NO: 1668500 - DNA, 15 bp, Homo sapiens
tacccaagttgttct

SEQ ID NO: 1668501 - DNA, 15 bp, Homo sapiens
acccaagttgttcta

SEQ ID NO: 1668502 - DNA, 15 bp, Homo sapiens
cccaagttgttctag

SEQ ID NO: 1668503 - DNA, 15 bp, Homo sapiens
ccaagttgttctagt

SEQ ID NO: 1668504 - DNA, 15 bp, Homo sapiens
caagttgttctagtt

SEQ ID NO: 1668505 - DNA, 15 bp, Homo sapiens
aagttgttctagtta

SEQ ID NO: 1668506 - DNA, 15 bp, Homo sapiens
agttgttctagttaa

SEQ ID NO: 1668507 - DNA, 15 bp, Homo sapiens
gttgttctagttaaa

SEQ ID NO: 1668508 - DNA, 15 bp, Homo sapiens
ttgttctagttaaat

SEQ ID NO: 1668509 - DNA, 15 bp, Homo sapiens
tgttctagttaaatg

SEQ ID NO: 1668510 - DNA, 15 bp, Homo sapiens
gttctagttaaatgg

SEQ ID NO: 1668511 - DNA, 15 bp, Homo sapiens
ttctagttaaatggc

SEQ ID NO: 1668512 - DNA, 15 bp, Homo sapiens
tctagttaaatggcc

SEQ ID NO: 1668513 - DNA, 15 bp, Homo sapiens
ctagttaaatggcct

SEQ ID NO: 1668514 - DNA, 15 bp, Homo sapiens
tagttaaatggcctg

SEQ ID NO: 1668515 - DNA, 15 bp, Homo sapiens
agttaaatggcctgg

SEQ ID NO: 1668516 - DNA, 15 bp, Homo sapiens
gttaaatggcctgga

SEQ ID NO: 1668517 - DNA, 15 bp, Homo sapiens
ttaaatggcctggaa

SEQ ID NO: 1668518 - DNA, 15 bp, Homo sapiens
taaatggcctggaaa

SEQ ID NO: 1668519 - DNA, 15 bp, Homo sapiens
aaatggcctggaaag

SEQ ID NO: 1668520 - DNA, 15 bp, Homo sapiens
aatggcctggaaagc

SEQ ID NO: 1668521 - DNA, 15 bp, Homo sapiens
atggcctggaaagcc

SEQ ID NO: 1668522 - DNA, 15 bp, Homo sapiens
tggcctggaaagcca

SEQ ID NO: 1668523 - DNA, 15 bp, Homo sapiens
ggcctggaaagccag

SEQ ID NO: 1668524 - DNA, 15 bp, Homo sapiens
gcctggaaagccagt

SEQ ID NO: 1668525 - DNA, 15 bp, Homo sapiens
cctggaaagccagtg

SEQ ID NO: 1668526 - DNA, 15 bp, Homo sapiens
ctggaaagccagtga

SEQ ID NO: 1668527 - DNA, 15 bp, Homo sapiens
tggaaagccagtgaa

SEQ ID NO: 1668528 - DNA, 15 bp, Homo sapiens
ggaaagccagtgaag

SEQ ID NO: 1668529 - DNA, 15 bp, Homo sapiens
gaaagccagtgaagc

SEQ ID NO: 1668530 - DNA, 15 bp, Homo sapiens
aaagccagtgaagcc

SEQ ID NO: 1668531 - DNA, 15 bp, Homo sapiens
aagccagtgaagccc

SEQ ID NO: 1668532 - DNA, 15 bp, Homo sapiens
agccagtgaagccca

SEQ ID NO: 1668533 - DNA, 15 bp, Homo sapiens
gccagtgaagcccag

SEQ ID NO: 1668534 - DNA, 15 bp, Homo sapiens
ccagtgaagcccagg

SEQ ID NO: 1668535 - DNA, 15 bp, Homo sapiens
cagtgaagcccagga

SEQ ID NO: 1668536 - DNA, 15 bp, Homo sapiens
agtgaagcccaggat

SEQ ID NO: 1668537 - DNA, 15 bp, Homo sapiens
gtgaagcccaggatt

SEQ ID NO: 1668538 - DNA, 15 bp, Homo sapiens
tgaagcccaggattg

SEQ ID NO: 1668539 - DNA, 15 bp, Homo sapiens
gaagcccaggattgt

SEQ ID NO: 1668540 - DNA, 15 bp, Homo sapiens
aagcccaggattgtc

SEQ ID NO: 1668541 - DNA, 15 bp, Homo sapiens
agcccaggattgtct

SEQ ID NO: 1668542 - DNA, 15 bp, Homo sapiens
gcccaggattgtcta

SEQ ID NO: 1668543 - DNA, 15 bp, Homo sapiens
cccaggattgtctat

SEQ ID NO: 1668544 - DNA, 15 bp, Homo sapiens
ccaggattgtctatc

SEQ ID NO: 1668545 - DNA, 15 bp, Homo sapiens
caggattgtctatct

SEQ ID NO: 1668546 - DNA, 15 bp, Homo sapiens
aggattgtctatcta

SEQ ID NO: 1668547 - DNA, 15 bp, Homo sapiens
ggattgtctatctaa

SEQ ID NO: 1668548 - DNA, 15 bp, Homo sapiens
gattgtctatctaac

SEQ ID NO: 1668549 - DNA, 15 bp, Homo sapiens
attgtctatctaacc

SEQ ID NO: 1668550 - DNA, 15 bp, Homo sapiens
ttgtctatctaaccc

SEQ ID NO: 1668551 - DNA, 15 bp, Homo sapiens
tgtctatctaacccc

SEQ ID NO: 1668552 - DNA, 15 bp, Homo sapiens
gtctatctaaccccc

SEQ ID NO: 1668553 - DNA, 15 bp, Homo sapiens
tctatctaaccccct

SEQ ID NO: 1668554 - DNA, 15 bp, Homo sapiens
ctatctaaccccctt

SEQ ID NO: 1668555 - DNA, 15 bp, Homo sapiens
tatctaaccccctta

SEQ ID NO: 1668556 - DNA, 15 bp, Homo sapiens
atctaacccccttac

SEQ ID NO: 1668557 - DNA, 15 bp, Homo sapiens
tctaacccccttact

SEQ ID NO: 1668558 - DNA, 15 bp, Homo sapiens
ctaacccccttacta

SEQ ID NO: 1668559 - DNA, 15 bp, Homo sapiens
taacccccttactac

SEQ ID NO: 1668560 - DNA, 15 bp, Homo sapiens
aacccccttactact

SEQ ID NO: 1668561 - DNA, 15 bp, Homo sapiens
acccccttactactc

SEQ ID NO: 1668562 - DNA, 15 bp, Homo sapiens
cccccttactactct

SEQ ID NO: 1668563 - DNA, 15 bp, Homo sapiens
ccccttactactcta

SEQ ID NO: 1668564 - DNA, 15 bp, Homo sapiens
cccttactactctaa

SEQ ID NO: 1668565 - DNA, 15 bp, Homo sapiens
ccttactactctaac

SEQ ID NO: 1668566 - DNA, 15 bp, Homo sapiens
cttactactctaact

SEQ ID NO: 1668567 - DNA, 15 bp, Homo sapiens
ttactactctaactt

SEQ ID NO: 1668568 - DNA, 15 bp, Homo sapiens
tactactctaacttt

SEQ ID NO: 1668569 - DNA, 15 bp, Homo sapiens
actactctaactttc

SEQ ID NO: 1668570 - DNA, 15 bp, Homo sapiens
ctactctaactttca

SEQ ID NO: 1668571 - DNA, 15 bp, Homo sapiens
tactctaactttcag

SEQ ID NO: 1668572 - DNA, 15 bp, Homo sapiens
actctaactttcagg

SEQ ID NO: 1668573 - DNA, 15 bp, Homo sapiens
ctctaactttcaggg

SEQ ID NO: 1668574 - DNA, 15 bp, Homo sapiens
tctaactttcaggga

SEQ ID NO: 1668575 - DNA, 15 bp, Homo sapiens
ctaactttcagggaa

SEQ ID NO: 1668576 - DNA, 15 bp, Homo sapiens
taactttcagggaat

SEQ ID NO: 1668577 - DNA, 15 bp, Homo sapiens
aactttcagggaatc

SEQ ID NO: 1668578 - DNA, 15 bp, Homo sapiens
actttcagggaatcc

SEQ ID NO: 1668579 - DNA, 15 bp, Homo sapiens
ctttcagggaatcca

SEQ ID NO: 1668580 - DNA, 15 bp, Homo sapiens
tttcagggaatccac

SEQ ID NO: 1668581 - DNA, 15 bp, Homo sapiens
ttcagggaatccaca

SEQ ID NO: 1668582 - DNA, 15 bp, Homo sapiens
tcagggaatccacat

SEQ ID NO: 1668583 - DNA, 15 bp, Homo sapiens
cagggaatccacatg

SEQ ID NO: 1668584 - DNA, 15 bp, Homo sapiens
agggaatccacatga

SEQ ID NO: 1668585 - DNA, 15 bp, Homo sapiens
gggaatccacatgaa

SEQ ID NO: 1668586 - DNA, 15 bp, Homo sapiens
ggaatccacatgaat

SEQ ID NO: 1668587 - DNA, 15 bp, Homo sapiens
gaatccacatgaatg

SEQ ID NO: 1668588 - DNA, 15 bp, Homo sapiens
aatccacatgaatgt

SEQ ID NO: 1668589 - DNA, 15 bp, Homo sapiens
atccacatgaatgtg

SEQ ID NO: 1668590 - DNA, 15 bp, Homo sapiens
tccacatgaatgtgc

SEQ ID NO: 1668591 - DNA, 15 bp, Homo sapiens
ccacatgaatgtgct

SEQ ID NO: 1668592 - DNA, 15 bp, Homo sapiens
cacatgaatgtgctg

SEQ ID NO: 1668593 - DNA, 15 bp, Homo sapiens
acatgaatgtgctgg

SEQ ID NO: 1668594 - DNA, 15 bp, Homo sapiens
catgaatgtgctggg

SEQ ID NO: 1668595 - DNA, 15 bp, Homo sapiens
atgaatgtgctgggt

SEQ ID NO: 1668596 - DNA, 15 bp, Homo sapiens
tgaatgtgctgggtc

SEQ ID NO: 1668597 - DNA, 15 bp, Homo sapiens
gaatgtgctgggtca

SEQ ID NO: 1668598 - DNA, 15 bp, Homo sapiens
aatgtgctgggtcaa

SEQ ID NO: 1668599 - DNA, 15 bp, Homo sapiens
atgtgctgggtcaac

SEQ ID NO: 1668600 - DNA, 15 bp, Homo sapiens
tgtgctgggtcaacc

SEQ ID NO: 1668601 - DNA, 15 bp, Homo sapiens
gtgctgggtcaacca

SEQ ID NO: 1668602 - DNA, 15 bp, Homo sapiens
tgctgggtcaaccat

SEQ ID NO: 1668603 - DNA, 15 bp, Homo sapiens
gctgggtcaaccatc

SEQ ID NO: 1668604 - DNA, 15 bp, Homo sapiens
ctgggtcaaccatca

SEQ ID NO: 1668605 - DNA, 15 bp, Homo sapiens
tgggtcaaccatcaa

SEQ ID NO: 1668606 - DNA, 15 bp, Homo sapiens
gggtcaaccatcaaa

SEQ ID NO: 1668607 - DNA, 15 bp, Homo sapiens
ggtcaaccatcaaag

SEQ ID NO: 1668608 - DNA, 15 bp, Homo sapiens
gtcaaccatcaaagt

SEQ ID NO: 1668609 - DNA, 15 bp, Homo sapiens
tcaaccatcaaagtt

SEQ ID NO: 1668610 - DNA, 15 bp, Homo sapiens
caaccatcaaagttg

SEQ ID NO: 1668611 - DNA, 15 bp, Homo sapiens
aaccatcaaagttga

SEQ ID NO: 1668612 - DNA, 15 bp, Homo sapiens
accatcaaagttgaa

SEQ ID NO: 1668613 - DNA, 15 bp, Homo sapiens
ccatcaaagttgaaa

SEQ ID NO: 1668614 - DNA, 15 bp, Homo sapiens
catcaaagttgaaat

SEQ ID NO: 1668615 - DNA, 15 bp, Homo sapiens
atcaaagttgaaatg

SEQ ID NO: 1668616 - DNA, 15 bp, Homo sapiens
tcaaagttgaaatgg

SEQ ID NO: 1668617 - DNA, 15 bp, Homo sapiens
caaagttgaaatgga

SEQ ID NO: 1668618 - DNA, 15 bp, Homo sapiens
aaagttgaaatggat

SEQ ID NO: 1668619 - DNA, 15 bp, Homo sapiens
aagttgaaatggata

SEQ ID NO: 1668620 - DNA, 15 bp, Homo sapiens
agttgaaatggataa

SEQ ID NO: 1668621 - DNA, 15 bp, Homo sapiens
gttgaaatggataaa

SEQ ID NO: 1668622 - DNA, 15 bp, Homo sapiens
ttgaaatggataaag

SEQ ID NO: 1668623 - DNA, 15 bp, Homo sapiens
tgaaatggataaagg

SEQ ID NO: 1668624 - DNA, 15 bp, Homo sapiens
gaaatggataaaggg

SEQ ID NO: 1668625 - DNA, 15 bp, Homo sapiens
aaatggataaagggg

SEQ ID NO: 1668626 - DNA, 15 bp, Homo sapiens
aatggataaaggggg

SEQ ID NO: 1668627 - DNA, 15 bp, Homo sapiens
atggataaagggggc

SEQ ID NO: 1668628 - DNA, 15 bp, Homo sapiens
tggataaagggggct

SEQ ID NO: 1668629 - DNA, 15 bp, Homo sapiens
ggataaagggggctg

SEQ ID NO: 1668630 - DNA, 15 bp, Homo sapiens
gataaagggggctgg

SEQ ID NO: 1668631 - DNA, 15 bp, Homo sapiens
ataaagggggctgga

SEQ ID NO: 1668632 - DNA, 15 bp, Homo sapiens
taaagggggctggat

SEQ ID NO: 1668633 - DNA, 15 bp, Homo sapiens
aaagggggctggatg

SEQ ID NO: 1668634 - DNA, 15 bp, Homo sapiens
aagggggctggatgc

SEQ ID NO: 1668635 - DNA, 15 bp, Homo sapiens
agggggctggatgcg

SEQ ID NO: 1668636 - DNA, 15 bp, Homo sapiens
gggggctggatgcgg

SEQ ID NO: 1668637 - DNA, 15 bp, Homo sapiens
ggggctggatgcggt

SEQ ID NO: 1668638 - DNA, 15 bp, Homo sapiens
gggctggatgcggtg

SEQ ID NO: 1668639 - DNA, 15 bp, Homo sapiens
ggctggatgcggtgg

SEQ ID NO: 1668640 - DNA, 15 bp, Homo sapiens
gctggatgcggtggc

SEQ ID NO: 1668641 - DNA, 15 bp, Homo sapiens
ctggatgcggtggct

SEQ ID NO: 1668642 - DNA, 15 bp, Homo sapiens
tggatgcggtggctg

SEQ ID NO: 1668643 - DNA, 15 bp, Homo sapiens
ggatgcggtggctga

SEQ ID NO: 1668644 - DNA, 15 bp, Homo sapiens
gatgcggtggctgat

SEQ ID NO: 1668645 - DNA, 15 bp, Homo sapiens
atgcggtggctgatg

SEQ ID NO: 1668646 - DNA, 15 bp, Homo sapiens
gatgcctgtaatcct

SEQ ID NO: 1668647 - DNA, 15 bp, Homo sapiens
atgcctgtaatccta

SEQ ID NO: 1668648 - DNA, 15 bp, Homo sapiens
ttgggaggccgagat

SEQ ID NO: 1668649 - DNA, 15 bp, Homo sapiens
tgggaggccgagatg

SEQ ID NO: 1668650 - DNA, 15 bp, Homo sapiens
gggaggccgagatgg

SEQ ID NO: 1668651 - DNA, 15 bp, Homo sapiens
ggaggccgagatggg

SEQ ID NO: 1668652 - DNA, 15 bp, Homo sapiens
gaggccgagatgggt

SEQ ID NO: 1668653 - DNA, 15 bp, Homo sapiens
aggccgagatgggtg

SEQ ID NO: 1668654 - DNA, 15 bp, Homo sapiens
ggccgagatgggtgg

SEQ ID NO: 1668655 - DNA, 15 bp, Homo sapiens
gccgagatgggtggg

SEQ ID NO: 1668656 - DNA, 15 bp, Homo sapiens
ccgagatgggtgggt

SEQ ID NO: 1668657 - DNA, 15 bp, Homo sapiens
cgagatgggtgggtg

SEQ ID NO: 1668658 - DNA, 15 bp, Homo sapiens
gagatgggtgggtgg

SEQ ID NO: 1668659 - DNA, 15 bp, Homo sapiens
agatgggtgggtgga

SEQ ID NO: 1668660 - DNA, 15 bp, Homo sapiens
gatgggtgggtggat

SEQ ID NO: 1668661 - DNA, 15 bp, Homo sapiens
atgggtgggtggatt

SEQ ID NO: 1668662 - DNA, 15 bp, Homo sapiens
tgggtgggtggattg

SEQ ID NO: 1668663 - DNA, 15 bp, Homo sapiens
gggtgggtggattgc

SEQ ID NO: 1668664 - DNA, 15 bp, Homo sapiens
attgcttgagcccaa

SEQ ID NO: 1668665 - DNA, 15 bp, Homo sapiens
ttgcttgagcccaag

SEQ ID NO: 1668666 - DNA, 15 bp, Homo sapiens
tgcttgagcccaaga

SEQ ID NO: 1668667 - DNA, 15 bp, Homo sapiens
gcttgagcccaagag

SEQ ID NO: 1668668 - DNA, 15 bp, Homo sapiens
cccaagagtttgaga

SEQ ID NO: 1668669 - DNA, 15 bp, Homo sapiens
ccaagagtttgagac

SEQ ID NO: 1668670 - DNA, 15 bp, Homo sapiens
caagagtttgagacc

SEQ ID NO: 1668671 - DNA, 15 bp, Homo sapiens
aagagtttgagacca

SEQ ID NO: 1668672 - DNA, 15 bp, Homo sapiens
caacatagtgagaca

SEQ ID NO: 1668673 - DNA, 15 bp, Homo sapiens
aacatagtgagacac

SEQ ID NO: 1668674 - DNA, 15 bp, Homo sapiens
acatagtgagacacc

SEQ ID NO: 1668675 - DNA, 15 bp, Homo sapiens
catagtgagacacct

SEQ ID NO: 1668676 - DNA, 15 bp, Homo sapiens
atagtgagacacctg

SEQ ID NO: 1668677 - DNA, 15 bp, Homo sapiens
tagtgagacacctgt

SEQ ID NO: 1668678 - DNA, 15 bp, Homo sapiens
agtgagacacctgtc

SEQ ID NO: 1668679 - DNA, 15 bp, Homo sapiens
gtgagacacctgtct

SEQ ID NO: 1668680 - DNA, 15 bp, Homo sapiens
tgagacacctgtctc

SEQ ID NO: 1668681 - DNA, 15 bp, Homo sapiens
gagacacctgtctct

SEQ ID NO: 1668682 - DNA, 15 bp, Homo sapiens
aaacattccaaaatc

SEQ ID NO: 1668683 - DNA, 15 bp, Homo sapiens
aacattccaaaatca

SEQ ID NO: 1668684 - DNA, 15 bp, Homo sapiens
acattccaaaatcag

SEQ ID NO: 1668685 - DNA, 15 bp, Homo sapiens
cattccaaaatcaga

SEQ ID NO: 1668686 - DNA, 15 bp, Homo sapiens
attccaaaatcagaa

SEQ ID NO: 1668687 - DNA, 15 bp, Homo sapiens
ttccaaaatcagaaa

SEQ ID NO: 1668688 - DNA, 15 bp, Homo sapiens
tccaaaatcagaaaa

SEQ ID NO: 1668689 - DNA, 15 bp, Homo sapiens
ccaaaatcagaaaaa

SEQ ID NO: 1668690 - DNA, 15 bp, Homo sapiens
caaaatcagaaaaat

SEQ ID NO: 1668691 - DNA, 15 bp, Homo sapiens
aaaatcagaaaaata

SEQ ID NO: 1668692 - DNA, 15 bp, Homo sapiens
aaatcagaaaaatat

SEQ ID NO: 1668693 - DNA, 15 bp, Homo sapiens
aatcagaaaaatatt

SEQ ID NO: 1668694 - DNA, 15 bp, Homo sapiens
atcagaaaaatattc

SEQ ID NO: 1668695 - DNA, 15 bp, Homo sapiens
tcagaaaaatattcc

SEQ ID NO: 1668696 - DNA, 15 bp, Homo sapiens
cagaaaaatattcca

SEQ ID NO: 1668697 - DNA, 15 bp, Homo sapiens
agaaaaatattccaa

SEQ ID NO: 1668698 - DNA, 15 bp, Homo sapiens
gaaaaatattccaac

SEQ ID NO: 1668699 - DNA, 15 bp, Homo sapiens
aaaaatattccaact

SEQ ID NO: 1668700 - DNA, 15 bp, Homo sapiens
aaaatattccaactc

SEQ ID NO: 1668701 - DNA, 15 bp, Homo sapiens
aaatattccaactct

SEQ ID NO: 1668702 - DNA, 15 bp, Homo sapiens
aatattccaactctg

SEQ ID NO: 1668703 - DNA, 15 bp, Homo sapiens
atattccaactctga

SEQ ID NO: 1668704 - DNA, 15 bp, Homo sapiens
tattccaactctgaa

SEQ ID NO: 1668705 - DNA, 15 bp, Homo sapiens
attccaactctgaaa

SEQ ID NO: 1668706 - DNA, 15 bp, Homo sapiens
ttccaactctgaaaa

SEQ ID NO: 1668707 - DNA, 15 bp, Homo sapiens
tccaactctgaaaat

SEQ ID NO: 1668708 - DNA, 15 bp, Homo sapiens
ccaactctgaaaata

SEQ ID NO: 1668709 - DNA, 15 bp, Homo sapiens
caactctgaaaatat

SEQ ID NO: 1668710 - DNA, 15 bp, Homo sapiens
aactctgaaaatatt

SEQ ID NO: 1668711 - DNA, 15 bp, Homo sapiens
actctgaaaatattc

SEQ ID NO: 1668712 - DNA, 15 bp, Homo sapiens
ctctgaaaatattcc

SEQ ID NO: 1668713 - DNA, 15 bp, Homo sapiens
tctgaaaatattcca

SEQ ID NO: 1668714 - DNA, 15 bp, Homo sapiens
ctgaaaatattccaa

SEQ ID NO: 1668715 - DNA, 15 bp, Homo sapiens
tgaaaatattccaaa

SEQ ID NO: 1668716 - DNA, 15 bp, Homo sapiens
gaaaatattccaaaa

SEQ ID NO: 1668717 - DNA, 15 bp, Homo sapiens
aaaatattccaaaat

SEQ ID NO: 1668718 - DNA, 15 bp, Homo sapiens
aaatattccaaaatc

SEQ ID NO: 1668719 - DNA, 15 bp, Homo sapiens
aatattccaaaatcc

SEQ ID NO: 1668720 - DNA, 15 bp, Homo sapiens
atattccaaaatcca

SEQ ID NO: 1668721 - DNA, 15 bp, Homo sapiens
tattccaaaatccaa

SEQ ID NO: 1668722 - DNA, 15 bp, Homo sapiens
attccaaaatccaaa

SEQ ID NO: 1668723 - DNA, 15 bp, Homo sapiens
ttccaaaatccaaaa

SEQ ID NO: 1668724 - DNA, 15 bp, Homo sapiens
tccaaaatccaaaaa

SEQ ID NO: 1668725 - DNA, 15 bp, Homo sapiens
ccaaaatccaaaaaa

SEQ ID NO: 1668726 - DNA, 15 bp, Homo sapiens
caaaatccaaaaaaa

SEQ ID NO: 1668727 - DNA, 15 bp, Homo sapiens
aaaatccaaaaaaat

SEQ ID NO: 1668728 - DNA, 15 bp, Homo sapiens
aaatccaaaaaaatt

SEQ ID NO: 1668729 - DNA, 15 bp, Homo sapiens
aatccaaaaaaattc

SEQ ID NO: 1668730 - DNA, 15 bp, Homo sapiens
atccaaaaaaattca

SEQ ID NO: 1668731 - DNA, 15 bp, Homo sapiens
tccaaaaaaattcaa

SEQ ID NO: 1668732 - DNA, 15 bp, Homo sapiens
ccaaaaaaattcaaa

SEQ ID NO: 1668733 - DNA, 15 bp, Homo sapiens
caaaaaaattcaaaa

SEQ ID NO: 1668734 - DNA, 15 bp, Homo sapiens
aaaaaaattcaaaat

SEQ ID NO: 1668735 - DNA, 15 bp, Homo sapiens
aaaaaattcaaaatc

SEQ ID NO: 1668736 - DNA, 15 bp, Homo sapiens
aaaaattcaaaatcc

SEQ ID NO: 1668737 - DNA, 15 bp, Homo sapiens
aaaattcaaaatcca

SEQ ID NO: 1668738 - DNA, 15 bp, Homo sapiens
aaattcaaaatccaa

SEQ ID NO: 1668739 - DNA, 15 bp, Homo sapiens
aattcaaaatccaaa

SEQ ID NO: 1668740 - DNA, 15 bp, Homo sapiens
attcaaaatccaaaa

SEQ ID NO: 1668741 - DNA, 15 bp, Homo sapiens
ttcaaaatccaaaac

SEQ ID NO: 1668742 - DNA, 15 bp, Homo sapiens
tcaaaatccaaaaca

SEQ ID NO: 1668743 - DNA, 15 bp, Homo sapiens
caaaatccaaaacac

SEQ ID NO: 1668744 - DNA, 15 bp, Homo sapiens
aaaatccaaaacact

SEQ ID NO: 1668745 - DNA, 15 bp, Homo sapiens
aaatccaaaacactt

SEQ ID NO: 1668746 - DNA, 15 bp, Homo sapiens
aatccaaaacacttc

SEQ ID NO: 1668747 - DNA, 15 bp, Homo sapiens
atccaaaacacttct

SEQ ID NO: 1668748 - DNA, 15 bp, Homo sapiens
tccaaaacacttctg

SEQ ID NO: 1668749 - DNA, 15 bp, Homo sapiens
ccaaaacacttctgg

SEQ ID NO: 1668750 - DNA, 15 bp, Homo sapiens
caaaacacttctggt

SEQ ID NO: 1668751 - DNA, 15 bp, Homo sapiens
aaaacacttctggtc

SEQ ID NO: 1668752 - DNA, 15 bp, Homo sapiens
aaacacttctggtcc

SEQ ID NO: 1668753 - DNA, 15 bp, Homo sapiens
aacacttctggtccc

SEQ ID NO: 1668754 - DNA, 15 bp, Homo sapiens
acacttctggtccca

SEQ ID NO: 1668755 - DNA, 15 bp, Homo sapiens
cacttctggtcccaa

SEQ ID NO: 1668756 - DNA, 15 bp, Homo sapiens
acttctggtcccaag

SEQ ID NO: 1668757 - DNA, 15 bp, Homo sapiens
cttctggtcccaagc

SEQ ID NO: 1668758 - DNA, 15 bp, Homo sapiens
ttctggtcccaagca

SEQ ID NO: 1668759 - DNA, 15 bp, Homo sapiens
tctggtcccaagcat

SEQ ID NO: 1668760 - DNA, 15 bp, Homo sapiens
ctggtcccaagcatt

SEQ ID NO: 1668761 - DNA, 15 bp, Homo sapiens
tggtcccaagcattt

SEQ ID NO: 1668762 - DNA, 15 bp, Homo sapiens
ggtcccaagcatttt

SEQ ID NO: 1668763 - DNA, 15 bp, Homo sapiens
gtcccaagcatttta

SEQ ID NO: 1668764 - DNA, 15 bp, Homo sapiens
tcccaagcattttag

SEQ ID NO: 1668765 - DNA, 15 bp, Homo sapiens
cccaagcattttaga

SEQ ID NO: 1668766 - DNA, 15 bp, Homo sapiens
ccaagcattttagag

SEQ ID NO: 1668767 - DNA, 15 bp, Homo sapiens
caagcattttagaga

SEQ ID NO: 1668768 - DNA, 15 bp, Homo sapiens
aagcattttagagaa

SEQ ID NO: 1668769 - DNA, 15 bp, Homo sapiens
agcattttagagaag

SEQ ID NO: 1668770 - DNA, 15 bp, Homo sapiens
gcattttagagaagg

SEQ ID NO: 1668771 - DNA, 15 bp, Homo sapiens
cattttagagaaggg

SEQ ID NO: 1668772 - DNA, 15 bp, Homo sapiens
attttagagaaggga

SEQ ID NO: 1668773 - DNA, 15 bp, Homo sapiens
ttttagagaagggat

SEQ ID NO: 1668774 - DNA, 15 bp, Homo sapiens
tttagagaagggata

SEQ ID NO: 1668775 - DNA, 15 bp, Homo sapiens
ttagagaagggatac

SEQ ID NO: 1668776 - DNA, 15 bp, Homo sapiens
tagagaagggatact

SEQ ID NO: 1668777 - DNA, 15 bp, Homo sapiens
agagaagggatactc

SEQ ID NO: 1668778 - DNA, 15 bp, Homo sapiens
gagaagggatactca

SEQ ID NO: 1668779 - DNA, 15 bp, Homo sapiens
agaagggatactcaa

SEQ ID NO: 1668780 - DNA, 15 bp, Homo sapiens
gaagggatactcaac

SEQ ID NO: 1668781 - DNA, 15 bp, Homo sapiens
aagggatactcaacc

SEQ ID NO: 1668782 - DNA, 15 bp, Homo sapiens
agggatactcaaccc

SEQ ID NO: 1668783 - DNA, 15 bp, Homo sapiens
gggatactcaaccca

SEQ ID NO: 1668784 - DNA, 15 bp, Homo sapiens
ggatactcaacccaa

SEQ ID NO: 1668785 - DNA, 15 bp, Homo sapiens
gatactcaacccaaa

SEQ ID NO: 1668786 - DNA, 15 bp, Homo sapiens
atactcaacccaaaa

SEQ ID NO: 1668787 - DNA, 15 bp, Homo sapiens
tactcaacccaaaat

SEQ ID NO: 1668788 - DNA, 15 bp, Homo sapiens
actcaacccaaaata

SEQ ID NO: 1668789 - DNA, 15 bp, Homo sapiens
ctcaacccaaaataa

SEQ ID NO: 1668790 - DNA, 15 bp, Homo sapiens
tcaacccaaaataag

SEQ ID NO: 1668791 - DNA, 15 bp, Homo sapiens
caacccaaaataagg

SEQ ID NO: 1668792 - DNA, 15 bp, Homo sapiens
aacccaaaataagga

SEQ ID NO: 1668793 - DNA, 15 bp, Homo sapiens
acccaaaataaggac

SEQ ID NO: 1668794 - DNA, 15 bp, Homo sapiens
cccaaaataaggaca

SEQ ID NO: 1668795 - DNA, 15 bp, Homo sapiens
ccaaaataaggacag

SEQ ID NO: 1668796 - DNA, 15 bp, Homo sapiens
caaaataaggacagc

SEQ ID NO: 1668797 - DNA, 15 bp, Homo sapiens
aaaataaggacagca

SEQ ID NO: 1668798 - DNA, 15 bp, Homo sapiens
aaataaggacagcaa

SEQ ID NO: 1668799 - DNA, 15 bp, Homo sapiens
aataaggacagcaat

SEQ ID NO: 1668800 - DNA, 15 bp, Homo sapiens
ataaggacagcaatt

SEQ ID NO: 1668801 - DNA, 15 bp, Homo sapiens
taaggacagcaattc

SEQ ID NO: 1668802 - DNA, 15 bp, Homo sapiens
aaggacagcaattct

SEQ ID NO: 1668803 - DNA, 15 bp, Homo sapiens
aggacagcaattcta

SEQ ID NO: 1668804 - DNA, 15 bp, Homo sapiens
ggacagcaattctat

SEQ ID NO: 1668805 - DNA, 15 bp, Homo sapiens
gacagcaattctata

SEQ ID NO: 1668806 - DNA, 15 bp, Homo sapiens
acagcaattctataa

SEQ ID NO: 1668807 - DNA, 15 bp, Homo sapiens
cagcaattctataaa

SEQ ID NO: 1668808 - DNA, 15 bp, Homo sapiens
agcaattctataaat

SEQ ID NO: 1668809 - DNA, 15 bp, Homo sapiens
gcaattctataaatt

SEQ ID NO: 1668810 - DNA, 15 bp, Homo sapiens
caattctataaattg

SEQ ID NO: 1668811 - DNA, 15 bp, Homo sapiens
aattctataaattgt

SEQ ID NO: 1668812 - DNA, 15 bp, Homo sapiens
attctataaattgtg

SEQ ID NO: 1668813 - DNA, 15 bp, Homo sapiens
ttctataaattgtgc

SEQ ID NO: 1668814 - DNA, 15 bp, Homo sapiens
tctataaattgtgct

SEQ ID NO: 1668815 - DNA, 15 bp, Homo sapiens
ctataaattgtgcta

SEQ ID NO: 1668816 - DNA, 15 bp, Homo sapiens
tataaattgtgctac

SEQ ID NO: 1668817 - DNA, 15 bp, Homo sapiens
ataaattgtgctacc

SEQ ID NO: 1668818 - DNA, 15 bp, Homo sapiens
taaattgtgctacca

SEQ ID NO: 1668819 - DNA, 15 bp, Homo sapiens
aaattgtgctaccat

SEQ ID NO: 1668820 - DNA, 15 bp, Homo sapiens
aattgtgctaccatc

SEQ ID NO: 1668821 - DNA, 15 bp, Homo sapiens
attgtgctaccatct

SEQ ID NO: 1668822 - DNA, 15 bp, Homo sapiens
ttgtgctaccatctt

SEQ ID NO: 1668823 - DNA, 15 bp, Homo sapiens
tgtgctaccatcttg

SEQ ID NO: 1668824 - DNA, 15 bp, Homo sapiens
gtgctaccatcttgc

SEQ ID NO: 1668825 - DNA, 15 bp, Homo sapiens
tgctaccatcttgca

SEQ ID NO: 1668826 - DNA, 15 bp, Homo sapiens
gctaccatcttgcag

SEQ ID NO: 1668827 - DNA, 15 bp, Homo sapiens
ctaccatcttgcagg

SEQ ID NO: 1668828 - DNA, 15 bp, Homo sapiens
taccatcttgcaggt

SEQ ID NO: 1668829 - DNA, 15 bp, Homo sapiens
accatcttgcaggtc

SEQ ID NO: 1668830 - DNA, 15 bp, Homo sapiens
ccatcttgcaggtct

SEQ ID NO: 1668831 - DNA, 15 bp, Homo sapiens
catcttgcaggtctc

SEQ ID NO: 1668832 - DNA, 15 bp, Homo sapiens
atcttgcaggtctca

SEQ ID NO: 1668833 - DNA, 15 bp, Homo sapiens
tcttgcaggtctcag

SEQ ID NO: 1668834 - DNA, 15 bp, Homo sapiens
cttgcaggtctcagt

SEQ ID NO: 1668835 - DNA, 15 bp, Homo sapiens
ttgcaggtctcagtt

SEQ ID NO: 1668836 - DNA, 15 bp, Homo sapiens
tgcaggtctcagttt

SEQ ID NO: 1668837 - DNA, 15 bp, Homo sapiens
gcaggtctcagttta

SEQ ID NO: 1668838 - DNA, 15 bp, Homo sapiens
caggtctcagtttaa

SEQ ID NO: 1668839 - DNA, 15 bp, Homo sapiens
ggtctcagtttaaca

SEQ ID NO: 1668840 - DNA, 15 bp, Homo sapiens
gtctcagtttaacag

SEQ ID NO: 1668841 - DNA, 15 bp, Homo sapiens
tctcagtttaacagc

SEQ ID NO: 1668842 - DNA, 15 bp, Homo sapiens
ctcagtttaacagct

SEQ ID NO: 1668843 - DNA, 15 bp, Homo sapiens
tcagtttaacagctt

SEQ ID NO: 1668844 - DNA, 15 bp, Homo sapiens
cagtttaacagcttt

SEQ ID NO: 1668845 - DNA, 15 bp, Homo sapiens
agtttaacagcttta

SEQ ID NO: 1668846 - DNA, 15 bp, Homo sapiens
gtttaacagctttac

SEQ ID NO: 1668847 - DNA, 15 bp, Homo sapiens
tttaacagctttaca

SEQ ID NO: 1668848 - DNA, 15 bp, Homo sapiens
ttaacagctttacac

SEQ ID NO: 1668849 - DNA, 15 bp, Homo sapiens
taacagctttacacc

SEQ ID NO: 1668850 - DNA, 15 bp, Homo sapiens
aacagctttacacct

SEQ ID NO: 1668851 - DNA, 15 bp, Homo sapiens
acagctttacaccta

SEQ ID NO: 1668852 - DNA, 15 bp, Homo sapiens
cagctttacacctat

SEQ ID NO: 1668853 - DNA, 15 bp, Homo sapiens
agctttacacctatt

SEQ ID NO: 1668854 - DNA, 15 bp, Homo sapiens
gctttacacctatta

SEQ ID NO: 1668855 - DNA, 15 bp, Homo sapiens
ctttacacctattag

SEQ ID NO: 1668856 - DNA, 15 bp, Homo sapiens
tttacacctattagc

SEQ ID NO: 1668857 - DNA, 15 bp, Homo sapiens
ttacacctattagcg

SEQ ID NO: 1668858 - DNA, 15 bp, Homo sapiens
tacacctattagcgc

SEQ ID NO: 1668859 - DNA, 15 bp, Homo sapiens
acacctattagcgca

SEQ ID NO: 1668860 - DNA, 15 bp, Homo sapiens
cacctattagcgcac

SEQ ID NO: 1668861 - DNA, 15 bp, Homo sapiens
acctattagcgcacc

SEQ ID NO: 1668862 - DNA, 15 bp, Homo sapiens
cctattagcgcacca

SEQ ID NO: 1668863 - DNA, 15 bp, Homo sapiens
ctattagcgcaccag

SEQ ID NO: 1668864 - DNA, 15 bp, Homo sapiens
tattagcgcaccagt

SEQ ID NO: 1668865 - DNA, 15 bp, Homo sapiens
attagcgcaccagtg

SEQ ID NO: 1668866 - DNA, 15 bp, Homo sapiens
ttagcgcaccagtgc

SEQ ID NO: 1668867 - DNA, 15 bp, Homo sapiens
tagcgcaccagtgct

SEQ ID NO: 1668868 - DNA, 15 bp, Homo sapiens
agcgcaccagtgctc

SEQ ID NO: 1668869 - DNA, 15 bp, Homo sapiens
gcgcaccagtgctca

SEQ ID NO: 1668870 - DNA, 15 bp, Homo sapiens
cgcaccagtgctcat

SEQ ID NO: 1668871 - DNA, 15 bp, Homo sapiens
gcaccagtgctcata

SEQ ID NO: 1668872 - DNA, 15 bp, Homo sapiens
caccagtgctcatag

SEQ ID NO: 1668873 - DNA, 15 bp, Homo sapiens
accagtgctcatagc

SEQ ID NO: 1668874 - DNA, 15 bp, Homo sapiens
ccagtgctcatagca

SEQ ID NO: 1668875 - DNA, 15 bp, Homo sapiens
cagtgctcatagcag

SEQ ID NO: 1668876 - DNA, 15 bp, Homo sapiens
agtgctcatagcagt

SEQ ID NO: 1668877 - DNA, 15 bp, Homo sapiens
gtgctcatagcagtg

SEQ ID NO: 1668878 - DNA, 15 bp, Homo sapiens
tgctcatagcagtgc

SEQ ID NO: 1668879 - DNA, 15 bp, Homo sapiens
gctcatagcagtgct

SEQ ID NO: 1668880 - DNA, 15 bp, Homo sapiens
ctcatagcagtgctg

SEQ ID NO: 1668881 - DNA, 15 bp, Homo sapiens
tcatagcagtgctgg

SEQ ID NO: 1668882 - DNA, 15 bp, Homo sapiens
catagcagtgctggg

SEQ ID NO: 1668883 - DNA, 15 bp, Homo sapiens
atagcagtgctggga

SEQ ID NO: 1668884 - DNA, 15 bp, Homo sapiens
tagcagtgctgggaa

SEQ ID NO: 1668885 - DNA, 15 bp, Homo sapiens
agcagtgctgggaaa

SEQ ID NO: 1668886 - DNA, 15 bp, Homo sapiens
gcagtgctgggaaat

SEQ ID NO: 1668887 - DNA, 15 bp, Homo sapiens
cagtgctgggaaatg

SEQ ID NO: 1668888 - DNA, 15 bp, Homo sapiens
agtgctgggaaatgt

SEQ ID NO: 1668889 - DNA, 15 bp, Homo sapiens
gtgctgggaaatgtg

SEQ ID NO: 1668890 - DNA, 15 bp, Homo sapiens
tgctgggaaatgtgt

SEQ ID NO: 1668891 - DNA, 15 bp, Homo sapiens
gctgggaaatgtgta

SEQ ID NO: 1668892 - DNA, 15 bp, Homo sapiens
ctgggaaatgtgtac

SEQ ID NO: 1668893 - DNA, 15 bp, Homo sapiens
tgggaaatgtgtaca

SEQ ID NO: 1668894 - DNA, 15 bp, Homo sapiens
gggaaatgtgtacag

SEQ ID NO: 1668895 - DNA, 15 bp, Homo sapiens
ggaaatgtgtacaga

SEQ ID NO: 1668896 - DNA, 15 bp, Homo sapiens
gaaatgtgtacagat

SEQ ID NO: 1668897 - DNA, 15 bp, Homo sapiens
aaatgtgtacagatg

SEQ ID NO: 1668898 - DNA, 15 bp, Homo sapiens
aatgtgtacagatga

SEQ ID NO: 1668899 - DNA, 15 bp, Homo sapiens
atgtgtacagatgag

SEQ ID NO: 1668900 - DNA, 15 bp, Homo sapiens
tgtgtacagatgagg

SEQ ID NO: 1668901 - DNA, 15 bp, Homo sapiens
gtgtacagatgagga

SEQ ID NO: 1668902 - DNA, 15 bp, Homo sapiens
tgtacagatgaggaa

SEQ ID NO: 1668903 - DNA, 15 bp, Homo sapiens
gtacagatgaggaaa

SEQ ID NO: 1668904 - DNA, 15 bp, Homo sapiens
ggaaactgaggcacc

SEQ ID NO: 1668905 - DNA, 15 bp, Homo sapiens
gaaactgaggcaccg

SEQ ID NO: 1668906 - DNA, 15 bp, Homo sapiens
aaactgaggcaccga

SEQ ID NO: 1668907 - DNA, 15 bp, Homo sapiens
aactgaggcaccgag

SEQ ID NO: 1668908 - DNA, 15 bp, Homo sapiens
actgaggcaccgaga

SEQ ID NO: 1668909 - DNA, 15 bp, Homo sapiens
ctgaggcaccgagag

SEQ ID NO: 1668910 - DNA, 15 bp, Homo sapiens
tgaggcaccgagagg

SEQ ID NO: 1668911 - DNA, 15 bp, Homo sapiens
gaggcaccgagaggg

SEQ ID NO: 1668912 - DNA, 15 bp, Homo sapiens
aggcaccgagagggc

SEQ ID NO: 1668913 - DNA, 15 bp, Homo sapiens
ggcaccgagagggca

SEQ ID NO: 1668914 - DNA, 15 bp, Homo sapiens
gcaccgagagggcag

SEQ ID NO: 1668915 - DNA, 15 bp, Homo sapiens
caccgagagggcagt

SEQ ID NO: 1668916 - DNA, 15 bp, Homo sapiens
accgagagggcagtg

SEQ ID NO: 1668917 - DNA, 15 bp, Homo sapiens
ccgagagggcagtgg

SEQ ID NO: 1668918 - DNA, 15 bp, Homo sapiens
cgagagggcagtggt

SEQ ID NO: 1668919 - DNA, 15 bp, Homo sapiens
gagagggcagtggtt

SEQ ID NO: 1668920 - DNA, 15 bp, Homo sapiens
agagggcagtggttc

SEQ ID NO: 1668921 - DNA, 15 bp, Homo sapiens
gagggcagtggttca

SEQ ID NO: 1668922 - DNA, 15 bp, Homo sapiens
agggcagtggttcag

SEQ ID NO: 1668923 - DNA, 15 bp, Homo sapiens
gggcagtggttcaga

SEQ ID NO: 1668924 - DNA, 15 bp, Homo sapiens
ggcagtggttcagag

SEQ ID NO: 1668925 - DNA, 15 bp, Homo sapiens
gcagtggttcagagt

SEQ ID NO: 1668926 - DNA, 15 bp, Homo sapiens
cagtggttcagagtc

SEQ ID NO: 1668927 - DNA, 15 bp, Homo sapiens
agtggttcagagtcc

SEQ ID NO: 1668928 - DNA, 15 bp, Homo sapiens
gtggttcagagtcca

SEQ ID NO: 1668929 - DNA, 15 bp, Homo sapiens
tggttcagagtccat

SEQ ID NO: 1668930 - DNA, 15 bp, Homo sapiens
ggttcagagtccatg

SEQ ID NO: 1668931 - DNA, 15 bp, Homo sapiens
gttcagagtccatgg

SEQ ID NO: 1668932 - DNA, 15 bp, Homo sapiens
ttcagagtccatggc

SEQ ID NO: 1668933 - DNA, 15 bp, Homo sapiens
tcagagtccatggcc

SEQ ID NO: 1668934 - DNA, 15 bp, Homo sapiens
cagagtccatggccc

SEQ ID NO: 1668935 - DNA, 15 bp, Homo sapiens
agagtccatggcccc

SEQ ID NO: 1668936 - DNA, 15 bp, Homo sapiens
gagtccatggcccct

SEQ ID NO: 1668937 - DNA, 15 bp, Homo sapiens
agtccatggcccctg

SEQ ID NO: 1668938 - DNA, 15 bp, Homo sapiens
gtccatggcccctga

SEQ ID NO: 1668939 - DNA, 15 bp, Homo sapiens
tccatggcccctgac

SEQ ID NO: 1668940 - DNA, 15 bp, Homo sapiens
ccatggcccctgact

SEQ ID NO: 1668941 - DNA, 15 bp, Homo sapiens
catggcccctgactg

SEQ ID NO: 1668942 - DNA, 15 bp, Homo sapiens
atggcccctgactgc

SEQ ID NO: 1668943 - DNA, 15 bp, Homo sapiens
tggcccctgactgct

SEQ ID NO: 1668944 - DNA, 15 bp, Homo sapiens
ggcccctgactgctc

SEQ ID NO: 1668945 - DNA, 15 bp, Homo sapiens
gcccctgactgctcc

SEQ ID NO: 1668946 - DNA, 15 bp, Homo sapiens
cccctgactgctccc

SEQ ID NO: 1668947 - DNA, 15 bp, Homo sapiens
ccctgactgctcccc

SEQ ID NO: 1668948 - DNA, 15 bp, Homo sapiens
cctgactgctcccca

SEQ ID NO: 1668949 - DNA, 15 bp, Homo sapiens
ctgactgctccccag

SEQ ID NO: 1668950 - DNA, 15 bp, Homo sapiens
tgactgctccccagc

SEQ ID NO: 1668951 - DNA, 15 bp, Homo sapiens
gactgctccccagcc

SEQ ID NO: 1668952 - DNA, 15 bp, Homo sapiens
actgctccccagccc

SEQ ID NO: 1668953 - DNA, 15 bp, Homo sapiens
ctgctccccagcccg

SEQ ID NO: 1668954 - DNA, 15 bp, Homo sapiens
tgctccccagcccgc

SEQ ID NO: 1668955 - DNA, 15 bp, Homo sapiens
gctccccagcccgcc

SEQ ID NO: 1668956 - DNA, 15 bp, Homo sapiens
ctccccagcccgcct

SEQ ID NO: 1668957 - DNA, 15 bp, Homo sapiens
tccccagcccgcctt

SEQ ID NO: 1668958 - DNA, 15 bp, Homo sapiens
ccccagcccgccttt

SEQ ID NO: 1668959 - DNA, 15 bp, Homo sapiens
cccagcccgcctttc

SEQ ID NO: 1668960 - DNA, 15 bp, Homo sapiens
ccagcccgcctttcc

SEQ ID NO: 1668961 - DNA, 15 bp, Homo sapiens
cagcccgcctttcca

SEQ ID NO: 1668962 - DNA, 15 bp, Homo sapiens
agcccgcctttccag

SEQ ID NO: 1668963 - DNA, 15 bp, Homo sapiens
gcccgcctttccagg

SEQ ID NO: 1668964 - DNA, 15 bp, Homo sapiens
cccgcctttccaggg

SEQ ID NO: 1668965 - DNA, 15 bp, Homo sapiens
ccgcctttccagggg

SEQ ID NO: 1668966 - DNA, 15 bp, Homo sapiens
cgcctttccaggggc

SEQ ID NO: 1668967 - DNA, 15 bp, Homo sapiens
gcctttccaggggcc

SEQ ID NO: 1668968 - DNA, 15 bp, Homo sapiens
cctttccaggggcct

SEQ ID NO: 1668969 - DNA, 15 bp, Homo sapiens
ctttccaggggcctg

SEQ ID NO: 1668970 - DNA, 15 bp, Homo sapiens
tttccaggggcctgg

SEQ ID NO: 1668971 - DNA, 15 bp, Homo sapiens
ttccaggggcctggc

SEQ ID NO: 1668972 - DNA, 15 bp, Homo sapiens
tccaggggcctggcc

SEQ ID NO: 1668973 - DNA, 15 bp, Homo sapiens
caggggcctggcctc

SEQ ID NO: 1668974 - DNA, 15 bp, Homo sapiens
aggggcctggcctca

SEQ ID NO: 1668975 - DNA, 15 bp, Homo sapiens
ggggcctggcctcac

SEQ ID NO: 1668976 - DNA, 15 bp, Homo sapiens
gggcctggcctcact

SEQ ID NO: 1668977 - DNA, 15 bp, Homo sapiens
ggcctggcctcactg

SEQ ID NO: 1668978 - DNA, 15 bp, Homo sapiens
gcctggcctcactgc

SEQ ID NO: 1668979 - DNA, 15 bp, Homo sapiens
cctggcctcactgcg

SEQ ID NO: 1668980 - DNA, 15 bp, Homo sapiens
ctggcctcactgcgg

SEQ ID NO: 1668981 - DNA, 15 bp, Homo sapiens
tggcctcactgcggc

SEQ ID NO: 1668982 - DNA, 15 bp, Homo sapiens
ggcctcactgcggca

SEQ ID NO: 1668983 - DNA, 15 bp, Homo sapiens
gcctcactgcggcag

SEQ ID NO: 1668984 - DNA, 15 bp, Homo sapiens
cctcactgcggcagc

SEQ ID NO: 1668985 - DNA, 15 bp, Homo sapiens
ctcactgcggcagcg

SEQ ID NO: 1668986 - DNA, 15 bp, Homo sapiens
tcactgcggcagcgt

SEQ ID NO: 1668987 - DNA, 15 bp, Homo sapiens
cactgcggcagcgtc

SEQ ID NO: 1668988 - DNA, 15 bp, Homo sapiens
actgcggcagcgtcc

SEQ ID NO: 1668989 - DNA, 15 bp, Homo sapiens
ctgcggcagcgtccc

SEQ ID NO: 1668990 - DNA, 15 bp, Homo sapiens
tgcggcagcgtcccc

SEQ ID NO: 1668991 - DNA, 15 bp, Homo sapiens
gcggcagcgtccccg

SEQ ID NO: 1668992 - DNA, 15 bp, Homo sapiens
cggcagcgtccccgg

SEQ ID NO: 1668993 - DNA, 15 bp, Homo sapiens
ggcagcgtccccggc

SEQ ID NO: 1668994 - DNA, 15 bp, Homo sapiens
gcagcgtccccggct

SEQ ID NO: 1668995 - DNA, 15 bp, Homo sapiens
cagcgtccccggcta

SEQ ID NO: 1668996 - DNA, 15 bp, Homo sapiens
agcgtccccggctat

SEQ ID NO: 1668997 - DNA, 15 bp, Homo sapiens
gcgtccccggctata

SEQ ID NO: 1668998 - DNA, 15 bp, Homo sapiens
cgtccccggctatag

SEQ ID NO: 1668999 - DNA, 15 bp, Homo sapiens
gtccccggctataga

SEQ ID NO: 1669000 - DNA, 15 bp, Homo sapiens
tccccggctatagaa

SEQ ID NO: 1669001 - DNA, 15 bp, Homo sapiens
ccccggctatagaat

SEQ ID NO: 1669002 - DNA, 15 bp, Homo sapiens
cccggctatagaatg

SEQ ID NO: 1669003 - DNA, 15 bp, Homo sapiens
ccggctatagaatgg

SEQ ID NO: 1669004 - DNA, 15 bp, Homo sapiens
cggctatagaatggg

SEQ ID NO: 1669005 - DNA, 15 bp, Homo sapiens
ggctatagaatgggc

SEQ ID NO: 1669006 - DNA, 15 bp, Homo sapiens
gctatagaatgggct

SEQ ID NO: 1669007 - DNA, 15 bp, Homo sapiens
ctatagaatgggctg

SEQ ID NO: 1669008 - DNA, 15 bp, Homo sapiens
tatagaatgggctgg

SEQ ID NO: 1669009 - DNA, 15 bp, Homo sapiens
atagaatgggctggt

SEQ ID NO: 1669010 - DNA, 15 bp, Homo sapiens
tagaatgggctggtg

SEQ ID NO: 1669011 - DNA, 15 bp, Homo sapiens
agaatgggctggtgt

SEQ ID NO: 1669012 - DNA, 15 bp, Homo sapiens
gaatgggctggtgtt

SEQ ID NO: 1669013 - DNA, 15 bp, Homo sapiens
aatgggctggtgttg

SEQ ID NO: 1669014 - DNA, 15 bp, Homo sapiens
atgggctggtgttgg

SEQ ID NO: 1669015 - DNA, 15 bp, Homo sapiens
tgggctggtgttggg

SEQ ID NO: 1669016 - DNA, 15 bp, Homo sapiens
gggctggtgttggga

SEQ ID NO: 1669017 - DNA, 15 bp, Homo sapiens
ggctggtgttgggag

SEQ ID NO: 1669018 - DNA, 15 bp, Homo sapiens
gctggtgttgggaga

SEQ ID NO: 1669019 - DNA, 15 bp, Homo sapiens
ctggtgttgggagac

SEQ ID NO: 1669020 - DNA, 15 bp, Homo sapiens
tggtgttgggagact

SEQ ID NO: 1669021 - DNA, 15 bp, Homo sapiens
ggtgttgggagactt

SEQ ID NO: 1669022 - DNA, 15 bp, Homo sapiens
gtgttgggagacttc

SEQ ID NO: 1669023 - DNA, 15 bp, Homo sapiens
tgttgggagacttca

SEQ ID NO: 1669024 - DNA, 15 bp, Homo sapiens
gttgggagacttcac

SEQ ID NO: 1669025 - DNA, 15 bp, Homo sapiens
ttgggagacttcaca

SEQ ID NO: 1669026 - DNA, 15 bp, Homo sapiens
tgggagacttcacac

SEQ ID NO: 1669027 - DNA, 15 bp, Homo sapiens
gggagacttcacacg

SEQ ID NO: 1669028 - DNA, 15 bp, Homo sapiens
ggagacttcacacgg

SEQ ID NO: 1669029 - DNA, 15 bp, Homo sapiens
gagacttcacacggt

SEQ ID NO: 1669030 - DNA, 15 bp, Homo sapiens
agacttcacacggtg

SEQ ID NO: 1669031 - DNA, 15 bp, Homo sapiens
gacttcacacggtga

SEQ ID NO: 1669032 - DNA, 15 bp, Homo sapiens
acttcacacggtgat

SEQ ID NO: 1669033 - DNA, 15 bp, Homo sapiens
cttcacacggtgatg

SEQ ID NO: 1669034 - DNA, 15 bp, Homo sapiens
ttcacacggtgatgg

SEQ ID NO: 1669035 - DNA, 15 bp, Homo sapiens
tcacacggtgatggt

SEQ ID NO: 1669036 - DNA, 15 bp, Homo sapiens
cacacggtgatggtg

SEQ ID NO: 1669037 - DNA, 15 bp, Homo sapiens
acacggtgatggtgg

SEQ ID NO: 1669038 - DNA, 15 bp, Homo sapiens
cacggtgatggtggt

SEQ ID NO: 1669039 - DNA, 15 bp, Homo sapiens
acggtgatggtggtc

SEQ ID NO: 1669040 - DNA, 15 bp, Homo sapiens
cggtgatggtggtct

SEQ ID NO: 1669041 - DNA, 15 bp, Homo sapiens
ggtgatggtggtctc

SEQ ID NO: 1669042 - DNA, 15 bp, Homo sapiens
gtgatggtggtctcg

SEQ ID NO: 1669043 - DNA, 15 bp, Homo sapiens
tgatggtggtctcgg

SEQ ID NO: 1669044 - DNA, 15 bp, Homo sapiens
gatggtggtctcggc

SEQ ID NO: 1669045 - DNA, 15 bp, Homo sapiens
atggtggtctcggcc

SEQ ID NO: 1669046 - DNA, 15 bp, Homo sapiens
tggtggtctcggccc

SEQ ID NO: 1669047 - DNA, 15 bp, Homo sapiens
ggtggtctcggccca

SEQ ID NO: 1669048 - DNA, 15 bp, Homo sapiens
gtggtctcggcccat

SEQ ID NO: 1669049 - DNA, 15 bp, Homo sapiens
tggtctcggcccatc

SEQ ID NO: 1669050 - DNA, 15 bp, Homo sapiens
ggtctcggcccatcc

SEQ ID NO: 1669051 - DNA, 15 bp, Homo sapiens
gtctcggcccatcca

SEQ ID NO: 1669052 - DNA, 15 bp, Homo sapiens
tctcggcccatccat

SEQ ID NO: 1669053 - DNA, 15 bp, Homo sapiens
ctcggcccatccatc

SEQ ID NO: 1669054 - DNA, 15 bp, Homo sapiens
tcggcccatccatcc

SEQ ID NO: 1669055 - DNA, 15 bp, Homo sapiens
cggcccatccatccc

SEQ ID NO: 1669056 - DNA, 15 bp, Homo sapiens
ggcccatccatccct

SEQ ID NO: 1669057 - DNA, 15 bp, Homo sapiens
gcccatccatccctg

SEQ ID NO: 1669058 - DNA, 15 bp, Homo sapiens
cccatccatccctgc

SEQ ID NO: 1669059 - DNA, 15 bp, Homo sapiens
ccatccatccctgca

SEQ ID NO: 1669060 - DNA, 15 bp, Homo sapiens
catccatccctgcag

SEQ ID NO: 1669061 - DNA, 15 bp, Homo sapiens
atccatccctgcagc

SEQ ID NO: 1669062 - DNA, 15 bp, Homo sapiens
tccatccctgcagcc

SEQ ID NO: 1669063 - DNA, 15 bp, Homo sapiens
ccatccctgcagccc

SEQ ID NO: 1669064 - DNA, 15 bp, Homo sapiens
catccctgcagcccc

SEQ ID NO: 1669065 - DNA, 15 bp, Homo sapiens
atccctgcagccccc

SEQ ID NO: 1669066 - DNA, 15 bp, Homo sapiens
tccctgcagccccca

SEQ ID NO: 1669067 - DNA, 15 bp, Homo sapiens
ccctgcagcccccaa

SEQ ID NO: 1669068 - DNA, 15 bp, Homo sapiens
cctgcagcccccaag

SEQ ID NO: 1669069 - DNA, 15 bp, Homo sapiens
ctgcagcccccaaga

SEQ ID NO: 1669070 - DNA, 15 bp, Homo sapiens
tgcagcccccaagac

SEQ ID NO: 1669071 - DNA, 15 bp, Homo sapiens
gcagcccccaagacg

SEQ ID NO: 1669072 - DNA, 15 bp, Homo sapiens
cagcccccaagacgt

SEQ ID NO: 1669073 - DNA, 15 bp, Homo sapiens
agcccccaagacgtg

SEQ ID NO: 1669074 - DNA, 15 bp, Homo sapiens
gcccccaagacgtgc

SEQ ID NO: 1669075 - DNA, 15 bp, Homo sapiens
cccccaagacgtgct

SEQ ID NO: 1669076 - DNA, 15 bp, Homo sapiens
ccccaagacgtgctc

SEQ ID NO: 1669077 - DNA, 15 bp, Homo sapiens
cccaagacgtgctcc

SEQ ID NO: 1669078 - DNA, 15 bp, Homo sapiens
ccaagacgtgctccc

SEQ ID NO: 1669079 - DNA, 15 bp, Homo sapiens
caagacgtgctccca

SEQ ID NO: 1669080 - DNA, 15 bp, Homo sapiens
aagacgtgctcccag

SEQ ID NO: 1669081 - DNA, 15 bp, Homo sapiens
agacgtgctcccagg

SEQ ID NO: 1669082 - DNA, 15 bp, Homo sapiens
gacgtgctcccagga

SEQ ID NO: 1669083 - DNA, 15 bp, Homo sapiens
acgtgctcccaggac

SEQ ID NO: 1669084 - DNA, 15 bp, Homo sapiens
cgtgctcccaggacg

SEQ ID NO: 1669085 - DNA, 15 bp, Homo sapiens
gtgctcccaggacga

SEQ ID NO: 1669086 - DNA, 15 bp, Homo sapiens
tgctcccaggacgag

SEQ ID NO: 1669087 - DNA, 15 bp, Homo sapiens
gctcccaggacgagt

SEQ ID NO: 1669088 - DNA, 15 bp, Homo sapiens
ctcccaggacgagtt

SEQ ID NO: 1669089 - DNA, 15 bp, Homo sapiens
tcccaggacgagttt

SEQ ID NO: 1669090 - DNA, 15 bp, Homo sapiens
cccaggacgagtttc

SEQ ID NO: 1669091 - DNA, 15 bp, Homo sapiens
ccaggacgagtttcg

SEQ ID NO: 1669092 - DNA, 15 bp, Homo sapiens
caggacgagtttcgc

SEQ ID NO: 1669093 - DNA, 15 bp, Homo sapiens
aggacgagtttcgct

SEQ ID NO: 1669094 - DNA, 15 bp, Homo sapiens
ggacgagtttcgctg

SEQ ID NO: 1669095 - DNA, 15 bp, Homo sapiens
gacgagtttcgctgc

SEQ ID NO: 1669096 - DNA, 15 bp, Homo sapiens
acgagtttcgctgcc

SEQ ID NO: 1669097 - DNA, 15 bp, Homo sapiens
cgagtttcgctgcca

SEQ ID NO: 1669098 - DNA, 15 bp, Homo sapiens
gagtttcgctgccac

SEQ ID NO: 1669099 - DNA, 15 bp, Homo sapiens
agtttcgctgccacg

SEQ ID NO: 1669100 - DNA, 15 bp, Homo sapiens
gtttcgctgccacga

SEQ ID NO: 1669101 - DNA, 15 bp, Homo sapiens
tttcgctgccacgat

SEQ ID NO: 1669102 - DNA, 15 bp, Homo sapiens
ttcgctgccacgatg

SEQ ID NO: 1669103 - DNA, 15 bp, Homo sapiens
tcgctgccacgatgg

SEQ ID NO: 1669104 - DNA, 15 bp, Homo sapiens
cgctgccacgatggg

SEQ ID NO: 1669105 - DNA, 15 bp, Homo sapiens
gctgccacgatggga

SEQ ID NO: 1669106 - DNA, 15 bp, Homo sapiens
ctgccacgatgggaa

SEQ ID NO: 1669107 - DNA, 15 bp, Homo sapiens
tgccacgatgggaag

SEQ ID NO: 1669108 - DNA, 15 bp, Homo sapiens
gccacgatgggaagt

SEQ ID NO: 1669109 - DNA, 15 bp, Homo sapiens
ccacgatgggaagtg

SEQ ID NO: 1669110 - DNA, 15 bp, Homo sapiens
cacgatgggaagtgc

SEQ ID NO: 1669111 - DNA, 15 bp, Homo sapiens
acgatgggaagtgca

SEQ ID NO: 1669112 - DNA, 15 bp, Homo sapiens
cgatgggaagtgcat

SEQ ID NO: 1669113 - DNA, 15 bp, Homo sapiens
gatgggaagtgcatc

SEQ ID NO: 1669114 - DNA, 15 bp, Homo sapiens
atgggaagtgcatct

SEQ ID NO: 1669115 - DNA, 15 bp, Homo sapiens
tgggaagtgcatctc

SEQ ID NO: 1669116 - DNA, 15 bp, Homo sapiens
gggaagtgcatctct

SEQ ID NO: 1669117 - DNA, 15 bp, Homo sapiens
ggaagtgcatctctc

SEQ ID NO: 1669118 - DNA, 15 bp, Homo sapiens
gaagtgcatctctcg

SEQ ID NO: 1669119 - DNA, 15 bp, Homo sapiens
aagtgcatctctcgg

SEQ ID NO: 1669120 - DNA, 15 bp, Homo sapiens
agtgcatctctcggc

SEQ ID NO: 1669121 - DNA, 15 bp, Homo sapiens
gtgcatctctcggca

SEQ ID NO: 1669122 - DNA, 15 bp, Homo sapiens
tgcatctctcggcag

SEQ ID NO: 1669123 - DNA, 15 bp, Homo sapiens
gcatctctcggcagt

SEQ ID NO: 1669124 - DNA, 15 bp, Homo sapiens
catctctcggcagtt

SEQ ID NO: 1669125 - DNA, 15 bp, Homo sapiens
atctctcggcagttc

SEQ ID NO: 1669126 - DNA, 15 bp, Homo sapiens
tctctcggcagttcg

SEQ ID NO: 1669127 - DNA, 15 bp, Homo sapiens
ctctcggcagttcgt

SEQ ID NO: 1669128 - DNA, 15 bp, Homo sapiens
tctcggcagttcgtc

SEQ ID NO: 1669129 - DNA, 15 bp, Homo sapiens
ctcggcagttcgtct

SEQ ID NO: 1669130 - DNA, 15 bp, Homo sapiens
tcggcagttcgtctg

SEQ ID NO: 1669131 - DNA, 15 bp, Homo sapiens
cggcagttcgtctgt

SEQ ID NO: 1669132 - DNA, 15 bp, Homo sapiens
ggcagttcgtctgtg

SEQ ID NO: 1669133 - DNA, 15 bp, Homo sapiens
gcagttcgtctgtga

SEQ ID NO: 1669134 - DNA, 15 bp, Homo sapiens
cagttcgtctgtgac

SEQ ID NO: 1669135 - DNA, 15 bp, Homo sapiens
agttcgtctgtgact

SEQ ID NO: 1669136 - DNA, 15 bp, Homo sapiens
gttcgtctgtgactc

SEQ ID NO: 1669137 - DNA, 15 bp, Homo sapiens
ttcgtctgtgactca

SEQ ID NO: 1669138 - DNA, 15 bp, Homo sapiens
tcgtctgtgactcag

SEQ ID NO: 1669139 - DNA, 15 bp, Homo sapiens
cgtctgtgactcaga

SEQ ID NO: 1669140 - DNA, 15 bp, Homo sapiens
gtctgtgactcagac

SEQ ID NO: 1669141 - DNA, 15 bp, Homo sapiens
tctgtgactcagacc

SEQ ID NO: 1669142 - DNA, 15 bp, Homo sapiens
ctgtgactcagaccg

SEQ ID NO: 1669143 - DNA, 15 bp, Homo sapiens
tgtgactcagaccgg

SEQ ID NO: 1669144 - DNA, 15 bp, Homo sapiens
gtgactcagaccggg

SEQ ID NO: 1669145 - DNA, 15 bp, Homo sapiens
tgactcagaccggga

SEQ ID NO: 1669146 - DNA, 15 bp, Homo sapiens
gactcagaccgggac

SEQ ID NO: 1669147 - DNA, 15 bp, Homo sapiens
actcagaccgggact

SEQ ID NO: 1669148 - DNA, 15 bp, Homo sapiens
ctcagaccgggactg

SEQ ID NO: 1669149 - DNA, 15 bp, Homo sapiens
tcagaccgggactgc

SEQ ID NO: 1669150 - DNA, 15 bp, Homo sapiens
cagaccgggactgct

SEQ ID NO: 1669151 - DNA, 15 bp, Homo sapiens
agaccgggactgctt

SEQ ID NO: 1669152 - DNA, 15 bp, Homo sapiens
gaccgggactgcttg

SEQ ID NO: 1669153 - DNA, 15 bp, Homo sapiens
accgggactgcttgg

SEQ ID NO: 1669154 - DNA, 15 bp, Homo sapiens
ccgggactgcttgga

SEQ ID NO: 1669155 - DNA, 15 bp, Homo sapiens
cgggactgcttggac

SEQ ID NO: 1669156 - DNA, 15 bp, Homo sapiens
gggactgcttggacg

SEQ ID NO: 1669157 - DNA, 15 bp, Homo sapiens
ggactgcttggacgg

SEQ ID NO: 1669158 - DNA, 15 bp, Homo sapiens
gactgcttggacggc

SEQ ID NO: 1669159 - DNA, 15 bp, Homo sapiens
actgcttggacggct

SEQ ID NO: 1669160 - DNA, 15 bp, Homo sapiens
ctgcttggacggctc

SEQ ID NO: 1669161 - DNA, 15 bp, Homo sapiens
tgcttggacggctca

SEQ ID NO: 1669162 - DNA, 15 bp, Homo sapiens
gcttggacggctcag

SEQ ID NO: 1669163 - DNA, 15 bp, Homo sapiens
cttggacggctcaga

SEQ ID NO: 1669164 - DNA, 15 bp, Homo sapiens
ttggacggctcagac

SEQ ID NO: 1669165 - DNA, 15 bp, Homo sapiens
tggacggctcagacg

SEQ ID NO: 1669166 - DNA, 15 bp, Homo sapiens
ggacggctcagacga

SEQ ID NO: 1669167 - DNA, 15 bp, Homo sapiens
gacggctcagacgag

SEQ ID NO: 1669168 - DNA, 15 bp, Homo sapiens
acggctcagacgagg

SEQ ID NO: 1669169 - DNA, 15 bp, Homo sapiens
cggctcagacgaggc

SEQ ID NO: 1669170 - DNA, 15 bp, Homo sapiens
ggctcagacgaggcc

SEQ ID NO: 1669171 - DNA, 15 bp, Homo sapiens
gctcagacgaggcct

SEQ ID NO: 1669172 - DNA, 15 bp, Homo sapiens
ctcagacgaggcctc

SEQ ID NO: 1669173 - DNA, 15 bp, Homo sapiens
tcagacgaggcctcc

SEQ ID NO: 1669174 - DNA, 15 bp, Homo sapiens
cagacgaggcctcct

SEQ ID NO: 1669175 - DNA, 15 bp, Homo sapiens
agacgaggcctcctg

SEQ ID NO: 1669176 - DNA, 15 bp, Homo sapiens
gacgaggcctcctgc

SEQ ID NO: 1669177 - DNA, 15 bp, Homo sapiens
acgaggcctcctgcc

SEQ ID NO: 1669178 - DNA, 15 bp, Homo sapiens
cgaggcctcctgccc

SEQ ID NO: 1669179 - DNA, 15 bp, Homo sapiens
gaggcctcctgcccg

SEQ ID NO: 1669180 - DNA, 15 bp, Homo sapiens
aggcctcctgcccgg

SEQ ID NO: 1669181 - DNA, 15 bp, Homo sapiens
ggcctcctgcccggt

SEQ ID NO: 1669182 - DNA, 15 bp, Homo sapiens
gcctcctgcccggtg

SEQ ID NO: 1669183 - DNA, 15 bp, Homo sapiens
cctcctgcccggtgc

SEQ ID NO: 1669184 - DNA, 15 bp, Homo sapiens
ctcctgcccggtgct

SEQ ID NO: 1669185 - DNA, 15 bp, Homo sapiens
tcctgcccggtgctc

SEQ ID NO: 1669186 - DNA, 15 bp, Homo sapiens
cctgcccggtgctca

SEQ ID NO: 1669187 - DNA, 15 bp, Homo sapiens
ctgcccggtgctcac

SEQ ID NO: 1669188 - DNA, 15 bp, Homo sapiens
tgcccggtgctcacc

SEQ ID NO: 1669189 - DNA, 15 bp, Homo sapiens
gcccggtgctcacct

SEQ ID NO: 1669190 - DNA, 15 bp, Homo sapiens
cccggtgctcacctg

SEQ ID NO: 1669191 - DNA, 15 bp, Homo sapiens
ccggtgctcacctgt

SEQ ID NO: 1669192 - DNA, 15 bp, Homo sapiens
cggtgctcacctgtg

SEQ ID NO: 1669193 - DNA, 15 bp, Homo sapiens
ggtgctcacctgtgg

SEQ ID NO: 1669194 - DNA, 15 bp, Homo sapiens
gtgctcacctgtggt

SEQ ID NO: 1669195 - DNA, 15 bp, Homo sapiens
tgctcacctgtggtc

SEQ ID NO: 1669196 - DNA, 15 bp, Homo sapiens
gctcacctgtggtcc

SEQ ID NO: 1669197 - DNA, 15 bp, Homo sapiens
ctcacctgtggtccc

SEQ ID NO: 1669198 - DNA, 15 bp, Homo sapiens
tcacctgtggtcccg

SEQ ID NO: 1669199 - DNA, 15 bp, Homo sapiens
cacctgtggtcccgc

SEQ ID NO: 1669200 - DNA, 15 bp, Homo sapiens
acctgtggtcccgcc

SEQ ID NO: 1669201 - DNA, 15 bp, Homo sapiens
cctgtggtcccgcca

SEQ ID NO: 1669202 - DNA, 15 bp, Homo sapiens
ctgtggtcccgccag

SEQ ID NO: 1669203 - DNA, 15 bp, Homo sapiens
tgtggtcccgccagc

SEQ ID NO: 1669204 - DNA, 15 bp, Homo sapiens
gtggtcccgccagct

SEQ ID NO: 1669205 - DNA, 15 bp, Homo sapiens
tggtcccgccagctt

SEQ ID NO: 1669206 - DNA, 15 bp, Homo sapiens
ggtcccgccagcttc

SEQ ID NO: 1669207 - DNA, 15 bp, Homo sapiens
gtcccgccagcttcc

SEQ ID NO: 1669208 - DNA, 15 bp, Homo sapiens
tcccgccagcttcca

SEQ ID NO: 1669209 - DNA, 15 bp, Homo sapiens
cccgccagcttccag

SEQ ID NO: 1669210 - DNA, 15 bp, Homo sapiens
ccgccagcttccagt

SEQ ID NO: 1669211 - DNA, 15 bp, Homo sapiens
cgccagcttccagtg

SEQ ID NO: 1669212 - DNA, 15 bp, Homo sapiens
gccagcttccagtgc

SEQ ID NO: 1669213 - DNA, 15 bp, Homo sapiens
ccagcttccagtgca

SEQ ID NO: 1669214 - DNA, 15 bp, Homo sapiens
cagcttccagtgcaa

SEQ ID NO: 1669215 - DNA, 15 bp, Homo sapiens
agcttccagtgcaac

SEQ ID NO: 1669216 - DNA, 15 bp, Homo sapiens
gcttccagtgcaaca

SEQ ID NO: 1669217 - DNA, 15 bp, Homo sapiens
cttccagtgcaacag

SEQ ID NO: 1669218 - DNA, 15 bp, Homo sapiens
ttccagtgcaacagc

SEQ ID NO: 1669219 - DNA, 15 bp, Homo sapiens
tccagtgcaacagct

SEQ ID NO: 1669220 - DNA, 15 bp, Homo sapiens
ccagtgcaacagctc

SEQ ID NO: 1669221 - DNA, 15 bp, Homo sapiens
cagtgcaacagctcc

SEQ ID NO: 1669222 - DNA, 15 bp, Homo sapiens
agtgcaacagctcca

SEQ ID NO: 1669223 - DNA, 15 bp, Homo sapiens
gtgcaacagctccac

SEQ ID NO: 1669224 - DNA, 15 bp, Homo sapiens
tgcaacagctccacc

SEQ ID NO: 1669225 - DNA, 15 bp, Homo sapiens
gcaacagctccacct

SEQ ID NO: 1669226 - DNA, 15 bp, Homo sapiens
caacagctccacctg

SEQ ID NO: 1669227 - DNA, 15 bp, Homo sapiens
aacagctccacctgc

SEQ ID NO: 1669228 - DNA, 15 bp, Homo sapiens
acagctccacctgca

SEQ ID NO: 1669229 - DNA, 15 bp, Homo sapiens
cagctccacctgcat

SEQ ID NO: 1669230 - DNA, 15 bp, Homo sapiens
agctccacctgcatc

SEQ ID NO: 1669231 - DNA, 15 bp, Homo sapiens
gctccacctgcatcc

SEQ ID NO: 1669232 - DNA, 15 bp, Homo sapiens
ctccacctgcatccc

SEQ ID NO: 1669233 - DNA, 15 bp, Homo sapiens
tccacctgcatcccc

SEQ ID NO: 1669234 - DNA, 15 bp, Homo sapiens
ccacctgcatccccc

SEQ ID NO: 1669235 - DNA, 15 bp, Homo sapiens
cacctgcatccccca

SEQ ID NO: 1669236 - DNA, 15 bp, Homo sapiens
acctgcatcccccag

SEQ ID NO: 1669237 - DNA, 15 bp, Homo sapiens
cctgcatcccccagc

SEQ ID NO: 1669238 - DNA, 15 bp, Homo sapiens
ctgcatcccccagct

SEQ ID NO: 1669239 - DNA, 15 bp, Homo sapiens
tgcatcccccagctg

SEQ ID NO: 1669240 - DNA, 15 bp, Homo sapiens
gcatcccccagctgt

SEQ ID NO: 1669241 - DNA, 15 bp, Homo sapiens
catcccccagctgtg

SEQ ID NO: 1669242 - DNA, 15 bp, Homo sapiens
atcccccagctgtgg

SEQ ID NO: 1669243 - DNA, 15 bp, Homo sapiens
tcccccagctgtggg

SEQ ID NO: 1669244 - DNA, 15 bp, Homo sapiens
cccccagctgtgggc

SEQ ID NO: 1669245 - DNA, 15 bp, Homo sapiens
ccccagctgtgggcc

SEQ ID NO: 1669246 - DNA, 15 bp, Homo sapiens
cccagctgtgggcct

SEQ ID NO: 1669247 - DNA, 15 bp, Homo sapiens
ccagctgtgggcctg

SEQ ID NO: 1669248 - DNA, 15 bp, Homo sapiens
cagctgtgggcctgc

SEQ ID NO: 1669249 - DNA, 15 bp, Homo sapiens
agctgtgggcctgcg

SEQ ID NO: 1669250 - DNA, 15 bp, Homo sapiens
gctgtgggcctgcga

SEQ ID NO: 1669251 - DNA, 15 bp, Homo sapiens
ctgtgggcctgcgac

SEQ ID NO: 1669252 - DNA, 15 bp, Homo sapiens
tgtgggcctgcgaca

SEQ ID NO: 1669253 - DNA, 15 bp, Homo sapiens
gtgggcctgcgacaa

SEQ ID NO: 1669254 - DNA, 15 bp, Homo sapiens
tgggcctgcgacaac

SEQ ID NO: 1669255 - DNA, 15 bp, Homo sapiens
gggcctgcgacaacg

SEQ ID NO: 1669256 - DNA, 15 bp, Homo sapiens
ggcctgcgacaacga

SEQ ID NO: 1669257 - DNA, 15 bp, Homo sapiens
gcctgcgacaacgac

SEQ ID NO: 1669258 - DNA, 15 bp, Homo sapiens
cctgcgacaacgacc

SEQ ID NO: 1669259 - DNA, 15 bp, Homo sapiens
ctgcgacaacgaccc

SEQ ID NO: 1669260 - DNA, 15 bp, Homo sapiens
tgcgacaacgacccc

SEQ ID NO: 1669261 - DNA, 15 bp, Homo sapiens
gcgacaacgaccccg

SEQ ID NO: 1669262 - DNA, 15 bp, Homo sapiens
cgacaacgaccccga

SEQ ID NO: 1669263 - DNA, 15 bp, Homo sapiens
gacaacgaccccgac

SEQ ID NO: 1669264 - DNA, 15 bp, Homo sapiens
acaacgaccccgact

SEQ ID NO: 1669265 - DNA, 15 bp, Homo sapiens
caacgaccccgactg

SEQ ID NO: 1669266 - DNA, 15 bp, Homo sapiens
aacgaccccgactgc

SEQ ID NO: 1669267 - DNA, 15 bp, Homo sapiens
acgaccccgactgcg

SEQ ID NO: 1669268 - DNA, 15 bp, Homo sapiens
cgaccccgactgcga

SEQ ID NO: 1669269 - DNA, 15 bp, Homo sapiens
gaccccgactgcgaa

SEQ ID NO: 1669270 - DNA, 15 bp, Homo sapiens
accccgactgcgaag

SEQ ID NO: 1669271 - DNA, 15 bp, Homo sapiens
ccccgactgcgaaga

SEQ ID NO: 1669272 - DNA, 15 bp, Homo sapiens
cccgactgcgaagat

SEQ ID NO: 1669273 - DNA, 15 bp, Homo sapiens
ccgactgcgaagatg

SEQ ID NO: 1669274 - DNA, 15 bp, Homo sapiens
cgactgcgaagatgg

SEQ ID NO: 1669275 - DNA, 15 bp, Homo sapiens
gactgcgaagatggc

SEQ ID NO: 1669276 - DNA, 15 bp, Homo sapiens
actgcgaagatggct

SEQ ID NO: 1669277 - DNA, 15 bp, Homo sapiens
ctgcgaagatggctc

SEQ ID NO: 1669278 - DNA, 15 bp, Homo sapiens
tgcgaagatggctcg

SEQ ID NO: 1669279 - DNA, 15 bp, Homo sapiens
gcgaagatggctcgg

SEQ ID NO: 1669280 - DNA, 15 bp, Homo sapiens
cgaagatggctcgga

SEQ ID NO: 1669281 - DNA, 15 bp, Homo sapiens
gaagatggctcggat

SEQ ID NO: 1669282 - DNA, 15 bp, Homo sapiens
aagatggctcggatg

SEQ ID NO: 1669283 - DNA, 15 bp, Homo sapiens
agatggctcggatga

SEQ ID NO: 1669284 - DNA, 15 bp, Homo sapiens
gatggctcggatgag

SEQ ID NO: 1669285 - DNA, 15 bp, Homo sapiens
atggctcggatgagt

SEQ ID NO: 1669286 - DNA, 15 bp, Homo sapiens
tggctcggatgagtg

SEQ ID NO: 1669287 - DNA, 15 bp, Homo sapiens
ggctcggatgagtgg

SEQ ID NO: 1669288 - DNA, 15 bp, Homo sapiens
gctcggatgagtggc

SEQ ID NO: 1669289 - DNA, 15 bp, Homo sapiens
ctcggatgagtggcc

SEQ ID NO: 1669290 - DNA, 15 bp, Homo sapiens
tcggatgagtggccg

SEQ ID NO: 1669291 - DNA, 15 bp, Homo sapiens
cggatgagtggccgc

SEQ ID NO: 1669292 - DNA, 15 bp, Homo sapiens
ggatgagtggccgca

SEQ ID NO: 1669293 - DNA, 15 bp, Homo sapiens
gatgagtggccgcag

SEQ ID NO: 1669294 - DNA, 15 bp, Homo sapiens
atgagtggccgcagc

SEQ ID NO: 1669295 - DNA, 15 bp, Homo sapiens
tgagtggccgcagcg

SEQ ID NO: 1669296 - DNA, 15 bp, Homo sapiens
gagtggccgcagcgc

SEQ ID NO: 1669297 - DNA, 15 bp, Homo sapiens
agtggccgcagcgct

SEQ ID NO: 1669298 - DNA, 15 bp, Homo sapiens
gtggccgcagcgctg

SEQ ID NO: 1669299 - DNA, 15 bp, Homo sapiens
tggccgcagcgctgt

SEQ ID NO: 1669300 - DNA, 15 bp, Homo sapiens
ggccgcagcgctgta

SEQ ID NO: 1669301 - DNA, 15 bp, Homo sapiens
gccgcagcgctgtag

SEQ ID NO: 1669302 - DNA, 15 bp, Homo sapiens
ccgcagcgctgtagg

SEQ ID NO: 1669303 - DNA, 15 bp, Homo sapiens
cgcagcgctgtaggg

SEQ ID NO: 1669304 - DNA, 15 bp, Homo sapiens
gcagcgctgtagggg

SEQ ID NO: 1669305 - DNA, 15 bp, Homo sapiens
cagcgctgtaggggt

SEQ ID NO: 1669306 - DNA, 15 bp, Homo sapiens
agcgctgtaggggtc

SEQ ID NO: 1669307 - DNA, 15 bp, Homo sapiens
gcgctgtaggggtct

SEQ ID NO: 1669308 - DNA, 15 bp, Homo sapiens
cgctgtaggggtctt

SEQ ID NO: 1669309 - DNA, 15 bp, Homo sapiens
gctgtaggggtcttt

SEQ ID NO: 1669310 - DNA, 15 bp, Homo sapiens
ctgtaggggtcttta

SEQ ID NO: 1669311 - DNA, 15 bp, Homo sapiens
tgtaggggtctttac

SEQ ID NO: 1669312 - DNA, 15 bp, Homo sapiens
gtaggggtctttacg

SEQ ID NO: 1669313 - DNA, 15 bp, Homo sapiens
taggggtctttacgt

SEQ ID NO: 1669314 - DNA, 15 bp, Homo sapiens
aggggtctttacgtg

SEQ ID NO: 1669315 - DNA, 15 bp, Homo sapiens
ggggtctttacgtgt

SEQ ID NO: 1669316 - DNA, 15 bp, Homo sapiens
gggtctttacgtgtt

SEQ ID NO: 1669317 - DNA, 15 bp, Homo sapiens
ggtctttacgtgttc

SEQ ID NO: 1669318 - DNA, 15 bp, Homo sapiens
gtctttacgtgttcc

SEQ ID NO: 1669319 - DNA, 15 bp, Homo sapiens
tctttacgtgttcca

SEQ ID NO: 1669320 - DNA, 15 bp, Homo sapiens
ctttacgtgttccaa

SEQ ID NO: 1669321 - DNA, 15 bp, Homo sapiens
tttacgtgttccaag

SEQ ID NO: 1669322 - DNA, 15 bp, Homo sapiens
ttacgtgttccaagg

SEQ ID NO: 1669323 - DNA, 15 bp, Homo sapiens
tacgtgttccaaggg

SEQ ID NO: 1669324 - DNA, 15 bp, Homo sapiens
acgtgttccaagggg

SEQ ID NO: 1669325 - DNA, 15 bp, Homo sapiens
cgtgttccaagggga

SEQ ID NO: 1669326 - DNA, 15 bp, Homo sapiens
gtgttccaaggggac

SEQ ID NO: 1669327 - DNA, 15 bp, Homo sapiens
tgttccaaggggaca

SEQ ID NO: 1669328 - DNA, 15 bp, Homo sapiens
gttccaaggggacag

SEQ ID NO: 1669329 - DNA, 15 bp, Homo sapiens
ttccaaggggacagt

SEQ ID NO: 1669330 - DNA, 15 bp, Homo sapiens
tccaaggggacagta

SEQ ID NO: 1669331 - DNA, 15 bp, Homo sapiens
ccaaggggacagtag

SEQ ID NO: 1669332 - DNA, 15 bp, Homo sapiens
caaggggacagtagc

SEQ ID NO: 1669333 - DNA, 15 bp, Homo sapiens
aaggggacagtagcc

SEQ ID NO: 1669334 - DNA, 15 bp, Homo sapiens
aggggacagtagccc

SEQ ID NO: 1669335 - DNA, 15 bp, Homo sapiens
ggggacagtagcccc

SEQ ID NO: 1669336 - DNA, 15 bp, Homo sapiens
gggacagtagcccct

SEQ ID NO: 1669337 - DNA, 15 bp, Homo sapiens
ggacagtagcccctg

SEQ ID NO: 1669338 - DNA, 15 bp, Homo sapiens
gacagtagcccctgc

SEQ ID NO: 1669339 - DNA, 15 bp, Homo sapiens
acagtagcccctgct

SEQ ID NO: 1669340 - DNA, 15 bp, Homo sapiens
cagtagcccctgctc

SEQ ID NO: 1669341 - DNA, 15 bp, Homo sapiens
agtagcccctgctcg

SEQ ID NO: 1669342 - DNA, 15 bp, Homo sapiens
gtagcccctgctcgg

SEQ ID NO: 1669343 - DNA, 15 bp, Homo sapiens
tagcccctgctcggc

SEQ ID NO: 1669344 - DNA, 15 bp, Homo sapiens
agcccctgctcggcc

SEQ ID NO: 1669345 - DNA, 15 bp, Homo sapiens
gcccctgctcggcct

SEQ ID NO: 1669346 - DNA, 15 bp, Homo sapiens
cccctgctcggcctt

SEQ ID NO: 1669347 - DNA, 15 bp, Homo sapiens
ccctgctcggccttc

SEQ ID NO: 1669348 - DNA, 15 bp, Homo sapiens
cctgctcggccttcg

SEQ ID NO: 1669349 - DNA, 15 bp, Homo sapiens
ctgctcggccttcga

SEQ ID NO: 1669350 - DNA, 15 bp, Homo sapiens
tgctcggccttcgag

SEQ ID NO: 1669351 - DNA, 15 bp, Homo sapiens
gctcggccttcgagt

SEQ ID NO: 1669352 - DNA, 15 bp, Homo sapiens
ctcggccttcgagtt

SEQ ID NO: 1669353 - DNA, 15 bp, Homo sapiens
tcggccttcgagttc

SEQ ID NO: 1669354 - DNA, 15 bp, Homo sapiens
cggccttcgagttcc

SEQ ID NO: 1669355 - DNA, 15 bp, Homo sapiens
ggccttcgagttcca

SEQ ID NO: 1669356 - DNA, 15 bp, Homo sapiens
gccttcgagttccac

SEQ ID NO: 1669357 - DNA, 15 bp, Homo sapiens
ccttcgagttccact

SEQ ID NO: 1669358 - DNA, 15 bp, Homo sapiens
cttcgagttccactg

SEQ ID NO: 1669359 - DNA, 15 bp, Homo sapiens
ttcgagttccactgc

SEQ ID NO: 1669360 - DNA, 15 bp, Homo sapiens
tcgagttccactgcc

SEQ ID NO: 1669361 - DNA, 15 bp, Homo sapiens
cgagttccactgcct

SEQ ID NO: 1669362 - DNA, 15 bp, Homo sapiens
gagttccactgccta

SEQ ID NO: 1669363 - DNA, 15 bp, Homo sapiens
agttccactgcctaa

SEQ ID NO: 1669364 - DNA, 15 bp, Homo sapiens
gttccactgcctaag

SEQ ID NO: 1669365 - DNA, 15 bp, Homo sapiens
ttccactgcctaagt

SEQ ID NO: 1669366 - DNA, 15 bp, Homo sapiens
tccactgcctaagtg

SEQ ID NO: 1669367 - DNA, 15 bp, Homo sapiens
ccactgcctaagtgg

SEQ ID NO: 1669368 - DNA, 15 bp, Homo sapiens
cactgcctaagtggc

SEQ ID NO: 1669369 - DNA, 15 bp, Homo sapiens
actgcctaagtggcg

SEQ ID NO: 1669370 - DNA, 15 bp, Homo sapiens
ctgcctaagtggcga

SEQ ID NO: 1669371 - DNA, 15 bp, Homo sapiens
tgcctaagtggcgag

SEQ ID NO: 1669372 - DNA, 15 bp, Homo sapiens
gcctaagtggcgagt

SEQ ID NO: 1669373 - DNA, 15 bp, Homo sapiens
cctaagtggcgagtg

SEQ ID NO: 1669374 - DNA, 15 bp, Homo sapiens
ctaagtggcgagtgc

SEQ ID NO: 1669375 - DNA, 15 bp, Homo sapiens
taagtggcgagtgca

SEQ ID NO: 1669376 - DNA, 15 bp, Homo sapiens
aagtggcgagtgcat

SEQ ID NO: 1669377 - DNA, 15 bp, Homo sapiens
agtggcgagtgcatc

SEQ ID NO: 1669378 - DNA, 15 bp, Homo sapiens
gtggcgagtgcatcc

SEQ ID NO: 1669379 - DNA, 15 bp, Homo sapiens
tggcgagtgcatcca

SEQ ID NO: 1669380 - DNA, 15 bp, Homo sapiens
ggcgagtgcatccac

SEQ ID NO: 1669381 - DNA, 15 bp, Homo sapiens
gcgagtgcatccact

SEQ ID NO: 1669382 - DNA, 15 bp, Homo sapiens
cgagtgcatccactc

SEQ ID NO: 1669383 - DNA, 15 bp, Homo sapiens
gagtgcatccactcc

SEQ ID NO: 1669384 - DNA, 15 bp, Homo sapiens
agtgcatccactcca

SEQ ID NO: 1669385 - DNA, 15 bp, Homo sapiens
gtgcatccactccag

SEQ ID NO: 1669386 - DNA, 15 bp, Homo sapiens
tgcatccactccagc

SEQ ID NO: 1669387 - DNA, 15 bp, Homo sapiens
gcatccactccagct

SEQ ID NO: 1669388 - DNA, 15 bp, Homo sapiens
catccactccagctg

SEQ ID NO: 1669389 - DNA, 15 bp, Homo sapiens
atccactccagctgg

SEQ ID NO: 1669390 - DNA, 15 bp, Homo sapiens
tccactccagctggc

SEQ ID NO: 1669391 - DNA, 15 bp, Homo sapiens
ccactccagctggcg

SEQ ID NO: 1669392 - DNA, 15 bp, Homo sapiens
cactccagctggcgc

SEQ ID NO: 1669393 - DNA, 15 bp, Homo sapiens
actccagctggcgct

SEQ ID NO: 1669394 - DNA, 15 bp, Homo sapiens
ctccagctggcgctg

SEQ ID NO: 1669395 - DNA, 15 bp, Homo sapiens
tccagctggcgctgt

SEQ ID NO: 1669396 - DNA, 15 bp, Homo sapiens
ccagctggcgctgtg

SEQ ID NO: 1669397 - DNA, 15 bp, Homo sapiens
cagctggcgctgtga

SEQ ID NO: 1669398 - DNA, 15 bp, Homo sapiens
agctggcgctgtgat

SEQ ID NO: 1669399 - DNA, 15 bp, Homo sapiens
gctggcgctgtgatg

SEQ ID NO: 1669400 - DNA, 15 bp, Homo sapiens
ctggcgctgtgatgg

SEQ ID NO: 1669401 - DNA, 15 bp, Homo sapiens
tggcgctgtgatggt

SEQ ID NO: 1669402 - DNA, 15 bp, Homo sapiens
ggcgctgtgatggtg

SEQ ID NO: 1669403 - DNA, 15 bp, Homo sapiens
gcgctgtgatggtgg

SEQ ID NO: 1669404 - DNA, 15 bp, Homo sapiens
cgctgtgatggtggc

SEQ ID NO: 1669405 - DNA, 15 bp, Homo sapiens
gctgtgatggtggcc

SEQ ID NO: 1669406 - DNA, 15 bp, Homo sapiens
ctgtgatggtggccc

SEQ ID NO: 1669407 - DNA, 15 bp, Homo sapiens
tgtgatggtggcccc

SEQ ID NO: 1669408 - DNA, 15 bp, Homo sapiens
gtgatggtggccccg

SEQ ID NO: 1669409 - DNA, 15 bp, Homo sapiens
tgatggtggccccga

SEQ ID NO: 1669410 - DNA, 15 bp, Homo sapiens
gatggtggccccgac

SEQ ID NO: 1669411 - DNA, 15 bp, Homo sapiens
atggtggccccgact

SEQ ID NO: 1669412 - DNA, 15 bp, Homo sapiens
tggtggccccgactg

SEQ ID NO: 1669413 - DNA, 15 bp, Homo sapiens
ggtggccccgactgc

SEQ ID NO: 1669414 - DNA, 15 bp, Homo sapiens
gtggccccgactgca

SEQ ID NO: 1669415 - DNA, 15 bp, Homo sapiens
tggccccgactgcaa

SEQ ID NO: 1669416 - DNA, 15 bp, Homo sapiens
ggccccgactgcaag

SEQ ID NO: 1669417 - DNA, 15 bp, Homo sapiens
gccccgactgcaagg

SEQ ID NO: 1669418 - DNA, 15 bp, Homo sapiens
ccccgactgcaagga

SEQ ID NO: 1669419 - DNA, 15 bp, Homo sapiens
cccgactgcaaggac

SEQ ID NO: 1669420 - DNA, 15 bp, Homo sapiens
ccgactgcaaggaca

SEQ ID NO: 1669421 - DNA, 15 bp, Homo sapiens
cgactgcaaggacaa

SEQ ID NO: 1669422 - DNA, 15 bp, Homo sapiens
gactgcaaggacaaa

SEQ ID NO: 1669423 - DNA, 15 bp, Homo sapiens
actgcaaggacaaat

SEQ ID NO: 1669424 - DNA, 15 bp, Homo sapiens
ctgcaaggacaaatc

SEQ ID NO: 1669425 - DNA, 15 bp, Homo sapiens
tgcaaggacaaatct

SEQ ID NO: 1669426 - DNA, 15 bp, Homo sapiens
gcaaggacaaatctg

SEQ ID NO: 1669427 - DNA, 15 bp, Homo sapiens
caaggacaaatctga

SEQ ID NO: 1669428 - DNA, 15 bp, Homo sapiens
aaggacaaatctgac

SEQ ID NO: 1669429 - DNA, 15 bp, Homo sapiens
aggacaaatctgacg

SEQ ID NO: 1669430 - DNA, 15 bp, Homo sapiens
ggacaaatctgacga

SEQ ID NO: 1669431 - DNA, 15 bp, Homo sapiens
gacaaatctgacgag

SEQ ID NO: 1669432 - DNA, 15 bp, Homo sapiens
acaaatctgacgagg

SEQ ID NO: 1669433 - DNA, 15 bp, Homo sapiens
caaatctgacgagga

SEQ ID NO: 1669434 - DNA, 15 bp, Homo sapiens
aaatctgacgaggaa

SEQ ID NO: 1669435 - DNA, 15 bp, Homo sapiens
aatctgacgaggaaa

SEQ ID NO: 1669436 - DNA, 15 bp, Homo sapiens
atctgacgaggaaaa

SEQ ID NO: 1669437 - DNA, 15 bp, Homo sapiens
tctgacgaggaaaac

SEQ ID NO: 1669438 - DNA, 15 bp, Homo sapiens
ctgacgaggaaaact

SEQ ID NO: 1669439 - DNA, 15 bp, Homo sapiens
tgacgaggaaaactg

SEQ ID NO: 1669440 - DNA, 15 bp, Homo sapiens
gacgaggaaaactgc

SEQ ID NO: 1669441 - DNA, 15 bp, Homo sapiens
acgaggaaaactgcg

SEQ ID NO: 1669442 - DNA, 15 bp, Homo sapiens
cgaggaaaactgcgg

SEQ ID NO: 1669443 - DNA, 15 bp, Homo sapiens
gaggaaaactgcggt

SEQ ID NO: 1669444 - DNA, 15 bp, Homo sapiens
aggaaaactgcggta

SEQ ID NO: 1669445 - DNA, 15 bp, Homo sapiens
ggaaaactgcggtat

SEQ ID NO: 1669446 - DNA, 15 bp, Homo sapiens
gaaaactgcggtatg

SEQ ID NO: 1669447 - DNA, 15 bp, Homo sapiens
aaaactgcggtatgg

SEQ ID NO: 1669448 - DNA, 15 bp, Homo sapiens
aaactgcggtatggg

SEQ ID NO: 1669449 - DNA, 15 bp, Homo sapiens
aactgcggtatgggc

SEQ ID NO: 1669450 - DNA, 15 bp, Homo sapiens
actgcggtatgggcg

SEQ ID NO: 1669451 - DNA, 15 bp, Homo sapiens
ctgcggtatgggcgg

SEQ ID NO: 1669452 - DNA, 15 bp, Homo sapiens
tgcggtatgggcggg

SEQ ID NO: 1669453 - DNA, 15 bp, Homo sapiens
gcggtatgggcgggg

SEQ ID NO: 1669454 - DNA, 15 bp, Homo sapiens
cggtatgggcggggc

SEQ ID NO: 1669455 - DNA, 15 bp, Homo sapiens
ggtatgggcggggcc

SEQ ID NO: 1669456 - DNA, 15 bp, Homo sapiens
gtatgggcggggcca

SEQ ID NO: 1669457 - DNA, 15 bp, Homo sapiens
tatgggcggggccag

SEQ ID NO: 1669458 - DNA, 15 bp, Homo sapiens
atgggcggggccagg

SEQ ID NO: 1669459 - DNA, 15 bp, Homo sapiens
tgggcggggccaggg

SEQ ID NO: 1669460 - DNA, 15 bp, Homo sapiens
gcggggccagggtgg

SEQ ID NO: 1669461 - DNA, 15 bp, Homo sapiens
cggggccagggtggg

SEQ ID NO: 1669462 - DNA, 15 bp, Homo sapiens
ggggccagggtgggg

SEQ ID NO: 1669463 - DNA, 15 bp, Homo sapiens
gggccagggtggggg

SEQ ID NO: 1669464 - DNA, 15 bp, Homo sapiens
ggccagggtgggggc

SEQ ID NO: 1669465 - DNA, 15 bp, Homo sapiens
gccagggtgggggcg

SEQ ID NO: 1669466 - DNA, 15 bp, Homo sapiens
ccagggtgggggcgg

SEQ ID NO: 1669467 - DNA, 15 bp, Homo sapiens
cagggtgggggcggg

SEQ ID NO: 1669468 - DNA, 15 bp, Homo sapiens
agggtgggggcgggg

SEQ ID NO: 1669469 - DNA, 15 bp, Homo sapiens
gggtgggggcggggc

SEQ ID NO: 1669470 - DNA, 15 bp, Homo sapiens
ggtgggggcggggcg

SEQ ID NO: 1669471 - DNA, 15 bp, Homo sapiens
gtgggggcggggcgt

SEQ ID NO: 1669472 - DNA, 15 bp, Homo sapiens
tgggggcggggcgtc

SEQ ID NO: 1669473 - DNA, 15 bp, Homo sapiens
gggggcggggcgtcc

SEQ ID NO: 1669474 - DNA, 15 bp, Homo sapiens
ggggcggggcgtcct

SEQ ID NO: 1669475 - DNA, 15 bp, Homo sapiens
gggcggggcgtccta

SEQ ID NO: 1669476 - DNA, 15 bp, Homo sapiens
ggcggggcgtcctat

SEQ ID NO: 1669477 - DNA, 15 bp, Homo sapiens
gcggggcgtcctatc

SEQ ID NO: 1669478 - DNA, 15 bp, Homo sapiens
cggggcgtcctatca

SEQ ID NO: 1669479 - DNA, 15 bp, Homo sapiens
ggggcgtcctatcac

SEQ ID NO: 1669480 - DNA, 15 bp, Homo sapiens
gggcgtcctatcacc

SEQ ID NO: 1669481 - DNA, 15 bp, Homo sapiens
ggcgtcctatcacct

SEQ ID NO: 1669482 - DNA, 15 bp, Homo sapiens
gcgtcctatcacctg

SEQ ID NO: 1669483 - DNA, 15 bp, Homo sapiens
cgtcctatcacctgt

SEQ ID NO: 1669484 - DNA, 15 bp, Homo sapiens
gtcctatcacctgtc

SEQ ID NO: 1669485 - DNA, 15 bp, Homo sapiens
tcctatcacctgtcc

SEQ ID NO: 1669486 - DNA, 15 bp, Homo sapiens
cctatcacctgtccc

SEQ ID NO: 1669487 - DNA, 15 bp, Homo sapiens
ctatcacctgtccct

SEQ ID NO: 1669488 - DNA, 15 bp, Homo sapiens
tatcacctgtccctg

SEQ ID NO: 1669489 - DNA, 15 bp, Homo sapiens
atcacctgtccctgg

SEQ ID NO: 1669490 - DNA, 15 bp, Homo sapiens
tcacctgtccctggg

SEQ ID NO: 1669491 - DNA, 15 bp, Homo sapiens
cacctgtccctgggc

SEQ ID NO: 1669492 - DNA, 15 bp, Homo sapiens
acctgtccctgggct

SEQ ID NO: 1669493 - DNA, 15 bp, Homo sapiens
cctgtccctgggctc

SEQ ID NO: 1669494 - DNA, 15 bp, Homo sapiens
ctgtccctgggctcc

SEQ ID NO: 1669495 - DNA, 15 bp, Homo sapiens
tgtccctgggctccc

SEQ ID NO: 1669496 - DNA, 15 bp, Homo sapiens
gtccctgggctcccc

SEQ ID NO: 1669497 - DNA, 15 bp, Homo sapiens
tccctgggctccccc

SEQ ID NO: 1669498 - DNA, 15 bp, Homo sapiens
ccctgggctccccca

SEQ ID NO: 1669499 - DNA, 15 bp, Homo sapiens
cctgggctcccccag

SEQ ID NO: 1669500 - DNA, 15 bp, Homo sapiens
ctgggctcccccagg

SEQ ID NO: 1669501 - DNA, 15 bp, Homo sapiens
tgggctcccccaggt

SEQ ID NO: 1669502 - DNA, 15 bp, Homo sapiens
gggctcccccaggtg

SEQ ID NO: 1669503 - DNA, 15 bp, Homo sapiens
ggctcccccaggtgt

SEQ ID NO: 1669504 - DNA, 15 bp, Homo sapiens
gctcccccaggtgtg

SEQ ID NO: 1669505 - DNA, 15 bp, Homo sapiens
ctcccccaggtgtgg

SEQ ID NO: 1669506 - DNA, 15 bp, Homo sapiens
tcccccaggtgtggg

SEQ ID NO: 1669507 - DNA, 15 bp, Homo sapiens
cccccaggtgtggga

SEQ ID NO: 1669508 - DNA, 15 bp, Homo sapiens
ccccaggtgtgggac

SEQ ID NO: 1669509 - DNA, 15 bp, Homo sapiens
cccaggtgtgggaca

SEQ ID NO: 1669510 - DNA, 15 bp, Homo sapiens
ccaggtgtgggacat

SEQ ID NO: 1669511 - DNA, 15 bp, Homo sapiens
caggtgtgggacatg

SEQ ID NO: 1669512 - DNA, 15 bp, Homo sapiens
aggtgtgggacatgc

SEQ ID NO: 1669513 - DNA, 15 bp, Homo sapiens
ggtgtgggacatgca

SEQ ID NO: 1669514 - DNA, 15 bp, Homo sapiens
gtgtgggacatgcag

SEQ ID NO: 1669515 - DNA, 15 bp, Homo sapiens
tgtgggacatgcagt

SEQ ID NO: 1669516 - DNA, 15 bp, Homo sapiens
gtgggacatgcagtg

SEQ ID NO: 1669517 - DNA, 15 bp, Homo sapiens
tgggacatgcagtga

SEQ ID NO: 1669518 - DNA, 15 bp, Homo sapiens
gggacatgcagtgat

SEQ ID NO: 1669519 - DNA, 15 bp, Homo sapiens
ggacatgcagtgatt

SEQ ID NO: 1669520 - DNA, 15 bp, Homo sapiens
gacatgcagtgattt

SEQ ID NO: 1669521 - DNA, 15 bp, Homo sapiens
acatgcagtgattta

SEQ ID NO: 1669522 - DNA, 15 bp, Homo sapiens
catgcagtgatttag

SEQ ID NO: 1669523 - DNA, 15 bp, Homo sapiens
atgcagtgatttagg

SEQ ID NO: 1669524 - DNA, 15 bp, Homo sapiens
tgcagtgatttaggt

SEQ ID NO: 1669525 - DNA, 15 bp, Homo sapiens
gcagtgatttaggtg

SEQ ID NO: 1669526 - DNA, 15 bp, Homo sapiens
cagtgatttaggtgc

SEQ ID NO: 1669527 - DNA, 15 bp, Homo sapiens
agtgatttaggtgcc

SEQ ID NO: 1669528 - DNA, 15 bp, Homo sapiens
gtgatttaggtgccg

SEQ ID NO: 1669529 - DNA, 15 bp, Homo sapiens
tgatttaggtgccga

SEQ ID NO: 1669530 - DNA, 15 bp, Homo sapiens
gatttaggtgccgaa

SEQ ID NO: 1669531 - DNA, 15 bp, Homo sapiens
atttaggtgccgaag

SEQ ID NO: 1669532 - DNA, 15 bp, Homo sapiens
tttaggtgccgaagt

SEQ ID NO: 1669533 - DNA, 15 bp, Homo sapiens
ttaggtgccgaagtg

SEQ ID NO: 1669534 - DNA, 15 bp, Homo sapiens
taggtgccgaagtgg

SEQ ID NO: 1669535 - DNA, 15 bp, Homo sapiens
aggtgccgaagtgga

SEQ ID NO: 1669536 - DNA, 15 bp, Homo sapiens
ggtgccgaagtggat

SEQ ID NO: 1669537 - DNA, 15 bp, Homo sapiens
gtgccgaagtggatt

SEQ ID NO: 1669538 - DNA, 15 bp, Homo sapiens
tgccgaagtggattt

SEQ ID NO: 1669539 - DNA, 15 bp, Homo sapiens
gccgaagtggatttc

SEQ ID NO: 1669540 - DNA, 15 bp, Homo sapiens
ccgaagtggatttcc

SEQ ID NO: 1669541 - DNA, 15 bp, Homo sapiens
cgaagtggatttcca

SEQ ID NO: 1669542 - DNA, 15 bp, Homo sapiens
gaagtggatttccaa

SEQ ID NO: 1669543 - DNA, 15 bp, Homo sapiens
aagtggatttccaac

SEQ ID NO: 1669544 - DNA, 15 bp, Homo sapiens
agtggatttccaaca

SEQ ID NO: 1669545 - DNA, 15 bp, Homo sapiens
gtggatttccaacaa

SEQ ID NO: 1669546 - DNA, 15 bp, Homo sapiens
tggatttccaacaac

SEQ ID NO: 1669547 - DNA, 15 bp, Homo sapiens
ggatttccaacaaca

SEQ ID NO: 1669548 - DNA, 15 bp, Homo sapiens
gatttccaacaacat

SEQ ID NO: 1669549 - DNA, 15 bp, Homo sapiens
atttccaacaacatg

SEQ ID NO: 1669550 - DNA, 15 bp, Homo sapiens
tttccaacaacatgc

SEQ ID NO: 1669551 - DNA, 15 bp, Homo sapiens
ttccaacaacatgcc

SEQ ID NO: 1669552 - DNA, 15 bp, Homo sapiens
tccaacaacatgcca

SEQ ID NO: 1669553 - DNA, 15 bp, Homo sapiens
ccaacaacatgccaa

SEQ ID NO: 1669554 - DNA, 15 bp, Homo sapiens
caacaacatgccaag

SEQ ID NO: 1669555 - DNA, 15 bp, Homo sapiens
aacaacatgccaaga

SEQ ID NO: 1669556 - DNA, 15 bp, Homo sapiens
acaacatgccaagaa

SEQ ID NO: 1669557 - DNA, 15 bp, Homo sapiens
caacatgccaagaaa

SEQ ID NO: 1669558 - DNA, 15 bp, Homo sapiens
aacatgccaagaaag

SEQ ID NO: 1669559 - DNA, 15 bp, Homo sapiens
acatgccaagaaagt

SEQ ID NO: 1669560 - DNA, 15 bp, Homo sapiens
catgccaagaaagta

SEQ ID NO: 1669561 - DNA, 15 bp, Homo sapiens
atgccaagaaagtat

SEQ ID NO: 1669562 - DNA, 15 bp, Homo sapiens
tgccaagaaagtatt

SEQ ID NO: 1669563 - DNA, 15 bp, Homo sapiens
gccaagaaagtattc

SEQ ID NO: 1669564 - DNA, 15 bp, Homo sapiens
ccaagaaagtattcc

SEQ ID NO: 1669565 - DNA, 15 bp, Homo sapiens
caagaaagtattccc

SEQ ID NO: 1669566 - DNA, 15 bp, Homo sapiens
aagaaagtattccca

SEQ ID NO: 1669567 - DNA, 15 bp, Homo sapiens
agaaagtattcccat

SEQ ID NO: 1669568 - DNA, 15 bp, Homo sapiens
gaaagtattcccatt

SEQ ID NO: 1669569 - DNA, 15 bp, Homo sapiens
aaagtattcccattt

SEQ ID NO: 1669570 - DNA, 15 bp, Homo sapiens
aagtattcccatttc

SEQ ID NO: 1669571 - DNA, 15 bp, Homo sapiens
agtattcccatttca

SEQ ID NO: 1669572 - DNA, 15 bp, Homo sapiens
gtattcccatttcat

SEQ ID NO: 1669573 - DNA, 15 bp, Homo sapiens
tattcccatttcatg

SEQ ID NO: 1669574 - DNA, 15 bp, Homo sapiens
attcccatttcatgt

SEQ ID NO: 1669575 - DNA, 15 bp, Homo sapiens
ttcccatttcatgtt

SEQ ID NO: 1669576 - DNA, 15 bp, Homo sapiens
tcccatttcatgttt

SEQ ID NO: 1669577 - DNA, 15 bp, Homo sapiens
cccatttcatgtttg

SEQ ID NO: 1669578 - DNA, 15 bp, Homo sapiens
ccatttcatgtttgt

SEQ ID NO: 1669579 - DNA, 15 bp, Homo sapiens
catttcatgtttgtt

SEQ ID NO: 1669580 - DNA, 15 bp, Homo sapiens
atttcatgtttgttt

SEQ ID NO: 1669581 - DNA, 15 bp, Homo sapiens
tttcatgtttgtttc

SEQ ID NO: 1669582 - DNA, 15 bp, Homo sapiens
ttcatgtttgtttct

SEQ ID NO: 1669583 - DNA, 15 bp, Homo sapiens
tcatgtttgtttctt

SEQ ID NO: 1669584 - DNA, 15 bp, Homo sapiens
catgtttgtttcttt

SEQ ID NO: 1669585 - DNA, 15 bp, Homo sapiens
atgtttgtttctttt

SEQ ID NO: 1669586 - DNA, 15 bp, Homo sapiens
tgtttgtttcttttt

SEQ ID NO: 1669587 - DNA, 15 bp, Homo sapiens
gtttgtttctttttt

SEQ ID NO: 1669588 - DNA, 15 bp, Homo sapiens
tgtttcttttttttc

SEQ ID NO: 1669589 - DNA, 15 bp, Homo sapiens
gtttcttttttttct

SEQ ID NO: 1669590 - DNA, 15 bp, Homo sapiens
tttttcttttctttc

SEQ ID NO: 1669591 - DNA, 15 bp, Homo sapiens
cttttctttctttat

SEQ ID NO: 1669592 - DNA, 15 bp, Homo sapiens
ttttctttctttatt

SEQ ID NO: 1669593 - DNA, 15 bp, Homo sapiens
tttctttctttattt

SEQ ID NO: 1669594 - DNA, 15 bp, Homo sapiens
ttctttctttatttt

SEQ ID NO: 1669595 - DNA, 15 bp, Homo sapiens
tctttctttattttg

SEQ ID NO: 1669596 - DNA, 15 bp, Homo sapiens
ctttctttattttgt

SEQ ID NO: 1669597 - DNA, 15 bp, Homo sapiens
tttctttattttgtt

SEQ ID NO: 1669598 - DNA, 15 bp, Homo sapiens
ttctttattttgttt

SEQ ID NO: 1669599 - DNA, 15 bp, Homo sapiens
tctttattttgtttt

SEQ ID NO: 1669600 - DNA, 15 bp, Homo sapiens
ctttattttgttttt

SEQ ID NO: 1669601 - DNA, 15 bp, Homo sapiens
tttattttgtttttg

SEQ ID NO: 1669602 - DNA, 15 bp, Homo sapiens
ttattttgtttttga

SEQ ID NO: 1669603 - DNA, 15 bp, Homo sapiens
tattttgtttttgag

SEQ ID NO: 1669604 - DNA, 15 bp, Homo sapiens
attttgtttttgaga

SEQ ID NO: 1669605 - DNA, 15 bp, Homo sapiens
gagtctcactctgtg

SEQ ID NO: 1669606 - DNA, 15 bp, Homo sapiens
agtctcactctgtga

SEQ ID NO: 1669607 - DNA, 15 bp, Homo sapiens
gtctcactctgtgat

SEQ ID NO: 1669608 - DNA, 15 bp, Homo sapiens
tctcactctgtgatt

SEQ ID NO: 1669609 - DNA, 15 bp, Homo sapiens
ctcactctgtgattt

SEQ ID NO: 1669610 - DNA, 15 bp, Homo sapiens
tcactctgtgatttt

SEQ ID NO: 1669611 - DNA, 15 bp, Homo sapiens
cactctgtgattttt

SEQ ID NO: 1669612 - DNA, 15 bp, Homo sapiens
actctgtgatttttt

SEQ ID NO: 1669613 - DNA, 15 bp, Homo sapiens
ctctgtgattttttt

SEQ ID NO: 1669614 - DNA, 15 bp, Homo sapiens
tctgtgatttttttc

SEQ ID NO: 1669615 - DNA, 15 bp, Homo sapiens
ctgtgatttttttca

SEQ ID NO: 1669616 - DNA, 15 bp, Homo sapiens
tgtgatttttttcat

SEQ ID NO: 1669617 - DNA, 15 bp, Homo sapiens
gtgatttttttcatc

SEQ ID NO: 1669618 - DNA, 15 bp, Homo sapiens
tgatttttttcatct

SEQ ID NO: 1669619 - DNA, 15 bp, Homo sapiens
gatttttttcatctc

SEQ ID NO: 1669620 - DNA, 15 bp, Homo sapiens
atttttttcatctct

SEQ ID NO: 1669621 - DNA, 15 bp, Homo sapiens
tttttttcatctcta

SEQ ID NO: 1669622 - DNA, 15 bp, Homo sapiens
ttttttcatctctaa

SEQ ID NO: 1669623 - DNA, 15 bp, Homo sapiens
ttttcatctctaaat

SEQ ID NO: 1669624 - DNA, 15 bp, Homo sapiens
tttcatctctaaatt

SEQ ID NO: 1669625 - DNA, 15 bp, Homo sapiens
ttcatctctaaattt

SEQ ID NO: 1669626 - DNA, 15 bp, Homo sapiens
tcatctctaaatttc

SEQ ID NO: 1669627 - DNA, 15 bp, Homo sapiens
catctctaaatttcc

SEQ ID NO: 1669628 - DNA, 15 bp, Homo sapiens
atctctaaatttcct

SEQ ID NO: 1669629 - DNA, 15 bp, Homo sapiens
tctctaaatttccta

SEQ ID NO: 1669630 - DNA, 15 bp, Homo sapiens
ctctaaatttcctac

SEQ ID NO: 1669631 - DNA, 15 bp, Homo sapiens
tctaaatttcctaca

SEQ ID NO: 1669632 - DNA, 15 bp, Homo sapiens
ctaaatttcctacat

SEQ ID NO: 1669633 - DNA, 15 bp, Homo sapiens
taaatttcctacatc

SEQ ID NO: 1669634 - DNA, 15 bp, Homo sapiens
aaatttcctacatcc

SEQ ID NO: 1669635 - DNA, 15 bp, Homo sapiens
aatttcctacatcca

SEQ ID NO: 1669636 - DNA, 15 bp, Homo sapiens
atttcctacatccat

SEQ ID NO: 1669637 - DNA, 15 bp, Homo sapiens
tttcctacatccata

SEQ ID NO: 1669638 - DNA, 15 bp, Homo sapiens
ttcctacatccatat

SEQ ID NO: 1669639 - DNA, 15 bp, Homo sapiens
tcctacatccatatg

SEQ ID NO: 1669640 - DNA, 15 bp, Homo sapiens
cctacatccatatgg

SEQ ID NO: 1669641 - DNA, 15 bp, Homo sapiens
ctacatccatatggc

SEQ ID NO: 1669642 - DNA, 15 bp, Homo sapiens
tacatccatatggcc

SEQ ID NO: 1669643 - DNA, 15 bp, Homo sapiens
acatccatatggcca

SEQ ID NO: 1669644 - DNA, 15 bp, Homo sapiens
catccatatggccac

SEQ ID NO: 1669645 - DNA, 15 bp, Homo sapiens
atccatatggccacc

SEQ ID NO: 1669646 - DNA, 15 bp, Homo sapiens
tccatatggccacca

SEQ ID NO: 1669647 - DNA, 15 bp, Homo sapiens
ccatatggccaccat

SEQ ID NO: 1669648 - DNA, 15 bp, Homo sapiens
catatggccaccatg

SEQ ID NO: 1669649 - DNA, 15 bp, Homo sapiens
atatggccaccatga

SEQ ID NO: 1669650 - DNA, 15 bp, Homo sapiens
tatggccaccatgag

SEQ ID NO: 1669651 - DNA, 15 bp, Homo sapiens
atggccaccatgagg

SEQ ID NO: 1669652 - DNA, 15 bp, Homo sapiens
tggccaccatgaggc

SEQ ID NO: 1669653 - DNA, 15 bp, Homo sapiens
ggccaccatgaggcc

SEQ ID NO: 1669654 - DNA, 15 bp, Homo sapiens
gccaccatgaggccc

SEQ ID NO: 1669655 - DNA, 15 bp, Homo sapiens
ccaccatgaggcccc

SEQ ID NO: 1669656 - DNA, 15 bp, Homo sapiens
caccatgaggcccca

SEQ ID NO: 1669657 - DNA, 15 bp, Homo sapiens
accatgaggccccag

SEQ ID NO: 1669658 - DNA, 15 bp, Homo sapiens
ccatgaggccccagg

SEQ ID NO: 1669659 - DNA, 15 bp, Homo sapiens
catgaggccccaggc

SEQ ID NO: 1669660 - DNA, 15 bp, Homo sapiens
atgaggccccaggct

SEQ ID NO: 1669661 - DNA, 15 bp, Homo sapiens
tgaggccccaggctg

SEQ ID NO: 1669662 - DNA, 15 bp, Homo sapiens
gaggccccaggctgg

SEQ ID NO: 1669663 - DNA, 15 bp, Homo sapiens
aggccccaggctggc

SEQ ID NO: 1669664 - DNA, 15 bp, Homo sapiens
ggccccaggctggcc

SEQ ID NO: 1669665 - DNA, 15 bp, Homo sapiens
gccccaggctggccg

SEQ ID NO: 1669666 - DNA, 15 bp, Homo sapiens
ccccaggctggccga

SEQ ID NO: 1669667 - DNA, 15 bp, Homo sapiens
cccaggctggccgat

SEQ ID NO: 1669668 - DNA, 15 bp, Homo sapiens
ccaggctggccgatg

SEQ ID NO: 1669669 - DNA, 15 bp, Homo sapiens
caggctggccgatgg

SEQ ID NO: 1669670 - DNA, 15 bp, Homo sapiens
aggctggccgatggt

SEQ ID NO: 1669671 - DNA, 15 bp, Homo sapiens
ggctggccgatggtt

SEQ ID NO: 1669672 - DNA, 15 bp, Homo sapiens
gctggccgatggttg

SEQ ID NO: 1669673 - DNA, 15 bp, Homo sapiens
ctggccgatggttgc

SEQ ID NO: 1669674 - DNA, 15 bp, Homo sapiens
tggccgatggttgct

SEQ ID NO: 1669675 - DNA, 15 bp, Homo sapiens
ggccgatggttgctg

SEQ ID NO: 1669676 - DNA, 15 bp, Homo sapiens
gccgatggttgctgt

SEQ ID NO: 1669677 - DNA, 15 bp, Homo sapiens
ccgatggttgctgtt

SEQ ID NO: 1669678 - DNA, 15 bp, Homo sapiens
cgatggttgctgtta

SEQ ID NO: 1669679 - DNA, 15 bp, Homo sapiens
gatggttgctgttag

SEQ ID NO: 1669680 - DNA, 15 bp, Homo sapiens
atggttgctgttagc

SEQ ID NO: 1669681 - DNA, 15 bp, Homo sapiens
tggttgctgttagct

SEQ ID NO: 1669682 - DNA, 15 bp, Homo sapiens
ggttgctgttagctt

SEQ ID NO: 1669683 - DNA, 15 bp, Homo sapiens
gttgctgttagctta

SEQ ID NO: 1669684 - DNA, 15 bp, Homo sapiens
ttgctgttagcttat

SEQ ID NO: 1669685 - DNA, 15 bp, Homo sapiens
tgctgttagcttatt

SEQ ID NO: 1669686 - DNA, 15 bp, Homo sapiens
gctgttagcttattg

SEQ ID NO: 1669687 - DNA, 15 bp, Homo sapiens
ctgttagcttattgg

SEQ ID NO: 1669688 - DNA, 15 bp, Homo sapiens
tgttagcttattggg

SEQ ID NO: 1669689 - DNA, 15 bp, Homo sapiens
gttagcttattggga

SEQ ID NO: 1669690 - DNA, 15 bp, Homo sapiens
ttagcttattgggaa

SEQ ID NO: 1669691 - DNA, 15 bp, Homo sapiens
tagcttattgggaaa

SEQ ID NO: 1669692 - DNA, 15 bp, Homo sapiens
agcttattgggaaat

SEQ ID NO: 1669693 - DNA, 15 bp, Homo sapiens
gcttattgggaaatc

SEQ ID NO: 1669694 - DNA, 15 bp, Homo sapiens
cttattgggaaatca

SEQ ID NO: 1669695 - DNA, 15 bp, Homo sapiens
ttattgggaaatcac

SEQ ID NO: 1669696 - DNA, 15 bp, Homo sapiens
tattgggaaatcact

SEQ ID NO: 1669697 - DNA, 15 bp, Homo sapiens
attgggaaatcactg

SEQ ID NO: 1669698 - DNA, 15 bp, Homo sapiens
ttgggaaatcactgt

SEQ ID NO: 1669699 - DNA, 15 bp, Homo sapiens
tgggaaatcactgtt

SEQ ID NO: 1669700 - DNA, 15 bp, Homo sapiens
gggaaatcactgttt

SEQ ID NO: 1669701 - DNA, 15 bp, Homo sapiens
ggaaatcactgtttg

SEQ ID NO: 1669702 - DNA, 15 bp, Homo sapiens
gaaatcactgtttgg

SEQ ID NO: 1669703 - DNA, 15 bp, Homo sapiens
aaatcactgtttgga

SEQ ID NO: 1669704 - DNA, 15 bp, Homo sapiens
aatcactgtttggaa

SEQ ID NO: 1669705 - DNA, 15 bp, Homo sapiens
atcactgtttggaag

SEQ ID NO: 1669706 - DNA, 15 bp, Homo sapiens
tcactgtttggaagg

SEQ ID NO: 1669707 - DNA, 15 bp, Homo sapiens
cactgtttggaaggt

SEQ ID NO: 1669708 - DNA, 15 bp, Homo sapiens
actgtttggaaggtg

SEQ ID NO: 1669709 - DNA, 15 bp, Homo sapiens
ctgtttggaaggtgc

SEQ ID NO: 1669710 - DNA, 15 bp, Homo sapiens
tgtttggaaggtgct

SEQ ID NO: 1669711 - DNA, 15 bp, Homo sapiens
gtttggaaggtgctg

SEQ ID NO: 1669712 - DNA, 15 bp, Homo sapiens
tttggaaggtgctgg

SEQ ID NO: 1669713 - DNA, 15 bp, Homo sapiens
ttggaaggtgctggt

SEQ ID NO: 1669714 - DNA, 15 bp, Homo sapiens
tggaaggtgctggtt

SEQ ID NO: 1669715 - DNA, 15 bp, Homo sapiens
ggaaggtgctggttg

SEQ ID NO: 1669716 - DNA, 15 bp, Homo sapiens
gaaggtgctggttgt

SEQ ID NO: 1669717 - DNA, 15 bp, Homo sapiens
aaggtgctggttgtt

SEQ ID NO: 1669718 - DNA, 15 bp, Homo sapiens
aggtgctggttgttt

SEQ ID NO: 1669719 - DNA, 15 bp, Homo sapiens
ggtgctggttgtttt

SEQ ID NO: 1669720 - DNA, 15 bp, Homo sapiens
gtgctggttgttttt

SEQ ID NO: 1669721 - DNA, 15 bp, Homo sapiens
tgctggttgtttttt

SEQ ID NO: 1669722 - DNA, 15 bp, Homo sapiens
gctggttgttttttg

SEQ ID NO: 1669723 - DNA, 15 bp, Homo sapiens
ctggttgttttttgt

SEQ ID NO: 1669724 - DNA, 15 bp, Homo sapiens
tggttgttttttgtt

SEQ ID NO: 1669725 - DNA, 15 bp, Homo sapiens
ggttgttttttgttg

SEQ ID NO: 1669726 - DNA, 15 bp, Homo sapiens
gttgttttttgttgt

SEQ ID NO: 1669727 - DNA, 15 bp, Homo sapiens
ttgttttttgttgtt

SEQ ID NO: 1669728 - DNA, 15 bp, Homo sapiens
tgttttttgttgttt

SEQ ID NO: 1669729 - DNA, 15 bp, Homo sapiens
ttttttgttgtttgt

SEQ ID NO: 1669730 - DNA, 15 bp, Homo sapiens
tttttgttgtttgtt

SEQ ID NO: 1669731 - DNA, 15 bp, Homo sapiens
ttttgttgtttgttg

SEQ ID NO: 1669732 - DNA, 15 bp, Homo sapiens
tttgttgtttgttgt

SEQ ID NO: 1669733 - DNA, 15 bp, Homo sapiens
ttgttgtttgttgtt

SEQ ID NO: 1669734 - DNA, 15 bp, Homo sapiens
tgttgtttgttgttt

SEQ ID NO: 1669735 - DNA, 15 bp, Homo sapiens
gttgtttgttgtttt

SEQ ID NO: 1669736 - DNA, 15 bp, Homo sapiens
ttgtttgttgttttt

SEQ ID NO: 1669737 - DNA, 15 bp, Homo sapiens
tgtttgttgtttttg

SEQ ID NO: 1669738 - DNA, 15 bp, Homo sapiens
gtttgttgtttttgt

SEQ ID NO: 1669739 - DNA, 15 bp, Homo sapiens
tttgttgtttttgtt

SEQ ID NO: 1669740 - DNA, 15 bp, Homo sapiens
ttgttgtttttgttt

SEQ ID NO: 1669741 - DNA, 15 bp, Homo sapiens
tgttgtttttgtttt

SEQ ID NO: 1669742 - DNA, 15 bp, Homo sapiens
gttgtttttgttttt

SEQ ID NO: 1669743 - DNA, 15 bp, Homo sapiens
ttgtttttgttttga

SEQ ID NO: 1669744 - DNA, 15 bp, Homo sapiens
tgtttttgttttgag

SEQ ID NO: 1669745 - DNA, 15 bp, Homo sapiens
gtttttgttttgaga

SEQ ID NO: 1669746 - DNA, 15 bp, Homo sapiens
gctctgtcgccaggg

SEQ ID NO: 1669747 - DNA, 15 bp, Homo sapiens
ctctgtcgccagggt

SEQ ID NO: 1669748 - DNA, 15 bp, Homo sapiens
tctgtcgccagggtg

SEQ ID NO: 1669749 - DNA, 15 bp, Homo sapiens
ctgtcgccagggtgg

SEQ ID NO: 1669750 - DNA, 15 bp, Homo sapiens
tgtcgccagggtgga

SEQ ID NO: 1669751 - DNA, 15 bp, Homo sapiens
gtcgccagggtggag

SEQ ID NO: 1669752 - DNA, 15 bp, Homo sapiens
tcgccagggtggagt

SEQ ID NO: 1669753 - DNA, 15 bp, Homo sapiens
cgccagggtggagtg

SEQ ID NO: 1669754 - DNA, 15 bp, Homo sapiens
gccagggtggagtgc

SEQ ID NO: 1669755 - DNA, 15 bp, Homo sapiens
gcagtggcgcgatca

SEQ ID NO: 1669756 - DNA, 15 bp, Homo sapiens
cagtggcgcgatcag

SEQ ID NO: 1669757 - DNA, 15 bp, Homo sapiens
agtggcgcgatcagc

SEQ ID NO: 1669758 - DNA, 15 bp, Homo sapiens
gtggcgcgatcagct

SEQ ID NO: 1669759 - DNA, 15 bp, Homo sapiens
tggcgcgatcagctc

SEQ ID NO: 1669760 - DNA, 15 bp, Homo sapiens
ggcgcgatcagctca

SEQ ID NO: 1669761 - DNA, 15 bp, Homo sapiens
gcgcgatcagctcac

SEQ ID NO: 1669762 - DNA, 15 bp, Homo sapiens
cgcgatcagctcact

SEQ ID NO: 1669763 - DNA, 15 bp, Homo sapiens
gcgatcagctcactg

SEQ ID NO: 1669764 - DNA, 15 bp, Homo sapiens
cgatcagctcactgc

SEQ ID NO: 1669765 - DNA, 15 bp, Homo sapiens
gatcagctcactgca

SEQ ID NO: 1669766 - DNA, 15 bp, Homo sapiens
atcagctcactgcaa

SEQ ID NO: 1669767 - DNA, 15 bp, Homo sapiens
caacctccgcttcct

SEQ ID NO: 1669768 - DNA, 15 bp, Homo sapiens
aacctccgcttcctg

SEQ ID NO: 1669769 - DNA, 15 bp, Homo sapiens
acctccgcttcctgg

SEQ ID NO: 1669770 - DNA, 15 bp, Homo sapiens
cctccgcttcctggg

SEQ ID NO: 1669771 - DNA, 15 bp, Homo sapiens
ctccgcttcctgggt

SEQ ID NO: 1669772 - DNA, 15 bp, Homo sapiens
tccgcttcctgggtt

SEQ ID NO: 1669773 - DNA, 15 bp, Homo sapiens
ccgcttcctgggttc

SEQ ID NO: 1669774 - DNA, 15 bp, Homo sapiens
cgcttcctgggttca

SEQ ID NO: 1669775 - DNA, 15 bp, Homo sapiens
tcctgggttcaagcc

SEQ ID NO: 1669776 - DNA, 15 bp, Homo sapiens
cctgggttcaagcca

SEQ ID NO: 1669777 - DNA, 15 bp, Homo sapiens
ctgggttcaagccat

SEQ ID NO: 1669778 - DNA, 15 bp, Homo sapiens
tgggttcaagccatt

SEQ ID NO: 1669779 - DNA, 15 bp, Homo sapiens
gttcaagccattctc

SEQ ID NO: 1669780 - DNA, 15 bp, Homo sapiens
ttcaagccattctcc

SEQ ID NO: 1669781 - DNA, 15 bp, Homo sapiens
tcaagccattctcct

SEQ ID NO: 1669782 - DNA, 15 bp, Homo sapiens
caagccattctcctg

SEQ ID NO: 1669783 - DNA, 15 bp, Homo sapiens
aagccattctcctgc

SEQ ID NO: 1669784 - DNA, 15 bp, Homo sapiens
agccattctcctgcc

SEQ ID NO: 1669785 - DNA, 15 bp, Homo sapiens
gcctcccaagtagcg

SEQ ID NO: 1669786 - DNA, 15 bp, Homo sapiens
cctcccaagtagcgc

SEQ ID NO: 1669787 - DNA, 15 bp, Homo sapiens
ctcccaagtagcgcg

SEQ ID NO: 1669788 - DNA, 15 bp, Homo sapiens
tcccaagtagcgcgg

SEQ ID NO: 1669789 - DNA, 15 bp, Homo sapiens
cccaagtagcgcgga

SEQ ID NO: 1669790 - DNA, 15 bp, Homo sapiens
ccaagtagcgcggat

SEQ ID NO: 1669791 - DNA, 15 bp, Homo sapiens
caagtagcgcggatt

SEQ ID NO: 1669792 - DNA, 15 bp, Homo sapiens
aagtagcgcggatta

SEQ ID NO: 1669793 - DNA, 15 bp, Homo sapiens
agtagcgcggattac

SEQ ID NO: 1669794 - DNA, 15 bp, Homo sapiens
gtagcgcggattaca

SEQ ID NO: 1669795 - DNA, 15 bp, Homo sapiens
tagcgcggattacag

SEQ ID NO: 1669796 - DNA, 15 bp, Homo sapiens
agcgcggattacagg

SEQ ID NO: 1669797 - DNA, 15 bp, Homo sapiens
gcgcggattacaggc

SEQ ID NO: 1669798 - DNA, 15 bp, Homo sapiens
cgcggattacaggca

SEQ ID NO: 1669799 - DNA, 15 bp, Homo sapiens
gcggattacaggcat

SEQ ID NO: 1669800 - DNA, 15 bp, Homo sapiens
cggattacaggcatg

SEQ ID NO: 1669801 - DNA, 15 bp, Homo sapiens
catgtgccaccacct

SEQ ID NO: 1669802 - DNA, 15 bp, Homo sapiens
atgtgccaccacctc

SEQ ID NO: 1669803 - DNA, 15 bp, Homo sapiens
tgtgccaccacctcc

SEQ ID NO: 1669804 - DNA, 15 bp, Homo sapiens
gtgccaccacctccg

SEQ ID NO: 1669805 - DNA, 15 bp, Homo sapiens
tgccaccacctccgg

SEQ ID NO: 1669806 - DNA, 15 bp, Homo sapiens
gccaccacctccggc

SEQ ID NO: 1669807 - DNA, 15 bp, Homo sapiens
ccaccacctccggct

SEQ ID NO: 1669808 - DNA, 15 bp, Homo sapiens
caccacctccggcta

SEQ ID NO: 1669809 - DNA, 15 bp, Homo sapiens
accacctccggctat

SEQ ID NO: 1669810 - DNA, 15 bp, Homo sapiens
ccacctccggctatt

SEQ ID NO: 1669811 - DNA, 15 bp, Homo sapiens
cacctccggctattt

SEQ ID NO: 1669812 - DNA, 15 bp, Homo sapiens
acctccggctatttt

SEQ ID NO: 1669813 - DNA, 15 bp, Homo sapiens
cctccggctattttt

SEQ ID NO: 1669814 - DNA, 15 bp, Homo sapiens
ctccggctatttttt

SEQ ID NO: 1669815 - DNA, 15 bp, Homo sapiens
tccggctattttttt

SEQ ID NO: 1669816 - DNA, 15 bp, Homo sapiens
ccggctatttttttt

SEQ ID NO: 1669817 - DNA, 15 bp, Homo sapiens
cggctattttttttt

SEQ ID NO: 1669818 - DNA, 15 bp, Homo sapiens
ggctatttttttttc

SEQ ID NO: 1669819 - DNA, 15 bp, Homo sapiens
gctatttttttttct

SEQ ID NO: 1669820 - DNA, 15 bp, Homo sapiens
ctatttttttttcta

SEQ ID NO: 1669821 - DNA, 15 bp, Homo sapiens
tatttttttttctat

SEQ ID NO: 1669822 - DNA, 15 bp, Homo sapiens
atttttttttctatt

SEQ ID NO: 1669823 - DNA, 15 bp, Homo sapiens
tttttttttctattt

SEQ ID NO: 1669824 - DNA, 15 bp, Homo sapiens
ttttttttctattta

SEQ ID NO: 1669825 - DNA, 15 bp, Homo sapiens
tttttttctatttag

SEQ ID NO: 1669826 - DNA, 15 bp, Homo sapiens
ttttttctatttagt

SEQ ID NO: 1669827 - DNA, 15 bp, Homo sapiens
tttttctatttagta

SEQ ID NO: 1669828 - DNA, 15 bp, Homo sapiens
ttttctatttagtag

SEQ ID NO: 1669829 - DNA, 15 bp, Homo sapiens
tttctatttagtaga

SEQ ID NO: 1669830 - DNA, 15 bp, Homo sapiens
ttctatttagtagag

SEQ ID NO: 1669831 - DNA, 15 bp, Homo sapiens
tctatttagtagaga

SEQ ID NO: 1669832 - DNA, 15 bp, Homo sapiens
ctatttagtagagat

SEQ ID NO: 1669833 - DNA, 15 bp, Homo sapiens
tatttagtagagatg

SEQ ID NO: 1669834 - DNA, 15 bp, Homo sapiens
atttagtagagatgg

SEQ ID NO: 1669835 - DNA, 15 bp, Homo sapiens
tttcaccatgttagt

SEQ ID NO: 1669836 - DNA, 15 bp, Homo sapiens
ttcaccatgttagtc

SEQ ID NO: 1669837 - DNA, 15 bp, Homo sapiens
tcaccatgttagtca

SEQ ID NO: 1669838 - DNA, 15 bp, Homo sapiens
caccatgttagtcag

SEQ ID NO: 1669839 - DNA, 15 bp, Homo sapiens
accatgttagtcagg

SEQ ID NO: 1669840 - DNA, 15 bp, Homo sapiens
ccatgttagtcaggc

SEQ ID NO: 1669841 - DNA, 15 bp, Homo sapiens
catgttagtcaggct

SEQ ID NO: 1669842 - DNA, 15 bp, Homo sapiens
atgttagtcaggctg

SEQ ID NO: 1669843 - DNA, 15 bp, Homo sapiens
tgttagtcaggctgg

SEQ ID NO: 1669844 - DNA, 15 bp, Homo sapiens
gttagtcaggctggt

SEQ ID NO: 1669845 - DNA, 15 bp, Homo sapiens
ttagtcaggctggtc

SEQ ID NO: 1669846 - DNA, 15 bp, Homo sapiens
tagtcaggctggtca

SEQ ID NO: 1669847 - DNA, 15 bp, Homo sapiens
agtcaggctggtcat

SEQ ID NO: 1669848 - DNA, 15 bp, Homo sapiens
gtcaggctggtcatg

SEQ ID NO: 1669849 - DNA, 15 bp, Homo sapiens
tcaggctggtcatga

SEQ ID NO: 1669850 - DNA, 15 bp, Homo sapiens
caggctggtcatgaa

SEQ ID NO: 1669851 - DNA, 15 bp, Homo sapiens
aggctggtcatgaac

SEQ ID NO: 1669852 - DNA, 15 bp, Homo sapiens
ggctggtcatgaact

SEQ ID NO: 1669853 - DNA, 15 bp, Homo sapiens
gctggtcatgaactc

SEQ ID NO: 1669854 - DNA, 15 bp, Homo sapiens
ctggtcatgaactct

SEQ ID NO: 1669855 - DNA, 15 bp, Homo sapiens
tggtcatgaactctt

SEQ ID NO: 1669856 - DNA, 15 bp, Homo sapiens
ggtcatgaactcttg

SEQ ID NO: 1669857 - DNA, 15 bp, Homo sapiens
gtcatgaactcttga

SEQ ID NO: 1669858 - DNA, 15 bp, Homo sapiens
tcatgaactcttgac

SEQ ID NO: 1669859 - DNA, 15 bp, Homo sapiens
catgaactcttgacc

SEQ ID NO: 1669860 - DNA, 15 bp, Homo sapiens
atgaactcttgacct

SEQ ID NO: 1669861 - DNA, 15 bp, Homo sapiens
ttacaggcgtgcact

SEQ ID NO: 1669862 - DNA, 15 bp, Homo sapiens
tacaggcgtgcactg

SEQ ID NO: 1669863 - DNA, 15 bp, Homo sapiens
acaggcgtgcactgc

SEQ ID NO: 1669864 - DNA, 15 bp, Homo sapiens
caggcgtgcactgct

SEQ ID NO: 1669865 - DNA, 15 bp, Homo sapiens
aggcgtgcactgctg

SEQ ID NO: 1669866 - DNA, 15 bp, Homo sapiens
ggcgtgcactgctgc

SEQ ID NO: 1669867 - DNA, 15 bp, Homo sapiens
gcgtgcactgctgca

SEQ ID NO: 1669868 - DNA, 15 bp, Homo sapiens
cgtgcactgctgcac

SEQ ID NO: 1669869 - DNA, 15 bp, Homo sapiens
gtgcactgctgcacc

SEQ ID NO: 1669870 - DNA, 15 bp, Homo sapiens
tgcactgctgcaccc

SEQ ID NO: 1669871 - DNA, 15 bp, Homo sapiens
gcactgctgcaccca

SEQ ID NO: 1669872 - DNA, 15 bp, Homo sapiens
cactgctgcacccag

SEQ ID NO: 1669873 - DNA, 15 bp, Homo sapiens
actgctgcacccagc

SEQ ID NO: 1669874 - DNA, 15 bp, Homo sapiens
ctgctgcacccagcc

SEQ ID NO: 1669875 - DNA, 15 bp, Homo sapiens
tgctgcacccagcct

SEQ ID NO: 1669876 - DNA, 15 bp, Homo sapiens
gctgcacccagcctt

SEQ ID NO: 1669877 - DNA, 15 bp, Homo sapiens
ctgcacccagccttt

SEQ ID NO: 1669878 - DNA, 15 bp, Homo sapiens
tgcacccagcctttt

SEQ ID NO: 1669879 - DNA, 15 bp, Homo sapiens
gcacccagccttttt

SEQ ID NO: 1669880 - DNA, 15 bp, Homo sapiens
cacccagcctttttt

SEQ ID NO: 1669881 - DNA, 15 bp, Homo sapiens
acccagccttttttt

SEQ ID NO: 1669882 - DNA, 15 bp, Homo sapiens
cccagcctttttttg

SEQ ID NO: 1669883 - DNA, 15 bp, Homo sapiens
ccagcctttttttgt

SEQ ID NO: 1669884 - DNA, 15 bp, Homo sapiens
cagcctttttttgtt

SEQ ID NO: 1669885 - DNA, 15 bp, Homo sapiens
agcctttttttgttt

SEQ ID NO: 1669886 - DNA, 15 bp, Homo sapiens
gcctttttttgtttt

SEQ ID NO: 1669887 - DNA, 15 bp, Homo sapiens
cctttttttgttttt

SEQ ID NO: 1669888 - DNA, 15 bp, Homo sapiens
ctttttttgtttttt

SEQ ID NO: 1669889 - DNA, 15 bp, Homo sapiens
tttttgtttttttga

SEQ ID NO: 1669890 - DNA, 15 bp, Homo sapiens
ttttgtttttttgag

SEQ ID NO: 1669891 - DNA, 15 bp, Homo sapiens
tttgtttttttgaga

SEQ ID NO: 1669892 - DNA, 15 bp, Homo sapiens
ttgtttttttgagac

SEQ ID NO: 1669893 - DNA, 15 bp, Homo sapiens
tgtttttttgagaca

SEQ ID NO: 1669894 - DNA, 15 bp, Homo sapiens
gacagggtcttgctg

SEQ ID NO: 1669895 - DNA, 15 bp, Homo sapiens
acagggtcttgctgt

SEQ ID NO: 1669896 - DNA, 15 bp, Homo sapiens
cagggtcttgctgtc

SEQ ID NO: 1669897 - DNA, 15 bp, Homo sapiens
agggtcttgctgtca

SEQ ID NO: 1669898 - DNA, 15 bp, Homo sapiens
gggtcttgctgtcac

SEQ ID NO: 1669899 - DNA, 15 bp, Homo sapiens
ggtcttgctgtcacc

SEQ ID NO: 1669900 - DNA, 15 bp, Homo sapiens
gtcttgctgtcaccc

SEQ ID NO: 1669901 - DNA, 15 bp, Homo sapiens
tcttgctgtcaccca

SEQ ID NO: 1669902 - DNA, 15 bp, Homo sapiens
cttgctgtcacccag

SEQ ID NO: 1669903 - DNA, 15 bp, Homo sapiens
ttgctgtcacccagg

SEQ ID NO: 1669904 - DNA, 15 bp, Homo sapiens
tgctgtcacccaggt

SEQ ID NO: 1669905 - DNA, 15 bp, Homo sapiens
gctgtcacccaggtt

SEQ ID NO: 1669906 - DNA, 15 bp, Homo sapiens
ctgtcacccaggttg

SEQ ID NO: 1669907 - DNA, 15 bp, Homo sapiens
tgtcacccaggttga

SEQ ID NO: 1669908 - DNA, 15 bp, Homo sapiens
gtcacccaggttgaa

SEQ ID NO: 1669909 - DNA, 15 bp, Homo sapiens
tcacccaggttgaag

SEQ ID NO: 1669910 - DNA, 15 bp, Homo sapiens
cacccaggttgaagt

SEQ ID NO: 1669911 - DNA, 15 bp, Homo sapiens
acccaggttgaagta

SEQ ID NO: 1669912 - DNA, 15 bp, Homo sapiens
cccaggttgaagtaa

SEQ ID NO: 1669913 - DNA, 15 bp, Homo sapiens
ccaggttgaagtaag

SEQ ID NO: 1669914 - DNA, 15 bp, Homo sapiens
caggttgaagtaagg

SEQ ID NO: 1669915 - DNA, 15 bp, Homo sapiens
aggttgaagtaaggt

SEQ ID NO: 1669916 - DNA, 15 bp, Homo sapiens
ggttgaagtaaggtg

SEQ ID NO: 1669917 - DNA, 15 bp, Homo sapiens
gttgaagtaaggtgg

SEQ ID NO: 1669918 - DNA, 15 bp, Homo sapiens
ttgaagtaaggtggc

SEQ ID NO: 1669919 - DNA, 15 bp, Homo sapiens
tgaagtaaggtggca

SEQ ID NO: 1669920 - DNA, 15 bp, Homo sapiens
gaagtaaggtggcac

SEQ ID NO: 1669921 - DNA, 15 bp, Homo sapiens
aagtaaggtggcacg

SEQ ID NO: 1669922 - DNA, 15 bp, Homo sapiens
agtaaggtggcacga

SEQ ID NO: 1669923 - DNA, 15 bp, Homo sapiens
gtaaggtggcacgat

SEQ ID NO: 1669924 - DNA, 15 bp, Homo sapiens
taaggtggcacgatt

SEQ ID NO: 1669925 - DNA, 15 bp, Homo sapiens
aaggtggcacgatta

SEQ ID NO: 1669926 - DNA, 15 bp, Homo sapiens
aggtggcacgattat

SEQ ID NO: 1669927 - DNA, 15 bp, Homo sapiens
ggtggcacgattatg

SEQ ID NO: 1669928 - DNA, 15 bp, Homo sapiens
gtggcacgattatgg

SEQ ID NO: 1669929 - DNA, 15 bp, Homo sapiens
tggcacgattatggc

SEQ ID NO: 1669930 - DNA, 15 bp, Homo sapiens
ggcacgattatggct

SEQ ID NO: 1669931 - DNA, 15 bp, Homo sapiens
gcacgattatggctc

SEQ ID NO: 1669932 - DNA, 15 bp, Homo sapiens
cacgattatggctca

SEQ ID NO: 1669933 - DNA, 15 bp, Homo sapiens
acgattatggctcac

SEQ ID NO: 1669934 - DNA, 15 bp, Homo sapiens
cgattatggctcact

SEQ ID NO: 1669935 - DNA, 15 bp, Homo sapiens
gattatggctcactg

SEQ ID NO: 1669936 - DNA, 15 bp, Homo sapiens
attatggctcactgc

SEQ ID NO: 1669937 - DNA, 15 bp, Homo sapiens
ttatggctcactgcg

SEQ ID NO: 1669938 - DNA, 15 bp, Homo sapiens
tatggctcactgcgg

SEQ ID NO: 1669939 - DNA, 15 bp, Homo sapiens
atggctcactgcggc

SEQ ID NO: 1669940 - DNA, 15 bp, Homo sapiens
tggctcactgcggcc

SEQ ID NO: 1669941 - DNA, 15 bp, Homo sapiens
ggctcactgcggcct

SEQ ID NO: 1669942 - DNA, 15 bp, Homo sapiens
gctcactgcggcctt

SEQ ID NO: 1669943 - DNA, 15 bp, Homo sapiens
ctcactgcggccttg

SEQ ID NO: 1669944 - DNA, 15 bp, Homo sapiens
tcactgcggccttga

SEQ ID NO: 1669945 - DNA, 15 bp, Homo sapiens
cactgcggccttgat

SEQ ID NO: 1669946 - DNA, 15 bp, Homo sapiens
actgcggccttgatc

SEQ ID NO: 1669947 - DNA, 15 bp, Homo sapiens
ctgcggccttgatct

SEQ ID NO: 1669948 - DNA, 15 bp, Homo sapiens
tgcggccttgatctc

SEQ ID NO: 1669949 - DNA, 15 bp, Homo sapiens
gcggccttgatctcc

SEQ ID NO: 1669950 - DNA, 15 bp, Homo sapiens
cggccttgatctcct

SEQ ID NO: 1669951 - DNA, 15 bp, Homo sapiens
ggccttgatctcctt

SEQ ID NO: 1669952 - DNA, 15 bp, Homo sapiens
gccttgatctccttg

SEQ ID NO: 1669953 - DNA, 15 bp, Homo sapiens
ccttgatctccttgg

SEQ ID NO: 1669954 - DNA, 15 bp, Homo sapiens
cttgatctccttggc

SEQ ID NO: 1669955 - DNA, 15 bp, Homo sapiens
ttgatctccttggct

SEQ ID NO: 1669956 - DNA, 15 bp, Homo sapiens
tgatctccttggctc

SEQ ID NO: 1669957 - DNA, 15 bp, Homo sapiens
gatctccttggctca

SEQ ID NO: 1669958 - DNA, 15 bp, Homo sapiens
atctccttggctcaa

SEQ ID NO: 1669959 - DNA, 15 bp, Homo sapiens
tctccttggctcaag

SEQ ID NO: 1669960 - DNA, 15 bp, Homo sapiens
tccttggctcaagcg

SEQ ID NO: 1669961 - DNA, 15 bp, Homo sapiens
ccttggctcaagcga

SEQ ID NO: 1669962 - DNA, 15 bp, Homo sapiens
cttggctcaagcgat

SEQ ID NO: 1669963 - DNA, 15 bp, Homo sapiens
ttggctcaagcgatc

SEQ ID NO: 1669964 - DNA, 15 bp, Homo sapiens
tggctcaagcgatcc

SEQ ID NO: 1669965 - DNA, 15 bp, Homo sapiens
ctcaagcgatcctct

SEQ ID NO: 1669966 - DNA, 15 bp, Homo sapiens
tcaagcgatcctctc

SEQ ID NO: 1669967 - DNA, 15 bp, Homo sapiens
caagcgatcctctca

SEQ ID NO: 1669968 - DNA, 15 bp, Homo sapiens
aagcgatcctctcac

SEQ ID NO: 1669969 - DNA, 15 bp, Homo sapiens
agcgatcctctcact

SEQ ID NO: 1669970 - DNA, 15 bp, Homo sapiens
gcgatcctctcactt

SEQ ID NO: 1669971 - DNA, 15 bp, Homo sapiens
cgatcctctcacttc

SEQ ID NO: 1669972 - DNA, 15 bp, Homo sapiens
gatcctctcacttca

SEQ ID NO: 1669973 - DNA, 15 bp, Homo sapiens
atcctctcacttcag

SEQ ID NO: 1669974 - DNA, 15 bp, Homo sapiens
tcctctcacttcagc

SEQ ID NO: 1669975 - DNA, 15 bp, Homo sapiens
cctctcacttcagcc

SEQ ID NO: 1669976 - DNA, 15 bp, Homo sapiens
ctctcacttcagcct

SEQ ID NO: 1669977 - DNA, 15 bp, Homo sapiens
tctcacttcagcctc

SEQ ID NO: 1669978 - DNA, 15 bp, Homo sapiens
ctcacttcagcctct

SEQ ID NO: 1669979 - DNA, 15 bp, Homo sapiens
tcacttcagcctctc

SEQ ID NO: 1669980 - DNA, 15 bp, Homo sapiens
cacttcagcctctca

SEQ ID NO: 1669981 - DNA, 15 bp, Homo sapiens
acttcagcctctcaa

SEQ ID NO: 1669982 - DNA, 15 bp, Homo sapiens
ttcagcctctcaagc

SEQ ID NO: 1669983 - DNA, 15 bp, Homo sapiens
tcagcctctcaagca

SEQ ID NO: 1669984 - DNA, 15 bp, Homo sapiens
cagcctctcaagcag

SEQ ID NO: 1669985 - DNA, 15 bp, Homo sapiens
agcctctcaagcagt

SEQ ID NO: 1669986 - DNA, 15 bp, Homo sapiens
gcctctcaagcagtt

SEQ ID NO: 1669987 - DNA, 15 bp, Homo sapiens
cctctcaagcagttg

SEQ ID NO: 1669988 - DNA, 15 bp, Homo sapiens
ctctcaagcagttgg

SEQ ID NO: 1669989 - DNA, 15 bp, Homo sapiens
tctcaagcagttgga

SEQ ID NO: 1669990 - DNA, 15 bp, Homo sapiens
ctcaagcagttggaa

SEQ ID NO: 1669991 - DNA, 15 bp, Homo sapiens
tcaagcagttggaac

SEQ ID NO: 1669992 - DNA, 15 bp, Homo sapiens
caagcagttggaacc

SEQ ID NO: 1669993 - DNA, 15 bp, Homo sapiens
aagcagttggaacca

SEQ ID NO: 1669994 - DNA, 15 bp, Homo sapiens
agcagttggaaccac

SEQ ID NO: 1669995 - DNA, 15 bp, Homo sapiens
gcagttggaaccaca

SEQ ID NO: 1669996 - DNA, 15 bp, Homo sapiens
cagttggaaccacag

SEQ ID NO: 1669997 - DNA, 15 bp, Homo sapiens
agttggaaccacagg

SEQ ID NO: 1669998 - DNA, 15 bp, Homo sapiens
gttggaaccacaggc

SEQ ID NO: 1669999 - DNA, 15 bp, Homo sapiens
ttggaaccacaggct

SEQ ID NO: 1670000 - DNA, 15 bp, Homo sapiens
tggaaccacaggctg

SEQ ID NO: 1670001 - DNA, 15 bp, Homo sapiens
ggaaccacaggctgt

SEQ ID NO: 1670002 - DNA, 15 bp, Homo sapiens
gaaccacaggctgta

SEQ ID NO: 1670003 - DNA, 15 bp, Homo sapiens
aaccacaggctgtac

SEQ ID NO: 1670004 - DNA, 15 bp, Homo sapiens
accacaggctgtacc

SEQ ID NO: 1670005 - DNA, 15 bp, Homo sapiens
ccacaggctgtacca

SEQ ID NO: 1670006 - DNA, 15 bp, Homo sapiens
cacaggctgtaccac

SEQ ID NO: 1670007 - DNA, 15 bp, Homo sapiens
acaggctgtaccacc

SEQ ID NO: 1670008 - DNA, 15 bp, Homo sapiens
caggctgtaccacca

SEQ ID NO: 1670009 - DNA, 15 bp, Homo sapiens
aggctgtaccaccaa

SEQ ID NO: 1670010 - DNA, 15 bp, Homo sapiens
ggctgtaccaccaag

SEQ ID NO: 1670011 - DNA, 15 bp, Homo sapiens
gctgtaccaccaagc

SEQ ID NO: 1670012 - DNA, 15 bp, Homo sapiens
ctgtaccaccaagcc

SEQ ID NO: 1670013 - DNA, 15 bp, Homo sapiens
tgtaccaccaagcct

SEQ ID NO: 1670014 - DNA, 15 bp, Homo sapiens
gtaccaccaagcctg

SEQ ID NO: 1670015 - DNA, 15 bp, Homo sapiens
taccaccaagcctgg

SEQ ID NO: 1670016 - DNA, 15 bp, Homo sapiens
accaccaagcctggc

SEQ ID NO: 1670017 - DNA, 15 bp, Homo sapiens
ccaccaagcctggcc

SEQ ID NO: 1670018 - DNA, 15 bp, Homo sapiens
caccaagcctggcca

SEQ ID NO: 1670019 - DNA, 15 bp, Homo sapiens
accaagcctggccaa

SEQ ID NO: 1670020 - DNA, 15 bp, Homo sapiens
ccaagcctggccaat

SEQ ID NO: 1670021 - DNA, 15 bp, Homo sapiens
caagcctggccaatt

SEQ ID NO: 1670022 - DNA, 15 bp, Homo sapiens
aagcctggccaattt

SEQ ID NO: 1670023 - DNA, 15 bp, Homo sapiens
agcctggccaatttt

SEQ ID NO: 1670024 - DNA, 15 bp, Homo sapiens
gcctggccaattttt

SEQ ID NO: 1670025 - DNA, 15 bp, Homo sapiens
cctggccaatttttt

SEQ ID NO: 1670026 - DNA, 15 bp, Homo sapiens
ctggccaattttttt

SEQ ID NO: 1670027 - DNA, 15 bp, Homo sapiens
tggccaatttttttg

SEQ ID NO: 1670028 - DNA, 15 bp, Homo sapiens
ggccaatttttttgt

SEQ ID NO: 1670029 - DNA, 15 bp, Homo sapiens
gccaatttttttgta

SEQ ID NO: 1670030 - DNA, 15 bp, Homo sapiens
ccaatttttttgtac

SEQ ID NO: 1670031 - DNA, 15 bp, Homo sapiens
caatttttttgtaca

SEQ ID NO: 1670032 - DNA, 15 bp, Homo sapiens
aatttttttgtacag

SEQ ID NO: 1670033 - DNA, 15 bp, Homo sapiens
atttttttgtacaga

SEQ ID NO: 1670034 - DNA, 15 bp, Homo sapiens
tttttttgtacagac

SEQ ID NO: 1670035 - DNA, 15 bp, Homo sapiens
ttttttgtacagaca

SEQ ID NO: 1670036 - DNA, 15 bp, Homo sapiens
tttttgtacagacac

SEQ ID NO: 1670037 - DNA, 15 bp, Homo sapiens
ttttgtacagacaca

SEQ ID NO: 1670038 - DNA, 15 bp, Homo sapiens
tttgtacagacacag

SEQ ID NO: 1670039 - DNA, 15 bp, Homo sapiens
ttgtacagacacagg

SEQ ID NO: 1670040 - DNA, 15 bp, Homo sapiens
tgtacagacacaggc

SEQ ID NO: 1670041 - DNA, 15 bp, Homo sapiens
gtacagacacaggct

SEQ ID NO: 1670042 - DNA, 15 bp, Homo sapiens
tacagacacaggctg

SEQ ID NO: 1670043 - DNA, 15 bp, Homo sapiens
acagacacaggctgg

SEQ ID NO: 1670044 - DNA, 15 bp, Homo sapiens
cagacacaggctggt

SEQ ID NO: 1670045 - DNA, 15 bp, Homo sapiens
agacacaggctggtc

SEQ ID NO: 1670046 - DNA, 15 bp, Homo sapiens
gacacaggctggtct

SEQ ID NO: 1670047 - DNA, 15 bp, Homo sapiens
acacaggctggtctt

SEQ ID NO: 1670048 - DNA, 15 bp, Homo sapiens
cacaggctggtcttg

SEQ ID NO: 1670049 - DNA, 15 bp, Homo sapiens
tccaggcatgagccg

SEQ ID NO: 1670050 - DNA, 15 bp, Homo sapiens
ccaggcatgagccgc

SEQ ID NO: 1670051 - DNA, 15 bp, Homo sapiens
catgagccgctgcac

SEQ ID NO: 1670052 - DNA, 15 bp, Homo sapiens
atgagccgctgcacc

SEQ ID NO: 1670053 - DNA, 15 bp, Homo sapiens
tgagccgctgcaccc

SEQ ID NO: 1670054 - DNA, 15 bp, Homo sapiens
gagccgctgcacccg

SEQ ID NO: 1670055 - DNA, 15 bp, Homo sapiens
agccgctgcacccgg

SEQ ID NO: 1670056 - DNA, 15 bp, Homo sapiens
gccgctgcacccggc

SEQ ID NO: 1670057 - DNA, 15 bp, Homo sapiens
ccgctgcacccggca

SEQ ID NO: 1670058 - DNA, 15 bp, Homo sapiens
cgctgcacccggcaa

SEQ ID NO: 1670059 - DNA, 15 bp, Homo sapiens
gctgcacccggcaaa

SEQ ID NO: 1670060 - DNA, 15 bp, Homo sapiens
ctgcacccggcaaaa

SEQ ID NO: 1670061 - DNA, 15 bp, Homo sapiens
tgcacccggcaaaag

SEQ ID NO: 1670062 - DNA, 15 bp, Homo sapiens
gcacccggcaaaagg

SEQ ID NO: 1670063 - DNA, 15 bp, Homo sapiens
cacccggcaaaaggc

SEQ ID NO: 1670064 - DNA, 15 bp, Homo sapiens
acccggcaaaaggcc

SEQ ID NO: 1670065 - DNA, 15 bp, Homo sapiens
cccggcaaaaggccc

SEQ ID NO: 1670066 - DNA, 15 bp, Homo sapiens
ccggcaaaaggccct

SEQ ID NO: 1670067 - DNA, 15 bp, Homo sapiens
cggcaaaaggccctg

SEQ ID NO: 1670068 - DNA, 15 bp, Homo sapiens
ggcaaaaggccctgc

SEQ ID NO: 1670069 - DNA, 15 bp, Homo sapiens
gcaaaaggccctgct

SEQ ID NO: 1670070 - DNA, 15 bp, Homo sapiens
caaaaggccctgctt

SEQ ID NO: 1670071 - DNA, 15 bp, Homo sapiens
aaaaggccctgcttc

SEQ ID NO: 1670072 - DNA, 15 bp, Homo sapiens
aaaggccctgcttct

SEQ ID NO: 1670073 - DNA, 15 bp, Homo sapiens
aaggccctgcttctt

SEQ ID NO: 1670074 - DNA, 15 bp, Homo sapiens
aggccctgcttcttt

SEQ ID NO: 1670075 - DNA, 15 bp, Homo sapiens
ggccctgcttctttt

SEQ ID NO: 1670076 - DNA, 15 bp, Homo sapiens
gccctgcttcttttt

SEQ ID NO: 1670077 - DNA, 15 bp, Homo sapiens
ccctgcttctttttc

SEQ ID NO: 1670078 - DNA, 15 bp, Homo sapiens
cctgcttctttttct

SEQ ID NO: 1670079 - DNA, 15 bp, Homo sapiens
ctgcttctttttctc

SEQ ID NO: 1670080 - DNA, 15 bp, Homo sapiens
tgcttctttttctct

SEQ ID NO: 1670081 - DNA, 15 bp, Homo sapiens
gcttctttttctctg

SEQ ID NO: 1670082 - DNA, 15 bp, Homo sapiens
cttctttttctctgg

SEQ ID NO: 1670083 - DNA, 15 bp, Homo sapiens
ttctttttctctggt

SEQ ID NO: 1670084 - DNA, 15 bp, Homo sapiens
tctttttctctggtt

SEQ ID NO: 1670085 - DNA, 15 bp, Homo sapiens
ctttttctctggttg

SEQ ID NO: 1670086 - DNA, 15 bp, Homo sapiens
tttttctctggttgt

SEQ ID NO: 1670087 - DNA, 15 bp, Homo sapiens
ttttctctggttgtc

SEQ ID NO: 1670088 - DNA, 15 bp, Homo sapiens
tttctctggttgtct

SEQ ID NO: 1670089 - DNA, 15 bp, Homo sapiens
ttctctggttgtctc

SEQ ID NO: 1670090 - DNA, 15 bp, Homo sapiens
tctctggttgtctct

SEQ ID NO: 1670091 - DNA, 15 bp, Homo sapiens
ctctggttgtctctt

SEQ ID NO: 1670092 - DNA, 15 bp, Homo sapiens
tctggttgtctcttc

SEQ ID NO: 1670093 - DNA, 15 bp, Homo sapiens
ctggttgtctcttct

SEQ ID NO: 1670094 - DNA, 15 bp, Homo sapiens
tggttgtctcttctt

SEQ ID NO: 1670095 - DNA, 15 bp, Homo sapiens
ggttgtctcttcttg

SEQ ID NO: 1670096 - DNA, 15 bp, Homo sapiens
gttgtctcttcttga

SEQ ID NO: 1670097 - DNA, 15 bp, Homo sapiens
ttgtctcttcttgag

SEQ ID NO: 1670098 - DNA, 15 bp, Homo sapiens
tgtctcttcttgaga

SEQ ID NO: 1670099 - DNA, 15 bp, Homo sapiens
gtctcttcttgagaa

SEQ ID NO: 1670100 - DNA, 15 bp, Homo sapiens
tctcttcttgagaaa

SEQ ID NO: 1670101 - DNA, 15 bp, Homo sapiens
ctcttcttgagaaaa

SEQ ID NO: 1670102 - DNA, 15 bp, Homo sapiens
tcttcttgagaaaat

SEQ ID NO: 1670103 - DNA, 15 bp, Homo sapiens
cttcttgagaaaatc

SEQ ID NO: 1670104 - DNA, 15 bp, Homo sapiens
ttcttgagaaaatca

SEQ ID NO: 1670105 - DNA, 15 bp, Homo sapiens
tcttgagaaaatcaa

SEQ ID NO: 1670106 - DNA, 15 bp, Homo sapiens
cttgagaaaatcaac

SEQ ID NO: 1670107 - DNA, 15 bp, Homo sapiens
ttgagaaaatcaaca

SEQ ID NO: 1670108 - DNA, 15 bp, Homo sapiens
tgagaaaatcaacac

SEQ ID NO: 1670109 - DNA, 15 bp, Homo sapiens
gagaaaatcaacaca

SEQ ID NO: 1670110 - DNA, 15 bp, Homo sapiens
agaaaatcaacacac

SEQ ID NO: 1670111 - DNA, 15 bp, Homo sapiens
gaaaatcaacacact

SEQ ID NO: 1670112 - DNA, 15 bp, Homo sapiens
aaaatcaacacactc

SEQ ID NO: 1670113 - DNA, 15 bp, Homo sapiens
aaatcaacacactct

SEQ ID NO: 1670114 - DNA, 15 bp, Homo sapiens
aatcaacacactctg

SEQ ID NO: 1670115 - DNA, 15 bp, Homo sapiens
atcaacacactctgt

SEQ ID NO: 1670116 - DNA, 15 bp, Homo sapiens
tcaacacactctgtc

SEQ ID NO: 1670117 - DNA, 15 bp, Homo sapiens
caacacactctgtcc

SEQ ID NO: 1670118 - DNA, 15 bp, Homo sapiens
aacacactctgtcct

SEQ ID NO: 1670119 - DNA, 15 bp, Homo sapiens
acacactctgtcctg

SEQ ID NO: 1670120 - DNA, 15 bp, Homo sapiens
cacactctgtcctgt

SEQ ID NO: 1670121 - DNA, 15 bp, Homo sapiens
acactctgtcctgtt

SEQ ID NO: 1670122 - DNA, 15 bp, Homo sapiens
cactctgtcctgttt

SEQ ID NO: 1670123 - DNA, 15 bp, Homo sapiens
actctgtcctgtttt

SEQ ID NO: 1670124 - DNA, 15 bp, Homo sapiens
ctctgtcctgttttc

SEQ ID NO: 1670125 - DNA, 15 bp, Homo sapiens
tctgtcctgttttcc

SEQ ID NO: 1670126 - DNA, 15 bp, Homo sapiens
ctgtcctgttttcca

SEQ ID NO: 1670127 - DNA, 15 bp, Homo sapiens
tgtcctgttttccag

SEQ ID NO: 1670128 - DNA, 15 bp, Homo sapiens
gtcctgttttccagc

SEQ ID NO: 1670129 - DNA, 15 bp, Homo sapiens
tcctgttttccagct

SEQ ID NO: 1670130 - DNA, 15 bp, Homo sapiens
cctgttttccagctg

SEQ ID NO: 1670131 - DNA, 15 bp, Homo sapiens
ctgttttccagctgt

SEQ ID NO: 1670132 - DNA, 15 bp, Homo sapiens
tgttttccagctgtg

SEQ ID NO: 1670133 - DNA, 15 bp, Homo sapiens
gttttccagctgtgg

SEQ ID NO: 1670134 - DNA, 15 bp, Homo sapiens
ttttccagctgtggc

SEQ ID NO: 1670135 - DNA, 15 bp, Homo sapiens
tttccagctgtggcc

SEQ ID NO: 1670136 - DNA, 15 bp, Homo sapiens
ttccagctgtggcca

SEQ ID NO: 1670137 - DNA, 15 bp, Homo sapiens
tccagctgtggccac

SEQ ID NO: 1670138 - DNA, 15 bp, Homo sapiens
ccagctgtggccacc

SEQ ID NO: 1670139 - DNA, 15 bp, Homo sapiens
cagctgtggccacct

SEQ ID NO: 1670140 - DNA, 15 bp, Homo sapiens
agctgtggccacctg

SEQ ID NO: 1670141 - DNA, 15 bp, Homo sapiens
gctgtggccacctgt

SEQ ID NO: 1670142 - DNA, 15 bp, Homo sapiens
ctgtggccacctgtc

SEQ ID NO: 1670143 - DNA, 15 bp, Homo sapiens
tgtggccacctgtcg

SEQ ID NO: 1670144 - DNA, 15 bp, Homo sapiens
gtggccacctgtcgc

SEQ ID NO: 1670145 - DNA, 15 bp, Homo sapiens
tggccacctgtcgcc

SEQ ID NO: 1670146 - DNA, 15 bp, Homo sapiens
ggccacctgtcgccc

SEQ ID NO: 1670147 - DNA, 15 bp, Homo sapiens
gccacctgtcgccct

SEQ ID NO: 1670148 - DNA, 15 bp, Homo sapiens
ccacctgtcgccctg

SEQ ID NO: 1670149 - DNA, 15 bp, Homo sapiens
cacctgtcgccctga

SEQ ID NO: 1670150 - DNA, 15 bp, Homo sapiens
acctgtcgccctgac

SEQ ID NO: 1670151 - DNA, 15 bp, Homo sapiens
cctgtcgccctgacg

SEQ ID NO: 1670152 - DNA, 15 bp, Homo sapiens
ctgtcgccctgacga

SEQ ID NO: 1670153 - DNA, 15 bp, Homo sapiens
tgtcgccctgacgaa

SEQ ID NO: 1670154 - DNA, 15 bp, Homo sapiens
gtcgccctgacgaat

SEQ ID NO: 1670155 - DNA, 15 bp, Homo sapiens
tcgccctgacgaatt

SEQ ID NO: 1670156 - DNA, 15 bp, Homo sapiens
cgccctgacgaattc

SEQ ID NO: 1670157 - DNA, 15 bp, Homo sapiens
gccctgacgaattcc

SEQ ID NO: 1670158 - DNA, 15 bp, Homo sapiens
ccctgacgaattcca

SEQ ID NO: 1670159 - DNA, 15 bp, Homo sapiens
cctgacgaattccag

SEQ ID NO: 1670160 - DNA, 15 bp, Homo sapiens
ctgacgaattccagt

SEQ ID NO: 1670161 - DNA, 15 bp, Homo sapiens
tgacgaattccagtg

SEQ ID NO: 1670162 - DNA, 15 bp, Homo sapiens
gacgaattccagtgc

SEQ ID NO: 1670163 - DNA, 15 bp, Homo sapiens
acgaattccagtgct

SEQ ID NO: 1670164 - DNA, 15 bp, Homo sapiens
cgaattccagtgctc

SEQ ID NO: 1670165 - DNA, 15 bp, Homo sapiens
gaattccagtgctct

SEQ ID NO: 1670166 - DNA, 15 bp, Homo sapiens
aattccagtgctctg

SEQ ID NO: 1670167 - DNA, 15 bp, Homo sapiens
attccagtgctctga

SEQ ID NO: 1670168 - DNA, 15 bp, Homo sapiens
ttccagtgctctgat

SEQ ID NO: 1670169 - DNA, 15 bp, Homo sapiens
tccagtgctctgatg

SEQ ID NO: 1670170 - DNA, 15 bp, Homo sapiens
ccagtgctctgatgg

SEQ ID NO: 1670171 - DNA, 15 bp, Homo sapiens
cagtgctctgatgga

SEQ ID NO: 1670172 - DNA, 15 bp, Homo sapiens
agtgctctgatggaa

SEQ ID NO: 1670173 - DNA, 15 bp, Homo sapiens
gtgctctgatggaaa

SEQ ID NO: 1670174 - DNA, 15 bp, Homo sapiens
tgctctgatggaaac

SEQ ID NO: 1670175 - DNA, 15 bp, Homo sapiens
gctctgatggaaact

SEQ ID NO: 1670176 - DNA, 15 bp, Homo sapiens
ctctgatggaaactg

SEQ ID NO: 1670177 - DNA, 15 bp, Homo sapiens
tctgatggaaactgc

SEQ ID NO: 1670178 - DNA, 15 bp, Homo sapiens
ctgatggaaactgca

SEQ ID NO: 1670179 - DNA, 15 bp, Homo sapiens
tgatggaaactgcat

SEQ ID NO: 1670180 - DNA, 15 bp, Homo sapiens
gatggaaactgcatc

SEQ ID NO: 1670181 - DNA, 15 bp, Homo sapiens
atggaaactgcatcc

SEQ ID NO: 1670182 - DNA, 15 bp, Homo sapiens
tggaaactgcatcca

SEQ ID NO: 1670183 - DNA, 15 bp, Homo sapiens
ggaaactgcatccat

SEQ ID NO: 1670184 - DNA, 15 bp, Homo sapiens
gaaactgcatccatg

SEQ ID NO: 1670185 - DNA, 15 bp, Homo sapiens
aaactgcatccatgg

SEQ ID NO: 1670186 - DNA, 15 bp, Homo sapiens
aactgcatccatggc

SEQ ID NO: 1670187 - DNA, 15 bp, Homo sapiens
actgcatccatggca

SEQ ID NO: 1670188 - DNA, 15 bp, Homo sapiens
ctgcatccatggcag

SEQ ID NO: 1670189 - DNA, 15 bp, Homo sapiens
tgcatccatggcagc

SEQ ID NO: 1670190 - DNA, 15 bp, Homo sapiens
gcatccatggcagcc

SEQ ID NO: 1670191 - DNA, 15 bp, Homo sapiens
catccatggcagccg

SEQ ID NO: 1670192 - DNA, 15 bp, Homo sapiens
atccatggcagccgg

SEQ ID NO: 1670193 - DNA, 15 bp, Homo sapiens
tccatggcagccggc

SEQ ID NO: 1670194 - DNA, 15 bp, Homo sapiens
ccatggcagccggca

SEQ ID NO: 1670195 - DNA, 15 bp, Homo sapiens
catggcagccggcag

SEQ ID NO: 1670196 - DNA, 15 bp, Homo sapiens
atggcagccggcagt

SEQ ID NO: 1670197 - DNA, 15 bp, Homo sapiens
tggcagccggcagtg

SEQ ID NO: 1670198 - DNA, 15 bp, Homo sapiens
ggcagccggcagtgt

SEQ ID NO: 1670199 - DNA, 15 bp, Homo sapiens
gcagccggcagtgtg

SEQ ID NO: 1670200 - DNA, 15 bp, Homo sapiens
cagccggcagtgtga

SEQ ID NO: 1670201 - DNA, 15 bp, Homo sapiens
agccggcagtgtgac

SEQ ID NO: 1670202 - DNA, 15 bp, Homo sapiens
gccggcagtgtgacc

SEQ ID NO: 1670203 - DNA, 15 bp, Homo sapiens
ccggcagtgtgaccg

SEQ ID NO: 1670204 - DNA, 15 bp, Homo sapiens
cggcagtgtgaccgg

SEQ ID NO: 1670205 - DNA, 15 bp, Homo sapiens
ggcagtgtgaccggg

SEQ ID NO: 1670206 - DNA, 15 bp, Homo sapiens
gcagtgtgaccggga

SEQ ID NO: 1670207 - DNA, 15 bp, Homo sapiens
cagtgtgaccgggaa

SEQ ID NO: 1670208 - DNA, 15 bp, Homo sapiens
agtgtgaccgggaat

SEQ ID NO: 1670209 - DNA, 15 bp, Homo sapiens
gtgtgaccgggaata

SEQ ID NO: 1670210 - DNA, 15 bp, Homo sapiens
tgtgaccgggaatat

SEQ ID NO: 1670211 - DNA, 15 bp, Homo sapiens
gtgaccgggaatatg

SEQ ID NO: 1670212 - DNA, 15 bp, Homo sapiens
tgaccgggaatatga

SEQ ID NO: 1670213 - DNA, 15 bp, Homo sapiens
gaccgggaatatgac

SEQ ID NO: 1670214 - DNA, 15 bp, Homo sapiens
accgggaatatgact

SEQ ID NO: 1670215 - DNA, 15 bp, Homo sapiens
ccgggaatatgactg

SEQ ID NO: 1670216 - DNA, 15 bp, Homo sapiens
cgggaatatgactgc

SEQ ID NO: 1670217 - DNA, 15 bp, Homo sapiens
gggaatatgactgca

SEQ ID NO: 1670218 - DNA, 15 bp, Homo sapiens
ggaatatgactgcaa

SEQ ID NO: 1670219 - DNA, 15 bp, Homo sapiens
gaatatgactgcaag

SEQ ID NO: 1670220 - DNA, 15 bp, Homo sapiens
aatatgactgcaagg

SEQ ID NO: 1670221 - DNA, 15 bp, Homo sapiens
atatgactgcaagga

SEQ ID NO: 1670222 - DNA, 15 bp, Homo sapiens
tatgactgcaaggac

SEQ ID NO: 1670223 - DNA, 15 bp, Homo sapiens
atgactgcaaggaca

SEQ ID NO: 1670224 - DNA, 15 bp, Homo sapiens
tgactgcaaggacat

SEQ ID NO: 1670225 - DNA, 15 bp, Homo sapiens
gactgcaaggacatg

SEQ ID NO: 1670226 - DNA, 15 bp, Homo sapiens
actgcaaggacatga

SEQ ID NO: 1670227 - DNA, 15 bp, Homo sapiens
ctgcaaggacatgag

SEQ ID NO: 1670228 - DNA, 15 bp, Homo sapiens
tgcaaggacatgagc

SEQ ID NO: 1670229 - DNA, 15 bp, Homo sapiens
gcaaggacatgagcg

SEQ ID NO: 1670230 - DNA, 15 bp, Homo sapiens
caaggacatgagcga

SEQ ID NO: 1670231 - DNA, 15 bp, Homo sapiens
aaggacatgagcgat

SEQ ID NO: 1670232 - DNA, 15 bp, Homo sapiens
aggacatgagcgatg

SEQ ID NO: 1670233 - DNA, 15 bp, Homo sapiens
ggacatgagcgatga

SEQ ID NO: 1670234 - DNA, 15 bp, Homo sapiens
gacatgagcgatgaa

SEQ ID NO: 1670235 - DNA, 15 bp, Homo sapiens
acatgagcgatgaag

SEQ ID NO: 1670236 - DNA, 15 bp, Homo sapiens
catgagcgatgaagt

SEQ ID NO: 1670237 - DNA, 15 bp, Homo sapiens
atgagcgatgaagtt

SEQ ID NO: 1670238 - DNA, 15 bp, Homo sapiens
tgagcgatgaagttg

SEQ ID NO: 1670239 - DNA, 15 bp, Homo sapiens
gagcgatgaagttgg

SEQ ID NO: 1670240 - DNA, 15 bp, Homo sapiens
agcgatgaagttggc

SEQ ID NO: 1670241 - DNA, 15 bp, Homo sapiens
gcgatgaagttggct

SEQ ID NO: 1670242 - DNA, 15 bp, Homo sapiens
cgatgaagttggctg

SEQ ID NO: 1670243 - DNA, 15 bp, Homo sapiens
gatgaagttggctgc

SEQ ID NO: 1670244 - DNA, 15 bp, Homo sapiens
atgaagttggctgcg

SEQ ID NO: 1670245 - DNA, 15 bp, Homo sapiens
tgaagttggctgcgt

SEQ ID NO: 1670246 - DNA, 15 bp, Homo sapiens
gaagttggctgcgtt

SEQ ID NO: 1670247 - DNA, 15 bp, Homo sapiens
aagttggctgcgtta

SEQ ID NO: 1670248 - DNA, 15 bp, Homo sapiens
agttggctgcgttaa

SEQ ID NO: 1670249 - DNA, 15 bp, Homo sapiens
gttggctgcgttaat

SEQ ID NO: 1670250 - DNA, 15 bp, Homo sapiens
ttggctgcgttaatg

SEQ ID NO: 1670251 - DNA, 15 bp, Homo sapiens
tggctgcgttaatgg

SEQ ID NO: 1670252 - DNA, 15 bp, Homo sapiens
ggctgcgttaatggt

SEQ ID NO: 1670253 - DNA, 15 bp, Homo sapiens
gctgcgttaatggtg

SEQ ID NO: 1670254 - DNA, 15 bp, Homo sapiens
ctgcgttaatggtga

SEQ ID NO: 1670255 - DNA, 15 bp, Homo sapiens
tgcgttaatggtgag

SEQ ID NO: 1670256 - DNA, 15 bp, Homo sapiens
gcgttaatggtgagc

SEQ ID NO: 1670257 - DNA, 15 bp, Homo sapiens
cgttaatggtgagcg

SEQ ID NO: 1670258 - DNA, 15 bp, Homo sapiens
gttaatggtgagcgc

SEQ ID NO: 1670259 - DNA, 15 bp, Homo sapiens
ttaatggtgagcgct

SEQ ID NO: 1670260 - DNA, 15 bp, Homo sapiens
taatggtgagcgctg

SEQ ID NO: 1670261 - DNA, 15 bp, Homo sapiens
aatggtgagcgctgg

SEQ ID NO: 1670262 - DNA, 15 bp, Homo sapiens
atggtgagcgctggc

SEQ ID NO: 1670263 - DNA, 15 bp, Homo sapiens
tggtgagcgctggcc

SEQ ID NO: 1670264 - DNA, 15 bp, Homo sapiens
ggtgagcgctggcca

SEQ ID NO: 1670265 - DNA, 15 bp, Homo sapiens
gtgagcgctggccat

SEQ ID NO: 1670266 - DNA, 15 bp, Homo sapiens
tgagcgctggccatc

SEQ ID NO: 1670267 - DNA, 15 bp, Homo sapiens
gagcgctggccatct

SEQ ID NO: 1670268 - DNA, 15 bp, Homo sapiens
agcgctggccatctg

SEQ ID NO: 1670269 - DNA, 15 bp, Homo sapiens
gcgctggccatctgg

SEQ ID NO: 1670270 - DNA, 15 bp, Homo sapiens
cgctggccatctggt

SEQ ID NO: 1670271 - DNA, 15 bp, Homo sapiens
gctggccatctggtt

SEQ ID NO: 1670272 - DNA, 15 bp, Homo sapiens
ctggccatctggttt

SEQ ID NO: 1670273 - DNA, 15 bp, Homo sapiens
tggccatctggtttt

SEQ ID NO: 1670274 - DNA, 15 bp, Homo sapiens
ggccatctggttttc

SEQ ID NO: 1670275 - DNA, 15 bp, Homo sapiens
gccatctggttttcc

SEQ ID NO: 1670276 - DNA, 15 bp, Homo sapiens
ccatctggttttcca

SEQ ID NO: 1670277 - DNA, 15 bp, Homo sapiens
catctggttttccat

SEQ ID NO: 1670278 - DNA, 15 bp, Homo sapiens
atctggttttccatc

SEQ ID NO: 1670279 - DNA, 15 bp, Homo sapiens
tctggttttccatcc

SEQ ID NO: 1670280 - DNA, 15 bp, Homo sapiens
ctggttttccatccc

SEQ ID NO: 1670281 - DNA, 15 bp, Homo sapiens
tggttttccatcccc

SEQ ID NO: 1670282 - DNA, 15 bp, Homo sapiens
ggttttccatccccc

SEQ ID NO: 1670283 - DNA, 15 bp, Homo sapiens
gttttccatccccca

SEQ ID NO: 1670284 - DNA, 15 bp, Homo sapiens
ttttccatcccccat

SEQ ID NO: 1670285 - DNA, 15 bp, Homo sapiens
tttccatcccccatt

SEQ ID NO: 1670286 - DNA, 15 bp, Homo sapiens
ttccatcccccattc

SEQ ID NO: 1670287 - DNA, 15 bp, Homo sapiens
tccatcccccattct

SEQ ID NO: 1670288 - DNA, 15 bp, Homo sapiens
ccatcccccattctc

SEQ ID NO: 1670289 - DNA, 15 bp, Homo sapiens
catcccccattctct

SEQ ID NO: 1670290 - DNA, 15 bp, Homo sapiens
atcccccattctctg

SEQ ID NO: 1670291 - DNA, 15 bp, Homo sapiens
tcccccattctctgt

SEQ ID NO: 1670292 - DNA, 15 bp, Homo sapiens
cccccattctctgtg

SEQ ID NO: 1670293 - DNA, 15 bp, Homo sapiens
ccccattctctgtgc

SEQ ID NO: 1670294 - DNA, 15 bp, Homo sapiens
cccattctctgtgcc

SEQ ID NO: 1670295 - DNA, 15 bp, Homo sapiens
cattctctgtgcctt

SEQ ID NO: 1670296 - DNA, 15 bp, Homo sapiens
attctctgtgccttg

SEQ ID NO: 1670297 - DNA, 15 bp, Homo sapiens
ttctctgtgccttgc

SEQ ID NO: 1670298 - DNA, 15 bp, Homo sapiens
tctctgtgccttgct

SEQ ID NO: 1670299 - DNA, 15 bp, Homo sapiens
ctctgtgccttgctg

SEQ ID NO: 1670300 - DNA, 15 bp, Homo sapiens
tctgtgccttgctgc

SEQ ID NO: 1670301 - DNA, 15 bp, Homo sapiens
ctgtgccttgctgct

SEQ ID NO: 1670302 - DNA, 15 bp, Homo sapiens
tgtgccttgctgctt

SEQ ID NO: 1670303 - DNA, 15 bp, Homo sapiens
gtgccttgctgcttg

SEQ ID NO: 1670304 - DNA, 15 bp, Homo sapiens
tgccttgctgcttgc

SEQ ID NO: 1670305 - DNA, 15 bp, Homo sapiens
gccttgctgcttgca

SEQ ID NO: 1670306 - DNA, 15 bp, Homo sapiens
ccttgctgcttgcaa

SEQ ID NO: 1670307 - DNA, 15 bp, Homo sapiens
cttgctgcttgcaaa

SEQ ID NO: 1670308 - DNA, 15 bp, Homo sapiens
ttgctgcttgcaaat

SEQ ID NO: 1670309 - DNA, 15 bp, Homo sapiens
tgctgcttgcaaatg

SEQ ID NO: 1670310 - DNA, 15 bp, Homo sapiens
gctgcttgcaaatga

SEQ ID NO: 1670311 - DNA, 15 bp, Homo sapiens
ctgcttgcaaatgat

SEQ ID NO: 1670312 - DNA, 15 bp, Homo sapiens
tgcttgcaaatgatt

SEQ ID NO: 1670313 - DNA, 15 bp, Homo sapiens
gcttgcaaatgattt

SEQ ID NO: 1670314 - DNA, 15 bp, Homo sapiens
cttgcaaatgatttg

SEQ ID NO: 1670315 - DNA, 15 bp, Homo sapiens
ttgcaaatgatttgt

SEQ ID NO: 1670316 - DNA, 15 bp, Homo sapiens
tgcaaatgatttgtg

SEQ ID NO: 1670317 - DNA, 15 bp, Homo sapiens
gcaaatgatttgtga

SEQ ID NO: 1670318 - DNA, 15 bp, Homo sapiens
caaatgatttgtgaa

SEQ ID NO: 1670319 - DNA, 15 bp, Homo sapiens
aaatgatttgtgaag

SEQ ID NO: 1670320 - DNA, 15 bp, Homo sapiens
aatgatttgtgaagc

SEQ ID NO: 1670321 - DNA, 15 bp, Homo sapiens
atgatttgtgaagcc

SEQ ID NO: 1670322 - DNA, 15 bp, Homo sapiens
tgatttgtgaagcca

SEQ ID NO: 1670323 - DNA, 15 bp, Homo sapiens
gatttgtgaagccag

SEQ ID NO: 1670324 - DNA, 15 bp, Homo sapiens
atttgtgaagccaga

SEQ ID NO: 1670325 - DNA, 15 bp, Homo sapiens
tttgtgaagccagag

SEQ ID NO: 1670326 - DNA, 15 bp, Homo sapiens
ttgtgaagccagagg

SEQ ID NO: 1670327 - DNA, 15 bp, Homo sapiens
tgtgaagccagaggg

SEQ ID NO: 1670328 - DNA, 15 bp, Homo sapiens
gtgaagccagagggc

SEQ ID NO: 1670329 - DNA, 15 bp, Homo sapiens
tgaagccagagggcg

SEQ ID NO: 1670330 - DNA, 15 bp, Homo sapiens
gaagccagagggcgc

SEQ ID NO: 1670331 - DNA, 15 bp, Homo sapiens
aagccagagggcgct

SEQ ID NO: 1670332 - DNA, 15 bp, Homo sapiens
agccagagggcgctt

SEQ ID NO: 1670333 - DNA, 15 bp, Homo sapiens
gccagagggcgcttc

SEQ ID NO: 1670334 - DNA, 15 bp, Homo sapiens
ccagagggcgcttcc

SEQ ID NO: 1670335 - DNA, 15 bp, Homo sapiens
cagagggcgcttccc

SEQ ID NO: 1670336 - DNA, 15 bp, Homo sapiens
agagggcgcttccct

SEQ ID NO: 1670337 - DNA, 15 bp, Homo sapiens
gagggcgcttccctg

SEQ ID NO: 1670338 - DNA, 15 bp, Homo sapiens
agggcgcttccctgg

SEQ ID NO: 1670339 - DNA, 15 bp, Homo sapiens
gggcgcttccctggt

SEQ ID NO: 1670340 - DNA, 15 bp, Homo sapiens
ggcgcttccctggtc

SEQ ID NO: 1670341 - DNA, 15 bp, Homo sapiens
gcgcttccctggtca

SEQ ID NO: 1670342 - DNA, 15 bp, Homo sapiens
cgcttccctggtcag

SEQ ID NO: 1670343 - DNA, 15 bp, Homo sapiens
gcttccctggtcagc

SEQ ID NO: 1670344 - DNA, 15 bp, Homo sapiens
cttccctggtcagct

SEQ ID NO: 1670345 - DNA, 15 bp, Homo sapiens
ttccctggtcagctc

SEQ ID NO: 1670346 - DNA, 15 bp, Homo sapiens
tccctggtcagctct

SEQ ID NO: 1670347 - DNA, 15 bp, Homo sapiens
ccctggtcagctctg

SEQ ID NO: 1670348 - DNA, 15 bp, Homo sapiens
ctggtcagctctgca

SEQ ID NO: 1670349 - DNA, 15 bp, Homo sapiens
tggtcagctctgcac

SEQ ID NO: 1670350 - DNA, 15 bp, Homo sapiens
ggtcagctctgcacc

SEQ ID NO: 1670351 - DNA, 15 bp, Homo sapiens
gtcagctctgcacca

SEQ ID NO: 1670352 - DNA, 15 bp, Homo sapiens
tcagctctgcaccag

SEQ ID NO: 1670353 - DNA, 15 bp, Homo sapiens
cagctctgcaccagc

SEQ ID NO: 1670354 - DNA, 15 bp, Homo sapiens
agctctgcaccagct

SEQ ID NO: 1670355 - DNA, 15 bp, Homo sapiens
gctctgcaccagctg

SEQ ID NO: 1670356 - DNA, 15 bp, Homo sapiens
ctctgcaccagctgt

SEQ ID NO: 1670357 - DNA, 15 bp, Homo sapiens
tctgcaccagctgtg

SEQ ID NO: 1670358 - DNA, 15 bp, Homo sapiens
ctgcaccagctgtgc

SEQ ID NO: 1670359 - DNA, 15 bp, Homo sapiens
tgcaccagctgtgcg

SEQ ID NO: 1670360 - DNA, 15 bp, Homo sapiens
gcaccagctgtgcgt

SEQ ID NO: 1670361 - DNA, 15 bp, Homo sapiens
caccagctgtgcgtc

SEQ ID NO: 1670362 - DNA, 15 bp, Homo sapiens
accagctgtgcgtct

SEQ ID NO: 1670363 - DNA, 15 bp, Homo sapiens
ccagctgtgcgtctg

SEQ ID NO: 1670364 - DNA, 15 bp, Homo sapiens
cagctgtgcgtctgt

SEQ ID NO: 1670365 - DNA, 15 bp, Homo sapiens
agctgtgcgtctgtg

SEQ ID NO: 1670366 - DNA, 15 bp, Homo sapiens
gctgtgcgtctgtgg

SEQ ID NO: 1670367 - DNA, 15 bp, Homo sapiens
ctgtgcgtctgtggg

SEQ ID NO: 1670368 - DNA, 15 bp, Homo sapiens
tgtgcgtctgtgggc

SEQ ID NO: 1670369 - DNA, 15 bp, Homo sapiens
gtgcgtctgtgggca

SEQ ID NO: 1670370 - DNA, 15 bp, Homo sapiens
tgcgtctgtgggcaa

SEQ ID NO: 1670371 - DNA, 15 bp, Homo sapiens
gcgtctgtgggcaag

SEQ ID NO: 1670372 - DNA, 15 bp, Homo sapiens
cgtctgtgggcaagt

SEQ ID NO: 1670373 - DNA, 15 bp, Homo sapiens
gtctgtgggcaagtg

SEQ ID NO: 1670374 - DNA, 15 bp, Homo sapiens
tctgtgggcaagtga

SEQ ID NO: 1670375 - DNA, 15 bp, Homo sapiens
ctgtgggcaagtgac

SEQ ID NO: 1670376 - DNA, 15 bp, Homo sapiens
tgtgggcaagtgact

SEQ ID NO: 1670377 - DNA, 15 bp, Homo sapiens
gtgggcaagtgactt

SEQ ID NO: 1670378 - DNA, 15 bp, Homo sapiens
tgggcaagtgacttg

SEQ ID NO: 1670379 - DNA, 15 bp, Homo sapiens
gggcaagtgacttga

SEQ ID NO: 1670380 - DNA, 15 bp, Homo sapiens
ggcaagtgacttgac

SEQ ID NO: 1670381 - DNA, 15 bp, Homo sapiens
gcaagtgacttgact

SEQ ID NO: 1670382 - DNA, 15 bp, Homo sapiens
caagtgacttgactt

SEQ ID NO: 1670383 - DNA, 15 bp, Homo sapiens
aagtgacttgacttc

SEQ ID NO: 1670384 - DNA, 15 bp, Homo sapiens
agtgacttgacttct

SEQ ID NO: 1670385 - DNA, 15 bp, Homo sapiens
gtgacttgacttctc

SEQ ID NO: 1670386 - DNA, 15 bp, Homo sapiens
tgacttgacttctca

SEQ ID NO: 1670387 - DNA, 15 bp, Homo sapiens
gacttgacttctcag

SEQ ID NO: 1670388 - DNA, 15 bp, Homo sapiens
acttgacttctcaga

SEQ ID NO: 1670389 - DNA, 15 bp, Homo sapiens
cttgacttctcagag

SEQ ID NO: 1670390 - DNA, 15 bp, Homo sapiens
ttgacttctcagagc

SEQ ID NO: 1670391 - DNA, 15 bp, Homo sapiens
tgacttctcagagcc

SEQ ID NO: 1670392 - DNA, 15 bp, Homo sapiens
gacttctcagagcct

SEQ ID NO: 1670393 - DNA, 15 bp, Homo sapiens
acttctcagagcctc

SEQ ID NO: 1670394 - DNA, 15 bp, Homo sapiens
cttctcagagcctca

SEQ ID NO: 1670395 - DNA, 15 bp, Homo sapiens
ttctcagagcctcac

SEQ ID NO: 1670396 - DNA, 15 bp, Homo sapiens
tctcagagcctcact

SEQ ID NO: 1670397 - DNA, 15 bp, Homo sapiens
ctcagagcctcactt

SEQ ID NO: 1670398 - DNA, 15 bp, Homo sapiens
tcagagcctcacttc

SEQ ID NO: 1670399 - DNA, 15 bp, Homo sapiens
cagagcctcacttcc

SEQ ID NO: 1670400 - DNA, 15 bp, Homo sapiens
agagcctcacttcct

SEQ ID NO: 1670401 - DNA, 15 bp, Homo sapiens
gagcctcacttcctt

SEQ ID NO: 1670402 - DNA, 15 bp, Homo sapiens
agcctcacttccttt

SEQ ID NO: 1670403 - DNA, 15 bp, Homo sapiens
gcctcacttcctttt

SEQ ID NO: 1670404 - DNA, 15 bp, Homo sapiens
cctcacttccttttg

SEQ ID NO: 1670405 - DNA, 15 bp, Homo sapiens
ctcacttccttttgt

SEQ ID NO: 1670406 - DNA, 15 bp, Homo sapiens
tcacttccttttgtt

SEQ ID NO: 1670407 - DNA, 15 bp, Homo sapiens
cacttccttttgttt

SEQ ID NO: 1670408 - DNA, 15 bp, Homo sapiens
acttccttttgtttt

SEQ ID NO: 1670409 - DNA, 15 bp, Homo sapiens
cttccttttgttttg

SEQ ID NO: 1670410 - DNA, 15 bp, Homo sapiens
ttccttttgttttga

SEQ ID NO: 1670411 - DNA, 15 bp, Homo sapiens
tccttttgttttgag

SEQ ID NO: 1670412 - DNA, 15 bp, Homo sapiens
ccttttgttttgaga

SEQ ID NO: 1670413 - DNA, 15 bp, Homo sapiens
cttttgttttgagac

SEQ ID NO: 1670414 - DNA, 15 bp, Homo sapiens
ggagtctcgctctga

SEQ ID NO: 1670415 - DNA, 15 bp, Homo sapiens
gagtctcgctctgac

SEQ ID NO: 1670416 - DNA, 15 bp, Homo sapiens
agtctcgctctgaca

SEQ ID NO: 1670417 - DNA, 15 bp, Homo sapiens
gtctcgctctgacac

SEQ ID NO: 1670418 - DNA, 15 bp, Homo sapiens
tctcgctctgacacc

SEQ ID NO: 1670419 - DNA, 15 bp, Homo sapiens
ctcgctctgacaccc

SEQ ID NO: 1670420 - DNA, 15 bp, Homo sapiens
tcgctctgacaccca

SEQ ID NO: 1670421 - DNA, 15 bp, Homo sapiens
cgctctgacacccag

SEQ ID NO: 1670422 - DNA, 15 bp, Homo sapiens
gctctgacacccagg

SEQ ID NO: 1670423 - DNA, 15 bp, Homo sapiens
ctctgacacccaggc

SEQ ID NO: 1670424 - DNA, 15 bp, Homo sapiens
tctgacacccaggct

SEQ ID NO: 1670425 - DNA, 15 bp, Homo sapiens
ctgacacccaggctg

SEQ ID NO: 1670426 - DNA, 15 bp, Homo sapiens
tgacacccaggctgg

SEQ ID NO: 1670427 - DNA, 15 bp, Homo sapiens
gacacccaggctgga

SEQ ID NO: 1670428 - DNA, 15 bp, Homo sapiens
acacccaggctggag

SEQ ID NO: 1670429 - DNA, 15 bp, Homo sapiens
ccaggctggagtgct

SEQ ID NO: 1670430 - DNA, 15 bp, Homo sapiens
caggctggagtgctg

SEQ ID NO: 1670431 - DNA, 15 bp, Homo sapiens
aggctggagtgctgt

SEQ ID NO: 1670432 - DNA, 15 bp, Homo sapiens
ggctggagtgctgtg

SEQ ID NO: 1670433 - DNA, 15 bp, Homo sapiens
ctggagtgctgtggc

SEQ ID NO: 1670434 - DNA, 15 bp, Homo sapiens
tggagtgctgtggca

SEQ ID NO: 1670435 - DNA, 15 bp, Homo sapiens
ggagtgctgtggcac

SEQ ID NO: 1670436 - DNA, 15 bp, Homo sapiens
gagtgctgtggcaca

SEQ ID NO: 1670437 - DNA, 15 bp, Homo sapiens
agtgctgtggcacaa

SEQ ID NO: 1670438 - DNA, 15 bp, Homo sapiens
gtgctgtggcacaat

SEQ ID NO: 1670439 - DNA, 15 bp, Homo sapiens
tgctgtggcacaatc

SEQ ID NO: 1670440 - DNA, 15 bp, Homo sapiens
gctgtggcacaatca

SEQ ID NO: 1670441 - DNA, 15 bp, Homo sapiens
ctgtggcacaatcac

SEQ ID NO: 1670442 - DNA, 15 bp, Homo sapiens
tgtggcacaatcaca

SEQ ID NO: 1670443 - DNA, 15 bp, Homo sapiens
gtggcacaatcacag

SEQ ID NO: 1670444 - DNA, 15 bp, Homo sapiens
tggcacaatcacagc

SEQ ID NO: 1670445 - DNA, 15 bp, Homo sapiens
ggcacaatcacagct

SEQ ID NO: 1670446 - DNA, 15 bp, Homo sapiens
gcacaatcacagctc

SEQ ID NO: 1670447 - DNA, 15 bp, Homo sapiens
cacaatcacagctca

SEQ ID NO: 1670448 - DNA, 15 bp, Homo sapiens
acaatcacagctcac

SEQ ID NO: 1670449 - DNA, 15 bp, Homo sapiens
caatcacagctcacg

SEQ ID NO: 1670450 - DNA, 15 bp, Homo sapiens
aatcacagctcacgg

SEQ ID NO: 1670451 - DNA, 15 bp, Homo sapiens
atcacagctcacggc

SEQ ID NO: 1670452 - DNA, 15 bp, Homo sapiens
tcacagctcacggca

SEQ ID NO: 1670453 - DNA, 15 bp, Homo sapiens
cacagctcacggcag

SEQ ID NO: 1670454 - DNA, 15 bp, Homo sapiens
acagctcacggcagc

SEQ ID NO: 1670455 - DNA, 15 bp, Homo sapiens
cagctcacggcagcc

SEQ ID NO: 1670456 - DNA, 15 bp, Homo sapiens
agctcacggcagcct

SEQ ID NO: 1670457 - DNA, 15 bp, Homo sapiens
gctcacggcagcctc

SEQ ID NO: 1670458 - DNA, 15 bp, Homo sapiens
ctcacggcagcctct

SEQ ID NO: 1670459 - DNA, 15 bp, Homo sapiens
tcacggcagcctctg

SEQ ID NO: 1670460 - DNA, 15 bp, Homo sapiens
cacggcagcctctgc

SEQ ID NO: 1670461 - DNA, 15 bp, Homo sapiens
acggcagcctctgcc

SEQ ID NO: 1670462 - DNA, 15 bp, Homo sapiens
cggcagcctctgcct

SEQ ID NO: 1670463 - DNA, 15 bp, Homo sapiens
ggcagcctctgcctc

SEQ ID NO: 1670464 - DNA, 15 bp, Homo sapiens
gcagcctctgcctct

SEQ ID NO: 1670465 - DNA, 15 bp, Homo sapiens
cagcctctgcctctg

SEQ ID NO: 1670466 - DNA, 15 bp, Homo sapiens
agcctctgcctctga

SEQ ID NO: 1670467 - DNA, 15 bp, Homo sapiens
gcctctgcctctgat

SEQ ID NO: 1670468 - DNA, 15 bp, Homo sapiens
cctctgcctctgatg

SEQ ID NO: 1670469 - DNA, 15 bp, Homo sapiens
ctctgcctctgatgt

SEQ ID NO: 1670470 - DNA, 15 bp, Homo sapiens
tctgcctctgatgtc

SEQ ID NO: 1670471 - DNA, 15 bp, Homo sapiens
ctgcctctgatgtcc

SEQ ID NO: 1670472 - DNA, 15 bp, Homo sapiens
tgcctctgatgtcca

SEQ ID NO: 1670473 - DNA, 15 bp, Homo sapiens
gcctctgatgtccag

SEQ ID NO: 1670474 - DNA, 15 bp, Homo sapiens
cctctgatgtccagt

SEQ ID NO: 1670475 - DNA, 15 bp, Homo sapiens
ctctgatgtccagtg

SEQ ID NO: 1670476 - DNA, 15 bp, Homo sapiens
tctgatgtccagtga

SEQ ID NO: 1670477 - DNA, 15 bp, Homo sapiens
ctgatgtccagtgat

SEQ ID NO: 1670478 - DNA, 15 bp, Homo sapiens
tgatgtccagtgatt

SEQ ID NO: 1670479 - DNA, 15 bp, Homo sapiens
gatgtccagtgattc

SEQ ID NO: 1670480 - DNA, 15 bp, Homo sapiens
atgtccagtgattct

SEQ ID NO: 1670481 - DNA, 15 bp, Homo sapiens
tgtccagtgattctc

SEQ ID NO: 1670482 - DNA, 15 bp, Homo sapiens
gtccagtgattctcc

SEQ ID NO: 1670483 - DNA, 15 bp, Homo sapiens
agtagctgagattaa

SEQ ID NO: 1670484 - DNA, 15 bp, Homo sapiens
gtagctgagattaaa

SEQ ID NO: 1670485 - DNA, 15 bp, Homo sapiens
tagctgagattaaag

SEQ ID NO: 1670486 - DNA, 15 bp, Homo sapiens
ctgagattaaaggcg

SEQ ID NO: 1670487 - DNA, 15 bp, Homo sapiens
tgagattaaaggcgt

SEQ ID NO: 1670488 - DNA, 15 bp, Homo sapiens
gagattaaaggcgta

SEQ ID NO: 1670489 - DNA, 15 bp, Homo sapiens
agattaaaggcgtat

SEQ ID NO: 1670490 - DNA, 15 bp, Homo sapiens
gattaaaggcgtata

SEQ ID NO: 1670491 - DNA, 15 bp, Homo sapiens
attaaaggcgtatac

SEQ ID NO: 1670492 - DNA, 15 bp, Homo sapiens
ttaaaggcgtatacc

SEQ ID NO: 1670493 - DNA, 15 bp, Homo sapiens
taaaggcgtatacca

SEQ ID NO: 1670494 - DNA, 15 bp, Homo sapiens
aaaggcgtataccac

SEQ ID NO: 1670495 - DNA, 15 bp, Homo sapiens
aaggcgtataccacc

SEQ ID NO: 1670496 - DNA, 15 bp, Homo sapiens
aggcgtataccacca

SEQ ID NO: 1670497 - DNA, 15 bp, Homo sapiens
ggcgtataccaccac

SEQ ID NO: 1670498 - DNA, 15 bp, Homo sapiens
gcgtataccaccacg

SEQ ID NO: 1670499 - DNA, 15 bp, Homo sapiens
cgtataccaccacgc

SEQ ID NO: 1670500 - DNA, 15 bp, Homo sapiens
gtataccaccacgcc

SEQ ID NO: 1670501 - DNA, 15 bp, Homo sapiens
tataccaccacgccc

SEQ ID NO: 1670502 - DNA, 15 bp, Homo sapiens
ataccaccacgcccg

SEQ ID NO: 1670503 - DNA, 15 bp, Homo sapiens
taccaccacgcccgg

SEQ ID NO: 1670504 - DNA, 15 bp, Homo sapiens
tttgtatttttatta

SEQ ID NO: 1670505 - DNA, 15 bp, Homo sapiens
ttgtatttttattag

SEQ ID NO: 1670506 - DNA, 15 bp, Homo sapiens
tgtatttttattaga

SEQ ID NO: 1670507 - DNA, 15 bp, Homo sapiens
gtatttttattagag

SEQ ID NO: 1670508 - DNA, 15 bp, Homo sapiens
tatttttattagaga

SEQ ID NO: 1670509 - DNA, 15 bp, Homo sapiens
atttttattagagac

SEQ ID NO: 1670510 - DNA, 15 bp, Homo sapiens
tttttattagagaca

SEQ ID NO: 1670511 - DNA, 15 bp, Homo sapiens
ttttattagagacag

SEQ ID NO: 1670512 - DNA, 15 bp, Homo sapiens
tttattagagacagg

SEQ ID NO: 1670513 - DNA, 15 bp, Homo sapiens
ttattagagacaggg

SEQ ID NO: 1670514 - DNA, 15 bp, Homo sapiens
tattagagacagggt

SEQ ID NO: 1670515 - DNA, 15 bp, Homo sapiens
attagagacagggtt

SEQ ID NO: 1670516 - DNA, 15 bp, Homo sapiens
ttagagacagggttt

SEQ ID NO: 1670517 - DNA, 15 bp, Homo sapiens
tttctccatgttggc

SEQ ID NO: 1670518 - DNA, 15 bp, Homo sapiens
ttctccatgttggcc

SEQ ID NO: 1670519 - DNA, 15 bp, Homo sapiens
tctccatgttggcca

SEQ ID NO: 1670520 - DNA, 15 bp, Homo sapiens
ctccatgttggccag

SEQ ID NO: 1670521 - DNA, 15 bp, Homo sapiens
tccatgttggccagg

SEQ ID NO: 1670522 - DNA, 15 bp, Homo sapiens
tcttgaactcctggt

SEQ ID NO: 1670523 - DNA, 15 bp, Homo sapiens
cttgaactcctggtc

SEQ ID NO: 1670524 - DNA, 15 bp, Homo sapiens
ttgaactcctggtct

SEQ ID NO: 1670525 - DNA, 15 bp, Homo sapiens
tgaactcctggtctc

SEQ ID NO: 1670526 - DNA, 15 bp, Homo sapiens
gaactcctggtctca

SEQ ID NO: 1670527 - DNA, 15 bp, Homo sapiens
aactcctggtctcag

SEQ ID NO: 1670528 - DNA, 15 bp, Homo sapiens
actcctggtctcagg

SEQ ID NO: 1670529 - DNA, 15 bp, Homo sapiens
ctcctggtctcaggt

SEQ ID NO: 1670530 - DNA, 15 bp, Homo sapiens
tcctggtctcaggtg

SEQ ID NO: 1670531 - DNA, 15 bp, Homo sapiens
cctggtctcaggtga

SEQ ID NO: 1670532 - DNA, 15 bp, Homo sapiens
ctggtctcaggtgat

SEQ ID NO: 1670533 - DNA, 15 bp, Homo sapiens
tggtctcaggtgatc

SEQ ID NO: 1670534 - DNA, 15 bp, Homo sapiens
ggtctcaggtgatcc

SEQ ID NO: 1670535 - DNA, 15 bp, Homo sapiens
gtctcaggtgatcca

SEQ ID NO: 1670536 - DNA, 15 bp, Homo sapiens
tgagccactgcgcca

SEQ ID NO: 1670537 - DNA, 15 bp, Homo sapiens
gagccactgcgccag

SEQ ID NO: 1670538 - DNA, 15 bp, Homo sapiens
agccactgcgccagg

SEQ ID NO: 1670539 - DNA, 15 bp, Homo sapiens
gccactgcgccaggc

SEQ ID NO: 1670540 - DNA, 15 bp, Homo sapiens
ccactgcgccaggcc

SEQ ID NO: 1670541 - DNA, 15 bp, Homo sapiens
cactgcgccaggcct

SEQ ID NO: 1670542 - DNA, 15 bp, Homo sapiens
actgcgccaggccta

SEQ ID NO: 1670543 - DNA, 15 bp, Homo sapiens
ctgcgccaggcctaa

SEQ ID NO: 1670544 - DNA, 15 bp, Homo sapiens
tgcgccaggcctaat

SEQ ID NO: 1670545 - DNA, 15 bp, Homo sapiens
gcgccaggcctaatt

SEQ ID NO: 1670546 - DNA, 15 bp, Homo sapiens
cgccaggcctaattt

SEQ ID NO: 1670547 - DNA, 15 bp, Homo sapiens
gccaggcctaatttt

SEQ ID NO: 1670548 - DNA, 15 bp, Homo sapiens
ccaggcctaattttt

SEQ ID NO: 1670549 - DNA, 15 bp, Homo sapiens
caggcctaatttttt

SEQ ID NO: 1670550 - DNA, 15 bp, Homo sapiens
aggcctaattttttt

SEQ ID NO: 1670551 - DNA, 15 bp, Homo sapiens
ggcctaatttttttg

SEQ ID NO: 1670552 - DNA, 15 bp, Homo sapiens
gcctaatttttttgt

SEQ ID NO: 1670553 - DNA, 15 bp, Homo sapiens
cctaatttttttgta

SEQ ID NO: 1670554 - DNA, 15 bp, Homo sapiens
tagagatgcggtttt

SEQ ID NO: 1670555 - DNA, 15 bp, Homo sapiens
agagatgcggttttg

SEQ ID NO: 1670556 - DNA, 15 bp, Homo sapiens
gagatgcggttttgc

SEQ ID NO: 1670557 - DNA, 15 bp, Homo sapiens
agatgcggttttgcc

SEQ ID NO: 1670558 - DNA, 15 bp, Homo sapiens
gatgcggttttgcca

SEQ ID NO: 1670559 - DNA, 15 bp, Homo sapiens
atgcggttttgccat

SEQ ID NO: 1670560 - DNA, 15 bp, Homo sapiens
tgcggttttgccata

SEQ ID NO: 1670561 - DNA, 15 bp, Homo sapiens
gcggttttgccatat

SEQ ID NO: 1670562 - DNA, 15 bp, Homo sapiens
cggttttgccatatt

SEQ ID NO: 1670563 - DNA, 15 bp, Homo sapiens
ggttttgccatattg

SEQ ID NO: 1670564 - DNA, 15 bp, Homo sapiens
gttttgccatattgc

SEQ ID NO: 1670565 - DNA, 15 bp, Homo sapiens
ttttgccatattgcc

SEQ ID NO: 1670566 - DNA, 15 bp, Homo sapiens
tttgccatattgccc

SEQ ID NO: 1670567 - DNA, 15 bp, Homo sapiens
ttgccatattgccca

SEQ ID NO: 1670568 - DNA, 15 bp, Homo sapiens
tgccatattgcccag

SEQ ID NO: 1670569 - DNA, 15 bp, Homo sapiens
gccatattgcccagg

SEQ ID NO: 1670570 - DNA, 15 bp, Homo sapiens
ggctcaagcgatctg

SEQ ID NO: 1670571 - DNA, 15 bp, Homo sapiens
tcaagcgatctgcct

SEQ ID NO: 1670572 - DNA, 15 bp, Homo sapiens
caagcgatctgcctg

SEQ ID NO: 1670573 - DNA, 15 bp, Homo sapiens
aagcgatctgcctgc

SEQ ID NO: 1670574 - DNA, 15 bp, Homo sapiens
agcgatctgcctgcc

SEQ ID NO: 1670575 - DNA, 15 bp, Homo sapiens
ggattacaggcacaa

SEQ ID NO: 1670576 - DNA, 15 bp, Homo sapiens
gattacaggcacaaa

SEQ ID NO: 1670577 - DNA, 15 bp, Homo sapiens
attacaggcacaaac

SEQ ID NO: 1670578 - DNA, 15 bp, Homo sapiens
ttacaggcacaaacc

SEQ ID NO: 1670579 - DNA, 15 bp, Homo sapiens
aggcacaaaccaccg

SEQ ID NO: 1670580 - DNA, 15 bp, Homo sapiens
ggcacaaaccaccgt

SEQ ID NO: 1670581 - DNA, 15 bp, Homo sapiens
gcacaaaccaccgtg

SEQ ID NO: 1670582 - DNA, 15 bp, Homo sapiens
cacaaaccaccgtgc

SEQ ID NO: 1670583 - DNA, 15 bp, Homo sapiens
acaaaccaccgtgcc

SEQ ID NO: 1670584 - DNA, 15 bp, Homo sapiens
caaaccaccgtgccc

SEQ ID NO: 1670585 - DNA, 15 bp, Homo sapiens
aaaccaccgtgcccg

SEQ ID NO: 1670586 - DNA, 15 bp, Homo sapiens
aaccaccgtgcccga

SEQ ID NO: 1670587 - DNA, 15 bp, Homo sapiens
accaccgtgcccgac

SEQ ID NO: 1670588 - DNA, 15 bp, Homo sapiens
ccaccgtgcccgacg

SEQ ID NO: 1670589 - DNA, 15 bp, Homo sapiens
caccgtgcccgacgc

SEQ ID NO: 1670590 - DNA, 15 bp, Homo sapiens
accgtgcccgacgcg

SEQ ID NO: 1670591 - DNA, 15 bp, Homo sapiens
ccgtgcccgacgcgt

SEQ ID NO: 1670592 - DNA, 15 bp, Homo sapiens
cgtgcccgacgcgtt

SEQ ID NO: 1670593 - DNA, 15 bp, Homo sapiens
gtgcccgacgcgttt

SEQ ID NO: 1670594 - DNA, 15 bp, Homo sapiens
tgcccgacgcgtttt

SEQ ID NO: 1670595 - DNA, 15 bp, Homo sapiens
gcccgacgcgttttc

SEQ ID NO: 1670596 - DNA, 15 bp, Homo sapiens
cccgacgcgttttct

SEQ ID NO: 1670597 - DNA, 15 bp, Homo sapiens
ccgacgcgttttctt

SEQ ID NO: 1670598 - DNA, 15 bp, Homo sapiens
cgacgcgttttctta

SEQ ID NO: 1670599 - DNA, 15 bp, Homo sapiens
gacgcgttttcttaa

SEQ ID NO: 1670600 - DNA, 15 bp, Homo sapiens
acgcgttttcttaat

SEQ ID NO: 1670601 - DNA, 15 bp, Homo sapiens
cgcgttttcttaatg

SEQ ID NO: 1670602 - DNA, 15 bp, Homo sapiens
gcgttttcttaatga

SEQ ID NO: 1670603 - DNA, 15 bp, Homo sapiens
cgttttcttaatgaa

SEQ ID NO: 1670604 - DNA, 15 bp, Homo sapiens
gttttcttaatgaat

SEQ ID NO: 1670605 - DNA, 15 bp, Homo sapiens
ttttcttaatgaatc

SEQ ID NO: 1670606 - DNA, 15 bp, Homo sapiens
tttcttaatgaatcc

SEQ ID NO: 1670607 - DNA, 15 bp, Homo sapiens
ttcttaatgaatcca

SEQ ID NO: 1670608 - DNA, 15 bp, Homo sapiens
tcttaatgaatccat

SEQ ID NO: 1670609 - DNA, 15 bp, Homo sapiens
cttaatgaatccatt

SEQ ID NO: 1670610 - DNA, 15 bp, Homo sapiens
ttaatgaatccattt

SEQ ID NO: 1670611 - DNA, 15 bp, Homo sapiens
taatgaatccatttg

SEQ ID NO: 1670612 - DNA, 15 bp, Homo sapiens
aatgaatccatttgc

SEQ ID NO: 1670613 - DNA, 15 bp, Homo sapiens
atgaatccatttgca

SEQ ID NO: 1670614 - DNA, 15 bp, Homo sapiens
tgaatccatttgcat

SEQ ID NO: 1670615 - DNA, 15 bp, Homo sapiens
gaatccatttgcatg

SEQ ID NO: 1670616 - DNA, 15 bp, Homo sapiens
aatccatttgcatgc

SEQ ID NO: 1670617 - DNA, 15 bp, Homo sapiens
atccatttgcatgcg

SEQ ID NO: 1670618 - DNA, 15 bp, Homo sapiens
tccatttgcatgcgt

SEQ ID NO: 1670619 - DNA, 15 bp, Homo sapiens
ccatttgcatgcgtt

SEQ ID NO: 1670620 - DNA, 15 bp, Homo sapiens
catttgcatgcgttc

SEQ ID NO: 1670621 - DNA, 15 bp, Homo sapiens
atttgcatgcgttct

SEQ ID NO: 1670622 - DNA, 15 bp, Homo sapiens
tttgcatgcgttctt

SEQ ID NO: 1670623 - DNA, 15 bp, Homo sapiens
ttgcatgcgttctta

SEQ ID NO: 1670624 - DNA, 15 bp, Homo sapiens
tgcatgcgttcttat

SEQ ID NO: 1670625 - DNA, 15 bp, Homo sapiens
gcatgcgttcttatg

SEQ ID NO: 1670626 - DNA, 15 bp, Homo sapiens
catgcgttcttatgt

SEQ ID NO: 1670627 - DNA, 15 bp, Homo sapiens
atgcgttcttatgtg

SEQ ID NO: 1670628 - DNA, 15 bp, Homo sapiens
tgcgttcttatgtga

SEQ ID NO: 1670629 - DNA, 15 bp, Homo sapiens
gcgttcttatgtgaa

SEQ ID NO: 1670630 - DNA, 15 bp, Homo sapiens
cgttcttatgtgaat

SEQ ID NO: 1670631 - DNA, 15 bp, Homo sapiens
gttcttatgtgaata

SEQ ID NO: 1670632 - DNA, 15 bp, Homo sapiens
ttcttatgtgaataa

SEQ ID NO: 1670633 - DNA, 15 bp, Homo sapiens
tcttatgtgaataaa

SEQ ID NO: 1670634 - DNA, 15 bp, Homo sapiens
cttatgtgaataaac

SEQ ID NO: 1670635 - DNA, 15 bp, Homo sapiens
ttatgtgaataaact

SEQ ID NO: 1670636 - DNA, 15 bp, Homo sapiens
tatgtgaataaacta

SEQ ID NO: 1670637 - DNA, 15 bp, Homo sapiens
atgtgaataaactat

SEQ ID NO: 1670638 - DNA, 15 bp, Homo sapiens
tgtgaataaactatt

SEQ ID NO: 1670639 - DNA, 15 bp, Homo sapiens
gtgaataaactatta

SEQ ID NO: 1670640 - DNA, 15 bp, Homo sapiens
tgaataaactattat

SEQ ID NO: 1670641 - DNA, 15 bp, Homo sapiens
gaataaactattata

SEQ ID NO: 1670642 - DNA, 15 bp, Homo sapiens
aataaactattatat

SEQ ID NO: 1670643 - DNA, 15 bp, Homo sapiens
ataaactattatatg

SEQ ID NO: 1670644 - DNA, 15 bp, Homo sapiens
taaactattatatga

SEQ ID NO: 1670645 - DNA, 15 bp, Homo sapiens
aaactattatatgaa

SEQ ID NO: 1670646 - DNA, 15 bp, Homo sapiens
aactattatatgaat

SEQ ID NO: 1670647 - DNA, 15 bp, Homo sapiens
actattatatgaatg

SEQ ID NO: 1670648 - DNA, 15 bp, Homo sapiens
ctattatatgaatga

SEQ ID NO: 1670649 - DNA, 15 bp, Homo sapiens
tattatatgaatgag

SEQ ID NO: 1670650 - DNA, 15 bp, Homo sapiens
attatatgaatgagt

SEQ ID NO: 1670651 - DNA, 15 bp, Homo sapiens
ttatatgaatgagtg

SEQ ID NO: 1670652 - DNA, 15 bp, Homo sapiens
tatatgaatgagtgc

SEQ ID NO: 1670653 - DNA, 15 bp, Homo sapiens
atatgaatgagtgcc

SEQ ID NO: 1670654 - DNA, 15 bp, Homo sapiens
tatgaatgagtgcca

SEQ ID NO: 1670655 - DNA, 15 bp, Homo sapiens
atgaatgagtgccaa

SEQ ID NO: 1670656 - DNA, 15 bp, Homo sapiens
tgaatgagtgccaag

SEQ ID NO: 1670657 - DNA, 15 bp, Homo sapiens
gaatgagtgccaagc

SEQ ID NO: 1670658 - DNA, 15 bp, Homo sapiens
aatgagtgccaagca

SEQ ID NO: 1670659 - DNA, 15 bp, Homo sapiens
atgagtgccaagcaa

SEQ ID NO: 1670660 - DNA, 15 bp, Homo sapiens
tgagtgccaagcaaa

SEQ ID NO: 1670661 - DNA, 15 bp, Homo sapiens
gagtgccaagcaaac

SEQ ID NO: 1670662 - DNA, 15 bp, Homo sapiens
agtgccaagcaaact

SEQ ID NO: 1670663 - DNA, 15 bp, Homo sapiens
gtgccaagcaaactg

SEQ ID NO: 1670664 - DNA, 15 bp, Homo sapiens
tgccaagcaaactga

SEQ ID NO: 1670665 - DNA, 15 bp, Homo sapiens
gccaagcaaactgag

SEQ ID NO: 1670666 - DNA, 15 bp, Homo sapiens
ccaagcaaactgagg

SEQ ID NO: 1670667 - DNA, 15 bp, Homo sapiens
caagcaaactgaggc

SEQ ID NO: 1670668 - DNA, 15 bp, Homo sapiens
aagcaaactgaggct

SEQ ID NO: 1670669 - DNA, 15 bp, Homo sapiens
agcaaactgaggctc

SEQ ID NO: 1670670 - DNA, 15 bp, Homo sapiens
gcaaactgaggctca

SEQ ID NO: 1670671 - DNA, 15 bp, Homo sapiens
caaactgaggctcag

SEQ ID NO: 1670672 - DNA, 15 bp, Homo sapiens
aactgaggctcagac

SEQ ID NO: 1670673 - DNA, 15 bp, Homo sapiens
actgaggctcagaca

SEQ ID NO: 1670674 - DNA, 15 bp, Homo sapiens
ctgaggctcagacac

SEQ ID NO: 1670675 - DNA, 15 bp, Homo sapiens
tgaggctcagacaca

SEQ ID NO: 1670676 - DNA, 15 bp, Homo sapiens
gaggctcagacacac

SEQ ID NO: 1670677 - DNA, 15 bp, Homo sapiens
aggctcagacacacc

SEQ ID NO: 1670678 - DNA, 15 bp, Homo sapiens
ggctcagacacacct

SEQ ID NO: 1670679 - DNA, 15 bp, Homo sapiens
gctcagacacacctg

SEQ ID NO: 1670680 - DNA, 15 bp, Homo sapiens
ctcagacacacctga

SEQ ID NO: 1670681 - DNA, 15 bp, Homo sapiens
tcagacacacctgac

SEQ ID NO: 1670682 - DNA, 15 bp, Homo sapiens
cagacacacctgacc

SEQ ID NO: 1670683 - DNA, 15 bp, Homo sapiens
agacacacctgacct

SEQ ID NO: 1670684 - DNA, 15 bp, Homo sapiens
gacacacctgacctt

SEQ ID NO: 1670685 - DNA, 15 bp, Homo sapiens
acacacctgaccttc

SEQ ID NO: 1670686 - DNA, 15 bp, Homo sapiens
cacacctgaccttcc

SEQ ID NO: 1670687 - DNA, 15 bp, Homo sapiens
acacctgaccttcct

SEQ ID NO: 1670688 - DNA, 15 bp, Homo sapiens
cacctgaccttcctc

SEQ ID NO: 1670689 - DNA, 15 bp, Homo sapiens
acctgaccttcctcc

SEQ ID NO: 1670690 - DNA, 15 bp, Homo sapiens
cctgaccttcctcct

SEQ ID NO: 1670691 - DNA, 15 bp, Homo sapiens
ctgaccttcctcctt

SEQ ID NO: 1670692 - DNA, 15 bp, Homo sapiens
tgaccttcctccttc

SEQ ID NO: 1670693 - DNA, 15 bp, Homo sapiens
gaccttcctccttcc

SEQ ID NO: 1670694 - DNA, 15 bp, Homo sapiens
accttcctccttcct

SEQ ID NO: 1670695 - DNA, 15 bp, Homo sapiens
ccttcctccttcctc

SEQ ID NO: 1670696 - DNA, 15 bp, Homo sapiens
cttcctccttcctct

SEQ ID NO: 1670697 - DNA, 15 bp, Homo sapiens
ttcctccttcctctc

SEQ ID NO: 1670698 - DNA, 15 bp, Homo sapiens
tcctccttcctctct

SEQ ID NO: 1670699 - DNA, 15 bp, Homo sapiens
cctccttcctctctc

SEQ ID NO: 1670700 - DNA, 15 bp, Homo sapiens
ctccttcctctctct

SEQ ID NO: 1670701 - DNA, 15 bp, Homo sapiens
tccttcctctctctg

SEQ ID NO: 1670702 - DNA, 15 bp, Homo sapiens
ccttcctctctctgg

SEQ ID NO: 1670703 - DNA, 15 bp, Homo sapiens
cttcctctctctggc

SEQ ID NO: 1670704 - DNA, 15 bp, Homo sapiens
ttcctctctctggct

SEQ ID NO: 1670705 - DNA, 15 bp, Homo sapiens
tcctctctctggctc

SEQ ID NO: 1670706 - DNA, 15 bp, Homo sapiens
cctctctctggctct

SEQ ID NO: 1670707 - DNA, 15 bp, Homo sapiens
ctctctctggctctc

SEQ ID NO: 1670708 - DNA, 15 bp, Homo sapiens
tctctctggctctca

SEQ ID NO: 1670709 - DNA, 15 bp, Homo sapiens
ctctctggctctcac

SEQ ID NO: 1670710 - DNA, 15 bp, Homo sapiens
tctctggctctcaca

SEQ ID NO: 1670711 - DNA, 15 bp, Homo sapiens
ctctggctctcacag

SEQ ID NO: 1670712 - DNA, 15 bp, Homo sapiens
tctggctctcacagt

SEQ ID NO: 1670713 - DNA, 15 bp, Homo sapiens
ctggctctcacagtg

SEQ ID NO: 1670714 - DNA, 15 bp, Homo sapiens
tggctctcacagtga

SEQ ID NO: 1670715 - DNA, 15 bp, Homo sapiens
ggctctcacagtgac

SEQ ID NO: 1670716 - DNA, 15 bp, Homo sapiens
gctctcacagtgaca

SEQ ID NO: 1670717 - DNA, 15 bp, Homo sapiens
ctctcacagtgacac

SEQ ID NO: 1670718 - DNA, 15 bp, Homo sapiens
tctcacagtgacact

SEQ ID NO: 1670719 - DNA, 15 bp, Homo sapiens
ctcacagtgacactc

SEQ ID NO: 1670720 - DNA, 15 bp, Homo sapiens
tcacagtgacactct

SEQ ID NO: 1670721 - DNA, 15 bp, Homo sapiens
cacagtgacactctg

SEQ ID NO: 1670722 - DNA, 15 bp, Homo sapiens
acagtgacactctgc

SEQ ID NO: 1670723 - DNA, 15 bp, Homo sapiens
cagtgacactctgcg

SEQ ID NO: 1670724 - DNA, 15 bp, Homo sapiens
agtgacactctgcga

SEQ ID NO: 1670725 - DNA, 15 bp, Homo sapiens
gtgacactctgcgag

SEQ ID NO: 1670726 - DNA, 15 bp, Homo sapiens
tgacactctgcgagg

SEQ ID NO: 1670727 - DNA, 15 bp, Homo sapiens
gacactctgcgaggg

SEQ ID NO: 1670728 - DNA, 15 bp, Homo sapiens
acactctgcgaggga

SEQ ID NO: 1670729 - DNA, 15 bp, Homo sapiens
cactctgcgagggac

SEQ ID NO: 1670730 - DNA, 15 bp, Homo sapiens
actctgcgagggacc

SEQ ID NO: 1670731 - DNA, 15 bp, Homo sapiens
ctctgcgagggaccc

SEQ ID NO: 1670732 - DNA, 15 bp, Homo sapiens
tctgcgagggaccca

SEQ ID NO: 1670733 - DNA, 15 bp, Homo sapiens
ctgcgagggacccaa

SEQ ID NO: 1670734 - DNA, 15 bp, Homo sapiens
tgcgagggacccaac

SEQ ID NO: 1670735 - DNA, 15 bp, Homo sapiens
gcgagggacccaaca

SEQ ID NO: 1670736 - DNA, 15 bp, Homo sapiens
cgagggacccaacaa

SEQ ID NO: 1670737 - DNA, 15 bp, Homo sapiens
gagggacccaacaag

SEQ ID NO: 1670738 - DNA, 15 bp, Homo sapiens
agggacccaacaagt

SEQ ID NO: 1670739 - DNA, 15 bp, Homo sapiens
gggacccaacaagtt

SEQ ID NO: 1670740 - DNA, 15 bp, Homo sapiens
ggacccaacaagttc

SEQ ID NO: 1670741 - DNA, 15 bp, Homo sapiens
gacccaacaagttca

SEQ ID NO: 1670742 - DNA, 15 bp, Homo sapiens
acccaacaagttcaa

SEQ ID NO: 1670743 - DNA, 15 bp, Homo sapiens
cccaacaagttcaag

SEQ ID NO: 1670744 - DNA, 15 bp, Homo sapiens
ccaacaagttcaagt

SEQ ID NO: 1670745 - DNA, 15 bp, Homo sapiens
caacaagttcaagtg

SEQ ID NO: 1670746 - DNA, 15 bp, Homo sapiens
aacaagttcaagtgt

SEQ ID NO: 1670747 - DNA, 15 bp, Homo sapiens
acaagttcaagtgtc

SEQ ID NO: 1670748 - DNA, 15 bp, Homo sapiens
caagttcaagtgtca

SEQ ID NO: 1670749 - DNA, 15 bp, Homo sapiens
aagttcaagtgtcac

SEQ ID NO: 1670750 - DNA, 15 bp, Homo sapiens
agttcaagtgtcaca

SEQ ID NO: 1670751 - DNA, 15 bp, Homo sapiens
gttcaagtgtcacag

SEQ ID NO: 1670752 - DNA, 15 bp, Homo sapiens
ttcaagtgtcacagc

SEQ ID NO: 1670753 - DNA, 15 bp, Homo sapiens
tcaagtgtcacagcg

SEQ ID NO: 1670754 - DNA, 15 bp, Homo sapiens
caagtgtcacagcgg

SEQ ID NO: 1670755 - DNA, 15 bp, Homo sapiens
aagtgtcacagcggc

SEQ ID NO: 1670756 - DNA, 15 bp, Homo sapiens
agtgtcacagcggcg

SEQ ID NO: 1670757 - DNA, 15 bp, Homo sapiens
gtgtcacagcggcga

SEQ ID NO: 1670758 - DNA, 15 bp, Homo sapiens
tgtcacagcggcgaa

SEQ ID NO: 1670759 - DNA, 15 bp, Homo sapiens
gtcacagcggcgaat

SEQ ID NO: 1670760 - DNA, 15 bp, Homo sapiens
tcacagcggcgaatg

SEQ ID NO: 1670761 - DNA, 15 bp, Homo sapiens
cacagcggcgaatgc

SEQ ID NO: 1670762 - DNA, 15 bp, Homo sapiens
acagcggcgaatgca

SEQ ID NO: 1670763 - DNA, 15 bp, Homo sapiens
cagcggcgaatgcat

SEQ ID NO: 1670764 - DNA, 15 bp, Homo sapiens
agcggcgaatgcatc

SEQ ID NO: 1670765 - DNA, 15 bp, Homo sapiens
gcggcgaatgcatca

SEQ ID NO: 1670766 - DNA, 15 bp, Homo sapiens
cggcgaatgcatcac

SEQ ID NO: 1670767 - DNA, 15 bp, Homo sapiens
ggcgaatgcatcacc

SEQ ID NO: 1670768 - DNA, 15 bp, Homo sapiens
gcgaatgcatcaccc

SEQ ID NO: 1670769 - DNA, 15 bp, Homo sapiens
cgaatgcatcaccct

SEQ ID NO: 1670770 - DNA, 15 bp, Homo sapiens
gaatgcatcaccctg

SEQ ID NO: 1670771 - DNA, 15 bp, Homo sapiens
aatgcatcaccctgg

SEQ ID NO: 1670772 - DNA, 15 bp, Homo sapiens
atgcatcaccctgga

SEQ ID NO: 1670773 - DNA, 15 bp, Homo sapiens
tgcatcaccctggac

SEQ ID NO: 1670774 - DNA, 15 bp, Homo sapiens
gcatcaccctggaca

SEQ ID NO: 1670775 - DNA, 15 bp, Homo sapiens
catcaccctggacaa

SEQ ID NO: 1670776 - DNA, 15 bp, Homo sapiens
atcaccctggacaaa

SEQ ID NO: 1670777 - DNA, 15 bp, Homo sapiens
tcaccctggacaaag

SEQ ID NO: 1670778 - DNA, 15 bp, Homo sapiens
caccctggacaaagt

SEQ ID NO: 1670779 - DNA, 15 bp, Homo sapiens
accctggacaaagtc

SEQ ID NO: 1670780 - DNA, 15 bp, Homo sapiens
ccctggacaaagtct

SEQ ID NO: 1670781 - DNA, 15 bp, Homo sapiens
cctggacaaagtctg

SEQ ID NO: 1670782 - DNA, 15 bp, Homo sapiens
ctggacaaagtctgc

SEQ ID NO: 1670783 - DNA, 15 bp, Homo sapiens
tggacaaagtctgca

SEQ ID NO: 1670784 - DNA, 15 bp, Homo sapiens
ggacaaagtctgcaa

SEQ ID NO: 1670785 - DNA, 15 bp, Homo sapiens
gacaaagtctgcaac

SEQ ID NO: 1670786 - DNA, 15 bp, Homo sapiens
acaaagtctgcaaca

SEQ ID NO: 1670787 - DNA, 15 bp, Homo sapiens
caaagtctgcaacat

SEQ ID NO: 1670788 - DNA, 15 bp, Homo sapiens
aaagtctgcaacatg

SEQ ID NO: 1670789 - DNA, 15 bp, Homo sapiens
aagtctgcaacatgg

SEQ ID NO: 1670790 - DNA, 15 bp, Homo sapiens
agtctgcaacatggc

SEQ ID NO: 1670791 - DNA, 15 bp, Homo sapiens
gtctgcaacatggct

SEQ ID NO: 1670792 - DNA, 15 bp, Homo sapiens
tctgcaacatggcta

SEQ ID NO: 1670793 - DNA, 15 bp, Homo sapiens
ctgcaacatggctag

SEQ ID NO: 1670794 - DNA, 15 bp, Homo sapiens
tgcaacatggctaga

SEQ ID NO: 1670795 - DNA, 15 bp, Homo sapiens
gcaacatggctagag

SEQ ID NO: 1670796 - DNA, 15 bp, Homo sapiens
caacatggctagaga

SEQ ID NO: 1670797 - DNA, 15 bp, Homo sapiens
aacatggctagagac

SEQ ID NO: 1670798 - DNA, 15 bp, Homo sapiens
acatggctagagact

SEQ ID NO: 1670799 - DNA, 15 bp, Homo sapiens
catggctagagactg

SEQ ID NO: 1670800 - DNA, 15 bp, Homo sapiens
atggctagagactgc

SEQ ID NO: 1670801 - DNA, 15 bp, Homo sapiens
tggctagagactgcc

SEQ ID NO: 1670802 - DNA, 15 bp, Homo sapiens
ggctagagactgccg

SEQ ID NO: 1670803 - DNA, 15 bp, Homo sapiens
gctagagactgccgg

SEQ ID NO: 1670804 - DNA, 15 bp, Homo sapiens
ctagagactgccggg

SEQ ID NO: 1670805 - DNA, 15 bp, Homo sapiens
tagagactgccggga

SEQ ID NO: 1670806 - DNA, 15 bp, Homo sapiens
agagactgccgggac

SEQ ID NO: 1670807 - DNA, 15 bp, Homo sapiens
gagactgccgggact

SEQ ID NO: 1670808 - DNA, 15 bp, Homo sapiens
agactgccgggactg

SEQ ID NO: 1670809 - DNA, 15 bp, Homo sapiens
gactgccgggactgg

SEQ ID NO: 1670810 - DNA, 15 bp, Homo sapiens
actgccgggactggt

SEQ ID NO: 1670811 - DNA, 15 bp, Homo sapiens
ctgccgggactggtc

SEQ ID NO: 1670812 - DNA, 15 bp, Homo sapiens
tgccgggactggtca

SEQ ID NO: 1670813 - DNA, 15 bp, Homo sapiens
gccgggactggtcag

SEQ ID NO: 1670814 - DNA, 15 bp, Homo sapiens
ccgggactggtcaga

SEQ ID NO: 1670815 - DNA, 15 bp, Homo sapiens
cgggactggtcagat

SEQ ID NO: 1670816 - DNA, 15 bp, Homo sapiens
gggactggtcagatg

SEQ ID NO: 1670817 - DNA, 15 bp, Homo sapiens
ggactggtcagatga

SEQ ID NO: 1670818 - DNA, 15 bp, Homo sapiens
gactggtcagatgaa

SEQ ID NO: 1670819 - DNA, 15 bp, Homo sapiens
actggtcagatgaac

SEQ ID NO: 1670820 - DNA, 15 bp, Homo sapiens
ctggtcagatgaacc

SEQ ID NO: 1670821 - DNA, 15 bp, Homo sapiens
tggtcagatgaaccc

SEQ ID NO: 1670822 - DNA, 15 bp, Homo sapiens
ggtcagatgaaccca

SEQ ID NO: 1670823 - DNA, 15 bp, Homo sapiens
gtcagatgaacccat

SEQ ID NO: 1670824 - DNA, 15 bp, Homo sapiens
tcagatgaacccatc

SEQ ID NO: 1670825 - DNA, 15 bp, Homo sapiens
cagatgaacccatca

SEQ ID NO: 1670826 - DNA, 15 bp, Homo sapiens
agatgaacccatcaa

SEQ ID NO: 1670827 - DNA, 15 bp, Homo sapiens
gatgaacccatcaaa

SEQ ID NO: 1670828 - DNA, 15 bp, Homo sapiens
atgaacccatcaaag

SEQ ID NO: 1670829 - DNA, 15 bp, Homo sapiens
tgaacccatcaaaga

SEQ ID NO: 1670830 - DNA, 15 bp, Homo sapiens
gaacccatcaaagag

SEQ ID NO: 1670831 - DNA, 15 bp, Homo sapiens
aacccatcaaagagt

SEQ ID NO: 1670832 - DNA, 15 bp, Homo sapiens
acccatcaaagagtg

SEQ ID NO: 1670833 - DNA, 15 bp, Homo sapiens
cccatcaaagagtgc

SEQ ID NO: 1670834 - DNA, 15 bp, Homo sapiens
ccatcaaagagtgcg

SEQ ID NO: 1670835 - DNA, 15 bp, Homo sapiens
catcaaagagtgcgg

SEQ ID NO: 1670836 - DNA, 15 bp, Homo sapiens
atcaaagagtgcggt

SEQ ID NO: 1670837 - DNA, 15 bp, Homo sapiens
tcaaagagtgcggtg

SEQ ID NO: 1670838 - DNA, 15 bp, Homo sapiens
caaagagtgcggtga

SEQ ID NO: 1670839 - DNA, 15 bp, Homo sapiens
aaagagtgcggtgag

SEQ ID NO: 1670840 - DNA, 15 bp, Homo sapiens
aagagtgcggtgagt

SEQ ID NO: 1670841 - DNA, 15 bp, Homo sapiens
agagtgcggtgagtc

SEQ ID NO: 1670842 - DNA, 15 bp, Homo sapiens
gagtgcggtgagtct

SEQ ID NO: 1670843 - DNA, 15 bp, Homo sapiens
agtgcggtgagtctc

SEQ ID NO: 1670844 - DNA, 15 bp, Homo sapiens
gtgcggtgagtctcg

SEQ ID NO: 1670845 - DNA, 15 bp, Homo sapiens
tgcggtgagtctcgg

SEQ ID NO: 1670846 - DNA, 15 bp, Homo sapiens
gcggtgagtctcggt

SEQ ID NO: 1670847 - DNA, 15 bp, Homo sapiens
cggtgagtctcggtg

SEQ ID NO: 1670848 - DNA, 15 bp, Homo sapiens
ggtgagtctcggtgc

SEQ ID NO: 1670849 - DNA, 15 bp, Homo sapiens
gtgagtctcggtgca

SEQ ID NO: 1670850 - DNA, 15 bp, Homo sapiens
tgagtctcggtgcag

SEQ ID NO: 1670851 - DNA, 15 bp, Homo sapiens
gagtctcggtgcagg

SEQ ID NO: 1670852 - DNA, 15 bp, Homo sapiens
agtctcggtgcaggc

SEQ ID NO: 1670853 - DNA, 15 bp, Homo sapiens
gtctcggtgcaggcg

SEQ ID NO: 1670854 - DNA, 15 bp, Homo sapiens
tctcggtgcaggcgg

SEQ ID NO: 1670855 - DNA, 15 bp, Homo sapiens
ctcggtgcaggcggc

SEQ ID NO: 1670856 - DNA, 15 bp, Homo sapiens
tcggtgcaggcggct

SEQ ID NO: 1670857 - DNA, 15 bp, Homo sapiens
cggtgcaggcggctt

SEQ ID NO: 1670858 - DNA, 15 bp, Homo sapiens
ggtgcaggcggcttg

SEQ ID NO: 1670859 - DNA, 15 bp, Homo sapiens
gtgcaggcggcttgc

SEQ ID NO: 1670860 - DNA, 15 bp, Homo sapiens
tgcaggcggcttgca

SEQ ID NO: 1670861 - DNA, 15 bp, Homo sapiens
gcaggcggcttgcag

SEQ ID NO: 1670862 - DNA, 15 bp, Homo sapiens
caggcggcttgcaga

SEQ ID NO: 1670863 - DNA, 15 bp, Homo sapiens
aggcggcttgcagag

SEQ ID NO: 1670864 - DNA, 15 bp, Homo sapiens
ggcggcttgcagagt

SEQ ID NO: 1670865 - DNA, 15 bp, Homo sapiens
gcggcttgcagagtt

SEQ ID NO: 1670866 - DNA, 15 bp, Homo sapiens
cggcttgcagagttt

SEQ ID NO: 1670867 - DNA, 15 bp, Homo sapiens
ggcttgcagagtttg

SEQ ID NO: 1670868 - DNA, 15 bp, Homo sapiens
gcttgcagagtttgt

SEQ ID NO: 1670869 - DNA, 15 bp, Homo sapiens
cttgcagagtttgtg

SEQ ID NO: 1670870 - DNA, 15 bp, Homo sapiens
ttgcagagtttgtgg

SEQ ID NO: 1670871 - DNA, 15 bp, Homo sapiens
tgcagagtttgtggg

SEQ ID NO: 1670872 - DNA, 15 bp, Homo sapiens
gcagagtttgtgggg

SEQ ID NO: 1670873 - DNA, 15 bp, Homo sapiens
cagagtttgtgggga

SEQ ID NO: 1670874 - DNA, 15 bp, Homo sapiens
agagtttgtggggag

SEQ ID NO: 1670875 - DNA, 15 bp, Homo sapiens
gagtttgtggggagc

SEQ ID NO: 1670876 - DNA, 15 bp, Homo sapiens
agtttgtggggagcc

SEQ ID NO: 1670877 - DNA, 15 bp, Homo sapiens
gtttgtggggagcca

SEQ ID NO: 1670878 - DNA, 15 bp, Homo sapiens
tttgtggggagccag

SEQ ID NO: 1670879 - DNA, 15 bp, Homo sapiens
ttgtggggagccagg

SEQ ID NO: 1670880 - DNA, 15 bp, Homo sapiens
tgtggggagccagga

SEQ ID NO: 1670881 - DNA, 15 bp, Homo sapiens
gtggggagccaggaa

SEQ ID NO: 1670882 - DNA, 15 bp, Homo sapiens
tggggagccaggaaa

SEQ ID NO: 1670883 - DNA, 15 bp, Homo sapiens
ggggagccaggaaag

SEQ ID NO: 1670884 - DNA, 15 bp, Homo sapiens
gggagccaggaaagg

SEQ ID NO: 1670885 - DNA, 15 bp, Homo sapiens
ggagccaggaaaggg

SEQ ID NO: 1670886 - DNA, 15 bp, Homo sapiens
gagccaggaaaggga

SEQ ID NO: 1670887 - DNA, 15 bp, Homo sapiens
agccaggaaagggac

SEQ ID NO: 1670888 - DNA, 15 bp, Homo sapiens
gccaggaaagggact

SEQ ID NO: 1670889 - DNA, 15 bp, Homo sapiens
ccaggaaagggactg

SEQ ID NO: 1670890 - DNA, 15 bp, Homo sapiens
caggaaagggactga

SEQ ID NO: 1670891 - DNA, 15 bp, Homo sapiens
aggaaagggactgag

SEQ ID NO: 1670892 - DNA, 15 bp, Homo sapiens
ggaaagggactgaga

SEQ ID NO: 1670893 - DNA, 15 bp, Homo sapiens
gaaagggactgagac

SEQ ID NO: 1670894 - DNA, 15 bp, Homo sapiens
aaagggactgagaca

SEQ ID NO: 1670895 - DNA, 15 bp, Homo sapiens
aagggactgagacat

SEQ ID NO: 1670896 - DNA, 15 bp, Homo sapiens
agggactgagacatg

SEQ ID NO: 1670897 - DNA, 15 bp, Homo sapiens
gggactgagacatga

SEQ ID NO: 1670898 - DNA, 15 bp, Homo sapiens
ggactgagacatgag

SEQ ID NO: 1670899 - DNA, 15 bp, Homo sapiens
gactgagacatgagt

SEQ ID NO: 1670900 - DNA, 15 bp, Homo sapiens
actgagacatgagtg

SEQ ID NO: 1670901 - DNA, 15 bp, Homo sapiens
ctgagacatgagtgc

SEQ ID NO: 1670902 - DNA, 15 bp, Homo sapiens
tgagacatgagtgct

SEQ ID NO: 1670903 - DNA, 15 bp, Homo sapiens
gagacatgagtgctg

SEQ ID NO: 1670904 - DNA, 15 bp, Homo sapiens
agacatgagtgctgt

SEQ ID NO: 1670905 - DNA, 15 bp, Homo sapiens
gacatgagtgctgta

SEQ ID NO: 1670906 - DNA, 15 bp, Homo sapiens
acatgagtgctgtag

SEQ ID NO: 1670907 - DNA, 15 bp, Homo sapiens
catgagtgctgtagg

SEQ ID NO: 1670908 - DNA, 15 bp, Homo sapiens
atgagtgctgtaggg

SEQ ID NO: 1670909 - DNA, 15 bp, Homo sapiens
tgagtgctgtagggt

SEQ ID NO: 1670910 - DNA, 15 bp, Homo sapiens
gagtgctgtagggtt

SEQ ID NO: 1670911 - DNA, 15 bp, Homo sapiens
agtgctgtagggttt

SEQ ID NO: 1670912 - DNA, 15 bp, Homo sapiens
gtgctgtagggtttt

SEQ ID NO: 1670913 - DNA, 15 bp, Homo sapiens
tgctgtagggttttg

SEQ ID NO: 1670914 - DNA, 15 bp, Homo sapiens
gctgtagggttttgg

SEQ ID NO: 1670915 - DNA, 15 bp, Homo sapiens
ctgtagggttttggg

SEQ ID NO: 1670916 - DNA, 15 bp, Homo sapiens
tgtagggttttggga

SEQ ID NO: 1670917 - DNA, 15 bp, Homo sapiens
gtagggttttgggaa

SEQ ID NO: 1670918 - DNA, 15 bp, Homo sapiens
tagggttttgggaac

SEQ ID NO: 1670919 - DNA, 15 bp, Homo sapiens
agggttttgggaact

SEQ ID NO: 1670920 - DNA, 15 bp, Homo sapiens
gggttttgggaactc

SEQ ID NO: 1670921 - DNA, 15 bp, Homo sapiens
ggttttgggaactcc

SEQ ID NO: 1670922 - DNA, 15 bp, Homo sapiens
gttttgggaactcca

SEQ ID NO: 1670923 - DNA, 15 bp, Homo sapiens
ttttgggaactccac

SEQ ID NO: 1670924 - DNA, 15 bp, Homo sapiens
tttgggaactccact

SEQ ID NO: 1670925 - DNA, 15 bp, Homo sapiens
ttgggaactccactc

SEQ ID NO: 1670926 - DNA, 15 bp, Homo sapiens
tgggaactccactct

SEQ ID NO: 1670927 - DNA, 15 bp, Homo sapiens
gggaactccactctg

SEQ ID NO: 1670928 - DNA, 15 bp, Homo sapiens
ggaactccactctgc

SEQ ID NO: 1670929 - DNA, 15 bp, Homo sapiens
gaactccactctgcc

SEQ ID NO: 1670930 - DNA, 15 bp, Homo sapiens
aactccactctgccc

SEQ ID NO: 1670931 - DNA, 15 bp, Homo sapiens
actccactctgccca

SEQ ID NO: 1670932 - DNA, 15 bp, Homo sapiens
ctccactctgcccac

SEQ ID NO: 1670933 - DNA, 15 bp, Homo sapiens
tccactctgcccacc

SEQ ID NO: 1670934 - DNA, 15 bp, Homo sapiens
ccactctgcccaccc

SEQ ID NO: 1670935 - DNA, 15 bp, Homo sapiens
cactctgcccaccct

SEQ ID NO: 1670936 - DNA, 15 bp, Homo sapiens
actctgcccaccctg

SEQ ID NO: 1670937 - DNA, 15 bp, Homo sapiens
ctctgcccaccctgt

SEQ ID NO: 1670938 - DNA, 15 bp, Homo sapiens
tctgcccaccctgtg

SEQ ID NO: 1670939 - DNA, 15 bp, Homo sapiens
ctgcccaccctgtgc

SEQ ID NO: 1670940 - DNA, 15 bp, Homo sapiens
tgcccaccctgtgca

SEQ ID NO: 1670941 - DNA, 15 bp, Homo sapiens
gcccaccctgtgcaa

SEQ ID NO: 1670942 - DNA, 15 bp, Homo sapiens
cccaccctgtgcaaa

SEQ ID NO: 1670943 - DNA, 15 bp, Homo sapiens
ccaccctgtgcaaag

SEQ ID NO: 1670944 - DNA, 15 bp, Homo sapiens
caccctgtgcaaagg

SEQ ID NO: 1670945 - DNA, 15 bp, Homo sapiens
accctgtgcaaaggg

SEQ ID NO: 1670946 - DNA, 15 bp, Homo sapiens
ccctgtgcaaagggc

SEQ ID NO: 1670947 - DNA, 15 bp, Homo sapiens
cctgtgcaaagggct

SEQ ID NO: 1670948 - DNA, 15 bp, Homo sapiens
ctgtgcaaagggctc

SEQ ID NO: 1670949 - DNA, 15 bp, Homo sapiens
tgtgcaaagggctcc

SEQ ID NO: 1670950 - DNA, 15 bp, Homo sapiens
gtgcaaagggctcct

SEQ ID NO: 1670951 - DNA, 15 bp, Homo sapiens
tgcaaagggctcctt

SEQ ID NO: 1670952 - DNA, 15 bp, Homo sapiens
gcaaagggctccttt

SEQ ID NO: 1670953 - DNA, 15 bp, Homo sapiens
caaagggctcctttt

SEQ ID NO: 1670954 - DNA, 15 bp, Homo sapiens
aaagggctccttttt

SEQ ID NO: 1670955 - DNA, 15 bp, Homo sapiens
aagggctcctttttt

SEQ ID NO: 1670956 - DNA, 15 bp, Homo sapiens
agggctccttttttc

SEQ ID NO: 1670957 - DNA, 15 bp, Homo sapiens
gggctccttttttca

SEQ ID NO: 1670958 - DNA, 15 bp, Homo sapiens
ggctccttttttcat

SEQ ID NO: 1670959 - DNA, 15 bp, Homo sapiens
gctccttttttcatt

SEQ ID NO: 1670960 - DNA, 15 bp, Homo sapiens
ctccttttttcattt

SEQ ID NO: 1670961 - DNA, 15 bp, Homo sapiens
tccttttttcatttt

SEQ ID NO: 1670962 - DNA, 15 bp, Homo sapiens
ccttttttcattttg

SEQ ID NO: 1670963 - DNA, 15 bp, Homo sapiens
cttttttcattttga

SEQ ID NO: 1670964 - DNA, 15 bp, Homo sapiens
ttttttcattttgag

SEQ ID NO: 1670965 - DNA, 15 bp, Homo sapiens
tttttcattttgaga

SEQ ID NO: 1670966 - DNA, 15 bp, Homo sapiens
ttttcattttgagac

SEQ ID NO: 1670967 - DNA, 15 bp, Homo sapiens
tttcattttgagaca

SEQ ID NO: 1670968 - DNA, 15 bp, Homo sapiens
ttcattttgagacag

SEQ ID NO: 1670969 - DNA, 15 bp, Homo sapiens
tcattttgagacagt

SEQ ID NO: 1670970 - DNA, 15 bp, Homo sapiens
cattttgagacagtc

SEQ ID NO: 1670971 - DNA, 15 bp, Homo sapiens
attttgagacagtct

SEQ ID NO: 1670972 - DNA, 15 bp, Homo sapiens
tttgagacagtctcg

SEQ ID NO: 1670973 - DNA, 15 bp, Homo sapiens
ttgagacagtctcgc

SEQ ID NO: 1670974 - DNA, 15 bp, Homo sapiens
tgagacagtctcgca

SEQ ID NO: 1670975 - DNA, 15 bp, Homo sapiens
gagacagtctcgcac

SEQ ID NO: 1670976 - DNA, 15 bp, Homo sapiens
agacagtctcgcacg

SEQ ID NO: 1670977 - DNA, 15 bp, Homo sapiens
gacagtctcgcacgg

SEQ ID NO: 1670978 - DNA, 15 bp, Homo sapiens
acagtctcgcacggt

SEQ ID NO: 1670979 - DNA, 15 bp, Homo sapiens
cagtctcgcacggtc

SEQ ID NO: 1670980 - DNA, 15 bp, Homo sapiens
agtctcgcacggtcg

SEQ ID NO: 1670981 - DNA, 15 bp, Homo sapiens
gtctcgcacggtcgc

SEQ ID NO: 1670982 - DNA, 15 bp, Homo sapiens
tctcgcacggtcgcc

SEQ ID NO: 1670983 - DNA, 15 bp, Homo sapiens
ctcgcacggtcgccc

SEQ ID NO: 1670984 - DNA, 15 bp, Homo sapiens
tcgcacggtcgccca

SEQ ID NO: 1670985 - DNA, 15 bp, Homo sapiens
cgcacggtcgcccag

SEQ ID NO: 1670986 - DNA, 15 bp, Homo sapiens
gcacggtcgcccagg

SEQ ID NO: 1670987 - DNA, 15 bp, Homo sapiens
cacggtcgcccaggc

SEQ ID NO: 1670988 - DNA, 15 bp, Homo sapiens
acggtcgcccaggct

SEQ ID NO: 1670989 - DNA, 15 bp, Homo sapiens
cggtcgcccaggctg

SEQ ID NO: 1670990 - DNA, 15 bp, Homo sapiens
ggtcgcccaggctgg

SEQ ID NO: 1670991 - DNA, 15 bp, Homo sapiens
gagcgcaatggcgcg

SEQ ID NO: 1670992 - DNA, 15 bp, Homo sapiens
agcgcaatggcgcga

SEQ ID NO: 1670993 - DNA, 15 bp, Homo sapiens
gcgcaatggcgcgat

SEQ ID NO: 1670994 - DNA, 15 bp, Homo sapiens
cgcaatggcgcgatc

SEQ ID NO: 1670995 - DNA, 15 bp, Homo sapiens
ggcgcccaccaccaa

SEQ ID NO: 1670996 - DNA, 15 bp, Homo sapiens
gcgcccaccaccaag

SEQ ID NO: 1670997 - DNA, 15 bp, Homo sapiens
cgcccaccaccaagc

SEQ ID NO: 1670998 - DNA, 15 bp, Homo sapiens
accaccaagcccggg

SEQ ID NO: 1670999 - DNA, 15 bp, Homo sapiens
ccaccaagcccgggt

SEQ ID NO: 1671000 - DNA, 15 bp, Homo sapiens
caccaagcccgggta

SEQ ID NO: 1671001 - DNA, 15 bp, Homo sapiens
accaagcccgggtaa

SEQ ID NO: 1671002 - DNA, 15 bp, Homo sapiens
ccaagcccgggtaat

SEQ ID NO: 1671003 - DNA, 15 bp, Homo sapiens
caagcccgggtaatt

SEQ ID NO: 1671004 - DNA, 15 bp, Homo sapiens
aagcccgggtaattt

SEQ ID NO: 1671005 - DNA, 15 bp, Homo sapiens
agcccgggtaatttt

SEQ ID NO: 1671006 - DNA, 15 bp, Homo sapiens
gcccgggtaattttt

SEQ ID NO: 1671007 - DNA, 15 bp, Homo sapiens
cccgggtaatttttt

SEQ ID NO: 1671008 - DNA, 15 bp, Homo sapiens
ccgggtaattttttg

SEQ ID NO: 1671009 - DNA, 15 bp, Homo sapiens
cgggtaattttttgt

SEQ ID NO: 1671010 - DNA, 15 bp, Homo sapiens
gggtaattttttgta

SEQ ID NO: 1671011 - DNA, 15 bp, Homo sapiens
ggtaattttttgtat

SEQ ID NO: 1671012 - DNA, 15 bp, Homo sapiens
gtaattttttgtatg

SEQ ID NO: 1671013 - DNA, 15 bp, Homo sapiens
taattttttgtatgt

SEQ ID NO: 1671014 - DNA, 15 bp, Homo sapiens
aattttttgtatgtt

SEQ ID NO: 1671015 - DNA, 15 bp, Homo sapiens
attttttgtatgttt

SEQ ID NO: 1671016 - DNA, 15 bp, Homo sapiens
ttttttgtatgttta

SEQ ID NO: 1671017 - DNA, 15 bp, Homo sapiens
tttttgtatgtttag

SEQ ID NO: 1671018 - DNA, 15 bp, Homo sapiens
ttttgtatgtttagt

SEQ ID NO: 1671019 - DNA, 15 bp, Homo sapiens
tttgtatgtttagta

SEQ ID NO: 1671020 - DNA, 15 bp, Homo sapiens
ttgtatgtttagtag

SEQ ID NO: 1671021 - DNA, 15 bp, Homo sapiens
tgtatgtttagtaga

SEQ ID NO: 1671022 - DNA, 15 bp, Homo sapiens
gtatgtttagtagag

SEQ ID NO: 1671023 - DNA, 15 bp, Homo sapiens
tatgtttagtagaga

SEQ ID NO: 1671024 - DNA, 15 bp, Homo sapiens
atgtttagtagagat

SEQ ID NO: 1671025 - DNA, 15 bp, Homo sapiens
tgtttagtagagatg

SEQ ID NO: 1671026 - DNA, 15 bp, Homo sapiens
gtttagtagagatgg

SEQ ID NO: 1671027 - DNA, 15 bp, Homo sapiens
gatggggtttcacta

SEQ ID NO: 1671028 - DNA, 15 bp, Homo sapiens
atggggtttcactat

SEQ ID NO: 1671029 - DNA, 15 bp, Homo sapiens
tggggtttcactatg

SEQ ID NO: 1671030 - DNA, 15 bp, Homo sapiens
gttgaactcctgacc

SEQ ID NO: 1671031 - DNA, 15 bp, Homo sapiens
ctcatgatccgccca

SEQ ID NO: 1671032 - DNA, 15 bp, Homo sapiens
tcatgatccgcccac

SEQ ID NO: 1671033 - DNA, 15 bp, Homo sapiens
catgatccgcccacc

SEQ ID NO: 1671034 - DNA, 15 bp, Homo sapiens
atgatccgcccacct

SEQ ID NO: 1671035 - DNA, 15 bp, Homo sapiens
gattacaggcgtgac

SEQ ID NO: 1671036 - DNA, 15 bp, Homo sapiens
attacaggcgtgacc

SEQ ID NO: 1671037 - DNA, 15 bp, Homo sapiens
ttacaggcgtgaccc

SEQ ID NO: 1671038 - DNA, 15 bp, Homo sapiens
tacaggcgtgaccca

SEQ ID NO: 1671039 - DNA, 15 bp, Homo sapiens
acaggcgtgacccac

SEQ ID NO: 1671040 - DNA, 15 bp, Homo sapiens
caggcgtgacccacc

SEQ ID NO: 1671041 - DNA, 15 bp, Homo sapiens
aggcgtgacccaccc

SEQ ID NO: 1671042 - DNA, 15 bp, Homo sapiens
ggcgtgacccacccc

SEQ ID NO: 1671043 - DNA, 15 bp, Homo sapiens
gcgtgacccacccca

SEQ ID NO: 1671044 - DNA, 15 bp, Homo sapiens
cgtgacccaccccat

SEQ ID NO: 1671045 - DNA, 15 bp, Homo sapiens
gtgacccaccccatg

SEQ ID NO: 1671046 - DNA, 15 bp, Homo sapiens
tgacccaccccatga

SEQ ID NO: 1671047 - DNA, 15 bp, Homo sapiens
gacccaccccatgaa

SEQ ID NO: 1671048 - DNA, 15 bp, Homo sapiens
acccaccccatgaaa

SEQ ID NO: 1671049 - DNA, 15 bp, Homo sapiens
cccaccccatgaaaa

SEQ ID NO: 1671050 - DNA, 15 bp, Homo sapiens
ccaccccatgaaaaa

SEQ ID NO: 1671051 - DNA, 15 bp, Homo sapiens
caccccatgaaaaaa

SEQ ID NO: 1671052 - DNA, 15 bp, Homo sapiens
accccatgaaaaaaa

SEQ ID NO: 1671053 - DNA, 15 bp, Homo sapiens
ccccatgaaaaaaaa

SEQ ID NO: 1671054 - DNA, 15 bp, Homo sapiens
cccatgaaaaaaaat

SEQ ID NO: 1671055 - DNA, 15 bp, Homo sapiens
ccatgaaaaaaaatt

SEQ ID NO: 1671056 - DNA, 15 bp, Homo sapiens
catgaaaaaaaatta

SEQ ID NO: 1671057 - DNA, 15 bp, Homo sapiens
atgaaaaaaaattaa

SEQ ID NO: 1671058 - DNA, 15 bp, Homo sapiens
tgaaaaaaaattaaa

SEQ ID NO: 1671059 - DNA, 15 bp, Homo sapiens
gaaaaaaaattaaaa

SEQ ID NO: 1671060 - DNA, 15 bp, Homo sapiens
aaaaattaaaaaatg

SEQ ID NO: 1671061 - DNA, 15 bp, Homo sapiens
aaaattaaaaaatga

SEQ ID NO: 1671062 - DNA, 15 bp, Homo sapiens
aaattaaaaaatgaa

SEQ ID NO: 1671063 - DNA, 15 bp, Homo sapiens
aattaaaaaatgaag

SEQ ID NO: 1671064 - DNA, 15 bp, Homo sapiens
aaaaaatgaagcgat

SEQ ID NO: 1671065 - DNA, 15 bp, Homo sapiens
aaaaatgaagcgatg

SEQ ID NO: 1671066 - DNA, 15 bp, Homo sapiens
aaaatgaagcgatgc

SEQ ID NO: 1671067 - DNA, 15 bp, Homo sapiens
aaatgaagcgatgct

SEQ ID NO: 1671068 - DNA, 15 bp, Homo sapiens
aatgaagcgatgctg

SEQ ID NO: 1671069 - DNA, 15 bp, Homo sapiens
atgaagcgatgctgg

SEQ ID NO: 1671070 - DNA, 15 bp, Homo sapiens
tgaagcgatgctggg

SEQ ID NO: 1671071 - DNA, 15 bp, Homo sapiens
gaagcgatgctgggc

SEQ ID NO: 1671072 - DNA, 15 bp, Homo sapiens
aagcgatgctgggcg

SEQ ID NO: 1671073 - DNA, 15 bp, Homo sapiens
agcgatgctgggcgc

SEQ ID NO: 1671074 - DNA, 15 bp, Homo sapiens
gcgatgctgggcgcg

SEQ ID NO: 1671075 - DNA, 15 bp, Homo sapiens
cgatgctgggcgcgg

SEQ ID NO: 1671076 - DNA, 15 bp, Homo sapiens
gatgctgggcgcggt

SEQ ID NO: 1671077 - DNA, 15 bp, Homo sapiens
atgctgggcgcggtg

SEQ ID NO: 1671078 - DNA, 15 bp, Homo sapiens
tgctgggcgcggtgg

SEQ ID NO: 1671079 - DNA, 15 bp, Homo sapiens
gctgggcgcggtgga

SEQ ID NO: 1671080 - DNA, 15 bp, Homo sapiens
ctgggcgcggtggat

SEQ ID NO: 1671081 - DNA, 15 bp, Homo sapiens
tgggcgcggtggatc

SEQ ID NO: 1671082 - DNA, 15 bp, Homo sapiens
gggcgcggtggatca

SEQ ID NO: 1671083 - DNA, 15 bp, Homo sapiens
ggcgcggtggatcac

SEQ ID NO: 1671084 - DNA, 15 bp, Homo sapiens
gcgcggtggatcacg

SEQ ID NO: 1671085 - DNA, 15 bp, Homo sapiens
cgcggtggatcacgc

SEQ ID NO: 1671086 - DNA, 15 bp, Homo sapiens
gcggtggatcacgcc

SEQ ID NO: 1671087 - DNA, 15 bp, Homo sapiens
gaagctgaggcaggc

SEQ ID NO: 1671088 - DNA, 15 bp, Homo sapiens
aagctgaggcaggca

SEQ ID NO: 1671089 - DNA, 15 bp, Homo sapiens
agctgaggcaggcag

SEQ ID NO: 1671090 - DNA, 15 bp, Homo sapiens
ggcaggcagatcacg

SEQ ID NO: 1671091 - DNA, 15 bp, Homo sapiens
gcaggcagatcacga

SEQ ID NO: 1671092 - DNA, 15 bp, Homo sapiens
aggcagatcacgagg

SEQ ID NO: 1671093 - DNA, 15 bp, Homo sapiens
ggcagatcacgaggg

SEQ ID NO: 1671094 - DNA, 15 bp, Homo sapiens
gcagatcacgagggc

SEQ ID NO: 1671095 - DNA, 15 bp, Homo sapiens
cagatcacgagggca

SEQ ID NO: 1671096 - DNA, 15 bp, Homo sapiens
agatcacgagggcag

SEQ ID NO: 1671097 - DNA, 15 bp, Homo sapiens
gatcacgagggcagg

SEQ ID NO: 1671098 - DNA, 15 bp, Homo sapiens
atcacgagggcagga

SEQ ID NO: 1671099 - DNA, 15 bp, Homo sapiens
tcacgagggcaggag

SEQ ID NO: 1671100 - DNA, 15 bp, Homo sapiens
cacgagggcaggaga

SEQ ID NO: 1671101 - DNA, 15 bp, Homo sapiens
acgagggcaggagat

SEQ ID NO: 1671102 - DNA, 15 bp, Homo sapiens
cgagggcaggagatt

SEQ ID NO: 1671103 - DNA, 15 bp, Homo sapiens
gagggcaggagattg

SEQ ID NO: 1671104 - DNA, 15 bp, Homo sapiens
agggcaggagattga

SEQ ID NO: 1671105 - DNA, 15 bp, Homo sapiens
gggcaggagattgag

SEQ ID NO: 1671106 - DNA, 15 bp, Homo sapiens
ggcaggagattgaga

SEQ ID NO: 1671107 - DNA, 15 bp, Homo sapiens
gcaggagattgagac

SEQ ID NO: 1671108 - DNA, 15 bp, Homo sapiens
catcctggctaatac

SEQ ID NO: 1671109 - DNA, 15 bp, Homo sapiens
atcctggctaatacg

SEQ ID NO: 1671110 - DNA, 15 bp, Homo sapiens
tcctggctaatacgg

SEQ ID NO: 1671111 - DNA, 15 bp, Homo sapiens
cctggctaatacggt

SEQ ID NO: 1671112 - DNA, 15 bp, Homo sapiens
ctggctaatacggtg

SEQ ID NO: 1671113 - DNA, 15 bp, Homo sapiens
tggctaatacggtga

SEQ ID NO: 1671114 - DNA, 15 bp, Homo sapiens
ggctaatacggtgaa

SEQ ID NO: 1671115 - DNA, 15 bp, Homo sapiens
gctaatacggtgaaa

SEQ ID NO: 1671116 - DNA, 15 bp, Homo sapiens
ctaatacggtgaaac

SEQ ID NO: 1671117 - DNA, 15 bp, Homo sapiens
taatacggtgaaacc

SEQ ID NO: 1671118 - DNA, 15 bp, Homo sapiens
aatacggtgaaaccc

SEQ ID NO: 1671119 - DNA, 15 bp, Homo sapiens
atacggtgaaacccc

SEQ ID NO: 1671120 - DNA, 15 bp, Homo sapiens
tacggtgaaacccca

SEQ ID NO: 1671121 - DNA, 15 bp, Homo sapiens
catctctactaaaac

SEQ ID NO: 1671122 - DNA, 15 bp, Homo sapiens
atctctactaaaact

SEQ ID NO: 1671123 - DNA, 15 bp, Homo sapiens
tctctactaaaacta

SEQ ID NO: 1671124 - DNA, 15 bp, Homo sapiens
ctctactaaaactac

SEQ ID NO: 1671125 - DNA, 15 bp, Homo sapiens
taaaactacaaaaaa

SEQ ID NO: 1671126 - DNA, 15 bp, Homo sapiens
aaaactacaaaaaat

SEQ ID NO: 1671127 - DNA, 15 bp, Homo sapiens
aaactacaaaaaatt

SEQ ID NO: 1671128 - DNA, 15 bp, Homo sapiens
aactacaaaaaatta

SEQ ID NO: 1671129 - DNA, 15 bp, Homo sapiens
actacaaaaaattag

SEQ ID NO: 1671130 - DNA, 15 bp, Homo sapiens
ctacaaaaaattagc

SEQ ID NO: 1671131 - DNA, 15 bp, Homo sapiens
cgggtgtggtggcag

SEQ ID NO: 1671132 - DNA, 15 bp, Homo sapiens
gggtgtggtggcagg

SEQ ID NO: 1671133 - DNA, 15 bp, Homo sapiens
ggtgtggtggcaggc

SEQ ID NO: 1671134 - DNA, 15 bp, Homo sapiens
gtgtggtggcaggca

SEQ ID NO: 1671135 - DNA, 15 bp, Homo sapiens
tgtggtggcaggcac

SEQ ID NO: 1671136 - DNA, 15 bp, Homo sapiens
gtggtggcaggcacc

SEQ ID NO: 1671137 - DNA, 15 bp, Homo sapiens
tggcaggcacctgtg

SEQ ID NO: 1671138 - DNA, 15 bp, Homo sapiens
ggcaggcacctgtga

SEQ ID NO: 1671139 - DNA, 15 bp, Homo sapiens
gcaggcacctgtgat

SEQ ID NO: 1671140 - DNA, 15 bp, Homo sapiens
caggcacctgtgatc

SEQ ID NO: 1671141 - DNA, 15 bp, Homo sapiens
aggcacctgtgatcc

SEQ ID NO: 1671142 - DNA, 15 bp, Homo sapiens
ggcacctgtgatccc

SEQ ID NO: 1671143 - DNA, 15 bp, Homo sapiens
gcacctgtgatccca

SEQ ID NO: 1671144 - DNA, 15 bp, Homo sapiens
cctgtgatcccagct

SEQ ID NO: 1671145 - DNA, 15 bp, Homo sapiens
ctgtgatcccagcta

SEQ ID NO: 1671146 - DNA, 15 bp, Homo sapiens
tgtgatcccagctac

SEQ ID NO: 1671147 - DNA, 15 bp, Homo sapiens
gtgatcccagctact

SEQ ID NO: 1671148 - DNA, 15 bp, Homo sapiens
tgatcccagctactc

SEQ ID NO: 1671149 - DNA, 15 bp, Homo sapiens
gatcccagctactca

SEQ ID NO: 1671150 - DNA, 15 bp, Homo sapiens
gttgcagtgagccgg

SEQ ID NO: 1671151 - DNA, 15 bp, Homo sapiens
ttgcagtgagccggg

SEQ ID NO: 1671152 - DNA, 15 bp, Homo sapiens
tgcagtgagccggga

SEQ ID NO: 1671153 - DNA, 15 bp, Homo sapiens
gcagtgagccgggat

SEQ ID NO: 1671154 - DNA, 15 bp, Homo sapiens
cagtgagccgggatc

SEQ ID NO: 1671155 - DNA, 15 bp, Homo sapiens
agtgagccgggatca

SEQ ID NO: 1671156 - DNA, 15 bp, Homo sapiens
gtgagccgggatcac

SEQ ID NO: 1671157 - DNA, 15 bp, Homo sapiens
tgagccgggatcaca

SEQ ID NO: 1671158 - DNA, 15 bp, Homo sapiens
gagccgggatcacac

SEQ ID NO: 1671159 - DNA, 15 bp, Homo sapiens
agccgggatcacacc

SEQ ID NO: 1671160 - DNA, 15 bp, Homo sapiens
gccgggatcacacca

SEQ ID NO: 1671161 - DNA, 15 bp, Homo sapiens
ccgggatcacaccat

SEQ ID NO: 1671162 - DNA, 15 bp, Homo sapiens
cgggatcacaccatt

SEQ ID NO: 1671163 - DNA, 15 bp, Homo sapiens
gggatcacaccattg

SEQ ID NO: 1671164 - DNA, 15 bp, Homo sapiens
ggatcacaccattgc

SEQ ID NO: 1671165 - DNA, 15 bp, Homo sapiens
aaaaaaaaaagcgaa

SEQ ID NO: 1671166 - DNA, 15 bp, Homo sapiens
aaaaaaaaagcgaat

SEQ ID NO: 1671167 - DNA, 15 bp, Homo sapiens
aaaaaaaagcgaatt

SEQ ID NO: 1671168 - DNA, 15 bp, Homo sapiens
aaaaaaagcgaattc

SEQ ID NO: 1671169 - DNA, 15 bp, Homo sapiens
aaaaaagcgaattct

SEQ ID NO: 1671170 - DNA, 15 bp, Homo sapiens
aaaaagcgaattctg

SEQ ID NO: 1671171 - DNA, 15 bp, Homo sapiens
aaaagcgaattctga

SEQ ID NO: 1671172 - DNA, 15 bp, Homo sapiens
aaagcgaattctgaa

SEQ ID NO: 1671173 - DNA, 15 bp, Homo sapiens
aagcgaattctgaaa

SEQ ID NO: 1671174 - DNA, 15 bp, Homo sapiens
agcgaattctgaaat

SEQ ID NO: 1671175 - DNA, 15 bp, Homo sapiens
gcgaattctgaaata

SEQ ID NO: 1671176 - DNA, 15 bp, Homo sapiens
cgaattctgaaatac

SEQ ID NO: 1671177 - DNA, 15 bp, Homo sapiens
gaattctgaaataca

SEQ ID NO: 1671178 - DNA, 15 bp, Homo sapiens
aattctgaaatacat

SEQ ID NO: 1671179 - DNA, 15 bp, Homo sapiens
attctgaaatacatg

SEQ ID NO: 1671180 - DNA, 15 bp, Homo sapiens
ttctgaaatacatga

SEQ ID NO: 1671181 - DNA, 15 bp, Homo sapiens
tctgaaatacatgaa

SEQ ID NO: 1671182 - DNA, 15 bp, Homo sapiens
ctgaaatacatgaat

SEQ ID NO: 1671183 - DNA, 15 bp, Homo sapiens
tgaaatacatgaatt

SEQ ID NO: 1671184 - DNA, 15 bp, Homo sapiens
gaaatacatgaattc

SEQ ID NO: 1671185 - DNA, 15 bp, Homo sapiens
aaatacatgaattct

SEQ ID NO: 1671186 - DNA, 15 bp, Homo sapiens
aatacatgaattctt

SEQ ID NO: 1671187 - DNA, 15 bp, Homo sapiens
atacatgaattcttt

SEQ ID NO: 1671188 - DNA, 15 bp, Homo sapiens
tacatgaattctttt

SEQ ID NO: 1671189 - DNA, 15 bp, Homo sapiens
acatgaattcttttc

SEQ ID NO: 1671190 - DNA, 15 bp, Homo sapiens
catgaattcttttcc

SEQ ID NO: 1671191 - DNA, 15 bp, Homo sapiens
atgaattcttttcct

SEQ ID NO: 1671192 - DNA, 15 bp, Homo sapiens
tgaattcttttcctt

SEQ ID NO: 1671193 - DNA, 15 bp, Homo sapiens
gaattcttttcctta

SEQ ID NO: 1671194 - DNA, 15 bp, Homo sapiens
aattcttttccttag

SEQ ID NO: 1671195 - DNA, 15 bp, Homo sapiens
attcttttccttaga

SEQ ID NO: 1671196 - DNA, 15 bp, Homo sapiens
ttcttttccttagat

SEQ ID NO: 1671197 - DNA, 15 bp, Homo sapiens
tcttttccttagatg

SEQ ID NO: 1671198 - DNA, 15 bp, Homo sapiens
cttttccttagatgc

SEQ ID NO: 1671199 - DNA, 15 bp, Homo sapiens
ttttccttagatgcc

SEQ ID NO: 1671200 - DNA, 15 bp, Homo sapiens
tttccttagatgcct

SEQ ID NO: 1671201 - DNA, 15 bp, Homo sapiens
ttccttagatgcctg

SEQ ID NO: 1671202 - DNA, 15 bp, Homo sapiens
tccttagatgcctgc

SEQ ID NO: 1671203 - DNA, 15 bp, Homo sapiens
ccttagatgcctgct

SEQ ID NO: 1671204 - DNA, 15 bp, Homo sapiens
cttagatgcctgctt

SEQ ID NO: 1671205 - DNA, 15 bp, Homo sapiens
ttagatgcctgcttc

SEQ ID NO: 1671206 - DNA, 15 bp, Homo sapiens
tagatgcctgcttct

SEQ ID NO: 1671207 - DNA, 15 bp, Homo sapiens
agatgcctgcttctg

SEQ ID NO: 1671208 - DNA, 15 bp, Homo sapiens
gatgcctgcttctgt

SEQ ID NO: 1671209 - DNA, 15 bp, Homo sapiens
atgcctgcttctgtc

SEQ ID NO: 1671210 - DNA, 15 bp, Homo sapiens
tgcctgcttctgtct

SEQ ID NO: 1671211 - DNA, 15 bp, Homo sapiens
gcctgcttctgtctt

SEQ ID NO: 1671212 - DNA, 15 bp, Homo sapiens
cctgcttctgtcttg

SEQ ID NO: 1671213 - DNA, 15 bp, Homo sapiens
ctgcttctgtcttga

SEQ ID NO: 1671214 - DNA, 15 bp, Homo sapiens
tgcttctgtcttgag

SEQ ID NO: 1671215 - DNA, 15 bp, Homo sapiens
gcttctgtcttgagg

SEQ ID NO: 1671216 - DNA, 15 bp, Homo sapiens
cttctgtcttgaggt

SEQ ID NO: 1671217 - DNA, 15 bp, Homo sapiens
ttctgtcttgaggtt

SEQ ID NO: 1671218 - DNA, 15 bp, Homo sapiens
tctgtcttgaggttt

SEQ ID NO: 1671219 - DNA, 15 bp, Homo sapiens
ctgtcttgaggtttg

SEQ ID NO: 1671220 - DNA, 15 bp, Homo sapiens
tgtcttgaggtttgt

SEQ ID NO: 1671221 - DNA, 15 bp, Homo sapiens
gtcttgaggtttgtt

SEQ ID NO: 1671222 - DNA, 15 bp, Homo sapiens
tcttgaggtttgttg

SEQ ID NO: 1671223 - DNA, 15 bp, Homo sapiens
cttgaggtttgttgt

SEQ ID NO: 1671224 - DNA, 15 bp, Homo sapiens
ttgaggtttgttgtt

SEQ ID NO: 1671225 - DNA, 15 bp, Homo sapiens
tgaggtttgttgttg

SEQ ID NO: 1671226 - DNA, 15 bp, Homo sapiens
gaggtttgttgttgt

SEQ ID NO: 1671227 - DNA, 15 bp, Homo sapiens
aggtttgttgttgtt

SEQ ID NO: 1671228 - DNA, 15 bp, Homo sapiens
ggtttgttgttgtta

SEQ ID NO: 1671229 - DNA, 15 bp, Homo sapiens
gtttgttgttgttat

SEQ ID NO: 1671230 - DNA, 15 bp, Homo sapiens
tgttgttgttatttc

SEQ ID NO: 1671231 - DNA, 15 bp, Homo sapiens
gttgttgttatttcg

SEQ ID NO: 1671232 - DNA, 15 bp, Homo sapiens
ttgttgttatttcga

SEQ ID NO: 1671233 - DNA, 15 bp, Homo sapiens
tgttgttatttcgaa

SEQ ID NO: 1671234 - DNA, 15 bp, Homo sapiens
gttgttatttcgaaa

SEQ ID NO: 1671235 - DNA, 15 bp, Homo sapiens
ttgttatttcgaaac

SEQ ID NO: 1671236 - DNA, 15 bp, Homo sapiens
tgttatttcgaaaca

SEQ ID NO: 1671237 - DNA, 15 bp, Homo sapiens
gttatttcgaaacag

SEQ ID NO: 1671238 - DNA, 15 bp, Homo sapiens
ttatttcgaaacaga

SEQ ID NO: 1671239 - DNA, 15 bp, Homo sapiens
tatttcgaaacagag

SEQ ID NO: 1671240 - DNA, 15 bp, Homo sapiens
atttcgaaacagagt

SEQ ID NO: 1671241 - DNA, 15 bp, Homo sapiens
tttcgaaacagagtc

SEQ ID NO: 1671242 - DNA, 15 bp, Homo sapiens
ttcgaaacagagtct

SEQ ID NO: 1671243 - DNA, 15 bp, Homo sapiens
tcgaaacagagtctt

SEQ ID NO: 1671244 - DNA, 15 bp, Homo sapiens
cgaaacagagtcttg

SEQ ID NO: 1671245 - DNA, 15 bp, Homo sapiens
gaaacagagtcttgc

SEQ ID NO: 1671246 - DNA, 15 bp, Homo sapiens
aaacagagtcttgct

SEQ ID NO: 1671247 - DNA, 15 bp, Homo sapiens
aacagagtcttgctc

SEQ ID NO: 1671248 - DNA, 15 bp, Homo sapiens
cttgctctgtcgctc

SEQ ID NO: 1671249 - DNA, 15 bp, Homo sapiens
ttgctctgtcgctca

SEQ ID NO: 1671250 - DNA, 15 bp, Homo sapiens
tgctctgtcgctcag

SEQ ID NO: 1671251 - DNA, 15 bp, Homo sapiens
gctctgtcgctcagg

SEQ ID NO: 1671252 - DNA, 15 bp, Homo sapiens
tcaccacaacctccg

SEQ ID NO: 1671253 - DNA, 15 bp, Homo sapiens
caccacaacctccgg

SEQ ID NO: 1671254 - DNA, 15 bp, Homo sapiens
accacaacctccggc

SEQ ID NO: 1671255 - DNA, 15 bp, Homo sapiens
ccacaacctccggct

SEQ ID NO: 1671256 - DNA, 15 bp, Homo sapiens
cacaacctccggctc

SEQ ID NO: 1671257 - DNA, 15 bp, Homo sapiens
acaacctccggctcc

SEQ ID NO: 1671258 - DNA, 15 bp, Homo sapiens
caacctccggctccc

SEQ ID NO: 1671259 - DNA, 15 bp, Homo sapiens
aacctccggctccca

SEQ ID NO: 1671260 - DNA, 15 bp, Homo sapiens
acctccggctcccag

SEQ ID NO: 1671261 - DNA, 15 bp, Homo sapiens
cctccggctcccagg

SEQ ID NO: 1671262 - DNA, 15 bp, Homo sapiens
ctccggctcccaggt

SEQ ID NO: 1671263 - DNA, 15 bp, Homo sapiens
tccggctcccaggtt

SEQ ID NO: 1671264 - DNA, 15 bp, Homo sapiens
ccggctcccaggttc

SEQ ID NO: 1671265 - DNA, 15 bp, Homo sapiens
cggctcccaggttca

SEQ ID NO: 1671266 - DNA, 15 bp, Homo sapiens
ggctcccaggttcaa

SEQ ID NO: 1671267 - DNA, 15 bp, Homo sapiens
caagcgattcttctg

SEQ ID NO: 1671268 - DNA, 15 bp, Homo sapiens
aagcgattcttctgc

SEQ ID NO: 1671269 - DNA, 15 bp, Homo sapiens
agcgattcttctgcc

SEQ ID NO: 1671270 - DNA, 15 bp, Homo sapiens
gcgattcttctgcct

SEQ ID NO: 1671271 - DNA, 15 bp, Homo sapiens
cgattcttctgcctc

SEQ ID NO: 1671272 - DNA, 15 bp, Homo sapiens
agctgggattacagc

SEQ ID NO: 1671273 - DNA, 15 bp, Homo sapiens
tgggattacagctga

SEQ ID NO: 1671274 - DNA, 15 bp, Homo sapiens
gggattacagctgaa

SEQ ID NO: 1671275 - DNA, 15 bp, Homo sapiens
ggattacagctgaat

SEQ ID NO: 1671276 - DNA, 15 bp, Homo sapiens
gattacagctgaatg

SEQ ID NO: 1671277 - DNA, 15 bp, Homo sapiens
attacagctgaatgc

SEQ ID NO: 1671278 - DNA, 15 bp, Homo sapiens
ttacagctgaatgcc

SEQ ID NO: 1671279 - DNA, 15 bp, Homo sapiens
tacagctgaatgcca

SEQ ID NO: 1671280 - DNA, 15 bp, Homo sapiens
acagctgaatgccac

SEQ ID NO: 1671281 - DNA, 15 bp, Homo sapiens
cagctgaatgccacc

SEQ ID NO: 1671282 - DNA, 15 bp, Homo sapiens
agctgaatgccacct

SEQ ID NO: 1671283 - DNA, 15 bp, Homo sapiens
gctgaatgccacctt

SEQ ID NO: 1671284 - DNA, 15 bp, Homo sapiens
ctgaatgccaccttg

SEQ ID NO: 1671285 - DNA, 15 bp, Homo sapiens
tgaatgccaccttgc

SEQ ID NO: 1671286 - DNA, 15 bp, Homo sapiens
gaatgccaccttgct

SEQ ID NO: 1671287 - DNA, 15 bp, Homo sapiens
aatgccaccttgctg

SEQ ID NO: 1671288 - DNA, 15 bp, Homo sapiens
atgccaccttgctgg

SEQ ID NO: 1671289 - DNA, 15 bp, Homo sapiens
tgccaccttgctggg

SEQ ID NO: 1671290 - DNA, 15 bp, Homo sapiens
gccaccttgctgggc

SEQ ID NO: 1671291 - DNA, 15 bp, Homo sapiens
ccaccttgctgggct

SEQ ID NO: 1671292 - DNA, 15 bp, Homo sapiens
caccttgctgggcta

SEQ ID NO: 1671293 - DNA, 15 bp, Homo sapiens
accttgctgggctaa

SEQ ID NO: 1671294 - DNA, 15 bp, Homo sapiens
ccttgctgggctaat

SEQ ID NO: 1671295 - DNA, 15 bp, Homo sapiens
cttgctgggctaatt

SEQ ID NO: 1671296 - DNA, 15 bp, Homo sapiens
ttgctgggctaattt

SEQ ID NO: 1671297 - DNA, 15 bp, Homo sapiens
ggccaggctggcctc

SEQ ID NO: 1671298 - DNA, 15 bp, Homo sapiens
gccaggctggcctcg

SEQ ID NO: 1671299 - DNA, 15 bp, Homo sapiens
ccaggctggcctcga

SEQ ID NO: 1671300 - DNA, 15 bp, Homo sapiens
caggctggcctcgaa

SEQ ID NO: 1671301 - DNA, 15 bp, Homo sapiens
aggctggcctcgaac

SEQ ID NO: 1671302 - DNA, 15 bp, Homo sapiens
ggctggcctcgaact

SEQ ID NO: 1671303 - DNA, 15 bp, Homo sapiens
aactcctgacctcga

SEQ ID NO: 1671304 - DNA, 15 bp, Homo sapiens
actcctgacctcgag

SEQ ID NO: 1671305 - DNA, 15 bp, Homo sapiens
ctcctgacctcgagt

SEQ ID NO: 1671306 - DNA, 15 bp, Homo sapiens
tcctgacctcgagtg

SEQ ID NO: 1671307 - DNA, 15 bp, Homo sapiens
cctgacctcgagtga

SEQ ID NO: 1671308 - DNA, 15 bp, Homo sapiens
ctgacctcgagtgat

SEQ ID NO: 1671309 - DNA, 15 bp, Homo sapiens
tgacctcgagtgatc

SEQ ID NO: 1671310 - DNA, 15 bp, Homo sapiens
gacctcgagtgatct

SEQ ID NO: 1671311 - DNA, 15 bp, Homo sapiens
acctcgagtgatctg

SEQ ID NO: 1671312 - DNA, 15 bp, Homo sapiens
cctcgagtgatctgc

SEQ ID NO: 1671313 - DNA, 15 bp, Homo sapiens
ctcgagtgatctgcc

SEQ ID NO: 1671314 - DNA, 15 bp, Homo sapiens
tcgagtgatctgccc

SEQ ID NO: 1671315 - DNA, 15 bp, Homo sapiens
cgagtgatctgcccg

SEQ ID NO: 1671316 - DNA, 15 bp, Homo sapiens
gagtgatctgcccgc

SEQ ID NO: 1671317 - DNA, 15 bp, Homo sapiens
gatctgcccgcctcc

SEQ ID NO: 1671318 - DNA, 15 bp, Homo sapiens
atctgcccgcctcct

SEQ ID NO: 1671319 - DNA, 15 bp, Homo sapiens
tctgcccgcctcctg

SEQ ID NO: 1671320 - DNA, 15 bp, Homo sapiens
ctgcccgcctcctga

SEQ ID NO: 1671321 - DNA, 15 bp, Homo sapiens
tgcccgcctcctgaa

SEQ ID NO: 1671322 - DNA, 15 bp, Homo sapiens
gcccgcctcctgaag

SEQ ID NO: 1671323 - DNA, 15 bp, Homo sapiens
cccgcctcctgaagt

SEQ ID NO: 1671324 - DNA, 15 bp, Homo sapiens
ccgcctcctgaagtg

SEQ ID NO: 1671325 - DNA, 15 bp, Homo sapiens
cgcctcctgaagtgc

SEQ ID NO: 1671326 - DNA, 15 bp, Homo sapiens
gcctcctgaagtgct

SEQ ID NO: 1671327 - DNA, 15 bp, Homo sapiens
cctcctgaagtgctg

SEQ ID NO: 1671328 - DNA, 15 bp, Homo sapiens
ctcctgaagtgctgg

SEQ ID NO: 1671329 - DNA, 15 bp, Homo sapiens
tcctgaagtgctggg

SEQ ID NO: 1671330 - DNA, 15 bp, Homo sapiens
cctgaagtgctggga

SEQ ID NO: 1671331 - DNA, 15 bp, Homo sapiens
aggcgtgagccacct

SEQ ID NO: 1671332 - DNA, 15 bp, Homo sapiens
ggcgtgagccacctc

SEQ ID NO: 1671333 - DNA, 15 bp, Homo sapiens
gcgtgagccacctcg

SEQ ID NO: 1671334 - DNA, 15 bp, Homo sapiens
cgtgagccacctcgt

SEQ ID NO: 1671335 - DNA, 15 bp, Homo sapiens
gtgagccacctcgtc

SEQ ID NO: 1671336 - DNA, 15 bp, Homo sapiens
tgagccacctcgtcc

SEQ ID NO: 1671337 - DNA, 15 bp, Homo sapiens
gagccacctcgtcct

SEQ ID NO: 1671338 - DNA, 15 bp, Homo sapiens
agccacctcgtcctg

SEQ ID NO: 1671339 - DNA, 15 bp, Homo sapiens
gccacctcgtcctgg

SEQ ID NO: 1671340 - DNA, 15 bp, Homo sapiens
ccacctcgtcctggt

SEQ ID NO: 1671341 - DNA, 15 bp, Homo sapiens
cacctcgtcctggtg

SEQ ID NO: 1671342 - DNA, 15 bp, Homo sapiens
acctcgtcctggtga

SEQ ID NO: 1671343 - DNA, 15 bp, Homo sapiens
cctcgtcctggtgag

SEQ ID NO: 1671344 - DNA, 15 bp, Homo sapiens
ctcgtcctggtgagg

SEQ ID NO: 1671345 - DNA, 15 bp, Homo sapiens
tcgtcctggtgaggg

SEQ ID NO: 1671346 - DNA, 15 bp, Homo sapiens
cgtcctggtgagggt

SEQ ID NO: 1671347 - DNA, 15 bp, Homo sapiens
gtcctggtgagggtt

SEQ ID NO: 1671348 - DNA, 15 bp, Homo sapiens
tcctggtgagggttt

SEQ ID NO: 1671349 - DNA, 15 bp, Homo sapiens
cctggtgagggtttt

SEQ ID NO: 1671350 - DNA, 15 bp, Homo sapiens
ctggtgagggttttt

SEQ ID NO: 1671351 - DNA, 15 bp, Homo sapiens
tggtgagggtttttt

SEQ ID NO: 1671352 - DNA, 15 bp, Homo sapiens
ggtgagggttttttt

SEQ ID NO: 1671353 - DNA, 15 bp, Homo sapiens
gtgagggtttttttt

SEQ ID NO: 1671354 - DNA, 15 bp, Homo sapiens
gggtttttttttttc

SEQ ID NO: 1671355 - DNA, 15 bp, Homo sapiens
ggtttttttttttcc

SEQ ID NO: 1671356 - DNA, 15 bp, Homo sapiens
gtttttttttttccc

SEQ ID NO: 1671357 - DNA, 15 bp, Homo sapiens
tttttttttttcccc

SEQ ID NO: 1671358 - DNA, 15 bp, Homo sapiens
ttttttttttcccca

SEQ ID NO: 1671359 - DNA, 15 bp, Homo sapiens
tttttttttccccaa

SEQ ID NO: 1671360 - DNA, 15 bp, Homo sapiens
ttttttttccccaac

SEQ ID NO: 1671361 - DNA, 15 bp, Homo sapiens
tttttttccccaacc

SEQ ID NO: 1671362 - DNA, 15 bp, Homo sapiens
ttttttccccaaccc

SEQ ID NO: 1671363 - DNA, 15 bp, Homo sapiens
tttttccccaaccct

SEQ ID NO: 1671364 - DNA, 15 bp, Homo sapiens
ttttccccaaccctc

SEQ ID NO: 1671365 - DNA, 15 bp, Homo sapiens
tttccccaaccctct

SEQ ID NO: 1671366 - DNA, 15 bp, Homo sapiens
ttccccaaccctctg

SEQ ID NO: 1671367 - DNA, 15 bp, Homo sapiens
tccccaaccctctgt

SEQ ID NO: 1671368 - DNA, 15 bp, Homo sapiens
ccccaaccctctgtg

SEQ ID NO: 1671369 - DNA, 15 bp, Homo sapiens
cccaaccctctgtgg

SEQ ID NO: 1671370 - DNA, 15 bp, Homo sapiens
ccaaccctctgtggt

SEQ ID NO: 1671371 - DNA, 15 bp, Homo sapiens
caaccctctgtggtg

SEQ ID NO: 1671372 - DNA, 15 bp, Homo sapiens
aaccctctgtggtgg

SEQ ID NO: 1671373 - DNA, 15 bp, Homo sapiens
accctctgtggtgga

SEQ ID NO: 1671374 - DNA, 15 bp, Homo sapiens
ccctctgtggtggat

SEQ ID NO: 1671375 - DNA, 15 bp, Homo sapiens
cctctgtggtggata

SEQ ID NO: 1671376 - DNA, 15 bp, Homo sapiens
ctctgtggtggatac

SEQ ID NO: 1671377 - DNA, 15 bp, Homo sapiens
tctgtggtggatact

SEQ ID NO: 1671378 - DNA, 15 bp, Homo sapiens
ctgtggtggatactg

SEQ ID NO: 1671379 - DNA, 15 bp, Homo sapiens
tgtggtggatactga

SEQ ID NO: 1671380 - DNA, 15 bp, Homo sapiens
gtggtggatactgaa

SEQ ID NO: 1671381 - DNA, 15 bp, Homo sapiens
tggtggatactgaaa

SEQ ID NO: 1671382 - DNA, 15 bp, Homo sapiens
ggtggatactgaaag

SEQ ID NO: 1671383 - DNA, 15 bp, Homo sapiens
gtggatactgaaaga

SEQ ID NO: 1671384 - DNA, 15 bp, Homo sapiens
tggatactgaaagac

SEQ ID NO: 1671385 - DNA, 15 bp, Homo sapiens
ggatactgaaagacc

SEQ ID NO: 1671386 - DNA, 15 bp, Homo sapiens
gatactgaaagacca

SEQ ID NO: 1671387 - DNA, 15 bp, Homo sapiens
atactgaaagaccat

SEQ ID NO: 1671388 - DNA, 15 bp, Homo sapiens
tactgaaagaccata

SEQ ID NO: 1671389 - DNA, 15 bp, Homo sapiens
actgaaagaccatat

SEQ ID NO: 1671390 - DNA, 15 bp, Homo sapiens
ctgaaagaccatatt

SEQ ID NO: 1671391 - DNA, 15 bp, Homo sapiens
tgaaagaccatatta

SEQ ID NO: 1671392 - DNA, 15 bp, Homo sapiens
gaaagaccatattag

SEQ ID NO: 1671393 - DNA, 15 bp, Homo sapiens
aaagaccatattagg

SEQ ID NO: 1671394 - DNA, 15 bp, Homo sapiens
aagaccatattagga

SEQ ID NO: 1671395 - DNA, 15 bp, Homo sapiens
agaccatattaggat

SEQ ID NO: 1671396 - DNA, 15 bp, Homo sapiens
gaccatattaggata

SEQ ID NO: 1671397 - DNA, 15 bp, Homo sapiens
accatattaggataa

SEQ ID NO: 1671398 - DNA, 15 bp, Homo sapiens
ccatattaggataac

SEQ ID NO: 1671399 - DNA, 15 bp, Homo sapiens
catattaggataact

SEQ ID NO: 1671400 - DNA, 15 bp, Homo sapiens
atattaggataactg

SEQ ID NO: 1671401 - DNA, 15 bp, Homo sapiens
tattaggataactgt

SEQ ID NO: 1671402 - DNA, 15 bp, Homo sapiens
attaggataactgta

SEQ ID NO: 1671403 - DNA, 15 bp, Homo sapiens
ttaggataactgtac

SEQ ID NO: 1671404 - DNA, 15 bp, Homo sapiens
taggataactgtaca

SEQ ID NO: 1671405 - DNA, 15 bp, Homo sapiens
aggataactgtacag

SEQ ID NO: 1671406 - DNA, 15 bp, Homo sapiens
ggataactgtacagt

SEQ ID NO: 1671407 - DNA, 15 bp, Homo sapiens
gataactgtacagta

SEQ ID NO: 1671408 - DNA, 15 bp, Homo sapiens
ataactgtacagtat

SEQ ID NO: 1671409 - DNA, 15 bp, Homo sapiens
taactgtacagtata

SEQ ID NO: 1671410 - DNA, 15 bp, Homo sapiens
aactgtacagtatag

SEQ ID NO: 1671411 - DNA, 15 bp, Homo sapiens
actgtacagtataga

SEQ ID NO: 1671412 - DNA, 15 bp, Homo sapiens
ctgtacagtatagag

SEQ ID NO: 1671413 - DNA, 15 bp, Homo sapiens
tgtacagtatagaga

SEQ ID NO: 1671414 - DNA, 15 bp, Homo sapiens
gtacagtatagagaa

SEQ ID NO: 1671415 - DNA, 15 bp, Homo sapiens
tacagtatagagaag

SEQ ID NO: 1671416 - DNA, 15 bp, Homo sapiens
acagtatagagaagg

SEQ ID NO: 1671417 - DNA, 15 bp, Homo sapiens
cagtatagagaaggc

SEQ ID NO: 1671418 - DNA, 15 bp, Homo sapiens
agtatagagaaggca

SEQ ID NO: 1671419 - DNA, 15 bp, Homo sapiens
gtatagagaaggcag

SEQ ID NO: 1671420 - DNA, 15 bp, Homo sapiens
tatagagaaggcagt

SEQ ID NO: 1671421 - DNA, 15 bp, Homo sapiens
atagagaaggcagtg

SEQ ID NO: 1671422 - DNA, 15 bp, Homo sapiens
tagagaaggcagtgg

SEQ ID NO: 1671423 - DNA, 15 bp, Homo sapiens
agagaaggcagtggc

SEQ ID NO: 1671424 - DNA, 15 bp, Homo sapiens
agaaggcagtggcaa

SEQ ID NO: 1671425 - DNA, 15 bp, Homo sapiens
gaaggcagtggcaag

SEQ ID NO: 1671426 - DNA, 15 bp, Homo sapiens
aaggcagtggcaagt

SEQ ID NO: 1671427 - DNA, 15 bp, Homo sapiens
aggcagtggcaagtt

SEQ ID NO: 1671428 - DNA, 15 bp, Homo sapiens
ggcagtggcaagttt

SEQ ID NO: 1671429 - DNA, 15 bp, Homo sapiens
gcagtggcaagtttt

SEQ ID NO: 1671430 - DNA, 15 bp, Homo sapiens
cagtggcaagttttc

SEQ ID NO: 1671431 - DNA, 15 bp, Homo sapiens
agtggcaagttttct

SEQ ID NO: 1671432 - DNA, 15 bp, Homo sapiens
gtggcaagttttctc

SEQ ID NO: 1671433 - DNA, 15 bp, Homo sapiens
tggcaagttttctct

SEQ ID NO: 1671434 - DNA, 15 bp, Homo sapiens
ggcaagttttctctg

SEQ ID NO: 1671435 - DNA, 15 bp, Homo sapiens
gcaagttttctctgt

SEQ ID NO: 1671436 - DNA, 15 bp, Homo sapiens
caagttttctctgtc

SEQ ID NO: 1671437 - DNA, 15 bp, Homo sapiens
aagttttctctgtca

SEQ ID NO: 1671438 - DNA, 15 bp, Homo sapiens
agttttctctgtcat

SEQ ID NO: 1671439 - DNA, 15 bp, Homo sapiens
gttttctctgtcata

SEQ ID NO: 1671440 - DNA, 15 bp, Homo sapiens
ttttctctgtcatat

SEQ ID NO: 1671441 - DNA, 15 bp, Homo sapiens
tttctctgtcatata

SEQ ID NO: 1671442 - DNA, 15 bp, Homo sapiens
ttctctgtcatatac

SEQ ID NO: 1671443 - DNA, 15 bp, Homo sapiens
tctctgtcatatacc

SEQ ID NO: 1671444 - DNA, 15 bp, Homo sapiens
ctctgtcatatacca

SEQ ID NO: 1671445 - DNA, 15 bp, Homo sapiens
tctgtcatataccag

SEQ ID NO: 1671446 - DNA, 15 bp, Homo sapiens
ctgtcatataccaga

SEQ ID NO: 1671447 - DNA, 15 bp, Homo sapiens
tgtcatataccagag

SEQ ID NO: 1671448 - DNA, 15 bp, Homo sapiens
gtcatataccagagt

SEQ ID NO: 1671449 - DNA, 15 bp, Homo sapiens
tcatataccagagtg

SEQ ID NO: 1671450 - DNA, 15 bp, Homo sapiens
catataccagagtgg

SEQ ID NO: 1671451 - DNA, 15 bp, Homo sapiens
atataccagagtggg

SEQ ID NO: 1671452 - DNA, 15 bp, Homo sapiens
tataccagagtgggc

SEQ ID NO: 1671453 - DNA, 15 bp, Homo sapiens
ataccagagtgggct

SEQ ID NO: 1671454 - DNA, 15 bp, Homo sapiens
taccagagtgggctt

SEQ ID NO: 1671455 - DNA, 15 bp, Homo sapiens
accagagtgggcttg

SEQ ID NO: 1671456 - DNA, 15 bp, Homo sapiens
ccagagtgggcttgg

SEQ ID NO: 1671457 - DNA, 15 bp, Homo sapiens
cagagtgggcttggg

SEQ ID NO: 1671458 - DNA, 15 bp, Homo sapiens
agagtgggcttgggc

SEQ ID NO: 1671459 - DNA, 15 bp, Homo sapiens
gagtgggcttgggca

SEQ ID NO: 1671460 - DNA, 15 bp, Homo sapiens
agtgggcttgggcat

SEQ ID NO: 1671461 - DNA, 15 bp, Homo sapiens
gtgggcttgggcatg

SEQ ID NO: 1671462 - DNA, 15 bp, Homo sapiens
tgggcttgggcatgg

SEQ ID NO: 1671463 - DNA, 15 bp, Homo sapiens
gggcttgggcatggt

SEQ ID NO: 1671464 - DNA, 15 bp, Homo sapiens
ggcttgggcatggtg

SEQ ID NO: 1671465 - DNA, 15 bp, Homo sapiens
gcttgggcatggtgg

SEQ ID NO: 1671466 - DNA, 15 bp, Homo sapiens
cttgggcatggtggc

SEQ ID NO: 1671467 - DNA, 15 bp, Homo sapiens
ttgggcatggtggca

SEQ ID NO: 1671468 - DNA, 15 bp, Homo sapiens
ggcatggtggcatac

SEQ ID NO: 1671469 - DNA, 15 bp, Homo sapiens
gcatggtggcatact

SEQ ID NO: 1671470 - DNA, 15 bp, Homo sapiens
catggtggcatactc

SEQ ID NO: 1671471 - DNA, 15 bp, Homo sapiens
atggtggcatactcc

SEQ ID NO: 1671472 - DNA, 15 bp, Homo sapiens
tggtggcatactcct

SEQ ID NO: 1671473 - DNA, 15 bp, Homo sapiens
ggtggcatactcctg

SEQ ID NO: 1671474 - DNA, 15 bp, Homo sapiens
gtggcatactcctgt

SEQ ID NO: 1671475 - DNA, 15 bp, Homo sapiens
tggcatactcctgta

SEQ ID NO: 1671476 - DNA, 15 bp, Homo sapiens
ggcatactcctgtag

SEQ ID NO: 1671477 - DNA, 15 bp, Homo sapiens
gcatactcctgtagt

SEQ ID NO: 1671478 - DNA, 15 bp, Homo sapiens
catactcctgtagtc

SEQ ID NO: 1671479 - DNA, 15 bp, Homo sapiens
atactcctgtagtct

SEQ ID NO: 1671480 - DNA, 15 bp, Homo sapiens
tactcctgtagtctc

SEQ ID NO: 1671481 - DNA, 15 bp, Homo sapiens
actcctgtagtctca

SEQ ID NO: 1671482 - DNA, 15 bp, Homo sapiens
ctcctgtagtctcag

SEQ ID NO: 1671483 - DNA, 15 bp, Homo sapiens
tcctgtagtctcagc

SEQ ID NO: 1671484 - DNA, 15 bp, Homo sapiens
tgtagtctcagctaa

SEQ ID NO: 1671485 - DNA, 15 bp, Homo sapiens
gtagtctcagctaat

SEQ ID NO: 1671486 - DNA, 15 bp, Homo sapiens
tagtctcagctaatc

SEQ ID NO: 1671487 - DNA, 15 bp, Homo sapiens
agtctcagctaatca

SEQ ID NO: 1671488 - DNA, 15 bp, Homo sapiens
gtctcagctaatcag

SEQ ID NO: 1671489 - DNA, 15 bp, Homo sapiens
tctcagctaatcagg

SEQ ID NO: 1671490 - DNA, 15 bp, Homo sapiens
ctcagctaatcagga

SEQ ID NO: 1671491 - DNA, 15 bp, Homo sapiens
tcagctaatcaggag

SEQ ID NO: 1671492 - DNA, 15 bp, Homo sapiens
cagctaatcaggagg

SEQ ID NO: 1671493 - DNA, 15 bp, Homo sapiens
agctaatcaggaggc

SEQ ID NO: 1671494 - DNA, 15 bp, Homo sapiens
gctaatcaggaggct

SEQ ID NO: 1671495 - DNA, 15 bp, Homo sapiens
ctaatcaggaggctg

SEQ ID NO: 1671496 - DNA, 15 bp, Homo sapiens
taatcaggaggctga

SEQ ID NO: 1671497 - DNA, 15 bp, Homo sapiens
aatcaggaggctgag

SEQ ID NO: 1671498 - DNA, 15 bp, Homo sapiens
atcaggaggctgagg

SEQ ID NO: 1671499 - DNA, 15 bp, Homo sapiens
tcaggaggctgagga

SEQ ID NO: 1671500 - DNA, 15 bp, Homo sapiens
caggaggctgaggaa

SEQ ID NO: 1671501 - DNA, 15 bp, Homo sapiens
aggaggctgaggaag

SEQ ID NO: 1671502 - DNA, 15 bp, Homo sapiens
ggctgaggaaggagg

SEQ ID NO: 1671503 - DNA, 15 bp, Homo sapiens
gctgaggaaggagga

SEQ ID NO: 1671504 - DNA, 15 bp, Homo sapiens
ctgaggaaggaggat

SEQ ID NO: 1671505 - DNA, 15 bp, Homo sapiens
tgaggaaggaggatc

SEQ ID NO: 1671506 - DNA, 15 bp, Homo sapiens
gaggaaggaggatcg

SEQ ID NO: 1671507 - DNA, 15 bp, Homo sapiens
aggaaggaggatcgc

SEQ ID NO: 1671508 - DNA, 15 bp, Homo sapiens
ggaaggaggatcgct

SEQ ID NO: 1671509 - DNA, 15 bp, Homo sapiens
gaaggaggatcgctt

SEQ ID NO: 1671510 - DNA, 15 bp, Homo sapiens
aaggaggatcgcttg

SEQ ID NO: 1671511 - DNA, 15 bp, Homo sapiens
ggatcgcttgggccc

SEQ ID NO: 1671512 - DNA, 15 bp, Homo sapiens
gatcgcttgggccca

SEQ ID NO: 1671513 - DNA, 15 bp, Homo sapiens
atcgcttgggcccag

SEQ ID NO: 1671514 - DNA, 15 bp, Homo sapiens
tcgcttgggcccagg

SEQ ID NO: 1671515 - DNA, 15 bp, Homo sapiens
cgcttgggcccagga

SEQ ID NO: 1671516 - DNA, 15 bp, Homo sapiens
gcttgggcccaggag

SEQ ID NO: 1671517 - DNA, 15 bp, Homo sapiens
cttgggcccaggagt

SEQ ID NO: 1671518 - DNA, 15 bp, Homo sapiens
ttgggcccaggagtt

SEQ ID NO: 1671519 - DNA, 15 bp, Homo sapiens
tgggcccaggagttg

SEQ ID NO: 1671520 - DNA, 15 bp, Homo sapiens
gggcccaggagttgg

SEQ ID NO: 1671521 - DNA, 15 bp, Homo sapiens
ggcccaggagttgga

SEQ ID NO: 1671522 - DNA, 15 bp, Homo sapiens
cccaggagttggaga

SEQ ID NO: 1671523 - DNA, 15 bp, Homo sapiens
ccaggagttggagac

SEQ ID NO: 1671524 - DNA, 15 bp, Homo sapiens
caggagttggagact

SEQ ID NO: 1671525 - DNA, 15 bp, Homo sapiens
aggagttggagactg

SEQ ID NO: 1671526 - DNA, 15 bp, Homo sapiens
ggagttggagactgt

SEQ ID NO: 1671527 - DNA, 15 bp, Homo sapiens
gagttggagactgta

SEQ ID NO: 1671528 - DNA, 15 bp, Homo sapiens
agttggagactgtag

SEQ ID NO: 1671529 - DNA, 15 bp, Homo sapiens
gttggagactgtagt

SEQ ID NO: 1671530 - DNA, 15 bp, Homo sapiens
ttggagactgtagtg

SEQ ID NO: 1671531 - DNA, 15 bp, Homo sapiens
tggagactgtagtga

SEQ ID NO: 1671532 - DNA, 15 bp, Homo sapiens
ggagactgtagtgag

SEQ ID NO: 1671533 - DNA, 15 bp, Homo sapiens
gagactgtagtgagc

SEQ ID NO: 1671534 - DNA, 15 bp, Homo sapiens
agactgtagtgagct

SEQ ID NO: 1671535 - DNA, 15 bp, Homo sapiens
gactgtagtgagctg

SEQ ID NO: 1671536 - DNA, 15 bp, Homo sapiens
actgtagtgagctgt

SEQ ID NO: 1671537 - DNA, 15 bp, Homo sapiens
ctgtagtgagctgtg

SEQ ID NO: 1671538 - DNA, 15 bp, Homo sapiens
tgtagtgagctgtga

SEQ ID NO: 1671539 - DNA, 15 bp, Homo sapiens
gtagtgagctgtgat

SEQ ID NO: 1671540 - DNA, 15 bp, Homo sapiens
tagtgagctgtgatc

SEQ ID NO: 1671541 - DNA, 15 bp, Homo sapiens
gtgagctgtgatcac

SEQ ID NO: 1671542 - DNA, 15 bp, Homo sapiens
tgagctgtgatcaca

SEQ ID NO: 1671543 - DNA, 15 bp, Homo sapiens
gagctgtgatcacac

SEQ ID NO: 1671544 - DNA, 15 bp, Homo sapiens
agctgtgatcacacc

SEQ ID NO: 1671545 - DNA, 15 bp, Homo sapiens
gctgtgatcacacca

SEQ ID NO: 1671546 - DNA, 15 bp, Homo sapiens
ctgtgatcacaccac

SEQ ID NO: 1671547 - DNA, 15 bp, Homo sapiens
tgtgatcacaccacc

SEQ ID NO: 1671548 - DNA, 15 bp, Homo sapiens
gtgatcacaccacca

SEQ ID NO: 1671549 - DNA, 15 bp, Homo sapiens
tgatcacaccaccac

SEQ ID NO: 1671550 - DNA, 15 bp, Homo sapiens
gatcacaccaccaca

SEQ ID NO: 1671551 - DNA, 15 bp, Homo sapiens
atcacaccaccacac

SEQ ID NO: 1671552 - DNA, 15 bp, Homo sapiens
tcacaccaccacact

SEQ ID NO: 1671553 - DNA, 15 bp, Homo sapiens
cacaccaccacactt

SEQ ID NO: 1671554 - DNA, 15 bp, Homo sapiens
acaccaccacacttc

SEQ ID NO: 1671555 - DNA, 15 bp, Homo sapiens
caccaccacacttca

SEQ ID NO: 1671556 - DNA, 15 bp, Homo sapiens
accaccacacttcaa

SEQ ID NO: 1671557 - DNA, 15 bp, Homo sapiens
ccaccacacttcaat

SEQ ID NO: 1671558 - DNA, 15 bp, Homo sapiens
caccacacttcaatc

SEQ ID NO: 1671559 - DNA, 15 bp, Homo sapiens
accacacttcaatct

SEQ ID NO: 1671560 - DNA, 15 bp, Homo sapiens
ccacacttcaatctg

SEQ ID NO: 1671561 - DNA, 15 bp, Homo sapiens
cacacttcaatctgg

SEQ ID NO: 1671562 - DNA, 15 bp, Homo sapiens
acacttcaatctggg

SEQ ID NO: 1671563 - DNA, 15 bp, Homo sapiens
cacttcaatctgggc

SEQ ID NO: 1671564 - DNA, 15 bp, Homo sapiens
acttcaatctgggca

SEQ ID NO: 1671565 - DNA, 15 bp, Homo sapiens
cttcaatctgggcaa

SEQ ID NO: 1671566 - DNA, 15 bp, Homo sapiens
ttcaatctgggcaac

SEQ ID NO: 1671567 - DNA, 15 bp, Homo sapiens
tcaatctgggcaaca

SEQ ID NO: 1671568 - DNA, 15 bp, Homo sapiens
caatctgggcaacag

SEQ ID NO: 1671569 - DNA, 15 bp, Homo sapiens
aatctgggcaacaga

SEQ ID NO: 1671570 - DNA, 15 bp, Homo sapiens
atctgggcaacagag

SEQ ID NO: 1671571 - DNA, 15 bp, Homo sapiens
tctgggcaacagagc

SEQ ID NO: 1671572 - DNA, 15 bp, Homo sapiens
caacagagcaagaga

SEQ ID NO: 1671573 - DNA, 15 bp, Homo sapiens
aacagagcaagagac

SEQ ID NO: 1671574 - DNA, 15 bp, Homo sapiens
acagagcaagagacc

SEQ ID NO: 1671575 - DNA, 15 bp, Homo sapiens
cagagcaagagaccc

SEQ ID NO: 1671576 - DNA, 15 bp, Homo sapiens
agagcaagagaccct

SEQ ID NO: 1671577 - DNA, 15 bp, Homo sapiens
gagcaagagacccta

SEQ ID NO: 1671578 - DNA, 15 bp, Homo sapiens
agcaagagaccctat

SEQ ID NO: 1671579 - DNA, 15 bp, Homo sapiens
gcaagagaccctatc

SEQ ID NO: 1671580 - DNA, 15 bp, Homo sapiens
caagagaccctatct

SEQ ID NO: 1671581 - DNA, 15 bp, Homo sapiens
aagagaccctatctc

SEQ ID NO: 1671582 - DNA, 15 bp, Homo sapiens
agagaccctatctct

SEQ ID NO: 1671583 - DNA, 15 bp, Homo sapiens
gagaccctatctcta

SEQ ID NO: 1671584 - DNA, 15 bp, Homo sapiens
agaccctatctctaa

SEQ ID NO: 1671585 - DNA, 15 bp, Homo sapiens
gaccctatctctaaa

SEQ ID NO: 1671586 - DNA, 15 bp, Homo sapiens
accctatctctaaaa

SEQ ID NO: 1671587 - DNA, 15 bp, Homo sapiens
ccctatctctaaaaa

SEQ ID NO: 1671588 - DNA, 15 bp, Homo sapiens
cctatctctaaaaaa

SEQ ID NO: 1671589 - DNA, 15 bp, Homo sapiens
ctatctctaaaaaaa

SEQ ID NO: 1671590 - DNA, 15 bp, Homo sapiens
tatctctaaaaaaaa

SEQ ID NO: 1671591 - DNA, 15 bp, Homo sapiens
atctctaaaaaaaag

SEQ ID NO: 1671592 - DNA, 15 bp, Homo sapiens
tctctaaaaaaaagt

SEQ ID NO: 1671593 - DNA, 15 bp, Homo sapiens
ctctaaaaaaaagta

SEQ ID NO: 1671594 - DNA, 15 bp, Homo sapiens
tctaaaaaaaagtaa

SEQ ID NO: 1671595 - DNA, 15 bp, Homo sapiens
ctaaaaaaaagtaag

SEQ ID NO: 1671596 - DNA, 15 bp, Homo sapiens
taaaaaaaagtaagt

SEQ ID NO: 1671597 - DNA, 15 bp, Homo sapiens
aaaaaaaagtaagta

SEQ ID NO: 1671598 - DNA, 15 bp, Homo sapiens
aaaaaaagtaagtat

SEQ ID NO: 1671599 - DNA, 15 bp, Homo sapiens
aaaaaagtaagtatt

SEQ ID NO: 1671600 - DNA, 15 bp, Homo sapiens
aaaaagtaagtattt

SEQ ID NO: 1671601 - DNA, 15 bp, Homo sapiens
aaaagtaagtatttc

SEQ ID NO: 1671602 - DNA, 15 bp, Homo sapiens
aaagtaagtatttcg

SEQ ID NO: 1671603 - DNA, 15 bp, Homo sapiens
aagtaagtatttcgg

SEQ ID NO: 1671604 - DNA, 15 bp, Homo sapiens
agtaagtatttcgga

SEQ ID NO: 1671605 - DNA, 15 bp, Homo sapiens
gtaagtatttcggac

SEQ ID NO: 1671606 - DNA, 15 bp, Homo sapiens
taagtatttcggaca

SEQ ID NO: 1671607 - DNA, 15 bp, Homo sapiens
aagtatttcggacac

SEQ ID NO: 1671608 - DNA, 15 bp, Homo sapiens
agtatttcggacact

SEQ ID NO: 1671609 - DNA, 15 bp, Homo sapiens
gtatttcggacactg

SEQ ID NO: 1671610 - DNA, 15 bp, Homo sapiens
tatttcggacactgt

SEQ ID NO: 1671611 - DNA, 15 bp, Homo sapiens
atttcggacactgtg

SEQ ID NO: 1671612 - DNA, 15 bp, Homo sapiens
tttcggacactgtgg

SEQ ID NO: 1671613 - DNA, 15 bp, Homo sapiens
ttcggacactgtggg

SEQ ID NO: 1671614 - DNA, 15 bp, Homo sapiens
tcggacactgtgggc

SEQ ID NO: 1671615 - DNA, 15 bp, Homo sapiens
cggacactgtgggcc

SEQ ID NO: 1671616 - DNA, 15 bp, Homo sapiens
ggacactgtgggcca

SEQ ID NO: 1671617 - DNA, 15 bp, Homo sapiens
gacactgtgggccat

SEQ ID NO: 1671618 - DNA, 15 bp, Homo sapiens
acactgtgggccata

SEQ ID NO: 1671619 - DNA, 15 bp, Homo sapiens
cactgtgggccatac

SEQ ID NO: 1671620 - DNA, 15 bp, Homo sapiens
actgtgggccatacg

SEQ ID NO: 1671621 - DNA, 15 bp, Homo sapiens
ctgtgggccatacgg

SEQ ID NO: 1671622 - DNA, 15 bp, Homo sapiens
tgtgggccatacggt

SEQ ID NO: 1671623 - DNA, 15 bp, Homo sapiens
gtgggccatacggtc

SEQ ID NO: 1671624 - DNA, 15 bp, Homo sapiens
tgggccatacggtct

SEQ ID NO: 1671625 - DNA, 15 bp, Homo sapiens
gggccatacggtctc

SEQ ID NO: 1671626 - DNA, 15 bp, Homo sapiens
ggccatacggtctct

SEQ ID NO: 1671627 - DNA, 15 bp, Homo sapiens
gccatacggtctctg

SEQ ID NO: 1671628 - DNA, 15 bp, Homo sapiens
ccatacggtctctgg

SEQ ID NO: 1671629 - DNA, 15 bp, Homo sapiens
catacggtctctggt

SEQ ID NO: 1671630 - DNA, 15 bp, Homo sapiens
atacggtctctggtg

SEQ ID NO: 1671631 - DNA, 15 bp, Homo sapiens
tacggtctctggtgc

SEQ ID NO: 1671632 - DNA, 15 bp, Homo sapiens
acggtctctggtgca

SEQ ID NO: 1671633 - DNA, 15 bp, Homo sapiens
cggtctctggtgcag

SEQ ID NO: 1671634 - DNA, 15 bp, Homo sapiens
ggtctctggtgcagt

SEQ ID NO: 1671635 - DNA, 15 bp, Homo sapiens
gtctctggtgcagtt

SEQ ID NO: 1671636 - DNA, 15 bp, Homo sapiens
tctctggtgcagttt

SEQ ID NO: 1671637 - DNA, 15 bp, Homo sapiens
ctctggtgcagtttc

SEQ ID NO: 1671638 - DNA, 15 bp, Homo sapiens
tctggtgcagtttct

SEQ ID NO: 1671639 - DNA, 15 bp, Homo sapiens
ctggtgcagtttctc

SEQ ID NO: 1671640 - DNA, 15 bp, Homo sapiens
tggtgcagtttctca

SEQ ID NO: 1671641 - DNA, 15 bp, Homo sapiens
ggtgcagtttctcaa

SEQ ID NO: 1671642 - DNA, 15 bp, Homo sapiens
gtgcagtttctcaac

SEQ ID NO: 1671643 - DNA, 15 bp, Homo sapiens
tgcagtttctcaaca

SEQ ID NO: 1671644 - DNA, 15 bp, Homo sapiens
gcagtttctcaacat

SEQ ID NO: 1671645 - DNA, 15 bp, Homo sapiens
cagtttctcaacatg

SEQ ID NO: 1671646 - DNA, 15 bp, Homo sapiens
agtttctcaacatgg

SEQ ID NO: 1671647 - DNA, 15 bp, Homo sapiens
gtttctcaacatggc

SEQ ID NO: 1671648 - DNA, 15 bp, Homo sapiens
tttctcaacatggct

SEQ ID NO: 1671649 - DNA, 15 bp, Homo sapiens
ttctcaacatggctg

SEQ ID NO: 1671650 - DNA, 15 bp, Homo sapiens
tctcaacatggctgt

SEQ ID NO: 1671651 - DNA, 15 bp, Homo sapiens
ctcaacatggctgtt

SEQ ID NO: 1671652 - DNA, 15 bp, Homo sapiens
tcaacatggctgttg

SEQ ID NO: 1671653 - DNA, 15 bp, Homo sapiens
caacatggctgttgg

SEQ ID NO: 1671654 - DNA, 15 bp, Homo sapiens
aacatggctgttggg

SEQ ID NO: 1671655 - DNA, 15 bp, Homo sapiens
acatggctgttgggt

SEQ ID NO: 1671656 - DNA, 15 bp, Homo sapiens
catggctgttgggtg

SEQ ID NO: 1671657 - DNA, 15 bp, Homo sapiens
atggctgttgggtga

SEQ ID NO: 1671658 - DNA, 15 bp, Homo sapiens
tggctgttgggtgaa

SEQ ID NO: 1671659 - DNA, 15 bp, Homo sapiens
ggctgttgggtgaac

SEQ ID NO: 1671660 - DNA, 15 bp, Homo sapiens
gctgttgggtgaaca

SEQ ID NO: 1671661 - DNA, 15 bp, Homo sapiens
ctgttgggtgaacac

SEQ ID NO: 1671662 - DNA, 15 bp, Homo sapiens
tgttgggtgaacaca

SEQ ID NO: 1671663 - DNA, 15 bp, Homo sapiens
gttgggtgaacacaa

SEQ ID NO: 1671664 - DNA, 15 bp, Homo sapiens
ttgggtgaacacaac

SEQ ID NO: 1671665 - DNA, 15 bp, Homo sapiens
tgggtgaacacaacc

SEQ ID NO: 1671666 - DNA, 15 bp, Homo sapiens
gggtgaacacaacca

SEQ ID NO: 1671667 - DNA, 15 bp, Homo sapiens
ggtgaacacaaccac

SEQ ID NO: 1671668 - DNA, 15 bp, Homo sapiens
gtgaacacaaccacg

SEQ ID NO: 1671669 - DNA, 15 bp, Homo sapiens
tgaacacaaccacgc

SEQ ID NO: 1671670 - DNA, 15 bp, Homo sapiens
gaacacaaccacgca

SEQ ID NO: 1671671 - DNA, 15 bp, Homo sapiens
aacacaaccacgcac

SEQ ID NO: 1671672 - DNA, 15 bp, Homo sapiens
acacaaccacgcaca

SEQ ID NO: 1671673 - DNA, 15 bp, Homo sapiens
cacaaccacgcacag

SEQ ID NO: 1671674 - DNA, 15 bp, Homo sapiens
acaaccacgcacaga

SEQ ID NO: 1671675 - DNA, 15 bp, Homo sapiens
caaccacgcacagaa

SEQ ID NO: 1671676 - DNA, 15 bp, Homo sapiens
aaccacgcacagaac

SEQ ID NO: 1671677 - DNA, 15 bp, Homo sapiens
accacgcacagaacg

SEQ ID NO: 1671678 - DNA, 15 bp, Homo sapiens
ccacgcacagaacgc

SEQ ID NO: 1671679 - DNA, 15 bp, Homo sapiens
cacgcacagaacgca

SEQ ID NO: 1671680 - DNA, 15 bp, Homo sapiens
acgcacagaacgcaa

SEQ ID NO: 1671681 - DNA, 15 bp, Homo sapiens
cgcacagaacgcaaa

SEQ ID NO: 1671682 - DNA, 15 bp, Homo sapiens
gcacagaacgcaaac

SEQ ID NO: 1671683 - DNA, 15 bp, Homo sapiens
cacagaacgcaaacc

SEQ ID NO: 1671684 - DNA, 15 bp, Homo sapiens
acagaacgcaaacca

SEQ ID NO: 1671685 - DNA, 15 bp, Homo sapiens
cagaacgcaaaccaa

SEQ ID NO: 1671686 - DNA, 15 bp, Homo sapiens
agaacgcaaaccaat

SEQ ID NO: 1671687 - DNA, 15 bp, Homo sapiens
gaacgcaaaccaata

SEQ ID NO: 1671688 - DNA, 15 bp, Homo sapiens
aacgcaaaccaatac

SEQ ID NO: 1671689 - DNA, 15 bp, Homo sapiens
acgcaaaccaataca

SEQ ID NO: 1671690 - DNA, 15 bp, Homo sapiens
cgcaaaccaatacac

SEQ ID NO: 1671691 - DNA, 15 bp, Homo sapiens
gcaaaccaatacacg

SEQ ID NO: 1671692 - DNA, 15 bp, Homo sapiens
caaaccaatacacgt

SEQ ID NO: 1671693 - DNA, 15 bp, Homo sapiens
aaaccaatacacgtg

SEQ ID NO: 1671694 - DNA, 15 bp, Homo sapiens
aaccaatacacgtgg

SEQ ID NO: 1671695 - DNA, 15 bp, Homo sapiens
accaatacacgtggc

SEQ ID NO: 1671696 - DNA, 15 bp, Homo sapiens
ccaatacacgtggct

SEQ ID NO: 1671697 - DNA, 15 bp, Homo sapiens
caatacacgtggctg

SEQ ID NO: 1671698 - DNA, 15 bp, Homo sapiens
aatacacgtggctgt

SEQ ID NO: 1671699 - DNA, 15 bp, Homo sapiens
atacacgtggctgtg

SEQ ID NO: 1671700 - DNA, 15 bp, Homo sapiens
tacacgtggctgtgg

SEQ ID NO: 1671701 - DNA, 15 bp, Homo sapiens
acacgtggctgtggg

SEQ ID NO: 1671702 - DNA, 15 bp, Homo sapiens
cacgtggctgtgggc

SEQ ID NO: 1671703 - DNA, 15 bp, Homo sapiens
acgtggctgtgggcc

SEQ ID NO: 1671704 - DNA, 15 bp, Homo sapiens
cgtggctgtgggccc

SEQ ID NO: 1671705 - DNA, 15 bp, Homo sapiens
gtggctgtgggccca

SEQ ID NO: 1671706 - DNA, 15 bp, Homo sapiens
tggctgtgggcccag

SEQ ID NO: 1671707 - DNA, 15 bp, Homo sapiens
ggctgtgggcccaga

SEQ ID NO: 1671708 - DNA, 15 bp, Homo sapiens
gctgtgggcccagaa

SEQ ID NO: 1671709 - DNA, 15 bp, Homo sapiens
ctgtgggcccagaaa

SEQ ID NO: 1671710 - DNA, 15 bp, Homo sapiens
tgtgggcccagaaaa

SEQ ID NO: 1671711 - DNA, 15 bp, Homo sapiens
gtgggcccagaaaat

SEQ ID NO: 1671712 - DNA, 15 bp, Homo sapiens
tgggcccagaaaatg

SEQ ID NO: 1671713 - DNA, 15 bp, Homo sapiens
gggcccagaaaatgt

SEQ ID NO: 1671714 - DNA, 15 bp, Homo sapiens
ggcccagaaaatgtt

SEQ ID NO: 1671715 - DNA, 15 bp, Homo sapiens
gcccagaaaatgtta

SEQ ID NO: 1671716 - DNA, 15 bp, Homo sapiens
cccagaaaatgttat

SEQ ID NO: 1671717 - DNA, 15 bp, Homo sapiens
ccagaaaatgttatt

SEQ ID NO: 1671718 - DNA, 15 bp, Homo sapiens
cagaaaatgttattt

SEQ ID NO: 1671719 - DNA, 15 bp, Homo sapiens
agaaaatgttattta

SEQ ID NO: 1671720 - DNA, 15 bp, Homo sapiens
gaaaatgttatttat

SEQ ID NO: 1671721 - DNA, 15 bp, Homo sapiens
aaaatgttatttatg

SEQ ID NO: 1671722 - DNA, 15 bp, Homo sapiens
aaatgttatttatgg

SEQ ID NO: 1671723 - DNA, 15 bp, Homo sapiens
aatgttatttatgga

SEQ ID NO: 1671724 - DNA, 15 bp, Homo sapiens
atgttatttatggac

SEQ ID NO: 1671725 - DNA, 15 bp, Homo sapiens
tgttatttatggaca

SEQ ID NO: 1671726 - DNA, 15 bp, Homo sapiens
gttatttatggacac

SEQ ID NO: 1671727 - DNA, 15 bp, Homo sapiens
ttatttatggacaca

SEQ ID NO: 1671728 - DNA, 15 bp, Homo sapiens
tatttatggacacaa

SEQ ID NO: 1671729 - DNA, 15 bp, Homo sapiens
atttatggacacaaa

SEQ ID NO: 1671730 - DNA, 15 bp, Homo sapiens
tttatggacacaaaa

SEQ ID NO: 1671731 - DNA, 15 bp, Homo sapiens
ttatggacacaaaaa

SEQ ID NO: 1671732 - DNA, 15 bp, Homo sapiens
tatggacacaaaaat

SEQ ID NO: 1671733 - DNA, 15 bp, Homo sapiens
atggacacaaaaatt

SEQ ID NO: 1671734 - DNA, 15 bp, Homo sapiens
tggacacaaaaattg

SEQ ID NO: 1671735 - DNA, 15 bp, Homo sapiens
ggacacaaaaattgg

SEQ ID NO: 1671736 - DNA, 15 bp, Homo sapiens
gacacaaaaattgga

SEQ ID NO: 1671737 - DNA, 15 bp, Homo sapiens
acacaaaaattggaa

SEQ ID NO: 1671738 - DNA, 15 bp, Homo sapiens
cacaaaaattggaat

SEQ ID NO: 1671739 - DNA, 15 bp, Homo sapiens
acaaaaattggaatt

SEQ ID NO: 1671740 - DNA, 15 bp, Homo sapiens
caaaaattggaattt

SEQ ID NO: 1671741 - DNA, 15 bp, Homo sapiens
aaaaattggaatttc

SEQ ID NO: 1671742 - DNA, 15 bp, Homo sapiens
aaaattggaatttca

SEQ ID NO: 1671743 - DNA, 15 bp, Homo sapiens
aaattggaatttcat

SEQ ID NO: 1671744 - DNA, 15 bp, Homo sapiens
aattggaatttcata

SEQ ID NO: 1671745 - DNA, 15 bp, Homo sapiens
attggaatttcatat

SEQ ID NO: 1671746 - DNA, 15 bp, Homo sapiens
ttggaatttcatata

SEQ ID NO: 1671747 - DNA, 15 bp, Homo sapiens
tggaatttcatataa

SEQ ID NO: 1671748 - DNA, 15 bp, Homo sapiens
ggaatttcatataac

SEQ ID NO: 1671749 - DNA, 15 bp, Homo sapiens
gaatttcatataact

SEQ ID NO: 1671750 - DNA, 15 bp, Homo sapiens
aatttcatataactg

SEQ ID NO: 1671751 - DNA, 15 bp, Homo sapiens
atttcatataactgt

SEQ ID NO: 1671752 - DNA, 15 bp, Homo sapiens
tttcatataactgtt

SEQ ID NO: 1671753 - DNA, 15 bp, Homo sapiens
ttcatataactgttt

SEQ ID NO: 1671754 - DNA, 15 bp, Homo sapiens
tcatataactgtttt

SEQ ID NO: 1671755 - DNA, 15 bp, Homo sapiens
catataactgttttg

SEQ ID NO: 1671756 - DNA, 15 bp, Homo sapiens
atataactgttttgt

SEQ ID NO: 1671757 - DNA, 15 bp, Homo sapiens
tataactgttttgtg

SEQ ID NO: 1671758 - DNA, 15 bp, Homo sapiens
ataactgttttgtgt

SEQ ID NO: 1671759 - DNA, 15 bp, Homo sapiens
taactgttttgtgtc

SEQ ID NO: 1671760 - DNA, 15 bp, Homo sapiens
aactgttttgtgtca

SEQ ID NO: 1671761 - DNA, 15 bp, Homo sapiens
actgttttgtgtcat

SEQ ID NO: 1671762 - DNA, 15 bp, Homo sapiens
ctgttttgtgtcatg

SEQ ID NO: 1671763 - DNA, 15 bp, Homo sapiens
tgttttgtgtcatga

SEQ ID NO: 1671764 - DNA, 15 bp, Homo sapiens
gttttgtgtcatgaa

SEQ ID NO: 1671765 - DNA, 15 bp, Homo sapiens
ttttgtgtcatgaaa

SEQ ID NO: 1671766 - DNA, 15 bp, Homo sapiens
tttgtgtcatgaaaa

SEQ ID NO: 1671767 - DNA, 15 bp, Homo sapiens
ttgtgtcatgaaaat

SEQ ID NO: 1671768 - DNA, 15 bp, Homo sapiens
tgtgtcatgaaaatg

SEQ ID NO: 1671769 - DNA, 15 bp, Homo sapiens
gtgtcatgaaaatga

SEQ ID NO: 1671770 - DNA, 15 bp, Homo sapiens
tgtcatgaaaatgat

SEQ ID NO: 1671771 - DNA, 15 bp, Homo sapiens
gtcatgaaaatgatt

SEQ ID NO: 1671772 - DNA, 15 bp, Homo sapiens
tcatgaaaatgattt

SEQ ID NO: 1671773 - DNA, 15 bp, Homo sapiens
catgaaaatgatttc

SEQ ID NO: 1671774 - DNA, 15 bp, Homo sapiens
atgaaaatgatttcc

SEQ ID NO: 1671775 - DNA, 15 bp, Homo sapiens
tgaaaatgatttccc

SEQ ID NO: 1671776 - DNA, 15 bp, Homo sapiens
gaaaatgatttccct

SEQ ID NO: 1671777 - DNA, 15 bp, Homo sapiens
aaaatgatttccctt

SEQ ID NO: 1671778 - DNA, 15 bp, Homo sapiens
aaatgatttcccttt

SEQ ID NO: 1671779 - DNA, 15 bp, Homo sapiens
aatgatttccctttt

SEQ ID NO: 1671780 - DNA, 15 bp, Homo sapiens
atgatttcccttttt

SEQ ID NO: 1671781 - DNA, 15 bp, Homo sapiens
tgatttcccttttta

SEQ ID NO: 1671782 - DNA, 15 bp, Homo sapiens
gatttccctttttat

SEQ ID NO: 1671783 - DNA, 15 bp, Homo sapiens
atttccctttttatt

SEQ ID NO: 1671784 - DNA, 15 bp, Homo sapiens
tttccctttttattt

SEQ ID NO: 1671785 - DNA, 15 bp, Homo sapiens
ttccctttttatttt

SEQ ID NO: 1671786 - DNA, 15 bp, Homo sapiens
tccctttttattttt

SEQ ID NO: 1671787 - DNA, 15 bp, Homo sapiens
ccctttttattttta

SEQ ID NO: 1671788 - DNA, 15 bp, Homo sapiens
cctttttatttttat

SEQ ID NO: 1671789 - DNA, 15 bp, Homo sapiens
ttatttttatttttc

SEQ ID NO: 1671790 - DNA, 15 bp, Homo sapiens
tatttttatttttct

SEQ ID NO: 1671791 - DNA, 15 bp, Homo sapiens
atttttatttttctt

SEQ ID NO: 1671792 - DNA, 15 bp, Homo sapiens
tttttatttttcttc

SEQ ID NO: 1671793 - DNA, 15 bp, Homo sapiens
ttttatttttcttct

SEQ ID NO: 1671794 - DNA, 15 bp, Homo sapiens
tttatttttcttctc

SEQ ID NO: 1671795 - DNA, 15 bp, Homo sapiens
ttatttttcttctca

SEQ ID NO: 1671796 - DNA, 15 bp, Homo sapiens
tatttttcttctcaa

SEQ ID NO: 1671797 - DNA, 15 bp, Homo sapiens
atttttcttctcaag

SEQ ID NO: 1671798 - DNA, 15 bp, Homo sapiens
tttttcttctcaagt

SEQ ID NO: 1671799 - DNA, 15 bp, Homo sapiens
ttttcttctcaagta

SEQ ID NO: 1671800 - DNA, 15 bp, Homo sapiens
tttcttctcaagtat

SEQ ID NO: 1671801 - DNA, 15 bp, Homo sapiens
ttcttctcaagtatt

SEQ ID NO: 1671802 - DNA, 15 bp, Homo sapiens
tcttctcaagtattt

SEQ ID NO: 1671803 - DNA, 15 bp, Homo sapiens
cttctcaagtattta

SEQ ID NO: 1671804 - DNA, 15 bp, Homo sapiens
ttctcaagtatttaa

SEQ ID NO: 1671805 - DNA, 15 bp, Homo sapiens
tctcaagtatttaaa

SEQ ID NO: 1671806 - DNA, 15 bp, Homo sapiens
ctcaagtatttaaat

SEQ ID NO: 1671807 - DNA, 15 bp, Homo sapiens
tcaagtatttaaata

SEQ ID NO: 1671808 - DNA, 15 bp, Homo sapiens
caagtatttaaatat

SEQ ID NO: 1671809 - DNA, 15 bp, Homo sapiens
aagtatttaaatatg

SEQ ID NO: 1671810 - DNA, 15 bp, Homo sapiens
agtatttaaatatgt

SEQ ID NO: 1671811 - DNA, 15 bp, Homo sapiens
gtatttaaatatgta

SEQ ID NO: 1671812 - DNA, 15 bp, Homo sapiens
tatttaaatatgtaa

SEQ ID NO: 1671813 - DNA, 15 bp, Homo sapiens
atttaaatatgtaaa

SEQ ID NO: 1671814 - DNA, 15 bp, Homo sapiens
tttaaatatgtaaaa

SEQ ID NO: 1671815 - DNA, 15 bp, Homo sapiens
ttaaatatgtaaaag

SEQ ID NO: 1671816 - DNA, 15 bp, Homo sapiens
taaatatgtaaaagc

SEQ ID NO: 1671817 - DNA, 15 bp, Homo sapiens
aaatatgtaaaagcc

SEQ ID NO: 1671818 - DNA, 15 bp, Homo sapiens
aatatgtaaaagcca

SEQ ID NO: 1671819 - DNA, 15 bp, Homo sapiens
atatgtaaaagccat

SEQ ID NO: 1671820 - DNA, 15 bp, Homo sapiens
tatgtaaaagccatt

SEQ ID NO: 1671821 - DNA, 15 bp, Homo sapiens
atgtaaaagccattt

SEQ ID NO: 1671822 - DNA, 15 bp, Homo sapiens
tgtaaaagccatttt

SEQ ID NO: 1671823 - DNA, 15 bp, Homo sapiens
gtaaaagccattttt

SEQ ID NO: 1671824 - DNA, 15 bp, Homo sapiens
taaaagccattttta

SEQ ID NO: 1671825 - DNA, 15 bp, Homo sapiens
aaaagccatttttag

SEQ ID NO: 1671826 - DNA, 15 bp, Homo sapiens
aaagccatttttagg

SEQ ID NO: 1671827 - DNA, 15 bp, Homo sapiens
aagccatttttaggc

SEQ ID NO: 1671828 - DNA, 15 bp, Homo sapiens
agccatttttaggcc

SEQ ID NO: 1671829 - DNA, 15 bp, Homo sapiens
gccatttttaggcct

SEQ ID NO: 1671830 - DNA, 15 bp, Homo sapiens
ccatttttaggcctg

SEQ ID NO: 1671831 - DNA, 15 bp, Homo sapiens
catttttaggcctgg

SEQ ID NO: 1671832 - DNA, 15 bp, Homo sapiens
atttttaggcctggc

SEQ ID NO: 1671833 - DNA, 15 bp, Homo sapiens
tttttaggcctggca

SEQ ID NO: 1671834 - DNA, 15 bp, Homo sapiens
ttttaggcctggcag

SEQ ID NO: 1671835 - DNA, 15 bp, Homo sapiens
tttaggcctggcagg

SEQ ID NO: 1671836 - DNA, 15 bp, Homo sapiens
ttaggcctggcagga

SEQ ID NO: 1671837 - DNA, 15 bp, Homo sapiens
taggcctggcaggat

SEQ ID NO: 1671838 - DNA, 15 bp, Homo sapiens
aggcctggcaggatg

SEQ ID NO: 1671839 - DNA, 15 bp, Homo sapiens
ggcctggcaggatgg

SEQ ID NO: 1671840 - DNA, 15 bp, Homo sapiens
gcctggcaggatggt

SEQ ID NO: 1671841 - DNA, 15 bp, Homo sapiens
cctggcaggatggtt

SEQ ID NO: 1671842 - DNA, 15 bp, Homo sapiens
ctggcaggatggttc

SEQ ID NO: 1671843 - DNA, 15 bp, Homo sapiens
tggcaggatggttca

SEQ ID NO: 1671844 - DNA, 15 bp, Homo sapiens
ggcaggatggttcac

SEQ ID NO: 1671845 - DNA, 15 bp, Homo sapiens
gcaggatggttcaca

SEQ ID NO: 1671846 - DNA, 15 bp, Homo sapiens
caggatggttcacag

SEQ ID NO: 1671847 - DNA, 15 bp, Homo sapiens
aggatggttcacagc

SEQ ID NO: 1671848 - DNA, 15 bp, Homo sapiens
ggatggttcacagct

SEQ ID NO: 1671849 - DNA, 15 bp, Homo sapiens
gatggttcacagctg

SEQ ID NO: 1671850 - DNA, 15 bp, Homo sapiens
atggttcacagctgt

SEQ ID NO: 1671851 - DNA, 15 bp, Homo sapiens
tggttcacagctgta

SEQ ID NO: 1671852 - DNA, 15 bp, Homo sapiens
ggttcacagctgtaa

SEQ ID NO: 1671853 - DNA, 15 bp, Homo sapiens
gttcacagctgtaat

SEQ ID NO: 1671854 - DNA, 15 bp, Homo sapiens
ttcacagctgtaatc

SEQ ID NO: 1671855 - DNA, 15 bp, Homo sapiens
tcacagctgtaatcc

SEQ ID NO: 1671856 - DNA, 15 bp, Homo sapiens
cacagctgtaatccc

SEQ ID NO: 1671857 - DNA, 15 bp, Homo sapiens
acagctgtaatccca

SEQ ID NO: 1671858 - DNA, 15 bp, Homo sapiens
actttgggaggtcga

SEQ ID NO: 1671859 - DNA, 15 bp, Homo sapiens
ctttgggaggtcgag

SEQ ID NO: 1671860 - DNA, 15 bp, Homo sapiens
tttgggaggtcgagg

SEQ ID NO: 1671861 - DNA, 15 bp, Homo sapiens
ttgggaggtcgaggc

SEQ ID NO: 1671862 - DNA, 15 bp, Homo sapiens
tgggaggtcgaggcg

SEQ ID NO: 1671863 - DNA, 15 bp, Homo sapiens
gggaggtcgaggcgg

SEQ ID NO: 1671864 - DNA, 15 bp, Homo sapiens
ggaggtcgaggcggg

SEQ ID NO: 1671865 - DNA, 15 bp, Homo sapiens
gaggtcgaggcggga

SEQ ID NO: 1671866 - DNA, 15 bp, Homo sapiens
aggtcgaggcgggag

SEQ ID NO: 1671867 - DNA, 15 bp, Homo sapiens
ggtcgaggcgggagg

SEQ ID NO: 1671868 - DNA, 15 bp, Homo sapiens
gtcgaggcgggagga

SEQ ID NO: 1671869 - DNA, 15 bp, Homo sapiens
tcgaggcgggaggat

SEQ ID NO: 1671870 - DNA, 15 bp, Homo sapiens
cgaggcgggaggatc

SEQ ID NO: 1671871 - DNA, 15 bp, Homo sapiens
ggcgggaggatcacg

SEQ ID NO: 1671872 - DNA, 15 bp, Homo sapiens
gcgggaggatcacga

SEQ ID NO: 1671873 - DNA, 15 bp, Homo sapiens
cgggaggatcacgag

SEQ ID NO: 1671874 - DNA, 15 bp, Homo sapiens
gggaggatcacgagg

SEQ ID NO: 1671875 - DNA, 15 bp, Homo sapiens
ggaggatcacgaggt

SEQ ID NO: 1671876 - DNA, 15 bp, Homo sapiens
gaggatcacgaggtc

SEQ ID NO: 1671877 - DNA, 15 bp, Homo sapiens
aggatcacgaggtca

SEQ ID NO: 1671878 - DNA, 15 bp, Homo sapiens
atcctggccaacaca

SEQ ID NO: 1671879 - DNA, 15 bp, Homo sapiens
tcctggccaacacag

SEQ ID NO: 1671880 - DNA, 15 bp, Homo sapiens
tggccaacacagtga

SEQ ID NO: 1671881 - DNA, 15 bp, Homo sapiens
ggccaacacagtgaa

SEQ ID NO: 1671882 - DNA, 15 bp, Homo sapiens
gccaacacagtgaaa

SEQ ID NO: 1671883 - DNA, 15 bp, Homo sapiens
ccaacacagtgaaac

SEQ ID NO: 1671884 - DNA, 15 bp, Homo sapiens
aatacaaaaaattaa

SEQ ID NO: 1671885 - DNA, 15 bp, Homo sapiens
atacaaaaaattaac

SEQ ID NO: 1671886 - DNA, 15 bp, Homo sapiens
tacaaaaaattaacc

SEQ ID NO: 1671887 - DNA, 15 bp, Homo sapiens
acaaaaaattaacca

SEQ ID NO: 1671888 - DNA, 15 bp, Homo sapiens
caaaaaattaaccag

SEQ ID NO: 1671889 - DNA, 15 bp, Homo sapiens
aaaattaaccaggct

SEQ ID NO: 1671890 - DNA, 15 bp, Homo sapiens
aaattaaccaggctt

SEQ ID NO: 1671891 - DNA, 15 bp, Homo sapiens
aattaaccaggcttg

SEQ ID NO: 1671892 - DNA, 15 bp, Homo sapiens
attaaccaggcttgg

SEQ ID NO: 1671893 - DNA, 15 bp, Homo sapiens
ttaaccaggcttggt

SEQ ID NO: 1671894 - DNA, 15 bp, Homo sapiens
taaccaggcttggtg

SEQ ID NO: 1671895 - DNA, 15 bp, Homo sapiens
aaccaggcttggtgg

SEQ ID NO: 1671896 - DNA, 15 bp, Homo sapiens
accaggcttggtggc

SEQ ID NO: 1671897 - DNA, 15 bp, Homo sapiens
ccaggcttggtggcg

SEQ ID NO: 1671898 - DNA, 15 bp, Homo sapiens
caggcttggtggcgc

SEQ ID NO: 1671899 - DNA, 15 bp, Homo sapiens
aggcttggtggcgcg

SEQ ID NO: 1671900 - DNA, 15 bp, Homo sapiens
ggcttggtggcgcgc

SEQ ID NO: 1671901 - DNA, 15 bp, Homo sapiens
gcttggtggcgcgcg

SEQ ID NO: 1671902 - DNA, 15 bp, Homo sapiens
cttggtggcgcgcgt

SEQ ID NO: 1671903 - DNA, 15 bp, Homo sapiens
ttggtggcgcgcgtc

SEQ ID NO: 1671904 - DNA, 15 bp, Homo sapiens
tggtggcgcgcgtct

SEQ ID NO: 1671905 - DNA, 15 bp, Homo sapiens
ggtggcgcgcgtctg

SEQ ID NO: 1671906 - DNA, 15 bp, Homo sapiens
gtggcgcgcgtctgt

SEQ ID NO: 1671907 - DNA, 15 bp, Homo sapiens
tggcgcgcgtctgta

SEQ ID NO: 1671908 - DNA, 15 bp, Homo sapiens
ggcgcgcgtctgtag

SEQ ID NO: 1671909 - DNA, 15 bp, Homo sapiens
gcgcgcgtctgtagt

SEQ ID NO: 1671910 - DNA, 15 bp, Homo sapiens
cgcgcgtctgtagtc

SEQ ID NO: 1671911 - DNA, 15 bp, Homo sapiens
gcgcgtctgtagtcc

SEQ ID NO: 1671912 - DNA, 15 bp, Homo sapiens
cgcgtctgtagtccc

SEQ ID NO: 1671913 - DNA, 15 bp, Homo sapiens
gcgtctgtagtccca

SEQ ID NO: 1671914 - DNA, 15 bp, Homo sapiens
cgtctgtagtcccag

SEQ ID NO: 1671915 - DNA, 15 bp, Homo sapiens
cccagctgctcagga

SEQ ID NO: 1671916 - DNA, 15 bp, Homo sapiens
ccagctgctcaggag

SEQ ID NO: 1671917 - DNA, 15 bp, Homo sapiens
cagctgctcaggagg

SEQ ID NO: 1671918 - DNA, 15 bp, Homo sapiens
agctgctcaggaggc

SEQ ID NO: 1671919 - DNA, 15 bp, Homo sapiens
gctgctcaggaggct

SEQ ID NO: 1671920 - DNA, 15 bp, Homo sapiens
ctgctcaggaggctg

SEQ ID NO: 1671921 - DNA, 15 bp, Homo sapiens
tgctcaggaggctga

SEQ ID NO: 1671922 - DNA, 15 bp, Homo sapiens
gctcaggaggctgag

SEQ ID NO: 1671923 - DNA, 15 bp, Homo sapiens
gagaatcgcttgaat

SEQ ID NO: 1671924 - DNA, 15 bp, Homo sapiens
agaatcgcttgaatg

SEQ ID NO: 1671925 - DNA, 15 bp, Homo sapiens
gaatcgcttgaatgc

SEQ ID NO: 1671926 - DNA, 15 bp, Homo sapiens
aatcgcttgaatgca

SEQ ID NO: 1671927 - DNA, 15 bp, Homo sapiens
atcgcttgaatgcag

SEQ ID NO: 1671928 - DNA, 15 bp, Homo sapiens
tcgcttgaatgcagg

SEQ ID NO: 1671929 - DNA, 15 bp, Homo sapiens
cgcttgaatgcagga

SEQ ID NO: 1671930 - DNA, 15 bp, Homo sapiens
gcttgaatgcaggag

SEQ ID NO: 1671931 - DNA, 15 bp, Homo sapiens
cttgaatgcaggagg

SEQ ID NO: 1671932 - DNA, 15 bp, Homo sapiens
ttgaatgcaggaggc

SEQ ID NO: 1671933 - DNA, 15 bp, Homo sapiens
tgaatgcaggaggcg

SEQ ID NO: 1671934 - DNA, 15 bp, Homo sapiens
gaatgcaggaggcgg

SEQ ID NO: 1671935 - DNA, 15 bp, Homo sapiens
aatgcaggaggcgga

SEQ ID NO: 1671936 - DNA, 15 bp, Homo sapiens
atgcaggaggcggag

SEQ ID NO: 1671937 - DNA, 15 bp, Homo sapiens
tgcaggaggcggagg

SEQ ID NO: 1671938 - DNA, 15 bp, Homo sapiens
gcaggaggcggaggt

SEQ ID NO: 1671939 - DNA, 15 bp, Homo sapiens
gaggcggaggttgta

SEQ ID NO: 1671940 - DNA, 15 bp, Homo sapiens
aggcggaggttgtag

SEQ ID NO: 1671941 - DNA, 15 bp, Homo sapiens
ggcggaggttgtagt

SEQ ID NO: 1671942 - DNA, 15 bp, Homo sapiens
gcggaggttgtagtg

SEQ ID NO: 1671943 - DNA, 15 bp, Homo sapiens
tgtagtgagccgagg

SEQ ID NO: 1671944 - DNA, 15 bp, Homo sapiens
gtagtgagccgaggt

SEQ ID NO: 1671945 - DNA, 15 bp, Homo sapiens
tagtgagccgaggtt

SEQ ID NO: 1671946 - DNA, 15 bp, Homo sapiens
agtgagccgaggttg

SEQ ID NO: 1671947 - DNA, 15 bp, Homo sapiens
gagccgaggttgcac

SEQ ID NO: 1671948 - DNA, 15 bp, Homo sapiens
agccgaggttgcacc

SEQ ID NO: 1671949 - DNA, 15 bp, Homo sapiens
gccgaggttgcacca

SEQ ID NO: 1671950 - DNA, 15 bp, Homo sapiens
ccgaggttgcaccac

SEQ ID NO: 1671951 - DNA, 15 bp, Homo sapiens
cgaggttgcaccact

SEQ ID NO: 1671952 - DNA, 15 bp, Homo sapiens
gaggttgcaccactg

SEQ ID NO: 1671953 - DNA, 15 bp, Homo sapiens
aggttgcaccactgc

SEQ ID NO: 1671954 - DNA, 15 bp, Homo sapiens
cctgagcgacagagt

SEQ ID NO: 1671955 - DNA, 15 bp, Homo sapiens
ctgagcgacagagtg

SEQ ID NO: 1671956 - DNA, 15 bp, Homo sapiens
tgagcgacagagtga

SEQ ID NO: 1671957 - DNA, 15 bp, Homo sapiens
gagcgacagagtgag

SEQ ID NO: 1671958 - DNA, 15 bp, Homo sapiens
agcgacagagtgaga

SEQ ID NO: 1671959 - DNA, 15 bp, Homo sapiens
gcgacagagtgagag

SEQ ID NO: 1671960 - DNA, 15 bp, Homo sapiens
cgacagagtgagagt

SEQ ID NO: 1671961 - DNA, 15 bp, Homo sapiens
gacagagtgagagtc

SEQ ID NO: 1671962 - DNA, 15 bp, Homo sapiens
acagagtgagagtcc

SEQ ID NO: 1671963 - DNA, 15 bp, Homo sapiens
cagagtgagagtccg

SEQ ID NO: 1671964 - DNA, 15 bp, Homo sapiens
agagtgagagtccgc

SEQ ID NO: 1671965 - DNA, 15 bp, Homo sapiens
gagtgagagtccgcc

SEQ ID NO: 1671966 - DNA, 15 bp, Homo sapiens
agtgagagtccgcct

SEQ ID NO: 1671967 - DNA, 15 bp, Homo sapiens
gtgagagtccgcctc

SEQ ID NO: 1671968 - DNA, 15 bp, Homo sapiens
tgagagtccgcctca

SEQ ID NO: 1671969 - DNA, 15 bp, Homo sapiens
gagagtccgcctcaa

SEQ ID NO: 1671970 - DNA, 15 bp, Homo sapiens
agagtccgcctcaaa

SEQ ID NO: 1671971 - DNA, 15 bp, Homo sapiens
gagtccgcctcaaac

SEQ ID NO: 1671972 - DNA, 15 bp, Homo sapiens
agtccgcctcaaaca

SEQ ID NO: 1671973 - DNA, 15 bp, Homo sapiens
gtccgcctcaaacaa

SEQ ID NO: 1671974 - DNA, 15 bp, Homo sapiens
tccgcctcaaacaaa

SEQ ID NO: 1671975 - DNA, 15 bp, Homo sapiens
ccgcctcaaacaaaa

SEQ ID NO: 1671976 - DNA, 15 bp, Homo sapiens
cgcctcaaacaaaaa

SEQ ID NO: 1671977 - DNA, 15 bp, Homo sapiens
gcctcaaacaaaaaa

SEQ ID NO: 1671978 - DNA, 15 bp, Homo sapiens
cctcaaacaaaaaaa

SEQ ID NO: 1671979 - DNA, 15 bp, Homo sapiens
ctcaaacaaaaaaat

SEQ ID NO: 1671980 - DNA, 15 bp, Homo sapiens
tcaaacaaaaaaatg

SEQ ID NO: 1671981 - DNA, 15 bp, Homo sapiens
caaacaaaaaaatgt

SEQ ID NO: 1671982 - DNA, 15 bp, Homo sapiens
aaacaaaaaaatgtt

SEQ ID NO: 1671983 - DNA, 15 bp, Homo sapiens
aacaaaaaaatgttt

SEQ ID NO: 1671984 - DNA, 15 bp, Homo sapiens
acaaaaaaatgtttg

SEQ ID NO: 1671985 - DNA, 15 bp, Homo sapiens
caaaaaaatgtttgc

SEQ ID NO: 1671986 - DNA, 15 bp, Homo sapiens
aaaaaaatgtttgcc

SEQ ID NO: 1671987 - DNA, 15 bp, Homo sapiens
aaaaaatgtttgccc

SEQ ID NO: 1671988 - DNA, 15 bp, Homo sapiens
aaaaatgtttgccca

SEQ ID NO: 1671989 - DNA, 15 bp, Homo sapiens
aaaatgtttgcccat

SEQ ID NO: 1671990 - DNA, 15 bp, Homo sapiens
aaatgtttgcccatg

SEQ ID NO: 1671991 - DNA, 15 bp, Homo sapiens
aatgtttgcccatgc

SEQ ID NO: 1671992 - DNA, 15 bp, Homo sapiens
atgtttgcccatgct

SEQ ID NO: 1671993 - DNA, 15 bp, Homo sapiens
tgtttgcccatgctg

SEQ ID NO: 1671994 - DNA, 15 bp, Homo sapiens
gtttgcccatgctgg

SEQ ID NO: 1671995 - DNA, 15 bp, Homo sapiens
tttgcccatgctggt

SEQ ID NO: 1671996 - DNA, 15 bp, Homo sapiens
ttgcccatgctggtc

SEQ ID NO: 1671997 - DNA, 15 bp, Homo sapiens
tgcccatgctggtct

SEQ ID NO: 1671998 - DNA, 15 bp, Homo sapiens
gcccatgctggtctt

SEQ ID NO: 1671999 - DNA, 15 bp, Homo sapiens
cccatgctggtcttg

SEQ ID NO: 1672000 - DNA, 15 bp, Homo sapiens
ccatgctggtcttga

SEQ ID NO: 1672001 - DNA, 15 bp, Homo sapiens
catgctggtcttgaa

SEQ ID NO: 1672002 - DNA, 15 bp, Homo sapiens
atgctggtcttgaac

SEQ ID NO: 1672003 - DNA, 15 bp, Homo sapiens
tgctggtcttgaact

SEQ ID NO: 1672004 - DNA, 15 bp, Homo sapiens
tcctgggctcaagct

SEQ ID NO: 1672005 - DNA, 15 bp, Homo sapiens
cctgggctcaagcta

SEQ ID NO: 1672006 - DNA, 15 bp, Homo sapiens
ctgggctcaagctat

SEQ ID NO: 1672007 - DNA, 15 bp, Homo sapiens
tgggctcaagctatc

SEQ ID NO: 1672008 - DNA, 15 bp, Homo sapiens
gggctcaagctatct

SEQ ID NO: 1672009 - DNA, 15 bp, Homo sapiens
ggctcaagctatctg

SEQ ID NO: 1672010 - DNA, 15 bp, Homo sapiens
gctcaagctatctgc

SEQ ID NO: 1672011 - DNA, 15 bp, Homo sapiens
ctcaagctatctgcc

SEQ ID NO: 1672012 - DNA, 15 bp, Homo sapiens
tcaagctatctgcct

SEQ ID NO: 1672013 - DNA, 15 bp, Homo sapiens
caagctatctgcctg

SEQ ID NO: 1672014 - DNA, 15 bp, Homo sapiens
aagctatctgcctgc

SEQ ID NO: 1672015 - DNA, 15 bp, Homo sapiens
agctatctgcctgcc

SEQ ID NO: 1672016 - DNA, 15 bp, Homo sapiens
gctatctgcctgcct

SEQ ID NO: 1672017 - DNA, 15 bp, Homo sapiens
ctatctgcctgcctt

SEQ ID NO: 1672018 - DNA, 15 bp, Homo sapiens
tatctgcctgccttg

SEQ ID NO: 1672019 - DNA, 15 bp, Homo sapiens
tctgcctgccttggt

SEQ ID NO: 1672020 - DNA, 15 bp, Homo sapiens
ctgcctgccttggtc

SEQ ID NO: 1672021 - DNA, 15 bp, Homo sapiens
tgcctgccttggtct

SEQ ID NO: 1672022 - DNA, 15 bp, Homo sapiens
gcctgccttggtctc

SEQ ID NO: 1672023 - DNA, 15 bp, Homo sapiens
cctgccttggtctcc

SEQ ID NO: 1672024 - DNA, 15 bp, Homo sapiens
ctgccttggtctccc

SEQ ID NO: 1672025 - DNA, 15 bp, Homo sapiens
tggtctcccaaagtt

SEQ ID NO: 1672026 - DNA, 15 bp, Homo sapiens
ggtctcccaaagttc

SEQ ID NO: 1672027 - DNA, 15 bp, Homo sapiens
gtctcccaaagttct

SEQ ID NO: 1672028 - DNA, 15 bp, Homo sapiens
tctcccaaagttctg

SEQ ID NO: 1672029 - DNA, 15 bp, Homo sapiens
ttacaggcatgagct

SEQ ID NO: 1672030 - DNA, 15 bp, Homo sapiens
tacaggcatgagcta

SEQ ID NO: 1672031 - DNA, 15 bp, Homo sapiens
acaggcatgagctac

SEQ ID NO: 1672032 - DNA, 15 bp, Homo sapiens
caggcatgagctaca

SEQ ID NO: 1672033 - DNA, 15 bp, Homo sapiens
aggcatgagctacag

SEQ ID NO: 1672034 - DNA, 15 bp, Homo sapiens
ggcatgagctacagc

SEQ ID NO: 1672035 - DNA, 15 bp, Homo sapiens
gcatgagctacagcg

SEQ ID NO: 1672036 - DNA, 15 bp, Homo sapiens
catgagctacagcgc

SEQ ID NO: 1672037 - DNA, 15 bp, Homo sapiens
atgagctacagcgcc

SEQ ID NO: 1672038 - DNA, 15 bp, Homo sapiens
tgagctacagcgccc

SEQ ID NO: 1672039 - DNA, 15 bp, Homo sapiens
gagctacagcgcccg

SEQ ID NO: 1672040 - DNA, 15 bp, Homo sapiens
agctacagcgcccgg

SEQ ID NO: 1672041 - DNA, 15 bp, Homo sapiens
gctacagcgcccgga

SEQ ID NO: 1672042 - DNA, 15 bp, Homo sapiens
ctacagcgcccggac

SEQ ID NO: 1672043 - DNA, 15 bp, Homo sapiens
tacagcgcccggact

SEQ ID NO: 1672044 - DNA, 15 bp, Homo sapiens
acagcgcccggactt

SEQ ID NO: 1672045 - DNA, 15 bp, Homo sapiens
cagcgcccggacttt

SEQ ID NO: 1672046 - DNA, 15 bp, Homo sapiens
agcgcccggactttt

SEQ ID NO: 1672047 - DNA, 15 bp, Homo sapiens
gcgcccggacttttg

SEQ ID NO: 1672048 - DNA, 15 bp, Homo sapiens
cgcccggacttttgt

SEQ ID NO: 1672049 - DNA, 15 bp, Homo sapiens
gcccggacttttgtt

SEQ ID NO: 1672050 - DNA, 15 bp, Homo sapiens
cccggacttttgttg

SEQ ID NO: 1672051 - DNA, 15 bp, Homo sapiens
ccggacttttgttgt

SEQ ID NO: 1672052 - DNA, 15 bp, Homo sapiens
cggacttttgttgtt

SEQ ID NO: 1672053 - DNA, 15 bp, Homo sapiens
ggacttttgttgttt

SEQ ID NO: 1672054 - DNA, 15 bp, Homo sapiens
gacttttgttgtttt

SEQ ID NO: 1672055 - DNA, 15 bp, Homo sapiens
acttttgttgtttta

SEQ ID NO: 1672056 - DNA, 15 bp, Homo sapiens
cttttgttgttttat

SEQ ID NO: 1672057 - DNA, 15 bp, Homo sapiens
ttttgttgttttata

SEQ ID NO: 1672058 - DNA, 15 bp, Homo sapiens
tttgttgttttatat

SEQ ID NO: 1672059 - DNA, 15 bp, Homo sapiens
ttgttgttttatatc

SEQ ID NO: 1672060 - DNA, 15 bp, Homo sapiens
tgttgttttatatct

SEQ ID NO: 1672061 - DNA, 15 bp, Homo sapiens
gttgttttatatcta

SEQ ID NO: 1672062 - DNA, 15 bp, Homo sapiens
ttgttttatatctat

SEQ ID NO: 1672063 - DNA, 15 bp, Homo sapiens
tgttttatatctata

SEQ ID NO: 1672064 - DNA, 15 bp, Homo sapiens
gttttatatctatat

SEQ ID NO: 1672065 - DNA, 15 bp, Homo sapiens
ttttatatctatata

SEQ ID NO: 1672066 - DNA, 15 bp, Homo sapiens
tttatatctatatat

SEQ ID NO: 1672067 - DNA, 15 bp, Homo sapiens
ttatatctatatatc

SEQ ID NO: 1672068 - DNA, 15 bp, Homo sapiens
tatatctatatatct

SEQ ID NO: 1672069 - DNA, 15 bp, Homo sapiens
atatctatatatcta

SEQ ID NO: 1672070 - DNA, 15 bp, Homo sapiens
tatctatatatctat

SEQ ID NO: 1672071 - DNA, 15 bp, Homo sapiens
atctatatatctata

SEQ ID NO: 1672072 - DNA, 15 bp, Homo sapiens
tctatatatctatat

SEQ ID NO: 1672073 - DNA, 15 bp, Homo sapiens
ctatatatctatata

SEQ ID NO: 1672074 - DNA, 15 bp, Homo sapiens
tatatatctatatat

SEQ ID NO: 1672075 - DNA, 15 bp, Homo sapiens
atatatctatatata

SEQ ID NO: 1672076 - DNA, 15 bp, Homo sapiens
tatatctatatataa

SEQ ID NO: 1672077 - DNA, 15 bp, Homo sapiens
atatctatatataac

SEQ ID NO: 1672078 - DNA, 15 bp, Homo sapiens
tatctatatataact

SEQ ID NO: 1672079 - DNA, 15 bp, Homo sapiens
atctatatataactt

SEQ ID NO: 1672080 - DNA, 15 bp, Homo sapiens
tctatatataacttg

SEQ ID NO: 1672081 - DNA, 15 bp, Homo sapiens
ctatatataacttgt

SEQ ID NO: 1672082 - DNA, 15 bp, Homo sapiens
tatatataacttgtt

SEQ ID NO: 1672083 - DNA, 15 bp, Homo sapiens
atatataacttgttt

SEQ ID NO: 1672084 - DNA, 15 bp, Homo sapiens
tatataacttgtttt

SEQ ID NO: 1672085 - DNA, 15 bp, Homo sapiens
atataacttgtttta

SEQ ID NO: 1672086 - DNA, 15 bp, Homo sapiens
tataacttgttttat

SEQ ID NO: 1672087 - DNA, 15 bp, Homo sapiens
ataacttgttttatg

SEQ ID NO: 1672088 - DNA, 15 bp, Homo sapiens
taacttgttttatgt

SEQ ID NO: 1672089 - DNA, 15 bp, Homo sapiens
aacttgttttatgta

SEQ ID NO: 1672090 - DNA, 15 bp, Homo sapiens
acttgttttatgtat

SEQ ID NO: 1672091 - DNA, 15 bp, Homo sapiens
cttgttttatgtata

SEQ ID NO: 1672092 - DNA, 15 bp, Homo sapiens
ttgttttatgtatat

SEQ ID NO: 1672093 - DNA, 15 bp, Homo sapiens
tgttttatgtatata

SEQ ID NO: 1672094 - DNA, 15 bp, Homo sapiens
gttttatgtatatat

SEQ ID NO: 1672095 - DNA, 15 bp, Homo sapiens
ttttatgtatatata

SEQ ID NO: 1672096 - DNA, 15 bp, Homo sapiens
atgtatatatataac

SEQ ID NO: 1672097 - DNA, 15 bp, Homo sapiens
tgtatatatataact

SEQ ID NO: 1672098 - DNA, 15 bp, Homo sapiens
gtatatatataactt

SEQ ID NO: 1672099 - DNA, 15 bp, Homo sapiens
tatatatataacttg

SEQ ID NO: 1672100 - DNA, 15 bp, Homo sapiens
atatatataacttgt

SEQ ID NO: 1672101 - DNA, 15 bp, Homo sapiens
ataacttgttttata

SEQ ID NO: 1672102 - DNA, 15 bp, Homo sapiens
taacttgttttatat

SEQ ID NO: 1672103 - DNA, 15 bp, Homo sapiens
aacttgttttatata

SEQ ID NO: 1672104 - DNA, 15 bp, Homo sapiens
acttgttttatatat

SEQ ID NO: 1672105 - DNA, 15 bp, Homo sapiens
cttgttttatatata

SEQ ID NO: 1672106 - DNA, 15 bp, Homo sapiens
ttgttttatatatat

SEQ ID NO: 1672107 - DNA, 15 bp, Homo sapiens
tgttttatatatata

SEQ ID NO: 1672108 - DNA, 15 bp, Homo sapiens
gttttatatatatac

SEQ ID NO: 1672109 - DNA, 15 bp, Homo sapiens
ttttatatatataca

SEQ ID NO: 1672110 - DNA, 15 bp, Homo sapiens
tttatatatatacat

SEQ ID NO: 1672111 - DNA, 15 bp, Homo sapiens
tatatatacataaac

SEQ ID NO: 1672112 - DNA, 15 bp, Homo sapiens
atatatacataaact

SEQ ID NO: 1672113 - DNA, 15 bp, Homo sapiens
tatatacataaactg

SEQ ID NO: 1672114 - DNA, 15 bp, Homo sapiens
atatacataaactgc

SEQ ID NO: 1672115 - DNA, 15 bp, Homo sapiens
tatacataaactgca

SEQ ID NO: 1672116 - DNA, 15 bp, Homo sapiens
atacataaactgcag

SEQ ID NO: 1672117 - DNA, 15 bp, Homo sapiens
tacataaactgcagt

SEQ ID NO: 1672118 - DNA, 15 bp, Homo sapiens
acataaactgcagta

SEQ ID NO: 1672119 - DNA, 15 bp, Homo sapiens
cataaactgcagtaa

SEQ ID NO: 1672120 - DNA, 15 bp, Homo sapiens
ataaactgcagtaaa

SEQ ID NO: 1672121 - DNA, 15 bp, Homo sapiens
taaactgcagtaaaa

SEQ ID NO: 1672122 - DNA, 15 bp, Homo sapiens
aaactgcagtaaaaa

SEQ ID NO: 1672123 - DNA, 15 bp, Homo sapiens
aactgcagtaaaaaa

SEQ ID NO: 1672124 - DNA, 15 bp, Homo sapiens
actgcagtaaaaaac

SEQ ID NO: 1672125 - DNA, 15 bp, Homo sapiens
ctgcagtaaaaaaca

SEQ ID NO: 1672126 - DNA, 15 bp, Homo sapiens
tgcagtaaaaaacat

SEQ ID NO: 1672127 - DNA, 15 bp, Homo sapiens
gcagtaaaaaacatg

SEQ ID NO: 1672128 - DNA, 15 bp, Homo sapiens
cagtaaaaaacatgt

SEQ ID NO: 1672129 - DNA, 15 bp, Homo sapiens
agtaaaaaacatgta

SEQ ID NO: 1672130 - DNA, 15 bp, Homo sapiens
gtaaaaaacatgtaa

SEQ ID NO: 1672131 - DNA, 15 bp, Homo sapiens
taaaaaacatgtaac

SEQ ID NO: 1672132 - DNA, 15 bp, Homo sapiens
aaaaaacatgtaaca

SEQ ID NO: 1672133 - DNA, 15 bp, Homo sapiens
aaaaacatgtaacat

SEQ ID NO: 1672134 - DNA, 15 bp, Homo sapiens
aaaacatgtaacata

SEQ ID NO: 1672135 - DNA, 15 bp, Homo sapiens
aaacatgtaacataa

SEQ ID NO: 1672136 - DNA, 15 bp, Homo sapiens
aacatgtaacataaa

SEQ ID NO: 1672137 - DNA, 15 bp, Homo sapiens
acatgtaacataaaa

SEQ ID NO: 1672138 - DNA, 15 bp, Homo sapiens
catgtaacataaaat

SEQ ID NO: 1672139 - DNA, 15 bp, Homo sapiens
atgtaacataaaatt

SEQ ID NO: 1672140 - DNA, 15 bp, Homo sapiens
tgtaacataaaattt

SEQ ID NO: 1672141 - DNA, 15 bp, Homo sapiens
gtaacataaaattta

SEQ ID NO: 1672142 - DNA, 15 bp, Homo sapiens
taacataaaatttac

SEQ ID NO: 1672143 - DNA, 15 bp, Homo sapiens
aacataaaatttacc

SEQ ID NO: 1672144 - DNA, 15 bp, Homo sapiens
acataaaatttacct

SEQ ID NO: 1672145 - DNA, 15 bp, Homo sapiens
cataaaatttacctt

SEQ ID NO: 1672146 - DNA, 15 bp, Homo sapiens
ataaaatttaccttc

SEQ ID NO: 1672147 - DNA, 15 bp, Homo sapiens
taaaatttaccttct

SEQ ID NO: 1672148 - DNA, 15 bp, Homo sapiens
aaaatttaccttctc

SEQ ID NO: 1672149 - DNA, 15 bp, Homo sapiens
aaatttaccttctca

SEQ ID NO: 1672150 - DNA, 15 bp, Homo sapiens
aatttaccttctcaa

SEQ ID NO: 1672151 - DNA, 15 bp, Homo sapiens
atttaccttctcaaa

SEQ ID NO: 1672152 - DNA, 15 bp, Homo sapiens
tttaccttctcaaac

SEQ ID NO: 1672153 - DNA, 15 bp, Homo sapiens
ttaccttctcaaacc

SEQ ID NO: 1672154 - DNA, 15 bp, Homo sapiens
taccttctcaaacct

SEQ ID NO: 1672155 - DNA, 15 bp, Homo sapiens
ccttctcaaacctta

SEQ ID NO: 1672156 - DNA, 15 bp, Homo sapiens
cttctcaaaccttat

SEQ ID NO: 1672157 - DNA, 15 bp, Homo sapiens
ttctcaaaccttatt

SEQ ID NO: 1672158 - DNA, 15 bp, Homo sapiens
tctcaaaccttatta

SEQ ID NO: 1672159 - DNA, 15 bp, Homo sapiens
ctcaaaccttattaa

SEQ ID NO: 1672160 - DNA, 15 bp, Homo sapiens
tcaaaccttattaag

SEQ ID NO: 1672161 - DNA, 15 bp, Homo sapiens
caaaccttattaagt

SEQ ID NO: 1672162 - DNA, 15 bp, Homo sapiens
aaaccttattaagtg

SEQ ID NO: 1672163 - DNA, 15 bp, Homo sapiens
aaccttattaagtgc

SEQ ID NO: 1672164 - DNA, 15 bp, Homo sapiens
accttattaagtgca

SEQ ID NO: 1672165 - DNA, 15 bp, Homo sapiens
ccttattaagtgcac

SEQ ID NO: 1672166 - DNA, 15 bp, Homo sapiens
cttattaagtgcaca

SEQ ID NO: 1672167 - DNA, 15 bp, Homo sapiens
ttattaagtgcacag

SEQ ID NO: 1672168 - DNA, 15 bp, Homo sapiens
tattaagtgcacagt

SEQ ID NO: 1672169 - DNA, 15 bp, Homo sapiens
attaagtgcacagtt

SEQ ID NO: 1672170 - DNA, 15 bp, Homo sapiens
ttaagtgcacagttc

SEQ ID NO: 1672171 - DNA, 15 bp, Homo sapiens
taagtgcacagttct

SEQ ID NO: 1672172 - DNA, 15 bp, Homo sapiens
aagtgcacagttctg

SEQ ID NO: 1672173 - DNA, 15 bp, Homo sapiens
agtgcacagttctgt

SEQ ID NO: 1672174 - DNA, 15 bp, Homo sapiens
gtgcacagttctgtg

SEQ ID NO: 1672175 - DNA, 15 bp, Homo sapiens
tgcacagttctgtgc

SEQ ID NO: 1672176 - DNA, 15 bp, Homo sapiens
gcacagttctgtgcc

SEQ ID NO: 1672177 - DNA, 15 bp, Homo sapiens
cacagttctgtgcca

SEQ ID NO: 1672178 - DNA, 15 bp, Homo sapiens
acagttctgtgccat

SEQ ID NO: 1672179 - DNA, 15 bp, Homo sapiens
cagttctgtgccatt

SEQ ID NO: 1672180 - DNA, 15 bp, Homo sapiens
agttctgtgccatta

SEQ ID NO: 1672181 - DNA, 15 bp, Homo sapiens
gttctgtgccattag

SEQ ID NO: 1672182 - DNA, 15 bp, Homo sapiens
ttctgtgccattagc

SEQ ID NO: 1672183 - DNA, 15 bp, Homo sapiens
tctgtgccattagca

SEQ ID NO: 1672184 - DNA, 15 bp, Homo sapiens
ctgtgccattagcaa

SEQ ID NO: 1672185 - DNA, 15 bp, Homo sapiens
tgtgccattagcaaa

SEQ ID NO: 1672186 - DNA, 15 bp, Homo sapiens
gtgccattagcaaat

SEQ ID NO: 1672187 - DNA, 15 bp, Homo sapiens
tgccattagcaaatt

SEQ ID NO: 1672188 - DNA, 15 bp, Homo sapiens
gccattagcaaattc

SEQ ID NO: 1672189 - DNA, 15 bp, Homo sapiens
ccattagcaaattca

SEQ ID NO: 1672190 - DNA, 15 bp, Homo sapiens
cattagcaaattcac

SEQ ID NO: 1672191 - DNA, 15 bp, Homo sapiens
attagcaaattcaca

SEQ ID NO: 1672192 - DNA, 15 bp, Homo sapiens
ttagcaaattcacac

SEQ ID NO: 1672193 - DNA, 15 bp, Homo sapiens
tagcaaattcacact

SEQ ID NO: 1672194 - DNA, 15 bp, Homo sapiens
agcaaattcacactg

SEQ ID NO: 1672195 - DNA, 15 bp, Homo sapiens
gcaaattcacactgt

SEQ ID NO: 1672196 - DNA, 15 bp, Homo sapiens
caaattcacactgtt

SEQ ID NO: 1672197 - DNA, 15 bp, Homo sapiens
aaattcacactgttg

SEQ ID NO: 1672198 - DNA, 15 bp, Homo sapiens
aattcacactgttgt

SEQ ID NO: 1672199 - DNA, 15 bp, Homo sapiens
attcacactgttgta

SEQ ID NO: 1672200 - DNA, 15 bp, Homo sapiens
ttcacactgttgtac

SEQ ID NO: 1672201 - DNA, 15 bp, Homo sapiens
tcacactgttgtaca

SEQ ID NO: 1672202 - DNA, 15 bp, Homo sapiens
cacactgttgtacaa

SEQ ID NO: 1672203 - DNA, 15 bp, Homo sapiens
acactgttgtacaac

SEQ ID NO: 1672204 - DNA, 15 bp, Homo sapiens
cactgttgtacaaca

SEQ ID NO: 1672205 - DNA, 15 bp, Homo sapiens
actgttgtacaacat

SEQ ID NO: 1672206 - DNA, 15 bp, Homo sapiens
ctgttgtacaacatc

SEQ ID NO: 1672207 - DNA, 15 bp, Homo sapiens
tgttgtacaacatca

SEQ ID NO: 1672208 - DNA, 15 bp, Homo sapiens
gttgtacaacatcac

SEQ ID NO: 1672209 - DNA, 15 bp, Homo sapiens
ttgtacaacatcaca

SEQ ID NO: 1672210 - DNA, 15 bp, Homo sapiens
tgtacaacatcacaa

SEQ ID NO: 1672211 - DNA, 15 bp, Homo sapiens
gtacaacatcacaac

SEQ ID NO: 1672212 - DNA, 15 bp, Homo sapiens
tacaacatcacaacc

SEQ ID NO: 1672213 - DNA, 15 bp, Homo sapiens
acaacatcacaacca

SEQ ID NO: 1672214 - DNA, 15 bp, Homo sapiens
caacatcacaaccac

SEQ ID NO: 1672215 - DNA, 15 bp, Homo sapiens
aacatcacaaccacc

SEQ ID NO: 1672216 - DNA, 15 bp, Homo sapiens
acatcacaaccacca

SEQ ID NO: 1672217 - DNA, 15 bp, Homo sapiens
catcacaaccaccat

SEQ ID NO: 1672218 - DNA, 15 bp, Homo sapiens
atcacaaccaccatc

SEQ ID NO: 1672219 - DNA, 15 bp, Homo sapiens
tcacaaccaccatct

SEQ ID NO: 1672220 - DNA, 15 bp, Homo sapiens
cacaaccaccatctc

SEQ ID NO: 1672221 - DNA, 15 bp, Homo sapiens
acaaccaccatctcc

SEQ ID NO: 1672222 - DNA, 15 bp, Homo sapiens
caaccaccatctcca

SEQ ID NO: 1672223 - DNA, 15 bp, Homo sapiens
aaccaccatctccag

SEQ ID NO: 1672224 - DNA, 15 bp, Homo sapiens
accaccatctccaga

SEQ ID NO: 1672225 - DNA, 15 bp, Homo sapiens
ccaccatctccagaa

SEQ ID NO: 1672226 - DNA, 15 bp, Homo sapiens
caccatctccagaac

SEQ ID NO: 1672227 - DNA, 15 bp, Homo sapiens
accatctccagaact

SEQ ID NO: 1672228 - DNA, 15 bp, Homo sapiens
ccatctccagaactt

SEQ ID NO: 1672229 - DNA, 15 bp, Homo sapiens
catctccagaacttt

SEQ ID NO: 1672230 - DNA, 15 bp, Homo sapiens
atctccagaactttt

SEQ ID NO: 1672231 - DNA, 15 bp, Homo sapiens
tctccagaacttttt

SEQ ID NO: 1672232 - DNA, 15 bp, Homo sapiens
ctccagaactttttt

SEQ ID NO: 1672233 - DNA, 15 bp, Homo sapiens
tttttttttttttat

SEQ ID NO: 1672234 - DNA, 15 bp, Homo sapiens
ttttttttttttatt

SEQ ID NO: 1672235 - DNA, 15 bp, Homo sapiens
tttttttttttattc

SEQ ID NO: 1672236 - DNA, 15 bp, Homo sapiens
ttttttttttattct

SEQ ID NO: 1672237 - DNA, 15 bp, Homo sapiens
tttttttttattctt

SEQ ID NO: 1672238 - DNA, 15 bp, Homo sapiens
ttttttttattcttt

SEQ ID NO: 1672239 - DNA, 15 bp, Homo sapiens
tttttttattctttt

SEQ ID NO: 1672240 - DNA, 15 bp, Homo sapiens
ttttttattcttttt

SEQ ID NO: 1672241 - DNA, 15 bp, Homo sapiens
tttttattctttttg

SEQ ID NO: 1672242 - DNA, 15 bp, Homo sapiens
ttttattctttttga

SEQ ID NO: 1672243 - DNA, 15 bp, Homo sapiens
tttattctttttgag

SEQ ID NO: 1672244 - DNA, 15 bp, Homo sapiens
ttattctttttgaga

SEQ ID NO: 1672245 - DNA, 15 bp, Homo sapiens
tattctttttgagac

SEQ ID NO: 1672246 - DNA, 15 bp, Homo sapiens
attctttttgagaca

SEQ ID NO: 1672247 - DNA, 15 bp, Homo sapiens
ttctttttgagacag

SEQ ID NO: 1672248 - DNA, 15 bp, Homo sapiens
tctttttgagacaga

SEQ ID NO: 1672249 - DNA, 15 bp, Homo sapiens
ctttttgagacagag

SEQ ID NO: 1672250 - DNA, 15 bp, Homo sapiens
acagagtctcactcg

SEQ ID NO: 1672251 - DNA, 15 bp, Homo sapiens
cagagtctcactcgt

SEQ ID NO: 1672252 - DNA, 15 bp, Homo sapiens
agagtctcactcgtc

SEQ ID NO: 1672253 - DNA, 15 bp, Homo sapiens
gagtctcactcgtcg

SEQ ID NO: 1672254 - DNA, 15 bp, Homo sapiens
agtctcactcgtcgc

SEQ ID NO: 1672255 - DNA, 15 bp, Homo sapiens
gtctcactcgtcgca

SEQ ID NO: 1672256 - DNA, 15 bp, Homo sapiens
tctcactcgtcgcac

SEQ ID NO: 1672257 - DNA, 15 bp, Homo sapiens
ctcactcgtcgcacg

SEQ ID NO: 1672258 - DNA, 15 bp, Homo sapiens
tcactcgtcgcacgg

SEQ ID NO: 1672259 - DNA, 15 bp, Homo sapiens
cactcgtcgcacggg

SEQ ID NO: 1672260 - DNA, 15 bp, Homo sapiens
ggttgtcacaagtca

SEQ ID NO: 1672261 - DNA, 15 bp, Homo sapiens
gttgtcacaagtcaa

SEQ ID NO: 1672262 - DNA, 15 bp, Homo sapiens
ttgtcacaagtcaat

SEQ ID NO: 1672263 - DNA, 15 bp, Homo sapiens
tgtcacaagtcaatg

SEQ ID NO: 1672264 - DNA, 15 bp, Homo sapiens
gtcacaagtcaatgg

SEQ ID NO: 1672265 - DNA, 15 bp, Homo sapiens
tcacaagtcaatggg

SEQ ID NO: 1672266 - DNA, 15 bp, Homo sapiens
cacaagtcaatgggg

SEQ ID NO: 1672267 - DNA, 15 bp, Homo sapiens
acaagtcaatgggga

SEQ ID NO: 1672268 - DNA, 15 bp, Homo sapiens
caagtcaatggggaa

SEQ ID NO: 1672269 - DNA, 15 bp, Homo sapiens
aagtcaatggggaag

SEQ ID NO: 1672270 - DNA, 15 bp, Homo sapiens
agtcaatggggaaga

SEQ ID NO: 1672271 - DNA, 15 bp, Homo sapiens
gtcaatggggaagac

SEQ ID NO: 1672272 - DNA, 15 bp, Homo sapiens
tcaatggggaagact

SEQ ID NO: 1672273 - DNA, 15 bp, Homo sapiens
caatggggaagactg

SEQ ID NO: 1672274 - DNA, 15 bp, Homo sapiens
aatggggaagactgt

SEQ ID NO: 1672275 - DNA, 15 bp, Homo sapiens
atggggaagactgtt

SEQ ID NO: 1672276 - DNA, 15 bp, Homo sapiens
tggggaagactgttg

SEQ ID NO: 1672277 - DNA, 15 bp, Homo sapiens
ggggaagactgttgg

SEQ ID NO: 1672278 - DNA, 15 bp, Homo sapiens
gggaagactgttggc

SEQ ID NO: 1672279 - DNA, 15 bp, Homo sapiens
ggaagactgttggca

SEQ ID NO: 1672280 - DNA, 15 bp, Homo sapiens
gaagactgttggcat

SEQ ID NO: 1672281 - DNA, 15 bp, Homo sapiens
aagactgttggcatt

SEQ ID NO: 1672282 - DNA, 15 bp, Homo sapiens
agactgttggcattt

SEQ ID NO: 1672283 - DNA, 15 bp, Homo sapiens
gactgttggcattta

SEQ ID NO: 1672284 - DNA, 15 bp, Homo sapiens
actgttggcatttag

SEQ ID NO: 1672285 - DNA, 15 bp, Homo sapiens
ctgttggcatttagt

SEQ ID NO: 1672286 - DNA, 15 bp, Homo sapiens
tgttggcatttagtg

SEQ ID NO: 1672287 - DNA, 15 bp, Homo sapiens
gttggcatttagtgg

SEQ ID NO: 1672288 - DNA, 15 bp, Homo sapiens
ttggcatttagtggg

SEQ ID NO: 1672289 - DNA, 15 bp, Homo sapiens
tggcatttagtgggt

SEQ ID NO: 1672290 - DNA, 15 bp, Homo sapiens
ggcatttagtgggta

SEQ ID NO: 1672291 - DNA, 15 bp, Homo sapiens
gcatttagtgggtag

SEQ ID NO: 1672292 - DNA, 15 bp, Homo sapiens
catttagtgggtaga

SEQ ID NO: 1672293 - DNA, 15 bp, Homo sapiens
atttagtgggtagag

SEQ ID NO: 1672294 - DNA, 15 bp, Homo sapiens
tttagtgggtagagg

SEQ ID NO: 1672295 - DNA, 15 bp, Homo sapiens
ttagtgggtagaggc

SEQ ID NO: 1672296 - DNA, 15 bp, Homo sapiens
tagtgggtagaggct

SEQ ID NO: 1672297 - DNA, 15 bp, Homo sapiens
agtgggtagaggctg

SEQ ID NO: 1672298 - DNA, 15 bp, Homo sapiens
gtgggtagaggctgg

SEQ ID NO: 1672299 - DNA, 15 bp, Homo sapiens
tgggtagaggctggt

SEQ ID NO: 1672300 - DNA, 15 bp, Homo sapiens
gggtagaggctggtg

SEQ ID NO: 1672301 - DNA, 15 bp, Homo sapiens
ggtagaggctggtga

SEQ ID NO: 1672302 - DNA, 15 bp, Homo sapiens
gtagaggctggtgac

SEQ ID NO: 1672303 - DNA, 15 bp, Homo sapiens
tagaggctggtgacg

SEQ ID NO: 1672304 - DNA, 15 bp, Homo sapiens
agaggctggtgacgc

SEQ ID NO: 1672305 - DNA, 15 bp, Homo sapiens
gaggctggtgacgct

SEQ ID NO: 1672306 - DNA, 15 bp, Homo sapiens
aggctggtgacgctg

SEQ ID NO: 1672307 - DNA, 15 bp, Homo sapiens
ggctggtgacgctgc

SEQ ID NO: 1672308 - DNA, 15 bp, Homo sapiens
gctggtgacgctgct

SEQ ID NO: 1672309 - DNA, 15 bp, Homo sapiens
ctggtgacgctgctg

SEQ ID NO: 1672310 - DNA, 15 bp, Homo sapiens
tggtgacgctgctga

SEQ ID NO: 1672311 - DNA, 15 bp, Homo sapiens
ggtgacgctgctgaa

SEQ ID NO: 1672312 - DNA, 15 bp, Homo sapiens
gtgacgctgctgaac

SEQ ID NO: 1672313 - DNA, 15 bp, Homo sapiens
tgacgctgctgaaca

SEQ ID NO: 1672314 - DNA, 15 bp, Homo sapiens
gacgctgctgaacac

SEQ ID NO: 1672315 - DNA, 15 bp, Homo sapiens
acgctgctgaacacc

SEQ ID NO: 1672316 - DNA, 15 bp, Homo sapiens
cgctgctgaacaccc

SEQ ID NO: 1672317 - DNA, 15 bp, Homo sapiens
gctgctgaacaccca

SEQ ID NO: 1672318 - DNA, 15 bp, Homo sapiens
ctgctgaacacccag

SEQ ID NO: 1672319 - DNA, 15 bp, Homo sapiens
tgctgaacacccaga

SEQ ID NO: 1672320 - DNA, 15 bp, Homo sapiens
gctgaacacccagaa

SEQ ID NO: 1672321 - DNA, 15 bp, Homo sapiens
ctgaacacccagaac

SEQ ID NO: 1672322 - DNA, 15 bp, Homo sapiens
tgaacacccagaaca

SEQ ID NO: 1672323 - DNA, 15 bp, Homo sapiens
gaacacccagaacag

SEQ ID NO: 1672324 - DNA, 15 bp, Homo sapiens
aacacccagaacagg

SEQ ID NO: 1672325 - DNA, 15 bp, Homo sapiens
acacccagaacaggg

SEQ ID NO: 1672326 - DNA, 15 bp, Homo sapiens
cacccagaacaggga

SEQ ID NO: 1672327 - DNA, 15 bp, Homo sapiens
acccagaacagggaa

SEQ ID NO: 1672328 - DNA, 15 bp, Homo sapiens
cccagaacagggaag

SEQ ID NO: 1672329 - DNA, 15 bp, Homo sapiens
ccagaacagggaagt

SEQ ID NO: 1672330 - DNA, 15 bp, Homo sapiens
cagaacagggaagta

SEQ ID NO: 1672331 - DNA, 15 bp, Homo sapiens
agaacagggaagtag

SEQ ID NO: 1672332 - DNA, 15 bp, Homo sapiens
gaacagggaagtagc

SEQ ID NO: 1672333 - DNA, 15 bp, Homo sapiens
aacagggaagtagca

SEQ ID NO: 1672334 - DNA, 15 bp, Homo sapiens
acagggaagtagcag

SEQ ID NO: 1672335 - DNA, 15 bp, Homo sapiens
cagggaagtagcagg

SEQ ID NO: 1672336 - DNA, 15 bp, Homo sapiens
agggaagtagcaggc

SEQ ID NO: 1672337 - DNA, 15 bp, Homo sapiens
gggaagtagcaggcc

SEQ ID NO: 1672338 - DNA, 15 bp, Homo sapiens
ggaagtagcaggccc

SEQ ID NO: 1672339 - DNA, 15 bp, Homo sapiens
gaagtagcaggccct

SEQ ID NO: 1672340 - DNA, 15 bp, Homo sapiens
aagtagcaggcccta

SEQ ID NO: 1672341 - DNA, 15 bp, Homo sapiens
agtagcaggccctag

SEQ ID NO: 1672342 - DNA, 15 bp, Homo sapiens
gtagcaggccctaga

SEQ ID NO: 1672343 - DNA, 15 bp, Homo sapiens
tagcaggccctagat

SEQ ID NO: 1672344 - DNA, 15 bp, Homo sapiens
agcaggccctagata

SEQ ID NO: 1672345 - DNA, 15 bp, Homo sapiens
gcaggccctagatag

SEQ ID NO: 1672346 - DNA, 15 bp, Homo sapiens
caggccctagataga

SEQ ID NO: 1672347 - DNA, 15 bp, Homo sapiens
aggccctagatagag

SEQ ID NO: 1672348 - DNA, 15 bp, Homo sapiens
ggccctagatagagc

SEQ ID NO: 1672349 - DNA, 15 bp, Homo sapiens
gccctagatagagcc

SEQ ID NO: 1672350 - DNA, 15 bp, Homo sapiens
ccctagatagagcca

SEQ ID NO: 1672351 - DNA, 15 bp, Homo sapiens
cctagatagagccat

SEQ ID NO: 1672352 - DNA, 15 bp, Homo sapiens
ctagatagagccatc

SEQ ID NO: 1672353 - DNA, 15 bp, Homo sapiens
tagatagagccatcg

SEQ ID NO: 1672354 - DNA, 15 bp, Homo sapiens
agatagagccatcgt

SEQ ID NO: 1672355 - DNA, 15 bp, Homo sapiens
gatagagccatcgtg

SEQ ID NO: 1672356 - DNA, 15 bp, Homo sapiens
atagagccatcgtgg

SEQ ID NO: 1672357 - DNA, 15 bp, Homo sapiens
tagagccatcgtggg

SEQ ID NO: 1672358 - DNA, 15 bp, Homo sapiens
agagccatcgtgggg

SEQ ID NO: 1672359 - DNA, 15 bp, Homo sapiens
gagccatcgtgggga

SEQ ID NO: 1672360 - DNA, 15 bp, Homo sapiens
agccatcgtggggaa

SEQ ID NO: 1672361 - DNA, 15 bp, Homo sapiens
gccatcgtggggaaa

SEQ ID NO: 1672362 - DNA, 15 bp, Homo sapiens
ccatcgtggggaaac

SEQ ID NO: 1672363 - DNA, 15 bp, Homo sapiens
catcgtggggaaacc

SEQ ID NO: 1672364 - DNA, 15 bp, Homo sapiens
atcgtggggaaaccc

SEQ ID NO: 1672365 - DNA, 15 bp, Homo sapiens
tcgtggggaaaccct

SEQ ID NO: 1672366 - DNA, 15 bp, Homo sapiens
cgtggggaaaccctg

SEQ ID NO: 1672367 - DNA, 15 bp, Homo sapiens
gtggggaaaccctgc

SEQ ID NO: 1672368 - DNA, 15 bp, Homo sapiens
tggggaaaccctgct

SEQ ID NO: 1672369 - DNA, 15 bp, Homo sapiens
ggggaaaccctgctc

SEQ ID NO: 1672370 - DNA, 15 bp, Homo sapiens
gggaaaccctgctct

SEQ ID NO: 1672371 - DNA, 15 bp, Homo sapiens
ggaaaccctgctcta

SEQ ID NO: 1672372 - DNA, 15 bp, Homo sapiens
gaaaccctgctctaa

SEQ ID NO: 1672373 - DNA, 15 bp, Homo sapiens
aaaccctgctctaag

SEQ ID NO: 1672374 - DNA, 15 bp, Homo sapiens
aaccctgctctaagg

SEQ ID NO: 1672375 - DNA, 15 bp, Homo sapiens
accctgctctaagga

SEQ ID NO: 1672376 - DNA, 15 bp, Homo sapiens
ccctgctctaaggaa

SEQ ID NO: 1672377 - DNA, 15 bp, Homo sapiens
cctgctctaaggaaa

SEQ ID NO: 1672378 - DNA, 15 bp, Homo sapiens
ctgctctaaggaaat

SEQ ID NO: 1672379 - DNA, 15 bp, Homo sapiens
tgctctaaggaaatg

SEQ ID NO: 1672380 - DNA, 15 bp, Homo sapiens
gctctaaggaaatgg

SEQ ID NO: 1672381 - DNA, 15 bp, Homo sapiens
ctctaaggaaatggc

SEQ ID NO: 1672382 - DNA, 15 bp, Homo sapiens
tctaaggaaatggcg

SEQ ID NO: 1672383 - DNA, 15 bp, Homo sapiens
ctaaggaaatggcgc

SEQ ID NO: 1672384 - DNA, 15 bp, Homo sapiens
taaggaaatggcgct

SEQ ID NO: 1672385 - DNA, 15 bp, Homo sapiens
aaggaaatggcgcta

SEQ ID NO: 1672386 - DNA, 15 bp, Homo sapiens
aggaaatggcgctat

SEQ ID NO: 1672387 - DNA, 15 bp, Homo sapiens
ggaaatggcgctatt

SEQ ID NO: 1672388 - DNA, 15 bp, Homo sapiens
gaaatggcgctattt

SEQ ID NO: 1672389 - DNA, 15 bp, Homo sapiens
aaatggcgctatttt

SEQ ID NO: 1672390 - DNA, 15 bp, Homo sapiens
aatggcgctatttta

SEQ ID NO: 1672391 - DNA, 15 bp, Homo sapiens
atggcgctattttat

SEQ ID NO: 1672392 - DNA, 15 bp, Homo sapiens
tggcgctattttata

SEQ ID NO: 1672393 - DNA, 15 bp, Homo sapiens
ggcgctattttataa

SEQ ID NO: 1672394 - DNA, 15 bp, Homo sapiens
gcgctattttataac

SEQ ID NO: 1672395 - DNA, 15 bp, Homo sapiens
cgctattttataacc

SEQ ID NO: 1672396 - DNA, 15 bp, Homo sapiens
gctattttataaccc

SEQ ID NO: 1672397 - DNA, 15 bp, Homo sapiens
ctattttataacccc

SEQ ID NO: 1672398 - DNA, 15 bp, Homo sapiens
tattttataacccca

SEQ ID NO: 1672399 - DNA, 15 bp, Homo sapiens
attttataaccccac

SEQ ID NO: 1672400 - DNA, 15 bp, Homo sapiens
ttttataaccccacg

SEQ ID NO: 1672401 - DNA, 15 bp, Homo sapiens
tttataaccccacgt

SEQ ID NO: 1672402 - DNA, 15 bp, Homo sapiens
ttataaccccacgtt

SEQ ID NO: 1672403 - DNA, 15 bp, Homo sapiens
tataaccccacgttc

SEQ ID NO: 1672404 - DNA, 15 bp, Homo sapiens
ataaccccacgttcc

SEQ ID NO: 1672405 - DNA, 15 bp, Homo sapiens
taaccccacgttcct

SEQ ID NO: 1672406 - DNA, 15 bp, Homo sapiens
aaccccacgttcctg

SEQ ID NO: 1672407 - DNA, 15 bp, Homo sapiens
accccacgttcctgg

SEQ ID NO: 1672408 - DNA, 15 bp, Homo sapiens
ccccacgttcctggc

SEQ ID NO: 1672409 - DNA, 15 bp, Homo sapiens
cccacgttcctggca

SEQ ID NO: 1672410 - DNA, 15 bp, Homo sapiens
ccacgttcctggcat

SEQ ID NO: 1672411 - DNA, 15 bp, Homo sapiens
cacgttcctggcatg

SEQ ID NO: 1672412 - DNA, 15 bp, Homo sapiens
acgttcctggcatga

SEQ ID NO: 1672413 - DNA, 15 bp, Homo sapiens
cgttcctggcatgat

SEQ ID NO: 1672414 - DNA, 15 bp, Homo sapiens
gttcctggcatgatt

SEQ ID NO: 1672415 - DNA, 15 bp, Homo sapiens
ttcctggcatgatta

SEQ ID NO: 1672416 - DNA, 15 bp, Homo sapiens
tcctggcatgattac

SEQ ID NO: 1672417 - DNA, 15 bp, Homo sapiens
cctggcatgattacc

SEQ ID NO: 1672418 - DNA, 15 bp, Homo sapiens
ctggcatgattacca

SEQ ID NO: 1672419 - DNA, 15 bp, Homo sapiens
tggcatgattaccaa

SEQ ID NO: 1672420 - DNA, 15 bp, Homo sapiens
ggcatgattaccaac

SEQ ID NO: 1672421 - DNA, 15 bp, Homo sapiens
gcatgattaccaaca

SEQ ID NO: 1672422 - DNA, 15 bp, Homo sapiens
catgattaccaacag

SEQ ID NO: 1672423 - DNA, 15 bp, Homo sapiens
atgattaccaacagc

SEQ ID NO: 1672424 - DNA, 15 bp, Homo sapiens
tgattaccaacagcc

SEQ ID NO: 1672425 - DNA, 15 bp, Homo sapiens
gattaccaacagcca

SEQ ID NO: 1672426 - DNA, 15 bp, Homo sapiens
attaccaacagccaa

SEQ ID NO: 1672427 - DNA, 15 bp, Homo sapiens
ttaccaacagccaaa

SEQ ID NO: 1672428 - DNA, 15 bp, Homo sapiens
taccaacagccaaaa

SEQ ID NO: 1672429 - DNA, 15 bp, Homo sapiens
accaacagccaaaag

SEQ ID NO: 1672430 - DNA, 15 bp, Homo sapiens
ccaacagccaaaagt

SEQ ID NO: 1672431 - DNA, 15 bp, Homo sapiens
caacagccaaaagtg

SEQ ID NO: 1672432 - DNA, 15 bp, Homo sapiens
aacagccaaaagtgg

SEQ ID NO: 1672433 - DNA, 15 bp, Homo sapiens
acagccaaaagtgga

SEQ ID NO: 1672434 - DNA, 15 bp, Homo sapiens
cagccaaaagtggag

SEQ ID NO: 1672435 - DNA, 15 bp, Homo sapiens
agccaaaagtggagt

SEQ ID NO: 1672436 - DNA, 15 bp, Homo sapiens
gccaaaagtggagtc

SEQ ID NO: 1672437 - DNA, 15 bp, Homo sapiens
ccaaaagtggagtcc

SEQ ID NO: 1672438 - DNA, 15 bp, Homo sapiens
caaaagtggagtccc

SEQ ID NO: 1672439 - DNA, 15 bp, Homo sapiens
aaaagtggagtcccc

SEQ ID NO: 1672440 - DNA, 15 bp, Homo sapiens
aaagtggagtccccc

SEQ ID NO: 1672441 - DNA, 15 bp, Homo sapiens
aagtggagtcccccc

SEQ ID NO: 1672442 - DNA, 15 bp, Homo sapiens
agtggagtcccccca

SEQ ID NO: 1672443 - DNA, 15 bp, Homo sapiens
gtggagtccccccaa

SEQ ID NO: 1672444 - DNA, 15 bp, Homo sapiens
tggagtccccccaag

SEQ ID NO: 1672445 - DNA, 15 bp, Homo sapiens
ggagtccccccaagt

SEQ ID NO: 1672446 - DNA, 15 bp, Homo sapiens
gagtccccccaagtg

SEQ ID NO: 1672447 - DNA, 15 bp, Homo sapiens
agtccccccaagtgt

SEQ ID NO: 1672448 - DNA, 15 bp, Homo sapiens
gtccccccaagtgtg

SEQ ID NO: 1672449 - DNA, 15 bp, Homo sapiens
tccccccaagtgtgt

SEQ ID NO: 1672450 - DNA, 15 bp, Homo sapiens
ccccccaagtgtgtt

SEQ ID NO: 1672451 - DNA, 15 bp, Homo sapiens
cccccaagtgtgttc

SEQ ID NO: 1672452 - DNA, 15 bp, Homo sapiens
ccccaagtgtgttcg

SEQ ID NO: 1672453 - DNA, 15 bp, Homo sapiens
cccaagtgtgttcgt

SEQ ID NO: 1672454 - DNA, 15 bp, Homo sapiens
ccaagtgtgttcgtc

SEQ ID NO: 1672455 - DNA, 15 bp, Homo sapiens
caagtgtgttcgtcc

SEQ ID NO: 1672456 - DNA, 15 bp, Homo sapiens
aagtgtgttcgtcca

SEQ ID NO: 1672457 - DNA, 15 bp, Homo sapiens
agtgtgttcgtccat

SEQ ID NO: 1672458 - DNA, 15 bp, Homo sapiens
gtgtgttcgtccatt

SEQ ID NO: 1672459 - DNA, 15 bp, Homo sapiens
tgtgttcgtccattt

SEQ ID NO: 1672460 - DNA, 15 bp, Homo sapiens
gtgttcgtccatttg

SEQ ID NO: 1672461 - DNA, 15 bp, Homo sapiens
tgttcgtccatttgc

SEQ ID NO: 1672462 - DNA, 15 bp, Homo sapiens
gttcgtccatttgca

SEQ ID NO: 1672463 - DNA, 15 bp, Homo sapiens
ttcgtccatttgcat

SEQ ID NO: 1672464 - DNA, 15 bp, Homo sapiens
tcgtccatttgcatt

SEQ ID NO: 1672465 - DNA, 15 bp, Homo sapiens
cgtccatttgcattg

SEQ ID NO: 1672466 - DNA, 15 bp, Homo sapiens
gtccatttgcattgc

SEQ ID NO: 1672467 - DNA, 15 bp, Homo sapiens
tccatttgcattgca

SEQ ID NO: 1672468 - DNA, 15 bp, Homo sapiens
ccatttgcattgcag

SEQ ID NO: 1672469 - DNA, 15 bp, Homo sapiens
catttgcattgcagt

SEQ ID NO: 1672470 - DNA, 15 bp, Homo sapiens
atttgcattgcagta

SEQ ID NO: 1672471 - DNA, 15 bp, Homo sapiens
tttgcattgcagtaa

SEQ ID NO: 1672472 - DNA, 15 bp, Homo sapiens
ttgcattgcagtaaa

SEQ ID NO: 1672473 - DNA, 15 bp, Homo sapiens
tgcattgcagtaaag

SEQ ID NO: 1672474 - DNA, 15 bp, Homo sapiens
gcattgcagtaaagg

SEQ ID NO: 1672475 - DNA, 15 bp, Homo sapiens
cattgcagtaaagga

SEQ ID NO: 1672476 - DNA, 15 bp, Homo sapiens
attgcagtaaaggaa

SEQ ID NO: 1672477 - DNA, 15 bp, Homo sapiens
ttgcagtaaaggaat

SEQ ID NO: 1672478 - DNA, 15 bp, Homo sapiens
tgcagtaaaggaata

SEQ ID NO: 1672479 - DNA, 15 bp, Homo sapiens
gcagtaaaggaatag

SEQ ID NO: 1672480 - DNA, 15 bp, Homo sapiens
cagtaaaggaatagc

SEQ ID NO: 1672481 - DNA, 15 bp, Homo sapiens
agtaaaggaatagct

SEQ ID NO: 1672482 - DNA, 15 bp, Homo sapiens
gtaaaggaatagctg

SEQ ID NO: 1672483 - DNA, 15 bp, Homo sapiens
taaaggaatagctga

SEQ ID NO: 1672484 - DNA, 15 bp, Homo sapiens
aaaggaatagctgag

SEQ ID NO: 1672485 - DNA, 15 bp, Homo sapiens
aaggaatagctgagg

SEQ ID NO: 1672486 - DNA, 15 bp, Homo sapiens
aggaatagctgaggc

SEQ ID NO: 1672487 - DNA, 15 bp, Homo sapiens
ggaatagctgaggcc

SEQ ID NO: 1672488 - DNA, 15 bp, Homo sapiens
gaatagctgaggccg

SEQ ID NO: 1672489 - DNA, 15 bp, Homo sapiens
aatagctgaggccgg

SEQ ID NO: 1672490 - DNA, 15 bp, Homo sapiens
atagctgaggccggg

SEQ ID NO: 1672491 - DNA, 15 bp, Homo sapiens
tagctgaggccgggt

SEQ ID NO: 1672492 - DNA, 15 bp, Homo sapiens
agctgaggccgggta

SEQ ID NO: 1672493 - DNA, 15 bp, Homo sapiens
gctgaggccgggtaa

SEQ ID NO: 1672494 - DNA, 15 bp, Homo sapiens
ctgaggccgggtaat

SEQ ID NO: 1672495 - DNA, 15 bp, Homo sapiens
tgaggccgggtaatt

SEQ ID NO: 1672496 - DNA, 15 bp, Homo sapiens
gaggccgggtaattt

SEQ ID NO: 1672497 - DNA, 15 bp, Homo sapiens
aggccgggtaattta

SEQ ID NO: 1672498 - DNA, 15 bp, Homo sapiens
ggccgggtaatttat

SEQ ID NO: 1672499 - DNA, 15 bp, Homo sapiens
gccgggtaatttata

SEQ ID NO: 1672500 - DNA, 15 bp, Homo sapiens
ccgggtaatttataa

SEQ ID NO: 1672501 - DNA, 15 bp, Homo sapiens
cgggtaatttataaa

SEQ ID NO: 1672502 - DNA, 15 bp, Homo sapiens
gggtaatttataaag

SEQ ID NO: 1672503 - DNA, 15 bp, Homo sapiens
tttataaagaaaaga

SEQ ID NO: 1672504 - DNA, 15 bp, Homo sapiens
ttataaagaaaagag

SEQ ID NO: 1672505 - DNA, 15 bp, Homo sapiens
tataaagaaaagaga

SEQ ID NO: 1672506 - DNA, 15 bp, Homo sapiens
ataaagaaaagagat

SEQ ID NO: 1672507 - DNA, 15 bp, Homo sapiens
taaagaaaagagatt

SEQ ID NO: 1672508 - DNA, 15 bp, Homo sapiens
aaagaaaagagattt

SEQ ID NO: 1672509 - DNA, 15 bp, Homo sapiens
aagaaaagagattta

SEQ ID NO: 1672510 - DNA, 15 bp, Homo sapiens
agaaaagagatttaa

SEQ ID NO: 1672511 - DNA, 15 bp, Homo sapiens
gaaaagagatttaaa

SEQ ID NO: 1672512 - DNA, 15 bp, Homo sapiens
aaaagagatttaaac

SEQ ID NO: 1672513 - DNA, 15 bp, Homo sapiens
aaagagatttaaact

SEQ ID NO: 1672514 - DNA, 15 bp, Homo sapiens
aagagatttaaactg

SEQ ID NO: 1672515 - DNA, 15 bp, Homo sapiens
agagatttaaactgg

SEQ ID NO: 1672516 - DNA, 15 bp, Homo sapiens
gagatttaaactggg

SEQ ID NO: 1672517 - DNA, 15 bp, Homo sapiens
agatttaaactgggt

SEQ ID NO: 1672518 - DNA, 15 bp, Homo sapiens
gatttaaactgggta

SEQ ID NO: 1672519 - DNA, 15 bp, Homo sapiens
atttaaactgggtat

SEQ ID NO: 1672520 - DNA, 15 bp, Homo sapiens
tttaaactgggtatg

SEQ ID NO: 1672521 - DNA, 15 bp, Homo sapiens
ttaaactgggtatgg

SEQ ID NO: 1672522 - DNA, 15 bp, Homo sapiens
taaactgggtatggc

SEQ ID NO: 1672523 - DNA, 15 bp, Homo sapiens
aaactgggtatggca

SEQ ID NO: 1672524 - DNA, 15 bp, Homo sapiens
aactgggtatggcag

SEQ ID NO: 1672525 - DNA, 15 bp, Homo sapiens
actgggtatggcagt

SEQ ID NO: 1672526 - DNA, 15 bp, Homo sapiens
ctgggtatggcagtt

SEQ ID NO: 1672527 - DNA, 15 bp, Homo sapiens
tgggtatggcagttt

SEQ ID NO: 1672528 - DNA, 15 bp, Homo sapiens
gggtatggcagttta

SEQ ID NO: 1672529 - DNA, 15 bp, Homo sapiens
ggtatggcagtttat

SEQ ID NO: 1672530 - DNA, 15 bp, Homo sapiens
gtatggcagtttatg

SEQ ID NO: 1672531 - DNA, 15 bp, Homo sapiens
tatggcagtttatgc

SEQ ID NO: 1672532 - DNA, 15 bp, Homo sapiens
atggcagtttatgcc

SEQ ID NO: 1672533 - DNA, 15 bp, Homo sapiens
tggcagtttatgcct

SEQ ID NO: 1672534 - DNA, 15 bp, Homo sapiens
ggcagtttatgccta

SEQ ID NO: 1672535 - DNA, 15 bp, Homo sapiens
gcagtttatgcctat

SEQ ID NO: 1672536 - DNA, 15 bp, Homo sapiens
cagtttatgcctata

SEQ ID NO: 1672537 - DNA, 15 bp, Homo sapiens
agtttatgcctataa

SEQ ID NO: 1672538 - DNA, 15 bp, Homo sapiens
gtttatgcctataat

SEQ ID NO: 1672539 - DNA, 15 bp, Homo sapiens
tttatgcctataatc

SEQ ID NO: 1672540 - DNA, 15 bp, Homo sapiens
ttatgcctataatcc

SEQ ID NO: 1672541 - DNA, 15 bp, Homo sapiens
tatgcctataatccc

SEQ ID NO: 1672542 - DNA, 15 bp, Homo sapiens
cctataatcccagaa

SEQ ID NO: 1672543 - DNA, 15 bp, Homo sapiens
ctataatcccagaac

SEQ ID NO: 1672544 - DNA, 15 bp, Homo sapiens
tataatcccagaact

SEQ ID NO: 1672545 - DNA, 15 bp, Homo sapiens
ataatcccagaactt

SEQ ID NO: 1672546 - DNA, 15 bp, Homo sapiens
cagaactttgggagg

SEQ ID NO: 1672547 - DNA, 15 bp, Homo sapiens
agaactttgggaggc

SEQ ID NO: 1672548 - DNA, 15 bp, Homo sapiens
gaactttgggaggct

SEQ ID NO: 1672549 - DNA, 15 bp, Homo sapiens
aactttgggaggctg

SEQ ID NO: 1672550 - DNA, 15 bp, Homo sapiens
gaggatcgcttgagt

SEQ ID NO: 1672551 - DNA, 15 bp, Homo sapiens
aggatcgcttgagtc

SEQ ID NO: 1672552 - DNA, 15 bp, Homo sapiens
ggatcgcttgagtcc

SEQ ID NO: 1672553 - DNA, 15 bp, Homo sapiens
gatcgcttgagtcca

SEQ ID NO: 1672554 - DNA, 15 bp, Homo sapiens
atcgcttgagtccag

SEQ ID NO: 1672555 - DNA, 15 bp, Homo sapiens
tcgcttgagtccagg

SEQ ID NO: 1672556 - DNA, 15 bp, Homo sapiens
cgcttgagtccagga

SEQ ID NO: 1672557 - DNA, 15 bp, Homo sapiens
ttgagtccaggagtg

SEQ ID NO: 1672558 - DNA, 15 bp, Homo sapiens
tgagtccaggagtgt

SEQ ID NO: 1672559 - DNA, 15 bp, Homo sapiens
gagtccaggagtgtg

SEQ ID NO: 1672560 - DNA, 15 bp, Homo sapiens
agtccaggagtgtga

SEQ ID NO: 1672561 - DNA, 15 bp, Homo sapiens
gtccaggagtgtgag

SEQ ID NO: 1672562 - DNA, 15 bp, Homo sapiens
tccaggagtgtgaga

SEQ ID NO: 1672563 - DNA, 15 bp, Homo sapiens
ccaggagtgtgagac

SEQ ID NO: 1672564 - DNA, 15 bp, Homo sapiens
aggagtgtgagaccg

SEQ ID NO: 1672565 - DNA, 15 bp, Homo sapiens
ggagtgtgagaccga

SEQ ID NO: 1672566 - DNA, 15 bp, Homo sapiens
gagtgtgagaccgag

SEQ ID NO: 1672567 - DNA, 15 bp, Homo sapiens
agtgtgagaccgaga

SEQ ID NO: 1672568 - DNA, 15 bp, Homo sapiens
gtgtgagaccgagac

SEQ ID NO: 1672569 - DNA, 15 bp, Homo sapiens
tgtgagaccgagacc

SEQ ID NO: 1672570 - DNA, 15 bp, Homo sapiens
gtgagaccgagacca

SEQ ID NO: 1672571 - DNA, 15 bp, Homo sapiens
tgagaccgagaccag

SEQ ID NO: 1672572 - DNA, 15 bp, Homo sapiens
gagaccgagaccagc

SEQ ID NO: 1672573 - DNA, 15 bp, Homo sapiens
agaccgagaccagcc

SEQ ID NO: 1672574 - DNA, 15 bp, Homo sapiens
gaccgagaccagcct

SEQ ID NO: 1672575 - DNA, 15 bp, Homo sapiens
accgagaccagcctg

SEQ ID NO: 1672576 - DNA, 15 bp, Homo sapiens
ccgagaccagcctgg

SEQ ID NO: 1672577 - DNA, 15 bp, Homo sapiens
cctggccaacatgac

SEQ ID NO: 1672578 - DNA, 15 bp, Homo sapiens
ctggccaacatgacg

SEQ ID NO: 1672579 - DNA, 15 bp, Homo sapiens
tggccaacatgacga

SEQ ID NO: 1672580 - DNA, 15 bp, Homo sapiens
ggccaacatgacgaa

SEQ ID NO: 1672581 - DNA, 15 bp, Homo sapiens
gccaacatgacgaaa

SEQ ID NO: 1672582 - DNA, 15 bp, Homo sapiens
ccaacatgacgaaac

SEQ ID NO: 1672583 - DNA, 15 bp, Homo sapiens
caacatgacgaaact

SEQ ID NO: 1672584 - DNA, 15 bp, Homo sapiens
aacatgacgaaactc

SEQ ID NO: 1672585 - DNA, 15 bp, Homo sapiens
acatgacgaaactct

SEQ ID NO: 1672586 - DNA, 15 bp, Homo sapiens
catgacgaaactctg

SEQ ID NO: 1672587 - DNA, 15 bp, Homo sapiens
atgacgaaactctgt

SEQ ID NO: 1672588 - DNA, 15 bp, Homo sapiens
tgacgaaactctgtc

SEQ ID NO: 1672589 - DNA, 15 bp, Homo sapiens
gacgaaactctgtct

SEQ ID NO: 1672590 - DNA, 15 bp, Homo sapiens
acgaaactctgtctc

SEQ ID NO: 1672591 - DNA, 15 bp, Homo sapiens
cgaaactctgtctct

SEQ ID NO: 1672592 - DNA, 15 bp, Homo sapiens
aactctgtctctaca

SEQ ID NO: 1672593 - DNA, 15 bp, Homo sapiens
actctgtctctacaa

SEQ ID NO: 1672594 - DNA, 15 bp, Homo sapiens
ctctgtctctacaaa

SEQ ID NO: 1672595 - DNA, 15 bp, Homo sapiens
tctgtctctacaaaa

SEQ ID NO: 1672596 - DNA, 15 bp, Homo sapiens
aaaaaatacaaaaag

SEQ ID NO: 1672597 - DNA, 15 bp, Homo sapiens
aatacaaaaagtagg

SEQ ID NO: 1672598 - DNA, 15 bp, Homo sapiens
atacaaaaagtaggc

SEQ ID NO: 1672599 - DNA, 15 bp, Homo sapiens
tacaaaaagtaggcc

SEQ ID NO: 1672600 - DNA, 15 bp, Homo sapiens
acaaaaagtaggcca

SEQ ID NO: 1672601 - DNA, 15 bp, Homo sapiens
caaaaagtaggccag

SEQ ID NO: 1672602 - DNA, 15 bp, Homo sapiens
aaaaagtaggccagg

SEQ ID NO: 1672603 - DNA, 15 bp, Homo sapiens
aaaagtaggccaggc

SEQ ID NO: 1672604 - DNA, 15 bp, Homo sapiens
aaagtaggccaggca

SEQ ID NO: 1672605 - DNA, 15 bp, Homo sapiens
aagtaggccaggcac

SEQ ID NO: 1672606 - DNA, 15 bp, Homo sapiens
agtaggccaggcacg

SEQ ID NO: 1672607 - DNA, 15 bp, Homo sapiens
gtaggccaggcacgg

SEQ ID NO: 1672608 - DNA, 15 bp, Homo sapiens
taggccaggcacggt

SEQ ID NO: 1672609 - DNA, 15 bp, Homo sapiens
aggccaggcacggtg

SEQ ID NO: 1672610 - DNA, 15 bp, Homo sapiens
gccaggcacggtggt

SEQ ID NO: 1672611 - DNA, 15 bp, Homo sapiens
ccaggcacggtggtt

SEQ ID NO: 1672612 - DNA, 15 bp, Homo sapiens
caggcacggtggttc

SEQ ID NO: 1672613 - DNA, 15 bp, Homo sapiens
aggcacggtggttca

SEQ ID NO: 1672614 - DNA, 15 bp, Homo sapiens
ggcacggtggttcac

SEQ ID NO: 1672615 - DNA, 15 bp, Homo sapiens
gcacggtggttcacg

SEQ ID NO: 1672616 - DNA, 15 bp, Homo sapiens
cacggtggttcacgc

SEQ ID NO: 1672617 - DNA, 15 bp, Homo sapiens
acggtggttcacgcc

SEQ ID NO: 1672618 - DNA, 15 bp, Homo sapiens
cggtggttcacgcct

SEQ ID NO: 1672619 - DNA, 15 bp, Homo sapiens
taaaaatacaaaaac

SEQ ID NO: 1672620 - DNA, 15 bp, Homo sapiens
aaaatacaaaaacaa

SEQ ID NO: 1672621 - DNA, 15 bp, Homo sapiens
aaatacaaaaacaaa

SEQ ID NO: 1672622 - DNA, 15 bp, Homo sapiens
aatacaaaaacaaaa

SEQ ID NO: 1672623 - DNA, 15 bp, Homo sapiens
atacaaaaacaaaat

SEQ ID NO: 1672624 - DNA, 15 bp, Homo sapiens
tacaaaaacaaaatt

SEQ ID NO: 1672625 - DNA, 15 bp, Homo sapiens
acaaaaacaaaatta

SEQ ID NO: 1672626 - DNA, 15 bp, Homo sapiens
caaaaacaaaattag

SEQ ID NO: 1672627 - DNA, 15 bp, Homo sapiens
aaaaacaaaattagc

SEQ ID NO: 1672628 - DNA, 15 bp, Homo sapiens
aaaacaaaattagcc

SEQ ID NO: 1672629 - DNA, 15 bp, Homo sapiens
aaacaaaattagccg

SEQ ID NO: 1672630 - DNA, 15 bp, Homo sapiens
aacaaaattagccgg

SEQ ID NO: 1672631 - DNA, 15 bp, Homo sapiens
caaaattagccgggt

SEQ ID NO: 1672632 - DNA, 15 bp, Homo sapiens
gtgtggtggcaggcg

SEQ ID NO: 1672633 - DNA, 15 bp, Homo sapiens
tgtggtggcaggcgc

SEQ ID NO: 1672634 - DNA, 15 bp, Homo sapiens
cgggaggctgaggcg

SEQ ID NO: 1672635 - DNA, 15 bp, Homo sapiens
gaggctgaggcggga

SEQ ID NO: 1672636 - DNA, 15 bp, Homo sapiens
tgaggcgggagaatg

SEQ ID NO: 1672637 - DNA, 15 bp, Homo sapiens
gaggcgggagaatgg

SEQ ID NO: 1672638 - DNA, 15 bp, Homo sapiens
aggcgggagaatggc

SEQ ID NO: 1672639 - DNA, 15 bp, Homo sapiens
ggcgggagaatggcg

SEQ ID NO: 1672640 - DNA, 15 bp, Homo sapiens
gcgggagaatggcgt

SEQ ID NO: 1672641 - DNA, 15 bp, Homo sapiens
cgggagaatggcgtg

SEQ ID NO: 1672642 - DNA, 15 bp, Homo sapiens
gggagaatggcgtga

SEQ ID NO: 1672643 - DNA, 15 bp, Homo sapiens
ccagcctgggtgacc

SEQ ID NO: 1672644 - DNA, 15 bp, Homo sapiens
cagcctgggtgaccg

SEQ ID NO: 1672645 - DNA, 15 bp, Homo sapiens
agcctgggtgaccga

SEQ ID NO: 1672646 - DNA, 15 bp, Homo sapiens
gcctgggtgaccgag

SEQ ID NO: 1672647 - DNA, 15 bp, Homo sapiens
cctgggtgaccgagt

SEQ ID NO: 1672648 - DNA, 15 bp, Homo sapiens
ctgggtgaccgagtt

SEQ ID NO: 1672649 - DNA, 15 bp, Homo sapiens
tgggtgaccgagttg

SEQ ID NO: 1672650 - DNA, 15 bp, Homo sapiens
gggtgaccgagttga

SEQ ID NO: 1672651 - DNA, 15 bp, Homo sapiens
ggtgaccgagttgag

SEQ ID NO: 1672652 - DNA, 15 bp, Homo sapiens
gtgaccgagttgaga

SEQ ID NO: 1672653 - DNA, 15 bp, Homo sapiens
tgaccgagttgagac

SEQ ID NO: 1672654 - DNA, 15 bp, Homo sapiens
gaccgagttgagact

SEQ ID NO: 1672655 - DNA, 15 bp, Homo sapiens
accgagttgagactc

SEQ ID NO: 1672656 - DNA, 15 bp, Homo sapiens
ccgagttgagactcc

SEQ ID NO: 1672657 - DNA, 15 bp, Homo sapiens
cgagttgagactccg

SEQ ID NO: 1672658 - DNA, 15 bp, Homo sapiens
gagttgagactccgt

SEQ ID NO: 1672659 - DNA, 15 bp, Homo sapiens
agttgagactccgtc

SEQ ID NO: 1672660 - DNA, 15 bp, Homo sapiens
gttgagactccgtct

SEQ ID NO: 1672661 - DNA, 15 bp, Homo sapiens
ttgagactccgtctc

SEQ ID NO: 1672662 - DNA, 15 bp, Homo sapiens
aaaaagtagccaggt

SEQ ID NO: 1672663 - DNA, 15 bp, Homo sapiens
aaaagtagccaggtg

SEQ ID NO: 1672664 - DNA, 15 bp, Homo sapiens
aaagtagccaggtgt

SEQ ID NO: 1672665 - DNA, 15 bp, Homo sapiens
aagtagccaggtgtg

SEQ ID NO: 1672666 - DNA, 15 bp, Homo sapiens
agtagccaggtgtgg

SEQ ID NO: 1672667 - DNA, 15 bp, Homo sapiens
gtagccaggtgtggt

SEQ ID NO: 1672668 - DNA, 15 bp, Homo sapiens
caggtgtggtggcag

SEQ ID NO: 1672669 - DNA, 15 bp, Homo sapiens
aggtgtggtggcagg

SEQ ID NO: 1672670 - DNA, 15 bp, Homo sapiens
aggcacctgtaatcc

SEQ ID NO: 1672671 - DNA, 15 bp, Homo sapiens
ggcacctgtaatcct

SEQ ID NO: 1672672 - DNA, 15 bp, Homo sapiens
gcacctgtaatcctg

SEQ ID NO: 1672673 - DNA, 15 bp, Homo sapiens
cacctgtaatcctgg

SEQ ID NO: 1672674 - DNA, 15 bp, Homo sapiens
acctgtaatcctggg

SEQ ID NO: 1672675 - DNA, 15 bp, Homo sapiens
cctgtaatcctgggt

SEQ ID NO: 1672676 - DNA, 15 bp, Homo sapiens
ctgtaatcctgggtt

SEQ ID NO: 1672677 - DNA, 15 bp, Homo sapiens
tgtaatcctgggttc

SEQ ID NO: 1672678 - DNA, 15 bp, Homo sapiens
gtaatcctgggttct

SEQ ID NO: 1672679 - DNA, 15 bp, Homo sapiens
taatcctgggttctc

SEQ ID NO: 1672680 - DNA, 15 bp, Homo sapiens
aatcctgggttctcg

SEQ ID NO: 1672681 - DNA, 15 bp, Homo sapiens
atcctgggttctcga

SEQ ID NO: 1672682 - DNA, 15 bp, Homo sapiens
tcctgggttctcgag

SEQ ID NO: 1672683 - DNA, 15 bp, Homo sapiens
cctgggttctcgaga

SEQ ID NO: 1672684 - DNA, 15 bp, Homo sapiens
ctgggttctcgagac

SEQ ID NO: 1672685 - DNA, 15 bp, Homo sapiens
tgggttctcgagacc

SEQ ID NO: 1672686 - DNA, 15 bp, Homo sapiens
gggttctcgagaccg

SEQ ID NO: 1672687 - DNA, 15 bp, Homo sapiens
ggttctcgagaccga

SEQ ID NO: 1672688 - DNA, 15 bp, Homo sapiens
gttctcgagaccgag

SEQ ID NO: 1672689 - DNA, 15 bp, Homo sapiens
ttctcgagaccgagg

SEQ ID NO: 1672690 - DNA, 15 bp, Homo sapiens
tctcgagaccgaggc

SEQ ID NO: 1672691 - DNA, 15 bp, Homo sapiens
ctcgagaccgaggca

SEQ ID NO: 1672692 - DNA, 15 bp, Homo sapiens
tcgagaccgaggcat

SEQ ID NO: 1672693 - DNA, 15 bp, Homo sapiens
cgagaccgaggcatg

SEQ ID NO: 1672694 - DNA, 15 bp, Homo sapiens
gagaccgaggcatga

SEQ ID NO: 1672695 - DNA, 15 bp, Homo sapiens
agaccgaggcatgag

SEQ ID NO: 1672696 - DNA, 15 bp, Homo sapiens
gaccgaggcatgaga

SEQ ID NO: 1672697 - DNA, 15 bp, Homo sapiens
accgaggcatgagaa

SEQ ID NO: 1672698 - DNA, 15 bp, Homo sapiens
ccgaggcatgagaat

SEQ ID NO: 1672699 - DNA, 15 bp, Homo sapiens
cgaggcatgagaatt

SEQ ID NO: 1672700 - DNA, 15 bp, Homo sapiens
ggcatgagaattgcc

SEQ ID NO: 1672701 - DNA, 15 bp, Homo sapiens
gcatgagaattgcct

SEQ ID NO: 1672702 - DNA, 15 bp, Homo sapiens
catgagaattgcctg

SEQ ID NO: 1672703 - DNA, 15 bp, Homo sapiens
atgagaattgcctga

SEQ ID NO: 1672704 - DNA, 15 bp, Homo sapiens
tgagaattgcctgac

SEQ ID NO: 1672705 - DNA, 15 bp, Homo sapiens
gagaattgcctgacc

SEQ ID NO: 1672706 - DNA, 15 bp, Homo sapiens
agaattgcctgaccc

SEQ ID NO: 1672707 - DNA, 15 bp, Homo sapiens
gaattgcctgacccc

SEQ ID NO: 1672708 - DNA, 15 bp, Homo sapiens
aattgcctgacccca

SEQ ID NO: 1672709 - DNA, 15 bp, Homo sapiens
attgcctgaccccag

SEQ ID NO: 1672710 - DNA, 15 bp, Homo sapiens
ttgcctgaccccagg

SEQ ID NO: 1672711 - DNA, 15 bp, Homo sapiens
tgcctgaccccagga

SEQ ID NO: 1672712 - DNA, 15 bp, Homo sapiens
gcctgaccccaggag

SEQ ID NO: 1672713 - DNA, 15 bp, Homo sapiens
cctgaccccaggagg

SEQ ID NO: 1672714 - DNA, 15 bp, Homo sapiens
ctgaccccaggaggt

SEQ ID NO: 1672715 - DNA, 15 bp, Homo sapiens
tgaccccaggaggtg

SEQ ID NO: 1672716 - DNA, 15 bp, Homo sapiens
gaccccaggaggtgg

SEQ ID NO: 1672717 - DNA, 15 bp, Homo sapiens
accccaggaggtgga

SEQ ID NO: 1672718 - DNA, 15 bp, Homo sapiens
ccccaggaggtggag

SEQ ID NO: 1672719 - DNA, 15 bp, Homo sapiens
ccaggaggtggaggc

SEQ ID NO: 1672720 - DNA, 15 bp, Homo sapiens
caggaggtggaggct

SEQ ID NO: 1672721 - DNA, 15 bp, Homo sapiens
aggaggtggaggctg

SEQ ID NO: 1672722 - DNA, 15 bp, Homo sapiens
ggaggtggaggctgc

SEQ ID NO: 1672723 - DNA, 15 bp, Homo sapiens
gaggtggaggctgca

SEQ ID NO: 1672724 - DNA, 15 bp, Homo sapiens
aggtggaggctgcag

SEQ ID NO: 1672725 - DNA, 15 bp, Homo sapiens
ggtggaggctgcagt

SEQ ID NO: 1672726 - DNA, 15 bp, Homo sapiens
gtggaggctgcagtg

SEQ ID NO: 1672727 - DNA, 15 bp, Homo sapiens
gtgagccaagatcat

SEQ ID NO: 1672728 - DNA, 15 bp, Homo sapiens
tgagccaagatcatg

SEQ ID NO: 1672729 - DNA, 15 bp, Homo sapiens
gagccaagatcatgc

SEQ ID NO: 1672730 - DNA, 15 bp, Homo sapiens
tgggcgacagagtgg

SEQ ID NO: 1672731 - DNA, 15 bp, Homo sapiens
gggcgacagagtggg

SEQ ID NO: 1672732 - DNA, 15 bp, Homo sapiens
ggcgacagagtggga

SEQ ID NO: 1672733 - DNA, 15 bp, Homo sapiens
gcgacagagtgggac

SEQ ID NO: 1672734 - DNA, 15 bp, Homo sapiens
cgacagagtgggact

SEQ ID NO: 1672735 - DNA, 15 bp, Homo sapiens
gacagagtgggactc

SEQ ID NO: 1672736 - DNA, 15 bp, Homo sapiens
acagagtgggactct

SEQ ID NO: 1672737 - DNA, 15 bp, Homo sapiens
cagagtgggactctg

SEQ ID NO: 1672738 - DNA, 15 bp, Homo sapiens
agagtgggactctgt

SEQ ID NO: 1672739 - DNA, 15 bp, Homo sapiens
gagtgggactctgtc

SEQ ID NO: 1672740 - DNA, 15 bp, Homo sapiens
agtgggactctgtct

SEQ ID NO: 1672741 - DNA, 15 bp, Homo sapiens
gtgggactctgtctc

SEQ ID NO: 1672742 - DNA, 15 bp, Homo sapiens
tgggactctgtctca

SEQ ID NO: 1672743 - DNA, 15 bp, Homo sapiens
gggactctgtctcaa

SEQ ID NO: 1672744 - DNA, 15 bp, Homo sapiens
ggactctgtctcaaa

SEQ ID NO: 1672745 - DNA, 15 bp, Homo sapiens
tctgtctcaaaaaac

SEQ ID NO: 1672746 - DNA, 15 bp, Homo sapiens
ctgtctcaaaaaaca

SEQ ID NO: 1672747 - DNA, 15 bp, Homo sapiens
tgtctcaaaaaacaa

SEQ ID NO: 1672748 - DNA, 15 bp, Homo sapiens
gtctcaaaaaacaac

SEQ ID NO: 1672749 - DNA, 15 bp, Homo sapiens
tctcaaaaaacaaca

SEQ ID NO: 1672750 - DNA, 15 bp, Homo sapiens
ctcaaaaaacaacaa

SEQ ID NO: 1672751 - DNA, 15 bp, Homo sapiens
tcaaaaaacaacaaa

SEQ ID NO: 1672752 - DNA, 15 bp, Homo sapiens
caaaaaacaacaaaa

SEQ ID NO: 1672753 - DNA, 15 bp, Homo sapiens
aaaaaacaacaaaaa

SEQ ID NO: 1672754 - DNA, 15 bp, Homo sapiens
aaacaacaaaaaaaa

SEQ ID NO: 1672755 - DNA, 15 bp, Homo sapiens
aacaacaaaaaaaaa

SEQ ID NO: 1672756 - DNA, 15 bp, Homo sapiens
acaacaaaaaaaaag

SEQ ID NO: 1672757 - DNA, 15 bp, Homo sapiens
caacaaaaaaaaagt

SEQ ID NO: 1672758 - DNA, 15 bp, Homo sapiens
aacaaaaaaaaagtt

SEQ ID NO: 1672759 - DNA, 15 bp, Homo sapiens
acaaaaaaaaagttc

SEQ ID NO: 1672760 - DNA, 15 bp, Homo sapiens
caaaaaaaaagttct

SEQ ID NO: 1672761 - DNA, 15 bp, Homo sapiens
aaaaaagttctggaa

SEQ ID NO: 1672762 - DNA, 15 bp, Homo sapiens
aaaaagttctggaaa

SEQ ID NO: 1672763 - DNA, 15 bp, Homo sapiens
aaaagttctggaaat

SEQ ID NO: 1672764 - DNA, 15 bp, Homo sapiens
aaagttctggaaatg

SEQ ID NO: 1672765 - DNA, 15 bp, Homo sapiens
aagttctggaaatgg

SEQ ID NO: 1672766 - DNA, 15 bp, Homo sapiens
agttctggaaatgga

SEQ ID NO: 1672767 - DNA, 15 bp, Homo sapiens
gttctggaaatggat

SEQ ID NO: 1672768 - DNA, 15 bp, Homo sapiens
ttctggaaatggatg

SEQ ID NO: 1672769 - DNA, 15 bp, Homo sapiens
tctggaaatggatgg

SEQ ID NO: 1672770 - DNA, 15 bp, Homo sapiens
ctggaaatggatggt

SEQ ID NO: 1672771 - DNA, 15 bp, Homo sapiens
tggaaatggatggtg

SEQ ID NO: 1672772 - DNA, 15 bp, Homo sapiens
ggaaatggatggtgg

SEQ ID NO: 1672773 - DNA, 15 bp, Homo sapiens
gaaatggatggtggt

SEQ ID NO: 1672774 - DNA, 15 bp, Homo sapiens
aaatggatggtggtg

SEQ ID NO: 1672775 - DNA, 15 bp, Homo sapiens
aatggatggtggtga

SEQ ID NO: 1672776 - DNA, 15 bp, Homo sapiens
atggatggtggtgat

SEQ ID NO: 1672777 - DNA, 15 bp, Homo sapiens
tggatggtggtgatg

SEQ ID NO: 1672778 - DNA, 15 bp, Homo sapiens
ggatggtggtgatgg

SEQ ID NO: 1672779 - DNA, 15 bp, Homo sapiens
gatggtggtgatggt

SEQ ID NO: 1672780 - DNA, 15 bp, Homo sapiens
atggtggtgatggtg

SEQ ID NO: 1672781 - DNA, 15 bp, Homo sapiens
tggtggtgatggtga

SEQ ID NO: 1672782 - DNA, 15 bp, Homo sapiens
ggtggtgatggtgat

SEQ ID NO: 1672783 - DNA, 15 bp, Homo sapiens
gtggtgatggtgata

SEQ ID NO: 1672784 - DNA, 15 bp, Homo sapiens
tggtgatggtgatac

SEQ ID NO: 1672785 - DNA, 15 bp, Homo sapiens
ggtgatggtgatact

SEQ ID NO: 1672786 - DNA, 15 bp, Homo sapiens
gtgatggtgatactt

SEQ ID NO: 1672787 - DNA, 15 bp, Homo sapiens
tgatggtgatacttc

SEQ ID NO: 1672788 - DNA, 15 bp, Homo sapiens
gatggtgatacttcc

SEQ ID NO: 1672789 - DNA, 15 bp, Homo sapiens
atggtgatacttcca

SEQ ID NO: 1672790 - DNA, 15 bp, Homo sapiens
tggtgatacttccac

SEQ ID NO: 1672791 - DNA, 15 bp, Homo sapiens
ggtgatacttccaca

SEQ ID NO: 1672792 - DNA, 15 bp, Homo sapiens
gtgatacttccacaa

SEQ ID NO: 1672793 - DNA, 15 bp, Homo sapiens
tgatacttccacaac

SEQ ID NO: 1672794 - DNA, 15 bp, Homo sapiens
gatacttccacaaca

SEQ ID NO: 1672795 - DNA, 15 bp, Homo sapiens
atacttccacaacag

SEQ ID NO: 1672796 - DNA, 15 bp, Homo sapiens
tacttccacaacagc

SEQ ID NO: 1672797 - DNA, 15 bp, Homo sapiens
acttccacaacagcg

SEQ ID NO: 1672798 - DNA, 15 bp, Homo sapiens
cttccacaacagcgt

SEQ ID NO: 1672799 - DNA, 15 bp, Homo sapiens
ttccacaacagcgtg

SEQ ID NO: 1672800 - DNA, 15 bp, Homo sapiens
tccacaacagcgtga

SEQ ID NO: 1672801 - DNA, 15 bp, Homo sapiens
ccacaacagcgtgaa

SEQ ID NO: 1672802 - DNA, 15 bp, Homo sapiens
cacaacagcgtgaat

SEQ ID NO: 1672803 - DNA, 15 bp, Homo sapiens
acaacagcgtgaatc

SEQ ID NO: 1672804 - DNA, 15 bp, Homo sapiens
caacagcgtgaatct

SEQ ID NO: 1672805 - DNA, 15 bp, Homo sapiens
aacagcgtgaatctg

SEQ ID NO: 1672806 - DNA, 15 bp, Homo sapiens
acagcgtgaatctgc

SEQ ID NO: 1672807 - DNA, 15 bp, Homo sapiens
cagcgtgaatctgct

SEQ ID NO: 1672808 - DNA, 15 bp, Homo sapiens
agcgtgaatctgctt

SEQ ID NO: 1672809 - DNA, 15 bp, Homo sapiens
gcgtgaatctgctta

SEQ ID NO: 1672810 - DNA, 15 bp, Homo sapiens
cgtgaatctgcttaa

SEQ ID NO: 1672811 - DNA, 15 bp, Homo sapiens
gtgaatctgcttaag

SEQ ID NO: 1672812 - DNA, 15 bp, Homo sapiens
tgaatctgcttaagg

SEQ ID NO: 1672813 - DNA, 15 bp, Homo sapiens
gaatctgcttaaggc

SEQ ID NO: 1672814 - DNA, 15 bp, Homo sapiens
aatctgcttaaggcc

SEQ ID NO: 1672815 - DNA, 15 bp, Homo sapiens
atctgcttaaggcca

SEQ ID NO: 1672816 - DNA, 15 bp, Homo sapiens
tctgcttaaggccac

SEQ ID NO: 1672817 - DNA, 15 bp, Homo sapiens
ctgcttaaggccacc

SEQ ID NO: 1672818 - DNA, 15 bp, Homo sapiens
tgcttaaggccaccg

SEQ ID NO: 1672819 - DNA, 15 bp, Homo sapiens
gcttaaggccaccga

SEQ ID NO: 1672820 - DNA, 15 bp, Homo sapiens
cttaaggccaccgaa

SEQ ID NO: 1672821 - DNA, 15 bp, Homo sapiens
ttaaggccaccgaac

SEQ ID NO: 1672822 - DNA, 15 bp, Homo sapiens
taaggccaccgaact

SEQ ID NO: 1672823 - DNA, 15 bp, Homo sapiens
aaggccaccgaactg

SEQ ID NO: 1672824 - DNA, 15 bp, Homo sapiens
aggccaccgaactgt

SEQ ID NO: 1672825 - DNA, 15 bp, Homo sapiens
ggccaccgaactgtg

SEQ ID NO: 1672826 - DNA, 15 bp, Homo sapiens
gccaccgaactgtgc

SEQ ID NO: 1672827 - DNA, 15 bp, Homo sapiens
ccaccgaactgtgca

SEQ ID NO: 1672828 - DNA, 15 bp, Homo sapiens
caccgaactgtgcac

SEQ ID NO: 1672829 - DNA, 15 bp, Homo sapiens
accgaactgtgcact

SEQ ID NO: 1672830 - DNA, 15 bp, Homo sapiens
ccgaactgtgcactc

SEQ ID NO: 1672831 - DNA, 15 bp, Homo sapiens
cgaactgtgcactca

SEQ ID NO: 1672832 - DNA, 15 bp, Homo sapiens
gaactgtgcactcac

SEQ ID NO: 1672833 - DNA, 15 bp, Homo sapiens
aactgtgcactcaca

SEQ ID NO: 1672834 - DNA, 15 bp, Homo sapiens
actgtgcactcacaa

SEQ ID NO: 1672835 - DNA, 15 bp, Homo sapiens
ctgtgcactcacaaa

SEQ ID NO: 1672836 - DNA, 15 bp, Homo sapiens
tgtgcactcacaaat

SEQ ID NO: 1672837 - DNA, 15 bp, Homo sapiens
gtgcactcacaaata

SEQ ID NO: 1672838 - DNA, 15 bp, Homo sapiens
tgcactcacaaatag

SEQ ID NO: 1672839 - DNA, 15 bp, Homo sapiens
gcactcacaaatagt

SEQ ID NO: 1672840 - DNA, 15 bp, Homo sapiens
cactcacaaatagtc

SEQ ID NO: 1672841 - DNA, 15 bp, Homo sapiens
actcacaaatagtcg

SEQ ID NO: 1672842 - DNA, 15 bp, Homo sapiens
ctcacaaatagtcga

SEQ ID NO: 1672843 - DNA, 15 bp, Homo sapiens
tcacaaatagtcgag

SEQ ID NO: 1672844 - DNA, 15 bp, Homo sapiens
cacaaatagtcgaga

SEQ ID NO: 1672845 - DNA, 15 bp, Homo sapiens
acaaatagtcgagat

SEQ ID NO: 1672846 - DNA, 15 bp, Homo sapiens
caaatagtcgagatg

SEQ ID NO: 1672847 - DNA, 15 bp, Homo sapiens
aaatagtcgagatgg

SEQ ID NO: 1672848 - DNA, 15 bp, Homo sapiens
aatagtcgagatggt

SEQ ID NO: 1672849 - DNA, 15 bp, Homo sapiens
atagtcgagatggta

SEQ ID NO: 1672850 - DNA, 15 bp, Homo sapiens
tagtcgagatggtac

SEQ ID NO: 1672851 - DNA, 15 bp, Homo sapiens
agtcgagatggtaca

SEQ ID NO: 1672852 - DNA, 15 bp, Homo sapiens
gtcgagatggtacat

SEQ ID NO: 1672853 - DNA, 15 bp, Homo sapiens
tcgagatggtacatt

SEQ ID NO: 1672854 - DNA, 15 bp, Homo sapiens
cgagatggtacattt

SEQ ID NO: 1672855 - DNA, 15 bp, Homo sapiens
gagatggtacatttt

SEQ ID NO: 1672856 - DNA, 15 bp, Homo sapiens
agatggtacatttta

SEQ ID NO: 1672857 - DNA, 15 bp, Homo sapiens
gatggtacattttat

SEQ ID NO: 1672858 - DNA, 15 bp, Homo sapiens
atggtacattttatg

SEQ ID NO: 1672859 - DNA, 15 bp, Homo sapiens
tggtacattttatgt

SEQ ID NO: 1672860 - DNA, 15 bp, Homo sapiens
ggtacattttatgtt

SEQ ID NO: 1672861 - DNA, 15 bp, Homo sapiens
gtacattttatgtta

SEQ ID NO: 1672862 - DNA, 15 bp, Homo sapiens
tacattttatgttat

SEQ ID NO: 1672863 - DNA, 15 bp, Homo sapiens
acattttatgttatg

SEQ ID NO: 1672864 - DNA, 15 bp, Homo sapiens
cattttatgttatgt

SEQ ID NO: 1672865 - DNA, 15 bp, Homo sapiens
attttatgttatgtg

SEQ ID NO: 1672866 - DNA, 15 bp, Homo sapiens
ttttatgttatgtgt

SEQ ID NO: 1672867 - DNA, 15 bp, Homo sapiens
tttatgttatgtgta

SEQ ID NO: 1672868 - DNA, 15 bp, Homo sapiens
ttatgttatgtgtat

SEQ ID NO: 1672869 - DNA, 15 bp, Homo sapiens
tatgttatgtgtatt

SEQ ID NO: 1672870 - DNA, 15 bp, Homo sapiens
atgttatgtgtattt

SEQ ID NO: 1672871 - DNA, 15 bp, Homo sapiens
tgttatgtgtatttc

SEQ ID NO: 1672872 - DNA, 15 bp, Homo sapiens
gttatgtgtatttca

SEQ ID NO: 1672873 - DNA, 15 bp, Homo sapiens
ttatgtgtatttcac

SEQ ID NO: 1672874 - DNA, 15 bp, Homo sapiens
tatgtgtatttcacc

SEQ ID NO: 1672875 - DNA, 15 bp, Homo sapiens
atgtgtatttcacca

SEQ ID NO: 1672876 - DNA, 15 bp, Homo sapiens
tgtgtatttcaccac

SEQ ID NO: 1672877 - DNA, 15 bp, Homo sapiens
gtgtatttcaccaca

SEQ ID NO: 1672878 - DNA, 15 bp, Homo sapiens
tgtatttcaccacaa

SEQ ID NO: 1672879 - DNA, 15 bp, Homo sapiens
gtatttcaccacaat

SEQ ID NO: 1672880 - DNA, 15 bp, Homo sapiens
tatttcaccacaatt

SEQ ID NO: 1672881 - DNA, 15 bp, Homo sapiens
atttcaccacaatta

SEQ ID NO: 1672882 - DNA, 15 bp, Homo sapiens
tttcaccacaattaa

SEQ ID NO: 1672883 - DNA, 15 bp, Homo sapiens
ttcaccacaattaaa

SEQ ID NO: 1672884 - DNA, 15 bp, Homo sapiens
tcaccacaattaaaa

SEQ ID NO: 1672885 - DNA, 15 bp, Homo sapiens
caccacaattaaaaa

SEQ ID NO: 1672886 - DNA, 15 bp, Homo sapiens
accacaattaaaaac

SEQ ID NO: 1672887 - DNA, 15 bp, Homo sapiens
ccacaattaaaaact

SEQ ID NO: 1672888 - DNA, 15 bp, Homo sapiens
cacaattaaaaacta

SEQ ID NO: 1672889 - DNA, 15 bp, Homo sapiens
acaattaaaaactag

SEQ ID NO: 1672890 - DNA, 15 bp, Homo sapiens
caattaaaaactagt

SEQ ID NO: 1672891 - DNA, 15 bp, Homo sapiens
aattaaaaactagtt

SEQ ID NO: 1672892 - DNA, 15 bp, Homo sapiens
attaaaaactagttg

SEQ ID NO: 1672893 - DNA, 15 bp, Homo sapiens
ttaaaaactagttgt

SEQ ID NO: 1672894 - DNA, 15 bp, Homo sapiens
taaaaactagttgtg

SEQ ID NO: 1672895 - DNA, 15 bp, Homo sapiens
aaaaactagttgtgg

SEQ ID NO: 1672896 - DNA, 15 bp, Homo sapiens
aaaactagttgtggg

SEQ ID NO: 1672897 - DNA, 15 bp, Homo sapiens
aaactagttgtgggc

SEQ ID NO: 1672898 - DNA, 15 bp, Homo sapiens
aactagttgtgggcc

SEQ ID NO: 1672899 - DNA, 15 bp, Homo sapiens
actagttgtgggcca

SEQ ID NO: 1672900 - DNA, 15 bp, Homo sapiens
ctagttgtgggccag

SEQ ID NO: 1672901 - DNA, 15 bp, Homo sapiens
tagttgtgggccagg

SEQ ID NO: 1672902 - DNA, 15 bp, Homo sapiens
agttgtgggccaggt

SEQ ID NO: 1672903 - DNA, 15 bp, Homo sapiens
gttgtgggccaggtg

SEQ ID NO: 1672904 - DNA, 15 bp, Homo sapiens
ttgtgggccaggtgt

SEQ ID NO: 1672905 - DNA, 15 bp, Homo sapiens
tgtgggccaggtgtg

SEQ ID NO: 1672906 - DNA, 15 bp, Homo sapiens
gtgggccaggtgtgg

SEQ ID NO: 1672907 - DNA, 15 bp, Homo sapiens
tgggccaggtgtggt

SEQ ID NO: 1672908 - DNA, 15 bp, Homo sapiens
gggccaggtgtggtg

SEQ ID NO: 1672909 - DNA, 15 bp, Homo sapiens
ccaggtgtggtggtt

SEQ ID NO: 1672910 - DNA, 15 bp, Homo sapiens
caggtgtggtggttc

SEQ ID NO: 1672911 - DNA, 15 bp, Homo sapiens
aggtgtggtggttca

SEQ ID NO: 1672912 - DNA, 15 bp, Homo sapiens
ggtgtggtggttcat

SEQ ID NO: 1672913 - DNA, 15 bp, Homo sapiens
gtgtggtggttcatg

SEQ ID NO: 1672914 - DNA, 15 bp, Homo sapiens
tgtggtggttcatgc

SEQ ID NO: 1672915 - DNA, 15 bp, Homo sapiens
gtggtggttcatgcc

SEQ ID NO: 1672916 - DNA, 15 bp, Homo sapiens
tggtggttcatgcct

SEQ ID NO: 1672917 - DNA, 15 bp, Homo sapiens
ggtggttcatgcctg

SEQ ID NO: 1672918 - DNA, 15 bp, Homo sapiens
gtggttcatgcctgt

SEQ ID NO: 1672919 - DNA, 15 bp, Homo sapiens
tggttcatgcctgta

SEQ ID NO: 1672920 - DNA, 15 bp, Homo sapiens
ggttcatgcctgtaa

SEQ ID NO: 1672921 - DNA, 15 bp, Homo sapiens
gttcatgcctgtaat

SEQ ID NO: 1672922 - DNA, 15 bp, Homo sapiens
ttcatgcctgtaatc

SEQ ID NO: 1672923 - DNA, 15 bp, Homo sapiens
cactttgggaggtca

SEQ ID NO: 1672924 - DNA, 15 bp, Homo sapiens
actttgggaggtcag

SEQ ID NO: 1672925 - DNA, 15 bp, Homo sapiens
ctttgggaggtcaga

SEQ ID NO: 1672926 - DNA, 15 bp, Homo sapiens
tttgggaggtcagag

SEQ ID NO: 1672927 - DNA, 15 bp, Homo sapiens
ttgggaggtcagagg

SEQ ID NO: 1672928 - DNA, 15 bp, Homo sapiens
tgggaggtcagaggg

SEQ ID NO: 1672929 - DNA, 15 bp, Homo sapiens
gggaggtcagaggga

SEQ ID NO: 1672930 - DNA, 15 bp, Homo sapiens
ggaggtcagagggag

SEQ ID NO: 1672931 - DNA, 15 bp, Homo sapiens
gaggtcagagggagg

SEQ ID NO: 1672932 - DNA, 15 bp, Homo sapiens
aggtcagagggaggt

SEQ ID NO: 1672933 - DNA, 15 bp, Homo sapiens
ggtcagagggaggtg

SEQ ID NO: 1672934 - DNA, 15 bp, Homo sapiens
gtcagagggaggtgg

SEQ ID NO: 1672935 - DNA, 15 bp, Homo sapiens
tcagagggaggtgga

SEQ ID NO: 1672936 - DNA, 15 bp, Homo sapiens
cagagggaggtggat

SEQ ID NO: 1672937 - DNA, 15 bp, Homo sapiens
agagggaggtggatc

SEQ ID NO: 1672938 - DNA, 15 bp, Homo sapiens
gagggaggtggatca

SEQ ID NO: 1672939 - DNA, 15 bp, Homo sapiens
agggaggtggatcat

SEQ ID NO: 1672940 - DNA, 15 bp, Homo sapiens
gggaggtggatcatg

SEQ ID NO: 1672941 - DNA, 15 bp, Homo sapiens
ggaggtggatcatga

SEQ ID NO: 1672942 - DNA, 15 bp, Homo sapiens
gaggtggatcatgag

SEQ ID NO: 1672943 - DNA, 15 bp, Homo sapiens
aggtggatcatgagg

SEQ ID NO: 1672944 - DNA, 15 bp, Homo sapiens
gatcatgaggtcagc

SEQ ID NO: 1672945 - DNA, 15 bp, Homo sapiens
atcatgaggtcagca

SEQ ID NO: 1672946 - DNA, 15 bp, Homo sapiens
tcatgaggtcagcag

SEQ ID NO: 1672947 - DNA, 15 bp, Homo sapiens
catgaggtcagcagt

SEQ ID NO: 1672948 - DNA, 15 bp, Homo sapiens
atgaggtcagcagtt

SEQ ID NO: 1672949 - DNA, 15 bp, Homo sapiens
ggtcagcagttcgag

SEQ ID NO: 1672950 - DNA, 15 bp, Homo sapiens
gtcagcagttcgaga

SEQ ID NO: 1672951 - DNA, 15 bp, Homo sapiens
tcagcagttcgagac

SEQ ID NO: 1672952 - DNA, 15 bp, Homo sapiens
cagcagttcgagacc

SEQ ID NO: 1672953 - DNA, 15 bp, Homo sapiens
agcagttcgagacca

SEQ ID NO: 1672954 - DNA, 15 bp, Homo sapiens
gcagttcgagaccag

SEQ ID NO: 1672955 - DNA, 15 bp, Homo sapiens
cagttcgagaccagc

SEQ ID NO: 1672956 - DNA, 15 bp, Homo sapiens
gttcgagaccagcca

SEQ ID NO: 1672957 - DNA, 15 bp, Homo sapiens
ttcgagaccagccag

SEQ ID NO: 1672958 - DNA, 15 bp, Homo sapiens
tcgagaccagccagg

SEQ ID NO: 1672959 - DNA, 15 bp, Homo sapiens
cgagaccagccaggc

SEQ ID NO: 1672960 - DNA, 15 bp, Homo sapiens
gagaccagccaggcc

SEQ ID NO: 1672961 - DNA, 15 bp, Homo sapiens
agaccagccaggcca

SEQ ID NO: 1672962 - DNA, 15 bp, Homo sapiens
gaccagccaggccaa

SEQ ID NO: 1672963 - DNA, 15 bp, Homo sapiens
accagccaggccaac

SEQ ID NO: 1672964 - DNA, 15 bp, Homo sapiens
ccagccaggccaaca

SEQ ID NO: 1672965 - DNA, 15 bp, Homo sapiens
cagccaggccaacat

SEQ ID NO: 1672966 - DNA, 15 bp, Homo sapiens
agccaggccaacatg

SEQ ID NO: 1672967 - DNA, 15 bp, Homo sapiens
gccaggccaacatgg

SEQ ID NO: 1672968 - DNA, 15 bp, Homo sapiens
ccaggccaacatggt

SEQ ID NO: 1672969 - DNA, 15 bp, Homo sapiens
caggccaacatggtg

SEQ ID NO: 1672970 - DNA, 15 bp, Homo sapiens
aggccaacatggtga

SEQ ID NO: 1672971 - DNA, 15 bp, Homo sapiens
agctacttgagaggc

SEQ ID NO: 1672972 - DNA, 15 bp, Homo sapiens
gctacttgagaggct

SEQ ID NO: 1672973 - DNA, 15 bp, Homo sapiens
ctacttgagaggctg

SEQ ID NO: 1672974 - DNA, 15 bp, Homo sapiens
tacttgagaggctga

SEQ ID NO: 1672975 - DNA, 15 bp, Homo sapiens
acttgagaggctgaa

SEQ ID NO: 1672976 - DNA, 15 bp, Homo sapiens
ttgagaggctgaagc

SEQ ID NO: 1672977 - DNA, 15 bp, Homo sapiens
tgagaggctgaagca

SEQ ID NO: 1672978 - DNA, 15 bp, Homo sapiens
gagaggctgaagcag

SEQ ID NO: 1672979 - DNA, 15 bp, Homo sapiens
agaggctgaagcagg

SEQ ID NO: 1672980 - DNA, 15 bp, Homo sapiens
gaacctgggaggcta

SEQ ID NO: 1672981 - DNA, 15 bp, Homo sapiens
aacctgggaggctaa

SEQ ID NO: 1672982 - DNA, 15 bp, Homo sapiens
acctgggaggctaag

SEQ ID NO: 1672983 - DNA, 15 bp, Homo sapiens
cctgggaggctaaga

SEQ ID NO: 1672984 - DNA, 15 bp, Homo sapiens
ctgggaggctaagat

SEQ ID NO: 1672985 - DNA, 15 bp, Homo sapiens
tgggaggctaagatt

SEQ ID NO: 1672986 - DNA, 15 bp, Homo sapiens
gggaggctaagattg

SEQ ID NO: 1672987 - DNA, 15 bp, Homo sapiens
ggaggctaagattgc

SEQ ID NO: 1672988 - DNA, 15 bp, Homo sapiens
gaggctaagattgca

SEQ ID NO: 1672989 - DNA, 15 bp, Homo sapiens
aggctaagattgcag

SEQ ID NO: 1672990 - DNA, 15 bp, Homo sapiens
ggctaagattgcagt

SEQ ID NO: 1672991 - DNA, 15 bp, Homo sapiens
gctaagattgcagtg

SEQ ID NO: 1672992 - DNA, 15 bp, Homo sapiens
ctaagattgcagtga

SEQ ID NO: 1672993 - DNA, 15 bp, Homo sapiens
taagattgcagtgag

SEQ ID NO: 1672994 - DNA, 15 bp, Homo sapiens
aagattgcagtgagc

SEQ ID NO: 1672995 - DNA, 15 bp, Homo sapiens
agattgcagtgagcc

SEQ ID NO: 1672996 - DNA, 15 bp, Homo sapiens
gattgcagtgagccg

SEQ ID NO: 1672997 - DNA, 15 bp, Homo sapiens
attgcagtgagccga

SEQ ID NO: 1672998 - DNA, 15 bp, Homo sapiens
actccagcctggacg

SEQ ID NO: 1672999 - DNA, 15 bp, Homo sapiens
ctccagcctggacga

SEQ ID NO: 1673000 - DNA, 15 bp, Homo sapiens
tccagcctggacgac

SEQ ID NO: 1673001 - DNA, 15 bp, Homo sapiens
ccagcctggacgaca

SEQ ID NO: 1673002 - DNA, 15 bp, Homo sapiens
cagcctggacgacag

SEQ ID NO: 1673003 - DNA, 15 bp, Homo sapiens
agcctggacgacaga

SEQ ID NO: 1673004 - DNA, 15 bp, Homo sapiens
gcctggacgacagag

SEQ ID NO: 1673005 - DNA, 15 bp, Homo sapiens
cctggacgacagagt

SEQ ID NO: 1673006 - DNA, 15 bp, Homo sapiens
ctggacgacagagtg

SEQ ID NO: 1673007 - DNA, 15 bp, Homo sapiens
tggacgacagagtga

SEQ ID NO: 1673008 - DNA, 15 bp, Homo sapiens
ggacgacagagtgag

SEQ ID NO: 1673009 - DNA, 15 bp, Homo sapiens
gacgacagagtgaga

SEQ ID NO: 1673010 - DNA, 15 bp, Homo sapiens
acgacagagtgagac

SEQ ID NO: 1673011 - DNA, 15 bp, Homo sapiens
gacagagtgagactt

SEQ ID NO: 1673012 - DNA, 15 bp, Homo sapiens
acagagtgagacttc

SEQ ID NO: 1673013 - DNA, 15 bp, Homo sapiens
cagagtgagacttcg

SEQ ID NO: 1673014 - DNA, 15 bp, Homo sapiens
tctcaaaaaaaaaac

SEQ ID NO: 1673015 - DNA, 15 bp, Homo sapiens
ctcaaaaaaaaaacc

SEQ ID NO: 1673016 - DNA, 15 bp, Homo sapiens
tcaaaaaaaaaacca

SEQ ID NO: 1673017 - DNA, 15 bp, Homo sapiens
caaaaaaaaaaccaa

SEQ ID NO: 1673018 - DNA, 15 bp, Homo sapiens
aaaaaaaaccaaaaa

SEQ ID NO: 1673019 - DNA, 15 bp, Homo sapiens
aaaaaaaccaaaaaa

SEQ ID NO: 1673020 - DNA, 15 bp, Homo sapiens
aaaaaaccaaaaaaa

SEQ ID NO: 1673021 - DNA, 15 bp, Homo sapiens
aaaaaccaaaaaaaa

SEQ ID NO: 1673022 - DNA, 15 bp, Homo sapiens
aaaaccaaaaaaaaa

SEQ ID NO: 1673023 - DNA, 15 bp, Homo sapiens
aaaccaaaaaaaaaa

SEQ ID NO: 1673024 - DNA, 15 bp, Homo sapiens
accaaaaaaaaaatt

SEQ ID NO: 1673025 - DNA, 15 bp, Homo sapiens
ccaaaaaaaaaatta

SEQ ID NO: 1673026 - DNA, 15 bp, Homo sapiens
caaaaaaaaaattag

SEQ ID NO: 1673027 - DNA, 15 bp, Homo sapiens
aaaaaaattagctgt

SEQ ID NO: 1673028 - DNA, 15 bp, Homo sapiens
aaaaaattagctgtg

SEQ ID NO: 1673029 - DNA, 15 bp, Homo sapiens
aaaaattagctgtgg

SEQ ID NO: 1673030 - DNA, 15 bp, Homo sapiens
aaaattagctgtggg

SEQ ID NO: 1673031 - DNA, 15 bp, Homo sapiens
aaattagctgtgggt

SEQ ID NO: 1673032 - DNA, 15 bp, Homo sapiens
aattagctgtgggtc

SEQ ID NO: 1673033 - DNA, 15 bp, Homo sapiens
attagctgtgggtca

SEQ ID NO: 1673034 - DNA, 15 bp, Homo sapiens
ttagctgtgggtcag

SEQ ID NO: 1673035 - DNA, 15 bp, Homo sapiens
tagctgtgggtcagg

SEQ ID NO: 1673036 - DNA, 15 bp, Homo sapiens
agctgtgggtcaggc

SEQ ID NO: 1673037 - DNA, 15 bp, Homo sapiens
gctgtgggtcaggca

SEQ ID NO: 1673038 - DNA, 15 bp, Homo sapiens
ctgtgggtcaggcac

SEQ ID NO: 1673039 - DNA, 15 bp, Homo sapiens
tgtgggtcaggcact

SEQ ID NO: 1673040 - DNA, 15 bp, Homo sapiens
gtgggtcaggcactg

SEQ ID NO: 1673041 - DNA, 15 bp, Homo sapiens
tgggtcaggcactgt

SEQ ID NO: 1673042 - DNA, 15 bp, Homo sapiens
gggtcaggcactgtg

SEQ ID NO: 1673043 - DNA, 15 bp, Homo sapiens
ggtcaggcactgtgg

SEQ ID NO: 1673044 - DNA, 15 bp, Homo sapiens
gtcaggcactgtggc

SEQ ID NO: 1673045 - DNA, 15 bp, Homo sapiens
tcaggcactgtggct

SEQ ID NO: 1673046 - DNA, 15 bp, Homo sapiens
caggcactgtggctc

SEQ ID NO: 1673047 - DNA, 15 bp, Homo sapiens
aggcactgtggctca

SEQ ID NO: 1673048 - DNA, 15 bp, Homo sapiens
gcactgtggctcacg

SEQ ID NO: 1673049 - DNA, 15 bp, Homo sapiens
cactgtggctcacgc

SEQ ID NO: 1673050 - DNA, 15 bp, Homo sapiens
actgtggctcacgcc

SEQ ID NO: 1673051 - DNA, 15 bp, Homo sapiens
ctgtggctcacgcct

SEQ ID NO: 1673052 - DNA, 15 bp, Homo sapiens
tgtggctcacgcctg

SEQ ID NO: 1673053 - DNA, 15 bp, Homo sapiens
ttgggagaccgaggt

SEQ ID NO: 1673054 - DNA, 15 bp, Homo sapiens
tgggagaccgaggta

SEQ ID NO: 1673055 - DNA, 15 bp, Homo sapiens
gggagaccgaggtag

SEQ ID NO: 1673056 - DNA, 15 bp, Homo sapiens
ggagaccgaggtagg

SEQ ID NO: 1673057 - DNA, 15 bp, Homo sapiens
gagaccgaggtaggt

SEQ ID NO: 1673058 - DNA, 15 bp, Homo sapiens
agaccgaggtaggtg

SEQ ID NO: 1673059 - DNA, 15 bp, Homo sapiens
gaccgaggtaggtgg

SEQ ID NO: 1673060 - DNA, 15 bp, Homo sapiens
accgaggtaggtgga

SEQ ID NO: 1673061 - DNA, 15 bp, Homo sapiens
cgaggtaggtggatg

SEQ ID NO: 1673062 - DNA, 15 bp, Homo sapiens
gaggtaggtggatgg

SEQ ID NO: 1673063 - DNA, 15 bp, Homo sapiens
aggtaggtggatggc

SEQ ID NO: 1673064 - DNA, 15 bp, Homo sapiens
ggtaggtggatggcc

SEQ ID NO: 1673065 - DNA, 15 bp, Homo sapiens
gtaggtggatggcct

SEQ ID NO: 1673066 - DNA, 15 bp, Homo sapiens
taggtggatggcctg

SEQ ID NO: 1673067 - DNA, 15 bp, Homo sapiens
aggtggatggcctga

SEQ ID NO: 1673068 - DNA, 15 bp, Homo sapiens
ggtggatggcctgag

SEQ ID NO: 1673069 - DNA, 15 bp, Homo sapiens
gtggatggcctgagg

SEQ ID NO: 1673070 - DNA, 15 bp, Homo sapiens
tggatggcctgaggt

SEQ ID NO: 1673071 - DNA, 15 bp, Homo sapiens
ggatggcctgaggtc

SEQ ID NO: 1673072 - DNA, 15 bp, Homo sapiens
gatggcctgaggtca

SEQ ID NO: 1673073 - DNA, 15 bp, Homo sapiens
atggcctgaggtcag

SEQ ID NO: 1673074 - DNA, 15 bp, Homo sapiens
tggcctgaggtcagg

SEQ ID NO: 1673075 - DNA, 15 bp, Homo sapiens
ggcctgaggtcagga

SEQ ID NO: 1673076 - DNA, 15 bp, Homo sapiens
ggtcaggagttcgaa

SEQ ID NO: 1673077 - DNA, 15 bp, Homo sapiens
gtcaggagttcgaat

SEQ ID NO: 1673078 - DNA, 15 bp, Homo sapiens
tcaggagttcgaatc

SEQ ID NO: 1673079 - DNA, 15 bp, Homo sapiens
caggagttcgaatcc

SEQ ID NO: 1673080 - DNA, 15 bp, Homo sapiens
aggagttcgaatcca

SEQ ID NO: 1673081 - DNA, 15 bp, Homo sapiens
ggagttcgaatccag

SEQ ID NO: 1673082 - DNA, 15 bp, Homo sapiens
gagttcgaatccagc

SEQ ID NO: 1673083 - DNA, 15 bp, Homo sapiens
agttcgaatccagcc

SEQ ID NO: 1673084 - DNA, 15 bp, Homo sapiens
gttcgaatccagcct

SEQ ID NO: 1673085 - DNA, 15 bp, Homo sapiens
ttcgaatccagcctg

SEQ ID NO: 1673086 - DNA, 15 bp, Homo sapiens
tcgaatccagcctgg

SEQ ID NO: 1673087 - DNA, 15 bp, Homo sapiens
cgaatccagcctggc

SEQ ID NO: 1673088 - DNA, 15 bp, Homo sapiens
gaatccagcctggcc

SEQ ID NO: 1673089 - DNA, 15 bp, Homo sapiens
aatccagcctggcca

SEQ ID NO: 1673090 - DNA, 15 bp, Homo sapiens
atccagcctggccaa

SEQ ID NO: 1673091 - DNA, 15 bp, Homo sapiens
tccagcctggccaac

SEQ ID NO: 1673092 - DNA, 15 bp, Homo sapiens
aaaaattagtcaggt

SEQ ID NO: 1673093 - DNA, 15 bp, Homo sapiens
aaaattagtcaggta

SEQ ID NO: 1673094 - DNA, 15 bp, Homo sapiens
aaattagtcaggtat

SEQ ID NO: 1673095 - DNA, 15 bp, Homo sapiens
aattagtcaggtatg

SEQ ID NO: 1673096 - DNA, 15 bp, Homo sapiens
attagtcaggtatgt

SEQ ID NO: 1673097 - DNA, 15 bp, Homo sapiens
ttagtcaggtatgtt

SEQ ID NO: 1673098 - DNA, 15 bp, Homo sapiens
tagtcaggtatgttg

SEQ ID NO: 1673099 - DNA, 15 bp, Homo sapiens
agtcaggtatgttgg

SEQ ID NO: 1673100 - DNA, 15 bp, Homo sapiens
gtcaggtatgttggc

SEQ ID NO: 1673101 - DNA, 15 bp, Homo sapiens
tcaggtatgttggca

SEQ ID NO: 1673102 - DNA, 15 bp, Homo sapiens
caggtatgttggcac

SEQ ID NO: 1673103 - DNA, 15 bp, Homo sapiens
aggtatgttggcaca

SEQ ID NO: 1673104 - DNA, 15 bp, Homo sapiens
ggtatgttggcacac

SEQ ID NO: 1673105 - DNA, 15 bp, Homo sapiens
gtatgttggcacacc

SEQ ID NO: 1673106 - DNA, 15 bp, Homo sapiens
tatgttggcacacct

SEQ ID NO: 1673107 - DNA, 15 bp, Homo sapiens
atgttggcacacctg

SEQ ID NO: 1673108 - DNA, 15 bp, Homo sapiens
tgttggcacacctgt

SEQ ID NO: 1673109 - DNA, 15 bp, Homo sapiens
gttggcacacctgta

SEQ ID NO: 1673110 - DNA, 15 bp, Homo sapiens
ttggcacacctgtaa

SEQ ID NO: 1673111 - DNA, 15 bp, Homo sapiens
tggcacacctgtaat

SEQ ID NO: 1673112 - DNA, 15 bp, Homo sapiens
ggcacacctgtaatc

SEQ ID NO: 1673113 - DNA, 15 bp, Homo sapiens
cacaacaccttggga

SEQ ID NO: 1673114 - DNA, 15 bp, Homo sapiens
acaacaccttgggag

SEQ ID NO: 1673115 - DNA, 15 bp, Homo sapiens
caacaccttgggagg

SEQ ID NO: 1673116 - DNA, 15 bp, Homo sapiens
aacaccttgggaggc

SEQ ID NO: 1673117 - DNA, 15 bp, Homo sapiens
acaccttgggaggca

SEQ ID NO: 1673118 - DNA, 15 bp, Homo sapiens
caccttgggaggcaa

SEQ ID NO: 1673119 - DNA, 15 bp, Homo sapiens
accttgggaggcaaa

SEQ ID NO: 1673120 - DNA, 15 bp, Homo sapiens
ccttgggaggcaaag

SEQ ID NO: 1673121 - DNA, 15 bp, Homo sapiens
cttgggaggcaaagg

SEQ ID NO: 1673122 - DNA, 15 bp, Homo sapiens
ttgggaggcaaaggt

SEQ ID NO: 1673123 - DNA, 15 bp, Homo sapiens
tgggaggcaaaggtg

SEQ ID NO: 1673124 - DNA, 15 bp, Homo sapiens
gggaggcaaaggtgg

SEQ ID NO: 1673125 - DNA, 15 bp, Homo sapiens
gaggcaaaggtgggc

SEQ ID NO: 1673126 - DNA, 15 bp, Homo sapiens
aggcaaaggtgggca

SEQ ID NO: 1673127 - DNA, 15 bp, Homo sapiens
ggcaaaggtgggcag

SEQ ID NO: 1673128 - DNA, 15 bp, Homo sapiens
gcaaaggtgggcaga

SEQ ID NO: 1673129 - DNA, 15 bp, Homo sapiens
caaaggtgggcagat

SEQ ID NO: 1673130 - DNA, 15 bp, Homo sapiens
aaaggtgggcagatc

SEQ ID NO: 1673131 - DNA, 15 bp, Homo sapiens
cgagactagcctggc

SEQ ID NO: 1673132 - DNA, 15 bp, Homo sapiens
gagactagcctggcc

SEQ ID NO: 1673133 - DNA, 15 bp, Homo sapiens
catggtgaaaccccc

SEQ ID NO: 1673134 - DNA, 15 bp, Homo sapiens
atggtgaaaccccct

SEQ ID NO: 1673135 - DNA, 15 bp, Homo sapiens
tggtgaaaccccctg

SEQ ID NO: 1673136 - DNA, 15 bp, Homo sapiens
ggtgaaaccccctgt

SEQ ID NO: 1673137 - DNA, 15 bp, Homo sapiens
gtgaaaccccctgtc

SEQ ID NO: 1673138 - DNA, 15 bp, Homo sapiens
tgaaaccccctgtct

SEQ ID NO: 1673139 - DNA, 15 bp, Homo sapiens
gaaaccccctgtcta

SEQ ID NO: 1673140 - DNA, 15 bp, Homo sapiens
aaaccccctgtctac

SEQ ID NO: 1673141 - DNA, 15 bp, Homo sapiens
aaccccctgtctact

SEQ ID NO: 1673142 - DNA, 15 bp, Homo sapiens
accccctgtctacta

SEQ ID NO: 1673143 - DNA, 15 bp, Homo sapiens
ccccctgtctactaa

SEQ ID NO: 1673144 - DNA, 15 bp, Homo sapiens
cccctgtctactaaa

SEQ ID NO: 1673145 - DNA, 15 bp, Homo sapiens
ccctgtctactaaaa

SEQ ID NO: 1673146 - DNA, 15 bp, Homo sapiens
cctgtctactaaaaa

SEQ ID NO: 1673147 - DNA, 15 bp, Homo sapiens
ctgtctactaaaaaa

SEQ ID NO: 1673148 - DNA, 15 bp, Homo sapiens
tgtctactaaaaaaa

SEQ ID NO: 1673149 - DNA, 15 bp, Homo sapiens
gtctactaaaaaaat

SEQ ID NO: 1673150 - DNA, 15 bp, Homo sapiens
atacaaaaattacct

SEQ ID NO: 1673151 - DNA, 15 bp, Homo sapiens
tacaaaaattacctg

SEQ ID NO: 1673152 - DNA, 15 bp, Homo sapiens
acaaaaattacctgg

SEQ ID NO: 1673153 - DNA, 15 bp, Homo sapiens
caaaaattacctggg

SEQ ID NO: 1673154 - DNA, 15 bp, Homo sapiens
aaaaattacctgggc

SEQ ID NO: 1673155 - DNA, 15 bp, Homo sapiens
aaaattacctgggca

SEQ ID NO: 1673156 - DNA, 15 bp, Homo sapiens
aaattacctgggcac

SEQ ID NO: 1673157 - DNA, 15 bp, Homo sapiens
aattacctgggcaca

SEQ ID NO: 1673158 - DNA, 15 bp, Homo sapiens
attacctgggcacag

SEQ ID NO: 1673159 - DNA, 15 bp, Homo sapiens
ttacctgggcacagt

SEQ ID NO: 1673160 - DNA, 15 bp, Homo sapiens
tacctgggcacagtg

SEQ ID NO: 1673161 - DNA, 15 bp, Homo sapiens
acctgggcacagtgg

SEQ ID NO: 1673162 - DNA, 15 bp, Homo sapiens
cctgggcacagtggt

SEQ ID NO: 1673163 - DNA, 15 bp, Homo sapiens
gggcacagtggtggg

SEQ ID NO: 1673164 - DNA, 15 bp, Homo sapiens
ggcacagtggtgggt

SEQ ID NO: 1673165 - DNA, 15 bp, Homo sapiens
gcacagtggtgggtg

SEQ ID NO: 1673166 - DNA, 15 bp, Homo sapiens
cacagtggtgggtgc

SEQ ID NO: 1673167 - DNA, 15 bp, Homo sapiens
acagtggtgggtgcc

SEQ ID NO: 1673168 - DNA, 15 bp, Homo sapiens
cagtggtgggtgcct

SEQ ID NO: 1673169 - DNA, 15 bp, Homo sapiens
agtggtgggtgcctg

SEQ ID NO: 1673170 - DNA, 15 bp, Homo sapiens
gtggtgggtgcctgt

SEQ ID NO: 1673171 - DNA, 15 bp, Homo sapiens
tggtgggtgcctgta

SEQ ID NO: 1673172 - DNA, 15 bp, Homo sapiens
ggtgggtgcctgtaa

SEQ ID NO: 1673173 - DNA, 15 bp, Homo sapiens
ccagctacttgggat

SEQ ID NO: 1673174 - DNA, 15 bp, Homo sapiens
cagctacttgggatg

SEQ ID NO: 1673175 - DNA, 15 bp, Homo sapiens
agctacttgggatgc

SEQ ID NO: 1673176 - DNA, 15 bp, Homo sapiens
gctacttgggatgct

SEQ ID NO: 1673177 - DNA, 15 bp, Homo sapiens
ctacttgggatgctg

SEQ ID NO: 1673178 - DNA, 15 bp, Homo sapiens
tacttgggatgctga

SEQ ID NO: 1673179 - DNA, 15 bp, Homo sapiens
acttgggatgctgag

SEQ ID NO: 1673180 - DNA, 15 bp, Homo sapiens
cttgggatgctgagg

SEQ ID NO: 1673181 - DNA, 15 bp, Homo sapiens
ttgggatgctgaggg

SEQ ID NO: 1673182 - DNA, 15 bp, Homo sapiens
tgggatgctgagggt

SEQ ID NO: 1673183 - DNA, 15 bp, Homo sapiens
gggatgctgagggtg

SEQ ID NO: 1673184 - DNA, 15 bp, Homo sapiens
ggatgctgagggtgg

SEQ ID NO: 1673185 - DNA, 15 bp, Homo sapiens
gatgctgagggtgga

SEQ ID NO: 1673186 - DNA, 15 bp, Homo sapiens
atgctgagggtggag

SEQ ID NO: 1673187 - DNA, 15 bp, Homo sapiens
tgctgagggtggaga

SEQ ID NO: 1673188 - DNA, 15 bp, Homo sapiens
gctgagggtggagaa

SEQ ID NO: 1673189 - DNA, 15 bp, Homo sapiens
ctgagggtggagaat

SEQ ID NO: 1673190 - DNA, 15 bp, Homo sapiens
tgagggtggagaatt

SEQ ID NO: 1673191 - DNA, 15 bp, Homo sapiens
gagggtggagaattg

SEQ ID NO: 1673192 - DNA, 15 bp, Homo sapiens
agggtggagaattgc

SEQ ID NO: 1673193 - DNA, 15 bp, Homo sapiens
gggtggagaattgct

SEQ ID NO: 1673194 - DNA, 15 bp, Homo sapiens
ggtggagaattgctt

SEQ ID NO: 1673195 - DNA, 15 bp, Homo sapiens
gtggagaattgcttg

SEQ ID NO: 1673196 - DNA, 15 bp, Homo sapiens
tggagaattgcttga

SEQ ID NO: 1673197 - DNA, 15 bp, Homo sapiens
acctgggaggcagaa

SEQ ID NO: 1673198 - DNA, 15 bp, Homo sapiens
cctgggaggcagaag

SEQ ID NO: 1673199 - DNA, 15 bp, Homo sapiens
ctgggaggcagaagt

SEQ ID NO: 1673200 - DNA, 15 bp, Homo sapiens
tgggaggcagaagtt

SEQ ID NO: 1673201 - DNA, 15 bp, Homo sapiens
gggaggcagaagttg

SEQ ID NO: 1673202 - DNA, 15 bp, Homo sapiens
gcagaagttgcagta

SEQ ID NO: 1673203 - DNA, 15 bp, Homo sapiens
cagaagttgcagtaa

SEQ ID NO: 1673204 - DNA, 15 bp, Homo sapiens
agaagttgcagtaag

SEQ ID NO: 1673205 - DNA, 15 bp, Homo sapiens
gaagttgcagtaagc

SEQ ID NO: 1673206 - DNA, 15 bp, Homo sapiens
aagttgcagtaagcc

SEQ ID NO: 1673207 - DNA, 15 bp, Homo sapiens
agttgcagtaagcca

SEQ ID NO: 1673208 - DNA, 15 bp, Homo sapiens
tgccactggactcca

SEQ ID NO: 1673209 - DNA, 15 bp, Homo sapiens
gccactggactccag

SEQ ID NO: 1673210 - DNA, 15 bp, Homo sapiens
ctggactccagcctc

SEQ ID NO: 1673211 - DNA, 15 bp, Homo sapiens
tggactccagcctca

SEQ ID NO: 1673212 - DNA, 15 bp, Homo sapiens
ggactccagcctcag

SEQ ID NO: 1673213 - DNA, 15 bp, Homo sapiens
gactccagcctcagt

SEQ ID NO: 1673214 - DNA, 15 bp, Homo sapiens
actccagcctcagtg

SEQ ID NO: 1673215 - DNA, 15 bp, Homo sapiens
ctccagcctcagtga

SEQ ID NO: 1673216 - DNA, 15 bp, Homo sapiens
tccagcctcagtgac

SEQ ID NO: 1673217 - DNA, 15 bp, Homo sapiens
ccagcctcagtgaca

SEQ ID NO: 1673218 - DNA, 15 bp, Homo sapiens
cagcctcagtgacag

SEQ ID NO: 1673219 - DNA, 15 bp, Homo sapiens
agcctcagtgacaga

SEQ ID NO: 1673220 - DNA, 15 bp, Homo sapiens
gcctcagtgacagag

SEQ ID NO: 1673221 - DNA, 15 bp, Homo sapiens
cctcagtgacagagc

SEQ ID NO: 1673222 - DNA, 15 bp, Homo sapiens
ctcagtgacagagca

SEQ ID NO: 1673223 - DNA, 15 bp, Homo sapiens
tcagtgacagagcaa

SEQ ID NO: 1673224 - DNA, 15 bp, Homo sapiens
cagtgacagagcaaa

SEQ ID NO: 1673225 - DNA, 15 bp, Homo sapiens
agtgacagagcaaaa

SEQ ID NO: 1673226 - DNA, 15 bp, Homo sapiens
gtgacagagcaaaac

SEQ ID NO: 1673227 - DNA, 15 bp, Homo sapiens
tgacagagcaaaact

SEQ ID NO: 1673228 - DNA, 15 bp, Homo sapiens
gacagagcaaaactc

SEQ ID NO: 1673229 - DNA, 15 bp, Homo sapiens
acagagcaaaactct

SEQ ID NO: 1673230 - DNA, 15 bp, Homo sapiens
cagagcaaaactctg

SEQ ID NO: 1673231 - DNA, 15 bp, Homo sapiens
gagcaaaactctgtc

SEQ ID NO: 1673232 - DNA, 15 bp, Homo sapiens
agcaaaactctgtct

SEQ ID NO: 1673233 - DNA, 15 bp, Homo sapiens
gcaaaactctgtctc

SEQ ID NO: 1673234 - DNA, 15 bp, Homo sapiens
aaactctgtctccaa

SEQ ID NO: 1673235 - DNA, 15 bp, Homo sapiens
aactctgtctccaaa

SEQ ID NO: 1673236 - DNA, 15 bp, Homo sapiens
ctgtctccaaaaaaa

SEQ ID NO: 1673237 - DNA, 15 bp, Homo sapiens
tgtctccaaaaaaat

SEQ ID NO: 1673238 - DNA, 15 bp, Homo sapiens
gtctccaaaaaaatt

SEQ ID NO: 1673239 - DNA, 15 bp, Homo sapiens
tctccaaaaaaattg

SEQ ID NO: 1673240 - DNA, 15 bp, Homo sapiens
ctccaaaaaaattgt

SEQ ID NO: 1673241 - DNA, 15 bp, Homo sapiens
tccaaaaaaattgtt

SEQ ID NO: 1673242 - DNA, 15 bp, Homo sapiens
ccaaaaaaattgttt

SEQ ID NO: 1673243 - DNA, 15 bp, Homo sapiens
caaaaaaattgtttt

SEQ ID NO: 1673244 - DNA, 15 bp, Homo sapiens
aaaaaaattgttttt

SEQ ID NO: 1673245 - DNA, 15 bp, Homo sapiens
aaaaaattgtttttt

SEQ ID NO: 1673246 - DNA, 15 bp, Homo sapiens
aaaaattgttttttt

SEQ ID NO: 1673247 - DNA, 15 bp, Homo sapiens
aaaattgtttttttt

SEQ ID NO: 1673248 - DNA, 15 bp, Homo sapiens
aaattgttttttttt

SEQ ID NO: 1673249 - DNA, 15 bp, Homo sapiens
tttttttttttttca

SEQ ID NO: 1673250 - DNA, 15 bp, Homo sapiens
tttttttttttcaaa

SEQ ID NO: 1673251 - DNA, 15 bp, Homo sapiens
ttttttttttcaaat

SEQ ID NO: 1673252 - DNA, 15 bp, Homo sapiens
tttttttttcaaatc

SEQ ID NO: 1673253 - DNA, 15 bp, Homo sapiens
ttttttttcaaatca

SEQ ID NO: 1673254 - DNA, 15 bp, Homo sapiens
tttttttcaaatcat

SEQ ID NO: 1673255 - DNA, 15 bp, Homo sapiens
ttttttcaaatcatc

SEQ ID NO: 1673256 - DNA, 15 bp, Homo sapiens
tttttcaaatcatca

SEQ ID NO: 1673257 - DNA, 15 bp, Homo sapiens
ttttcaaatcatcac

SEQ ID NO: 1673258 - DNA, 15 bp, Homo sapiens
tttcaaatcatcaca

SEQ ID NO: 1673259 - DNA, 15 bp, Homo sapiens
ttcaaatcatcacac

SEQ ID NO: 1673260 - DNA, 15 bp, Homo sapiens
tcaaatcatcacact

SEQ ID NO: 1673261 - DNA, 15 bp, Homo sapiens
caaatcatcacacta

SEQ ID NO: 1673262 - DNA, 15 bp, Homo sapiens
aaatcatcacactac

SEQ ID NO: 1673263 - DNA, 15 bp, Homo sapiens
aatcatcacactaca

SEQ ID NO: 1673264 - DNA, 15 bp, Homo sapiens
atcatcacactacag

SEQ ID NO: 1673265 - DNA, 15 bp, Homo sapiens
tcatcacactacagc

SEQ ID NO: 1673266 - DNA, 15 bp, Homo sapiens
catcacactacagcc

SEQ ID NO: 1673267 - DNA, 15 bp, Homo sapiens
atcacactacagcca

SEQ ID NO: 1673268 - DNA, 15 bp, Homo sapiens
tcacactacagccaa

SEQ ID NO: 1673269 - DNA, 15 bp, Homo sapiens
cacactacagccaag

SEQ ID NO: 1673270 - DNA, 15 bp, Homo sapiens
acactacagccaagg

SEQ ID NO: 1673271 - DNA, 15 bp, Homo sapiens
cactacagccaaggc

SEQ ID NO: 1673272 - DNA, 15 bp, Homo sapiens
actacagccaaggcc

SEQ ID NO: 1673273 - DNA, 15 bp, Homo sapiens
ctacagccaaggcct

SEQ ID NO: 1673274 - DNA, 15 bp, Homo sapiens
tacagccaaggcctg

SEQ ID NO: 1673275 - DNA, 15 bp, Homo sapiens
acagccaaggcctgg

SEQ ID NO: 1673276 - DNA, 15 bp, Homo sapiens
cagccaaggcctggc

SEQ ID NO: 1673277 - DNA, 15 bp, Homo sapiens
agccaaggcctggcc

SEQ ID NO: 1673278 - DNA, 15 bp, Homo sapiens
gccaaggcctggcca

SEQ ID NO: 1673279 - DNA, 15 bp, Homo sapiens
ccaaggcctggccac

SEQ ID NO: 1673280 - DNA, 15 bp, Homo sapiens
caaggcctggccact

SEQ ID NO: 1673281 - DNA, 15 bp, Homo sapiens
aaggcctggccactt

SEQ ID NO: 1673282 - DNA, 15 bp, Homo sapiens
aggcctggccactta

SEQ ID NO: 1673283 - DNA, 15 bp, Homo sapiens
ggcctggccacttac

SEQ ID NO: 1673284 - DNA, 15 bp, Homo sapiens
gcctggccacttact

SEQ ID NO: 1673285 - DNA, 15 bp, Homo sapiens
cctggccacttactt

SEQ ID NO: 1673286 - DNA, 15 bp, Homo sapiens
ctggccacttacttt

SEQ ID NO: 1673287 - DNA, 15 bp, Homo sapiens
tggccacttactttt

SEQ ID NO: 1673288 - DNA, 15 bp, Homo sapiens
ggccacttacttttg

SEQ ID NO: 1673289 - DNA, 15 bp, Homo sapiens
gccacttacttttgt

SEQ ID NO: 1673290 - DNA, 15 bp, Homo sapiens
ccacttacttttgta

SEQ ID NO: 1673291 - DNA, 15 bp, Homo sapiens
cacttacttttgtaa

SEQ ID NO: 1673292 - DNA, 15 bp, Homo sapiens
acttacttttgtaaa

SEQ ID NO: 1673293 - DNA, 15 bp, Homo sapiens
cttacttttgtaaat

SEQ ID NO: 1673294 - DNA, 15 bp, Homo sapiens
ttacttttgtaaata

SEQ ID NO: 1673295 - DNA, 15 bp, Homo sapiens
tacttttgtaaataa

SEQ ID NO: 1673296 - DNA, 15 bp, Homo sapiens
acttttgtaaataaa

SEQ ID NO: 1673297 - DNA, 15 bp, Homo sapiens
cttttgtaaataaag

SEQ ID NO: 1673298 - DNA, 15 bp, Homo sapiens
ttttgtaaataaagt

SEQ ID NO: 1673299 - DNA, 15 bp, Homo sapiens
tttgtaaataaagtt

SEQ ID NO: 1673300 - DNA, 15 bp, Homo sapiens
ttgtaaataaagttt

SEQ ID NO: 1673301 - DNA, 15 bp, Homo sapiens
tgtaaataaagtttt

SEQ ID NO: 1673302 - DNA, 15 bp, Homo sapiens
gtaaataaagtttta

SEQ ID NO: 1673303 - DNA, 15 bp, Homo sapiens
taaataaagttttat

SEQ ID NO: 1673304 - DNA, 15 bp, Homo sapiens
aaataaagttttatt

SEQ ID NO: 1673305 - DNA, 15 bp, Homo sapiens
aataaagttttattg

SEQ ID NO: 1673306 - DNA, 15 bp, Homo sapiens
ataaagttttattgg

SEQ ID NO: 1673307 - DNA, 15 bp, Homo sapiens
taaagttttattgga

SEQ ID NO: 1673308 - DNA, 15 bp, Homo sapiens
aaagttttattggag

SEQ ID NO: 1673309 - DNA, 15 bp, Homo sapiens
aagttttattggagc

SEQ ID NO: 1673310 - DNA, 15 bp, Homo sapiens
agttttattggagcc

SEQ ID NO: 1673311 - DNA, 15 bp, Homo sapiens
gttttattggagcca

SEQ ID NO: 1673312 - DNA, 15 bp, Homo sapiens
ttttattggagccag

SEQ ID NO: 1673313 - DNA, 15 bp, Homo sapiens
tttattggagccagt

SEQ ID NO: 1673314 - DNA, 15 bp, Homo sapiens
ttattggagccagtg

SEQ ID NO: 1673315 - DNA, 15 bp, Homo sapiens
tattggagccagtgg

SEQ ID NO: 1673316 - DNA, 15 bp, Homo sapiens
attggagccagtgga

SEQ ID NO: 1673317 - DNA, 15 bp, Homo sapiens
ttggagccagtggac

SEQ ID NO: 1673318 - DNA, 15 bp, Homo sapiens
tggagccagtggacc

SEQ ID NO: 1673319 - DNA, 15 bp, Homo sapiens
ggagccagtggacca

SEQ ID NO: 1673320 - DNA, 15 bp, Homo sapiens
gagccagtggaccag

SEQ ID NO: 1673321 - DNA, 15 bp, Homo sapiens
agccagtggaccagt

SEQ ID NO: 1673322 - DNA, 15 bp, Homo sapiens
gccagtggaccagtg

SEQ ID NO: 1673323 - DNA, 15 bp, Homo sapiens
ccagtggaccagtga

SEQ ID NO: 1673324 - DNA, 15 bp, Homo sapiens
cagtggaccagtgag

SEQ ID NO: 1673325 - DNA, 15 bp, Homo sapiens
agtggaccagtgagg

SEQ ID NO: 1673326 - DNA, 15 bp, Homo sapiens
gtggaccagtgaggc

SEQ ID NO: 1673327 - DNA, 15 bp, Homo sapiens
tggaccagtgaggcc

SEQ ID NO: 1673328 - DNA, 15 bp, Homo sapiens
ggaccagtgaggccg

SEQ ID NO: 1673329 - DNA, 15 bp, Homo sapiens
gaccagtgaggccga

SEQ ID NO: 1673330 - DNA, 15 bp, Homo sapiens
accagtgaggccgaa

SEQ ID NO: 1673331 - DNA, 15 bp, Homo sapiens
ccagtgaggccgaat

SEQ ID NO: 1673332 - DNA, 15 bp, Homo sapiens
cagtgaggccgaatc

SEQ ID NO: 1673333 - DNA, 15 bp, Homo sapiens
agtgaggccgaatct

SEQ ID NO: 1673334 - DNA, 15 bp, Homo sapiens
gtgaggccgaatctt

SEQ ID NO: 1673335 - DNA, 15 bp, Homo sapiens
tgaggccgaatcttg

SEQ ID NO: 1673336 - DNA, 15 bp, Homo sapiens
gaggccgaatcttgc

SEQ ID NO: 1673337 - DNA, 15 bp, Homo sapiens
aggccgaatcttgca

SEQ ID NO: 1673338 - DNA, 15 bp, Homo sapiens
ggccgaatcttgcag

SEQ ID NO: 1673339 - DNA, 15 bp, Homo sapiens
gccgaatcttgcagg

SEQ ID NO: 1673340 - DNA, 15 bp, Homo sapiens
ccgaatcttgcaggt

SEQ ID NO: 1673341 - DNA, 15 bp, Homo sapiens
cgaatcttgcaggtg

SEQ ID NO: 1673342 - DNA, 15 bp, Homo sapiens
gaatcttgcaggtgt

SEQ ID NO: 1673343 - DNA, 15 bp, Homo sapiens
aatcttgcaggtgta

SEQ ID NO: 1673344 - DNA, 15 bp, Homo sapiens
atcttgcaggtgtaa

SEQ ID NO: 1673345 - DNA, 15 bp, Homo sapiens
tcttgcaggtgtaag

SEQ ID NO: 1673346 - DNA, 15 bp, Homo sapiens
cttgcaggtgtaaga

SEQ ID NO: 1673347 - DNA, 15 bp, Homo sapiens
ttgcaggtgtaagat

SEQ ID NO: 1673348 - DNA, 15 bp, Homo sapiens
tgcaggtgtaagatc

SEQ ID NO: 1673349 - DNA, 15 bp, Homo sapiens
gcaggtgtaagatca

SEQ ID NO: 1673350 - DNA, 15 bp, Homo sapiens
caggtgtaagatcac

SEQ ID NO: 1673351 - DNA, 15 bp, Homo sapiens
aggtgtaagatcaca

SEQ ID NO: 1673352 - DNA, 15 bp, Homo sapiens
ggtgtaagatcacag

SEQ ID NO: 1673353 - DNA, 15 bp, Homo sapiens
gtgtaagatcacagt

SEQ ID NO: 1673354 - DNA, 15 bp, Homo sapiens
tgtaagatcacagtc

SEQ ID NO: 1673355 - DNA, 15 bp, Homo sapiens
gtaagatcacagtct

SEQ ID NO: 1673356 - DNA, 15 bp, Homo sapiens
taagatcacagtcta

SEQ ID NO: 1673357 - DNA, 15 bp, Homo sapiens
aagatcacagtctat

SEQ ID NO: 1673358 - DNA, 15 bp, Homo sapiens
agatcacagtctatc

SEQ ID NO: 1673359 - DNA, 15 bp, Homo sapiens
gatcacagtctatcc

SEQ ID NO: 1673360 - DNA, 15 bp, Homo sapiens
atcacagtctatcct

SEQ ID NO: 1673361 - DNA, 15 bp, Homo sapiens
tcacagtctatcctt

SEQ ID NO: 1673362 - DNA, 15 bp, Homo sapiens
cacagtctatccttg

SEQ ID NO: 1673363 - DNA, 15 bp, Homo sapiens
acagtctatccttga

SEQ ID NO: 1673364 - DNA, 15 bp, Homo sapiens
cagtctatccttgaa

SEQ ID NO: 1673365 - DNA, 15 bp, Homo sapiens
agtctatccttgaaa

SEQ ID NO: 1673366 - DNA, 15 bp, Homo sapiens
gtctatccttgaaaa

SEQ ID NO: 1673367 - DNA, 15 bp, Homo sapiens
tctatccttgaaaat

SEQ ID NO: 1673368 - DNA, 15 bp, Homo sapiens
ctatccttgaaaatt

SEQ ID NO: 1673369 - DNA, 15 bp, Homo sapiens
tatccttgaaaattt

SEQ ID NO: 1673370 - DNA, 15 bp, Homo sapiens
atccttgaaaatttt

SEQ ID NO: 1673371 - DNA, 15 bp, Homo sapiens
tccttgaaaattttg

SEQ ID NO: 1673372 - DNA, 15 bp, Homo sapiens
ccttgaaaattttga

SEQ ID NO: 1673373 - DNA, 15 bp, Homo sapiens
cttgaaaattttgat

SEQ ID NO: 1673374 - DNA, 15 bp, Homo sapiens
ttgaaaattttgata

SEQ ID NO: 1673375 - DNA, 15 bp, Homo sapiens
tgaaaattttgatat

SEQ ID NO: 1673376 - DNA, 15 bp, Homo sapiens
gaaaattttgatatt

SEQ ID NO: 1673377 - DNA, 15 bp, Homo sapiens
aaaattttgatattt

SEQ ID NO: 1673378 - DNA, 15 bp, Homo sapiens
aaattttgatatttt

SEQ ID NO: 1673379 - DNA, 15 bp, Homo sapiens
aattttgatattttg

SEQ ID NO: 1673380 - DNA, 15 bp, Homo sapiens
attttgatattttgt

SEQ ID NO: 1673381 - DNA, 15 bp, Homo sapiens
ttttgatattttgtt

SEQ ID NO: 1673382 - DNA, 15 bp, Homo sapiens
tttgatattttgttc

SEQ ID NO: 1673383 - DNA, 15 bp, Homo sapiens
ttgatattttgttca

SEQ ID NO: 1673384 - DNA, 15 bp, Homo sapiens
tgatattttgttcat

SEQ ID NO: 1673385 - DNA, 15 bp, Homo sapiens
gatattttgttcatt

SEQ ID NO: 1673386 - DNA, 15 bp, Homo sapiens
atattttgttcattg

SEQ ID NO: 1673387 - DNA, 15 bp, Homo sapiens
tattttgttcattgg

SEQ ID NO: 1673388 - DNA, 15 bp, Homo sapiens
attttgttcattggg

SEQ ID NO: 1673389 - DNA, 15 bp, Homo sapiens
ttttgttcattgggt

SEQ ID NO: 1673390 - DNA, 15 bp, Homo sapiens
tttgttcattgggtg

SEQ ID NO: 1673391 - DNA, 15 bp, Homo sapiens
ttgttcattgggtgg

SEQ ID NO: 1673392 - DNA, 15 bp, Homo sapiens
tgttcattgggtggt

SEQ ID NO: 1673393 - DNA, 15 bp, Homo sapiens
gttcattgggtggtt

SEQ ID NO: 1673394 - DNA, 15 bp, Homo sapiens
ttcattgggtggttt

SEQ ID NO: 1673395 - DNA, 15 bp, Homo sapiens
tcattgggtggtttt

SEQ ID NO: 1673396 - DNA, 15 bp, Homo sapiens
cattgggtggttttt

SEQ ID NO: 1673397 - DNA, 15 bp, Homo sapiens
attgggtggtttttc

SEQ ID NO: 1673398 - DNA, 15 bp, Homo sapiens
ttgggtggtttttca

SEQ ID NO: 1673399 - DNA, 15 bp, Homo sapiens
tgggtggtttttcat

SEQ ID NO: 1673400 - DNA, 15 bp, Homo sapiens
gggtggtttttcatt

SEQ ID NO: 1673401 - DNA, 15 bp, Homo sapiens
ggtggtttttcatta

SEQ ID NO: 1673402 - DNA, 15 bp, Homo sapiens
gtggtttttcattaa

SEQ ID NO: 1673403 - DNA, 15 bp, Homo sapiens
tggtttttcattaat

SEQ ID NO: 1673404 - DNA, 15 bp, Homo sapiens
ggtttttcattaatt

SEQ ID NO: 1673405 - DNA, 15 bp, Homo sapiens
gtttttcattaattt

SEQ ID NO: 1673406 - DNA, 15 bp, Homo sapiens
tttttcattaattta

SEQ ID NO: 1673407 - DNA, 15 bp, Homo sapiens
ttttcattaatttaa

SEQ ID NO: 1673408 - DNA, 15 bp, Homo sapiens
tttcattaatttaaa

SEQ ID NO: 1673409 - DNA, 15 bp, Homo sapiens
ttcattaatttaaat

SEQ ID NO: 1673410 - DNA, 15 bp, Homo sapiens
tcattaatttaaatt

SEQ ID NO: 1673411 - DNA, 15 bp, Homo sapiens
cattaatttaaattt

SEQ ID NO: 1673412 - DNA, 15 bp, Homo sapiens
attaatttaaatttt

SEQ ID NO: 1673413 - DNA, 15 bp, Homo sapiens
ttaatttaaatttta

SEQ ID NO: 1673414 - DNA, 15 bp, Homo sapiens
taatttaaattttaa

SEQ ID NO: 1673415 - DNA, 15 bp, Homo sapiens
aatttaaattttaaa

SEQ ID NO: 1673416 - DNA, 15 bp, Homo sapiens
atttaaattttaaaa

SEQ ID NO: 1673417 - DNA, 15 bp, Homo sapiens
tttaaattttaaaaa

SEQ ID NO: 1673418 - DNA, 15 bp, Homo sapiens
ttaaattttaaaaaa

SEQ ID NO: 1673419 - DNA, 15 bp, Homo sapiens
taaattttaaaaaat

SEQ ID NO: 1673420 - DNA, 15 bp, Homo sapiens
aaattttaaaaaata

SEQ ID NO: 1673421 - DNA, 15 bp, Homo sapiens
attttaaaaaataac

SEQ ID NO: 1673422 - DNA, 15 bp, Homo sapiens
ttttaaaaaataaca

SEQ ID NO: 1673423 - DNA, 15 bp, Homo sapiens
tttaaaaaataacat

SEQ ID NO: 1673424 - DNA, 15 bp, Homo sapiens
ttaaaaaataacata

SEQ ID NO: 1673425 - DNA, 15 bp, Homo sapiens
taaaaaataacatat

SEQ ID NO: 1673426 - DNA, 15 bp, Homo sapiens
aaaaaataacatatt

SEQ ID NO: 1673427 - DNA, 15 bp, Homo sapiens
aaaaataacatatta

SEQ ID NO: 1673428 - DNA, 15 bp, Homo sapiens
aaaataacatattaa

SEQ ID NO: 1673429 - DNA, 15 bp, Homo sapiens
aaataacatattaaa

SEQ ID NO: 1673430 - DNA, 15 bp, Homo sapiens
aataacatattaaag

SEQ ID NO: 1673431 - DNA, 15 bp, Homo sapiens
ataacatattaaagg

SEQ ID NO: 1673432 - DNA, 15 bp, Homo sapiens
taacatattaaaggc

SEQ ID NO: 1673433 - DNA, 15 bp, Homo sapiens
aacatattaaaggct

SEQ ID NO: 1673434 - DNA, 15 bp, Homo sapiens
acatattaaaggctg

SEQ ID NO: 1673435 - DNA, 15 bp, Homo sapiens
catattaaaggctgg

SEQ ID NO: 1673436 - DNA, 15 bp, Homo sapiens
atattaaaggctggt

SEQ ID NO: 1673437 - DNA, 15 bp, Homo sapiens
tattaaaggctggtg

SEQ ID NO: 1673438 - DNA, 15 bp, Homo sapiens
attaaaggctggtgt

SEQ ID NO: 1673439 - DNA, 15 bp, Homo sapiens
ttaaaggctggtgtg

SEQ ID NO: 1673440 - DNA, 15 bp, Homo sapiens
taaaggctggtgtgg

SEQ ID NO: 1673441 - DNA, 15 bp, Homo sapiens
aaaggctggtgtgga

SEQ ID NO: 1673442 - DNA, 15 bp, Homo sapiens
aaggctggtgtggag

SEQ ID NO: 1673443 - DNA, 15 bp, Homo sapiens
aggctggtgtggagg

SEQ ID NO: 1673444 - DNA, 15 bp, Homo sapiens
ggctggtgtggaggt

SEQ ID NO: 1673445 - DNA, 15 bp, Homo sapiens
gctggtgtggaggtg

SEQ ID NO: 1673446 - DNA, 15 bp, Homo sapiens
ctggtgtggaggtgc

SEQ ID NO: 1673447 - DNA, 15 bp, Homo sapiens
tggtgtggaggtgca

SEQ ID NO: 1673448 - DNA, 15 bp, Homo sapiens
ggtgtggaggtgcac

SEQ ID NO: 1673449 - DNA, 15 bp, Homo sapiens
gtgtggaggtgcacg

SEQ ID NO: 1673450 - DNA, 15 bp, Homo sapiens
tgtggaggtgcacgc

SEQ ID NO: 1673451 - DNA, 15 bp, Homo sapiens
gtggaggtgcacgcc

SEQ ID NO: 1673452 - DNA, 15 bp, Homo sapiens
tggaggtgcacgcct

SEQ ID NO: 1673453 - DNA, 15 bp, Homo sapiens
ggaggtgcacgcctg

SEQ ID NO: 1673454 - DNA, 15 bp, Homo sapiens
gaggtgcacgcctgc

SEQ ID NO: 1673455 - DNA, 15 bp, Homo sapiens
aggtgcacgcctgca

SEQ ID NO: 1673456 - DNA, 15 bp, Homo sapiens
ggtgcacgcctgcag

SEQ ID NO: 1673457 - DNA, 15 bp, Homo sapiens
gtgcacgcctgcagt

SEQ ID NO: 1673458 - DNA, 15 bp, Homo sapiens
tgcacgcctgcagtc

SEQ ID NO: 1673459 - DNA, 15 bp, Homo sapiens
gcacgcctgcagtcc

SEQ ID NO: 1673460 - DNA, 15 bp, Homo sapiens
cacgcctgcagtcct

SEQ ID NO: 1673461 - DNA, 15 bp, Homo sapiens
acgcctgcagtccta

SEQ ID NO: 1673462 - DNA, 15 bp, Homo sapiens
cgcctgcagtcctag

SEQ ID NO: 1673463 - DNA, 15 bp, Homo sapiens
gcctgcagtcctagc

SEQ ID NO: 1673464 - DNA, 15 bp, Homo sapiens
cctgcagtcctagct

SEQ ID NO: 1673465 - DNA, 15 bp, Homo sapiens
ctgcagtcctagcta

SEQ ID NO: 1673466 - DNA, 15 bp, Homo sapiens
tgcagtcctagctac

SEQ ID NO: 1673467 - DNA, 15 bp, Homo sapiens
gcagtcctagctact

SEQ ID NO: 1673468 - DNA, 15 bp, Homo sapiens
cagtcctagctactc

SEQ ID NO: 1673469 - DNA, 15 bp, Homo sapiens
agtcctagctactcc

SEQ ID NO: 1673470 - DNA, 15 bp, Homo sapiens
gtcctagctactccc

SEQ ID NO: 1673471 - DNA, 15 bp, Homo sapiens
tcctagctactccca

SEQ ID NO: 1673472 - DNA, 15 bp, Homo sapiens
cctagctactcccag

SEQ ID NO: 1673473 - DNA, 15 bp, Homo sapiens
ctagctactcccaga

SEQ ID NO: 1673474 - DNA, 15 bp, Homo sapiens
tagctactcccagag

SEQ ID NO: 1673475 - DNA, 15 bp, Homo sapiens
agctactcccagagg

SEQ ID NO: 1673476 - DNA, 15 bp, Homo sapiens
gctactcccagaggc

SEQ ID NO: 1673477 - DNA, 15 bp, Homo sapiens
ctactcccagaggct

SEQ ID NO: 1673478 - DNA, 15 bp, Homo sapiens
tactcccagaggctg

SEQ ID NO: 1673479 - DNA, 15 bp, Homo sapiens
actcccagaggctga

SEQ ID NO: 1673480 - DNA, 15 bp, Homo sapiens
ctcccagaggctgag

SEQ ID NO: 1673481 - DNA, 15 bp, Homo sapiens
tcccagaggctgagg

SEQ ID NO: 1673482 - DNA, 15 bp, Homo sapiens
cccagaggctgaggc

SEQ ID NO: 1673483 - DNA, 15 bp, Homo sapiens
ccagaggctgaggcg

SEQ ID NO: 1673484 - DNA, 15 bp, Homo sapiens
cagaggctgaggcgg

SEQ ID NO: 1673485 - DNA, 15 bp, Homo sapiens
gctgaggcgggagac

SEQ ID NO: 1673486 - DNA, 15 bp, Homo sapiens
ctgaggcgggagact

SEQ ID NO: 1673487 - DNA, 15 bp, Homo sapiens
tgaggcgggagactt

SEQ ID NO: 1673488 - DNA, 15 bp, Homo sapiens
gaggcgggagacttg

SEQ ID NO: 1673489 - DNA, 15 bp, Homo sapiens
aggcgggagacttgc

SEQ ID NO: 1673490 - DNA, 15 bp, Homo sapiens
ggcgggagacttgct

SEQ ID NO: 1673491 - DNA, 15 bp, Homo sapiens
gcgggagacttgctt

SEQ ID NO: 1673492 - DNA, 15 bp, Homo sapiens
cgggagacttgcttg

SEQ ID NO: 1673493 - DNA, 15 bp, Homo sapiens
gggagacttgcttga

SEQ ID NO: 1673494 - DNA, 15 bp, Homo sapiens
ggagacttgcttgag

SEQ ID NO: 1673495 - DNA, 15 bp, Homo sapiens
gagacttgcttgagc

SEQ ID NO: 1673496 - DNA, 15 bp, Homo sapiens
agacttgcttgagcc

SEQ ID NO: 1673497 - DNA, 15 bp, Homo sapiens
gacttgcttgagccc

SEQ ID NO: 1673498 - DNA, 15 bp, Homo sapiens
acttgcttgagccca

SEQ ID NO: 1673499 - DNA, 15 bp, Homo sapiens
cttgcttgagcccaa

SEQ ID NO: 1673500 - DNA, 15 bp, Homo sapiens
tgagcccaagagttg

SEQ ID NO: 1673501 - DNA, 15 bp, Homo sapiens
gagcccaagagttga

SEQ ID NO: 1673502 - DNA, 15 bp, Homo sapiens
agcccaagagttgaa

SEQ ID NO: 1673503 - DNA, 15 bp, Homo sapiens
gcccaagagttgaag

SEQ ID NO: 1673504 - DNA, 15 bp, Homo sapiens
cccaagagttgaagt

SEQ ID NO: 1673505 - DNA, 15 bp, Homo sapiens
ccaagagttgaagtc

SEQ ID NO: 1673506 - DNA, 15 bp, Homo sapiens
caagagttgaagtcc

SEQ ID NO: 1673507 - DNA, 15 bp, Homo sapiens
aagagttgaagtcca

SEQ ID NO: 1673508 - DNA, 15 bp, Homo sapiens
agagttgaagtccag

SEQ ID NO: 1673509 - DNA, 15 bp, Homo sapiens
gagttgaagtccagc

SEQ ID NO: 1673510 - DNA, 15 bp, Homo sapiens
agttgaagtccagcc

SEQ ID NO: 1673511 - DNA, 15 bp, Homo sapiens
gttgaagtccagcct

SEQ ID NO: 1673512 - DNA, 15 bp, Homo sapiens
ttgaagtccagcctg

SEQ ID NO: 1673513 - DNA, 15 bp, Homo sapiens
tgaagtccagcctgg

SEQ ID NO: 1673514 - DNA, 15 bp, Homo sapiens
gaagtccagcctggg

SEQ ID NO: 1673515 - DNA, 15 bp, Homo sapiens
ctgggcaacatagcg

SEQ ID NO: 1673516 - DNA, 15 bp, Homo sapiens
tgggcaacatagcga

SEQ ID NO: 1673517 - DNA, 15 bp, Homo sapiens
gggcaacatagcgag

SEQ ID NO: 1673518 - DNA, 15 bp, Homo sapiens
ggcaacatagcgaga

SEQ ID NO: 1673519 - DNA, 15 bp, Homo sapiens
gcaacatagcgagac

SEQ ID NO: 1673520 - DNA, 15 bp, Homo sapiens
caacatagcgagacc

SEQ ID NO: 1673521 - DNA, 15 bp, Homo sapiens
aacatagcgagaccc

SEQ ID NO: 1673522 - DNA, 15 bp, Homo sapiens
acatagcgagacccc

SEQ ID NO: 1673523 - DNA, 15 bp, Homo sapiens
catagcgagaccccc

SEQ ID NO: 1673524 - DNA, 15 bp, Homo sapiens
atagcgagaccccca

SEQ ID NO: 1673525 - DNA, 15 bp, Homo sapiens
tagcgagacccccat

SEQ ID NO: 1673526 - DNA, 15 bp, Homo sapiens
agcgagacccccatc

SEQ ID NO: 1673527 - DNA, 15 bp, Homo sapiens
gcgagacccccatct

SEQ ID NO: 1673528 - DNA, 15 bp, Homo sapiens
cgagacccccatctc

SEQ ID NO: 1673529 - DNA, 15 bp, Homo sapiens
gacccccatctctaa

SEQ ID NO: 1673530 - DNA, 15 bp, Homo sapiens
acccccatctctaaa

SEQ ID NO: 1673531 - DNA, 15 bp, Homo sapiens
cccccatctctaaaa

SEQ ID NO: 1673532 - DNA, 15 bp, Homo sapiens
cccatctctaaaaat

SEQ ID NO: 1673533 - DNA, 15 bp, Homo sapiens
ccatctctaaaaata

SEQ ID NO: 1673534 - DNA, 15 bp, Homo sapiens
catctctaaaaataa

SEQ ID NO: 1673535 - DNA, 15 bp, Homo sapiens
tctctaaaaataaaa

SEQ ID NO: 1673536 - DNA, 15 bp, Homo sapiens
ctctaaaaataaaaa

SEQ ID NO: 1673537 - DNA, 15 bp, Homo sapiens
tctaaaaataaaaat

SEQ ID NO: 1673538 - DNA, 15 bp, Homo sapiens
ctaaaaataaaaata

SEQ ID NO: 1673539 - DNA, 15 bp, Homo sapiens
taaaaataaaaataa

SEQ ID NO: 1673540 - DNA, 15 bp, Homo sapiens
aaaaataaaaataat

SEQ ID NO: 1673541 - DNA, 15 bp, Homo sapiens
aaaataaaaataatg

SEQ ID NO: 1673542 - DNA, 15 bp, Homo sapiens
aaataaaaataatgc

SEQ ID NO: 1673543 - DNA, 15 bp, Homo sapiens
aataaaaataatgca

SEQ ID NO: 1673544 - DNA, 15 bp, Homo sapiens
ataaaaataatgcat

SEQ ID NO: 1673545 - DNA, 15 bp, Homo sapiens
taaaaataatgcatt

SEQ ID NO: 1673546 - DNA, 15 bp, Homo sapiens
aaaaataatgcatta

SEQ ID NO: 1673547 - DNA, 15 bp, Homo sapiens
aaaataatgcattag

SEQ ID NO: 1673548 - DNA, 15 bp, Homo sapiens
aaataatgcattaga

SEQ ID NO: 1673549 - DNA, 15 bp, Homo sapiens
aataatgcattagaa

SEQ ID NO: 1673550 - DNA, 15 bp, Homo sapiens
ataatgcattagaat

SEQ ID NO: 1673551 - DNA, 15 bp, Homo sapiens
taatgcattagaata

SEQ ID NO: 1673552 - DNA, 15 bp, Homo sapiens
aatgcattagaatat

SEQ ID NO: 1673553 - DNA, 15 bp, Homo sapiens
atgcattagaatatt

SEQ ID NO: 1673554 - DNA, 15 bp, Homo sapiens
tgcattagaatatta

SEQ ID NO: 1673555 - DNA, 15 bp, Homo sapiens
gcattagaatattat

SEQ ID NO: 1673556 - DNA, 15 bp, Homo sapiens
cattagaatattatt

SEQ ID NO: 1673557 - DNA, 15 bp, Homo sapiens
attagaatattattg

SEQ ID NO: 1673558 - DNA, 15 bp, Homo sapiens
ttagaatattattgg

SEQ ID NO: 1673559 - DNA, 15 bp, Homo sapiens
tagaatattattgga

SEQ ID NO: 1673560 - DNA, 15 bp, Homo sapiens
agaatattattggat

SEQ ID NO: 1673561 - DNA, 15 bp, Homo sapiens
gaatattattggatt

SEQ ID NO: 1673562 - DNA, 15 bp, Homo sapiens
aatattattggattc

SEQ ID NO: 1673563 - DNA, 15 bp, Homo sapiens
atattattggattcc

SEQ ID NO: 1673564 - DNA, 15 bp, Homo sapiens
tattattggattcct

SEQ ID NO: 1673565 - DNA, 15 bp, Homo sapiens
attattggattcctg

SEQ ID NO: 1673566 - DNA, 15 bp, Homo sapiens
ttattggattcctgg

SEQ ID NO: 1673567 - DNA, 15 bp, Homo sapiens
tattggattcctggg

SEQ ID NO: 1673568 - DNA, 15 bp, Homo sapiens
attggattcctgggc

SEQ ID NO: 1673569 - DNA, 15 bp, Homo sapiens
ttggattcctgggca

SEQ ID NO: 1673570 - DNA, 15 bp, Homo sapiens
tggattcctgggcag

SEQ ID NO: 1673571 - DNA, 15 bp, Homo sapiens
ggattcctgggcagg

SEQ ID NO: 1673572 - DNA, 15 bp, Homo sapiens
gattcctgggcaggg

SEQ ID NO: 1673573 - DNA, 15 bp, Homo sapiens
attcctgggcagggc

SEQ ID NO: 1673574 - DNA, 15 bp, Homo sapiens
ttcctgggcagggca

SEQ ID NO: 1673575 - DNA, 15 bp, Homo sapiens
tcctgggcagggcac

SEQ ID NO: 1673576 - DNA, 15 bp, Homo sapiens
cctgggcagggcaca

SEQ ID NO: 1673577 - DNA, 15 bp, Homo sapiens
ctgggcagggcacag

SEQ ID NO: 1673578 - DNA, 15 bp, Homo sapiens
tgggcagggcacagt

SEQ ID NO: 1673579 - DNA, 15 bp, Homo sapiens
gggcagggcacagtg

SEQ ID NO: 1673580 - DNA, 15 bp, Homo sapiens
gggaggctgaagcac

SEQ ID NO: 1673581 - DNA, 15 bp, Homo sapiens
ggaggctgaagcacg

SEQ ID NO: 1673582 - DNA, 15 bp, Homo sapiens
gaggctgaagcacga

SEQ ID NO: 1673583 - DNA, 15 bp, Homo sapiens
aggctgaagcacgag

SEQ ID NO: 1673584 - DNA, 15 bp, Homo sapiens
ggctgaagcacgaga

SEQ ID NO: 1673585 - DNA, 15 bp, Homo sapiens
gctgaagcacgagaa

SEQ ID NO: 1673586 - DNA, 15 bp, Homo sapiens
ctgaagcacgagaat

SEQ ID NO: 1673587 - DNA, 15 bp, Homo sapiens
tgaagcacgagaatc

SEQ ID NO: 1673588 - DNA, 15 bp, Homo sapiens
gaagcacgagaatcg

SEQ ID NO: 1673589 - DNA, 15 bp, Homo sapiens
aagcacgagaatcgc

SEQ ID NO: 1673590 - DNA, 15 bp, Homo sapiens
agcacgagaatcgct

SEQ ID NO: 1673591 - DNA, 15 bp, Homo sapiens
gcacgagaatcgctt

SEQ ID NO: 1673592 - DNA, 15 bp, Homo sapiens
cacgagaatcgcttg

SEQ ID NO: 1673593 - DNA, 15 bp, Homo sapiens
acgagaatcgcttga

SEQ ID NO: 1673594 - DNA, 15 bp, Homo sapiens
cgagaatcgcttgaa

SEQ ID NO: 1673595 - DNA, 15 bp, Homo sapiens
agaatcgcttgaatc

SEQ ID NO: 1673596 - DNA, 15 bp, Homo sapiens
gaatcgcttgaatcc

SEQ ID NO: 1673597 - DNA, 15 bp, Homo sapiens
aatcgcttgaatcca

SEQ ID NO: 1673598 - DNA, 15 bp, Homo sapiens
atcgcttgaatccag

SEQ ID NO: 1673599 - DNA, 15 bp, Homo sapiens
tcgcttgaatccagg

SEQ ID NO: 1673600 - DNA, 15 bp, Homo sapiens
cgcttgaatccagga

SEQ ID NO: 1673601 - DNA, 15 bp, Homo sapiens
gcttgaatccaggag

SEQ ID NO: 1673602 - DNA, 15 bp, Homo sapiens
cttgaatccaggagg

SEQ ID NO: 1673603 - DNA, 15 bp, Homo sapiens
ttgaatccaggaggc

SEQ ID NO: 1673604 - DNA, 15 bp, Homo sapiens
tgaatccaggaggcg

SEQ ID NO: 1673605 - DNA, 15 bp, Homo sapiens
gaatccaggaggcgg

SEQ ID NO: 1673606 - DNA, 15 bp, Homo sapiens
aatccaggaggcgga

SEQ ID NO: 1673607 - DNA, 15 bp, Homo sapiens
atccaggaggcggag

SEQ ID NO: 1673608 - DNA, 15 bp, Homo sapiens
tccaggaggcggagg

SEQ ID NO: 1673609 - DNA, 15 bp, Homo sapiens
tgagctgagattgcg

SEQ ID NO: 1673610 - DNA, 15 bp, Homo sapiens
gagctgagattgcgc

SEQ ID NO: 1673611 - DNA, 15 bp, Homo sapiens
ctgagattgcgccat

SEQ ID NO: 1673612 - DNA, 15 bp, Homo sapiens
tgagattgcgccatt

SEQ ID NO: 1673613 - DNA, 15 bp, Homo sapiens
cactccagcctggag

SEQ ID NO: 1673614 - DNA, 15 bp, Homo sapiens
actccagcctggagg

SEQ ID NO: 1673615 - DNA, 15 bp, Homo sapiens
ctccagcctggagga

SEQ ID NO: 1673616 - DNA, 15 bp, Homo sapiens
tccagcctggaggac

SEQ ID NO: 1673617 - DNA, 15 bp, Homo sapiens
ccagcctggaggaca

SEQ ID NO: 1673618 - DNA, 15 bp, Homo sapiens
cagcctggaggacaa

SEQ ID NO: 1673619 - DNA, 15 bp, Homo sapiens
agcctggaggacaag

SEQ ID NO: 1673620 - DNA, 15 bp, Homo sapiens
gcctggaggacaaga

SEQ ID NO: 1673621 - DNA, 15 bp, Homo sapiens
cctggaggacaagag

SEQ ID NO: 1673622 - DNA, 15 bp, Homo sapiens
ctggaggacaagagt

SEQ ID NO: 1673623 - DNA, 15 bp, Homo sapiens
tggaggacaagagtg

SEQ ID NO: 1673624 - DNA, 15 bp, Homo sapiens
ggaggacaagagtga

SEQ ID NO: 1673625 - DNA, 15 bp, Homo sapiens
gaggacaagagtgaa

SEQ ID NO: 1673626 - DNA, 15 bp, Homo sapiens
aggacaagagtgaaa

SEQ ID NO: 1673627 - DNA, 15 bp, Homo sapiens
ggacaagagtgaaac

SEQ ID NO: 1673628 - DNA, 15 bp, Homo sapiens
gacaagagtgaaact

SEQ ID NO: 1673629 - DNA, 15 bp, Homo sapiens
gagtgaaactccatt

SEQ ID NO: 1673630 - DNA, 15 bp, Homo sapiens
agtgaaactccattc

SEQ ID NO: 1673631 - DNA, 15 bp, Homo sapiens
gtgaaactccattcc

SEQ ID NO: 1673632 - DNA, 15 bp, Homo sapiens
tgaaactccattccc

SEQ ID NO: 1673633 - DNA, 15 bp, Homo sapiens
gaaactccattcccc

SEQ ID NO: 1673634 - DNA, 15 bp, Homo sapiens
aaactccattcccct

SEQ ID NO: 1673635 - DNA, 15 bp, Homo sapiens
aactccattcccctc

SEQ ID NO: 1673636 - DNA, 15 bp, Homo sapiens
actccattcccctct

SEQ ID NO: 1673637 - DNA, 15 bp, Homo sapiens
ctccattcccctctg

SEQ ID NO: 1673638 - DNA, 15 bp, Homo sapiens
tccattcccctctgc

SEQ ID NO: 1673639 - DNA, 15 bp, Homo sapiens
ccattcccctctgca

SEQ ID NO: 1673640 - DNA, 15 bp, Homo sapiens
cattcccctctgcaa

SEQ ID NO: 1673641 - DNA, 15 bp, Homo sapiens
attcccctctgcaaa

SEQ ID NO: 1673642 - DNA, 15 bp, Homo sapiens
ttcccctctgcaaag

SEQ ID NO: 1673643 - DNA, 15 bp, Homo sapiens
tcccctctgcaaaga

SEQ ID NO: 1673644 - DNA, 15 bp, Homo sapiens
cccctctgcaaagaa

SEQ ID NO: 1673645 - DNA, 15 bp, Homo sapiens
ccctctgcaaagaaa

SEQ ID NO: 1673646 - DNA, 15 bp, Homo sapiens
cctctgcaaagaaaa

SEQ ID NO: 1673647 - DNA, 15 bp, Homo sapiens
ctctgcaaagaaaag

SEQ ID NO: 1673648 - DNA, 15 bp, Homo sapiens
tctgcaaagaaaagg

SEQ ID NO: 1673649 - DNA, 15 bp, Homo sapiens
ctgcaaagaaaagga

SEQ ID NO: 1673650 - DNA, 15 bp, Homo sapiens
tgcaaagaaaaggaa

SEQ ID NO: 1673651 - DNA, 15 bp, Homo sapiens
gcaaagaaaaggaat

SEQ ID NO: 1673652 - DNA, 15 bp, Homo sapiens
caaagaaaaggaata

SEQ ID NO: 1673653 - DNA, 15 bp, Homo sapiens
aaagaaaaggaatat

SEQ ID NO: 1673654 - DNA, 15 bp, Homo sapiens
aagaaaaggaatatt

SEQ ID NO: 1673655 - DNA, 15 bp, Homo sapiens
agaaaaggaatatta

SEQ ID NO: 1673656 - DNA, 15 bp, Homo sapiens
gaaaaggaatattat

SEQ ID NO: 1673657 - DNA, 15 bp, Homo sapiens
aaaaggaatattatc

SEQ ID NO: 1673658 - DNA, 15 bp, Homo sapiens
aaaggaatattatca

SEQ ID NO: 1673659 - DNA, 15 bp, Homo sapiens
aaggaatattatcag

SEQ ID NO: 1673660 - DNA, 15 bp, Homo sapiens
aggaatattatcaga

SEQ ID NO: 1673661 - DNA, 15 bp, Homo sapiens
ggaatattatcagat

SEQ ID NO: 1673662 - DNA, 15 bp, Homo sapiens
gaatattatcagatt

SEQ ID NO: 1673663 - DNA, 15 bp, Homo sapiens
aatattatcagattc

SEQ ID NO: 1673664 - DNA, 15 bp, Homo sapiens
atattatcagattcc

SEQ ID NO: 1673665 - DNA, 15 bp, Homo sapiens
tattatcagattcct

SEQ ID NO: 1673666 - DNA, 15 bp, Homo sapiens
attatcagattccta

SEQ ID NO: 1673667 - DNA, 15 bp, Homo sapiens
ttatcagattcctaa

SEQ ID NO: 1673668 - DNA, 15 bp, Homo sapiens
tatcagattcctaag

SEQ ID NO: 1673669 - DNA, 15 bp, Homo sapiens
atcagattcctaagc

SEQ ID NO: 1673670 - DNA, 15 bp, Homo sapiens
tcagattcctaagct

SEQ ID NO: 1673671 - DNA, 15 bp, Homo sapiens
cagattcctaagctt

SEQ ID NO: 1673672 - DNA, 15 bp, Homo sapiens
agattcctaagcttt

SEQ ID NO: 1673673 - DNA, 15 bp, Homo sapiens
gattcctaagctttt

SEQ ID NO: 1673674 - DNA, 15 bp, Homo sapiens
attcctaagcttttt

SEQ ID NO: 1673675 - DNA, 15 bp, Homo sapiens
ttcctaagctttttg

SEQ ID NO: 1673676 - DNA, 15 bp, Homo sapiens
tcctaagctttttgg

SEQ ID NO: 1673677 - DNA, 15 bp, Homo sapiens
cctaagctttttggc

SEQ ID NO: 1673678 - DNA, 15 bp, Homo sapiens
ctaagctttttggct

SEQ ID NO: 1673679 - DNA, 15 bp, Homo sapiens
taagctttttggctc

SEQ ID NO: 1673680 - DNA, 15 bp, Homo sapiens
aagctttttggctcc

SEQ ID NO: 1673681 - DNA, 15 bp, Homo sapiens
agctttttggctccc

SEQ ID NO: 1673682 - DNA, 15 bp, Homo sapiens
gctttttggctcccc

SEQ ID NO: 1673683 - DNA, 15 bp, Homo sapiens
ctttttggctccccc

SEQ ID NO: 1673684 - DNA, 15 bp, Homo sapiens
tttttggctccccct

SEQ ID NO: 1673685 - DNA, 15 bp, Homo sapiens
ttttggctccccctt

SEQ ID NO: 1673686 - DNA, 15 bp, Homo sapiens
tttggctcccccttt

SEQ ID NO: 1673687 - DNA, 15 bp, Homo sapiens
ttggctcccccttta

SEQ ID NO: 1673688 - DNA, 15 bp, Homo sapiens
tggctccccctttag

SEQ ID NO: 1673689 - DNA, 15 bp, Homo sapiens
ggctccccctttagt

SEQ ID NO: 1673690 - DNA, 15 bp, Homo sapiens
gctccccctttagtt

SEQ ID NO: 1673691 - DNA, 15 bp, Homo sapiens
ctccccctttagttt

SEQ ID NO: 1673692 - DNA, 15 bp, Homo sapiens
tccccctttagtttg

SEQ ID NO: 1673693 - DNA, 15 bp, Homo sapiens
ccccctttagtttgg

SEQ ID NO: 1673694 - DNA, 15 bp, Homo sapiens
cccctttagtttggg

SEQ ID NO: 1673695 - DNA, 15 bp, Homo sapiens
ccctttagtttgggg

SEQ ID NO: 1673696 - DNA, 15 bp, Homo sapiens
cctttagtttggggg

SEQ ID NO: 1673697 - DNA, 15 bp, Homo sapiens
ctttagtttgggggc

SEQ ID NO: 1673698 - DNA, 15 bp, Homo sapiens
tttagtttgggggct

SEQ ID NO: 1673699 - DNA, 15 bp, Homo sapiens
ttagtttgggggctg

SEQ ID NO: 1673700 - DNA, 15 bp, Homo sapiens
tagtttgggggctgg

SEQ ID NO: 1673701 - DNA, 15 bp, Homo sapiens
agtttgggggctggg

SEQ ID NO: 1673702 - DNA, 15 bp, Homo sapiens
gtttgggggctgggg

SEQ ID NO: 1673703 - DNA, 15 bp, Homo sapiens
tttgggggctggggt

SEQ ID NO: 1673704 - DNA, 15 bp, Homo sapiens
ttgggggctggggtg

SEQ ID NO: 1673705 - DNA, 15 bp, Homo sapiens
tgggggctggggtgg

SEQ ID NO: 1673706 - DNA, 15 bp, Homo sapiens
gggggctggggtggt

SEQ ID NO: 1673707 - DNA, 15 bp, Homo sapiens
ggggctggggtggtg

SEQ ID NO: 1673708 - DNA, 15 bp, Homo sapiens
gggctggggtggtga

SEQ ID NO: 1673709 - DNA, 15 bp, Homo sapiens
ggctggggtggtgag

SEQ ID NO: 1673710 - DNA, 15 bp, Homo sapiens
gctggggtggtgagt

SEQ ID NO: 1673711 - DNA, 15 bp, Homo sapiens
ctggggtggtgagtg

SEQ ID NO: 1673712 - DNA, 15 bp, Homo sapiens
tggggtggtgagtgt

SEQ ID NO: 1673713 - DNA, 15 bp, Homo sapiens
ggggtggtgagtgtc

SEQ ID NO: 1673714 - DNA, 15 bp, Homo sapiens
gggtggtgagtgtct

SEQ ID NO: 1673715 - DNA, 15 bp, Homo sapiens
ggtggtgagtgtctg

SEQ ID NO: 1673716 - DNA, 15 bp, Homo sapiens
gtggtgagtgtctga

SEQ ID NO: 1673717 - DNA, 15 bp, Homo sapiens
tggtgagtgtctgac

SEQ ID NO: 1673718 - DNA, 15 bp, Homo sapiens
ggtgagtgtctgacc

SEQ ID NO: 1673719 - DNA, 15 bp, Homo sapiens
gtgagtgtctgacct

SEQ ID NO: 1673720 - DNA, 15 bp, Homo sapiens
tgagtgtctgacctg

SEQ ID NO: 1673721 - DNA, 15 bp, Homo sapiens
gagtgtctgacctgg

SEQ ID NO: 1673722 - DNA, 15 bp, Homo sapiens
agtgtctgacctggc

SEQ ID NO: 1673723 - DNA, 15 bp, Homo sapiens
gtgtctgacctggcc

SEQ ID NO: 1673724 - DNA, 15 bp, Homo sapiens
tgtctgacctggcct

SEQ ID NO: 1673725 - DNA, 15 bp, Homo sapiens
gtctgacctggcctc

SEQ ID NO: 1673726 - DNA, 15 bp, Homo sapiens
tctgacctggcctca

SEQ ID NO: 1673727 - DNA, 15 bp, Homo sapiens
ctgacctggcctcac

SEQ ID NO: 1673728 - DNA, 15 bp, Homo sapiens
tgacctggcctcact

SEQ ID NO: 1673729 - DNA, 15 bp, Homo sapiens
gacctggcctcactg

SEQ ID NO: 1673730 - DNA, 15 bp, Homo sapiens
acctggcctcactgt

SEQ ID NO: 1673731 - DNA, 15 bp, Homo sapiens
cctggcctcactgtc

SEQ ID NO: 1673732 - DNA, 15 bp, Homo sapiens
ctggcctcactgtcc

SEQ ID NO: 1673733 - DNA, 15 bp, Homo sapiens
tggcctcactgtcct

SEQ ID NO: 1673734 - DNA, 15 bp, Homo sapiens
ggcctcactgtcctc

SEQ ID NO: 1673735 - DNA, 15 bp, Homo sapiens
gcctcactgtcctcc

SEQ ID NO: 1673736 - DNA, 15 bp, Homo sapiens
cctcactgtcctccc

SEQ ID NO: 1673737 - DNA, 15 bp, Homo sapiens
ctcactgtcctccct

SEQ ID NO: 1673738 - DNA, 15 bp, Homo sapiens
tcactgtcctccctg

SEQ ID NO: 1673739 - DNA, 15 bp, Homo sapiens
cactgtcctccctgg

SEQ ID NO: 1673740 - DNA, 15 bp, Homo sapiens
actgtcctccctgga

SEQ ID NO: 1673741 - DNA, 15 bp, Homo sapiens
ctgtcctccctggat

SEQ ID NO: 1673742 - DNA, 15 bp, Homo sapiens
tgtcctccctggatg

SEQ ID NO: 1673743 - DNA, 15 bp, Homo sapiens
gtcctccctggatgt

SEQ ID NO: 1673744 - DNA, 15 bp, Homo sapiens
tcctccctggatgtg

SEQ ID NO: 1673745 - DNA, 15 bp, Homo sapiens
cctccctggatgtga

SEQ ID NO: 1673746 - DNA, 15 bp, Homo sapiens
ctccctggatgtgat

SEQ ID NO: 1673747 - DNA, 15 bp, Homo sapiens
tccctggatgtgatg

SEQ ID NO: 1673748 - DNA, 15 bp, Homo sapiens
ccctggatgtgatga

SEQ ID NO: 1673749 - DNA, 15 bp, Homo sapiens
cctggatgtgatgag

SEQ ID NO: 1673750 - DNA, 15 bp, Homo sapiens
ctggatgtgatgaga

SEQ ID NO: 1673751 - DNA, 15 bp, Homo sapiens
tggatgtgatgagac

SEQ ID NO: 1673752 - DNA, 15 bp, Homo sapiens
ggatgtgatgagacc

SEQ ID NO: 1673753 - DNA, 15 bp, Homo sapiens
gatgtgatgagaccc

SEQ ID NO: 1673754 - DNA, 15 bp, Homo sapiens
atgtgatgagaccca

SEQ ID NO: 1673755 - DNA, 15 bp, Homo sapiens
tgtgatgagacccag

SEQ ID NO: 1673756 - DNA, 15 bp, Homo sapiens
gtgatgagacccagg

SEQ ID NO: 1673757 - DNA, 15 bp, Homo sapiens
tgatgagacccaggt

SEQ ID NO: 1673758 - DNA, 15 bp, Homo sapiens
gatgagacccaggtg

SEQ ID NO: 1673759 - DNA, 15 bp, Homo sapiens
atgagacccaggtgt

SEQ ID NO: 1673760 - DNA, 15 bp, Homo sapiens
tgagacccaggtgtg

SEQ ID NO: 1673761 - DNA, 15 bp, Homo sapiens
gagacccaggtgtgg

SEQ ID NO: 1673762 - DNA, 15 bp, Homo sapiens
agacccaggtgtggg

SEQ ID NO: 1673763 - DNA, 15 bp, Homo sapiens
gacccaggtgtgggt

SEQ ID NO: 1673764 - DNA, 15 bp, Homo sapiens
acccaggtgtgggtc

SEQ ID NO: 1673765 - DNA, 15 bp, Homo sapiens
cccaggtgtgggtca

SEQ ID NO: 1673766 - DNA, 15 bp, Homo sapiens
ccaggtgtgggtcag

SEQ ID NO: 1673767 - DNA, 15 bp, Homo sapiens
caggtgtgggtcagg

SEQ ID NO: 1673768 - DNA, 15 bp, Homo sapiens
aggtgtgggtcagga

SEQ ID NO: 1673769 - DNA, 15 bp, Homo sapiens
ggtgtgggtcaggat

SEQ ID NO: 1673770 - DNA, 15 bp, Homo sapiens
gtgtgggtcaggatg

SEQ ID NO: 1673771 - DNA, 15 bp, Homo sapiens
tgtgggtcaggatgt

SEQ ID NO: 1673772 - DNA, 15 bp, Homo sapiens
gtgggtcaggatgtc

SEQ ID NO: 1673773 - DNA, 15 bp, Homo sapiens
tgggtcaggatgtca

SEQ ID NO: 1673774 - DNA, 15 bp, Homo sapiens
gggtcaggatgtcat

SEQ ID NO: 1673775 - DNA, 15 bp, Homo sapiens
ggtcaggatgtcatt

SEQ ID NO: 1673776 - DNA, 15 bp, Homo sapiens
gtcaggatgtcattc

SEQ ID NO: 1673777 - DNA, 15 bp, Homo sapiens
tcaggatgtcattcg

SEQ ID NO: 1673778 - DNA, 15 bp, Homo sapiens
caggatgtcattcgt

SEQ ID NO: 1673779 - DNA, 15 bp, Homo sapiens
aggatgtcattcgtt

SEQ ID NO: 1673780 - DNA, 15 bp, Homo sapiens
ggatgtcattcgttt

SEQ ID NO: 1673781 - DNA, 15 bp, Homo sapiens
gatgtcattcgtttg

SEQ ID NO: 1673782 - DNA, 15 bp, Homo sapiens
atgtcattcgtttgt

SEQ ID NO: 1673783 - DNA, 15 bp, Homo sapiens
tgtcattcgtttgtc

SEQ ID NO: 1673784 - DNA, 15 bp, Homo sapiens
gtcattcgtttgtcc

SEQ ID NO: 1673785 - DNA, 15 bp, Homo sapiens
tcattcgtttgtcca

SEQ ID NO: 1673786 - DNA, 15 bp, Homo sapiens
cattcgtttgtccac

SEQ ID NO: 1673787 - DNA, 15 bp, Homo sapiens
attcgtttgtccacc

SEQ ID NO: 1673788 - DNA, 15 bp, Homo sapiens
ttcgtttgtccacca

SEQ ID NO: 1673789 - DNA, 15 bp, Homo sapiens
tcgtttgtccaccag

SEQ ID NO: 1673790 - DNA, 15 bp, Homo sapiens
cgtttgtccaccaga

SEQ ID NO: 1673791 - DNA, 15 bp, Homo sapiens
gtttgtccaccagag

SEQ ID NO: 1673792 - DNA, 15 bp, Homo sapiens
tttgtccaccagagg

SEQ ID NO: 1673793 - DNA, 15 bp, Homo sapiens
ttgtccaccagaggg

SEQ ID NO: 1673794 - DNA, 15 bp, Homo sapiens
tgtccaccagagggc

SEQ ID NO: 1673795 - DNA, 15 bp, Homo sapiens
gtccaccagagggcg

SEQ ID NO: 1673796 - DNA, 15 bp, Homo sapiens
tccaccagagggcgc

SEQ ID NO: 1673797 - DNA, 15 bp, Homo sapiens
ccaccagagggcgcc

SEQ ID NO: 1673798 - DNA, 15 bp, Homo sapiens
caccagagggcgccc

SEQ ID NO: 1673799 - DNA, 15 bp, Homo sapiens
accagagggcgccca

SEQ ID NO: 1673800 - DNA, 15 bp, Homo sapiens
ccagagggcgcccaa

SEQ ID NO: 1673801 - DNA, 15 bp, Homo sapiens
cagagggcgcccaaa

SEQ ID NO: 1673802 - DNA, 15 bp, Homo sapiens
agagggcgcccaaac

SEQ ID NO: 1673803 - DNA, 15 bp, Homo sapiens
gagggcgcccaaact

SEQ ID NO: 1673804 - DNA, 15 bp, Homo sapiens
agggcgcccaaactg

SEQ ID NO: 1673805 - DNA, 15 bp, Homo sapiens
gggcgcccaaactgc

SEQ ID NO: 1673806 - DNA, 15 bp, Homo sapiens
ggcgcccaaactgct

SEQ ID NO: 1673807 - DNA, 15 bp, Homo sapiens
gcgcccaaactgctt

SEQ ID NO: 1673808 - DNA, 15 bp, Homo sapiens
cgcccaaactgcttt

SEQ ID NO: 1673809 - DNA, 15 bp, Homo sapiens
gcccaaactgctttg

SEQ ID NO: 1673810 - DNA, 15 bp, Homo sapiens
cccaaactgctttga

SEQ ID NO: 1673811 - DNA, 15 bp, Homo sapiens
ccaaactgctttgag

SEQ ID NO: 1673812 - DNA, 15 bp, Homo sapiens
caaactgctttgagc

SEQ ID NO: 1673813 - DNA, 15 bp, Homo sapiens
aaactgctttgagct

SEQ ID NO: 1673814 - DNA, 15 bp, Homo sapiens
aactgctttgagctg

SEQ ID NO: 1673815 - DNA, 15 bp, Homo sapiens
actgctttgagctgc

SEQ ID NO: 1673816 - DNA, 15 bp, Homo sapiens
ctgctttgagctgct

SEQ ID NO: 1673817 - DNA, 15 bp, Homo sapiens
tgctttgagctgctg

SEQ ID NO: 1673818 - DNA, 15 bp, Homo sapiens
gctttgagctgctgg

SEQ ID NO: 1673819 - DNA, 15 bp, Homo sapiens
ctttgagctgctggg

SEQ ID NO: 1673820 - DNA, 15 bp, Homo sapiens
tttgagctgctggga

SEQ ID NO: 1673821 - DNA, 15 bp, Homo sapiens
ttgagctgctgggaa

SEQ ID NO: 1673822 - DNA, 15 bp, Homo sapiens
tgagctgctgggaaa

SEQ ID NO: 1673823 - DNA, 15 bp, Homo sapiens
gagctgctgggaaat

SEQ ID NO: 1673824 - DNA, 15 bp, Homo sapiens
agctgctgggaaatg

SEQ ID NO: 1673825 - DNA, 15 bp, Homo sapiens
gctgctgggaaatgg

SEQ ID NO: 1673826 - DNA, 15 bp, Homo sapiens
ctgctgggaaatggt

SEQ ID NO: 1673827 - DNA, 15 bp, Homo sapiens
tgctgggaaatggtg

SEQ ID NO: 1673828 - DNA, 15 bp, Homo sapiens
gctgggaaatggtgc

SEQ ID NO: 1673829 - DNA, 15 bp, Homo sapiens
ctgggaaatggtgct

SEQ ID NO: 1673830 - DNA, 15 bp, Homo sapiens
tgggaaatggtgctc

SEQ ID NO: 1673831 - DNA, 15 bp, Homo sapiens
gggaaatggtgctcc

SEQ ID NO: 1673832 - DNA, 15 bp, Homo sapiens
ggaaatggtgctcct

SEQ ID NO: 1673833 - DNA, 15 bp, Homo sapiens
gaaatggtgctccta

SEQ ID NO: 1673834 - DNA, 15 bp, Homo sapiens
aaatggtgctcctag

SEQ ID NO: 1673835 - DNA, 15 bp, Homo sapiens
aatggtgctcctaga

SEQ ID NO: 1673836 - DNA, 15 bp, Homo sapiens
atggtgctcctagac

SEQ ID NO: 1673837 - DNA, 15 bp, Homo sapiens
tggtgctcctagact

SEQ ID NO: 1673838 - DNA, 15 bp, Homo sapiens
ggtgctcctagactt

SEQ ID NO: 1673839 - DNA, 15 bp, Homo sapiens
gtgctcctagacttt

SEQ ID NO: 1673840 - DNA, 15 bp, Homo sapiens
tgctcctagactttt

SEQ ID NO: 1673841 - DNA, 15 bp, Homo sapiens
gctcctagactttta

SEQ ID NO: 1673842 - DNA, 15 bp, Homo sapiens
ctcctagacttttag

SEQ ID NO: 1673843 - DNA, 15 bp, Homo sapiens
tcctagacttttagc

SEQ ID NO: 1673844 - DNA, 15 bp, Homo sapiens
cctagacttttagca

SEQ ID NO: 1673845 - DNA, 15 bp, Homo sapiens
ctagacttttagcaa

SEQ ID NO: 1673846 - DNA, 15 bp, Homo sapiens
tagacttttagcaaa

SEQ ID NO: 1673847 - DNA, 15 bp, Homo sapiens
agacttttagcaaac

SEQ ID NO: 1673848 - DNA, 15 bp, Homo sapiens
gacttttagcaaaca

SEQ ID NO: 1673849 - DNA, 15 bp, Homo sapiens
acttttagcaaacaa

SEQ ID NO: 1673850 - DNA, 15 bp, Homo sapiens
cttttagcaaacaaa

SEQ ID NO: 1673851 - DNA, 15 bp, Homo sapiens
ttttagcaaacaaac

SEQ ID NO: 1673852 - DNA, 15 bp, Homo sapiens
tttagcaaacaaaca

SEQ ID NO: 1673853 - DNA, 15 bp, Homo sapiens
ttagcaaacaaacaa

SEQ ID NO: 1673854 - DNA, 15 bp, Homo sapiens
tagcaaacaaacaaa

SEQ ID NO: 1673855 - DNA, 15 bp, Homo sapiens
agcaaacaaacaaaa

SEQ ID NO: 1673856 - DNA, 15 bp, Homo sapiens
gcaaacaaacaaaaa

SEQ ID NO: 1673857 - DNA, 15 bp, Homo sapiens
caaacaaaaaaaaat

SEQ ID NO: 1673858 - DNA, 15 bp, Homo sapiens
aaacaaaaaaaaatg

SEQ ID NO: 1673859 - DNA, 15 bp, Homo sapiens
aacaaaaaaaaatgg

SEQ ID NO: 1673860 - DNA, 15 bp, Homo sapiens
acaaaaaaaaatggc

SEQ ID NO: 1673861 - DNA, 15 bp, Homo sapiens
caaaaaaaaatggca

SEQ ID NO: 1673862 - DNA, 15 bp, Homo sapiens
aaaaaaaaatggcac

SEQ ID NO: 1673863 - DNA, 15 bp, Homo sapiens
aaaaaaaatggcaca

SEQ ID NO: 1673864 - DNA, 15 bp, Homo sapiens
aaaaaaatggcacat

SEQ ID NO: 1673865 - DNA, 15 bp, Homo sapiens
aaaaaatggcacatc

SEQ ID NO: 1673866 - DNA, 15 bp, Homo sapiens
aaaaatggcacatcg

SEQ ID NO: 1673867 - DNA, 15 bp, Homo sapiens
aaaatggcacatcgg

SEQ ID NO: 1673868 - DNA, 15 bp, Homo sapiens
aaatggcacatcggc

SEQ ID NO: 1673869 - DNA, 15 bp, Homo sapiens
aatggcacatcggca

SEQ ID NO: 1673870 - DNA, 15 bp, Homo sapiens
atggcacatcggcaa

SEQ ID NO: 1673871 - DNA, 15 bp, Homo sapiens
tggcacatcggcaaa

SEQ ID NO: 1673872 - DNA, 15 bp, Homo sapiens
ggcacatcggcaaat

SEQ ID NO: 1673873 - DNA, 15 bp, Homo sapiens
gcacatcggcaaatt

SEQ ID NO: 1673874 - DNA, 15 bp, Homo sapiens
cacatcggcaaattt

SEQ ID NO: 1673875 - DNA, 15 bp, Homo sapiens
acatcggcaaatttc

SEQ ID NO: 1673876 - DNA, 15 bp, Homo sapiens
catcggcaaatttca

SEQ ID NO: 1673877 - DNA, 15 bp, Homo sapiens
atcggcaaatttcag

SEQ ID NO: 1673878 - DNA, 15 bp, Homo sapiens
tcggcaaatttcaga

SEQ ID NO: 1673879 - DNA, 15 bp, Homo sapiens
cggcaaatttcagac

SEQ ID NO: 1673880 - DNA, 15 bp, Homo sapiens
ggcaaatttcagacc

SEQ ID NO: 1673881 - DNA, 15 bp, Homo sapiens
gcaaatttcagacca

SEQ ID NO: 1673882 - DNA, 15 bp, Homo sapiens
caaatttcagaccat

SEQ ID NO: 1673883 - DNA, 15 bp, Homo sapiens
aaatttcagaccatt

SEQ ID NO: 1673884 - DNA, 15 bp, Homo sapiens
aatttcagaccattc

SEQ ID NO: 1673885 - DNA, 15 bp, Homo sapiens
atttcagaccattct

SEQ ID NO: 1673886 - DNA, 15 bp, Homo sapiens
tttcagaccattctt

SEQ ID NO: 1673887 - DNA, 15 bp, Homo sapiens
ttcagaccattcttt

SEQ ID NO: 1673888 - DNA, 15 bp, Homo sapiens
tcagaccattctttt

SEQ ID NO: 1673889 - DNA, 15 bp, Homo sapiens
cagaccattcttttt

SEQ ID NO: 1673890 - DNA, 15 bp, Homo sapiens
agaccattctttttt

SEQ ID NO: 1673891 - DNA, 15 bp, Homo sapiens
gaccattcttttttt

SEQ ID NO: 1673892 - DNA, 15 bp, Homo sapiens
accattctttttttt

SEQ ID NO: 1673893 - DNA, 15 bp, Homo sapiens
ccattcttttttttt

SEQ ID NO: 1673894 - DNA, 15 bp, Homo sapiens
tttttttttttggtt

SEQ ID NO: 1673895 - DNA, 15 bp, Homo sapiens
ttttttttttggttc

SEQ ID NO: 1673896 - DNA, 15 bp, Homo sapiens
tttttttttggttcc

SEQ ID NO: 1673897 - DNA, 15 bp, Homo sapiens
ttttttttggttcca

SEQ ID NO: 1673898 - DNA, 15 bp, Homo sapiens
tttttttggttccag

SEQ ID NO: 1673899 - DNA, 15 bp, Homo sapiens
ttttttggttccaga

SEQ ID NO: 1673900 - DNA, 15 bp, Homo sapiens
tttttggttccagag

SEQ ID NO: 1673901 - DNA, 15 bp, Homo sapiens
ttttggttccagagt

SEQ ID NO: 1673902 - DNA, 15 bp, Homo sapiens
tttggttccagagta

SEQ ID NO: 1673903 - DNA, 15 bp, Homo sapiens
ttggttccagagtag

SEQ ID NO: 1673904 - DNA, 15 bp, Homo sapiens
tggttccagagtagc

SEQ ID NO: 1673905 - DNA, 15 bp, Homo sapiens
ggttccagagtagct

SEQ ID NO: 1673906 - DNA, 15 bp, Homo sapiens
gttccagagtagctg

SEQ ID NO: 1673907 - DNA, 15 bp, Homo sapiens
ttccagagtagctga

SEQ ID NO: 1673908 - DNA, 15 bp, Homo sapiens
tccagagtagctgaa

SEQ ID NO: 1673909 - DNA, 15 bp, Homo sapiens
ccagagtagctgaaa

SEQ ID NO: 1673910 - DNA, 15 bp, Homo sapiens
cagagtagctgaaat

SEQ ID NO: 1673911 - DNA, 15 bp, Homo sapiens
agagtagctgaaatc

SEQ ID NO: 1673912 - DNA, 15 bp, Homo sapiens
gagtagctgaaatct

SEQ ID NO: 1673913 - DNA, 15 bp, Homo sapiens
agtagctgaaatctt

SEQ ID NO: 1673914 - DNA, 15 bp, Homo sapiens
gtagctgaaatcttt

SEQ ID NO: 1673915 - DNA, 15 bp, Homo sapiens
tagctgaaatctttg

SEQ ID NO: 1673916 - DNA, 15 bp, Homo sapiens
agctgaaatctttgt

SEQ ID NO: 1673917 - DNA, 15 bp, Homo sapiens
gctgaaatctttgtt

SEQ ID NO: 1673918 - DNA, 15 bp, Homo sapiens
ctgaaatctttgttc

SEQ ID NO: 1673919 - DNA, 15 bp, Homo sapiens
tgaaatctttgttca

SEQ ID NO: 1673920 - DNA, 15 bp, Homo sapiens
gaaatctttgttcag

SEQ ID NO: 1673921 - DNA, 15 bp, Homo sapiens
aaatctttgttcagt

SEQ ID NO: 1673922 - DNA, 15 bp, Homo sapiens
aatctttgttcagtt

SEQ ID NO: 1673923 - DNA, 15 bp, Homo sapiens
atctttgttcagtta

SEQ ID NO: 1673924 - DNA, 15 bp, Homo sapiens
tctttgttcagttac

SEQ ID NO: 1673925 - DNA, 15 bp, Homo sapiens
ctttgttcagttaca

SEQ ID NO: 1673926 - DNA, 15 bp, Homo sapiens
tttgttcagttacaa

SEQ ID NO: 1673927 - DNA, 15 bp, Homo sapiens
ttgttcagttacaag

SEQ ID NO: 1673928 - DNA, 15 bp, Homo sapiens
tgttcagttacaagc

SEQ ID NO: 1673929 - DNA, 15 bp, Homo sapiens
gttcagttacaagca

SEQ ID NO: 1673930 - DNA, 15 bp, Homo sapiens
ttcagttacaagcag

SEQ ID NO: 1673931 - DNA, 15 bp, Homo sapiens
tcagttacaagcagg

SEQ ID NO: 1673932 - DNA, 15 bp, Homo sapiens
cagttacaagcagga

SEQ ID NO: 1673933 - DNA, 15 bp, Homo sapiens
agttacaagcaggat

SEQ ID NO: 1673934 - DNA, 15 bp, Homo sapiens
gttacaagcaggata

SEQ ID NO: 1673935 - DNA, 15 bp, Homo sapiens
ttacaagcaggataa

SEQ ID NO: 1673936 - DNA, 15 bp, Homo sapiens
tacaagcaggataaa

SEQ ID NO: 1673937 - DNA, 15 bp, Homo sapiens
acaagcaggataaaa

SEQ ID NO: 1673938 - DNA, 15 bp, Homo sapiens
caagcaggataaaat

SEQ ID NO: 1673939 - DNA, 15 bp, Homo sapiens
aagcaggataaaatg

SEQ ID NO: 1673940 - DNA, 15 bp, Homo sapiens
agcaggataaaatgg

SEQ ID NO: 1673941 - DNA, 15 bp, Homo sapiens
gcaggataaaatgga

SEQ ID NO: 1673942 - DNA, 15 bp, Homo sapiens
caggataaaatggaa

SEQ ID NO: 1673943 - DNA, 15 bp, Homo sapiens
aggataaaatggaaa

SEQ ID NO: 1673944 - DNA, 15 bp, Homo sapiens
ggataaaatggaaac

SEQ ID NO: 1673945 - DNA, 15 bp, Homo sapiens
gataaaatggaaact

SEQ ID NO: 1673946 - DNA, 15 bp, Homo sapiens
ataaaatggaaactg

SEQ ID NO: 1673947 - DNA, 15 bp, Homo sapiens
taaaatggaaactgc

SEQ ID NO: 1673948 - DNA, 15 bp, Homo sapiens
aaaatggaaactgcc

SEQ ID NO: 1673949 - DNA, 15 bp, Homo sapiens
aaatggaaactgcct

SEQ ID NO: 1673950 - DNA, 15 bp, Homo sapiens
aatggaaactgcctg

SEQ ID NO: 1673951 - DNA, 15 bp, Homo sapiens
atggaaactgcctgg

SEQ ID NO: 1673952 - DNA, 15 bp, Homo sapiens
tggaaactgcctggg

SEQ ID NO: 1673953 - DNA, 15 bp, Homo sapiens
ggaaactgcctggga

SEQ ID NO: 1673954 - DNA, 15 bp, Homo sapiens
gaaactgcctgggag

SEQ ID NO: 1673955 - DNA, 15 bp, Homo sapiens
aaactgcctgggaga

SEQ ID NO: 1673956 - DNA, 15 bp, Homo sapiens
aactgcctgggagag

SEQ ID NO: 1673957 - DNA, 15 bp, Homo sapiens
actgcctgggagagg

SEQ ID NO: 1673958 - DNA, 15 bp, Homo sapiens
ctgcctgggagaggc

SEQ ID NO: 1673959 - DNA, 15 bp, Homo sapiens
tgcctgggagaggct

SEQ ID NO: 1673960 - DNA, 15 bp, Homo sapiens
gcctgggagaggctg

SEQ ID NO: 1673961 - DNA, 15 bp, Homo sapiens
cctgggagaggctga

SEQ ID NO: 1673962 - DNA, 15 bp, Homo sapiens
ctgggagaggctgag

SEQ ID NO: 1673963 - DNA, 15 bp, Homo sapiens
tgggagaggctgaga

SEQ ID NO: 1673964 - DNA, 15 bp, Homo sapiens
gggagaggctgagaa

SEQ ID NO: 1673965 - DNA, 15 bp, Homo sapiens
ggagaggctgagaaa

SEQ ID NO: 1673966 - DNA, 15 bp, Homo sapiens
gagaggctgagaaac

SEQ ID NO: 1673967 - DNA, 15 bp, Homo sapiens
agaggctgagaaacc

SEQ ID NO: 1673968 - DNA, 15 bp, Homo sapiens
gaggctgagaaacct

SEQ ID NO: 1673969 - DNA, 15 bp, Homo sapiens
aggctgagaaacctt

SEQ ID NO: 1673970 - DNA, 15 bp, Homo sapiens
ggctgagaaaccttc

SEQ ID NO: 1673971 - DNA, 15 bp, Homo sapiens
gctgagaaaccttct

SEQ ID NO: 1673972 - DNA, 15 bp, Homo sapiens
ctgagaaaccttctt

SEQ ID NO: 1673973 - DNA, 15 bp, Homo sapiens
tgagaaaccttcttg

SEQ ID NO: 1673974 - DNA, 15 bp, Homo sapiens
gagaaaccttcttgc

SEQ ID NO: 1673975 - DNA, 15 bp, Homo sapiens
agaaaccttcttgct

SEQ ID NO: 1673976 - DNA, 15 bp, Homo sapiens
gaaaccttcttgctt

SEQ ID NO: 1673977 - DNA, 15 bp, Homo sapiens
aaaccttcttgcttg

SEQ ID NO: 1673978 - DNA, 15 bp, Homo sapiens
aaccttcttgcttgg

SEQ ID NO: 1673979 - DNA, 15 bp, Homo sapiens
accttcttgcttggg

SEQ ID NO: 1673980 - DNA, 15 bp, Homo sapiens
ccttcttgcttgggg

SEQ ID NO: 1673981 - DNA, 15 bp, Homo sapiens
cttcttgcttggggg

SEQ ID NO: 1673982 - DNA, 15 bp, Homo sapiens
ttcttgcttggggga

SEQ ID NO: 1673983 - DNA, 15 bp, Homo sapiens
tcttgcttgggggag

SEQ ID NO: 1673984 - DNA, 15 bp, Homo sapiens
cttgcttgggggagg

SEQ ID NO: 1673985 - DNA, 15 bp, Homo sapiens
ttgcttgggggaggt

SEQ ID NO: 1673986 - DNA, 15 bp, Homo sapiens
tgcttgggggaggtg

SEQ ID NO: 1673987 - DNA, 15 bp, Homo sapiens
gcttgggggaggtgg

SEQ ID NO: 1673988 - DNA, 15 bp, Homo sapiens
cttgggggaggtggg

SEQ ID NO: 1673989 - DNA, 15 bp, Homo sapiens
ttgggggaggtgggg

SEQ ID NO: 1673990 - DNA, 15 bp, Homo sapiens
tgggggaggtggggc

SEQ ID NO: 1673991 - DNA, 15 bp, Homo sapiens
gggggaggtggggca

SEQ ID NO: 1673992 - DNA, 15 bp, Homo sapiens
ggggaggtggggcac

SEQ ID NO: 1673993 - DNA, 15 bp, Homo sapiens
gggaggtggggcact

SEQ ID NO: 1673994 - DNA, 15 bp, Homo sapiens
ggaggtggggcactg

SEQ ID NO: 1673995 - DNA, 15 bp, Homo sapiens
gaggtggggcactgc

SEQ ID NO: 1673996 - DNA, 15 bp, Homo sapiens
aggtggggcactgct

SEQ ID NO: 1673997 - DNA, 15 bp, Homo sapiens
ggtggggcactgcta

SEQ ID NO: 1673998 - DNA, 15 bp, Homo sapiens
gtggggcactgctag

SEQ ID NO: 1673999 - DNA, 15 bp, Homo sapiens
tggggcactgctaga

SEQ ID NO: 1674000 - DNA, 15 bp, Homo sapiens
ggggcactgctagaa

SEQ ID NO: 1674001 - DNA, 15 bp, Homo sapiens
gggcactgctagaat

SEQ ID NO: 1674002 - DNA, 15 bp, Homo sapiens
ggcactgctagaatt

SEQ ID NO: 1674003 - DNA, 15 bp, Homo sapiens
gcactgctagaatta

SEQ ID NO: 1674004 - DNA, 15 bp, Homo sapiens
cactgctagaattaa

SEQ ID NO: 1674005 - DNA, 15 bp, Homo sapiens
actgctagaattaat

SEQ ID NO: 1674006 - DNA, 15 bp, Homo sapiens
ctgctagaattaatc

SEQ ID NO: 1674007 - DNA, 15 bp, Homo sapiens
tgctagaattaatcg

SEQ ID NO: 1674008 - DNA, 15 bp, Homo sapiens
gctagaattaatcgc

SEQ ID NO: 1674009 - DNA, 15 bp, Homo sapiens
ctagaattaatcgct

SEQ ID NO: 1674010 - DNA, 15 bp, Homo sapiens
tagaattaatcgctt

SEQ ID NO: 1674011 - DNA, 15 bp, Homo sapiens
agaattaatcgcttc

SEQ ID NO: 1674012 - DNA, 15 bp, Homo sapiens
gaattaatcgcttca

SEQ ID NO: 1674013 - DNA, 15 bp, Homo sapiens
aattaatcgcttcac

SEQ ID NO: 1674014 - DNA, 15 bp, Homo sapiens
attaatcgcttcaca

SEQ ID NO: 1674015 - DNA, 15 bp, Homo sapiens
ttaatcgcttcacag

SEQ ID NO: 1674016 - DNA, 15 bp, Homo sapiens
taatcgcttcacaga

SEQ ID NO: 1674017 - DNA, 15 bp, Homo sapiens
aatcgcttcacagac

SEQ ID NO: 1674018 - DNA, 15 bp, Homo sapiens
atcgcttcacagacc

SEQ ID NO: 1674019 - DNA, 15 bp, Homo sapiens
tcgcttcacagacca

SEQ ID NO: 1674020 - DNA, 15 bp, Homo sapiens
cgcttcacagaccag

SEQ ID NO: 1674021 - DNA, 15 bp, Homo sapiens
gcttcacagaccagc

SEQ ID NO: 1674022 - DNA, 15 bp, Homo sapiens
cttcacagaccagcc

SEQ ID NO: 1674023 - DNA, 15 bp, Homo sapiens
ttcacagaccagccc

SEQ ID NO: 1674024 - DNA, 15 bp, Homo sapiens
tcacagaccagccca

SEQ ID NO: 1674025 - DNA, 15 bp, Homo sapiens
cacagaccagcccat

SEQ ID NO: 1674026 - DNA, 15 bp, Homo sapiens
acagaccagcccatc

SEQ ID NO: 1674027 - DNA, 15 bp, Homo sapiens
cagaccagcccatcc

SEQ ID NO: 1674028 - DNA, 15 bp, Homo sapiens
agaccagcccatcca

SEQ ID NO: 1674029 - DNA, 15 bp, Homo sapiens
gaccagcccatccag

SEQ ID NO: 1674030 - DNA, 15 bp, Homo sapiens
accagcccatccagg

SEQ ID NO: 1674031 - DNA, 15 bp, Homo sapiens
ccagcccatccagga

SEQ ID NO: 1674032 - DNA, 15 bp, Homo sapiens
cagcccatccaggac

SEQ ID NO: 1674033 - DNA, 15 bp, Homo sapiens
agcccatccaggact

SEQ ID NO: 1674034 - DNA, 15 bp, Homo sapiens
gcccatccaggactc

SEQ ID NO: 1674035 - DNA, 15 bp, Homo sapiens
cccatccaggactcc

SEQ ID NO: 1674036 - DNA, 15 bp, Homo sapiens
ccatccaggactcct

SEQ ID NO: 1674037 - DNA, 15 bp, Homo sapiens
catccaggactcctc

SEQ ID NO: 1674038 - DNA, 15 bp, Homo sapiens
atccaggactcctca

SEQ ID NO: 1674039 - DNA, 15 bp, Homo sapiens
tccaggactcctcaa

SEQ ID NO: 1674040 - DNA, 15 bp, Homo sapiens
ccaggactcctcaaa

SEQ ID NO: 1674041 - DNA, 15 bp, Homo sapiens
caggactcctcaaat

SEQ ID NO: 1674042 - DNA, 15 bp, Homo sapiens
aggactcctcaaatt

SEQ ID NO: 1674043 - DNA, 15 bp, Homo sapiens
ggactcctcaaattt

SEQ ID NO: 1674044 - DNA, 15 bp, Homo sapiens
gactcctcaaatttg

SEQ ID NO: 1674045 - DNA, 15 bp, Homo sapiens
actcctcaaatttgg

SEQ ID NO: 1674046 - DNA, 15 bp, Homo sapiens
ctcctcaaatttggc

SEQ ID NO: 1674047 - DNA, 15 bp, Homo sapiens
tcctcaaatttggca

SEQ ID NO: 1674048 - DNA, 15 bp, Homo sapiens
cctcaaatttggcaa

SEQ ID NO: 1674049 - DNA, 15 bp, Homo sapiens
ctcaaatttggcaaa

SEQ ID NO: 1674050 - DNA, 15 bp, Homo sapiens
tcaaatttggcaaaa

SEQ ID NO: 1674051 - DNA, 15 bp, Homo sapiens
caaatttggcaaaaa

SEQ ID NO: 1674052 - DNA, 15 bp, Homo sapiens
aaatttggcaaaaaa

SEQ ID NO: 1674053 - DNA, 15 bp, Homo sapiens
aatttggcaaaaaag

SEQ ID NO: 1674054 - DNA, 15 bp, Homo sapiens
atttggcaaaaaagc

SEQ ID NO: 1674055 - DNA, 15 bp, Homo sapiens
tttggcaaaaaagcc

SEQ ID NO: 1674056 - DNA, 15 bp, Homo sapiens
ttggcaaaaaagcca

SEQ ID NO: 1674057 - DNA, 15 bp, Homo sapiens
tggcaaaaaagccat

SEQ ID NO: 1674058 - DNA, 15 bp, Homo sapiens
ggcaaaaaagccatt

SEQ ID NO: 1674059 - DNA, 15 bp, Homo sapiens
gcaaaaaagccattc

SEQ ID NO: 1674060 - DNA, 15 bp, Homo sapiens
caaaaaagccattca

SEQ ID NO: 1674061 - DNA, 15 bp, Homo sapiens
aaaaaagccattcat

SEQ ID NO: 1674062 - DNA, 15 bp, Homo sapiens
aaaaagccattcatt

SEQ ID NO: 1674063 - DNA, 15 bp, Homo sapiens
aaaagccattcattc

SEQ ID NO: 1674064 - DNA, 15 bp, Homo sapiens
aaagccattcattca

SEQ ID NO: 1674065 - DNA, 15 bp, Homo sapiens
aagccattcattcat

SEQ ID NO: 1674066 - DNA, 15 bp, Homo sapiens
agccattcattcatt

SEQ ID NO: 1674067 - DNA, 15 bp, Homo sapiens
gccattcattcattc

SEQ ID NO: 1674068 - DNA, 15 bp, Homo sapiens
cattcattcattcat

SEQ ID NO: 1674069 - DNA, 15 bp, Homo sapiens
attcattcattcatt

SEQ ID NO: 1674070 - DNA, 15 bp, Homo sapiens
ttcattcattcattt

SEQ ID NO: 1674071 - DNA, 15 bp, Homo sapiens
tcattcattcattta

SEQ ID NO: 1674072 - DNA, 15 bp, Homo sapiens
cattcattcatttat

SEQ ID NO: 1674073 - DNA, 15 bp, Homo sapiens
attcattcatttatg

SEQ ID NO: 1674074 - DNA, 15 bp, Homo sapiens
ttcattcatttatgt

SEQ ID NO: 1674075 - DNA, 15 bp, Homo sapiens
tcattcatttatgta

SEQ ID NO: 1674076 - DNA, 15 bp, Homo sapiens
cattcatttatgtag

SEQ ID NO: 1674077 - DNA, 15 bp, Homo sapiens
attcatttatgtaga

SEQ ID NO: 1674078 - DNA, 15 bp, Homo sapiens
ttcatttatgtagag

SEQ ID NO: 1674079 - DNA, 15 bp, Homo sapiens
tcatttatgtagaga

SEQ ID NO: 1674080 - DNA, 15 bp, Homo sapiens
catttatgtagagac

SEQ ID NO: 1674081 - DNA, 15 bp, Homo sapiens
atttatgtagagacg

SEQ ID NO: 1674082 - DNA, 15 bp, Homo sapiens
tttatgtagagacga

SEQ ID NO: 1674083 - DNA, 15 bp, Homo sapiens
ttatgtagagacgag

SEQ ID NO: 1674084 - DNA, 15 bp, Homo sapiens
tatgtagagacgagg

SEQ ID NO: 1674085 - DNA, 15 bp, Homo sapiens
atgtagagacgaggg

SEQ ID NO: 1674086 - DNA, 15 bp, Homo sapiens
tgtagagacgagggg

SEQ ID NO: 1674087 - DNA, 15 bp, Homo sapiens
gtagagacgaggggg

SEQ ID NO: 1674088 - DNA, 15 bp, Homo sapiens
tagagacgaggggga

SEQ ID NO: 1674089 - DNA, 15 bp, Homo sapiens
agagacgagggggat

SEQ ID NO: 1674090 - DNA, 15 bp, Homo sapiens
gagacgagggggatc

SEQ ID NO: 1674091 - DNA, 15 bp, Homo sapiens
agacgagggggatct

SEQ ID NO: 1674092 - DNA, 15 bp, Homo sapiens
gacgagggggatctg

SEQ ID NO: 1674093 - DNA, 15 bp, Homo sapiens
acgagggggatctgg

SEQ ID NO: 1674094 - DNA, 15 bp, Homo sapiens
cgagggggatctggc

SEQ ID NO: 1674095 - DNA, 15 bp, Homo sapiens
gagggggatctggct

SEQ ID NO: 1674096 - DNA, 15 bp, Homo sapiens
agggggatctggcta

SEQ ID NO: 1674097 - DNA, 15 bp, Homo sapiens
gggggatctggctat

SEQ ID NO: 1674098 - DNA, 15 bp, Homo sapiens
ggggatctggctata

SEQ ID NO: 1674099 - DNA, 15 bp, Homo sapiens
gggatctggctatat

SEQ ID NO: 1674100 - DNA, 15 bp, Homo sapiens
ggatctggctatatt

SEQ ID NO: 1674101 - DNA, 15 bp, Homo sapiens
gatctggctatattg

SEQ ID NO: 1674102 - DNA, 15 bp, Homo sapiens
atctggctatattgc

SEQ ID NO: 1674103 - DNA, 15 bp, Homo sapiens
tctggctatattgcc

SEQ ID NO: 1674104 - DNA, 15 bp, Homo sapiens
ctggctatattgcct

SEQ ID NO: 1674105 - DNA, 15 bp, Homo sapiens
tggctatattgccta

SEQ ID NO: 1674106 - DNA, 15 bp, Homo sapiens
ggctatattgcctag

SEQ ID NO: 1674107 - DNA, 15 bp, Homo sapiens
gctatattgcctaga

SEQ ID NO: 1674108 - DNA, 15 bp, Homo sapiens
ctatattgcctagat

SEQ ID NO: 1674109 - DNA, 15 bp, Homo sapiens
tatattgcctagatt

SEQ ID NO: 1674110 - DNA, 15 bp, Homo sapiens
atattgcctagattg

SEQ ID NO: 1674111 - DNA, 15 bp, Homo sapiens
attgcctagattggt

SEQ ID NO: 1674112 - DNA, 15 bp, Homo sapiens
ttgcctagattggtc

SEQ ID NO: 1674113 - DNA, 15 bp, Homo sapiens
tgcctagattggtct

SEQ ID NO: 1674114 - DNA, 15 bp, Homo sapiens
gcctagattggtctc

SEQ ID NO: 1674115 - DNA, 15 bp, Homo sapiens
cctagattggtctca

SEQ ID NO: 1674116 - DNA, 15 bp, Homo sapiens
ctagattggtctcaa

SEQ ID NO: 1674117 - DNA, 15 bp, Homo sapiens
tagattggtctcaaa

SEQ ID NO: 1674118 - DNA, 15 bp, Homo sapiens
agattggtctcaaat

SEQ ID NO: 1674119 - DNA, 15 bp, Homo sapiens
gattggtctcaaatt

SEQ ID NO: 1674120 - DNA, 15 bp, Homo sapiens
attggtctcaaattc

SEQ ID NO: 1674121 - DNA, 15 bp, Homo sapiens
ttggtctcaaattcc

SEQ ID NO: 1674122 - DNA, 15 bp, Homo sapiens
tcctgccttggtcta

SEQ ID NO: 1674123 - DNA, 15 bp, Homo sapiens
cctgccttggtctac

SEQ ID NO: 1674124 - DNA, 15 bp, Homo sapiens
ctgccttggtctact

SEQ ID NO: 1674125 - DNA, 15 bp, Homo sapiens
tgccttggtctacta

SEQ ID NO: 1674126 - DNA, 15 bp, Homo sapiens
gccttggtctactaa

SEQ ID NO: 1674127 - DNA, 15 bp, Homo sapiens
ccttggtctactaat

SEQ ID NO: 1674128 - DNA, 15 bp, Homo sapiens
cttggtctactaatg

SEQ ID NO: 1674129 - DNA, 15 bp, Homo sapiens
ttggtctactaatgt

SEQ ID NO: 1674130 - DNA, 15 bp, Homo sapiens
tggtctactaatgtg

SEQ ID NO: 1674131 - DNA, 15 bp, Homo sapiens
ggtctactaatgtgc

SEQ ID NO: 1674132 - DNA, 15 bp, Homo sapiens
gtctactaatgtgct

SEQ ID NO: 1674133 - DNA, 15 bp, Homo sapiens
tctactaatgtgctg

SEQ ID NO: 1674134 - DNA, 15 bp, Homo sapiens
ctactaatgtgctgc

SEQ ID NO: 1674135 - DNA, 15 bp, Homo sapiens
tactaatgtgctgcg

SEQ ID NO: 1674136 - DNA, 15 bp, Homo sapiens
actaatgtgctgcga

SEQ ID NO: 1674137 - DNA, 15 bp, Homo sapiens
ctaatgtgctgcgat

SEQ ID NO: 1674138 - DNA, 15 bp, Homo sapiens
taatgtgctgcgatt

SEQ ID NO: 1674139 - DNA, 15 bp, Homo sapiens
aatgtgctgcgatta

SEQ ID NO: 1674140 - DNA, 15 bp, Homo sapiens
atgtgctgcgattac

SEQ ID NO: 1674141 - DNA, 15 bp, Homo sapiens
tgtgctgcgattaca

SEQ ID NO: 1674142 - DNA, 15 bp, Homo sapiens
gagccaccgtgccta

SEQ ID NO: 1674143 - DNA, 15 bp, Homo sapiens
agccaccgtgcctag

SEQ ID NO: 1674144 - DNA, 15 bp, Homo sapiens
gccaccgtgcctagc

SEQ ID NO: 1674145 - DNA, 15 bp, Homo sapiens
ccaccgtgcctagct

SEQ ID NO: 1674146 - DNA, 15 bp, Homo sapiens
caccgtgcctagctc

SEQ ID NO: 1674147 - DNA, 15 bp, Homo sapiens
accgtgcctagctct

SEQ ID NO: 1674148 - DNA, 15 bp, Homo sapiens
ccgtgcctagctcta

SEQ ID NO: 1674149 - DNA, 15 bp, Homo sapiens
cgtgcctagctctag

SEQ ID NO: 1674150 - DNA, 15 bp, Homo sapiens
gtgcctagctctagt

SEQ ID NO: 1674151 - DNA, 15 bp, Homo sapiens
tgcctagctctagtg

SEQ ID NO: 1674152 - DNA, 15 bp, Homo sapiens
gcctagctctagtgg

SEQ ID NO: 1674153 - DNA, 15 bp, Homo sapiens
cctagctctagtgga

SEQ ID NO: 1674154 - DNA, 15 bp, Homo sapiens
ctagctctagtggac

SEQ ID NO: 1674155 - DNA, 15 bp, Homo sapiens
tagctctagtggact

SEQ ID NO: 1674156 - DNA, 15 bp, Homo sapiens
agctctagtggactt

SEQ ID NO: 1674157 - DNA, 15 bp, Homo sapiens
gctctagtggacttg

SEQ ID NO: 1674158 - DNA, 15 bp, Homo sapiens
ctctagtggacttga

SEQ ID NO: 1674159 - DNA, 15 bp, Homo sapiens
tctagtggacttgaa

SEQ ID NO: 1674160 - DNA, 15 bp, Homo sapiens
ctagtggacttgaaa

SEQ ID NO: 1674161 - DNA, 15 bp, Homo sapiens
tagtggacttgaaat

SEQ ID NO: 1674162 - DNA, 15 bp, Homo sapiens
agtggacttgaaatg

SEQ ID NO: 1674163 - DNA, 15 bp, Homo sapiens
gtggacttgaaatgt

SEQ ID NO: 1674164 - DNA, 15 bp, Homo sapiens
tggacttgaaatgtt

SEQ ID NO: 1674165 - DNA, 15 bp, Homo sapiens
ggacttgaaatgttg

SEQ ID NO: 1674166 - DNA, 15 bp, Homo sapiens
gacttgaaatgttgc

SEQ ID NO: 1674167 - DNA, 15 bp, Homo sapiens
acttgaaatgttgcc

SEQ ID NO: 1674168 - DNA, 15 bp, Homo sapiens
cttgaaatgttgcct

SEQ ID NO: 1674169 - DNA, 15 bp, Homo sapiens
ttgaaatgttgcctt

SEQ ID NO: 1674170 - DNA, 15 bp, Homo sapiens
tgaaatgttgccttg

SEQ ID NO: 1674171 - DNA, 15 bp, Homo sapiens
gaaatgttgccttgc

SEQ ID NO: 1674172 - DNA, 15 bp, Homo sapiens
aaatgttgccttgcc

SEQ ID NO: 1674173 - DNA, 15 bp, Homo sapiens
aatgttgccttgccc

SEQ ID NO: 1674174 - DNA, 15 bp, Homo sapiens
atgttgccttgccca

SEQ ID NO: 1674175 - DNA, 15 bp, Homo sapiens
tgttgccttgcccag

SEQ ID NO: 1674176 - DNA, 15 bp, Homo sapiens
gttgccttgcccagg

SEQ ID NO: 1674177 - DNA, 15 bp, Homo sapiens
ttgccttgcccaggg

SEQ ID NO: 1674178 - DNA, 15 bp, Homo sapiens
tgccttgcccagggc

SEQ ID NO: 1674179 - DNA, 15 bp, Homo sapiens
gccttgcccagggcc

SEQ ID NO: 1674180 - DNA, 15 bp, Homo sapiens
ccttgcccagggccc

SEQ ID NO: 1674181 - DNA, 15 bp, Homo sapiens
cttgcccagggccct

SEQ ID NO: 1674182 - DNA, 15 bp, Homo sapiens
ttgcccagggccctt

SEQ ID NO: 1674183 - DNA, 15 bp, Homo sapiens
tgcccagggccctta

SEQ ID NO: 1674184 - DNA, 15 bp, Homo sapiens
gcccagggcccttat

SEQ ID NO: 1674185 - DNA, 15 bp, Homo sapiens
cccagggcccttatg

SEQ ID NO: 1674186 - DNA, 15 bp, Homo sapiens
ccagggcccttatgt

SEQ ID NO: 1674187 - DNA, 15 bp, Homo sapiens
cagggcccttatgtt

SEQ ID NO: 1674188 - DNA, 15 bp, Homo sapiens
agggcccttatgttg

SEQ ID NO: 1674189 - DNA, 15 bp, Homo sapiens
gggcccttatgttga

SEQ ID NO: 1674190 - DNA, 15 bp, Homo sapiens
ggcccttatgttgaa

SEQ ID NO: 1674191 - DNA, 15 bp, Homo sapiens
gcccttatgttgaat

SEQ ID NO: 1674192 - DNA, 15 bp, Homo sapiens
cccttatgttgaatg

SEQ ID NO: 1674193 - DNA, 15 bp, Homo sapiens
ccttatgttgaatgg

SEQ ID NO: 1674194 - DNA, 15 bp, Homo sapiens
cttatgttgaatggc

SEQ ID NO: 1674195 - DNA, 15 bp, Homo sapiens
ttatgttgaatggcc

SEQ ID NO: 1674196 - DNA, 15 bp, Homo sapiens
tatgttgaatggccc

SEQ ID NO: 1674197 - DNA, 15 bp, Homo sapiens
atgttgaatggccca

SEQ ID NO: 1674198 - DNA, 15 bp, Homo sapiens
tgttgaatggcccag

SEQ ID NO: 1674199 - DNA, 15 bp, Homo sapiens
gttgaatggcccagg

SEQ ID NO: 1674200 - DNA, 15 bp, Homo sapiens
ttgaatggcccaggt

SEQ ID NO: 1674201 - DNA, 15 bp, Homo sapiens
tgaatggcccaggtc

SEQ ID NO: 1674202 - DNA, 15 bp, Homo sapiens
gaatggcccaggtcc

SEQ ID NO: 1674203 - DNA, 15 bp, Homo sapiens
aatggcccaggtcca

SEQ ID NO: 1674204 - DNA, 15 bp, Homo sapiens
atggcccaggtccac

SEQ ID NO: 1674205 - DNA, 15 bp, Homo sapiens
tggcccaggtccact

SEQ ID NO: 1674206 - DNA, 15 bp, Homo sapiens
ggcccaggtccactt

SEQ ID NO: 1674207 - DNA, 15 bp, Homo sapiens
gcccaggtccacttg

SEQ ID NO: 1674208 - DNA, 15 bp, Homo sapiens
cccaggtccacttgt

SEQ ID NO: 1674209 - DNA, 15 bp, Homo sapiens
ccaggtccacttgta

SEQ ID NO: 1674210 - DNA, 15 bp, Homo sapiens
caggtccacttgtat

SEQ ID NO: 1674211 - DNA, 15 bp, Homo sapiens
aggtccacttgtatg

SEQ ID NO: 1674212 - DNA, 15 bp, Homo sapiens
ggtccacttgtatgg

SEQ ID NO: 1674213 - DNA, 15 bp, Homo sapiens
gtccacttgtatggt

SEQ ID NO: 1674214 - DNA, 15 bp, Homo sapiens
tccacttgtatggtt

SEQ ID NO: 1674215 - DNA, 15 bp, Homo sapiens
ccacttgtatggttc

SEQ ID NO: 1674216 - DNA, 15 bp, Homo sapiens
cacttgtatggttct

SEQ ID NO: 1674217 - DNA, 15 bp, Homo sapiens
acttgtatggttctg

SEQ ID NO: 1674218 - DNA, 15 bp, Homo sapiens
cttgtatggttctgt

SEQ ID NO: 1674219 - DNA, 15 bp, Homo sapiens
ttgtatggttctgta

SEQ ID NO: 1674220 - DNA, 15 bp, Homo sapiens
tgtatggttctgtac

SEQ ID NO: 1674221 - DNA, 15 bp, Homo sapiens
gtatggttctgtacc

SEQ ID NO: 1674222 - DNA, 15 bp, Homo sapiens
tatggttctgtacca

SEQ ID NO: 1674223 - DNA, 15 bp, Homo sapiens
atggttctgtaccaa

SEQ ID NO: 1674224 - DNA, 15 bp, Homo sapiens
tggttctgtaccaag

SEQ ID NO: 1674225 - DNA, 15 bp, Homo sapiens
ggttctgtaccaagg

SEQ ID NO: 1674226 - DNA, 15 bp, Homo sapiens
gttctgtaccaaggt

SEQ ID NO: 1674227 - DNA, 15 bp, Homo sapiens
ttctgtaccaaggtt

SEQ ID NO: 1674228 - DNA, 15 bp, Homo sapiens
tctgtaccaaggtta

SEQ ID NO: 1674229 - DNA, 15 bp, Homo sapiens
ctgtaccaaggttaa

SEQ ID NO: 1674230 - DNA, 15 bp, Homo sapiens
tgtaccaaggttaac

SEQ ID NO: 1674231 - DNA, 15 bp, Homo sapiens
gtaccaaggttaacc

SEQ ID NO: 1674232 - DNA, 15 bp, Homo sapiens
taccaaggttaaccc

SEQ ID NO: 1674233 - DNA, 15 bp, Homo sapiens
accaaggttaacccc

SEQ ID NO: 1674234 - DNA, 15 bp, Homo sapiens
ccaaggttaacccca

SEQ ID NO: 1674235 - DNA, 15 bp, Homo sapiens
caaggttaaccccat

SEQ ID NO: 1674236 - DNA, 15 bp, Homo sapiens
aaggttaaccccatc

SEQ ID NO: 1674237 - DNA, 15 bp, Homo sapiens
aggttaaccccatcc

SEQ ID NO: 1674238 - DNA, 15 bp, Homo sapiens
ggttaaccccatccc

SEQ ID NO: 1674239 - DNA, 15 bp, Homo sapiens
gttaaccccatccca

SEQ ID NO: 1674240 - DNA, 15 bp, Homo sapiens
ttaaccccatcccat

SEQ ID NO: 1674241 - DNA, 15 bp, Homo sapiens
taaccccatcccata

SEQ ID NO: 1674242 - DNA, 15 bp, Homo sapiens
aaccccatcccataa

SEQ ID NO: 1674243 - DNA, 15 bp, Homo sapiens
accccatcccataat

SEQ ID NO: 1674244 - DNA, 15 bp, Homo sapiens
ccccatcccataatg

SEQ ID NO: 1674245 - DNA, 15 bp, Homo sapiens
cccatcccataatgc

SEQ ID NO: 1674246 - DNA, 15 bp, Homo sapiens
ccatcccataatgcc

SEQ ID NO: 1674247 - DNA, 15 bp, Homo sapiens
catcccataatgcct

SEQ ID NO: 1674248 - DNA, 15 bp, Homo sapiens
atcccataatgcctg

SEQ ID NO: 1674249 - DNA, 15 bp, Homo sapiens
tcccataatgcctgg

SEQ ID NO: 1674250 - DNA, 15 bp, Homo sapiens
cccataatgcctggg

SEQ ID NO: 1674251 - DNA, 15 bp, Homo sapiens
ccataatgcctggga

SEQ ID NO: 1674252 - DNA, 15 bp, Homo sapiens
cataatgcctgggac

SEQ ID NO: 1674253 - DNA, 15 bp, Homo sapiens
ataatgcctgggaca

SEQ ID NO: 1674254 - DNA, 15 bp, Homo sapiens
taatgcctgggacag

SEQ ID NO: 1674255 - DNA, 15 bp, Homo sapiens
aatgcctgggacagt

SEQ ID NO: 1674256 - DNA, 15 bp, Homo sapiens
atgcctgggacagtt

SEQ ID NO: 1674257 - DNA, 15 bp, Homo sapiens
tgcctgggacagttg

SEQ ID NO: 1674258 - DNA, 15 bp, Homo sapiens
gcctgggacagttga

SEQ ID NO: 1674259 - DNA, 15 bp, Homo sapiens
cctgggacagttgat

SEQ ID NO: 1674260 - DNA, 15 bp, Homo sapiens
ctgggacagttgatg

SEQ ID NO: 1674261 - DNA, 15 bp, Homo sapiens
tgggacagttgatgc

SEQ ID NO: 1674262 - DNA, 15 bp, Homo sapiens
gggacagttgatgca

SEQ ID NO: 1674263 - DNA, 15 bp, Homo sapiens
ggacagttgatgcag

SEQ ID NO: 1674264 - DNA, 15 bp, Homo sapiens
gacagttgatgcagg

SEQ ID NO: 1674265 - DNA, 15 bp, Homo sapiens
acagttgatgcagga

SEQ ID NO: 1674266 - DNA, 15 bp, Homo sapiens
cagttgatgcaggac

SEQ ID NO: 1674267 - DNA, 15 bp, Homo sapiens
agttgatgcaggaca

SEQ ID NO: 1674268 - DNA, 15 bp, Homo sapiens
gttgatgcaggacaa

SEQ ID NO: 1674269 - DNA, 15 bp, Homo sapiens
ttgatgcaggacaat

SEQ ID NO: 1674270 - DNA, 15 bp, Homo sapiens
tgatgcaggacaatc

SEQ ID NO: 1674271 - DNA, 15 bp, Homo sapiens
gatgcaggacaatca

SEQ ID NO: 1674272 - DNA, 15 bp, Homo sapiens
atgcaggacaatcag

SEQ ID NO: 1674273 - DNA, 15 bp, Homo sapiens
tgcaggacaatcagc

SEQ ID NO: 1674274 - DNA, 15 bp, Homo sapiens
gcaggacaatcagct

SEQ ID NO: 1674275 - DNA, 15 bp, Homo sapiens
caggacaatcagctt

SEQ ID NO: 1674276 - DNA, 15 bp, Homo sapiens
aggacaatcagcttc

SEQ ID NO: 1674277 - DNA, 15 bp, Homo sapiens
ggacaatcagcttct

SEQ ID NO: 1674278 - DNA, 15 bp, Homo sapiens
gacaatcagcttctg

SEQ ID NO: 1674279 - DNA, 15 bp, Homo sapiens
acaatcagcttctgt

SEQ ID NO: 1674280 - DNA, 15 bp, Homo sapiens
caatcagcttctgtg

SEQ ID NO: 1674281 - DNA, 15 bp, Homo sapiens
aatcagcttctgtgc

SEQ ID NO: 1674282 - DNA, 15 bp, Homo sapiens
atcagcttctgtgcc

SEQ ID NO: 1674283 - DNA, 15 bp, Homo sapiens
tcagcttctgtgcca

SEQ ID NO: 1674284 - DNA, 15 bp, Homo sapiens
cagcttctgtgccat

SEQ ID NO: 1674285 - DNA, 15 bp, Homo sapiens
agcttctgtgccatt

SEQ ID NO: 1674286 - DNA, 15 bp, Homo sapiens
gcttctgtgccattc

SEQ ID NO: 1674287 - DNA, 15 bp, Homo sapiens
cttctgtgccattca

SEQ ID NO: 1674288 - DNA, 15 bp, Homo sapiens
ttctgtgccattcaa

SEQ ID NO: 1674289 - DNA, 15 bp, Homo sapiens
tctgtgccattcaac

SEQ ID NO: 1674290 - DNA, 15 bp, Homo sapiens
ctgtgccattcaacc

SEQ ID NO: 1674291 - DNA, 15 bp, Homo sapiens
tgtgccattcaacct

SEQ ID NO: 1674292 - DNA, 15 bp, Homo sapiens
gtgccattcaacctc

SEQ ID NO: 1674293 - DNA, 15 bp, Homo sapiens
tgccattcaacctca

SEQ ID NO: 1674294 - DNA, 15 bp, Homo sapiens
gccattcaacctcag

SEQ ID NO: 1674295 - DNA, 15 bp, Homo sapiens
ccattcaacctcagg

SEQ ID NO: 1674296 - DNA, 15 bp, Homo sapiens
cattcaacctcagga

SEQ ID NO: 1674297 - DNA, 15 bp, Homo sapiens
attcaacctcaggac

SEQ ID NO: 1674298 - DNA, 15 bp, Homo sapiens
ttcaacctcaggact

SEQ ID NO: 1674299 - DNA, 15 bp, Homo sapiens
tcaacctcaggactg

SEQ ID NO: 1674300 - DNA, 15 bp, Homo sapiens
caacctcaggactga

SEQ ID NO: 1674301 - DNA, 15 bp, Homo sapiens
aacctcaggactgag

SEQ ID NO: 1674302 - DNA, 15 bp, Homo sapiens
acctcaggactgagc

SEQ ID NO: 1674303 - DNA, 15 bp, Homo sapiens
cctcaggactgagca

SEQ ID NO: 1674304 - DNA, 15 bp, Homo sapiens
ctcaggactgagcat

SEQ ID NO: 1674305 - DNA, 15 bp, Homo sapiens
tcaggactgagcatg

SEQ ID NO: 1674306 - DNA, 15 bp, Homo sapiens
caggactgagcatgc

SEQ ID NO: 1674307 - DNA, 15 bp, Homo sapiens
aggactgagcatgct

SEQ ID NO: 1674308 - DNA, 15 bp, Homo sapiens
ggactgagcatgctg

SEQ ID NO: 1674309 - DNA, 15 bp, Homo sapiens
gactgagcatgctgg

SEQ ID NO: 1674310 - DNA, 15 bp, Homo sapiens
actgagcatgctggg

SEQ ID NO: 1674311 - DNA, 15 bp, Homo sapiens
ctgagcatgctgggc

SEQ ID NO: 1674312 - DNA, 15 bp, Homo sapiens
tgagcatgctgggca

SEQ ID NO: 1674313 - DNA, 15 bp, Homo sapiens
gagcatgctgggcat

SEQ ID NO: 1674314 - DNA, 15 bp, Homo sapiens
agcatgctgggcatt

SEQ ID NO: 1674315 - DNA, 15 bp, Homo sapiens
gcatgctgggcattg

SEQ ID NO: 1674316 - DNA, 15 bp, Homo sapiens
catgctgggcattgt

SEQ ID NO: 1674317 - DNA, 15 bp, Homo sapiens
atgctgggcattgtg

SEQ ID NO: 1674318 - DNA, 15 bp, Homo sapiens
tgctgggcattgtgg

SEQ ID NO: 1674319 - DNA, 15 bp, Homo sapiens
gctgggcattgtggg

SEQ ID NO: 1674320 - DNA, 15 bp, Homo sapiens
ctgggcattgtgggg

SEQ ID NO: 1674321 - DNA, 15 bp, Homo sapiens
tgggcattgtggggt

SEQ ID NO: 1674322 - DNA, 15 bp, Homo sapiens
gggcattgtggggtc

SEQ ID NO: 1674323 - DNA, 15 bp, Homo sapiens
ggcattgtggggtcc

SEQ ID NO: 1674324 - DNA, 15 bp, Homo sapiens
gcattgtggggtccg

SEQ ID NO: 1674325 - DNA, 15 bp, Homo sapiens
cattgtggggtccga

SEQ ID NO: 1674326 - DNA, 15 bp, Homo sapiens
attgtggggtccgaa

SEQ ID NO: 1674327 - DNA, 15 bp, Homo sapiens
ttgtggggtccgaag

SEQ ID NO: 1674328 - DNA, 15 bp, Homo sapiens
tgtggggtccgaagg

SEQ ID NO: 1674329 - DNA, 15 bp, Homo sapiens
gtggggtccgaaggt

SEQ ID NO: 1674330 - DNA, 15 bp, Homo sapiens
tggggtccgaaggtg

SEQ ID NO: 1674331 - DNA, 15 bp, Homo sapiens
ggggtccgaaggtgg

SEQ ID NO: 1674332 - DNA, 15 bp, Homo sapiens
gggtccgaaggtggc

SEQ ID NO: 1674333 - DNA, 15 bp, Homo sapiens
ggtccgaaggtggct

SEQ ID NO: 1674334 - DNA, 15 bp, Homo sapiens
gtccgaaggtggctc

SEQ ID NO: 1674335 - DNA, 15 bp, Homo sapiens
tccgaaggtggctcc

SEQ ID NO: 1674336 - DNA, 15 bp, Homo sapiens
ccgaaggtggctccc

SEQ ID NO: 1674337 - DNA, 15 bp, Homo sapiens
cgaaggtggctcccc

SEQ ID NO: 1674338 - DNA, 15 bp, Homo sapiens
gaaggtggctcccct

SEQ ID NO: 1674339 - DNA, 15 bp, Homo sapiens
aaggtggctcccctg

SEQ ID NO: 1674340 - DNA, 15 bp, Homo sapiens
aggtggctcccctgt

SEQ ID NO: 1674341 - DNA, 15 bp, Homo sapiens
ggtggctcccctgtc

SEQ ID NO: 1674342 - DNA, 15 bp, Homo sapiens
gtggctcccctgtcc

SEQ ID NO: 1674343 - DNA, 15 bp, Homo sapiens
tggctcccctgtccc

SEQ ID NO: 1674344 - DNA, 15 bp, Homo sapiens
ggctcccctgtcccc

SEQ ID NO: 1674345 - DNA, 15 bp, Homo sapiens
gctcccctgtcccct

SEQ ID NO: 1674346 - DNA, 15 bp, Homo sapiens
ctcccctgtcccctt

SEQ ID NO: 1674347 - DNA, 15 bp, Homo sapiens
tcccctgtccccttc

SEQ ID NO: 1674348 - DNA, 15 bp, Homo sapiens
cccctgtccccttca

SEQ ID NO: 1674349 - DNA, 15 bp, Homo sapiens
ccctgtccccttcaa

SEQ ID NO: 1674350 - DNA, 15 bp, Homo sapiens
cctgtccccttcaaa

SEQ ID NO: 1674351 - DNA, 15 bp, Homo sapiens
ctgtccccttcaaaa

SEQ ID NO: 1674352 - DNA, 15 bp, Homo sapiens
tgtccccttcaaaat

SEQ ID NO: 1674353 - DNA, 15 bp, Homo sapiens
gtccccttcaaaata

SEQ ID NO: 1674354 - DNA, 15 bp, Homo sapiens
tccccttcaaaatac

SEQ ID NO: 1674355 - DNA, 15 bp, Homo sapiens
ccccttcaaaatacc

SEQ ID NO: 1674356 - DNA, 15 bp, Homo sapiens
cccttcaaaataccc

SEQ ID NO: 1674357 - DNA, 15 bp, Homo sapiens
ccttcaaaataccct

SEQ ID NO: 1674358 - DNA, 15 bp, Homo sapiens
cttcaaaataccctc

SEQ ID NO: 1674359 - DNA, 15 bp, Homo sapiens
ttcaaaataccctct

SEQ ID NO: 1674360 - DNA, 15 bp, Homo sapiens
tcaaaataccctctt

SEQ ID NO: 1674361 - DNA, 15 bp, Homo sapiens
caaaataccctcttt

SEQ ID NO: 1674362 - DNA, 15 bp, Homo sapiens
aaaataccctctttt

SEQ ID NO: 1674363 - DNA, 15 bp, Homo sapiens
aaataccctcttttt

SEQ ID NO: 1674364 - DNA, 15 bp, Homo sapiens
aataccctctttttc

SEQ ID NO: 1674365 - DNA, 15 bp, Homo sapiens
ataccctctttttct

SEQ ID NO: 1674366 - DNA, 15 bp, Homo sapiens
taccctctttttctt

SEQ ID NO: 1674367 - DNA, 15 bp, Homo sapiens
accctctttttcttt

SEQ ID NO: 1674368 - DNA, 15 bp, Homo sapiens
ccctctttttctttt

SEQ ID NO: 1674369 - DNA, 15 bp, Homo sapiens
cctctttttcttttc

SEQ ID NO: 1674370 - DNA, 15 bp, Homo sapiens
ctctttttcttttct

SEQ ID NO: 1674371 - DNA, 15 bp, Homo sapiens
ctttttcttttcttc

SEQ ID NO: 1674372 - DNA, 15 bp, Homo sapiens
tttttcttttcttct

SEQ ID NO: 1674373 - DNA, 15 bp, Homo sapiens
ttttcttttcttctt

SEQ ID NO: 1674374 - DNA, 15 bp, Homo sapiens
tttcttttcttcttt

SEQ ID NO: 1674375 - DNA, 15 bp, Homo sapiens
ttcttttcttctttt

SEQ ID NO: 1674376 - DNA, 15 bp, Homo sapiens
tcttttcttcttttt

SEQ ID NO: 1674377 - DNA, 15 bp, Homo sapiens
cttttcttctttttt

SEQ ID NO: 1674378 - DNA, 15 bp, Homo sapiens
ttttcttcttttttt

SEQ ID NO: 1674379 - DNA, 15 bp, Homo sapiens
tttttttgagacgaa

SEQ ID NO: 1674380 - DNA, 15 bp, Homo sapiens
ttttttgagacgaag

SEQ ID NO: 1674381 - DNA, 15 bp, Homo sapiens
tttttgagacgaagt

SEQ ID NO: 1674382 - DNA, 15 bp, Homo sapiens
ttttgagacgaagtc

SEQ ID NO: 1674383 - DNA, 15 bp, Homo sapiens
tttgagacgaagtct

SEQ ID NO: 1674384 - DNA, 15 bp, Homo sapiens
ttgagacgaagtctt

SEQ ID NO: 1674385 - DNA, 15 bp, Homo sapiens
tgagacgaagtcttg

SEQ ID NO: 1674386 - DNA, 15 bp, Homo sapiens
gagacgaagtcttgc

SEQ ID NO: 1674387 - DNA, 15 bp, Homo sapiens
agacgaagtcttgct

SEQ ID NO: 1674388 - DNA, 15 bp, Homo sapiens
gacgaagtcttgctc

SEQ ID NO: 1674389 - DNA, 15 bp, Homo sapiens
acgaagtcttgctct

SEQ ID NO: 1674390 - DNA, 15 bp, Homo sapiens
cgaagtcttgctctg

SEQ ID NO: 1674391 - DNA, 15 bp, Homo sapiens
gaagtcttgctctgt

SEQ ID NO: 1674392 - DNA, 15 bp, Homo sapiens
aagtcttgctctgtt

SEQ ID NO: 1674393 - DNA, 15 bp, Homo sapiens
ctctgttgccccagc

SEQ ID NO: 1674394 - DNA, 15 bp, Homo sapiens
tctgttgccccagct

SEQ ID NO: 1674395 - DNA, 15 bp, Homo sapiens
ctgttgccccagcta

SEQ ID NO: 1674396 - DNA, 15 bp, Homo sapiens
tgttgccccagctag

SEQ ID NO: 1674397 - DNA, 15 bp, Homo sapiens
gttgccccagctaga

SEQ ID NO: 1674398 - DNA, 15 bp, Homo sapiens
ttgccccagctagag

SEQ ID NO: 1674399 - DNA, 15 bp, Homo sapiens
tgccccagctagagt

SEQ ID NO: 1674400 - DNA, 15 bp, Homo sapiens
gccccagctagagtg

SEQ ID NO: 1674401 - DNA, 15 bp, Homo sapiens
ccccagctagagtgc

SEQ ID NO: 1674402 - DNA, 15 bp, Homo sapiens
cccagctagagtgca

SEQ ID NO: 1674403 - DNA, 15 bp, Homo sapiens
ccagctagagtgcag

SEQ ID NO: 1674404 - DNA, 15 bp, Homo sapiens
cagctagagtgcagt

SEQ ID NO: 1674405 - DNA, 15 bp, Homo sapiens
agctagagtgcagtg

SEQ ID NO: 1674406 - DNA, 15 bp, Homo sapiens
tgcgatctcagctcc

SEQ ID NO: 1674407 - DNA, 15 bp, Homo sapiens
gcgatctcagctccc

SEQ ID NO: 1674408 - DNA, 15 bp, Homo sapiens
cgatctcagctcccc

SEQ ID NO: 1674409 - DNA, 15 bp, Homo sapiens
gatctcagctccccg

SEQ ID NO: 1674410 - DNA, 15 bp, Homo sapiens
atctcagctccccgc

SEQ ID NO: 1674411 - DNA, 15 bp, Homo sapiens
tctcagctccccgca

SEQ ID NO: 1674412 - DNA, 15 bp, Homo sapiens
ctcagctccccgcaa

SEQ ID NO: 1674413 - DNA, 15 bp, Homo sapiens
tcagctccccgcaac

SEQ ID NO: 1674414 - DNA, 15 bp, Homo sapiens
cagctccccgcaacc

SEQ ID NO: 1674415 - DNA, 15 bp, Homo sapiens
agctccccgcaacct

SEQ ID NO: 1674416 - DNA, 15 bp, Homo sapiens
gctccccgcaacctc

SEQ ID NO: 1674417 - DNA, 15 bp, Homo sapiens
ctccccgcaacctct

SEQ ID NO: 1674418 - DNA, 15 bp, Homo sapiens
tccccgcaacctctg

SEQ ID NO: 1674419 - DNA, 15 bp, Homo sapiens
ccccgcaacctctgc

SEQ ID NO: 1674420 - DNA, 15 bp, Homo sapiens
cccgcaacctctgct

SEQ ID NO: 1674421 - DNA, 15 bp, Homo sapiens
ccgcaacctctgctt

SEQ ID NO: 1674422 - DNA, 15 bp, Homo sapiens
cgcaacctctgcttc

SEQ ID NO: 1674423 - DNA, 15 bp, Homo sapiens
caacctctgcttccc

SEQ ID NO: 1674424 - DNA, 15 bp, Homo sapiens
aacctctgcttcccg

SEQ ID NO: 1674425 - DNA, 15 bp, Homo sapiens
acctctgcttcccgg

SEQ ID NO: 1674426 - DNA, 15 bp, Homo sapiens
cctctgcttcccggg

SEQ ID NO: 1674427 - DNA, 15 bp, Homo sapiens
ctctgcttcccgggt

SEQ ID NO: 1674428 - DNA, 15 bp, Homo sapiens
tctgcttcccgggtt

SEQ ID NO: 1674429 - DNA, 15 bp, Homo sapiens
ctgcttcccgggttc

SEQ ID NO: 1674430 - DNA, 15 bp, Homo sapiens
tgcttcccgggttca

SEQ ID NO: 1674431 - DNA, 15 bp, Homo sapiens
gcttcccgggttcag

SEQ ID NO: 1674432 - DNA, 15 bp, Homo sapiens
cttcccgggttcagg

SEQ ID NO: 1674433 - DNA, 15 bp, Homo sapiens
ttcccgggttcaggc

SEQ ID NO: 1674434 - DNA, 15 bp, Homo sapiens
tcccgggttcaggcg

SEQ ID NO: 1674435 - DNA, 15 bp, Homo sapiens
cccgggttcaggcga

SEQ ID NO: 1674436 - DNA, 15 bp, Homo sapiens
ccgggttcaggcgat

SEQ ID NO: 1674437 - DNA, 15 bp, Homo sapiens
cgggttcaggcgatt

SEQ ID NO: 1674438 - DNA, 15 bp, Homo sapiens
gggttcaggcgattc

SEQ ID NO: 1674439 - DNA, 15 bp, Homo sapiens
aggcgattctcctgc

SEQ ID NO: 1674440 - DNA, 15 bp, Homo sapiens
ggcgattctcctgcc

SEQ ID NO: 1674441 - DNA, 15 bp, Homo sapiens
tacaggtgcccaccg

SEQ ID NO: 1674442 - DNA, 15 bp, Homo sapiens
acaggtgcccaccgc

SEQ ID NO: 1674443 - DNA, 15 bp, Homo sapiens
caggtgcccaccgcc

SEQ ID NO: 1674444 - DNA, 15 bp, Homo sapiens
aggtgcccaccgcca

SEQ ID NO: 1674445 - DNA, 15 bp, Homo sapiens
ggtgcccaccgccac

SEQ ID NO: 1674446 - DNA, 15 bp, Homo sapiens
gtgcccaccgccaca

SEQ ID NO: 1674447 - DNA, 15 bp, Homo sapiens
tgcccaccgccacag

SEQ ID NO: 1674448 - DNA, 15 bp, Homo sapiens
gcccaccgccacagc

SEQ ID NO: 1674449 - DNA, 15 bp, Homo sapiens
cccaccgccacagct

SEQ ID NO: 1674450 - DNA, 15 bp, Homo sapiens
ccaccgccacagctg

SEQ ID NO: 1674451 - DNA, 15 bp, Homo sapiens
caccgccacagctgg

SEQ ID NO: 1674452 - DNA, 15 bp, Homo sapiens
accgccacagctggc

SEQ ID NO: 1674453 - DNA, 15 bp, Homo sapiens
ccgccacagctggct

SEQ ID NO: 1674454 - DNA, 15 bp, Homo sapiens
cgccacagctggcta

SEQ ID NO: 1674455 - DNA, 15 bp, Homo sapiens
gccacagctggctaa

SEQ ID NO: 1674456 - DNA, 15 bp, Homo sapiens
cacagctggctaatt

SEQ ID NO: 1674457 - DNA, 15 bp, Homo sapiens
acagctggctaattt

SEQ ID NO: 1674458 - DNA, 15 bp, Homo sapiens
cagctggctaatttt

SEQ ID NO: 1674459 - DNA, 15 bp, Homo sapiens
agctggctaattttt

SEQ ID NO: 1674460 - DNA, 15 bp, Homo sapiens
gctggctaatttttg

SEQ ID NO: 1674461 - DNA, 15 bp, Homo sapiens
ggtttcaccgtgttg

SEQ ID NO: 1674462 - DNA, 15 bp, Homo sapiens
gtttcaccgtgttgg

SEQ ID NO: 1674463 - DNA, 15 bp, Homo sapiens
tttcaccgtgttggc

SEQ ID NO: 1674464 - DNA, 15 bp, Homo sapiens
ttcaccgtgttggcc

SEQ ID NO: 1674465 - DNA, 15 bp, Homo sapiens
tcctgacctcaggca

SEQ ID NO: 1674466 - DNA, 15 bp, Homo sapiens
cctgacctcaggcaa

SEQ ID NO: 1674467 - DNA, 15 bp, Homo sapiens
ctgacctcaggcaac

SEQ ID NO: 1674468 - DNA, 15 bp, Homo sapiens
tgacctcaggcaacc

SEQ ID NO: 1674469 - DNA, 15 bp, Homo sapiens
gacctcaggcaacct

SEQ ID NO: 1674470 - DNA, 15 bp, Homo sapiens
acctcaggcaacctg

SEQ ID NO: 1674471 - DNA, 15 bp, Homo sapiens
cctcaggcaacctgc

SEQ ID NO: 1674472 - DNA, 15 bp, Homo sapiens
ctcaggcaacctgcc

SEQ ID NO: 1674473 - DNA, 15 bp, Homo sapiens
tcaggcaacctgccc

SEQ ID NO: 1674474 - DNA, 15 bp, Homo sapiens
caggcaacctgccca

SEQ ID NO: 1674475 - DNA, 15 bp, Homo sapiens
aggcaacctgcccac

SEQ ID NO: 1674476 - DNA, 15 bp, Homo sapiens
ggcaacctgcccacc

SEQ ID NO: 1674477 - DNA, 15 bp, Homo sapiens
gcaacctgcccacct

SEQ ID NO: 1674478 - DNA, 15 bp, Homo sapiens
caacctgcccacctc

SEQ ID NO: 1674479 - DNA, 15 bp, Homo sapiens
aacctgcccacctca

SEQ ID NO: 1674480 - DNA, 15 bp, Homo sapiens
acctgcccacctcag

SEQ ID NO: 1674481 - DNA, 15 bp, Homo sapiens
cctgcccacctcagc

SEQ ID NO: 1674482 - DNA, 15 bp, Homo sapiens
caggtttgagccact

SEQ ID NO: 1674483 - DNA, 15 bp, Homo sapiens
aggtttgagccactg

SEQ ID NO: 1674484 - DNA, 15 bp, Homo sapiens
ggtttgagccactgg

SEQ ID NO: 1674485 - DNA, 15 bp, Homo sapiens
gtttgagccactggg

SEQ ID NO: 1674486 - DNA, 15 bp, Homo sapiens
tttgagccactgggc

SEQ ID NO: 1674487 - DNA, 15 bp, Homo sapiens
ttgagccactgggcc

SEQ ID NO: 1674488 - DNA, 15 bp, Homo sapiens
tgagccactgggcct

SEQ ID NO: 1674489 - DNA, 15 bp, Homo sapiens
gagccactgggcctg

SEQ ID NO: 1674490 - DNA, 15 bp, Homo sapiens
agccactgggcctgg

SEQ ID NO: 1674491 - DNA, 15 bp, Homo sapiens
gccactgggcctggc

SEQ ID NO: 1674492 - DNA, 15 bp, Homo sapiens
ccactgggcctggcc

SEQ ID NO: 1674493 - DNA, 15 bp, Homo sapiens
cactgggcctggcct

SEQ ID NO: 1674494 - DNA, 15 bp, Homo sapiens
actgggcctggcctt

SEQ ID NO: 1674495 - DNA, 15 bp, Homo sapiens
ctgggcctggccttt

SEQ ID NO: 1674496 - DNA, 15 bp, Homo sapiens
tgggcctggcctttt

SEQ ID NO: 1674497 - DNA, 15 bp, Homo sapiens
gggcctggccttttt

SEQ ID NO: 1674498 - DNA, 15 bp, Homo sapiens
ggcctggcctttttt

SEQ ID NO: 1674499 - DNA, 15 bp, Homo sapiens
tttttttttgagagg

SEQ ID NO: 1674500 - DNA, 15 bp, Homo sapiens
ttttttttgagaggg

SEQ ID NO: 1674501 - DNA, 15 bp, Homo sapiens
tttttttgagaggga

SEQ ID NO: 1674502 - DNA, 15 bp, Homo sapiens
ttttttgagagggag

SEQ ID NO: 1674503 - DNA, 15 bp, Homo sapiens
tttttgagagggagt

SEQ ID NO: 1674504 - DNA, 15 bp, Homo sapiens
ttttgagagggagtc

SEQ ID NO: 1674505 - DNA, 15 bp, Homo sapiens
tttgagagggagtct

SEQ ID NO: 1674506 - DNA, 15 bp, Homo sapiens
ttgagagggagtctc

SEQ ID NO: 1674507 - DNA, 15 bp, Homo sapiens
tgagagggagtctca

SEQ ID NO: 1674508 - DNA, 15 bp, Homo sapiens
gagagggagtctcac

SEQ ID NO: 1674509 - DNA, 15 bp, Homo sapiens
agagggagtctcact

SEQ ID NO: 1674510 - DNA, 15 bp, Homo sapiens
gagggagtctcactc

SEQ ID NO: 1674511 - DNA, 15 bp, Homo sapiens
agggagtctcactct

SEQ ID NO: 1674512 - DNA, 15 bp, Homo sapiens
gggagtctcactctg

SEQ ID NO: 1674513 - DNA, 15 bp, Homo sapiens
atggcgcgatcttga

SEQ ID NO: 1674514 - DNA, 15 bp, Homo sapiens
tggcgcgatcttgac

SEQ ID NO: 1674515 - DNA, 15 bp, Homo sapiens
ggcgcgatcttgact

SEQ ID NO: 1674516 - DNA, 15 bp, Homo sapiens
gcgcgatcttgactc

SEQ ID NO: 1674517 - DNA, 15 bp, Homo sapiens
cgcgatcttgactca

SEQ ID NO: 1674518 - DNA, 15 bp, Homo sapiens
gcgatcttgactcac

SEQ ID NO: 1674519 - DNA, 15 bp, Homo sapiens
cgatcttgactcact

SEQ ID NO: 1674520 - DNA, 15 bp, Homo sapiens
gatcttgactcactg

SEQ ID NO: 1674521 - DNA, 15 bp, Homo sapiens
atcttgactcactgc

SEQ ID NO: 1674522 - DNA, 15 bp, Homo sapiens
tcttgactcactgca

SEQ ID NO: 1674523 - DNA, 15 bp, Homo sapiens
cttgactcactgcaa

SEQ ID NO: 1674524 - DNA, 15 bp, Homo sapiens
ttgactcactgcaac

SEQ ID NO: 1674525 - DNA, 15 bp, Homo sapiens
tgactcactgcaact

SEQ ID NO: 1674526 - DNA, 15 bp, Homo sapiens
gactcactgcaactc

SEQ ID NO: 1674527 - DNA, 15 bp, Homo sapiens
actcactgcaactcc

SEQ ID NO: 1674528 - DNA, 15 bp, Homo sapiens
ctcactgcaactcca

SEQ ID NO: 1674529 - DNA, 15 bp, Homo sapiens
tcactgcaactccat

SEQ ID NO: 1674530 - DNA, 15 bp, Homo sapiens
cactgcaactccatt

SEQ ID NO: 1674531 - DNA, 15 bp, Homo sapiens
actgcaactccattt

SEQ ID NO: 1674532 - DNA, 15 bp, Homo sapiens
ctgcaactccatttc

SEQ ID NO: 1674533 - DNA, 15 bp, Homo sapiens
tgcaactccatttcc

SEQ ID NO: 1674534 - DNA, 15 bp, Homo sapiens
gcaactccatttccc

SEQ ID NO: 1674535 - DNA, 15 bp, Homo sapiens
caactccatttcccg

SEQ ID NO: 1674536 - DNA, 15 bp, Homo sapiens
aactccatttcccgg

SEQ ID NO: 1674537 - DNA, 15 bp, Homo sapiens
actccatttcccggg

SEQ ID NO: 1674538 - DNA, 15 bp, Homo sapiens
caagtgattctcctc

SEQ ID NO: 1674539 - DNA, 15 bp, Homo sapiens
aagtgattctcctcc

SEQ ID NO: 1674540 - DNA, 15 bp, Homo sapiens
agtgattctcctccc

SEQ ID NO: 1674541 - DNA, 15 bp, Homo sapiens
gtgattctcctccct

SEQ ID NO: 1674542 - DNA, 15 bp, Homo sapiens
tgattctcctccctc

SEQ ID NO: 1674543 - DNA, 15 bp, Homo sapiens
gattctcctccctca

SEQ ID NO: 1674544 - DNA, 15 bp, Homo sapiens
attctcctccctcag

SEQ ID NO: 1674545 - DNA, 15 bp, Homo sapiens
ttctcctccctcagc

SEQ ID NO: 1674546 - DNA, 15 bp, Homo sapiens
tctcctccctcagcc

SEQ ID NO: 1674547 - DNA, 15 bp, Homo sapiens
ggattacaggtgcat

SEQ ID NO: 1674548 - DNA, 15 bp, Homo sapiens
gattacaggtgcatg

SEQ ID NO: 1674549 - DNA, 15 bp, Homo sapiens
attacaggtgcatgc

SEQ ID NO: 1674550 - DNA, 15 bp, Homo sapiens
ttacaggtgcatgcc

SEQ ID NO: 1674551 - DNA, 15 bp, Homo sapiens
acaggtgcatgccac

SEQ ID NO: 1674552 - DNA, 15 bp, Homo sapiens
caggtgcatgccacc

SEQ ID NO: 1674553 - DNA, 15 bp, Homo sapiens
tgcatgccaccacgg

SEQ ID NO: 1674554 - DNA, 15 bp, Homo sapiens
gcatgccaccacggc

SEQ ID NO: 1674555 - DNA, 15 bp, Homo sapiens
catgccaccacggcc

SEQ ID NO: 1674556 - DNA, 15 bp, Homo sapiens
atgccaccacggcca

SEQ ID NO: 1674557 - DNA, 15 bp, Homo sapiens
tgccaccacggccag

SEQ ID NO: 1674558 - DNA, 15 bp, Homo sapiens
gccaccacggccagc

SEQ ID NO: 1674559 - DNA, 15 bp, Homo sapiens
ccaccacggccagct

SEQ ID NO: 1674560 - DNA, 15 bp, Homo sapiens
caccacggccagcta

SEQ ID NO: 1674561 - DNA, 15 bp, Homo sapiens
accacggccagctaa

SEQ ID NO: 1674562 - DNA, 15 bp, Homo sapiens
ccacggccagctaat

SEQ ID NO: 1674563 - DNA, 15 bp, Homo sapiens
cacggccagctaatt

SEQ ID NO: 1674564 - DNA, 15 bp, Homo sapiens
acggccagctaattt

SEQ ID NO: 1674565 - DNA, 15 bp, Homo sapiens
cggccagctaatttt

SEQ ID NO: 1674566 - DNA, 15 bp, Homo sapiens
ggccagctaattttg

SEQ ID NO: 1674567 - DNA, 15 bp, Homo sapiens
gccagctaattttgt

SEQ ID NO: 1674568 - DNA, 15 bp, Homo sapiens
gtttcactatgttga

SEQ ID NO: 1674569 - DNA, 15 bp, Homo sapiens
tttcactatgttgat

SEQ ID NO: 1674570 - DNA, 15 bp, Homo sapiens
ttcactatgttgatc

SEQ ID NO: 1674571 - DNA, 15 bp, Homo sapiens
tcactatgttgatca

SEQ ID NO: 1674572 - DNA, 15 bp, Homo sapiens
cactatgttgatcat

SEQ ID NO: 1674573 - DNA, 15 bp, Homo sapiens
actatgttgatcatg

SEQ ID NO: 1674574 - DNA, 15 bp, Homo sapiens
ctatgttgatcatgc

SEQ ID NO: 1674575 - DNA, 15 bp, Homo sapiens
tatgttgatcatgct

SEQ ID NO: 1674576 - DNA, 15 bp, Homo sapiens
atgttgatcatgctg

SEQ ID NO: 1674577 - DNA, 15 bp, Homo sapiens
tgttgatcatgctgg

SEQ ID NO: 1674578 - DNA, 15 bp, Homo sapiens
gttgatcatgctggt

SEQ ID NO: 1674579 - DNA, 15 bp, Homo sapiens
ttgatcatgctggtc

SEQ ID NO: 1674580 - DNA, 15 bp, Homo sapiens
tgatcatgctggtct

SEQ ID NO: 1674581 - DNA, 15 bp, Homo sapiens
gatcatgctggtctc

SEQ ID NO: 1674582 - DNA, 15 bp, Homo sapiens
atcatgctggtctca

SEQ ID NO: 1674583 - DNA, 15 bp, Homo sapiens
tcatgctggtctcaa

SEQ ID NO: 1674584 - DNA, 15 bp, Homo sapiens
catgctggtctcaaa

SEQ ID NO: 1674585 - DNA, 15 bp, Homo sapiens
caaactcctgacctt

SEQ ID NO: 1674586 - DNA, 15 bp, Homo sapiens
aaactcctgacctta

SEQ ID NO: 1674587 - DNA, 15 bp, Homo sapiens
aactcctgaccttag

SEQ ID NO: 1674588 - DNA, 15 bp, Homo sapiens
actcctgaccttagg

SEQ ID NO: 1674589 - DNA, 15 bp, Homo sapiens
ccttaggtgatctgc

SEQ ID NO: 1674590 - DNA, 15 bp, Homo sapiens
ttaggtgatctgccc

SEQ ID NO: 1674591 - DNA, 15 bp, Homo sapiens
taggtgatctgcccg

SEQ ID NO: 1674592 - DNA, 15 bp, Homo sapiens
gatctgcccgcctta

SEQ ID NO: 1674593 - DNA, 15 bp, Homo sapiens
atctgcccgccttag

SEQ ID NO: 1674594 - DNA, 15 bp, Homo sapiens
tctgcccgccttagc

SEQ ID NO: 1674595 - DNA, 15 bp, Homo sapiens
ctgcccgccttagcc

SEQ ID NO: 1674596 - DNA, 15 bp, Homo sapiens
tgcccgccttagcct

SEQ ID NO: 1674597 - DNA, 15 bp, Homo sapiens
gcccgccttagcctc

SEQ ID NO: 1674598 - DNA, 15 bp, Homo sapiens
cccgccttagcctcc

SEQ ID NO: 1674599 - DNA, 15 bp, Homo sapiens
ccgccttagcctccc

SEQ ID NO: 1674600 - DNA, 15 bp, Homo sapiens
cgccttagcctccca

SEQ ID NO: 1674601 - DNA, 15 bp, Homo sapiens
cagagggccaggagg

SEQ ID NO: 1674602 - DNA, 15 bp, Homo sapiens
agagggccaggaggg

SEQ ID NO: 1674603 - DNA, 15 bp, Homo sapiens
gagggccaggaggga

SEQ ID NO: 1674604 - DNA, 15 bp, Homo sapiens
agggccaggagggag

SEQ ID NO: 1674605 - DNA, 15 bp, Homo sapiens
gggccaggagggagg

SEQ ID NO: 1674606 - DNA, 15 bp, Homo sapiens
ggccaggagggagga

SEQ ID NO: 1674607 - DNA, 15 bp, Homo sapiens
gccaggagggaggaa

SEQ ID NO: 1674608 - DNA, 15 bp, Homo sapiens
ccaggagggaggaag

SEQ ID NO: 1674609 - DNA, 15 bp, Homo sapiens
caggagggaggaagg

SEQ ID NO: 1674610 - DNA, 15 bp, Homo sapiens
aggagggaggaaggg

SEQ ID NO: 1674611 - DNA, 15 bp, Homo sapiens
ggagggaggaaggga

SEQ ID NO: 1674612 - DNA, 15 bp, Homo sapiens
gagggaggaagggag

SEQ ID NO: 1674613 - DNA, 15 bp, Homo sapiens
agggaggaagggaga

SEQ ID NO: 1674614 - DNA, 15 bp, Homo sapiens
gggaggaagggagag

SEQ ID NO: 1674615 - DNA, 15 bp, Homo sapiens
ggaggaagggagagg

SEQ ID NO: 1674616 - DNA, 15 bp, Homo sapiens
gaggaagggagagga

SEQ ID NO: 1674617 - DNA, 15 bp, Homo sapiens
aggaagggagaggag

SEQ ID NO: 1674618 - DNA, 15 bp, Homo sapiens
ggaagggagaggagg

SEQ ID NO: 1674619 - DNA, 15 bp, Homo sapiens
gaagggagaggaggt

SEQ ID NO: 1674620 - DNA, 15 bp, Homo sapiens
aagggagaggaggtg

SEQ ID NO: 1674621 - DNA, 15 bp, Homo sapiens
agggagaggaggtgt

SEQ ID NO: 1674622 - DNA, 15 bp, Homo sapiens
gggagaggaggtgtt

SEQ ID NO: 1674623 - DNA, 15 bp, Homo sapiens
ggagaggaggtgttt

SEQ ID NO: 1674624 - DNA, 15 bp, Homo sapiens
gagaggaggtgtttt

SEQ ID NO: 1674625 - DNA, 15 bp, Homo sapiens
agaggaggtgtttta

SEQ ID NO: 1674626 - DNA, 15 bp, Homo sapiens
gaggaggtgttttat

SEQ ID NO: 1674627 - DNA, 15 bp, Homo sapiens
aggaggtgttttatt

SEQ ID NO: 1674628 - DNA, 15 bp, Homo sapiens
ggaggtgttttattt

SEQ ID NO: 1674629 - DNA, 15 bp, Homo sapiens
gaggtgttttatttt

SEQ ID NO: 1674630 - DNA, 15 bp, Homo sapiens
aggtgttttattttt

SEQ ID NO: 1674631 - DNA, 15 bp, Homo sapiens
ggtgttttatttttt

SEQ ID NO: 1674632 - DNA, 15 bp, Homo sapiens
gtgttttattttttt

SEQ ID NO: 1674633 - DNA, 15 bp, Homo sapiens
tgttttatttttttg

SEQ ID NO: 1674634 - DNA, 15 bp, Homo sapiens
gttttatttttttgc

SEQ ID NO: 1674635 - DNA, 15 bp, Homo sapiens
tttatttttttgctt

SEQ ID NO: 1674636 - DNA, 15 bp, Homo sapiens
ttatttttttgcttt

SEQ ID NO: 1674637 - DNA, 15 bp, Homo sapiens
tatttttttgctttt

SEQ ID NO: 1674638 - DNA, 15 bp, Homo sapiens
atttttttgctttta

SEQ ID NO: 1674639 - DNA, 15 bp, Homo sapiens
tttttttgcttttat

SEQ ID NO: 1674640 - DNA, 15 bp, Homo sapiens
ttttttgcttttatt

SEQ ID NO: 1674641 - DNA, 15 bp, Homo sapiens
ttttgcttttatttt

SEQ ID NO: 1674642 - DNA, 15 bp, Homo sapiens
tttgcttttattttt

SEQ ID NO: 1674643 - DNA, 15 bp, Homo sapiens
ttgcttttatttttt

SEQ ID NO: 1674644 - DNA, 15 bp, Homo sapiens
tgcttttatttttta

SEQ ID NO: 1674645 - DNA, 15 bp, Homo sapiens
gcttttattttttat

SEQ ID NO: 1674646 - DNA, 15 bp, Homo sapiens
cttttattttttatt

SEQ ID NO: 1674647 - DNA, 15 bp, Homo sapiens
ttattttttattttg

SEQ ID NO: 1674648 - DNA, 15 bp, Homo sapiens
tattttttattttga

SEQ ID NO: 1674649 - DNA, 15 bp, Homo sapiens
attttttattttgag

SEQ ID NO: 1674650 - DNA, 15 bp, Homo sapiens
tttattttgagacag

SEQ ID NO: 1674651 - DNA, 15 bp, Homo sapiens
ttattttgagacaga

SEQ ID NO: 1674652 - DNA, 15 bp, Homo sapiens
tattttgagacagag

SEQ ID NO: 1674653 - DNA, 15 bp, Homo sapiens
attttgagacagagt

SEQ ID NO: 1674654 - DNA, 15 bp, Homo sapiens
agtctctctctgtca

SEQ ID NO: 1674655 - DNA, 15 bp, Homo sapiens
ctctgtcacccaggt

SEQ ID NO: 1674656 - DNA, 15 bp, Homo sapiens
tctgtcacccaggtt

SEQ ID NO: 1674657 - DNA, 15 bp, Homo sapiens
tgtcacccaggttgg

SEQ ID NO: 1674658 - DNA, 15 bp, Homo sapiens
gtcacccaggttgga

SEQ ID NO: 1674659 - DNA, 15 bp, Homo sapiens
tcacccaggttggag

SEQ ID NO: 1674660 - DNA, 15 bp, Homo sapiens
cacccaggttggagt

SEQ ID NO: 1674661 - DNA, 15 bp, Homo sapiens
gttggagtgcagtgc

SEQ ID NO: 1674662 - DNA, 15 bp, Homo sapiens
ttggagtgcagtgct

SEQ ID NO: 1674663 - DNA, 15 bp, Homo sapiens
gcagtgctgtgatct

SEQ ID NO: 1674664 - DNA, 15 bp, Homo sapiens
cagtgctgtgatctt

SEQ ID NO: 1674665 - DNA, 15 bp, Homo sapiens
agtgctgtgatcttg

SEQ ID NO: 1674666 - DNA, 15 bp, Homo sapiens
gtgctgtgatcttgg

SEQ ID NO: 1674667 - DNA, 15 bp, Homo sapiens
tgctgtgatcttggc

SEQ ID NO: 1674668 - DNA, 15 bp, Homo sapiens
gctgtgatcttggct

SEQ ID NO: 1674669 - DNA, 15 bp, Homo sapiens
ctgtgatcttggctc

SEQ ID NO: 1674670 - DNA, 15 bp, Homo sapiens
tggctcactgcaact

SEQ ID NO: 1674671 - DNA, 15 bp, Homo sapiens
ctcactgcaacttct

SEQ ID NO: 1674672 - DNA, 15 bp, Homo sapiens
tcactgcaacttctg

SEQ ID NO: 1674673 - DNA, 15 bp, Homo sapiens
cactgcaacttctgc

SEQ ID NO: 1674674 - DNA, 15 bp, Homo sapiens
actgcaacttctgcc

SEQ ID NO: 1674675 - DNA, 15 bp, Homo sapiens
ctgcaacttctgcct

SEQ ID NO: 1674676 - DNA, 15 bp, Homo sapiens
caacttctgcctcct

SEQ ID NO: 1674677 - DNA, 15 bp, Homo sapiens
aacttctgcctcctg

SEQ ID NO: 1674678 - DNA, 15 bp, Homo sapiens
acttctgcctcctgg

SEQ ID NO: 1674679 - DNA, 15 bp, Homo sapiens
cttctgcctcctggg

SEQ ID NO: 1674680 - DNA, 15 bp, Homo sapiens
ttctgcctcctgggt

SEQ ID NO: 1674681 - DNA, 15 bp, Homo sapiens
tatgcctcagcctca

SEQ ID NO: 1674682 - DNA, 15 bp, Homo sapiens
atgcctcagcctcag

SEQ ID NO: 1674683 - DNA, 15 bp, Homo sapiens
tgcctcagcctcagc

SEQ ID NO: 1674684 - DNA, 15 bp, Homo sapiens
gcctcagcctcagcc

SEQ ID NO: 1674685 - DNA, 15 bp, Homo sapiens
cctcagcctcagcct

SEQ ID NO: 1674686 - DNA, 15 bp, Homo sapiens
ctcagcctcagcctc

SEQ ID NO: 1674687 - DNA, 15 bp, Homo sapiens
tcagcctcagcctcc

SEQ ID NO: 1674688 - DNA, 15 bp, Homo sapiens
cagcctcagcctcct

SEQ ID NO: 1674689 - DNA, 15 bp, Homo sapiens
agcctcagcctcctg

SEQ ID NO: 1674690 - DNA, 15 bp, Homo sapiens
agctgggattacaac

SEQ ID NO: 1674691 - DNA, 15 bp, Homo sapiens
gctgggattacaaca

SEQ ID NO: 1674692 - DNA, 15 bp, Homo sapiens
ctgggattacaacac

SEQ ID NO: 1674693 - DNA, 15 bp, Homo sapiens
tgggattacaacact

SEQ ID NO: 1674694 - DNA, 15 bp, Homo sapiens
gggattacaacacta

SEQ ID NO: 1674695 - DNA, 15 bp, Homo sapiens
ggattacaacactat

SEQ ID NO: 1674696 - DNA, 15 bp, Homo sapiens
gattacaacactatg

SEQ ID NO: 1674697 - DNA, 15 bp, Homo sapiens
attacaacactatgc

SEQ ID NO: 1674698 - DNA, 15 bp, Homo sapiens
ttacaacactatgcc

SEQ ID NO: 1674699 - DNA, 15 bp, Homo sapiens
tacaacactatgccc

SEQ ID NO: 1674700 - DNA, 15 bp, Homo sapiens
acaacactatgcccg

SEQ ID NO: 1674701 - DNA, 15 bp, Homo sapiens
caacactatgcccgg

SEQ ID NO: 1674702 - DNA, 15 bp, Homo sapiens
aacactatgcccggg

SEQ ID NO: 1674703 - DNA, 15 bp, Homo sapiens
acactatgcccgggt

SEQ ID NO: 1674704 - DNA, 15 bp, Homo sapiens
cactatgcccgggta

SEQ ID NO: 1674705 - DNA, 15 bp, Homo sapiens
actatgcccgggtaa

SEQ ID NO: 1674706 - DNA, 15 bp, Homo sapiens
ctatgcccgggtaat

SEQ ID NO: 1674707 - DNA, 15 bp, Homo sapiens
tatgcccgggtaatt

SEQ ID NO: 1674708 - DNA, 15 bp, Homo sapiens
atgcccgggtaattt

SEQ ID NO: 1674709 - DNA, 15 bp, Homo sapiens
tgcccgggtaatttt

SEQ ID NO: 1674710 - DNA, 15 bp, Homo sapiens
cccgggtaatttttg

SEQ ID NO: 1674711 - DNA, 15 bp, Homo sapiens
ccgggtaatttttgt

SEQ ID NO: 1674712 - DNA, 15 bp, Homo sapiens
cgggtaatttttgta

SEQ ID NO: 1674713 - DNA, 15 bp, Homo sapiens
gggtaatttttgtat

SEQ ID NO: 1674714 - DNA, 15 bp, Homo sapiens
ggtaatttttgtatt

SEQ ID NO: 1674715 - DNA, 15 bp, Homo sapiens
gtaatttttgtattt

SEQ ID NO: 1674716 - DNA, 15 bp, Homo sapiens
agagacgaggtttcg

SEQ ID NO: 1674717 - DNA, 15 bp, Homo sapiens
gagacgaggtttcgc

SEQ ID NO: 1674718 - DNA, 15 bp, Homo sapiens
agacgaggtttcgcc

SEQ ID NO: 1674719 - DNA, 15 bp, Homo sapiens
gacgaggtttcgcca

SEQ ID NO: 1674720 - DNA, 15 bp, Homo sapiens
acgaggtttcgccat

SEQ ID NO: 1674721 - DNA, 15 bp, Homo sapiens
cgaggtttcgccatg

SEQ ID NO: 1674722 - DNA, 15 bp, Homo sapiens
gaggtttcgccatgt

SEQ ID NO: 1674723 - DNA, 15 bp, Homo sapiens
gccatgttgcccaga

SEQ ID NO: 1674724 - DNA, 15 bp, Homo sapiens
catgttgcccagact

SEQ ID NO: 1674725 - DNA, 15 bp, Homo sapiens
atgttgcccagactg

SEQ ID NO: 1674726 - DNA, 15 bp, Homo sapiens
gttgcccagactggt

SEQ ID NO: 1674727 - DNA, 15 bp, Homo sapiens
ttgcccagactggtc

SEQ ID NO: 1674728 - DNA, 15 bp, Homo sapiens
tgcccagactggtct

SEQ ID NO: 1674729 - DNA, 15 bp, Homo sapiens
gcccagactggtctc

SEQ ID NO: 1674730 - DNA, 15 bp, Homo sapiens
cccagactggtctcg

SEQ ID NO: 1674731 - DNA, 15 bp, Homo sapiens
ccagactggtctcga

SEQ ID NO: 1674732 - DNA, 15 bp, Homo sapiens
cgccttggcctcccc

SEQ ID NO: 1674733 - DNA, 15 bp, Homo sapiens
gccttggcctcccca

SEQ ID NO: 1674734 - DNA, 15 bp, Homo sapiens
ccttggcctccccac

SEQ ID NO: 1674735 - DNA, 15 bp, Homo sapiens
cttggcctccccacg

SEQ ID NO: 1674736 - DNA, 15 bp, Homo sapiens
ttggcctccccacgt

SEQ ID NO: 1674737 - DNA, 15 bp, Homo sapiens
tggcctccccacgtg

SEQ ID NO: 1674738 - DNA, 15 bp, Homo sapiens
ggcctccccacgtgc

SEQ ID NO: 1674739 - DNA, 15 bp, Homo sapiens
gcctccccacgtgct

SEQ ID NO: 1674740 - DNA, 15 bp, Homo sapiens
cctccccacgtgctg

SEQ ID NO: 1674741 - DNA, 15 bp, Homo sapiens
ctccccacgtgctgg

SEQ ID NO: 1674742 - DNA, 15 bp, Homo sapiens
tccccacgtgctggg

SEQ ID NO: 1674743 - DNA, 15 bp, Homo sapiens
ccccacgtgctggga

SEQ ID NO: 1674744 - DNA, 15 bp, Homo sapiens
cccacgtgctgggat

SEQ ID NO: 1674745 - DNA, 15 bp, Homo sapiens
ccacgtgctgggatt

SEQ ID NO: 1674746 - DNA, 15 bp, Homo sapiens
cacgtgctgggattg

SEQ ID NO: 1674747 - DNA, 15 bp, Homo sapiens
acgtgctgggattgc

SEQ ID NO: 1674748 - DNA, 15 bp, Homo sapiens
cgtgctgggattgca

SEQ ID NO: 1674749 - DNA, 15 bp, Homo sapiens
gctgggattgcaggc

SEQ ID NO: 1674750 - DNA, 15 bp, Homo sapiens
ctgggattgcaggcg

SEQ ID NO: 1674751 - DNA, 15 bp, Homo sapiens
tgggattgcaggcgt

SEQ ID NO: 1674752 - DNA, 15 bp, Homo sapiens
gggattgcaggcgtg

SEQ ID NO: 1674753 - DNA, 15 bp, Homo sapiens
gattgcaggcgtgag

SEQ ID NO: 1674754 - DNA, 15 bp, Homo sapiens
attgcaggcgtgagc

SEQ ID NO: 1674755 - DNA, 15 bp, Homo sapiens
ttgcaggcgtgagcc

SEQ ID NO: 1674756 - DNA, 15 bp, Homo sapiens
tgcaggcgtgagcca

SEQ ID NO: 1674757 - DNA, 15 bp, Homo sapiens
gcaggcgtgagccac

SEQ ID NO: 1674758 - DNA, 15 bp, Homo sapiens
agccactgcgcccgc

SEQ ID NO: 1674759 - DNA, 15 bp, Homo sapiens
gccactgcgcccgcc

SEQ ID NO: 1674760 - DNA, 15 bp, Homo sapiens
ccactgcgcccgcct

SEQ ID NO: 1674761 - DNA, 15 bp, Homo sapiens
cactgcgcccgcctt

SEQ ID NO: 1674762 - DNA, 15 bp, Homo sapiens
actgcgcccgccttg

SEQ ID NO: 1674763 - DNA, 15 bp, Homo sapiens
ctgcgcccgccttga

SEQ ID NO: 1674764 - DNA, 15 bp, Homo sapiens
tgcgcccgccttgat

SEQ ID NO: 1674765 - DNA, 15 bp, Homo sapiens
gcgcccgccttgatc

SEQ ID NO: 1674766 - DNA, 15 bp, Homo sapiens
cgcccgccttgatct

SEQ ID NO: 1674767 - DNA, 15 bp, Homo sapiens
gcccgccttgatctt

SEQ ID NO: 1674768 - DNA, 15 bp, Homo sapiens
cccgccttgatcttt

SEQ ID NO: 1674769 - DNA, 15 bp, Homo sapiens
ccgccttgatcttta

SEQ ID NO: 1674770 - DNA, 15 bp, Homo sapiens
cgccttgatctttac

SEQ ID NO: 1674771 - DNA, 15 bp, Homo sapiens
gccttgatctttaca

SEQ ID NO: 1674772 - DNA, 15 bp, Homo sapiens
ccttgatctttacac

SEQ ID NO: 1674773 - DNA, 15 bp, Homo sapiens
cttgatctttacaca

SEQ ID NO: 1674774 - DNA, 15 bp, Homo sapiens
ttgatctttacacaa

SEQ ID NO: 1674775 - DNA, 15 bp, Homo sapiens
tgatctttacacaag

SEQ ID NO: 1674776 - DNA, 15 bp, Homo sapiens
gatctttacacaagg

SEQ ID NO: 1674777 - DNA, 15 bp, Homo sapiens
atctttacacaaggg

SEQ ID NO: 1674778 - DNA, 15 bp, Homo sapiens
tctttacacaagggg

SEQ ID NO: 1674779 - DNA, 15 bp, Homo sapiens
ctttacacaaggggt

SEQ ID NO: 1674780 - DNA, 15 bp, Homo sapiens
tttacacaaggggtt

SEQ ID NO: 1674781 - DNA, 15 bp, Homo sapiens
ttacacaaggggttt

SEQ ID NO: 1674782 - DNA, 15 bp, Homo sapiens
tacacaaggggttta

SEQ ID NO: 1674783 - DNA, 15 bp, Homo sapiens
acacaaggggtttag

SEQ ID NO: 1674784 - DNA, 15 bp, Homo sapiens
cacaaggggtttagg

SEQ ID NO: 1674785 - DNA, 15 bp, Homo sapiens
acaaggggtttaggg

SEQ ID NO: 1674786 - DNA, 15 bp, Homo sapiens
caaggggtttagggt

SEQ ID NO: 1674787 - DNA, 15 bp, Homo sapiens
aaggggtttagggta

SEQ ID NO: 1674788 - DNA, 15 bp, Homo sapiens
aggggtttagggtag

SEQ ID NO: 1674789 - DNA, 15 bp, Homo sapiens
ggggtttagggtagg

SEQ ID NO: 1674790 - DNA, 15 bp, Homo sapiens
gggtttagggtaggt

SEQ ID NO: 1674791 - DNA, 15 bp, Homo sapiens
ggtttagggtaggta

SEQ ID NO: 1674792 - DNA, 15 bp, Homo sapiens
gtttagggtaggtag

SEQ ID NO: 1674793 - DNA, 15 bp, Homo sapiens
tttagggtaggtagc

SEQ ID NO: 1674794 - DNA, 15 bp, Homo sapiens
ttagggtaggtagcc

SEQ ID NO: 1674795 - DNA, 15 bp, Homo sapiens
tagggtaggtagcct

SEQ ID NO: 1674796 - DNA, 15 bp, Homo sapiens
agggtaggtagcctt

SEQ ID NO: 1674797 - DNA, 15 bp, Homo sapiens
gggtaggtagccttc

SEQ ID NO: 1674798 - DNA, 15 bp, Homo sapiens
ggtaggtagccttct

SEQ ID NO: 1674799 - DNA, 15 bp, Homo sapiens
gtaggtagccttctc

SEQ ID NO: 1674800 - DNA, 15 bp, Homo sapiens
taggtagccttctct

SEQ ID NO: 1674801 - DNA, 15 bp, Homo sapiens
aggtagccttctctg

SEQ ID NO: 1674802 - DNA, 15 bp, Homo sapiens
ggtagccttctctga

SEQ ID NO: 1674803 - DNA, 15 bp, Homo sapiens
gtagccttctctgaa

SEQ ID NO: 1674804 - DNA, 15 bp, Homo sapiens
tagccttctctgaac

SEQ ID NO: 1674805 - DNA, 15 bp, Homo sapiens
agccttctctgaacc

SEQ ID NO: 1674806 - DNA, 15 bp, Homo sapiens
gccttctctgaacca

SEQ ID NO: 1674807 - DNA, 15 bp, Homo sapiens
ccttctctgaaccag

SEQ ID NO: 1674808 - DNA, 15 bp, Homo sapiens
cttctctgaaccagg

SEQ ID NO: 1674809 - DNA, 15 bp, Homo sapiens
ttctctgaaccagga

SEQ ID NO: 1674810 - DNA, 15 bp, Homo sapiens
tctctgaaccaggag

SEQ ID NO: 1674811 - DNA, 15 bp, Homo sapiens
ctctgaaccaggaga

SEQ ID NO: 1674812 - DNA, 15 bp, Homo sapiens
tctgaaccaggagaa

SEQ ID NO: 1674813 - DNA, 15 bp, Homo sapiens
ctgaaccaggagaac

SEQ ID NO: 1674814 - DNA, 15 bp, Homo sapiens
tgaaccaggagaaca

SEQ ID NO: 1674815 - DNA, 15 bp, Homo sapiens
gaaccaggagaacag

SEQ ID NO: 1674816 - DNA, 15 bp, Homo sapiens
aaccaggagaacagc

SEQ ID NO: 1674817 - DNA, 15 bp, Homo sapiens
accaggagaacagcc

SEQ ID NO: 1674818 - DNA, 15 bp, Homo sapiens
ccaggagaacagcct

SEQ ID NO: 1674819 - DNA, 15 bp, Homo sapiens
caggagaacagcctg

SEQ ID NO: 1674820 - DNA, 15 bp, Homo sapiens
aggagaacagcctgt

SEQ ID NO: 1674821 - DNA, 15 bp, Homo sapiens
ggagaacagcctgtg

SEQ ID NO: 1674822 - DNA, 15 bp, Homo sapiens
gagaacagcctgtgc

SEQ ID NO: 1674823 - DNA, 15 bp, Homo sapiens
agaacagcctgtgcg

SEQ ID NO: 1674824 - DNA, 15 bp, Homo sapiens
gaacagcctgtgcga

SEQ ID NO: 1674825 - DNA, 15 bp, Homo sapiens
aacagcctgtgcgaa

SEQ ID NO: 1674826 - DNA, 15 bp, Homo sapiens
acagcctgtgcgaag

SEQ ID NO: 1674827 - DNA, 15 bp, Homo sapiens
cagcctgtgcgaagg

SEQ ID NO: 1674828 - DNA, 15 bp, Homo sapiens
agcctgtgcgaaggc

SEQ ID NO: 1674829 - DNA, 15 bp, Homo sapiens
gcctgtgcgaaggcc

SEQ ID NO: 1674830 - DNA, 15 bp, Homo sapiens
cctgtgcgaaggccc

SEQ ID NO: 1674831 - DNA, 15 bp, Homo sapiens
ctgtgcgaaggccct

SEQ ID NO: 1674832 - DNA, 15 bp, Homo sapiens
tgtgcgaaggccctg

SEQ ID NO: 1674833 - DNA, 15 bp, Homo sapiens
gtgcgaaggccctga

SEQ ID NO: 1674834 - DNA, 15 bp, Homo sapiens
tgcgaaggccctgag

SEQ ID NO: 1674835 - DNA, 15 bp, Homo sapiens
gcgaaggccctgagg

SEQ ID NO: 1674836 - DNA, 15 bp, Homo sapiens
cgaaggccctgaggc

SEQ ID NO: 1674837 - DNA, 15 bp, Homo sapiens
gaaggccctgaggct

SEQ ID NO: 1674838 - DNA, 15 bp, Homo sapiens
aaggccctgaggctg

SEQ ID NO: 1674839 - DNA, 15 bp, Homo sapiens
aggccctgaggctgg

SEQ ID NO: 1674840 - DNA, 15 bp, Homo sapiens
ggccctgaggctgga

SEQ ID NO: 1674841 - DNA, 15 bp, Homo sapiens
gccctgaggctggac

SEQ ID NO: 1674842 - DNA, 15 bp, Homo sapiens
ccctgaggctggacc

SEQ ID NO: 1674843 - DNA, 15 bp, Homo sapiens
cctgaggctggaccg

SEQ ID NO: 1674844 - DNA, 15 bp, Homo sapiens
ctgaggctggaccgt

SEQ ID NO: 1674845 - DNA, 15 bp, Homo sapiens
tgaggctggaccgtg

SEQ ID NO: 1674846 - DNA, 15 bp, Homo sapiens
gaggctggaccgtgc

SEQ ID NO: 1674847 - DNA, 15 bp, Homo sapiens
aggctggaccgtgcc

SEQ ID NO: 1674848 - DNA, 15 bp, Homo sapiens
ggctggaccgtgcct

SEQ ID NO: 1674849 - DNA, 15 bp, Homo sapiens
gctggaccgtgcctg

SEQ ID NO: 1674850 - DNA, 15 bp, Homo sapiens
ctggaccgtgcctgt

SEQ ID NO: 1674851 - DNA, 15 bp, Homo sapiens
tggaccgtgcctgtt

SEQ ID NO: 1674852 - DNA, 15 bp, Homo sapiens
ggaccgtgcctgttg

SEQ ID NO: 1674853 - DNA, 15 bp, Homo sapiens
gaccgtgcctgttgg

SEQ ID NO: 1674854 - DNA, 15 bp, Homo sapiens
accgtgcctgttggg

SEQ ID NO: 1674855 - DNA, 15 bp, Homo sapiens
ccgtgcctgttgggt

SEQ ID NO: 1674856 - DNA, 15 bp, Homo sapiens
cgtgcctgttgggtt

SEQ ID NO: 1674857 - DNA, 15 bp, Homo sapiens
gtgcctgttgggttt

SEQ ID NO: 1674858 - DNA, 15 bp, Homo sapiens
tgcctgttgggtttg

SEQ ID NO: 1674859 - DNA, 15 bp, Homo sapiens
gcctgttgggtttga

SEQ ID NO: 1674860 - DNA, 15 bp, Homo sapiens
cctgttgggtttgag

SEQ ID NO: 1674861 - DNA, 15 bp, Homo sapiens
ctgttgggtttgagg

SEQ ID NO: 1674862 - DNA, 15 bp, Homo sapiens
tgttgggtttgaggc

SEQ ID NO: 1674863 - DNA, 15 bp, Homo sapiens
gttgggtttgaggcc

SEQ ID NO: 1674864 - DNA, 15 bp, Homo sapiens
ttgggtttgaggccg

SEQ ID NO: 1674865 - DNA, 15 bp, Homo sapiens
tgggtttgaggccgt

SEQ ID NO: 1674866 - DNA, 15 bp, Homo sapiens
gggtttgaggccgtt

SEQ ID NO: 1674867 - DNA, 15 bp, Homo sapiens
ggtttgaggccgttg

SEQ ID NO: 1674868 - DNA, 15 bp, Homo sapiens
gtttgaggccgttgt

SEQ ID NO: 1674869 - DNA, 15 bp, Homo sapiens
tttgaggccgttgta

SEQ ID NO: 1674870 - DNA, 15 bp, Homo sapiens
ttgaggccgttgtag

SEQ ID NO: 1674871 - DNA, 15 bp, Homo sapiens
tgaggccgttgtagc

SEQ ID NO: 1674872 - DNA, 15 bp, Homo sapiens
gaggccgttgtagct

SEQ ID NO: 1674873 - DNA, 15 bp, Homo sapiens
aggccgttgtagctg

SEQ ID NO: 1674874 - DNA, 15 bp, Homo sapiens
ggccgttgtagctgg

SEQ ID NO: 1674875 - DNA, 15 bp, Homo sapiens
gccgttgtagctgga

SEQ ID NO: 1674876 - DNA, 15 bp, Homo sapiens
ccgttgtagctggag

SEQ ID NO: 1674877 - DNA, 15 bp, Homo sapiens
cgttgtagctggagc

SEQ ID NO: 1674878 - DNA, 15 bp, Homo sapiens
gttgtagctggagca

SEQ ID NO: 1674879 - DNA, 15 bp, Homo sapiens
ttgtagctggagcaa

SEQ ID NO: 1674880 - DNA, 15 bp, Homo sapiens
tgtagctggagcaaa

SEQ ID NO: 1674881 - DNA, 15 bp, Homo sapiens
gtagctggagcaaac

SEQ ID NO: 1674882 - DNA, 15 bp, Homo sapiens
tagctggagcaaaca

SEQ ID NO: 1674883 - DNA, 15 bp, Homo sapiens
agctggagcaaacag

SEQ ID NO: 1674884 - DNA, 15 bp, Homo sapiens
gctggagcaaacaga

SEQ ID NO: 1674885 - DNA, 15 bp, Homo sapiens
ctggagcaaacagag

SEQ ID NO: 1674886 - DNA, 15 bp, Homo sapiens
tggagcaaacagaga

SEQ ID NO: 1674887 - DNA, 15 bp, Homo sapiens
ggagcaaacagagag

SEQ ID NO: 1674888 - DNA, 15 bp, Homo sapiens
gagcaaacagagaga

SEQ ID NO: 1674889 - DNA, 15 bp, Homo sapiens
agcaaacagagagag

SEQ ID NO: 1674890 - DNA, 15 bp, Homo sapiens
gcaaacagagagagg

SEQ ID NO: 1674891 - DNA, 15 bp, Homo sapiens
caaacagagagaggg

SEQ ID NO: 1674892 - DNA, 15 bp, Homo sapiens
aaacagagagagggg

SEQ ID NO: 1674893 - DNA, 15 bp, Homo sapiens
aacagagagaggggt

SEQ ID NO: 1674894 - DNA, 15 bp, Homo sapiens
acagagagaggggta

SEQ ID NO: 1674895 - DNA, 15 bp, Homo sapiens
cagagagaggggtaa

SEQ ID NO: 1674896 - DNA, 15 bp, Homo sapiens
agagagaggggtaaa

SEQ ID NO: 1674897 - DNA, 15 bp, Homo sapiens
gagagaggggtaaaa

SEQ ID NO: 1674898 - DNA, 15 bp, Homo sapiens
agagaggggtaaaaa

SEQ ID NO: 1674899 - DNA, 15 bp, Homo sapiens
gagaggggtaaaaag

SEQ ID NO: 1674900 - DNA, 15 bp, Homo sapiens
agaggggtaaaaagg

SEQ ID NO: 1674901 - DNA, 15 bp, Homo sapiens
gaggggtaaaaaggc

SEQ ID NO: 1674902 - DNA, 15 bp, Homo sapiens
aggggtaaaaaggca

SEQ ID NO: 1674903 - DNA, 15 bp, Homo sapiens
ggggtaaaaaggcag

SEQ ID NO: 1674904 - DNA, 15 bp, Homo sapiens
gggtaaaaaggcagg

SEQ ID NO: 1674905 - DNA, 15 bp, Homo sapiens
ggtaaaaaggcagga

SEQ ID NO: 1674906 - DNA, 15 bp, Homo sapiens
gtaaaaaggcaggag

SEQ ID NO: 1674907 - DNA, 15 bp, Homo sapiens
taaaaaggcaggagg

SEQ ID NO: 1674908 - DNA, 15 bp, Homo sapiens
aaaaaggcaggaggc

SEQ ID NO: 1674909 - DNA, 15 bp, Homo sapiens
aaaaggcaggaggct

SEQ ID NO: 1674910 - DNA, 15 bp, Homo sapiens
aaaggcaggaggcta

SEQ ID NO: 1674911 - DNA, 15 bp, Homo sapiens
aaggcaggaggctac

SEQ ID NO: 1674912 - DNA, 15 bp, Homo sapiens
aggcaggaggctacc

SEQ ID NO: 1674913 - DNA, 15 bp, Homo sapiens
ggcaggaggctacca

SEQ ID NO: 1674914 - DNA, 15 bp, Homo sapiens
gcaggaggctaccag

SEQ ID NO: 1674915 - DNA, 15 bp, Homo sapiens
caggaggctaccagg

SEQ ID NO: 1674916 - DNA, 15 bp, Homo sapiens
aggaggctaccaggc

SEQ ID NO: 1674917 - DNA, 15 bp, Homo sapiens
ggaggctaccaggca

SEQ ID NO: 1674918 - DNA, 15 bp, Homo sapiens
gaggctaccaggcag

SEQ ID NO: 1674919 - DNA, 15 bp, Homo sapiens
aggctaccaggcagg

SEQ ID NO: 1674920 - DNA, 15 bp, Homo sapiens
ggctaccaggcaggt

SEQ ID NO: 1674921 - DNA, 15 bp, Homo sapiens
gctaccaggcaggtt

SEQ ID NO: 1674922 - DNA, 15 bp, Homo sapiens
ctaccaggcaggttg

SEQ ID NO: 1674923 - DNA, 15 bp, Homo sapiens
taccaggcaggttgt

SEQ ID NO: 1674924 - DNA, 15 bp, Homo sapiens
accaggcaggttgtg

SEQ ID NO: 1674925 - DNA, 15 bp, Homo sapiens
ccaggcaggttgtgc

SEQ ID NO: 1674926 - DNA, 15 bp, Homo sapiens
caggcaggttgtgca

SEQ ID NO: 1674927 - DNA, 15 bp, Homo sapiens
aggcaggttgtgcag

SEQ ID NO: 1674928 - DNA, 15 bp, Homo sapiens
ggcaggttgtgcaga

SEQ ID NO: 1674929 - DNA, 15 bp, Homo sapiens
gcaggttgtgcagag

SEQ ID NO: 1674930 - DNA, 15 bp, Homo sapiens
caggttgtgcagagc

SEQ ID NO: 1674931 - DNA, 15 bp, Homo sapiens
aggttgtgcagagcc

SEQ ID NO: 1674932 - DNA, 15 bp, Homo sapiens
ggttgtgcagagcct

SEQ ID NO: 1674933 - DNA, 15 bp, Homo sapiens
gttgtgcagagcctt

SEQ ID NO: 1674934 - DNA, 15 bp, Homo sapiens
ttgtgcagagccttg

SEQ ID NO: 1674935 - DNA, 15 bp, Homo sapiens
tgtgcagagccttgt

SEQ ID NO: 1674936 - DNA, 15 bp, Homo sapiens
gtgcagagccttgtg

SEQ ID NO: 1674937 - DNA, 15 bp, Homo sapiens
tgcagagccttgtgg

SEQ ID NO: 1674938 - DNA, 15 bp, Homo sapiens
gcagagccttgtggg

SEQ ID NO: 1674939 - DNA, 15 bp, Homo sapiens
cagagccttgtgggc

SEQ ID NO: 1674940 - DNA, 15 bp, Homo sapiens
agagccttgtgggcc

SEQ ID NO: 1674941 - DNA, 15 bp, Homo sapiens
gagccttgtgggcca

SEQ ID NO: 1674942 - DNA, 15 bp, Homo sapiens
agccttgtgggccac

SEQ ID NO: 1674943 - DNA, 15 bp, Homo sapiens
gccttgtgggccact

SEQ ID NO: 1674944 - DNA, 15 bp, Homo sapiens
ccttgtgggccactg

SEQ ID NO: 1674945 - DNA, 15 bp, Homo sapiens
cttgtgggccactgg

SEQ ID NO: 1674946 - DNA, 15 bp, Homo sapiens
ttgtgggccactggg

SEQ ID NO: 1674947 - DNA, 15 bp, Homo sapiens
tgtgggccactgggg

SEQ ID NO: 1674948 - DNA, 15 bp, Homo sapiens
gtgggccactgggga

SEQ ID NO: 1674949 - DNA, 15 bp, Homo sapiens
tgggccactggggag

SEQ ID NO: 1674950 - DNA, 15 bp, Homo sapiens
gggccactggggagg

SEQ ID NO: 1674951 - DNA, 15 bp, Homo sapiens
ggccactggggagga

SEQ ID NO: 1674952 - DNA, 15 bp, Homo sapiens
gccactggggaggac

SEQ ID NO: 1674953 - DNA, 15 bp, Homo sapiens
ccactggggaggact

SEQ ID NO: 1674954 - DNA, 15 bp, Homo sapiens
cactggggaggactt

SEQ ID NO: 1674955 - DNA, 15 bp, Homo sapiens
actggggaggacttt

SEQ ID NO: 1674956 - DNA, 15 bp, Homo sapiens
ctggggaggactttg

SEQ ID NO: 1674957 - DNA, 15 bp, Homo sapiens
tggggaggactttgg

SEQ ID NO: 1674958 - DNA, 15 bp, Homo sapiens
ggggaggactttggc

SEQ ID NO: 1674959 - DNA, 15 bp, Homo sapiens
gggaggactttggct

SEQ ID NO: 1674960 - DNA, 15 bp, Homo sapiens
ggaggactttggctt

SEQ ID NO: 1674961 - DNA, 15 bp, Homo sapiens
gaggactttggcttt

SEQ ID NO: 1674962 - DNA, 15 bp, Homo sapiens
aggactttggctttt

SEQ ID NO: 1674963 - DNA, 15 bp, Homo sapiens
ggactttggcttttg

SEQ ID NO: 1674964 - DNA, 15 bp, Homo sapiens
gactttggcttttgc

SEQ ID NO: 1674965 - DNA, 15 bp, Homo sapiens
actttggcttttgcc

SEQ ID NO: 1674966 - DNA, 15 bp, Homo sapiens
ctttggcttttgccc

SEQ ID NO: 1674967 - DNA, 15 bp, Homo sapiens
tttggcttttgccct

SEQ ID NO: 1674968 - DNA, 15 bp, Homo sapiens
ttggcttttgccctg

SEQ ID NO: 1674969 - DNA, 15 bp, Homo sapiens
tggcttttgccctga

SEQ ID NO: 1674970 - DNA, 15 bp, Homo sapiens
ggcttttgccctgag

SEQ ID NO: 1674971 - DNA, 15 bp, Homo sapiens
gcttttgccctgaga

SEQ ID NO: 1674972 - DNA, 15 bp, Homo sapiens
cttttgccctgagag

SEQ ID NO: 1674973 - DNA, 15 bp, Homo sapiens
ttttgccctgagagc

SEQ ID NO: 1674974 - DNA, 15 bp, Homo sapiens
tttgccctgagagcg

SEQ ID NO: 1674975 - DNA, 15 bp, Homo sapiens
ttgccctgagagcgg

SEQ ID NO: 1674976 - DNA, 15 bp, Homo sapiens
tgccctgagagcggt

SEQ ID NO: 1674977 - DNA, 15 bp, Homo sapiens
gccctgagagcggtg

SEQ ID NO: 1674978 - DNA, 15 bp, Homo sapiens
ccctgagagcggtgg

SEQ ID NO: 1674979 - DNA, 15 bp, Homo sapiens
cctgagagcggtggg

SEQ ID NO: 1674980 - DNA, 15 bp, Homo sapiens
ctgagagcggtggga

SEQ ID NO: 1674981 - DNA, 15 bp, Homo sapiens
tgagagcggtgggaa

SEQ ID NO: 1674982 - DNA, 15 bp, Homo sapiens
gagagcggtgggaag

SEQ ID NO: 1674983 - DNA, 15 bp, Homo sapiens
agagcggtgggaagt

SEQ ID NO: 1674984 - DNA, 15 bp, Homo sapiens
gagcggtgggaagtg

SEQ ID NO: 1674985 - DNA, 15 bp, Homo sapiens
agcggtgggaagtga

SEQ ID NO: 1674986 - DNA, 15 bp, Homo sapiens
gcggtgggaagtgac

SEQ ID NO: 1674987 - DNA, 15 bp, Homo sapiens
cggtgggaagtgact

SEQ ID NO: 1674988 - DNA, 15 bp, Homo sapiens
ggtgggaagtgactg

SEQ ID NO: 1674989 - DNA, 15 bp, Homo sapiens
gtgggaagtgactga

SEQ ID NO: 1674990 - DNA, 15 bp, Homo sapiens
tgggaagtgactgaa

SEQ ID NO: 1674991 - DNA, 15 bp, Homo sapiens
gggaagtgactgaat

SEQ ID NO: 1674992 - DNA, 15 bp, Homo sapiens
ggaagtgactgaatc

SEQ ID NO: 1674993 - DNA, 15 bp, Homo sapiens
gaagtgactgaatcc

SEQ ID NO: 1674994 - DNA, 15 bp, Homo sapiens
aagtgactgaatccg

SEQ ID NO: 1674995 - DNA, 15 bp, Homo sapiens
agtgactgaatccgg

SEQ ID NO: 1674996 - DNA, 15 bp, Homo sapiens
gtgactgaatccggt

SEQ ID NO: 1674997 - DNA, 15 bp, Homo sapiens
tgactgaatccggta

SEQ ID NO: 1674998 - DNA, 15 bp, Homo sapiens
gactgaatccggtac

SEQ ID NO: 1674999 - DNA, 15 bp, Homo sapiens
actgaatccggtact

SEQ ID NO: 1675000 - DNA, 15 bp, Homo sapiens
ctgaatccggtactc

SEQ ID NO: 1675001 - DNA, 15 bp, Homo sapiens
tgaatccggtactca

SEQ ID NO: 1675002 - DNA, 15 bp, Homo sapiens
gaatccggtactcac

SEQ ID NO: 1675003 - DNA, 15 bp, Homo sapiens
aatccggtactcacc

SEQ ID NO: 1675004 - DNA, 15 bp, Homo sapiens
atccggtactcaccg

SEQ ID NO: 1675005 - DNA, 15 bp, Homo sapiens
tccggtactcaccgt

SEQ ID NO: 1675006 - DNA, 15 bp, Homo sapiens
ccggtactcaccgtc

SEQ ID NO: 1675007 - DNA, 15 bp, Homo sapiens
cggtactcaccgtct

SEQ ID NO: 1675008 - DNA, 15 bp, Homo sapiens
ggtactcaccgtctc

SEQ ID NO: 1675009 - DNA, 15 bp, Homo sapiens
gtactcaccgtctcc

SEQ ID NO: 1675010 - DNA, 15 bp, Homo sapiens
tactcaccgtctccc

SEQ ID NO: 1675011 - DNA, 15 bp, Homo sapiens
actcaccgtctccct

SEQ ID NO: 1675012 - DNA, 15 bp, Homo sapiens
ctcaccgtctccctc

SEQ ID NO: 1675013 - DNA, 15 bp, Homo sapiens
tcaccgtctccctct

SEQ ID NO: 1675014 - DNA, 15 bp, Homo sapiens
caccgtctccctctg

SEQ ID NO: 1675015 - DNA, 15 bp, Homo sapiens
accgtctccctctgg

SEQ ID NO: 1675016 - DNA, 15 bp, Homo sapiens
ccgtctccctctggc

SEQ ID NO: 1675017 - DNA, 15 bp, Homo sapiens
cgtctccctctggcg

SEQ ID NO: 1675018 - DNA, 15 bp, Homo sapiens
gtctccctctggcgg

SEQ ID NO: 1675019 - DNA, 15 bp, Homo sapiens
tctccctctggcggc

SEQ ID NO: 1675020 - DNA, 15 bp, Homo sapiens
ctccctctggcggct

SEQ ID NO: 1675021 - DNA, 15 bp, Homo sapiens
tccctctggcggctc

SEQ ID NO: 1675022 - DNA, 15 bp, Homo sapiens
ccctctggcggctcc

SEQ ID NO: 1675023 - DNA, 15 bp, Homo sapiens
cctctggcggctcct

SEQ ID NO: 1675024 - DNA, 15 bp, Homo sapiens
ctctggcggctcctg

SEQ ID NO: 1675025 - DNA, 15 bp, Homo sapiens
tctggcggctcctgg

SEQ ID NO: 1675026 - DNA, 15 bp, Homo sapiens
ctggcggctcctggg

SEQ ID NO: 1675027 - DNA, 15 bp, Homo sapiens
tggcggctcctgggg

SEQ ID NO: 1675028 - DNA, 15 bp, Homo sapiens
ggcggctcctggggg

SEQ ID NO: 1675029 - DNA, 15 bp, Homo sapiens
gcggctcctggggga

SEQ ID NO: 1675030 - DNA, 15 bp, Homo sapiens
cggctcctgggggaa

SEQ ID NO: 1675031 - DNA, 15 bp, Homo sapiens
ggctcctgggggaac

SEQ ID NO: 1675032 - DNA, 15 bp, Homo sapiens
gctcctgggggaaca

SEQ ID NO: 1675033 - DNA, 15 bp, Homo sapiens
ctcctgggggaacat

SEQ ID NO: 1675034 - DNA, 15 bp, Homo sapiens
tcctgggggaacatg

SEQ ID NO: 1675035 - DNA, 15 bp, Homo sapiens
cctgggggaacatgc

SEQ ID NO: 1675036 - DNA, 15 bp, Homo sapiens
ctgggggaacatgct

SEQ ID NO: 1675037 - DNA, 15 bp, Homo sapiens
tgggggaacatgctt

SEQ ID NO: 1675038 - DNA, 15 bp, Homo sapiens
gggggaacatgcttg

SEQ ID NO: 1675039 - DNA, 15 bp, Homo sapiens
ggggaacatgcttgg

SEQ ID NO: 1675040 - DNA, 15 bp, Homo sapiens
gggaacatgcttggg

SEQ ID NO: 1675041 - DNA, 15 bp, Homo sapiens
ggaacatgcttgggg

SEQ ID NO: 1675042 - DNA, 15 bp, Homo sapiens
gaacatgcttgggga

SEQ ID NO: 1675043 - DNA, 15 bp, Homo sapiens
aacatgcttggggat

SEQ ID NO: 1675044 - DNA, 15 bp, Homo sapiens
acatgcttggggatc

SEQ ID NO: 1675045 - DNA, 15 bp, Homo sapiens
catgcttggggatca

SEQ ID NO: 1675046 - DNA, 15 bp, Homo sapiens
atgcttggggatcag

SEQ ID NO: 1675047 - DNA, 15 bp, Homo sapiens
tgcttggggatcagg

SEQ ID NO: 1675048 - DNA, 15 bp, Homo sapiens
gcttggggatcaggc

SEQ ID NO: 1675049 - DNA, 15 bp, Homo sapiens
cttggggatcaggct

SEQ ID NO: 1675050 - DNA, 15 bp, Homo sapiens
ttggggatcaggctg

SEQ ID NO: 1675051 - DNA, 15 bp, Homo sapiens
tggggatcaggctgg

SEQ ID NO: 1675052 - DNA, 15 bp, Homo sapiens
ggggatcaggctggg

SEQ ID NO: 1675053 - DNA, 15 bp, Homo sapiens
gggatcaggctgggg

SEQ ID NO: 1675054 - DNA, 15 bp, Homo sapiens
ggatcaggctggggg

SEQ ID NO: 1675055 - DNA, 15 bp, Homo sapiens
gatcaggctggggga

SEQ ID NO: 1675056 - DNA, 15 bp, Homo sapiens
atcaggctgggggag

SEQ ID NO: 1675057 - DNA, 15 bp, Homo sapiens
tcaggctgggggagg

SEQ ID NO: 1675058 - DNA, 15 bp, Homo sapiens
caggctgggggaggc

SEQ ID NO: 1675059 - DNA, 15 bp, Homo sapiens
aggctgggggaggct

SEQ ID NO: 1675060 - DNA, 15 bp, Homo sapiens
ggctgggggaggctg

SEQ ID NO: 1675061 - DNA, 15 bp, Homo sapiens
gctgggggaggctgc

SEQ ID NO: 1675062 - DNA, 15 bp, Homo sapiens
ctgggggaggctgcc

SEQ ID NO: 1675063 - DNA, 15 bp, Homo sapiens
tgggggaggctgcca

SEQ ID NO: 1675064 - DNA, 15 bp, Homo sapiens
gggggaggctgccag

SEQ ID NO: 1675065 - DNA, 15 bp, Homo sapiens
ggggaggctgccagg

SEQ ID NO: 1675066 - DNA, 15 bp, Homo sapiens
gggaggctgccaggc

SEQ ID NO: 1675067 - DNA, 15 bp, Homo sapiens
ggaggctgccaggcc

SEQ ID NO: 1675068 - DNA, 15 bp, Homo sapiens
gaggctgccaggccc

SEQ ID NO: 1675069 - DNA, 15 bp, Homo sapiens
aggctgccaggccca

SEQ ID NO: 1675070 - DNA, 15 bp, Homo sapiens
ggctgccaggcccag

SEQ ID NO: 1675071 - DNA, 15 bp, Homo sapiens
gctgccaggcccagg

SEQ ID NO: 1675072 - DNA, 15 bp, Homo sapiens
ctgccaggcccagga

SEQ ID NO: 1675073 - DNA, 15 bp, Homo sapiens
tgccaggcccaggag

SEQ ID NO: 1675074 - DNA, 15 bp, Homo sapiens
gccaggcccaggagg

SEQ ID NO: 1675075 - DNA, 15 bp, Homo sapiens
ccaggcccaggaggt

SEQ ID NO: 1675076 - DNA, 15 bp, Homo sapiens
caggcccaggaggtg

SEQ ID NO: 1675077 - DNA, 15 bp, Homo sapiens
aggcccaggaggtga

SEQ ID NO: 1675078 - DNA, 15 bp, Homo sapiens
ggcccaggaggtgag

SEQ ID NO: 1675079 - DNA, 15 bp, Homo sapiens
gcccaggaggtgaga

SEQ ID NO: 1675080 - DNA, 15 bp, Homo sapiens
cccaggaggtgagaa

SEQ ID NO: 1675081 - DNA, 15 bp, Homo sapiens
ccaggaggtgagaag

SEQ ID NO: 1675082 - DNA, 15 bp, Homo sapiens
caggaggtgagaagt

SEQ ID NO: 1675083 - DNA, 15 bp, Homo sapiens
aggaggtgagaagta

SEQ ID NO: 1675084 - DNA, 15 bp, Homo sapiens
ggaggtgagaagtag

SEQ ID NO: 1675085 - DNA, 15 bp, Homo sapiens
gaggtgagaagtagg

SEQ ID NO: 1675086 - DNA, 15 bp, Homo sapiens
gtgagaagtaggtgg

SEQ ID NO: 1675087 - DNA, 15 bp, Homo sapiens
tgagaagtaggtggc

SEQ ID NO: 1675088 - DNA, 15 bp, Homo sapiens
gagaagtaggtggcc

SEQ ID NO: 1675089 - DNA, 15 bp, Homo sapiens
agaagtaggtggcct

SEQ ID NO: 1675090 - DNA, 15 bp, Homo sapiens
gaagtaggtggcctc

SEQ ID NO: 1675091 - DNA, 15 bp, Homo sapiens
aagtaggtggcctcc

SEQ ID NO: 1675092 - DNA, 15 bp, Homo sapiens
agtaggtggcctcca

SEQ ID NO: 1675093 - DNA, 15 bp, Homo sapiens
gtaggtggcctccag

SEQ ID NO: 1675094 - DNA, 15 bp, Homo sapiens
taggtggcctccagc

SEQ ID NO: 1675095 - DNA, 15 bp, Homo sapiens
aggtggcctccagcc

SEQ ID NO: 1675096 - DNA, 15 bp, Homo sapiens
ggtggcctccagccg

SEQ ID NO: 1675097 - DNA, 15 bp, Homo sapiens
gtggcctccagccgt

SEQ ID NO: 1675098 - DNA, 15 bp, Homo sapiens
tggcctccagccgtg

SEQ ID NO: 1675099 - DNA, 15 bp, Homo sapiens
ggcctccagccgtgt

SEQ ID NO: 1675100 - DNA, 15 bp, Homo sapiens
gcctccagccgtgtt

SEQ ID NO: 1675101 - DNA, 15 bp, Homo sapiens
cctccagccgtgttt

SEQ ID NO: 1675102 - DNA, 15 bp, Homo sapiens
ctccagccgtgtttc

SEQ ID NO: 1675103 - DNA, 15 bp, Homo sapiens
tccagccgtgtttcc

SEQ ID NO: 1675104 - DNA, 15 bp, Homo sapiens
ccagccgtgtttcct

SEQ ID NO: 1675105 - DNA, 15 bp, Homo sapiens
cagccgtgtttcctg

SEQ ID NO: 1675106 - DNA, 15 bp, Homo sapiens
agccgtgtttcctga

SEQ ID NO: 1675107 - DNA, 15 bp, Homo sapiens
gccgtgtttcctgaa

SEQ ID NO: 1675108 - DNA, 15 bp, Homo sapiens
ccgtgtttcctgaat

SEQ ID NO: 1675109 - DNA, 15 bp, Homo sapiens
cgtgtttcctgaatg

SEQ ID NO: 1675110 - DNA, 15 bp, Homo sapiens
gtgtttcctgaatgc

SEQ ID NO: 1675111 - DNA, 15 bp, Homo sapiens
tgtttcctgaatgct

SEQ ID NO: 1675112 - DNA, 15 bp, Homo sapiens
gtttcctgaatgctg

SEQ ID NO: 1675113 - DNA, 15 bp, Homo sapiens
tttcctgaatgctgg

SEQ ID NO: 1675114 - DNA, 15 bp, Homo sapiens
ttcctgaatgctgga

SEQ ID NO: 1675115 - DNA, 15 bp, Homo sapiens
tcctgaatgctggac

SEQ ID NO: 1675116 - DNA, 15 bp, Homo sapiens
cctgaatgctggact

SEQ ID NO: 1675117 - DNA, 15 bp, Homo sapiens
ctgaatgctggactg

SEQ ID NO: 1675118 - DNA, 15 bp, Homo sapiens
tgaatgctggactga

SEQ ID NO: 1675119 - DNA, 15 bp, Homo sapiens
gaatgctggactgat

SEQ ID NO: 1675120 - DNA, 15 bp, Homo sapiens
aatgctggactgata

SEQ ID NO: 1675121 - DNA, 15 bp, Homo sapiens
atgctggactgatag

SEQ ID NO: 1675122 - DNA, 15 bp, Homo sapiens
tgctggactgatagt

SEQ ID NO: 1675123 - DNA, 15 bp, Homo sapiens
gctggactgatagtt

SEQ ID NO: 1675124 - DNA, 15 bp, Homo sapiens
ctggactgatagttt

SEQ ID NO: 1675125 - DNA, 15 bp, Homo sapiens
tggactgatagtttc

SEQ ID NO: 1675126 - DNA, 15 bp, Homo sapiens
ggactgatagtttcc

SEQ ID NO: 1675127 - DNA, 15 bp, Homo sapiens
gactgatagtttccg

SEQ ID NO: 1675128 - DNA, 15 bp, Homo sapiens
actgatagtttccgc

SEQ ID NO: 1675129 - DNA, 15 bp, Homo sapiens
ctgatagtttccgct

SEQ ID NO: 1675130 - DNA, 15 bp, Homo sapiens
tgatagtttccgctg

SEQ ID NO: 1675131 - DNA, 15 bp, Homo sapiens
gatagtttccgctgt

SEQ ID NO: 1675132 - DNA, 15 bp, Homo sapiens
atagtttccgctgtt

SEQ ID NO: 1675133 - DNA, 15 bp, Homo sapiens
tagtttccgctgttt

SEQ ID NO: 1675134 - DNA, 15 bp, Homo sapiens
agtttccgctgttta

SEQ ID NO: 1675135 - DNA, 15 bp, Homo sapiens
gtttccgctgtttac

SEQ ID NO: 1675136 - DNA, 15 bp, Homo sapiens
tttccgctgtttacc

SEQ ID NO: 1675137 - DNA, 15 bp, Homo sapiens
ttccgctgtttacca

SEQ ID NO: 1675138 - DNA, 15 bp, Homo sapiens
tccgctgtttaccat

SEQ ID NO: 1675139 - DNA, 15 bp, Homo sapiens
ccgctgtttaccatt

SEQ ID NO: 1675140 - DNA, 15 bp, Homo sapiens
cgctgtttaccattt

SEQ ID NO: 1675141 - DNA, 15 bp, Homo sapiens
gctgtttaccatttg

SEQ ID NO: 1675142 - DNA, 15 bp, Homo sapiens
ctgtttaccatttgt

SEQ ID NO: 1675143 - DNA, 15 bp, Homo sapiens
tgtttaccatttgtt

SEQ ID NO: 1675144 - DNA, 15 bp, Homo sapiens
gtttaccatttgttg

SEQ ID NO: 1675145 - DNA, 15 bp, Homo sapiens
tttaccatttgttgg

SEQ ID NO: 1675146 - DNA, 15 bp, Homo sapiens
ttaccatttgttggc

SEQ ID NO: 1675147 - DNA, 15 bp, Homo sapiens
taccatttgttggca

SEQ ID NO: 1675148 - DNA, 15 bp, Homo sapiens
accatttgttggcag

SEQ ID NO: 1675149 - DNA, 15 bp, Homo sapiens
ccatttgttggcaga

SEQ ID NO: 1675150 - DNA, 15 bp, Homo sapiens
catttgttggcagag

SEQ ID NO: 1675151 - DNA, 15 bp, Homo sapiens
atttgttggcagaga

SEQ ID NO: 1675152 - DNA, 15 bp, Homo sapiens
tttgttggcagagac

SEQ ID NO: 1675153 - DNA, 15 bp, Homo sapiens
ttgttggcagagaca

SEQ ID NO: 1675154 - DNA, 15 bp, Homo sapiens
tgttggcagagacag

SEQ ID NO: 1675155 - DNA, 15 bp, Homo sapiens
gttggcagagacaga

SEQ ID NO: 1675156 - DNA, 15 bp, Homo sapiens
ttggcagagacagat

SEQ ID NO: 1675157 - DNA, 15 bp, Homo sapiens
tggcagagacagatg

SEQ ID NO: 1675158 - DNA, 15 bp, Homo sapiens
ggcagagacagatgg

SEQ ID NO: 1675159 - DNA, 15 bp, Homo sapiens
gcagagacagatggt

SEQ ID NO: 1675160 - DNA, 15 bp, Homo sapiens
cagagacagatggtc

SEQ ID NO: 1675161 - DNA, 15 bp, Homo sapiens
agagacagatggtca

SEQ ID NO: 1675162 - DNA, 15 bp, Homo sapiens
gagacagatggtcag

SEQ ID NO: 1675163 - DNA, 15 bp, Homo sapiens
agacagatggtcagt

SEQ ID NO: 1675164 - DNA, 15 bp, Homo sapiens
gacagatggtcagtc

SEQ ID NO: 1675165 - DNA, 15 bp, Homo sapiens
acagatggtcagtct

SEQ ID NO: 1675166 - DNA, 15 bp, Homo sapiens
cagatggtcagtctg

SEQ ID NO: 1675167 - DNA, 15 bp, Homo sapiens
agatggtcagtctgg

SEQ ID NO: 1675168 - DNA, 15 bp, Homo sapiens
gatggtcagtctgga

SEQ ID NO: 1675169 - DNA, 15 bp, Homo sapiens
atggtcagtctggag

SEQ ID NO: 1675170 - DNA, 15 bp, Homo sapiens
tggtcagtctggagg

SEQ ID NO: 1675171 - DNA, 15 bp, Homo sapiens
ggtcagtctggagga

SEQ ID NO: 1675172 - DNA, 15 bp, Homo sapiens
gtcagtctggaggat

SEQ ID NO: 1675173 - DNA, 15 bp, Homo sapiens
tcagtctggaggatg

SEQ ID NO: 1675174 - DNA, 15 bp, Homo sapiens
cagtctggaggatga

SEQ ID NO: 1675175 - DNA, 15 bp, Homo sapiens
agtctggaggatgac

SEQ ID NO: 1675176 - DNA, 15 bp, Homo sapiens
gtctggaggatgacg

SEQ ID NO: 1675177 - DNA, 15 bp, Homo sapiens
tctggaggatgacgt

SEQ ID NO: 1675178 - DNA, 15 bp, Homo sapiens
ctggaggatgacgtg

SEQ ID NO: 1675179 - DNA, 15 bp, Homo sapiens
tggaggatgacgtgg

SEQ ID NO: 1675180 - DNA, 15 bp, Homo sapiens
ggaggatgacgtggc

SEQ ID NO: 1675181 - DNA, 15 bp, Homo sapiens
gaggatgacgtggcg

SEQ ID NO: 1675182 - DNA, 15 bp, Homo sapiens
aggatgacgtggcgt

SEQ ID NO: 1675183 - DNA, 15 bp, Homo sapiens
ggatgacgtggcgtg

SEQ ID NO: 1675184 - DNA, 15 bp, Homo sapiens
gatgacgtggcgtga

SEQ ID NO: 1675185 - DNA, 15 bp, Homo sapiens
atgacgtggcgtgaa

SEQ ID NO: 1675186 - DNA, 15 bp, Homo sapiens
tgacgtggcgtgaac

SEQ ID NO: 1675187 - DNA, 15 bp, Homo sapiens
gacgtggcgtgaaca

SEQ ID NO: 1675188 - DNA, 15 bp, Homo sapiens
acgtggcgtgaacat

SEQ ID NO: 1675189 - DNA, 15 bp, Homo sapiens
cgtggcgtgaacatc

SEQ ID NO: 1675190 - DNA, 15 bp, Homo sapiens
gtggcgtgaacatct

SEQ ID NO: 1675191 - DNA, 15 bp, Homo sapiens
tggcgtgaacatctg

SEQ ID NO: 1675192 - DNA, 15 bp, Homo sapiens
ggcgtgaacatctgc

SEQ ID NO: 1675193 - DNA, 15 bp, Homo sapiens
gcgtgaacatctgcc

SEQ ID NO: 1675194 - DNA, 15 bp, Homo sapiens
cgtgaacatctgcct

SEQ ID NO: 1675195 - DNA, 15 bp, Homo sapiens
gtgaacatctgcctg

SEQ ID NO: 1675196 - DNA, 15 bp, Homo sapiens
tgaacatctgcctgg

SEQ ID NO: 1675197 - DNA, 15 bp, Homo sapiens
gaacatctgcctgga

SEQ ID NO: 1675198 - DNA, 15 bp, Homo sapiens
aacatctgcctggag

SEQ ID NO: 1675199 - DNA, 15 bp, Homo sapiens
acatctgcctggagt

SEQ ID NO: 1675200 - DNA, 15 bp, Homo sapiens
catctgcctggagtc

SEQ ID NO: 1675201 - DNA, 15 bp, Homo sapiens
atctgcctggagtcc

SEQ ID NO: 1675202 - DNA, 15 bp, Homo sapiens
tctgcctggagtccc

SEQ ID NO: 1675203 - DNA, 15 bp, Homo sapiens
ctgcctggagtcccg

SEQ ID NO: 1675204 - DNA, 15 bp, Homo sapiens
tgcctggagtcccgt

SEQ ID NO: 1675205 - DNA, 15 bp, Homo sapiens
gcctggagtcccgtc

SEQ ID NO: 1675206 - DNA, 15 bp, Homo sapiens
cctggagtcccgtcc

SEQ ID NO: 1675207 - DNA, 15 bp, Homo sapiens
ctggagtcccgtccc

SEQ ID NO: 1675208 - DNA, 15 bp, Homo sapiens
tggagtcccgtccct

SEQ ID NO: 1675209 - DNA, 15 bp, Homo sapiens
ggagtcccgtccctg

SEQ ID NO: 1675210 - DNA, 15 bp, Homo sapiens
gagtcccgtccctgc

SEQ ID NO: 1675211 - DNA, 15 bp, Homo sapiens
agtcccgtccctgcc

SEQ ID NO: 1675212 - DNA, 15 bp, Homo sapiens
gtcccgtccctgccc

SEQ ID NO: 1675213 - DNA, 15 bp, Homo sapiens
tcccgtccctgccca

SEQ ID NO: 1675214 - DNA, 15 bp, Homo sapiens
cccgtccctgcccag

SEQ ID NO: 1675215 - DNA, 15 bp, Homo sapiens
ccgtccctgcccaga

SEQ ID NO: 1675216 - DNA, 15 bp, Homo sapiens
cgtccctgcccagaa

SEQ ID NO: 1675217 - DNA, 15 bp, Homo sapiens
gtccctgcccagaac

SEQ ID NO: 1675218 - DNA, 15 bp, Homo sapiens
tccctgcccagaacc

SEQ ID NO: 1675219 - DNA, 15 bp, Homo sapiens
ccctgcccagaaccc

SEQ ID NO: 1675220 - DNA, 15 bp, Homo sapiens
cctgcccagaaccct

SEQ ID NO: 1675221 - DNA, 15 bp, Homo sapiens
ctgcccagaaccctt

SEQ ID NO: 1675222 - DNA, 15 bp, Homo sapiens
tgcccagaacccttc

SEQ ID NO: 1675223 - DNA, 15 bp, Homo sapiens
gcccagaacccttcc

SEQ ID NO: 1675224 - DNA, 15 bp, Homo sapiens
cccagaacccttcct

SEQ ID NO: 1675225 - DNA, 15 bp, Homo sapiens
ccagaacccttcctg

SEQ ID NO: 1675226 - DNA, 15 bp, Homo sapiens
cagaacccttcctga

SEQ ID NO: 1675227 - DNA, 15 bp, Homo sapiens
agaacccttcctgag

SEQ ID NO: 1675228 - DNA, 15 bp, Homo sapiens
gaacccttcctgaga

SEQ ID NO: 1675229 - DNA, 15 bp, Homo sapiens
aacccttcctgagac

SEQ ID NO: 1675230 - DNA, 15 bp, Homo sapiens
acccttcctgagacc

SEQ ID NO: 1675231 - DNA, 15 bp, Homo sapiens
cccttcctgagacct

SEQ ID NO: 1675232 - DNA, 15 bp, Homo sapiens
ccttcctgagacctc

SEQ ID NO: 1675233 - DNA, 15 bp, Homo sapiens
cttcctgagacctcg

SEQ ID NO: 1675234 - DNA, 15 bp, Homo sapiens
ttcctgagacctcgc

SEQ ID NO: 1675235 - DNA, 15 bp, Homo sapiens
tcctgagacctcgcc

SEQ ID NO: 1675236 - DNA, 15 bp, Homo sapiens
cctgagacctcgccg

SEQ ID NO: 1675237 - DNA, 15 bp, Homo sapiens
ctgagacctcgccgg

SEQ ID NO: 1675238 - DNA, 15 bp, Homo sapiens
tgagacctcgccggc

SEQ ID NO: 1675239 - DNA, 15 bp, Homo sapiens
gagacctcgccggcc

SEQ ID NO: 1675240 - DNA, 15 bp, Homo sapiens
agacctcgccggcct

SEQ ID NO: 1675241 - DNA, 15 bp, Homo sapiens
gacctcgccggcctt

SEQ ID NO: 1675242 - DNA, 15 bp, Homo sapiens
acctcgccggccttg

SEQ ID NO: 1675243 - DNA, 15 bp, Homo sapiens
cctcgccggccttgt

SEQ ID NO: 1675244 - DNA, 15 bp, Homo sapiens
ctcgccggccttgtt

SEQ ID NO: 1675245 - DNA, 15 bp, Homo sapiens
tcgccggccttgttt

SEQ ID NO: 1675246 - DNA, 15 bp, Homo sapiens
cgccggccttgtttt

SEQ ID NO: 1675247 - DNA, 15 bp, Homo sapiens
gccggccttgtttta

SEQ ID NO: 1675248 - DNA, 15 bp, Homo sapiens
ccggccttgttttat

SEQ ID NO: 1675249 - DNA, 15 bp, Homo sapiens
cggccttgttttatt

SEQ ID NO: 1675250 - DNA, 15 bp, Homo sapiens
ggccttgttttattc

SEQ ID NO: 1675251 - DNA, 15 bp, Homo sapiens
gccttgttttattca

SEQ ID NO: 1675252 - DNA, 15 bp, Homo sapiens
ccttgttttattcaa

SEQ ID NO: 1675253 - DNA, 15 bp, Homo sapiens
cttgttttattcaaa

SEQ ID NO: 1675254 - DNA, 15 bp, Homo sapiens
ttgttttattcaaag

SEQ ID NO: 1675255 - DNA, 15 bp, Homo sapiens
tgttttattcaaaga

SEQ ID NO: 1675256 - DNA, 15 bp, Homo sapiens
gttttattcaaagac

SEQ ID NO: 1675257 - DNA, 15 bp, Homo sapiens
ttttattcaaagaca

SEQ ID NO: 1675258 - DNA, 15 bp, Homo sapiens
tttattcaaagacag

SEQ ID NO: 1675259 - DNA, 15 bp, Homo sapiens
ttattcaaagacaga

SEQ ID NO: 1675260 - DNA, 15 bp, Homo sapiens
tattcaaagacagag

SEQ ID NO: 1675261 - DNA, 15 bp, Homo sapiens
attcaaagacagaga

SEQ ID NO: 1675262 - DNA, 15 bp, Homo sapiens
ttcaaagacagagaa

SEQ ID NO: 1675263 - DNA, 15 bp, Homo sapiens
tcaaagacagagaag

SEQ ID NO: 1675264 - DNA, 15 bp, Homo sapiens
caaagacagagaaga

SEQ ID NO: 1675265 - DNA, 15 bp, Homo sapiens
aaagacagagaagac

SEQ ID NO: 1675266 - DNA, 15 bp, Homo sapiens
aagacagagaagacc

SEQ ID NO: 1675267 - DNA, 15 bp, Homo sapiens
agacagagaagacca

SEQ ID NO: 1675268 - DNA, 15 bp, Homo sapiens
gacagagaagaccaa

SEQ ID NO: 1675269 - DNA, 15 bp, Homo sapiens
acagagaagaccaaa

SEQ ID NO: 1675270 - DNA, 15 bp, Homo sapiens
cagagaagaccaaag

SEQ ID NO: 1675271 - DNA, 15 bp, Homo sapiens
agagaagaccaaagc

SEQ ID NO: 1675272 - DNA, 15 bp, Homo sapiens
gagaagaccaaagca

SEQ ID NO: 1675273 - DNA, 15 bp, Homo sapiens
agaagaccaaagcat

SEQ ID NO: 1675274 - DNA, 15 bp, Homo sapiens
gaagaccaaagcatt

SEQ ID NO: 1675275 - DNA, 15 bp, Homo sapiens
aagaccaaagcattg

SEQ ID NO: 1675276 - DNA, 15 bp, Homo sapiens
agaccaaagcattgc

SEQ ID NO: 1675277 - DNA, 15 bp, Homo sapiens
gaccaaagcattgcc

SEQ ID NO: 1675278 - DNA, 15 bp, Homo sapiens
accaaagcattgcct

SEQ ID NO: 1675279 - DNA, 15 bp, Homo sapiens
ccaaagcattgcctg

SEQ ID NO: 1675280 - DNA, 15 bp, Homo sapiens
caaagcattgcctgc

SEQ ID NO: 1675281 - DNA, 15 bp, Homo sapiens
aaagcattgcctgcc

SEQ ID NO: 1675282 - DNA, 15 bp, Homo sapiens
aagcattgcctgcca

SEQ ID NO: 1675283 - DNA, 15 bp, Homo sapiens
agcattgcctgccag

SEQ ID NO: 1675284 - DNA, 15 bp, Homo sapiens
gcattgcctgccaga

SEQ ID NO: 1675285 - DNA, 15 bp, Homo sapiens
cattgcctgccagag

SEQ ID NO: 1675286 - DNA, 15 bp, Homo sapiens
attgcctgccagagc

SEQ ID NO: 1675287 - DNA, 15 bp, Homo sapiens
ttgcctgccagagct

SEQ ID NO: 1675288 - DNA, 15 bp, Homo sapiens
tgcctgccagagctt

SEQ ID NO: 1675289 - DNA, 15 bp, Homo sapiens
gcctgccagagcttt

SEQ ID NO: 1675290 - DNA, 15 bp, Homo sapiens
cctgccagagctttg

SEQ ID NO: 1675291 - DNA, 15 bp, Homo sapiens
ctgccagagctttgt

SEQ ID NO: 1675292 - DNA, 15 bp, Homo sapiens
tgccagagctttgtt

SEQ ID NO: 1675293 - DNA, 15 bp, Homo sapiens
gccagagctttgttt

SEQ ID NO: 1675294 - DNA, 15 bp, Homo sapiens
ccagagctttgtttt

SEQ ID NO: 1675295 - DNA, 15 bp, Homo sapiens
cagagctttgtttta

SEQ ID NO: 1675296 - DNA, 15 bp, Homo sapiens
agagctttgttttat

SEQ ID NO: 1675297 - DNA, 15 bp, Homo sapiens
gagctttgttttata

SEQ ID NO: 1675298 - DNA, 15 bp, Homo sapiens
agctttgttttatat

SEQ ID NO: 1675299 - DNA, 15 bp, Homo sapiens
gctttgttttatata

SEQ ID NO: 1675300 - DNA, 15 bp, Homo sapiens
ctttgttttatatat

SEQ ID NO: 1675301 - DNA, 15 bp, Homo sapiens
tttgttttatatatt

SEQ ID NO: 1675302 - DNA, 15 bp, Homo sapiens
ttgttttatatattt

SEQ ID NO: 1675303 - DNA, 15 bp, Homo sapiens
tgttttatatattta

SEQ ID NO: 1675304 - DNA, 15 bp, Homo sapiens
gttttatatatttat

SEQ ID NO: 1675305 - DNA, 15 bp, Homo sapiens
ttttatatatttatt

SEQ ID NO: 1675306 - DNA, 15 bp, Homo sapiens
tttatatatttattc

SEQ ID NO: 1675307 - DNA, 15 bp, Homo sapiens
ttatatatttattca

SEQ ID NO: 1675308 - DNA, 15 bp, Homo sapiens
tatatatttattcat

SEQ ID NO: 1675309 - DNA, 15 bp, Homo sapiens
atatatttattcatc

SEQ ID NO: 1675310 - DNA, 15 bp, Homo sapiens
tatatttattcatct

SEQ ID NO: 1675311 - DNA, 15 bp, Homo sapiens
atatttattcatctg

SEQ ID NO: 1675312 - DNA, 15 bp, Homo sapiens
tatttattcatctgg

SEQ ID NO: 1675313 - DNA, 15 bp, Homo sapiens
atttattcatctggg

SEQ ID NO: 1675314 - DNA, 15 bp, Homo sapiens
tttattcatctggga

SEQ ID NO: 1675315 - DNA, 15 bp, Homo sapiens
ttattcatctgggag

SEQ ID NO: 1675316 - DNA, 15 bp, Homo sapiens
tattcatctgggagg

SEQ ID NO: 1675317 - DNA, 15 bp, Homo sapiens
attcatctgggaggc

SEQ ID NO: 1675318 - DNA, 15 bp, Homo sapiens
ttcatctgggaggca

SEQ ID NO: 1675319 - DNA, 15 bp, Homo sapiens
tcatctgggaggcag

SEQ ID NO: 1675320 - DNA, 15 bp, Homo sapiens
catctgggaggcaga

SEQ ID NO: 1675321 - DNA, 15 bp, Homo sapiens
atctgggaggcagaa

SEQ ID NO: 1675322 - DNA, 15 bp, Homo sapiens
tctgggaggcagaac

SEQ ID NO: 1675323 - DNA, 15 bp, Homo sapiens
ctgggaggcagaaca

SEQ ID NO: 1675324 - DNA, 15 bp, Homo sapiens
tgggaggcagaacag

SEQ ID NO: 1675325 - DNA, 15 bp, Homo sapiens
gggaggcagaacagg

SEQ ID NO: 1675326 - DNA, 15 bp, Homo sapiens
ggaggcagaacaggc

SEQ ID NO: 1675327 - DNA, 15 bp, Homo sapiens
gaggcagaacaggct

SEQ ID NO: 1675328 - DNA, 15 bp, Homo sapiens
aggcagaacaggctt

SEQ ID NO: 1675329 - DNA, 15 bp, Homo sapiens
ggcagaacaggcttc

SEQ ID NO: 1675330 - DNA, 15 bp, Homo sapiens
gcagaacaggcttcg

SEQ ID NO: 1675331 - DNA, 15 bp, Homo sapiens
cagaacaggcttcgg

SEQ ID NO: 1675332 - DNA, 15 bp, Homo sapiens
agaacaggcttcgga

SEQ ID NO: 1675333 - DNA, 15 bp, Homo sapiens
gaacaggcttcggac

SEQ ID NO: 1675334 - DNA, 15 bp, Homo sapiens
aacaggcttcggaca

SEQ ID NO: 1675335 - DNA, 15 bp, Homo sapiens
acaggcttcggacag

SEQ ID NO: 1675336 - DNA, 15 bp, Homo sapiens
caggcttcggacagt

SEQ ID NO: 1675337 - DNA, 15 bp, Homo sapiens
aggcttcggacagtg

SEQ ID NO: 1675338 - DNA, 15 bp, Homo sapiens
ggcttcggacagtgc

SEQ ID NO: 1675339 - DNA, 15 bp, Homo sapiens
gcttcggacagtgcc

SEQ ID NO: 1675340 - DNA, 15 bp, Homo sapiens
cttcggacagtgccc

SEQ ID NO: 1675341 - DNA, 15 bp, Homo sapiens
ttcggacagtgccca

SEQ ID NO: 1675342 - DNA, 15 bp, Homo sapiens
tcggacagtgcccat

SEQ ID NO: 1675343 - DNA, 15 bp, Homo sapiens
cggacagtgcccatg

SEQ ID NO: 1675344 - DNA, 15 bp, Homo sapiens
ggacagtgcccatgc

SEQ ID NO: 1675345 - DNA, 15 bp, Homo sapiens
gacagtgcccatgca

SEQ ID NO: 1675346 - DNA, 15 bp, Homo sapiens
acagtgcccatgcaa

SEQ ID NO: 1675347 - DNA, 15 bp, Homo sapiens
cagtgcccatgcaat

SEQ ID NO: 1675348 - DNA, 15 bp, Homo sapiens
agtgcccatgcaatg

SEQ ID NO: 1675349 - DNA, 15 bp, Homo sapiens
gtgcccatgcaatgg

SEQ ID NO: 1675350 - DNA, 15 bp, Homo sapiens
tgcccatgcaatggc

SEQ ID NO: 1675351 - DNA, 15 bp, Homo sapiens
gcccatgcaatggct

SEQ ID NO: 1675352 - DNA, 15 bp, Homo sapiens
cccatgcaatggctt

SEQ ID NO: 1675353 - DNA, 15 bp, Homo sapiens
ccatgcaatggcttg

SEQ ID NO: 1675354 - DNA, 15 bp, Homo sapiens
catgcaatggcttgg

SEQ ID NO: 1675355 - DNA, 15 bp, Homo sapiens
atgcaatggcttggg

SEQ ID NO: 1675356 - DNA, 15 bp, Homo sapiens
tgcaatggcttgggt

SEQ ID NO: 1675357 - DNA, 15 bp, Homo sapiens
gcaatggcttgggtt

SEQ ID NO: 1675358 - DNA, 15 bp, Homo sapiens
caatggcttgggttg

SEQ ID NO: 1675359 - DNA, 15 bp, Homo sapiens
aatggcttgggttgg

SEQ ID NO: 1675360 - DNA, 15 bp, Homo sapiens
atggcttgggttggg

SEQ ID NO: 1675361 - DNA, 15 bp, Homo sapiens
tggcttgggttggga

SEQ ID NO: 1675362 - DNA, 15 bp, Homo sapiens
ggcttgggttgggat

SEQ ID NO: 1675363 - DNA, 15 bp, Homo sapiens
gcttgggttgggatt

SEQ ID NO: 1675364 - DNA, 15 bp, Homo sapiens
cttgggttgggattt

SEQ ID NO: 1675365 - DNA, 15 bp, Homo sapiens
ttgggttgggatttt

SEQ ID NO: 1675366 - DNA, 15 bp, Homo sapiens
tgggttgggattttg

SEQ ID NO: 1675367 - DNA, 15 bp, Homo sapiens
gggttgggattttgg

SEQ ID NO: 1675368 - DNA, 15 bp, Homo sapiens
ggttgggattttggt

SEQ ID NO: 1675369 - DNA, 15 bp, Homo sapiens
gttgggattttggtt

SEQ ID NO: 1675370 - DNA, 15 bp, Homo sapiens
ttgggattttggttt

SEQ ID NO: 1675371 - DNA, 15 bp, Homo sapiens
tgggattttggtttc

SEQ ID NO: 1675372 - DNA, 15 bp, Homo sapiens
gggattttggtttct

SEQ ID NO: 1675373 - DNA, 15 bp, Homo sapiens
ggattttggtttctt

SEQ ID NO: 1675374 - DNA, 15 bp, Homo sapiens
gattttggtttcttc

SEQ ID NO: 1675375 - DNA, 15 bp, Homo sapiens
attttggtttcttcc

SEQ ID NO: 1675376 - DNA, 15 bp, Homo sapiens
ttttggtttcttcct

SEQ ID NO: 1675377 - DNA, 15 bp, Homo sapiens
tttggtttcttcctt

SEQ ID NO: 1675378 - DNA, 15 bp, Homo sapiens
ttggtttcttccttt

SEQ ID NO: 1675379 - DNA, 15 bp, Homo sapiens
tggtttcttcctttc

SEQ ID NO: 1675380 - DNA, 15 bp, Homo sapiens
ggtttcttcctttcc

SEQ ID NO: 1675381 - DNA, 15 bp, Homo sapiens
gtttcttcctttcct

SEQ ID NO: 1675382 - DNA, 15 bp, Homo sapiens
tttcttcctttcctc

SEQ ID NO: 1675383 - DNA, 15 bp, Homo sapiens
ttcttcctttcctcg

SEQ ID NO: 1675384 - DNA, 15 bp, Homo sapiens
tcttcctttcctcgt

SEQ ID NO: 1675385 - DNA, 15 bp, Homo sapiens
cttcctttcctcgtg

SEQ ID NO: 1675386 - DNA, 15 bp, Homo sapiens
ttcctttcctcgtga

SEQ ID NO: 1675387 - DNA, 15 bp, Homo sapiens
tcctttcctcgtgaa

SEQ ID NO: 1675388 - DNA, 15 bp, Homo sapiens
cctttcctcgtgaag

SEQ ID NO: 1675389 - DNA, 15 bp, Homo sapiens
ctttcctcgtgaagg

SEQ ID NO: 1675390 - DNA, 15 bp, Homo sapiens
tttcctcgtgaagga

SEQ ID NO: 1675391 - DNA, 15 bp, Homo sapiens
ttcctcgtgaaggat

SEQ ID NO: 1675392 - DNA, 15 bp, Homo sapiens
tcctcgtgaaggata

SEQ ID NO: 1675393 - DNA, 15 bp, Homo sapiens
cctcgtgaaggataa

SEQ ID NO: 1675394 - DNA, 15 bp, Homo sapiens
ctcgtgaaggataag

SEQ ID NO: 1675395 - DNA, 15 bp, Homo sapiens
tcgtgaaggataaga

SEQ ID NO: 1675396 - DNA, 15 bp, Homo sapiens
cgtgaaggataagag

SEQ ID NO: 1675397 - DNA, 15 bp, Homo sapiens
gtgaaggataagaga

SEQ ID NO: 1675398 - DNA, 15 bp, Homo sapiens
tgaaggataagagaa

SEQ ID NO: 1675399 - DNA, 15 bp, Homo sapiens
gaaggataagagaaa

SEQ ID NO: 1675400 - DNA, 15 bp, Homo sapiens
aaggataagagaaac

SEQ ID NO: 1675401 - DNA, 15 bp, Homo sapiens
aggataagagaaaca

SEQ ID NO: 1675402 - DNA, 15 bp, Homo sapiens
ggataagagaaacag

SEQ ID NO: 1675403 - DNA, 15 bp, Homo sapiens
gataagagaaacagg

SEQ ID NO: 1675404 - DNA, 15 bp, Homo sapiens
ataagagaaacaggc

SEQ ID NO: 1675405 - DNA, 15 bp, Homo sapiens
taagagaaacaggcc

SEQ ID NO: 1675406 - DNA, 15 bp, Homo sapiens
aagagaaacaggccc

SEQ ID NO: 1675407 - DNA, 15 bp, Homo sapiens
agagaaacaggcccg

SEQ ID NO: 1675408 - DNA, 15 bp, Homo sapiens
gagaaacaggcccgg

SEQ ID NO: 1675409 - DNA, 15 bp, Homo sapiens
agaaacaggcccggg

SEQ ID NO: 1675410 - DNA, 15 bp, Homo sapiens
gaaacaggcccgggg

SEQ ID NO: 1675411 - DNA, 15 bp, Homo sapiens
aaacaggcccggggg

SEQ ID NO: 1675412 - DNA, 15 bp, Homo sapiens
aacaggcccgggggg

SEQ ID NO: 1675413 - DNA, 15 bp, Homo sapiens
acaggcccgggggga

SEQ ID NO: 1675414 - DNA, 15 bp, Homo sapiens
caggcccggggggac

SEQ ID NO: 1675415 - DNA, 15 bp, Homo sapiens
aggcccggggggacc

SEQ ID NO: 1675416 - DNA, 15 bp, Homo sapiens
ggcccggggggacca

SEQ ID NO: 1675417 - DNA, 15 bp, Homo sapiens
gcccggggggaccag

SEQ ID NO: 1675418 - DNA, 15 bp, Homo sapiens
cccggggggaccagg

SEQ ID NO: 1675419 - DNA, 15 bp, Homo sapiens
ccggggggaccagga

SEQ ID NO: 1675420 - DNA, 15 bp, Homo sapiens
cggggggaccaggat

SEQ ID NO: 1675421 - DNA, 15 bp, Homo sapiens
ggggggaccaggatg

SEQ ID NO: 1675422 - DNA, 15 bp, Homo sapiens
gggggaccaggatga

SEQ ID NO: 1675423 - DNA, 15 bp, Homo sapiens
ggggaccaggatgac

SEQ ID NO: 1675424 - DNA, 15 bp, Homo sapiens
gggaccaggatgaca

SEQ ID NO: 1675425 - DNA, 15 bp, Homo sapiens
ggaccaggatgacac

SEQ ID NO: 1675426 - DNA, 15 bp, Homo sapiens
gaccaggatgacacc

SEQ ID NO: 1675427 - DNA, 15 bp, Homo sapiens
accaggatgacacct

SEQ ID NO: 1675428 - DNA, 15 bp, Homo sapiens
ccaggatgacacctc

SEQ ID NO: 1675429 - DNA, 15 bp, Homo sapiens
caggatgacacctcc

SEQ ID NO: 1675430 - DNA, 15 bp, Homo sapiens
aggatgacacctcca

SEQ ID NO: 1675431 - DNA, 15 bp, Homo sapiens
ggatgacacctccat

SEQ ID NO: 1675432 - DNA, 15 bp, Homo sapiens
gatgacacctccatt

SEQ ID NO: 1675433 - DNA, 15 bp, Homo sapiens
atgacacctccattt

SEQ ID NO: 1675434 - DNA, 15 bp, Homo sapiens
tgacacctccatttc

SEQ ID NO: 1675435 - DNA, 15 bp, Homo sapiens
gacacctccatttct

SEQ ID NO: 1675436 - DNA, 15 bp, Homo sapiens
acacctccatttctc

SEQ ID NO: 1675437 - DNA, 15 bp, Homo sapiens
cacctccatttctct

SEQ ID NO: 1675438 - DNA, 15 bp, Homo sapiens
acctccatttctctc

SEQ ID NO: 1675439 - DNA, 15 bp, Homo sapiens
cctccatttctctcc

SEQ ID NO: 1675440 - DNA, 15 bp, Homo sapiens
tccatttctctccag

SEQ ID NO: 1675441 - DNA, 15 bp, Homo sapiens
ccatttctctccagg

SEQ ID NO: 1675442 - DNA, 15 bp, Homo sapiens
catttctctccagga

SEQ ID NO: 1675443 - DNA, 15 bp, Homo sapiens
atttctctccaggaa

SEQ ID NO: 1675444 - DNA, 15 bp, Homo sapiens
tttctctccaggaag

SEQ ID NO: 1675445 - DNA, 15 bp, Homo sapiens
ttctctccaggaagt

SEQ ID NO: 1675446 - DNA, 15 bp, Homo sapiens
tctctccaggaagtt

SEQ ID NO: 1675447 - DNA, 15 bp, Homo sapiens
ctctccaggaagttt

SEQ ID NO: 1675448 - DNA, 15 bp, Homo sapiens
tctccaggaagtttt

SEQ ID NO: 1675449 - DNA, 15 bp, Homo sapiens
ctccaggaagttttg

SEQ ID NO: 1675450 - DNA, 15 bp, Homo sapiens
tccaggaagttttga

SEQ ID NO: 1675451 - DNA, 15 bp, Homo sapiens
ccaggaagttttgag

SEQ ID NO: 1675452 - DNA, 15 bp, Homo sapiens
caggaagttttgagt

SEQ ID NO: 1675453 - DNA, 15 bp, Homo sapiens
aggaagttttgagtt

SEQ ID NO: 1675454 - DNA, 15 bp, Homo sapiens
ggaagttttgagttt

SEQ ID NO: 1675455 - DNA, 15 bp, Homo sapiens
gaagttttgagtttc

SEQ ID NO: 1675456 - DNA, 15 bp, Homo sapiens
aagttttgagtttct

SEQ ID NO: 1675457 - DNA, 15 bp, Homo sapiens
agttttgagtttctc

SEQ ID NO: 1675458 - DNA, 15 bp, Homo sapiens
gttttgagtttctct

SEQ ID NO: 1675459 - DNA, 15 bp, Homo sapiens
ttttgagtttctctc

SEQ ID NO: 1675460 - DNA, 15 bp, Homo sapiens
tttgagtttctctcc

SEQ ID NO: 1675461 - DNA, 15 bp, Homo sapiens
ttgagtttctctcca

SEQ ID NO: 1675462 - DNA, 15 bp, Homo sapiens
tgagtttctctccac

SEQ ID NO: 1675463 - DNA, 15 bp, Homo sapiens
gagtttctctccacc

SEQ ID NO: 1675464 - DNA, 15 bp, Homo sapiens
agtttctctccaccg

SEQ ID NO: 1675465 - DNA, 15 bp, Homo sapiens
gtttctctccaccgt

SEQ ID NO: 1675466 - DNA, 15 bp, Homo sapiens
tttctctccaccgtg

SEQ ID NO: 1675467 - DNA, 15 bp, Homo sapiens
ttctctccaccgtga

SEQ ID NO: 1675468 - DNA, 15 bp, Homo sapiens
tctctccaccgtgac

SEQ ID NO: 1675469 - DNA, 15 bp, Homo sapiens
ctctccaccgtgaca

SEQ ID NO: 1675470 - DNA, 15 bp, Homo sapiens
tctccaccgtgacac

SEQ ID NO: 1675471 - DNA, 15 bp, Homo sapiens
ctccaccgtgacaca

SEQ ID NO: 1675472 - DNA, 15 bp, Homo sapiens
tccaccgtgacacaa

SEQ ID NO: 1675473 - DNA, 15 bp, Homo sapiens
ccaccgtgacacaat

SEQ ID NO: 1675474 - DNA, 15 bp, Homo sapiens
caccgtgacacaatc

SEQ ID NO: 1675475 - DNA, 15 bp, Homo sapiens
accgtgacacaatcc

SEQ ID NO: 1675476 - DNA, 15 bp, Homo sapiens
ccgtgacacaatcct

SEQ ID NO: 1675477 - DNA, 15 bp, Homo sapiens
cgtgacacaatcctc

SEQ ID NO: 1675478 - DNA, 15 bp, Homo sapiens
gtgacacaatcctca

SEQ ID NO: 1675479 - DNA, 15 bp, Homo sapiens
tgacacaatcctcaa

SEQ ID NO: 1675480 - DNA, 15 bp, Homo sapiens
gacacaatcctcaaa

SEQ ID NO: 1675481 - DNA, 15 bp, Homo sapiens
acacaatcctcaaac

SEQ ID NO: 1675482 - DNA, 15 bp, Homo sapiens
cacaatcctcaaaca

SEQ ID NO: 1675483 - DNA, 15 bp, Homo sapiens
acaatcctcaaacat

SEQ ID NO: 1675484 - DNA, 15 bp, Homo sapiens
caatcctcaaacatg

SEQ ID NO: 1675485 - DNA, 15 bp, Homo sapiens
aatcctcaaacatgg

SEQ ID NO: 1675486 - DNA, 15 bp, Homo sapiens
atcctcaaacatgga

SEQ ID NO: 1675487 - DNA, 15 bp, Homo sapiens
tcctcaaacatggaa

SEQ ID NO: 1675488 - DNA, 15 bp, Homo sapiens
cctcaaacatggaag

SEQ ID NO: 1675489 - DNA, 15 bp, Homo sapiens
ctcaaacatggaaga

SEQ ID NO: 1675490 - DNA, 15 bp, Homo sapiens
tcaaacatggaagat

SEQ ID NO: 1675491 - DNA, 15 bp, Homo sapiens
caaacatggaagatg

SEQ ID NO: 1675492 - DNA, 15 bp, Homo sapiens
aaacatggaagatga

SEQ ID NO: 1675493 - DNA, 15 bp, Homo sapiens
aacatggaagatgaa

SEQ ID NO: 1675494 - DNA, 15 bp, Homo sapiens
acatggaagatgaaa

SEQ ID NO: 1675495 - DNA, 15 bp, Homo sapiens
catggaagatgaaag

SEQ ID NO: 1675496 - DNA, 15 bp, Homo sapiens
atggaagatgaaagg

SEQ ID NO: 1675497 - DNA, 15 bp, Homo sapiens
tggaagatgaaaggg

SEQ ID NO: 1675498 - DNA, 15 bp, Homo sapiens
ggaagatgaaagggg

SEQ ID NO: 1675499 - DNA, 15 bp, Homo sapiens
gaagatgaaagggga

SEQ ID NO: 1675500 - DNA, 15 bp, Homo sapiens
aagatgaaaggggag

SEQ ID NO: 1675501 - DNA, 15 bp, Homo sapiens
agatgaaaggggagg

SEQ ID NO: 1675502 - DNA, 15 bp, Homo sapiens
gatgaaaggggaggg

SEQ ID NO: 1675503 - DNA, 15 bp, Homo sapiens
atgaaaggggagggg

SEQ ID NO: 1675504 - DNA, 15 bp, Homo sapiens
tgaaaggggagggga

SEQ ID NO: 1675505 - DNA, 15 bp, Homo sapiens
gaaaggggaggggat

SEQ ID NO: 1675506 - DNA, 15 bp, Homo sapiens
aaaggggaggggatg

SEQ ID NO: 1675507 - DNA, 15 bp, Homo sapiens
aaggggaggggatgt

SEQ ID NO: 1675508 - DNA, 15 bp, Homo sapiens
aggggaggggatgtc

SEQ ID NO: 1675509 - DNA, 15 bp, Homo sapiens
ggggaggggatgtca

SEQ ID NO: 1675510 - DNA, 15 bp, Homo sapiens
gggaggggatgtcag

SEQ ID NO: 1675511 - DNA, 15 bp, Homo sapiens
ggaggggatgtcagg

SEQ ID NO: 1675512 - DNA, 15 bp, Homo sapiens
gaggggatgtcaggc

SEQ ID NO: 1675513 - DNA, 15 bp, Homo sapiens
aggggatgtcaggcc

SEQ ID NO: 1675514 - DNA, 15 bp, Homo sapiens
ggggatgtcaggccc

SEQ ID NO: 1675515 - DNA, 15 bp, Homo sapiens
gggatgtcaggccca

SEQ ID NO: 1675516 - DNA, 15 bp, Homo sapiens
ggatgtcaggcccag

SEQ ID NO: 1675517 - DNA, 15 bp, Homo sapiens
gatgtcaggcccaga

SEQ ID NO: 1675518 - DNA, 15 bp, Homo sapiens
atgtcaggcccagag

SEQ ID NO: 1675519 - DNA, 15 bp, Homo sapiens
tgtcaggcccagaga

SEQ ID NO: 1675520 - DNA, 15 bp, Homo sapiens
gtcaggcccagagaa

SEQ ID NO: 1675521 - DNA, 15 bp, Homo sapiens
tcaggcccagagaag

SEQ ID NO: 1675522 - DNA, 15 bp, Homo sapiens
caggcccagagaagc

SEQ ID NO: 1675523 - DNA, 15 bp, Homo sapiens
aggcccagagaagca

SEQ ID NO: 1675524 - DNA, 15 bp, Homo sapiens
ggcccagagaagcaa

SEQ ID NO: 1675525 - DNA, 15 bp, Homo sapiens
gcccagagaagcaag

SEQ ID NO: 1675526 - DNA, 15 bp, Homo sapiens
cccagagaagcaagt

SEQ ID NO: 1675527 - DNA, 15 bp, Homo sapiens
ccagagaagcaagtg

SEQ ID NO: 1675528 - DNA, 15 bp, Homo sapiens
cagagaagcaagtgg

SEQ ID NO: 1675529 - DNA, 15 bp, Homo sapiens
agagaagcaagtggc

SEQ ID NO: 1675530 - DNA, 15 bp, Homo sapiens
gagaagcaagtggct

SEQ ID NO: 1675531 - DNA, 15 bp, Homo sapiens
agaagcaagtggctt

SEQ ID NO: 1675532 - DNA, 15 bp, Homo sapiens
gaagcaagtggcttt

SEQ ID NO: 1675533 - DNA, 15 bp, Homo sapiens
aagcaagtggctttc

SEQ ID NO: 1675534 - DNA, 15 bp, Homo sapiens
agcaagtggctttca

SEQ ID NO: 1675535 - DNA, 15 bp, Homo sapiens
gcaagtggctttcaa

SEQ ID NO: 1675536 - DNA, 15 bp, Homo sapiens
caagtggctttcaac

SEQ ID NO: 1675537 - DNA, 15 bp, Homo sapiens
aagtggctttcaaca

SEQ ID NO: 1675538 - DNA, 15 bp, Homo sapiens
agtggctttcaacac

SEQ ID NO: 1675539 - DNA, 15 bp, Homo sapiens
gtggctttcaacaca

SEQ ID NO: 1675540 - DNA, 15 bp, Homo sapiens
tggctttcaacacac

SEQ ID NO: 1675541 - DNA, 15 bp, Homo sapiens
ggctttcaacacaca

SEQ ID NO: 1675542 - DNA, 15 bp, Homo sapiens
gctttcaacacacaa

SEQ ID NO: 1675543 - DNA, 15 bp, Homo sapiens
ctttcaacacacaac

SEQ ID NO: 1675544 - DNA, 15 bp, Homo sapiens
tttcaacacacaaca

SEQ ID NO: 1675545 - DNA, 15 bp, Homo sapiens
ttcaacacacaacag

SEQ ID NO: 1675546 - DNA, 15 bp, Homo sapiens
tcaacacacaacagc

SEQ ID NO: 1675547 - DNA, 15 bp, Homo sapiens
caacacacaacagca

SEQ ID NO: 1675548 - DNA, 15 bp, Homo sapiens
aacacacaacagcag

SEQ ID NO: 1675549 - DNA, 15 bp, Homo sapiens
acacacaacagcaga

SEQ ID NO: 1675550 - DNA, 15 bp, Homo sapiens
cacacaacagcagat

SEQ ID NO: 1675551 - DNA, 15 bp, Homo sapiens
acacaacagcagatg

SEQ ID NO: 1675552 - DNA, 15 bp, Homo sapiens
cacaacagcagatgg

SEQ ID NO: 1675553 - DNA, 15 bp, Homo sapiens
acaacagcagatggc

SEQ ID NO: 1675554 - DNA, 15 bp, Homo sapiens
caacagcagatggca

SEQ ID NO: 1675555 - DNA, 15 bp, Homo sapiens
aacagcagatggcac

SEQ ID NO: 1675556 - DNA, 15 bp, Homo sapiens
acagcagatggcacc

SEQ ID NO: 1675557 - DNA, 15 bp, Homo sapiens
cagcagatggcacca

SEQ ID NO: 1675558 - DNA, 15 bp, Homo sapiens
agcagatggcaccaa

SEQ ID NO: 1675559 - DNA, 15 bp, Homo sapiens
gcagatggcaccaac

SEQ ID NO: 1675560 - DNA, 15 bp, Homo sapiens
cagatggcaccaacg

SEQ ID NO: 1675561 - DNA, 15 bp, Homo sapiens
agatggcaccaacgg

SEQ ID NO: 1675562 - DNA, 15 bp, Homo sapiens
gatggcaccaacggg

SEQ ID NO: 1675563 - DNA, 15 bp, Homo sapiens
atggcaccaacggga

SEQ ID NO: 1675564 - DNA, 15 bp, Homo sapiens
tggcaccaacgggac

SEQ ID NO: 1675565 - DNA, 15 bp, Homo sapiens
ggcaccaacgggacc

SEQ ID NO: 1675566 - DNA, 15 bp, Homo sapiens
gcaccaacgggaccc

SEQ ID NO: 1675567 - DNA, 15 bp, Homo sapiens
caccaacgggacccc

SEQ ID NO: 1675568 - DNA, 15 bp, Homo sapiens
accaacgggaccccc

SEQ ID NO: 1675569 - DNA, 15 bp, Homo sapiens
ccaacgggaccccct

SEQ ID NO: 1675570 - DNA, 15 bp, Homo sapiens
caacgggaccccctg

SEQ ID NO: 1675571 - DNA, 15 bp, Homo sapiens
aacgggaccccctgg

SEQ ID NO: 1675572 - DNA, 15 bp, Homo sapiens
acgggaccccctggc

SEQ ID NO: 1675573 - DNA, 15 bp, Homo sapiens
cgggaccccctggcc

SEQ ID NO: 1675574 - DNA, 15 bp, Homo sapiens
gggaccccctggccc

SEQ ID NO: 1675575 - DNA, 15 bp, Homo sapiens
ggaccccctggccct

SEQ ID NO: 1675576 - DNA, 15 bp, Homo sapiens
gaccccctggccctg

SEQ ID NO: 1675577 - DNA, 15 bp, Homo sapiens
accccctggccctgc

SEQ ID NO: 1675578 - DNA, 15 bp, Homo sapiens
ccccctggccctgcc

SEQ ID NO: 1675579 - DNA, 15 bp, Homo sapiens
cccctggccctgcct

SEQ ID NO: 1675580 - DNA, 15 bp, Homo sapiens
ccctggccctgcctc

SEQ ID NO: 1675581 - DNA, 15 bp, Homo sapiens
cctggccctgcctca

SEQ ID NO: 1675582 - DNA, 15 bp, Homo sapiens
ctggccctgcctcat

SEQ ID NO: 1675583 - DNA, 15 bp, Homo sapiens
tggccctgcctcatc

SEQ ID NO: 1675584 - DNA, 15 bp, Homo sapiens
ggccctgcctcatcc

SEQ ID NO: 1675585 - DNA, 15 bp, Homo sapiens
gccctgcctcatcca

SEQ ID NO: 1675586 - DNA, 15 bp, Homo sapiens
ccctgcctcatccac

SEQ ID NO: 1675587 - DNA, 15 bp, Homo sapiens
cctgcctcatccacc

SEQ ID NO: 1675588 - DNA, 15 bp, Homo sapiens
ctgcctcatccacca

SEQ ID NO: 1675589 - DNA, 15 bp, Homo sapiens
tgcctcatccaccaa

SEQ ID NO: 1675590 - DNA, 15 bp, Homo sapiens
gcctcatccaccaat

SEQ ID NO: 1675591 - DNA, 15 bp, Homo sapiens
cctcatccaccaatc

SEQ ID NO: 1675592 - DNA, 15 bp, Homo sapiens
ctcatccaccaatct

SEQ ID NO: 1675593 - DNA, 15 bp, Homo sapiens
tcatccaccaatctc

SEQ ID NO: 1675594 - DNA, 15 bp, Homo sapiens
catccaccaatctct

SEQ ID NO: 1675595 - DNA, 15 bp, Homo sapiens
atccaccaatctcta

SEQ ID NO: 1675596 - DNA, 15 bp, Homo sapiens
tccaccaatctctaa

SEQ ID NO: 1675597 - DNA, 15 bp, Homo sapiens
ccaccaatctctaag

SEQ ID NO: 1675598 - DNA, 15 bp, Homo sapiens
caccaatctctaagc

SEQ ID NO: 1675599 - DNA, 15 bp, Homo sapiens
accaatctctaagcc

SEQ ID NO: 1675600 - DNA, 15 bp, Homo sapiens
ccaatctctaagcca

SEQ ID NO: 1675601 - DNA, 15 bp, Homo sapiens
caatctctaagccaa

SEQ ID NO: 1675602 - DNA, 15 bp, Homo sapiens
aatctctaagccaaa

SEQ ID NO: 1675603 - DNA, 15 bp, Homo sapiens
tcctggctaacacgt

SEQ ID NO: 1675604 - DNA, 15 bp, Homo sapiens
cctggctaacacgtg

SEQ ID NO: 1675605 - DNA, 15 bp, Homo sapiens
ctggctaacacgtga

SEQ ID NO: 1675606 - DNA, 15 bp, Homo sapiens
tggctaacacgtgaa

SEQ ID NO: 1675607 - DNA, 15 bp, Homo sapiens
ggctaacacgtgaaa

SEQ ID NO: 1675608 - DNA, 15 bp, Homo sapiens
gctaacacgtgaaac

SEQ ID NO: 1675609 - DNA, 15 bp, Homo sapiens
ctaacacgtgaaacc

SEQ ID NO: 1675610 - DNA, 15 bp, Homo sapiens
taacacgtgaaaccc

SEQ ID NO: 1675611 - DNA, 15 bp, Homo sapiens
aacacgtgaaacccc

SEQ ID NO: 1675612 - DNA, 15 bp, Homo sapiens
acacgtgaaaccccg

SEQ ID NO: 1675613 - DNA, 15 bp, Homo sapiens
cacgtgaaaccccgt

SEQ ID NO: 1675614 - DNA, 15 bp, Homo sapiens
acgtgaaaccccgtc

SEQ ID NO: 1675615 - DNA, 15 bp, Homo sapiens
cgtgaaaccccgtct

SEQ ID NO: 1675616 - DNA, 15 bp, Homo sapiens
gaatggtgtgaaccc

SEQ ID NO: 1675617 - DNA, 15 bp, Homo sapiens
aatggtgtgaacccg

SEQ ID NO: 1675618 - DNA, 15 bp, Homo sapiens
atggtgtgaacccgg

SEQ ID NO: 1675619 - DNA, 15 bp, Homo sapiens
tggtgtgaacccggg

SEQ ID NO: 1675620 - DNA, 15 bp, Homo sapiens
ggtgtgaacccggga

SEQ ID NO: 1675621 - DNA, 15 bp, Homo sapiens
gtgtgaacccgggaa

SEQ ID NO: 1675622 - DNA, 15 bp, Homo sapiens
tgtgaacccgggaag

SEQ ID NO: 1675623 - DNA, 15 bp, Homo sapiens
gtgaacccgggaagc

SEQ ID NO: 1675624 - DNA, 15 bp, Homo sapiens
cccgggaagcggagc

SEQ ID NO: 1675625 - DNA, 15 bp, Homo sapiens
ccgggaagcggagct

SEQ ID NO: 1675626 - DNA, 15 bp, Homo sapiens
cgggaagcggagctt

SEQ ID NO: 1675627 - DNA, 15 bp, Homo sapiens
gggaagcggagcttg

SEQ ID NO: 1675628 - DNA, 15 bp, Homo sapiens
ggaagcggagcttgc

SEQ ID NO: 1675629 - DNA, 15 bp, Homo sapiens
gaagcggagcttgca

SEQ ID NO: 1675630 - DNA, 15 bp, Homo sapiens
aagcggagcttgcag

SEQ ID NO: 1675631 - DNA, 15 bp, Homo sapiens
agcggagcttgcagt

SEQ ID NO: 1675632 - DNA, 15 bp, Homo sapiens
attgcgccactgcag

SEQ ID NO: 1675633 - DNA, 15 bp, Homo sapiens
ttgcgccactgcagt

SEQ ID NO: 1675634 - DNA, 15 bp, Homo sapiens
tgcgccactgcagtc

SEQ ID NO: 1675635 - DNA, 15 bp, Homo sapiens
gcgccactgcagtcc

SEQ ID NO: 1675636 - DNA, 15 bp, Homo sapiens
cgccactgcagtccg

SEQ ID NO: 1675637 - DNA, 15 bp, Homo sapiens
gccactgcagtccgc

SEQ ID NO: 1675638 - DNA, 15 bp, Homo sapiens
ccactgcagtccgca

SEQ ID NO: 1675639 - DNA, 15 bp, Homo sapiens
cactgcagtccgcag

SEQ ID NO: 1675640 - DNA, 15 bp, Homo sapiens
actgcagtccgcagt

SEQ ID NO: 1675641 - DNA, 15 bp, Homo sapiens
ctgcagtccgcagtc

SEQ ID NO: 1675642 - DNA, 15 bp, Homo sapiens
tgcagtccgcagtct

SEQ ID NO: 1675643 - DNA, 15 bp, Homo sapiens
gcagtccgcagtctg

SEQ ID NO: 1675644 - DNA, 15 bp, Homo sapiens
cagtccgcagtctgg

SEQ ID NO: 1675645 - DNA, 15 bp, Homo sapiens
agtccgcagtctggc

SEQ ID NO: 1675646 - DNA, 15 bp, Homo sapiens
gtccgcagtctggcc

SEQ ID NO: 1675647 - DNA, 15 bp, Homo sapiens
tccgcagtctggcct

SEQ ID NO: 1675648 - DNA, 15 bp, Homo sapiens
ccgcagtctggcctg

SEQ ID NO: 1675649 - DNA, 15 bp, Homo sapiens
cgcagtctggcctgg

SEQ ID NO: 1675650 - DNA, 15 bp, Homo sapiens
gcagtctggcctggg

SEQ ID NO: 1675651 - DNA, 15 bp, Homo sapiens
cagtctggcctgggc

SEQ ID NO: 1675652 - DNA, 15 bp, Homo sapiens
agtctggcctgggcg

SEQ ID NO: 1675653 - DNA, 15 bp, Homo sapiens
gtctggcctgggcga

SEQ ID NO: 1675654 - DNA, 15 bp, Homo sapiens
tctggcctgggcgac

SEQ ID NO: 1675655 - DNA, 15 bp, Homo sapiens
ctggcctgggcgaca

SEQ ID NO: 1675656 - DNA, 15 bp, Homo sapiens
tggcctgggcgacag

SEQ ID NO: 1675657 - DNA, 15 bp, Homo sapiens
ggcctgggcgacaga

SEQ ID NO: 1675658 - DNA, 15 bp, Homo sapiens
tcaaaaaaaaaaaac

SEQ ID NO: 1675659 - DNA, 15 bp, Homo sapiens
caaaaaaaaaaaaca

SEQ ID NO: 1675660 - DNA, 15 bp, Homo sapiens
aacaaaaaaaaacca

SEQ ID NO: 1675661 - DNA, 15 bp, Homo sapiens
acaaaaaaaaaccat

SEQ ID NO: 1675662 - DNA, 15 bp, Homo sapiens
caaaaaaaaaccatg

SEQ ID NO: 1675663 - DNA, 15 bp, Homo sapiens
aaaaaaaaaccatgc

SEQ ID NO: 1675664 - DNA, 15 bp, Homo sapiens
aaaaaaaaccatgca

SEQ ID NO: 1675665 - DNA, 15 bp, Homo sapiens
aaaaaaaccatgcat

SEQ ID NO: 1675666 - DNA, 15 bp, Homo sapiens
aaaaaaccatgcatg

SEQ ID NO: 1675667 - DNA, 15 bp, Homo sapiens
aaaaaccatgcatgg

SEQ ID NO: 1675668 - DNA, 15 bp, Homo sapiens
aaaaccatgcatggt

SEQ ID NO: 1675669 - DNA, 15 bp, Homo sapiens
aaaccatgcatggtg

SEQ ID NO: 1675670 - DNA, 15 bp, Homo sapiens
aaccatgcatggtgc

SEQ ID NO: 1675671 - DNA, 15 bp, Homo sapiens
accatgcatggtgca

SEQ ID NO: 1675672 - DNA, 15 bp, Homo sapiens
ccatgcatggtgcat

SEQ ID NO: 1675673 - DNA, 15 bp, Homo sapiens
catgcatggtgcatc

SEQ ID NO: 1675674 - DNA, 15 bp, Homo sapiens
atgcatggtgcatca

SEQ ID NO: 1675675 - DNA, 15 bp, Homo sapiens
tgcatggtgcatcag

SEQ ID NO: 1675676 - DNA, 15 bp, Homo sapiens
gcatggtgcatcagc

SEQ ID NO: 1675677 - DNA, 15 bp, Homo sapiens
catggtgcatcagca

SEQ ID NO: 1675678 - DNA, 15 bp, Homo sapiens
atggtgcatcagcag

SEQ ID NO: 1675679 - DNA, 15 bp, Homo sapiens
tggtgcatcagcagc

SEQ ID NO: 1675680 - DNA, 15 bp, Homo sapiens
ggtgcatcagcagcc

SEQ ID NO: 1675681 - DNA, 15 bp, Homo sapiens
gtgcatcagcagccc

SEQ ID NO: 1675682 - DNA, 15 bp, Homo sapiens
tgcatcagcagccca

SEQ ID NO: 1675683 - DNA, 15 bp, Homo sapiens
gcatcagcagcccat

SEQ ID NO: 1675684 - DNA, 15 bp, Homo sapiens
catcagcagcccatg

SEQ ID NO: 1675685 - DNA, 15 bp, Homo sapiens
atcagcagcccatgg

SEQ ID NO: 1675686 - DNA, 15 bp, Homo sapiens
tcagcagcccatggc

SEQ ID NO: 1675687 - DNA, 15 bp, Homo sapiens
cagcagcccatggcc

SEQ ID NO: 1675688 - DNA, 15 bp, Homo sapiens
agcagcccatggcct

SEQ ID NO: 1675689 - DNA, 15 bp, Homo sapiens
gcagcccatggcctc

SEQ ID NO: 1675690 - DNA, 15 bp, Homo sapiens
cagcccatggcctct

SEQ ID NO: 1675691 - DNA, 15 bp, Homo sapiens
agcccatggcctctg

SEQ ID NO: 1675692 - DNA, 15 bp, Homo sapiens
gcccatggcctctgg

SEQ ID NO: 1675693 - DNA, 15 bp, Homo sapiens
cccatggcctctggc

SEQ ID NO: 1675694 - DNA, 15 bp, Homo sapiens
ccatggcctctggcc

SEQ ID NO: 1675695 - DNA, 15 bp, Homo sapiens
catggcctctggcca

SEQ ID NO: 1675696 - DNA, 15 bp, Homo sapiens
atggcctctggccag

SEQ ID NO: 1675697 - DNA, 15 bp, Homo sapiens
tggcctctggccagg

SEQ ID NO: 1675698 - DNA, 15 bp, Homo sapiens
ggcctctggccaggc

SEQ ID NO: 1675699 - DNA, 15 bp, Homo sapiens
gcctctggccaggca

SEQ ID NO: 1675700 - DNA, 15 bp, Homo sapiens
cctctggccaggcat

SEQ ID NO: 1675701 - DNA, 15 bp, Homo sapiens
ctctggccaggcatg

SEQ ID NO: 1675702 - DNA, 15 bp, Homo sapiens
tctggccaggcatgg

SEQ ID NO: 1675703 - DNA, 15 bp, Homo sapiens
ctggccaggcatggc

SEQ ID NO: 1675704 - DNA, 15 bp, Homo sapiens
tggccaggcatggcg

SEQ ID NO: 1675705 - DNA, 15 bp, Homo sapiens
ggccaggcatggcga

SEQ ID NO: 1675706 - DNA, 15 bp, Homo sapiens
gccaggcatggcgag

SEQ ID NO: 1675707 - DNA, 15 bp, Homo sapiens
ccaggcatggcgagg

SEQ ID NO: 1675708 - DNA, 15 bp, Homo sapiens
caggcatggcgaggc

SEQ ID NO: 1675709 - DNA, 15 bp, Homo sapiens
aggcatggcgaggct

SEQ ID NO: 1675710 - DNA, 15 bp, Homo sapiens
ggcatggcgaggctg

SEQ ID NO: 1675711 - DNA, 15 bp, Homo sapiens
gcatggcgaggctga

SEQ ID NO: 1675712 - DNA, 15 bp, Homo sapiens
catggcgaggctgag

SEQ ID NO: 1675713 - DNA, 15 bp, Homo sapiens
atggcgaggctgagg

SEQ ID NO: 1675714 - DNA, 15 bp, Homo sapiens
tggcgaggctgaggt

SEQ ID NO: 1675715 - DNA, 15 bp, Homo sapiens
ggcgaggctgaggtg

SEQ ID NO: 1675716 - DNA, 15 bp, Homo sapiens
gcgaggctgaggtgg

SEQ ID NO: 1675717 - DNA, 15 bp, Homo sapiens
cgaggctgaggtggg

SEQ ID NO: 1675718 - DNA, 15 bp, Homo sapiens
aggtgggaggatggt

SEQ ID NO: 1675719 - DNA, 15 bp, Homo sapiens
ggtgggaggatggtt

SEQ ID NO: 1675720 - DNA, 15 bp, Homo sapiens
gtgggaggatggttt

SEQ ID NO: 1675721 - DNA, 15 bp, Homo sapiens
tgggaggatggtttg

SEQ ID NO: 1675722 - DNA, 15 bp, Homo sapiens
gggaggatggtttga

SEQ ID NO: 1675723 - DNA, 15 bp, Homo sapiens
ggaggatggtttgag

SEQ ID NO: 1675724 - DNA, 15 bp, Homo sapiens
gaggatggtttgagc

SEQ ID NO: 1675725 - DNA, 15 bp, Homo sapiens
aggatggtttgagct

SEQ ID NO: 1675726 - DNA, 15 bp, Homo sapiens
ggatggtttgagctc

SEQ ID NO: 1675727 - DNA, 15 bp, Homo sapiens
gatggtttgagctca

SEQ ID NO: 1675728 - DNA, 15 bp, Homo sapiens
atggtttgagctcag

SEQ ID NO: 1675729 - DNA, 15 bp, Homo sapiens
tggtttgagctcagg

SEQ ID NO: 1675730 - DNA, 15 bp, Homo sapiens
ggtttgagctcaggc

SEQ ID NO: 1675731 - DNA, 15 bp, Homo sapiens
gtttgagctcaggca

SEQ ID NO: 1675732 - DNA, 15 bp, Homo sapiens
tttgagctcaggcat

SEQ ID NO: 1675733 - DNA, 15 bp, Homo sapiens
ttgagctcaggcatt

SEQ ID NO: 1675734 - DNA, 15 bp, Homo sapiens
tgagctcaggcattt

SEQ ID NO: 1675735 - DNA, 15 bp, Homo sapiens
gagctcaggcatttg

SEQ ID NO: 1675736 - DNA, 15 bp, Homo sapiens
agctcaggcatttga

SEQ ID NO: 1675737 - DNA, 15 bp, Homo sapiens
gctcaggcatttgag

SEQ ID NO: 1675738 - DNA, 15 bp, Homo sapiens
ctcaggcatttgagg

SEQ ID NO: 1675739 - DNA, 15 bp, Homo sapiens
tcaggcatttgaggc

SEQ ID NO: 1675740 - DNA, 15 bp, Homo sapiens
caggcatttgaggct

SEQ ID NO: 1675741 - DNA, 15 bp, Homo sapiens
aggcatttgaggctg

SEQ ID NO: 1675742 - DNA, 15 bp, Homo sapiens
ggcatttgaggctgt

SEQ ID NO: 1675743 - DNA, 15 bp, Homo sapiens
gcatttgaggctgtc

SEQ ID NO: 1675744 - DNA, 15 bp, Homo sapiens
catttgaggctgtcg

SEQ ID NO: 1675745 - DNA, 15 bp, Homo sapiens
atttgaggctgtcgt

SEQ ID NO: 1675746 - DNA, 15 bp, Homo sapiens
tttgaggctgtcgtg

SEQ ID NO: 1675747 - DNA, 15 bp, Homo sapiens
ttgaggctgtcgtga

SEQ ID NO: 1675748 - DNA, 15 bp, Homo sapiens
tgaggctgtcgtgag

SEQ ID NO: 1675749 - DNA, 15 bp, Homo sapiens
gaggctgtcgtgagc

SEQ ID NO: 1675750 - DNA, 15 bp, Homo sapiens
aggctgtcgtgagct

SEQ ID NO: 1675751 - DNA, 15 bp, Homo sapiens
ggctgtcgtgagcta

SEQ ID NO: 1675752 - DNA, 15 bp, Homo sapiens
gctgtcgtgagctat

SEQ ID NO: 1675753 - DNA, 15 bp, Homo sapiens
ctgtcgtgagctatg

SEQ ID NO: 1675754 - DNA, 15 bp, Homo sapiens
tgtcgtgagctatga

SEQ ID NO: 1675755 - DNA, 15 bp, Homo sapiens
gtcgtgagctatgat

SEQ ID NO: 1675756 - DNA, 15 bp, Homo sapiens
tcgtgagctatgatt

SEQ ID NO: 1675757 - DNA, 15 bp, Homo sapiens
cgtgagctatgatta

SEQ ID NO: 1675758 - DNA, 15 bp, Homo sapiens
gtgagctatgattat

SEQ ID NO: 1675759 - DNA, 15 bp, Homo sapiens
tgagctatgattatg

SEQ ID NO: 1675760 - DNA, 15 bp, Homo sapiens
gagctatgattatgc

SEQ ID NO: 1675761 - DNA, 15 bp, Homo sapiens
agctatgattatgcc

SEQ ID NO: 1675762 - DNA, 15 bp, Homo sapiens
gctatgattatgcca

SEQ ID NO: 1675763 - DNA, 15 bp, Homo sapiens
ctatgattatgccac

SEQ ID NO: 1675764 - DNA, 15 bp, Homo sapiens
tatgattatgccact

SEQ ID NO: 1675765 - DNA, 15 bp, Homo sapiens
atgattatgccactg

SEQ ID NO: 1675766 - DNA, 15 bp, Homo sapiens
tgattatgccactgc

SEQ ID NO: 1675767 - DNA, 15 bp, Homo sapiens
gattatgccactgct

SEQ ID NO: 1675768 - DNA, 15 bp, Homo sapiens
attatgccactgctt

SEQ ID NO: 1675769 - DNA, 15 bp, Homo sapiens
ttatgccactgcttt

SEQ ID NO: 1675770 - DNA, 15 bp, Homo sapiens
tatgccactgctttc

SEQ ID NO: 1675771 - DNA, 15 bp, Homo sapiens
atgccactgctttcc

SEQ ID NO: 1675772 - DNA, 15 bp, Homo sapiens
tgccactgctttcca

SEQ ID NO: 1675773 - DNA, 15 bp, Homo sapiens
gccactgctttccag

SEQ ID NO: 1675774 - DNA, 15 bp, Homo sapiens
ccactgctttccagc

SEQ ID NO: 1675775 - DNA, 15 bp, Homo sapiens
cactgctttccagcc

SEQ ID NO: 1675776 - DNA, 15 bp, Homo sapiens
actgctttccagcct

SEQ ID NO: 1675777 - DNA, 15 bp, Homo sapiens
ctgctttccagcctg

SEQ ID NO: 1675778 - DNA, 15 bp, Homo sapiens
tgctttccagcctgg

SEQ ID NO: 1675779 - DNA, 15 bp, Homo sapiens
gctttccagcctggg

SEQ ID NO: 1675780 - DNA, 15 bp, Homo sapiens
ctttccagcctgggc

SEQ ID NO: 1675781 - DNA, 15 bp, Homo sapiens
tttccagcctgggca

SEQ ID NO: 1675782 - DNA, 15 bp, Homo sapiens
ttccagcctgggcaa

SEQ ID NO: 1675783 - DNA, 15 bp, Homo sapiens
ctgggcaacatagta

SEQ ID NO: 1675784 - DNA, 15 bp, Homo sapiens
tgggcaacatagtaa

SEQ ID NO: 1675785 - DNA, 15 bp, Homo sapiens
caacatagtaagacc

SEQ ID NO: 1675786 - DNA, 15 bp, Homo sapiens
aacatagtaagaccc

SEQ ID NO: 1675787 - DNA, 15 bp, Homo sapiens
acatagtaagacccc

SEQ ID NO: 1675788 - DNA, 15 bp, Homo sapiens
catagtaagacccca

SEQ ID NO: 1675789 - DNA, 15 bp, Homo sapiens
atagtaagaccccat

SEQ ID NO: 1675790 - DNA, 15 bp, Homo sapiens
tagtaagaccccatc

SEQ ID NO: 1675791 - DNA, 15 bp, Homo sapiens
aagaccccatctctt

SEQ ID NO: 1675792 - DNA, 15 bp, Homo sapiens
agaccccatctctta

SEQ ID NO: 1675793 - DNA, 15 bp, Homo sapiens
gaccccatctcttaa

SEQ ID NO: 1675794 - DNA, 15 bp, Homo sapiens
accccatctcttaaa

SEQ ID NO: 1675795 - DNA, 15 bp, Homo sapiens
ccccatctcttaaaa

SEQ ID NO: 1675796 - DNA, 15 bp, Homo sapiens
cccatctcttaaaaa

SEQ ID NO: 1675797 - DNA, 15 bp, Homo sapiens
catctcttaaaaaat

SEQ ID NO: 1675798 - DNA, 15 bp, Homo sapiens
atctcttaaaaaatg

SEQ ID NO: 1675799 - DNA, 15 bp, Homo sapiens
tctcttaaaaaatga

SEQ ID NO: 1675800 - DNA, 15 bp, Homo sapiens
ctcttaaaaaatgaa

SEQ ID NO: 1675801 - DNA, 15 bp, Homo sapiens
tcttaaaaaatgaat

SEQ ID NO: 1675802 - DNA, 15 bp, Homo sapiens
cttaaaaaatgaatt

SEQ ID NO: 1675803 - DNA, 15 bp, Homo sapiens
ttaaaaaatgaattt

SEQ ID NO: 1675804 - DNA, 15 bp, Homo sapiens
taaaaaatgaatttg

SEQ ID NO: 1675805 - DNA, 15 bp, Homo sapiens
aaaaaatgaatttgg

SEQ ID NO: 1675806 - DNA, 15 bp, Homo sapiens
aaaaatgaatttggc

SEQ ID NO: 1675807 - DNA, 15 bp, Homo sapiens
aaaatgaatttggcc

SEQ ID NO: 1675808 - DNA, 15 bp, Homo sapiens
aaatgaatttggcca

SEQ ID NO: 1675809 - DNA, 15 bp, Homo sapiens
aatgaatttggccag

SEQ ID NO: 1675810 - DNA, 15 bp, Homo sapiens
atgaatttggccaga

SEQ ID NO: 1675811 - DNA, 15 bp, Homo sapiens
tgaatttggccagac

SEQ ID NO: 1675812 - DNA, 15 bp, Homo sapiens
gaatttggccagaca

SEQ ID NO: 1675813 - DNA, 15 bp, Homo sapiens
aatttggccagacac

SEQ ID NO: 1675814 - DNA, 15 bp, Homo sapiens
atttggccagacaca

SEQ ID NO: 1675815 - DNA, 15 bp, Homo sapiens
tttggccagacacag

SEQ ID NO: 1675816 - DNA, 15 bp, Homo sapiens
ttggccagacacagg

SEQ ID NO: 1675817 - DNA, 15 bp, Homo sapiens
tggccagacacaggt

SEQ ID NO: 1675818 - DNA, 15 bp, Homo sapiens
ggccagacacaggtg

SEQ ID NO: 1675819 - DNA, 15 bp, Homo sapiens
gccagacacaggtgc

SEQ ID NO: 1675820 - DNA, 15 bp, Homo sapiens
ccagacacaggtgcc

SEQ ID NO: 1675821 - DNA, 15 bp, Homo sapiens
cagacacaggtgcct

SEQ ID NO: 1675822 - DNA, 15 bp, Homo sapiens
agacacaggtgcctc

SEQ ID NO: 1675823 - DNA, 15 bp, Homo sapiens
gacacaggtgcctca

SEQ ID NO: 1675824 - DNA, 15 bp, Homo sapiens
acacaggtgcctcac

SEQ ID NO: 1675825 - DNA, 15 bp, Homo sapiens
cacaggtgcctcacg

SEQ ID NO: 1675826 - DNA, 15 bp, Homo sapiens
acaggtgcctcacgc

SEQ ID NO: 1675827 - DNA, 15 bp, Homo sapiens
caggtgcctcacgcc

SEQ ID NO: 1675828 - DNA, 15 bp, Homo sapiens
aggtgcctcacgcct

SEQ ID NO: 1675829 - DNA, 15 bp, Homo sapiens
ggtgcctcacgcctg

SEQ ID NO: 1675830 - DNA, 15 bp, Homo sapiens
gtgcctcacgcctgt

SEQ ID NO: 1675831 - DNA, 15 bp, Homo sapiens
tgcctcacgcctgta

SEQ ID NO: 1675832 - DNA, 15 bp, Homo sapiens
gcctcacgcctgtaa

SEQ ID NO: 1675833 - DNA, 15 bp, Homo sapiens
cctcacgcctgtaat

SEQ ID NO: 1675834 - DNA, 15 bp, Homo sapiens
ggaggctgagctgga

SEQ ID NO: 1675835 - DNA, 15 bp, Homo sapiens
gaggctgagctggat

SEQ ID NO: 1675836 - DNA, 15 bp, Homo sapiens
aggctgagctggatc

SEQ ID NO: 1675837 - DNA, 15 bp, Homo sapiens
ggctgagctggatca

SEQ ID NO: 1675838 - DNA, 15 bp, Homo sapiens
gctgagctggatcac

SEQ ID NO: 1675839 - DNA, 15 bp, Homo sapiens
ctgagctggatcact

SEQ ID NO: 1675840 - DNA, 15 bp, Homo sapiens
tgagctggatcactt

SEQ ID NO: 1675841 - DNA, 15 bp, Homo sapiens
gagctggatcacttg

SEQ ID NO: 1675842 - DNA, 15 bp, Homo sapiens
agctggatcacttga

SEQ ID NO: 1675843 - DNA, 15 bp, Homo sapiens
gctggatcacttgag

SEQ ID NO: 1675844 - DNA, 15 bp, Homo sapiens
ctggatcacttgagt

SEQ ID NO: 1675845 - DNA, 15 bp, Homo sapiens
tgagttcaggagttg

SEQ ID NO: 1675846 - DNA, 15 bp, Homo sapiens
gagttcaggagttgg

SEQ ID NO: 1675847 - DNA, 15 bp, Homo sapiens
agttcaggagttgga

SEQ ID NO: 1675848 - DNA, 15 bp, Homo sapiens
gttcaggagttggag

SEQ ID NO: 1675849 - DNA, 15 bp, Homo sapiens
ttcaggagttggaga

SEQ ID NO: 1675850 - DNA, 15 bp, Homo sapiens
gttggagaccaggcc

SEQ ID NO: 1675851 - DNA, 15 bp, Homo sapiens
ttggagaccaggcct

SEQ ID NO: 1675852 - DNA, 15 bp, Homo sapiens
tggagaccaggcctg

SEQ ID NO: 1675853 - DNA, 15 bp, Homo sapiens
ggagaccaggcctga

SEQ ID NO: 1675854 - DNA, 15 bp, Homo sapiens
gagaccaggcctgag

SEQ ID NO: 1675855 - DNA, 15 bp, Homo sapiens
agaccaggcctgagc

SEQ ID NO: 1675856 - DNA, 15 bp, Homo sapiens
gaccaggcctgagca

SEQ ID NO: 1675857 - DNA, 15 bp, Homo sapiens
accaggcctgagcaa

SEQ ID NO: 1675858 - DNA, 15 bp, Homo sapiens
ccaggcctgagcaac

SEQ ID NO: 1675859 - DNA, 15 bp, Homo sapiens
caggcctgagcaaca

SEQ ID NO: 1675860 - DNA, 15 bp, Homo sapiens
aggcctgagcaacaa

SEQ ID NO: 1675861 - DNA, 15 bp, Homo sapiens
ggcctgagcaacaaa

SEQ ID NO: 1675862 - DNA, 15 bp, Homo sapiens
gcctgagcaacaaag

SEQ ID NO: 1675863 - DNA, 15 bp, Homo sapiens
cctgagcaacaaagc

SEQ ID NO: 1675864 - DNA, 15 bp, Homo sapiens
ctgagcaacaaagcg

SEQ ID NO: 1675865 - DNA, 15 bp, Homo sapiens
tgagcaacaaagcga

SEQ ID NO: 1675866 - DNA, 15 bp, Homo sapiens
gagcaacaaagcgag

SEQ ID NO: 1675867 - DNA, 15 bp, Homo sapiens
agcaacaaagcgaga

SEQ ID NO: 1675868 - DNA, 15 bp, Homo sapiens
gcaacaaagcgagat

SEQ ID NO: 1675869 - DNA, 15 bp, Homo sapiens
caacaaagcgagatc

SEQ ID NO: 1675870 - DNA, 15 bp, Homo sapiens
aacaaagcgagatcc

SEQ ID NO: 1675871 - DNA, 15 bp, Homo sapiens
acaaagcgagatccc

SEQ ID NO: 1675872 - DNA, 15 bp, Homo sapiens
caaagcgagatccca

SEQ ID NO: 1675873 - DNA, 15 bp, Homo sapiens
aaagcgagatcccat

SEQ ID NO: 1675874 - DNA, 15 bp, Homo sapiens
aagcgagatcccatc

SEQ ID NO: 1675875 - DNA, 15 bp, Homo sapiens
agcgagatcccatct

SEQ ID NO: 1675876 - DNA, 15 bp, Homo sapiens
gcgagatcccatctc

SEQ ID NO: 1675877 - DNA, 15 bp, Homo sapiens
cgagatcccatctct

SEQ ID NO: 1675878 - DNA, 15 bp, Homo sapiens
gagatcccatctcta

SEQ ID NO: 1675879 - DNA, 15 bp, Homo sapiens
agatcccatctctac

SEQ ID NO: 1675880 - DNA, 15 bp, Homo sapiens
gatcccatctctaca

SEQ ID NO: 1675881 - DNA, 15 bp, Homo sapiens
atcccatctctacaa

SEQ ID NO: 1675882 - DNA, 15 bp, Homo sapiens
tcccatctctacaaa

SEQ ID NO: 1675883 - DNA, 15 bp, Homo sapiens
atctctacaaaaacc

SEQ ID NO: 1675884 - DNA, 15 bp, Homo sapiens
tctctacaaaaacca

SEQ ID NO: 1675885 - DNA, 15 bp, Homo sapiens
ctctacaaaaaccaa

SEQ ID NO: 1675886 - DNA, 15 bp, Homo sapiens
tctacaaaaaccaaa

SEQ ID NO: 1675887 - DNA, 15 bp, Homo sapiens
ctacaaaaaccaaaa

SEQ ID NO: 1675888 - DNA, 15 bp, Homo sapiens
tacaaaaaccaaaaa

SEQ ID NO: 1675889 - DNA, 15 bp, Homo sapiens
acaaaaaccaaaaag

SEQ ID NO: 1675890 - DNA, 15 bp, Homo sapiens
caaaaaccaaaaagt

SEQ ID NO: 1675891 - DNA, 15 bp, Homo sapiens
aaaaaccaaaaagtt

SEQ ID NO: 1675892 - DNA, 15 bp, Homo sapiens
aaaaccaaaaagtta

SEQ ID NO: 1675893 - DNA, 15 bp, Homo sapiens
aaaccaaaaagttaa

SEQ ID NO: 1675894 - DNA, 15 bp, Homo sapiens
aaccaaaaagttaaa

SEQ ID NO: 1675895 - DNA, 15 bp, Homo sapiens
accaaaaagttaaaa

SEQ ID NO: 1675896 - DNA, 15 bp, Homo sapiens
ccaaaaagttaaaaa

SEQ ID NO: 1675897 - DNA, 15 bp, Homo sapiens
caaaaagttaaaaat

SEQ ID NO: 1675898 - DNA, 15 bp, Homo sapiens
aaaaagttaaaaatc

SEQ ID NO: 1675899 - DNA, 15 bp, Homo sapiens
aaaagttaaaaatca

SEQ ID NO: 1675900 - DNA, 15 bp, Homo sapiens
aaagttaaaaatcag

SEQ ID NO: 1675901 - DNA, 15 bp, Homo sapiens
aagttaaaaatcagc

SEQ ID NO: 1675902 - DNA, 15 bp, Homo sapiens
agttaaaaatcagct

SEQ ID NO: 1675903 - DNA, 15 bp, Homo sapiens
gttaaaaatcagctg

SEQ ID NO: 1675904 - DNA, 15 bp, Homo sapiens
ttaaaaatcagctgg

SEQ ID NO: 1675905 - DNA, 15 bp, Homo sapiens
taaaaatcagctggg

SEQ ID NO: 1675906 - DNA, 15 bp, Homo sapiens
aaaaatcagctgggt

SEQ ID NO: 1675907 - DNA, 15 bp, Homo sapiens
aaaatcagctgggta

SEQ ID NO: 1675908 - DNA, 15 bp, Homo sapiens
aaatcagctgggtac

SEQ ID NO: 1675909 - DNA, 15 bp, Homo sapiens
aatcagctgggtacg

SEQ ID NO: 1675910 - DNA, 15 bp, Homo sapiens
atcagctgggtacgg

SEQ ID NO: 1675911 - DNA, 15 bp, Homo sapiens
tcagctgggtacggt

SEQ ID NO: 1675912 - DNA, 15 bp, Homo sapiens
cagctgggtacggtg

SEQ ID NO: 1675913 - DNA, 15 bp, Homo sapiens
agctgggtacggtgg

SEQ ID NO: 1675914 - DNA, 15 bp, Homo sapiens
gctgggtacggtggc

SEQ ID NO: 1675915 - DNA, 15 bp, Homo sapiens
ctgggtacggtggca

SEQ ID NO: 1675916 - DNA, 15 bp, Homo sapiens
tgggtacggtggcac

SEQ ID NO: 1675917 - DNA, 15 bp, Homo sapiens
gggtacggtggcacg

SEQ ID NO: 1675918 - DNA, 15 bp, Homo sapiens
ggtacggtggcacgt

SEQ ID NO: 1675919 - DNA, 15 bp, Homo sapiens
gtacggtggcacgtg

SEQ ID NO: 1675920 - DNA, 15 bp, Homo sapiens
tacggtggcacgtgc

SEQ ID NO: 1675921 - DNA, 15 bp, Homo sapiens
acggtggcacgtgcc

SEQ ID NO: 1675922 - DNA, 15 bp, Homo sapiens
cggtggcacgtgcct

SEQ ID NO: 1675923 - DNA, 15 bp, Homo sapiens
ggcacgtgcctgtga

SEQ ID NO: 1675924 - DNA, 15 bp, Homo sapiens
gcacgtgcctgtgat

SEQ ID NO: 1675925 - DNA, 15 bp, Homo sapiens
cacgtgcctgtgatc

SEQ ID NO: 1675926 - DNA, 15 bp, Homo sapiens
acgtgcctgtgatcc

SEQ ID NO: 1675927 - DNA, 15 bp, Homo sapiens
cgtgcctgtgatccc

SEQ ID NO: 1675928 - DNA, 15 bp, Homo sapiens
gtgcctgtgatccca

SEQ ID NO: 1675929 - DNA, 15 bp, Homo sapiens
tgcctgtgatcccag

SEQ ID NO: 1675930 - DNA, 15 bp, Homo sapiens
gcctgtgatcccagc

SEQ ID NO: 1675931 - DNA, 15 bp, Homo sapiens
tgatcccagctactt

SEQ ID NO: 1675932 - DNA, 15 bp, Homo sapiens
gatcccagctacttg

SEQ ID NO: 1675933 - DNA, 15 bp, Homo sapiens
ggcaggaggatcgcc

SEQ ID NO: 1675934 - DNA, 15 bp, Homo sapiens
gcaggaggatcgcct

SEQ ID NO: 1675935 - DNA, 15 bp, Homo sapiens
caggaggatcgcctg

SEQ ID NO: 1675936 - DNA, 15 bp, Homo sapiens
aggaggatcgcctga

SEQ ID NO: 1675937 - DNA, 15 bp, Homo sapiens
gaggatcgcctgagc

SEQ ID NO: 1675938 - DNA, 15 bp, Homo sapiens
aggatcgcctgagcc

SEQ ID NO: 1675939 - DNA, 15 bp, Homo sapiens
ggatcgcctgagccc

SEQ ID NO: 1675940 - DNA, 15 bp, Homo sapiens
gatcgcctgagccca

SEQ ID NO: 1675941 - DNA, 15 bp, Homo sapiens
atcgcctgagcccag

SEQ ID NO: 1675942 - DNA, 15 bp, Homo sapiens
tcgcctgagcccagg

SEQ ID NO: 1675943 - DNA, 15 bp, Homo sapiens
cgcctgagcccagga

SEQ ID NO: 1675944 - DNA, 15 bp, Homo sapiens
tgagcccaggaggtg

SEQ ID NO: 1675945 - DNA, 15 bp, Homo sapiens
gagcccaggaggtgg

SEQ ID NO: 1675946 - DNA, 15 bp, Homo sapiens
agcccaggaggtgga

SEQ ID NO: 1675947 - DNA, 15 bp, Homo sapiens
gcccaggaggtggag

SEQ ID NO: 1675948 - DNA, 15 bp, Homo sapiens
gttgcagtgagccat

SEQ ID NO: 1675949 - DNA, 15 bp, Homo sapiens
ttgcagtgagccatg

SEQ ID NO: 1675950 - DNA, 15 bp, Homo sapiens
agtgagccatgatcg

SEQ ID NO: 1675951 - DNA, 15 bp, Homo sapiens
gtgagccatgatcga

SEQ ID NO: 1675952 - DNA, 15 bp, Homo sapiens
tgagccatgatcgag

SEQ ID NO: 1675953 - DNA, 15 bp, Homo sapiens
gagccatgatcgagc

SEQ ID NO: 1675954 - DNA, 15 bp, Homo sapiens
agccatgatcgagcc

SEQ ID NO: 1675955 - DNA, 15 bp, Homo sapiens
gccatgatcgagcca

SEQ ID NO: 1675956 - DNA, 15 bp, Homo sapiens
ccatgatcgagccac

SEQ ID NO: 1675957 - DNA, 15 bp, Homo sapiens
catgatcgagccact

SEQ ID NO: 1675958 - DNA, 15 bp, Homo sapiens
atgatcgagccactg

SEQ ID NO: 1675959 - DNA, 15 bp, Homo sapiens
tgatcgagccactgc

SEQ ID NO: 1675960 - DNA, 15 bp, Homo sapiens
gatcgagccactgca

SEQ ID NO: 1675961 - DNA, 15 bp, Homo sapiens
atcgagccactgcac

SEQ ID NO: 1675962 - DNA, 15 bp, Homo sapiens
tcgagccactgcact

SEQ ID NO: 1675963 - DNA, 15 bp, Homo sapiens
cgagccactgcactc

SEQ ID NO: 1675964 - DNA, 15 bp, Homo sapiens
gagccactgcactcc

SEQ ID NO: 1675965 - DNA, 15 bp, Homo sapiens
agccactgcactcca

SEQ ID NO: 1675966 - DNA, 15 bp, Homo sapiens
gcctgggcaacagat

SEQ ID NO: 1675967 - DNA, 15 bp, Homo sapiens
cctgggcaacagatg

SEQ ID NO: 1675968 - DNA, 15 bp, Homo sapiens
ctgggcaacagatga

SEQ ID NO: 1675969 - DNA, 15 bp, Homo sapiens
tgggcaacagatgaa

SEQ ID NO: 1675970 - DNA, 15 bp, Homo sapiens
gggcaacagatgaag

SEQ ID NO: 1675971 - DNA, 15 bp, Homo sapiens
ggcaacagatgaaga

SEQ ID NO: 1675972 - DNA, 15 bp, Homo sapiens
gcaacagatgaagac

SEQ ID NO: 1675973 - DNA, 15 bp, Homo sapiens
caacagatgaagacc

SEQ ID NO: 1675974 - DNA, 15 bp, Homo sapiens
aacagatgaagaccc

SEQ ID NO: 1675975 - DNA, 15 bp, Homo sapiens
acagatgaagaccct

SEQ ID NO: 1675976 - DNA, 15 bp, Homo sapiens
cagatgaagacccta

SEQ ID NO: 1675977 - DNA, 15 bp, Homo sapiens
agatgaagaccctat

SEQ ID NO: 1675978 - DNA, 15 bp, Homo sapiens
gatgaagaccctatt

SEQ ID NO: 1675979 - DNA, 15 bp, Homo sapiens
atgaagaccctattt

SEQ ID NO: 1675980 - DNA, 15 bp, Homo sapiens
tgaagaccctatttc

SEQ ID NO: 1675981 - DNA, 15 bp, Homo sapiens
gaagaccctatttca

SEQ ID NO: 1675982 - DNA, 15 bp, Homo sapiens
aagaccctatttcag

SEQ ID NO: 1675983 - DNA, 15 bp, Homo sapiens
agaccctatttcaga

SEQ ID NO: 1675984 - DNA, 15 bp, Homo sapiens
gaccctatttcagaa

SEQ ID NO: 1675985 - DNA, 15 bp, Homo sapiens
accctatttcagaaa

SEQ ID NO: 1675986 - DNA, 15 bp, Homo sapiens
ccctatttcagaaat

SEQ ID NO: 1675987 - DNA, 15 bp, Homo sapiens
cctatttcagaaata

SEQ ID NO: 1675988 - DNA, 15 bp, Homo sapiens
ctatttcagaaatac

SEQ ID NO: 1675989 - DNA, 15 bp, Homo sapiens
tatttcagaaataca

SEQ ID NO: 1675990 - DNA, 15 bp, Homo sapiens
atttcagaaatacaa

SEQ ID NO: 1675991 - DNA, 15 bp, Homo sapiens
tttcagaaatacaac

SEQ ID NO: 1675992 - DNA, 15 bp, Homo sapiens
ttcagaaatacaact

SEQ ID NO: 1675993 - DNA, 15 bp, Homo sapiens
tcagaaatacaacta

SEQ ID NO: 1675994 - DNA, 15 bp, Homo sapiens
agaaatacaactata

SEQ ID NO: 1675995 - DNA, 15 bp, Homo sapiens
gaaatacaactataa

SEQ ID NO: 1675996 - DNA, 15 bp, Homo sapiens
aaatacaactataaa

SEQ ID NO: 1675997 - DNA, 15 bp, Homo sapiens
aatacaactataaaa

SEQ ID NO: 1675998 - DNA, 15 bp, Homo sapiens
atacaactataaaaa

SEQ ID NO: 1675999 - DNA, 15 bp, Homo sapiens
tacaactataaaaaa

SEQ ID NO: 1676000 - DNA, 15 bp, Homo sapiens
acaactataaaaaaa

SEQ ID NO: 1676001 - DNA, 15 bp, Homo sapiens
caactataaaaaaat

SEQ ID NO: 1676002 - DNA, 15 bp, Homo sapiens
aactataaaaaaata

SEQ ID NO: 1676003 - DNA, 15 bp, Homo sapiens
actataaaaaaataa

SEQ ID NO: 1676004 - DNA, 15 bp, Homo sapiens
ctataaaaaaataaa

SEQ ID NO: 1676005 - DNA, 15 bp, Homo sapiens
tataaaaaaataaat

SEQ ID NO: 1676006 - DNA, 15 bp, Homo sapiens
ataaaaaaataaata

SEQ ID NO: 1676007 - DNA, 15 bp, Homo sapiens
taaaaaaataaataa

SEQ ID NO: 1676008 - DNA, 15 bp, Homo sapiens
aaaaataaataaatc

SEQ ID NO: 1676009 - DNA, 15 bp, Homo sapiens
aaaataaataaatcc

SEQ ID NO: 1676010 - DNA, 15 bp, Homo sapiens
aaataaataaatcct

SEQ ID NO: 1676011 - DNA, 15 bp, Homo sapiens
aataaataaatcctc

SEQ ID NO: 1676012 - DNA, 15 bp, Homo sapiens
ataaataaatcctcc

SEQ ID NO: 1676013 - DNA, 15 bp, Homo sapiens
taaataaatcctcca

SEQ ID NO: 1676014 - DNA, 15 bp, Homo sapiens
aaataaatcctccag

SEQ ID NO: 1676015 - DNA, 15 bp, Homo sapiens
aataaatcctccagt

SEQ ID NO: 1676016 - DNA, 15 bp, Homo sapiens
ataaatcctccagtc

SEQ ID NO: 1676017 - DNA, 15 bp, Homo sapiens
taaatcctccagtct

SEQ ID NO: 1676018 - DNA, 15 bp, Homo sapiens
aaatcctccagtctg

SEQ ID NO: 1676019 - DNA, 15 bp, Homo sapiens
aatcctccagtctgg

SEQ ID NO: 1676020 - DNA, 15 bp, Homo sapiens
atcctccagtctgga

SEQ ID NO: 1676021 - DNA, 15 bp, Homo sapiens
tcctccagtctggat

SEQ ID NO: 1676022 - DNA, 15 bp, Homo sapiens
cctccagtctggatc

SEQ ID NO: 1676023 - DNA, 15 bp, Homo sapiens
ctccagtctggatcg

SEQ ID NO: 1676024 - DNA, 15 bp, Homo sapiens
tccagtctggatcgt

SEQ ID NO: 1676025 - DNA, 15 bp, Homo sapiens
ccagtctggatcgtt

SEQ ID NO: 1676026 - DNA, 15 bp, Homo sapiens
cagtctggatcgttt

SEQ ID NO: 1676027 - DNA, 15 bp, Homo sapiens
agtctggatcgtttg

SEQ ID NO: 1676028 - DNA, 15 bp, Homo sapiens
gtctggatcgtttga

SEQ ID NO: 1676029 - DNA, 15 bp, Homo sapiens
tctggatcgtttgac

SEQ ID NO: 1676030 - DNA, 15 bp, Homo sapiens
ctggatcgtttgacg

SEQ ID NO: 1676031 - DNA, 15 bp, Homo sapiens
tggatcgtttgacgg

SEQ ID NO: 1676032 - DNA, 15 bp, Homo sapiens
ggatcgtttgacggg

SEQ ID NO: 1676033 - DNA, 15 bp, Homo sapiens
gatcgtttgacggga

SEQ ID NO: 1676034 - DNA, 15 bp, Homo sapiens
atcgtttgacgggac

SEQ ID NO: 1676035 - DNA, 15 bp, Homo sapiens
tcgtttgacgggact

SEQ ID NO: 1676036 - DNA, 15 bp, Homo sapiens
cgtttgacgggactt

SEQ ID NO: 1676037 - DNA, 15 bp, Homo sapiens
gtttgacgggacttc

SEQ ID NO: 1676038 - DNA, 15 bp, Homo sapiens
tttgacgggacttca

SEQ ID NO: 1676039 - DNA, 15 bp, Homo sapiens
ttgacgggacttcag

SEQ ID NO: 1676040 - DNA, 15 bp, Homo sapiens
tgacgggacttcagg

SEQ ID NO: 1676041 - DNA, 15 bp, Homo sapiens
gacgggacttcaggt

SEQ ID NO: 1676042 - DNA, 15 bp, Homo sapiens
acgggacttcaggtt

SEQ ID NO: 1676043 - DNA, 15 bp, Homo sapiens
cgggacttcaggttc

SEQ ID NO: 1676044 - DNA, 15 bp, Homo sapiens
gggacttcaggttct

SEQ ID NO: 1676045 - DNA, 15 bp, Homo sapiens
ggacttcaggttctt

SEQ ID NO: 1676046 - DNA, 15 bp, Homo sapiens
gacttcaggttcttt

SEQ ID NO: 1676047 - DNA, 15 bp, Homo sapiens
acttcaggttctttc

SEQ ID NO: 1676048 - DNA, 15 bp, Homo sapiens
cttcaggttctttct

SEQ ID NO: 1676049 - DNA, 15 bp, Homo sapiens
ttcaggttctttctg

SEQ ID NO: 1676050 - DNA, 15 bp, Homo sapiens
tcaggttctttctga

SEQ ID NO: 1676051 - DNA, 15 bp, Homo sapiens
caggttctttctgaa

SEQ ID NO: 1676052 - DNA, 15 bp, Homo sapiens
aggttctttctgaaa

SEQ ID NO: 1676053 - DNA, 15 bp, Homo sapiens
ggttctttctgaaat

SEQ ID NO: 1676054 - DNA, 15 bp, Homo sapiens
gttctttctgaaatc

SEQ ID NO: 1676055 - DNA, 15 bp, Homo sapiens
ttctttctgaaatcg

SEQ ID NO: 1676056 - DNA, 15 bp, Homo sapiens
tctttctgaaatcgc

SEQ ID NO: 1676057 - DNA, 15 bp, Homo sapiens
ctttctgaaatcgcc

SEQ ID NO: 1676058 - DNA, 15 bp, Homo sapiens
tttctgaaatcgccg

SEQ ID NO: 1676059 - DNA, 15 bp, Homo sapiens
ttctgaaatcgccgt

SEQ ID NO: 1676060 - DNA, 15 bp, Homo sapiens
tctgaaatcgccgtg

SEQ ID NO: 1676061 - DNA, 15 bp, Homo sapiens
ctgaaatcgccgtgt

SEQ ID NO: 1676062 - DNA, 15 bp, Homo sapiens
tgaaatcgccgtgtt

SEQ ID NO: 1676063 - DNA, 15 bp, Homo sapiens
gaaatcgccgtgtta

SEQ ID NO: 1676064 - DNA, 15 bp, Homo sapiens
aaatcgccgtgttac

SEQ ID NO: 1676065 - DNA, 15 bp, Homo sapiens
aatcgccgtgttact

SEQ ID NO: 1676066 - DNA, 15 bp, Homo sapiens
atcgccgtgttactg

SEQ ID NO: 1676067 - DNA, 15 bp, Homo sapiens
tcgccgtgttactgt

SEQ ID NO: 1676068 - DNA, 15 bp, Homo sapiens
cgccgtgttactgtt

SEQ ID NO: 1676069 - DNA, 15 bp, Homo sapiens
gccgtgttactgttg

SEQ ID NO: 1676070 - DNA, 15 bp, Homo sapiens
ccgtgttactgttgc

SEQ ID NO: 1676071 - DNA, 15 bp, Homo sapiens
cgtgttactgttgca

SEQ ID NO: 1676072 - DNA, 15 bp, Homo sapiens
gtgttactgttgcac

SEQ ID NO: 1676073 - DNA, 15 bp, Homo sapiens
tgttactgttgcact

SEQ ID NO: 1676074 - DNA, 15 bp, Homo sapiens
gttactgttgcactg

SEQ ID NO: 1676075 - DNA, 15 bp, Homo sapiens
ttactgttgcactga

SEQ ID NO: 1676076 - DNA, 15 bp, Homo sapiens
tactgttgcactgat

SEQ ID NO: 1676077 - DNA, 15 bp, Homo sapiens
actgttgcactgatg

SEQ ID NO: 1676078 - DNA, 15 bp, Homo sapiens
ctgttgcactgatgt

SEQ ID NO: 1676079 - DNA, 15 bp, Homo sapiens
tgttgcactgatgtc

SEQ ID NO: 1676080 - DNA, 15 bp, Homo sapiens
gttgcactgatgtcc

SEQ ID NO: 1676081 - DNA, 15 bp, Homo sapiens
ttgcactgatgtccg

SEQ ID NO: 1676082 - DNA, 15 bp, Homo sapiens
tgcactgatgtccgg

SEQ ID NO: 1676083 - DNA, 15 bp, Homo sapiens
gcactgatgtccgga

SEQ ID NO: 1676084 - DNA, 15 bp, Homo sapiens
cactgatgtccggag

SEQ ID NO: 1676085 - DNA, 15 bp, Homo sapiens
actgatgtccggaga

SEQ ID NO: 1676086 - DNA, 15 bp, Homo sapiens
ctgatgtccggagag

SEQ ID NO: 1676087 - DNA, 15 bp, Homo sapiens
tgatgtccggagaga

SEQ ID NO: 1676088 - DNA, 15 bp, Homo sapiens
gatgtccggagagac

SEQ ID NO: 1676089 - DNA, 15 bp, Homo sapiens
atgtccggagagaca

SEQ ID NO: 1676090 - DNA, 15 bp, Homo sapiens
tgtccggagagacag

SEQ ID NO: 1676091 - DNA, 15 bp, Homo sapiens
gtccggagagacagt

SEQ ID NO: 1676092 - DNA, 15 bp, Homo sapiens
tccggagagacagtg

SEQ ID NO: 1676093 - DNA, 15 bp, Homo sapiens
ccggagagacagtga

SEQ ID NO: 1676094 - DNA, 15 bp, Homo sapiens
cggagagacagtgac

SEQ ID NO: 1676095 - DNA, 15 bp, Homo sapiens
ggagagacagtgaca

SEQ ID NO: 1676096 - DNA, 15 bp, Homo sapiens
gagagacagtgacag

SEQ ID NO: 1676097 - DNA, 15 bp, Homo sapiens
agagacagtgacagc

SEQ ID NO: 1676098 - DNA, 15 bp, Homo sapiens
gagacagtgacagcc

SEQ ID NO: 1676099 - DNA, 15 bp, Homo sapiens
agacagtgacagcct

SEQ ID NO: 1676100 - DNA, 15 bp, Homo sapiens
gacagtgacagcctc

SEQ ID NO: 1676101 - DNA, 15 bp, Homo sapiens
acagtgacagcctcc

SEQ ID NO: 1676102 - DNA, 15 bp, Homo sapiens
cagtgacagcctccg

SEQ ID NO: 1676103 - DNA, 15 bp, Homo sapiens
agtgacagcctccgt

SEQ ID NO: 1676104 - DNA, 15 bp, Homo sapiens
gtgacagcctccgtc

SEQ ID NO: 1676105 - DNA, 15 bp, Homo sapiens
tgacagcctccgtca

SEQ ID NO: 1676106 - DNA, 15 bp, Homo sapiens
gacagcctccgtcag

SEQ ID NO: 1676107 - DNA, 15 bp, Homo sapiens
acagcctccgtcaga

SEQ ID NO: 1676108 - DNA, 15 bp, Homo sapiens
cagcctccgtcagac

SEQ ID NO: 1676109 - DNA, 15 bp, Homo sapiens
agcctccgtcagact

SEQ ID NO: 1676110 - DNA, 15 bp, Homo sapiens
gcctccgtcagactc

SEQ ID NO: 1676111 - DNA, 15 bp, Homo sapiens
cctccgtcagactcc

SEQ ID NO: 1676112 - DNA, 15 bp, Homo sapiens
ctccgtcagactccc

SEQ ID NO: 1676113 - DNA, 15 bp, Homo sapiens
tccgtcagactcccg

SEQ ID NO: 1676114 - DNA, 15 bp, Homo sapiens
ccgtcagactcccgc

SEQ ID NO: 1676115 - DNA, 15 bp, Homo sapiens
cgtcagactcccgcg

SEQ ID NO: 1676116 - DNA, 15 bp, Homo sapiens
gtcagactcccgcgt

SEQ ID NO: 1676117 - DNA, 15 bp, Homo sapiens
tcagactcccgcgtg

SEQ ID NO: 1676118 - DNA, 15 bp, Homo sapiens
cagactcccgcgtga

SEQ ID NO: 1676119 - DNA, 15 bp, Homo sapiens
agactcccgcgtgaa

SEQ ID NO: 1676120 - DNA, 15 bp, Homo sapiens
gactcccgcgtgaag

SEQ ID NO: 1676121 - DNA, 15 bp, Homo sapiens
actcccgcgtgaaga

SEQ ID NO: 1676122 - DNA, 15 bp, Homo sapiens
ctcccgcgtgaagat

SEQ ID NO: 1676123 - DNA, 15 bp, Homo sapiens
tcccgcgtgaagatg

SEQ ID NO: 1676124 - DNA, 15 bp, Homo sapiens
cccgcgtgaagatgt

SEQ ID NO: 1676125 - DNA, 15 bp, Homo sapiens
ccgcgtgaagatgtc

SEQ ID NO: 1676126 - DNA, 15 bp, Homo sapiens
cgcgtgaagatgtca

SEQ ID NO: 1676127 - DNA, 15 bp, Homo sapiens
gcgtgaagatgtcac

SEQ ID NO: 1676128 - DNA, 15 bp, Homo sapiens
cgtgaagatgtcaca

SEQ ID NO: 1676129 - DNA, 15 bp, Homo sapiens
gtgaagatgtcacaa

SEQ ID NO: 1676130 - DNA, 15 bp, Homo sapiens
tgaagatgtcacaag

SEQ ID NO: 1676131 - DNA, 15 bp, Homo sapiens
gaagatgtcacaagg

SEQ ID NO: 1676132 - DNA, 15 bp, Homo sapiens
aagatgtcacaaggg

SEQ ID NO: 1676133 - DNA, 15 bp, Homo sapiens
agatgtcacaaggga

SEQ ID NO: 1676134 - DNA, 15 bp, Homo sapiens
gatgtcacaagggat

SEQ ID NO: 1676135 - DNA, 15 bp, Homo sapiens
atgtcacaagggatt

SEQ ID NO: 1676136 - DNA, 15 bp, Homo sapiens
tgtcacaagggattg

SEQ ID NO: 1676137 - DNA, 15 bp, Homo sapiens
gtcacaagggattgg

SEQ ID NO: 1676138 - DNA, 15 bp, Homo sapiens
tcacaagggattggc

SEQ ID NO: 1676139 - DNA, 15 bp, Homo sapiens
cacaagggattggca

SEQ ID NO: 1676140 - DNA, 15 bp, Homo sapiens
acaagggattggcaa

SEQ ID NO: 1676141 - DNA, 15 bp, Homo sapiens
caagggattggcaat

SEQ ID NO: 1676142 - DNA, 15 bp, Homo sapiens
aagggattggcaatt

SEQ ID NO: 1676143 - DNA, 15 bp, Homo sapiens
agggattggcaattg

SEQ ID NO: 1676144 - DNA, 15 bp, Homo sapiens
gggattggcaattgt

SEQ ID NO: 1676145 - DNA, 15 bp, Homo sapiens
ggattggcaattgtc

SEQ ID NO: 1676146 - DNA, 15 bp, Homo sapiens
gattggcaattgtcc

SEQ ID NO: 1676147 - DNA, 15 bp, Homo sapiens
attggcaattgtccc

SEQ ID NO: 1676148 - DNA, 15 bp, Homo sapiens
ttggcaattgtcccc

SEQ ID NO: 1676149 - DNA, 15 bp, Homo sapiens
tggcaattgtcccca

SEQ ID NO: 1676150 - DNA, 15 bp, Homo sapiens
ggcaattgtccccag

SEQ ID NO: 1676151 - DNA, 15 bp, Homo sapiens
gcaattgtccccagg

SEQ ID NO: 1676152 - DNA, 15 bp, Homo sapiens
caattgtccccaggg

SEQ ID NO: 1676153 - DNA, 15 bp, Homo sapiens
aattgtccccaggga

SEQ ID NO: 1676154 - DNA, 15 bp, Homo sapiens
attgtccccagggac

SEQ ID NO: 1676155 - DNA, 15 bp, Homo sapiens
ttgtccccagggaca

SEQ ID NO: 1676156 - DNA, 15 bp, Homo sapiens
tgtccccagggacaa

SEQ ID NO: 1676157 - DNA, 15 bp, Homo sapiens
gtccccagggacaaa

SEQ ID NO: 1676158 - DNA, 15 bp, Homo sapiens
tccccagggacaaaa

SEQ ID NO: 1676159 - DNA, 15 bp, Homo sapiens
ccccagggacaaaac

SEQ ID NO: 1676160 - DNA, 15 bp, Homo sapiens
cccagggacaaaaca

SEQ ID NO: 1676161 - DNA, 15 bp, Homo sapiens
ccagggacaaaacac

SEQ ID NO: 1676162 - DNA, 15 bp, Homo sapiens
cagggacaaaacact

SEQ ID NO: 1676163 - DNA, 15 bp, Homo sapiens
agggacaaaacactg

SEQ ID NO: 1676164 - DNA, 15 bp, Homo sapiens
gggacaaaacactgt

SEQ ID NO: 1676165 - DNA, 15 bp, Homo sapiens
ggacaaaacactgtg

SEQ ID NO: 1676166 - DNA, 15 bp, Homo sapiens
gacaaaacactgtgt

SEQ ID NO: 1676167 - DNA, 15 bp, Homo sapiens
acaaaacactgtgtc

SEQ ID NO: 1676168 - DNA, 15 bp, Homo sapiens
caaaacactgtgtcc

SEQ ID NO: 1676169 - DNA, 15 bp, Homo sapiens
aaaacactgtgtccc

SEQ ID NO: 1676170 - DNA, 15 bp, Homo sapiens
aaacactgtgtcccc

SEQ ID NO: 1676171 - DNA, 15 bp, Homo sapiens
aacactgtgtccccc

SEQ ID NO: 1676172 - DNA, 15 bp, Homo sapiens
acactgtgtcccccc

SEQ ID NO: 1676173 - DNA, 15 bp, Homo sapiens
cactgtgtccccccc

SEQ ID NO: 1676174 - DNA, 15 bp, Homo sapiens
actgtgtccccccca

SEQ ID NO: 1676175 - DNA, 15 bp, Homo sapiens
ctgtgtcccccccag

SEQ ID NO: 1676176 - DNA, 15 bp, Homo sapiens
tgtgtcccccccagt

SEQ ID NO: 1676177 - DNA, 15 bp, Homo sapiens
gtgtcccccccagtg

SEQ ID NO: 1676178 - DNA, 15 bp, Homo sapiens
tgtcccccccagtgc

SEQ ID NO: 1676179 - DNA, 15 bp, Homo sapiens
gtcccccccagtgca

SEQ ID NO: 1676180 - DNA, 15 bp, Homo sapiens
tcccccccagtgcag

SEQ ID NO: 1676181 - DNA, 15 bp, Homo sapiens
cccccccagtgcagg

SEQ ID NO: 1676182 - DNA, 15 bp, Homo sapiens
ccccccagtgcaggg

SEQ ID NO: 1676183 - DNA, 15 bp, Homo sapiens
cccccagtgcaggga

SEQ ID NO: 1676184 - DNA, 15 bp, Homo sapiens
ccccagtgcagggaa

SEQ ID NO: 1676185 - DNA, 15 bp, Homo sapiens
cccagtgcagggaac

SEQ ID NO: 1676186 - DNA, 15 bp, Homo sapiens
ccagtgcagggaacc

SEQ ID NO: 1676187 - DNA, 15 bp, Homo sapiens
cagtgcagggaaccg

SEQ ID NO: 1676188 - DNA, 15 bp, Homo sapiens
agtgcagggaaccgt

SEQ ID NO: 1676189 - DNA, 15 bp, Homo sapiens
gtgcagggaaccgtg

SEQ ID NO: 1676190 - DNA, 15 bp, Homo sapiens
tgcagggaaccgtga

SEQ ID NO: 1676191 - DNA, 15 bp, Homo sapiens
gcagggaaccgtgat

SEQ ID NO: 1676192 - DNA, 15 bp, Homo sapiens
cagggaaccgtgata

SEQ ID NO: 1676193 - DNA, 15 bp, Homo sapiens
agggaaccgtgataa

SEQ ID NO: 1676194 - DNA, 15 bp, Homo sapiens
gggaaccgtgataag

SEQ ID NO: 1676195 - DNA, 15 bp, Homo sapiens
ggaaccgtgataagc

SEQ ID NO: 1676196 - DNA, 15 bp, Homo sapiens
gaaccgtgataagcc

SEQ ID NO: 1676197 - DNA, 15 bp, Homo sapiens
aaccgtgataagcct

SEQ ID NO: 1676198 - DNA, 15 bp, Homo sapiens
accgtgataagcctt

SEQ ID NO: 1676199 - DNA, 15 bp, Homo sapiens
ccgtgataagccttt

SEQ ID NO: 1676200 - DNA, 15 bp, Homo sapiens
cgtgataagcctttc

SEQ ID NO: 1676201 - DNA, 15 bp, Homo sapiens
gtgataagcctttct

SEQ ID NO: 1676202 - DNA, 15 bp, Homo sapiens
tgataagcctttctg

SEQ ID NO: 1676203 - DNA, 15 bp, Homo sapiens
gataagcctttctgg

SEQ ID NO: 1676204 - DNA, 15 bp, Homo sapiens
ataagcctttctggt

SEQ ID NO: 1676205 - DNA, 15 bp, Homo sapiens
taagcctttctggtt

SEQ ID NO: 1676206 - DNA, 15 bp, Homo sapiens
aagcctttctggttt

SEQ ID NO: 1676207 - DNA, 15 bp, Homo sapiens
agcctttctggtttc

SEQ ID NO: 1676208 - DNA, 15 bp, Homo sapiens
gcctttctggtttcg

SEQ ID NO: 1676209 - DNA, 15 bp, Homo sapiens
cctttctggtttcgg

SEQ ID NO: 1676210 - DNA, 15 bp, Homo sapiens
ctttctggtttcgga

SEQ ID NO: 1676211 - DNA, 15 bp, Homo sapiens
tttctggtttcggag

SEQ ID NO: 1676212 - DNA, 15 bp, Homo sapiens
ttctggtttcggagc

SEQ ID NO: 1676213 - DNA, 15 bp, Homo sapiens
tctggtttcggagca

SEQ ID NO: 1676214 - DNA, 15 bp, Homo sapiens
ctggtttcggagcac

SEQ ID NO: 1676215 - DNA, 15 bp, Homo sapiens
tggtttcggagcacg

SEQ ID NO: 1676216 - DNA, 15 bp, Homo sapiens
ggtttcggagcacgt

SEQ ID NO: 1676217 - DNA, 15 bp, Homo sapiens
gtttcggagcacgta

SEQ ID NO: 1676218 - DNA, 15 bp, Homo sapiens
tttcggagcacgtaa

SEQ ID NO: 1676219 - DNA, 15 bp, Homo sapiens
ttcggagcacgtaaa

SEQ ID NO: 1676220 - DNA, 15 bp, Homo sapiens
tcggagcacgtaaat

SEQ ID NO: 1676221 - DNA, 15 bp, Homo sapiens
cggagcacgtaaatg

SEQ ID NO: 1676222 - DNA, 15 bp, Homo sapiens
ggagcacgtaaatgc

SEQ ID NO: 1676223 - DNA, 15 bp, Homo sapiens
gagcacgtaaatgcg

SEQ ID NO: 1676224 - DNA, 15 bp, Homo sapiens
agcacgtaaatgcgt

SEQ ID NO: 1676225 - DNA, 15 bp, Homo sapiens
gcacgtaaatgcgtc

SEQ ID NO: 1676226 - DNA, 15 bp, Homo sapiens
cacgtaaatgcgtcc

SEQ ID NO: 1676227 - DNA, 15 bp, Homo sapiens
acgtaaatgcgtccc

SEQ ID NO: 1676228 - DNA, 15 bp, Homo sapiens
cgtaaatgcgtccct

SEQ ID NO: 1676229 - DNA, 15 bp, Homo sapiens
gtaaatgcgtccctg

SEQ ID NO: 1676230 - DNA, 15 bp, Homo sapiens
taaatgcgtccctgt

SEQ ID NO: 1676231 - DNA, 15 bp, Homo sapiens
aaatgcgtccctgta

SEQ ID NO: 1676232 - DNA, 15 bp, Homo sapiens
aatgcgtccctgtac

SEQ ID NO: 1676233 - DNA, 15 bp, Homo sapiens
atgcgtccctgtaca

SEQ ID NO: 1676234 - DNA, 15 bp, Homo sapiens
tgcgtccctgtacag

SEQ ID NO: 1676235 - DNA, 15 bp, Homo sapiens
gcgtccctgtacaga

SEQ ID NO: 1676236 - DNA, 15 bp, Homo sapiens
cgtccctgtacagat

SEQ ID NO: 1676237 - DNA, 15 bp, Homo sapiens
gtccctgtacagata

SEQ ID NO: 1676238 - DNA, 15 bp, Homo sapiens
tccctgtacagatag

SEQ ID NO: 1676239 - DNA, 15 bp, Homo sapiens
ccctgtacagatagt

SEQ ID NO: 1676240 - DNA, 15 bp, Homo sapiens
cctgtacagatagtg

SEQ ID NO: 1676241 - DNA, 15 bp, Homo sapiens
ctgtacagatagtgg

SEQ ID NO: 1676242 - DNA, 15 bp, Homo sapiens
tgtacagatagtggg

SEQ ID NO: 1676243 - DNA, 15 bp, Homo sapiens
gtacagatagtgggg

SEQ ID NO: 1676244 - DNA, 15 bp, Homo sapiens
tacagatagtgggga

SEQ ID NO: 1676245 - DNA, 15 bp, Homo sapiens
acagatagtggggat

SEQ ID NO: 1676246 - DNA, 15 bp, Homo sapiens
cagatagtggggatt

SEQ ID NO: 1676247 - DNA, 15 bp, Homo sapiens
agatagtggggattt

SEQ ID NO: 1676248 - DNA, 15 bp, Homo sapiens
gatagtggggatttt

SEQ ID NO: 1676249 - DNA, 15 bp, Homo sapiens
atagtggggattttt

SEQ ID NO: 1676250 - DNA, 15 bp, Homo sapiens
tagtggggatttttt

SEQ ID NO: 1676251 - DNA, 15 bp, Homo sapiens
agtggggattttttg

SEQ ID NO: 1676252 - DNA, 15 bp, Homo sapiens
gtggggattttttgt

SEQ ID NO: 1676253 - DNA, 15 bp, Homo sapiens
tggggattttttgtt

SEQ ID NO: 1676254 - DNA, 15 bp, Homo sapiens
ggggattttttgtta

SEQ ID NO: 1676255 - DNA, 15 bp, Homo sapiens
gggattttttgttat

SEQ ID NO: 1676256 - DNA, 15 bp, Homo sapiens
ggattttttgttatg

SEQ ID NO: 1676257 - DNA, 15 bp, Homo sapiens
gattttttgttatgt

SEQ ID NO: 1676258 - DNA, 15 bp, Homo sapiens
attttttgttatgtt

SEQ ID NO: 1676259 - DNA, 15 bp, Homo sapiens
ttttttgttatgttt

SEQ ID NO: 1676260 - DNA, 15 bp, Homo sapiens
tttttgttatgtttg

SEQ ID NO: 1676261 - DNA, 15 bp, Homo sapiens
ttttgttatgtttgc

SEQ ID NO: 1676262 - DNA, 15 bp, Homo sapiens
tttgttatgtttgca

SEQ ID NO: 1676263 - DNA, 15 bp, Homo sapiens
ttgttatgtttgcac

SEQ ID NO: 1676264 - DNA, 15 bp, Homo sapiens
tgttatgtttgcact

SEQ ID NO: 1676265 - DNA, 15 bp, Homo sapiens
gttatgtttgcactt

SEQ ID NO: 1676266 - DNA, 15 bp, Homo sapiens
ttatgtttgcacttt

SEQ ID NO: 1676267 - DNA, 15 bp, Homo sapiens
tatgtttgcactttg

SEQ ID NO: 1676268 - DNA, 15 bp, Homo sapiens
atgtttgcactttgt

SEQ ID NO: 1676269 - DNA, 15 bp, Homo sapiens
tgtttgcactttgta

SEQ ID NO: 1676270 - DNA, 15 bp, Homo sapiens
gtttgcactttgtat

SEQ ID NO: 1676271 - DNA, 15 bp, Homo sapiens
tttgcactttgtata

SEQ ID NO: 1676272 - DNA, 15 bp, Homo sapiens
ttgcactttgtatat

SEQ ID NO: 1676273 - DNA, 15 bp, Homo sapiens
tgcactttgtatatt

SEQ ID NO: 1676274 - DNA, 15 bp, Homo sapiens
gcactttgtatattg

SEQ ID NO: 1676275 - DNA, 15 bp, Homo sapiens
cactttgtatattgg

SEQ ID NO: 1676276 - DNA, 15 bp, Homo sapiens
actttgtatattggt

SEQ ID NO: 1676277 - DNA, 15 bp, Homo sapiens
ctttgtatattggtt

SEQ ID NO: 1676278 - DNA, 15 bp, Homo sapiens
tttgtatattggttg

SEQ ID NO: 1676279 - DNA, 15 bp, Homo sapiens
ttgtatattggttga

SEQ ID NO: 1676280 - DNA, 15 bp, Homo sapiens
tgtatattggttgaa

SEQ ID NO: 1676281 - DNA, 15 bp, Homo sapiens
gtatattggttgaaa

SEQ ID NO: 1676282 - DNA, 15 bp, Homo sapiens
tatattggttgaaac

SEQ ID NO: 1676283 - DNA, 15 bp, Homo sapiens
atattggttgaaact

SEQ ID NO: 1676284 - DNA, 15 bp, Homo sapiens
tattggttgaaactg

SEQ ID NO: 1676285 - DNA, 15 bp, Homo sapiens
attggttgaaactgt

SEQ ID NO: 1676286 - DNA, 15 bp, Homo sapiens
ttggttgaaactgtt

SEQ ID NO: 1676287 - DNA, 15 bp, Homo sapiens
tggttgaaactgtta

SEQ ID NO: 1676288 - DNA, 15 bp, Homo sapiens
ggttgaaactgttat

SEQ ID NO: 1676289 - DNA, 15 bp, Homo sapiens
gttgaaactgttatc

SEQ ID NO: 1676290 - DNA, 15 bp, Homo sapiens
ttgaaactgttatca

SEQ ID NO: 1676291 - DNA, 15 bp, Homo sapiens
gaaactgttatcact

SEQ ID NO: 1676292 - DNA, 15 bp, Homo sapiens
aaactgttatcactt

SEQ ID NO: 1676293 - DNA, 15 bp, Homo sapiens
aactgttatcactta

SEQ ID NO: 1676294 - DNA, 15 bp, Homo sapiens
actgttatcacttat

SEQ ID NO: 1676295 - DNA, 15 bp, Homo sapiens
ctgttatcacttata

SEQ ID NO: 1676296 - DNA, 15 bp, Homo sapiens
tgttatcacttatat

SEQ ID NO: 1676297 - DNA, 15 bp, Homo sapiens
gttatcacttatata

SEQ ID NO: 1676298 - DNA, 15 bp, Homo sapiens
ttatcacttatatat

SEQ ID NO: 1676299 - DNA, 15 bp, Homo sapiens
tatcacttatatata

SEQ ID NO: 1676300 - DNA, 15 bp, Homo sapiens
atcacttatatatat

SEQ ID NO: 1676301 - DNA, 15 bp, Homo sapiens
tcacttatatatata

SEQ ID NO: 1676302 - DNA, 15 bp, Homo sapiens
cacttatatatatat

SEQ ID NO: 1676303 - DNA, 15 bp, Homo sapiens
acttatatatatata

SEQ ID NO: 1676304 - DNA, 15 bp, Homo sapiens
cttatatatatatat

SEQ ID NO: 1676305 - DNA, 15 bp, Homo sapiens
atatatacacacata

SEQ ID NO: 1676306 - DNA, 15 bp, Homo sapiens
tatatacacacatat

SEQ ID NO: 1676307 - DNA, 15 bp, Homo sapiens
atatacacacatata

SEQ ID NO: 1676308 - DNA, 15 bp, Homo sapiens
tatacacacatatat

SEQ ID NO: 1676309 - DNA, 15 bp, Homo sapiens
atacacacatatata

SEQ ID NO: 1676310 - DNA, 15 bp, Homo sapiens
tacacacatatatat

SEQ ID NO: 1676311 - DNA, 15 bp, Homo sapiens
cacacatatatataa

SEQ ID NO: 1676312 - DNA, 15 bp, Homo sapiens
acacatatatataaa

SEQ ID NO: 1676313 - DNA, 15 bp, Homo sapiens
cacatatatataaaa

SEQ ID NO: 1676314 - DNA, 15 bp, Homo sapiens
acatatatataaaat

SEQ ID NO: 1676315 - DNA, 15 bp, Homo sapiens
catatatataaaatc

SEQ ID NO: 1676316 - DNA, 15 bp, Homo sapiens
atatatataaaatct

SEQ ID NO: 1676317 - DNA, 15 bp, Homo sapiens
tatatataaaatcta

SEQ ID NO: 1676318 - DNA, 15 bp, Homo sapiens
atatataaaatctat

SEQ ID NO: 1676319 - DNA, 15 bp, Homo sapiens
tatataaaatctatt

SEQ ID NO: 1676320 - DNA, 15 bp, Homo sapiens
atataaaatctattt

SEQ ID NO: 1676321 - DNA, 15 bp, Homo sapiens
tataaaatctattta

SEQ ID NO: 1676322 - DNA, 15 bp, Homo sapiens
ataaaatctatttat

SEQ ID NO: 1676323 - DNA, 15 bp, Homo sapiens
taaaatctatttatt

SEQ ID NO: 1676324 - DNA, 15 bp, Homo sapiens
aaaatctatttattt

SEQ ID NO: 1676325 - DNA, 15 bp, Homo sapiens
aaatctatttatttt

SEQ ID NO: 1676326 - DNA, 15 bp, Homo sapiens
aatctatttattttt

SEQ ID NO: 1676327 - DNA, 15 bp, Homo sapiens
atctatttatttttg

SEQ ID NO: 1676328 - DNA, 15 bp, Homo sapiens
tctatttatttttgc

SEQ ID NO: 1676329 - DNA, 15 bp, Homo sapiens
ctatttatttttgca

SEQ ID NO: 1676330 - DNA, 15 bp, Homo sapiens
tatttatttttgcaa

SEQ ID NO: 1676331 - DNA, 15 bp, Homo sapiens
atttatttttgcaaa

SEQ ID NO: 1676332 - DNA, 15 bp, Homo sapiens
tttatttttgcaaac

SEQ ID NO: 1676333 - DNA, 15 bp, Homo sapiens
ttatttttgcaaacc

SEQ ID NO: 1676334 - DNA, 15 bp, Homo sapiens
tatttttgcaaaccc

SEQ ID NO: 1676335 - DNA, 15 bp, Homo sapiens
atttttgcaaaccct

SEQ ID NO: 1676336 - DNA, 15 bp, Homo sapiens
tttttgcaaaccctg

SEQ ID NO: 1676337 - DNA, 15 bp, Homo sapiens
ttttgcaaaccctgg

SEQ ID NO: 1676338 - DNA, 15 bp, Homo sapiens
tttgcaaaccctggt

SEQ ID NO: 1676339 - DNA, 15 bp, Homo sapiens
ttgcaaaccctggtt

SEQ ID NO: 1676340 - DNA, 15 bp, Homo sapiens
tgcaaaccctggttg

SEQ ID NO: 1676341 - DNA, 15 bp, Homo sapiens
gcaaaccctggttgc

SEQ ID NO: 1676342 - DNA, 15 bp, Homo sapiens
caaaccctggttgct

SEQ ID NO: 1676343 - DNA, 15 bp, Homo sapiens
aaaccctggttgctg

SEQ ID NO: 1676344 - DNA, 15 bp, Homo sapiens
accctggttgctgta

SEQ ID NO: 1676345 - DNA, 15 bp, Homo sapiens
ccctggttgctgtat

SEQ ID NO: 1676346 - DNA, 15 bp, Homo sapiens
cctggttgctgtatt

SEQ ID NO: 1676347 - DNA, 15 bp, Homo sapiens
ctggttgctgtattt

SEQ ID NO: 1676348 - DNA, 15 bp, Homo sapiens
tggttgctgtatttg

SEQ ID NO: 1676349 - DNA, 15 bp, Homo sapiens
ggttgctgtatttgt

SEQ ID NO: 1676350 - DNA, 15 bp, Homo sapiens
gttgctgtatttgtt

SEQ ID NO: 1676351 - DNA, 15 bp, Homo sapiens
ttgctgtatttgttc

SEQ ID NO: 1676352 - DNA, 15 bp, Homo sapiens
tgctgtatttgttca

SEQ ID NO: 1676353 - DNA, 15 bp, Homo sapiens
gctgtatttgttcag

SEQ ID NO: 1676354 - DNA, 15 bp, Homo sapiens
ctgtatttgttcagt

SEQ ID NO: 1676355 - DNA, 15 bp, Homo sapiens
tgtatttgttcagtg

SEQ ID NO: 1676356 - DNA, 15 bp, Homo sapiens
gtatttgttcagtga

SEQ ID NO: 1676357 - DNA, 15 bp, Homo sapiens
tatttgttcagtgac

SEQ ID NO: 1676358 - DNA, 15 bp, Homo sapiens
atttgttcagtgact

SEQ ID NO: 1676359 - DNA, 15 bp, Homo sapiens
tttgttcagtgacta

SEQ ID NO: 1676360 - DNA, 15 bp, Homo sapiens
ttgttcagtgactat

SEQ ID NO: 1676361 - DNA, 15 bp, Homo sapiens
tgttcagtgactatt

SEQ ID NO: 1676362 - DNA, 15 bp, Homo sapiens
gttcagtgactattc

SEQ ID NO: 1676363 - DNA, 15 bp, Homo sapiens
ttcagtgactattct

SEQ ID NO: 1676364 - DNA, 15 bp, Homo sapiens
tcagtgactattctc

SEQ ID NO: 1676365 - DNA, 15 bp, Homo sapiens
cagtgactattctcg

SEQ ID NO: 1676366 - DNA, 15 bp, Homo sapiens
agtgactattctcgg

SEQ ID NO: 1676367 - DNA, 15 bp, Homo sapiens
gtgactattctcggg

SEQ ID NO: 1676368 - DNA, 15 bp, Homo sapiens
tgactattctcgggg

SEQ ID NO: 1676369 - DNA, 15 bp, Homo sapiens
gactattctcggggc

SEQ ID NO: 1676370 - DNA, 15 bp, Homo sapiens
actattctcggggcc

SEQ ID NO: 1676371 - DNA, 15 bp, Homo sapiens
ctattctcggggccc

SEQ ID NO: 1676372 - DNA, 15 bp, Homo sapiens
tattctcggggccct

SEQ ID NO: 1676373 - DNA, 15 bp, Homo sapiens
attctcggggccctg

SEQ ID NO: 1676374 - DNA, 15 bp, Homo sapiens
ttctcggggccctgt

SEQ ID NO: 1676375 - DNA, 15 bp, Homo sapiens
tctcggggccctgtg

SEQ ID NO: 1676376 - DNA, 15 bp, Homo sapiens
ctcggggccctgtgt

SEQ ID NO: 1676377 - DNA, 15 bp, Homo sapiens
tcggggccctgtgta

SEQ ID NO: 1676378 - DNA, 15 bp, Homo sapiens
cggggccctgtgtag

SEQ ID NO: 1676379 - DNA, 15 bp, Homo sapiens
ggggccctgtgtagg

SEQ ID NO: 1676380 - DNA, 15 bp, Homo sapiens
gggccctgtgtaggg

SEQ ID NO: 1676381 - DNA, 15 bp, Homo sapiens
ggccctgtgtagggg

SEQ ID NO: 1676382 - DNA, 15 bp, Homo sapiens
gccctgtgtaggggg

SEQ ID NO: 1676383 - DNA, 15 bp, Homo sapiens
ccctgtgtagggggt

SEQ ID NO: 1676384 - DNA, 15 bp, Homo sapiens
cctgtgtagggggtt

SEQ ID NO: 1676385 - DNA, 15 bp, Homo sapiens
ctgtgtagggggtta

SEQ ID NO: 1676386 - DNA, 15 bp, Homo sapiens
tgtgtagggggttat

SEQ ID NO: 1676387 - DNA, 15 bp, Homo sapiens
gtgtagggggttatt

SEQ ID NO: 1676388 - DNA, 15 bp, Homo sapiens
tgtagggggttattg

SEQ ID NO: 1676389 - DNA, 15 bp, Homo sapiens
gtagggggttattgc

SEQ ID NO: 1676390 - DNA, 15 bp, Homo sapiens
tagggggttattgcc

SEQ ID NO: 1676391 - DNA, 15 bp, Homo sapiens
agggggttattgcct

SEQ ID NO: 1676392 - DNA, 15 bp, Homo sapiens
gggggttattgcctc

SEQ ID NO: 1676393 - DNA, 15 bp, Homo sapiens
ggggttattgcctct

SEQ ID NO: 1676394 - DNA, 15 bp, Homo sapiens
gggttattgcctctg

SEQ ID NO: 1676395 - DNA, 15 bp, Homo sapiens
ggttattgcctctga

SEQ ID NO: 1676396 - DNA, 15 bp, Homo sapiens
gttattgcctctgaa

SEQ ID NO: 1676397 - DNA, 15 bp, Homo sapiens
ttattgcctctgaaa

SEQ ID NO: 1676398 - DNA, 15 bp, Homo sapiens
tattgcctctgaaat

SEQ ID NO: 1676399 - DNA, 15 bp, Homo sapiens
attgcctctgaaatg

SEQ ID NO: 1676400 - DNA, 15 bp, Homo sapiens
ttgcctctgaaatgc

SEQ ID NO: 1676401 - DNA, 15 bp, Homo sapiens
tgcctctgaaatgcc

SEQ ID NO: 1676402 - DNA, 15 bp, Homo sapiens
gcctctgaaatgcct

SEQ ID NO: 1676403 - DNA, 15 bp, Homo sapiens
cctctgaaatgcctc

SEQ ID NO: 1676404 - DNA, 15 bp, Homo sapiens
ctctgaaatgcctct

SEQ ID NO: 1676405 - DNA, 15 bp, Homo sapiens
tctgaaatgcctctt

SEQ ID NO: 1676406 - DNA, 15 bp, Homo sapiens
ctgaaatgcctcttc

SEQ ID NO: 1676407 - DNA, 15 bp, Homo sapiens
tgaaatgcctcttct

SEQ ID NO: 1676408 - DNA, 15 bp, Homo sapiens
gaaatgcctcttctt

SEQ ID NO: 1676409 - DNA, 15 bp, Homo sapiens
aaatgcctcttcttt

SEQ ID NO: 1676410 - DNA, 15 bp, Homo sapiens
aatgcctcttcttta

SEQ ID NO: 1676411 - DNA, 15 bp, Homo sapiens
atgcctcttctttat

SEQ ID NO: 1676412 - DNA, 15 bp, Homo sapiens
tgcctcttctttatg

SEQ ID NO: 1676413 - DNA, 15 bp, Homo sapiens
gcctcttctttatgt

SEQ ID NO: 1676414 - DNA, 15 bp, Homo sapiens
cctcttctttatgta

SEQ ID NO: 1676415 - DNA, 15 bp, Homo sapiens
ctcttctttatgtac

SEQ ID NO: 1676416 - DNA, 15 bp, Homo sapiens
tcttctttatgtaca

SEQ ID NO: 1676417 - DNA, 15 bp, Homo sapiens
cttctttatgtacaa

SEQ ID NO: 1676418 - DNA, 15 bp, Homo sapiens
ttctttatgtacaaa

SEQ ID NO: 1676419 - DNA, 15 bp, Homo sapiens
tctttatgtacaaag

SEQ ID NO: 1676420 - DNA, 15 bp, Homo sapiens
ctttatgtacaaaga

SEQ ID NO: 1676421 - DNA, 15 bp, Homo sapiens
tttatgtacaaagat

SEQ ID NO: 1676422 - DNA, 15 bp, Homo sapiens
ttatgtacaaagatt

SEQ ID NO: 1676423 - DNA, 15 bp, Homo sapiens
tatgtacaaagatta

SEQ ID NO: 1676424 - DNA, 15 bp, Homo sapiens
atgtacaaagattat

SEQ ID NO: 1676425 - DNA, 15 bp, Homo sapiens
tgtacaaagattatt

SEQ ID NO: 1676426 - DNA, 15 bp, Homo sapiens
gtacaaagattattt

SEQ ID NO: 1676427 - DNA, 15 bp, Homo sapiens
tacaaagattatttg

SEQ ID NO: 1676428 - DNA, 15 bp, Homo sapiens
acaaagattatttgc

SEQ ID NO: 1676429 - DNA, 15 bp, Homo sapiens
caaagattatttgca

SEQ ID NO: 1676430 - DNA, 15 bp, Homo sapiens
aaagattatttgcac

SEQ ID NO: 1676431 - DNA, 15 bp, Homo sapiens
aagattatttgcacg

SEQ ID NO: 1676432 - DNA, 15 bp, Homo sapiens
agattatttgcacga

SEQ ID NO: 1676433 - DNA, 15 bp, Homo sapiens
gattatttgcacgaa

SEQ ID NO: 1676434 - DNA, 15 bp, Homo sapiens
attatttgcacgaac

SEQ ID NO: 1676435 - DNA, 15 bp, Homo sapiens
ttatttgcacgaact

SEQ ID NO: 1676436 - DNA, 15 bp, Homo sapiens
tatttgcacgaactg

SEQ ID NO: 1676437 - DNA, 15 bp, Homo sapiens
atttgcacgaactgg

SEQ ID NO: 1676438 - DNA, 15 bp, Homo sapiens
tttgcacgaactgga

SEQ ID NO: 1676439 - DNA, 15 bp, Homo sapiens
ttgcacgaactggac

SEQ ID NO: 1676440 - DNA, 15 bp, Homo sapiens
tgcacgaactggact

SEQ ID NO: 1676441 - DNA, 15 bp, Homo sapiens
gcacgaactggactg

SEQ ID NO: 1676442 - DNA, 15 bp, Homo sapiens
cacgaactggactgt

SEQ ID NO: 1676443 - DNA, 15 bp, Homo sapiens
acgaactggactgtg

SEQ ID NO: 1676444 - DNA, 15 bp, Homo sapiens
cgaactggactgtgt

SEQ ID NO: 1676445 - DNA, 15 bp, Homo sapiens
gaactggactgtgtg

SEQ ID NO: 1676446 - DNA, 15 bp, Homo sapiens
aactggactgtgtgc

SEQ ID NO: 1676447 - DNA, 15 bp, Homo sapiens
actggactgtgtgca

SEQ ID NO: 1676448 - DNA, 15 bp, Homo sapiens
ctggactgtgtgcaa

SEQ ID NO: 1676449 - DNA, 15 bp, Homo sapiens
tggactgtgtgcaac

SEQ ID NO: 1676450 - DNA, 15 bp, Homo sapiens
ggactgtgtgcaacg

SEQ ID NO: 1676451 - DNA, 15 bp, Homo sapiens
gactgtgtgcaacgc

SEQ ID NO: 1676452 - DNA, 15 bp, Homo sapiens
actgtgtgcaacgct

SEQ ID NO: 1676453 - DNA, 15 bp, Homo sapiens
ctgtgtgcaacgctt

SEQ ID NO: 1676454 - DNA, 15 bp, Homo sapiens
tgtgtgcaacgcttt

SEQ ID NO: 1676455 - DNA, 15 bp, Homo sapiens
gtgtgcaacgctttt

SEQ ID NO: 1676456 - DNA, 15 bp, Homo sapiens
tgtgcaacgcttttt

SEQ ID NO: 1676457 - DNA, 15 bp, Homo sapiens
gtgcaacgctttttg

SEQ ID NO: 1676458 - DNA, 15 bp, Homo sapiens
tgcaacgctttttgg

SEQ ID NO: 1676459 - DNA, 15 bp, Homo sapiens
gcaacgctttttggg

SEQ ID NO: 1676460 - DNA, 15 bp, Homo sapiens
caacgctttttggga

SEQ ID NO: 1676461 - DNA, 15 bp, Homo sapiens
aacgctttttgggag

SEQ ID NO: 1676462 - DNA, 15 bp, Homo sapiens
acgctttttgggaga

SEQ ID NO: 1676463 - DNA, 15 bp, Homo sapiens
cgctttttgggagaa

SEQ ID NO: 1676464 - DNA, 15 bp, Homo sapiens
gctttttgggagaat

SEQ ID NO: 1676465 - DNA, 15 bp, Homo sapiens
ctttttgggagaatg

SEQ ID NO: 1676466 - DNA, 15 bp, Homo sapiens
tttttgggagaatga

SEQ ID NO: 1676467 - DNA, 15 bp, Homo sapiens
ttttgggagaatgat

SEQ ID NO: 1676468 - DNA, 15 bp, Homo sapiens
tttgggagaatgatg

SEQ ID NO: 1676469 - DNA, 15 bp, Homo sapiens
ttgggagaatgatgt

SEQ ID NO: 1676470 - DNA, 15 bp, Homo sapiens
tgggagaatgatgtc

SEQ ID NO: 1676471 - DNA, 15 bp, Homo sapiens
gggagaatgatgtcc

SEQ ID NO: 1676472 - DNA, 15 bp, Homo sapiens
ggagaatgatgtccc

SEQ ID NO: 1676473 - DNA, 15 bp, Homo sapiens
gagaatgatgtcccc

SEQ ID NO: 1676474 - DNA, 15 bp, Homo sapiens
agaatgatgtccccg

SEQ ID NO: 1676475 - DNA, 15 bp, Homo sapiens
gaatgatgtccccgt

SEQ ID NO: 1676476 - DNA, 15 bp, Homo sapiens
aatgatgtccccgtt

SEQ ID NO: 1676477 - DNA, 15 bp, Homo sapiens
atgatgtccccgttg

SEQ ID NO: 1676478 - DNA, 15 bp, Homo sapiens
tgatgtccccgttgt

SEQ ID NO: 1676479 - DNA, 15 bp, Homo sapiens
gatgtccccgttgta

SEQ ID NO: 1676480 - DNA, 15 bp, Homo sapiens
atgtccccgttgtat

SEQ ID NO: 1676481 - DNA, 15 bp, Homo sapiens
tgtccccgttgtatg

SEQ ID NO: 1676482 - DNA, 15 bp, Homo sapiens
gtccccgttgtatgt

SEQ ID NO: 1676483 - DNA, 15 bp, Homo sapiens
tccccgttgtatgta

SEQ ID NO: 1676484 - DNA, 15 bp, Homo sapiens
ccccgttgtatgtat

SEQ ID NO: 1676485 - DNA, 15 bp, Homo sapiens
cccgttgtatgtatg

SEQ ID NO: 1676486 - DNA, 15 bp, Homo sapiens
ccgttgtatgtatga

SEQ ID NO: 1676487 - DNA, 15 bp, Homo sapiens
cgttgtatgtatgag

SEQ ID NO: 1676488 - DNA, 15 bp, Homo sapiens
gttgtatgtatgagt

SEQ ID NO: 1676489 - DNA, 15 bp, Homo sapiens
ttgtatgtatgagtg

SEQ ID NO: 1676490 - DNA, 15 bp, Homo sapiens
tgtatgtatgagtgg

SEQ ID NO: 1676491 - DNA, 15 bp, Homo sapiens
gtatgtatgagtggc

SEQ ID NO: 1676492 - DNA, 15 bp, Homo sapiens
tatgtatgagtggct

SEQ ID NO: 1676493 - DNA, 15 bp, Homo sapiens
atgtatgagtggctt

SEQ ID NO: 1676494 - DNA, 15 bp, Homo sapiens
tgtatgagtggcttc

SEQ ID NO: 1676495 - DNA, 15 bp, Homo sapiens
gtatgagtggcttct

SEQ ID NO: 1676496 - DNA, 15 bp, Homo sapiens
tatgagtggcttctg

SEQ ID NO: 1676497 - DNA, 15 bp, Homo sapiens
atgagtggcttctgg

SEQ ID NO: 1676498 - DNA, 15 bp, Homo sapiens
tgagtggcttctggg

SEQ ID NO: 1676499 - DNA, 15 bp, Homo sapiens
gagtggcttctggga

SEQ ID NO: 1676500 - DNA, 15 bp, Homo sapiens
agtggcttctgggag

SEQ ID NO: 1676501 - DNA, 15 bp, Homo sapiens
gtggcttctgggaga

SEQ ID NO: 1676502 - DNA, 15 bp, Homo sapiens
tggcttctgggagat

SEQ ID NO: 1676503 - DNA, 15 bp, Homo sapiens
ggcttctgggagatg

SEQ ID NO: 1676504 - DNA, 15 bp, Homo sapiens
gcttctgggagatgg

SEQ ID NO: 1676505 - DNA, 15 bp, Homo sapiens
cttctgggagatggg

SEQ ID NO: 1676506 - DNA, 15 bp, Homo sapiens
ttctgggagatgggt

SEQ ID NO: 1676507 - DNA, 15 bp, Homo sapiens
tctgggagatgggtg

SEQ ID NO: 1676508 - DNA, 15 bp, Homo sapiens
ctgggagatgggtgt

SEQ ID NO: 1676509 - DNA, 15 bp, Homo sapiens
tgggagatgggtgtc

SEQ ID NO: 1676510 - DNA, 15 bp, Homo sapiens
gggagatgggtgtca

SEQ ID NO: 1676511 - DNA, 15 bp, Homo sapiens
ggagatgggtgtcac

SEQ ID NO: 1676512 - DNA, 15 bp, Homo sapiens
gagatgggtgtcact

SEQ ID NO: 1676513 - DNA, 15 bp, Homo sapiens
agatgggtgtcactt

SEQ ID NO: 1676514 - DNA, 15 bp, Homo sapiens
gatgggtgtcacttt

SEQ ID NO: 1676515 - DNA, 15 bp, Homo sapiens
atgggtgtcactttt

SEQ ID NO: 1676516 - DNA, 15 bp, Homo sapiens
tgggtgtcacttttt

SEQ ID NO: 1676517 - DNA, 15 bp, Homo sapiens
gggtgtcacttttta

SEQ ID NO: 1676518 - DNA, 15 bp, Homo sapiens
ggtgtcactttttaa

SEQ ID NO: 1676519 - DNA, 15 bp, Homo sapiens
gtgtcactttttaaa

SEQ ID NO: 1676520 - DNA, 15 bp, Homo sapiens
tgtcactttttaaac

SEQ ID NO: 1676521 - DNA, 15 bp, Homo sapiens
gtcactttttaaacc

SEQ ID NO: 1676522 - DNA, 15 bp, Homo sapiens
tcactttttaaacca

SEQ ID NO: 1676523 - DNA, 15 bp, Homo sapiens
cactttttaaaccac

SEQ ID NO: 1676524 - DNA, 15 bp, Homo sapiens
actttttaaaccact

SEQ ID NO: 1676525 - DNA, 15 bp, Homo sapiens
ctttttaaaccactg

SEQ ID NO: 1676526 - DNA, 15 bp, Homo sapiens
tttttaaaccactgt

SEQ ID NO: 1676527 - DNA, 15 bp, Homo sapiens
ttttaaaccactgta

SEQ ID NO: 1676528 - DNA, 15 bp, Homo sapiens
tttaaaccactgtat

SEQ ID NO: 1676529 - DNA, 15 bp, Homo sapiens
ttaaaccactgtata

SEQ ID NO: 1676530 - DNA, 15 bp, Homo sapiens
taaaccactgtatag

SEQ ID NO: 1676531 - DNA, 15 bp, Homo sapiens
aaaccactgtataga

SEQ ID NO: 1676532 - DNA, 15 bp, Homo sapiens
aaccactgtatagaa

SEQ ID NO: 1676533 - DNA, 15 bp, Homo sapiens
accactgtatagaag

SEQ ID NO: 1676534 - DNA, 15 bp, Homo sapiens
ccactgtatagaagg

SEQ ID NO: 1676535 - DNA, 15 bp, Homo sapiens
cactgtatagaaggt

SEQ ID NO: 1676536 - DNA, 15 bp, Homo sapiens
actgtatagaaggtt

SEQ ID NO: 1676537 - DNA, 15 bp, Homo sapiens
ctgtatagaaggttt

SEQ ID NO: 1676538 - DNA, 15 bp, Homo sapiens
tgtatagaaggtttt

SEQ ID NO: 1676539 - DNA, 15 bp, Homo sapiens
cagtggcacaatctt

SEQ ID NO: 1676540 - DNA, 15 bp, Homo sapiens
agtggcacaatcttg

SEQ ID NO: 1676541 - DNA, 15 bp, Homo sapiens
gtggcacaatcttgg

SEQ ID NO: 1676542 - DNA, 15 bp, Homo sapiens
gcctcagcctcctgt

SEQ ID NO: 1676543 - DNA, 15 bp, Homo sapiens
cctcagcctcctgtg

SEQ ID NO: 1676544 - DNA, 15 bp, Homo sapiens
ctcagcctcctgtgt

SEQ ID NO: 1676545 - DNA, 15 bp, Homo sapiens
tcagcctcctgtgtt

SEQ ID NO: 1676546 - DNA, 15 bp, Homo sapiens
cagcctcctgtgttg

SEQ ID NO: 1676547 - DNA, 15 bp, Homo sapiens
agcctcctgtgttgc

SEQ ID NO: 1676548 - DNA, 15 bp, Homo sapiens
gcctcctgtgttgct

SEQ ID NO: 1676549 - DNA, 15 bp, Homo sapiens
cctcctgtgttgctg

SEQ ID NO: 1676550 - DNA, 15 bp, Homo sapiens
ctcctgtgttgctgg

SEQ ID NO: 1676551 - DNA, 15 bp, Homo sapiens
tcctgtgttgctggg

SEQ ID NO: 1676552 - DNA, 15 bp, Homo sapiens
cctgtgttgctggga

SEQ ID NO: 1676553 - DNA, 15 bp, Homo sapiens
ctgtgttgctgggat

SEQ ID NO: 1676554 - DNA, 15 bp, Homo sapiens
tgtgttgctgggatc

SEQ ID NO: 1676555 - DNA, 15 bp, Homo sapiens
gtgttgctgggatca

SEQ ID NO: 1676556 - DNA, 15 bp, Homo sapiens
tgttgctgggatcac

SEQ ID NO: 1676557 - DNA, 15 bp, Homo sapiens
gttgctgggatcaca

SEQ ID NO: 1676558 - DNA, 15 bp, Homo sapiens
ttgctgggatcacag

SEQ ID NO: 1676559 - DNA, 15 bp, Homo sapiens
tgctgggatcacagg

SEQ ID NO: 1676560 - DNA, 15 bp, Homo sapiens
ctgggatcacaggcg

SEQ ID NO: 1676561 - DNA, 15 bp, Homo sapiens
tgggatcacaggcgc

SEQ ID NO: 1676562 - DNA, 15 bp, Homo sapiens
gggatcacaggcgcg

SEQ ID NO: 1676563 - DNA, 15 bp, Homo sapiens
ggatcacaggcgcgt

SEQ ID NO: 1676564 - DNA, 15 bp, Homo sapiens
gatcacaggcgcgta

SEQ ID NO: 1676565 - DNA, 15 bp, Homo sapiens
atcacaggcgcgtac

SEQ ID NO: 1676566 - DNA, 15 bp, Homo sapiens
tcacaggcgcgtacc

SEQ ID NO: 1676567 - DNA, 15 bp, Homo sapiens
cacaggcgcgtaccc

SEQ ID NO: 1676568 - DNA, 15 bp, Homo sapiens
acaggcgcgtacccg

SEQ ID NO: 1676569 - DNA, 15 bp, Homo sapiens
caggcgcgtacccgg

SEQ ID NO: 1676570 - DNA, 15 bp, Homo sapiens
aggcgcgtacccggc

SEQ ID NO: 1676571 - DNA, 15 bp, Homo sapiens
ggcgcgtacccggct

SEQ ID NO: 1676572 - DNA, 15 bp, Homo sapiens
gcgcgtacccggcta

SEQ ID NO: 1676573 - DNA, 15 bp, Homo sapiens
cgcgtacccggctaa

SEQ ID NO: 1676574 - DNA, 15 bp, Homo sapiens
gcgtacccggctaat

SEQ ID NO: 1676575 - DNA, 15 bp, Homo sapiens
cgtacccggctaatt

SEQ ID NO: 1676576 - DNA, 15 bp, Homo sapiens
gtacccggctaattt

SEQ ID NO: 1676577 - DNA, 15 bp, Homo sapiens
cccggctaattttta

SEQ ID NO: 1676578 - DNA, 15 bp, Homo sapiens
ccggctaatttttat

SEQ ID NO: 1676579 - DNA, 15 bp, Homo sapiens
cggctaatttttata

SEQ ID NO: 1676580 - DNA, 15 bp, Homo sapiens
aatttttatattttc

SEQ ID NO: 1676581 - DNA, 15 bp, Homo sapiens
atttttatattttca

SEQ ID NO: 1676582 - DNA, 15 bp, Homo sapiens
tttttatattttcag

SEQ ID NO: 1676583 - DNA, 15 bp, Homo sapiens
ttttatattttcagt

SEQ ID NO: 1676584 - DNA, 15 bp, Homo sapiens
tttatattttcagta

SEQ ID NO: 1676585 - DNA, 15 bp, Homo sapiens
ttatattttcagtag

SEQ ID NO: 1676586 - DNA, 15 bp, Homo sapiens
tatattttcagtaga

SEQ ID NO: 1676587 - DNA, 15 bp, Homo sapiens
atattttcagtagag

SEQ ID NO: 1676588 - DNA, 15 bp, Homo sapiens
attttcagtagagat

SEQ ID NO: 1676589 - DNA, 15 bp, Homo sapiens
tcagtagagatgggg

SEQ ID NO: 1676590 - DNA, 15 bp, Homo sapiens
cagtagagatggggt

SEQ ID NO: 1676591 - DNA, 15 bp, Homo sapiens
gagatggggttttgc

SEQ ID NO: 1676592 - DNA, 15 bp, Homo sapiens
atggggttttgccat

SEQ ID NO: 1676593 - DNA, 15 bp, Homo sapiens
tggggttttgccatg

SEQ ID NO: 1676594 - DNA, 15 bp, Homo sapiens
tgttggccaggctat

SEQ ID NO: 1676595 - DNA, 15 bp, Homo sapiens
gttggccaggctatt

SEQ ID NO: 1676596 - DNA, 15 bp, Homo sapiens
ttggccaggctattc

SEQ ID NO: 1676597 - DNA, 15 bp, Homo sapiens
tggccaggctattct

SEQ ID NO: 1676598 - DNA, 15 bp, Homo sapiens
ggccaggctattctt

SEQ ID NO: 1676599 - DNA, 15 bp, Homo sapiens
gccaggctattcttg

SEQ ID NO: 1676600 - DNA, 15 bp, Homo sapiens
ccaggctattcttga

SEQ ID NO: 1676601 - DNA, 15 bp, Homo sapiens
caggctattcttgaa

SEQ ID NO: 1676602 - DNA, 15 bp, Homo sapiens
aggctattcttgaac

SEQ ID NO: 1676603 - DNA, 15 bp, Homo sapiens
ggctattcttgaact

SEQ ID NO: 1676604 - DNA, 15 bp, Homo sapiens
gctattcttgaactc

SEQ ID NO: 1676605 - DNA, 15 bp, Homo sapiens
ctattcttgaactct

SEQ ID NO: 1676606 - DNA, 15 bp, Homo sapiens
tattcttgaactctt

SEQ ID NO: 1676607 - DNA, 15 bp, Homo sapiens
attcttgaactcttg

SEQ ID NO: 1676608 - DNA, 15 bp, Homo sapiens
ttcttgaactcttga

SEQ ID NO: 1676609 - DNA, 15 bp, Homo sapiens
aactcttgacctcaa

SEQ ID NO: 1676610 - DNA, 15 bp, Homo sapiens
actcttgacctcaag

SEQ ID NO: 1676611 - DNA, 15 bp, Homo sapiens
ctcttgacctcaagt

SEQ ID NO: 1676612 - DNA, 15 bp, Homo sapiens
tcttgacctcaagtc

SEQ ID NO: 1676613 - DNA, 15 bp, Homo sapiens
cttgacctcaagtcg

SEQ ID NO: 1676614 - DNA, 15 bp, Homo sapiens
ttgacctcaagtcgt

SEQ ID NO: 1676615 - DNA, 15 bp, Homo sapiens
tgacctcaagtcgtc

SEQ ID NO: 1676616 - DNA, 15 bp, Homo sapiens
gacctcaagtcgtct

SEQ ID NO: 1676617 - DNA, 15 bp, Homo sapiens
acctcaagtcgtcta

SEQ ID NO: 1676618 - DNA, 15 bp, Homo sapiens
cctcaagtcgtctac

SEQ ID NO: 1676619 - DNA, 15 bp, Homo sapiens
ctcaagtcgtctacc

SEQ ID NO: 1676620 - DNA, 15 bp, Homo sapiens
tcaagtcgtctaccg

SEQ ID NO: 1676621 - DNA, 15 bp, Homo sapiens
caagtcgtctaccgc

SEQ ID NO: 1676622 - DNA, 15 bp, Homo sapiens
aagtcgtctaccgcc

SEQ ID NO: 1676623 - DNA, 15 bp, Homo sapiens
agtcgtctaccgcct

SEQ ID NO: 1676624 - DNA, 15 bp, Homo sapiens
gtcgtctaccgcctc

SEQ ID NO: 1676625 - DNA, 15 bp, Homo sapiens
tcgtctaccgcctcg

SEQ ID NO: 1676626 - DNA, 15 bp, Homo sapiens
cgtctaccgcctcgg

SEQ ID NO: 1676627 - DNA, 15 bp, Homo sapiens
gtctaccgcctcggc

SEQ ID NO: 1676628 - DNA, 15 bp, Homo sapiens
tctaccgcctcggcc

SEQ ID NO: 1676629 - DNA, 15 bp, Homo sapiens
ctaccgcctcggcct

SEQ ID NO: 1676630 - DNA, 15 bp, Homo sapiens
taccgcctcggcctc

SEQ ID NO: 1676631 - DNA, 15 bp, Homo sapiens
accgcctcggcctcc

SEQ ID NO: 1676632 - DNA, 15 bp, Homo sapiens
cctcccaaaatgcta

SEQ ID NO: 1676633 - DNA, 15 bp, Homo sapiens
ctcccaaaatgctag

SEQ ID NO: 1676634 - DNA, 15 bp, Homo sapiens
tcccaaaatgctagg

SEQ ID NO: 1676635 - DNA, 15 bp, Homo sapiens
cccaaaatgctagga

SEQ ID NO: 1676636 - DNA, 15 bp, Homo sapiens
ccaaaatgctaggat

SEQ ID NO: 1676637 - DNA, 15 bp, Homo sapiens
caaaatgctaggatt

SEQ ID NO: 1676638 - DNA, 15 bp, Homo sapiens
aaaatgctaggatta

SEQ ID NO: 1676639 - DNA, 15 bp, Homo sapiens
aaatgctaggattac

SEQ ID NO: 1676640 - DNA, 15 bp, Homo sapiens
aatgctaggattaca

SEQ ID NO: 1676641 - DNA, 15 bp, Homo sapiens
atgctaggattacag

SEQ ID NO: 1676642 - DNA, 15 bp, Homo sapiens
tgagccaccgcacca

SEQ ID NO: 1676643 - DNA, 15 bp, Homo sapiens
gagccaccgcaccaa

SEQ ID NO: 1676644 - DNA, 15 bp, Homo sapiens
agccaccgcaccaag

SEQ ID NO: 1676645 - DNA, 15 bp, Homo sapiens
gccaccgcaccaagc

SEQ ID NO: 1676646 - DNA, 15 bp, Homo sapiens
ccaccgcaccaagcc

SEQ ID NO: 1676647 - DNA, 15 bp, Homo sapiens
caccgcaccaagcca

SEQ ID NO: 1676648 - DNA, 15 bp, Homo sapiens
accgcaccaagccaa

SEQ ID NO: 1676649 - DNA, 15 bp, Homo sapiens
ccgcaccaagccaaa

SEQ ID NO: 1676650 - DNA, 15 bp, Homo sapiens
cgcaccaagccaaat

SEQ ID NO: 1676651 - DNA, 15 bp, Homo sapiens
gcaccaagccaaatg

SEQ ID NO: 1676652 - DNA, 15 bp, Homo sapiens
caccaagccaaatgt

SEQ ID NO: 1676653 - DNA, 15 bp, Homo sapiens
accaagccaaatgtt

SEQ ID NO: 1676654 - DNA, 15 bp, Homo sapiens
ccaagccaaatgtta

SEQ ID NO: 1676655 - DNA, 15 bp, Homo sapiens
caagccaaatgttac

SEQ ID NO: 1676656 - DNA, 15 bp, Homo sapiens
aagccaaatgttact

SEQ ID NO: 1676657 - DNA, 15 bp, Homo sapiens
agccaaatgttactt

SEQ ID NO: 1676658 - DNA, 15 bp, Homo sapiens
gccaaatgttacttc

SEQ ID NO: 1676659 - DNA, 15 bp, Homo sapiens
ccaaatgttacttca

SEQ ID NO: 1676660 - DNA, 15 bp, Homo sapiens
caaatgttacttcat

SEQ ID NO: 1676661 - DNA, 15 bp, Homo sapiens
aaatgttacttcatt

SEQ ID NO: 1676662 - DNA, 15 bp, Homo sapiens
aatgttacttcatta

SEQ ID NO: 1676663 - DNA, 15 bp, Homo sapiens
atgttacttcattag

SEQ ID NO: 1676664 - DNA, 15 bp, Homo sapiens
tgttacttcattaga

SEQ ID NO: 1676665 - DNA, 15 bp, Homo sapiens
gttacttcattagag

SEQ ID NO: 1676666 - DNA, 15 bp, Homo sapiens
ttacttcattagaga

SEQ ID NO: 1676667 - DNA, 15 bp, Homo sapiens
tacttcattagagaa

SEQ ID NO: 1676668 - DNA, 15 bp, Homo sapiens
acttcattagagaaa

SEQ ID NO: 1676669 - DNA, 15 bp, Homo sapiens
cttcattagagaaac

SEQ ID NO: 1676670 - DNA, 15 bp, Homo sapiens
ttcattagagaaact

SEQ ID NO: 1676671 - DNA, 15 bp, Homo sapiens
tcattagagaaactc

SEQ ID NO: 1676672 - DNA, 15 bp, Homo sapiens
cattagagaaactcc

SEQ ID NO: 1676673 - DNA, 15 bp, Homo sapiens
attagagaaactccc

SEQ ID NO: 1676674 - DNA, 15 bp, Homo sapiens
ttagagaaactcccc

SEQ ID NO: 1676675 - DNA, 15 bp, Homo sapiens
tagagaaactccccc

SEQ ID NO: 1676676 - DNA, 15 bp, Homo sapiens
agagaaactccccct

SEQ ID NO: 1676677 - DNA, 15 bp, Homo sapiens
gagaaactccccctg

SEQ ID NO: 1676678 - DNA, 15 bp, Homo sapiens
agaaactccccctga

SEQ ID NO: 1676679 - DNA, 15 bp, Homo sapiens
gaaactccccctgaa

SEQ ID NO: 1676680 - DNA, 15 bp, Homo sapiens
aaactccccctgaag

SEQ ID NO: 1676681 - DNA, 15 bp, Homo sapiens
aactccccctgaaga

SEQ ID NO: 1676682 - DNA, 15 bp, Homo sapiens
actccccctgaagaa

SEQ ID NO: 1676683 - DNA, 15 bp, Homo sapiens
ctccccctgaagaaa

SEQ ID NO: 1676684 - DNA, 15 bp, Homo sapiens
tccccctgaagaaaa

SEQ ID NO: 1676685 - DNA, 15 bp, Homo sapiens
ccccctgaagaaaac

SEQ ID NO: 1676686 - DNA, 15 bp, Homo sapiens
cccctgaagaaaact

SEQ ID NO: 1676687 - DNA, 15 bp, Homo sapiens
ccctgaagaaaactt

SEQ ID NO: 1676688 - DNA, 15 bp, Homo sapiens
cctgaagaaaacttc

SEQ ID NO: 1676689 - DNA, 15 bp, Homo sapiens
ctgaagaaaacttcc

SEQ ID NO: 1676690 - DNA, 15 bp, Homo sapiens
tgaagaaaacttcct

SEQ ID NO: 1676691 - DNA, 15 bp, Homo sapiens
gaagaaaacttcctt

SEQ ID NO: 1676692 - DNA, 15 bp, Homo sapiens
aagaaaacttccttc

SEQ ID NO: 1676693 - DNA, 15 bp, Homo sapiens
agaaaacttccttcc

SEQ ID NO: 1676694 - DNA, 15 bp, Homo sapiens
gaaaacttccttcct

SEQ ID NO: 1676695 - DNA, 15 bp, Homo sapiens
aaaacttccttcctg

SEQ ID NO: 1676696 - DNA, 15 bp, Homo sapiens
aaacttccttcctgc

SEQ ID NO: 1676697 - DNA, 15 bp, Homo sapiens
aacttccttcctgcc

SEQ ID NO: 1676698 - DNA, 15 bp, Homo sapiens
acttccttcctgcca

SEQ ID NO: 1676699 - DNA, 15 bp, Homo sapiens
cttccttcctgccag

SEQ ID NO: 1676700 - DNA, 15 bp, Homo sapiens
ttccttcctgccagt

SEQ ID NO: 1676701 - DNA, 15 bp, Homo sapiens
tccttcctgccagtt

SEQ ID NO: 1676702 - DNA, 15 bp, Homo sapiens
ccttcctgccagttg

SEQ ID NO: 1676703 - DNA, 15 bp, Homo sapiens
cttcctgccagttgc

SEQ ID NO: 1676704 - DNA, 15 bp, Homo sapiens
ttcctgccagttgct

SEQ ID NO: 1676705 - DNA, 15 bp, Homo sapiens
tcctgccagttgctt

SEQ ID NO: 1676706 - DNA, 15 bp, Homo sapiens
cctgccagttgcttt

SEQ ID NO: 1676707 - DNA, 15 bp, Homo sapiens
ctgccagttgctttt

SEQ ID NO: 1676708 - DNA, 15 bp, Homo sapiens
tgccagttgcttttc

SEQ ID NO: 1676709 - DNA, 15 bp, Homo sapiens
gccagttgcttttct

SEQ ID NO: 1676710 - DNA, 15 bp, Homo sapiens
ccagttgcttttctg

SEQ ID NO: 1676711 - DNA, 15 bp, Homo sapiens
cagttgcttttctgt

SEQ ID NO: 1676712 - DNA, 15 bp, Homo sapiens
agttgcttttctgtc

SEQ ID NO: 1676713 - DNA, 15 bp, Homo sapiens
gttgcttttctgtcc

SEQ ID NO: 1676714 - DNA, 15 bp, Homo sapiens
ttgcttttctgtccc

SEQ ID NO: 1676715 - DNA, 15 bp, Homo sapiens
tgcttttctgtcccc

SEQ ID NO: 1676716 - DNA, 15 bp, Homo sapiens
gcttttctgtcccca

SEQ ID NO: 1676717 - DNA, 15 bp, Homo sapiens
cttttctgtccccat

SEQ ID NO: 1676718 - DNA, 15 bp, Homo sapiens
ttttctgtccccata

SEQ ID NO: 1676719 - DNA, 15 bp, Homo sapiens
tttctgtccccatac

SEQ ID NO: 1676720 - DNA, 15 bp, Homo sapiens
ttctgtccccatact

SEQ ID NO: 1676721 - DNA, 15 bp, Homo sapiens
tctgtccccatactc

SEQ ID NO: 1676722 - DNA, 15 bp, Homo sapiens
ctgtccccatactct

SEQ ID NO: 1676723 - DNA, 15 bp, Homo sapiens
tgtccccatactctg

SEQ ID NO: 1676724 - DNA, 15 bp, Homo sapiens
gtccccatactctgt

SEQ ID NO: 1676725 - DNA, 15 bp, Homo sapiens
tccccatactctgtt

SEQ ID NO: 1676726 - DNA, 15 bp, Homo sapiens
ccccatactctgttt

SEQ ID NO: 1676727 - DNA, 15 bp, Homo sapiens
cccatactctgttta

SEQ ID NO: 1676728 - DNA, 15 bp, Homo sapiens
ccatactctgtttaa

SEQ ID NO: 1676729 - DNA, 15 bp, Homo sapiens
catactctgtttaat

SEQ ID NO: 1676730 - DNA, 15 bp, Homo sapiens
atactctgtttaata

SEQ ID NO: 1676731 - DNA, 15 bp, Homo sapiens
tactctgtttaatat

SEQ ID NO: 1676732 - DNA, 15 bp, Homo sapiens
actctgtttaatatt

SEQ ID NO: 1676733 - DNA, 15 bp, Homo sapiens
ctctgtttaatattc

SEQ ID NO: 1676734 - DNA, 15 bp, Homo sapiens
tctgtttaatattct

SEQ ID NO: 1676735 - DNA, 15 bp, Homo sapiens
ctgtttaatattctt

SEQ ID NO: 1676736 - DNA, 15 bp, Homo sapiens
tgtttaatattcttc

SEQ ID NO: 1676737 - DNA, 15 bp, Homo sapiens
gtttaatattcttct

SEQ ID NO: 1676738 - DNA, 15 bp, Homo sapiens
tttaatattcttcta

SEQ ID NO: 1676739 - DNA, 15 bp, Homo sapiens
ttaatattcttctag

SEQ ID NO: 1676740 - DNA, 15 bp, Homo sapiens
taatattcttctaga

SEQ ID NO: 1676741 - DNA, 15 bp, Homo sapiens
aatattcttctagaa

SEQ ID NO: 1676742 - DNA, 15 bp, Homo sapiens
atattcttctagaat

SEQ ID NO: 1676743 - DNA, 15 bp, Homo sapiens
tattcttctagaata

SEQ ID NO: 1676744 - DNA, 15 bp, Homo sapiens
attcttctagaatat

SEQ ID NO: 1676745 - DNA, 15 bp, Homo sapiens
ttcttctagaatatt

SEQ ID NO: 1676746 - DNA, 15 bp, Homo sapiens
tcttctagaatattc

SEQ ID NO: 1676747 - DNA, 15 bp, Homo sapiens
cttctagaatattct

SEQ ID NO: 1676748 - DNA, 15 bp, Homo sapiens
ttctagaatattctt

SEQ ID NO: 1676749 - DNA, 15 bp, Homo sapiens
tctagaatattcttc

SEQ ID NO: 1676750 - DNA, 15 bp, Homo sapiens
ctagaatattcttct

SEQ ID NO: 1676751 - DNA, 15 bp, Homo sapiens
tagaatattcttcta

SEQ ID NO: 1676752 - DNA, 15 bp, Homo sapiens
agaatattcttctaa

SEQ ID NO: 1676753 - DNA, 15 bp, Homo sapiens
gaatattcttctaaa

SEQ ID NO: 1676754 - DNA, 15 bp, Homo sapiens
aatattcttctaaaa

SEQ ID NO: 1676755 - DNA, 15 bp, Homo sapiens
atattcttctaaaat

SEQ ID NO: 1676756 - DNA, 15 bp, Homo sapiens
tattcttctaaaatg

SEQ ID NO: 1676757 - DNA, 15 bp, Homo sapiens
attcttctaaaatgt

SEQ ID NO: 1676758 - DNA, 15 bp, Homo sapiens
ttcttctaaaatgta

SEQ ID NO: 1676759 - DNA, 15 bp, Homo sapiens
tcttctaaaatgtag

SEQ ID NO: 1676760 - DNA, 15 bp, Homo sapiens
cttctaaaatgtagc

SEQ ID NO: 1676761 - DNA, 15 bp, Homo sapiens
ttctaaaatgtagca

SEQ ID NO: 1676762 - DNA, 15 bp, Homo sapiens
tctaaaatgtagcaa

SEQ ID NO: 1676763 - DNA, 15 bp, Homo sapiens
ctaaaatgtagcaat

SEQ ID NO: 1676764 - DNA, 15 bp, Homo sapiens
taaaatgtagcaatt

SEQ ID NO: 1676765 - DNA, 15 bp, Homo sapiens
aaaatgtagcaattt

SEQ ID NO: 1676766 - DNA, 15 bp, Homo sapiens
aaatgtagcaatttt

SEQ ID NO: 1676767 - DNA, 15 bp, Homo sapiens
aatgtagcaattttt

SEQ ID NO: 1676768 - DNA, 15 bp, Homo sapiens
atgtagcaatttttt

SEQ ID NO: 1676769 - DNA, 15 bp, Homo sapiens
tgtagcaattttttg

SEQ ID NO: 1676770 - DNA, 15 bp, Homo sapiens
gtagcaattttttgt

SEQ ID NO: 1676771 - DNA, 15 bp, Homo sapiens
tagcaattttttgta

SEQ ID NO: 1676772 - DNA, 15 bp, Homo sapiens
agcaattttttgtat

SEQ ID NO: 1676773 - DNA, 15 bp, Homo sapiens
gcaattttttgtatc

SEQ ID NO: 1676774 - DNA, 15 bp, Homo sapiens
caattttttgtatct

SEQ ID NO: 1676775 - DNA, 15 bp, Homo sapiens
aattttttgtatcta

SEQ ID NO: 1676776 - DNA, 15 bp, Homo sapiens
attttttgtatctat

SEQ ID NO: 1676777 - DNA, 15 bp, Homo sapiens
ttttttgtatctatt

SEQ ID NO: 1676778 - DNA, 15 bp, Homo sapiens
tttttgtatctattc

SEQ ID NO: 1676779 - DNA, 15 bp, Homo sapiens
ttttgtatctattct

SEQ ID NO: 1676780 - DNA, 15 bp, Homo sapiens
tttgtatctattcta

SEQ ID NO: 1676781 - DNA, 15 bp, Homo sapiens
ttgtatctattctaa

SEQ ID NO: 1676782 - DNA, 15 bp, Homo sapiens
tgtatctattctaaa

SEQ ID NO: 1676783 - DNA, 15 bp, Homo sapiens
gtatctattctaaaa

SEQ ID NO: 1676784 - DNA, 15 bp, Homo sapiens
tatctattctaaaaa

SEQ ID NO: 1676785 - DNA, 15 bp, Homo sapiens
atctattctaaaaat

SEQ ID NO: 1676786 - DNA, 15 bp, Homo sapiens
tctattctaaaaatg

SEQ ID NO: 1676787 - DNA, 15 bp, Homo sapiens
ctattctaaaaatgg

SEQ ID NO: 1676788 - DNA, 15 bp, Homo sapiens
tattctaaaaatgga

SEQ ID NO: 1676789 - DNA, 15 bp, Homo sapiens
attctaaaaatggag

SEQ ID NO: 1676790 - DNA, 15 bp, Homo sapiens
ttctaaaaatggagg

SEQ ID NO: 1676791 - DNA, 15 bp, Homo sapiens
tctaaaaatggaggc

SEQ ID NO: 1676792 - DNA, 15 bp, Homo sapiens
ctaaaaatggaggcc

SEQ ID NO: 1676793 - DNA, 15 bp, Homo sapiens
taaaaatggaggcca

SEQ ID NO: 1676794 - DNA, 15 bp, Homo sapiens
aaaaatggaggccaa

SEQ ID NO: 1676795 - DNA, 15 bp, Homo sapiens
aaaatggaggccaag

SEQ ID NO: 1676796 - DNA, 15 bp, Homo sapiens
aaatggaggccaagg

SEQ ID NO: 1676797 - DNA, 15 bp, Homo sapiens
aatggaggccaagga

SEQ ID NO: 1676798 - DNA, 15 bp, Homo sapiens
atggaggccaaggaa

SEQ ID NO: 1676799 - DNA, 15 bp, Homo sapiens
tggaggccaaggaag

SEQ ID NO: 1676800 - DNA, 15 bp, Homo sapiens
ggaggccaaggaagg

SEQ ID NO: 1676801 - DNA, 15 bp, Homo sapiens
gaggccaaggaaggc

SEQ ID NO: 1676802 - DNA, 15 bp, Homo sapiens
aggccaaggaaggca

SEQ ID NO: 1676803 - DNA, 15 bp, Homo sapiens
ggccaaggaaggcag

SEQ ID NO: 1676804 - DNA, 15 bp, Homo sapiens
gccaaggaaggcaga

SEQ ID NO: 1676805 - DNA, 15 bp, Homo sapiens
ccaaggaaggcagat

SEQ ID NO: 1676806 - DNA, 15 bp, Homo sapiens
caaggaaggcagatc

SEQ ID NO: 1676807 - DNA, 15 bp, Homo sapiens
aaggaaggcagatca

SEQ ID NO: 1676808 - DNA, 15 bp, Homo sapiens
aggaaggcagatcac

SEQ ID NO: 1676809 - DNA, 15 bp, Homo sapiens
ggaaggcagatcact

SEQ ID NO: 1676810 - DNA, 15 bp, Homo sapiens
gaaggcagatcactt

SEQ ID NO: 1676811 - DNA, 15 bp, Homo sapiens
aaggcagatcacttg

SEQ ID NO: 1676812 - DNA, 15 bp, Homo sapiens
tgagactagcctggc

SEQ ID NO: 1676813 - DNA, 15 bp, Homo sapiens
acatggtgaaaccat

SEQ ID NO: 1676814 - DNA, 15 bp, Homo sapiens
catggtgaaaccatg

SEQ ID NO: 1676815 - DNA, 15 bp, Homo sapiens
atggtgaaaccatgt

SEQ ID NO: 1676816 - DNA, 15 bp, Homo sapiens
tggtgaaaccatgtc

SEQ ID NO: 1676817 - DNA, 15 bp, Homo sapiens
ggtgaaaccatgtct

SEQ ID NO: 1676818 - DNA, 15 bp, Homo sapiens
gtgaaaccatgtctc

SEQ ID NO: 1676819 - DNA, 15 bp, Homo sapiens
tgaaaccatgtctct

SEQ ID NO: 1676820 - DNA, 15 bp, Homo sapiens
gaaaccatgtctcta

SEQ ID NO: 1676821 - DNA, 15 bp, Homo sapiens
aaaccatgtctctac

SEQ ID NO: 1676822 - DNA, 15 bp, Homo sapiens
aaccatgtctctact

SEQ ID NO: 1676823 - DNA, 15 bp, Homo sapiens
accatgtctctacta

SEQ ID NO: 1676824 - DNA, 15 bp, Homo sapiens
ccatgtctctactaa

SEQ ID NO: 1676825 - DNA, 15 bp, Homo sapiens
catgtctctactaaa

SEQ ID NO: 1676826 - DNA, 15 bp, Homo sapiens
atgtctctactaaaa

SEQ ID NO: 1676827 - DNA, 15 bp, Homo sapiens
gtctctactaaaaag

SEQ ID NO: 1676828 - DNA, 15 bp, Homo sapiens
tctctactaaaaagg

SEQ ID NO: 1676829 - DNA, 15 bp, Homo sapiens
ctctactaaaaaggg

SEQ ID NO: 1676830 - DNA, 15 bp, Homo sapiens
tctactaaaaagggt

SEQ ID NO: 1676831 - DNA, 15 bp, Homo sapiens
ctactaaaaagggta

SEQ ID NO: 1676832 - DNA, 15 bp, Homo sapiens
tactaaaaagggtaa

SEQ ID NO: 1676833 - DNA, 15 bp, Homo sapiens
actaaaaagggtaag

SEQ ID NO: 1676834 - DNA, 15 bp, Homo sapiens
ctaaaaagggtaaga

SEQ ID NO: 1676835 - DNA, 15 bp, Homo sapiens
taaaaagggtaagat

SEQ ID NO: 1676836 - DNA, 15 bp, Homo sapiens
aaaaagggtaagatt

SEQ ID NO: 1676837 - DNA, 15 bp, Homo sapiens
aaaagggtaagattt

SEQ ID NO: 1676838 - DNA, 15 bp, Homo sapiens
aaagggtaagatttt

SEQ ID NO: 1676839 - DNA, 15 bp, Homo sapiens
aagggtaagattttg

SEQ ID NO: 1676840 - DNA, 15 bp, Homo sapiens
agggtaagattttga

SEQ ID NO: 1676841 - DNA, 15 bp, Homo sapiens
gggtaagattttgag

SEQ ID NO: 1676842 - DNA, 15 bp, Homo sapiens
ggtaagattttgagg

SEQ ID NO: 1676843 - DNA, 15 bp, Homo sapiens
gtaagattttgaggc

SEQ ID NO: 1676844 - DNA, 15 bp, Homo sapiens
taagattttgaggct

SEQ ID NO: 1676845 - DNA, 15 bp, Homo sapiens
aagattttgaggctg

SEQ ID NO: 1676846 - DNA, 15 bp, Homo sapiens
agattttgaggctgc

SEQ ID NO: 1676847 - DNA, 15 bp, Homo sapiens
gattttgaggctgca

SEQ ID NO: 1676848 - DNA, 15 bp, Homo sapiens
attttgaggctgcag

SEQ ID NO: 1676849 - DNA, 15 bp, Homo sapiens
ttttgaggctgcagt

SEQ ID NO: 1676850 - DNA, 15 bp, Homo sapiens
gcagtgagctatgac

SEQ ID NO: 1676851 - DNA, 15 bp, Homo sapiens
cagtgagctatgacg

SEQ ID NO: 1676852 - DNA, 15 bp, Homo sapiens
agtgagctatgacgg

SEQ ID NO: 1676853 - DNA, 15 bp, Homo sapiens
gtgagctatgacggc

SEQ ID NO: 1676854 - DNA, 15 bp, Homo sapiens
tgagctatgacggca

SEQ ID NO: 1676855 - DNA, 15 bp, Homo sapiens
gagctatgacggcac

SEQ ID NO: 1676856 - DNA, 15 bp, Homo sapiens
agctatgacggcacc

SEQ ID NO: 1676857 - DNA, 15 bp, Homo sapiens
gctatgacggcacca

SEQ ID NO: 1676858 - DNA, 15 bp, Homo sapiens
ctatgacggcaccat

SEQ ID NO: 1676859 - DNA, 15 bp, Homo sapiens
tatgacggcaccatt

SEQ ID NO: 1676860 - DNA, 15 bp, Homo sapiens
atgacggcaccattg

SEQ ID NO: 1676861 - DNA, 15 bp, Homo sapiens
tgacggcaccattgc

SEQ ID NO: 1676862 - DNA, 15 bp, Homo sapiens
gacggcaccattgca

SEQ ID NO: 1676863 - DNA, 15 bp, Homo sapiens
acggcaccattgcac

SEQ ID NO: 1676864 - DNA, 15 bp, Homo sapiens
cggcaccattgcact

SEQ ID NO: 1676865 - DNA, 15 bp, Homo sapiens
ccattgcactccagg

SEQ ID NO: 1676866 - DNA, 15 bp, Homo sapiens
cattgcactccaggc

SEQ ID NO: 1676867 - DNA, 15 bp, Homo sapiens
attgcactccaggct

SEQ ID NO: 1676868 - DNA, 15 bp, Homo sapiens
ttgcactccaggctg

SEQ ID NO: 1676869 - DNA, 15 bp, Homo sapiens
caacagagcgagaca

SEQ ID NO: 1676870 - DNA, 15 bp, Homo sapiens
aacagagcgagacac

SEQ ID NO: 1676871 - DNA, 15 bp, Homo sapiens
acagagcgagacacc

SEQ ID NO: 1676872 - DNA, 15 bp, Homo sapiens
cagagcgagacacca

SEQ ID NO: 1676873 - DNA, 15 bp, Homo sapiens
agagcgagacaccat

SEQ ID NO: 1676874 - DNA, 15 bp, Homo sapiens
gagcgagacaccatc

SEQ ID NO: 1676875 - DNA, 15 bp, Homo sapiens
agcgagacaccatct

SEQ ID NO: 1676876 - DNA, 15 bp, Homo sapiens
gcgagacaccatctc

SEQ ID NO: 1676877 - DNA, 15 bp, Homo sapiens
cgagacaccatctca

SEQ ID NO: 1676878 - DNA, 15 bp, Homo sapiens
agacaccatctcaat

SEQ ID NO: 1676879 - DNA, 15 bp, Homo sapiens
gacaccatctcaata

SEQ ID NO: 1676880 - DNA, 15 bp, Homo sapiens
acaccatctcaataa

SEQ ID NO: 1676881 - DNA, 15 bp, Homo sapiens
caccatctcaataaa

SEQ ID NO: 1676882 - DNA, 15 bp, Homo sapiens
accatctcaataaaa

SEQ ID NO: 1676883 - DNA, 15 bp, Homo sapiens
ctcaataaaaaaaaa

SEQ ID NO: 1676884 - DNA, 15 bp, Homo sapiens
tcaataaaaaaaaaa

SEQ ID NO: 1676885 - DNA, 15 bp, Homo sapiens
caataaaaaaaaaaa

SEQ ID NO: 1676886 - DNA, 15 bp, Homo sapiens
aaaaaaaaaagcagg

SEQ ID NO: 1676887 - DNA, 15 bp, Homo sapiens
aaaaaaaaagcaggg

SEQ ID NO: 1676888 - DNA, 15 bp, Homo sapiens
aaaaaaaagcagggt

SEQ ID NO: 1676889 - DNA, 15 bp, Homo sapiens
aaaaaaagcagggtg

SEQ ID NO: 1676890 - DNA, 15 bp, Homo sapiens
aaaaaagcagggtgc

SEQ ID NO: 1676891 - DNA, 15 bp, Homo sapiens
aaaaagcagggtgcg

SEQ ID NO: 1676892 - DNA, 15 bp, Homo sapiens
aaaagcagggtgcgg

SEQ ID NO: 1676893 - DNA, 15 bp, Homo sapiens
aaagcagggtgcggt

SEQ ID NO: 1676894 - DNA, 15 bp, Homo sapiens
aagcagggtgcggtg

SEQ ID NO: 1676895 - DNA, 15 bp, Homo sapiens
agcagggtgcggtgg

SEQ ID NO: 1676896 - DNA, 15 bp, Homo sapiens
gcagggtgcggtggc

SEQ ID NO: 1676897 - DNA, 15 bp, Homo sapiens
cagggtgcggtggct

SEQ ID NO: 1676898 - DNA, 15 bp, Homo sapiens
agggtgcggtggctc

SEQ ID NO: 1676899 - DNA, 15 bp, Homo sapiens
ggtgcggtggctcaa

SEQ ID NO: 1676900 - DNA, 15 bp, Homo sapiens
gtgcggtggctcaag

SEQ ID NO: 1676901 - DNA, 15 bp, Homo sapiens
agcctgtaatcccaa

SEQ ID NO: 1676902 - DNA, 15 bp, Homo sapiens
tcgagaccagcctgc

SEQ ID NO: 1676903 - DNA, 15 bp, Homo sapiens
cgagaccagcctgcc

SEQ ID NO: 1676904 - DNA, 15 bp, Homo sapiens
gagaccagcctgccc

SEQ ID NO: 1676905 - DNA, 15 bp, Homo sapiens
agaccagcctgccca

SEQ ID NO: 1676906 - DNA, 15 bp, Homo sapiens
gaccagcctgcccaa

SEQ ID NO: 1676907 - DNA, 15 bp, Homo sapiens
accagcctgcccaac

SEQ ID NO: 1676908 - DNA, 15 bp, Homo sapiens
ccagcctgcccaaca

SEQ ID NO: 1676909 - DNA, 15 bp, Homo sapiens
cagcctgcccaacat

SEQ ID NO: 1676910 - DNA, 15 bp, Homo sapiens
agcctgcccaacata

SEQ ID NO: 1676911 - DNA, 15 bp, Homo sapiens
gcctgcccaacatag

SEQ ID NO: 1676912 - DNA, 15 bp, Homo sapiens
cctgcccaacatagt

SEQ ID NO: 1676913 - DNA, 15 bp, Homo sapiens
ctgcccaacatagtg

SEQ ID NO: 1676914 - DNA, 15 bp, Homo sapiens
tgcccaacatagtga

SEQ ID NO: 1676915 - DNA, 15 bp, Homo sapiens
gcccaacatagtgaa

SEQ ID NO: 1676916 - DNA, 15 bp, Homo sapiens
cccaacatagtgaaa

SEQ ID NO: 1676917 - DNA, 15 bp, Homo sapiens
gtgaaaccctgtcta

SEQ ID NO: 1676918 - DNA, 15 bp, Homo sapiens
tgaaaccctgtctac

SEQ ID NO: 1676919 - DNA, 15 bp, Homo sapiens
gaaaccctgtctact

SEQ ID NO: 1676920 - DNA, 15 bp, Homo sapiens
aaaccctgtctacta

SEQ ID NO: 1676921 - DNA, 15 bp, Homo sapiens
aaccctgtctactaa

SEQ ID NO: 1676922 - DNA, 15 bp, Homo sapiens
accctgtctactaaa

SEQ ID NO: 1676923 - DNA, 15 bp, Homo sapiens
ctgtctactaaaaat

SEQ ID NO: 1676924 - DNA, 15 bp, Homo sapiens
tgtctactaaaaata

SEQ ID NO: 1676925 - DNA, 15 bp, Homo sapiens
gtctactaaaaatac

SEQ ID NO: 1676926 - DNA, 15 bp, Homo sapiens
caaaaaaattagccg

SEQ ID NO: 1676927 - DNA, 15 bp, Homo sapiens
aaattagccgggtat

SEQ ID NO: 1676928 - DNA, 15 bp, Homo sapiens
aattagccgggtatg

SEQ ID NO: 1676929 - DNA, 15 bp, Homo sapiens
attagccgggtatgc

SEQ ID NO: 1676930 - DNA, 15 bp, Homo sapiens
ttagccgggtatgct

SEQ ID NO: 1676931 - DNA, 15 bp, Homo sapiens
tagccgggtatgctg

SEQ ID NO: 1676932 - DNA, 15 bp, Homo sapiens
agccgggtatgctgg

SEQ ID NO: 1676933 - DNA, 15 bp, Homo sapiens
gccgggtatgctggc

SEQ ID NO: 1676934 - DNA, 15 bp, Homo sapiens
ccgggtatgctggca

SEQ ID NO: 1676935 - DNA, 15 bp, Homo sapiens
cgggtatgctggcag

SEQ ID NO: 1676936 - DNA, 15 bp, Homo sapiens
gggtatgctggcagg

SEQ ID NO: 1676937 - DNA, 15 bp, Homo sapiens
ggtatgctggcaggt

SEQ ID NO: 1676938 - DNA, 15 bp, Homo sapiens
gtatgctggcaggtg

SEQ ID NO: 1676939 - DNA, 15 bp, Homo sapiens
tatgctggcaggtga

SEQ ID NO: 1676940 - DNA, 15 bp, Homo sapiens
atgctggcaggtgac

SEQ ID NO: 1676941 - DNA, 15 bp, Homo sapiens
tgctggcaggtgact

SEQ ID NO: 1676942 - DNA, 15 bp, Homo sapiens
gctggcaggtgactg

SEQ ID NO: 1676943 - DNA, 15 bp, Homo sapiens
ctggcaggtgactgc

SEQ ID NO: 1676944 - DNA, 15 bp, Homo sapiens
tggcaggtgactgca

SEQ ID NO: 1676945 - DNA, 15 bp, Homo sapiens
ggcaggtgactgcac

SEQ ID NO: 1676946 - DNA, 15 bp, Homo sapiens
gcaggtgactgcacc

SEQ ID NO: 1676947 - DNA, 15 bp, Homo sapiens
caggtgactgcacca

SEQ ID NO: 1676948 - DNA, 15 bp, Homo sapiens
aggtgactgcaccat

SEQ ID NO: 1676949 - DNA, 15 bp, Homo sapiens
ggtgactgcaccata

SEQ ID NO: 1676950 - DNA, 15 bp, Homo sapiens
gtgactgcaccataa

SEQ ID NO: 1676951 - DNA, 15 bp, Homo sapiens
tgactgcaccataaa

SEQ ID NO: 1676952 - DNA, 15 bp, Homo sapiens
gactgcaccataaaa

SEQ ID NO: 1676953 - DNA, 15 bp, Homo sapiens
actgcaccataaaaa

SEQ ID NO: 1676954 - DNA, 15 bp, Homo sapiens
ctgcaccataaaaaa

SEQ ID NO: 1676955 - DNA, 15 bp, Homo sapiens
tgcaccataaaaaat

SEQ ID NO: 1676956 - DNA, 15 bp, Homo sapiens
gcaccataaaaaatg

SEQ ID NO: 1676957 - DNA, 15 bp, Homo sapiens
caccataaaaaatgt

SEQ ID NO: 1676958 - DNA, 15 bp, Homo sapiens
accataaaaaatgtt

SEQ ID NO: 1676959 - DNA, 15 bp, Homo sapiens
ccataaaaaatgttc

SEQ ID NO: 1676960 - DNA, 15 bp, Homo sapiens
cataaaaaatgttca

SEQ ID NO: 1676961 - DNA, 15 bp, Homo sapiens
ataaaaaatgttcaa

SEQ ID NO: 1676962 - DNA, 15 bp, Homo sapiens
taaaaaatgttcaag

SEQ ID NO: 1676963 - DNA, 15 bp, Homo sapiens
aaaaaatgttcaaga

SEQ ID NO: 1676964 - DNA, 15 bp, Homo sapiens
aaaaatgttcaagat

SEQ ID NO: 1676965 - DNA, 15 bp, Homo sapiens
aaaatgttcaagatt

SEQ ID NO: 1676966 - DNA, 15 bp, Homo sapiens
aaatgttcaagatta

SEQ ID NO: 1676967 - DNA, 15 bp, Homo sapiens
aatgttcaagattaa

SEQ ID NO: 1676968 - DNA, 15 bp, Homo sapiens
atgttcaagattaaa

SEQ ID NO: 1676969 - DNA, 15 bp, Homo sapiens
tgttcaagattaaac

SEQ ID NO: 1676970 - DNA, 15 bp, Homo sapiens
gttcaagattaaaca

SEQ ID NO: 1676971 - DNA, 15 bp, Homo sapiens
ttcaagattaaacag

SEQ ID NO: 1676972 - DNA, 15 bp, Homo sapiens
tcaagattaaacagg

SEQ ID NO: 1676973 - DNA, 15 bp, Homo sapiens
caagattaaacaggg

SEQ ID NO: 1676974 - DNA, 15 bp, Homo sapiens
aagattaaacagggg

SEQ ID NO: 1676975 - DNA, 15 bp, Homo sapiens
agattaaacaggggg

SEQ ID NO: 1676976 - DNA, 15 bp, Homo sapiens
gattaaacaggggga

SEQ ID NO: 1676977 - DNA, 15 bp, Homo sapiens
attaaacagggggac

SEQ ID NO: 1676978 - DNA, 15 bp, Homo sapiens
ttaaacagggggacg

SEQ ID NO: 1676979 - DNA, 15 bp, Homo sapiens
taaacagggggacgg

SEQ ID NO: 1676980 - DNA, 15 bp, Homo sapiens
aaacagggggacggt

SEQ ID NO: 1676981 - DNA, 15 bp, Homo sapiens
aacagggggacggtg

SEQ ID NO: 1676982 - DNA, 15 bp, Homo sapiens
acagggggacggtga

SEQ ID NO: 1676983 - DNA, 15 bp, Homo sapiens
cagggggacggtgag

SEQ ID NO: 1676984 - DNA, 15 bp, Homo sapiens
agggggacggtgagg

SEQ ID NO: 1676985 - DNA, 15 bp, Homo sapiens
gggggacggtgaggt

SEQ ID NO: 1676986 - DNA, 15 bp, Homo sapiens
ggggacggtgaggta

SEQ ID NO: 1676987 - DNA, 15 bp, Homo sapiens
gggacggtgaggtaa

SEQ ID NO: 1676988 - DNA, 15 bp, Homo sapiens
ggacggtgaggtaac

SEQ ID NO: 1676989 - DNA, 15 bp, Homo sapiens
gacggtgaggtaacc

SEQ ID NO: 1676990 - DNA, 15 bp, Homo sapiens
acggtgaggtaaccc

SEQ ID NO: 1676991 - DNA, 15 bp, Homo sapiens
cggtgaggtaaccca

SEQ ID NO: 1676992 - DNA, 15 bp, Homo sapiens
ggtgaggtaacccag

SEQ ID NO: 1676993 - DNA, 15 bp, Homo sapiens
gtgaggtaacccaga

SEQ ID NO: 1676994 - DNA, 15 bp, Homo sapiens
tgaggtaacccagaa

SEQ ID NO: 1676995 - DNA, 15 bp, Homo sapiens
gaggtaacccagaaa

SEQ ID NO: 1676996 - DNA, 15 bp, Homo sapiens
aggtaacccagaaat

SEQ ID NO: 1676997 - DNA, 15 bp, Homo sapiens
ggtaacccagaaata

SEQ ID NO: 1676998 - DNA, 15 bp, Homo sapiens
gtaacccagaaataa

SEQ ID NO: 1676999 - DNA, 15 bp, Homo sapiens
taacccagaaataag

SEQ ID NO: 1677000 - DNA, 15 bp, Homo sapiens
aacccagaaataagc

SEQ ID NO: 1677001 - DNA, 15 bp, Homo sapiens
acccagaaataagca

SEQ ID NO: 1677002 - DNA, 15 bp, Homo sapiens
cccagaaataagcaa

SEQ ID NO: 1677003 - DNA, 15 bp, Homo sapiens
ccagaaataagcaac

SEQ ID NO: 1677004 - DNA, 15 bp, Homo sapiens
cagaaataagcaaca

SEQ ID NO: 1677005 - DNA, 15 bp, Homo sapiens
agaaataagcaacag

SEQ ID NO: 1677006 - DNA, 15 bp, Homo sapiens
gaaataagcaacagc

SEQ ID NO: 1677007 - DNA, 15 bp, Homo sapiens
aaataagcaacagca

SEQ ID NO: 1677008 - DNA, 15 bp, Homo sapiens
aataagcaacagcag

SEQ ID NO: 1677009 - DNA, 15 bp, Homo sapiens
ataagcaacagcaga

SEQ ID NO: 1677010 - DNA, 15 bp, Homo sapiens
taagcaacagcagaa

SEQ ID NO: 1677011 - DNA, 15 bp, Homo sapiens
aagcaacagcagaaa

SEQ ID NO: 1677012 - DNA, 15 bp, Homo sapiens
agcaacagcagaaag

SEQ ID NO: 1677013 - DNA, 15 bp, Homo sapiens
gcaacagcagaaagc

SEQ ID NO: 1677014 - DNA, 15 bp, Homo sapiens
caacagcagaaagcg

SEQ ID NO: 1677015 - DNA, 15 bp, Homo sapiens
aacagcagaaagcgc

SEQ ID NO: 1677016 - DNA, 15 bp, Homo sapiens
acagcagaaagcgcc

SEQ ID NO: 1677017 - DNA, 15 bp, Homo sapiens
cagcagaaagcgcca

SEQ ID NO: 1677018 - DNA, 15 bp, Homo sapiens
agcagaaagcgccac

SEQ ID NO: 1677019 - DNA, 15 bp, Homo sapiens
gcagaaagcgccacc

SEQ ID NO: 1677020 - DNA, 15 bp, Homo sapiens
cagaaagcgccacca

SEQ ID NO: 1677021 - DNA, 15 bp, Homo sapiens
agaaagcgccaccac

SEQ ID NO: 1677022 - DNA, 15 bp, Homo sapiens
gaaagcgccaccacc

SEQ ID NO: 1677023 - DNA, 15 bp, Homo sapiens
aaagcgccaccacca

SEQ ID NO: 1677024 - DNA, 15 bp, Homo sapiens
aagcgccaccaccac

SEQ ID NO: 1677025 - DNA, 15 bp, Homo sapiens
agcgccaccaccaca

SEQ ID NO: 1677026 - DNA, 15 bp, Homo sapiens
gcgccaccaccacaa

SEQ ID NO: 1677027 - DNA, 15 bp, Homo sapiens
cgccaccaccacaaa

SEQ ID NO: 1677028 - DNA, 15 bp, Homo sapiens
gccaccaccacaaaa

SEQ ID NO: 1677029 - DNA, 15 bp, Homo sapiens
ccaccaccacaaaac

SEQ ID NO: 1677030 - DNA, 15 bp, Homo sapiens
caccaccacaaaacc

SEQ ID NO: 1677031 - DNA, 15 bp, Homo sapiens
accaccacaaaacca

SEQ ID NO: 1677032 - DNA, 15 bp, Homo sapiens
ccaccacaaaaccag

SEQ ID NO: 1677033 - DNA, 15 bp, Homo sapiens
caccacaaaaccagg

SEQ ID NO: 1677034 - DNA, 15 bp, Homo sapiens
accacaaaaccagga

SEQ ID NO: 1677035 - DNA, 15 bp, Homo sapiens
ccacaaaaccaggag

SEQ ID NO: 1677036 - DNA, 15 bp, Homo sapiens
cacaaaaccaggaga

SEQ ID NO: 1677037 - DNA, 15 bp, Homo sapiens
acaaaaccaggagag

SEQ ID NO: 1677038 - DNA, 15 bp, Homo sapiens
caaaaccaggagagg

SEQ ID NO: 1677039 - DNA, 15 bp, Homo sapiens
aaaaccaggagagga

SEQ ID NO: 1677040 - DNA, 15 bp, Homo sapiens
aaaccaggagaggaa

SEQ ID NO: 1677041 - DNA, 15 bp, Homo sapiens
aaccaggagaggaag

SEQ ID NO: 1677042 - DNA, 15 bp, Homo sapiens
accaggagaggaaga

SEQ ID NO: 1677043 - DNA, 15 bp, Homo sapiens
ccaggagaggaagat

SEQ ID NO: 1677044 - DNA, 15 bp, Homo sapiens
caggagaggaagatg

SEQ ID NO: 1677045 - DNA, 15 bp, Homo sapiens
aggagaggaagatgt

SEQ ID NO: 1677046 - DNA, 15 bp, Homo sapiens
ggagaggaagatgtg

SEQ ID NO: 1677047 - DNA, 15 bp, Homo sapiens
gagaggaagatgtgg

SEQ ID NO: 1677048 - DNA, 15 bp, Homo sapiens
agaggaagatgtggt

SEQ ID NO: 1677049 - DNA, 15 bp, Homo sapiens
gaggaagatgtggtt

SEQ ID NO: 1677050 - DNA, 15 bp, Homo sapiens
aggaagatgtggttt

SEQ ID NO: 1677051 - DNA, 15 bp, Homo sapiens
ggaagatgtggtttc

SEQ ID NO: 1677052 - DNA, 15 bp, Homo sapiens
gaagatgtggtttct

SEQ ID NO: 1677053 - DNA, 15 bp, Homo sapiens
aagatgtggtttctg

SEQ ID NO: 1677054 - DNA, 15 bp, Homo sapiens
agatgtggtttctgg

SEQ ID NO: 1677055 - DNA, 15 bp, Homo sapiens
gatgtggtttctgga

SEQ ID NO: 1677056 - DNA, 15 bp, Homo sapiens
atgtggtttctggag

SEQ ID NO: 1677057 - DNA, 15 bp, Homo sapiens
tgtggtttctggagc

SEQ ID NO: 1677058 - DNA, 15 bp, Homo sapiens
gtggtttctggagcc

SEQ ID NO: 1677059 - DNA, 15 bp, Homo sapiens
tggtttctggagcct

SEQ ID NO: 1677060 - DNA, 15 bp, Homo sapiens
ggtttctggagcctg

SEQ ID NO: 1677061 - DNA, 15 bp, Homo sapiens
gtttctggagcctgg

SEQ ID NO: 1677062 - DNA, 15 bp, Homo sapiens
tttctggagcctggg

SEQ ID NO: 1677063 - DNA, 15 bp, Homo sapiens
ttctggagcctggga

SEQ ID NO: 1677064 - DNA, 15 bp, Homo sapiens
tctggagcctgggag

SEQ ID NO: 1677065 - DNA, 15 bp, Homo sapiens
ctggagcctgggagc

SEQ ID NO: 1677066 - DNA, 15 bp, Homo sapiens
tggagcctgggagct

SEQ ID NO: 1677067 - DNA, 15 bp, Homo sapiens
ggagcctgggagctg

SEQ ID NO: 1677068 - DNA, 15 bp, Homo sapiens
gagcctgggagctgg

SEQ ID NO: 1677069 - DNA, 15 bp, Homo sapiens
agcctgggagctggt

SEQ ID NO: 1677070 - DNA, 15 bp, Homo sapiens
gcctgggagctggtg

SEQ ID NO: 1677071 - DNA, 15 bp, Homo sapiens
cctgggagctggtga

SEQ ID NO: 1677072 - DNA, 15 bp, Homo sapiens
ctgggagctggtgag

SEQ ID NO: 1677073 - DNA, 15 bp, Homo sapiens
tgggagctggtgaga

SEQ ID NO: 1677074 - DNA, 15 bp, Homo sapiens
gggagctggtgagag

SEQ ID NO: 1677075 - DNA, 15 bp, Homo sapiens
ggagctggtgagagc

SEQ ID NO: 1677076 - DNA, 15 bp, Homo sapiens
gagctggtgagagcc

SEQ ID NO: 1677077 - DNA, 15 bp, Homo sapiens
agctggtgagagcca

SEQ ID NO: 1677078 - DNA, 15 bp, Homo sapiens
gctggtgagagccag

SEQ ID NO: 1677079 - DNA, 15 bp, Homo sapiens
ctggtgagagccaga

SEQ ID NO: 1677080 - DNA, 15 bp, Homo sapiens
tggtgagagccagaa

SEQ ID NO: 1677081 - DNA, 15 bp, Homo sapiens
ggtgagagccagaaa

SEQ ID NO: 1677082 - DNA, 15 bp, Homo sapiens
gtgagagccagaaac

SEQ ID NO: 1677083 - DNA, 15 bp, Homo sapiens
tgagagccagaaact

SEQ ID NO: 1677084 - DNA, 15 bp, Homo sapiens
gagagccagaaactc

SEQ ID NO: 1677085 - DNA, 15 bp, Homo sapiens
agagccagaaactca

SEQ ID NO: 1677086 - DNA, 15 bp, Homo sapiens
gagccagaaactcat

SEQ ID NO: 1677087 - DNA, 15 bp, Homo sapiens
agccagaaactcata

SEQ ID NO: 1677088 - DNA, 15 bp, Homo sapiens
gccagaaactcatag

SEQ ID NO: 1677089 - DNA, 15 bp, Homo sapiens
ccagaaactcatagg

SEQ ID NO: 1677090 - DNA, 15 bp, Homo sapiens
cagaaactcatagga

SEQ ID NO: 1677091 - DNA, 15 bp, Homo sapiens
agaaactcataggag

SEQ ID NO: 1677092 - DNA, 15 bp, Homo sapiens
gaaactcataggagg

SEQ ID NO: 1677093 - DNA, 15 bp, Homo sapiens
aaactcataggaggg

SEQ ID NO: 1677094 - DNA, 15 bp, Homo sapiens
aactcataggaggga

SEQ ID NO: 1677095 - DNA, 15 bp, Homo sapiens
actcataggagggaa

SEQ ID NO: 1677096 - DNA, 15 bp, Homo sapiens
ctcataggagggaaa

SEQ ID NO: 1677097 - DNA, 15 bp, Homo sapiens
tcataggagggaaag

SEQ ID NO: 1677098 - DNA, 15 bp, Homo sapiens
cataggagggaaaga

SEQ ID NO: 1677099 - DNA, 15 bp, Homo sapiens
ataggagggaaagaa

SEQ ID NO: 1677100 - DNA, 15 bp, Homo sapiens
taggagggaaagaag

SEQ ID NO: 1677101 - DNA, 15 bp, Homo sapiens
aggagggaaagaagt

SEQ ID NO: 1677102 - DNA, 15 bp, Homo sapiens
ggagggaaagaagtg

SEQ ID NO: 1677103 - DNA, 15 bp, Homo sapiens
gagggaaagaagtgc

SEQ ID NO: 1677104 - DNA, 15 bp, Homo sapiens
agggaaagaagtgct

SEQ ID NO: 1677105 - DNA, 15 bp, Homo sapiens
gggaaagaagtgctg

SEQ ID NO: 1677106 - DNA, 15 bp, Homo sapiens
ggaaagaagtgctgc

SEQ ID NO: 1677107 - DNA, 15 bp, Homo sapiens
gaaagaagtgctgca

SEQ ID NO: 1677108 - DNA, 15 bp, Homo sapiens
aaagaagtgctgcag

SEQ ID NO: 1677109 - DNA, 15 bp, Homo sapiens
aagaagtgctgcaga

SEQ ID NO: 1677110 - DNA, 15 bp, Homo sapiens
agaagtgctgcagac

SEQ ID NO: 1677111 - DNA, 15 bp, Homo sapiens
gaagtgctgcagaca

SEQ ID NO: 1677112 - DNA, 15 bp, Homo sapiens
aagtgctgcagacat

SEQ ID NO: 1677113 - DNA, 15 bp, Homo sapiens
agtgctgcagacatg

SEQ ID NO: 1677114 - DNA, 15 bp, Homo sapiens
gtgctgcagacatgg

SEQ ID NO: 1677115 - DNA, 15 bp, Homo sapiens
tgctgcagacatggt

SEQ ID NO: 1677116 - DNA, 15 bp, Homo sapiens
gctgcagacatggtc

SEQ ID NO: 1677117 - DNA, 15 bp, Homo sapiens
ctgcagacatggtcc

SEQ ID NO: 1677118 - DNA, 15 bp, Homo sapiens
tgcagacatggtccc

SEQ ID NO: 1677119 - DNA, 15 bp, Homo sapiens
gcagacatggtcccc

SEQ ID NO: 1677120 - DNA, 15 bp, Homo sapiens
cagacatggtcccca

SEQ ID NO: 1677121 - DNA, 15 bp, Homo sapiens
agacatggtccccag

SEQ ID NO: 1677122 - DNA, 15 bp, Homo sapiens
gacatggtccccagc

SEQ ID NO: 1677123 - DNA, 15 bp, Homo sapiens
acatggtccccagca

SEQ ID NO: 1677124 - DNA, 15 bp, Homo sapiens
catggtccccagcag

SEQ ID NO: 1677125 - DNA, 15 bp, Homo sapiens
atggtccccagcaga

SEQ ID NO: 1677126 - DNA, 15 bp, Homo sapiens
tggtccccagcagag

SEQ ID NO: 1677127 - DNA, 15 bp, Homo sapiens
ggtccccagcagagc

SEQ ID NO: 1677128 - DNA, 15 bp, Homo sapiens
tccccagcagagcga

SEQ ID NO: 1677129 - DNA, 15 bp, Homo sapiens
ccccagcagagcgag

SEQ ID NO: 1677130 - DNA, 15 bp, Homo sapiens
cccagcagagcgagg

SEQ ID NO: 1677131 - DNA, 15 bp, Homo sapiens
ccagcagagcgaggc

SEQ ID NO: 1677132 - DNA, 15 bp, Homo sapiens
cagcagagcgaggcg

SEQ ID NO: 1677133 - DNA, 15 bp, Homo sapiens
agcagagcgaggcgg

SEQ ID NO: 1677134 - DNA, 15 bp, Homo sapiens
gcagagcgaggcggg

SEQ ID NO: 1677135 - DNA, 15 bp, Homo sapiens
cagagcgaggcgggg

SEQ ID NO: 1677136 - DNA, 15 bp, Homo sapiens
agagcgaggcgggga

SEQ ID NO: 1677137 - DNA, 15 bp, Homo sapiens
gagcgaggcggggaa

SEQ ID NO: 1677138 - DNA, 15 bp, Homo sapiens
agcgaggcggggaag

SEQ ID NO: 1677139 - DNA, 15 bp, Homo sapiens
gcgaggcggggaaga

SEQ ID NO: 1677140 - DNA, 15 bp, Homo sapiens
cgaggcggggaagag

SEQ ID NO: 1677141 - DNA, 15 bp, Homo sapiens
gaggcggggaagagc

SEQ ID NO: 1677142 - DNA, 15 bp, Homo sapiens
aggcggggaagagcc

SEQ ID NO: 1677143 - DNA, 15 bp, Homo sapiens
ggcggggaagagccc

SEQ ID NO: 1677144 - DNA, 15 bp, Homo sapiens
gcggggaagagccca

SEQ ID NO: 1677145 - DNA, 15 bp, Homo sapiens
cggggaagagcccag

SEQ ID NO: 1677146 - DNA, 15 bp, Homo sapiens
ggggaagagcccagc

SEQ ID NO: 1677147 - DNA, 15 bp, Homo sapiens
gggaagagcccagcc

SEQ ID NO: 1677148 - DNA, 15 bp, Homo sapiens
ggaagagcccagcct

SEQ ID NO: 1677149 - DNA, 15 bp, Homo sapiens
gaagagcccagcctg

SEQ ID NO: 1677150 - DNA, 15 bp, Homo sapiens
aagagcccagcctgt

SEQ ID NO: 1677151 - DNA, 15 bp, Homo sapiens
agagcccagcctgtc

SEQ ID NO: 1677152 - DNA, 15 bp, Homo sapiens
gagcccagcctgtcc

SEQ ID NO: 1677153 - DNA, 15 bp, Homo sapiens
agcccagcctgtccc

SEQ ID NO: 1677154 - DNA, 15 bp, Homo sapiens
gcccagcctgtcccc

SEQ ID NO: 1677155 - DNA, 15 bp, Homo sapiens
cccagcctgtccccc

SEQ ID NO: 1677156 - DNA, 15 bp, Homo sapiens
ccagcctgtcccccg

SEQ ID NO: 1677157 - DNA, 15 bp, Homo sapiens
cagcctgtcccccgc

SEQ ID NO: 1677158 - DNA, 15 bp, Homo sapiens
agcctgtcccccgct

SEQ ID NO: 1677159 - DNA, 15 bp, Homo sapiens
gcctgtcccccgctc

SEQ ID NO: 1677160 - DNA, 15 bp, Homo sapiens
cctgtcccccgctcc

SEQ ID NO: 1677161 - DNA, 15 bp, Homo sapiens
ctgtcccccgctcca

SEQ ID NO: 1677162 - DNA, 15 bp, Homo sapiens
tgtcccccgctccag

SEQ ID NO: 1677163 - DNA, 15 bp, Homo sapiens
gtcccccgctccagg

SEQ ID NO: 1677164 - DNA, 15 bp, Homo sapiens
tcccccgctccaggc

SEQ ID NO: 1677165 - DNA, 15 bp, Homo sapiens
cccccgctccaggct

SEQ ID NO: 1677166 - DNA, 15 bp, Homo sapiens
ccccgctccaggctc

SEQ ID NO: 1677167 - DNA, 15 bp, Homo sapiens
cccgctccaggctct

SEQ ID NO: 1677168 - DNA, 15 bp, Homo sapiens
ccgctccaggctcta

SEQ ID NO: 1677169 - DNA, 15 bp, Homo sapiens
cgctccaggctctat

SEQ ID NO: 1677170 - DNA, 15 bp, Homo sapiens
gctccaggctctatc

SEQ ID NO: 1677171 - DNA, 15 bp, Homo sapiens
ctccaggctctatct

SEQ ID NO: 1677172 - DNA, 15 bp, Homo sapiens
tccaggctctatctc

SEQ ID NO: 1677173 - DNA, 15 bp, Homo sapiens
ccaggctctatctcc

SEQ ID NO: 1677174 - DNA, 15 bp, Homo sapiens
caggctctatctccc

SEQ ID NO: 1677175 - DNA, 15 bp, Homo sapiens
aggctctatctccca

SEQ ID NO: 1677176 - DNA, 15 bp, Homo sapiens
ggctctatctcccac

SEQ ID NO: 1677177 - DNA, 15 bp, Homo sapiens
gctctatctcccacc

SEQ ID NO: 1677178 - DNA, 15 bp, Homo sapiens
ctctatctcccacca

SEQ ID NO: 1677179 - DNA, 15 bp, Homo sapiens
tctatctcccaccag

SEQ ID NO: 1677180 - DNA, 15 bp, Homo sapiens
ctatctcccaccagt

SEQ ID NO: 1677181 - DNA, 15 bp, Homo sapiens
tatctcccaccagtg

SEQ ID NO: 1677182 - DNA, 15 bp, Homo sapiens
atctcccaccagtgc

SEQ ID NO: 1677183 - DNA, 15 bp, Homo sapiens
tctcccaccagtgcc

SEQ ID NO: 1677184 - DNA, 15 bp, Homo sapiens
ctcccaccagtgcct

SEQ ID NO: 1677185 - DNA, 15 bp, Homo sapiens
tcccaccagtgcctc

SEQ ID NO: 1677186 - DNA, 15 bp, Homo sapiens
cccaccagtgcctcc

SEQ ID NO: 1677187 - DNA, 15 bp, Homo sapiens
ccaccagtgcctccc

SEQ ID NO: 1677188 - DNA, 15 bp, Homo sapiens
caccagtgcctccca

SEQ ID NO: 1677189 - DNA, 15 bp, Homo sapiens
accagtgcctcccac

SEQ ID NO: 1677190 - DNA, 15 bp, Homo sapiens
ccagtgcctcccacg

SEQ ID NO: 1677191 - DNA, 15 bp, Homo sapiens
cagtgcctcccacgg

SEQ ID NO: 1677192 - DNA, 15 bp, Homo sapiens
agtgcctcccacggg

SEQ ID NO: 1677193 - DNA, 15 bp, Homo sapiens
gtgcctcccacgggc

SEQ ID NO: 1677194 - DNA, 15 bp, Homo sapiens
tgcctcccacgggct

SEQ ID NO: 1677195 - DNA, 15 bp, Homo sapiens
gcctcccacgggctg

SEQ ID NO: 1677196 - DNA, 15 bp, Homo sapiens
cctcccacgggctga

SEQ ID NO: 1677197 - DNA, 15 bp, Homo sapiens
ctcccacgggctgag

SEQ ID NO: 1677198 - DNA, 15 bp, Homo sapiens
tcccacgggctgagc

SEQ ID NO: 1677199 - DNA, 15 bp, Homo sapiens
cccacgggctgagcc

SEQ ID NO: 1677200 - DNA, 15 bp, Homo sapiens
ccacgggctgagccc

SEQ ID NO: 1677201 - DNA, 15 bp, Homo sapiens
cacgggctgagccca

SEQ ID NO: 1677202 - DNA, 15 bp, Homo sapiens
acgggctgagcccaa

SEQ ID NO: 1677203 - DNA, 15 bp, Homo sapiens
cgggctgagcccaac

SEQ ID NO: 1677204 - DNA, 15 bp, Homo sapiens
gggctgagcccaaca

SEQ ID NO: 1677205 - DNA, 15 bp, Homo sapiens
ggctgagcccaacag

SEQ ID NO: 1677206 - DNA, 15 bp, Homo sapiens
gctgagcccaacagg

SEQ ID NO: 1677207 - DNA, 15 bp, Homo sapiens
ctgagcccaacaggg

SEQ ID NO: 1677208 - DNA, 15 bp, Homo sapiens
tgagcccaacaggga

SEQ ID NO: 1677209 - DNA, 15 bp, Homo sapiens
gagcccaacagggac

SEQ ID NO: 1677210 - DNA, 15 bp, Homo sapiens
agcccaacagggaca

SEQ ID NO: 1677211 - DNA, 15 bp, Homo sapiens
gcccaacagggacag

SEQ ID NO: 1677212 - DNA, 15 bp, Homo sapiens
cccaacagggacagg

SEQ ID NO: 1677213 - DNA, 15 bp, Homo sapiens
ccaacagggacaggc

SEQ ID NO: 1677214 - DNA, 15 bp, Homo sapiens
caacagggacaggct

SEQ ID NO: 1677215 - DNA, 15 bp, Homo sapiens
aacagggacaggctg

SEQ ID NO: 1677216 - DNA, 15 bp, Homo sapiens
acagggacaggctga

SEQ ID NO: 1677217 - DNA, 15 bp, Homo sapiens
cagggacaggctgat

SEQ ID NO: 1677218 - DNA, 15 bp, Homo sapiens
agggacaggctgatg

SEQ ID NO: 1677219 - DNA, 15 bp, Homo sapiens
gggacaggctgatga

SEQ ID NO: 1677220 - DNA, 15 bp, Homo sapiens
ggacaggctgatgaa

SEQ ID NO: 1677221 - DNA, 15 bp, Homo sapiens
gacaggctgatgaag

SEQ ID NO: 1677222 - DNA, 15 bp, Homo sapiens
acaggctgatgaagc

SEQ ID NO: 1677223 - DNA, 15 bp, Homo sapiens
caggctgatgaagcc

SEQ ID NO: 1677224 - DNA, 15 bp, Homo sapiens
aggctgatgaagccc

SEQ ID NO: 1677225 - DNA, 15 bp, Homo sapiens
ggctgatgaagccca

SEQ ID NO: 1677226 - DNA, 15 bp, Homo sapiens
gctgatgaagcccag

SEQ ID NO: 1677227 - DNA, 15 bp, Homo sapiens
ctgatgaagcccagg

SEQ ID NO: 1677228 - DNA, 15 bp, Homo sapiens
tgatgaagcccaggc

SEQ ID NO: 1677229 - DNA, 15 bp, Homo sapiens
gatgaagcccaggca

SEQ ID NO: 1677230 - DNA, 15 bp, Homo sapiens
atgaagcccaggcaa

SEQ ID NO: 1677231 - DNA, 15 bp, Homo sapiens
tgaagcccaggcaat

SEQ ID NO: 1677232 - DNA, 15 bp, Homo sapiens
gaagcccaggcaatg

SEQ ID NO: 1677233 - DNA, 15 bp, Homo sapiens
aagcccaggcaatgg

SEQ ID NO: 1677234 - DNA, 15 bp, Homo sapiens
agcccaggcaatggt

SEQ ID NO: 1677235 - DNA, 15 bp, Homo sapiens
gcccaggcaatggtg

SEQ ID NO: 1677236 - DNA, 15 bp, Homo sapiens
cccaggcaatggtgc

SEQ ID NO: 1677237 - DNA, 15 bp, Homo sapiens
ccaggcaatggtgcc

SEQ ID NO: 1677238 - DNA, 15 bp, Homo sapiens
caggcaatggtgcct

SEQ ID NO: 1677239 - DNA, 15 bp, Homo sapiens
aggcaatggtgcctt

SEQ ID NO: 1677240 - DNA, 15 bp, Homo sapiens
ggcaatggtgcctta

SEQ ID NO: 1677241 - DNA, 15 bp, Homo sapiens
gcaatggtgccttac

SEQ ID NO: 1677242 - DNA, 15 bp, Homo sapiens
caatggtgccttact

SEQ ID NO: 1677243 - DNA, 15 bp, Homo sapiens
aatggtgccttactg

SEQ ID NO: 1677244 - DNA, 15 bp, Homo sapiens
atggtgccttactgg

SEQ ID NO: 1677245 - DNA, 15 bp, Homo sapiens
tggtgccttactggg

SEQ ID NO: 1677246 - DNA, 15 bp, Homo sapiens
ggtgccttactgggt

SEQ ID NO: 1677247 - DNA, 15 bp, Homo sapiens
gtgccttactgggtg

SEQ ID NO: 1677248 - DNA, 15 bp, Homo sapiens
tgccttactgggtgg

SEQ ID NO: 1677249 - DNA, 15 bp, Homo sapiens
gccttactgggtgga

SEQ ID NO: 1677250 - DNA, 15 bp, Homo sapiens
ccttactgggtggat

SEQ ID NO: 1677251 - DNA, 15 bp, Homo sapiens
cttactgggtggatc

SEQ ID NO: 1677252 - DNA, 15 bp, Homo sapiens
ttactgggtggatcg

SEQ ID NO: 1677253 - DNA, 15 bp, Homo sapiens
tactgggtggatcga

SEQ ID NO: 1677254 - DNA, 15 bp, Homo sapiens
actgggtggatcgaa

SEQ ID NO: 1677255 - DNA, 15 bp, Homo sapiens
ctgggtggatcgaag

SEQ ID NO: 1677256 - DNA, 15 bp, Homo sapiens
tgggtggatcgaagg

SEQ ID NO: 1677257 - DNA, 15 bp, Homo sapiens
gggtggatcgaagga

SEQ ID NO: 1677258 - DNA, 15 bp, Homo sapiens
ggtggatcgaaggag

SEQ ID NO: 1677259 - DNA, 15 bp, Homo sapiens
gtggatcgaaggagg

SEQ ID NO: 1677260 - DNA, 15 bp, Homo sapiens
tggatcgaaggaggg

SEQ ID NO: 1677261 - DNA, 15 bp, Homo sapiens
ggatcgaaggaggga

SEQ ID NO: 1677262 - DNA, 15 bp, Homo sapiens
gatcgaaggagggac

SEQ ID NO: 1677263 - DNA, 15 bp, Homo sapiens
atcgaaggagggaca

SEQ ID NO: 1677264 - DNA, 15 bp, Homo sapiens
tcgaaggagggacag

SEQ ID NO: 1677265 - DNA, 15 bp, Homo sapiens
cgaaggagggacagg

SEQ ID NO: 1677266 - DNA, 15 bp, Homo sapiens
gaaggagggacaggg

SEQ ID NO: 1677267 - DNA, 15 bp, Homo sapiens
aaggagggacagggt

SEQ ID NO: 1677268 - DNA, 15 bp, Homo sapiens
aggagggacagggtt

SEQ ID NO: 1677269 - DNA, 15 bp, Homo sapiens
ggagggacagggttg

SEQ ID NO: 1677270 - DNA, 15 bp, Homo sapiens
gagggacagggttgg

SEQ ID NO: 1677271 - DNA, 15 bp, Homo sapiens
agggacagggttggc

SEQ ID NO: 1677272 - DNA, 15 bp, Homo sapiens
gggacagggttggcc

SEQ ID NO: 1677273 - DNA, 15 bp, Homo sapiens
ggacagggttggccc

SEQ ID NO: 1677274 - DNA, 15 bp, Homo sapiens
gacagggttggccca

SEQ ID NO: 1677275 - DNA, 15 bp, Homo sapiens
acagggttggcccag

SEQ ID NO: 1677276 - DNA, 15 bp, Homo sapiens
cagggttggcccagg

SEQ ID NO: 1677277 - DNA, 15 bp, Homo sapiens
agggttggcccaggg

SEQ ID NO: 1677278 - DNA, 15 bp, Homo sapiens
gggttggcccagggg

SEQ ID NO: 1677279 - DNA, 15 bp, Homo sapiens
ggttggcccaggggt

SEQ ID NO: 1677280 - DNA, 15 bp, Homo sapiens
gttggcccaggggtg

SEQ ID NO: 1677281 - DNA, 15 bp, Homo sapiens
ttggcccaggggtga

SEQ ID NO: 1677282 - DNA, 15 bp, Homo sapiens
tggcccaggggtgac

SEQ ID NO: 1677283 - DNA, 15 bp, Homo sapiens
ggcccaggggtgaca

SEQ ID NO: 1677284 - DNA, 15 bp, Homo sapiens
gcccaggggtgacac

SEQ ID NO: 1677285 - DNA, 15 bp, Homo sapiens
cccaggggtgacacg

SEQ ID NO: 1677286 - DNA, 15 bp, Homo sapiens
ccaggggtgacacga

SEQ ID NO: 1677287 - DNA, 15 bp, Homo sapiens
caggggtgacacgac

SEQ ID NO: 1677288 - DNA, 15 bp, Homo sapiens
aggggtgacacgaca

SEQ ID NO: 1677289 - DNA, 15 bp, Homo sapiens
ggggtgacacgacac

SEQ ID NO: 1677290 - DNA, 15 bp, Homo sapiens
gggtgacacgacact

SEQ ID NO: 1677291 - DNA, 15 bp, Homo sapiens
ggtgacacgacactg

SEQ ID NO: 1677292 - DNA, 15 bp, Homo sapiens
gtgacacgacactgg

SEQ ID NO: 1677293 - DNA, 15 bp, Homo sapiens
tgacacgacactggg

SEQ ID NO: 1677294 - DNA, 15 bp, Homo sapiens
gacacgacactgggg

SEQ ID NO: 1677295 - DNA, 15 bp, Homo sapiens
acacgacactggggt

SEQ ID NO: 1677296 - DNA, 15 bp, Homo sapiens
cacgacactggggtg

SEQ ID NO: 1677297 - DNA, 15 bp, Homo sapiens
acgacactggggtgg

SEQ ID NO: 1677298 - DNA, 15 bp, Homo sapiens
cgacactggggtggt

SEQ ID NO: 1677299 - DNA, 15 bp, Homo sapiens
gacactggggtggtt

SEQ ID NO: 1677300 - DNA, 15 bp, Homo sapiens
acactggggtggtta

SEQ ID NO: 1677301 - DNA, 15 bp, Homo sapiens
cactggggtggttag

SEQ ID NO: 1677302 - DNA, 15 bp, Homo sapiens
actggggtggttagg

SEQ ID NO: 1677303 - DNA, 15 bp, Homo sapiens
ctggggtggttaggt

SEQ ID NO: 1677304 - DNA, 15 bp, Homo sapiens
tggggtggttaggtc

SEQ ID NO: 1677305 - DNA, 15 bp, Homo sapiens
ggggtggttaggtcc

SEQ ID NO: 1677306 - DNA, 15 bp, Homo sapiens
gggtggttaggtcca

SEQ ID NO: 1677307 - DNA, 15 bp, Homo sapiens
ggtggttaggtccac

SEQ ID NO: 1677308 - DNA, 15 bp, Homo sapiens
gtggttaggtccaca

SEQ ID NO: 1677309 - DNA, 15 bp, Homo sapiens
tggttaggtccacaa

SEQ ID NO: 1677310 - DNA, 15 bp, Homo sapiens
ggttaggtccacaaa

SEQ ID NO: 1677311 - DNA, 15 bp, Homo sapiens
gttaggtccacaaac

SEQ ID NO: 1677312 - DNA, 15 bp, Homo sapiens
ttaggtccacaaacg

SEQ ID NO: 1677313 - DNA, 15 bp, Homo sapiens
taggtccacaaacgt

SEQ ID NO: 1677314 - DNA, 15 bp, Homo sapiens
aggtccacaaacgtg

SEQ ID NO: 1677315 - DNA, 15 bp, Homo sapiens
ggtccacaaacgtgg

SEQ ID NO: 1677316 - DNA, 15 bp, Homo sapiens
gtccacaaacgtggc

SEQ ID NO: 1677317 - DNA, 15 bp, Homo sapiens
tccacaaacgtggct

SEQ ID NO: 1677318 - DNA, 15 bp, Homo sapiens
ccacaaacgtggctc

SEQ ID NO: 1677319 - DNA, 15 bp, Homo sapiens
cacaaacgtggctca

SEQ ID NO: 1677320 - DNA, 15 bp, Homo sapiens
acaaacgtggctcat

SEQ ID NO: 1677321 - DNA, 15 bp, Homo sapiens
caaacgtggctcatg

SEQ ID NO: 1677322 - DNA, 15 bp, Homo sapiens
aaacgtggctcatgc

SEQ ID NO: 1677323 - DNA, 15 bp, Homo sapiens
aacgtggctcatgcc

SEQ ID NO: 1677324 - DNA, 15 bp, Homo sapiens
acgtggctcatgcct

SEQ ID NO: 1677325 - DNA, 15 bp, Homo sapiens
cgtggctcatgcctg

SEQ ID NO: 1677326 - DNA, 15 bp, Homo sapiens
ctgtaatcccagtac

SEQ ID NO: 1677327 - DNA, 15 bp, Homo sapiens
tgtaatcccagtacc

SEQ ID NO: 1677328 - DNA, 15 bp, Homo sapiens
gtaatcccagtacct

SEQ ID NO: 1677329 - DNA, 15 bp, Homo sapiens
taatcccagtacctt

SEQ ID NO: 1677330 - DNA, 15 bp, Homo sapiens
aatcccagtaccttg

SEQ ID NO: 1677331 - DNA, 15 bp, Homo sapiens
atcccagtaccttgg

SEQ ID NO: 1677332 - DNA, 15 bp, Homo sapiens
tcccagtaccttggg

SEQ ID NO: 1677333 - DNA, 15 bp, Homo sapiens
cccagtaccttggga

SEQ ID NO: 1677334 - DNA, 15 bp, Homo sapiens
ccagtaccttgggaa

SEQ ID NO: 1677335 - DNA, 15 bp, Homo sapiens
cagtaccttgggaag

SEQ ID NO: 1677336 - DNA, 15 bp, Homo sapiens
agtaccttgggaagc

SEQ ID NO: 1677337 - DNA, 15 bp, Homo sapiens
gtaccttgggaagct

SEQ ID NO: 1677338 - DNA, 15 bp, Homo sapiens
taccttgggaagctg

SEQ ID NO: 1677339 - DNA, 15 bp, Homo sapiens
accttgggaagctga

SEQ ID NO: 1677340 - DNA, 15 bp, Homo sapiens
ccttgggaagctgag

SEQ ID NO: 1677341 - DNA, 15 bp, Homo sapiens
agctgaggcaggagg

SEQ ID NO: 1677342 - DNA, 15 bp, Homo sapiens
tgaggcaggaggatt

SEQ ID NO: 1677343 - DNA, 15 bp, Homo sapiens
gaggcaggaggattg

SEQ ID NO: 1677344 - DNA, 15 bp, Homo sapiens
ccaggagttcaagag

SEQ ID NO: 1677345 - DNA, 15 bp, Homo sapiens
caggagttcaagagc

SEQ ID NO: 1677346 - DNA, 15 bp, Homo sapiens
aggagttcaagagca

SEQ ID NO: 1677347 - DNA, 15 bp, Homo sapiens
ggagttcaagagcag

SEQ ID NO: 1677348 - DNA, 15 bp, Homo sapiens
gagttcaagagcagt

SEQ ID NO: 1677349 - DNA, 15 bp, Homo sapiens
agttcaagagcagtc

SEQ ID NO: 1677350 - DNA, 15 bp, Homo sapiens
gttcaagagcagtct

SEQ ID NO: 1677351 - DNA, 15 bp, Homo sapiens
ttcaagagcagtctg

SEQ ID NO: 1677352 - DNA, 15 bp, Homo sapiens
tcaagagcagtctgg

SEQ ID NO: 1677353 - DNA, 15 bp, Homo sapiens
caagagcagtctggg

SEQ ID NO: 1677354 - DNA, 15 bp, Homo sapiens
aagagcagtctgggc

SEQ ID NO: 1677355 - DNA, 15 bp, Homo sapiens
agagcagtctgggca

SEQ ID NO: 1677356 - DNA, 15 bp, Homo sapiens
gagcagtctgggcaa

SEQ ID NO: 1677357 - DNA, 15 bp, Homo sapiens
agcagtctgggcaac

SEQ ID NO: 1677358 - DNA, 15 bp, Homo sapiens
gcagtctgggcaaca

SEQ ID NO: 1677359 - DNA, 15 bp, Homo sapiens
agtctgggcaacata

SEQ ID NO: 1677360 - DNA, 15 bp, Homo sapiens
gtctgggcaacatag

SEQ ID NO: 1677361 - DNA, 15 bp, Homo sapiens
tctgggcaacatagc

SEQ ID NO: 1677362 - DNA, 15 bp, Homo sapiens
acatagcaagacccc

SEQ ID NO: 1677363 - DNA, 15 bp, Homo sapiens
catagcaagacccca

SEQ ID NO: 1677364 - DNA, 15 bp, Homo sapiens
atagcaagaccccat

SEQ ID NO: 1677365 - DNA, 15 bp, Homo sapiens
tagcaagaccccatc

SEQ ID NO: 1677366 - DNA, 15 bp, Homo sapiens
ccatctctaaaaaac

SEQ ID NO: 1677367 - DNA, 15 bp, Homo sapiens
catctctaaaaaacg

SEQ ID NO: 1677368 - DNA, 15 bp, Homo sapiens
atctctaaaaaacgt

SEQ ID NO: 1677369 - DNA, 15 bp, Homo sapiens
tctctaaaaaacgtt

SEQ ID NO: 1677370 - DNA, 15 bp, Homo sapiens
ctctaaaaaacgttt

SEQ ID NO: 1677371 - DNA, 15 bp, Homo sapiens
tctaaaaaacgtttt

SEQ ID NO: 1677372 - DNA, 15 bp, Homo sapiens
ctaaaaaacgttttt

SEQ ID NO: 1677373 - DNA, 15 bp, Homo sapiens
taaaaaacgttttta

SEQ ID NO: 1677374 - DNA, 15 bp, Homo sapiens
aaaaaacgtttttaa

SEQ ID NO: 1677375 - DNA, 15 bp, Homo sapiens
aaaaacgtttttaaa

SEQ ID NO: 1677376 - DNA, 15 bp, Homo sapiens
aaaacgtttttaaat

SEQ ID NO: 1677377 - DNA, 15 bp, Homo sapiens
aaacgtttttaaatt

SEQ ID NO: 1677378 - DNA, 15 bp, Homo sapiens
aacgtttttaaattt

SEQ ID NO: 1677379 - DNA, 15 bp, Homo sapiens
acgtttttaaatttc

SEQ ID NO: 1677380 - DNA, 15 bp, Homo sapiens
cgtttttaaatttct

SEQ ID NO: 1677381 - DNA, 15 bp, Homo sapiens
gtttttaaatttctg

SEQ ID NO: 1677382 - DNA, 15 bp, Homo sapiens
tttttaaatttctgg

SEQ ID NO: 1677383 - DNA, 15 bp, Homo sapiens
ttttaaatttctggg

SEQ ID NO: 1677384 - DNA, 15 bp, Homo sapiens
tttaaatttctgggc

SEQ ID NO: 1677385 - DNA, 15 bp, Homo sapiens
ttaaatttctgggct

SEQ ID NO: 1677386 - DNA, 15 bp, Homo sapiens
taaatttctgggctc

SEQ ID NO: 1677387 - DNA, 15 bp, Homo sapiens
aaatttctgggctca

SEQ ID NO: 1677388 - DNA, 15 bp, Homo sapiens
aatttctgggctcag

SEQ ID NO: 1677389 - DNA, 15 bp, Homo sapiens
atttctgggctcagt

SEQ ID NO: 1677390 - DNA, 15 bp, Homo sapiens
tttctgggctcagtg

SEQ ID NO: 1677391 - DNA, 15 bp, Homo sapiens
ttctgggctcagtgg

SEQ ID NO: 1677392 - DNA, 15 bp, Homo sapiens
tctgggctcagtggc

SEQ ID NO: 1677393 - DNA, 15 bp, Homo sapiens
ctgggctcagtggct

SEQ ID NO: 1677394 - DNA, 15 bp, Homo sapiens
tgggctcagtggctc

SEQ ID NO: 1677395 - DNA, 15 bp, Homo sapiens
ggctcagtggctcat

SEQ ID NO: 1677396 - DNA, 15 bp, Homo sapiens
gctcagtggctcatg

SEQ ID NO: 1677397 - DNA, 15 bp, Homo sapiens
ctcagtggctcatgc

SEQ ID NO: 1677398 - DNA, 15 bp, Homo sapiens
tcagtggctcatgcc

SEQ ID NO: 1677399 - DNA, 15 bp, Homo sapiens
ataatcccagcactc

SEQ ID NO: 1677400 - DNA, 15 bp, Homo sapiens
cactctgggaggccg

SEQ ID NO: 1677401 - DNA, 15 bp, Homo sapiens
actctgggaggccga

SEQ ID NO: 1677402 - DNA, 15 bp, Homo sapiens
ctctgggaggccgag

SEQ ID NO: 1677403 - DNA, 15 bp, Homo sapiens
tctgggaggccgagg

SEQ ID NO: 1677404 - DNA, 15 bp, Homo sapiens
ctgggaggccgaggc

SEQ ID NO: 1677405 - DNA, 15 bp, Homo sapiens
ttcaaaaccagccta

SEQ ID NO: 1677406 - DNA, 15 bp, Homo sapiens
tcaaaaccagcctag

SEQ ID NO: 1677407 - DNA, 15 bp, Homo sapiens
caaaaccagcctagc

SEQ ID NO: 1677408 - DNA, 15 bp, Homo sapiens
aaaaccagcctagcc

SEQ ID NO: 1677409 - DNA, 15 bp, Homo sapiens
aaaccagcctagcca

SEQ ID NO: 1677410 - DNA, 15 bp, Homo sapiens
aaccagcctagccaa

SEQ ID NO: 1677411 - DNA, 15 bp, Homo sapiens
accagcctagccaaa

SEQ ID NO: 1677412 - DNA, 15 bp, Homo sapiens
ccagcctagccaaaa

SEQ ID NO: 1677413 - DNA, 15 bp, Homo sapiens
cagcctagccaaaat

SEQ ID NO: 1677414 - DNA, 15 bp, Homo sapiens
agcctagccaaaatg

SEQ ID NO: 1677415 - DNA, 15 bp, Homo sapiens
gcctagccaaaatgg

SEQ ID NO: 1677416 - DNA, 15 bp, Homo sapiens
cctagccaaaatggc

SEQ ID NO: 1677417 - DNA, 15 bp, Homo sapiens
ctagccaaaatggca

SEQ ID NO: 1677418 - DNA, 15 bp, Homo sapiens
tagccaaaatggcaa

SEQ ID NO: 1677419 - DNA, 15 bp, Homo sapiens
agccaaaatggcaaa

SEQ ID NO: 1677420 - DNA, 15 bp, Homo sapiens
gccaaaatggcaaaa

SEQ ID NO: 1677421 - DNA, 15 bp, Homo sapiens
ccaaaatggcaaaac

SEQ ID NO: 1677422 - DNA, 15 bp, Homo sapiens
caaaatggcaaaacc

SEQ ID NO: 1677423 - DNA, 15 bp, Homo sapiens
aaaatggcaaaaccc

SEQ ID NO: 1677424 - DNA, 15 bp, Homo sapiens
aaatggcaaaacccc

SEQ ID NO: 1677425 - DNA, 15 bp, Homo sapiens
aatggcaaaaccccg

SEQ ID NO: 1677426 - DNA, 15 bp, Homo sapiens
atggcaaaaccccgc

SEQ ID NO: 1677427 - DNA, 15 bp, Homo sapiens
tggcaaaaccccgcc

SEQ ID NO: 1677428 - DNA, 15 bp, Homo sapiens
ggcaaaaccccgcct

SEQ ID NO: 1677429 - DNA, 15 bp, Homo sapiens
gcaaaaccccgcctc

SEQ ID NO: 1677430 - DNA, 15 bp, Homo sapiens
caaaaccccgcctct

SEQ ID NO: 1677431 - DNA, 15 bp, Homo sapiens
aaaaccccgcctcta

SEQ ID NO: 1677432 - DNA, 15 bp, Homo sapiens
aaaccccgcctctac

SEQ ID NO: 1677433 - DNA, 15 bp, Homo sapiens
aaccccgcctctact

SEQ ID NO: 1677434 - DNA, 15 bp, Homo sapiens
accccgcctctacta

SEQ ID NO: 1677435 - DNA, 15 bp, Homo sapiens
ccccgcctctactaa

SEQ ID NO: 1677436 - DNA, 15 bp, Homo sapiens
cccgcctctactaaa

SEQ ID NO: 1677437 - DNA, 15 bp, Homo sapiens
ccgcctctactaaaa

SEQ ID NO: 1677438 - DNA, 15 bp, Homo sapiens
cgcctctactaaaaa

SEQ ID NO: 1677439 - DNA, 15 bp, Homo sapiens
gcctctactaaaaat

SEQ ID NO: 1677440 - DNA, 15 bp, Homo sapiens
aaaaattagttgggt

SEQ ID NO: 1677441 - DNA, 15 bp, Homo sapiens
aaaattagttgggtg

SEQ ID NO: 1677442 - DNA, 15 bp, Homo sapiens
aaattagttgggtgt

SEQ ID NO: 1677443 - DNA, 15 bp, Homo sapiens
aattagttgggtgtg

SEQ ID NO: 1677444 - DNA, 15 bp, Homo sapiens
attagttgggtgtgg

SEQ ID NO: 1677445 - DNA, 15 bp, Homo sapiens
ttagttgggtgtggt

SEQ ID NO: 1677446 - DNA, 15 bp, Homo sapiens
tagttgggtgtggtg

SEQ ID NO: 1677447 - DNA, 15 bp, Homo sapiens
agttgggtgtggtgg

SEQ ID NO: 1677448 - DNA, 15 bp, Homo sapiens
gttgggtgtggtggc

SEQ ID NO: 1677449 - DNA, 15 bp, Homo sapiens
ttgggtgtggtggcg

SEQ ID NO: 1677450 - DNA, 15 bp, Homo sapiens
tgggtgtggtggcgc

SEQ ID NO: 1677451 - DNA, 15 bp, Homo sapiens
tgaactcgggaggcc

SEQ ID NO: 1677452 - DNA, 15 bp, Homo sapiens
gaactcgggaggccg

SEQ ID NO: 1677453 - DNA, 15 bp, Homo sapiens
aactcgggaggccga

SEQ ID NO: 1677454 - DNA, 15 bp, Homo sapiens
cgggaggccgaggtt

SEQ ID NO: 1677455 - DNA, 15 bp, Homo sapiens
gggaggccgaggttg

SEQ ID NO: 1677456 - DNA, 15 bp, Homo sapiens
ggaggccgaggttgc

SEQ ID NO: 1677457 - DNA, 15 bp, Homo sapiens
gaggccgaggttgca

SEQ ID NO: 1677458 - DNA, 15 bp, Homo sapiens
aggccgaggttgcac

SEQ ID NO: 1677459 - DNA, 15 bp, Homo sapiens
ggccgaggttgcact

SEQ ID NO: 1677460 - DNA, 15 bp, Homo sapiens
gccgaggttgcactg

SEQ ID NO: 1677461 - DNA, 15 bp, Homo sapiens
ccgaggttgcactga

SEQ ID NO: 1677462 - DNA, 15 bp, Homo sapiens
cgaggttgcactgag

SEQ ID NO: 1677463 - DNA, 15 bp, Homo sapiens
ggttgcactgagcca

SEQ ID NO: 1677464 - DNA, 15 bp, Homo sapiens
gttgcactgagccaa

SEQ ID NO: 1677465 - DNA, 15 bp, Homo sapiens
ttgcactgagccaag

SEQ ID NO: 1677466 - DNA, 15 bp, Homo sapiens
tgcactgagccaaga

SEQ ID NO: 1677467 - DNA, 15 bp, Homo sapiens
gcactgagccaagat

SEQ ID NO: 1677468 - DNA, 15 bp, Homo sapiens
cactgagccaagatc

SEQ ID NO: 1677469 - DNA, 15 bp, Homo sapiens
actgagccaagatcg

SEQ ID NO: 1677470 - DNA, 15 bp, Homo sapiens
ctgagccaagatcgc

SEQ ID NO: 1677471 - DNA, 15 bp, Homo sapiens
gcactccagcctgac

SEQ ID NO: 1677472 - DNA, 15 bp, Homo sapiens
cactccagcctgaca

SEQ ID NO: 1677473 - DNA, 15 bp, Homo sapiens
actccagcctgacag

SEQ ID NO: 1677474 - DNA, 15 bp, Homo sapiens
ctccagcctgacaga

SEQ ID NO: 1677475 - DNA, 15 bp, Homo sapiens
tccagcctgacagag

SEQ ID NO: 1677476 - DNA, 15 bp, Homo sapiens
ccagcctgacagagc

SEQ ID NO: 1677477 - DNA, 15 bp, Homo sapiens
cagcctgacagagcg

SEQ ID NO: 1677478 - DNA, 15 bp, Homo sapiens
agcctgacagagcga

SEQ ID NO: 1677479 - DNA, 15 bp, Homo sapiens
gcctgacagagcgag

SEQ ID NO: 1677480 - DNA, 15 bp, Homo sapiens
cctgacagagcgaga

SEQ ID NO: 1677481 - DNA, 15 bp, Homo sapiens
ctgacagagcgagac

SEQ ID NO: 1677482 - DNA, 15 bp, Homo sapiens
tgacagagcgagaca

SEQ ID NO: 1677483 - DNA, 15 bp, Homo sapiens
gacagagcgagacac

SEQ ID NO: 1677484 - DNA, 15 bp, Homo sapiens
acagagcgagacact

SEQ ID NO: 1677485 - DNA, 15 bp, Homo sapiens
cagagcgagacactg

SEQ ID NO: 1677486 - DNA, 15 bp, Homo sapiens
agagcgagacactgc

SEQ ID NO: 1677487 - DNA, 15 bp, Homo sapiens
gagcgagacactgcg

SEQ ID NO: 1677488 - DNA, 15 bp, Homo sapiens
agcgagacactgcgt

SEQ ID NO: 1677489 - DNA, 15 bp, Homo sapiens
gcgagacactgcgtc

SEQ ID NO: 1677490 - DNA, 15 bp, Homo sapiens
cgagacactgcgtca

SEQ ID NO: 1677491 - DNA, 15 bp, Homo sapiens
gagacactgcgtcaa

SEQ ID NO: 1677492 - DNA, 15 bp, Homo sapiens
agacactgcgtcaaa

SEQ ID NO: 1677493 - DNA, 15 bp, Homo sapiens
gacactgcgtcaaaa

SEQ ID NO: 1677494 - DNA, 15 bp, Homo sapiens
acactgcgtcaaaaa

SEQ ID NO: 1677495 - DNA, 15 bp, Homo sapiens
cactgcgtcaaaaaa

SEQ ID NO: 1677496 - DNA, 15 bp, Homo sapiens
actgcgtcaaaaaaa

SEQ ID NO: 1677497 - DNA, 15 bp, Homo sapiens
ctgcgtcaaaaaaac

SEQ ID NO: 1677498 - DNA, 15 bp, Homo sapiens
tgcgtcaaaaaaaca

SEQ ID NO: 1677499 - DNA, 15 bp, Homo sapiens
gcgtcaaaaaaacag

SEQ ID NO: 1677500 - DNA, 15 bp, Homo sapiens
cgtcaaaaaaacaga

SEQ ID NO: 1677501 - DNA, 15 bp, Homo sapiens
gtcaaaaaaacagac

SEQ ID NO: 1677502 - DNA, 15 bp, Homo sapiens
tcaaaaaaacagaca

SEQ ID NO: 1677503 - DNA, 15 bp, Homo sapiens
caaaaaaacagacaa

SEQ ID NO: 1677504 - DNA, 15 bp, Homo sapiens
aaaaaaacagacaac

SEQ ID NO: 1677505 - DNA, 15 bp, Homo sapiens
aaaaaacagacaaca

SEQ ID NO: 1677506 - DNA, 15 bp, Homo sapiens
aaaaacagacaacaa

SEQ ID NO: 1677507 - DNA, 15 bp, Homo sapiens
aaaacagacaacaac

SEQ ID NO: 1677508 - DNA, 15 bp, Homo sapiens
aaacagacaacaaca

SEQ ID NO: 1677509 - DNA, 15 bp, Homo sapiens
aacagacaacaacaa

SEQ ID NO: 1677510 - DNA, 15 bp, Homo sapiens
acagacaacaacaac

SEQ ID NO: 1677511 - DNA, 15 bp, Homo sapiens
cagacaacaacaaca

SEQ ID NO: 1677512 - DNA, 15 bp, Homo sapiens
agacaacaacaacag

SEQ ID NO: 1677513 - DNA, 15 bp, Homo sapiens
gacaacaacaacaga

SEQ ID NO: 1677514 - DNA, 15 bp, Homo sapiens
acaacaacaacagaa

SEQ ID NO: 1677515 - DNA, 15 bp, Homo sapiens
caacaacaacagaaa

SEQ ID NO: 1677516 - DNA, 15 bp, Homo sapiens
aacaacaacagaaaa

SEQ ID NO: 1677517 - DNA, 15 bp, Homo sapiens
acaacaacagaaaaa

SEQ ID NO: 1677518 - DNA, 15 bp, Homo sapiens
caacaacagaaaaag

SEQ ID NO: 1677519 - DNA, 15 bp, Homo sapiens
aacaacagaaaaagt

SEQ ID NO: 1677520 - DNA, 15 bp, Homo sapiens
acaacagaaaaagtt

SEQ ID NO: 1677521 - DNA, 15 bp, Homo sapiens
caacagaaaaagttt

SEQ ID NO: 1677522 - DNA, 15 bp, Homo sapiens
aacagaaaaagtttt

SEQ ID NO: 1677523 - DNA, 15 bp, Homo sapiens
acagaaaaagtttta

SEQ ID NO: 1677524 - DNA, 15 bp, Homo sapiens
cagaaaaagttttaa

SEQ ID NO: 1677525 - DNA, 15 bp, Homo sapiens
agaaaaagttttaaa

SEQ ID NO: 1677526 - DNA, 15 bp, Homo sapiens
gaaaaagttttaaaa

SEQ ID NO: 1677527 - DNA, 15 bp, Homo sapiens
aaaaagttttaaaat

SEQ ID NO: 1677528 - DNA, 15 bp, Homo sapiens
aaaagttttaaaatt

SEQ ID NO: 1677529 - DNA, 15 bp, Homo sapiens
aaagttttaaaatta

SEQ ID NO: 1677530 - DNA, 15 bp, Homo sapiens
aagttttaaaattac

SEQ ID NO: 1677531 - DNA, 15 bp, Homo sapiens
agttttaaaattacc

SEQ ID NO: 1677532 - DNA, 15 bp, Homo sapiens
gttttaaaattacca

SEQ ID NO: 1677533 - DNA, 15 bp, Homo sapiens
ttttaaaattaccag

SEQ ID NO: 1677534 - DNA, 15 bp, Homo sapiens
tttaaaattaccagc

SEQ ID NO: 1677535 - DNA, 15 bp, Homo sapiens
ttaaaattaccagcc

SEQ ID NO: 1677536 - DNA, 15 bp, Homo sapiens
taaaattaccagccg

SEQ ID NO: 1677537 - DNA, 15 bp, Homo sapiens
aaaattaccagccgg

SEQ ID NO: 1677538 - DNA, 15 bp, Homo sapiens
aaattaccagccgga

SEQ ID NO: 1677539 - DNA, 15 bp, Homo sapiens
aattaccagccggat

SEQ ID NO: 1677540 - DNA, 15 bp, Homo sapiens
attaccagccggatg

SEQ ID NO: 1677541 - DNA, 15 bp, Homo sapiens
ttaccagccggatgc

SEQ ID NO: 1677542 - DNA, 15 bp, Homo sapiens
taccagccggatgcg

SEQ ID NO: 1677543 - DNA, 15 bp, Homo sapiens
accagccggatgcga

SEQ ID NO: 1677544 - DNA, 15 bp, Homo sapiens
ccagccggatgcgat

SEQ ID NO: 1677545 - DNA, 15 bp, Homo sapiens
cagccggatgcgatg

SEQ ID NO: 1677546 - DNA, 15 bp, Homo sapiens
agccggatgcgatgg

SEQ ID NO: 1677547 - DNA, 15 bp, Homo sapiens
gccggatgcgatggc

SEQ ID NO: 1677548 - DNA, 15 bp, Homo sapiens
ccggatgcgatggcg

SEQ ID NO: 1677549 - DNA, 15 bp, Homo sapiens
cggatgcgatggcgc

SEQ ID NO: 1677550 - DNA, 15 bp, Homo sapiens
ggatgcgatggcgca

SEQ ID NO: 1677551 - DNA, 15 bp, Homo sapiens
gatgcgatggcgcac

SEQ ID NO: 1677552 - DNA, 15 bp, Homo sapiens
atgcgatggcgcaca

SEQ ID NO: 1677553 - DNA, 15 bp, Homo sapiens
tgcgatggcgcacac

SEQ ID NO: 1677554 - DNA, 15 bp, Homo sapiens
gcgatggcgcacacc

SEQ ID NO: 1677555 - DNA, 15 bp, Homo sapiens
cgatggcgcacacct

SEQ ID NO: 1677556 - DNA, 15 bp, Homo sapiens
gatggcgcacacctg

SEQ ID NO: 1677557 - DNA, 15 bp, Homo sapiens
atggcgcacacctgt

SEQ ID NO: 1677558 - DNA, 15 bp, Homo sapiens
acctgtagtcccaga

SEQ ID NO: 1677559 - DNA, 15 bp, Homo sapiens
cctgtagtcccagat

SEQ ID NO: 1677560 - DNA, 15 bp, Homo sapiens
ctgtagtcccagata

SEQ ID NO: 1677561 - DNA, 15 bp, Homo sapiens
tgtagtcccagatac

SEQ ID NO: 1677562 - DNA, 15 bp, Homo sapiens
gtagtcccagatact

SEQ ID NO: 1677563 - DNA, 15 bp, Homo sapiens
tagtcccagatactt

SEQ ID NO: 1677564 - DNA, 15 bp, Homo sapiens
agtcccagatacttg

SEQ ID NO: 1677565 - DNA, 15 bp, Homo sapiens
gtcccagatacttgg

SEQ ID NO: 1677566 - DNA, 15 bp, Homo sapiens
tcccagatacttgga

SEQ ID NO: 1677567 - DNA, 15 bp, Homo sapiens
cccagatacttggag

SEQ ID NO: 1677568 - DNA, 15 bp, Homo sapiens
ccagatacttggagg

SEQ ID NO: 1677569 - DNA, 15 bp, Homo sapiens
cagatacttggaggc

SEQ ID NO: 1677570 - DNA, 15 bp, Homo sapiens
agatacttggaggct

SEQ ID NO: 1677571 - DNA, 15 bp, Homo sapiens
gatacttggaggctg

SEQ ID NO: 1677572 - DNA, 15 bp, Homo sapiens
atacttggaggctga

SEQ ID NO: 1677573 - DNA, 15 bp, Homo sapiens
tacttggaggctgag

SEQ ID NO: 1677574 - DNA, 15 bp, Homo sapiens
acttggaggctgagg

SEQ ID NO: 1677575 - DNA, 15 bp, Homo sapiens
cttggaggctgaggt

SEQ ID NO: 1677576 - DNA, 15 bp, Homo sapiens
ttggaggctgaggtg

SEQ ID NO: 1677577 - DNA, 15 bp, Homo sapiens
tggaggctgaggtgg

SEQ ID NO: 1677578 - DNA, 15 bp, Homo sapiens
gaggtgggaagatct

SEQ ID NO: 1677579 - DNA, 15 bp, Homo sapiens
aggtgggaagatctc

SEQ ID NO: 1677580 - DNA, 15 bp, Homo sapiens
ggtgggaagatctct

SEQ ID NO: 1677581 - DNA, 15 bp, Homo sapiens
gtgggaagatctctt

SEQ ID NO: 1677582 - DNA, 15 bp, Homo sapiens
tgggaagatctcttg

SEQ ID NO: 1677583 - DNA, 15 bp, Homo sapiens
gggaagatctcttga

SEQ ID NO: 1677584 - DNA, 15 bp, Homo sapiens
ggaagatctcttgag

SEQ ID NO: 1677585 - DNA, 15 bp, Homo sapiens
gaagatctcttgagt

SEQ ID NO: 1677586 - DNA, 15 bp, Homo sapiens
aagatctcttgagtc

SEQ ID NO: 1677587 - DNA, 15 bp, Homo sapiens
agatctcttgagtcc

SEQ ID NO: 1677588 - DNA, 15 bp, Homo sapiens
gatctcttgagtcca

SEQ ID NO: 1677589 - DNA, 15 bp, Homo sapiens
atctcttgagtccag

SEQ ID NO: 1677590 - DNA, 15 bp, Homo sapiens
tctcttgagtccagc

SEQ ID NO: 1677591 - DNA, 15 bp, Homo sapiens
ctcttgagtccagca

SEQ ID NO: 1677592 - DNA, 15 bp, Homo sapiens
tcttgagtccagcac

SEQ ID NO: 1677593 - DNA, 15 bp, Homo sapiens
cttgagtccagcact

SEQ ID NO: 1677594 - DNA, 15 bp, Homo sapiens
ttgagtccagcactt

SEQ ID NO: 1677595 - DNA, 15 bp, Homo sapiens
tgagtccagcacttt

SEQ ID NO: 1677596 - DNA, 15 bp, Homo sapiens
gagtccagcactttg

SEQ ID NO: 1677597 - DNA, 15 bp, Homo sapiens
cacctgaggttgggg

SEQ ID NO: 1677598 - DNA, 15 bp, Homo sapiens
acctgaggttggggg

SEQ ID NO: 1677599 - DNA, 15 bp, Homo sapiens
cctgaggttgggggt

SEQ ID NO: 1677600 - DNA, 15 bp, Homo sapiens
ctgaggttgggggtt

SEQ ID NO: 1677601 - DNA, 15 bp, Homo sapiens
tgaggttgggggttt

SEQ ID NO: 1677602 - DNA, 15 bp, Homo sapiens
gaggttgggggtttg

SEQ ID NO: 1677603 - DNA, 15 bp, Homo sapiens
aggttgggggtttga

SEQ ID NO: 1677604 - DNA, 15 bp, Homo sapiens
ggttgggggtttgag

SEQ ID NO: 1677605 - DNA, 15 bp, Homo sapiens
gttgggggtttgaga

SEQ ID NO: 1677606 - DNA, 15 bp, Homo sapiens
ttgggggtttgagac

SEQ ID NO: 1677607 - DNA, 15 bp, Homo sapiens
tgggggtttgagacc

SEQ ID NO: 1677608 - DNA, 15 bp, Homo sapiens
gggggtttgagacca

SEQ ID NO: 1677609 - DNA, 15 bp, Homo sapiens
ggggtttgagaccag

SEQ ID NO: 1677610 - DNA, 15 bp, Homo sapiens
gggtttgagaccagc

SEQ ID NO: 1677611 - DNA, 15 bp, Homo sapiens
ggtttgagaccagcc

SEQ ID NO: 1677612 - DNA, 15 bp, Homo sapiens
caaaattagctgggt

SEQ ID NO: 1677613 - DNA, 15 bp, Homo sapiens
ttagctgggtgtggc

SEQ ID NO: 1677614 - DNA, 15 bp, Homo sapiens
tagctgggtgtggcg

SEQ ID NO: 1677615 - DNA, 15 bp, Homo sapiens
agctgggtgtggcgg

SEQ ID NO: 1677616 - DNA, 15 bp, Homo sapiens
gctgggtgtggcggc

SEQ ID NO: 1677617 - DNA, 15 bp, Homo sapiens
ctgggtgtggcggcg

SEQ ID NO: 1677618 - DNA, 15 bp, Homo sapiens
tgggtgtggcggcgc

SEQ ID NO: 1677619 - DNA, 15 bp, Homo sapiens
gggtgtggcggcgca

SEQ ID NO: 1677620 - DNA, 15 bp, Homo sapiens
ggtgtggcggcgcat

SEQ ID NO: 1677621 - DNA, 15 bp, Homo sapiens
gtgtggcggcgcatg

SEQ ID NO: 1677622 - DNA, 15 bp, Homo sapiens
tgtggcggcgcatgc

SEQ ID NO: 1677623 - DNA, 15 bp, Homo sapiens
gtggcggcgcatgcc

SEQ ID NO: 1677624 - DNA, 15 bp, Homo sapiens
tggcggcgcatgcct

SEQ ID NO: 1677625 - DNA, 15 bp, Homo sapiens
ggcggcgcatgcctg

SEQ ID NO: 1677626 - DNA, 15 bp, Homo sapiens
gcggcgcatgcctgt

SEQ ID NO: 1677627 - DNA, 15 bp, Homo sapiens
cggcgcatgcctgta

SEQ ID NO: 1677628 - DNA, 15 bp, Homo sapiens
gtaatcccagctacg

SEQ ID NO: 1677629 - DNA, 15 bp, Homo sapiens
taatcccagctacgc

SEQ ID NO: 1677630 - DNA, 15 bp, Homo sapiens
aatcccagctacgcg

SEQ ID NO: 1677631 - DNA, 15 bp, Homo sapiens
atcccagctacgcgg

SEQ ID NO: 1677632 - DNA, 15 bp, Homo sapiens
tcccagctacgcggg

SEQ ID NO: 1677633 - DNA, 15 bp, Homo sapiens
cccagctacgcggga

SEQ ID NO: 1677634 - DNA, 15 bp, Homo sapiens
ccagctacgcgggag

SEQ ID NO: 1677635 - DNA, 15 bp, Homo sapiens
cagctacgcgggagg

SEQ ID NO: 1677636 - DNA, 15 bp, Homo sapiens
agctacgcgggaggc

SEQ ID NO: 1677637 - DNA, 15 bp, Homo sapiens
gctacgcgggaggct

SEQ ID NO: 1677638 - DNA, 15 bp, Homo sapiens
ctacgcgggaggctg

SEQ ID NO: 1677639 - DNA, 15 bp, Homo sapiens
tacgcgggaggctga

SEQ ID NO: 1677640 - DNA, 15 bp, Homo sapiens
acgcgggaggctgag

SEQ ID NO: 1677641 - DNA, 15 bp, Homo sapiens
cgcgggaggctgagg

SEQ ID NO: 1677642 - DNA, 15 bp, Homo sapiens
gcgggaggctgaggt

SEQ ID NO: 1677643 - DNA, 15 bp, Homo sapiens
cgggaggctgaggta

SEQ ID NO: 1677644 - DNA, 15 bp, Homo sapiens
ggaggctgaggtagg

SEQ ID NO: 1677645 - DNA, 15 bp, Homo sapiens
gaggctgaggtagga

SEQ ID NO: 1677646 - DNA, 15 bp, Homo sapiens
aggctgaggtaggag

SEQ ID NO: 1677647 - DNA, 15 bp, Homo sapiens
ggctgaggtaggaga

SEQ ID NO: 1677648 - DNA, 15 bp, Homo sapiens
gctgaggtaggagaa

SEQ ID NO: 1677649 - DNA, 15 bp, Homo sapiens
ctgaggtaggagaat

SEQ ID NO: 1677650 - DNA, 15 bp, Homo sapiens
tgaggtaggagaatt

SEQ ID NO: 1677651 - DNA, 15 bp, Homo sapiens
gaggtaggagaattg

SEQ ID NO: 1677652 - DNA, 15 bp, Homo sapiens
aggtaggagaattgc

SEQ ID NO: 1677653 - DNA, 15 bp, Homo sapiens
ggtaggagaattgct

SEQ ID NO: 1677654 - DNA, 15 bp, Homo sapiens
gtaggagaattgctt

SEQ ID NO: 1677655 - DNA, 15 bp, Homo sapiens
taggagaattgcttg

SEQ ID NO: 1677656 - DNA, 15 bp, Homo sapiens
tgaacctgggaggaa

SEQ ID NO: 1677657 - DNA, 15 bp, Homo sapiens
gaacctgggaggaag

SEQ ID NO: 1677658 - DNA, 15 bp, Homo sapiens
aacctgggaggaaga

SEQ ID NO: 1677659 - DNA, 15 bp, Homo sapiens
acctgggaggaagag

SEQ ID NO: 1677660 - DNA, 15 bp, Homo sapiens
cctgggaggaagagg

SEQ ID NO: 1677661 - DNA, 15 bp, Homo sapiens
ctgggaggaagaggt

SEQ ID NO: 1677662 - DNA, 15 bp, Homo sapiens
tgggaggaagaggtt

SEQ ID NO: 1677663 - DNA, 15 bp, Homo sapiens
gggaggaagaggttg

SEQ ID NO: 1677664 - DNA, 15 bp, Homo sapiens
ggaggaagaggttgc

SEQ ID NO: 1677665 - DNA, 15 bp, Homo sapiens
gaggaagaggttgcg

SEQ ID NO: 1677666 - DNA, 15 bp, Homo sapiens
aggaagaggttgcgg

SEQ ID NO: 1677667 - DNA, 15 bp, Homo sapiens
ggaagaggttgcggt

SEQ ID NO: 1677668 - DNA, 15 bp, Homo sapiens
gaagaggttgcggtg

SEQ ID NO: 1677669 - DNA, 15 bp, Homo sapiens
aagaggttgcggtga

SEQ ID NO: 1677670 - DNA, 15 bp, Homo sapiens
cggtgagccgagatt

SEQ ID NO: 1677671 - DNA, 15 bp, Homo sapiens
agattgcaccattgc

SEQ ID NO: 1677672 - DNA, 15 bp, Homo sapiens
gattgcaccattgca

SEQ ID NO: 1677673 - DNA, 15 bp, Homo sapiens
tccagcctgggaaac

SEQ ID NO: 1677674 - DNA, 15 bp, Homo sapiens
ccagcctgggaaact

SEQ ID NO: 1677675 - DNA, 15 bp, Homo sapiens
cagcctgggaaactc

SEQ ID NO: 1677676 - DNA, 15 bp, Homo sapiens
agcctgggaaactct

SEQ ID NO: 1677677 - DNA, 15 bp, Homo sapiens
gcctgggaaactctg

SEQ ID NO: 1677678 - DNA, 15 bp, Homo sapiens
cctgggaaactctgt

SEQ ID NO: 1677679 - DNA, 15 bp, Homo sapiens
ctgggaaactctgtc

SEQ ID NO: 1677680 - DNA, 15 bp, Homo sapiens
tgggaaactctgtct

SEQ ID NO: 1677681 - DNA, 15 bp, Homo sapiens
gggaaactctgtctc

SEQ ID NO: 1677682 - DNA, 15 bp, Homo sapiens
ggaaactctgtctca

SEQ ID NO: 1677683 - DNA, 15 bp, Homo sapiens
aaactctgtctcaaa

SEQ ID NO: 1677684 - DNA, 15 bp, Homo sapiens
aactctgtctcaaaa

SEQ ID NO: 1677685 - DNA, 15 bp, Homo sapiens
tcaaaaaaacaaaac

SEQ ID NO: 1677686 - DNA, 15 bp, Homo sapiens
caaaaaaacaaaaca

SEQ ID NO: 1677687 - DNA, 15 bp, Homo sapiens
aaaacaaaacacaac

SEQ ID NO: 1677688 - DNA, 15 bp, Homo sapiens
aaacaaaacacaaca

SEQ ID NO: 1677689 - DNA, 15 bp, Homo sapiens
aacaaaacacaacaa

SEQ ID NO: 1677690 - DNA, 15 bp, Homo sapiens
acaaaacacaacaaa

SEQ ID NO: 1677691 - DNA, 15 bp, Homo sapiens
caaaacacaacaaaa

SEQ ID NO: 1677692 - DNA, 15 bp, Homo sapiens
aaaacacaacaaaaa

SEQ ID NO: 1677693 - DNA, 15 bp, Homo sapiens
aaacacaacaaaaac

SEQ ID NO: 1677694 - DNA, 15 bp, Homo sapiens
aacacaacaaaaacc

SEQ ID NO: 1677695 - DNA, 15 bp, Homo sapiens
acacaacaaaaaccc

SEQ ID NO: 1677696 - DNA, 15 bp, Homo sapiens
cacaacaaaaaccca

SEQ ID NO: 1677697 - DNA, 15 bp, Homo sapiens
acaacaaaaacccaa

SEQ ID NO: 1677698 - DNA, 15 bp, Homo sapiens
caacaaaaacccaaa

SEQ ID NO: 1677699 - DNA, 15 bp, Homo sapiens
aacaaaaacccaaaa

SEQ ID NO: 1677700 - DNA, 15 bp, Homo sapiens
acaaaaacccaaaaa

SEQ ID NO: 1677701 - DNA, 15 bp, Homo sapiens
caaaaacccaaaaag

SEQ ID NO: 1677702 - DNA, 15 bp, Homo sapiens
aaaaacccaaaaaga

SEQ ID NO: 1677703 - DNA, 15 bp, Homo sapiens
aaaacccaaaaagag

SEQ ID NO: 1677704 - DNA, 15 bp, Homo sapiens
aaacccaaaaagagc

SEQ ID NO: 1677705 - DNA, 15 bp, Homo sapiens
aacccaaaaagagca

SEQ ID NO: 1677706 - DNA, 15 bp, Homo sapiens
acccaaaaagagcag

SEQ ID NO: 1677707 - DNA, 15 bp, Homo sapiens
cccaaaaagagcaga

SEQ ID NO: 1677708 - DNA, 15 bp, Homo sapiens
ccaaaaagagcagac

SEQ ID NO: 1677709 - DNA, 15 bp, Homo sapiens
caaaaagagcagact

SEQ ID NO: 1677710 - DNA, 15 bp, Homo sapiens
aaaaagagcagactg

SEQ ID NO: 1677711 - DNA, 15 bp, Homo sapiens
aaaagagcagactga

SEQ ID NO: 1677712 - DNA, 15 bp, Homo sapiens
aaagagcagactgac

SEQ ID NO: 1677713 - DNA, 15 bp, Homo sapiens
aagagcagactgacc

SEQ ID NO: 1677714 - DNA, 15 bp, Homo sapiens
agagcagactgacca

SEQ ID NO: 1677715 - DNA, 15 bp, Homo sapiens
gagcagactgaccag

SEQ ID NO: 1677716 - DNA, 15 bp, Homo sapiens
agcagactgaccagg

SEQ ID NO: 1677717 - DNA, 15 bp, Homo sapiens
gcagactgaccaggc

SEQ ID NO: 1677718 - DNA, 15 bp, Homo sapiens
cagactgaccaggcc

SEQ ID NO: 1677719 - DNA, 15 bp, Homo sapiens
agactgaccaggccg

SEQ ID NO: 1677720 - DNA, 15 bp, Homo sapiens
gactgaccaggccgt

SEQ ID NO: 1677721 - DNA, 15 bp, Homo sapiens
actgaccaggccgtc

SEQ ID NO: 1677722 - DNA, 15 bp, Homo sapiens
ctgaccaggccgtct

SEQ ID NO: 1677723 - DNA, 15 bp, Homo sapiens
tgaccaggccgtctg

SEQ ID NO: 1677724 - DNA, 15 bp, Homo sapiens
gaccaggccgtctgg

SEQ ID NO: 1677725 - DNA, 15 bp, Homo sapiens
accaggccgtctggg

SEQ ID NO: 1677726 - DNA, 15 bp, Homo sapiens
ccaggccgtctgggt

SEQ ID NO: 1677727 - DNA, 15 bp, Homo sapiens
caggccgtctgggtt

SEQ ID NO: 1677728 - DNA, 15 bp, Homo sapiens
aggccgtctgggttc

SEQ ID NO: 1677729 - DNA, 15 bp, Homo sapiens
ggccgtctgggttca

SEQ ID NO: 1677730 - DNA, 15 bp, Homo sapiens
gccgtctgggttcat

SEQ ID NO: 1677731 - DNA, 15 bp, Homo sapiens
ccgtctgggttcata

SEQ ID NO: 1677732 - DNA, 15 bp, Homo sapiens
cgtctgggttcataa

SEQ ID NO: 1677733 - DNA, 15 bp, Homo sapiens
gtctgggttcataac

SEQ ID NO: 1677734 - DNA, 15 bp, Homo sapiens
tctgggttcataacc

SEQ ID NO: 1677735 - DNA, 15 bp, Homo sapiens
ctgggttcataacct

SEQ ID NO: 1677736 - DNA, 15 bp, Homo sapiens
tgggttcataacctg

SEQ ID NO: 1677737 - DNA, 15 bp, Homo sapiens
gggttcataacctgg

SEQ ID NO: 1677738 - DNA, 15 bp, Homo sapiens
ggttcataacctggc

SEQ ID NO: 1677739 - DNA, 15 bp, Homo sapiens
gttcataacctggct

SEQ ID NO: 1677740 - DNA, 15 bp, Homo sapiens
ttcataacctggctc

SEQ ID NO: 1677741 - DNA, 15 bp, Homo sapiens
tcataacctggctct

SEQ ID NO: 1677742 - DNA, 15 bp, Homo sapiens
cataacctggctctg

SEQ ID NO: 1677743 - DNA, 15 bp, Homo sapiens
ataacctggctctgc

SEQ ID NO: 1677744 - DNA, 15 bp, Homo sapiens
taacctggctctgcc

SEQ ID NO: 1677745 - DNA, 15 bp, Homo sapiens
aacctggctctgcca

SEQ ID NO: 1677746 - DNA, 15 bp, Homo sapiens
acctggctctgccac

SEQ ID NO: 1677747 - DNA, 15 bp, Homo sapiens
cctggctctgccact

SEQ ID NO: 1677748 - DNA, 15 bp, Homo sapiens
ctggctctgccactg

SEQ ID NO: 1677749 - DNA, 15 bp, Homo sapiens
tggctctgccactga

SEQ ID NO: 1677750 - DNA, 15 bp, Homo sapiens
ggctctgccactgac

SEQ ID NO: 1677751 - DNA, 15 bp, Homo sapiens
gctctgccactgact

SEQ ID NO: 1677752 - DNA, 15 bp, Homo sapiens
ctctgccactgactc

SEQ ID NO: 1677753 - DNA, 15 bp, Homo sapiens
tctgccactgactcg

SEQ ID NO: 1677754 - DNA, 15 bp, Homo sapiens
ctgccactgactcgc

SEQ ID NO: 1677755 - DNA, 15 bp, Homo sapiens
tgccactgactcgct

SEQ ID NO: 1677756 - DNA, 15 bp, Homo sapiens
gccactgactcgctg

SEQ ID NO: 1677757 - DNA, 15 bp, Homo sapiens
ccactgactcgctgg

SEQ ID NO: 1677758 - DNA, 15 bp, Homo sapiens
cactgactcgctggg

SEQ ID NO: 1677759 - DNA, 15 bp, Homo sapiens
actgactcgctgggt

SEQ ID NO: 1677760 - DNA, 15 bp, Homo sapiens
ctgactcgctgggtg

SEQ ID NO: 1677761 - DNA, 15 bp, Homo sapiens
tgactcgctgggtga

SEQ ID NO: 1677762 - DNA, 15 bp, Homo sapiens
gactcgctgggtgac

SEQ ID NO: 1677763 - DNA, 15 bp, Homo sapiens
actcgctgggtgaca

SEQ ID NO: 1677764 - DNA, 15 bp, Homo sapiens
ctcgctgggtgacag

SEQ ID NO: 1677765 - DNA, 15 bp, Homo sapiens
tcgctgggtgacagg

SEQ ID NO: 1677766 - DNA, 15 bp, Homo sapiens
cgctgggtgacaggc

SEQ ID NO: 1677767 - DNA, 15 bp, Homo sapiens
gggtgacaggcacct

SEQ ID NO: 1677768 - DNA, 15 bp, Homo sapiens
ggtgacaggcacctc

SEQ ID NO: 1677769 - DNA, 15 bp, Homo sapiens
gtgacaggcacctca

SEQ ID NO: 1677770 - DNA, 15 bp, Homo sapiens
tgacaggcacctcag

SEQ ID NO: 1677771 - DNA, 15 bp, Homo sapiens
gacaggcacctcaga

SEQ ID NO: 1677772 - DNA, 15 bp, Homo sapiens
acaggcacctcagag

SEQ ID NO: 1677773 - DNA, 15 bp, Homo sapiens
caggcacctcagagc

SEQ ID NO: 1677774 - DNA, 15 bp, Homo sapiens
aggcacctcagagcc

SEQ ID NO: 1677775 - DNA, 15 bp, Homo sapiens
ggcacctcagagcct

SEQ ID NO: 1677776 - DNA, 15 bp, Homo sapiens
gcacctcagagcctc

SEQ ID NO: 1677777 - DNA, 15 bp, Homo sapiens
cacctcagagcctca

SEQ ID NO: 1677778 - DNA, 15 bp, Homo sapiens
acctcagagcctcag

SEQ ID NO: 1677779 - DNA, 15 bp, Homo sapiens
cctcagagcctcagt

SEQ ID NO: 1677780 - DNA, 15 bp, Homo sapiens
ctcagagcctcagtt

SEQ ID NO: 1677781 - DNA, 15 bp, Homo sapiens
tcagagcctcagttt

SEQ ID NO: 1677782 - DNA, 15 bp, Homo sapiens
cagagcctcagtttc

SEQ ID NO: 1677783 - DNA, 15 bp, Homo sapiens
agagcctcagtttcc

SEQ ID NO: 1677784 - DNA, 15 bp, Homo sapiens
agcctcagtttcccc

SEQ ID NO: 1677785 - DNA, 15 bp, Homo sapiens
agtttccccacctga

SEQ ID NO: 1677786 - DNA, 15 bp, Homo sapiens
gtttccccacctgac

SEQ ID NO: 1677787 - DNA, 15 bp, Homo sapiens
tttccccacctgaca

SEQ ID NO: 1677788 - DNA, 15 bp, Homo sapiens
ttccccacctgacaa

SEQ ID NO: 1677789 - DNA, 15 bp, Homo sapiens
tccccacctgacaat

SEQ ID NO: 1677790 - DNA, 15 bp, Homo sapiens
ccccacctgacaatg

SEQ ID NO: 1677791 - DNA, 15 bp, Homo sapiens
cccacctgacaatgg

SEQ ID NO: 1677792 - DNA, 15 bp, Homo sapiens
ccacctgacaatgga

SEQ ID NO: 1677793 - DNA, 15 bp, Homo sapiens
cacctgacaatggag

SEQ ID NO: 1677794 - DNA, 15 bp, Homo sapiens
acctgacaatggaga

SEQ ID NO: 1677795 - DNA, 15 bp, Homo sapiens
cctgacaatggagac

SEQ ID NO: 1677796 - DNA, 15 bp, Homo sapiens
ctgacaatggagaca

SEQ ID NO: 1677797 - DNA, 15 bp, Homo sapiens
tgacaatggagacaa

SEQ ID NO: 1677798 - DNA, 15 bp, Homo sapiens
gacaatggagacaaa

SEQ ID NO: 1677799 - DNA, 15 bp, Homo sapiens
acaatggagacaaag

SEQ ID NO: 1677800 - DNA, 15 bp, Homo sapiens
caatggagacaaagc

SEQ ID NO: 1677801 - DNA, 15 bp, Homo sapiens
aatggagacaaagct

SEQ ID NO: 1677802 - DNA, 15 bp, Homo sapiens
atggagacaaagcta

SEQ ID NO: 1677803 - DNA, 15 bp, Homo sapiens
tggagacaaagctaa

SEQ ID NO: 1677804 - DNA, 15 bp, Homo sapiens
ggagacaaagctaat

SEQ ID NO: 1677805 - DNA, 15 bp, Homo sapiens
gagacaaagctaatc

SEQ ID NO: 1677806 - DNA, 15 bp, Homo sapiens
agacaaagctaatct

SEQ ID NO: 1677807 - DNA, 15 bp, Homo sapiens
gacaaagctaatctc

SEQ ID NO: 1677808 - DNA, 15 bp, Homo sapiens
acaaagctaatctcc

SEQ ID NO: 1677809 - DNA, 15 bp, Homo sapiens
caaagctaatctccc

SEQ ID NO: 1677810 - DNA, 15 bp, Homo sapiens
aaagctaatctcccc

SEQ ID NO: 1677811 - DNA, 15 bp, Homo sapiens
aagctaatctccccc

SEQ ID NO: 1677812 - DNA, 15 bp, Homo sapiens
agctaatctccccct

SEQ ID NO: 1677813 - DNA, 15 bp, Homo sapiens
gctaatctccccctc

SEQ ID NO: 1677814 - DNA, 15 bp, Homo sapiens
ctaatctccccctcc

SEQ ID NO: 1677815 - DNA, 15 bp, Homo sapiens
taatctccccctccc

SEQ ID NO: 1677816 - DNA, 15 bp, Homo sapiens
aatctccccctcccc

SEQ ID NO: 1677817 - DNA, 15 bp, Homo sapiens
atctccccctcccca

SEQ ID NO: 1677818 - DNA, 15 bp, Homo sapiens
ctccccctccccagg

SEQ ID NO: 1677819 - DNA, 15 bp, Homo sapiens
tccccctccccaggg

SEQ ID NO: 1677820 - DNA, 15 bp, Homo sapiens
ccccctccccagggg

SEQ ID NO: 1677821 - DNA, 15 bp, Homo sapiens
cccctccccaggggc

SEQ ID NO: 1677822 - DNA, 15 bp, Homo sapiens
ccctccccaggggct

SEQ ID NO: 1677823 - DNA, 15 bp, Homo sapiens
cctccccaggggctc

SEQ ID NO: 1677824 - DNA, 15 bp, Homo sapiens
ctccccaggggctct

SEQ ID NO: 1677825 - DNA, 15 bp, Homo sapiens
tccccaggggctctg

SEQ ID NO: 1677826 - DNA, 15 bp, Homo sapiens
ccccaggggctctgg

SEQ ID NO: 1677827 - DNA, 15 bp, Homo sapiens
cccaggggctctgga

SEQ ID NO: 1677828 - DNA, 15 bp, Homo sapiens
ccaggggctctggaa

SEQ ID NO: 1677829 - DNA, 15 bp, Homo sapiens
caggggctctggaag

SEQ ID NO: 1677830 - DNA, 15 bp, Homo sapiens
aggggctctggaagt

SEQ ID NO: 1677831 - DNA, 15 bp, Homo sapiens
ggggctctggaagtg

SEQ ID NO: 1677832 - DNA, 15 bp, Homo sapiens
gggctctggaagtgg

SEQ ID NO: 1677833 - DNA, 15 bp, Homo sapiens
ggctctggaagtggg

SEQ ID NO: 1677834 - DNA, 15 bp, Homo sapiens
gctctggaagtgggg

SEQ ID NO: 1677835 - DNA, 15 bp, Homo sapiens
ctctggaagtggggc

SEQ ID NO: 1677836 - DNA, 15 bp, Homo sapiens
tctggaagtggggca

SEQ ID NO: 1677837 - DNA, 15 bp, Homo sapiens
ctggaagtggggcag

SEQ ID NO: 1677838 - DNA, 15 bp, Homo sapiens
tggaagtggggcagg

SEQ ID NO: 1677839 - DNA, 15 bp, Homo sapiens
ggaagtggggcagga

SEQ ID NO: 1677840 - DNA, 15 bp, Homo sapiens
gaagtggggcaggat

SEQ ID NO: 1677841 - DNA, 15 bp, Homo sapiens
aagtggggcaggatg

SEQ ID NO: 1677842 - DNA, 15 bp, Homo sapiens
agtggggcaggatgg

SEQ ID NO: 1677843 - DNA, 15 bp, Homo sapiens
gtggggcaggatggg

SEQ ID NO: 1677844 - DNA, 15 bp, Homo sapiens
tggggcaggatgggg

SEQ ID NO: 1677845 - DNA, 15 bp, Homo sapiens
ggggcaggatggggc

SEQ ID NO: 1677846 - DNA, 15 bp, Homo sapiens
gggcaggatggggct

SEQ ID NO: 1677847 - DNA, 15 bp, Homo sapiens
ggcaggatggggctg

SEQ ID NO: 1677848 - DNA, 15 bp, Homo sapiens
gcaggatggggctgc

SEQ ID NO: 1677849 - DNA, 15 bp, Homo sapiens
caggatggggctgcg

SEQ ID NO: 1677850 - DNA, 15 bp, Homo sapiens
aggatggggctgcgc

SEQ ID NO: 1677851 - DNA, 15 bp, Homo sapiens
ggatggggctgcgca

SEQ ID NO: 1677852 - DNA, 15 bp, Homo sapiens
gatggggctgcgcag

SEQ ID NO: 1677853 - DNA, 15 bp, Homo sapiens
atggggctgcgcagg

SEQ ID NO: 1677854 - DNA, 15 bp, Homo sapiens
tggggctgcgcaggc

SEQ ID NO: 1677855 - DNA, 15 bp, Homo sapiens
ggggctgcgcaggcg

SEQ ID NO: 1677856 - DNA, 15 bp, Homo sapiens
gggctgcgcaggcgc

SEQ ID NO: 1677857 - DNA, 15 bp, Homo sapiens
ggctgcgcaggcgct

SEQ ID NO: 1677858 - DNA, 15 bp, Homo sapiens
gctgcgcaggcgctc

SEQ ID NO: 1677859 - DNA, 15 bp, Homo sapiens
ctgcgcaggcgctcg

SEQ ID NO: 1677860 - DNA, 15 bp, Homo sapiens
tgcgcaggcgctcgg

SEQ ID NO: 1677861 - DNA, 15 bp, Homo sapiens
gcgcaggcgctcgga

SEQ ID NO: 1677862 - DNA, 15 bp, Homo sapiens
cgcaggcgctcggag

SEQ ID NO: 1677863 - DNA, 15 bp, Homo sapiens
gcaggcgctcggaga

SEQ ID NO: 1677864 - DNA, 15 bp, Homo sapiens
caggcgctcggagac

SEQ ID NO: 1677865 - DNA, 15 bp, Homo sapiens
aggcgctcggagaca

SEQ ID NO: 1677866 - DNA, 15 bp, Homo sapiens
ggcgctcggagacaa

SEQ ID NO: 1677867 - DNA, 15 bp, Homo sapiens
gcgctcggagacaaa

SEQ ID NO: 1677868 - DNA, 15 bp, Homo sapiens
cgctcggagacaaag

SEQ ID NO: 1677869 - DNA, 15 bp, Homo sapiens
gctcggagacaaagg

SEQ ID NO: 1677870 - DNA, 15 bp, Homo sapiens
ctcggagacaaaggc

SEQ ID NO: 1677871 - DNA, 15 bp, Homo sapiens
tcggagacaaaggca

SEQ ID NO: 1677872 - DNA, 15 bp, Homo sapiens
cggagacaaaggcag

SEQ ID NO: 1677873 - DNA, 15 bp, Homo sapiens
ggagacaaaggcagg

SEQ ID NO: 1677874 - DNA, 15 bp, Homo sapiens
gagacaaaggcaggg

SEQ ID NO: 1677875 - DNA, 15 bp, Homo sapiens
agacaaaggcagggc

SEQ ID NO: 1677876 - DNA, 15 bp, Homo sapiens
gacaaaggcagggcc

SEQ ID NO: 1677877 - DNA, 15 bp, Homo sapiens
acaaaggcagggcct

SEQ ID NO: 1677878 - DNA, 15 bp, Homo sapiens
caaaggcagggcctg

SEQ ID NO: 1677879 - DNA, 15 bp, Homo sapiens
aaaggcagggcctgt

SEQ ID NO: 1677880 - DNA, 15 bp, Homo sapiens
aaggcagggcctgtc

SEQ ID NO: 1677881 - DNA, 15 bp, Homo sapiens
aggcagggcctgtca

SEQ ID NO: 1677882 - DNA, 15 bp, Homo sapiens
ggcagggcctgtcat

SEQ ID NO: 1677883 - DNA, 15 bp, Homo sapiens
gcagggcctgtcatc

SEQ ID NO: 1677884 - DNA, 15 bp, Homo sapiens
cagggcctgtcatct

SEQ ID NO: 1677885 - DNA, 15 bp, Homo sapiens
agggcctgtcatctt

SEQ ID NO: 1677886 - DNA, 15 bp, Homo sapiens
gggcctgtcatcttt

SEQ ID NO: 1677887 - DNA, 15 bp, Homo sapiens
ggcctgtcatctttc

SEQ ID NO: 1677888 - DNA, 15 bp, Homo sapiens
gcctgtcatctttcc

SEQ ID NO: 1677889 - DNA, 15 bp, Homo sapiens
cctgtcatctttcct

SEQ ID NO: 1677890 - DNA, 15 bp, Homo sapiens
ctgtcatctttcctg

SEQ ID NO: 1677891 - DNA, 15 bp, Homo sapiens
tgtcatctttcctgc

SEQ ID NO: 1677892 - DNA, 15 bp, Homo sapiens
gtcatctttcctgcg

SEQ ID NO: 1677893 - DNA, 15 bp, Homo sapiens
tcatctttcctgcgt

SEQ ID NO: 1677894 - DNA, 15 bp, Homo sapiens
catctttcctgcgtc

SEQ ID NO: 1677895 - DNA, 15 bp, Homo sapiens
atctttcctgcgtcc

SEQ ID NO: 1677896 - DNA, 15 bp, Homo sapiens
tctttcctgcgtcca

SEQ ID NO: 1677897 - DNA, 15 bp, Homo sapiens
ctttcctgcgtccac

SEQ ID NO: 1677898 - DNA, 15 bp, Homo sapiens
tttcctgcgtccacg

SEQ ID NO: 1677899 - DNA, 15 bp, Homo sapiens
ttcctgcgtccacgg

SEQ ID NO: 1677900 - DNA, 15 bp, Homo sapiens
tcctgcgtccacggg

SEQ ID NO: 1677901 - DNA, 15 bp, Homo sapiens
cctgcgtccacgggg

SEQ ID NO: 1677902 - DNA, 15 bp, Homo sapiens
ctgcgtccacggggt

SEQ ID NO: 1677903 - DNA, 15 bp, Homo sapiens
tgcgtccacggggtg

SEQ ID NO: 1677904 - DNA, 15 bp, Homo sapiens
gcgtccacggggtgg

SEQ ID NO: 1677905 - DNA, 15 bp, Homo sapiens
cgtccacggggtggc

SEQ ID NO: 1677906 - DNA, 15 bp, Homo sapiens
gtccacggggtggca

SEQ ID NO: 1677907 - DNA, 15 bp, Homo sapiens
tccacggggtggcac

SEQ ID NO: 1677908 - DNA, 15 bp, Homo sapiens
ccacggggtggcact

SEQ ID NO: 1677909 - DNA, 15 bp, Homo sapiens
cacggggtggcactt

SEQ ID NO: 1677910 - DNA, 15 bp, Homo sapiens
acggggtggcacttc

SEQ ID NO: 1677911 - DNA, 15 bp, Homo sapiens
cggggtggcacttcc

SEQ ID NO: 1677912 - DNA, 15 bp, Homo sapiens
ggggtggcacttcct

SEQ ID NO: 1677913 - DNA, 15 bp, Homo sapiens
gggtggcacttcctt

SEQ ID NO: 1677914 - DNA, 15 bp, Homo sapiens
ggtggcacttccttc

SEQ ID NO: 1677915 - DNA, 15 bp, Homo sapiens
gtggcacttccttcc

SEQ ID NO: 1677916 - DNA, 15 bp, Homo sapiens
tggcacttccttcct

SEQ ID NO: 1677917 - DNA, 15 bp, Homo sapiens
ggcacttccttcctg

SEQ ID NO: 1677918 - DNA, 15 bp, Homo sapiens
gcacttccttcctgc

SEQ ID NO: 1677919 - DNA, 15 bp, Homo sapiens
cacttccttcctgcc

SEQ ID NO: 1677920 - DNA, 15 bp, Homo sapiens
acttccttcctgcct

SEQ ID NO: 1677921 - DNA, 15 bp, Homo sapiens
cttccttcctgcctt

SEQ ID NO: 1677922 - DNA, 15 bp, Homo sapiens
ttccttcctgccttc

SEQ ID NO: 1677923 - DNA, 15 bp, Homo sapiens
tccttcctgccttcc

SEQ ID NO: 1677924 - DNA, 15 bp, Homo sapiens
ccttcctgccttccg

SEQ ID NO: 1677925 - DNA, 15 bp, Homo sapiens
cttcctgccttccgc

SEQ ID NO: 1677926 - DNA, 15 bp, Homo sapiens
ttcctgccttccgcc

SEQ ID NO: 1677927 - DNA, 15 bp, Homo sapiens
tcctgccttccgcct

SEQ ID NO: 1677928 - DNA, 15 bp, Homo sapiens
cctgccttccgcctt

SEQ ID NO: 1677929 - DNA, 15 bp, Homo sapiens
ctgccttccgccttt

SEQ ID NO: 1677930 - DNA, 15 bp, Homo sapiens
tgccttccgcctttt

SEQ ID NO: 1677931 - DNA, 15 bp, Homo sapiens
gccttccgccttttg

SEQ ID NO: 1677932 - DNA, 15 bp, Homo sapiens
ccttccgccttttgt

SEQ ID NO: 1677933 - DNA, 15 bp, Homo sapiens
cttccgccttttgtt

SEQ ID NO: 1677934 - DNA, 15 bp, Homo sapiens
ttccgccttttgttt

SEQ ID NO: 1677935 - DNA, 15 bp, Homo sapiens
tccgccttttgtttt

SEQ ID NO: 1677936 - DNA, 15 bp, Homo sapiens
ccgccttttgttttg

SEQ ID NO: 1677937 - DNA, 15 bp, Homo sapiens
cgccttttgttttgg

SEQ ID NO: 1677938 - DNA, 15 bp, Homo sapiens
gccttttgttttggg

SEQ ID NO: 1677939 - DNA, 15 bp, Homo sapiens
ccttttgttttggga

SEQ ID NO: 1677940 - DNA, 15 bp, Homo sapiens
cttttgttttgggac

SEQ ID NO: 1677941 - DNA, 15 bp, Homo sapiens
ttttgttttgggacg

SEQ ID NO: 1677942 - DNA, 15 bp, Homo sapiens
tttgttttgggacgc

SEQ ID NO: 1677943 - DNA, 15 bp, Homo sapiens
ttgttttgggacgct

SEQ ID NO: 1677944 - DNA, 15 bp, Homo sapiens
tgttttgggacgctt

SEQ ID NO: 1677945 - DNA, 15 bp, Homo sapiens
gttttgggacgcttc

SEQ ID NO: 1677946 - DNA, 15 bp, Homo sapiens
ttttgggacgcttcc

SEQ ID NO: 1677947 - DNA, 15 bp, Homo sapiens
tttgggacgcttcca

SEQ ID NO: 1677948 - DNA, 15 bp, Homo sapiens
ttgggacgcttccaa

SEQ ID NO: 1677949 - DNA, 15 bp, Homo sapiens
tgggacgcttccaaa

SEQ ID NO: 1677950 - DNA, 15 bp, Homo sapiens
gggacgcttccaaaa

SEQ ID NO: 1677951 - DNA, 15 bp, Homo sapiens
ggacgcttccaaaac

SEQ ID NO: 1677952 - DNA, 15 bp, Homo sapiens
gacgcttccaaaacg

SEQ ID NO: 1677953 - DNA, 15 bp, Homo sapiens
acgcttccaaaacgc

SEQ ID NO: 1677954 - DNA, 15 bp, Homo sapiens
cgcttccaaaacgcc

SEQ ID NO: 1677955 - DNA, 15 bp, Homo sapiens
gcttccaaaacgccc

SEQ ID NO: 1677956 - DNA, 15 bp, Homo sapiens
cttccaaaacgcccc

SEQ ID NO: 1677957 - DNA, 15 bp, Homo sapiens
ttccaaaacgcccct

SEQ ID NO: 1677958 - DNA, 15 bp, Homo sapiens
tccaaaacgcccctg

SEQ ID NO: 1677959 - DNA, 15 bp, Homo sapiens
ccaaaacgcccctgg

SEQ ID NO: 1677960 - DNA, 15 bp, Homo sapiens
caaaacgcccctggg

SEQ ID NO: 1677961 - DNA, 15 bp, Homo sapiens
aaaacgcccctggga

SEQ ID NO: 1677962 - DNA, 15 bp, Homo sapiens
aaacgcccctgggag

SEQ ID NO: 1677963 - DNA, 15 bp, Homo sapiens
aacgcccctgggagg

SEQ ID NO: 1677964 - DNA, 15 bp, Homo sapiens
acgcccctgggaggg

SEQ ID NO: 1677965 - DNA, 15 bp, Homo sapiens
cgcccctgggaggga

SEQ ID NO: 1677966 - DNA, 15 bp, Homo sapiens
gcccctgggagggaa

SEQ ID NO: 1677967 - DNA, 15 bp, Homo sapiens
cccctgggagggaaa

SEQ ID NO: 1677968 - DNA, 15 bp, Homo sapiens
ccctgggagggaaaa

SEQ ID NO: 1677969 - DNA, 15 bp, Homo sapiens
cctgggagggaaaac

SEQ ID NO: 1677970 - DNA, 15 bp, Homo sapiens
ctgggagggaaaact

SEQ ID NO: 1677971 - DNA, 15 bp, Homo sapiens
tgggagggaaaactg

SEQ ID NO: 1677972 - DNA, 15 bp, Homo sapiens
gggagggaaaactga

SEQ ID NO: 1677973 - DNA, 15 bp, Homo sapiens
ggagggaaaactgag

SEQ ID NO: 1677974 - DNA, 15 bp, Homo sapiens
gagggaaaactgagc

SEQ ID NO: 1677975 - DNA, 15 bp, Homo sapiens
agggaaaactgagca

SEQ ID NO: 1677976 - DNA, 15 bp, Homo sapiens
gggaaaactgagcag

SEQ ID NO: 1677977 - DNA, 15 bp, Homo sapiens
ggaaaactgagcagc

SEQ ID NO: 1677978 - DNA, 15 bp, Homo sapiens
gaaaactgagcagcc

SEQ ID NO: 1677979 - DNA, 15 bp, Homo sapiens
aaaactgagcagccc

SEQ ID NO: 1677980 - DNA, 15 bp, Homo sapiens
aaactgagcagccca

SEQ ID NO: 1677981 - DNA, 15 bp, Homo sapiens
aactgagcagcccac

SEQ ID NO: 1677982 - DNA, 15 bp, Homo sapiens
actgagcagcccaca

SEQ ID NO: 1677983 - DNA, 15 bp, Homo sapiens
ctgagcagcccacac

SEQ ID NO: 1677984 - DNA, 15 bp, Homo sapiens
tgagcagcccacaca

SEQ ID NO: 1677985 - DNA, 15 bp, Homo sapiens
gagcagcccacacag

SEQ ID NO: 1677986 - DNA, 15 bp, Homo sapiens
agcagcccacacagg

SEQ ID NO: 1677987 - DNA, 15 bp, Homo sapiens
gcagcccacacagga

SEQ ID NO: 1677988 - DNA, 15 bp, Homo sapiens
cagcccacacaggaa

SEQ ID NO: 1677989 - DNA, 15 bp, Homo sapiens
agcccacacaggaag

SEQ ID NO: 1677990 - DNA, 15 bp, Homo sapiens
gcccacacaggaagc

SEQ ID NO: 1677991 - DNA, 15 bp, Homo sapiens
cccacacaggaagcg

SEQ ID NO: 1677992 - DNA, 15 bp, Homo sapiens
ccacacaggaagcgt

SEQ ID NO: 1677993 - DNA, 15 bp, Homo sapiens
cacacaggaagcgtc

SEQ ID NO: 1677994 - DNA, 15 bp, Homo sapiens
acacaggaagcgtcc

SEQ ID NO: 1677995 - DNA, 15 bp, Homo sapiens
cacaggaagcgtcct

SEQ ID NO: 1677996 - DNA, 15 bp, Homo sapiens
acaggaagcgtcctg

SEQ ID NO: 1677997 - DNA, 15 bp, Homo sapiens
caggaagcgtcctgg

SEQ ID NO: 1677998 - DNA, 15 bp, Homo sapiens
aggaagcgtcctgga

SEQ ID NO: 1677999 - DNA, 15 bp, Homo sapiens
ggaagcgtcctggag

SEQ ID NO: 1678000 - DNA, 15 bp, Homo sapiens
gaagcgtcctggagc

SEQ ID NO: 1678001 - DNA, 15 bp, Homo sapiens
aagcgtcctggagcc

SEQ ID NO: 1678002 - DNA, 15 bp, Homo sapiens
agcgtcctggagcct

SEQ ID NO: 1678003 - DNA, 15 bp, Homo sapiens
gcgtcctggagcctg

SEQ ID NO: 1678004 - DNA, 15 bp, Homo sapiens
cgtcctggagcctgc

SEQ ID NO: 1678005 - DNA, 15 bp, Homo sapiens
gtcctggagcctgca

SEQ ID NO: 1678006 - DNA, 15 bp, Homo sapiens
tcctggagcctgcac

SEQ ID NO: 1678007 - DNA, 15 bp, Homo sapiens
cctggagcctgcaca

SEQ ID NO: 1678008 - DNA, 15 bp, Homo sapiens
ctggagcctgcacac

SEQ ID NO: 1678009 - DNA, 15 bp, Homo sapiens
tggagcctgcacaca

SEQ ID NO: 1678010 - DNA, 15 bp, Homo sapiens
ggagcctgcacacag

SEQ ID NO: 1678011 - DNA, 15 bp, Homo sapiens
gagcctgcacacagg

SEQ ID NO: 1678012 - DNA, 15 bp, Homo sapiens
agcctgcacacaggc

SEQ ID NO: 1678013 - DNA, 15 bp, Homo sapiens
gcctgcacacaggcg

SEQ ID NO: 1678014 - DNA, 15 bp, Homo sapiens
cctgcacacaggcgc

SEQ ID NO: 1678015 - DNA, 15 bp, Homo sapiens
ctgcacacaggcgct

SEQ ID NO: 1678016 - DNA, 15 bp, Homo sapiens
tgcacacaggcgctc

SEQ ID NO: 1678017 - DNA, 15 bp, Homo sapiens
gcacacaggcgctcg

SEQ ID NO: 1678018 - DNA, 15 bp, Homo sapiens
cacacaggcgctcga

SEQ ID NO: 1678019 - DNA, 15 bp, Homo sapiens
acacaggcgctcgat

SEQ ID NO: 1678020 - DNA, 15 bp, Homo sapiens
cacaggcgctcgata

SEQ ID NO: 1678021 - DNA, 15 bp, Homo sapiens
acaggcgctcgataa

SEQ ID NO: 1678022 - DNA, 15 bp, Homo sapiens
caggcgctcgataat

SEQ ID NO: 1678023 - DNA, 15 bp, Homo sapiens
aggcgctcgataatt

SEQ ID NO: 1678024 - DNA, 15 bp, Homo sapiens
ggcgctcgataattg

SEQ ID NO: 1678025 - DNA, 15 bp, Homo sapiens
gcgctcgataattgc

SEQ ID NO: 1678026 - DNA, 15 bp, Homo sapiens
cgctcgataattgct

SEQ ID NO: 1678027 - DNA, 15 bp, Homo sapiens
gctcgataattgctc

SEQ ID NO: 1678028 - DNA, 15 bp, Homo sapiens
ctcgataattgctcg

SEQ ID NO: 1678029 - DNA, 15 bp, Homo sapiens
tcgataattgctcga

SEQ ID NO: 1678030 - DNA, 15 bp, Homo sapiens
cgataattgctcgat

SEQ ID NO: 1678031 - DNA, 15 bp, Homo sapiens
gataattgctcgatt

SEQ ID NO: 1678032 - DNA, 15 bp, Homo sapiens
ataattgctcgattg

SEQ ID NO: 1678033 - DNA, 15 bp, Homo sapiens
taattgctcgattga

SEQ ID NO: 1678034 - DNA, 15 bp, Homo sapiens
aattgctcgattgac

SEQ ID NO: 1678035 - DNA, 15 bp, Homo sapiens
attgctcgattgacg

SEQ ID NO: 1678036 - DNA, 15 bp, Homo sapiens
ttgctcgattgacga

SEQ ID NO: 1678037 - DNA, 15 bp, Homo sapiens
tgctcgattgacgaa

SEQ ID NO: 1678038 - DNA, 15 bp, Homo sapiens
gctcgattgacgaaa

SEQ ID NO: 1678039 - DNA, 15 bp, Homo sapiens
ctcgattgacgaaat

SEQ ID NO: 1678040 - DNA, 15 bp, Homo sapiens
tcgattgacgaaatt

SEQ ID NO: 1678041 - DNA, 15 bp, Homo sapiens
cgattgacgaaattg

SEQ ID NO: 1678042 - DNA, 15 bp, Homo sapiens
gattgacgaaattgg

SEQ ID NO: 1678043 - DNA, 15 bp, Homo sapiens
attgacgaaattggt

SEQ ID NO: 1678044 - DNA, 15 bp, Homo sapiens
ttgacgaaattggtg

SEQ ID NO: 1678045 - DNA, 15 bp, Homo sapiens
tgacgaaattggtgc

SEQ ID NO: 1678046 - DNA, 15 bp, Homo sapiens
gacgaaattggtgct

SEQ ID NO: 1678047 - DNA, 15 bp, Homo sapiens
acgaaattggtgctc

SEQ ID NO: 1678048 - DNA, 15 bp, Homo sapiens
cgaaattggtgctca

SEQ ID NO: 1678049 - DNA, 15 bp, Homo sapiens
gaaattggtgctcaa

SEQ ID NO: 1678050 - DNA, 15 bp, Homo sapiens
aaattggtgctcaac

SEQ ID NO: 1678051 - DNA, 15 bp, Homo sapiens
aattggtgctcaacc

SEQ ID NO: 1678052 - DNA, 15 bp, Homo sapiens
attggtgctcaacca

SEQ ID NO: 1678053 - DNA, 15 bp, Homo sapiens
ttggtgctcaaccaa

SEQ ID NO: 1678054 - DNA, 15 bp, Homo sapiens
tggtgctcaaccaag

SEQ ID NO: 1678055 - DNA, 15 bp, Homo sapiens
ggtgctcaaccaagt

SEQ ID NO: 1678056 - DNA, 15 bp, Homo sapiens
gtgctcaaccaagtg

SEQ ID NO: 1678057 - DNA, 15 bp, Homo sapiens
tgctcaaccaagtgg

SEQ ID NO: 1678058 - DNA, 15 bp, Homo sapiens
gctcaaccaagtggc

SEQ ID NO: 1678059 - DNA, 15 bp, Homo sapiens
ctcaaccaagtggca

SEQ ID NO: 1678060 - DNA, 15 bp, Homo sapiens
tcaaccaagtggcaa

SEQ ID NO: 1678061 - DNA, 15 bp, Homo sapiens
caaccaagtggcaaa

SEQ ID NO: 1678062 - DNA, 15 bp, Homo sapiens
aaccaagtggcaaac

SEQ ID NO: 1678063 - DNA, 15 bp, Homo sapiens
accaagtggcaaaca

SEQ ID NO: 1678064 - DNA, 15 bp, Homo sapiens
ccaagtggcaaacag

SEQ ID NO: 1678065 - DNA, 15 bp, Homo sapiens
caagtggcaaacagg

SEQ ID NO: 1678066 - DNA, 15 bp, Homo sapiens
aagtggcaaacagga

SEQ ID NO: 1678067 - DNA, 15 bp, Homo sapiens
agtggcaaacaggat

SEQ ID NO: 1678068 - DNA, 15 bp, Homo sapiens
gtggcaaacaggata

SEQ ID NO: 1678069 - DNA, 15 bp, Homo sapiens
tggcaaacaggataa

SEQ ID NO: 1678070 - DNA, 15 bp, Homo sapiens
ggcaaacaggataag

SEQ ID NO: 1678071 - DNA, 15 bp, Homo sapiens
gcaaacaggataagc

SEQ ID NO: 1678072 - DNA, 15 bp, Homo sapiens
caaacaggataagcg

SEQ ID NO: 1678073 - DNA, 15 bp, Homo sapiens
aaacaggataagcgg

SEQ ID NO: 1678074 - DNA, 15 bp, Homo sapiens
aacaggataagcggg

SEQ ID NO: 1678075 - DNA, 15 bp, Homo sapiens
acaggataagcgggc

SEQ ID NO: 1678076 - DNA, 15 bp, Homo sapiens
caggataagcgggct

SEQ ID NO: 1678077 - DNA, 15 bp, Homo sapiens
aggataagcgggctc

SEQ ID NO: 1678078 - DNA, 15 bp, Homo sapiens
ggataagcgggctca

SEQ ID NO: 1678079 - DNA, 15 bp, Homo sapiens
gataagcgggctcag

SEQ ID NO: 1678080 - DNA, 15 bp, Homo sapiens
ataagcgggctcaga

SEQ ID NO: 1678081 - DNA, 15 bp, Homo sapiens
taagcgggctcagat

SEQ ID NO: 1678082 - DNA, 15 bp, Homo sapiens
aagcgggctcagatg

SEQ ID NO: 1678083 - DNA, 15 bp, Homo sapiens
agcgggctcagatgg

SEQ ID NO: 1678084 - DNA, 15 bp, Homo sapiens
gcgggctcagatggc

SEQ ID NO: 1678085 - DNA, 15 bp, Homo sapiens
cgggctcagatggcc

SEQ ID NO: 1678086 - DNA, 15 bp, Homo sapiens
gggctcagatggcca

SEQ ID NO: 1678087 - DNA, 15 bp, Homo sapiens
ggctcagatggccag

SEQ ID NO: 1678088 - DNA, 15 bp, Homo sapiens
gctcagatggccagg

SEQ ID NO: 1678089 - DNA, 15 bp, Homo sapiens
ctcagatggccagga

SEQ ID NO: 1678090 - DNA, 15 bp, Homo sapiens
tcagatggccaggaa

SEQ ID NO: 1678091 - DNA, 15 bp, Homo sapiens
cagatggccaggaaa

SEQ ID NO: 1678092 - DNA, 15 bp, Homo sapiens
agatggccaggaaaa

SEQ ID NO: 1678093 - DNA, 15 bp, Homo sapiens
gatggccaggaaaac

SEQ ID NO: 1678094 - DNA, 15 bp, Homo sapiens
atggccaggaaaacg

SEQ ID NO: 1678095 - DNA, 15 bp, Homo sapiens
tggccaggaaaacgg

SEQ ID NO: 1678096 - DNA, 15 bp, Homo sapiens
ggccaggaaaacggg

SEQ ID NO: 1678097 - DNA, 15 bp, Homo sapiens
gccaggaaaacggga

SEQ ID NO: 1678098 - DNA, 15 bp, Homo sapiens
ccaggaaaacgggag

SEQ ID NO: 1678099 - DNA, 15 bp, Homo sapiens
caggaaaacgggagg

SEQ ID NO: 1678100 - DNA, 15 bp, Homo sapiens
aggaaaacgggaggg

SEQ ID NO: 1678101 - DNA, 15 bp, Homo sapiens
ggaaaacgggagggc

SEQ ID NO: 1678102 - DNA, 15 bp, Homo sapiens
gaaaacgggagggcc

SEQ ID NO: 1678103 - DNA, 15 bp, Homo sapiens
aaaacgggagggcct

SEQ ID NO: 1678104 - DNA, 15 bp, Homo sapiens
aaacgggagggcctg

SEQ ID NO: 1678105 - DNA, 15 bp, Homo sapiens
aacgggagggcctgg

SEQ ID NO: 1678106 - DNA, 15 bp, Homo sapiens
acgggagggcctggg

SEQ ID NO: 1678107 - DNA, 15 bp, Homo sapiens
cgggagggcctggga

SEQ ID NO: 1678108 - DNA, 15 bp, Homo sapiens
gggagggcctgggag

SEQ ID NO: 1678109 - DNA, 15 bp, Homo sapiens
ggagggcctgggagg

SEQ ID NO: 1678110 - DNA, 15 bp, Homo sapiens
gagggcctgggaggt

SEQ ID NO: 1678111 - DNA, 15 bp, Homo sapiens
agggcctgggaggtg

SEQ ID NO: 1678112 - DNA, 15 bp, Homo sapiens
gggcctgggaggtgg

SEQ ID NO: 1678113 - DNA, 15 bp, Homo sapiens
ggcctgggaggtggc

SEQ ID NO: 1678114 - DNA, 15 bp, Homo sapiens
gcctgggaggtggcg

SEQ ID NO: 1678115 - DNA, 15 bp, Homo sapiens
cctgggaggtggcgg

SEQ ID NO: 1678116 - DNA, 15 bp, Homo sapiens
ctgggaggtggcggc

SEQ ID NO: 1678117 - DNA, 15 bp, Homo sapiens
tgggaggtggcggct

SEQ ID NO: 1678118 - DNA, 15 bp, Homo sapiens
gggaggtggcggctc

SEQ ID NO: 1678119 - DNA, 15 bp, Homo sapiens
ggaggtggcggctcg

SEQ ID NO: 1678120 - DNA, 15 bp, Homo sapiens
gaggtggcggctcga

SEQ ID NO: 1678121 - DNA, 15 bp, Homo sapiens
aggtggcggctcgag

SEQ ID NO: 1678122 - DNA, 15 bp, Homo sapiens
ggtggcggctcgagg

SEQ ID NO: 1678123 - DNA, 15 bp, Homo sapiens
gtggcggctcgaggg

SEQ ID NO: 1678124 - DNA, 15 bp, Homo sapiens
tggcggctcgagggt

SEQ ID NO: 1678125 - DNA, 15 bp, Homo sapiens
ggcggctcgagggtg

SEQ ID NO: 1678126 - DNA, 15 bp, Homo sapiens
gcggctcgagggtgc

SEQ ID NO: 1678127 - DNA, 15 bp, Homo sapiens
cggctcgagggtgct

SEQ ID NO: 1678128 - DNA, 15 bp, Homo sapiens
ggctcgagggtgctg

SEQ ID NO: 1678129 - DNA, 15 bp, Homo sapiens
gctcgagggtgctga

SEQ ID NO: 1678130 - DNA, 15 bp, Homo sapiens
ctcgagggtgctgag

SEQ ID NO: 1678131 - DNA, 15 bp, Homo sapiens
tcgagggtgctgaga

SEQ ID NO: 1678132 - DNA, 15 bp, Homo sapiens
cgagggtgctgagac

SEQ ID NO: 1678133 - DNA, 15 bp, Homo sapiens
gagggtgctgagact

SEQ ID NO: 1678134 - DNA, 15 bp, Homo sapiens
agggtgctgagactg

SEQ ID NO: 1678135 - DNA, 15 bp, Homo sapiens
gggtgctgagactga

SEQ ID NO: 1678136 - DNA, 15 bp, Homo sapiens
ggtgctgagactgag

SEQ ID NO: 1678137 - DNA, 15 bp, Homo sapiens
gtgctgagactgaga

SEQ ID NO: 1678138 - DNA, 15 bp, Homo sapiens
tgctgagactgagac

SEQ ID NO: 1678139 - DNA, 15 bp, Homo sapiens
gctgagactgagacg

SEQ ID NO: 1678140 - DNA, 15 bp, Homo sapiens
ctgagactgagacgg

SEQ ID NO: 1678141 - DNA, 15 bp, Homo sapiens
tgagactgagacggg

SEQ ID NO: 1678142 - DNA, 15 bp, Homo sapiens
gagactgagacggga

SEQ ID NO: 1678143 - DNA, 15 bp, Homo sapiens
agactgagacgggag

SEQ ID NO: 1678144 - DNA, 15 bp, Homo sapiens
gactgagacgggagg

SEQ ID NO: 1678145 - DNA, 15 bp, Homo sapiens
actgagacgggaggg

SEQ ID NO: 1678146 - DNA, 15 bp, Homo sapiens
ctgagacgggagggt

SEQ ID NO: 1678147 - DNA, 15 bp, Homo sapiens
tgagacgggagggtg

SEQ ID NO: 1678148 - DNA, 15 bp, Homo sapiens
gagacgggagggtgg

SEQ ID NO: 1678149 - DNA, 15 bp, Homo sapiens
agacgggagggtggg

SEQ ID NO: 1678150 - DNA, 15 bp, Homo sapiens
gacgggagggtgggc

SEQ ID NO: 1678151 - DNA, 15 bp, Homo sapiens
acgggagggtgggca

SEQ ID NO: 1678152 - DNA, 15 bp, Homo sapiens
cgggagggtgggcag

SEQ ID NO: 1678153 - DNA, 15 bp, Homo sapiens
gggagggtgggcagg

SEQ ID NO: 1678154 - DNA, 15 bp, Homo sapiens
ggagggtgggcagga

SEQ ID NO: 1678155 - DNA, 15 bp, Homo sapiens
gagggtgggcaggac

SEQ ID NO: 1678156 - DNA, 15 bp, Homo sapiens
agggtgggcaggacc

SEQ ID NO: 1678157 - DNA, 15 bp, Homo sapiens
gggtgggcaggaccg

SEQ ID NO: 1678158 - DNA, 15 bp, Homo sapiens
ggtgggcaggaccgg

SEQ ID NO: 1678159 - DNA, 15 bp, Homo sapiens
gtgggcaggaccggg

SEQ ID NO: 1678160 - DNA, 15 bp, Homo sapiens
tgggcaggaccgggg

SEQ ID NO: 1678161 - DNA, 15 bp, Homo sapiens
gggcaggaccggggt

SEQ ID NO: 1678162 - DNA, 15 bp, Homo sapiens
ggcaggaccggggtg

SEQ ID NO: 1678163 - DNA, 15 bp, Homo sapiens
gcaggaccggggtgc

SEQ ID NO: 1678164 - DNA, 15 bp, Homo sapiens
caggaccggggtgca

SEQ ID NO: 1678165 - DNA, 15 bp, Homo sapiens
aggaccggggtgcat

SEQ ID NO: 1678166 - DNA, 15 bp, Homo sapiens
ggaccggggtgcatc

SEQ ID NO: 1678167 - DNA, 15 bp, Homo sapiens
gaccggggtgcatcc

SEQ ID NO: 1678168 - DNA, 15 bp, Homo sapiens
accggggtgcatccc

SEQ ID NO: 1678169 - DNA, 15 bp, Homo sapiens
ccggggtgcatcccc

SEQ ID NO: 1678170 - DNA, 15 bp, Homo sapiens
cggggtgcatcccca

SEQ ID NO: 1678171 - DNA, 15 bp, Homo sapiens
ggggtgcatccccag

SEQ ID NO: 1678172 - DNA, 15 bp, Homo sapiens
gggtgcatccccagg

SEQ ID NO: 1678173 - DNA, 15 bp, Homo sapiens
ggtgcatccccaggc

SEQ ID NO: 1678174 - DNA, 15 bp, Homo sapiens
gtgcatccccaggca

SEQ ID NO: 1678175 - DNA, 15 bp, Homo sapiens
tgcatccccaggcag

SEQ ID NO: 1678176 - DNA, 15 bp, Homo sapiens
gcatccccaggcagg

SEQ ID NO: 1678177 - DNA, 15 bp, Homo sapiens
catccccaggcaggg

SEQ ID NO: 1678178 - DNA, 15 bp, Homo sapiens
atccccaggcagggg

SEQ ID NO: 1678179 - DNA, 15 bp, Homo sapiens
tccccaggcaggggt

SEQ ID NO: 1678180 - DNA, 15 bp, Homo sapiens
ccccaggcaggggtg

SEQ ID NO: 1678181 - DNA, 15 bp, Homo sapiens
cccaggcaggggtgg

SEQ ID NO: 1678182 - DNA, 15 bp, Homo sapiens
ccaggcaggggtggg

SEQ ID NO: 1678183 - DNA, 15 bp, Homo sapiens
caggcaggggtgggg

SEQ ID NO: 1678184 - DNA, 15 bp, Homo sapiens
aggcaggggtgggga

SEQ ID NO: 1678185 - DNA, 15 bp, Homo sapiens
ggcaggggtggggac

SEQ ID NO: 1678186 - DNA, 15 bp, Homo sapiens
gcaggggtggggact

SEQ ID NO: 1678187 - DNA, 15 bp, Homo sapiens
caggggtggggactg

SEQ ID NO: 1678188 - DNA, 15 bp, Homo sapiens
aggggtggggactgg

SEQ ID NO: 1678189 - DNA, 15 bp, Homo sapiens
ggggtggggactggg

SEQ ID NO: 1678190 - DNA, 15 bp, Homo sapiens
gggtggggactggga

SEQ ID NO: 1678191 - DNA, 15 bp, Homo sapiens
ggtggggactgggag

SEQ ID NO: 1678192 - DNA, 15 bp, Homo sapiens
gtggggactgggagc

SEQ ID NO: 1678193 - DNA, 15 bp, Homo sapiens
tggggactgggagca

SEQ ID NO: 1678194 - DNA, 15 bp, Homo sapiens
ggggactgggagcac

SEQ ID NO: 1678195 - DNA, 15 bp, Homo sapiens
gggactgggagcaca

SEQ ID NO: 1678196 - DNA, 15 bp, Homo sapiens
ggactgggagcacag

SEQ ID NO: 1678197 - DNA, 15 bp, Homo sapiens
gactgggagcacagc

SEQ ID NO: 1678198 - DNA, 15 bp, Homo sapiens
actgggagcacagca

SEQ ID NO: 1678199 - DNA, 15 bp, Homo sapiens
ctgggagcacagcat

SEQ ID NO: 1678200 - DNA, 15 bp, Homo sapiens
tgggagcacagcatg

SEQ ID NO: 1678201 - DNA, 15 bp, Homo sapiens
gggagcacagcatgg

SEQ ID NO: 1678202 - DNA, 15 bp, Homo sapiens
ggagcacagcatggg

SEQ ID NO: 1678203 - DNA, 15 bp, Homo sapiens
gagcacagcatgggt

SEQ ID NO: 1678204 - DNA, 15 bp, Homo sapiens
agcacagcatgggtg

SEQ ID NO: 1678205 - DNA, 15 bp, Homo sapiens
gcacagcatgggtgg

SEQ ID NO: 1678206 - DNA, 15 bp, Homo sapiens
cacagcatgggtggg

SEQ ID NO: 1678207 - DNA, 15 bp, Homo sapiens
acagcatgggtgggg

SEQ ID NO: 1678208 - DNA, 15 bp, Homo sapiens
cagcatgggtggggc

SEQ ID NO: 1678209 - DNA, 15 bp, Homo sapiens
agcatgggtggggca

SEQ ID NO: 1678210 - DNA, 15 bp, Homo sapiens
gcatgggtggggcat

SEQ ID NO: 1678211 - DNA, 15 bp, Homo sapiens
catgggtggggcatg

SEQ ID NO: 1678212 - DNA, 15 bp, Homo sapiens
atgggtggggcatgg

SEQ ID NO: 1678213 - DNA, 15 bp, Homo sapiens
tgggtggggcatggc

SEQ ID NO: 1678214 - DNA, 15 bp, Homo sapiens
gggtggggcatggcc

SEQ ID NO: 1678215 - DNA, 15 bp, Homo sapiens
ggtggggcatggccc

SEQ ID NO: 1678216 - DNA, 15 bp, Homo sapiens
gtggggcatggccca

SEQ ID NO: 1678217 - DNA, 15 bp, Homo sapiens
tggggcatggcccag

SEQ ID NO: 1678218 - DNA, 15 bp, Homo sapiens
ggggcatggcccaga

SEQ ID NO: 1678219 - DNA, 15 bp, Homo sapiens
gggcatggcccagag

SEQ ID NO: 1678220 - DNA, 15 bp, Homo sapiens
ggcatggcccagagg

SEQ ID NO: 1678221 - DNA, 15 bp, Homo sapiens
gcatggcccagagga

SEQ ID NO: 1678222 - DNA, 15 bp, Homo sapiens
catggcccagaggag

SEQ ID NO: 1678223 - DNA, 15 bp, Homo sapiens
atggcccagaggaga

SEQ ID NO: 1678224 - DNA, 15 bp, Homo sapiens
tggcccagaggagag

SEQ ID NO: 1678225 - DNA, 15 bp, Homo sapiens
ggcccagaggagagg

SEQ ID NO: 1678226 - DNA, 15 bp, Homo sapiens
gcccagaggagaggc

SEQ ID NO: 1678227 - DNA, 15 bp, Homo sapiens
cccagaggagaggcc

SEQ ID NO: 1678228 - DNA, 15 bp, Homo sapiens
ccagaggagaggcca

SEQ ID NO: 1678229 - DNA, 15 bp, Homo sapiens
cagaggagaggccag

SEQ ID NO: 1678230 - DNA, 15 bp, Homo sapiens
agaggagaggccaga

SEQ ID NO: 1678231 - DNA, 15 bp, Homo sapiens
gaggagaggccagag

SEQ ID NO: 1678232 - DNA, 15 bp, Homo sapiens
aggagaggccagagg

SEQ ID NO: 1678233 - DNA, 15 bp, Homo sapiens
ggagaggccagaggt

SEQ ID NO: 1678234 - DNA, 15 bp, Homo sapiens
gagaggccagaggtg

SEQ ID NO: 1678235 - DNA, 15 bp, Homo sapiens
agaggccagaggtga

SEQ ID NO: 1678236 - DNA, 15 bp, Homo sapiens
gaggccagaggtgat

SEQ ID NO: 1678237 - DNA, 15 bp, Homo sapiens
aggccagaggtgatg

SEQ ID NO: 1678238 - DNA, 15 bp, Homo sapiens
ggccagaggtgatgg

SEQ ID NO: 1678239 - DNA, 15 bp, Homo sapiens
gccagaggtgatgga

SEQ ID NO: 1678240 - DNA, 15 bp, Homo sapiens
ccagaggtgatggaa

SEQ ID NO: 1678241 - DNA, 15 bp, Homo sapiens
cagaggtgatggaag

SEQ ID NO: 1678242 - DNA, 15 bp, Homo sapiens
agaggtgatggaagg

SEQ ID NO: 1678243 - DNA, 15 bp, Homo sapiens
gaggtgatggaaggt

SEQ ID NO: 1678244 - DNA, 15 bp, Homo sapiens
aggtgatggaaggtt

SEQ ID NO: 1678245 - DNA, 15 bp, Homo sapiens
ggtgatggaaggttc

SEQ ID NO: 1678246 - DNA, 15 bp, Homo sapiens
gtgatggaaggttct

SEQ ID NO: 1678247 - DNA, 15 bp, Homo sapiens
tgatggaaggttctg

SEQ ID NO: 1678248 - DNA, 15 bp, Homo sapiens
gatggaaggttctgg

SEQ ID NO: 1678249 - DNA, 15 bp, Homo sapiens
atggaaggttctggt

SEQ ID NO: 1678250 - DNA, 15 bp, Homo sapiens
tggaaggttctggta

SEQ ID NO: 1678251 - DNA, 15 bp, Homo sapiens
ggaaggttctggtat

SEQ ID NO: 1678252 - DNA, 15 bp, Homo sapiens
gaaggttctggtatt

SEQ ID NO: 1678253 - DNA, 15 bp, Homo sapiens
aaggttctggtattc

SEQ ID NO: 1678254 - DNA, 15 bp, Homo sapiens
aggttctggtattcg

SEQ ID NO: 1678255 - DNA, 15 bp, Homo sapiens
ggttctggtattcgg

SEQ ID NO: 1678256 - DNA, 15 bp, Homo sapiens
gttctggtattcggc

SEQ ID NO: 1678257 - DNA, 15 bp, Homo sapiens
ttctggtattcggcc

SEQ ID NO: 1678258 - DNA, 15 bp, Homo sapiens
tctggtattcggcct

SEQ ID NO: 1678259 - DNA, 15 bp, Homo sapiens
ctggtattcggcctt

SEQ ID NO: 1678260 - DNA, 15 bp, Homo sapiens
tggtattcggccttg

SEQ ID NO: 1678261 - DNA, 15 bp, Homo sapiens
ggtattcggccttgg

SEQ ID NO: 1678262 - DNA, 15 bp, Homo sapiens
gtattcggccttggc

SEQ ID NO: 1678263 - DNA, 15 bp, Homo sapiens
tattcggccttggct

SEQ ID NO: 1678264 - DNA, 15 bp, Homo sapiens
attcggccttggctg

SEQ ID NO: 1678265 - DNA, 15 bp, Homo sapiens
ttcggccttggctgc

SEQ ID NO: 1678266 - DNA, 15 bp, Homo sapiens
tcggccttggctgct

SEQ ID NO: 1678267 - DNA, 15 bp, Homo sapiens
cggccttggctgctg

SEQ ID NO: 1678268 - DNA, 15 bp, Homo sapiens
ggccttggctgctgc

SEQ ID NO: 1678269 - DNA, 15 bp, Homo sapiens
gccttggctgctgca

SEQ ID NO: 1678270 - DNA, 15 bp, Homo sapiens
ccttggctgctgcat

SEQ ID NO: 1678271 - DNA, 15 bp, Homo sapiens
cttggctgctgcatt

SEQ ID NO: 1678272 - DNA, 15 bp, Homo sapiens
ttggctgctgcattg

SEQ ID NO: 1678273 - DNA, 15 bp, Homo sapiens
tggctgctgcattgg

SEQ ID NO: 1678274 - DNA, 15 bp, Homo sapiens
ggctgctgcattggg

SEQ ID NO: 1678275 - DNA, 15 bp, Homo sapiens
gctgctgcattggga

SEQ ID NO: 1678276 - DNA, 15 bp, Homo sapiens
ctgctgcattgggag

SEQ ID NO: 1678277 - DNA, 15 bp, Homo sapiens
tgctgcattgggagc

SEQ ID NO: 1678278 - DNA, 15 bp, Homo sapiens
gctgcattgggagct

SEQ ID NO: 1678279 - DNA, 15 bp, Homo sapiens
ctgcattgggagctt

SEQ ID NO: 1678280 - DNA, 15 bp, Homo sapiens
tgcattgggagcttg

SEQ ID NO: 1678281 - DNA, 15 bp, Homo sapiens
gcattgggagcttgt

SEQ ID NO: 1678282 - DNA, 15 bp, Homo sapiens
cattgggagcttgta

SEQ ID NO: 1678283 - DNA, 15 bp, Homo sapiens
attgggagcttgtat

SEQ ID NO: 1678284 - DNA, 15 bp, Homo sapiens
ttgggagcttgtatc

SEQ ID NO: 1678285 - DNA, 15 bp, Homo sapiens
tgggagcttgtatca

SEQ ID NO: 1678286 - DNA, 15 bp, Homo sapiens
gggagcttgtatcag

SEQ ID NO: 1678287 - DNA, 15 bp, Homo sapiens
ggagcttgtatcaga

SEQ ID NO: 1678288 - DNA, 15 bp, Homo sapiens
gagcttgtatcagag

SEQ ID NO: 1678289 - DNA, 15 bp, Homo sapiens
agcttgtatcagagc

SEQ ID NO: 1678290 - DNA, 15 bp, Homo sapiens
gcttgtatcagagct

SEQ ID NO: 1678291 - DNA, 15 bp, Homo sapiens
cttgtatcagagctt

SEQ ID NO: 1678292 - DNA, 15 bp, Homo sapiens
ttgtatcagagcttt

SEQ ID NO: 1678293 - DNA, 15 bp, Homo sapiens
tgtatcagagctttg

SEQ ID NO: 1678294 - DNA, 15 bp, Homo sapiens
gtatcagagctttga

SEQ ID NO: 1678295 - DNA, 15 bp, Homo sapiens
tatcagagctttgag

SEQ ID NO: 1678296 - DNA, 15 bp, Homo sapiens
atcagagctttgagg

SEQ ID NO: 1678297 - DNA, 15 bp, Homo sapiens
tcagagctttgaggg

SEQ ID NO: 1678298 - DNA, 15 bp, Homo sapiens
cagagctttgagggt

SEQ ID NO: 1678299 - DNA, 15 bp, Homo sapiens
agagctttgagggtg

SEQ ID NO: 1678300 - DNA, 15 bp, Homo sapiens
gagctttgagggtga

SEQ ID NO: 1678301 - DNA, 15 bp, Homo sapiens
agctttgagggtgac

SEQ ID NO: 1678302 - DNA, 15 bp, Homo sapiens
gctttgagggtgaca

SEQ ID NO: 1678303 - DNA, 15 bp, Homo sapiens
ctttgagggtgacac

SEQ ID NO: 1678304 - DNA, 15 bp, Homo sapiens
tttgagggtgacaca

SEQ ID NO: 1678305 - DNA, 15 bp, Homo sapiens
ttgagggtgacacag

SEQ ID NO: 1678306 - DNA, 15 bp, Homo sapiens
tgagggtgacacaga

SEQ ID NO: 1678307 - DNA, 15 bp, Homo sapiens
gagggtgacacagac

SEQ ID NO: 1678308 - DNA, 15 bp, Homo sapiens
agggtgacacagaca

SEQ ID NO: 1678309 - DNA, 15 bp, Homo sapiens
gggtgacacagacat

SEQ ID NO: 1678310 - DNA, 15 bp, Homo sapiens
ggtgacacagacatg

SEQ ID NO: 1678311 - DNA, 15 bp, Homo sapiens
gtgacacagacatgc

SEQ ID NO: 1678312 - DNA, 15 bp, Homo sapiens
tgacacagacatgca

SEQ ID NO: 1678313 - DNA, 15 bp, Homo sapiens
gacacagacatgcag

SEQ ID NO: 1678314 - DNA, 15 bp, Homo sapiens
acacagacatgcaga

SEQ ID NO: 1678315 - DNA, 15 bp, Homo sapiens
cacagacatgcagac

SEQ ID NO: 1678316 - DNA, 15 bp, Homo sapiens
acagacatgcagaca

SEQ ID NO: 1678317 - DNA, 15 bp, Homo sapiens
cagacatgcagacat

SEQ ID NO: 1678318 - DNA, 15 bp, Homo sapiens
agacatgcagacatt

SEQ ID NO: 1678319 - DNA, 15 bp, Homo sapiens
gacatgcagacattc

SEQ ID NO: 1678320 - DNA, 15 bp, Homo sapiens
acatgcagacattca

SEQ ID NO: 1678321 - DNA, 15 bp, Homo sapiens
catgcagacattcag

SEQ ID NO: 1678322 - DNA, 15 bp, Homo sapiens
atgcagacattcagt

SEQ ID NO: 1678323 - DNA, 15 bp, Homo sapiens
tgcagacattcagtt

SEQ ID NO: 1678324 - DNA, 15 bp, Homo sapiens
gcagacattcagttt

SEQ ID NO: 1678325 - DNA, 15 bp, Homo sapiens
cagacattcagtttc

SEQ ID NO: 1678326 - DNA, 15 bp, Homo sapiens
agacattcagtttcc

SEQ ID NO: 1678327 - DNA, 15 bp, Homo sapiens
gacattcagtttcct

SEQ ID NO: 1678328 - DNA, 15 bp, Homo sapiens
acattcagtttcctg

SEQ ID NO: 1678329 - DNA, 15 bp, Homo sapiens
cattcagtttcctga

SEQ ID NO: 1678330 - DNA, 15 bp, Homo sapiens
attcagtttcctgac

SEQ ID NO: 1678331 - DNA, 15 bp, Homo sapiens
ttcagtttcctgaca

SEQ ID NO: 1678332 - DNA, 15 bp, Homo sapiens
tcagtttcctgacaa

SEQ ID NO: 1678333 - DNA, 15 bp, Homo sapiens
cagtttcctgacaat

SEQ ID NO: 1678334 - DNA, 15 bp, Homo sapiens
agtttcctgacaatc

SEQ ID NO: 1678335 - DNA, 15 bp, Homo sapiens
gtttcctgacaatcc

SEQ ID NO: 1678336 - DNA, 15 bp, Homo sapiens
tttcctgacaatcca

SEQ ID NO: 1678337 - DNA, 15 bp, Homo sapiens
ttcctgacaatccat

SEQ ID NO: 1678338 - DNA, 15 bp, Homo sapiens
tcctgacaatccatc

SEQ ID NO: 1678339 - DNA, 15 bp, Homo sapiens
cctgacaatccatcg

SEQ ID NO: 1678340 - DNA, 15 bp, Homo sapiens
ctgacaatccatcgt

SEQ ID NO: 1678341 - DNA, 15 bp, Homo sapiens
tgacaatccatcgtt

SEQ ID NO: 1678342 - DNA, 15 bp, Homo sapiens
gacaatccatcgttc

SEQ ID NO: 1678343 - DNA, 15 bp, Homo sapiens
acaatccatcgttct

SEQ ID NO: 1678344 - DNA, 15 bp, Homo sapiens
caatccatcgttctg

SEQ ID NO: 1678345 - DNA, 15 bp, Homo sapiens
aatccatcgttctgc

SEQ ID NO: 1678346 - DNA, 15 bp, Homo sapiens
atccatcgttctgcc

SEQ ID NO: 1678347 - DNA, 15 bp, Homo sapiens
tccatcgttctgccc

SEQ ID NO: 1678348 - DNA, 15 bp, Homo sapiens
ccatcgttctgcccc

SEQ ID NO: 1678349 - DNA, 15 bp, Homo sapiens
catcgttctgccccg

SEQ ID NO: 1678350 - DNA, 15 bp, Homo sapiens
atcgttctgccccga

SEQ ID NO: 1678351 - DNA, 15 bp, Homo sapiens
tcgttctgccccgat

SEQ ID NO: 1678352 - DNA, 15 bp, Homo sapiens
cgttctgccccgatg

SEQ ID NO: 1678353 - DNA, 15 bp, Homo sapiens
gttctgccccgatgg

SEQ ID NO: 1678354 - DNA, 15 bp, Homo sapiens
ttctgccccgatggt

SEQ ID NO: 1678355 - DNA, 15 bp, Homo sapiens
tctgccccgatggtc

SEQ ID NO: 1678356 - DNA, 15 bp, Homo sapiens
ctgccccgatggtcg

SEQ ID NO: 1678357 - DNA, 15 bp, Homo sapiens
tgccccgatggtcgc

SEQ ID NO: 1678358 - DNA, 15 bp, Homo sapiens
gccccgatggtcgcc

SEQ ID NO: 1678359 - DNA, 15 bp, Homo sapiens
ccccgatggtcgcca

SEQ ID NO: 1678360 - DNA, 15 bp, Homo sapiens
cccgatggtcgccaa

SEQ ID NO: 1678361 - DNA, 15 bp, Homo sapiens
ccgatggtcgccaaa

SEQ ID NO: 1678362 - DNA, 15 bp, Homo sapiens
cgatggtcgccaaag

SEQ ID NO: 1678363 - DNA, 15 bp, Homo sapiens
gatggtcgccaaagg

SEQ ID NO: 1678364 - DNA, 15 bp, Homo sapiens
atggtcgccaaaggg

SEQ ID NO: 1678365 - DNA, 15 bp, Homo sapiens
tggtcgccaaaggga

SEQ ID NO: 1678366 - DNA, 15 bp, Homo sapiens
ggtcgccaaagggag

SEQ ID NO: 1678367 - DNA, 15 bp, Homo sapiens
gtcgccaaagggagg

SEQ ID NO: 1678368 - DNA, 15 bp, Homo sapiens
tcgccaaagggaggg

SEQ ID NO: 1678369 - DNA, 15 bp, Homo sapiens
cgccaaagggaggga

SEQ ID NO: 1678370 - DNA, 15 bp, Homo sapiens
gccaaagggagggag

SEQ ID NO: 1678371 - DNA, 15 bp, Homo sapiens
ccaaagggagggagg

SEQ ID NO: 1678372 - DNA, 15 bp, Homo sapiens
caaagggagggaggg

SEQ ID NO: 1678373 - DNA, 15 bp, Homo sapiens
aaagggagggagggt

SEQ ID NO: 1678374 - DNA, 15 bp, Homo sapiens
aagggagggagggtt

SEQ ID NO: 1678375 - DNA, 15 bp, Homo sapiens
agggagggagggttg

SEQ ID NO: 1678376 - DNA, 15 bp, Homo sapiens
gggagggagggttga

SEQ ID NO: 1678377 - DNA, 15 bp, Homo sapiens
ggagggagggttgac

SEQ ID NO: 1678378 - DNA, 15 bp, Homo sapiens
gagggagggttgaca

SEQ ID NO: 1678379 - DNA, 15 bp, Homo sapiens
agggagggttgacag

SEQ ID NO: 1678380 - DNA, 15 bp, Homo sapiens
gggagggttgacagc

SEQ ID NO: 1678381 - DNA, 15 bp, Homo sapiens
ggagggttgacagcc

SEQ ID NO: 1678382 - DNA, 15 bp, Homo sapiens
gagggttgacagcca

SEQ ID NO: 1678383 - DNA, 15 bp, Homo sapiens
agggttgacagccac

SEQ ID NO: 1678384 - DNA, 15 bp, Homo sapiens
gggttgacagccacc

SEQ ID NO: 1678385 - DNA, 15 bp, Homo sapiens
ggttgacagccaccc

SEQ ID NO: 1678386 - DNA, 15 bp, Homo sapiens
gttgacagccaccca

SEQ ID NO: 1678387 - DNA, 15 bp, Homo sapiens
ttgacagccacccat

SEQ ID NO: 1678388 - DNA, 15 bp, Homo sapiens
tgacagccacccatt

SEQ ID NO: 1678389 - DNA, 15 bp, Homo sapiens
gacagccacccattt

SEQ ID NO: 1678390 - DNA, 15 bp, Homo sapiens
acagccacccatttt

SEQ ID NO: 1678391 - DNA, 15 bp, Homo sapiens
cagccacccatttta

SEQ ID NO: 1678392 - DNA, 15 bp, Homo sapiens
agccacccattttac

SEQ ID NO: 1678393 - DNA, 15 bp, Homo sapiens
gccacccattttaca

SEQ ID NO: 1678394 - DNA, 15 bp, Homo sapiens
ccacccattttacag

SEQ ID NO: 1678395 - DNA, 15 bp, Homo sapiens
cacccattttacaga

SEQ ID NO: 1678396 - DNA, 15 bp, Homo sapiens
acccattttacagag

SEQ ID NO: 1678397 - DNA, 15 bp, Homo sapiens
cccattttacagaga

SEQ ID NO: 1678398 - DNA, 15 bp, Homo sapiens
ccattttacagagag

SEQ ID NO: 1678399 - DNA, 15 bp, Homo sapiens
cattttacagagaga

SEQ ID NO: 1678400 - DNA, 15 bp, Homo sapiens
attttacagagagaa

SEQ ID NO: 1678401 - DNA, 15 bp, Homo sapiens
ttttacagagagaaa

SEQ ID NO: 1678402 - DNA, 15 bp, Homo sapiens
tttacagagagaaat

SEQ ID NO: 1678403 - DNA, 15 bp, Homo sapiens
ttacagagagaaata

SEQ ID NO: 1678404 - DNA, 15 bp, Homo sapiens
tacagagagaaatag

SEQ ID NO: 1678405 - DNA, 15 bp, Homo sapiens
acagagagaaatagg

SEQ ID NO: 1678406 - DNA, 15 bp, Homo sapiens
cagagagaaatagga

SEQ ID NO: 1678407 - DNA, 15 bp, Homo sapiens
agagagaaataggag

SEQ ID NO: 1678408 - DNA, 15 bp, Homo sapiens
gagagaaataggagg

SEQ ID NO: 1678409 - DNA, 15 bp, Homo sapiens
agagaaataggaggc

SEQ ID NO: 1678410 - DNA, 15 bp, Homo sapiens
gagaaataggaggct

SEQ ID NO: 1678411 - DNA, 15 bp, Homo sapiens
agaaataggaggctc

SEQ ID NO: 1678412 - DNA, 15 bp, Homo sapiens
gaaataggaggctcg

SEQ ID NO: 1678413 - DNA, 15 bp, Homo sapiens
aaataggaggctcgg

SEQ ID NO: 1678414 - DNA, 15 bp, Homo sapiens
aataggaggctcggg

SEQ ID NO: 1678415 - DNA, 15 bp, Homo sapiens
ataggaggctcgggt

SEQ ID NO: 1678416 - DNA, 15 bp, Homo sapiens
taggaggctcgggtc

SEQ ID NO: 1678417 - DNA, 15 bp, Homo sapiens
aggaggctcgggtca

SEQ ID NO: 1678418 - DNA, 15 bp, Homo sapiens
ggaggctcgggtcac

SEQ ID NO: 1678419 - DNA, 15 bp, Homo sapiens
gaggctcgggtcact

SEQ ID NO: 1678420 - DNA, 15 bp, Homo sapiens
aggctcgggtcactg

SEQ ID NO: 1678421 - DNA, 15 bp, Homo sapiens
ggctcgggtcactgt

SEQ ID NO: 1678422 - DNA, 15 bp, Homo sapiens
gctcgggtcactgtg

SEQ ID NO: 1678423 - DNA, 15 bp, Homo sapiens
ctcgggtcactgtgg

SEQ ID NO: 1678424 - DNA, 15 bp, Homo sapiens
tcgggtcactgtggc

SEQ ID NO: 1678425 - DNA, 15 bp, Homo sapiens
cgggtcactgtggct

SEQ ID NO: 1678426 - DNA, 15 bp, Homo sapiens
gggtcactgtggctg

SEQ ID NO: 1678427 - DNA, 15 bp, Homo sapiens
ggtcactgtggctgg

SEQ ID NO: 1678428 - DNA, 15 bp, Homo sapiens
gtcactgtggctgga

SEQ ID NO: 1678429 - DNA, 15 bp, Homo sapiens
tcactgtggctggat

SEQ ID NO: 1678430 - DNA, 15 bp, Homo sapiens
cactgtggctggatt

SEQ ID NO: 1678431 - DNA, 15 bp, Homo sapiens
actgtggctggattc

SEQ ID NO: 1678432 - DNA, 15 bp, Homo sapiens
ctgtggctggattct

SEQ ID NO: 1678433 - DNA, 15 bp, Homo sapiens
tgtggctggattctg

SEQ ID NO: 1678434 - DNA, 15 bp, Homo sapiens
gtggctggattctga

SEQ ID NO: 1678435 - DNA, 15 bp, Homo sapiens
tggctggattctgat

SEQ ID NO: 1678436 - DNA, 15 bp, Homo sapiens
ggctggattctgatc

SEQ ID NO: 1678437 - DNA, 15 bp, Homo sapiens
gctggattctgatcc

SEQ ID NO: 1678438 - DNA, 15 bp, Homo sapiens
ctggattctgatcct

SEQ ID NO: 1678439 - DNA, 15 bp, Homo sapiens
tggattctgatcctc

SEQ ID NO: 1678440 - DNA, 15 bp, Homo sapiens
ggattctgatcctcg

SEQ ID NO: 1678441 - DNA, 15 bp, Homo sapiens
gattctgatcctcgc

SEQ ID NO: 1678442 - DNA, 15 bp, Homo sapiens
attctgatcctcgcc

SEQ ID NO: 1678443 - DNA, 15 bp, Homo sapiens
ttctgatcctcgccg

SEQ ID NO: 1678444 - DNA, 15 bp, Homo sapiens
tctgatcctcgccgg

SEQ ID NO: 1678445 - DNA, 15 bp, Homo sapiens
ctgatcctcgccggt

SEQ ID NO: 1678446 - DNA, 15 bp, Homo sapiens
tgatcctcgccggtt

SEQ ID NO: 1678447 - DNA, 15 bp, Homo sapiens
gatcctcgccggttc

SEQ ID NO: 1678448 - DNA, 15 bp, Homo sapiens
atcctcgccggttcc

SEQ ID NO: 1678449 - DNA, 15 bp, Homo sapiens
tcctcgccggttcca

SEQ ID NO: 1678450 - DNA, 15 bp, Homo sapiens
cctcgccggttccag

SEQ ID NO: 1678451 - DNA, 15 bp, Homo sapiens
ctcgccggttccagt

SEQ ID NO: 1678452 - DNA, 15 bp, Homo sapiens
tcgccggttccagtt

SEQ ID NO: 1678453 - DNA, 15 bp, Homo sapiens
cgccggttccagttc

SEQ ID NO: 1678454 - DNA, 15 bp, Homo sapiens
gccggttccagttct

SEQ ID NO: 1678455 - DNA, 15 bp, Homo sapiens
ccggttccagttctc

SEQ ID NO: 1678456 - DNA, 15 bp, Homo sapiens
cggttccagttctct

SEQ ID NO: 1678457 - DNA, 15 bp, Homo sapiens
ggttccagttctctg

SEQ ID NO: 1678458 - DNA, 15 bp, Homo sapiens
gttccagttctctgg

SEQ ID NO: 1678459 - DNA, 15 bp, Homo sapiens
ttccagttctctggc

SEQ ID NO: 1678460 - DNA, 15 bp, Homo sapiens
tccagttctctggct

SEQ ID NO: 1678461 - DNA, 15 bp, Homo sapiens
ccagttctctggctc

SEQ ID NO: 1678462 - DNA, 15 bp, Homo sapiens
cagttctctggctca

SEQ ID NO: 1678463 - DNA, 15 bp, Homo sapiens
agttctctggctcag

SEQ ID NO: 1678464 - DNA, 15 bp, Homo sapiens
gttctctggctcaga

SEQ ID NO: 1678465 - DNA, 15 bp, Homo sapiens
ttctctggctcagaa

SEQ ID NO: 1678466 - DNA, 15 bp, Homo sapiens
tctctggctcagaac

SEQ ID NO: 1678467 - DNA, 15 bp, Homo sapiens
ctctggctcagaacg

SEQ ID NO: 1678468 - DNA, 15 bp, Homo sapiens
tctggctcagaacgg

SEQ ID NO: 1678469 - DNA, 15 bp, Homo sapiens
ctggctcagaacggg

SEQ ID NO: 1678470 - DNA, 15 bp, Homo sapiens
tggctcagaacgggg

SEQ ID NO: 1678471 - DNA, 15 bp, Homo sapiens
ggctcagaacggggc

SEQ ID NO: 1678472 - DNA, 15 bp, Homo sapiens
gctcagaacggggcc

SEQ ID NO: 1678473 - DNA, 15 bp, Homo sapiens
ctcagaacggggccc

SEQ ID NO: 1678474 - DNA, 15 bp, Homo sapiens
tcagaacggggccct

SEQ ID NO: 1678475 - DNA, 15 bp, Homo sapiens
cagaacggggccctg

SEQ ID NO: 1678476 - DNA, 15 bp, Homo sapiens
agaacggggccctgg

SEQ ID NO: 1678477 - DNA, 15 bp, Homo sapiens
gaacggggccctggt

SEQ ID NO: 1678478 - DNA, 15 bp, Homo sapiens
aacggggccctggta

SEQ ID NO: 1678479 - DNA, 15 bp, Homo sapiens
acggggccctggtaa

SEQ ID NO: 1678480 - DNA, 15 bp, Homo sapiens
cggggccctggtaaa

SEQ ID NO: 1678481 - DNA, 15 bp, Homo sapiens
ggggccctggtaaaa

SEQ ID NO: 1678482 - DNA, 15 bp, Homo sapiens
gggccctggtaaaat

SEQ ID NO: 1678483 - DNA, 15 bp, Homo sapiens
ggccctggtaaaatg

SEQ ID NO: 1678484 - DNA, 15 bp, Homo sapiens
gccctggtaaaatgc

SEQ ID NO: 1678485 - DNA, 15 bp, Homo sapiens
ccctggtaaaatgcg

SEQ ID NO: 1678486 - DNA, 15 bp, Homo sapiens
cctggtaaaatgcgc

SEQ ID NO: 1678487 - DNA, 15 bp, Homo sapiens
ctggtaaaatgcgct

SEQ ID NO: 1678488 - DNA, 15 bp, Homo sapiens
tggtaaaatgcgctg

SEQ ID NO: 1678489 - DNA, 15 bp, Homo sapiens
ggtaaaatgcgctgc

SEQ ID NO: 1678490 - DNA, 15 bp, Homo sapiens
gtaaaatgcgctgct

SEQ ID NO: 1678491 - DNA, 15 bp, Homo sapiens
taaaatgcgctgctg

SEQ ID NO: 1678492 - DNA, 15 bp, Homo sapiens
aaaatgcgctgctgg

SEQ ID NO: 1678493 - DNA, 15 bp, Homo sapiens
aaatgcgctgctggc

SEQ ID NO: 1678494 - DNA, 15 bp, Homo sapiens
aatgcgctgctggct

SEQ ID NO: 1678495 - DNA, 15 bp, Homo sapiens
atgcgctgctggctc

SEQ ID NO: 1678496 - DNA, 15 bp, Homo sapiens
tgcgctgctggctcc

SEQ ID NO: 1678497 - DNA, 15 bp, Homo sapiens
gcgctgctggctccc

SEQ ID NO: 1678498 - DNA, 15 bp, Homo sapiens
cgctgctggctccct

SEQ ID NO: 1678499 - DNA, 15 bp, Homo sapiens
gctgctggctccctg

SEQ ID NO: 1678500 - DNA, 15 bp, Homo sapiens
ctgctggctccctgg

SEQ ID NO: 1678501 - DNA, 15 bp, Homo sapiens
tgctggctccctggt

SEQ ID NO: 1678502 - DNA, 15 bp, Homo sapiens
gctggctccctggtc

SEQ ID NO: 1678503 - DNA, 15 bp, Homo sapiens
ctggctccctggtct

SEQ ID NO: 1678504 - DNA, 15 bp, Homo sapiens
tggctccctggtcta

SEQ ID NO: 1678505 - DNA, 15 bp, Homo sapiens
ggctccctggtctat

SEQ ID NO: 1678506 - DNA, 15 bp, Homo sapiens
gctccctggtctata

SEQ ID NO: 1678507 - DNA, 15 bp, Homo sapiens
ctccctggtctatag

SEQ ID NO: 1678508 - DNA, 15 bp, Homo sapiens
tccctggtctatagg

SEQ ID NO: 1678509 - DNA, 15 bp, Homo sapiens
ccctggtctataggc

SEQ ID NO: 1678510 - DNA, 15 bp, Homo sapiens
cctggtctataggct

SEQ ID NO: 1678511 - DNA, 15 bp, Homo sapiens
ctggtctataggctc

SEQ ID NO: 1678512 - DNA, 15 bp, Homo sapiens
tggtctataggctca

SEQ ID NO: 1678513 - DNA, 15 bp, Homo sapiens
ggtctataggctcag

SEQ ID NO: 1678514 - DNA, 15 bp, Homo sapiens
gtctataggctcagc

SEQ ID NO: 1678515 - DNA, 15 bp, Homo sapiens
tctataggctcagca

SEQ ID NO: 1678516 - DNA, 15 bp, Homo sapiens
ctataggctcagcac

SEQ ID NO: 1678517 - DNA, 15 bp, Homo sapiens
tataggctcagcacc

SEQ ID NO: 1678518 - DNA, 15 bp, Homo sapiens
ataggctcagcaccc

SEQ ID NO: 1678519 - DNA, 15 bp, Homo sapiens
taggctcagcaccca

SEQ ID NO: 1678520 - DNA, 15 bp, Homo sapiens
aggctcagcacccac

SEQ ID NO: 1678521 - DNA, 15 bp, Homo sapiens
ggctcagcacccacc

SEQ ID NO: 1678522 - DNA, 15 bp, Homo sapiens
gctcagcacccaccc

SEQ ID NO: 1678523 - DNA, 15 bp, Homo sapiens
ctcagcacccaccca

SEQ ID NO: 1678524 - DNA, 15 bp, Homo sapiens
tcagcacccacccac

SEQ ID NO: 1678525 - DNA, 15 bp, Homo sapiens
cagcacccacccacc

SEQ ID NO: 1678526 - DNA, 15 bp, Homo sapiens
agcacccacccaccc

SEQ ID NO: 1678527 - DNA, 15 bp, Homo sapiens
gcacccacccaccca

SEQ ID NO: 1678528 - DNA, 15 bp, Homo sapiens
cacccacccacccac

SEQ ID NO: 1678529 - DNA, 15 bp, Homo sapiens
acccacccacccacc

SEQ ID NO: 1678530 - DNA, 15 bp, Homo sapiens
cccacccacccaccc

SEQ ID NO: 1678531 - DNA, 15 bp, Homo sapiens
ccacccacccaccca

SEQ ID NO: 1678532 - DNA, 15 bp, Homo sapiens
acccacccacccact

SEQ ID NO: 1678533 - DNA, 15 bp, Homo sapiens
cccacccacccactt

SEQ ID NO: 1678534 - DNA, 15 bp, Homo sapiens
ccacccacccacttg

SEQ ID NO: 1678535 - DNA, 15 bp, Homo sapiens
cacccacccacttgt

SEQ ID NO: 1678536 - DNA, 15 bp, Homo sapiens
acccacccacttgtc

SEQ ID NO: 1678537 - DNA, 15 bp, Homo sapiens
cccacccacttgtcc

SEQ ID NO: 1678538 - DNA, 15 bp, Homo sapiens
ccacccacttgtcct

SEQ ID NO: 1678539 - DNA, 15 bp, Homo sapiens
cacccacttgtcctg

SEQ ID NO: 1678540 - DNA, 15 bp, Homo sapiens
acccacttgtcctgc

SEQ ID NO: 1678541 - DNA, 15 bp, Homo sapiens
cccacttgtcctgca

SEQ ID NO: 1678542 - DNA, 15 bp, Homo sapiens
ccacttgtcctgcag

SEQ ID NO: 1678543 - DNA, 15 bp, Homo sapiens
cacttgtcctgcagg

SEQ ID NO: 1678544 - DNA, 15 bp, Homo sapiens
acttgtcctgcaggg

SEQ ID NO: 1678545 - DNA, 15 bp, Homo sapiens
cttgtcctgcagggc

SEQ ID NO: 1678546 - DNA, 15 bp, Homo sapiens
ttgtcctgcagggct

SEQ ID NO: 1678547 - DNA, 15 bp, Homo sapiens
tgtcctgcagggctg

SEQ ID NO: 1678548 - DNA, 15 bp, Homo sapiens
gtcctgcagggctgg

SEQ ID NO: 1678549 - DNA, 15 bp, Homo sapiens
tcctgcagggctggg

SEQ ID NO: 1678550 - DNA, 15 bp, Homo sapiens
cctgcagggctgggg

SEQ ID NO: 1678551 - DNA, 15 bp, Homo sapiens
ctgcagggctggggg

SEQ ID NO: 1678552 - DNA, 15 bp, Homo sapiens
tgcagggctgggggc

SEQ ID NO: 1678553 - DNA, 15 bp, Homo sapiens
gcagggctgggggca

SEQ ID NO: 1678554 - DNA, 15 bp, Homo sapiens
cagggctgggggcag

SEQ ID NO: 1678555 - DNA, 15 bp, Homo sapiens
agggctgggggcagc

SEQ ID NO: 1678556 - DNA, 15 bp, Homo sapiens
gggctgggggcagcc

SEQ ID NO: 1678557 - DNA, 15 bp, Homo sapiens
ggctgggggcagcct

SEQ ID NO: 1678558 - DNA, 15 bp, Homo sapiens
gctgggggcagcctg

SEQ ID NO: 1678559 - DNA, 15 bp, Homo sapiens
ctgggggcagcctgc

SEQ ID NO: 1678560 - DNA, 15 bp, Homo sapiens
tgggggcagcctgca

SEQ ID NO: 1678561 - DNA, 15 bp, Homo sapiens
gggggcagcctgcag

SEQ ID NO: 1678562 - DNA, 15 bp, Homo sapiens
ggggcagcctgcagc

SEQ ID NO: 1678563 - DNA, 15 bp, Homo sapiens
gggcagcctgcagct

SEQ ID NO: 1678564 - DNA, 15 bp, Homo sapiens
ggcagcctgcagctt

SEQ ID NO: 1678565 - DNA, 15 bp, Homo sapiens
gcagcctgcagcttg

SEQ ID NO: 1678566 - DNA, 15 bp, Homo sapiens
cagcctgcagcttgg

SEQ ID NO: 1678567 - DNA, 15 bp, Homo sapiens
agcctgcagcttggg

SEQ ID NO: 1678568 - DNA, 15 bp, Homo sapiens
gcctgcagcttgggg

SEQ ID NO: 1678569 - DNA, 15 bp, Homo sapiens
cctgcagcttgggga

SEQ ID NO: 1678570 - DNA, 15 bp, Homo sapiens
ctgcagcttggggaa

SEQ ID NO: 1678571 - DNA, 15 bp, Homo sapiens
tgcagcttggggaac

SEQ ID NO: 1678572 - DNA, 15 bp, Homo sapiens
gcagcttggggaacg

SEQ ID NO: 1678573 - DNA, 15 bp, Homo sapiens
cagcttggggaacgc

SEQ ID NO: 1678574 - DNA, 15 bp, Homo sapiens
agcttggggaacgcc

SEQ ID NO: 1678575 - DNA, 15 bp, Homo sapiens
gcttggggaacgcca

SEQ ID NO: 1678576 - DNA, 15 bp, Homo sapiens
cttggggaacgccac

SEQ ID NO: 1678577 - DNA, 15 bp, Homo sapiens
ttggggaacgccacc

SEQ ID NO: 1678578 - DNA, 15 bp, Homo sapiens
tggggaacgccaccc

SEQ ID NO: 1678579 - DNA, 15 bp, Homo sapiens
ggggaacgccacccc

SEQ ID NO: 1678580 - DNA, 15 bp, Homo sapiens
gggaacgccacccct

SEQ ID NO: 1678581 - DNA, 15 bp, Homo sapiens
ggaacgccacccctg

SEQ ID NO: 1678582 - DNA, 15 bp, Homo sapiens
gaacgccacccctgc

SEQ ID NO: 1678583 - DNA, 15 bp, Homo sapiens
aacgccacccctgca

SEQ ID NO: 1678584 - DNA, 15 bp, Homo sapiens
acgccacccctgcag

SEQ ID NO: 1678585 - DNA, 15 bp, Homo sapiens
cgccacccctgcagg

SEQ ID NO: 1678586 - DNA, 15 bp, Homo sapiens
gccacccctgcaggc

SEQ ID NO: 1678587 - DNA, 15 bp, Homo sapiens
ccacccctgcaggct

SEQ ID NO: 1678588 - DNA, 15 bp, Homo sapiens
cacccctgcaggctg

SEQ ID NO: 1678589 - DNA, 15 bp, Homo sapiens
acccctgcaggctgg

SEQ ID NO: 1678590 - DNA, 15 bp, Homo sapiens
cccctgcaggctggt

SEQ ID NO: 1678591 - DNA, 15 bp, Homo sapiens
ccctgcaggctggtg

SEQ ID NO: 1678592 - DNA, 15 bp, Homo sapiens
cctgcaggctggtgg

SEQ ID NO: 1678593 - DNA, 15 bp, Homo sapiens
ctgcaggctggtggt

SEQ ID NO: 1678594 - DNA, 15 bp, Homo sapiens
tgcaggctggtggtc

SEQ ID NO: 1678595 - DNA, 15 bp, Homo sapiens
gcaggctggtggtcc

SEQ ID NO: 1678596 - DNA, 15 bp, Homo sapiens
caggctggtggtcct

SEQ ID NO: 1678597 - DNA, 15 bp, Homo sapiens
aggctggtggtcctg

SEQ ID NO: 1678598 - DNA, 15 bp, Homo sapiens
ggctggtggtcctgt

SEQ ID NO: 1678599 - DNA, 15 bp, Homo sapiens
gctggtggtcctgtc

SEQ ID NO: 1678600 - DNA, 15 bp, Homo sapiens
ctggtggtcctgtcc

SEQ ID NO: 1678601 - DNA, 15 bp, Homo sapiens
tggtggtcctgtcct

SEQ ID NO: 1678602 - DNA, 15 bp, Homo sapiens
ggtggtcctgtcctg

SEQ ID NO: 1678603 - DNA, 15 bp, Homo sapiens
gtggtcctgtcctgt

SEQ ID NO: 1678604 - DNA, 15 bp, Homo sapiens
tggtcctgtcctgtc

SEQ ID NO: 1678605 - DNA, 15 bp, Homo sapiens
ggtcctgtcctgtct

SEQ ID NO: 1678606 - DNA, 15 bp, Homo sapiens
gtcctgtcctgtctc

SEQ ID NO: 1678607 - DNA, 15 bp, Homo sapiens
tcctgtcctgtctcc

SEQ ID NO: 1678608 - DNA, 15 bp, Homo sapiens
cctgtcctgtctccg

SEQ ID NO: 1678609 - DNA, 15 bp, Homo sapiens
ctgtcctgtctccgc

SEQ ID NO: 1678610 - DNA, 15 bp, Homo sapiens
tgtcctgtctccgca

SEQ ID NO: 1678611 - DNA, 15 bp, Homo sapiens
gtcctgtctccgcag

SEQ ID NO: 1678612 - DNA, 15 bp, Homo sapiens
tcctgtctccgcagg

SEQ ID NO: 1678613 - DNA, 15 bp, Homo sapiens
cctgtctccgcaggc

SEQ ID NO: 1678614 - DNA, 15 bp, Homo sapiens
ctgtctccgcaggct

SEQ ID NO: 1678615 - DNA, 15 bp, Homo sapiens
tgtctccgcaggctc

SEQ ID NO: 1678616 - DNA, 15 bp, Homo sapiens
gtctccgcaggctca

SEQ ID NO: 1678617 - DNA, 15 bp, Homo sapiens
tctccgcaggctcaa

SEQ ID NO: 1678618 - DNA, 15 bp, Homo sapiens
ctccgcaggctcaac

SEQ ID NO: 1678619 - DNA, 15 bp, Homo sapiens
tccgcaggctcaaca

SEQ ID NO: 1678620 - DNA, 15 bp, Homo sapiens
ccgcaggctcaacag

SEQ ID NO: 1678621 - DNA, 15 bp, Homo sapiens
cgcaggctcaacagc

SEQ ID NO: 1678622 - DNA, 15 bp, Homo sapiens
gcaggctcaacagct

SEQ ID NO: 1678623 - DNA, 15 bp, Homo sapiens
caggctcaacagctc

SEQ ID NO: 1678624 - DNA, 15 bp, Homo sapiens
aggctcaacagctct

SEQ ID NO: 1678625 - DNA, 15 bp, Homo sapiens
ggctcaacagctctg

SEQ ID NO: 1678626 - DNA, 15 bp, Homo sapiens
gctcaacagctctgg

SEQ ID NO: 1678627 - DNA, 15 bp, Homo sapiens
ctcaacagctctggc

SEQ ID NO: 1678628 - DNA, 15 bp, Homo sapiens
tcaacagctctggcc

SEQ ID NO: 1678629 - DNA, 15 bp, Homo sapiens
caacagctctggcca

SEQ ID NO: 1678630 - DNA, 15 bp, Homo sapiens
aacagctctggccag

SEQ ID NO: 1678631 - DNA, 15 bp, Homo sapiens
acagctctggccagg

SEQ ID NO: 1678632 - DNA, 15 bp, Homo sapiens
cagctctggccagga

SEQ ID NO: 1678633 - DNA, 15 bp, Homo sapiens
agctctggccaggac

SEQ ID NO: 1678634 - DNA, 15 bp, Homo sapiens
gctctggccaggaca

SEQ ID NO: 1678635 - DNA, 15 bp, Homo sapiens
ctctggccaggacag

SEQ ID NO: 1678636 - DNA, 15 bp, Homo sapiens
tctggccaggacagg

SEQ ID NO: 1678637 - DNA, 15 bp, Homo sapiens
ctggccaggacaggg

SEQ ID NO: 1678638 - DNA, 15 bp, Homo sapiens
tggccaggacagggt

SEQ ID NO: 1678639 - DNA, 15 bp, Homo sapiens
ggccaggacagggtg

SEQ ID NO: 1678640 - DNA, 15 bp, Homo sapiens
gccaggacagggtgg

SEQ ID NO: 1678641 - DNA, 15 bp, Homo sapiens
ccaggacagggtgga

SEQ ID NO: 1678642 - DNA, 15 bp, Homo sapiens
caggacagggtggaa

SEQ ID NO: 1678643 - DNA, 15 bp, Homo sapiens
aggacagggtggaag

SEQ ID NO: 1678644 - DNA, 15 bp, Homo sapiens
ggacagggtggaagg

SEQ ID NO: 1678645 - DNA, 15 bp, Homo sapiens
gacagggtggaaggt

SEQ ID NO: 1678646 - DNA, 15 bp, Homo sapiens
acagggtggaaggtg

SEQ ID NO: 1678647 - DNA, 15 bp, Homo sapiens
cagggtggaaggtgg

SEQ ID NO: 1678648 - DNA, 15 bp, Homo sapiens
agggtggaaggtggg

SEQ ID NO: 1678649 - DNA, 15 bp, Homo sapiens
gggtggaaggtggga

SEQ ID NO: 1678650 - DNA, 15 bp, Homo sapiens
ggtggaaggtgggag

SEQ ID NO: 1678651 - DNA, 15 bp, Homo sapiens
gtggaaggtgggagg

SEQ ID NO: 1678652 - DNA, 15 bp, Homo sapiens
tggaaggtgggagga

SEQ ID NO: 1678653 - DNA, 15 bp, Homo sapiens
ggaaggtgggaggaa

SEQ ID NO: 1678654 - DNA, 15 bp, Homo sapiens
gaaggtgggaggaat

SEQ ID NO: 1678655 - DNA, 15 bp, Homo sapiens
aaggtgggaggaatt

SEQ ID NO: 1678656 - DNA, 15 bp, Homo sapiens
aggtgggaggaattt

SEQ ID NO: 1678657 - DNA, 15 bp, Homo sapiens
ggtgggaggaatttg

SEQ ID NO: 1678658 - DNA, 15 bp, Homo sapiens
gtgggaggaatttgt

SEQ ID NO: 1678659 - DNA, 15 bp, Homo sapiens
tgggaggaatttgtc

SEQ ID NO: 1678660 - DNA, 15 bp, Homo sapiens
gggaggaatttgtcc

SEQ ID NO: 1678661 - DNA, 15 bp, Homo sapiens
ggaggaatttgtccc

SEQ ID NO: 1678662 - DNA, 15 bp, Homo sapiens
gaggaatttgtccca

SEQ ID NO: 1678663 - DNA, 15 bp, Homo sapiens
aggaatttgtcccac

SEQ ID NO: 1678664 - DNA, 15 bp, Homo sapiens
ggaatttgtcccact

SEQ ID NO: 1678665 - DNA, 15 bp, Homo sapiens
gaatttgtcccactc

SEQ ID NO: 1678666 - DNA, 15 bp, Homo sapiens
aatttgtcccactcc

SEQ ID NO: 1678667 - DNA, 15 bp, Homo sapiens
atttgtcccactccc

SEQ ID NO: 1678668 - DNA, 15 bp, Homo sapiens
tttgtcccactccca

SEQ ID NO: 1678669 - DNA, 15 bp, Homo sapiens
ttgtcccactcccag

SEQ ID NO: 1678670 - DNA, 15 bp, Homo sapiens
tgtcccactcccagc

SEQ ID NO: 1678671 - DNA, 15 bp, Homo sapiens
gtcccactcccagca

SEQ ID NO: 1678672 - DNA, 15 bp, Homo sapiens
tcccactcccagcaa

SEQ ID NO: 1678673 - DNA, 15 bp, Homo sapiens
cccactcccagcaag

SEQ ID NO: 1678674 - DNA, 15 bp, Homo sapiens
ccactcccagcaagt

SEQ ID NO: 1678675 - DNA, 15 bp, Homo sapiens
cactcccagcaagtc

SEQ ID NO: 1678676 - DNA, 15 bp, Homo sapiens
actcccagcaagtct

SEQ ID NO: 1678677 - DNA, 15 bp, Homo sapiens
ctcccagcaagtctg

SEQ ID NO: 1678678 - DNA, 15 bp, Homo sapiens
tcccagcaagtctga

SEQ ID NO: 1678679 - DNA, 15 bp, Homo sapiens
cccagcaagtctgac

SEQ ID NO: 1678680 - DNA, 15 bp, Homo sapiens
ccagcaagtctgaca

SEQ ID NO: 1678681 - DNA, 15 bp, Homo sapiens
cagcaagtctgacac

SEQ ID NO: 1678682 - DNA, 15 bp, Homo sapiens
agcaagtctgacacc

SEQ ID NO: 1678683 - DNA, 15 bp, Homo sapiens
gcaagtctgacaccc

SEQ ID NO: 1678684 - DNA, 15 bp, Homo sapiens
caagtctgacaccca

SEQ ID NO: 1678685 - DNA, 15 bp, Homo sapiens
aagtctgacacccac

SEQ ID NO: 1678686 - DNA, 15 bp, Homo sapiens
agtctgacacccaca

SEQ ID NO: 1678687 - DNA, 15 bp, Homo sapiens
gtctgacacccacaa

SEQ ID NO: 1678688 - DNA, 15 bp, Homo sapiens
tctgacacccacaac

SEQ ID NO: 1678689 - DNA, 15 bp, Homo sapiens
ctgacacccacaact

SEQ ID NO: 1678690 - DNA, 15 bp, Homo sapiens
tgacacccacaacta

SEQ ID NO: 1678691 - DNA, 15 bp, Homo sapiens
gacacccacaactag

SEQ ID NO: 1678692 - DNA, 15 bp, Homo sapiens
acacccacaactagt

SEQ ID NO: 1678693 - DNA, 15 bp, Homo sapiens
cacccacaactagtg

SEQ ID NO: 1678694 - DNA, 15 bp, Homo sapiens
acccacaactagtgt

SEQ ID NO: 1678695 - DNA, 15 bp, Homo sapiens
cccacaactagtgtc

SEQ ID NO: 1678696 - DNA, 15 bp, Homo sapiens
ccacaactagtgtcc

SEQ ID NO: 1678697 - DNA, 15 bp, Homo sapiens
cacaactagtgtccc

SEQ ID NO: 1678698 - DNA, 15 bp, Homo sapiens
acaactagtgtcccc

SEQ ID NO: 1678699 - DNA, 15 bp, Homo sapiens
caactagtgtcccct

SEQ ID NO: 1678700 - DNA, 15 bp, Homo sapiens
aactagtgtcccctg

SEQ ID NO: 1678701 - DNA, 15 bp, Homo sapiens
actagtgtcccctgc

SEQ ID NO: 1678702 - DNA, 15 bp, Homo sapiens
ctagtgtcccctgct

SEQ ID NO: 1678703 - DNA, 15 bp, Homo sapiens
tagtgtcccctgctg

SEQ ID NO: 1678704 - DNA, 15 bp, Homo sapiens
agtgtcccctgctgt

SEQ ID NO: 1678705 - DNA, 15 bp, Homo sapiens
gtgtcccctgctgtc

SEQ ID NO: 1678706 - DNA, 15 bp, Homo sapiens
tgtcccctgctgtcc

SEQ ID NO: 1678707 - DNA, 15 bp, Homo sapiens
gtcccctgctgtccc

SEQ ID NO: 1678708 - DNA, 15 bp, Homo sapiens
tcccctgctgtccct

SEQ ID NO: 1678709 - DNA, 15 bp, Homo sapiens
cccctgctgtccctc

SEQ ID NO: 1678710 - DNA, 15 bp, Homo sapiens
ccctgctgtccctcc

SEQ ID NO: 1678711 - DNA, 15 bp, Homo sapiens
cctgctgtccctccc

SEQ ID NO: 1678712 - DNA, 15 bp, Homo sapiens
ctgctgtccctcccc

SEQ ID NO: 1678713 - DNA, 15 bp, Homo sapiens
tgctgtccctcccct

SEQ ID NO: 1678714 - DNA, 15 bp, Homo sapiens
gctgtccctcccctt

SEQ ID NO: 1678715 - DNA, 15 bp, Homo sapiens
ctgtccctccccttc

SEQ ID NO: 1678716 - DNA, 15 bp, Homo sapiens
tgtccctccccttct

SEQ ID NO: 1678717 - DNA, 15 bp, Homo sapiens
gtccctccccttctc

SEQ ID NO: 1678718 - DNA, 15 bp, Homo sapiens
tccctccccttctcc

SEQ ID NO: 1678719 - DNA, 15 bp, Homo sapiens
ccctccccttctcct

SEQ ID NO: 1678720 - DNA, 15 bp, Homo sapiens
cctccccttctcctg

SEQ ID NO: 1678721 - DNA, 15 bp, Homo sapiens
ctccccttctcctgt

SEQ ID NO: 1678722 - DNA, 15 bp, Homo sapiens
tccccttctcctgtc

SEQ ID NO: 1678723 - DNA, 15 bp, Homo sapiens
ccccttctcctgtcc

SEQ ID NO: 1678724 - DNA, 15 bp, Homo sapiens
cccttctcctgtccc

SEQ ID NO: 1678725 - DNA, 15 bp, Homo sapiens
ccttctcctgtcccc

SEQ ID NO: 1678726 - DNA, 15 bp, Homo sapiens
cttctcctgtcccca

SEQ ID NO: 1678727 - DNA, 15 bp, Homo sapiens
ttctcctgtccccag

SEQ ID NO: 1678728 - DNA, 15 bp, Homo sapiens
tctcctgtccccagg

SEQ ID NO: 1678729 - DNA, 15 bp, Homo sapiens
ctcctgtccccaggc

SEQ ID NO: 1678730 - DNA, 15 bp, Homo sapiens
tcctgtccccaggcc

SEQ ID NO: 1678731 - DNA, 15 bp, Homo sapiens
cctgtccccaggccg

SEQ ID NO: 1678732 - DNA, 15 bp, Homo sapiens
ctgtccccaggccgt

SEQ ID NO: 1678733 - DNA, 15 bp, Homo sapiens
tgtccccaggccgtt

SEQ ID NO: 1678734 - DNA, 15 bp, Homo sapiens
gtccccaggccgttc

SEQ ID NO: 1678735 - DNA, 15 bp, Homo sapiens
tccccaggccgttcc

SEQ ID NO: 1678736 - DNA, 15 bp, Homo sapiens
ccccaggccgttccc

SEQ ID NO: 1678737 - DNA, 15 bp, Homo sapiens
cccaggccgttcccc

SEQ ID NO: 1678738 - DNA, 15 bp, Homo sapiens
ccaggccgttcccct

SEQ ID NO: 1678739 - DNA, 15 bp, Homo sapiens
caggccgttcccctt

SEQ ID NO: 1678740 - DNA, 15 bp, Homo sapiens
aggccgttccccttc

SEQ ID NO: 1678741 - DNA, 15 bp, Homo sapiens
ggccgttccccttcc

SEQ ID NO: 1678742 - DNA, 15 bp, Homo sapiens
gccgttccccttcca

SEQ ID NO: 1678743 - DNA, 15 bp, Homo sapiens
ccgttccccttccag

SEQ ID NO: 1678744 - DNA, 15 bp, Homo sapiens
cgttccccttccagc

SEQ ID NO: 1678745 - DNA, 15 bp, Homo sapiens
gttccccttccagca

SEQ ID NO: 1678746 - DNA, 15 bp, Homo sapiens
ttccccttccagcag

SEQ ID NO: 1678747 - DNA, 15 bp, Homo sapiens
tccccttccagcagc

SEQ ID NO: 1678748 - DNA, 15 bp, Homo sapiens
ccccttccagcagcc

SEQ ID NO: 1678749 - DNA, 15 bp, Homo sapiens
cccttccagcagccc

SEQ ID NO: 1678750 - DNA, 15 bp, Homo sapiens
ccttccagcagcccg

SEQ ID NO: 1678751 - DNA, 15 bp, Homo sapiens
cttccagcagcccga

SEQ ID NO: 1678752 - DNA, 15 bp, Homo sapiens
ttccagcagcccgag

SEQ ID NO: 1678753 - DNA, 15 bp, Homo sapiens
tccagcagcccgagg

SEQ ID NO: 1678754 - DNA, 15 bp, Homo sapiens
ccagcagcccgaggc

SEQ ID NO: 1678755 - DNA, 15 bp, Homo sapiens
cagcagcccgaggca

SEQ ID NO: 1678756 - DNA, 15 bp, Homo sapiens
agcagcccgaggcat

SEQ ID NO: 1678757 - DNA, 15 bp, Homo sapiens
gcagcccgaggcatc

SEQ ID NO: 1678758 - DNA, 15 bp, Homo sapiens
cagcccgaggcatcc

SEQ ID NO: 1678759 - DNA, 15 bp, Homo sapiens
agcccgaggcatccc

SEQ ID NO: 1678760 - DNA, 15 bp, Homo sapiens
gcccgaggcatccca

SEQ ID NO: 1678761 - DNA, 15 bp, Homo sapiens
cccgaggcatcccag

SEQ ID NO: 1678762 - DNA, 15 bp, Homo sapiens
ccgaggcatcccaga

SEQ ID NO: 1678763 - DNA, 15 bp, Homo sapiens
cgaggcatcccagac

SEQ ID NO: 1678764 - DNA, 15 bp, Homo sapiens
gaggcatcccagacc

SEQ ID NO: 1678765 - DNA, 15 bp, Homo sapiens
aggcatcccagacca

SEQ ID NO: 1678766 - DNA, 15 bp, Homo sapiens
ggcatcccagaccac

SEQ ID NO: 1678767 - DNA, 15 bp, Homo sapiens
gcatcccagaccaca

SEQ ID NO: 1678768 - DNA, 15 bp, Homo sapiens
catcccagaccacag

SEQ ID NO: 1678769 - DNA, 15 bp, Homo sapiens
atcccagaccacagc

SEQ ID NO: 1678770 - DNA, 15 bp, Homo sapiens
tcccagaccacagct

SEQ ID NO: 1678771 - DNA, 15 bp, Homo sapiens
cccagaccacagctg

SEQ ID NO: 1678772 - DNA, 15 bp, Homo sapiens
ccagaccacagctgt

SEQ ID NO: 1678773 - DNA, 15 bp, Homo sapiens
cagaccacagctgtc

SEQ ID NO: 1678774 - DNA, 15 bp, Homo sapiens
agaccacagctgtct

SEQ ID NO: 1678775 - DNA, 15 bp, Homo sapiens
gaccacagctgtctg

SEQ ID NO: 1678776 - DNA, 15 bp, Homo sapiens
accacagctgtctgc

SEQ ID NO: 1678777 - DNA, 15 bp, Homo sapiens
ccacagctgtctgca

SEQ ID NO: 1678778 - DNA, 15 bp, Homo sapiens
cacagctgtctgcag

SEQ ID NO: 1678779 - DNA, 15 bp, Homo sapiens
acagctgtctgcagt

SEQ ID NO: 1678780 - DNA, 15 bp, Homo sapiens
cagctgtctgcagtg

SEQ ID NO: 1678781 - DNA, 15 bp, Homo sapiens
agctgtctgcagtga

SEQ ID NO: 1678782 - DNA, 15 bp, Homo sapiens
gctgtctgcagtgag

SEQ ID NO: 1678783 - DNA, 15 bp, Homo sapiens
ctgtctgcagtgagt

SEQ ID NO: 1678784 - DNA, 15 bp, Homo sapiens
tgtctgcagtgagtc

SEQ ID NO: 1678785 - DNA, 15 bp, Homo sapiens
gtctgcagtgagtca

SEQ ID NO: 1678786 - DNA, 15 bp, Homo sapiens
tctgcagtgagtcag

SEQ ID NO: 1678787 - DNA, 15 bp, Homo sapiens
ctgcagtgagtcagc

SEQ ID NO: 1678788 - DNA, 15 bp, Homo sapiens
tgcagtgagtcagcc

SEQ ID NO: 1678789 - DNA, 15 bp, Homo sapiens
gcagtgagtcagcct

SEQ ID NO: 1678790 - DNA, 15 bp, Homo sapiens
cagtgagtcagcctg

SEQ ID NO: 1678791 - DNA, 15 bp, Homo sapiens
agtgagtcagcctgg

SEQ ID NO: 1678792 - DNA, 15 bp, Homo sapiens
gtgagtcagcctgga

SEQ ID NO: 1678793 - DNA, 15 bp, Homo sapiens
tgagtcagcctggag

SEQ ID NO: 1678794 - DNA, 15 bp, Homo sapiens
gagtcagcctggagc

SEQ ID NO: 1678795 - DNA, 15 bp, Homo sapiens
agtcagcctggagcc

SEQ ID NO: 1678796 - DNA, 15 bp, Homo sapiens
gtcagcctggagcct

SEQ ID NO: 1678797 - DNA, 15 bp, Homo sapiens
tcagcctggagcctc

SEQ ID NO: 1678798 - DNA, 15 bp, Homo sapiens
cagcctggagcctct

SEQ ID NO: 1678799 - DNA, 15 bp, Homo sapiens
agcctggagcctctg

SEQ ID NO: 1678800 - DNA, 15 bp, Homo sapiens
gcctggagcctctgg

SEQ ID NO: 1678801 - DNA, 15 bp, Homo sapiens
cctggagcctctggg

SEQ ID NO: 1678802 - DNA, 15 bp, Homo sapiens
ctggagcctctgggc

SEQ ID NO: 1678803 - DNA, 15 bp, Homo sapiens
tggagcctctgggct

SEQ ID NO: 1678804 - DNA, 15 bp, Homo sapiens
gagcctctgggctga

SEQ ID NO: 1678805 - DNA, 15 bp, Homo sapiens
agcctctgggctgag

SEQ ID NO: 1678806 - DNA, 15 bp, Homo sapiens
gcctctgggctgagc

SEQ ID NO: 1678807 - DNA, 15 bp, Homo sapiens
cctctgggctgagcc

SEQ ID NO: 1678808 - DNA, 15 bp, Homo sapiens
ctctgggctgagccg

SEQ ID NO: 1678809 - DNA, 15 bp, Homo sapiens
tctgggctgagccgc

SEQ ID NO: 1678810 - DNA, 15 bp, Homo sapiens
ctgggctgagccgcg

SEQ ID NO: 1678811 - DNA, 15 bp, Homo sapiens
tgggctgagccgcgg

SEQ ID NO: 1678812 - DNA, 15 bp, Homo sapiens
gggctgagccgcggc

SEQ ID NO: 1678813 - DNA, 15 bp, Homo sapiens
ggctgagccgcggct

SEQ ID NO: 1678814 - DNA, 15 bp, Homo sapiens
gctgagccgcggctg

SEQ ID NO: 1678815 - DNA, 15 bp, Homo sapiens
ctgagccgcggctgc

SEQ ID NO: 1678816 - DNA, 15 bp, Homo sapiens
tgagccgcggctgcc

SEQ ID NO: 1678817 - DNA, 15 bp, Homo sapiens
gagccgcggctgcca

SEQ ID NO: 1678818 - DNA, 15 bp, Homo sapiens
agccgcggctgccag

SEQ ID NO: 1678819 - DNA, 15 bp, Homo sapiens
gccgcggctgccaga

SEQ ID NO: 1678820 - DNA, 15 bp, Homo sapiens
ccgcggctgccagag

SEQ ID NO: 1678821 - DNA, 15 bp, Homo sapiens
cgcggctgccagagg

SEQ ID NO: 1678822 - DNA, 15 bp, Homo sapiens
gcggctgccagaggg

SEQ ID NO: 1678823 - DNA, 15 bp, Homo sapiens
cggctgccagaggga

SEQ ID NO: 1678824 - DNA, 15 bp, Homo sapiens
ggctgccagagggag

SEQ ID NO: 1678825 - DNA, 15 bp, Homo sapiens
gctgccagagggagg

SEQ ID NO: 1678826 - DNA, 15 bp, Homo sapiens
ctgccagagggaggt

SEQ ID NO: 1678827 - DNA, 15 bp, Homo sapiens
tgccagagggaggtg

SEQ ID NO: 1678828 - DNA, 15 bp, Homo sapiens
gccagagggaggtgg

SEQ ID NO: 1678829 - DNA, 15 bp, Homo sapiens
ccagagggaggtggg

SEQ ID NO: 1678830 - DNA, 15 bp, Homo sapiens
agagggaggtgggga

SEQ ID NO: 1678831 - DNA, 15 bp, Homo sapiens
gagggaggtggggag

SEQ ID NO: 1678832 - DNA, 15 bp, Homo sapiens
agggaggtggggaga

SEQ ID NO: 1678833 - DNA, 15 bp, Homo sapiens
gggaggtggggagag

SEQ ID NO: 1678834 - DNA, 15 bp, Homo sapiens
ggaggtggggagagg

SEQ ID NO: 1678835 - DNA, 15 bp, Homo sapiens
gaggtggggagaggg

SEQ ID NO: 1678836 - DNA, 15 bp, Homo sapiens
aggtggggagagggg

SEQ ID NO: 1678837 - DNA, 15 bp, Homo sapiens
ggtggggagaggggt

SEQ ID NO: 1678838 - DNA, 15 bp, Homo sapiens
gtggggagaggggtg

SEQ ID NO: 1678839 - DNA, 15 bp, Homo sapiens
tggggagaggggtgc

SEQ ID NO: 1678840 - DNA, 15 bp, Homo sapiens
ggggagaggggtgca

SEQ ID NO: 1678841 - DNA, 15 bp, Homo sapiens
gggagaggggtgcag

SEQ ID NO: 1678842 - DNA, 15 bp, Homo sapiens
ggagaggggtgcagg

SEQ ID NO: 1678843 - DNA, 15 bp, Homo sapiens
gagaggggtgcaggc

SEQ ID NO: 1678844 - DNA, 15 bp, Homo sapiens
agaggggtgcaggct

SEQ ID NO: 1678845 - DNA, 15 bp, Homo sapiens
gaggggtgcaggctg

SEQ ID NO: 1678846 - DNA, 15 bp, Homo sapiens
aggggtgcaggctgc

SEQ ID NO: 1678847 - DNA, 15 bp, Homo sapiens
ggggtgcaggctgcc

SEQ ID NO: 1678848 - DNA, 15 bp, Homo sapiens
gggtgcaggctgccc

SEQ ID NO: 1678849 - DNA, 15 bp, Homo sapiens
ggtgcaggctgccct

SEQ ID NO: 1678850 - DNA, 15 bp, Homo sapiens
gtgcaggctgccctg

SEQ ID NO: 1678851 - DNA, 15 bp, Homo sapiens
tgcaggctgccctgc

SEQ ID NO: 1678852 - DNA, 15 bp, Homo sapiens
gcaggctgccctgcc

SEQ ID NO: 1678853 - DNA, 15 bp, Homo sapiens
caggctgccctgccc

SEQ ID NO: 1678854 - DNA, 15 bp, Homo sapiens
aggctgccctgccct

SEQ ID NO: 1678855 - DNA, 15 bp, Homo sapiens
ggctgccctgccctg

SEQ ID NO: 1678856 - DNA, 15 bp, Homo sapiens
gctgccctgccctgc

SEQ ID NO: 1678857 - DNA, 15 bp, Homo sapiens
ctgccctgccctgca

SEQ ID NO: 1678858 - DNA, 15 bp, Homo sapiens
tgccctgccctgcag

SEQ ID NO: 1678859 - DNA, 15 bp, Homo sapiens
gccctgccctgcagc

SEQ ID NO: 1678860 - DNA, 15 bp, Homo sapiens
ccctgccctgcagct

SEQ ID NO: 1678861 - DNA, 15 bp, Homo sapiens
cctgccctgcagctg

SEQ ID NO: 1678862 - DNA, 15 bp, Homo sapiens
ctgccctgcagctgg

SEQ ID NO: 1678863 - DNA, 15 bp, Homo sapiens
tgccctgcagctggc

SEQ ID NO: 1678864 - DNA, 15 bp, Homo sapiens
gccctgcagctggcc

SEQ ID NO: 1678865 - DNA, 15 bp, Homo sapiens
ccctgcagctggccc

SEQ ID NO: 1678866 - DNA, 15 bp, Homo sapiens
cctgcagctggccct

SEQ ID NO: 1678867 - DNA, 15 bp, Homo sapiens
ctgcagctggccctg

SEQ ID NO: 1678868 - DNA, 15 bp, Homo sapiens
tgcagctggccctgg

SEQ ID NO: 1678869 - DNA, 15 bp, Homo sapiens
gcagctggccctggc

SEQ ID NO: 1678870 - DNA, 15 bp, Homo sapiens
cagctggccctggcc

SEQ ID NO: 1678871 - DNA, 15 bp, Homo sapiens
agctggccctggcct

SEQ ID NO: 1678872 - DNA, 15 bp, Homo sapiens
gctggccctggccta

SEQ ID NO: 1678873 - DNA, 15 bp, Homo sapiens
ctggccctggcctaa

SEQ ID NO: 1678874 - DNA, 15 bp, Homo sapiens
tggccctggcctaat

SEQ ID NO: 1678875 - DNA, 15 bp, Homo sapiens
ggccctggcctaatc

SEQ ID NO: 1678876 - DNA, 15 bp, Homo sapiens
gccctggcctaatcc

SEQ ID NO: 1678877 - DNA, 15 bp, Homo sapiens
ccctggcctaatccc

SEQ ID NO: 1678878 - DNA, 15 bp, Homo sapiens
cctggcctaatcccc

SEQ ID NO: 1678879 - DNA, 15 bp, Homo sapiens
ctggcctaatcccct

SEQ ID NO: 1678880 - DNA, 15 bp, Homo sapiens
tggcctaatcccctc

SEQ ID NO: 1678881 - DNA, 15 bp, Homo sapiens
ggcctaatcccctcc

SEQ ID NO: 1678882 - DNA, 15 bp, Homo sapiens
gcctaatcccctccc

SEQ ID NO: 1678883 - DNA, 15 bp, Homo sapiens
cctaatcccctcccc

SEQ ID NO: 1678884 - DNA, 15 bp, Homo sapiens
ctaatcccctccccg

SEQ ID NO: 1678885 - DNA, 15 bp, Homo sapiens
taatcccctccccgc

SEQ ID NO: 1678886 - DNA, 15 bp, Homo sapiens
aatcccctccccgct

SEQ ID NO: 1678887 - DNA, 15 bp, Homo sapiens
atcccctccccgctc

SEQ ID NO: 1678888 - DNA, 15 bp, Homo sapiens
tcccctccccgctcc

SEQ ID NO: 1678889 - DNA, 15 bp, Homo sapiens
cccctccccgctccc

SEQ ID NO: 1678890 - DNA, 15 bp, Homo sapiens
ccctccccgctcccc

SEQ ID NO: 1678891 - DNA, 15 bp, Homo sapiens
cctccccgctcccca

SEQ ID NO: 1678892 - DNA, 15 bp, Homo sapiens
ctccccgctccccag

SEQ ID NO: 1678893 - DNA, 15 bp, Homo sapiens
tccccgctccccagt

SEQ ID NO: 1678894 - DNA, 15 bp, Homo sapiens
ccccgctccccagtc

SEQ ID NO: 1678895 - DNA, 15 bp, Homo sapiens
cccgctccccagtct

SEQ ID NO: 1678896 - DNA, 15 bp, Homo sapiens
ccgctccccagtctg

SEQ ID NO: 1678897 - DNA, 15 bp, Homo sapiens
cgctccccagtctgg

SEQ ID NO: 1678898 - DNA, 15 bp, Homo sapiens
gctccccagtctggg

SEQ ID NO: 1678899 - DNA, 15 bp, Homo sapiens
ctccccagtctgggg

SEQ ID NO: 1678900 - DNA, 15 bp, Homo sapiens
tccccagtctggggt

SEQ ID NO: 1678901 - DNA, 15 bp, Homo sapiens
ccccagtctggggtc

SEQ ID NO: 1678902 - DNA, 15 bp, Homo sapiens
cccagtctggggtca

SEQ ID NO: 1678903 - DNA, 15 bp, Homo sapiens
ccagtctggggtcag

SEQ ID NO: 1678904 - DNA, 15 bp, Homo sapiens
cagtctggggtcagc

SEQ ID NO: 1678905 - DNA, 15 bp, Homo sapiens
agtctggggtcagca

SEQ ID NO: 1678906 - DNA, 15 bp, Homo sapiens
gtctggggtcagcac

SEQ ID NO: 1678907 - DNA, 15 bp, Homo sapiens
tctggggtcagcacc

SEQ ID NO: 1678908 - DNA, 15 bp, Homo sapiens
ctggggtcagcaccc

SEQ ID NO: 1678909 - DNA, 15 bp, Homo sapiens
tggggtcagcaccct

SEQ ID NO: 1678910 - DNA, 15 bp, Homo sapiens
ggggtcagcaccctc

SEQ ID NO: 1678911 - DNA, 15 bp, Homo sapiens
gggtcagcaccctcc

SEQ ID NO: 1678912 - DNA, 15 bp, Homo sapiens
ggtcagcaccctcct

SEQ ID NO: 1678913 - DNA, 15 bp, Homo sapiens
gtcagcaccctcctc

SEQ ID NO: 1678914 - DNA, 15 bp, Homo sapiens
tcagcaccctcctcc

SEQ ID NO: 1678915 - DNA, 15 bp, Homo sapiens
cagcaccctcctccc

SEQ ID NO: 1678916 - DNA, 15 bp, Homo sapiens
agcaccctcctccct

SEQ ID NO: 1678917 - DNA, 15 bp, Homo sapiens
gcaccctcctccctt

SEQ ID NO: 1678918 - DNA, 15 bp, Homo sapiens
caccctcctcccttg

SEQ ID NO: 1678919 - DNA, 15 bp, Homo sapiens
accctcctcccttgc

SEQ ID NO: 1678920 - DNA, 15 bp, Homo sapiens
ccctcctcccttgca

SEQ ID NO: 1678921 - DNA, 15 bp, Homo sapiens
cctcctcccttgcag

SEQ ID NO: 1678922 - DNA, 15 bp, Homo sapiens
ctcctcccttgcagg

SEQ ID NO: 1678923 - DNA, 15 bp, Homo sapiens
tcctcccttgcaggc

SEQ ID NO: 1678924 - DNA, 15 bp, Homo sapiens
cctcccttgcaggca

SEQ ID NO: 1678925 - DNA, 15 bp, Homo sapiens
ctcccttgcaggcag

SEQ ID NO: 1678926 - DNA, 15 bp, Homo sapiens
tcccttgcaggcagt

SEQ ID NO: 1678927 - DNA, 15 bp, Homo sapiens
cccttgcaggcagtg

SEQ ID NO: 1678928 - DNA, 15 bp, Homo sapiens
ccttgcaggcagtga

SEQ ID NO: 1678929 - DNA, 15 bp, Homo sapiens
cttgcaggcagtgat

SEQ ID NO: 1678930 - DNA, 15 bp, Homo sapiens
ttgcaggcagtgatt

SEQ ID NO: 1678931 - DNA, 15 bp, Homo sapiens
tgcaggcagtgattt

SEQ ID NO: 1678932 - DNA, 15 bp, Homo sapiens
gcaggcagtgatttt

SEQ ID NO: 1678933 - DNA, 15 bp, Homo sapiens
caggcagtgattttc

SEQ ID NO: 1678934 - DNA, 15 bp, Homo sapiens
aggcagtgattttcc

SEQ ID NO: 1678935 - DNA, 15 bp, Homo sapiens
ggcagtgattttccg

SEQ ID NO: 1678936 - DNA, 15 bp, Homo sapiens
gcagtgattttccgt

SEQ ID NO: 1678937 - DNA, 15 bp, Homo sapiens
cagtgattttccgtg

SEQ ID NO: 1678938 - DNA, 15 bp, Homo sapiens
agtgattttccgtga

SEQ ID NO: 1678939 - DNA, 15 bp, Homo sapiens
gtgattttccgtgat

SEQ ID NO: 1678940 - DNA, 15 bp, Homo sapiens
tgattttccgtgatg

SEQ ID NO: 1678941 - DNA, 15 bp, Homo sapiens
gattttccgtgatga

SEQ ID NO: 1678942 - DNA, 15 bp, Homo sapiens
attttccgtgatgat

SEQ ID NO: 1678943 - DNA, 15 bp, Homo sapiens
ttttccgtgatgatg

SEQ ID NO: 1678944 - DNA, 15 bp, Homo sapiens
tttccgtgatgatga

SEQ ID NO: 1678945 - DNA, 15 bp, Homo sapiens
ttccgtgatgatgaa

SEQ ID NO: 1678946 - DNA, 15 bp, Homo sapiens
tccgtgatgatgaag

SEQ ID NO: 1678947 - DNA, 15 bp, Homo sapiens
ccgtgatgatgaagg

SEQ ID NO: 1678948 - DNA, 15 bp, Homo sapiens
cgtgatgatgaagga

SEQ ID NO: 1678949 - DNA, 15 bp, Homo sapiens
gtgatgatgaaggaa

SEQ ID NO: 1678950 - DNA, 15 bp, Homo sapiens
tgatgatgaaggaat

SEQ ID NO: 1678951 - DNA, 15 bp, Homo sapiens
gatgatgaaggaata

SEQ ID NO: 1678952 - DNA, 15 bp, Homo sapiens
atgatgaaggaataa

SEQ ID NO: 1678953 - DNA, 15 bp, Homo sapiens
tgatgaaggaataaa

SEQ ID NO: 1678954 - DNA, 15 bp, Homo sapiens
gatgaaggaataaaa

SEQ ID NO: 1678955 - DNA, 15 bp, Homo sapiens
atgaaggaataaaaa

SEQ ID NO: 1678956 - DNA, 15 bp, Homo sapiens
tgaaggaataaaaaa

SEQ ID NO: 1678957 - DNA, 15 bp, Homo sapiens
gaaggaataaaaaag

SEQ ID NO: 1678958 - DNA, 15 bp, Homo sapiens
aaggaataaaaaagc

SEQ ID NO: 1678959 - DNA, 15 bp, Homo sapiens
aggaataaaaaagcc

SEQ ID NO: 1678960 - DNA, 15 bp, Homo sapiens
ggaataaaaaagcca

SEQ ID NO: 1678961 - DNA, 15 bp, Homo sapiens
gaataaaaaagccac

SEQ ID NO: 1678962 - DNA, 15 bp, Homo sapiens
aataaaaaagccacg

SEQ ID NO: 1678963 - DNA, 15 bp, Homo sapiens
ataaaaaagccacgg

SEQ ID NO: 1678964 - DNA, 15 bp, Homo sapiens
taaaaaagccacgga

SEQ ID NO: 1678965 - DNA, 15 bp, Homo sapiens
aaaaaagccacggag

SEQ ID NO: 1678966 - DNA, 15 bp, Homo sapiens
aaaaagccacggagg

SEQ ID NO: 1678967 - DNA, 15 bp, Homo sapiens
aaaagccacggaggg

SEQ ID NO: 1678968 - DNA, 15 bp, Homo sapiens
aaagccacggagggt

SEQ ID NO: 1678969 - DNA, 15 bp, Homo sapiens
aagccacggagggtt

SEQ ID NO: 1678970 - DNA, 15 bp, Homo sapiens
agccacggagggttc

SEQ ID NO: 1678971 - DNA, 15 bp, Homo sapiens
gccacggagggttct

SEQ ID NO: 1678972 - DNA, 15 bp, Homo sapiens
ccacggagggttctg

SEQ ID NO: 1678973 - DNA, 15 bp, Homo sapiens
cacggagggttctga

SEQ ID NO: 1678974 - DNA, 15 bp, Homo sapiens
acggagggttctgag

SEQ ID NO: 1678975 - DNA, 15 bp, Homo sapiens
cggagggttctgagt

SEQ ID NO: 1678976 - DNA, 15 bp, Homo sapiens
ggagggttctgagtg

SEQ ID NO: 1678977 - DNA, 15 bp, Homo sapiens
gagggttctgagtgg

SEQ ID NO: 1678978 - DNA, 15 bp, Homo sapiens
agggttctgagtggg

SEQ ID NO: 1678979 - DNA, 15 bp, Homo sapiens
gggttctgagtggga

SEQ ID NO: 1678980 - DNA, 15 bp, Homo sapiens
ggttctgagtgggag

SEQ ID NO: 1678981 - DNA, 15 bp, Homo sapiens
gttctgagtgggagt

SEQ ID NO: 1678982 - DNA, 15 bp, Homo sapiens
ttctgagtgggagtc

SEQ ID NO: 1678983 - DNA, 15 bp, Homo sapiens
tctgagtgggagtcc

SEQ ID NO: 1678984 - DNA, 15 bp, Homo sapiens
ctgagtgggagtccc

SEQ ID NO: 1678985 - DNA, 15 bp, Homo sapiens
tgagtgggagtccct

SEQ ID NO: 1678986 - DNA, 15 bp, Homo sapiens
gagtgggagtccctg

SEQ ID NO: 1678987 - DNA, 15 bp, Homo sapiens
agtgggagtccctgg

SEQ ID NO: 1678988 - DNA, 15 bp, Homo sapiens
gtgggagtccctggt

SEQ ID NO: 1678989 - DNA, 15 bp, Homo sapiens
tgggagtccctggtc

SEQ ID NO: 1678990 - DNA, 15 bp, Homo sapiens
gggagtccctggtcc

SEQ ID NO: 1678991 - DNA, 15 bp, Homo sapiens
ggagtccctggtccc

SEQ ID NO: 1678992 - DNA, 15 bp, Homo sapiens
gagtccctggtcccc

SEQ ID NO: 1678993 - DNA, 15 bp, Homo sapiens
agtccctggtcccca

SEQ ID NO: 1678994 - DNA, 15 bp, Homo sapiens
gtccctggtccccat

SEQ ID NO: 1678995 - DNA, 15 bp, Homo sapiens
tccctggtccccatc

SEQ ID NO: 1678996 - DNA, 15 bp, Homo sapiens
ccctggtccccatca

SEQ ID NO: 1678997 - DNA, 15 bp, Homo sapiens
cctggtccccatcac

SEQ ID NO: 1678998 - DNA, 15 bp, Homo sapiens
ctggtccccatcacc

SEQ ID NO: 1678999 - DNA, 15 bp, Homo sapiens
tggtccccatcaccc

SEQ ID NO: 1679000 - DNA, 15 bp, Homo sapiens
ggtccccatcacccc

SEQ ID NO: 1679001 - DNA, 15 bp, Homo sapiens
gtccccatcacccca

SEQ ID NO: 1679002 - DNA, 15 bp, Homo sapiens
tccccatcaccccac

SEQ ID NO: 1679003 - DNA, 15 bp, Homo sapiens
ccccatcaccccact

SEQ ID NO: 1679004 - DNA, 15 bp, Homo sapiens
cccatcaccccactg

SEQ ID NO: 1679005 - DNA, 15 bp, Homo sapiens
ccatcaccccactga

SEQ ID NO: 1679006 - DNA, 15 bp, Homo sapiens
catcaccccactgag

SEQ ID NO: 1679007 - DNA, 15 bp, Homo sapiens
atcaccccactgagc

SEQ ID NO: 1679008 - DNA, 15 bp, Homo sapiens
tcaccccactgagca

SEQ ID NO: 1679009 - DNA, 15 bp, Homo sapiens
caccccactgagcat

SEQ ID NO: 1679010 - DNA, 15 bp, Homo sapiens
accccactgagcatg

SEQ ID NO: 1679011 - DNA, 15 bp, Homo sapiens
ccccactgagcatgg

SEQ ID NO: 1679012 - DNA, 15 bp, Homo sapiens
cccactgagcatggc

SEQ ID NO: 1679013 - DNA, 15 bp, Homo sapiens
ccactgagcatggcc

SEQ ID NO: 1679014 - DNA, 15 bp, Homo sapiens
cactgagcatggccg

SEQ ID NO: 1679015 - DNA, 15 bp, Homo sapiens
actgagcatggccgc

SEQ ID NO: 1679016 - DNA, 15 bp, Homo sapiens
ctgagcatggccgct

SEQ ID NO: 1679017 - DNA, 15 bp, Homo sapiens
tgagcatggccgctg

SEQ ID NO: 1679018 - DNA, 15 bp, Homo sapiens
gagcatggccgctgg

SEQ ID NO: 1679019 - DNA, 15 bp, Homo sapiens
agcatggccgctggg

SEQ ID NO: 1679020 - DNA, 15 bp, Homo sapiens
gcatggccgctgggg

SEQ ID NO: 1679021 - DNA, 15 bp, Homo sapiens
catggccgctggggt

SEQ ID NO: 1679022 - DNA, 15 bp, Homo sapiens
atggccgctggggtt

SEQ ID NO: 1679023 - DNA, 15 bp, Homo sapiens
tggccgctggggttt

SEQ ID NO: 1679024 - DNA, 15 bp, Homo sapiens
ggccgctggggtttc

SEQ ID NO: 1679025 - DNA, 15 bp, Homo sapiens
gccgctggggtttcc

SEQ ID NO: 1679026 - DNA, 15 bp, Homo sapiens
ccgctggggtttcct

SEQ ID NO: 1679027 - DNA, 15 bp, Homo sapiens
cgctggggtttcctg

SEQ ID NO: 1679028 - DNA, 15 bp, Homo sapiens
gctggggtttcctgg

SEQ ID NO: 1679029 - DNA, 15 bp, Homo sapiens
ctggggtttcctggc

SEQ ID NO: 1679030 - DNA, 15 bp, Homo sapiens
tggggtttcctggca

SEQ ID NO: 1679031 - DNA, 15 bp, Homo sapiens
ggggtttcctggcaa

SEQ ID NO: 1679032 - DNA, 15 bp, Homo sapiens
gggtttcctggcaac

SEQ ID NO: 1679033 - DNA, 15 bp, Homo sapiens
ggtttcctggcaact

SEQ ID NO: 1679034 - DNA, 15 bp, Homo sapiens
gtttcctggcaactt

SEQ ID NO: 1679035 - DNA, 15 bp, Homo sapiens
tttcctggcaacttt

SEQ ID NO: 1679036 - DNA, 15 bp, Homo sapiens
ttcctggcaactttc

SEQ ID NO: 1679037 - DNA, 15 bp, Homo sapiens
tcctggcaactttct

SEQ ID NO: 1679038 - DNA, 15 bp, Homo sapiens
cctggcaactttctg

SEQ ID NO: 1679039 - DNA, 15 bp, Homo sapiens
ctggcaactttctgc

SEQ ID NO: 1679040 - DNA, 15 bp, Homo sapiens
tggcaactttctgct

SEQ ID NO: 1679041 - DNA, 15 bp, Homo sapiens
ggcaactttctgctc

SEQ ID NO: 1679042 - DNA, 15 bp, Homo sapiens
gcaactttctgctcc

SEQ ID NO: 1679043 - DNA, 15 bp, Homo sapiens
caactttctgctcca

SEQ ID NO: 1679044 - DNA, 15 bp, Homo sapiens
aactttctgctccat

SEQ ID NO: 1679045 - DNA, 15 bp, Homo sapiens
actttctgctccatc

SEQ ID NO: 1679046 - DNA, 15 bp, Homo sapiens
ctttctgctccatcc

SEQ ID NO: 1679047 - DNA, 15 bp, Homo sapiens
tttctgctccatccg

SEQ ID NO: 1679048 - DNA, 15 bp, Homo sapiens
ttctgctccatccgg

SEQ ID NO: 1679049 - DNA, 15 bp, Homo sapiens
tctgctccatccgga

SEQ ID NO: 1679050 - DNA, 15 bp, Homo sapiens
ctgctccatccggag

SEQ ID NO: 1679051 - DNA, 15 bp, Homo sapiens
tgctccatccggagc

SEQ ID NO: 1679052 - DNA, 15 bp, Homo sapiens
gctccatccggagcc

SEQ ID NO: 1679053 - DNA, 15 bp, Homo sapiens
ctccatccggagccg

SEQ ID NO: 1679054 - DNA, 15 bp, Homo sapiens
tccatccggagccgt

SEQ ID NO: 1679055 - DNA, 15 bp, Homo sapiens
ccatccggagccgtc

SEQ ID NO: 1679056 - DNA, 15 bp, Homo sapiens
catccggagccgtcc

SEQ ID NO: 1679057 - DNA, 15 bp, Homo sapiens
atccggagccgtccc

SEQ ID NO: 1679058 - DNA, 15 bp, Homo sapiens
tccggagccgtccct

SEQ ID NO: 1679059 - DNA, 15 bp, Homo sapiens
ccggagccgtccctc

SEQ ID NO: 1679060 - DNA, 15 bp, Homo sapiens
cggagccgtccctcc

SEQ ID NO: 1679061 - DNA, 15 bp, Homo sapiens
ggagccgtccctccc

SEQ ID NO: 1679062 - DNA, 15 bp, Homo sapiens
gagccgtccctcccc

SEQ ID NO: 1679063 - DNA, 15 bp, Homo sapiens
agccgtccctcccct

SEQ ID NO: 1679064 - DNA, 15 bp, Homo sapiens
gccgtccctcccctg

SEQ ID NO: 1679065 - DNA, 15 bp, Homo sapiens
ccgtccctcccctgg

SEQ ID NO: 1679066 - DNA, 15 bp, Homo sapiens
cgtccctcccctggg

SEQ ID NO: 1679067 - DNA, 15 bp, Homo sapiens
gtccctcccctgggc

SEQ ID NO: 1679068 - DNA, 15 bp, Homo sapiens
tccctcccctgggct

SEQ ID NO: 1679069 - DNA, 15 bp, Homo sapiens
ccctcccctgggctg

SEQ ID NO: 1679070 - DNA, 15 bp, Homo sapiens
cctcccctgggctgg

SEQ ID NO: 1679071 - DNA, 15 bp, Homo sapiens
ctcccctgggctggg

SEQ ID NO: 1679072 - DNA, 15 bp, Homo sapiens
tcccctgggctgggc

SEQ ID NO: 1679073 - DNA, 15 bp, Homo sapiens
cccctgggctgggct

SEQ ID NO: 1679074 - DNA, 15 bp, Homo sapiens
ccctgggctgggctg

SEQ ID NO: 1679075 - DNA, 15 bp, Homo sapiens
cctgggctgggctgc

SEQ ID NO: 1679076 - DNA, 15 bp, Homo sapiens
ctgggctgggctgct

SEQ ID NO: 1679077 - DNA, 15 bp, Homo sapiens
tgggctgggctgctc

SEQ ID NO: 1679078 - DNA, 15 bp, Homo sapiens
gggctgggctgctct

SEQ ID NO: 1679079 - DNA, 15 bp, Homo sapiens
ggctgggctgctctg

SEQ ID NO: 1679080 - DNA, 15 bp, Homo sapiens
gctgggctgctctgg

SEQ ID NO: 1679081 - DNA, 15 bp, Homo sapiens
ctgggctgctctggg

SEQ ID NO: 1679082 - DNA, 15 bp, Homo sapiens
tgggctgctctgggg

SEQ ID NO: 1679083 - DNA, 15 bp, Homo sapiens
gggctgctctggggc

SEQ ID NO: 1679084 - DNA, 15 bp, Homo sapiens
ggctgctctggggct

SEQ ID NO: 1679085 - DNA, 15 bp, Homo sapiens
gctgctctggggctg

SEQ ID NO: 1679086 - DNA, 15 bp, Homo sapiens
ctgctctggggctgt

SEQ ID NO: 1679087 - DNA, 15 bp, Homo sapiens
tgctctggggctgtt

SEQ ID NO: 1679088 - DNA, 15 bp, Homo sapiens
gctctggggctgttc

SEQ ID NO: 1679089 - DNA, 15 bp, Homo sapiens
ctctggggctgttcc

SEQ ID NO: 1679090 - DNA, 15 bp, Homo sapiens
tctggggctgttcct

SEQ ID NO: 1679091 - DNA, 15 bp, Homo sapiens
ctggggctgttcctg

SEQ ID NO: 1679092 - DNA, 15 bp, Homo sapiens
tggggctgttcctgg

SEQ ID NO: 1679093 - DNA, 15 bp, Homo sapiens
ggggctgttcctggg

SEQ ID NO: 1679094 - DNA, 15 bp, Homo sapiens
gggctgttcctggga

SEQ ID NO: 1679095 - DNA, 15 bp, Homo sapiens
ggctgttcctgggat

SEQ ID NO: 1679096 - DNA, 15 bp, Homo sapiens
gctgttcctgggatg

SEQ ID NO: 1679097 - DNA, 15 bp, Homo sapiens
ctgttcctgggatgg

SEQ ID NO: 1679098 - DNA, 15 bp, Homo sapiens
tgttcctgggatggg

SEQ ID NO: 1679099 - DNA, 15 bp, Homo sapiens
gttcctgggatgggg

SEQ ID NO: 1679100 - DNA, 15 bp, Homo sapiens
ttcctgggatgggga

SEQ ID NO: 1679101 - DNA, 15 bp, Homo sapiens
tcctgggatggggag

SEQ ID NO: 1679102 - DNA, 15 bp, Homo sapiens
cctgggatggggagc

SEQ ID NO: 1679103 - DNA, 15 bp, Homo sapiens
ctgggatggggagcg

SEQ ID NO: 1679104 - DNA, 15 bp, Homo sapiens
tgggatggggagcgg

SEQ ID NO: 1679105 - DNA, 15 bp, Homo sapiens
gggatggggagcggg

SEQ ID NO: 1679106 - DNA, 15 bp, Homo sapiens
ggatggggagcgggg

SEQ ID NO: 1679107 - DNA, 15 bp, Homo sapiens
gatggggagcgggga

SEQ ID NO: 1679108 - DNA, 15 bp, Homo sapiens
atggggagcggggag

SEQ ID NO: 1679109 - DNA, 15 bp, Homo sapiens
tggggagcggggagc

SEQ ID NO: 1679110 - DNA, 15 bp, Homo sapiens
ggggagcggggagct

SEQ ID NO: 1679111 - DNA, 15 bp, Homo sapiens
gggagcggggagctt

SEQ ID NO: 1679112 - DNA, 15 bp, Homo sapiens
ggagcggggagcttg

SEQ ID NO: 1679113 - DNA, 15 bp, Homo sapiens
gagcggggagcttgg

SEQ ID NO: 1679114 - DNA, 15 bp, Homo sapiens
agcggggagcttggg

SEQ ID NO: 1679115 - DNA, 15 bp, Homo sapiens
gcggggagcttggga

SEQ ID NO: 1679116 - DNA, 15 bp, Homo sapiens
cggggagcttgggag

SEQ ID NO: 1679117 - DNA, 15 bp, Homo sapiens
ggggagcttgggagt

SEQ ID NO: 1679118 - DNA, 15 bp, Homo sapiens
gggagcttgggagta

SEQ ID NO: 1679119 - DNA, 15 bp, Homo sapiens
ggagcttgggagtaa

SEQ ID NO: 1679120 - DNA, 15 bp, Homo sapiens
gagcttgggagtaaa

SEQ ID NO: 1679121 - DNA, 15 bp, Homo sapiens
agcttgggagtaaat

SEQ ID NO: 1679122 - DNA, 15 bp, Homo sapiens
gcttgggagtaaata

SEQ ID NO: 1679123 - DNA, 15 bp, Homo sapiens
cttgggagtaaatag

SEQ ID NO: 1679124 - DNA, 15 bp, Homo sapiens
ttgggagtaaatagt

SEQ ID NO: 1679125 - DNA, 15 bp, Homo sapiens
tgggagtaaatagtg

SEQ ID NO: 1679126 - DNA, 15 bp, Homo sapiens
gggagtaaatagtga

SEQ ID NO: 1679127 - DNA, 15 bp, Homo sapiens
ggagtaaatagtgac

SEQ ID NO: 1679128 - DNA, 15 bp, Homo sapiens
gagtaaatagtgaca

SEQ ID NO: 1679129 - DNA, 15 bp, Homo sapiens
agtaaatagtgacat

SEQ ID NO: 1679130 - DNA, 15 bp, Homo sapiens
gtaaatagtgacatc

SEQ ID NO: 1679131 - DNA, 15 bp, Homo sapiens
taaatagtgacatca

SEQ ID NO: 1679132 - DNA, 15 bp, Homo sapiens
aaatagtgacatcag

SEQ ID NO: 1679133 - DNA, 15 bp, Homo sapiens
aatagtgacatcagc

SEQ ID NO: 1679134 - DNA, 15 bp, Homo sapiens
atagtgacatcagcc

SEQ ID NO: 1679135 - DNA, 15 bp, Homo sapiens
tagtgacatcagcca

SEQ ID NO: 1679136 - DNA, 15 bp, Homo sapiens
agtgacatcagccac

SEQ ID NO: 1679137 - DNA, 15 bp, Homo sapiens
gtgacatcagccacc

SEQ ID NO: 1679138 - DNA, 15 bp, Homo sapiens
tgacatcagccacct

SEQ ID NO: 1679139 - DNA, 15 bp, Homo sapiens
gacatcagccaccta

SEQ ID NO: 1679140 - DNA, 15 bp, Homo sapiens
acatcagccacctag

SEQ ID NO: 1679141 - DNA, 15 bp, Homo sapiens
catcagccacctaga

SEQ ID NO: 1679142 - DNA, 15 bp, Homo sapiens
atcagccacctagac

SEQ ID NO: 1679143 - DNA, 15 bp, Homo sapiens
tcagccacctagaca

SEQ ID NO: 1679144 - DNA, 15 bp, Homo sapiens
cagccacctagacag

SEQ ID NO: 1679145 - DNA, 15 bp, Homo sapiens
agccacctagacagg

SEQ ID NO: 1679146 - DNA, 15 bp, Homo sapiens
gccacctagacaggc

SEQ ID NO: 1679147 - DNA, 15 bp, Homo sapiens
ccacctagacaggcg

SEQ ID NO: 1679148 - DNA, 15 bp, Homo sapiens
cacctagacaggcgg

SEQ ID NO: 1679149 - DNA, 15 bp, Homo sapiens
acctagacaggcggg

SEQ ID NO: 1679150 - DNA, 15 bp, Homo sapiens
cctagacaggcgggg

SEQ ID NO: 1679151 - DNA, 15 bp, Homo sapiens
ctagacaggcggggc

SEQ ID NO: 1679152 - DNA, 15 bp, Homo sapiens
tagacaggcggggcc

SEQ ID NO: 1679153 - DNA, 15 bp, Homo sapiens
agacaggcggggcca

SEQ ID NO: 1679154 - DNA, 15 bp, Homo sapiens
gacaggcggggccac

SEQ ID NO: 1679155 - DNA, 15 bp, Homo sapiens
acaggcggggccact

SEQ ID NO: 1679156 - DNA, 15 bp, Homo sapiens
caggcggggccactg

SEQ ID NO: 1679157 - DNA, 15 bp, Homo sapiens
aggcggggccactgt

SEQ ID NO: 1679158 - DNA, 15 bp, Homo sapiens
ggcggggccactgtg

SEQ ID NO: 1679159 - DNA, 15 bp, Homo sapiens
gcggggccactgtgt

SEQ ID NO: 1679160 - DNA, 15 bp, Homo sapiens
cggggccactgtgtc

SEQ ID NO: 1679161 - DNA, 15 bp, Homo sapiens
ggggccactgtgtca

SEQ ID NO: 1679162 - DNA, 15 bp, Homo sapiens
gggccactgtgtcaa

SEQ ID NO: 1679163 - DNA, 15 bp, Homo sapiens
ggccactgtgtcaag

SEQ ID NO: 1679164 - DNA, 15 bp, Homo sapiens
gccactgtgtcaagg

SEQ ID NO: 1679165 - DNA, 15 bp, Homo sapiens
ccactgtgtcaaggg

SEQ ID NO: 1679166 - DNA, 15 bp, Homo sapiens
cactgtgtcaagggg

SEQ ID NO: 1679167 - DNA, 15 bp, Homo sapiens
actgtgtcaaggggc

SEQ ID NO: 1679168 - DNA, 15 bp, Homo sapiens
ctgtgtcaaggggcc

SEQ ID NO: 1679169 - DNA, 15 bp, Homo sapiens
tgtgtcaaggggcca

SEQ ID NO: 1679170 - DNA, 15 bp, Homo sapiens
gtgtcaaggggccat

SEQ ID NO: 1679171 - DNA, 15 bp, Homo sapiens
tgtcaaggggccatg

SEQ ID NO: 1679172 - DNA, 15 bp, Homo sapiens
gtcaaggggccatgt

SEQ ID NO: 1679173 - DNA, 15 bp, Homo sapiens
tcaaggggccatgtc

SEQ ID NO: 1679174 - DNA, 15 bp, Homo sapiens
caaggggccatgtca

SEQ ID NO: 1679175 - DNA, 15 bp, Homo sapiens
aaggggccatgtcag

SEQ ID NO: 1679176 - DNA, 15 bp, Homo sapiens
aggggccatgtcagg

SEQ ID NO: 1679177 - DNA, 15 bp, Homo sapiens
ggggccatgtcaggt

SEQ ID NO: 1679178 - DNA, 15 bp, Homo sapiens
gggccatgtcaggtt

SEQ ID NO: 1679179 - DNA, 15 bp, Homo sapiens
ggccatgtcaggttc

SEQ ID NO: 1679180 - DNA, 15 bp, Homo sapiens
gccatgtcaggttcc

SEQ ID NO: 1679181 - DNA, 15 bp, Homo sapiens
ccatgtcaggttccc

SEQ ID NO: 1679182 - DNA, 15 bp, Homo sapiens
catgtcaggttccct

SEQ ID NO: 1679183 - DNA, 15 bp, Homo sapiens
atgtcaggttccctt

SEQ ID NO: 1679184 - DNA, 15 bp, Homo sapiens
tgtcaggttcccttc

SEQ ID NO: 1679185 - DNA, 15 bp, Homo sapiens
gtcaggttcccttct

SEQ ID NO: 1679186 - DNA, 15 bp, Homo sapiens
tcaggttcccttctc

SEQ ID NO: 1679187 - DNA, 15 bp, Homo sapiens
caggttcccttctcc

SEQ ID NO: 1679188 - DNA, 15 bp, Homo sapiens
aggttcccttctccc

SEQ ID NO: 1679189 - DNA, 15 bp, Homo sapiens
ggttcccttctccca

SEQ ID NO: 1679190 - DNA, 15 bp, Homo sapiens
gttcccttctcccag

SEQ ID NO: 1679191 - DNA, 15 bp, Homo sapiens
ttcccttctcccaga

SEQ ID NO: 1679192 - DNA, 15 bp, Homo sapiens
tcccttctcccagag

SEQ ID NO: 1679193 - DNA, 15 bp, Homo sapiens
cccttctcccagagc

SEQ ID NO: 1679194 - DNA, 15 bp, Homo sapiens
ccttctcccagagct

SEQ ID NO: 1679195 - DNA, 15 bp, Homo sapiens
cttctcccagagctg

SEQ ID NO: 1679196 - DNA, 15 bp, Homo sapiens
ttctcccagagctgg

SEQ ID NO: 1679197 - DNA, 15 bp, Homo sapiens
tctcccagagctggg

SEQ ID NO: 1679198 - DNA, 15 bp, Homo sapiens
ctcccagagctgggg

SEQ ID NO: 1679199 - DNA, 15 bp, Homo sapiens
tcccagagctggggc

SEQ ID NO: 1679200 - DNA, 15 bp, Homo sapiens
cccagagctggggct

SEQ ID NO: 1679201 - DNA, 15 bp, Homo sapiens
ccagagctggggctt

SEQ ID NO: 1679202 - DNA, 15 bp, Homo sapiens
cagagctggggcttg

SEQ ID NO: 1679203 - DNA, 15 bp, Homo sapiens
agagctggggcttgt

SEQ ID NO: 1679204 - DNA, 15 bp, Homo sapiens
gagctggggcttgtc

SEQ ID NO: 1679205 - DNA, 15 bp, Homo sapiens
agctggggcttgtct

SEQ ID NO: 1679206 - DNA, 15 bp, Homo sapiens
gctggggcttgtctt

SEQ ID NO: 1679207 - DNA, 15 bp, Homo sapiens
ctggggcttgtcttg

SEQ ID NO: 1679208 - DNA, 15 bp, Homo sapiens
tggggcttgtcttgg

SEQ ID NO: 1679209 - DNA, 15 bp, Homo sapiens
ggggcttgtcttgga

SEQ ID NO: 1679210 - DNA, 15 bp, Homo sapiens
gggcttgtcttggaa

SEQ ID NO: 1679211 - DNA, 15 bp, Homo sapiens
ggcttgtcttggaat

SEQ ID NO: 1679212 - DNA, 15 bp, Homo sapiens
gcttgtcttggaatt

SEQ ID NO: 1679213 - DNA, 15 bp, Homo sapiens
cttgtcttggaattg

SEQ ID NO: 1679214 - DNA, 15 bp, Homo sapiens
ttgtcttggaattgg

SEQ ID NO: 1679215 - DNA, 15 bp, Homo sapiens
tgtcttggaattgga

SEQ ID NO: 1679216 - DNA, 15 bp, Homo sapiens
gtcttggaattggaa

SEQ ID NO: 1679217 - DNA, 15 bp, Homo sapiens
tcttggaattggaaa

SEQ ID NO: 1679218 - DNA, 15 bp, Homo sapiens
cttggaattggaaaa

SEQ ID NO: 1679219 - DNA, 15 bp, Homo sapiens
ttggaattggaaaat

SEQ ID NO: 1679220 - DNA, 15 bp, Homo sapiens
tggaattggaaaatc

SEQ ID NO: 1679221 - DNA, 15 bp, Homo sapiens
ggaattggaaaatcc

SEQ ID NO: 1679222 - DNA, 15 bp, Homo sapiens
gaattggaaaatcct

SEQ ID NO: 1679223 - DNA, 15 bp, Homo sapiens
aattggaaaatcctc

SEQ ID NO: 1679224 - DNA, 15 bp, Homo sapiens
attggaaaatcctcc

SEQ ID NO: 1679225 - DNA, 15 bp, Homo sapiens
ttggaaaatcctccc

SEQ ID NO: 1679226 - DNA, 15 bp, Homo sapiens
tggaaaatcctcccc

SEQ ID NO: 1679227 - DNA, 15 bp, Homo sapiens
ggaaaatcctcccca

SEQ ID NO: 1679228 - DNA, 15 bp, Homo sapiens
gaaaatcctccccac

SEQ ID NO: 1679229 - DNA, 15 bp, Homo sapiens
aaaatcctccccaca

SEQ ID NO: 1679230 - DNA, 15 bp, Homo sapiens
aaatcctccccacat

SEQ ID NO: 1679231 - DNA, 15 bp, Homo sapiens
aatcctccccacatt

SEQ ID NO: 1679232 - DNA, 15 bp, Homo sapiens
atcctccccacattg

SEQ ID NO: 1679233 - DNA, 15 bp, Homo sapiens
tcctccccacattgc

SEQ ID NO: 1679234 - DNA, 15 bp, Homo sapiens
cctccccacattgcc

SEQ ID NO: 1679235 - DNA, 15 bp, Homo sapiens
ctccccacattgccc

SEQ ID NO: 1679236 - DNA, 15 bp, Homo sapiens
tccccacattgccct

SEQ ID NO: 1679237 - DNA, 15 bp, Homo sapiens
ccccacattgccctg

SEQ ID NO: 1679238 - DNA, 15 bp, Homo sapiens
cccacattgccctgt

SEQ ID NO: 1679239 - DNA, 15 bp, Homo sapiens
ccacattgccctgtg

SEQ ID NO: 1679240 - DNA, 15 bp, Homo sapiens
cacattgccctgtgg

SEQ ID NO: 1679241 - DNA, 15 bp, Homo sapiens
acattgccctgtgga

SEQ ID NO: 1679242 - DNA, 15 bp, Homo sapiens
cattgccctgtggac

SEQ ID NO: 1679243 - DNA, 15 bp, Homo sapiens
attgccctgtggact

SEQ ID NO: 1679244 - DNA, 15 bp, Homo sapiens
ttgccctgtggactg

SEQ ID NO: 1679245 - DNA, 15 bp, Homo sapiens
tgccctgtggactgc

SEQ ID NO: 1679246 - DNA, 15 bp, Homo sapiens
gccctgtggactgca

SEQ ID NO: 1679247 - DNA, 15 bp, Homo sapiens
ccctgtggactgcag

SEQ ID NO: 1679248 - DNA, 15 bp, Homo sapiens
cctgtggactgcagg

SEQ ID NO: 1679249 - DNA, 15 bp, Homo sapiens
ctgtggactgcaggc

SEQ ID NO: 1679250 - DNA, 15 bp, Homo sapiens
tgtggactgcaggcc

SEQ ID NO: 1679251 - DNA, 15 bp, Homo sapiens
gtggactgcaggcct

SEQ ID NO: 1679252 - DNA, 15 bp, Homo sapiens
tggactgcaggcctg

SEQ ID NO: 1679253 - DNA, 15 bp, Homo sapiens
ggactgcaggcctgg

SEQ ID NO: 1679254 - DNA, 15 bp, Homo sapiens
gactgcaggcctggc

SEQ ID NO: 1679255 - DNA, 15 bp, Homo sapiens
actgcaggcctggcg

SEQ ID NO: 1679256 - DNA, 15 bp, Homo sapiens
ctgcaggcctggcgt

SEQ ID NO: 1679257 - DNA, 15 bp, Homo sapiens
tgcaggcctggcgtg

SEQ ID NO: 1679258 - DNA, 15 bp, Homo sapiens
gcaggcctggcgtga

SEQ ID NO: 1679259 - DNA, 15 bp, Homo sapiens
caggcctggcgtgat

SEQ ID NO: 1679260 - DNA, 15 bp, Homo sapiens
aggcctggcgtgatc

SEQ ID NO: 1679261 - DNA, 15 bp, Homo sapiens
ggcctggcgtgatca

SEQ ID NO: 1679262 - DNA, 15 bp, Homo sapiens
gcctggcgtgatcaa

SEQ ID NO: 1679263 - DNA, 15 bp, Homo sapiens
cctggcgtgatcaag

SEQ ID NO: 1679264 - DNA, 15 bp, Homo sapiens
ctggcgtgatcaagg

SEQ ID NO: 1679265 - DNA, 15 bp, Homo sapiens
tggcgtgatcaagga

SEQ ID NO: 1679266 - DNA, 15 bp, Homo sapiens
ggcgtgatcaaggac

SEQ ID NO: 1679267 - DNA, 15 bp, Homo sapiens
gcgtgatcaaggacc

SEQ ID NO: 1679268 - DNA, 15 bp, Homo sapiens
cgtgatcaaggaccc

SEQ ID NO: 1679269 - DNA, 15 bp, Homo sapiens
gtgatcaaggacccc

SEQ ID NO: 1679270 - DNA, 15 bp, Homo sapiens
tgatcaaggacccct

SEQ ID NO: 1679271 - DNA, 15 bp, Homo sapiens
gatcaaggacccctg

SEQ ID NO: 1679272 - DNA, 15 bp, Homo sapiens
atcaaggacccctgc

SEQ ID NO: 1679273 - DNA, 15 bp, Homo sapiens
tcaaggacccctgcc

SEQ ID NO: 1679274 - DNA, 15 bp, Homo sapiens
caaggacccctgccc

SEQ ID NO: 1679275 - DNA, 15 bp, Homo sapiens
aaggacccctgccct

SEQ ID NO: 1679276 - DNA, 15 bp, Homo sapiens
aggacccctgccctc

SEQ ID NO: 1679277 - DNA, 15 bp, Homo sapiens
ggacccctgccctcc

SEQ ID NO: 1679278 - DNA, 15 bp, Homo sapiens
gacccctgccctcct

SEQ ID NO: 1679279 - DNA, 15 bp, Homo sapiens
acccctgccctcctg

SEQ ID NO: 1679280 - DNA, 15 bp, Homo sapiens
cccctgccctcctgc

SEQ ID NO: 1679281 - DNA, 15 bp, Homo sapiens
ccctgccctcctgcc

SEQ ID NO: 1679282 - DNA, 15 bp, Homo sapiens
cctgccctcctgcca

SEQ ID NO: 1679283 - DNA, 15 bp, Homo sapiens
ctgccctcctgccat

SEQ ID NO: 1679284 - DNA, 15 bp, Homo sapiens
tgccctcctgccatc

SEQ ID NO: 1679285 - DNA, 15 bp, Homo sapiens
gccctcctgccatcc

SEQ ID NO: 1679286 - DNA, 15 bp, Homo sapiens
ccctcctgccatccc

SEQ ID NO: 1679287 - DNA, 15 bp, Homo sapiens
cctcctgccatcccc

SEQ ID NO: 1679288 - DNA, 15 bp, Homo sapiens
ctcctgccatccccc

SEQ ID NO: 1679289 - DNA, 15 bp, Homo sapiens
tcctgccatccccct

SEQ ID NO: 1679290 - DNA, 15 bp, Homo sapiens
cctgccatccccctt

SEQ ID NO: 1679291 - DNA, 15 bp, Homo sapiens
ctgccatcccccttg

SEQ ID NO: 1679292 - DNA, 15 bp, Homo sapiens
tgccatcccccttgg

SEQ ID NO: 1679293 - DNA, 15 bp, Homo sapiens
gccatcccccttggt

SEQ ID NO: 1679294 - DNA, 15 bp, Homo sapiens
ccatcccccttggtc

SEQ ID NO: 1679295 - DNA, 15 bp, Homo sapiens
catcccccttggtct

SEQ ID NO: 1679296 - DNA, 15 bp, Homo sapiens
atcccccttggtctc

SEQ ID NO: 1679297 - DNA, 15 bp, Homo sapiens
tcccccttggtctcc

SEQ ID NO: 1679298 - DNA, 15 bp, Homo sapiens
cccccttggtctcct

SEQ ID NO: 1679299 - DNA, 15 bp, Homo sapiens
ccccttggtctcctc

SEQ ID NO: 1679300 - DNA, 15 bp, Homo sapiens
cccttggtctcctcc

SEQ ID NO: 1679301 - DNA, 15 bp, Homo sapiens
ccttggtctcctcca

SEQ ID NO: 1679302 - DNA, 15 bp, Homo sapiens
cttggtctcctccat

SEQ ID NO: 1679303 - DNA, 15 bp, Homo sapiens
ttggtctcctccatg

SEQ ID NO: 1679304 - DNA, 15 bp, Homo sapiens
tggtctcctccatgc

SEQ ID NO: 1679305 - DNA, 15 bp, Homo sapiens
ggtctcctccatgcc

SEQ ID NO: 1679306 - DNA, 15 bp, Homo sapiens
gtctcctccatgcca

SEQ ID NO: 1679307 - DNA, 15 bp, Homo sapiens
tctcctccatgccag

SEQ ID NO: 1679308 - DNA, 15 bp, Homo sapiens
ctcctccatgccagc

SEQ ID NO: 1679309 - DNA, 15 bp, Homo sapiens
tcctccatgccagcc

SEQ ID NO: 1679310 - DNA, 15 bp, Homo sapiens
cctccatgccagcct

SEQ ID NO: 1679311 - DNA, 15 bp, Homo sapiens
ctccatgccagcctt

SEQ ID NO: 1679312 - DNA, 15 bp, Homo sapiens
tccatgccagccttg

SEQ ID NO: 1679313 - DNA, 15 bp, Homo sapiens
ccatgccagccttgc

SEQ ID NO: 1679314 - DNA, 15 bp, Homo sapiens
catgccagccttgct

SEQ ID NO: 1679315 - DNA, 15 bp, Homo sapiens
atgccagccttgctg

SEQ ID NO: 1679316 - DNA, 15 bp, Homo sapiens
tgccagccttgctgt

SEQ ID NO: 1679317 - DNA, 15 bp, Homo sapiens
gccagccttgctgtt

SEQ ID NO: 1679318 - DNA, 15 bp, Homo sapiens
ccagccttgctgttt

SEQ ID NO: 1679319 - DNA, 15 bp, Homo sapiens
cagccttgctgtttc

SEQ ID NO: 1679320 - DNA, 15 bp, Homo sapiens
agccttgctgtttcc

SEQ ID NO: 1679321 - DNA, 15 bp, Homo sapiens
gccttgctgtttccc

SEQ ID NO: 1679322 - DNA, 15 bp, Homo sapiens
ccttgctgtttcccc

SEQ ID NO: 1679323 - DNA, 15 bp, Homo sapiens
cttgctgtttcccct

SEQ ID NO: 1679324 - DNA, 15 bp, Homo sapiens
ttgctgtttcccctg

SEQ ID NO: 1679325 - DNA, 15 bp, Homo sapiens
tgctgtttcccctgc

SEQ ID NO: 1679326 - DNA, 15 bp, Homo sapiens
gctgtttcccctgcc

SEQ ID NO: 1679327 - DNA, 15 bp, Homo sapiens
ctgtttcccctgcct

SEQ ID NO: 1679328 - DNA, 15 bp, Homo sapiens
tgtttcccctgcctg

SEQ ID NO: 1679329 - DNA, 15 bp, Homo sapiens
gtttcccctgcctgg

SEQ ID NO: 1679330 - DNA, 15 bp, Homo sapiens
tttcccctgcctggc

SEQ ID NO: 1679331 - DNA, 15 bp, Homo sapiens
ttcccctgcctggct

SEQ ID NO: 1679332 - DNA, 15 bp, Homo sapiens
tcccctgcctggctc

SEQ ID NO: 1679333 - DNA, 15 bp, Homo sapiens
cccctgcctggctca

SEQ ID NO: 1679334 - DNA, 15 bp, Homo sapiens
ccctgcctggctcac

SEQ ID NO: 1679335 - DNA, 15 bp, Homo sapiens
cctgcctggctcaca

SEQ ID NO: 1679336 - DNA, 15 bp, Homo sapiens
ctgcctggctcacag

SEQ ID NO: 1679337 - DNA, 15 bp, Homo sapiens
tgcctggctcacagt

SEQ ID NO: 1679338 - DNA, 15 bp, Homo sapiens
gcctggctcacagtc

SEQ ID NO: 1679339 - DNA, 15 bp, Homo sapiens
cctggctcacagtct

SEQ ID NO: 1679340 - DNA, 15 bp, Homo sapiens
ctggctcacagtctc

SEQ ID NO: 1679341 - DNA, 15 bp, Homo sapiens
tggctcacagtctcc

SEQ ID NO: 1679342 - DNA, 15 bp, Homo sapiens
ggctcacagtctcca

SEQ ID NO: 1679343 - DNA, 15 bp, Homo sapiens
gctcacagtctccac

SEQ ID NO: 1679344 - DNA, 15 bp, Homo sapiens
ctcacagtctccaca

SEQ ID NO: 1679345 - DNA, 15 bp, Homo sapiens
tcacagtctccacac

SEQ ID NO: 1679346 - DNA, 15 bp, Homo sapiens
cacagtctccacacc

SEQ ID NO: 1679347 - DNA, 15 bp, Homo sapiens
acagtctccacacct

SEQ ID NO: 1679348 - DNA, 15 bp, Homo sapiens
cagtctccacacctt

SEQ ID NO: 1679349 - DNA, 15 bp, Homo sapiens
agtctccacaccttt

SEQ ID NO: 1679350 - DNA, 15 bp, Homo sapiens
gtctccacaccttta

SEQ ID NO: 1679351 - DNA, 15 bp, Homo sapiens
tctccacacctttat

SEQ ID NO: 1679352 - DNA, 15 bp, Homo sapiens
ctccacacctttatc

SEQ ID NO: 1679353 - DNA, 15 bp, Homo sapiens
tccacacctttatcc

SEQ ID NO: 1679354 - DNA, 15 bp, Homo sapiens
ccacacctttatccc

SEQ ID NO: 1679355 - DNA, 15 bp, Homo sapiens
cacacctttatcccc

SEQ ID NO: 1679356 - DNA, 15 bp, Homo sapiens
acacctttatcccct

SEQ ID NO: 1679357 - DNA, 15 bp, Homo sapiens
cacctttatcccctg

SEQ ID NO: 1679358 - DNA, 15 bp, Homo sapiens
acctttatcccctgg

SEQ ID NO: 1679359 - DNA, 15 bp, Homo sapiens
cctttatcccctggg

SEQ ID NO: 1679360 - DNA, 15 bp, Homo sapiens
ctttatcccctgggg

SEQ ID NO: 1679361 - DNA, 15 bp, Homo sapiens
tttatcccctggggg

SEQ ID NO: 1679362 - DNA, 15 bp, Homo sapiens
ttatcccctgggggc

SEQ ID NO: 1679363 - DNA, 15 bp, Homo sapiens
tatcccctgggggct

SEQ ID NO: 1679364 - DNA, 15 bp, Homo sapiens
atcccctgggggctc

SEQ ID NO: 1679365 - DNA, 15 bp, Homo sapiens
tcccctgggggctca

SEQ ID NO: 1679366 - DNA, 15 bp, Homo sapiens
cccctgggggctcaa

SEQ ID NO: 1679367 - DNA, 15 bp, Homo sapiens
ccctgggggctcaag

SEQ ID NO: 1679368 - DNA, 15 bp, Homo sapiens
cctgggggctcaagt

SEQ ID NO: 1679369 - DNA, 15 bp, Homo sapiens
ctgggggctcaagtc

SEQ ID NO: 1679370 - DNA, 15 bp, Homo sapiens
tgggggctcaagtct

SEQ ID NO: 1679371 - DNA, 15 bp, Homo sapiens
gggggctcaagtctg

SEQ ID NO: 1679372 - DNA, 15 bp, Homo sapiens
ggggctcaagtctgg

SEQ ID NO: 1679373 - DNA, 15 bp, Homo sapiens
gggctcaagtctggg

SEQ ID NO: 1679374 - DNA, 15 bp, Homo sapiens
ggctcaagtctggga

SEQ ID NO: 1679375 - DNA, 15 bp, Homo sapiens
gctcaagtctgggac

SEQ ID NO: 1679376 - DNA, 15 bp, Homo sapiens
ctcaagtctgggaca

SEQ ID NO: 1679377 - DNA, 15 bp, Homo sapiens
tcaagtctgggacaa

SEQ ID NO: 1679378 - DNA, 15 bp, Homo sapiens
caagtctgggacaaa

SEQ ID NO: 1679379 - DNA, 15 bp, Homo sapiens
aagtctgggacaaat

SEQ ID NO: 1679380 - DNA, 15 bp, Homo sapiens
agtctgggacaaatg

SEQ ID NO: 1679381 - DNA, 15 bp, Homo sapiens
gtctgggacaaatga

SEQ ID NO: 1679382 - DNA, 15 bp, Homo sapiens
tctgggacaaatgac

SEQ ID NO: 1679383 - DNA, 15 bp, Homo sapiens
ctgggacaaatgaca

SEQ ID NO: 1679384 - DNA, 15 bp, Homo sapiens
tgggacaaatgacac

SEQ ID NO: 1679385 - DNA, 15 bp, Homo sapiens
gggacaaatgacacc

SEQ ID NO: 1679386 - DNA, 15 bp, Homo sapiens
ggacaaatgacacct

SEQ ID NO: 1679387 - DNA, 15 bp, Homo sapiens
gacaaatgacacctc

SEQ ID NO: 1679388 - DNA, 15 bp, Homo sapiens
acaaatgacacctcc

SEQ ID NO: 1679389 - DNA, 15 bp, Homo sapiens
caaatgacacctcct

SEQ ID NO: 1679390 - DNA, 15 bp, Homo sapiens
aaatgacacctcctc

SEQ ID NO: 1679391 - DNA, 15 bp, Homo sapiens
aatgacacctcctcc

SEQ ID NO: 1679392 - DNA, 15 bp, Homo sapiens
atgacacctcctccc

SEQ ID NO: 1679393 - DNA, 15 bp, Homo sapiens
tgacacctcctccct

SEQ ID NO: 1679394 - DNA, 15 bp, Homo sapiens
gacacctcctccctg

SEQ ID NO: 1679395 - DNA, 15 bp, Homo sapiens
acacctcctccctgg

SEQ ID NO: 1679396 - DNA, 15 bp, Homo sapiens
cacctcctccctggg

SEQ ID NO: 1679397 - DNA, 15 bp, Homo sapiens
acctcctccctgggc

SEQ ID NO: 1679398 - DNA, 15 bp, Homo sapiens
cctcctccctgggcc

SEQ ID NO: 1679399 - DNA, 15 bp, Homo sapiens
ctcctccctgggcct

SEQ ID NO: 1679400 - DNA, 15 bp, Homo sapiens
tcctccctgggcctc

SEQ ID NO: 1679401 - DNA, 15 bp, Homo sapiens
cctccctgggcctcc

SEQ ID NO: 1679402 - DNA, 15 bp, Homo sapiens
ctccctgggcctccc

SEQ ID NO: 1679403 - DNA, 15 bp, Homo sapiens
tccctgggcctccca

SEQ ID NO: 1679404 - DNA, 15 bp, Homo sapiens
ccctgggcctcccac

SEQ ID NO: 1679405 - DNA, 15 bp, Homo sapiens
cctgggcctcccaca

SEQ ID NO: 1679406 - DNA, 15 bp, Homo sapiens
ctgggcctcccacag

SEQ ID NO: 1679407 - DNA, 15 bp, Homo sapiens
tgggcctcccacaga

SEQ ID NO: 1679408 - DNA, 15 bp, Homo sapiens
gggcctcccacagag

SEQ ID NO: 1679409 - DNA, 15 bp, Homo sapiens
ggcctcccacagagc

SEQ ID NO: 1679410 - DNA, 15 bp, Homo sapiens
gcctcccacagagcc

SEQ ID NO: 1679411 - DNA, 15 bp, Homo sapiens
cctcccacagagcca

SEQ ID NO: 1679412 - DNA, 15 bp, Homo sapiens
ctcccacagagccac

SEQ ID NO: 1679413 - DNA, 15 bp, Homo sapiens
tcccacagagccaca

SEQ ID NO: 1679414 - DNA, 15 bp, Homo sapiens
cccacagagccacag

SEQ ID NO: 1679415 - DNA, 15 bp, Homo sapiens
ccacagagccacaga

SEQ ID NO: 1679416 - DNA, 15 bp, Homo sapiens
cacagagccacagag

SEQ ID NO: 1679417 - DNA, 15 bp, Homo sapiens
acagagccacagagc

SEQ ID NO: 1679418 - DNA, 15 bp, Homo sapiens
cagagccacagagcg

SEQ ID NO: 1679419 - DNA, 15 bp, Homo sapiens
agagccacagagcgt

SEQ ID NO: 1679420 - DNA, 15 bp, Homo sapiens
gagccacagagcgtc

SEQ ID NO: 1679421 - DNA, 15 bp, Homo sapiens
agccacagagcgtca

SEQ ID NO: 1679422 - DNA, 15 bp, Homo sapiens
gccacagagcgtcac

SEQ ID NO: 1679423 - DNA, 15 bp, Homo sapiens
ccacagagcgtcacc

SEQ ID NO: 1679424 - DNA, 15 bp, Homo sapiens
cacagagcgtcaccc

SEQ ID NO: 1679425 - DNA, 15 bp, Homo sapiens
acagagcgtcacccc

SEQ ID NO: 1679426 - DNA, 15 bp, Homo sapiens
cagagcgtcaccccc

SEQ ID NO: 1679427 - DNA, 15 bp, Homo sapiens
agagcgtcacccccc

SEQ ID NO: 1679428 - DNA, 15 bp, Homo sapiens
gagcgtcacccccca

SEQ ID NO: 1679429 - DNA, 15 bp, Homo sapiens
agcgtcaccccccac

SEQ ID NO: 1679430 - DNA, 15 bp, Homo sapiens
gcgtcaccccccacc

SEQ ID NO: 1679431 - DNA, 15 bp, Homo sapiens
cgtcaccccccacca

SEQ ID NO: 1679432 - DNA, 15 bp, Homo sapiens
gtcaccccccaccac

SEQ ID NO: 1679433 - DNA, 15 bp, Homo sapiens
tcaccccccaccacc

SEQ ID NO: 1679434 - DNA, 15 bp, Homo sapiens
caccccccaccaccc

SEQ ID NO: 1679435 - DNA, 15 bp, Homo sapiens
accccccaccacccc

SEQ ID NO: 1679436 - DNA, 15 bp, Homo sapiens
ccccccaccacccca

SEQ ID NO: 1679437 - DNA, 15 bp, Homo sapiens
cccccaccaccccac

SEQ ID NO: 1679438 - DNA, 15 bp, Homo sapiens
ccccaccaccccaca

SEQ ID NO: 1679439 - DNA, 15 bp, Homo sapiens
cccaccaccccacag

SEQ ID NO: 1679440 - DNA, 15 bp, Homo sapiens
ccaccaccccacagc

SEQ ID NO: 1679441 - DNA, 15 bp, Homo sapiens
caccaccccacagcg

SEQ ID NO: 1679442 - DNA, 15 bp, Homo sapiens
accaccccacagcgt

SEQ ID NO: 1679443 - DNA, 15 bp, Homo sapiens
ccaccccacagcgtt

SEQ ID NO: 1679444 - DNA, 15 bp, Homo sapiens
caccccacagcgttc

SEQ ID NO: 1679445 - DNA, 15 bp, Homo sapiens
accccacagcgttca

SEQ ID NO: 1679446 - DNA, 15 bp, Homo sapiens
ccccacagcgttcat

SEQ ID NO: 1679447 - DNA, 15 bp, Homo sapiens
cccacagcgttcatt

SEQ ID NO: 1679448 - DNA, 15 bp, Homo sapiens
ccacagcgttcattt

SEQ ID NO: 1679449 - DNA, 15 bp, Homo sapiens
cacagcgttcatttg

SEQ ID NO: 1679450 - DNA, 15 bp, Homo sapiens
acagcgttcatttgt

SEQ ID NO: 1679451 - DNA, 15 bp, Homo sapiens
cagcgttcatttgtg

SEQ ID NO: 1679452 - DNA, 15 bp, Homo sapiens
agcgttcatttgtgg

SEQ ID NO: 1679453 - DNA, 15 bp, Homo sapiens
gcgttcatttgtggg

SEQ ID NO: 1679454 - DNA, 15 bp, Homo sapiens
cgttcatttgtgggt

SEQ ID NO: 1679455 - DNA, 15 bp, Homo sapiens
gttcatttgtgggtc

SEQ ID NO: 1679456 - DNA, 15 bp, Homo sapiens
ttcatttgtgggtca

SEQ ID NO: 1679457 - DNA, 15 bp, Homo sapiens
tcatttgtgggtcag

SEQ ID NO: 1679458 - DNA, 15 bp, Homo sapiens
catttgtgggtcagg

SEQ ID NO: 1679459 - DNA, 15 bp, Homo sapiens
atttgtgggtcagga

SEQ ID NO: 1679460 - DNA, 15 bp, Homo sapiens
tttgtgggtcaggat

SEQ ID NO: 1679461 - DNA, 15 bp, Homo sapiens
ttgtgggtcaggatt

SEQ ID NO: 1679462 - DNA, 15 bp, Homo sapiens
tgtgggtcaggatta

SEQ ID NO: 1679463 - DNA, 15 bp, Homo sapiens
gtgggtcaggattaa

SEQ ID NO: 1679464 - DNA, 15 bp, Homo sapiens
tgggtcaggattaag

SEQ ID NO: 1679465 - DNA, 15 bp, Homo sapiens
gggtcaggattaaga

SEQ ID NO: 1679466 - DNA, 15 bp, Homo sapiens
ggtcaggattaagag

SEQ ID NO: 1679467 - DNA, 15 bp, Homo sapiens
gtcaggattaagagc

SEQ ID NO: 1679468 - DNA, 15 bp, Homo sapiens
tcaggattaagagca

SEQ ID NO: 1679469 - DNA, 15 bp, Homo sapiens
caggattaagagcac

SEQ ID NO: 1679470 - DNA, 15 bp, Homo sapiens
aggattaagagcaca

SEQ ID NO: 1679471 - DNA, 15 bp, Homo sapiens
ggattaagagcacaa

SEQ ID NO: 1679472 - DNA, 15 bp, Homo sapiens
gattaagagcacaag

SEQ ID NO: 1679473 - DNA, 15 bp, Homo sapiens
attaagagcacaagc

SEQ ID NO: 1679474 - DNA, 15 bp, Homo sapiens
ttaagagcacaagct

SEQ ID NO: 1679475 - DNA, 15 bp, Homo sapiens
taagagcacaagctc

SEQ ID NO: 1679476 - DNA, 15 bp, Homo sapiens
aagagcacaagctct

SEQ ID NO: 1679477 - DNA, 15 bp, Homo sapiens
agagcacaagctctg

SEQ ID NO: 1679478 - DNA, 15 bp, Homo sapiens
gagcacaagctctga

SEQ ID NO: 1679479 - DNA, 15 bp, Homo sapiens
agcacaagctctgaa

SEQ ID NO: 1679480 - DNA, 15 bp, Homo sapiens
gcacaagctctgaac

SEQ ID NO: 1679481 - DNA, 15 bp, Homo sapiens
cacaagctctgaaca

SEQ ID NO: 1679482 - DNA, 15 bp, Homo sapiens
acaagctctgaacac

SEQ ID NO: 1679483 - DNA, 15 bp, Homo sapiens
caagctctgaacaca

SEQ ID NO: 1679484 - DNA, 15 bp, Homo sapiens
aagctctgaacacac

SEQ ID NO: 1679485 - DNA, 15 bp, Homo sapiens
agctctgaacacact

SEQ ID NO: 1679486 - DNA, 15 bp, Homo sapiens
gctctgaacacactc

SEQ ID NO: 1679487 - DNA, 15 bp, Homo sapiens
ctctgaacacactca

SEQ ID NO: 1679488 - DNA, 15 bp, Homo sapiens
tctgaacacactcag

SEQ ID NO: 1679489 - DNA, 15 bp, Homo sapiens
ctgaacacactcagc

SEQ ID NO: 1679490 - DNA, 15 bp, Homo sapiens
tgaacacactcagct

SEQ ID NO: 1679491 - DNA, 15 bp, Homo sapiens
gaacacactcagctc

SEQ ID NO: 1679492 - DNA, 15 bp, Homo sapiens
aacacactcagctca

SEQ ID NO: 1679493 - DNA, 15 bp, Homo sapiens
acacactcagctcag

SEQ ID NO: 1679494 - DNA, 15 bp, Homo sapiens
cacactcagctcaga

SEQ ID NO: 1679495 - DNA, 15 bp, Homo sapiens
acactcagctcagat

SEQ ID NO: 1679496 - DNA, 15 bp, Homo sapiens
cactcagctcagatt

SEQ ID NO: 1679497 - DNA, 15 bp, Homo sapiens
actcagctcagatta

SEQ ID NO: 1679498 - DNA, 15 bp, Homo sapiens
ctcagctcagattaa

SEQ ID NO: 1679499 - DNA, 15 bp, Homo sapiens
tcagctcagattaaa

SEQ ID NO: 1679500 - DNA, 15 bp, Homo sapiens
cagctcagattaaag

SEQ ID NO: 1679501 - DNA, 15 bp, Homo sapiens
agctcagattaaagc

SEQ ID NO: 1679502 - DNA, 15 bp, Homo sapiens
gctcagattaaagcc

SEQ ID NO: 1679503 - DNA, 15 bp, Homo sapiens
ctcagattaaagccc

SEQ ID NO: 1679504 - DNA, 15 bp, Homo sapiens
tcagattaaagccct

SEQ ID NO: 1679505 - DNA, 15 bp, Homo sapiens
cagattaaagccctg

SEQ ID NO: 1679506 - DNA, 15 bp, Homo sapiens
agattaaagccctgg

SEQ ID NO: 1679507 - DNA, 15 bp, Homo sapiens
gattaaagccctggc

SEQ ID NO: 1679508 - DNA, 15 bp, Homo sapiens
attaaagccctggct

SEQ ID NO: 1679509 - DNA, 15 bp, Homo sapiens
ttaaagccctggctc

SEQ ID NO: 1679510 - DNA, 15 bp, Homo sapiens
taaagccctggctct

SEQ ID NO: 1679511 - DNA, 15 bp, Homo sapiens
aaagccctggctctg

SEQ ID NO: 1679512 - DNA, 15 bp, Homo sapiens
aagccctggctctgc

SEQ ID NO: 1679513 - DNA, 15 bp, Homo sapiens
agccctggctctgcc

SEQ ID NO: 1679514 - DNA, 15 bp, Homo sapiens
gccctggctctgcca

SEQ ID NO: 1679515 - DNA, 15 bp, Homo sapiens
ccctggctctgccac

SEQ ID NO: 1679516 - DNA, 15 bp, Homo sapiens
cctggctctgccacc

SEQ ID NO: 1679517 - DNA, 15 bp, Homo sapiens
ctggctctgccaccc

SEQ ID NO: 1679518 - DNA, 15 bp, Homo sapiens
tggctctgccacccg

SEQ ID NO: 1679519 - DNA, 15 bp, Homo sapiens
ggctctgccacccgt

SEQ ID NO: 1679520 - DNA, 15 bp, Homo sapiens
gctctgccacccgtc

SEQ ID NO: 1679521 - DNA, 15 bp, Homo sapiens
ctctgccacccgtct

SEQ ID NO: 1679522 - DNA, 15 bp, Homo sapiens
tctgccacccgtcta

SEQ ID NO: 1679523 - DNA, 15 bp, Homo sapiens
ctgccacccgtctac

SEQ ID NO: 1679524 - DNA, 15 bp, Homo sapiens
tgccacccgtctaca

SEQ ID NO: 1679525 - DNA, 15 bp, Homo sapiens
gccacccgtctacag

SEQ ID NO: 1679526 - DNA, 15 bp, Homo sapiens
ccacccgtctacaga

SEQ ID NO: 1679527 - DNA, 15 bp, Homo sapiens
cacccgtctacagaa

SEQ ID NO: 1679528 - DNA, 15 bp, Homo sapiens
acccgtctacagaaa

SEQ ID NO: 1679529 - DNA, 15 bp, Homo sapiens
cccgtctacagaaaa

SEQ ID NO: 1679530 - DNA, 15 bp, Homo sapiens
ccgtctacagaaaaa

SEQ ID NO: 1679531 - DNA, 15 bp, Homo sapiens
cgtctacagaaaaac

SEQ ID NO: 1679532 - DNA, 15 bp, Homo sapiens
gtctacagaaaaact

SEQ ID NO: 1679533 - DNA, 15 bp, Homo sapiens
tctacagaaaaactg

SEQ ID NO: 1679534 - DNA, 15 bp, Homo sapiens
ctacagaaaaactga

SEQ ID NO: 1679535 - DNA, 15 bp, Homo sapiens
tacagaaaaactgac

SEQ ID NO: 1679536 - DNA, 15 bp, Homo sapiens
acagaaaaactgaca

SEQ ID NO: 1679537 - DNA, 15 bp, Homo sapiens
cagaaaaactgacac

SEQ ID NO: 1679538 - DNA, 15 bp, Homo sapiens
agaaaaactgacaca

SEQ ID NO: 1679539 - DNA, 15 bp, Homo sapiens
gaaaaactgacacag

SEQ ID NO: 1679540 - DNA, 15 bp, Homo sapiens
aaaaactgacacagt

SEQ ID NO: 1679541 - DNA, 15 bp, Homo sapiens
aaaactgacacagtg

SEQ ID NO: 1679542 - DNA, 15 bp, Homo sapiens
aaactgacacagtgg

SEQ ID NO: 1679543 - DNA, 15 bp, Homo sapiens
aactgacacagtggc

SEQ ID NO: 1679544 - DNA, 15 bp, Homo sapiens
actgacacagtggcc

SEQ ID NO: 1679545 - DNA, 15 bp, Homo sapiens
ctgacacagtggcct

SEQ ID NO: 1679546 - DNA, 15 bp, Homo sapiens
tgacacagtggcctc

SEQ ID NO: 1679547 - DNA, 15 bp, Homo sapiens
gacacagtggcctcc

SEQ ID NO: 1679548 - DNA, 15 bp, Homo sapiens
acacagtggcctcca

SEQ ID NO: 1679549 - DNA, 15 bp, Homo sapiens
cacagtggcctccac

SEQ ID NO: 1679550 - DNA, 15 bp, Homo sapiens
acagtggcctccact

SEQ ID NO: 1679551 - DNA, 15 bp, Homo sapiens
cagtggcctccactg

SEQ ID NO: 1679552 - DNA, 15 bp, Homo sapiens
agtggcctccactgg

SEQ ID NO: 1679553 - DNA, 15 bp, Homo sapiens
gtggcctccactggg

SEQ ID NO: 1679554 - DNA, 15 bp, Homo sapiens
tggcctccactgggg

SEQ ID NO: 1679555 - DNA, 15 bp, Homo sapiens
ggcctccactggggt

SEQ ID NO: 1679556 - DNA, 15 bp, Homo sapiens
gcctccactggggtg

SEQ ID NO: 1679557 - DNA, 15 bp, Homo sapiens
cctccactggggtgt

SEQ ID NO: 1679558 - DNA, 15 bp, Homo sapiens
ctccactggggtgtg

SEQ ID NO: 1679559 - DNA, 15 bp, Homo sapiens
tccactggggtgtgg

SEQ ID NO: 1679560 - DNA, 15 bp, Homo sapiens
ccactggggtgtggc

SEQ ID NO: 1679561 - DNA, 15 bp, Homo sapiens
cactggggtgtggct

SEQ ID NO: 1679562 - DNA, 15 bp, Homo sapiens
actggggtgtggctc

SEQ ID NO: 1679563 - DNA, 15 bp, Homo sapiens
ctggggtgtggctcc

SEQ ID NO: 1679564 - DNA, 15 bp, Homo sapiens
tggggtgtggctcca

SEQ ID NO: 1679565 - DNA, 15 bp, Homo sapiens
ggggtgtggctccat

SEQ ID NO: 1679566 - DNA, 15 bp, Homo sapiens
gggtgtggctccatg

SEQ ID NO: 1679567 - DNA, 15 bp, Homo sapiens
ggtgtggctccatga

SEQ ID NO: 1679568 - DNA, 15 bp, Homo sapiens
gtgtggctccatgaa

SEQ ID NO: 1679569 - DNA, 15 bp, Homo sapiens
tgtggctccatgaag

SEQ ID NO: 1679570 - DNA, 15 bp, Homo sapiens
gtggctccatgaagg

SEQ ID NO: 1679571 - DNA, 15 bp, Homo sapiens
tggctccatgaagga

SEQ ID NO: 1679572 - DNA, 15 bp, Homo sapiens
ggctccatgaaggag

SEQ ID NO: 1679573 - DNA, 15 bp, Homo sapiens
gctccatgaaggagg

SEQ ID NO: 1679574 - DNA, 15 bp, Homo sapiens
ctccatgaaggaggg

SEQ ID NO: 1679575 - DNA, 15 bp, Homo sapiens
tccatgaaggagggt

SEQ ID NO: 1679576 - DNA, 15 bp, Homo sapiens
ccatgaaggagggtc

SEQ ID NO: 1679577 - DNA, 15 bp, Homo sapiens
catgaaggagggtct

SEQ ID NO: 1679578 - DNA, 15 bp, Homo sapiens
atgaaggagggtctg

SEQ ID NO: 1679579 - DNA, 15 bp, Homo sapiens
tgaaggagggtctgg

SEQ ID NO: 1679580 - DNA, 15 bp, Homo sapiens
gaaggagggtctggc

SEQ ID NO: 1679581 - DNA, 15 bp, Homo sapiens
aaggagggtctggcg

SEQ ID NO: 1679582 - DNA, 15 bp, Homo sapiens
aggagggtctggcgg

SEQ ID NO: 1679583 - DNA, 15 bp, Homo sapiens
ggagggtctggcggg

SEQ ID NO: 1679584 - DNA, 15 bp, Homo sapiens
gagggtctggcgggc

SEQ ID NO: 1679585 - DNA, 15 bp, Homo sapiens
agggtctggcgggcc

SEQ ID NO: 1679586 - DNA, 15 bp, Homo sapiens
gggtctggcgggcca

SEQ ID NO: 1679587 - DNA, 15 bp, Homo sapiens
ggtctggcgggccac

SEQ ID NO: 1679588 - DNA, 15 bp, Homo sapiens
gtctggcgggccaca

SEQ ID NO: 1679589 - DNA, 15 bp, Homo sapiens
tctggcgggccacag

SEQ ID NO: 1679590 - DNA, 15 bp, Homo sapiens
ctggcgggccacagg

SEQ ID NO: 1679591 - DNA, 15 bp, Homo sapiens
tggcgggccacaggc

SEQ ID NO: 1679592 - DNA, 15 bp, Homo sapiens
ggcgggccacaggct

SEQ ID NO: 1679593 - DNA, 15 bp, Homo sapiens
gcgggccacaggctt

SEQ ID NO: 1679594 - DNA, 15 bp, Homo sapiens
cgggccacaggctta

SEQ ID NO: 1679595 - DNA, 15 bp, Homo sapiens
gggccacaggcttac

SEQ ID NO: 1679596 - DNA, 15 bp, Homo sapiens
ggccacaggcttaca

SEQ ID NO: 1679597 - DNA, 15 bp, Homo sapiens
gccacaggcttacag

SEQ ID NO: 1679598 - DNA, 15 bp, Homo sapiens
ccacaggcttacagt

SEQ ID NO: 1679599 - DNA, 15 bp, Homo sapiens
cacaggcttacagta

SEQ ID NO: 1679600 - DNA, 15 bp, Homo sapiens
acaggcttacagtac

SEQ ID NO: 1679601 - DNA, 15 bp, Homo sapiens
caggcttacagtact

SEQ ID NO: 1679602 - DNA, 15 bp, Homo sapiens
aggcttacagtactc

SEQ ID NO: 1679603 - DNA, 15 bp, Homo sapiens
ggcttacagtactca

SEQ ID NO: 1679604 - DNA, 15 bp, Homo sapiens
gcttacagtactcat

SEQ ID NO: 1679605 - DNA, 15 bp, Homo sapiens
cttacagtactcatt

SEQ ID NO: 1679606 - DNA, 15 bp, Homo sapiens
ttacagtactcattt

SEQ ID NO: 1679607 - DNA, 15 bp, Homo sapiens
tacagtactcatttc

SEQ ID NO: 1679608 - DNA, 15 bp, Homo sapiens
acagtactcatttct

SEQ ID NO: 1679609 - DNA, 15 bp, Homo sapiens
cagtactcatttctc

SEQ ID NO: 1679610 - DNA, 15 bp, Homo sapiens
agtactcatttctct

SEQ ID NO: 1679611 - DNA, 15 bp, Homo sapiens
gtactcatttctctt

SEQ ID NO: 1679612 - DNA, 15 bp, Homo sapiens
tactcatttctcttt

SEQ ID NO: 1679613 - DNA, 15 bp, Homo sapiens
actcatttctctttt

SEQ ID NO: 1679614 - DNA, 15 bp, Homo sapiens
ctcatttctcttttc

SEQ ID NO: 1679615 - DNA, 15 bp, Homo sapiens
tcatttctcttttct

SEQ ID NO: 1679616 - DNA, 15 bp, Homo sapiens
catttctcttttctt

SEQ ID NO: 1679617 - DNA, 15 bp, Homo sapiens
atttctcttttcttt

SEQ ID NO: 1679618 - DNA, 15 bp, Homo sapiens
ttcttttctttcttc

SEQ ID NO: 1679619 - DNA, 15 bp, Homo sapiens
tcttttctttcttcc

SEQ ID NO: 1679620 - DNA, 15 bp, Homo sapiens
cttttctttcttcct

SEQ ID NO: 1679621 - DNA, 15 bp, Homo sapiens
ttttctttcttcctt

SEQ ID NO: 1679622 - DNA, 15 bp, Homo sapiens
tttctttcttccttc

SEQ ID NO: 1679623 - DNA, 15 bp, Homo sapiens
ttctttcttccttca

SEQ ID NO: 1679624 - DNA, 15 bp, Homo sapiens
tctttcttccttcat

SEQ ID NO: 1679625 - DNA, 15 bp, Homo sapiens
ctttcttccttcatt

SEQ ID NO: 1679626 - DNA, 15 bp, Homo sapiens
tttcttccttcattt

SEQ ID NO: 1679627 - DNA, 15 bp, Homo sapiens
ttcttccttcatttc

SEQ ID NO: 1679628 - DNA, 15 bp, Homo sapiens
tcttccttcatttcc

SEQ ID NO: 1679629 - DNA, 15 bp, Homo sapiens
cttccttcatttcct

SEQ ID NO: 1679630 - DNA, 15 bp, Homo sapiens
ttccttcatttcctt

SEQ ID NO: 1679631 - DNA, 15 bp, Homo sapiens
tccttcatttccttt

SEQ ID NO: 1679632 - DNA, 15 bp, Homo sapiens
ccttcatttcctttc

SEQ ID NO: 1679633 - DNA, 15 bp, Homo sapiens
cttcatttcctttct

SEQ ID NO: 1679634 - DNA, 15 bp, Homo sapiens
ttcatttcctttctc

SEQ ID NO: 1679635 - DNA, 15 bp, Homo sapiens
tcatttcctttctct

SEQ ID NO: 1679636 - DNA, 15 bp, Homo sapiens
catttcctttctctc

SEQ ID NO: 1679637 - DNA, 15 bp, Homo sapiens
atttcctttctctct

SEQ ID NO: 1679638 - DNA, 15 bp, Homo sapiens
tttcctttctctctc

SEQ ID NO: 1679639 - DNA, 15 bp, Homo sapiens
ttcctttctctctct

SEQ ID NO: 1679640 - DNA, 15 bp, Homo sapiens
tcctttctctctctc

SEQ ID NO: 1679641 - DNA, 15 bp, Homo sapiens
cctttctctctctcc

SEQ ID NO: 1679642 - DNA, 15 bp, Homo sapiens
ctttctctctctcct

SEQ ID NO: 1679643 - DNA, 15 bp, Homo sapiens
tttctctctctcctt

SEQ ID NO: 1679644 - DNA, 15 bp, Homo sapiens
ttctctctctccttc

SEQ ID NO: 1679645 - DNA, 15 bp, Homo sapiens
tctctctctccttcc

SEQ ID NO: 1679646 - DNA, 15 bp, Homo sapiens
ctctctctccttcct

SEQ ID NO: 1679647 - DNA, 15 bp, Homo sapiens
tctctctccttcctt

SEQ ID NO: 1679648 - DNA, 15 bp, Homo sapiens
ctctctccttccttc

SEQ ID NO: 1679649 - DNA, 15 bp, Homo sapiens
tctctccttccttcc

SEQ ID NO: 1679650 - DNA, 15 bp, Homo sapiens
ctctccttccttcct

SEQ ID NO: 1679651 - DNA, 15 bp, Homo sapiens
tctccttccttcctc

SEQ ID NO: 1679652 - DNA, 15 bp, Homo sapiens
ctccttccttcctcc

SEQ ID NO: 1679653 - DNA, 15 bp, Homo sapiens
tccttccttcctccc

SEQ ID NO: 1679654 - DNA, 15 bp, Homo sapiens
ccttccttcctccct

SEQ ID NO: 1679655 - DNA, 15 bp, Homo sapiens
cttccttcctccctc

SEQ ID NO: 1679656 - DNA, 15 bp, Homo sapiens
ttccttcctccctcc

SEQ ID NO: 1679657 - DNA, 15 bp, Homo sapiens
tccttcctccctccc

SEQ ID NO: 1679658 - DNA, 15 bp, Homo sapiens
ccttcctccctccct

SEQ ID NO: 1679659 - DNA, 15 bp, Homo sapiens
cttcctccctccctc

SEQ ID NO: 1679660 - DNA, 15 bp, Homo sapiens
ttcctccctccctcc

SEQ ID NO: 1679661 - DNA, 15 bp, Homo sapiens
tcctccctccctccc

SEQ ID NO: 1679662 - DNA, 15 bp, Homo sapiens
tcccttccttccttc

SEQ ID NO: 1679663 - DNA, 15 bp, Homo sapiens
cccttccttccttct

SEQ ID NO: 1679664 - DNA, 15 bp, Homo sapiens
tccttccttctttct

SEQ ID NO: 1679665 - DNA, 15 bp, Homo sapiens
ccttccttctttctt

SEQ ID NO: 1679666 - DNA, 15 bp, Homo sapiens
ttccttctttcttcc

SEQ ID NO: 1679667 - DNA, 15 bp, Homo sapiens
tccttctttcttcct

SEQ ID NO: 1679668 - DNA, 15 bp, Homo sapiens
ccttctttcttcctt

SEQ ID NO: 1679669 - DNA, 15 bp, Homo sapiens
cttctttcttccttt

SEQ ID NO: 1679670 - DNA, 15 bp, Homo sapiens
ttctttcttcctttg

SEQ ID NO: 1679671 - DNA, 15 bp, Homo sapiens
tctttcttcctttgt

SEQ ID NO: 1679672 - DNA, 15 bp, Homo sapiens
ctttcttcctttgtt

SEQ ID NO: 1679673 - DNA, 15 bp, Homo sapiens
tttcttcctttgttt

SEQ ID NO: 1679674 - DNA, 15 bp, Homo sapiens
ttcttcctttgtttc

SEQ ID NO: 1679675 - DNA, 15 bp, Homo sapiens
tcttcctttgtttct

SEQ ID NO: 1679676 - DNA, 15 bp, Homo sapiens
cttcctttgtttctc

SEQ ID NO: 1679677 - DNA, 15 bp, Homo sapiens
ttcctttgtttctct

SEQ ID NO: 1679678 - DNA, 15 bp, Homo sapiens
tcctttgtttctctc

SEQ ID NO: 1679679 - DNA, 15 bp, Homo sapiens
cctttgtttctctct

SEQ ID NO: 1679680 - DNA, 15 bp, Homo sapiens
ctttgtttctctctc

SEQ ID NO: 1679681 - DNA, 15 bp, Homo sapiens
tttgtttctctctct

SEQ ID NO: 1679682 - DNA, 15 bp, Homo sapiens
ttgtttctctctctt

SEQ ID NO: 1679683 - DNA, 15 bp, Homo sapiens
tgtttctctctcttt

SEQ ID NO: 1679684 - DNA, 15 bp, Homo sapiens
gtttctctctctttt

SEQ ID NO: 1679685 - DNA, 15 bp, Homo sapiens
tttctctctcttttt

SEQ ID NO: 1679686 - DNA, 15 bp, Homo sapiens
ttctctctctttttt

SEQ ID NO: 1679687 - DNA, 15 bp, Homo sapiens
ctcttttttttttga

SEQ ID NO: 1679688 - DNA, 15 bp, Homo sapiens
ggagtgtagtggtgc

SEQ ID NO: 1679689 - DNA, 15 bp, Homo sapiens
gagtgtagtggtgcg

SEQ ID NO: 1679690 - DNA, 15 bp, Homo sapiens
agtgtagtggtgcga

SEQ ID NO: 1679691 - DNA, 15 bp, Homo sapiens
gtgtagtggtgcgat

SEQ ID NO: 1679692 - DNA, 15 bp, Homo sapiens
tgtagtggtgcgatc

SEQ ID NO: 1679693 - DNA, 15 bp, Homo sapiens
gtagtggtgcgatct

SEQ ID NO: 1679694 - DNA, 15 bp, Homo sapiens
tagtggtgcgatctc

SEQ ID NO: 1679695 - DNA, 15 bp, Homo sapiens
gcgatctcagctcaa

SEQ ID NO: 1679696 - DNA, 15 bp, Homo sapiens
cgatctcagctcaag

SEQ ID NO: 1679697 - DNA, 15 bp, Homo sapiens
gatctcagctcaagg

SEQ ID NO: 1679698 - DNA, 15 bp, Homo sapiens
atctcagctcaaggc

SEQ ID NO: 1679699 - DNA, 15 bp, Homo sapiens
tctcagctcaaggca

SEQ ID NO: 1679700 - DNA, 15 bp, Homo sapiens
ctcagctcaaggcaa

SEQ ID NO: 1679701 - DNA, 15 bp, Homo sapiens
tcagctcaaggcaac

SEQ ID NO: 1679702 - DNA, 15 bp, Homo sapiens
cagctcaaggcaacc

SEQ ID NO: 1679703 - DNA, 15 bp, Homo sapiens
agctcaaggcaacca

SEQ ID NO: 1679704 - DNA, 15 bp, Homo sapiens
gctcaaggcaaccac

SEQ ID NO: 1679705 - DNA, 15 bp, Homo sapiens
ctcaaggcaaccacc

SEQ ID NO: 1679706 - DNA, 15 bp, Homo sapiens
tcaaggcaaccacca

SEQ ID NO: 1679707 - DNA, 15 bp, Homo sapiens
caaggcaaccaccac

SEQ ID NO: 1679708 - DNA, 15 bp, Homo sapiens
aaggcaaccaccacc

SEQ ID NO: 1679709 - DNA, 15 bp, Homo sapiens
aggcaaccaccacct

SEQ ID NO: 1679710 - DNA, 15 bp, Homo sapiens
ggcaaccaccacctc

SEQ ID NO: 1679711 - DNA, 15 bp, Homo sapiens
gcaaccaccacctcc

SEQ ID NO: 1679712 - DNA, 15 bp, Homo sapiens
caaccaccacctcct

SEQ ID NO: 1679713 - DNA, 15 bp, Homo sapiens
aaccaccacctcctg

SEQ ID NO: 1679714 - DNA, 15 bp, Homo sapiens
accaccacctcctgg

SEQ ID NO: 1679715 - DNA, 15 bp, Homo sapiens
ccaccacctcctggg

SEQ ID NO: 1679716 - DNA, 15 bp, Homo sapiens
caccacctcctgggt

SEQ ID NO: 1679717 - DNA, 15 bp, Homo sapiens
accacctcctgggtt

SEQ ID NO: 1679718 - DNA, 15 bp, Homo sapiens
tcctgggttcaaacg

SEQ ID NO: 1679719 - DNA, 15 bp, Homo sapiens
cctgggttcaaacga

SEQ ID NO: 1679720 - DNA, 15 bp, Homo sapiens
ctgggttcaaacgat

SEQ ID NO: 1679721 - DNA, 15 bp, Homo sapiens
tgggttcaaacgatt

SEQ ID NO: 1679722 - DNA, 15 bp, Homo sapiens
gggttcaaacgattc

SEQ ID NO: 1679723 - DNA, 15 bp, Homo sapiens
ggttcaaacgattct

SEQ ID NO: 1679724 - DNA, 15 bp, Homo sapiens
gttcaaacgattctc

SEQ ID NO: 1679725 - DNA, 15 bp, Homo sapiens
ttcaaacgattctct

SEQ ID NO: 1679726 - DNA, 15 bp, Homo sapiens
tcaaacgattctctt

SEQ ID NO: 1679727 - DNA, 15 bp, Homo sapiens
caaacgattctctta

SEQ ID NO: 1679728 - DNA, 15 bp, Homo sapiens
aaacgattctcttag

SEQ ID NO: 1679729 - DNA, 15 bp, Homo sapiens
aacgattctcttagc

SEQ ID NO: 1679730 - DNA, 15 bp, Homo sapiens
acgattctcttagcc

SEQ ID NO: 1679731 - DNA, 15 bp, Homo sapiens
cgattctcttagcct

SEQ ID NO: 1679732 - DNA, 15 bp, Homo sapiens
gattctcttagcctc

SEQ ID NO: 1679733 - DNA, 15 bp, Homo sapiens
attctcttagcctcc

SEQ ID NO: 1679734 - DNA, 15 bp, Homo sapiens
ttctcttagcctcct

SEQ ID NO: 1679735 - DNA, 15 bp, Homo sapiens
tctcttagcctcctg

SEQ ID NO: 1679736 - DNA, 15 bp, Homo sapiens
ctcttagcctcctga

SEQ ID NO: 1679737 - DNA, 15 bp, Homo sapiens
tcttagcctcctgag

SEQ ID NO: 1679738 - DNA, 15 bp, Homo sapiens
gggattacaagcacg

SEQ ID NO: 1679739 - DNA, 15 bp, Homo sapiens
ggattacaagcacgc

SEQ ID NO: 1679740 - DNA, 15 bp, Homo sapiens
gattacaagcacgca

SEQ ID NO: 1679741 - DNA, 15 bp, Homo sapiens
attacaagcacgcac

SEQ ID NO: 1679742 - DNA, 15 bp, Homo sapiens
ttacaagcacgcacc

SEQ ID NO: 1679743 - DNA, 15 bp, Homo sapiens
tacaagcacgcacca

SEQ ID NO: 1679744 - DNA, 15 bp, Homo sapiens
acaagcacgcaccac

SEQ ID NO: 1679745 - DNA, 15 bp, Homo sapiens
caagcacgcaccacc

SEQ ID NO: 1679746 - DNA, 15 bp, Homo sapiens
aagcacgcaccacca

SEQ ID NO: 1679747 - DNA, 15 bp, Homo sapiens
agcacgcaccaccac

SEQ ID NO: 1679748 - DNA, 15 bp, Homo sapiens
gcacgcaccaccacg

SEQ ID NO: 1679749 - DNA, 15 bp, Homo sapiens
cacgcaccaccacgc

SEQ ID NO: 1679750 - DNA, 15 bp, Homo sapiens
acgcaccaccacgcc

SEQ ID NO: 1679751 - DNA, 15 bp, Homo sapiens
cgcaccaccacgcct

SEQ ID NO: 1679752 - DNA, 15 bp, Homo sapiens
tggctagtttttgtg

SEQ ID NO: 1679753 - DNA, 15 bp, Homo sapiens
ggctagtttttgtgt

SEQ ID NO: 1679754 - DNA, 15 bp, Homo sapiens
gctagtttttgtgtg

SEQ ID NO: 1679755 - DNA, 15 bp, Homo sapiens
ctagtttttgtgtgt

SEQ ID NO: 1679756 - DNA, 15 bp, Homo sapiens
tagtttttgtgtgtt

SEQ ID NO: 1679757 - DNA, 15 bp, Homo sapiens
agtttttgtgtgttt

SEQ ID NO: 1679758 - DNA, 15 bp, Homo sapiens
gtttttgtgtgttta

SEQ ID NO: 1679759 - DNA, 15 bp, Homo sapiens
tttttgtgtgtttag

SEQ ID NO: 1679760 - DNA, 15 bp, Homo sapiens
ttttgtgtgtttagt

SEQ ID NO: 1679761 - DNA, 15 bp, Homo sapiens
tttgtgtgtttagta

SEQ ID NO: 1679762 - DNA, 15 bp, Homo sapiens
ttgtgtgtttagtaa

SEQ ID NO: 1679763 - DNA, 15 bp, Homo sapiens
tgtgtgtttagtaaa

SEQ ID NO: 1679764 - DNA, 15 bp, Homo sapiens
gtgtgtttagtaaag

SEQ ID NO: 1679765 - DNA, 15 bp, Homo sapiens
tgtgtttagtaaaga

SEQ ID NO: 1679766 - DNA, 15 bp, Homo sapiens
gtgtttagtaaagat

SEQ ID NO: 1679767 - DNA, 15 bp, Homo sapiens
tgtttagtaaagata

SEQ ID NO: 1679768 - DNA, 15 bp, Homo sapiens
gtttagtaaagatag

SEQ ID NO: 1679769 - DNA, 15 bp, Homo sapiens
tttagtaaagatagg

SEQ ID NO: 1679770 - DNA, 15 bp, Homo sapiens
ttagtaaagataggg

SEQ ID NO: 1679771 - DNA, 15 bp, Homo sapiens
tagtaaagatagggt

SEQ ID NO: 1679772 - DNA, 15 bp, Homo sapiens
agtaaagatagggtt

SEQ ID NO: 1679773 - DNA, 15 bp, Homo sapiens
gtaaagatagggttt

SEQ ID NO: 1679774 - DNA, 15 bp, Homo sapiens
taaagatagggtttc

SEQ ID NO: 1679775 - DNA, 15 bp, Homo sapiens
aaagatagggtttca

SEQ ID NO: 1679776 - DNA, 15 bp, Homo sapiens
aagatagggtttcac

SEQ ID NO: 1679777 - DNA, 15 bp, Homo sapiens
agatagggtttcacc

SEQ ID NO: 1679778 - DNA, 15 bp, Homo sapiens
gatagggtttcacca

SEQ ID NO: 1679779 - DNA, 15 bp, Homo sapiens
atagggtttcaccat

SEQ ID NO: 1679780 - DNA, 15 bp, Homo sapiens
tagggtttcaccatg

SEQ ID NO: 1679781 - DNA, 15 bp, Homo sapiens
tcaccatgttggctg

SEQ ID NO: 1679782 - DNA, 15 bp, Homo sapiens
caccatgttggctga

SEQ ID NO: 1679783 - DNA, 15 bp, Homo sapiens
accatgttggctgag

SEQ ID NO: 1679784 - DNA, 15 bp, Homo sapiens
catgttggctgagct

SEQ ID NO: 1679785 - DNA, 15 bp, Homo sapiens
atgttggctgagctg

SEQ ID NO: 1679786 - DNA, 15 bp, Homo sapiens
tgttggctgagctgg

SEQ ID NO: 1679787 - DNA, 15 bp, Homo sapiens
gttggctgagctggt

SEQ ID NO: 1679788 - DNA, 15 bp, Homo sapiens
ttggctgagctggtc

SEQ ID NO: 1679789 - DNA, 15 bp, Homo sapiens
tggctgagctggtct

SEQ ID NO: 1679790 - DNA, 15 bp, Homo sapiens
ggctgagctggtctt

SEQ ID NO: 1679791 - DNA, 15 bp, Homo sapiens
gctgagctggtcttg

SEQ ID NO: 1679792 - DNA, 15 bp, Homo sapiens
ctgagctggtcttga

SEQ ID NO: 1679793 - DNA, 15 bp, Homo sapiens
tgagctggtcttgaa

SEQ ID NO: 1679794 - DNA, 15 bp, Homo sapiens
gagctggtcttgaac

SEQ ID NO: 1679795 - DNA, 15 bp, Homo sapiens
gacctcaagcaatct

SEQ ID NO: 1679796 - DNA, 15 bp, Homo sapiens
acctcaagcaatctg

SEQ ID NO: 1679797 - DNA, 15 bp, Homo sapiens
cctcaagcaatctgc

SEQ ID NO: 1679798 - DNA, 15 bp, Homo sapiens
ctcaagcaatctgcc

SEQ ID NO: 1679799 - DNA, 15 bp, Homo sapiens
tcaagcaatctgccc

SEQ ID NO: 1679800 - DNA, 15 bp, Homo sapiens
caagcaatctgcccc

SEQ ID NO: 1679801 - DNA, 15 bp, Homo sapiens
aagcaatctgcccca

SEQ ID NO: 1679802 - DNA, 15 bp, Homo sapiens
agcaatctgccccac

SEQ ID NO: 1679803 - DNA, 15 bp, Homo sapiens
gcaatctgccccacc

SEQ ID NO: 1679804 - DNA, 15 bp, Homo sapiens
caatctgccccacct

SEQ ID NO: 1679805 - DNA, 15 bp, Homo sapiens
aatctgccccacctc

SEQ ID NO: 1679806 - DNA, 15 bp, Homo sapiens
atctgccccacctcg

SEQ ID NO: 1679807 - DNA, 15 bp, Homo sapiens
tctgccccacctcgg

SEQ ID NO: 1679808 - DNA, 15 bp, Homo sapiens
ctgccccacctcggc

SEQ ID NO: 1679809 - DNA, 15 bp, Homo sapiens
tgccccacctcggcc

SEQ ID NO: 1679810 - DNA, 15 bp, Homo sapiens
gccccacctcggcct

SEQ ID NO: 1679811 - DNA, 15 bp, Homo sapiens
ccccacctcggcctc

SEQ ID NO: 1679812 - DNA, 15 bp, Homo sapiens
ccacctcggcctcca

SEQ ID NO: 1679813 - DNA, 15 bp, Homo sapiens
cacctcggcctccag

SEQ ID NO: 1679814 - DNA, 15 bp, Homo sapiens
acctcggcctccaga

SEQ ID NO: 1679815 - DNA, 15 bp, Homo sapiens
cctcggcctccagaa

SEQ ID NO: 1679816 - DNA, 15 bp, Homo sapiens
ctcggcctccagaag

SEQ ID NO: 1679817 - DNA, 15 bp, Homo sapiens
tcggcctccagaagc

SEQ ID NO: 1679818 - DNA, 15 bp, Homo sapiens
cggcctccagaagcg

SEQ ID NO: 1679819 - DNA, 15 bp, Homo sapiens
ggcctccagaagcgt

SEQ ID NO: 1679820 - DNA, 15 bp, Homo sapiens
gcctccagaagcgtt

SEQ ID NO: 1679821 - DNA, 15 bp, Homo sapiens
cctccagaagcgttg

SEQ ID NO: 1679822 - DNA, 15 bp, Homo sapiens
ctccagaagcgttgg

SEQ ID NO: 1679823 - DNA, 15 bp, Homo sapiens
tccagaagcgttggg

SEQ ID NO: 1679824 - DNA, 15 bp, Homo sapiens
ccagaagcgttggga

SEQ ID NO: 1679825 - DNA, 15 bp, Homo sapiens
cagaagcgttgggat

SEQ ID NO: 1679826 - DNA, 15 bp, Homo sapiens
agaagcgttgggatt

SEQ ID NO: 1679827 - DNA, 15 bp, Homo sapiens
gaagcgttgggatta

SEQ ID NO: 1679828 - DNA, 15 bp, Homo sapiens
aagcgttgggattac

SEQ ID NO: 1679829 - DNA, 15 bp, Homo sapiens
agcgttgggattaca

SEQ ID NO: 1679830 - DNA, 15 bp, Homo sapiens
gcgttgggattacag

SEQ ID NO: 1679831 - DNA, 15 bp, Homo sapiens
cgttgggattacagg

SEQ ID NO: 1679832 - DNA, 15 bp, Homo sapiens
agccaccacaccggc

SEQ ID NO: 1679833 - DNA, 15 bp, Homo sapiens
gccaccacaccggct

SEQ ID NO: 1679834 - DNA, 15 bp, Homo sapiens
ccaccacaccggctt

SEQ ID NO: 1679835 - DNA, 15 bp, Homo sapiens
caccacaccggcttc

SEQ ID NO: 1679836 - DNA, 15 bp, Homo sapiens
accacaccggcttct

SEQ ID NO: 1679837 - DNA, 15 bp, Homo sapiens
ccacaccggcttctc

SEQ ID NO: 1679838 - DNA, 15 bp, Homo sapiens
cacaccggcttctcc

SEQ ID NO: 1679839 - DNA, 15 bp, Homo sapiens
acaccggcttctcct

SEQ ID NO: 1679840 - DNA, 15 bp, Homo sapiens
caccggcttctcctc

SEQ ID NO: 1679841 - DNA, 15 bp, Homo sapiens
accggcttctcctct

SEQ ID NO: 1679842 - DNA, 15 bp, Homo sapiens
ccggcttctcctctc

SEQ ID NO: 1679843 - DNA, 15 bp, Homo sapiens
cggcttctcctctcc

SEQ ID NO: 1679844 - DNA, 15 bp, Homo sapiens
ggcttctcctctccc

SEQ ID NO: 1679845 - DNA, 15 bp, Homo sapiens
gcttctcctctccct

SEQ ID NO: 1679846 - DNA, 15 bp, Homo sapiens
cttctcctctccctc

SEQ ID NO: 1679847 - DNA, 15 bp, Homo sapiens
ttctcctctccctct

SEQ ID NO: 1679848 - DNA, 15 bp, Homo sapiens
tctcctctccctctc

SEQ ID NO: 1679849 - DNA, 15 bp, Homo sapiens
ctcctctccctctcc

SEQ ID NO: 1679850 - DNA, 15 bp, Homo sapiens
tcctctccctctcct

SEQ ID NO: 1679851 - DNA, 15 bp, Homo sapiens
cctctccctctcctc

SEQ ID NO: 1679852 - DNA, 15 bp, Homo sapiens
ctctccctctcctct

SEQ ID NO: 1679853 - DNA, 15 bp, Homo sapiens
tctccctctcctctt

SEQ ID NO: 1679854 - DNA, 15 bp, Homo sapiens
ctccctctcctcttt

SEQ ID NO: 1679855 - DNA, 15 bp, Homo sapiens
tccctctcctctttc

SEQ ID NO: 1679856 - DNA, 15 bp, Homo sapiens
ccctctcctctttct

SEQ ID NO: 1679857 - DNA, 15 bp, Homo sapiens
cctctcctctttctc

SEQ ID NO: 1679858 - DNA, 15 bp, Homo sapiens
ctctcctctttctcc

SEQ ID NO: 1679859 - DNA, 15 bp, Homo sapiens
tctcctctttctcct

SEQ ID NO: 1679860 - DNA, 15 bp, Homo sapiens
ctcctctttctcctt

SEQ ID NO: 1679861 - DNA, 15 bp, Homo sapiens
tcctctttctccttt

SEQ ID NO: 1679862 - DNA, 15 bp, Homo sapiens
cctctttctcctttt

SEQ ID NO: 1679863 - DNA, 15 bp, Homo sapiens
ctctttctccttttc

SEQ ID NO: 1679864 - DNA, 15 bp, Homo sapiens
tctttctccttttcc

SEQ ID NO: 1679865 - DNA, 15 bp, Homo sapiens
tttctccttttcctt

SEQ ID NO: 1679866 - DNA, 15 bp, Homo sapiens
ttctccttttccttc

SEQ ID NO: 1679867 - DNA, 15 bp, Homo sapiens
tctccttttccttcc

SEQ ID NO: 1679868 - DNA, 15 bp, Homo sapiens
ctccttttccttcct

SEQ ID NO: 1679869 - DNA, 15 bp, Homo sapiens
tccttttccttcctt

SEQ ID NO: 1679870 - DNA, 15 bp, Homo sapiens
ccttttccttccttt

SEQ ID NO: 1679871 - DNA, 15 bp, Homo sapiens
cttttccttcctttc

SEQ ID NO: 1679872 - DNA, 15 bp, Homo sapiens
ttttccttcctttct

SEQ ID NO: 1679873 - DNA, 15 bp, Homo sapiens
tttccttcctttctt

SEQ ID NO: 1679874 - DNA, 15 bp, Homo sapiens
ttccttcctttcttc

SEQ ID NO: 1679875 - DNA, 15 bp, Homo sapiens
tccttcctttcttcc

SEQ ID NO: 1679876 - DNA, 15 bp, Homo sapiens
ccttcctttcttcct

SEQ ID NO: 1679877 - DNA, 15 bp, Homo sapiens
cttcctttcttcctt

SEQ ID NO: 1679878 - DNA, 15 bp, Homo sapiens
ttcctttcttccttc

SEQ ID NO: 1679879 - DNA, 15 bp, Homo sapiens
tcctttcttccttcc

SEQ ID NO: 1679880 - DNA, 15 bp, Homo sapiens
cctttcttccttcct

SEQ ID NO: 1679881 - DNA, 15 bp, Homo sapiens
ctttcttccttcctt

SEQ ID NO: 1679882 - DNA, 15 bp, Homo sapiens
tttcttccttccttc

SEQ ID NO: 1679883 - DNA, 15 bp, Homo sapiens
ttcttccttccttcc

SEQ ID NO: 1679884 - DNA, 15 bp, Homo sapiens
tcttccttccttccc

SEQ ID NO: 1679885 - DNA, 15 bp, Homo sapiens
cttccttccttccct

SEQ ID NO: 1679886 - DNA, 15 bp, Homo sapiens
ttccttccttccctt

SEQ ID NO: 1679887 - DNA, 15 bp, Homo sapiens
tccttccttcccttc

SEQ ID NO: 1679888 - DNA, 15 bp, Homo sapiens
ccttccttcccttcc

SEQ ID NO: 1679889 - DNA, 15 bp, Homo sapiens
ttccttcccttcccc

SEQ ID NO: 1679890 - DNA, 15 bp, Homo sapiens
tccttcccttcccct

SEQ ID NO: 1679891 - DNA, 15 bp, Homo sapiens
ccttcccttcccctt

SEQ ID NO: 1679892 - DNA, 15 bp, Homo sapiens
cttcccttccccttc

SEQ ID NO: 1679893 - DNA, 15 bp, Homo sapiens
ttcccttccccttcc

SEQ ID NO: 1679894 - DNA, 15 bp, Homo sapiens
tcccttccccttcct

SEQ ID NO: 1679895 - DNA, 15 bp, Homo sapiens
cccttccccttcctt

SEQ ID NO: 1679896 - DNA, 15 bp, Homo sapiens
ccttccccttccttc

SEQ ID NO: 1679897 - DNA, 15 bp, Homo sapiens
cttccccttccttcc

SEQ ID NO: 1679898 - DNA, 15 bp, Homo sapiens
ttccccttccttcct

SEQ ID NO: 1679899 - DNA, 15 bp, Homo sapiens
tccccttccttcctt

SEQ ID NO: 1679900 - DNA, 15 bp, Homo sapiens
ccccttccttccttc

SEQ ID NO: 1679901 - DNA, 15 bp, Homo sapiens
tccttccttccttca

SEQ ID NO: 1679902 - DNA, 15 bp, Homo sapiens
ccttccttccttcat

SEQ ID NO: 1679903 - DNA, 15 bp, Homo sapiens
cttccttccttcatt

SEQ ID NO: 1679904 - DNA, 15 bp, Homo sapiens
ttccttccttcattc

SEQ ID NO: 1679905 - DNA, 15 bp, Homo sapiens
tccttccttcattct

SEQ ID NO: 1679906 - DNA, 15 bp, Homo sapiens
ccttccttcattctt

SEQ ID NO: 1679907 - DNA, 15 bp, Homo sapiens
cttccttcattcttt

SEQ ID NO: 1679908 - DNA, 15 bp, Homo sapiens
ttccttcattctttc

SEQ ID NO: 1679909 - DNA, 15 bp, Homo sapiens
tccttcattctttct

SEQ ID NO: 1679910 - DNA, 15 bp, Homo sapiens
ccttcattctttctt

SEQ ID NO: 1679911 - DNA, 15 bp, Homo sapiens
cttcattctttcttc

SEQ ID NO: 1679912 - DNA, 15 bp, Homo sapiens
ttcattctttcttcc

SEQ ID NO: 1679913 - DNA, 15 bp, Homo sapiens
tcattctttcttccc

SEQ ID NO: 1679914 - DNA, 15 bp, Homo sapiens
cattctttcttcccc

SEQ ID NO: 1679915 - DNA, 15 bp, Homo sapiens
attctttcttccccc

SEQ ID NO: 1679916 - DNA, 15 bp, Homo sapiens
ttctttcttcccccc

SEQ ID NO: 1679917 - DNA, 15 bp, Homo sapiens
tctttcttccccccg

SEQ ID NO: 1679918 - DNA, 15 bp, Homo sapiens
ctttcttccccccgc

SEQ ID NO: 1679919 - DNA, 15 bp, Homo sapiens
tttcttccccccgct

SEQ ID NO: 1679920 - DNA, 15 bp, Homo sapiens
ttcttccccccgctc

SEQ ID NO: 1679921 - DNA, 15 bp, Homo sapiens
tcttccccccgctcc

SEQ ID NO: 1679922 - DNA, 15 bp, Homo sapiens
cttccccccgctccc

SEQ ID NO: 1679923 - DNA, 15 bp, Homo sapiens
ttccccccgctcccc

SEQ ID NO: 1679924 - DNA, 15 bp, Homo sapiens
tccccccgctccccc

SEQ ID NO: 1679925 - DNA, 15 bp, Homo sapiens
ccccccgctcccccc

SEQ ID NO: 1679926 - DNA, 15 bp, Homo sapiens
cccccgctcccccct

SEQ ID NO: 1679927 - DNA, 15 bp, Homo sapiens
ccccgctcccccctc

SEQ ID NO: 1679928 - DNA, 15 bp, Homo sapiens
cccgctcccccctct

SEQ ID NO: 1679929 - DNA, 15 bp, Homo sapiens
ccgctcccccctctt

SEQ ID NO: 1679930 - DNA, 15 bp, Homo sapiens
cgctcccccctcttt

SEQ ID NO: 1679931 - DNA, 15 bp, Homo sapiens
gctcccccctctttt

SEQ ID NO: 1679932 - DNA, 15 bp, Homo sapiens
ctcccccctcttttt

SEQ ID NO: 1679933 - DNA, 15 bp, Homo sapiens
tcccccctctttttt

SEQ ID NO: 1679934 - DNA, 15 bp, Homo sapiens
cccccctcttttttt

SEQ ID NO: 1679935 - DNA, 15 bp, Homo sapiens
ccccctctttttttt

SEQ ID NO: 1679936 - DNA, 15 bp, Homo sapiens
cccctcttttttttt

SEQ ID NO: 1679937 - DNA, 15 bp, Homo sapiens
ccctctttttttttg

SEQ ID NO: 1679938 - DNA, 15 bp, Homo sapiens
cctctttttttttga

SEQ ID NO: 1679939 - DNA, 15 bp, Homo sapiens
gacagggtcttgctt

SEQ ID NO: 1679940 - DNA, 15 bp, Homo sapiens
acagggtcttgcttt

SEQ ID NO: 1679941 - DNA, 15 bp, Homo sapiens
cagggtcttgctttg

SEQ ID NO: 1679942 - DNA, 15 bp, Homo sapiens
agggtcttgctttgt

SEQ ID NO: 1679943 - DNA, 15 bp, Homo sapiens
gggtcttgctttgtc

SEQ ID NO: 1679944 - DNA, 15 bp, Homo sapiens
ggtcttgctttgtca

SEQ ID NO: 1679945 - DNA, 15 bp, Homo sapiens
gtcttgctttgtcac

SEQ ID NO: 1679946 - DNA, 15 bp, Homo sapiens
tcttgctttgtcacc

SEQ ID NO: 1679947 - DNA, 15 bp, Homo sapiens
cttgctttgtcaccc

SEQ ID NO: 1679948 - DNA, 15 bp, Homo sapiens
ttgctttgtcaccca

SEQ ID NO: 1679949 - DNA, 15 bp, Homo sapiens
tgctttgtcacccag

SEQ ID NO: 1679950 - DNA, 15 bp, Homo sapiens
gctttgtcacccagg

SEQ ID NO: 1679951 - DNA, 15 bp, Homo sapiens
cacccaggctggagc

SEQ ID NO: 1679952 - DNA, 15 bp, Homo sapiens
acccaggctggagcg

SEQ ID NO: 1679953 - DNA, 15 bp, Homo sapiens
aggctggagcgcagt

SEQ ID NO: 1679954 - DNA, 15 bp, Homo sapiens
ggctggagcgcagtg

SEQ ID NO: 1679955 - DNA, 15 bp, Homo sapiens
gctggagcgcagtgg

SEQ ID NO: 1679956 - DNA, 15 bp, Homo sapiens
gagcgcagtggtgca

SEQ ID NO: 1679957 - DNA, 15 bp, Homo sapiens
agcgcagtggtgcaa

SEQ ID NO: 1679958 - DNA, 15 bp, Homo sapiens
gcgcagtggtgcaat

SEQ ID NO: 1679959 - DNA, 15 bp, Homo sapiens
cgcagtggtgcaatc

SEQ ID NO: 1679960 - DNA, 15 bp, Homo sapiens
agtggtgcaatccta

SEQ ID NO: 1679961 - DNA, 15 bp, Homo sapiens
gtggtgcaatcctag

SEQ ID NO: 1679962 - DNA, 15 bp, Homo sapiens
tggtgcaatcctagc

SEQ ID NO: 1679963 - DNA, 15 bp, Homo sapiens
ggtgcaatcctagct

SEQ ID NO: 1679964 - DNA, 15 bp, Homo sapiens
gtgcaatcctagctc

SEQ ID NO: 1679965 - DNA, 15 bp, Homo sapiens
tgcaatcctagctca

SEQ ID NO: 1679966 - DNA, 15 bp, Homo sapiens
gcaatcctagctcac

SEQ ID NO: 1679967 - DNA, 15 bp, Homo sapiens
caatcctagctcact

SEQ ID NO: 1679968 - DNA, 15 bp, Homo sapiens
aatcctagctcactg

SEQ ID NO: 1679969 - DNA, 15 bp, Homo sapiens
atcctagctcactgc

SEQ ID NO: 1679970 - DNA, 15 bp, Homo sapiens
tcctagctcactgca

SEQ ID NO: 1679971 - DNA, 15 bp, Homo sapiens
cctagctcactgcag

SEQ ID NO: 1679972 - DNA, 15 bp, Homo sapiens
ctagctcactgcagc

SEQ ID NO: 1679973 - DNA, 15 bp, Homo sapiens
cagccttgacctccc

SEQ ID NO: 1679974 - DNA, 15 bp, Homo sapiens
agccttgacctccca

SEQ ID NO: 1679975 - DNA, 15 bp, Homo sapiens
gccttgacctcccag

SEQ ID NO: 1679976 - DNA, 15 bp, Homo sapiens
cttgacctcccaggg

SEQ ID NO: 1679977 - DNA, 15 bp, Homo sapiens
ttgacctcccagggt

SEQ ID NO: 1679978 - DNA, 15 bp, Homo sapiens
tgacctcccagggtt

SEQ ID NO: 1679979 - DNA, 15 bp, Homo sapiens
gacctcccagggttg

SEQ ID NO: 1679980 - DNA, 15 bp, Homo sapiens
acctcccagggttga

SEQ ID NO: 1679981 - DNA, 15 bp, Homo sapiens
cctcccagggttgag

SEQ ID NO: 1679982 - DNA, 15 bp, Homo sapiens
ctcccagggttgagg

SEQ ID NO: 1679983 - DNA, 15 bp, Homo sapiens
tcccagggttgaggc

SEQ ID NO: 1679984 - DNA, 15 bp, Homo sapiens
cccagggttgaggca

SEQ ID NO: 1679985 - DNA, 15 bp, Homo sapiens
ccagggttgaggcaa

SEQ ID NO: 1679986 - DNA, 15 bp, Homo sapiens
cagggttgaggcaat

SEQ ID NO: 1679987 - DNA, 15 bp, Homo sapiens
agggttgaggcaatc

SEQ ID NO: 1679988 - DNA, 15 bp, Homo sapiens
gggttgaggcaatcc

SEQ ID NO: 1679989 - DNA, 15 bp, Homo sapiens
ggttgaggcaatcct

SEQ ID NO: 1679990 - DNA, 15 bp, Homo sapiens
gttgaggcaatcctc

SEQ ID NO: 1679991 - DNA, 15 bp, Homo sapiens
ttgaggcaatcctcc

SEQ ID NO: 1679992 - DNA, 15 bp, Homo sapiens
tgaggcaatcctccc

SEQ ID NO: 1679993 - DNA, 15 bp, Homo sapiens
gaggcaatcctccca

SEQ ID NO: 1679994 - DNA, 15 bp, Homo sapiens
aggcaatcctcccac

SEQ ID NO: 1679995 - DNA, 15 bp, Homo sapiens
ggcaatcctcccacc

SEQ ID NO: 1679996 - DNA, 15 bp, Homo sapiens
gcctcccaagtagcc

SEQ ID NO: 1679997 - DNA, 15 bp, Homo sapiens
cctcccaagtagcca

SEQ ID NO: 1679998 - DNA, 15 bp, Homo sapiens
ctcccaagtagccag

SEQ ID NO: 1679999 - DNA, 15 bp, Homo sapiens
tcccaagtagccagg

SEQ ID NO: 1680000 - DNA, 15 bp, Homo sapiens
cccaagtagccagga

SEQ ID NO: 1680001 - DNA, 15 bp, Homo sapiens
ccaagtagccaggac

SEQ ID NO: 1680002 - DNA, 15 bp, Homo sapiens
caagtagccaggact

SEQ ID NO: 1680003 - DNA, 15 bp, Homo sapiens
aagtagccaggacta

SEQ ID NO: 1680004 - DNA, 15 bp, Homo sapiens
agtagccaggactac

SEQ ID NO: 1680005 - DNA, 15 bp, Homo sapiens
gtagccaggactacg

SEQ ID NO: 1680006 - DNA, 15 bp, Homo sapiens
tagccaggactacga

SEQ ID NO: 1680007 - DNA, 15 bp, Homo sapiens
agccaggactacgag

SEQ ID NO: 1680008 - DNA, 15 bp, Homo sapiens
gccaggactacgagt

SEQ ID NO: 1680009 - DNA, 15 bp, Homo sapiens
ccaggactacgagtg

SEQ ID NO: 1680010 - DNA, 15 bp, Homo sapiens
caggactacgagtgc

SEQ ID NO: 1680011 - DNA, 15 bp, Homo sapiens
aggactacgagtgca

SEQ ID NO: 1680012 - DNA, 15 bp, Homo sapiens
ggactacgagtgcac

SEQ ID NO: 1680013 - DNA, 15 bp, Homo sapiens
gactacgagtgcacg

SEQ ID NO: 1680014 - DNA, 15 bp, Homo sapiens
actacgagtgcacgc

SEQ ID NO: 1680015 - DNA, 15 bp, Homo sapiens
ctacgagtgcacgcc

SEQ ID NO: 1680016 - DNA, 15 bp, Homo sapiens
tacgagtgcacgcca

SEQ ID NO: 1680017 - DNA, 15 bp, Homo sapiens
acgagtgcacgccac

SEQ ID NO: 1680018 - DNA, 15 bp, Homo sapiens
cgagtgcacgccacc

SEQ ID NO: 1680019 - DNA, 15 bp, Homo sapiens
gagtgcacgccacca

SEQ ID NO: 1680020 - DNA, 15 bp, Homo sapiens
agtgcacgccaccat

SEQ ID NO: 1680021 - DNA, 15 bp, Homo sapiens
tggctaattttttag

SEQ ID NO: 1680022 - DNA, 15 bp, Homo sapiens
ggctaattttttagt

SEQ ID NO: 1680023 - DNA, 15 bp, Homo sapiens
gctaattttttagtt

SEQ ID NO: 1680024 - DNA, 15 bp, Homo sapiens
ctaattttttagttt

SEQ ID NO: 1680025 - DNA, 15 bp, Homo sapiens
taattttttagtttt

SEQ ID NO: 1680026 - DNA, 15 bp, Homo sapiens
aattttttagttttt

SEQ ID NO: 1680027 - DNA, 15 bp, Homo sapiens
attttttagtttttt

SEQ ID NO: 1680028 - DNA, 15 bp, Homo sapiens
ttttttagttttttt

SEQ ID NO: 1680029 - DNA, 15 bp, Homo sapiens
tttttagtttttttt

SEQ ID NO: 1680030 - DNA, 15 bp, Homo sapiens
ttttagttttttttt

SEQ ID NO: 1680031 - DNA, 15 bp, Homo sapiens
tttagtttttttttg

SEQ ID NO: 1680032 - DNA, 15 bp, Homo sapiens
ttagtttttttttgt

SEQ ID NO: 1680033 - DNA, 15 bp, Homo sapiens
tagtttttttttgta

SEQ ID NO: 1680034 - DNA, 15 bp, Homo sapiens
agtttttttttgtag

SEQ ID NO: 1680035 - DNA, 15 bp, Homo sapiens
gtttttttttgtaga

SEQ ID NO: 1680036 - DNA, 15 bp, Homo sapiens
tttgtagagacagga

SEQ ID NO: 1680037 - DNA, 15 bp, Homo sapiens
ttgtagagacaggag

SEQ ID NO: 1680038 - DNA, 15 bp, Homo sapiens
tgtagagacaggagt

SEQ ID NO: 1680039 - DNA, 15 bp, Homo sapiens
gtagagacaggagtc

SEQ ID NO: 1680040 - DNA, 15 bp, Homo sapiens
tagagacaggagtct

SEQ ID NO: 1680041 - DNA, 15 bp, Homo sapiens
agagacaggagtctc

SEQ ID NO: 1680042 - DNA, 15 bp, Homo sapiens
gagacaggagtctca

SEQ ID NO: 1680043 - DNA, 15 bp, Homo sapiens
agacaggagtctcac

SEQ ID NO: 1680044 - DNA, 15 bp, Homo sapiens
gacaggagtctcact

SEQ ID NO: 1680045 - DNA, 15 bp, Homo sapiens
acaggagtctcactg

SEQ ID NO: 1680046 - DNA, 15 bp, Homo sapiens
caggagtctcactgt

SEQ ID NO: 1680047 - DNA, 15 bp, Homo sapiens
aggagtctcactgtg

SEQ ID NO: 1680048 - DNA, 15 bp, Homo sapiens
ggagtctcactgtgt

SEQ ID NO: 1680049 - DNA, 15 bp, Homo sapiens
gagtctcactgtgtt

SEQ ID NO: 1680050 - DNA, 15 bp, Homo sapiens
agtctcactgtgttg

SEQ ID NO: 1680051 - DNA, 15 bp, Homo sapiens
gtctcactgtgttgt

SEQ ID NO: 1680052 - DNA, 15 bp, Homo sapiens
tctcactgtgttgtc

SEQ ID NO: 1680053 - DNA, 15 bp, Homo sapiens
ctcactgtgttgtcc

SEQ ID NO: 1680054 - DNA, 15 bp, Homo sapiens
tcactgtgttgtcca

SEQ ID NO: 1680055 - DNA, 15 bp, Homo sapiens
cactgtgttgtccag

SEQ ID NO: 1680056 - DNA, 15 bp, Homo sapiens
actgtgttgtccagg

SEQ ID NO: 1680057 - DNA, 15 bp, Homo sapiens
ggtcttgaactcctc

SEQ ID NO: 1680058 - DNA, 15 bp, Homo sapiens
gtcttgaactcctcg

SEQ ID NO: 1680059 - DNA, 15 bp, Homo sapiens
tcttgaactcctcgg

SEQ ID NO: 1680060 - DNA, 15 bp, Homo sapiens
cttgaactcctcggt

SEQ ID NO: 1680061 - DNA, 15 bp, Homo sapiens
ttgaactcctcggtt

SEQ ID NO: 1680062 - DNA, 15 bp, Homo sapiens
tgaactcctcggttc

SEQ ID NO: 1680063 - DNA, 15 bp, Homo sapiens
gaactcctcggttca

SEQ ID NO: 1680064 - DNA, 15 bp, Homo sapiens
aactcctcggttcaa

SEQ ID NO: 1680065 - DNA, 15 bp, Homo sapiens
actcctcggttcaag

SEQ ID NO: 1680066 - DNA, 15 bp, Homo sapiens
ctcctcggttcaagc

SEQ ID NO: 1680067 - DNA, 15 bp, Homo sapiens
tcctcggttcaagca

SEQ ID NO: 1680068 - DNA, 15 bp, Homo sapiens
cctcggttcaagcaa

SEQ ID NO: 1680069 - DNA, 15 bp, Homo sapiens
ctcggttcaagcaat

SEQ ID NO: 1680070 - DNA, 15 bp, Homo sapiens
tcggttcaagcaatc

SEQ ID NO: 1680071 - DNA, 15 bp, Homo sapiens
cggttcaagcaatct

SEQ ID NO: 1680072 - DNA, 15 bp, Homo sapiens
ggttcaagcaatctt

SEQ ID NO: 1680073 - DNA, 15 bp, Homo sapiens
gttcaagcaatcttc

SEQ ID NO: 1680074 - DNA, 15 bp, Homo sapiens
ttcaagcaatcttcc

SEQ ID NO: 1680075 - DNA, 15 bp, Homo sapiens
tcaagcaatcttcct

SEQ ID NO: 1680076 - DNA, 15 bp, Homo sapiens
caagcaatcttcctg

SEQ ID NO: 1680077 - DNA, 15 bp, Homo sapiens
aagcaatcttcctgc

SEQ ID NO: 1680078 - DNA, 15 bp, Homo sapiens
agcaatcttcctgcc

SEQ ID NO: 1680079 - DNA, 15 bp, Homo sapiens
gcaatcttcctgcct

SEQ ID NO: 1680080 - DNA, 15 bp, Homo sapiens
caatcttcctgcctt

SEQ ID NO: 1680081 - DNA, 15 bp, Homo sapiens
aatcttcctgccttg

SEQ ID NO: 1680082 - DNA, 15 bp, Homo sapiens
atcttcctgccttgg

SEQ ID NO: 1680083 - DNA, 15 bp, Homo sapiens
tcttcctgccttggc

SEQ ID NO: 1680084 - DNA, 15 bp, Homo sapiens
cttcctgccttggcc

SEQ ID NO: 1680085 - DNA, 15 bp, Homo sapiens
ttcctgccttggcct

SEQ ID NO: 1680086 - DNA, 15 bp, Homo sapiens
ctgccttggcctcct

SEQ ID NO: 1680087 - DNA, 15 bp, Homo sapiens
tgccttggcctccta

SEQ ID NO: 1680088 - DNA, 15 bp, Homo sapiens
gccttggcctcctaa

SEQ ID NO: 1680089 - DNA, 15 bp, Homo sapiens
ccttggcctcctaaa

SEQ ID NO: 1680090 - DNA, 15 bp, Homo sapiens
cttggcctcctaaag

SEQ ID NO: 1680091 - DNA, 15 bp, Homo sapiens
ttggcctcctaaagt

SEQ ID NO: 1680092 - DNA, 15 bp, Homo sapiens
tggcctcctaaagtg

SEQ ID NO: 1680093 - DNA, 15 bp, Homo sapiens
ggcgtgagccacagc

SEQ ID NO: 1680094 - DNA, 15 bp, Homo sapiens
gcgtgagccacagca

SEQ ID NO: 1680095 - DNA, 15 bp, Homo sapiens
cgtgagccacagcac

SEQ ID NO: 1680096 - DNA, 15 bp, Homo sapiens
gtgagccacagcacc

SEQ ID NO: 1680097 - DNA, 15 bp, Homo sapiens
tgagccacagcacct

SEQ ID NO: 1680098 - DNA, 15 bp, Homo sapiens
gagccacagcacctg

SEQ ID NO: 1680099 - DNA, 15 bp, Homo sapiens
agccacagcacctgg

SEQ ID NO: 1680100 - DNA, 15 bp, Homo sapiens
gccacagcacctggc

SEQ ID NO: 1680101 - DNA, 15 bp, Homo sapiens
ccacagcacctggcc

SEQ ID NO: 1680102 - DNA, 15 bp, Homo sapiens
cacagcacctggccc

SEQ ID NO: 1680103 - DNA, 15 bp, Homo sapiens
acagcacctggccca

SEQ ID NO: 1680104 - DNA, 15 bp, Homo sapiens
cagcacctggcccag

SEQ ID NO: 1680105 - DNA, 15 bp, Homo sapiens
agcacctggcccagt

SEQ ID NO: 1680106 - DNA, 15 bp, Homo sapiens
gcacctggcccagtc

SEQ ID NO: 1680107 - DNA, 15 bp, Homo sapiens
cacctggcccagtcc

SEQ ID NO: 1680108 - DNA, 15 bp, Homo sapiens
acctggcccagtcca

SEQ ID NO: 1680109 - DNA, 15 bp, Homo sapiens
cctggcccagtccac

SEQ ID NO: 1680110 - DNA, 15 bp, Homo sapiens
ctggcccagtccaca

SEQ ID NO: 1680111 - DNA, 15 bp, Homo sapiens
tggcccagtccacat

SEQ ID NO: 1680112 - DNA, 15 bp, Homo sapiens
ggcccagtccacatt

SEQ ID NO: 1680113 - DNA, 15 bp, Homo sapiens
gcccagtccacattt

SEQ ID NO: 1680114 - DNA, 15 bp, Homo sapiens
cccagtccacatttc

SEQ ID NO: 1680115 - DNA, 15 bp, Homo sapiens
ccagtccacatttct

SEQ ID NO: 1680116 - DNA, 15 bp, Homo sapiens
cagtccacatttcta

SEQ ID NO: 1680117 - DNA, 15 bp, Homo sapiens
agtccacatttctaa

SEQ ID NO: 1680118 - DNA, 15 bp, Homo sapiens
gtccacatttctaag

SEQ ID NO: 1680119 - DNA, 15 bp, Homo sapiens
tccacatttctaagt

SEQ ID NO: 1680120 - DNA, 15 bp, Homo sapiens
ccacatttctaagta

SEQ ID NO: 1680121 - DNA, 15 bp, Homo sapiens
cacatttctaagtaa

SEQ ID NO: 1680122 - DNA, 15 bp, Homo sapiens
acatttctaagtaaa

SEQ ID NO: 1680123 - DNA, 15 bp, Homo sapiens
catttctaagtaaat

SEQ ID NO: 1680124 - DNA, 15 bp, Homo sapiens
atttctaagtaaata

SEQ ID NO: 1680125 - DNA, 15 bp, Homo sapiens
tttctaagtaaatat

SEQ ID NO: 1680126 - DNA, 15 bp, Homo sapiens
ttctaagtaaatatg

SEQ ID NO: 1680127 - DNA, 15 bp, Homo sapiens
tctaagtaaatatgg

SEQ ID NO: 1680128 - DNA, 15 bp, Homo sapiens
ctaagtaaatatggg

SEQ ID NO: 1680129 - DNA, 15 bp, Homo sapiens
taagtaaatatggga

SEQ ID NO: 1680130 - DNA, 15 bp, Homo sapiens
aagtaaatatgggag

SEQ ID NO: 1680131 - DNA, 15 bp, Homo sapiens
agtaaatatgggagg

SEQ ID NO: 1680132 - DNA, 15 bp, Homo sapiens
gtaaatatgggaggc

SEQ ID NO: 1680133 - DNA, 15 bp, Homo sapiens
taaatatgggaggcc

SEQ ID NO: 1680134 - DNA, 15 bp, Homo sapiens
aaatatgggaggcca

SEQ ID NO: 1680135 - DNA, 15 bp, Homo sapiens
aatatgggaggccag

SEQ ID NO: 1680136 - DNA, 15 bp, Homo sapiens
atatgggaggccagc

SEQ ID NO: 1680137 - DNA, 15 bp, Homo sapiens
tatgggaggccagcc

SEQ ID NO: 1680138 - DNA, 15 bp, Homo sapiens
atgggaggccagcca

SEQ ID NO: 1680139 - DNA, 15 bp, Homo sapiens
tgggaggccagccag

SEQ ID NO: 1680140 - DNA, 15 bp, Homo sapiens
gggaggccagccagg

SEQ ID NO: 1680141 - DNA, 15 bp, Homo sapiens
ggaggccagccaggt

SEQ ID NO: 1680142 - DNA, 15 bp, Homo sapiens
gaggccagccaggtg

SEQ ID NO: 1680143 - DNA, 15 bp, Homo sapiens
aggccagccaggtgc

SEQ ID NO: 1680144 - DNA, 15 bp, Homo sapiens
ggccagccaggtgca

SEQ ID NO: 1680145 - DNA, 15 bp, Homo sapiens
gccagccaggtgcag

SEQ ID NO: 1680146 - DNA, 15 bp, Homo sapiens
ccagccaggtgcagt

SEQ ID NO: 1680147 - DNA, 15 bp, Homo sapiens
cagccaggtgcagtg

SEQ ID NO: 1680148 - DNA, 15 bp, Homo sapiens
agccaggtgcagtgg

SEQ ID NO: 1680149 - DNA, 15 bp, Homo sapiens
aggtgcagtggctgt

SEQ ID NO: 1680150 - DNA, 15 bp, Homo sapiens
ggtgcagtggctgta

SEQ ID NO: 1680151 - DNA, 15 bp, Homo sapiens
gtgcagtggctgtaa

SEQ ID NO: 1680152 - DNA, 15 bp, Homo sapiens
tgcagtggctgtaat

SEQ ID NO: 1680153 - DNA, 15 bp, Homo sapiens
gcagtggctgtaatc

SEQ ID NO: 1680154 - DNA, 15 bp, Homo sapiens
cagtggctgtaatcc

SEQ ID NO: 1680155 - DNA, 15 bp, Homo sapiens
agtggctgtaatccc

SEQ ID NO: 1680156 - DNA, 15 bp, Homo sapiens
gtggctgtaatccca

SEQ ID NO: 1680157 - DNA, 15 bp, Homo sapiens
gaggccgaggtgggt

SEQ ID NO: 1680158 - DNA, 15 bp, Homo sapiens
aggccgaggtgggtg

SEQ ID NO: 1680159 - DNA, 15 bp, Homo sapiens
ggccgaggtgggtgg

SEQ ID NO: 1680160 - DNA, 15 bp, Homo sapiens
gagttccagaccagt

SEQ ID NO: 1680161 - DNA, 15 bp, Homo sapiens
agttccagaccagtc

SEQ ID NO: 1680162 - DNA, 15 bp, Homo sapiens
gttccagaccagtct

SEQ ID NO: 1680163 - DNA, 15 bp, Homo sapiens
ttccagaccagtctg

SEQ ID NO: 1680164 - DNA, 15 bp, Homo sapiens
tccagaccagtctgg

SEQ ID NO: 1680165 - DNA, 15 bp, Homo sapiens
ccagaccagtctggc

SEQ ID NO: 1680166 - DNA, 15 bp, Homo sapiens
cagaccagtctggcc

SEQ ID NO: 1680167 - DNA, 15 bp, Homo sapiens
gtgaaatcccgtctt

SEQ ID NO: 1680168 - DNA, 15 bp, Homo sapiens
tgaaatcccgtcttt

SEQ ID NO: 1680169 - DNA, 15 bp, Homo sapiens
gaaatcccgtcttta

SEQ ID NO: 1680170 - DNA, 15 bp, Homo sapiens
aaatcccgtctttac

SEQ ID NO: 1680171 - DNA, 15 bp, Homo sapiens
aatcccgtctttact

SEQ ID NO: 1680172 - DNA, 15 bp, Homo sapiens
atcccgtctttacta

SEQ ID NO: 1680173 - DNA, 15 bp, Homo sapiens
tcccgtctttactaa

SEQ ID NO: 1680174 - DNA, 15 bp, Homo sapiens
cccgtctttactaaa

SEQ ID NO: 1680175 - DNA, 15 bp, Homo sapiens
ccgtctttactaaaa

SEQ ID NO: 1680176 - DNA, 15 bp, Homo sapiens
cgtctttactaaaaa

SEQ ID NO: 1680177 - DNA, 15 bp, Homo sapiens
gtctttactaaaaat

SEQ ID NO: 1680178 - DNA, 15 bp, Homo sapiens
gaggctgaggcggca

SEQ ID NO: 1680179 - DNA, 15 bp, Homo sapiens
aggctgaggcggcag

SEQ ID NO: 1680180 - DNA, 15 bp, Homo sapiens
ggctgaggcggcaga

SEQ ID NO: 1680181 - DNA, 15 bp, Homo sapiens
gctgaggcggcagat

SEQ ID NO: 1680182 - DNA, 15 bp, Homo sapiens
ctgaggcggcagatc

SEQ ID NO: 1680183 - DNA, 15 bp, Homo sapiens
tgaggcggcagatca

SEQ ID NO: 1680184 - DNA, 15 bp, Homo sapiens
gaggcggcagatcac

SEQ ID NO: 1680185 - DNA, 15 bp, Homo sapiens
aggcggcagatcaca

SEQ ID NO: 1680186 - DNA, 15 bp, Homo sapiens
ggcggcagatcacaa

SEQ ID NO: 1680187 - DNA, 15 bp, Homo sapiens
gcggcagatcacaag

SEQ ID NO: 1680188 - DNA, 15 bp, Homo sapiens
cggcagatcacaagg

SEQ ID NO: 1680189 - DNA, 15 bp, Homo sapiens
atacggtgaaacccg

SEQ ID NO: 1680190 - DNA, 15 bp, Homo sapiens
tacggtgaaacccgt

SEQ ID NO: 1680191 - DNA, 15 bp, Homo sapiens
acggtgaaacccgtc

SEQ ID NO: 1680192 - DNA, 15 bp, Homo sapiens
cggtgaaacccgtct

SEQ ID NO: 1680193 - DNA, 15 bp, Homo sapiens
ggtgaaacccgtctc

SEQ ID NO: 1680194 - DNA, 15 bp, Homo sapiens
gtgaaacccgtctct

SEQ ID NO: 1680195 - DNA, 15 bp, Homo sapiens
tgaaacccgtctcta

SEQ ID NO: 1680196 - DNA, 15 bp, Homo sapiens
gaaacccgtctctat

SEQ ID NO: 1680197 - DNA, 15 bp, Homo sapiens
aaacccgtctctatt

SEQ ID NO: 1680198 - DNA, 15 bp, Homo sapiens
aacccgtctctatta

SEQ ID NO: 1680199 - DNA, 15 bp, Homo sapiens
acccgtctctattaa

SEQ ID NO: 1680200 - DNA, 15 bp, Homo sapiens
ggcatggtggcagga

SEQ ID NO: 1680201 - DNA, 15 bp, Homo sapiens
gcatggtggcaggag

SEQ ID NO: 1680202 - DNA, 15 bp, Homo sapiens
catggtggcaggagc

SEQ ID NO: 1680203 - DNA, 15 bp, Homo sapiens
atggtggcaggagcc

SEQ ID NO: 1680204 - DNA, 15 bp, Homo sapiens
tggtggcaggagcct

SEQ ID NO: 1680205 - DNA, 15 bp, Homo sapiens
ggtggcaggagcctg

SEQ ID NO: 1680206 - DNA, 15 bp, Homo sapiens
gtggcaggagcctgt

SEQ ID NO: 1680207 - DNA, 15 bp, Homo sapiens
tggcaggagcctgta

SEQ ID NO: 1680208 - DNA, 15 bp, Homo sapiens
ggcaggagcctgtag

SEQ ID NO: 1680209 - DNA, 15 bp, Homo sapiens
gcaggagcctgtagt

SEQ ID NO: 1680210 - DNA, 15 bp, Homo sapiens
caggagcctgtagtc

SEQ ID NO: 1680211 - DNA, 15 bp, Homo sapiens
aggagcctgtagtcc

SEQ ID NO: 1680212 - DNA, 15 bp, Homo sapiens
ggagcctgtagtccc

SEQ ID NO: 1680213 - DNA, 15 bp, Homo sapiens
caggagaatggtgta

SEQ ID NO: 1680214 - DNA, 15 bp, Homo sapiens
aggagaatggtgtaa

SEQ ID NO: 1680215 - DNA, 15 bp, Homo sapiens
ggagaatggtgtaaa

SEQ ID NO: 1680216 - DNA, 15 bp, Homo sapiens
gagaatggtgtaaac

SEQ ID NO: 1680217 - DNA, 15 bp, Homo sapiens
agaatggtgtaaacc

SEQ ID NO: 1680218 - DNA, 15 bp, Homo sapiens
gaatggtgtaaaccc

SEQ ID NO: 1680219 - DNA, 15 bp, Homo sapiens
aatggtgtaaacccg

SEQ ID NO: 1680220 - DNA, 15 bp, Homo sapiens
atggtgtaaacccgg

SEQ ID NO: 1680221 - DNA, 15 bp, Homo sapiens
tggtgtaaacccggg

SEQ ID NO: 1680222 - DNA, 15 bp, Homo sapiens
ggtgtaaacccggga

SEQ ID NO: 1680223 - DNA, 15 bp, Homo sapiens
gtgtaaacccgggag

SEQ ID NO: 1680224 - DNA, 15 bp, Homo sapiens
tgtaaacccgggagg

SEQ ID NO: 1680225 - DNA, 15 bp, Homo sapiens
gtaaacccgggaggc

SEQ ID NO: 1680226 - DNA, 15 bp, Homo sapiens
taaacccgggaggca

SEQ ID NO: 1680227 - DNA, 15 bp, Homo sapiens
aaacccgggaggcag

SEQ ID NO: 1680228 - DNA, 15 bp, Homo sapiens
actgcactccagccc

SEQ ID NO: 1680229 - DNA, 15 bp, Homo sapiens
ctgcactccagccca

SEQ ID NO: 1680230 - DNA, 15 bp, Homo sapiens
cactccagcccaggt

SEQ ID NO: 1680231 - DNA, 15 bp, Homo sapiens
actccagcccaggtg

SEQ ID NO: 1680232 - DNA, 15 bp, Homo sapiens
ctccagcccaggtga

SEQ ID NO: 1680233 - DNA, 15 bp, Homo sapiens
tccagcccaggtgag

SEQ ID NO: 1680234 - DNA, 15 bp, Homo sapiens
ccagcccaggtgaga

SEQ ID NO: 1680235 - DNA, 15 bp, Homo sapiens
cagcccaggtgagag

SEQ ID NO: 1680236 - DNA, 15 bp, Homo sapiens
agcccaggtgagagt

SEQ ID NO: 1680237 - DNA, 15 bp, Homo sapiens
gcccaggtgagagtg

SEQ ID NO: 1680238 - DNA, 15 bp, Homo sapiens
cccaggtgagagtgt

SEQ ID NO: 1680239 - DNA, 15 bp, Homo sapiens
ccaggtgagagtgtg

SEQ ID NO: 1680240 - DNA, 15 bp, Homo sapiens
caggtgagagtgtga

SEQ ID NO: 1680241 - DNA, 15 bp, Homo sapiens
aggtgagagtgtgag

SEQ ID NO: 1680242 - DNA, 15 bp, Homo sapiens
ggtgagagtgtgaga

SEQ ID NO: 1680243 - DNA, 15 bp, Homo sapiens
gtgagagtgtgagac

SEQ ID NO: 1680244 - DNA, 15 bp, Homo sapiens
tgagagtgtgagact

SEQ ID NO: 1680245 - DNA, 15 bp, Homo sapiens
gagagtgtgagactc

SEQ ID NO: 1680246 - DNA, 15 bp, Homo sapiens
agagtgtgagactcc

SEQ ID NO: 1680247 - DNA, 15 bp, Homo sapiens
gagtgtgagactccg

SEQ ID NO: 1680248 - DNA, 15 bp, Homo sapiens
agtgtgagactccgt

SEQ ID NO: 1680249 - DNA, 15 bp, Homo sapiens
gtgtgagactccgtc

SEQ ID NO: 1680250 - DNA, 15 bp, Homo sapiens
tgtgagactccgtct

SEQ ID NO: 1680251 - DNA, 15 bp, Homo sapiens
ccgtctcaaaaaaac

SEQ ID NO: 1680252 - DNA, 15 bp, Homo sapiens
cgtctcaaaaaaaca

SEQ ID NO: 1680253 - DNA, 15 bp, Homo sapiens
tcaaaaaaacaaaat

SEQ ID NO: 1680254 - DNA, 15 bp, Homo sapiens
caaaaaaacaaaata

SEQ ID NO: 1680255 - DNA, 15 bp, Homo sapiens
aataaaacaaaaaat

SEQ ID NO: 1680256 - DNA, 15 bp, Homo sapiens
ataaaacaaaaaata

SEQ ID NO: 1680257 - DNA, 15 bp, Homo sapiens
taaaacaaaaaatac

SEQ ID NO: 1680258 - DNA, 15 bp, Homo sapiens
aaaacaaaaaataca

SEQ ID NO: 1680259 - DNA, 15 bp, Homo sapiens
aaacaaaaaatacaa

SEQ ID NO: 1680260 - DNA, 15 bp, Homo sapiens
aacaaaaaatacaaa

SEQ ID NO: 1680261 - DNA, 15 bp, Homo sapiens
atacaaaaattagcg

SEQ ID NO: 1680262 - DNA, 15 bp, Homo sapiens
tacaaaaattagcgg

SEQ ID NO: 1680263 - DNA, 15 bp, Homo sapiens
acaaaaattagcggg

SEQ ID NO: 1680264 - DNA, 15 bp, Homo sapiens
caaaaattagcgggg

SEQ ID NO: 1680265 - DNA, 15 bp, Homo sapiens
aaaaattagcggggc

SEQ ID NO: 1680266 - DNA, 15 bp, Homo sapiens
aaaattagcggggcg

SEQ ID NO: 1680267 - DNA, 15 bp, Homo sapiens
aaattagcggggcgt

SEQ ID NO: 1680268 - DNA, 15 bp, Homo sapiens
aattagcggggcgtg

SEQ ID NO: 1680269 - DNA, 15 bp, Homo sapiens
attagcggggcgtga

SEQ ID NO: 1680270 - DNA, 15 bp, Homo sapiens
ttagcggggcgtgat

SEQ ID NO: 1680271 - DNA, 15 bp, Homo sapiens
tagcggggcgtgatg

SEQ ID NO: 1680272 - DNA, 15 bp, Homo sapiens
agcggggcgtgatgg

SEQ ID NO: 1680273 - DNA, 15 bp, Homo sapiens
gcggggcgtgatggc

SEQ ID NO: 1680274 - DNA, 15 bp, Homo sapiens
cggggcgtgatggca

SEQ ID NO: 1680275 - DNA, 15 bp, Homo sapiens
ggggcgtgatggcag

SEQ ID NO: 1680276 - DNA, 15 bp, Homo sapiens
gggcgtgatggcagg

SEQ ID NO: 1680277 - DNA, 15 bp, Homo sapiens
ggcgtgatggcaggt

SEQ ID NO: 1680278 - DNA, 15 bp, Homo sapiens
gcgtgatggcaggtg

SEQ ID NO: 1680279 - DNA, 15 bp, Homo sapiens
cgtgatggcaggtgc

SEQ ID NO: 1680280 - DNA, 15 bp, Homo sapiens
gtgatggcaggtgcc

SEQ ID NO: 1680281 - DNA, 15 bp, Homo sapiens
ttaggaggctgaggg

SEQ ID NO: 1680282 - DNA, 15 bp, Homo sapiens
taggaggctgaggga

SEQ ID NO: 1680283 - DNA, 15 bp, Homo sapiens
aggaggctgagggaa

SEQ ID NO: 1680284 - DNA, 15 bp, Homo sapiens
ggaggctgagggaag

SEQ ID NO: 1680285 - DNA, 15 bp, Homo sapiens
gaggctgagggaaga

SEQ ID NO: 1680286 - DNA, 15 bp, Homo sapiens
aggctgagggaagag

SEQ ID NO: 1680287 - DNA, 15 bp, Homo sapiens
ggctgagggaagaga

SEQ ID NO: 1680288 - DNA, 15 bp, Homo sapiens
gctgagggaagagaa

SEQ ID NO: 1680289 - DNA, 15 bp, Homo sapiens
ctgagggaagagaat

SEQ ID NO: 1680290 - DNA, 15 bp, Homo sapiens
tgagggaagagaatc

SEQ ID NO: 1680291 - DNA, 15 bp, Homo sapiens
gagggaagagaatca

SEQ ID NO: 1680292 - DNA, 15 bp, Homo sapiens
agggaagagaatcac

SEQ ID NO: 1680293 - DNA, 15 bp, Homo sapiens
gggaagagaatcact

SEQ ID NO: 1680294 - DNA, 15 bp, Homo sapiens
ggaagagaatcactt

SEQ ID NO: 1680295 - DNA, 15 bp, Homo sapiens
gaagagaatcacttg

SEQ ID NO: 1680296 - DNA, 15 bp, Homo sapiens
agagaatcacttgaa

SEQ ID NO: 1680297 - DNA, 15 bp, Homo sapiens
acttgaacccgggaa

SEQ ID NO: 1680298 - DNA, 15 bp, Homo sapiens
tgaacccgggaagca

SEQ ID NO: 1680299 - DNA, 15 bp, Homo sapiens
gaacccgggaagcag

SEQ ID NO: 1680300 - DNA, 15 bp, Homo sapiens
aacccgggaagcaga

SEQ ID NO: 1680301 - DNA, 15 bp, Homo sapiens
acccgggaagcagaa

SEQ ID NO: 1680302 - DNA, 15 bp, Homo sapiens
cccgggaagcagaag

SEQ ID NO: 1680303 - DNA, 15 bp, Homo sapiens
ccgggaagcagaagt

SEQ ID NO: 1680304 - DNA, 15 bp, Homo sapiens
cgggaagcagaagtt

SEQ ID NO: 1680305 - DNA, 15 bp, Homo sapiens
gggaagcagaagttg

SEQ ID NO: 1680306 - DNA, 15 bp, Homo sapiens
ggaagcagaagttgc

SEQ ID NO: 1680307 - DNA, 15 bp, Homo sapiens
gaagcagaagttgca

SEQ ID NO: 1680308 - DNA, 15 bp, Homo sapiens
aagcagaagttgcag

SEQ ID NO: 1680309 - DNA, 15 bp, Homo sapiens
agcagaagttgcagt

SEQ ID NO: 1680310 - DNA, 15 bp, Homo sapiens
gttgcagtgagccgc

SEQ ID NO: 1680311 - DNA, 15 bp, Homo sapiens
ttgcagtgagccgcg

SEQ ID NO: 1680312 - DNA, 15 bp, Homo sapiens
tgcagtgagccgcga

SEQ ID NO: 1680313 - DNA, 15 bp, Homo sapiens
gcagtgagccgcgat

SEQ ID NO: 1680314 - DNA, 15 bp, Homo sapiens
cagtgagccgcgatc

SEQ ID NO: 1680315 - DNA, 15 bp, Homo sapiens
agtgagccgcgatcg

SEQ ID NO: 1680316 - DNA, 15 bp, Homo sapiens
gtgagccgcgatcgc

SEQ ID NO: 1680317 - DNA, 15 bp, Homo sapiens
tgagccgcgatcgca

SEQ ID NO: 1680318 - DNA, 15 bp, Homo sapiens
gagccgcgatcgcat

SEQ ID NO: 1680319 - DNA, 15 bp, Homo sapiens
agccgcgatcgcatc

SEQ ID NO: 1680320 - DNA, 15 bp, Homo sapiens
gccgcgatcgcatca

SEQ ID NO: 1680321 - DNA, 15 bp, Homo sapiens
ccgcgatcgcatcac

SEQ ID NO: 1680322 - DNA, 15 bp, Homo sapiens
cgcgatcgcatcact

SEQ ID NO: 1680323 - DNA, 15 bp, Homo sapiens
gcgatcgcatcactg

SEQ ID NO: 1680324 - DNA, 15 bp, Homo sapiens
cgatcgcatcactgc

SEQ ID NO: 1680325 - DNA, 15 bp, Homo sapiens
gatcgcatcactgca

SEQ ID NO: 1680326 - DNA, 15 bp, Homo sapiens
atcgcatcactgcac

SEQ ID NO: 1680327 - DNA, 15 bp, Homo sapiens
tcgcatcactgcact

SEQ ID NO: 1680328 - DNA, 15 bp, Homo sapiens
cgcatcactgcactg

SEQ ID NO: 1680329 - DNA, 15 bp, Homo sapiens
gcatcactgcactgc

SEQ ID NO: 1680330 - DNA, 15 bp, Homo sapiens
catcactgcactgca

SEQ ID NO: 1680331 - DNA, 15 bp, Homo sapiens
atcactgcactgcag

SEQ ID NO: 1680332 - DNA, 15 bp, Homo sapiens
tcactgcactgcagc

SEQ ID NO: 1680333 - DNA, 15 bp, Homo sapiens
cactgcactgcagcc

SEQ ID NO: 1680334 - DNA, 15 bp, Homo sapiens
actgcactgcagccc

SEQ ID NO: 1680335 - DNA, 15 bp, Homo sapiens
ctgcactgcagcccg

SEQ ID NO: 1680336 - DNA, 15 bp, Homo sapiens
tgcactgcagcccgg

SEQ ID NO: 1680337 - DNA, 15 bp, Homo sapiens
gcactgcagcccggg

SEQ ID NO: 1680338 - DNA, 15 bp, Homo sapiens
cactgcagcccgggt

SEQ ID NO: 1680339 - DNA, 15 bp, Homo sapiens
actgcagcccgggtg

SEQ ID NO: 1680340 - DNA, 15 bp, Homo sapiens
ctgcagcccgggtga

SEQ ID NO: 1680341 - DNA, 15 bp, Homo sapiens
tgcagcccgggtgac

SEQ ID NO: 1680342 - DNA, 15 bp, Homo sapiens
gcagcccgggtgaca

SEQ ID NO: 1680343 - DNA, 15 bp, Homo sapiens
cagcccgggtgacag

SEQ ID NO: 1680344 - DNA, 15 bp, Homo sapiens
agcccgggtgacaga

SEQ ID NO: 1680345 - DNA, 15 bp, Homo sapiens
gcccgggtgacagag

SEQ ID NO: 1680346 - DNA, 15 bp, Homo sapiens
cccgggtgacagagc

SEQ ID NO: 1680347 - DNA, 15 bp, Homo sapiens
ccgggtgacagagca

SEQ ID NO: 1680348 - DNA, 15 bp, Homo sapiens
cgggtgacagagcaa

SEQ ID NO: 1680349 - DNA, 15 bp, Homo sapiens
aaaaaaaaaagggag

SEQ ID NO: 1680350 - DNA, 15 bp, Homo sapiens
aaaaaaaaagggagg

SEQ ID NO: 1680351 - DNA, 15 bp, Homo sapiens
aaaaaaaagggaggc

SEQ ID NO: 1680352 - DNA, 15 bp, Homo sapiens
aaaaaaagggaggcc

SEQ ID NO: 1680353 - DNA, 15 bp, Homo sapiens
aaaaaagggaggcca

SEQ ID NO: 1680354 - DNA, 15 bp, Homo sapiens
aaaaagggaggccac

SEQ ID NO: 1680355 - DNA, 15 bp, Homo sapiens
aaaagggaggccact

SEQ ID NO: 1680356 - DNA, 15 bp, Homo sapiens
aaagggaggccactg

SEQ ID NO: 1680357 - DNA, 15 bp, Homo sapiens
aagggaggccactgg

SEQ ID NO: 1680358 - DNA, 15 bp, Homo sapiens
agggaggccactgga

SEQ ID NO: 1680359 - DNA, 15 bp, Homo sapiens
gggaggccactggag

SEQ ID NO: 1680360 - DNA, 15 bp, Homo sapiens
ggaggccactggagg

SEQ ID NO: 1680361 - DNA, 15 bp, Homo sapiens
gaggccactggaggt

SEQ ID NO: 1680362 - DNA, 15 bp, Homo sapiens
aggccactggaggtt

SEQ ID NO: 1680363 - DNA, 15 bp, Homo sapiens
ggccactggaggttg

SEQ ID NO: 1680364 - DNA, 15 bp, Homo sapiens
gccactggaggttgt

SEQ ID NO: 1680365 - DNA, 15 bp, Homo sapiens
ccactggaggttgtg

SEQ ID NO: 1680366 - DNA, 15 bp, Homo sapiens
cactggaggttgtgg

SEQ ID NO: 1680367 - DNA, 15 bp, Homo sapiens
actggaggttgtggg

SEQ ID NO: 1680368 - DNA, 15 bp, Homo sapiens
ctggaggttgtgggg

SEQ ID NO: 1680369 - DNA, 15 bp, Homo sapiens
tggaggttgtggggc

SEQ ID NO: 1680370 - DNA, 15 bp, Homo sapiens
ggaggttgtggggcc

SEQ ID NO: 1680371 - DNA, 15 bp, Homo sapiens
gaggttgtggggcca

SEQ ID NO: 1680372 - DNA, 15 bp, Homo sapiens
aggttgtggggccac

SEQ ID NO: 1680373 - DNA, 15 bp, Homo sapiens
ggttgtggggccacc

SEQ ID NO: 1680374 - DNA, 15 bp, Homo sapiens
gttgtggggccacca

SEQ ID NO: 1680375 - DNA, 15 bp, Homo sapiens
ttgtggggccaccat

SEQ ID NO: 1680376 - DNA, 15 bp, Homo sapiens
tgtggggccaccatg

SEQ ID NO: 1680377 - DNA, 15 bp, Homo sapiens
gtggggccaccatga

SEQ ID NO: 1680378 - DNA, 15 bp, Homo sapiens
tggggccaccatgag

SEQ ID NO: 1680379 - DNA, 15 bp, Homo sapiens
ggggccaccatgaga

SEQ ID NO: 1680380 - DNA, 15 bp, Homo sapiens
gggccaccatgagag

SEQ ID NO: 1680381 - DNA, 15 bp, Homo sapiens
ggccaccatgagagt

SEQ ID NO: 1680382 - DNA, 15 bp, Homo sapiens
gccaccatgagagtc

SEQ ID NO: 1680383 - DNA, 15 bp, Homo sapiens
ccaccatgagagtcg

SEQ ID NO: 1680384 - DNA, 15 bp, Homo sapiens
caccatgagagtcga

SEQ ID NO: 1680385 - DNA, 15 bp, Homo sapiens
accatgagagtcgac

SEQ ID NO: 1680386 - DNA, 15 bp, Homo sapiens
ccatgagagtcgaca

SEQ ID NO: 1680387 - DNA, 15 bp, Homo sapiens
catgagagtcgacaa

SEQ ID NO: 1680388 - DNA, 15 bp, Homo sapiens
atgagagtcgacaag

SEQ ID NO: 1680389 - DNA, 15 bp, Homo sapiens
tgagagtcgacaagg

SEQ ID NO: 1680390 - DNA, 15 bp, Homo sapiens
gagagtcgacaaggg

SEQ ID NO: 1680391 - DNA, 15 bp, Homo sapiens
agagtcgacaagggt

SEQ ID NO: 1680392 - DNA, 15 bp, Homo sapiens
gagtcgacaagggtg

SEQ ID NO: 1680393 - DNA, 15 bp, Homo sapiens
agtcgacaagggtgg

SEQ ID NO: 1680394 - DNA, 15 bp, Homo sapiens
gtcgacaagggtggc

SEQ ID NO: 1680395 - DNA, 15 bp, Homo sapiens
tcgacaagggtggcc

SEQ ID NO: 1680396 - DNA, 15 bp, Homo sapiens
cgacaagggtggccc

SEQ ID NO: 1680397 - DNA, 15 bp, Homo sapiens
gacaagggtggccca

SEQ ID NO: 1680398 - DNA, 15 bp, Homo sapiens
acaagggtggcccac

SEQ ID NO: 1680399 - DNA, 15 bp, Homo sapiens
caagggtggcccaca

SEQ ID NO: 1680400 - DNA, 15 bp, Homo sapiens
aagggtggcccacat

SEQ ID NO: 1680401 - DNA, 15 bp, Homo sapiens
agggtggcccacatt

SEQ ID NO: 1680402 - DNA, 15 bp, Homo sapiens
gggtggcccacattc

SEQ ID NO: 1680403 - DNA, 15 bp, Homo sapiens
ggtggcccacattcc

SEQ ID NO: 1680404 - DNA, 15 bp, Homo sapiens
gtggcccacattcct

SEQ ID NO: 1680405 - DNA, 15 bp, Homo sapiens
tggcccacattccta

SEQ ID NO: 1680406 - DNA, 15 bp, Homo sapiens
ggcccacattcctag

SEQ ID NO: 1680407 - DNA, 15 bp, Homo sapiens
gcccacattcctaga

SEQ ID NO: 1680408 - DNA, 15 bp, Homo sapiens
cccacattcctagat

SEQ ID NO: 1680409 - DNA, 15 bp, Homo sapiens
ccacattcctagatg

SEQ ID NO: 1680410 - DNA, 15 bp, Homo sapiens
cacattcctagatga

SEQ ID NO: 1680411 - DNA, 15 bp, Homo sapiens
acattcctagatgag

SEQ ID NO: 1680412 - DNA, 15 bp, Homo sapiens
cattcctagatgagt

SEQ ID NO: 1680413 - DNA, 15 bp, Homo sapiens
attcctagatgagtt

SEQ ID NO: 1680414 - DNA, 15 bp, Homo sapiens
ttcctagatgagttg

SEQ ID NO: 1680415 - DNA, 15 bp, Homo sapiens
tcctagatgagttgc

SEQ ID NO: 1680416 - DNA, 15 bp, Homo sapiens
cctagatgagttgcc

SEQ ID NO: 1680417 - DNA, 15 bp, Homo sapiens
ctagatgagttgcct

SEQ ID NO: 1680418 - DNA, 15 bp, Homo sapiens
tagatgagttgcctg

SEQ ID NO: 1680419 - DNA, 15 bp, Homo sapiens
agatgagttgcctgg

SEQ ID NO: 1680420 - DNA, 15 bp, Homo sapiens
gatgagttgcctgga

SEQ ID NO: 1680421 - DNA, 15 bp, Homo sapiens
atgagttgcctggag

SEQ ID NO: 1680422 - DNA, 15 bp, Homo sapiens
tgagttgcctggagg

SEQ ID NO: 1680423 - DNA, 15 bp, Homo sapiens
gagttgcctggaggc

SEQ ID NO: 1680424 - DNA, 15 bp, Homo sapiens
agttgcctggaggct

SEQ ID NO: 1680425 - DNA, 15 bp, Homo sapiens
gttgcctggaggctg

SEQ ID NO: 1680426 - DNA, 15 bp, Homo sapiens
ttgcctggaggctgt

SEQ ID NO: 1680427 - DNA, 15 bp, Homo sapiens
tgcctggaggctgta

SEQ ID NO: 1680428 - DNA, 15 bp, Homo sapiens
gcctggaggctgtag

SEQ ID NO: 1680429 - DNA, 15 bp, Homo sapiens
cctggaggctgtagt

SEQ ID NO: 1680430 - DNA, 15 bp, Homo sapiens
ctggaggctgtagtc

SEQ ID NO: 1680431 - DNA, 15 bp, Homo sapiens
tggaggctgtagtcc

SEQ ID NO: 1680432 - DNA, 15 bp, Homo sapiens
ggaggctgtagtccc

SEQ ID NO: 1680433 - DNA, 15 bp, Homo sapiens
gaggctgtagtccca

SEQ ID NO: 1680434 - DNA, 15 bp, Homo sapiens
aggctgtagtcccag

SEQ ID NO: 1680435 - DNA, 15 bp, Homo sapiens
ggctgtagtcccaga

SEQ ID NO: 1680436 - DNA, 15 bp, Homo sapiens
gctgtagtcccagac

SEQ ID NO: 1680437 - DNA, 15 bp, Homo sapiens
ctgtagtcccagacc

SEQ ID NO: 1680438 - DNA, 15 bp, Homo sapiens
tgtagtcccagacct

SEQ ID NO: 1680439 - DNA, 15 bp, Homo sapiens
gtagtcccagacctc

SEQ ID NO: 1680440 - DNA, 15 bp, Homo sapiens
tagtcccagacctca

SEQ ID NO: 1680441 - DNA, 15 bp, Homo sapiens
agtcccagacctcag

SEQ ID NO: 1680442 - DNA, 15 bp, Homo sapiens
gtcccagacctcagg

SEQ ID NO: 1680443 - DNA, 15 bp, Homo sapiens
tcccagacctcaggg

SEQ ID NO: 1680444 - DNA, 15 bp, Homo sapiens
cccagacctcagggg

SEQ ID NO: 1680445 - DNA, 15 bp, Homo sapiens
ccagacctcaggggg

SEQ ID NO: 1680446 - DNA, 15 bp, Homo sapiens
cagacctcagggggg

SEQ ID NO: 1680447 - DNA, 15 bp, Homo sapiens
agacctcaggggggt

SEQ ID NO: 1680448 - DNA, 15 bp, Homo sapiens
gacctcaggggggtc

SEQ ID NO: 1680449 - DNA, 15 bp, Homo sapiens
acctcaggggggtcc

SEQ ID NO: 1680450 - DNA, 15 bp, Homo sapiens
cctcaggggggtccc

SEQ ID NO: 1680451 - DNA, 15 bp, Homo sapiens
ctcaggggggtcccc

SEQ ID NO: 1680452 - DNA, 15 bp, Homo sapiens
tcaggggggtcccct

SEQ ID NO: 1680453 - DNA, 15 bp, Homo sapiens
caggggggtcccctc

SEQ ID NO: 1680454 - DNA, 15 bp, Homo sapiens
aggggggtcccctcc

SEQ ID NO: 1680455 - DNA, 15 bp, Homo sapiens
ggggggtcccctccg

SEQ ID NO: 1680456 - DNA, 15 bp, Homo sapiens
gggggtcccctccgg

SEQ ID NO: 1680457 - DNA, 15 bp, Homo sapiens
ggggtcccctccgga

SEQ ID NO: 1680458 - DNA, 15 bp, Homo sapiens
gggtcccctccggaa

SEQ ID NO: 1680459 - DNA, 15 bp, Homo sapiens
ggtcccctccggaac

SEQ ID NO: 1680460 - DNA, 15 bp, Homo sapiens
gtcccctccggaacc

SEQ ID NO: 1680461 - DNA, 15 bp, Homo sapiens
tcccctccggaaccc

SEQ ID NO: 1680462 - DNA, 15 bp, Homo sapiens
cccctccggaaccca

SEQ ID NO: 1680463 - DNA, 15 bp, Homo sapiens
ccctccggaacccaa

SEQ ID NO: 1680464 - DNA, 15 bp, Homo sapiens
cctccggaacccaaa

SEQ ID NO: 1680465 - DNA, 15 bp, Homo sapiens
ctccggaacccaaac

SEQ ID NO: 1680466 - DNA, 15 bp, Homo sapiens
tccggaacccaaaca

SEQ ID NO: 1680467 - DNA, 15 bp, Homo sapiens
ccggaacccaaacac

SEQ ID NO: 1680468 - DNA, 15 bp, Homo sapiens
cggaacccaaacact

SEQ ID NO: 1680469 - DNA, 15 bp, Homo sapiens
ggaacccaaacactg

SEQ ID NO: 1680470 - DNA, 15 bp, Homo sapiens
gaacccaaacactgt

SEQ ID NO: 1680471 - DNA, 15 bp, Homo sapiens
aacccaaacactgtc

SEQ ID NO: 1680472 - DNA, 15 bp, Homo sapiens
acccaaacactgtca

SEQ ID NO: 1680473 - DNA, 15 bp, Homo sapiens
cccaaacactgtcat

SEQ ID NO: 1680474 - DNA, 15 bp, Homo sapiens
ccaaacactgtcatg

SEQ ID NO: 1680475 - DNA, 15 bp, Homo sapiens
caaacactgtcatgc

SEQ ID NO: 1680476 - DNA, 15 bp, Homo sapiens
aaacactgtcatgcc

SEQ ID NO: 1680477 - DNA, 15 bp, Homo sapiens
aacactgtcatgcca

SEQ ID NO: 1680478 - DNA, 15 bp, Homo sapiens
acactgtcatgccaa

SEQ ID NO: 1680479 - DNA, 15 bp, Homo sapiens
cactgtcatgccaat

SEQ ID NO: 1680480 - DNA, 15 bp, Homo sapiens
actgtcatgccaatg

SEQ ID NO: 1680481 - DNA, 15 bp, Homo sapiens
ctgtcatgccaatga

SEQ ID NO: 1680482 - DNA, 15 bp, Homo sapiens
tgtcatgccaatgac

SEQ ID NO: 1680483 - DNA, 15 bp, Homo sapiens
gtcatgccaatgaca

SEQ ID NO: 1680484 - DNA, 15 bp, Homo sapiens
tcatgccaatgacac

SEQ ID NO: 1680485 - DNA, 15 bp, Homo sapiens
catgccaatgacaca

SEQ ID NO: 1680486 - DNA, 15 bp, Homo sapiens
atgccaatgacacaa

SEQ ID NO: 1680487 - DNA, 15 bp, Homo sapiens
tgccaatgacacaaa

SEQ ID NO: 1680488 - DNA, 15 bp, Homo sapiens
gccaatgacacaaaa

SEQ ID NO: 1680489 - DNA, 15 bp, Homo sapiens
ccaatgacacaaaac

SEQ ID NO: 1680490 - DNA, 15 bp, Homo sapiens
caatgacacaaaact

SEQ ID NO: 1680491 - DNA, 15 bp, Homo sapiens
aatgacacaaaactg

SEQ ID NO: 1680492 - DNA, 15 bp, Homo sapiens
atgacacaaaactgg

SEQ ID NO: 1680493 - DNA, 15 bp, Homo sapiens
tgacacaaaactggt

SEQ ID NO: 1680494 - DNA, 15 bp, Homo sapiens
gacacaaaactggtc

SEQ ID NO: 1680495 - DNA, 15 bp, Homo sapiens
acacaaaactggtct

SEQ ID NO: 1680496 - DNA, 15 bp, Homo sapiens
cacaaaactggtctt

SEQ ID NO: 1680497 - DNA, 15 bp, Homo sapiens
acaaaactggtcttc

SEQ ID NO: 1680498 - DNA, 15 bp, Homo sapiens
caaaactggtcttcc

SEQ ID NO: 1680499 - DNA, 15 bp, Homo sapiens
aaaactggtcttcct

SEQ ID NO: 1680500 - DNA, 15 bp, Homo sapiens
aaactggtcttcctg

SEQ ID NO: 1680501 - DNA, 15 bp, Homo sapiens
aactggtcttcctgg

SEQ ID NO: 1680502 - DNA, 15 bp, Homo sapiens
actggtcttcctggc

SEQ ID NO: 1680503 - DNA, 15 bp, Homo sapiens
ctggtcttcctggcc

SEQ ID NO: 1680504 - DNA, 15 bp, Homo sapiens
tggtcttcctggcct

SEQ ID NO: 1680505 - DNA, 15 bp, Homo sapiens
ggtcttcctggcctc

SEQ ID NO: 1680506 - DNA, 15 bp, Homo sapiens
gtcttcctggcctct

SEQ ID NO: 1680507 - DNA, 15 bp, Homo sapiens
tcttcctggcctctc

SEQ ID NO: 1680508 - DNA, 15 bp, Homo sapiens
cttcctggcctctcc

SEQ ID NO: 1680509 - DNA, 15 bp, Homo sapiens
ttcctggcctctccc

SEQ ID NO: 1680510 - DNA, 15 bp, Homo sapiens
tcctggcctctccca

SEQ ID NO: 1680511 - DNA, 15 bp, Homo sapiens
cctggcctctcccat

SEQ ID NO: 1680512 - DNA, 15 bp, Homo sapiens
ctggcctctcccatc

SEQ ID NO: 1680513 - DNA, 15 bp, Homo sapiens
tggcctctcccatcc

SEQ ID NO: 1680514 - DNA, 15 bp, Homo sapiens
ggcctctcccatcct

SEQ ID NO: 1680515 - DNA, 15 bp, Homo sapiens
gcctctcccatcctg

SEQ ID NO: 1680516 - DNA, 15 bp, Homo sapiens
cctctcccatcctgt

SEQ ID NO: 1680517 - DNA, 15 bp, Homo sapiens
ctctcccatcctgtc

SEQ ID NO: 1680518 - DNA, 15 bp, Homo sapiens
tctcccatcctgtcc

SEQ ID NO: 1680519 - DNA, 15 bp, Homo sapiens
ctcccatcctgtcca

SEQ ID NO: 1680520 - DNA, 15 bp, Homo sapiens
tcccatcctgtccag

SEQ ID NO: 1680521 - DNA, 15 bp, Homo sapiens
cccatcctgtccagc

SEQ ID NO: 1680522 - DNA, 15 bp, Homo sapiens
ccatcctgtccagcc

SEQ ID NO: 1680523 - DNA, 15 bp, Homo sapiens
catcctgtccagcct

SEQ ID NO: 1680524 - DNA, 15 bp, Homo sapiens
atcctgtccagccta

SEQ ID NO: 1680525 - DNA, 15 bp, Homo sapiens
tcctgtccagcctag

SEQ ID NO: 1680526 - DNA, 15 bp, Homo sapiens
cctgtccagcctaga

SEQ ID NO: 1680527 - DNA, 15 bp, Homo sapiens
ctgtccagcctagaa

SEQ ID NO: 1680528 - DNA, 15 bp, Homo sapiens
tgtccagcctagaag

SEQ ID NO: 1680529 - DNA, 15 bp, Homo sapiens
gtccagcctagaagg

SEQ ID NO: 1680530 - DNA, 15 bp, Homo sapiens
tccagcctagaaggg

SEQ ID NO: 1680531 - DNA, 15 bp, Homo sapiens
ccagcctagaaggga

SEQ ID NO: 1680532 - DNA, 15 bp, Homo sapiens
cagcctagaagggag

SEQ ID NO: 1680533 - DNA, 15 bp, Homo sapiens
agcctagaagggaga

SEQ ID NO: 1680534 - DNA, 15 bp, Homo sapiens
gcctagaagggagac

SEQ ID NO: 1680535 - DNA, 15 bp, Homo sapiens
cctagaagggagact

SEQ ID NO: 1680536 - DNA, 15 bp, Homo sapiens
ctagaagggagactg

SEQ ID NO: 1680537 - DNA, 15 bp, Homo sapiens
tagaagggagactga

SEQ ID NO: 1680538 - DNA, 15 bp, Homo sapiens
agaagggagactgag

SEQ ID NO: 1680539 - DNA, 15 bp, Homo sapiens
gaagggagactgaga

SEQ ID NO: 1680540 - DNA, 15 bp, Homo sapiens
aagggagactgagac

SEQ ID NO: 1680541 - DNA, 15 bp, Homo sapiens
agggagactgagact

SEQ ID NO: 1680542 - DNA, 15 bp, Homo sapiens
gggagactgagactt

SEQ ID NO: 1680543 - DNA, 15 bp, Homo sapiens
ggagactgagacttc

SEQ ID NO: 1680544 - DNA, 15 bp, Homo sapiens
gagactgagacttca

SEQ ID NO: 1680545 - DNA, 15 bp, Homo sapiens
agactgagacttcag

SEQ ID NO: 1680546 - DNA, 15 bp, Homo sapiens
gactgagacttcaga

SEQ ID NO: 1680547 - DNA, 15 bp, Homo sapiens
actgagacttcagat

SEQ ID NO: 1680548 - DNA, 15 bp, Homo sapiens
ctgagacttcagatc

SEQ ID NO: 1680549 - DNA, 15 bp, Homo sapiens
tgagacttcagatcc

SEQ ID NO: 1680550 - DNA, 15 bp, Homo sapiens
gagacttcagatccg

SEQ ID NO: 1680551 - DNA, 15 bp, Homo sapiens
agacttcagatccga

SEQ ID NO: 1680552 - DNA, 15 bp, Homo sapiens
gacttcagatccgac

SEQ ID NO: 1680553 - DNA, 15 bp, Homo sapiens
acttcagatccgaca

SEQ ID NO: 1680554 - DNA, 15 bp, Homo sapiens
cttcagatccgacaa

SEQ ID NO: 1680555 - DNA, 15 bp, Homo sapiens
ttcagatccgacaac

SEQ ID NO: 1680556 - DNA, 15 bp, Homo sapiens
tcagatccgacaacc

SEQ ID NO: 1680557 - DNA, 15 bp, Homo sapiens
cagatccgacaacca

SEQ ID NO: 1680558 - DNA, 15 bp, Homo sapiens
agatccgacaaccat

SEQ ID NO: 1680559 - DNA, 15 bp, Homo sapiens
gatccgacaaccatg

SEQ ID NO: 1680560 - DNA, 15 bp, Homo sapiens
atccgacaaccatgg

SEQ ID NO: 1680561 - DNA, 15 bp, Homo sapiens
tccgacaaccatggg

SEQ ID NO: 1680562 - DNA, 15 bp, Homo sapiens
ccgacaaccatgggt

SEQ ID NO: 1680563 - DNA, 15 bp, Homo sapiens
cgacaaccatgggtt

SEQ ID NO: 1680564 - DNA, 15 bp, Homo sapiens
gacaaccatgggttc

SEQ ID NO: 1680565 - DNA, 15 bp, Homo sapiens
acaaccatgggttca

SEQ ID NO: 1680566 - DNA, 15 bp, Homo sapiens
caaccatgggttcaa

SEQ ID NO: 1680567 - DNA, 15 bp, Homo sapiens
aaccatgggttcaaa

SEQ ID NO: 1680568 - DNA, 15 bp, Homo sapiens
accatgggttcaaat

SEQ ID NO: 1680569 - DNA, 15 bp, Homo sapiens
ccatgggttcaaatc

SEQ ID NO: 1680570 - DNA, 15 bp, Homo sapiens
catgggttcaaatcc

SEQ ID NO: 1680571 - DNA, 15 bp, Homo sapiens
atgggttcaaatcca

SEQ ID NO: 1680572 - DNA, 15 bp, Homo sapiens
gggttcaaatccagc

SEQ ID NO: 1680573 - DNA, 15 bp, Homo sapiens
ggttcaaatccagcc

SEQ ID NO: 1680574 - DNA, 15 bp, Homo sapiens
gttcaaatccagcct

SEQ ID NO: 1680575 - DNA, 15 bp, Homo sapiens
ttcaaatccagcctt

SEQ ID NO: 1680576 - DNA, 15 bp, Homo sapiens
tcaaatccagccttg

SEQ ID NO: 1680577 - DNA, 15 bp, Homo sapiens
caaatccagccttga

SEQ ID NO: 1680578 - DNA, 15 bp, Homo sapiens
aaatccagccttgaa

SEQ ID NO: 1680579 - DNA, 15 bp, Homo sapiens
aatccagccttgaaa

SEQ ID NO: 1680580 - DNA, 15 bp, Homo sapiens
atccagccttgaaaa

SEQ ID NO: 1680581 - DNA, 15 bp, Homo sapiens
tccagccttgaaaac

SEQ ID NO: 1680582 - DNA, 15 bp, Homo sapiens
ccagccttgaaaact

SEQ ID NO: 1680583 - DNA, 15 bp, Homo sapiens
cagccttgaaaactt

SEQ ID NO: 1680584 - DNA, 15 bp, Homo sapiens
agccttgaaaacttc

SEQ ID NO: 1680585 - DNA, 15 bp, Homo sapiens
ccttgaaaacttccc

SEQ ID NO: 1680586 - DNA, 15 bp, Homo sapiens
cttgaaaacttccca

SEQ ID NO: 1680587 - DNA, 15 bp, Homo sapiens
ttgaaaacttcccat

SEQ ID NO: 1680588 - DNA, 15 bp, Homo sapiens
tgaaaacttcccatg

SEQ ID NO: 1680589 - DNA, 15 bp, Homo sapiens
gaaaacttcccatgc

SEQ ID NO: 1680590 - DNA, 15 bp, Homo sapiens
aaaacttcccatgca

SEQ ID NO: 1680591 - DNA, 15 bp, Homo sapiens
aaacttcccatgcac

SEQ ID NO: 1680592 - DNA, 15 bp, Homo sapiens
aacttcccatgcaca

SEQ ID NO: 1680593 - DNA, 15 bp, Homo sapiens
acttcccatgcacag

SEQ ID NO: 1680594 - DNA, 15 bp, Homo sapiens
cttcccatgcacagg

SEQ ID NO: 1680595 - DNA, 15 bp, Homo sapiens
ttcccatgcacaggc

SEQ ID NO: 1680596 - DNA, 15 bp, Homo sapiens
tcccatgcacaggca

SEQ ID NO: 1680597 - DNA, 15 bp, Homo sapiens
cccatgcacaggcaa

SEQ ID NO: 1680598 - DNA, 15 bp, Homo sapiens
ccatgcacaggcaag

SEQ ID NO: 1680599 - DNA, 15 bp, Homo sapiens
catgcacaggcaagc

SEQ ID NO: 1680600 - DNA, 15 bp, Homo sapiens
atgcacaggcaagcc

SEQ ID NO: 1680601 - DNA, 15 bp, Homo sapiens
tgcacaggcaagccc

SEQ ID NO: 1680602 - DNA, 15 bp, Homo sapiens
gcacaggcaagcccc

SEQ ID NO: 1680603 - DNA, 15 bp, Homo sapiens
cacaggcaagcccca

SEQ ID NO: 1680604 - DNA, 15 bp, Homo sapiens
acaggcaagccccat

SEQ ID NO: 1680605 - DNA, 15 bp, Homo sapiens
caggcaagccccatt

SEQ ID NO: 1680606 - DNA, 15 bp, Homo sapiens
aggcaagccccattg

SEQ ID NO: 1680607 - DNA, 15 bp, Homo sapiens
ggcaagccccattgc

SEQ ID NO: 1680608 - DNA, 15 bp, Homo sapiens
gcaagccccattgcg

SEQ ID NO: 1680609 - DNA, 15 bp, Homo sapiens
caagccccattgcga

SEQ ID NO: 1680610 - DNA, 15 bp, Homo sapiens
aagccccattgcgat

SEQ ID NO: 1680611 - DNA, 15 bp, Homo sapiens
agccccattgcgatc

SEQ ID NO: 1680612 - DNA, 15 bp, Homo sapiens
gccccattgcgatct

SEQ ID NO: 1680613 - DNA, 15 bp, Homo sapiens
ccccattgcgatctg

SEQ ID NO: 1680614 - DNA, 15 bp, Homo sapiens
cccattgcgatctgt

SEQ ID NO: 1680615 - DNA, 15 bp, Homo sapiens
ccattgcgatctgtt

SEQ ID NO: 1680616 - DNA, 15 bp, Homo sapiens
cattgcgatctgttt

SEQ ID NO: 1680617 - DNA, 15 bp, Homo sapiens
attgcgatctgtttc

SEQ ID NO: 1680618 - DNA, 15 bp, Homo sapiens
ttgcgatctgtttct

SEQ ID NO: 1680619 - DNA, 15 bp, Homo sapiens
tgcgatctgtttctt

SEQ ID NO: 1680620 - DNA, 15 bp, Homo sapiens
gcgatctgtttcttt

SEQ ID NO: 1680621 - DNA, 15 bp, Homo sapiens
cgatctgtttctttt

SEQ ID NO: 1680622 - DNA, 15 bp, Homo sapiens
gatctgtttcttttc

SEQ ID NO: 1680623 - DNA, 15 bp, Homo sapiens
atctgtttcttttct

SEQ ID NO: 1680624 - DNA, 15 bp, Homo sapiens
tctgtttcttttctt

SEQ ID NO: 1680625 - DNA, 15 bp, Homo sapiens
ctgtttcttttcttt

SEQ ID NO: 1680626 - DNA, 15 bp, Homo sapiens
tgtttcttttctttt

SEQ ID NO: 1680627 - DNA, 15 bp, Homo sapiens
gtttcttttcttttc

SEQ ID NO: 1680628 - DNA, 15 bp, Homo sapiens
tttcttttcttttcc

SEQ ID NO: 1680629 - DNA, 15 bp, Homo sapiens
ttttcttttcctttc

SEQ ID NO: 1680630 - DNA, 15 bp, Homo sapiens
tcctttctttctttt

SEQ ID NO: 1680631 - DNA, 15 bp, Homo sapiens
cctttctttcttttt

SEQ ID NO: 1680632 - DNA, 15 bp, Homo sapiens
gcaacctccgcctca

SEQ ID NO: 1680633 - DNA, 15 bp, Homo sapiens
caacctccgcctcac

SEQ ID NO: 1680634 - DNA, 15 bp, Homo sapiens
aacctccgcctcaca

SEQ ID NO: 1680635 - DNA, 15 bp, Homo sapiens
acctccgcctcacag

SEQ ID NO: 1680636 - DNA, 15 bp, Homo sapiens
cctccgcctcacagg

SEQ ID NO: 1680637 - DNA, 15 bp, Homo sapiens
gcctcacaggttcaa

SEQ ID NO: 1680638 - DNA, 15 bp, Homo sapiens
cctcacaggttcaag

SEQ ID NO: 1680639 - DNA, 15 bp, Homo sapiens
ctcacaggttcaagc

SEQ ID NO: 1680640 - DNA, 15 bp, Homo sapiens
tcacaggttcaagcg

SEQ ID NO: 1680641 - DNA, 15 bp, Homo sapiens
cacaggttcaagcga

SEQ ID NO: 1680642 - DNA, 15 bp, Homo sapiens
acaggttcaagcgat

SEQ ID NO: 1680643 - DNA, 15 bp, Homo sapiens
attacaggtgcccat

SEQ ID NO: 1680644 - DNA, 15 bp, Homo sapiens
ttacaggtgcccatc

SEQ ID NO: 1680645 - DNA, 15 bp, Homo sapiens
tacaggtgcccatca

SEQ ID NO: 1680646 - DNA, 15 bp, Homo sapiens
acaggtgcccatcac

SEQ ID NO: 1680647 - DNA, 15 bp, Homo sapiens
caggtgcccatcacc

SEQ ID NO: 1680648 - DNA, 15 bp, Homo sapiens
aggtgcccatcaccg

SEQ ID NO: 1680649 - DNA, 15 bp, Homo sapiens
ggtgcccatcaccgt

SEQ ID NO: 1680650 - DNA, 15 bp, Homo sapiens
gtgcccatcaccgtg

SEQ ID NO: 1680651 - DNA, 15 bp, Homo sapiens
tgcccatcaccgtgc

SEQ ID NO: 1680652 - DNA, 15 bp, Homo sapiens
gcccatcaccgtgcc

SEQ ID NO: 1680653 - DNA, 15 bp, Homo sapiens
cccatcaccgtgccc

SEQ ID NO: 1680654 - DNA, 15 bp, Homo sapiens
ccatcaccgtgccca

SEQ ID NO: 1680655 - DNA, 15 bp, Homo sapiens
catcaccgtgcccag

SEQ ID NO: 1680656 - DNA, 15 bp, Homo sapiens
atcaccgtgcccagc

SEQ ID NO: 1680657 - DNA, 15 bp, Homo sapiens
tcaccgtgcccagct

SEQ ID NO: 1680658 - DNA, 15 bp, Homo sapiens
caccgtgcccagcta

SEQ ID NO: 1680659 - DNA, 15 bp, Homo sapiens
tagtagagacgggag

SEQ ID NO: 1680660 - DNA, 15 bp, Homo sapiens
agtagagacgggagt

SEQ ID NO: 1680661 - DNA, 15 bp, Homo sapiens
gtagagacgggagtt

SEQ ID NO: 1680662 - DNA, 15 bp, Homo sapiens
tagagacgggagttt

SEQ ID NO: 1680663 - DNA, 15 bp, Homo sapiens
agagacgggagtttc

SEQ ID NO: 1680664 - DNA, 15 bp, Homo sapiens
gagacgggagtttca

SEQ ID NO: 1680665 - DNA, 15 bp, Homo sapiens
agacgggagtttcac

SEQ ID NO: 1680666 - DNA, 15 bp, Homo sapiens
gacgggagtttcacc

SEQ ID NO: 1680667 - DNA, 15 bp, Homo sapiens
acgggagtttcacca

SEQ ID NO: 1680668 - DNA, 15 bp, Homo sapiens
cgggagtttcaccat

SEQ ID NO: 1680669 - DNA, 15 bp, Homo sapiens
gggagtttcaccatc

SEQ ID NO: 1680670 - DNA, 15 bp, Homo sapiens
ggagtttcaccatct

SEQ ID NO: 1680671 - DNA, 15 bp, Homo sapiens
gagtttcaccatctt

SEQ ID NO: 1680672 - DNA, 15 bp, Homo sapiens
agtttcaccatcttg

SEQ ID NO: 1680673 - DNA, 15 bp, Homo sapiens
acctcgtgatctgct

SEQ ID NO: 1680674 - DNA, 15 bp, Homo sapiens
cctcgtgatctgctt

SEQ ID NO: 1680675 - DNA, 15 bp, Homo sapiens
ctcgtgatctgcttg

SEQ ID NO: 1680676 - DNA, 15 bp, Homo sapiens
tcgtgatctgcttgc

SEQ ID NO: 1680677 - DNA, 15 bp, Homo sapiens
cgtgatctgcttgcc

SEQ ID NO: 1680678 - DNA, 15 bp, Homo sapiens
gtgatctgcttgcct

SEQ ID NO: 1680679 - DNA, 15 bp, Homo sapiens
tgatctgcttgcctc

SEQ ID NO: 1680680 - DNA, 15 bp, Homo sapiens
gatctgcttgcctca

SEQ ID NO: 1680681 - DNA, 15 bp, Homo sapiens
atctgcttgcctcag

SEQ ID NO: 1680682 - DNA, 15 bp, Homo sapiens
tctgcttgcctcagc

SEQ ID NO: 1680683 - DNA, 15 bp, Homo sapiens
ctgcttgcctcagcc

SEQ ID NO: 1680684 - DNA, 15 bp, Homo sapiens
tgcttgcctcagcct

SEQ ID NO: 1680685 - DNA, 15 bp, Homo sapiens
gcttgcctcagcctg

SEQ ID NO: 1680686 - DNA, 15 bp, Homo sapiens
cttgcctcagcctgc

SEQ ID NO: 1680687 - DNA, 15 bp, Homo sapiens
ttgcctcagcctgcc

SEQ ID NO: 1680688 - DNA, 15 bp, Homo sapiens
tgcctcagcctgcca

SEQ ID NO: 1680689 - DNA, 15 bp, Homo sapiens
gcctcagcctgccaa

SEQ ID NO: 1680690 - DNA, 15 bp, Homo sapiens
cctcagcctgccaaa

SEQ ID NO: 1680691 - DNA, 15 bp, Homo sapiens
ctcagcctgccaaag

SEQ ID NO: 1680692 - DNA, 15 bp, Homo sapiens
tcagcctgccaaagt

SEQ ID NO: 1680693 - DNA, 15 bp, Homo sapiens
cagcctgccaaagtg

SEQ ID NO: 1680694 - DNA, 15 bp, Homo sapiens
agcctgccaaagtgc

SEQ ID NO: 1680695 - DNA, 15 bp, Homo sapiens
gctgggattacaggg

SEQ ID NO: 1680696 - DNA, 15 bp, Homo sapiens
ctgggattacagggg

SEQ ID NO: 1680697 - DNA, 15 bp, Homo sapiens
tgggattacaggggt

SEQ ID NO: 1680698 - DNA, 15 bp, Homo sapiens
gggattacaggggtg

SEQ ID NO: 1680699 - DNA, 15 bp, Homo sapiens
ggattacaggggtga

SEQ ID NO: 1680700 - DNA, 15 bp, Homo sapiens
gattacaggggtgag

SEQ ID NO: 1680701 - DNA, 15 bp, Homo sapiens
attacaggggtgagc

SEQ ID NO: 1680702 - DNA, 15 bp, Homo sapiens
ggggtgagccactgt

SEQ ID NO: 1680703 - DNA, 15 bp, Homo sapiens
gggtgagccactgtg

SEQ ID NO: 1680704 - DNA, 15 bp, Homo sapiens
ggtgagccactgtgc

SEQ ID NO: 1680705 - DNA, 15 bp, Homo sapiens
ccactgtgcccggct

SEQ ID NO: 1680706 - DNA, 15 bp, Homo sapiens
cactgtgcccggctg

SEQ ID NO: 1680707 - DNA, 15 bp, Homo sapiens
actgtgcccggctgc

SEQ ID NO: 1680708 - DNA, 15 bp, Homo sapiens
ctgtgcccggctgcg

SEQ ID NO: 1680709 - DNA, 15 bp, Homo sapiens
tgtgcccggctgcga

SEQ ID NO: 1680710 - DNA, 15 bp, Homo sapiens
gtgcccggctgcgat

SEQ ID NO: 1680711 - DNA, 15 bp, Homo sapiens
tgcccggctgcgatc

SEQ ID NO: 1680712 - DNA, 15 bp, Homo sapiens
gcccggctgcgatct

SEQ ID NO: 1680713 - DNA, 15 bp, Homo sapiens
cccggctgcgatctg

SEQ ID NO: 1680714 - DNA, 15 bp, Homo sapiens
ccggctgcgatctgt

SEQ ID NO: 1680715 - DNA, 15 bp, Homo sapiens
cggctgcgatctgtt

SEQ ID NO: 1680716 - DNA, 15 bp, Homo sapiens
ggctgcgatctgttt

SEQ ID NO: 1680717 - DNA, 15 bp, Homo sapiens
gctgcgatctgtttc

SEQ ID NO: 1680718 - DNA, 15 bp, Homo sapiens
ctgcgatctgtttct

SEQ ID NO: 1680719 - DNA, 15 bp, Homo sapiens
gatctgtttctttta

SEQ ID NO: 1680720 - DNA, 15 bp, Homo sapiens
atctgtttcttttaa

SEQ ID NO: 1680721 - DNA, 15 bp, Homo sapiens
tctgtttcttttaac

SEQ ID NO: 1680722 - DNA, 15 bp, Homo sapiens
ctgtttcttttaacc

SEQ ID NO: 1680723 - DNA, 15 bp, Homo sapiens
tgtttcttttaaccg

SEQ ID NO: 1680724 - DNA, 15 bp, Homo sapiens
gtttcttttaaccgt

SEQ ID NO: 1680725 - DNA, 15 bp, Homo sapiens
tttcttttaaccgta

SEQ ID NO: 1680726 - DNA, 15 bp, Homo sapiens
ttcttttaaccgtaa

SEQ ID NO: 1680727 - DNA, 15 bp, Homo sapiens
tcttttaaccgtaaa

SEQ ID NO: 1680728 - DNA, 15 bp, Homo sapiens
cttttaaccgtaaac

SEQ ID NO: 1680729 - DNA, 15 bp, Homo sapiens
ttttaaccgtaaact

SEQ ID NO: 1680730 - DNA, 15 bp, Homo sapiens
tttaaccgtaaactg

SEQ ID NO: 1680731 - DNA, 15 bp, Homo sapiens
ttaaccgtaaactgg

SEQ ID NO: 1680732 - DNA, 15 bp, Homo sapiens
taaccgtaaactggg

SEQ ID NO: 1680733 - DNA, 15 bp, Homo sapiens
aaccgtaaactggga

SEQ ID NO: 1680734 - DNA, 15 bp, Homo sapiens
accgtaaactgggaa

SEQ ID NO: 1680735 - DNA, 15 bp, Homo sapiens
ccgtaaactgggaag

SEQ ID NO: 1680736 - DNA, 15 bp, Homo sapiens
cgtaaactgggaaga

SEQ ID NO: 1680737 - DNA, 15 bp, Homo sapiens
gtaaactgggaagaa

SEQ ID NO: 1680738 - DNA, 15 bp, Homo sapiens
taaactgggaagaac

SEQ ID NO: 1680739 - DNA, 15 bp, Homo sapiens
aaactgggaagaact

SEQ ID NO: 1680740 - DNA, 15 bp, Homo sapiens
aactgggaagaactt

SEQ ID NO: 1680741 - DNA, 15 bp, Homo sapiens
actgggaagaacttt

SEQ ID NO: 1680742 - DNA, 15 bp, Homo sapiens
ctgggaagaactttg

SEQ ID NO: 1680743 - DNA, 15 bp, Homo sapiens
tgggaagaactttga

SEQ ID NO: 1680744 - DNA, 15 bp, Homo sapiens
gggaagaactttgac

SEQ ID NO: 1680745 - DNA, 15 bp, Homo sapiens
ggaagaactttgacc

SEQ ID NO: 1680746 - DNA, 15 bp, Homo sapiens
gaagaactttgacca

SEQ ID NO: 1680747 - DNA, 15 bp, Homo sapiens
aagaactttgaccac

SEQ ID NO: 1680748 - DNA, 15 bp, Homo sapiens
agaactttgaccacc

SEQ ID NO: 1680749 - DNA, 15 bp, Homo sapiens
gaactttgaccacct

SEQ ID NO: 1680750 - DNA, 15 bp, Homo sapiens
aactttgaccacctc

SEQ ID NO: 1680751 - DNA, 15 bp, Homo sapiens
actttgaccacctct

SEQ ID NO: 1680752 - DNA, 15 bp, Homo sapiens
ctttgaccacctctt

SEQ ID NO: 1680753 - DNA, 15 bp, Homo sapiens
tttgaccacctctta

SEQ ID NO: 1680754 - DNA, 15 bp, Homo sapiens
ttgaccacctcttag

SEQ ID NO: 1680755 - DNA, 15 bp, Homo sapiens
tgaccacctcttagt

SEQ ID NO: 1680756 - DNA, 15 bp, Homo sapiens
gaccacctcttagtc

SEQ ID NO: 1680757 - DNA, 15 bp, Homo sapiens
accacctcttagtcc

SEQ ID NO: 1680758 - DNA, 15 bp, Homo sapiens
ccacctcttagtcca

SEQ ID NO: 1680759 - DNA, 15 bp, Homo sapiens
cacctcttagtccag

SEQ ID NO: 1680760 - DNA, 15 bp, Homo sapiens
acctcttagtccaga

SEQ ID NO: 1680761 - DNA, 15 bp, Homo sapiens
cctcttagtccagaa

SEQ ID NO: 1680762 - DNA, 15 bp, Homo sapiens
ctcttagtccagaac

SEQ ID NO: 1680763 - DNA, 15 bp, Homo sapiens
tcttagtccagaact

SEQ ID NO: 1680764 - DNA, 15 bp, Homo sapiens
cttagtccagaacta

SEQ ID NO: 1680765 - DNA, 15 bp, Homo sapiens
ttagtccagaactat

SEQ ID NO: 1680766 - DNA, 15 bp, Homo sapiens
tagtccagaactatc

SEQ ID NO: 1680767 - DNA, 15 bp, Homo sapiens
agtccagaactatca

SEQ ID NO: 1680768 - DNA, 15 bp, Homo sapiens
gtccagaactatcag

SEQ ID NO: 1680769 - DNA, 15 bp, Homo sapiens
tccagaactatcagg

SEQ ID NO: 1680770 - DNA, 15 bp, Homo sapiens
ccagaactatcaggg

SEQ ID NO: 1680771 - DNA, 15 bp, Homo sapiens
cagaactatcaggga

SEQ ID NO: 1680772 - DNA, 15 bp, Homo sapiens
agaactatcagggaa

SEQ ID NO: 1680773 - DNA, 15 bp, Homo sapiens
gaactatcagggaag

SEQ ID NO: 1680774 - DNA, 15 bp, Homo sapiens
aactatcagggaagg

SEQ ID NO: 1680775 - DNA, 15 bp, Homo sapiens
actatcagggaaggg

SEQ ID NO: 1680776 - DNA, 15 bp, Homo sapiens
ctatcagggaagggg

SEQ ID NO: 1680777 - DNA, 15 bp, Homo sapiens
tatcagggaaggggc

SEQ ID NO: 1680778 - DNA, 15 bp, Homo sapiens
atcagggaaggggca

SEQ ID NO: 1680779 - DNA, 15 bp, Homo sapiens
tcagggaaggggcac

SEQ ID NO: 1680780 - DNA, 15 bp, Homo sapiens
cagggaaggggcact

SEQ ID NO: 1680781 - DNA, 15 bp, Homo sapiens
agggaaggggcactg

SEQ ID NO: 1680782 - DNA, 15 bp, Homo sapiens
gggaaggggcactga

SEQ ID NO: 1680783 - DNA, 15 bp, Homo sapiens
ggaaggggcactgaa

SEQ ID NO: 1680784 - DNA, 15 bp, Homo sapiens
gaaggggcactgaat

SEQ ID NO: 1680785 - DNA, 15 bp, Homo sapiens
aaggggcactgaatg

SEQ ID NO: 1680786 - DNA, 15 bp, Homo sapiens
aggggcactgaatgc

SEQ ID NO: 1680787 - DNA, 15 bp, Homo sapiens
ggggcactgaatgcc

SEQ ID NO: 1680788 - DNA, 15 bp, Homo sapiens
gggcactgaatgcca

SEQ ID NO: 1680789 - DNA, 15 bp, Homo sapiens
ggcactgaatgccag

SEQ ID NO: 1680790 - DNA, 15 bp, Homo sapiens
gcactgaatgccagg

SEQ ID NO: 1680791 - DNA, 15 bp, Homo sapiens
actgaatgccaggct

SEQ ID NO: 1680792 - DNA, 15 bp, Homo sapiens
ctgaatgccaggctg

SEQ ID NO: 1680793 - DNA, 15 bp, Homo sapiens
tgaatgccaggctgg

SEQ ID NO: 1680794 - DNA, 15 bp, Homo sapiens
gaatgccaggctgga

SEQ ID NO: 1680795 - DNA, 15 bp, Homo sapiens
aatgccaggctggag

SEQ ID NO: 1680796 - DNA, 15 bp, Homo sapiens
atgccaggctggagg

SEQ ID NO: 1680797 - DNA, 15 bp, Homo sapiens
tgccaggctggagga

SEQ ID NO: 1680798 - DNA, 15 bp, Homo sapiens
gccaggctggaggag

SEQ ID NO: 1680799 - DNA, 15 bp, Homo sapiens
ccaggctggaggagg

SEQ ID NO: 1680800 - DNA, 15 bp, Homo sapiens
caggctggaggaggg

SEQ ID NO: 1680801 - DNA, 15 bp, Homo sapiens
aggctggaggagggt

SEQ ID NO: 1680802 - DNA, 15 bp, Homo sapiens
ggctggaggagggtt

SEQ ID NO: 1680803 - DNA, 15 bp, Homo sapiens
gctggaggagggttg

SEQ ID NO: 1680804 - DNA, 15 bp, Homo sapiens
ctggaggagggttgc

SEQ ID NO: 1680805 - DNA, 15 bp, Homo sapiens
tggaggagggttgca

SEQ ID NO: 1680806 - DNA, 15 bp, Homo sapiens
ggaggagggttgcat

SEQ ID NO: 1680807 - DNA, 15 bp, Homo sapiens
gaggagggttgcatg

SEQ ID NO: 1680808 - DNA, 15 bp, Homo sapiens
aggagggttgcatga

SEQ ID NO: 1680809 - DNA, 15 bp, Homo sapiens
ggagggttgcatgaa

SEQ ID NO: 1680810 - DNA, 15 bp, Homo sapiens
gagggttgcatgaaa

SEQ ID NO: 1680811 - DNA, 15 bp, Homo sapiens
agggttgcatgaaag

SEQ ID NO: 1680812 - DNA, 15 bp, Homo sapiens
gggttgcatgaaagg

SEQ ID NO: 1680813 - DNA, 15 bp, Homo sapiens
ggttgcatgaaaggc

SEQ ID NO: 1680814 - DNA, 15 bp, Homo sapiens
gttgcatgaaaggct

SEQ ID NO: 1680815 - DNA, 15 bp, Homo sapiens
ttgcatgaaaggctt

SEQ ID NO: 1680816 - DNA, 15 bp, Homo sapiens
tgcatgaaaggcttg

SEQ ID NO: 1680817 - DNA, 15 bp, Homo sapiens
gcatgaaaggcttga

SEQ ID NO: 1680818 - DNA, 15 bp, Homo sapiens
catgaaaggcttgac

SEQ ID NO: 1680819 - DNA, 15 bp, Homo sapiens
atgaaaggcttgacc

SEQ ID NO: 1680820 - DNA, 15 bp, Homo sapiens
tgaaaggcttgaccc

SEQ ID NO: 1680821 - DNA, 15 bp, Homo sapiens
gaaaggcttgacccc

SEQ ID NO: 1680822 - DNA, 15 bp, Homo sapiens
aaaggcttgacccca

SEQ ID NO: 1680823 - DNA, 15 bp, Homo sapiens
aaggcttgaccccag

SEQ ID NO: 1680824 - DNA, 15 bp, Homo sapiens
aggcttgaccccagc

SEQ ID NO: 1680825 - DNA, 15 bp, Homo sapiens
ggcttgaccccagct

SEQ ID NO: 1680826 - DNA, 15 bp, Homo sapiens
gcttgaccccagcta

SEQ ID NO: 1680827 - DNA, 15 bp, Homo sapiens
cttgaccccagctac

SEQ ID NO: 1680828 - DNA, 15 bp, Homo sapiens
ttgaccccagctact

SEQ ID NO: 1680829 - DNA, 15 bp, Homo sapiens
tgaccccagctactc

SEQ ID NO: 1680830 - DNA, 15 bp, Homo sapiens
gaccccagctactca

SEQ ID NO: 1680831 - DNA, 15 bp, Homo sapiens
accccagctactcag

SEQ ID NO: 1680832 - DNA, 15 bp, Homo sapiens
ggctgaggcagaagg

SEQ ID NO: 1680833 - DNA, 15 bp, Homo sapiens
gctgaggcagaagga

SEQ ID NO: 1680834 - DNA, 15 bp, Homo sapiens
ctgaggcagaaggac

SEQ ID NO: 1680835 - DNA, 15 bp, Homo sapiens
tgaggcagaaggact

SEQ ID NO: 1680836 - DNA, 15 bp, Homo sapiens
gaggcagaaggactg

SEQ ID NO: 1680837 - DNA, 15 bp, Homo sapiens
aggcagaaggactgt

SEQ ID NO: 1680838 - DNA, 15 bp, Homo sapiens
ggcagaaggactgtt

SEQ ID NO: 1680839 - DNA, 15 bp, Homo sapiens
gcagaaggactgttt

SEQ ID NO: 1680840 - DNA, 15 bp, Homo sapiens
cagaaggactgtttg

SEQ ID NO: 1680841 - DNA, 15 bp, Homo sapiens
agaaggactgtttga

SEQ ID NO: 1680842 - DNA, 15 bp, Homo sapiens
gaaggactgtttgac

SEQ ID NO: 1680843 - DNA, 15 bp, Homo sapiens
aaggactgtttgacc

SEQ ID NO: 1680844 - DNA, 15 bp, Homo sapiens
aggactgtttgacct

SEQ ID NO: 1680845 - DNA, 15 bp, Homo sapiens
ggactgtttgacctg

SEQ ID NO: 1680846 - DNA, 15 bp, Homo sapiens
gactgtttgacctga

SEQ ID NO: 1680847 - DNA, 15 bp, Homo sapiens
actgtttgacctgat

SEQ ID NO: 1680848 - DNA, 15 bp, Homo sapiens
ctgtttgacctgatg

SEQ ID NO: 1680849 - DNA, 15 bp, Homo sapiens
tgtttgacctgatga

SEQ ID NO: 1680850 - DNA, 15 bp, Homo sapiens
gtttgacctgatgaa

SEQ ID NO: 1680851 - DNA, 15 bp, Homo sapiens
tttgacctgatgaat

SEQ ID NO: 1680852 - DNA, 15 bp, Homo sapiens
ttgacctgatgaatt

SEQ ID NO: 1680853 - DNA, 15 bp, Homo sapiens
tgacctgatgaattc

SEQ ID NO: 1680854 - DNA, 15 bp, Homo sapiens
gacctgatgaattcg

SEQ ID NO: 1680855 - DNA, 15 bp, Homo sapiens
acctgatgaattcga

SEQ ID NO: 1680856 - DNA, 15 bp, Homo sapiens
cctgatgaattcgag

SEQ ID NO: 1680857 - DNA, 15 bp, Homo sapiens
ctgatgaattcgagg

SEQ ID NO: 1680858 - DNA, 15 bp, Homo sapiens
tgatgaattcgaggc

SEQ ID NO: 1680859 - DNA, 15 bp, Homo sapiens
gatgaattcgaggct

SEQ ID NO: 1680860 - DNA, 15 bp, Homo sapiens
atgaattcgaggctg

SEQ ID NO: 1680861 - DNA, 15 bp, Homo sapiens
tgaattcgaggctgc

SEQ ID NO: 1680862 - DNA, 15 bp, Homo sapiens
gaattcgaggctgca

SEQ ID NO: 1680863 - DNA, 15 bp, Homo sapiens
aattcgaggctgcag

SEQ ID NO: 1680864 - DNA, 15 bp, Homo sapiens
attcgaggctgcagt

SEQ ID NO: 1680865 - DNA, 15 bp, Homo sapiens
ttcgaggctgcagtg

SEQ ID NO: 1680866 - DNA, 15 bp, Homo sapiens
ctgcagtgaggctgt

SEQ ID NO: 1680867 - DNA, 15 bp, Homo sapiens
tgcagtgaggctgtg

SEQ ID NO: 1680868 - DNA, 15 bp, Homo sapiens
gcagtgaggctgtga

SEQ ID NO: 1680869 - DNA, 15 bp, Homo sapiens
cagtgaggctgtgat

SEQ ID NO: 1680870 - DNA, 15 bp, Homo sapiens
agtgaggctgtgatc

SEQ ID NO: 1680871 - DNA, 15 bp, Homo sapiens
gtgaggctgtgatcg

SEQ ID NO: 1680872 - DNA, 15 bp, Homo sapiens
tgaggctgtgatcgc

SEQ ID NO: 1680873 - DNA, 15 bp, Homo sapiens
gaggctgtgatcgcg

SEQ ID NO: 1680874 - DNA, 15 bp, Homo sapiens
aggctgtgatcgcgc

SEQ ID NO: 1680875 - DNA, 15 bp, Homo sapiens
ggctgtgatcgcgcc

SEQ ID NO: 1680876 - DNA, 15 bp, Homo sapiens
gctgtgatcgcgcca

SEQ ID NO: 1680877 - DNA, 15 bp, Homo sapiens
ctgtgatcgcgccac

SEQ ID NO: 1680878 - DNA, 15 bp, Homo sapiens
tgtgatcgcgccact

SEQ ID NO: 1680879 - DNA, 15 bp, Homo sapiens
gtgatcgcgccactg

SEQ ID NO: 1680880 - DNA, 15 bp, Homo sapiens
tccagcctaggcaat

SEQ ID NO: 1680881 - DNA, 15 bp, Homo sapiens
ccagcctaggcaata

SEQ ID NO: 1680882 - DNA, 15 bp, Homo sapiens
cagcctaggcaatag

SEQ ID NO: 1680883 - DNA, 15 bp, Homo sapiens
agcctaggcaataga

SEQ ID NO: 1680884 - DNA, 15 bp, Homo sapiens
gcctaggcaatagag

SEQ ID NO: 1680885 - DNA, 15 bp, Homo sapiens
cctaggcaatagagt

SEQ ID NO: 1680886 - DNA, 15 bp, Homo sapiens
ctaggcaatagagtg

SEQ ID NO: 1680887 - DNA, 15 bp, Homo sapiens
taggcaatagagtga

SEQ ID NO: 1680888 - DNA, 15 bp, Homo sapiens
aggcaatagagtgag

SEQ ID NO: 1680889 - DNA, 15 bp, Homo sapiens
caatagagtgagacc

SEQ ID NO: 1680890 - DNA, 15 bp, Homo sapiens
aatagagtgagaccc

SEQ ID NO: 1680891 - DNA, 15 bp, Homo sapiens
atagagtgagaccct

SEQ ID NO: 1680892 - DNA, 15 bp, Homo sapiens
tagagtgagaccctg

SEQ ID NO: 1680893 - DNA, 15 bp, Homo sapiens
tgtctctaaaaaaaa

SEQ ID NO: 1680894 - DNA, 15 bp, Homo sapiens
gtctctaaaaaaaaa

SEQ ID NO: 1680895 - DNA, 15 bp, Homo sapiens
tctctaaaaaaaaaa

SEQ ID NO: 1680896 - DNA, 15 bp, Homo sapiens
ctctaaaaaaaaaaa

SEQ ID NO: 1680897 - DNA, 15 bp, Homo sapiens
aaaaaaaaaaaatgg

SEQ ID NO: 1680898 - DNA, 15 bp, Homo sapiens
aaaaaaaaaaatggc

SEQ ID NO: 1680899 - DNA, 15 bp, Homo sapiens
aaaaaaaaaatggct

SEQ ID NO: 1680900 - DNA, 15 bp, Homo sapiens
aaaaaaaaatggctc

SEQ ID NO: 1680901 - DNA, 15 bp, Homo sapiens
aaaaaaaatggctca

SEQ ID NO: 1680902 - DNA, 15 bp, Homo sapiens
aaaaaaatggctcag

SEQ ID NO: 1680903 - DNA, 15 bp, Homo sapiens
aaaaaatggctcagc

SEQ ID NO: 1680904 - DNA, 15 bp, Homo sapiens
aaaaatggctcagcc

SEQ ID NO: 1680905 - DNA, 15 bp, Homo sapiens
aaaatggctcagcca

SEQ ID NO: 1680906 - DNA, 15 bp, Homo sapiens
aaatggctcagccat

SEQ ID NO: 1680907 - DNA, 15 bp, Homo sapiens
aatggctcagccatc

SEQ ID NO: 1680908 - DNA, 15 bp, Homo sapiens
atggctcagccatcc

SEQ ID NO: 1680909 - DNA, 15 bp, Homo sapiens
tggctcagccatccc

SEQ ID NO: 1680910 - DNA, 15 bp, Homo sapiens
ggctcagccatccca

SEQ ID NO: 1680911 - DNA, 15 bp, Homo sapiens
gctcagccatcccaa

SEQ ID NO: 1680912 - DNA, 15 bp, Homo sapiens
ctcagccatcccaag

SEQ ID NO: 1680913 - DNA, 15 bp, Homo sapiens
tcagccatcccaagc

SEQ ID NO: 1680914 - DNA, 15 bp, Homo sapiens
cagccatcccaagct

SEQ ID NO: 1680915 - DNA, 15 bp, Homo sapiens
agccatcccaagctg

SEQ ID NO: 1680916 - DNA, 15 bp, Homo sapiens
gccatcccaagctgc

SEQ ID NO: 1680917 - DNA, 15 bp, Homo sapiens
ccatcccaagctgct

SEQ ID NO: 1680918 - DNA, 15 bp, Homo sapiens
catcccaagctgctc

SEQ ID NO: 1680919 - DNA, 15 bp, Homo sapiens
atcccaagctgctcc

SEQ ID NO: 1680920 - DNA, 15 bp, Homo sapiens
tcccaagctgctccc

SEQ ID NO: 1680921 - DNA, 15 bp, Homo sapiens
cccaagctgctccca

SEQ ID NO: 1680922 - DNA, 15 bp, Homo sapiens
ccaagctgctcccag

SEQ ID NO: 1680923 - DNA, 15 bp, Homo sapiens
caagctgctcccagc

SEQ ID NO: 1680924 - DNA, 15 bp, Homo sapiens
aagctgctcccagct

SEQ ID NO: 1680925 - DNA, 15 bp, Homo sapiens
agctgctcccagctg

SEQ ID NO: 1680926 - DNA, 15 bp, Homo sapiens
gctgctcccagctgc

SEQ ID NO: 1680927 - DNA, 15 bp, Homo sapiens
ctgctcccagctgcc

SEQ ID NO: 1680928 - DNA, 15 bp, Homo sapiens
tgctcccagctgcct

SEQ ID NO: 1680929 - DNA, 15 bp, Homo sapiens
gctcccagctgcctg

SEQ ID NO: 1680930 - DNA, 15 bp, Homo sapiens
ctcccagctgcctgc

SEQ ID NO: 1680931 - DNA, 15 bp, Homo sapiens
tcccagctgcctgcc

SEQ ID NO: 1680932 - DNA, 15 bp, Homo sapiens
cccagctgcctgccc

SEQ ID NO: 1680933 - DNA, 15 bp, Homo sapiens
ccagctgcctgcccc

SEQ ID NO: 1680934 - DNA, 15 bp, Homo sapiens
cagctgcctgcccct

SEQ ID NO: 1680935 - DNA, 15 bp, Homo sapiens
agctgcctgcccctc

SEQ ID NO: 1680936 - DNA, 15 bp, Homo sapiens
gctgcctgcccctct

SEQ ID NO: 1680937 - DNA, 15 bp, Homo sapiens
ctgcctgcccctcta

SEQ ID NO: 1680938 - DNA, 15 bp, Homo sapiens
tgcctgcccctctag

SEQ ID NO: 1680939 - DNA, 15 bp, Homo sapiens
gcctgcccctctagg

SEQ ID NO: 1680940 - DNA, 15 bp, Homo sapiens
cctgcccctctaggt

SEQ ID NO: 1680941 - DNA, 15 bp, Homo sapiens
ctgcccctctaggtg

SEQ ID NO: 1680942 - DNA, 15 bp, Homo sapiens
tgcccctctaggtgg

SEQ ID NO: 1680943 - DNA, 15 bp, Homo sapiens
gcccctctaggtggc

SEQ ID NO: 1680944 - DNA, 15 bp, Homo sapiens
cccctctaggtggcc

SEQ ID NO: 1680945 - DNA, 15 bp, Homo sapiens
ccctctaggtggccc

SEQ ID NO: 1680946 - DNA, 15 bp, Homo sapiens
cctctaggtggcccc

SEQ ID NO: 1680947 - DNA, 15 bp, Homo sapiens
ctctaggtggccccc

SEQ ID NO: 1680948 - DNA, 15 bp, Homo sapiens
tctaggtggccccca

SEQ ID NO: 1680949 - DNA, 15 bp, Homo sapiens
ctaggtggcccccac

SEQ ID NO: 1680950 - DNA, 15 bp, Homo sapiens
taggtggcccccact

SEQ ID NO: 1680951 - DNA, 15 bp, Homo sapiens
aggtggcccccacta

SEQ ID NO: 1680952 - DNA, 15 bp, Homo sapiens
ggtggcccccactac

SEQ ID NO: 1680953 - DNA, 15 bp, Homo sapiens
gtggcccccactact

SEQ ID NO: 1680954 - DNA, 15 bp, Homo sapiens
tggcccccactactg

SEQ ID NO: 1680955 - DNA, 15 bp, Homo sapiens
ggcccccactactgg

SEQ ID NO: 1680956 - DNA, 15 bp, Homo sapiens
gcccccactactggc

SEQ ID NO: 1680957 - DNA, 15 bp, Homo sapiens
cccccactactggcc

SEQ ID NO: 1680958 - DNA, 15 bp, Homo sapiens
ccccactactggcct

SEQ ID NO: 1680959 - DNA, 15 bp, Homo sapiens
cccactactggcctg

SEQ ID NO: 1680960 - DNA, 15 bp, Homo sapiens
ccactactggcctga

SEQ ID NO: 1680961 - DNA, 15 bp, Homo sapiens
cactactggcctgag

SEQ ID NO: 1680962 - DNA, 15 bp, Homo sapiens
actactggcctgagg

SEQ ID NO: 1680963 - DNA, 15 bp, Homo sapiens
ctactggcctgagga

SEQ ID NO: 1680964 - DNA, 15 bp, Homo sapiens
tactggcctgaggat

SEQ ID NO: 1680965 - DNA, 15 bp, Homo sapiens
actggcctgaggatg

SEQ ID NO: 1680966 - DNA, 15 bp, Homo sapiens
ctggcctgaggatgc

SEQ ID NO: 1680967 - DNA, 15 bp, Homo sapiens
tggcctgaggatgca

SEQ ID NO: 1680968 - DNA, 15 bp, Homo sapiens
ggcctgaggatgcac

SEQ ID NO: 1680969 - DNA, 15 bp, Homo sapiens
gcctgaggatgcact

SEQ ID NO: 1680970 - DNA, 15 bp, Homo sapiens
cctgaggatgcactt

SEQ ID NO: 1680971 - DNA, 15 bp, Homo sapiens
ctgaggatgcacttt

SEQ ID NO: 1680972 - DNA, 15 bp, Homo sapiens
tgaggatgcacttta

SEQ ID NO: 1680973 - DNA, 15 bp, Homo sapiens
gaggatgcactttat

SEQ ID NO: 1680974 - DNA, 15 bp, Homo sapiens
aggatgcactttatc

SEQ ID NO: 1680975 - DNA, 15 bp, Homo sapiens
ggatgcactttatcc

SEQ ID NO: 1680976 - DNA, 15 bp, Homo sapiens
gatgcactttatccc

SEQ ID NO: 1680977 - DNA, 15 bp, Homo sapiens
atgcactttatcccc

SEQ ID NO: 1680978 - DNA, 15 bp, Homo sapiens
tgcactttatccccg

SEQ ID NO: 1680979 - DNA, 15 bp, Homo sapiens
gcactttatccccgc

SEQ ID NO: 1680980 - DNA, 15 bp, Homo sapiens
cactttatccccgcc

SEQ ID NO: 1680981 - DNA, 15 bp, Homo sapiens
actttatccccgcca

SEQ ID NO: 1680982 - DNA, 15 bp, Homo sapiens
ctttatccccgccag

SEQ ID NO: 1680983 - DNA, 15 bp, Homo sapiens
tttatccccgccagg

SEQ ID NO: 1680984 - DNA, 15 bp, Homo sapiens
ttatccccgccaggg

SEQ ID NO: 1680985 - DNA, 15 bp, Homo sapiens
tatccccgccagggc

SEQ ID NO: 1680986 - DNA, 15 bp, Homo sapiens
atccccgccagggcc

SEQ ID NO: 1680987 - DNA, 15 bp, Homo sapiens
tccccgccagggcct

SEQ ID NO: 1680988 - DNA, 15 bp, Homo sapiens
ccccgccagggcctg

SEQ ID NO: 1680989 - DNA, 15 bp, Homo sapiens
cccgccagggcctga

SEQ ID NO: 1680990 - DNA, 15 bp, Homo sapiens
ccgccagggcctgag

SEQ ID NO: 1680991 - DNA, 15 bp, Homo sapiens
cgccagggcctgagg

SEQ ID NO: 1680992 - DNA, 15 bp, Homo sapiens
gccagggcctgagga

SEQ ID NO: 1680993 - DNA, 15 bp, Homo sapiens
ccagggcctgaggag

SEQ ID NO: 1680994 - DNA, 15 bp, Homo sapiens
cagggcctgaggagt

SEQ ID NO: 1680995 - DNA, 15 bp, Homo sapiens
agggcctgaggagtc

SEQ ID NO: 1680996 - DNA, 15 bp, Homo sapiens
gggcctgaggagtcc

SEQ ID NO: 1680997 - DNA, 15 bp, Homo sapiens
ggcctgaggagtcct

SEQ ID NO: 1680998 - DNA, 15 bp, Homo sapiens
gcctgaggagtcctg

SEQ ID NO: 1680999 - DNA, 15 bp, Homo sapiens
cctgaggagtcctgg

SEQ ID NO: 1681000 - DNA, 15 bp, Homo sapiens
ctgaggagtcctggg

SEQ ID NO: 1681001 - DNA, 15 bp, Homo sapiens
tgaggagtcctgggg

SEQ ID NO: 1681002 - DNA, 15 bp, Homo sapiens
gaggagtcctgggga

SEQ ID NO: 1681003 - DNA, 15 bp, Homo sapiens
aggagtcctggggaa

SEQ ID NO: 1681004 - DNA, 15 bp, Homo sapiens
ggagtcctggggaaa

SEQ ID NO: 1681005 - DNA, 15 bp, Homo sapiens
gagtcctggggaaag

SEQ ID NO: 1681006 - DNA, 15 bp, Homo sapiens
agtcctggggaaagg

SEQ ID NO: 1681007 - DNA, 15 bp, Homo sapiens
gtcctggggaaaggt

SEQ ID NO: 1681008 - DNA, 15 bp, Homo sapiens
tcctggggaaaggta

SEQ ID NO: 1681009 - DNA, 15 bp, Homo sapiens
cctggggaaaggtac

SEQ ID NO: 1681010 - DNA, 15 bp, Homo sapiens
ctggggaaaggtacc

SEQ ID NO: 1681011 - DNA, 15 bp, Homo sapiens
tggggaaaggtaccc

SEQ ID NO: 1681012 - DNA, 15 bp, Homo sapiens
ggggaaaggtaccca

SEQ ID NO: 1681013 - DNA, 15 bp, Homo sapiens
gggaaaggtacccaa

SEQ ID NO: 1681014 - DNA, 15 bp, Homo sapiens
ggaaaggtacccaag

SEQ ID NO: 1681015 - DNA, 15 bp, Homo sapiens
gaaaggtacccaagt

SEQ ID NO: 1681016 - DNA, 15 bp, Homo sapiens
aaaggtacccaagtc

SEQ ID NO: 1681017 - DNA, 15 bp, Homo sapiens
aaggtacccaagtct

SEQ ID NO: 1681018 - DNA, 15 bp, Homo sapiens
aggtacccaagtcta

SEQ ID NO: 1681019 - DNA, 15 bp, Homo sapiens
ggtacccaagtctag

SEQ ID NO: 1681020 - DNA, 15 bp, Homo sapiens
gtacccaagtctagt

SEQ ID NO: 1681021 - DNA, 15 bp, Homo sapiens
tacccaagtctagtc

SEQ ID NO: 1681022 - DNA, 15 bp, Homo sapiens
acccaagtctagtcc

SEQ ID NO: 1681023 - DNA, 15 bp, Homo sapiens
cccaagtctagtcct

SEQ ID NO: 1681024 - DNA, 15 bp, Homo sapiens
ccaagtctagtcctc

SEQ ID NO: 1681025 - DNA, 15 bp, Homo sapiens
caagtctagtcctca

SEQ ID NO: 1681026 - DNA, 15 bp, Homo sapiens
aagtctagtcctcag

SEQ ID NO: 1681027 - DNA, 15 bp, Homo sapiens
agtctagtcctcagg

SEQ ID NO: 1681028 - DNA, 15 bp, Homo sapiens
gtctagtcctcagga

SEQ ID NO: 1681029 - DNA, 15 bp, Homo sapiens
tctagtcctcaggag

SEQ ID NO: 1681030 - DNA, 15 bp, Homo sapiens
ctagtcctcaggaga

SEQ ID NO: 1681031 - DNA, 15 bp, Homo sapiens
tagtcctcaggagaa

SEQ ID NO: 1681032 - DNA, 15 bp, Homo sapiens
agtcctcaggagaag

SEQ ID NO: 1681033 - DNA, 15 bp, Homo sapiens
gtcctcaggagaagc

SEQ ID NO: 1681034 - DNA, 15 bp, Homo sapiens
tcctcaggagaagcc

SEQ ID NO: 1681035 - DNA, 15 bp, Homo sapiens
cctcaggagaagccg

SEQ ID NO: 1681036 - DNA, 15 bp, Homo sapiens
ctcaggagaagccgc

SEQ ID NO: 1681037 - DNA, 15 bp, Homo sapiens
tcaggagaagccgcc

SEQ ID NO: 1681038 - DNA, 15 bp, Homo sapiens
caggagaagccgccc

SEQ ID NO: 1681039 - DNA, 15 bp, Homo sapiens
aggagaagccgccca

SEQ ID NO: 1681040 - DNA, 15 bp, Homo sapiens
ggagaagccgcccag

SEQ ID NO: 1681041 - DNA, 15 bp, Homo sapiens
gagaagccgcccagg

SEQ ID NO: 1681042 - DNA, 15 bp, Homo sapiens
agaagccgcccaggg

SEQ ID NO: 1681043 - DNA, 15 bp, Homo sapiens
gaagccgcccaggga

SEQ ID NO: 1681044 - DNA, 15 bp, Homo sapiens
aagccgcccagggag

SEQ ID NO: 1681045 - DNA, 15 bp, Homo sapiens
agccgcccagggagc

SEQ ID NO: 1681046 - DNA, 15 bp, Homo sapiens
gccgcccagggagca

SEQ ID NO: 1681047 - DNA, 15 bp, Homo sapiens
ccgcccagggagcac

SEQ ID NO: 1681048 - DNA, 15 bp, Homo sapiens
cgcccagggagcact

SEQ ID NO: 1681049 - DNA, 15 bp, Homo sapiens
gcccagggagcacta

SEQ ID NO: 1681050 - DNA, 15 bp, Homo sapiens
cccagggagcactag

SEQ ID NO: 1681051 - DNA, 15 bp, Homo sapiens
ccagggagcactagg

SEQ ID NO: 1681052 - DNA, 15 bp, Homo sapiens
cagggagcactaggg

SEQ ID NO: 1681053 - DNA, 15 bp, Homo sapiens
agggagcactagggc

SEQ ID NO: 1681054 - DNA, 15 bp, Homo sapiens
gggagcactagggcc

SEQ ID NO: 1681055 - DNA, 15 bp, Homo sapiens
ggagcactagggccc

SEQ ID NO: 1681056 - DNA, 15 bp, Homo sapiens
gagcactagggcccg

SEQ ID NO: 1681057 - DNA, 15 bp, Homo sapiens
agcactagggcccga

SEQ ID NO: 1681058 - DNA, 15 bp, Homo sapiens
gcactagggcccgag

SEQ ID NO: 1681059 - DNA, 15 bp, Homo sapiens
cactagggcccgagg

SEQ ID NO: 1681060 - DNA, 15 bp, Homo sapiens
actagggcccgagga

SEQ ID NO: 1681061 - DNA, 15 bp, Homo sapiens
ctagggcccgaggaa

SEQ ID NO: 1681062 - DNA, 15 bp, Homo sapiens
tagggcccgaggaag

SEQ ID NO: 1681063 - DNA, 15 bp, Homo sapiens
agggcccgaggaagg

SEQ ID NO: 1681064 - DNA, 15 bp, Homo sapiens
gggcccgaggaaggg

SEQ ID NO: 1681065 - DNA, 15 bp, Homo sapiens
ggcccgaggaagggt

SEQ ID NO: 1681066 - DNA, 15 bp, Homo sapiens
gcccgaggaagggtt

SEQ ID NO: 1681067 - DNA, 15 bp, Homo sapiens
cccgaggaagggttc

SEQ ID NO: 1681068 - DNA, 15 bp, Homo sapiens
ccgaggaagggttca

SEQ ID NO: 1681069 - DNA, 15 bp, Homo sapiens
cgaggaagggttcaa

SEQ ID NO: 1681070 - DNA, 15 bp, Homo sapiens
gaggaagggttcaac

SEQ ID NO: 1681071 - DNA, 15 bp, Homo sapiens
aggaagggttcaacc

SEQ ID NO: 1681072 - DNA, 15 bp, Homo sapiens
ggaagggttcaacct

SEQ ID NO: 1681073 - DNA, 15 bp, Homo sapiens
gaagggttcaacctc

SEQ ID NO: 1681074 - DNA, 15 bp, Homo sapiens
aagggttcaacctcg

SEQ ID NO: 1681075 - DNA, 15 bp, Homo sapiens
agggttcaacctcga

SEQ ID NO: 1681076 - DNA, 15 bp, Homo sapiens
gggttcaacctcgag

SEQ ID NO: 1681077 - DNA, 15 bp, Homo sapiens
ggttcaacctcgaga

SEQ ID NO: 1681078 - DNA, 15 bp, Homo sapiens
gttcaacctcgagac

SEQ ID NO: 1681079 - DNA, 15 bp, Homo sapiens
ttcaacctcgagact

SEQ ID NO: 1681080 - DNA, 15 bp, Homo sapiens
tcaacctcgagactc

SEQ ID NO: 1681081 - DNA, 15 bp, Homo sapiens
caacctcgagactcc

SEQ ID NO: 1681082 - DNA, 15 bp, Homo sapiens
aacctcgagactcca

SEQ ID NO: 1681083 - DNA, 15 bp, Homo sapiens
acctcgagactccat

SEQ ID NO: 1681084 - DNA, 15 bp, Homo sapiens
cctcgagactccata

SEQ ID NO: 1681085 - DNA, 15 bp, Homo sapiens
ctcgagactccatag

SEQ ID NO: 1681086 - DNA, 15 bp, Homo sapiens
tcgagactccatagc

SEQ ID NO: 1681087 - DNA, 15 bp, Homo sapiens
cgagactccatagcc

SEQ ID NO: 1681088 - DNA, 15 bp, Homo sapiens
gagactccatagccc

SEQ ID NO: 1681089 - DNA, 15 bp, Homo sapiens
agactccatagcccc

SEQ ID NO: 1681090 - DNA, 15 bp, Homo sapiens
gactccatagcccct

SEQ ID NO: 1681091 - DNA, 15 bp, Homo sapiens
actccatagcccctg

SEQ ID NO: 1681092 - DNA, 15 bp, Homo sapiens
ctccatagcccctgg

SEQ ID NO: 1681093 - DNA, 15 bp, Homo sapiens
tccatagcccctggg

SEQ ID NO: 1681094 - DNA, 15 bp, Homo sapiens
ccatagcccctgggc

SEQ ID NO: 1681095 - DNA, 15 bp, Homo sapiens
catagcccctgggct

SEQ ID NO: 1681096 - DNA, 15 bp, Homo sapiens
atagcccctgggctc

SEQ ID NO: 1681097 - DNA, 15 bp, Homo sapiens
tagcccctgggctcc

SEQ ID NO: 1681098 - DNA, 15 bp, Homo sapiens
agcccctgggctccc

SEQ ID NO: 1681099 - DNA, 15 bp, Homo sapiens
gcccctgggctcccg

SEQ ID NO: 1681100 - DNA, 15 bp, Homo sapiens
cccctgggctcccgt

SEQ ID NO: 1681101 - DNA, 15 bp, Homo sapiens
ccctgggctcccgtc

SEQ ID NO: 1681102 - DNA, 15 bp, Homo sapiens
cctgggctcccgtcc

SEQ ID NO: 1681103 - DNA, 15 bp, Homo sapiens
ctgggctcccgtccc

SEQ ID NO: 1681104 - DNA, 15 bp, Homo sapiens
tgggctcccgtcccc

SEQ ID NO: 1681105 - DNA, 15 bp, Homo sapiens
gggctcccgtcccca

SEQ ID NO: 1681106 - DNA, 15 bp, Homo sapiens
ggctcccgtccccag

SEQ ID NO: 1681107 - DNA, 15 bp, Homo sapiens
gctcccgtccccaga

SEQ ID NO: 1681108 - DNA, 15 bp, Homo sapiens
ctcccgtccccagaa

SEQ ID NO: 1681109 - DNA, 15 bp, Homo sapiens
tcccgtccccagaaa

SEQ ID NO: 1681110 - DNA, 15 bp, Homo sapiens
cccgtccccagaaac

SEQ ID NO: 1681111 - DNA, 15 bp, Homo sapiens
ccgtccccagaaaca

SEQ ID NO: 1681112 - DNA, 15 bp, Homo sapiens
cgtccccagaaacac

SEQ ID NO: 1681113 - DNA, 15 bp, Homo sapiens
gtccccagaaacacc

SEQ ID NO: 1681114 - DNA, 15 bp, Homo sapiens
tccccagaaacacca

SEQ ID NO: 1681115 - DNA, 15 bp, Homo sapiens
ccccagaaacaccag

SEQ ID NO: 1681116 - DNA, 15 bp, Homo sapiens
cccagaaacaccagt

SEQ ID NO: 1681117 - DNA, 15 bp, Homo sapiens
ccagaaacaccagtt

SEQ ID NO: 1681118 - DNA, 15 bp, Homo sapiens
cagaaacaccagtta

SEQ ID NO: 1681119 - DNA, 15 bp, Homo sapiens
agaaacaccagttac

SEQ ID NO: 1681120 - DNA, 15 bp, Homo sapiens
gaaacaccagttacg

SEQ ID NO: 1681121 - DNA, 15 bp, Homo sapiens
aaacaccagttacga

SEQ ID NO: 1681122 - DNA, 15 bp, Homo sapiens
aacaccagttacgag

SEQ ID NO: 1681123 - DNA, 15 bp, Homo sapiens
acaccagttacgagc

SEQ ID NO: 1681124 - DNA, 15 bp, Homo sapiens
caccagttacgagca

SEQ ID NO: 1681125 - DNA, 15 bp, Homo sapiens
accagttacgagcag

SEQ ID NO: 1681126 - DNA, 15 bp, Homo sapiens
ccagttacgagcagg

SEQ ID NO: 1681127 - DNA, 15 bp, Homo sapiens
cagttacgagcaggg

SEQ ID NO: 1681128 - DNA, 15 bp, Homo sapiens
agttacgagcagggg

SEQ ID NO: 1681129 - DNA, 15 bp, Homo sapiens
gttacgagcaggggg

SEQ ID NO: 1681130 - DNA, 15 bp, Homo sapiens
ttacgagcagggggc

SEQ ID NO: 1681131 - DNA, 15 bp, Homo sapiens
tacgagcagggggct

SEQ ID NO: 1681132 - DNA, 15 bp, Homo sapiens
acgagcagggggctg

SEQ ID NO: 1681133 - DNA, 15 bp, Homo sapiens
cgagcagggggctgg

SEQ ID NO: 1681134 - DNA, 15 bp, Homo sapiens
gagcagggggctggc

SEQ ID NO: 1681135 - DNA, 15 bp, Homo sapiens
agcagggggctggcc

SEQ ID NO: 1681136 - DNA, 15 bp, Homo sapiens
gcagggggctggcca

SEQ ID NO: 1681137 - DNA, 15 bp, Homo sapiens
cagggggctggccat

SEQ ID NO: 1681138 - DNA, 15 bp, Homo sapiens
agggggctggccatg

SEQ ID NO: 1681139 - DNA, 15 bp, Homo sapiens
gggggctggccatgg

SEQ ID NO: 1681140 - DNA, 15 bp, Homo sapiens
ggggctggccatggt

SEQ ID NO: 1681141 - DNA, 15 bp, Homo sapiens
gggctggccatggtg

SEQ ID NO: 1681142 - DNA, 15 bp, Homo sapiens
ggctggccatggtgt

SEQ ID NO: 1681143 - DNA, 15 bp, Homo sapiens
gctggccatggtgtg

SEQ ID NO: 1681144 - DNA, 15 bp, Homo sapiens
ctggccatggtgtga

SEQ ID NO: 1681145 - DNA, 15 bp, Homo sapiens
tggccatggtgtgaa

SEQ ID NO: 1681146 - DNA, 15 bp, Homo sapiens
ggccatggtgtgaat

SEQ ID NO: 1681147 - DNA, 15 bp, Homo sapiens
gccatggtgtgaatt

SEQ ID NO: 1681148 - DNA, 15 bp, Homo sapiens
ccatggtgtgaattc

SEQ ID NO: 1681149 - DNA, 15 bp, Homo sapiens
catggtgtgaattca

SEQ ID NO: 1681150 - DNA, 15 bp, Homo sapiens
atggtgtgaattcat

SEQ ID NO: 1681151 - DNA, 15 bp, Homo sapiens
tggtgtgaattcatg

SEQ ID NO: 1681152 - DNA, 15 bp, Homo sapiens
ggtgtgaattcatga

SEQ ID NO: 1681153 - DNA, 15 bp, Homo sapiens
gtgtgaattcatgac

SEQ ID NO: 1681154 - DNA, 15 bp, Homo sapiens
tgtgaattcatgacc

SEQ ID NO: 1681155 - DNA, 15 bp, Homo sapiens
gtgaattcatgacct

SEQ ID NO: 1681156 - DNA, 15 bp, Homo sapiens
tgaattcatgacctg

SEQ ID NO: 1681157 - DNA, 15 bp, Homo sapiens
gaattcatgacctgc

SEQ ID NO: 1681158 - DNA, 15 bp, Homo sapiens
aattcatgacctgca

SEQ ID NO: 1681159 - DNA, 15 bp, Homo sapiens
attcatgacctgcac

SEQ ID NO: 1681160 - DNA, 15 bp, Homo sapiens
ttcatgacctgcaca

SEQ ID NO: 1681161 - DNA, 15 bp, Homo sapiens
tcatgacctgcacac

SEQ ID NO: 1681162 - DNA, 15 bp, Homo sapiens
catgacctgcacacc

SEQ ID NO: 1681163 - DNA, 15 bp, Homo sapiens
atgacctgcacacct

SEQ ID NO: 1681164 - DNA, 15 bp, Homo sapiens
tgacctgcacacctc

SEQ ID NO: 1681165 - DNA, 15 bp, Homo sapiens
gacctgcacacctct

SEQ ID NO: 1681166 - DNA, 15 bp, Homo sapiens
acctgcacacctctt

SEQ ID NO: 1681167 - DNA, 15 bp, Homo sapiens
cctgcacacctcttg

SEQ ID NO: 1681168 - DNA, 15 bp, Homo sapiens
ctgcacacctcttgc

SEQ ID NO: 1681169 - DNA, 15 bp, Homo sapiens
tgcacacctcttgcc

SEQ ID NO: 1681170 - DNA, 15 bp, Homo sapiens
gcacacctcttgccg

SEQ ID NO: 1681171 - DNA, 15 bp, Homo sapiens
cacacctcttgccgt

SEQ ID NO: 1681172 - DNA, 15 bp, Homo sapiens
acacctcttgccgta

SEQ ID NO: 1681173 - DNA, 15 bp, Homo sapiens
cacctcttgccgtaa

SEQ ID NO: 1681174 - DNA, 15 bp, Homo sapiens
acctcttgccgtaat

SEQ ID NO: 1681175 - DNA, 15 bp, Homo sapiens
cctcttgccgtaatg

SEQ ID NO: 1681176 - DNA, 15 bp, Homo sapiens
ctcttgccgtaatga

SEQ ID NO: 1681177 - DNA, 15 bp, Homo sapiens
tcttgccgtaatgac

SEQ ID NO: 1681178 - DNA, 15 bp, Homo sapiens
cttgccgtaatgact

SEQ ID NO: 1681179 - DNA, 15 bp, Homo sapiens
ttgccgtaatgacta

SEQ ID NO: 1681180 - DNA, 15 bp, Homo sapiens
tgccgtaatgactaa

SEQ ID NO: 1681181 - DNA, 15 bp, Homo sapiens
gccgtaatgactaag

SEQ ID NO: 1681182 - DNA, 15 bp, Homo sapiens
ccgtaatgactaagt

SEQ ID NO: 1681183 - DNA, 15 bp, Homo sapiens
cgtaatgactaagtg

SEQ ID NO: 1681184 - DNA, 15 bp, Homo sapiens
gtaatgactaagtgg

SEQ ID NO: 1681185 - DNA, 15 bp, Homo sapiens
taatgactaagtggc

SEQ ID NO: 1681186 - DNA, 15 bp, Homo sapiens
aatgactaagtggct

SEQ ID NO: 1681187 - DNA, 15 bp, Homo sapiens
atgactaagtggcta

SEQ ID NO: 1681188 - DNA, 15 bp, Homo sapiens
tgactaagtggctag

SEQ ID NO: 1681189 - DNA, 15 bp, Homo sapiens
gactaagtggctaga

SEQ ID NO: 1681190 - DNA, 15 bp, Homo sapiens
actaagtggctagag

SEQ ID NO: 1681191 - DNA, 15 bp, Homo sapiens
ctaagtggctagagc

SEQ ID NO: 1681192 - DNA, 15 bp, Homo sapiens
taagtggctagagct

SEQ ID NO: 1681193 - DNA, 15 bp, Homo sapiens
aagtggctagagctt

SEQ ID NO: 1681194 - DNA, 15 bp, Homo sapiens
agtggctagagcttc

SEQ ID NO: 1681195 - DNA, 15 bp, Homo sapiens
gtggctagagcttca

SEQ ID NO: 1681196 - DNA, 15 bp, Homo sapiens
tggctagagcttcag

SEQ ID NO: 1681197 - DNA, 15 bp, Homo sapiens
ggctagagcttcagg

SEQ ID NO: 1681198 - DNA, 15 bp, Homo sapiens
gctagagcttcaggc

SEQ ID NO: 1681199 - DNA, 15 bp, Homo sapiens
ctagagcttcaggct

SEQ ID NO: 1681200 - DNA, 15 bp, Homo sapiens
tagagcttcaggctg

SEQ ID NO: 1681201 - DNA, 15 bp, Homo sapiens
agagcttcaggctgc

SEQ ID NO: 1681202 - DNA, 15 bp, Homo sapiens
gagcttcaggctgcc

SEQ ID NO: 1681203 - DNA, 15 bp, Homo sapiens
agcttcaggctgccc

SEQ ID NO: 1681204 - DNA, 15 bp, Homo sapiens
gcttcaggctgcccc

SEQ ID NO: 1681205 - DNA, 15 bp, Homo sapiens
cttcaggctgcccca

SEQ ID NO: 1681206 - DNA, 15 bp, Homo sapiens
ttcaggctgccccac

SEQ ID NO: 1681207 - DNA, 15 bp, Homo sapiens
tcaggctgccccact

SEQ ID NO: 1681208 - DNA, 15 bp, Homo sapiens
caggctgccccactg

SEQ ID NO: 1681209 - DNA, 15 bp, Homo sapiens
aggctgccccactgc

SEQ ID NO: 1681210 - DNA, 15 bp, Homo sapiens
ggctgccccactgct

SEQ ID NO: 1681211 - DNA, 15 bp, Homo sapiens
gctgccccactgctg

SEQ ID NO: 1681212 - DNA, 15 bp, Homo sapiens
ctgccccactgctgc

SEQ ID NO: 1681213 - DNA, 15 bp, Homo sapiens
tgccccactgctgcc

SEQ ID NO: 1681214 - DNA, 15 bp, Homo sapiens
gccccactgctgccc

SEQ ID NO: 1681215 - DNA, 15 bp, Homo sapiens
ccccactgctgccct

SEQ ID NO: 1681216 - DNA, 15 bp, Homo sapiens
cccactgctgccctc

SEQ ID NO: 1681217 - DNA, 15 bp, Homo sapiens
ccactgctgccctct

SEQ ID NO: 1681218 - DNA, 15 bp, Homo sapiens
cactgctgccctctg

SEQ ID NO: 1681219 - DNA, 15 bp, Homo sapiens
actgctgccctctgg

SEQ ID NO: 1681220 - DNA, 15 bp, Homo sapiens
ctgctgccctctgga

SEQ ID NO: 1681221 - DNA, 15 bp, Homo sapiens
tgctgccctctggag

SEQ ID NO: 1681222 - DNA, 15 bp, Homo sapiens
gctgccctctggagc

SEQ ID NO: 1681223 - DNA, 15 bp, Homo sapiens
ctgccctctggagct

SEQ ID NO: 1681224 - DNA, 15 bp, Homo sapiens
tgccctctggagctc

SEQ ID NO: 1681225 - DNA, 15 bp, Homo sapiens
gccctctggagctcg

SEQ ID NO: 1681226 - DNA, 15 bp, Homo sapiens
ccctctggagctcga

SEQ ID NO: 1681227 - DNA, 15 bp, Homo sapiens
cctctggagctcgag

SEQ ID NO: 1681228 - DNA, 15 bp, Homo sapiens
ctctggagctcgagc

SEQ ID NO: 1681229 - DNA, 15 bp, Homo sapiens
tctggagctcgagca

SEQ ID NO: 1681230 - DNA, 15 bp, Homo sapiens
ctggagctcgagcag

SEQ ID NO: 1681231 - DNA, 15 bp, Homo sapiens
tggagctcgagcagg

SEQ ID NO: 1681232 - DNA, 15 bp, Homo sapiens
ggagctcgagcaggt

SEQ ID NO: 1681233 - DNA, 15 bp, Homo sapiens
gagctcgagcaggtg

SEQ ID NO: 1681234 - DNA, 15 bp, Homo sapiens
agctcgagcaggtgc

SEQ ID NO: 1681235 - DNA, 15 bp, Homo sapiens
gctcgagcaggtgca

SEQ ID NO: 1681236 - DNA, 15 bp, Homo sapiens
ctcgagcaggtgcag

SEQ ID NO: 1681237 - DNA, 15 bp, Homo sapiens
tcgagcaggtgcagg

SEQ ID NO: 1681238 - DNA, 15 bp, Homo sapiens
cgagcaggtgcaggt

SEQ ID NO: 1681239 - DNA, 15 bp, Homo sapiens
gagcaggtgcaggtg

SEQ ID NO: 1681240 - DNA, 15 bp, Homo sapiens
agcaggtgcaggtgt

SEQ ID NO: 1681241 - DNA, 15 bp, Homo sapiens
gcaggtgcaggtgtg

SEQ ID NO: 1681242 - DNA, 15 bp, Homo sapiens
caggtgcaggtgtgg

SEQ ID NO: 1681243 - DNA, 15 bp, Homo sapiens
aggtgcaggtgtggg

SEQ ID NO: 1681244 - DNA, 15 bp, Homo sapiens
ggtgcaggtgtgggt

SEQ ID NO: 1681245 - DNA, 15 bp, Homo sapiens
gtgcaggtgtgggtg

SEQ ID NO: 1681246 - DNA, 15 bp, Homo sapiens
tgcaggtgtgggtgc

SEQ ID NO: 1681247 - DNA, 15 bp, Homo sapiens
gcaggtgtgggtgcc

SEQ ID NO: 1681248 - DNA, 15 bp, Homo sapiens
caggtgtgggtgccc

SEQ ID NO: 1681249 - DNA, 15 bp, Homo sapiens
aggtgtgggtgccca

SEQ ID NO: 1681250 - DNA, 15 bp, Homo sapiens
ggtgtgggtgcccac

SEQ ID NO: 1681251 - DNA, 15 bp, Homo sapiens
gtgtgggtgcccacc

SEQ ID NO: 1681252 - DNA, 15 bp, Homo sapiens
tgtgggtgcccaccc

SEQ ID NO: 1681253 - DNA, 15 bp, Homo sapiens
gtgggtgcccaccct

SEQ ID NO: 1681254 - DNA, 15 bp, Homo sapiens
tgggtgcccaccctg

SEQ ID NO: 1681255 - DNA, 15 bp, Homo sapiens
gggtgcccaccctgg

SEQ ID NO: 1681256 - DNA, 15 bp, Homo sapiens
ggtgcccaccctggc

SEQ ID NO: 1681257 - DNA, 15 bp, Homo sapiens
gtgcccaccctggct

SEQ ID NO: 1681258 - DNA, 15 bp, Homo sapiens
tgcccaccctggctt

SEQ ID NO: 1681259 - DNA, 15 bp, Homo sapiens
gcccaccctggcttg

SEQ ID NO: 1681260 - DNA, 15 bp, Homo sapiens
cccaccctggcttgg

SEQ ID NO: 1681261 - DNA, 15 bp, Homo sapiens
ccaccctggcttggc

SEQ ID NO: 1681262 - DNA, 15 bp, Homo sapiens
caccctggcttggcc

SEQ ID NO: 1681263 - DNA, 15 bp, Homo sapiens
accctggcttggcct

SEQ ID NO: 1681264 - DNA, 15 bp, Homo sapiens
ccctggcttggcctc

SEQ ID NO: 1681265 - DNA, 15 bp, Homo sapiens
cctggcttggcctct

SEQ ID NO: 1681266 - DNA, 15 bp, Homo sapiens
ctggcttggcctctt

SEQ ID NO: 1681267 - DNA, 15 bp, Homo sapiens
tggcttggcctcttc

SEQ ID NO: 1681268 - DNA, 15 bp, Homo sapiens
ggcttggcctcttct

SEQ ID NO: 1681269 - DNA, 15 bp, Homo sapiens
gcttggcctcttctc

SEQ ID NO: 1681270 - DNA, 15 bp, Homo sapiens
cttggcctcttctca

SEQ ID NO: 1681271 - DNA, 15 bp, Homo sapiens
ttggcctcttctcac

SEQ ID NO: 1681272 - DNA, 15 bp, Homo sapiens
tggcctcttctcacc

SEQ ID NO: 1681273 - DNA, 15 bp, Homo sapiens
ggcctcttctcacct

SEQ ID NO: 1681274 - DNA, 15 bp, Homo sapiens
gcctcttctcacctg

SEQ ID NO: 1681275 - DNA, 15 bp, Homo sapiens
cctcttctcacctgg

SEQ ID NO: 1681276 - DNA, 15 bp, Homo sapiens
ctcttctcacctggg

SEQ ID NO: 1681277 - DNA, 15 bp, Homo sapiens
tcttctcacctgggt

SEQ ID NO: 1681278 - DNA, 15 bp, Homo sapiens
cttctcacctgggtg

SEQ ID NO: 1681279 - DNA, 15 bp, Homo sapiens
ttctcacctgggtgg

SEQ ID NO: 1681280 - DNA, 15 bp, Homo sapiens
tctcacctgggtggc

SEQ ID NO: 1681281 - DNA, 15 bp, Homo sapiens
ctcacctgggtggct

SEQ ID NO: 1681282 - DNA, 15 bp, Homo sapiens
tcacctgggtggctt

SEQ ID NO: 1681283 - DNA, 15 bp, Homo sapiens
cacctgggtggcttc

SEQ ID NO: 1681284 - DNA, 15 bp, Homo sapiens
acctgggtggcttcg

SEQ ID NO: 1681285 - DNA, 15 bp, Homo sapiens
cctgggtggcttcgg

SEQ ID NO: 1681286 - DNA, 15 bp, Homo sapiens
ctgggtggcttcgga

SEQ ID NO: 1681287 - DNA, 15 bp, Homo sapiens
tgggtggcttcggac

SEQ ID NO: 1681288 - DNA, 15 bp, Homo sapiens
gggtggcttcggaca

SEQ ID NO: 1681289 - DNA, 15 bp, Homo sapiens
ggtggcttcggacac

SEQ ID NO: 1681290 - DNA, 15 bp, Homo sapiens
gtggcttcggacaca

SEQ ID NO: 1681291 - DNA, 15 bp, Homo sapiens
tggcttcggacacag

SEQ ID NO: 1681292 - DNA, 15 bp, Homo sapiens
ggcttcggacacagg

SEQ ID NO: 1681293 - DNA, 15 bp, Homo sapiens
gcttcggacacaggg

SEQ ID NO: 1681294 - DNA, 15 bp, Homo sapiens
cttcggacacagggt

SEQ ID NO: 1681295 - DNA, 15 bp, Homo sapiens
ttcggacacagggtg

SEQ ID NO: 1681296 - DNA, 15 bp, Homo sapiens
tcggacacagggtgg

SEQ ID NO: 1681297 - DNA, 15 bp, Homo sapiens
cggacacagggtgga

SEQ ID NO: 1681298 - DNA, 15 bp, Homo sapiens
ggacacagggtggac

SEQ ID NO: 1681299 - DNA, 15 bp, Homo sapiens
gacacagggtggact

SEQ ID NO: 1681300 - DNA, 15 bp, Homo sapiens
acacagggtggactc

SEQ ID NO: 1681301 - DNA, 15 bp, Homo sapiens
cacagggtggactcc

SEQ ID NO: 1681302 - DNA, 15 bp, Homo sapiens
acagggtggactcct

SEQ ID NO: 1681303 - DNA, 15 bp, Homo sapiens
cagggtggactcctc

SEQ ID NO: 1681304 - DNA, 15 bp, Homo sapiens
agggtggactcctca

SEQ ID NO: 1681305 - DNA, 15 bp, Homo sapiens
gggtggactcctcaa

SEQ ID NO: 1681306 - DNA, 15 bp, Homo sapiens
ggtggactcctcaaa

SEQ ID NO: 1681307 - DNA, 15 bp, Homo sapiens
gtggactcctcaaag

SEQ ID NO: 1681308 - DNA, 15 bp, Homo sapiens
tggactcctcaaagg

SEQ ID NO: 1681309 - DNA, 15 bp, Homo sapiens
ggactcctcaaaggg

SEQ ID NO: 1681310 - DNA, 15 bp, Homo sapiens
gactcctcaaagggg

SEQ ID NO: 1681311 - DNA, 15 bp, Homo sapiens
actcctcaaaggggc

SEQ ID NO: 1681312 - DNA, 15 bp, Homo sapiens
ctcctcaaaggggct

SEQ ID NO: 1681313 - DNA, 15 bp, Homo sapiens
tcctcaaaggggctg

SEQ ID NO: 1681314 - DNA, 15 bp, Homo sapiens
cctcaaaggggctgc

SEQ ID NO: 1681315 - DNA, 15 bp, Homo sapiens
ctcaaaggggctgct

SEQ ID NO: 1681316 - DNA, 15 bp, Homo sapiens
tcaaaggggctgctt

SEQ ID NO: 1681317 - DNA, 15 bp, Homo sapiens
caaaggggctgcttc

SEQ ID NO: 1681318 - DNA, 15 bp, Homo sapiens
aaaggggctgcttcc

SEQ ID NO: 1681319 - DNA, 15 bp, Homo sapiens
aaggggctgcttccc

SEQ ID NO: 1681320 - DNA, 15 bp, Homo sapiens
aggggctgcttccca

SEQ ID NO: 1681321 - DNA, 15 bp, Homo sapiens
ggggctgcttcccat

SEQ ID NO: 1681322 - DNA, 15 bp, Homo sapiens
gggctgcttcccatc

SEQ ID NO: 1681323 - DNA, 15 bp, Homo sapiens
ggctgcttcccatct

SEQ ID NO: 1681324 - DNA, 15 bp, Homo sapiens
gctgcttcccatctg

SEQ ID NO: 1681325 - DNA, 15 bp, Homo sapiens
ctgcttcccatctga

SEQ ID NO: 1681326 - DNA, 15 bp, Homo sapiens
tgcttcccatctgag

SEQ ID NO: 1681327 - DNA, 15 bp, Homo sapiens
gcttcccatctgaga

SEQ ID NO: 1681328 - DNA, 15 bp, Homo sapiens
cttcccatctgagaa

SEQ ID NO: 1681329 - DNA, 15 bp, Homo sapiens
ttcccatctgagaag

SEQ ID NO: 1681330 - DNA, 15 bp, Homo sapiens
tcccatctgagaagc

SEQ ID NO: 1681331 - DNA, 15 bp, Homo sapiens
cccatctgagaagcc

SEQ ID NO: 1681332 - DNA, 15 bp, Homo sapiens
ccatctgagaagcca

SEQ ID NO: 1681333 - DNA, 15 bp, Homo sapiens
catctgagaagccag

SEQ ID NO: 1681334 - DNA, 15 bp, Homo sapiens
atctgagaagccagc

SEQ ID NO: 1681335 - DNA, 15 bp, Homo sapiens
tctgagaagccagca

SEQ ID NO: 1681336 - DNA, 15 bp, Homo sapiens
ctgagaagccagcat

SEQ ID NO: 1681337 - DNA, 15 bp, Homo sapiens
tgagaagccagcata

SEQ ID NO: 1681338 - DNA, 15 bp, Homo sapiens
gagaagccagcataa

SEQ ID NO: 1681339 - DNA, 15 bp, Homo sapiens
agaagccagcataat

SEQ ID NO: 1681340 - DNA, 15 bp, Homo sapiens
gaagccagcataatc

SEQ ID NO: 1681341 - DNA, 15 bp, Homo sapiens
aagccagcataatcc

SEQ ID NO: 1681342 - DNA, 15 bp, Homo sapiens
agccagcataatcct

SEQ ID NO: 1681343 - DNA, 15 bp, Homo sapiens
gccagcataatcctc

SEQ ID NO: 1681344 - DNA, 15 bp, Homo sapiens
ccagcataatcctcc

SEQ ID NO: 1681345 - DNA, 15 bp, Homo sapiens
cagcataatcctcca

SEQ ID NO: 1681346 - DNA, 15 bp, Homo sapiens
agcataatcctccag

SEQ ID NO: 1681347 - DNA, 15 bp, Homo sapiens
gcataatcctccagg

SEQ ID NO: 1681348 - DNA, 15 bp, Homo sapiens
cataatcctccaggg

SEQ ID NO: 1681349 - DNA, 15 bp, Homo sapiens
ataatcctccagggg

SEQ ID NO: 1681350 - DNA, 15 bp, Homo sapiens
taatcctccaggggc

SEQ ID NO: 1681351 - DNA, 15 bp, Homo sapiens
aatcctccaggggct

SEQ ID NO: 1681352 - DNA, 15 bp, Homo sapiens
atcctccaggggcta

SEQ ID NO: 1681353 - DNA, 15 bp, Homo sapiens
tcctccaggggctac

SEQ ID NO: 1681354 - DNA, 15 bp, Homo sapiens
cctccaggggctact

SEQ ID NO: 1681355 - DNA, 15 bp, Homo sapiens
ctccaggggctactg

SEQ ID NO: 1681356 - DNA, 15 bp, Homo sapiens
tccaggggctactga

SEQ ID NO: 1681357 - DNA, 15 bp, Homo sapiens
ccaggggctactgat

SEQ ID NO: 1681358 - DNA, 15 bp, Homo sapiens
caggggctactgata

SEQ ID NO: 1681359 - DNA, 15 bp, Homo sapiens
aggggctactgatat

SEQ ID NO: 1681360 - DNA, 15 bp, Homo sapiens
ggggctactgatata

SEQ ID NO: 1681361 - DNA, 15 bp, Homo sapiens
gggctactgatatac

SEQ ID NO: 1681362 - DNA, 15 bp, Homo sapiens
ggctactgatataca

SEQ ID NO: 1681363 - DNA, 15 bp, Homo sapiens
gctactgatatacac

SEQ ID NO: 1681364 - DNA, 15 bp, Homo sapiens
ctactgatatacaca

SEQ ID NO: 1681365 - DNA, 15 bp, Homo sapiens
tactgatatacacac

SEQ ID NO: 1681366 - DNA, 15 bp, Homo sapiens
actgatatacacacg

SEQ ID NO: 1681367 - DNA, 15 bp, Homo sapiens
ctgatatacacacgc

SEQ ID NO: 1681368 - DNA, 15 bp, Homo sapiens
tgatatacacacgct

SEQ ID NO: 1681369 - DNA, 15 bp, Homo sapiens
gatatacacacgctg

SEQ ID NO: 1681370 - DNA, 15 bp, Homo sapiens
atatacacacgctgc

SEQ ID NO: 1681371 - DNA, 15 bp, Homo sapiens
tatacacacgctgcc

SEQ ID NO: 1681372 - DNA, 15 bp, Homo sapiens
atacacacgctgccc

SEQ ID NO: 1681373 - DNA, 15 bp, Homo sapiens
tacacacgctgcccc

SEQ ID NO: 1681374 - DNA, 15 bp, Homo sapiens
acacacgctgcccct

SEQ ID NO: 1681375 - DNA, 15 bp, Homo sapiens
cacacgctgcccctg

SEQ ID NO: 1681376 - DNA, 15 bp, Homo sapiens
acacgctgcccctgg

SEQ ID NO: 1681377 - DNA, 15 bp, Homo sapiens
cacgctgcccctggt

SEQ ID NO: 1681378 - DNA, 15 bp, Homo sapiens
acgctgcccctggtc

SEQ ID NO: 1681379 - DNA, 15 bp, Homo sapiens
cgctgcccctggtcc

SEQ ID NO: 1681380 - DNA, 15 bp, Homo sapiens
gctgcccctggtcct

SEQ ID NO: 1681381 - DNA, 15 bp, Homo sapiens
ctgcccctggtcctg

SEQ ID NO: 1681382 - DNA, 15 bp, Homo sapiens
tgcccctggtcctga

SEQ ID NO: 1681383 - DNA, 15 bp, Homo sapiens
gcccctggtcctgag

SEQ ID NO: 1681384 - DNA, 15 bp, Homo sapiens
cccctggtcctgagt

SEQ ID NO: 1681385 - DNA, 15 bp, Homo sapiens
ccctggtcctgagtt

SEQ ID NO: 1681386 - DNA, 15 bp, Homo sapiens
cctggtcctgagtta

SEQ ID NO: 1681387 - DNA, 15 bp, Homo sapiens
ctggtcctgagttag

SEQ ID NO: 1681388 - DNA, 15 bp, Homo sapiens
tggtcctgagttaga

SEQ ID NO: 1681389 - DNA, 15 bp, Homo sapiens
ggtcctgagttagat

SEQ ID NO: 1681390 - DNA, 15 bp, Homo sapiens
gtcctgagttagatc

SEQ ID NO: 1681391 - DNA, 15 bp, Homo sapiens
tcctgagttagatca

SEQ ID NO: 1681392 - DNA, 15 bp, Homo sapiens
cctgagttagatcac

SEQ ID NO: 1681393 - DNA, 15 bp, Homo sapiens
ctgagttagatcacc

SEQ ID NO: 1681394 - DNA, 15 bp, Homo sapiens
tgagttagatcaccc

SEQ ID NO: 1681395 - DNA, 15 bp, Homo sapiens
gagttagatcaccct

SEQ ID NO: 1681396 - DNA, 15 bp, Homo sapiens
agttagatcaccctg

SEQ ID NO: 1681397 - DNA, 15 bp, Homo sapiens
gttagatcaccctgc

SEQ ID NO: 1681398 - DNA, 15 bp, Homo sapiens
ttagatcaccctgcc

SEQ ID NO: 1681399 - DNA, 15 bp, Homo sapiens
tagatcaccctgccc

SEQ ID NO: 1681400 - DNA, 15 bp, Homo sapiens
agatcaccctgcccc

SEQ ID NO: 1681401 - DNA, 15 bp, Homo sapiens
gatcaccctgcccct

SEQ ID NO: 1681402 - DNA, 15 bp, Homo sapiens
atcaccctgccccta

SEQ ID NO: 1681403 - DNA, 15 bp, Homo sapiens
tcaccctgcccctag

SEQ ID NO: 1681404 - DNA, 15 bp, Homo sapiens
caccctgcccctagg

SEQ ID NO: 1681405 - DNA, 15 bp, Homo sapiens
accctgcccctaggg

SEQ ID NO: 1681406 - DNA, 15 bp, Homo sapiens
ccctgcccctaggga

SEQ ID NO: 1681407 - DNA, 15 bp, Homo sapiens
cctgcccctagggag

SEQ ID NO: 1681408 - DNA, 15 bp, Homo sapiens
ctgcccctagggagg

SEQ ID NO: 1681409 - DNA, 15 bp, Homo sapiens
tgcccctagggaggg

SEQ ID NO: 1681410 - DNA, 15 bp, Homo sapiens
gcccctagggagggc

SEQ ID NO: 1681411 - DNA, 15 bp, Homo sapiens
cccctagggagggct

SEQ ID NO: 1681412 - DNA, 15 bp, Homo sapiens
ccctagggagggctt

SEQ ID NO: 1681413 - DNA, 15 bp, Homo sapiens
cctagggagggcttg

SEQ ID NO: 1681414 - DNA, 15 bp, Homo sapiens
ctagggagggcttgg

SEQ ID NO: 1681415 - DNA, 15 bp, Homo sapiens
tagggagggcttggg

SEQ ID NO: 1681416 - DNA, 15 bp, Homo sapiens
agggagggcttgggg

SEQ ID NO: 1681417 - DNA, 15 bp, Homo sapiens
gggagggcttggggg

SEQ ID NO: 1681418 - DNA, 15 bp, Homo sapiens
ggagggcttgggggc

SEQ ID NO: 1681419 - DNA, 15 bp, Homo sapiens
gagggcttgggggct

SEQ ID NO: 1681420 - DNA, 15 bp, Homo sapiens
agggcttgggggctt

SEQ ID NO: 1681421 - DNA, 15 bp, Homo sapiens
gggcttgggggcttc

SEQ ID NO: 1681422 - DNA, 15 bp, Homo sapiens
ggcttgggggcttca

SEQ ID NO: 1681423 - DNA, 15 bp, Homo sapiens
gcttgggggcttcac

SEQ ID NO: 1681424 - DNA, 15 bp, Homo sapiens
cttgggggcttcact

SEQ ID NO: 1681425 - DNA, 15 bp, Homo sapiens
ttgggggcttcactg

SEQ ID NO: 1681426 - DNA, 15 bp, Homo sapiens
tgggggcttcactgc

SEQ ID NO: 1681427 - DNA, 15 bp, Homo sapiens
gggggcttcactgct

SEQ ID NO: 1681428 - DNA, 15 bp, Homo sapiens
ggggcttcactgctg

SEQ ID NO: 1681429 - DNA, 15 bp, Homo sapiens
gggcttcactgctga

SEQ ID NO: 1681430 - DNA, 15 bp, Homo sapiens
ggcttcactgctgaa

SEQ ID NO: 1681431 - DNA, 15 bp, Homo sapiens
gcttcactgctgaag

SEQ ID NO: 1681432 - DNA, 15 bp, Homo sapiens
cttcactgctgaagt

SEQ ID NO: 1681433 - DNA, 15 bp, Homo sapiens
ttcactgctgaagtt

SEQ ID NO: 1681434 - DNA, 15 bp, Homo sapiens
tcactgctgaagttc

SEQ ID NO: 1681435 - DNA, 15 bp, Homo sapiens
cactgctgaagttca

SEQ ID NO: 1681436 - DNA, 15 bp, Homo sapiens
actgctgaagttcag

SEQ ID NO: 1681437 - DNA, 15 bp, Homo sapiens
ctgctgaagttcaga

SEQ ID NO: 1681438 - DNA, 15 bp, Homo sapiens
tgctgaagttcagac

SEQ ID NO: 1681439 - DNA, 15 bp, Homo sapiens
gctgaagttcagact

SEQ ID NO: 1681440 - DNA, 15 bp, Homo sapiens
ctgaagttcagactc

SEQ ID NO: 1681441 - DNA, 15 bp, Homo sapiens
tgaagttcagactcc

SEQ ID NO: 1681442 - DNA, 15 bp, Homo sapiens
gaagttcagactcca

SEQ ID NO: 1681443 - DNA, 15 bp, Homo sapiens
aagttcagactccag

SEQ ID NO: 1681444 - DNA, 15 bp, Homo sapiens
agttcagactccagg

SEQ ID NO: 1681445 - DNA, 15 bp, Homo sapiens
gttcagactccaggg

SEQ ID NO: 1681446 - DNA, 15 bp, Homo sapiens
ttcagactccagggt

SEQ ID NO: 1681447 - DNA, 15 bp, Homo sapiens
tcagactccagggtg

SEQ ID NO: 1681448 - DNA, 15 bp, Homo sapiens
cagactccagggtgg

SEQ ID NO: 1681449 - DNA, 15 bp, Homo sapiens
agactccagggtggt

SEQ ID NO: 1681450 - DNA, 15 bp, Homo sapiens
gactccagggtggtc

SEQ ID NO: 1681451 - DNA, 15 bp, Homo sapiens
actccagggtggtcc

SEQ ID NO: 1681452 - DNA, 15 bp, Homo sapiens
ctccagggtggtcct

SEQ ID NO: 1681453 - DNA, 15 bp, Homo sapiens
tccagggtggtcctt

SEQ ID NO: 1681454 - DNA, 15 bp, Homo sapiens
ccagggtggtccttg

SEQ ID NO: 1681455 - DNA, 15 bp, Homo sapiens
cagggtggtccttgt

SEQ ID NO: 1681456 - DNA, 15 bp, Homo sapiens
agggtggtccttgtc

SEQ ID NO: 1681457 - DNA, 15 bp, Homo sapiens
gggtggtccttgtcc

SEQ ID NO: 1681458 - DNA, 15 bp, Homo sapiens
ggtggtccttgtcct

SEQ ID NO: 1681459 - DNA, 15 bp, Homo sapiens
gtggtccttgtcctg

SEQ ID NO: 1681460 - DNA, 15 bp, Homo sapiens
tggtccttgtcctgt

SEQ ID NO: 1681461 - DNA, 15 bp, Homo sapiens
ggtccttgtcctgtg

SEQ ID NO: 1681462 - DNA, 15 bp, Homo sapiens
gtccttgtcctgtgt

SEQ ID NO: 1681463 - DNA, 15 bp, Homo sapiens
tccttgtcctgtgtg

SEQ ID NO: 1681464 - DNA, 15 bp, Homo sapiens
ccttgtcctgtgtgc

SEQ ID NO: 1681465 - DNA, 15 bp, Homo sapiens
cttgtcctgtgtgcc

SEQ ID NO: 1681466 - DNA, 15 bp, Homo sapiens
ttgtcctgtgtgcct

SEQ ID NO: 1681467 - DNA, 15 bp, Homo sapiens
tgtcctgtgtgcctc

SEQ ID NO: 1681468 - DNA, 15 bp, Homo sapiens
gtcctgtgtgcctca

SEQ ID NO: 1681469 - DNA, 15 bp, Homo sapiens
tcctgtgtgcctcag

SEQ ID NO: 1681470 - DNA, 15 bp, Homo sapiens
cctgtgtgcctcagt

SEQ ID NO: 1681471 - DNA, 15 bp, Homo sapiens
ccacatacatttcac

SEQ ID NO: 1681472 - DNA, 15 bp, Homo sapiens
cacatacatttcact

SEQ ID NO: 1681473 - DNA, 15 bp, Homo sapiens
acatacatttcactg

SEQ ID NO: 1681474 - DNA, 15 bp, Homo sapiens
catacatttcactgg

SEQ ID NO: 1681475 - DNA, 15 bp, Homo sapiens
atacatttcactggc

SEQ ID NO: 1681476 - DNA, 15 bp, Homo sapiens
tacatttcactggcc

SEQ ID NO: 1681477 - DNA, 15 bp, Homo sapiens
aatttagttattttt

SEQ ID NO: 1681478 - DNA, 15 bp, Homo sapiens
atttagttattttta

SEQ ID NO: 1681479 - DNA, 15 bp, Homo sapiens
tttagttatttttag

SEQ ID NO: 1681480 - DNA, 15 bp, Homo sapiens
ttagttatttttagt

SEQ ID NO: 1681481 - DNA, 15 bp, Homo sapiens
tagttatttttagta

SEQ ID NO: 1681482 - DNA, 15 bp, Homo sapiens
agttatttttagtag

SEQ ID NO: 1681483 - DNA, 15 bp, Homo sapiens
gttatttttagtaga

SEQ ID NO: 1681484 - DNA, 15 bp, Homo sapiens
gtagagatgggtttt

SEQ ID NO: 1681485 - DNA, 15 bp, Homo sapiens
tagagatgggttttc

SEQ ID NO: 1681486 - DNA, 15 bp, Homo sapiens
agagatgggttttct

SEQ ID NO: 1681487 - DNA, 15 bp, Homo sapiens
gagatgggttttctc

SEQ ID NO: 1681488 - DNA, 15 bp, Homo sapiens
agatgggttttctcc

SEQ ID NO: 1681489 - DNA, 15 bp, Homo sapiens
gatgggttttctcca

SEQ ID NO: 1681490 - DNA, 15 bp, Homo sapiens
atgggttttctccat

SEQ ID NO: 1681491 - DNA, 15 bp, Homo sapiens
tgggttttctccatg

SEQ ID NO: 1681492 - DNA, 15 bp, Homo sapiens
gggttttctccatgt

SEQ ID NO: 1681493 - DNA, 15 bp, Homo sapiens
ggttttctccatgtt

SEQ ID NO: 1681494 - DNA, 15 bp, Homo sapiens
gttttctccatgttg

SEQ ID NO: 1681495 - DNA, 15 bp, Homo sapiens
ttttctccatgttgg

SEQ ID NO: 1681496 - DNA, 15 bp, Homo sapiens
caggtgatccacccc

SEQ ID NO: 1681497 - DNA, 15 bp, Homo sapiens
aggtgatccaccccc

SEQ ID NO: 1681498 - DNA, 15 bp, Homo sapiens
ggtgatccacccccc

SEQ ID NO: 1681499 - DNA, 15 bp, Homo sapiens
gtgatccacccccct

SEQ ID NO: 1681500 - DNA, 15 bp, Homo sapiens
tgatccacccccctc

SEQ ID NO: 1681501 - DNA, 15 bp, Homo sapiens
gatccacccccctcg

SEQ ID NO: 1681502 - DNA, 15 bp, Homo sapiens
atccacccccctcgg

SEQ ID NO: 1681503 - DNA, 15 bp, Homo sapiens
tccacccccctcggc

SEQ ID NO: 1681504 - DNA, 15 bp, Homo sapiens
ccacccccctcggcc

SEQ ID NO: 1681505 - DNA, 15 bp, Homo sapiens
cacccccctcggcct

SEQ ID NO: 1681506 - DNA, 15 bp, Homo sapiens
acccccctcggcctc

SEQ ID NO: 1681507 - DNA, 15 bp, Homo sapiens
cccccctcggcctcc

SEQ ID NO: 1681508 - DNA, 15 bp, Homo sapiens
ccccctcggcctccc

SEQ ID NO: 1681509 - DNA, 15 bp, Homo sapiens
cccctcggcctccca

SEQ ID NO: 1681510 - DNA, 15 bp, Homo sapiens
ccctcggcctcccaa

SEQ ID NO: 1681511 - DNA, 15 bp, Homo sapiens
caaagtgttgggata

SEQ ID NO: 1681512 - DNA, 15 bp, Homo sapiens
aaagtgttgggataa

SEQ ID NO: 1681513 - DNA, 15 bp, Homo sapiens
aagtgttgggataac

SEQ ID NO: 1681514 - DNA, 15 bp, Homo sapiens
agtgttgggataaca

SEQ ID NO: 1681515 - DNA, 15 bp, Homo sapiens
gtgttgggataacag

SEQ ID NO: 1681516 - DNA, 15 bp, Homo sapiens
tgttgggataacagg

SEQ ID NO: 1681517 - DNA, 15 bp, Homo sapiens
gttgggataacaggc

SEQ ID NO: 1681518 - DNA, 15 bp, Homo sapiens
ttgggataacaggcg

SEQ ID NO: 1681519 - DNA, 15 bp, Homo sapiens
tgggataacaggcgt

SEQ ID NO: 1681520 - DNA, 15 bp, Homo sapiens
gggataacaggcgtg

SEQ ID NO: 1681521 - DNA, 15 bp, Homo sapiens
ggataacaggcgtga

SEQ ID NO: 1681522 - DNA, 15 bp, Homo sapiens
gataacaggcgtgag

SEQ ID NO: 1681523 - DNA, 15 bp, Homo sapiens
ataacaggcgtgagc

SEQ ID NO: 1681524 - DNA, 15 bp, Homo sapiens
taacaggcgtgagcc

SEQ ID NO: 1681525 - DNA, 15 bp, Homo sapiens
aacaggcgtgagcca

SEQ ID NO: 1681526 - DNA, 15 bp, Homo sapiens
cactgcgcctggccg

SEQ ID NO: 1681527 - DNA, 15 bp, Homo sapiens
actgcgcctggccgg

SEQ ID NO: 1681528 - DNA, 15 bp, Homo sapiens
ctgcgcctggccggc

SEQ ID NO: 1681529 - DNA, 15 bp, Homo sapiens
tgcgcctggccggct

SEQ ID NO: 1681530 - DNA, 15 bp, Homo sapiens
gcgcctggccggctc

SEQ ID NO: 1681531 - DNA, 15 bp, Homo sapiens
cgcctggccggctca

SEQ ID NO: 1681532 - DNA, 15 bp, Homo sapiens
gcctggccggctcat

SEQ ID NO: 1681533 - DNA, 15 bp, Homo sapiens
cctggccggctcatt

SEQ ID NO: 1681534 - DNA, 15 bp, Homo sapiens
ctggccggctcattt

SEQ ID NO: 1681535 - DNA, 15 bp, Homo sapiens
tggccggctcatttc

SEQ ID NO: 1681536 - DNA, 15 bp, Homo sapiens
ggccggctcatttct

SEQ ID NO: 1681537 - DNA, 15 bp, Homo sapiens
gccggctcatttctt

SEQ ID NO: 1681538 - DNA, 15 bp, Homo sapiens
ccggctcatttcttt

SEQ ID NO: 1681539 - DNA, 15 bp, Homo sapiens
cggctcatttctttt

SEQ ID NO: 1681540 - DNA, 15 bp, Homo sapiens
ggctcatttcttttg

SEQ ID NO: 1681541 - DNA, 15 bp, Homo sapiens
gctcatttcttttga

SEQ ID NO: 1681542 - DNA, 15 bp, Homo sapiens
ctcatttcttttgat

SEQ ID NO: 1681543 - DNA, 15 bp, Homo sapiens
tcatttcttttgatc

SEQ ID NO: 1681544 - DNA, 15 bp, Homo sapiens
catttcttttgatca

SEQ ID NO: 1681545 - DNA, 15 bp, Homo sapiens
atttcttttgatcac

SEQ ID NO: 1681546 - DNA, 15 bp, Homo sapiens
tttcttttgatcact

SEQ ID NO: 1681547 - DNA, 15 bp, Homo sapiens
ttcttttgatcactt

SEQ ID NO: 1681548 - DNA, 15 bp, Homo sapiens
tcttttgatcactta

SEQ ID NO: 1681549 - DNA, 15 bp, Homo sapiens
cttttgatcacttac

SEQ ID NO: 1681550 - DNA, 15 bp, Homo sapiens
ttttgatcacttact

SEQ ID NO: 1681551 - DNA, 15 bp, Homo sapiens
tttgatcacttacta

SEQ ID NO: 1681552 - DNA, 15 bp, Homo sapiens
ttgatcacttactaa

SEQ ID NO: 1681553 - DNA, 15 bp, Homo sapiens
tgatcacttactaat

SEQ ID NO: 1681554 - DNA, 15 bp, Homo sapiens
gatcacttactaata

SEQ ID NO: 1681555 - DNA, 15 bp, Homo sapiens
atcacttactaatat

SEQ ID NO: 1681556 - DNA, 15 bp, Homo sapiens
tcacttactaatatt

SEQ ID NO: 1681557 - DNA, 15 bp, Homo sapiens
cacttactaatattt

SEQ ID NO: 1681558 - DNA, 15 bp, Homo sapiens
acttactaatatttc

SEQ ID NO: 1681559 - DNA, 15 bp, Homo sapiens
cttactaatatttca

SEQ ID NO: 1681560 - DNA, 15 bp, Homo sapiens
ttactaatatttcat

SEQ ID NO: 1681561 - DNA, 15 bp, Homo sapiens
tactaatatttcatt

SEQ ID NO: 1681562 - DNA, 15 bp, Homo sapiens
actaatatttcattg

SEQ ID NO: 1681563 - DNA, 15 bp, Homo sapiens
ctaatatttcattgt

SEQ ID NO: 1681564 - DNA, 15 bp, Homo sapiens
taatatttcattgtg

SEQ ID NO: 1681565 - DNA, 15 bp, Homo sapiens
aatatttcattgtgt

SEQ ID NO: 1681566 - DNA, 15 bp, Homo sapiens
atatttcattgtgta

SEQ ID NO: 1681567 - DNA, 15 bp, Homo sapiens
tatttcattgtgtag

SEQ ID NO: 1681568 - DNA, 15 bp, Homo sapiens
atttcattgtgtaga

SEQ ID NO: 1681569 - DNA, 15 bp, Homo sapiens
tttcattgtgtagat

SEQ ID NO: 1681570 - DNA, 15 bp, Homo sapiens
ttcattgtgtagatg

SEQ ID NO: 1681571 - DNA, 15 bp, Homo sapiens
tcattgtgtagatgg

SEQ ID NO: 1681572 - DNA, 15 bp, Homo sapiens
cattgtgtagatgga

SEQ ID NO: 1681573 - DNA, 15 bp, Homo sapiens
attgtgtagatggac

SEQ ID NO: 1681574 - DNA, 15 bp, Homo sapiens
ttgtgtagatggacc

SEQ ID NO: 1681575 - DNA, 15 bp, Homo sapiens
tgtgtagatggacca

SEQ ID NO: 1681576 - DNA, 15 bp, Homo sapiens
gtgtagatggaccac

SEQ ID NO: 1681577 - DNA, 15 bp, Homo sapiens
tgtagatggaccaca

SEQ ID NO: 1681578 - DNA, 15 bp, Homo sapiens
gtagatggaccacag

SEQ ID NO: 1681579 - DNA, 15 bp, Homo sapiens
tagatggaccacagt

SEQ ID NO: 1681580 - DNA, 15 bp, Homo sapiens
agatggaccacagtt

SEQ ID NO: 1681581 - DNA, 15 bp, Homo sapiens
gatggaccacagttt

SEQ ID NO: 1681582 - DNA, 15 bp, Homo sapiens
atggaccacagttta

SEQ ID NO: 1681583 - DNA, 15 bp, Homo sapiens
tggaccacagtttat

SEQ ID NO: 1681584 - DNA, 15 bp, Homo sapiens
ggaccacagtttatc

SEQ ID NO: 1681585 - DNA, 15 bp, Homo sapiens
gaccacagtttatcc

SEQ ID NO: 1681586 - DNA, 15 bp, Homo sapiens
accacagtttatcca

SEQ ID NO: 1681587 - DNA, 15 bp, Homo sapiens
ccacagtttatccat

SEQ ID NO: 1681588 - DNA, 15 bp, Homo sapiens
cacagtttatccatt

SEQ ID NO: 1681589 - DNA, 15 bp, Homo sapiens
acagtttatccattc

SEQ ID NO: 1681590 - DNA, 15 bp, Homo sapiens
cagtttatccattca

SEQ ID NO: 1681591 - DNA, 15 bp, Homo sapiens
agtttatccattcac

SEQ ID NO: 1681592 - DNA, 15 bp, Homo sapiens
gtttatccattcacc

SEQ ID NO: 1681593 - DNA, 15 bp, Homo sapiens
tttatccattcaccc

SEQ ID NO: 1681594 - DNA, 15 bp, Homo sapiens
ttatccattcaccct

SEQ ID NO: 1681595 - DNA, 15 bp, Homo sapiens
tatccattcacccta

SEQ ID NO: 1681596 - DNA, 15 bp, Homo sapiens
atccattcaccctac

SEQ ID NO: 1681597 - DNA, 15 bp, Homo sapiens
tccattcaccctact

SEQ ID NO: 1681598 - DNA, 15 bp, Homo sapiens
ccattcaccctactg

SEQ ID NO: 1681599 - DNA, 15 bp, Homo sapiens
cattcaccctactga

SEQ ID NO: 1681600 - DNA, 15 bp, Homo sapiens
attcaccctactgaa

SEQ ID NO: 1681601 - DNA, 15 bp, Homo sapiens
ttcaccctactgaag

SEQ ID NO: 1681602 - DNA, 15 bp, Homo sapiens
tcaccctactgaagg

SEQ ID NO: 1681603 - DNA, 15 bp, Homo sapiens
caccctactgaagga

SEQ ID NO: 1681604 - DNA, 15 bp, Homo sapiens
accctactgaaggac

SEQ ID NO: 1681605 - DNA, 15 bp, Homo sapiens
ccctactgaaggaca

SEQ ID NO: 1681606 - DNA, 15 bp, Homo sapiens
cctactgaaggacat

SEQ ID NO: 1681607 - DNA, 15 bp, Homo sapiens
ctactgaaggacatc

SEQ ID NO: 1681608 - DNA, 15 bp, Homo sapiens
tactgaaggacatct

SEQ ID NO: 1681609 - DNA, 15 bp, Homo sapiens
actgaaggacatctt

SEQ ID NO: 1681610 - DNA, 15 bp, Homo sapiens
ctgaaggacatcttg

SEQ ID NO: 1681611 - DNA, 15 bp, Homo sapiens
tgaaggacatcttgg

SEQ ID NO: 1681612 - DNA, 15 bp, Homo sapiens
gaaggacatcttggt

SEQ ID NO: 1681613 - DNA, 15 bp, Homo sapiens
aaggacatcttggta

SEQ ID NO: 1681614 - DNA, 15 bp, Homo sapiens
aggacatcttggtaa

SEQ ID NO: 1681615 - DNA, 15 bp, Homo sapiens
ggacatcttggtaaa

SEQ ID NO: 1681616 - DNA, 15 bp, Homo sapiens
gacatcttggtaaat

SEQ ID NO: 1681617 - DNA, 15 bp, Homo sapiens
acatcttggtaaatt

SEQ ID NO: 1681618 - DNA, 15 bp, Homo sapiens
catcttggtaaattt

SEQ ID NO: 1681619 - DNA, 15 bp, Homo sapiens
atcttggtaaatttt

SEQ ID NO: 1681620 - DNA, 15 bp, Homo sapiens
tcttggtaaatttta

SEQ ID NO: 1681621 - DNA, 15 bp, Homo sapiens
cttggtaaattttag

SEQ ID NO: 1681622 - DNA, 15 bp, Homo sapiens
ttggtaaattttagc

SEQ ID NO: 1681623 - DNA, 15 bp, Homo sapiens
tggtaaattttagca

SEQ ID NO: 1681624 - DNA, 15 bp, Homo sapiens
ggtaaattttagcaa

SEQ ID NO: 1681625 - DNA, 15 bp, Homo sapiens
gtaaattttagcaac

SEQ ID NO: 1681626 - DNA, 15 bp, Homo sapiens
taaattttagcaact

SEQ ID NO: 1681627 - DNA, 15 bp, Homo sapiens
aaattttagcaactg

SEQ ID NO: 1681628 - DNA, 15 bp, Homo sapiens
aattttagcaactgt

SEQ ID NO: 1681629 - DNA, 15 bp, Homo sapiens
attttagcaactgtg

SEQ ID NO: 1681630 - DNA, 15 bp, Homo sapiens
ttttagcaactgtga

SEQ ID NO: 1681631 - DNA, 15 bp, Homo sapiens
tttagcaactgtgaa

SEQ ID NO: 1681632 - DNA, 15 bp, Homo sapiens
ttagcaactgtgaat

SEQ ID NO: 1681633 - DNA, 15 bp, Homo sapiens
tagcaactgtgaata

SEQ ID NO: 1681634 - DNA, 15 bp, Homo sapiens
agcaactgtgaataa

SEQ ID NO: 1681635 - DNA, 15 bp, Homo sapiens
gcaactgtgaataaa

SEQ ID NO: 1681636 - DNA, 15 bp, Homo sapiens
caactgtgaataaaa

SEQ ID NO: 1681637 - DNA, 15 bp, Homo sapiens
aactgtgaataaaac

SEQ ID NO: 1681638 - DNA, 15 bp, Homo sapiens
actgtgaataaaacc

SEQ ID NO: 1681639 - DNA, 15 bp, Homo sapiens
ctgtgaataaaaccg

SEQ ID NO: 1681640 - DNA, 15 bp, Homo sapiens
tgtgaataaaaccgc

SEQ ID NO: 1681641 - DNA, 15 bp, Homo sapiens
gtgaataaaaccgct

SEQ ID NO: 1681642 - DNA, 15 bp, Homo sapiens
tgaataaaaccgctc

SEQ ID NO: 1681643 - DNA, 15 bp, Homo sapiens
gaataaaaccgctcc

SEQ ID NO: 1681644 - DNA, 15 bp, Homo sapiens
aataaaaccgctcca

SEQ ID NO: 1681645 - DNA, 15 bp, Homo sapiens
ataaaaccgctccag

SEQ ID NO: 1681646 - DNA, 15 bp, Homo sapiens
taaaaccgctccagc

SEQ ID NO: 1681647 - DNA, 15 bp, Homo sapiens
aaaaccgctccagcc

SEQ ID NO: 1681648 - DNA, 15 bp, Homo sapiens
aaaccgctccagccg

SEQ ID NO: 1681649 - DNA, 15 bp, Homo sapiens
aaccgctccagccgg

SEQ ID NO: 1681650 - DNA, 15 bp, Homo sapiens
accgctccagccggg

SEQ ID NO: 1681651 - DNA, 15 bp, Homo sapiens
ccgctccagccgggc

SEQ ID NO: 1681652 - DNA, 15 bp, Homo sapiens
cgctccagccgggca

SEQ ID NO: 1681653 - DNA, 15 bp, Homo sapiens
gctccagccgggcac

SEQ ID NO: 1681654 - DNA, 15 bp, Homo sapiens
ctccagccgggcacg

SEQ ID NO: 1681655 - DNA, 15 bp, Homo sapiens
tccagccgggcacga

SEQ ID NO: 1681656 - DNA, 15 bp, Homo sapiens
ccagccgggcacgat

SEQ ID NO: 1681657 - DNA, 15 bp, Homo sapiens
cagccgggcacgatg

SEQ ID NO: 1681658 - DNA, 15 bp, Homo sapiens
agccgggcacgatgg

SEQ ID NO: 1681659 - DNA, 15 bp, Homo sapiens
gccgggcacgatggc

SEQ ID NO: 1681660 - DNA, 15 bp, Homo sapiens
ccgggcacgatggct

SEQ ID NO: 1681661 - DNA, 15 bp, Homo sapiens
cgggcacgatggctc

SEQ ID NO: 1681662 - DNA, 15 bp, Homo sapiens
gggcacgatggctca

SEQ ID NO: 1681663 - DNA, 15 bp, Homo sapiens
ggcacgatggctcac

SEQ ID NO: 1681664 - DNA, 15 bp, Homo sapiens
gcacgatggctcacg

SEQ ID NO: 1681665 - DNA, 15 bp, Homo sapiens
cacgatggctcacgg

SEQ ID NO: 1681666 - DNA, 15 bp, Homo sapiens
acgatggctcacggc

SEQ ID NO: 1681667 - DNA, 15 bp, Homo sapiens
cgatggctcacggct

SEQ ID NO: 1681668 - DNA, 15 bp, Homo sapiens
gatggctcacggctg

SEQ ID NO: 1681669 - DNA, 15 bp, Homo sapiens
atggctcacggctgt

SEQ ID NO: 1681670 - DNA, 15 bp, Homo sapiens
tcacggctgtaatcc

SEQ ID NO: 1681671 - DNA, 15 bp, Homo sapiens
cacggctgtaatccc

SEQ ID NO: 1681672 - DNA, 15 bp, Homo sapiens
acggctgtaatccca

SEQ ID NO: 1681673 - DNA, 15 bp, Homo sapiens
cggctgtaatcccac

SEQ ID NO: 1681674 - DNA, 15 bp, Homo sapiens
ggctgtaatcccacc

SEQ ID NO: 1681675 - DNA, 15 bp, Homo sapiens
gctgtaatcccacca

SEQ ID NO: 1681676 - DNA, 15 bp, Homo sapiens
ctgtaatcccaccac

SEQ ID NO: 1681677 - DNA, 15 bp, Homo sapiens
tgtaatcccaccact

SEQ ID NO: 1681678 - DNA, 15 bp, Homo sapiens
gtaatcccaccactt

SEQ ID NO: 1681679 - DNA, 15 bp, Homo sapiens
taatcccaccactta

SEQ ID NO: 1681680 - DNA, 15 bp, Homo sapiens
aatcccaccacttag

SEQ ID NO: 1681681 - DNA, 15 bp, Homo sapiens
atcccaccacttagg

SEQ ID NO: 1681682 - DNA, 15 bp, Homo sapiens
tcccaccacttaggg

SEQ ID NO: 1681683 - DNA, 15 bp, Homo sapiens
cccaccacttaggga

SEQ ID NO: 1681684 - DNA, 15 bp, Homo sapiens
ccaccacttagggag

SEQ ID NO: 1681685 - DNA, 15 bp, Homo sapiens
caccacttagggagg

SEQ ID NO: 1681686 - DNA, 15 bp, Homo sapiens
accacttagggaggc

SEQ ID NO: 1681687 - DNA, 15 bp, Homo sapiens
ccacttagggaggcc

SEQ ID NO: 1681688 - DNA, 15 bp, Homo sapiens
tagggaggccgaggt

SEQ ID NO: 1681689 - DNA, 15 bp, Homo sapiens
agggaggccgaggta

SEQ ID NO: 1681690 - DNA, 15 bp, Homo sapiens
gaggccgaggtagat

SEQ ID NO: 1681691 - DNA, 15 bp, Homo sapiens
aggccgaggtagatg

SEQ ID NO: 1681692 - DNA, 15 bp, Homo sapiens
ggccgaggtagatgg

SEQ ID NO: 1681693 - DNA, 15 bp, Homo sapiens
gccgaggtagatgga

SEQ ID NO: 1681694 - DNA, 15 bp, Homo sapiens
ccgaggtagatggat

SEQ ID NO: 1681695 - DNA, 15 bp, Homo sapiens
cgaggtagatggatc

SEQ ID NO: 1681696 - DNA, 15 bp, Homo sapiens
gaggtagatggatcc

SEQ ID NO: 1681697 - DNA, 15 bp, Homo sapiens
aggtagatggatccc

SEQ ID NO: 1681698 - DNA, 15 bp, Homo sapiens
ggtagatggatcccc

SEQ ID NO: 1681699 - DNA, 15 bp, Homo sapiens
gtagatggatccccg

SEQ ID NO: 1681700 - DNA, 15 bp, Homo sapiens
tagatggatccccga

SEQ ID NO: 1681701 - DNA, 15 bp, Homo sapiens
agatggatccccgag

SEQ ID NO: 1681702 - DNA, 15 bp, Homo sapiens
gatggatccccgagg

SEQ ID NO: 1681703 - DNA, 15 bp, Homo sapiens
atggatccccgaggt

SEQ ID NO: 1681704 - DNA, 15 bp, Homo sapiens
tggatccccgaggtc

SEQ ID NO: 1681705 - DNA, 15 bp, Homo sapiens
ggatccccgaggtca

SEQ ID NO: 1681706 - DNA, 15 bp, Homo sapiens
gatccccgaggtcag

SEQ ID NO: 1681707 - DNA, 15 bp, Homo sapiens
atccccgaggtcagg

SEQ ID NO: 1681708 - DNA, 15 bp, Homo sapiens
tccccgaggtcagga

SEQ ID NO: 1681709 - DNA, 15 bp, Homo sapiens
ccccgaggtcaggag

SEQ ID NO: 1681710 - DNA, 15 bp, Homo sapiens
ccgaggtcaggagta

SEQ ID NO: 1681711 - DNA, 15 bp, Homo sapiens
cgaggtcaggagtaa

SEQ ID NO: 1681712 - DNA, 15 bp, Homo sapiens
gaggtcaggagtaag

SEQ ID NO: 1681713 - DNA, 15 bp, Homo sapiens
aggtcaggagtaaga

SEQ ID NO: 1681714 - DNA, 15 bp, Homo sapiens
ggtcaggagtaagag

SEQ ID NO: 1681715 - DNA, 15 bp, Homo sapiens
gtcaggagtaagaga

SEQ ID NO: 1681716 - DNA, 15 bp, Homo sapiens
tcaggagtaagagac

SEQ ID NO: 1681717 - DNA, 15 bp, Homo sapiens
caggagtaagagacc

SEQ ID NO: 1681718 - DNA, 15 bp, Homo sapiens
aggagtaagagacca

SEQ ID NO: 1681719 - DNA, 15 bp, Homo sapiens
ggagtaagagaccag

SEQ ID NO: 1681720 - DNA, 15 bp, Homo sapiens
gagtaagagaccagc

SEQ ID NO: 1681721 - DNA, 15 bp, Homo sapiens
agtaagagaccagcc

SEQ ID NO: 1681722 - DNA, 15 bp, Homo sapiens
gtaagagaccagcct

SEQ ID NO: 1681723 - DNA, 15 bp, Homo sapiens
taagagaccagcctg

SEQ ID NO: 1681724 - DNA, 15 bp, Homo sapiens
aagagaccagcctgg

SEQ ID NO: 1681725 - DNA, 15 bp, Homo sapiens
agagaccagcctggc

SEQ ID NO: 1681726 - DNA, 15 bp, Homo sapiens
ctcaagtgatttgct

SEQ ID NO: 1681727 - DNA, 15 bp, Homo sapiens
tcaagtgatttgctc

SEQ ID NO: 1681728 - DNA, 15 bp, Homo sapiens
caagtgatttgctct

SEQ ID NO: 1681729 - DNA, 15 bp, Homo sapiens
aagtgatttgctctc

SEQ ID NO: 1681730 - DNA, 15 bp, Homo sapiens
agtgatttgctctcc

SEQ ID NO: 1681731 - DNA, 15 bp, Homo sapiens
gtgatttgctctcct

SEQ ID NO: 1681732 - DNA, 15 bp, Homo sapiens
tgatttgctctccta

SEQ ID NO: 1681733 - DNA, 15 bp, Homo sapiens
gatttgctctcctag

SEQ ID NO: 1681734 - DNA, 15 bp, Homo sapiens
atttgctctcctagg

SEQ ID NO: 1681735 - DNA, 15 bp, Homo sapiens
tttgctctcctaggc

SEQ ID NO: 1681736 - DNA, 15 bp, Homo sapiens
ttgctctcctaggcc

SEQ ID NO: 1681737 - DNA, 15 bp, Homo sapiens
tgctctcctaggcct

SEQ ID NO: 1681738 - DNA, 15 bp, Homo sapiens
gctctcctaggcctc

SEQ ID NO: 1681739 - DNA, 15 bp, Homo sapiens
ctctcctaggcctcc

SEQ ID NO: 1681740 - DNA, 15 bp, Homo sapiens
tctcctaggcctccc

SEQ ID NO: 1681741 - DNA, 15 bp, Homo sapiens
ctcctaggcctccca

SEQ ID NO: 1681742 - DNA, 15 bp, Homo sapiens
tcctaggcctcccaa

SEQ ID NO: 1681743 - DNA, 15 bp, Homo sapiens
cctaggcctcccaaa

SEQ ID NO: 1681744 - DNA, 15 bp, Homo sapiens
ctaggcctcccaaag

SEQ ID NO: 1681745 - DNA, 15 bp, Homo sapiens
tgctgggattatagt

SEQ ID NO: 1681746 - DNA, 15 bp, Homo sapiens
gctgggattatagtc

SEQ ID NO: 1681747 - DNA, 15 bp, Homo sapiens
ctgggattatagtcg

SEQ ID NO: 1681748 - DNA, 15 bp, Homo sapiens
tgggattatagtcgt

SEQ ID NO: 1681749 - DNA, 15 bp, Homo sapiens
gggattatagtcgtg

SEQ ID NO: 1681750 - DNA, 15 bp, Homo sapiens
ggattatagtcgtga

SEQ ID NO: 1681751 - DNA, 15 bp, Homo sapiens
gattatagtcgtgag

SEQ ID NO: 1681752 - DNA, 15 bp, Homo sapiens
attatagtcgtgagc

SEQ ID NO: 1681753 - DNA, 15 bp, Homo sapiens
ttatagtcgtgagcc

SEQ ID NO: 1681754 - DNA, 15 bp, Homo sapiens
tatagtcgtgagcca

SEQ ID NO: 1681755 - DNA, 15 bp, Homo sapiens
atagtcgtgagccac

SEQ ID NO: 1681756 - DNA, 15 bp, Homo sapiens
tagtcgtgagccacg

SEQ ID NO: 1681757 - DNA, 15 bp, Homo sapiens
agtcgtgagccacgg

SEQ ID NO: 1681758 - DNA, 15 bp, Homo sapiens
gtcgtgagccacggt

SEQ ID NO: 1681759 - DNA, 15 bp, Homo sapiens
tcgtgagccacggtt

SEQ ID NO: 1681760 - DNA, 15 bp, Homo sapiens
cgtgagccacggttc

SEQ ID NO: 1681761 - DNA, 15 bp, Homo sapiens
gtgagccacggttcc

SEQ ID NO: 1681762 - DNA, 15 bp, Homo sapiens
tgagccacggttccc

SEQ ID NO: 1681763 - DNA, 15 bp, Homo sapiens
gagccacggttccca

SEQ ID NO: 1681764 - DNA, 15 bp, Homo sapiens
agccacggttcccag

SEQ ID NO: 1681765 - DNA, 15 bp, Homo sapiens
gccacggttcccagc

SEQ ID NO: 1681766 - DNA, 15 bp, Homo sapiens
ccacggttcccagct

SEQ ID NO: 1681767 - DNA, 15 bp, Homo sapiens
cacggttcccagcta

SEQ ID NO: 1681768 - DNA, 15 bp, Homo sapiens
acggttcccagctag

SEQ ID NO: 1681769 - DNA, 15 bp, Homo sapiens
cggttcccagctagt

SEQ ID NO: 1681770 - DNA, 15 bp, Homo sapiens
ggttcccagctagtt

SEQ ID NO: 1681771 - DNA, 15 bp, Homo sapiens
gttcccagctagttt

SEQ ID NO: 1681772 - DNA, 15 bp, Homo sapiens
ttcccagctagtttt

SEQ ID NO: 1681773 - DNA, 15 bp, Homo sapiens
tcccagctagtttta

SEQ ID NO: 1681774 - DNA, 15 bp, Homo sapiens
cccagctagttttaa

SEQ ID NO: 1681775 - DNA, 15 bp, Homo sapiens
ccagctagttttaaa

SEQ ID NO: 1681776 - DNA, 15 bp, Homo sapiens
cagctagttttaaag

SEQ ID NO: 1681777 - DNA, 15 bp, Homo sapiens
agctagttttaaaga

SEQ ID NO: 1681778 - DNA, 15 bp, Homo sapiens
gctagttttaaagat

SEQ ID NO: 1681779 - DNA, 15 bp, Homo sapiens
ctagttttaaagatt

SEQ ID NO: 1681780 - DNA, 15 bp, Homo sapiens
tagttttaaagattt

SEQ ID NO: 1681781 - DNA, 15 bp, Homo sapiens
agttttaaagatttt

SEQ ID NO: 1681782 - DNA, 15 bp, Homo sapiens
gttttaaagattttt

SEQ ID NO: 1681783 - DNA, 15 bp, Homo sapiens
ttttaaagattttta

SEQ ID NO: 1681784 - DNA, 15 bp, Homo sapiens
tttaaagatttttag

SEQ ID NO: 1681785 - DNA, 15 bp, Homo sapiens
ttaaagatttttaga

SEQ ID NO: 1681786 - DNA, 15 bp, Homo sapiens
taaagatttttagat

SEQ ID NO: 1681787 - DNA, 15 bp, Homo sapiens
aaagatttttagatg

SEQ ID NO: 1681788 - DNA, 15 bp, Homo sapiens
aagatttttagatgg

SEQ ID NO: 1681789 - DNA, 15 bp, Homo sapiens
agatttttagatggt

SEQ ID NO: 1681790 - DNA, 15 bp, Homo sapiens
gatttttagatggtt

SEQ ID NO: 1681791 - DNA, 15 bp, Homo sapiens
atttttagatggtta

SEQ ID NO: 1681792 - DNA, 15 bp, Homo sapiens
tttttagatggttaa

SEQ ID NO: 1681793 - DNA, 15 bp, Homo sapiens
ttttagatggttaag

SEQ ID NO: 1681794 - DNA, 15 bp, Homo sapiens
tttagatggttaagg

SEQ ID NO: 1681795 - DNA, 15 bp, Homo sapiens
ttagatggttaaggg

SEQ ID NO: 1681796 - DNA, 15 bp, Homo sapiens
tagatggttaagggc

SEQ ID NO: 1681797 - DNA, 15 bp, Homo sapiens
agatggttaagggcc

SEQ ID NO: 1681798 - DNA, 15 bp, Homo sapiens
gatggttaagggcca

SEQ ID NO: 1681799 - DNA, 15 bp, Homo sapiens
atggttaagggccag

SEQ ID NO: 1681800 - DNA, 15 bp, Homo sapiens
tggttaagggccagg

SEQ ID NO: 1681801 - DNA, 15 bp, Homo sapiens
ggttaagggccaggc

SEQ ID NO: 1681802 - DNA, 15 bp, Homo sapiens
gttaagggccaggcg

SEQ ID NO: 1681803 - DNA, 15 bp, Homo sapiens
ttaagggccaggcgc

SEQ ID NO: 1681804 - DNA, 15 bp, Homo sapiens
taagggccaggcgcc

SEQ ID NO: 1681805 - DNA, 15 bp, Homo sapiens
aagggccaggcgccg

SEQ ID NO: 1681806 - DNA, 15 bp, Homo sapiens
agggccaggcgccgt

SEQ ID NO: 1681807 - DNA, 15 bp, Homo sapiens
gggccaggcgccgtg

SEQ ID NO: 1681808 - DNA, 15 bp, Homo sapiens
ggccaggcgccgtgg

SEQ ID NO: 1681809 - DNA, 15 bp, Homo sapiens
gccaggcgccgtggc

SEQ ID NO: 1681810 - DNA, 15 bp, Homo sapiens
ccaggcgccgtggct

SEQ ID NO: 1681811 - DNA, 15 bp, Homo sapiens
caggcgccgtggctc

SEQ ID NO: 1681812 - DNA, 15 bp, Homo sapiens
aggcgccgtggctca

SEQ ID NO: 1681813 - DNA, 15 bp, Homo sapiens
gaggccaaagcaggc

SEQ ID NO: 1681814 - DNA, 15 bp, Homo sapiens
aggccaaagcaggcg

SEQ ID NO: 1681815 - DNA, 15 bp, Homo sapiens
ggccaaagcaggcgg

SEQ ID NO: 1681816 - DNA, 15 bp, Homo sapiens
gccaaagcaggcgga

SEQ ID NO: 1681817 - DNA, 15 bp, Homo sapiens
ccaaagcaggcggat

SEQ ID NO: 1681818 - DNA, 15 bp, Homo sapiens
caaagcaggcggatc

SEQ ID NO: 1681819 - DNA, 15 bp, Homo sapiens
aaagcaggcggatca

SEQ ID NO: 1681820 - DNA, 15 bp, Homo sapiens
aagcaggcggatcac

SEQ ID NO: 1681821 - DNA, 15 bp, Homo sapiens
agcaggcggatcacg

SEQ ID NO: 1681822 - DNA, 15 bp, Homo sapiens
caggcggatcacgag

SEQ ID NO: 1681823 - DNA, 15 bp, Homo sapiens
aggcggatcacgagg

SEQ ID NO: 1681824 - DNA, 15 bp, Homo sapiens
aacatggtgaaaccg

SEQ ID NO: 1681825 - DNA, 15 bp, Homo sapiens
acatggtgaaaccgc

SEQ ID NO: 1681826 - DNA, 15 bp, Homo sapiens
catggtgaaaccgcg

SEQ ID NO: 1681827 - DNA, 15 bp, Homo sapiens
atggtgaaaccgcgt

SEQ ID NO: 1681828 - DNA, 15 bp, Homo sapiens
tggtgaaaccgcgtc

SEQ ID NO: 1681829 - DNA, 15 bp, Homo sapiens
ggtgaaaccgcgtct

SEQ ID NO: 1681830 - DNA, 15 bp, Homo sapiens
gtgaaaccgcgtcta

SEQ ID NO: 1681831 - DNA, 15 bp, Homo sapiens
tgaaaccgcgtctac

SEQ ID NO: 1681832 - DNA, 15 bp, Homo sapiens
gaaaccgcgtctacc

SEQ ID NO: 1681833 - DNA, 15 bp, Homo sapiens
aaaccgcgtctacca

SEQ ID NO: 1681834 - DNA, 15 bp, Homo sapiens
aaccgcgtctaccaa

SEQ ID NO: 1681835 - DNA, 15 bp, Homo sapiens
accgcgtctaccaaa

SEQ ID NO: 1681836 - DNA, 15 bp, Homo sapiens
ccgcgtctaccaaaa

SEQ ID NO: 1681837 - DNA, 15 bp, Homo sapiens
cgcgtctaccaaaaa

SEQ ID NO: 1681838 - DNA, 15 bp, Homo sapiens
gcgtctaccaaaaaa

SEQ ID NO: 1681839 - DNA, 15 bp, Homo sapiens
cgtctaccaaaaaac

SEQ ID NO: 1681840 - DNA, 15 bp, Homo sapiens
gtctaccaaaaaaca

SEQ ID NO: 1681841 - DNA, 15 bp, Homo sapiens
tctaccaaaaaacaa

SEQ ID NO: 1681842 - DNA, 15 bp, Homo sapiens
ctaccaaaaaacaaa

SEQ ID NO: 1681843 - DNA, 15 bp, Homo sapiens
taccaaaaaacaaaa

SEQ ID NO: 1681844 - DNA, 15 bp, Homo sapiens
accaaaaaacaaaaa

SEQ ID NO: 1681845 - DNA, 15 bp, Homo sapiens
ccaaaaaacaaaaaa

SEQ ID NO: 1681846 - DNA, 15 bp, Homo sapiens
caaaaaacaaaaaat

SEQ ID NO: 1681847 - DNA, 15 bp, Homo sapiens
aaaaaacaaaaaatt

SEQ ID NO: 1681848 - DNA, 15 bp, Homo sapiens
aaaaacaaaaaatta

SEQ ID NO: 1681849 - DNA, 15 bp, Homo sapiens
aaaacaaaaaattag

SEQ ID NO: 1681850 - DNA, 15 bp, Homo sapiens
aaacaaaaaattagc

SEQ ID NO: 1681851 - DNA, 15 bp, Homo sapiens
aacaaaaaattagcc

SEQ ID NO: 1681852 - DNA, 15 bp, Homo sapiens
aaaaattagccaggg

SEQ ID NO: 1681853 - DNA, 15 bp, Homo sapiens
aaaattagccagggc

SEQ ID NO: 1681854 - DNA, 15 bp, Homo sapiens
aaattagccagggct

SEQ ID NO: 1681855 - DNA, 15 bp, Homo sapiens
aattagccagggctg

SEQ ID NO: 1681856 - DNA, 15 bp, Homo sapiens
attagccagggctgg

SEQ ID NO: 1681857 - DNA, 15 bp, Homo sapiens
ttagccagggctggt

SEQ ID NO: 1681858 - DNA, 15 bp, Homo sapiens
tagccagggctggtg

SEQ ID NO: 1681859 - DNA, 15 bp, Homo sapiens
agccagggctggtgg

SEQ ID NO: 1681860 - DNA, 15 bp, Homo sapiens
gccagggctggtggc

SEQ ID NO: 1681861 - DNA, 15 bp, Homo sapiens
ccagggctggtggca

SEQ ID NO: 1681862 - DNA, 15 bp, Homo sapiens
cagggctggtggcac

SEQ ID NO: 1681863 - DNA, 15 bp, Homo sapiens
agggctggtggcacg

SEQ ID NO: 1681864 - DNA, 15 bp, Homo sapiens
gggctggtggcacgc

SEQ ID NO: 1681865 - DNA, 15 bp, Homo sapiens
ggctggtggcacgca

SEQ ID NO: 1681866 - DNA, 15 bp, Homo sapiens
gctggtggcacgcac

SEQ ID NO: 1681867 - DNA, 15 bp, Homo sapiens
ctggtggcacgcacc

SEQ ID NO: 1681868 - DNA, 15 bp, Homo sapiens
ggtggcacgcacctg

SEQ ID NO: 1681869 - DNA, 15 bp, Homo sapiens
gtggcacgcacctgt

SEQ ID NO: 1681870 - DNA, 15 bp, Homo sapiens
tggcacgcacctgta

SEQ ID NO: 1681871 - DNA, 15 bp, Homo sapiens
ggcacgcacctgtaa

SEQ ID NO: 1681872 - DNA, 15 bp, Homo sapiens
gcacgcacctgtaat

SEQ ID NO: 1681873 - DNA, 15 bp, Homo sapiens
cacgcacctgtaatc

SEQ ID NO: 1681874 - DNA, 15 bp, Homo sapiens
acgcacctgtaatcc

SEQ ID NO: 1681875 - DNA, 15 bp, Homo sapiens
cgcacctgtaatccc

SEQ ID NO: 1681876 - DNA, 15 bp, Homo sapiens
gcacctgtaatccca

SEQ ID NO: 1681877 - DNA, 15 bp, Homo sapiens
taatcccagctgctc

SEQ ID NO: 1681878 - DNA, 15 bp, Homo sapiens
aatcccagctgctcg

SEQ ID NO: 1681879 - DNA, 15 bp, Homo sapiens
atcccagctgctcgg

SEQ ID NO: 1681880 - DNA, 15 bp, Homo sapiens
ctcgggaggctgagc

SEQ ID NO: 1681881 - DNA, 15 bp, Homo sapiens
tcgggaggctgagcc

SEQ ID NO: 1681882 - DNA, 15 bp, Homo sapiens
cgggaggctgagcca

SEQ ID NO: 1681883 - DNA, 15 bp, Homo sapiens
gggaggctgagccag

SEQ ID NO: 1681884 - DNA, 15 bp, Homo sapiens
ggaggctgagccagg

SEQ ID NO: 1681885 - DNA, 15 bp, Homo sapiens
gaggctgagccagga

SEQ ID NO: 1681886 - DNA, 15 bp, Homo sapiens
aggctgagccaggag

SEQ ID NO: 1681887 - DNA, 15 bp, Homo sapiens
ggctgagccaggaga

SEQ ID NO: 1681888 - DNA, 15 bp, Homo sapiens
gctgagccaggagaa

SEQ ID NO: 1681889 - DNA, 15 bp, Homo sapiens
ctgagccaggagaat

SEQ ID NO: 1681890 - DNA, 15 bp, Homo sapiens
tgagccaggagaatc

SEQ ID NO: 1681891 - DNA, 15 bp, Homo sapiens
gagccaggagaatcc

SEQ ID NO: 1681892 - DNA, 15 bp, Homo sapiens
agccaggagaatccc

SEQ ID NO: 1681893 - DNA, 15 bp, Homo sapiens
gccaggagaatccct

SEQ ID NO: 1681894 - DNA, 15 bp, Homo sapiens
ccaggagaatccctt

SEQ ID NO: 1681895 - DNA, 15 bp, Homo sapiens
attccagcctgggca

SEQ ID NO: 1681896 - DNA, 15 bp, Homo sapiens
ttccagcctgggcaa

SEQ ID NO: 1681897 - DNA, 15 bp, Homo sapiens
aataaataaaaatat

SEQ ID NO: 1681898 - DNA, 15 bp, Homo sapiens
ataaataaaaatatt

SEQ ID NO: 1681899 - DNA, 15 bp, Homo sapiens
taaataaaaatattt

SEQ ID NO: 1681900 - DNA, 15 bp, Homo sapiens
aaataaaaatattta

SEQ ID NO: 1681901 - DNA, 15 bp, Homo sapiens
aataaaaatatttat

SEQ ID NO: 1681902 - DNA, 15 bp, Homo sapiens
ataaaaatatttata

SEQ ID NO: 1681903 - DNA, 15 bp, Homo sapiens
taaaaatatttatac

SEQ ID NO: 1681904 - DNA, 15 bp, Homo sapiens
aaaaatatttataca

SEQ ID NO: 1681905 - DNA, 15 bp, Homo sapiens
aaaatatttatacat

SEQ ID NO: 1681906 - DNA, 15 bp, Homo sapiens
aaatatttatacatg

SEQ ID NO: 1681907 - DNA, 15 bp, Homo sapiens
aatatttatacatgg

SEQ ID NO: 1681908 - DNA, 15 bp, Homo sapiens
atatttatacatggt

SEQ ID NO: 1681909 - DNA, 15 bp, Homo sapiens
tatttatacatggtt

SEQ ID NO: 1681910 - DNA, 15 bp, Homo sapiens
atttatacatggtta

SEQ ID NO: 1681911 - DNA, 15 bp, Homo sapiens
tttatacatggttaa

SEQ ID NO: 1681912 - DNA, 15 bp, Homo sapiens
ttatacatggttaaa

SEQ ID NO: 1681913 - DNA, 15 bp, Homo sapiens
tatacatggttaaag

SEQ ID NO: 1681914 - DNA, 15 bp, Homo sapiens
atacatggttaaagt

SEQ ID NO: 1681915 - DNA, 15 bp, Homo sapiens
tacatggttaaagta

SEQ ID NO: 1681916 - DNA, 15 bp, Homo sapiens
acatggttaaagtat

SEQ ID NO: 1681917 - DNA, 15 bp, Homo sapiens
catggttaaagtatg

SEQ ID NO: 1681918 - DNA, 15 bp, Homo sapiens
atggttaaagtatgt

SEQ ID NO: 1681919 - DNA, 15 bp, Homo sapiens
tggttaaagtatgta

SEQ ID NO: 1681920 - DNA, 15 bp, Homo sapiens
ggttaaagtatgtat

SEQ ID NO: 1681921 - DNA, 15 bp, Homo sapiens
gttaaagtatgtatt

SEQ ID NO: 1681922 - DNA, 15 bp, Homo sapiens
ttaaagtatgtattg

SEQ ID NO: 1681923 - DNA, 15 bp, Homo sapiens
taaagtatgtattgt

SEQ ID NO: 1681924 - DNA, 15 bp, Homo sapiens
aaagtatgtattgtg

SEQ ID NO: 1681925 - DNA, 15 bp, Homo sapiens
aagtatgtattgtgg

SEQ ID NO: 1681926 - DNA, 15 bp, Homo sapiens
agtatgtattgtggg

SEQ ID NO: 1681927 - DNA, 15 bp, Homo sapiens
gtatgtattgtgggt

SEQ ID NO: 1681928 - DNA, 15 bp, Homo sapiens
tatgtattgtgggtg

SEQ ID NO: 1681929 - DNA, 15 bp, Homo sapiens
atgtattgtgggtgt

SEQ ID NO: 1681930 - DNA, 15 bp, Homo sapiens
tgtattgtgggtgta

SEQ ID NO: 1681931 - DNA, 15 bp, Homo sapiens
gtattgtgggtgtat

SEQ ID NO: 1681932 - DNA, 15 bp, Homo sapiens
tattgtgggtgtata

SEQ ID NO: 1681933 - DNA, 15 bp, Homo sapiens
attgtgggtgtatat

SEQ ID NO: 1681934 - DNA, 15 bp, Homo sapiens
ttgtgggtgtatatt

SEQ ID NO: 1681935 - DNA, 15 bp, Homo sapiens
tgtgggtgtatattt

SEQ ID NO: 1681936 - DNA, 15 bp, Homo sapiens
gtgggtgtatatttt

SEQ ID NO: 1681937 - DNA, 15 bp, Homo sapiens
tgggtgtatattttt

SEQ ID NO: 1681938 - DNA, 15 bp, Homo sapiens
gggtgtatattttta

SEQ ID NO: 1681939 - DNA, 15 bp, Homo sapiens
ggtgtatatttttat

SEQ ID NO: 1681940 - DNA, 15 bp, Homo sapiens
gtgtatatttttatt

SEQ ID NO: 1681941 - DNA, 15 bp, Homo sapiens
tgtatatttttattc

SEQ ID NO: 1681942 - DNA, 15 bp, Homo sapiens
gtatatttttattct

SEQ ID NO: 1681943 - DNA, 15 bp, Homo sapiens
tatatttttattctt

SEQ ID NO: 1681944 - DNA, 15 bp, Homo sapiens
atatttttattcttg

SEQ ID NO: 1681945 - DNA, 15 bp, Homo sapiens
tatttttattcttgc

SEQ ID NO: 1681946 - DNA, 15 bp, Homo sapiens
atttttattcttgct

SEQ ID NO: 1681947 - DNA, 15 bp, Homo sapiens
tttttattcttgcta

SEQ ID NO: 1681948 - DNA, 15 bp, Homo sapiens
ttttattcttgctaa

SEQ ID NO: 1681949 - DNA, 15 bp, Homo sapiens
tttattcttgctaac

SEQ ID NO: 1681950 - DNA, 15 bp, Homo sapiens
ttattcttgctaaca

SEQ ID NO: 1681951 - DNA, 15 bp, Homo sapiens
tattcttgctaacat

SEQ ID NO: 1681952 - DNA, 15 bp, Homo sapiens
attcttgctaacatt

SEQ ID NO: 1681953 - DNA, 15 bp, Homo sapiens
ttcttgctaacattt

SEQ ID NO: 1681954 - DNA, 15 bp, Homo sapiens
tcttgctaacatttt

SEQ ID NO: 1681955 - DNA, 15 bp, Homo sapiens
cttgctaacatttta

SEQ ID NO: 1681956 - DNA, 15 bp, Homo sapiens
ttgctaacattttac

SEQ ID NO: 1681957 - DNA, 15 bp, Homo sapiens
tgctaacattttacc

SEQ ID NO: 1681958 - DNA, 15 bp, Homo sapiens
gctaacattttacca

SEQ ID NO: 1681959 - DNA, 15 bp, Homo sapiens
ctaacattttaccag

SEQ ID NO: 1681960 - DNA, 15 bp, Homo sapiens
taacattttaccaga

SEQ ID NO: 1681961 - DNA, 15 bp, Homo sapiens
aacattttaccagaa

SEQ ID NO: 1681962 - DNA, 15 bp, Homo sapiens
acattttaccagaaa

SEQ ID NO: 1681963 - DNA, 15 bp, Homo sapiens
cattttaccagaaat

SEQ ID NO: 1681964 - DNA, 15 bp, Homo sapiens
attttaccagaaata

SEQ ID NO: 1681965 - DNA, 15 bp, Homo sapiens
ttttaccagaaataa

SEQ ID NO: 1681966 - DNA, 15 bp, Homo sapiens
tttaccagaaataaa

SEQ ID NO: 1681967 - DNA, 15 bp, Homo sapiens
ttaccagaaataaat

SEQ ID NO: 1681968 - DNA, 15 bp, Homo sapiens
taccagaaataaatt

SEQ ID NO: 1681969 - DNA, 15 bp, Homo sapiens
accagaaataaatta

SEQ ID NO: 1681970 - DNA, 15 bp, Homo sapiens
ccagaaataaattaa

SEQ ID NO: 1681971 - DNA, 15 bp, Homo sapiens
cagaaataaattaaa

SEQ ID NO: 1681972 - DNA, 15 bp, Homo sapiens
agaaataaattaaaa

SEQ ID NO: 1681973 - DNA, 15 bp, Homo sapiens
gaaataaattaaaac

SEQ ID NO: 1681974 - DNA, 15 bp, Homo sapiens
aaataaattaaaaca

SEQ ID NO: 1681975 - DNA, 15 bp, Homo sapiens
aataaattaaaacat

SEQ ID NO: 1681976 - DNA, 15 bp, Homo sapiens
ataaattaaaacata

SEQ ID NO: 1681977 - DNA, 15 bp, Homo sapiens
taaattaaaacatag

SEQ ID NO: 1681978 - DNA, 15 bp, Homo sapiens
aaattaaaacatagt

SEQ ID NO: 1681979 - DNA, 15 bp, Homo sapiens
aattaaaacatagtt

SEQ ID NO: 1681980 - DNA, 15 bp, Homo sapiens
attaaaacatagtta

SEQ ID NO: 1681981 - DNA, 15 bp, Homo sapiens
ttaaaacatagttaa

SEQ ID NO: 1681982 - DNA, 15 bp, Homo sapiens
taaaacatagttaat

SEQ ID NO: 1681983 - DNA, 15 bp, Homo sapiens
aaaacatagttaatt

SEQ ID NO: 1681984 - DNA, 15 bp, Homo sapiens
aaacatagttaatta

SEQ ID NO: 1681985 - DNA, 15 bp, Homo sapiens
aacatagttaattat

SEQ ID NO: 1681986 - DNA, 15 bp, Homo sapiens
acatagttaattatc

SEQ ID NO: 1681987 - DNA, 15 bp, Homo sapiens
catagttaattatct

SEQ ID NO: 1681988 - DNA, 15 bp, Homo sapiens
atagttaattatctt

SEQ ID NO: 1681989 - DNA, 15 bp, Homo sapiens
tagttaattatcttt

SEQ ID NO: 1681990 - DNA, 15 bp, Homo sapiens
agttaattatctttc

SEQ ID NO: 1681991 - DNA, 15 bp, Homo sapiens
gttaattatctttct

SEQ ID NO: 1681992 - DNA, 15 bp, Homo sapiens
ttaattatctttctt

SEQ ID NO: 1681993 - DNA, 15 bp, Homo sapiens
taattatctttctta

SEQ ID NO: 1681994 - DNA, 15 bp, Homo sapiens
aattatctttcttaa

SEQ ID NO: 1681995 - DNA, 15 bp, Homo sapiens
attatctttcttaag

SEQ ID NO: 1681996 - DNA, 15 bp, Homo sapiens
ttatctttcttaagt

SEQ ID NO: 1681997 - DNA, 15 bp, Homo sapiens
tatctttcttaagta

SEQ ID NO: 1681998 - DNA, 15 bp, Homo sapiens
atctttcttaagtaa

SEQ ID NO: 1681999 - DNA, 15 bp, Homo sapiens
tctttcttaagtaaa

SEQ ID NO: 1682000 - DNA, 15 bp, Homo sapiens
ctttcttaagtaaat

SEQ ID NO: 1682001 - DNA, 15 bp, Homo sapiens
tttcttaagtaaatt

SEQ ID NO: 1682002 - DNA, 15 bp, Homo sapiens
ttcttaagtaaattg

SEQ ID NO: 1682003 - DNA, 15 bp, Homo sapiens
tcttaagtaaattga

SEQ ID NO: 1682004 - DNA, 15 bp, Homo sapiens
cttaagtaaattgaa

SEQ ID NO: 1682005 - DNA, 15 bp, Homo sapiens
ttaagtaaattgaat

SEQ ID NO: 1682006 - DNA, 15 bp, Homo sapiens
taagtaaattgaatg

SEQ ID NO: 1682007 - DNA, 15 bp, Homo sapiens
aagtaaattgaatgt

SEQ ID NO: 1682008 - DNA, 15 bp, Homo sapiens
agtaaattgaatgta

SEQ ID NO: 1682009 - DNA, 15 bp, Homo sapiens
gtaaattgaatgtat

SEQ ID NO: 1682010 - DNA, 15 bp, Homo sapiens
taaattgaatgtatt

SEQ ID NO: 1682011 - DNA, 15 bp, Homo sapiens
aaattgaatgtatta

SEQ ID NO: 1682012 - DNA, 15 bp, Homo sapiens
aattgaatgtattaa

SEQ ID NO: 1682013 - DNA, 15 bp, Homo sapiens
attgaatgtattaat

SEQ ID NO: 1682014 - DNA, 15 bp, Homo sapiens
ttgaatgtattaata

SEQ ID NO: 1682015 - DNA, 15 bp, Homo sapiens
tgaatgtattaatat

SEQ ID NO: 1682016 - DNA, 15 bp, Homo sapiens
gaatgtattaatatg

SEQ ID NO: 1682017 - DNA, 15 bp, Homo sapiens
aatgtattaatatgg

SEQ ID NO: 1682018 - DNA, 15 bp, Homo sapiens
atgtattaatatgga

SEQ ID NO: 1682019 - DNA, 15 bp, Homo sapiens
tgtattaatatggaa

SEQ ID NO: 1682020 - DNA, 15 bp, Homo sapiens
gtattaatatggaaa

SEQ ID NO: 1682021 - DNA, 15 bp, Homo sapiens
tattaatatggaaat

SEQ ID NO: 1682022 - DNA, 15 bp, Homo sapiens
attaatatggaaatt

SEQ ID NO: 1682023 - DNA, 15 bp, Homo sapiens
ttaatatggaaattg

SEQ ID NO: 1682024 - DNA, 15 bp, Homo sapiens
taatatggaaattgg

SEQ ID NO: 1682025 - DNA, 15 bp, Homo sapiens
aatatggaaattgga

SEQ ID NO: 1682026 - DNA, 15 bp, Homo sapiens
atatggaaattggat

SEQ ID NO: 1682027 - DNA, 15 bp, Homo sapiens
tatggaaattggatc

SEQ ID NO: 1682028 - DNA, 15 bp, Homo sapiens
atggaaattggatca

SEQ ID NO: 1682029 - DNA, 15 bp, Homo sapiens
tggaaattggatcag

SEQ ID NO: 1682030 - DNA, 15 bp, Homo sapiens
ggaaattggatcagg

SEQ ID NO: 1682031 - DNA, 15 bp, Homo sapiens
gaaattggatcagga

SEQ ID NO: 1682032 - DNA, 15 bp, Homo sapiens
aaattggatcaggaa

SEQ ID NO: 1682033 - DNA, 15 bp, Homo sapiens
aattggatcaggaaa

SEQ ID NO: 1682034 - DNA, 15 bp, Homo sapiens
attggatcaggaaaa

SEQ ID NO: 1682035 - DNA, 15 bp, Homo sapiens
ttggatcaggaaaaa

SEQ ID NO: 1682036 - DNA, 15 bp, Homo sapiens
tggatcaggaaaaaa

SEQ ID NO: 1682037 - DNA, 15 bp, Homo sapiens
ggatcaggaaaaaaa

SEQ ID NO: 1682038 - DNA, 15 bp, Homo sapiens
gatcaggaaaaaaaa

SEQ ID NO: 1682039 - DNA, 15 bp, Homo sapiens
atcaggaaaaaaaat

SEQ ID NO: 1682040 - DNA, 15 bp, Homo sapiens
aggaaaaaaaatcaa

SEQ ID NO: 1682041 - DNA, 15 bp, Homo sapiens
ggaaaaaaaatcaat

SEQ ID NO: 1682042 - DNA, 15 bp, Homo sapiens
gaaaaaaaatcaatt

SEQ ID NO: 1682043 - DNA, 15 bp, Homo sapiens
aaaaaaaatcaattc

SEQ ID NO: 1682044 - DNA, 15 bp, Homo sapiens
aaaaaaatcaattcc

SEQ ID NO: 1682045 - DNA, 15 bp, Homo sapiens
aaaaaatcaattccc

SEQ ID NO: 1682046 - DNA, 15 bp, Homo sapiens
aaaaatcaattccca

SEQ ID NO: 1682047 - DNA, 15 bp, Homo sapiens
aaaatcaattcccaa

SEQ ID NO: 1682048 - DNA, 15 bp, Homo sapiens
aaatcaattcccaat

SEQ ID NO: 1682049 - DNA, 15 bp, Homo sapiens
aatcaattcccaata

SEQ ID NO: 1682050 - DNA, 15 bp, Homo sapiens
atcaattcccaatac

SEQ ID NO: 1682051 - DNA, 15 bp, Homo sapiens
tcaattcccaatacc

SEQ ID NO: 1682052 - DNA, 15 bp, Homo sapiens
caattcccaatacct

SEQ ID NO: 1682053 - DNA, 15 bp, Homo sapiens
aattcccaatacctt

SEQ ID NO: 1682054 - DNA, 15 bp, Homo sapiens
attcccaatacctta

SEQ ID NO: 1682055 - DNA, 15 bp, Homo sapiens
ttcccaataccttac

SEQ ID NO: 1682056 - DNA, 15 bp, Homo sapiens
tcccaataccttaca

SEQ ID NO: 1682057 - DNA, 15 bp, Homo sapiens
cccaataccttacag

SEQ ID NO: 1682058 - DNA, 15 bp, Homo sapiens
ccaataccttacagt

SEQ ID NO: 1682059 - DNA, 15 bp, Homo sapiens
caataccttacagtt

SEQ ID NO: 1682060 - DNA, 15 bp, Homo sapiens
aataccttacagttc

SEQ ID NO: 1682061 - DNA, 15 bp, Homo sapiens
ataccttacagttcc

SEQ ID NO: 1682062 - DNA, 15 bp, Homo sapiens
taccttacagttccc

SEQ ID NO: 1682063 - DNA, 15 bp, Homo sapiens
accttacagttccca

SEQ ID NO: 1682064 - DNA, 15 bp, Homo sapiens
ccttacagttcccag

SEQ ID NO: 1682065 - DNA, 15 bp, Homo sapiens
cttacagttcccagt

SEQ ID NO: 1682066 - DNA, 15 bp, Homo sapiens
ttacagttcccagta

SEQ ID NO: 1682067 - DNA, 15 bp, Homo sapiens
tacagttcccagtaa

SEQ ID NO: 1682068 - DNA, 15 bp, Homo sapiens
acagttcccagtaat

SEQ ID NO: 1682069 - DNA, 15 bp, Homo sapiens
cagttcccagtaata

SEQ ID NO: 1682070 - DNA, 15 bp, Homo sapiens
agttcccagtaatac

SEQ ID NO: 1682071 - DNA, 15 bp, Homo sapiens
gttcccagtaatact

SEQ ID NO: 1682072 - DNA, 15 bp, Homo sapiens
ttcccagtaatactc

SEQ ID NO: 1682073 - DNA, 15 bp, Homo sapiens
tcccagtaatactcg

SEQ ID NO: 1682074 - DNA, 15 bp, Homo sapiens
cccagtaatactcgg

SEQ ID NO: 1682075 - DNA, 15 bp, Homo sapiens
ccagtaatactcggt

SEQ ID NO: 1682076 - DNA, 15 bp, Homo sapiens
cagtaatactcggta

SEQ ID NO: 1682077 - DNA, 15 bp, Homo sapiens
agtaatactcggtat

SEQ ID NO: 1682078 - DNA, 15 bp, Homo sapiens
gtaatactcggtatg

SEQ ID NO: 1682079 - DNA, 15 bp, Homo sapiens
taatactcggtatga

SEQ ID NO: 1682080 - DNA, 15 bp, Homo sapiens
aatactcggtatgaa

SEQ ID NO: 1682081 - DNA, 15 bp, Homo sapiens
atactcggtatgaat

SEQ ID NO: 1682082 - DNA, 15 bp, Homo sapiens
tactcggtatgaata

SEQ ID NO: 1682083 - DNA, 15 bp, Homo sapiens
actcggtatgaataa

SEQ ID NO: 1682084 - DNA, 15 bp, Homo sapiens
ctcggtatgaataaa

SEQ ID NO: 1682085 - DNA, 15 bp, Homo sapiens
tcggtatgaataaag

SEQ ID NO: 1682086 - DNA, 15 bp, Homo sapiens
cggtatgaataaaga

SEQ ID NO: 1682087 - DNA, 15 bp, Homo sapiens
ggtatgaataaagac

SEQ ID NO: 1682088 - DNA, 15 bp, Homo sapiens
gtatgaataaagaca

SEQ ID NO: 1682089 - DNA, 15 bp, Homo sapiens
tatgaataaagacag

SEQ ID NO: 1682090 - DNA, 15 bp, Homo sapiens
atgaataaagacaga

SEQ ID NO: 1682091 - DNA, 15 bp, Homo sapiens
tgaataaagacagat

SEQ ID NO: 1682092 - DNA, 15 bp, Homo sapiens
gaataaagacagatt

SEQ ID NO: 1682093 - DNA, 15 bp, Homo sapiens
aataaagacagatta

SEQ ID NO: 1682094 - DNA, 15 bp, Homo sapiens
ataaagacagattag

SEQ ID NO: 1682095 - DNA, 15 bp, Homo sapiens
taaagacagattaga

SEQ ID NO: 1682096 - DNA, 15 bp, Homo sapiens
aaagacagattagag

SEQ ID NO: 1682097 - DNA, 15 bp, Homo sapiens
aagacagattagagc

SEQ ID NO: 1682098 - DNA, 15 bp, Homo sapiens
agacagattagagca

SEQ ID NO: 1682099 - DNA, 15 bp, Homo sapiens
gacagattagagcac

SEQ ID NO: 1682100 - DNA, 15 bp, Homo sapiens
acagattagagcaca

SEQ ID NO: 1682101 - DNA, 15 bp, Homo sapiens
cagattagagcacag

SEQ ID NO: 1682102 - DNA, 15 bp, Homo sapiens
agattagagcacagg

SEQ ID NO: 1682103 - DNA, 15 bp, Homo sapiens
gattagagcacagga

SEQ ID NO: 1682104 - DNA, 15 bp, Homo sapiens
attagagcacaggac

SEQ ID NO: 1682105 - DNA, 15 bp, Homo sapiens
ttagagcacaggaca

SEQ ID NO: 1682106 - DNA, 15 bp, Homo sapiens
tagagcacaggacat

SEQ ID NO: 1682107 - DNA, 15 bp, Homo sapiens
agagcacaggacatt

SEQ ID NO: 1682108 - DNA, 15 bp, Homo sapiens
gagcacaggacattt

SEQ ID NO: 1682109 - DNA, 15 bp, Homo sapiens
agcacaggacatttg

SEQ ID NO: 1682110 - DNA, 15 bp, Homo sapiens
gcacaggacatttga

SEQ ID NO: 1682111 - DNA, 15 bp, Homo sapiens
cacaggacatttgag

SEQ ID NO: 1682112 - DNA, 15 bp, Homo sapiens
acaggacatttgagg

SEQ ID NO: 1682113 - DNA, 15 bp, Homo sapiens
caggacatttgagga

SEQ ID NO: 1682114 - DNA, 15 bp, Homo sapiens
aggacatttgaggat

SEQ ID NO: 1682115 - DNA, 15 bp, Homo sapiens
ggacatttgaggatt

SEQ ID NO: 1682116 - DNA, 15 bp, Homo sapiens
gacatttgaggattt

SEQ ID NO: 1682117 - DNA, 15 bp, Homo sapiens
acatttgaggatttg

SEQ ID NO: 1682118 - DNA, 15 bp, Homo sapiens
catttgaggatttgg

SEQ ID NO: 1682119 - DNA, 15 bp, Homo sapiens
atttgaggatttggt

SEQ ID NO: 1682120 - DNA, 15 bp, Homo sapiens
tttgaggatttggta

SEQ ID NO: 1682121 - DNA, 15 bp, Homo sapiens
ttgaggatttggtaa

SEQ ID NO: 1682122 - DNA, 15 bp, Homo sapiens
tgaggatttggtaat

SEQ ID NO: 1682123 - DNA, 15 bp, Homo sapiens
gaggatttggtaatt

SEQ ID NO: 1682124 - DNA, 15 bp, Homo sapiens
aggatttggtaattt

SEQ ID NO: 1682125 - DNA, 15 bp, Homo sapiens
ggatttggtaattta

SEQ ID NO: 1682126 - DNA, 15 bp, Homo sapiens
gatttggtaatttac

SEQ ID NO: 1682127 - DNA, 15 bp, Homo sapiens
atttggtaatttact

SEQ ID NO: 1682128 - DNA, 15 bp, Homo sapiens
tttggtaatttactt

SEQ ID NO: 1682129 - DNA, 15 bp, Homo sapiens
ttggtaatttacttg

SEQ ID NO: 1682130 - DNA, 15 bp, Homo sapiens
tggtaatttacttgg

SEQ ID NO: 1682131 - DNA, 15 bp, Homo sapiens
ggtaatttacttggg

SEQ ID NO: 1682132 - DNA, 15 bp, Homo sapiens
gtaatttacttggga

SEQ ID NO: 1682133 - DNA, 15 bp, Homo sapiens
atttacttgggaatt

SEQ ID NO: 1682134 - DNA, 15 bp, Homo sapiens
tttacttgggaattt

SEQ ID NO: 1682135 - DNA, 15 bp, Homo sapiens
ttacttgggaattta

SEQ ID NO: 1682136 - DNA, 15 bp, Homo sapiens
tacttgggaatttac

SEQ ID NO: 1682137 - DNA, 15 bp, Homo sapiens
acttgggaatttact

SEQ ID NO: 1682138 - DNA, 15 bp, Homo sapiens
cttgggaatttactc

SEQ ID NO: 1682139 - DNA, 15 bp, Homo sapiens
ttgggaatttactca

SEQ ID NO: 1682140 - DNA, 15 bp, Homo sapiens
tgggaatttactcag

SEQ ID NO: 1682141 - DNA, 15 bp, Homo sapiens
gggaatttactcaga

SEQ ID NO: 1682142 - DNA, 15 bp, Homo sapiens
ggaatttactcagaa

SEQ ID NO: 1682143 - DNA, 15 bp, Homo sapiens
gaatttactcagaac

SEQ ID NO: 1682144 - DNA, 15 bp, Homo sapiens
aatttactcagaacc

SEQ ID NO: 1682145 - DNA, 15 bp, Homo sapiens
atttactcagaacca

SEQ ID NO: 1682146 - DNA, 15 bp, Homo sapiens
tttactcagaaccat

SEQ ID NO: 1682147 - DNA, 15 bp, Homo sapiens
ttactcagaaccatg

SEQ ID NO: 1682148 - DNA, 15 bp, Homo sapiens
tactcagaaccatgt

SEQ ID NO: 1682149 - DNA, 15 bp, Homo sapiens
actcagaaccatgta

SEQ ID NO: 1682150 - DNA, 15 bp, Homo sapiens
ctcagaaccatgtat

SEQ ID NO: 1682151 - DNA, 15 bp, Homo sapiens
tcagaaccatgtatt

SEQ ID NO: 1682152 - DNA, 15 bp, Homo sapiens
cagaaccatgtattt

SEQ ID NO: 1682153 - DNA, 15 bp, Homo sapiens
agaaccatgtatttt

SEQ ID NO: 1682154 - DNA, 15 bp, Homo sapiens
gaaccatgtatttta

SEQ ID NO: 1682155 - DNA, 15 bp, Homo sapiens
aaccatgtattttaa

SEQ ID NO: 1682156 - DNA, 15 bp, Homo sapiens
accatgtattttaaa

SEQ ID NO: 1682157 - DNA, 15 bp, Homo sapiens
ccatgtattttaaac

SEQ ID NO: 1682158 - DNA, 15 bp, Homo sapiens
catgtattttaaacg

SEQ ID NO: 1682159 - DNA, 15 bp, Homo sapiens
atgtattttaaacgt

SEQ ID NO: 1682160 - DNA, 15 bp, Homo sapiens
tgtattttaaacgtc

SEQ ID NO: 1682161 - DNA, 15 bp, Homo sapiens
gtattttaaacgtct

SEQ ID NO: 1682162 - DNA, 15 bp, Homo sapiens
tattttaaacgtctc

SEQ ID NO: 1682163 - DNA, 15 bp, Homo sapiens
attttaaacgtctct

SEQ ID NO: 1682164 - DNA, 15 bp, Homo sapiens
ttttaaacgtctcta

SEQ ID NO: 1682165 - DNA, 15 bp, Homo sapiens
tttaaacgtctctaa

SEQ ID NO: 1682166 - DNA, 15 bp, Homo sapiens
ttaaacgtctctaag

SEQ ID NO: 1682167 - DNA, 15 bp, Homo sapiens
taaacgtctctaagt

SEQ ID NO: 1682168 - DNA, 15 bp, Homo sapiens
aaacgtctctaagtc

SEQ ID NO: 1682169 - DNA, 15 bp, Homo sapiens
aacgtctctaagtcc

SEQ ID NO: 1682170 - DNA, 15 bp, Homo sapiens
acgtctctaagtcca

SEQ ID NO: 1682171 - DNA, 15 bp, Homo sapiens
cgtctctaagtccag

SEQ ID NO: 1682172 - DNA, 15 bp, Homo sapiens
gtctctaagtccagg

SEQ ID NO: 1682173 - DNA, 15 bp, Homo sapiens
tctctaagtccaggc

SEQ ID NO: 1682174 - DNA, 15 bp, Homo sapiens
ctctaagtccaggca

SEQ ID NO: 1682175 - DNA, 15 bp, Homo sapiens
tctaagtccaggcat

SEQ ID NO: 1682176 - DNA, 15 bp, Homo sapiens
ctaagtccaggcatg

SEQ ID NO: 1682177 - DNA, 15 bp, Homo sapiens
taagtccaggcatgg

SEQ ID NO: 1682178 - DNA, 15 bp, Homo sapiens
aagtccaggcatggt

SEQ ID NO: 1682179 - DNA, 15 bp, Homo sapiens
agtccaggcatggtg

SEQ ID NO: 1682180 - DNA, 15 bp, Homo sapiens
gtccaggcatggtgg

SEQ ID NO: 1682181 - DNA, 15 bp, Homo sapiens
tccaggcatggtggc

SEQ ID NO: 1682182 - DNA, 15 bp, Homo sapiens
tcacatctgtaatca

SEQ ID NO: 1682183 - DNA, 15 bp, Homo sapiens
cacatctgtaatcac

SEQ ID NO: 1682184 - DNA, 15 bp, Homo sapiens
acatctgtaatcaca

SEQ ID NO: 1682185 - DNA, 15 bp, Homo sapiens
catctgtaatcacaa

SEQ ID NO: 1682186 - DNA, 15 bp, Homo sapiens
atctgtaatcacaac

SEQ ID NO: 1682187 - DNA, 15 bp, Homo sapiens
tctgtaatcacaaca

SEQ ID NO: 1682188 - DNA, 15 bp, Homo sapiens
ctgtaatcacaacac

SEQ ID NO: 1682189 - DNA, 15 bp, Homo sapiens
tgtaatcacaacact

SEQ ID NO: 1682190 - DNA, 15 bp, Homo sapiens
gtaatcacaacactt

SEQ ID NO: 1682191 - DNA, 15 bp, Homo sapiens
taatcacaacacttt

SEQ ID NO: 1682192 - DNA, 15 bp, Homo sapiens
aatcacaacactttg

SEQ ID NO: 1682193 - DNA, 15 bp, Homo sapiens
atcacaacactttgg

SEQ ID NO: 1682194 - DNA, 15 bp, Homo sapiens
tcacaacactttggg

SEQ ID NO: 1682195 - DNA, 15 bp, Homo sapiens
cacaacactttggga

SEQ ID NO: 1682196 - DNA, 15 bp, Homo sapiens
acaacactttgggag

SEQ ID NO: 1682197 - DNA, 15 bp, Homo sapiens
ttgggaggcccagga

SEQ ID NO: 1682198 - DNA, 15 bp, Homo sapiens
tgggaggcccaggag

SEQ ID NO: 1682199 - DNA, 15 bp, Homo sapiens
gggaggcccaggagg

SEQ ID NO: 1682200 - DNA, 15 bp, Homo sapiens
ggaggcccaggaggg

SEQ ID NO: 1682201 - DNA, 15 bp, Homo sapiens
gaggcccaggaggga

SEQ ID NO: 1682202 - DNA, 15 bp, Homo sapiens
aggcccaggagggag

SEQ ID NO: 1682203 - DNA, 15 bp, Homo sapiens
ggcccaggagggagg

SEQ ID NO: 1682204 - DNA, 15 bp, Homo sapiens
gcccaggagggagga

SEQ ID NO: 1682205 - DNA, 15 bp, Homo sapiens
cccaggagggaggat

SEQ ID NO: 1682206 - DNA, 15 bp, Homo sapiens
ccaggagggaggatc

SEQ ID NO: 1682207 - DNA, 15 bp, Homo sapiens
caggagggaggatcg

SEQ ID NO: 1682208 - DNA, 15 bp, Homo sapiens
ggagggaggatcgct

SEQ ID NO: 1682209 - DNA, 15 bp, Homo sapiens
gagggaggatcgctt

SEQ ID NO: 1682210 - DNA, 15 bp, Homo sapiens
agggaggatcgcttg

SEQ ID NO: 1682211 - DNA, 15 bp, Homo sapiens
gaggatcgcttgaag

SEQ ID NO: 1682212 - DNA, 15 bp, Homo sapiens
aggatcgcttgaagc

SEQ ID NO: 1682213 - DNA, 15 bp, Homo sapiens
ggatcgcttgaagcc

SEQ ID NO: 1682214 - DNA, 15 bp, Homo sapiens
gatcgcttgaagcca

SEQ ID NO: 1682215 - DNA, 15 bp, Homo sapiens
atcgcttgaagccag

SEQ ID NO: 1682216 - DNA, 15 bp, Homo sapiens
tcgcttgaagccagg

SEQ ID NO: 1682217 - DNA, 15 bp, Homo sapiens
cgcttgaagccagga

SEQ ID NO: 1682218 - DNA, 15 bp, Homo sapiens
tgaagccaggagttc

SEQ ID NO: 1682219 - DNA, 15 bp, Homo sapiens
gaagccaggagttcc

SEQ ID NO: 1682220 - DNA, 15 bp, Homo sapiens
aagccaggagttcca

SEQ ID NO: 1682221 - DNA, 15 bp, Homo sapiens
agccaggagttccag

SEQ ID NO: 1682222 - DNA, 15 bp, Homo sapiens
gccaggagttccaga

SEQ ID NO: 1682223 - DNA, 15 bp, Homo sapiens
ccaggagttccagac

SEQ ID NO: 1682224 - DNA, 15 bp, Homo sapiens
ggagttccagaccat

SEQ ID NO: 1682225 - DNA, 15 bp, Homo sapiens
gagttccagaccatc

SEQ ID NO: 1682226 - DNA, 15 bp, Homo sapiens
agttccagaccatcc

SEQ ID NO: 1682227 - DNA, 15 bp, Homo sapiens
gttccagaccatcct

SEQ ID NO: 1682228 - DNA, 15 bp, Homo sapiens
ttccagaccatcctg

SEQ ID NO: 1682229 - DNA, 15 bp, Homo sapiens
tccagaccatcctgg

SEQ ID NO: 1682230 - DNA, 15 bp, Homo sapiens
ccagaccatcctgga

SEQ ID NO: 1682231 - DNA, 15 bp, Homo sapiens
cagaccatcctggaa

SEQ ID NO: 1682232 - DNA, 15 bp, Homo sapiens
agaccatcctggaaa

SEQ ID NO: 1682233 - DNA, 15 bp, Homo sapiens
gaccatcctggaaaa

SEQ ID NO: 1682234 - DNA, 15 bp, Homo sapiens
accatcctggaaaac

SEQ ID NO: 1682235 - DNA, 15 bp, Homo sapiens
ccatcctggaaaacc

SEQ ID NO: 1682236 - DNA, 15 bp, Homo sapiens
catcctggaaaacct

SEQ ID NO: 1682237 - DNA, 15 bp, Homo sapiens
atcctggaaaaccta

SEQ ID NO: 1682238 - DNA, 15 bp, Homo sapiens
tcctggaaaacctag

SEQ ID NO: 1682239 - DNA, 15 bp, Homo sapiens
cctggaaaacctagc

SEQ ID NO: 1682240 - DNA, 15 bp, Homo sapiens
ctggaaaacctagca

SEQ ID NO: 1682241 - DNA, 15 bp, Homo sapiens
tggaaaacctagcaa

SEQ ID NO: 1682242 - DNA, 15 bp, Homo sapiens
ggaaaacctagcaat

SEQ ID NO: 1682243 - DNA, 15 bp, Homo sapiens
gaaaacctagcaata

SEQ ID NO: 1682244 - DNA, 15 bp, Homo sapiens
aaaacctagcaatac

SEQ ID NO: 1682245 - DNA, 15 bp, Homo sapiens
aaacctagcaatacc

SEQ ID NO: 1682246 - DNA, 15 bp, Homo sapiens
aacctagcaatacct

SEQ ID NO: 1682247 - DNA, 15 bp, Homo sapiens
acctagcaatacctc

SEQ ID NO: 1682248 - DNA, 15 bp, Homo sapiens
cctagcaatacctca

SEQ ID NO: 1682249 - DNA, 15 bp, Homo sapiens
ctagcaatacctcat

SEQ ID NO: 1682250 - DNA, 15 bp, Homo sapiens
tagcaatacctcatc

SEQ ID NO: 1682251 - DNA, 15 bp, Homo sapiens
agcaatacctcatct

SEQ ID NO: 1682252 - DNA, 15 bp, Homo sapiens
gcaatacctcatctc

SEQ ID NO: 1682253 - DNA, 15 bp, Homo sapiens
caatacctcatctct

SEQ ID NO: 1682254 - DNA, 15 bp, Homo sapiens
aatacctcatctcta

SEQ ID NO: 1682255 - DNA, 15 bp, Homo sapiens
atacctcatctctac

SEQ ID NO: 1682256 - DNA, 15 bp, Homo sapiens
tacctcatctctaca

SEQ ID NO: 1682257 - DNA, 15 bp, Homo sapiens
acctcatctctacag

SEQ ID NO: 1682258 - DNA, 15 bp, Homo sapiens
cctcatctctacaga

SEQ ID NO: 1682259 - DNA, 15 bp, Homo sapiens
ctcatctctacagaa

SEQ ID NO: 1682260 - DNA, 15 bp, Homo sapiens
tcatctctacagaaa

SEQ ID NO: 1682261 - DNA, 15 bp, Homo sapiens
catctctacagaaaa

SEQ ID NO: 1682262 - DNA, 15 bp, Homo sapiens
atctctacagaaaaa

SEQ ID NO: 1682263 - DNA, 15 bp, Homo sapiens
tctctacagaaaaaa

SEQ ID NO: 1682264 - DNA, 15 bp, Homo sapiens
ctctacagaaaaaaa

SEQ ID NO: 1682265 - DNA, 15 bp, Homo sapiens
tctacagaaaaaaaa

SEQ ID NO: 1682266 - DNA, 15 bp, Homo sapiens
ctacagaaaaaaaaa

SEQ ID NO: 1682267 - DNA, 15 bp, Homo sapiens
tacagaaaaaaaaaa

SEQ ID NO: 1682268 - DNA, 15 bp, Homo sapiens
acagaaaaaaaaaag

SEQ ID NO: 1682269 - DNA, 15 bp, Homo sapiens
cagaaaaaaaaaagt

SEQ ID NO: 1682270 - DNA, 15 bp, Homo sapiens
aaaaaaaaaagttgc

SEQ ID NO: 1682271 - DNA, 15 bp, Homo sapiens
aaaaaaaaagttgca

SEQ ID NO: 1682272 - DNA, 15 bp, Homo sapiens
aaaaaaaagttgcac

SEQ ID NO: 1682273 - DNA, 15 bp, Homo sapiens
aaaaaaagttgcact

SEQ ID NO: 1682274 - DNA, 15 bp, Homo sapiens
aaaaaagttgcactc

SEQ ID NO: 1682275 - DNA, 15 bp, Homo sapiens
aaaaagttgcactcc

SEQ ID NO: 1682276 - DNA, 15 bp, Homo sapiens
aaaagttgcactcca

SEQ ID NO: 1682277 - DNA, 15 bp, Homo sapiens
aaagttgcactccag

SEQ ID NO: 1682278 - DNA, 15 bp, Homo sapiens
aagttgcactccaga

SEQ ID NO: 1682279 - DNA, 15 bp, Homo sapiens
agttgcactccagac

SEQ ID NO: 1682280 - DNA, 15 bp, Homo sapiens
gttgcactccagact

SEQ ID NO: 1682281 - DNA, 15 bp, Homo sapiens
tgcactccagactga

SEQ ID NO: 1682282 - DNA, 15 bp, Homo sapiens
gcactccagactgaa

SEQ ID NO: 1682283 - DNA, 15 bp, Homo sapiens
cactccagactgaat

SEQ ID NO: 1682284 - DNA, 15 bp, Homo sapiens
actccagactgaatg

SEQ ID NO: 1682285 - DNA, 15 bp, Homo sapiens
ctccagactgaatga

SEQ ID NO: 1682286 - DNA, 15 bp, Homo sapiens
tccagactgaatgac

SEQ ID NO: 1682287 - DNA, 15 bp, Homo sapiens
ccagactgaatgaca

SEQ ID NO: 1682288 - DNA, 15 bp, Homo sapiens
cagactgaatgacag

SEQ ID NO: 1682289 - DNA, 15 bp, Homo sapiens
agactgaatgacaga

SEQ ID NO: 1682290 - DNA, 15 bp, Homo sapiens
gactgaatgacagag

SEQ ID NO: 1682291 - DNA, 15 bp, Homo sapiens
actgaatgacagagc

SEQ ID NO: 1682292 - DNA, 15 bp, Homo sapiens
ctgaatgacagagca

SEQ ID NO: 1682293 - DNA, 15 bp, Homo sapiens
tgaatgacagagcaa

SEQ ID NO: 1682294 - DNA, 15 bp, Homo sapiens
gaatgacagagcaag

SEQ ID NO: 1682295 - DNA, 15 bp, Homo sapiens
aatgacagagcaagg

SEQ ID NO: 1682296 - DNA, 15 bp, Homo sapiens
atgacagagcaaggc

SEQ ID NO: 1682297 - DNA, 15 bp, Homo sapiens
tgacagagcaaggcc

SEQ ID NO: 1682298 - DNA, 15 bp, Homo sapiens
gacagagcaaggcct

SEQ ID NO: 1682299 - DNA, 15 bp, Homo sapiens
acagagcaaggcctg

SEQ ID NO: 1682300 - DNA, 15 bp, Homo sapiens
cagagcaaggcctgt

SEQ ID NO: 1682301 - DNA, 15 bp, Homo sapiens
agagcaaggcctgtc

SEQ ID NO: 1682302 - DNA, 15 bp, Homo sapiens
gagcaaggcctgtct

SEQ ID NO: 1682303 - DNA, 15 bp, Homo sapiens
agcaaggcctgtctc

SEQ ID NO: 1682304 - DNA, 15 bp, Homo sapiens
gcaaggcctgtctca

SEQ ID NO: 1682305 - DNA, 15 bp, Homo sapiens
caaggcctgtctcaa

SEQ ID NO: 1682306 - DNA, 15 bp, Homo sapiens
aaggcctgtctcaaa

SEQ ID NO: 1682307 - DNA, 15 bp, Homo sapiens
aggcctgtctcaaaa

SEQ ID NO: 1682308 - DNA, 15 bp, Homo sapiens
ggcctgtctcaaaaa

SEQ ID NO: 1682309 - DNA, 15 bp, Homo sapiens
gcctgtctcaaaaac

SEQ ID NO: 1682310 - DNA, 15 bp, Homo sapiens
ctcaaaaacaaaaaa

SEQ ID NO: 1682311 - DNA, 15 bp, Homo sapiens
tcaaaaacaaaaaat

SEQ ID NO: 1682312 - DNA, 15 bp, Homo sapiens
caaaaacaaaaaatg

SEQ ID NO: 1682313 - DNA, 15 bp, Homo sapiens
aaaaacaaaaaatga

SEQ ID NO: 1682314 - DNA, 15 bp, Homo sapiens
aaaacaaaaaatgaa

SEQ ID NO: 1682315 - DNA, 15 bp, Homo sapiens
aaacaaaaaatgaaa

SEQ ID NO: 1682316 - DNA, 15 bp, Homo sapiens
aacaaaaaatgaaaa

SEQ ID NO: 1682317 - DNA, 15 bp, Homo sapiens
acaaaaaatgaaaaa

SEQ ID NO: 1682318 - DNA, 15 bp, Homo sapiens
caaaaaatgaaaaac

SEQ ID NO: 1682319 - DNA, 15 bp, Homo sapiens
aaatgaaaaacaaaa

SEQ ID NO: 1682320 - DNA, 15 bp, Homo sapiens
aatgaaaaacaaaat

SEQ ID NO: 1682321 - DNA, 15 bp, Homo sapiens
atgaaaaacaaaata

SEQ ID NO: 1682322 - DNA, 15 bp, Homo sapiens
tgaaaaacaaaataa

SEQ ID NO: 1682323 - DNA, 15 bp, Homo sapiens
gaaaaacaaaataaa

SEQ ID NO: 1682324 - DNA, 15 bp, Homo sapiens
acaaaataaagaaaa

SEQ ID NO: 1682325 - DNA, 15 bp, Homo sapiens
caaaataaagaaaac

SEQ ID NO: 1682326 - DNA, 15 bp, Homo sapiens
aaaataaagaaaacc

SEQ ID NO: 1682327 - DNA, 15 bp, Homo sapiens
aaataaagaaaaccc

SEQ ID NO: 1682328 - DNA, 15 bp, Homo sapiens
aataaagaaaaccct

SEQ ID NO: 1682329 - DNA, 15 bp, Homo sapiens
ataaagaaaaccctc

SEQ ID NO: 1682330 - DNA, 15 bp, Homo sapiens
taaagaaaaccctca

SEQ ID NO: 1682331 - DNA, 15 bp, Homo sapiens
aaagaaaaccctcac

SEQ ID NO: 1682332 - DNA, 15 bp, Homo sapiens
aagaaaaccctcaca

SEQ ID NO: 1682333 - DNA, 15 bp, Homo sapiens
agaaaaccctcacat

SEQ ID NO: 1682334 - DNA, 15 bp, Homo sapiens
gaaaaccctcacatc

SEQ ID NO: 1682335 - DNA, 15 bp, Homo sapiens
aaaaccctcacatca

SEQ ID NO: 1682336 - DNA, 15 bp, Homo sapiens
aaaccctcacatcaa

SEQ ID NO: 1682337 - DNA, 15 bp, Homo sapiens
aaccctcacatcaac

SEQ ID NO: 1682338 - DNA, 15 bp, Homo sapiens
accctcacatcaacc

SEQ ID NO: 1682339 - DNA, 15 bp, Homo sapiens
ccctcacatcaacca

SEQ ID NO: 1682340 - DNA, 15 bp, Homo sapiens
cctcacatcaaccac

SEQ ID NO: 1682341 - DNA, 15 bp, Homo sapiens
ctcacatcaaccacg

SEQ ID NO: 1682342 - DNA, 15 bp, Homo sapiens
tcacatcaaccacgt

SEQ ID NO: 1682343 - DNA, 15 bp, Homo sapiens
cacatcaaccacgtt

SEQ ID NO: 1682344 - DNA, 15 bp, Homo sapiens
acatcaaccacgttg

SEQ ID NO: 1682345 - DNA, 15 bp, Homo sapiens
catcaaccacgttgg

SEQ ID NO: 1682346 - DNA, 15 bp, Homo sapiens
atcaaccacgttgga

SEQ ID NO: 1682347 - DNA, 15 bp, Homo sapiens
tcaaccacgttggat

SEQ ID NO: 1682348 - DNA, 15 bp, Homo sapiens
caaccacgttggata

SEQ ID NO: 1682349 - DNA, 15 bp, Homo sapiens
aaccacgttggatag

SEQ ID NO: 1682350 - DNA, 15 bp, Homo sapiens
accacgttggatagt

SEQ ID NO: 1682351 - DNA, 15 bp, Homo sapiens
ccacgttggatagta

SEQ ID NO: 1682352 - DNA, 15 bp, Homo sapiens
cacgttggatagtaa

SEQ ID NO: 1682353 - DNA, 15 bp, Homo sapiens
acgttggatagtaat

SEQ ID NO: 1682354 - DNA, 15 bp, Homo sapiens
cgttggatagtaata

SEQ ID NO: 1682355 - DNA, 15 bp, Homo sapiens
gttggatagtaatat

SEQ ID NO: 1682356 - DNA, 15 bp, Homo sapiens
ttggatagtaatata

SEQ ID NO: 1682357 - DNA, 15 bp, Homo sapiens
tggatagtaatatag

SEQ ID NO: 1682358 - DNA, 15 bp, Homo sapiens
ggatagtaatatagc

SEQ ID NO: 1682359 - DNA, 15 bp, Homo sapiens
gatagtaatatagct

SEQ ID NO: 1682360 - DNA, 15 bp, Homo sapiens
atagtaatatagctg

SEQ ID NO: 1682361 - DNA, 15 bp, Homo sapiens
tagtaatatagctgt

SEQ ID NO: 1682362 - DNA, 15 bp, Homo sapiens
agtaatatagctgtt

SEQ ID NO: 1682363 - DNA, 15 bp, Homo sapiens
gtaatatagctgttc

SEQ ID NO: 1682364 - DNA, 15 bp, Homo sapiens
taatatagctgttca

SEQ ID NO: 1682365 - DNA, 15 bp, Homo sapiens
aatatagctgttcaa

SEQ ID NO: 1682366 - DNA, 15 bp, Homo sapiens
atatagctgttcaac

SEQ ID NO: 1682367 - DNA, 15 bp, Homo sapiens
tatagctgttcaaca

SEQ ID NO: 1682368 - DNA, 15 bp, Homo sapiens
atagctgttcaacag

SEQ ID NO: 1682369 - DNA, 15 bp, Homo sapiens
tagctgttcaacaga

SEQ ID NO: 1682370 - DNA, 15 bp, Homo sapiens
agctgttcaacagat

SEQ ID NO: 1682371 - DNA, 15 bp, Homo sapiens
gctgttcaacagata

SEQ ID NO: 1682372 - DNA, 15 bp, Homo sapiens
ctgttcaacagataa

SEQ ID NO: 1682373 - DNA, 15 bp, Homo sapiens
tgttcaacagataat

SEQ ID NO: 1682374 - DNA, 15 bp, Homo sapiens
gttcaacagataatg

SEQ ID NO: 1682375 - DNA, 15 bp, Homo sapiens
ttcaacagataatgg

SEQ ID NO: 1682376 - DNA, 15 bp, Homo sapiens
tcaacagataatgga

SEQ ID NO: 1682377 - DNA, 15 bp, Homo sapiens
caacagataatggaa

SEQ ID NO: 1682378 - DNA, 15 bp, Homo sapiens
aacagataatggaac

SEQ ID NO: 1682379 - DNA, 15 bp, Homo sapiens
acagataatggaact

SEQ ID NO: 1682380 - DNA, 15 bp, Homo sapiens
cagataatggaacta

SEQ ID NO: 1682381 - DNA, 15 bp, Homo sapiens
agataatggaactaa

SEQ ID NO: 1682382 - DNA, 15 bp, Homo sapiens
gataatggaactaag

SEQ ID NO: 1682383 - DNA, 15 bp, Homo sapiens
ataatggaactaaga

SEQ ID NO: 1682384 - DNA, 15 bp, Homo sapiens
taatggaactaagaa

SEQ ID NO: 1682385 - DNA, 15 bp, Homo sapiens
aatggaactaagaaa

SEQ ID NO: 1682386 - DNA, 15 bp, Homo sapiens
atggaactaagaaaa

SEQ ID NO: 1682387 - DNA, 15 bp, Homo sapiens
tggaactaagaaaat

SEQ ID NO: 1682388 - DNA, 15 bp, Homo sapiens
ggaactaagaaaatt

SEQ ID NO: 1682389 - DNA, 15 bp, Homo sapiens
gaactaagaaaatta

SEQ ID NO: 1682390 - DNA, 15 bp, Homo sapiens
aactaagaaaattag

SEQ ID NO: 1682391 - DNA, 15 bp, Homo sapiens
actaagaaaattaga

SEQ ID NO: 1682392 - DNA, 15 bp, Homo sapiens
ctaagaaaattagac

SEQ ID NO: 1682393 - DNA, 15 bp, Homo sapiens
taagaaaattagaca

SEQ ID NO: 1682394 - DNA, 15 bp, Homo sapiens
aagaaaattagacaa

SEQ ID NO: 1682395 - DNA, 15 bp, Homo sapiens
agaaaattagacaag

SEQ ID NO: 1682396 - DNA, 15 bp, Homo sapiens
gaaaattagacaagt

SEQ ID NO: 1682397 - DNA, 15 bp, Homo sapiens
aaaattagacaagtt

SEQ ID NO: 1682398 - DNA, 15 bp, Homo sapiens
aaattagacaagtta

SEQ ID NO: 1682399 - DNA, 15 bp, Homo sapiens
aattagacaagttaa

SEQ ID NO: 1682400 - DNA, 15 bp, Homo sapiens
attagacaagttaaa

SEQ ID NO: 1682401 - DNA, 15 bp, Homo sapiens
ttagacaagttaaat

SEQ ID NO: 1682402 - DNA, 15 bp, Homo sapiens
tagacaagttaaatt

SEQ ID NO: 1682403 - DNA, 15 bp, Homo sapiens
agacaagttaaatta

SEQ ID NO: 1682404 - DNA, 15 bp, Homo sapiens
gacaagttaaattaa

SEQ ID NO: 1682405 - DNA, 15 bp, Homo sapiens
acaagttaaattaat

SEQ ID NO: 1682406 - DNA, 15 bp, Homo sapiens
caagttaaattaatt

SEQ ID NO: 1682407 - DNA, 15 bp, Homo sapiens
aagttaaattaattc

SEQ ID NO: 1682408 - DNA, 15 bp, Homo sapiens
agttaaattaattca

SEQ ID NO: 1682409 - DNA, 15 bp, Homo sapiens
gttaaattaattcac

SEQ ID NO: 1682410 - DNA, 15 bp, Homo sapiens
ttaaattaattcacc

SEQ ID NO: 1682411 - DNA, 15 bp, Homo sapiens
taaattaattcaccc

SEQ ID NO: 1682412 - DNA, 15 bp, Homo sapiens
aaattaattcaccca

SEQ ID NO: 1682413 - DNA, 15 bp, Homo sapiens
aattaattcacccaa

SEQ ID NO: 1682414 - DNA, 15 bp, Homo sapiens
attaattcacccaag

SEQ ID NO: 1682415 - DNA, 15 bp, Homo sapiens
ttaattcacccaaga

SEQ ID NO: 1682416 - DNA, 15 bp, Homo sapiens
taattcacccaagat

SEQ ID NO: 1682417 - DNA, 15 bp, Homo sapiens
aattcacccaagatt

SEQ ID NO: 1682418 - DNA, 15 bp, Homo sapiens
attcacccaagattc

SEQ ID NO: 1682419 - DNA, 15 bp, Homo sapiens
ttcacccaagattca

SEQ ID NO: 1682420 - DNA, 15 bp, Homo sapiens
tcacccaagattcaa

SEQ ID NO: 1682421 - DNA, 15 bp, Homo sapiens
cacccaagattcaag

SEQ ID NO: 1682422 - DNA, 15 bp, Homo sapiens
acccaagattcaagt

SEQ ID NO: 1682423 - DNA, 15 bp, Homo sapiens
cccaagattcaagta

SEQ ID NO: 1682424 - DNA, 15 bp, Homo sapiens
ccaagattcaagtag

SEQ ID NO: 1682425 - DNA, 15 bp, Homo sapiens
caagattcaagtagt

SEQ ID NO: 1682426 - DNA, 15 bp, Homo sapiens
aagattcaagtagtt

SEQ ID NO: 1682427 - DNA, 15 bp, Homo sapiens
agattcaagtagttg

SEQ ID NO: 1682428 - DNA, 15 bp, Homo sapiens
gattcaagtagttgg

SEQ ID NO: 1682429 - DNA, 15 bp, Homo sapiens
attcaagtagttgga

SEQ ID NO: 1682430 - DNA, 15 bp, Homo sapiens
ttcaagtagttggat

SEQ ID NO: 1682431 - DNA, 15 bp, Homo sapiens
tcaagtagttggatt

SEQ ID NO: 1682432 - DNA, 15 bp, Homo sapiens
caagtagttggatta

SEQ ID NO: 1682433 - DNA, 15 bp, Homo sapiens
aagtagttggattaa

SEQ ID NO: 1682434 - DNA, 15 bp, Homo sapiens
agtagttggattaat

SEQ ID NO: 1682435 - DNA, 15 bp, Homo sapiens
gtagttggattaatg

SEQ ID NO: 1682436 - DNA, 15 bp, Homo sapiens
tagttggattaatgg

SEQ ID NO: 1682437 - DNA, 15 bp, Homo sapiens
agttggattaatggt

SEQ ID NO: 1682438 - DNA, 15 bp, Homo sapiens
gttggattaatggta

SEQ ID NO: 1682439 - DNA, 15 bp, Homo sapiens
ttggattaatggtaa

SEQ ID NO: 1682440 - DNA, 15 bp, Homo sapiens
tggattaatggtaaa

SEQ ID NO: 1682441 - DNA, 15 bp, Homo sapiens
ggattaatggtaaat

SEQ ID NO: 1682442 - DNA, 15 bp, Homo sapiens
gattaatggtaaatc

SEQ ID NO: 1682443 - DNA, 15 bp, Homo sapiens
attaatggtaaatct

SEQ ID NO: 1682444 - DNA, 15 bp, Homo sapiens
ttaatggtaaatctg

SEQ ID NO: 1682445 - DNA, 15 bp, Homo sapiens
taatggtaaatctgg

SEQ ID NO: 1682446 - DNA, 15 bp, Homo sapiens
aatggtaaatctgga

SEQ ID NO: 1682447 - DNA, 15 bp, Homo sapiens
atggtaaatctggaa

SEQ ID NO: 1682448 - DNA, 15 bp, Homo sapiens
tggtaaatctggaat

SEQ ID NO: 1682449 - DNA, 15 bp, Homo sapiens
ggtaaatctggaatt

SEQ ID NO: 1682450 - DNA, 15 bp, Homo sapiens
gtaaatctggaattt

SEQ ID NO: 1682451 - DNA, 15 bp, Homo sapiens
taaatctggaattta

SEQ ID NO: 1682452 - DNA, 15 bp, Homo sapiens
aaatctggaatttaa

SEQ ID NO: 1682453 - DNA, 15 bp, Homo sapiens
aatctggaatttaaa

SEQ ID NO: 1682454 - DNA, 15 bp, Homo sapiens
atctggaatttaaac

SEQ ID NO: 1682455 - DNA, 15 bp, Homo sapiens
tctggaatttaaacc

SEQ ID NO: 1682456 - DNA, 15 bp, Homo sapiens
ctggaatttaaaccc

SEQ ID NO: 1682457 - DNA, 15 bp, Homo sapiens
tggaatttaaaccca

SEQ ID NO: 1682458 - DNA, 15 bp, Homo sapiens
ggaatttaaacccag

SEQ ID NO: 1682459 - DNA, 15 bp, Homo sapiens
gaatttaaacccagg

SEQ ID NO: 1682460 - DNA, 15 bp, Homo sapiens
aatttaaacccaggt

SEQ ID NO: 1682461 - DNA, 15 bp, Homo sapiens
atttaaacccaggtc

SEQ ID NO: 1682462 - DNA, 15 bp, Homo sapiens
tttaaacccaggtct

SEQ ID NO: 1682463 - DNA, 15 bp, Homo sapiens
ttaaacccaggtctg

SEQ ID NO: 1682464 - DNA, 15 bp, Homo sapiens
taaacccaggtctga

SEQ ID NO: 1682465 - DNA, 15 bp, Homo sapiens
aaacccaggtctgac

SEQ ID NO: 1682466 - DNA, 15 bp, Homo sapiens
aacccaggtctgact

SEQ ID NO: 1682467 - DNA, 15 bp, Homo sapiens
acccaggtctgacta

SEQ ID NO: 1682468 - DNA, 15 bp, Homo sapiens
cccaggtctgactaa

SEQ ID NO: 1682469 - DNA, 15 bp, Homo sapiens
ccaggtctgactaac

SEQ ID NO: 1682470 - DNA, 15 bp, Homo sapiens
caggtctgactaacc

SEQ ID NO: 1682471 - DNA, 15 bp, Homo sapiens
aggtctgactaacct

SEQ ID NO: 1682472 - DNA, 15 bp, Homo sapiens
ggtctgactaacctt

SEQ ID NO: 1682473 - DNA, 15 bp, Homo sapiens
gtctgactaacctta

SEQ ID NO: 1682474 - DNA, 15 bp, Homo sapiens
tctgactaaccttat

SEQ ID NO: 1682475 - DNA, 15 bp, Homo sapiens
ctgactaaccttatc

SEQ ID NO: 1682476 - DNA, 15 bp, Homo sapiens
tgactaaccttatca

SEQ ID NO: 1682477 - DNA, 15 bp, Homo sapiens
gactaaccttatcac

SEQ ID NO: 1682478 - DNA, 15 bp, Homo sapiens
actaaccttatcact

SEQ ID NO: 1682479 - DNA, 15 bp, Homo sapiens
ctaaccttatcacta

SEQ ID NO: 1682480 - DNA, 15 bp, Homo sapiens
taaccttatcactag

SEQ ID NO: 1682481 - DNA, 15 bp, Homo sapiens
aaccttatcactaga

SEQ ID NO: 1682482 - DNA, 15 bp, Homo sapiens
accttatcactagag

SEQ ID NO: 1682483 - DNA, 15 bp, Homo sapiens
ccttatcactagagg

SEQ ID NO: 1682484 - DNA, 15 bp, Homo sapiens
cttatcactagaggc

SEQ ID NO: 1682485 - DNA, 15 bp, Homo sapiens
ttatcactagaggct

SEQ ID NO: 1682486 - DNA, 15 bp, Homo sapiens
tatcactagaggctg

SEQ ID NO: 1682487 - DNA, 15 bp, Homo sapiens
atcactagaggctgc

SEQ ID NO: 1682488 - DNA, 15 bp, Homo sapiens
tcactagaggctgcc

SEQ ID NO: 1682489 - DNA, 15 bp, Homo sapiens
cactagaggctgcct

SEQ ID NO: 1682490 - DNA, 15 bp, Homo sapiens
actagaggctgcctt

SEQ ID NO: 1682491 - DNA, 15 bp, Homo sapiens
ctagaggctgccttt

SEQ ID NO: 1682492 - DNA, 15 bp, Homo sapiens
tagaggctgcctttt

SEQ ID NO: 1682493 - DNA, 15 bp, Homo sapiens
agaggctgccttttc

SEQ ID NO: 1682494 - DNA, 15 bp, Homo sapiens
gaggctgccttttca

SEQ ID NO: 1682495 - DNA, 15 bp, Homo sapiens
aggctgccttttcag

SEQ ID NO: 1682496 - DNA, 15 bp, Homo sapiens
ggctgccttttcaga

SEQ ID NO: 1682497 - DNA, 15 bp, Homo sapiens
gctgccttttcagat

SEQ ID NO: 1682498 - DNA, 15 bp, Homo sapiens
ctgccttttcagatt

SEQ ID NO: 1682499 - DNA, 15 bp, Homo sapiens
tgccttttcagattc

SEQ ID NO: 1682500 - DNA, 15 bp, Homo sapiens
gccttttcagattcc

SEQ ID NO: 1682501 - DNA, 15 bp, Homo sapiens
ccttttcagattccc

SEQ ID NO: 1682502 - DNA, 15 bp, Homo sapiens
cttttcagattcccc

SEQ ID NO: 1682503 - DNA, 15 bp, Homo sapiens
ttttcagattcccca

SEQ ID NO: 1682504 - DNA, 15 bp, Homo sapiens
tttcagattccccaa

SEQ ID NO: 1682505 - DNA, 15 bp, Homo sapiens
ttcagattccccaaa

SEQ ID NO: 1682506 - DNA, 15 bp, Homo sapiens
tcagattccccaaaa

SEQ ID NO: 1682507 - DNA, 15 bp, Homo sapiens
cagattccccaaaac

SEQ ID NO: 1682508 - DNA, 15 bp, Homo sapiens
agattccccaaaacc

SEQ ID NO: 1682509 - DNA, 15 bp, Homo sapiens
gattccccaaaacca

SEQ ID NO: 1682510 - DNA, 15 bp, Homo sapiens
attccccaaaaccat

SEQ ID NO: 1682511 - DNA, 15 bp, Homo sapiens
ttccccaaaaccata

SEQ ID NO: 1682512 - DNA, 15 bp, Homo sapiens
tccccaaaaccatat

SEQ ID NO: 1682513 - DNA, 15 bp, Homo sapiens
ccccaaaaccatatc

SEQ ID NO: 1682514 - DNA, 15 bp, Homo sapiens
cccaaaaccatatca

SEQ ID NO: 1682515 - DNA, 15 bp, Homo sapiens
ccaaaaccatatcat

SEQ ID NO: 1682516 - DNA, 15 bp, Homo sapiens
caaaaccatatcatc

SEQ ID NO: 1682517 - DNA, 15 bp, Homo sapiens
aaaaccatatcatcc

SEQ ID NO: 1682518 - DNA, 15 bp, Homo sapiens
aaaccatatcatcct

SEQ ID NO: 1682519 - DNA, 15 bp, Homo sapiens
aaccatatcatccta

SEQ ID NO: 1682520 - DNA, 15 bp, Homo sapiens
accatatcatcctat

SEQ ID NO: 1682521 - DNA, 15 bp, Homo sapiens
ccatatcatcctatt

SEQ ID NO: 1682522 - DNA, 15 bp, Homo sapiens
catatcatcctattt

SEQ ID NO: 1682523 - DNA, 15 bp, Homo sapiens
atatcatcctattta

SEQ ID NO: 1682524 - DNA, 15 bp, Homo sapiens
tatcatcctatttat

SEQ ID NO: 1682525 - DNA, 15 bp, Homo sapiens
atcatcctatttata

SEQ ID NO: 1682526 - DNA, 15 bp, Homo sapiens
tcatcctatttataa

SEQ ID NO: 1682527 - DNA, 15 bp, Homo sapiens
catcctatttataat

SEQ ID NO: 1682528 - DNA, 15 bp, Homo sapiens
atcctatttataatt

SEQ ID NO: 1682529 - DNA, 15 bp, Homo sapiens
tcctatttataattt

SEQ ID NO: 1682530 - DNA, 15 bp, Homo sapiens
cctatttataatttg

SEQ ID NO: 1682531 - DNA, 15 bp, Homo sapiens
ctatttataatttgt

SEQ ID NO: 1682532 - DNA, 15 bp, Homo sapiens
tatttataatttgta

SEQ ID NO: 1682533 - DNA, 15 bp, Homo sapiens
atttataatttgtaa

SEQ ID NO: 1682534 - DNA, 15 bp, Homo sapiens
tttataatttgtaag

SEQ ID NO: 1682535 - DNA, 15 bp, Homo sapiens
ttataatttgtaagc

SEQ ID NO: 1682536 - DNA, 15 bp, Homo sapiens
tataatttgtaagcg

SEQ ID NO: 1682537 - DNA, 15 bp, Homo sapiens
ataatttgtaagcgc

SEQ ID NO: 1682538 - DNA, 15 bp, Homo sapiens
taatttgtaagcgct

SEQ ID NO: 1682539 - DNA, 15 bp, Homo sapiens
aatttgtaagcgcta

SEQ ID NO: 1682540 - DNA, 15 bp, Homo sapiens
atttgtaagcgctac

SEQ ID NO: 1682541 - DNA, 15 bp, Homo sapiens
tttgtaagcgctaca

SEQ ID NO: 1682542 - DNA, 15 bp, Homo sapiens
ttgtaagcgctacag

SEQ ID NO: 1682543 - DNA, 15 bp, Homo sapiens
tgtaagcgctacagt

SEQ ID NO: 1682544 - DNA, 15 bp, Homo sapiens
gtaagcgctacagta

SEQ ID NO: 1682545 - DNA, 15 bp, Homo sapiens
taagcgctacagtag

SEQ ID NO: 1682546 - DNA, 15 bp, Homo sapiens
aagcgctacagtaga

SEQ ID NO: 1682547 - DNA, 15 bp, Homo sapiens
agcgctacagtagaa

SEQ ID NO: 1682548 - DNA, 15 bp, Homo sapiens
gcgctacagtagaag

SEQ ID NO: 1682549 - DNA, 15 bp, Homo sapiens
cgctacagtagaaga

SEQ ID NO: 1682550 - DNA, 15 bp, Homo sapiens
gctacagtagaagaa

SEQ ID NO: 1682551 - DNA, 15 bp, Homo sapiens
ctacagtagaagaat

SEQ ID NO: 1682552 - DNA, 15 bp, Homo sapiens
tacagtagaagaatg

SEQ ID NO: 1682553 - DNA, 15 bp, Homo sapiens
acagtagaagaatgg

SEQ ID NO: 1682554 - DNA, 15 bp, Homo sapiens
cagtagaagaatggg

SEQ ID NO: 1682555 - DNA, 15 bp, Homo sapiens
agtagaagaatggga

SEQ ID NO: 1682556 - DNA, 15 bp, Homo sapiens
gtagaagaatgggat

SEQ ID NO: 1682557 - DNA, 15 bp, Homo sapiens
tagaagaatgggatt

SEQ ID NO: 1682558 - DNA, 15 bp, Homo sapiens
agaagaatgggatta

SEQ ID NO: 1682559 - DNA, 15 bp, Homo sapiens
gaagaatgggattaa

SEQ ID NO: 1682560 - DNA, 15 bp, Homo sapiens
aagaatgggattaat

SEQ ID NO: 1682561 - DNA, 15 bp, Homo sapiens
agaatgggattaatc

SEQ ID NO: 1682562 - DNA, 15 bp, Homo sapiens
gaatgggattaatct

SEQ ID NO: 1682563 - DNA, 15 bp, Homo sapiens
aatgggattaatctg

SEQ ID NO: 1682564 - DNA, 15 bp, Homo sapiens
atgggattaatctga

SEQ ID NO: 1682565 - DNA, 15 bp, Homo sapiens
tgggattaatctgag

SEQ ID NO: 1682566 - DNA, 15 bp, Homo sapiens
gggattaatctgaga

SEQ ID NO: 1682567 - DNA, 15 bp, Homo sapiens
ggattaatctgagag

SEQ ID NO: 1682568 - DNA, 15 bp, Homo sapiens
gattaatctgagaga

SEQ ID NO: 1682569 - DNA, 15 bp, Homo sapiens
attaatctgagagaa

SEQ ID NO: 1682570 - DNA, 15 bp, Homo sapiens
ttaatctgagagaat

SEQ ID NO: 1682571 - DNA, 15 bp, Homo sapiens
taatctgagagaatt

SEQ ID NO: 1682572 - DNA, 15 bp, Homo sapiens
aatctgagagaattt

SEQ ID NO: 1682573 - DNA, 15 bp, Homo sapiens
atctgagagaatttt

SEQ ID NO: 1682574 - DNA, 15 bp, Homo sapiens
tctgagagaattttg

SEQ ID NO: 1682575 - DNA, 15 bp, Homo sapiens
ctgagagaattttgc

SEQ ID NO: 1682576 - DNA, 15 bp, Homo sapiens
tgagagaattttgca

SEQ ID NO: 1682577 - DNA, 15 bp, Homo sapiens
gagagaattttgcag

SEQ ID NO: 1682578 - DNA, 15 bp, Homo sapiens
agagaattttgcagg

SEQ ID NO: 1682579 - DNA, 15 bp, Homo sapiens
gagaattttgcagga

SEQ ID NO: 1682580 - DNA, 15 bp, Homo sapiens
agaattttgcaggag

SEQ ID NO: 1682581 - DNA, 15 bp, Homo sapiens
gaattttgcaggagg

SEQ ID NO: 1682582 - DNA, 15 bp, Homo sapiens
aattttgcaggagga

SEQ ID NO: 1682583 - DNA, 15 bp, Homo sapiens
attttgcaggaggaa

SEQ ID NO: 1682584 - DNA, 15 bp, Homo sapiens
ttttgcaggaggaaa

SEQ ID NO: 1682585 - DNA, 15 bp, Homo sapiens
tttgcaggaggaaaa

SEQ ID NO: 1682586 - DNA, 15 bp, Homo sapiens
ttgcaggaggaaaat

SEQ ID NO: 1682587 - DNA, 15 bp, Homo sapiens
tgcaggaggaaaata

SEQ ID NO: 1682588 - DNA, 15 bp, Homo sapiens
gcaggaggaaaatag

SEQ ID NO: 1682589 - DNA, 15 bp, Homo sapiens
caggaggaaaataga

SEQ ID NO: 1682590 - DNA, 15 bp, Homo sapiens
aggaggaaaatagaa

SEQ ID NO: 1682591 - DNA, 15 bp, Homo sapiens
ggaggaaaatagaat

SEQ ID NO: 1682592 - DNA, 15 bp, Homo sapiens
gaggaaaatagaata

SEQ ID NO: 1682593 - DNA, 15 bp, Homo sapiens
aggaaaatagaatac

SEQ ID NO: 1682594 - DNA, 15 bp, Homo sapiens
ggaaaatagaataca

SEQ ID NO: 1682595 - DNA, 15 bp, Homo sapiens
gaaaatagaatacaa

SEQ ID NO: 1682596 - DNA, 15 bp, Homo sapiens
aaaatagaatacaaa

SEQ ID NO: 1682597 - DNA, 15 bp, Homo sapiens
aaatagaatacaaaa

SEQ ID NO: 1682598 - DNA, 15 bp, Homo sapiens
aatagaatacaaaaa

SEQ ID NO: 1682599 - DNA, 15 bp, Homo sapiens
atagaatacaaaaaa

SEQ ID NO: 1682600 - DNA, 15 bp, Homo sapiens
tagaatacaaaaaat

SEQ ID NO: 1682601 - DNA, 15 bp, Homo sapiens
agaatacaaaaaatt

SEQ ID NO: 1682602 - DNA, 15 bp, Homo sapiens
gaatacaaaaaattc

SEQ ID NO: 1682603 - DNA, 15 bp, Homo sapiens
aatacaaaaaattcc

SEQ ID NO: 1682604 - DNA, 15 bp, Homo sapiens
atacaaaaaattcca

SEQ ID NO: 1682605 - DNA, 15 bp, Homo sapiens
tacaaaaaattccat

SEQ ID NO: 1682606 - DNA, 15 bp, Homo sapiens
acaaaaaattccatc

SEQ ID NO: 1682607 - DNA, 15 bp, Homo sapiens
caaaaaattccatct

SEQ ID NO: 1682608 - DNA, 15 bp, Homo sapiens
aaaaaattccatcta

SEQ ID NO: 1682609 - DNA, 15 bp, Homo sapiens
aaaaattccatctac

SEQ ID NO: 1682610 - DNA, 15 bp, Homo sapiens
aaaattccatctact

SEQ ID NO: 1682611 - DNA, 15 bp, Homo sapiens
aaattccatctactc

SEQ ID NO: 1682612 - DNA, 15 bp, Homo sapiens
aattccatctactct

SEQ ID NO: 1682613 - DNA, 15 bp, Homo sapiens
attccatctactctg

SEQ ID NO: 1682614 - DNA, 15 bp, Homo sapiens
ttccatctactctga

SEQ ID NO: 1682615 - DNA, 15 bp, Homo sapiens
tccatctactctgac

SEQ ID NO: 1682616 - DNA, 15 bp, Homo sapiens
ccatctactctgacc

SEQ ID NO: 1682617 - DNA, 15 bp, Homo sapiens
catctactctgacct

SEQ ID NO: 1682618 - DNA, 15 bp, Homo sapiens
atctactctgacctt

SEQ ID NO: 1682619 - DNA, 15 bp, Homo sapiens
tctactctgacctta

SEQ ID NO: 1682620 - DNA, 15 bp, Homo sapiens
ctactctgaccttag

SEQ ID NO: 1682621 - DNA, 15 bp, Homo sapiens
tactctgaccttaga

SEQ ID NO: 1682622 - DNA, 15 bp, Homo sapiens
actctgaccttagaa

SEQ ID NO: 1682623 - DNA, 15 bp, Homo sapiens
ctctgaccttagaat

SEQ ID NO: 1682624 - DNA, 15 bp, Homo sapiens
tctgaccttagaatt

SEQ ID NO: 1682625 - DNA, 15 bp, Homo sapiens
ctgaccttagaattc

SEQ ID NO: 1682626 - DNA, 15 bp, Homo sapiens
tgaccttagaattct

SEQ ID NO: 1682627 - DNA, 15 bp, Homo sapiens
gaccttagaattctc

SEQ ID NO: 1682628 - DNA, 15 bp, Homo sapiens
accttagaattctca

SEQ ID NO: 1682629 - DNA, 15 bp, Homo sapiens
ccttagaattctcac

SEQ ID NO: 1682630 - DNA, 15 bp, Homo sapiens
cttagaattctcact

SEQ ID NO: 1682631 - DNA, 15 bp, Homo sapiens
ttagaattctcactt

SEQ ID NO: 1682632 - DNA, 15 bp, Homo sapiens
tagaattctcacttt

SEQ ID NO: 1682633 - DNA, 15 bp, Homo sapiens
agaattctcactttt

SEQ ID NO: 1682634 - DNA, 15 bp, Homo sapiens
gaattctcacttttc

SEQ ID NO: 1682635 - DNA, 15 bp, Homo sapiens
aattctcacttttct

SEQ ID NO: 1682636 - DNA, 15 bp, Homo sapiens
attctcacttttctt

SEQ ID NO: 1682637 - DNA, 15 bp, Homo sapiens
ttctcacttttctta

SEQ ID NO: 1682638 - DNA, 15 bp, Homo sapiens
tctcacttttcttag

SEQ ID NO: 1682639 - DNA, 15 bp, Homo sapiens
ctcacttttcttagt

SEQ ID NO: 1682640 - DNA, 15 bp, Homo sapiens
tcacttttcttagtt

SEQ ID NO: 1682641 - DNA, 15 bp, Homo sapiens
cacttttcttagtta

SEQ ID NO: 1682642 - DNA, 15 bp, Homo sapiens
acttttcttagttat

SEQ ID NO: 1682643 - DNA, 15 bp, Homo sapiens
cttttcttagttata

SEQ ID NO: 1682644 - DNA, 15 bp, Homo sapiens
ttttcttagttataa

SEQ ID NO: 1682645 - DNA, 15 bp, Homo sapiens
tttcttagttataaa

SEQ ID NO: 1682646 - DNA, 15 bp, Homo sapiens
ttcttagttataaaa

SEQ ID NO: 1682647 - DNA, 15 bp, Homo sapiens
tcttagttataaaaa

SEQ ID NO: 1682648 - DNA, 15 bp, Homo sapiens
cttagttataaaaaa

SEQ ID NO: 1682649 - DNA, 15 bp, Homo sapiens
ttagttataaaaaaa

SEQ ID NO: 1682650 - DNA, 15 bp, Homo sapiens
tagttataaaaaaaa

SEQ ID NO: 1682651 - DNA, 15 bp, Homo sapiens
agttataaaaaaaac

SEQ ID NO: 1682652 - DNA, 15 bp, Homo sapiens
gttataaaaaaaaca

SEQ ID NO: 1682653 - DNA, 15 bp, Homo sapiens
ttataaaaaaaacaa

SEQ ID NO: 1682654 - DNA, 15 bp, Homo sapiens
tataaaaaaaacaaa

SEQ ID NO: 1682655 - DNA, 15 bp, Homo sapiens
ataaaaaaaacaaag

SEQ ID NO: 1682656 - DNA, 15 bp, Homo sapiens
taaaaaaaacaaaga

SEQ ID NO: 1682657 - DNA, 15 bp, Homo sapiens
aaaaaaaacaaagat

SEQ ID NO: 1682658 - DNA, 15 bp, Homo sapiens
aaaaaaacaaagatc

SEQ ID NO: 1682659 - DNA, 15 bp, Homo sapiens
aaaaaacaaagatct

SEQ ID NO: 1682660 - DNA, 15 bp, Homo sapiens
aaaaacaaagatctt

SEQ ID NO: 1682661 - DNA, 15 bp, Homo sapiens
aaaacaaagatctta

SEQ ID NO: 1682662 - DNA, 15 bp, Homo sapiens
aaacaaagatcttaa

SEQ ID NO: 1682663 - DNA, 15 bp, Homo sapiens
aacaaagatcttaag

SEQ ID NO: 1682664 - DNA, 15 bp, Homo sapiens
acaaagatcttaagg

SEQ ID NO: 1682665 - DNA, 15 bp, Homo sapiens
caaagatcttaagga

SEQ ID NO: 1682666 - DNA, 15 bp, Homo sapiens
aaagatcttaaggaa

SEQ ID NO: 1682667 - DNA, 15 bp, Homo sapiens
aagatcttaaggaaa

SEQ ID NO: 1682668 - DNA, 15 bp, Homo sapiens
agatcttaaggaaag

SEQ ID NO: 1682669 - DNA, 15 bp, Homo sapiens
gatcttaaggaaaga

SEQ ID NO: 1682670 - DNA, 15 bp, Homo sapiens
atcttaaggaaagac

SEQ ID NO: 1682671 - DNA, 15 bp, Homo sapiens
tcttaaggaaagaca

SEQ ID NO: 1682672 - DNA, 15 bp, Homo sapiens
cttaaggaaagacaa

SEQ ID NO: 1682673 - DNA, 15 bp, Homo sapiens
ttaaggaaagacaat

SEQ ID NO: 1682674 - DNA, 15 bp, Homo sapiens
taaggaaagacaata

SEQ ID NO: 1682675 - DNA, 15 bp, Homo sapiens
aaggaaagacaataa

SEQ ID NO: 1682676 - DNA, 15 bp, Homo sapiens
aggaaagacaataat

SEQ ID NO: 1682677 - DNA, 15 bp, Homo sapiens
ggaaagacaataatg

SEQ ID NO: 1682678 - DNA, 15 bp, Homo sapiens
gaaagacaataatgc

SEQ ID NO: 1682679 - DNA, 15 bp, Homo sapiens
aaagacaataatgct

SEQ ID NO: 1682680 - DNA, 15 bp, Homo sapiens
aagacaataatgctt

SEQ ID NO: 1682681 - DNA, 15 bp, Homo sapiens
agacaataatgcttt

SEQ ID NO: 1682682 - DNA, 15 bp, Homo sapiens
gacaataatgctttt

SEQ ID NO: 1682683 - DNA, 15 bp, Homo sapiens
acaataatgctttta

SEQ ID NO: 1682684 - DNA, 15 bp, Homo sapiens
caataatgcttttaa

SEQ ID NO: 1682685 - DNA, 15 bp, Homo sapiens
aataatgcttttaaa

SEQ ID NO: 1682686 - DNA, 15 bp, Homo sapiens
ataatgcttttaaaa

SEQ ID NO: 1682687 - DNA, 15 bp, Homo sapiens
taatgcttttaaaag

SEQ ID NO: 1682688 - DNA, 15 bp, Homo sapiens
aatgcttttaaaagc

SEQ ID NO: 1682689 - DNA, 15 bp, Homo sapiens
atgcttttaaaagca

SEQ ID NO: 1682690 - DNA, 15 bp, Homo sapiens
tgcttttaaaagcag

SEQ ID NO: 1682691 - DNA, 15 bp, Homo sapiens
gcttttaaaagcagt

SEQ ID NO: 1682692 - DNA, 15 bp, Homo sapiens
cttttaaaagcagtg

SEQ ID NO: 1682693 - DNA, 15 bp, Homo sapiens
ttttaaaagcagtgg

SEQ ID NO: 1682694 - DNA, 15 bp, Homo sapiens
tttaaaagcagtggg

SEQ ID NO: 1682695 - DNA, 15 bp, Homo sapiens
ttaaaagcagtgggt

SEQ ID NO: 1682696 - DNA, 15 bp, Homo sapiens
taaaagcagtgggta

SEQ ID NO: 1682697 - DNA, 15 bp, Homo sapiens
aaaagcagtgggtat

SEQ ID NO: 1682698 - DNA, 15 bp, Homo sapiens
aaagcagtgggtatg

SEQ ID NO: 1682699 - DNA, 15 bp, Homo sapiens
aagcagtgggtatga

SEQ ID NO: 1682700 - DNA, 15 bp, Homo sapiens
agcagtgggtatgaa

SEQ ID NO: 1682701 - DNA, 15 bp, Homo sapiens
gcagtgggtatgaaa

SEQ ID NO: 1682702 - DNA, 15 bp, Homo sapiens
cagtgggtatgaaac

SEQ ID NO: 1682703 - DNA, 15 bp, Homo sapiens
agtgggtatgaaaca

SEQ ID NO: 1682704 - DNA, 15 bp, Homo sapiens
gtgggtatgaaacaa

SEQ ID NO: 1682705 - DNA, 15 bp, Homo sapiens
tgggtatgaaacaaa

SEQ ID NO: 1682706 - DNA, 15 bp, Homo sapiens
gggtatgaaacaaat

SEQ ID NO: 1682707 - DNA, 15 bp, Homo sapiens
ggtatgaaacaaatt

SEQ ID NO: 1682708 - DNA, 15 bp, Homo sapiens
gtatgaaacaaatta

SEQ ID NO: 1682709 - DNA, 15 bp, Homo sapiens
tatgaaacaaattat

SEQ ID NO: 1682710 - DNA, 15 bp, Homo sapiens
atgaaacaaattatg

SEQ ID NO: 1682711 - DNA, 15 bp, Homo sapiens
tgaaacaaattatgt

SEQ ID NO: 1682712 - DNA, 15 bp, Homo sapiens
gaaacaaattatgtc

SEQ ID NO: 1682713 - DNA, 15 bp, Homo sapiens
aaacaaattatgtct

SEQ ID NO: 1682714 - DNA, 15 bp, Homo sapiens
aacaaattatgtctt

SEQ ID NO: 1682715 - DNA, 15 bp, Homo sapiens
acaaattatgtcttc

SEQ ID NO: 1682716 - DNA, 15 bp, Homo sapiens
caaattatgtcttca

SEQ ID NO: 1682717 - DNA, 15 bp, Homo sapiens
aaattatgtcttcag

SEQ ID NO: 1682718 - DNA, 15 bp, Homo sapiens
aattatgtcttcaga

SEQ ID NO: 1682719 - DNA, 15 bp, Homo sapiens
attatgtcttcagag

SEQ ID NO: 1682720 - DNA, 15 bp, Homo sapiens
ttatgtcttcagagg

SEQ ID NO: 1682721 - DNA, 15 bp, Homo sapiens
tatgtcttcagaggg

SEQ ID NO: 1682722 - DNA, 15 bp, Homo sapiens
atgtcttcagagggt

SEQ ID NO: 1682723 - DNA, 15 bp, Homo sapiens
tgtcttcagagggta

SEQ ID NO: 1682724 - DNA, 15 bp, Homo sapiens
gtcttcagagggtag

SEQ ID NO: 1682725 - DNA, 15 bp, Homo sapiens
tcttcagagggtagg

SEQ ID NO: 1682726 - DNA, 15 bp, Homo sapiens
cttcagagggtaggc

SEQ ID NO: 1682727 - DNA, 15 bp, Homo sapiens
ttcagagggtaggca

SEQ ID NO: 1682728 - DNA, 15 bp, Homo sapiens
tcagagggtaggcaa

SEQ ID NO: 1682729 - DNA, 15 bp, Homo sapiens
cagagggtaggcaat

SEQ ID NO: 1682730 - DNA, 15 bp, Homo sapiens
agagggtaggcaata

SEQ ID NO: 1682731 - DNA, 15 bp, Homo sapiens
gagggtaggcaataa

SEQ ID NO: 1682732 - DNA, 15 bp, Homo sapiens
agggtaggcaataag

SEQ ID NO: 1682733 - DNA, 15 bp, Homo sapiens
gggtaggcaataagt

SEQ ID NO: 1682734 - DNA, 15 bp, Homo sapiens
ggtaggcaataagta

SEQ ID NO: 1682735 - DNA, 15 bp, Homo sapiens
gtaggcaataagtac

SEQ ID NO: 1682736 - DNA, 15 bp, Homo sapiens
taggcaataagtaca

SEQ ID NO: 1682737 - DNA, 15 bp, Homo sapiens
aggcaataagtacag

SEQ ID NO: 1682738 - DNA, 15 bp, Homo sapiens
ggcaataagtacaga

SEQ ID NO: 1682739 - DNA, 15 bp, Homo sapiens
gcaataagtacagat

SEQ ID NO: 1682740 - DNA, 15 bp, Homo sapiens
caataagtacagata

SEQ ID NO: 1682741 - DNA, 15 bp, Homo sapiens
aataagtacagatag

SEQ ID NO: 1682742 - DNA, 15 bp, Homo sapiens
ataagtacagataga

SEQ ID NO: 1682743 - DNA, 15 bp, Homo sapiens
taagtacagatagag

SEQ ID NO: 1682744 - DNA, 15 bp, Homo sapiens
aagtacagatagagg

SEQ ID NO: 1682745 - DNA, 15 bp, Homo sapiens
agtacagatagagga

SEQ ID NO: 1682746 - DNA, 15 bp, Homo sapiens
gtacagatagaggaa

SEQ ID NO: 1682747 - DNA, 15 bp, Homo sapiens
tacagatagaggaaa

SEQ ID NO: 1682748 - DNA, 15 bp, Homo sapiens
acagatagaggaaaa

SEQ ID NO: 1682749 - DNA, 15 bp, Homo sapiens
cagatagaggaaaag

SEQ ID NO: 1682750 - DNA, 15 bp, Homo sapiens
agatagaggaaaagg

SEQ ID NO: 1682751 - DNA, 15 bp, Homo sapiens
gatagaggaaaaggg

SEQ ID NO: 1682752 - DNA, 15 bp, Homo sapiens
atagaggaaaaggga

SEQ ID NO: 1682753 - DNA, 15 bp, Homo sapiens
tagaggaaaagggaa

SEQ ID NO: 1682754 - DNA, 15 bp, Homo sapiens
agaggaaaagggaac

SEQ ID NO: 1682755 - DNA, 15 bp, Homo sapiens
gaggaaaagggaaca

SEQ ID NO: 1682756 - DNA, 15 bp, Homo sapiens
aggaaaagggaacaa

SEQ ID NO: 1682757 - DNA, 15 bp, Homo sapiens
ggaaaagggaacaaa

SEQ ID NO: 1682758 - DNA, 15 bp, Homo sapiens
gaaaagggaacaaat

SEQ ID NO: 1682759 - DNA, 15 bp, Homo sapiens
aaaagggaacaaata

SEQ ID NO: 1682760 - DNA, 15 bp, Homo sapiens
aaagggaacaaatag

SEQ ID NO: 1682761 - DNA, 15 bp, Homo sapiens
aagggaacaaatagg

SEQ ID NO: 1682762 - DNA, 15 bp, Homo sapiens
agggaacaaatagga

SEQ ID NO: 1682763 - DNA, 15 bp, Homo sapiens
gggaacaaataggag

SEQ ID NO: 1682764 - DNA, 15 bp, Homo sapiens
ggaacaaataggaga

SEQ ID NO: 1682765 - DNA, 15 bp, Homo sapiens
gaacaaataggagac

SEQ ID NO: 1682766 - DNA, 15 bp, Homo sapiens
aacaaataggagacc

SEQ ID NO: 1682767 - DNA, 15 bp, Homo sapiens
acaaataggagacca

SEQ ID NO: 1682768 - DNA, 15 bp, Homo sapiens
caaataggagaccaa

SEQ ID NO: 1682769 - DNA, 15 bp, Homo sapiens
aaataggagaccaaa

SEQ ID NO: 1682770 - DNA, 15 bp, Homo sapiens
aataggagaccaaac

SEQ ID NO: 1682771 - DNA, 15 bp, Homo sapiens
ataggagaccaaacg

SEQ ID NO: 1682772 - DNA, 15 bp, Homo sapiens
taggagaccaaacgc

SEQ ID NO: 1682773 - DNA, 15 bp, Homo sapiens
aggagaccaaacgcg

SEQ ID NO: 1682774 - DNA, 15 bp, Homo sapiens
ggagaccaaacgcga

SEQ ID NO: 1682775 - DNA, 15 bp, Homo sapiens
gagaccaaacgcgag

SEQ ID NO: 1682776 - DNA, 15 bp, Homo sapiens
agaccaaacgcgaga

SEQ ID NO: 1682777 - DNA, 15 bp, Homo sapiens
gaccaaacgcgagaa

SEQ ID NO: 1682778 - DNA, 15 bp, Homo sapiens
accaaacgcgagaat

SEQ ID NO: 1682779 - DNA, 15 bp, Homo sapiens
ccaaacgcgagaata

SEQ ID NO: 1682780 - DNA, 15 bp, Homo sapiens
caaacgcgagaatag

SEQ ID NO: 1682781 - DNA, 15 bp, Homo sapiens
aaacgcgagaatagg

SEQ ID NO: 1682782 - DNA, 15 bp, Homo sapiens
aacgcgagaataggt

SEQ ID NO: 1682783 - DNA, 15 bp, Homo sapiens
acgcgagaataggtg

SEQ ID NO: 1682784 - DNA, 15 bp, Homo sapiens
cgcgagaataggtga

SEQ ID NO: 1682785 - DNA, 15 bp, Homo sapiens
gcgagaataggtgag

SEQ ID NO: 1682786 - DNA, 15 bp, Homo sapiens
cgagaataggtgagg

SEQ ID NO: 1682787 - DNA, 15 bp, Homo sapiens
gagaataggtgaggc

SEQ ID NO: 1682788 - DNA, 15 bp, Homo sapiens
agaataggtgaggcc

SEQ ID NO: 1682789 - DNA, 15 bp, Homo sapiens
gaataggtgaggccg

SEQ ID NO: 1682790 - DNA, 15 bp, Homo sapiens
aataggtgaggccgt

SEQ ID NO: 1682791 - DNA, 15 bp, Homo sapiens
ataggtgaggccgtg

SEQ ID NO: 1682792 - DNA, 15 bp, Homo sapiens
taggtgaggccgtgg

SEQ ID NO: 1682793 - DNA, 15 bp, Homo sapiens
aggtgaggccgtggg

SEQ ID NO: 1682794 - DNA, 15 bp, Homo sapiens
ggtgaggccgtgggt

SEQ ID NO: 1682795 - DNA, 15 bp, Homo sapiens
gtgaggccgtgggtg

SEQ ID NO: 1682796 - DNA, 15 bp, Homo sapiens
tgaggccgtgggtga

SEQ ID NO: 1682797 - DNA, 15 bp, Homo sapiens
gaggccgtgggtgaa

SEQ ID NO: 1682798 - DNA, 15 bp, Homo sapiens
aggccgtgggtgaaa

SEQ ID NO: 1682799 - DNA, 15 bp, Homo sapiens
ggccgtgggtgaaat

SEQ ID NO: 1682800 - DNA, 15 bp, Homo sapiens
gccgtgggtgaaatg

SEQ ID NO: 1682801 - DNA, 15 bp, Homo sapiens
ccgtgggtgaaatgg

SEQ ID NO: 1682802 - DNA, 15 bp, Homo sapiens
cgtgggtgaaatggg

SEQ ID NO: 1682803 - DNA, 15 bp, Homo sapiens
gtgggtgaaatggga

SEQ ID NO: 1682804 - DNA, 15 bp, Homo sapiens
tgggtgaaatgggag

SEQ ID NO: 1682805 - DNA, 15 bp, Homo sapiens
gggtgaaatgggagt

SEQ ID NO: 1682806 - DNA, 15 bp, Homo sapiens
ggtgaaatgggagtt

SEQ ID NO: 1682807 - DNA, 15 bp, Homo sapiens
gtgaaatgggagttc

SEQ ID NO: 1682808 - DNA, 15 bp, Homo sapiens
tgaaatgggagttct

SEQ ID NO: 1682809 - DNA, 15 bp, Homo sapiens
gaaatgggagttctt

SEQ ID NO: 1682810 - DNA, 15 bp, Homo sapiens
aaatgggagttctta

SEQ ID NO: 1682811 - DNA, 15 bp, Homo sapiens
aatgggagttcttac

SEQ ID NO: 1682812 - DNA, 15 bp, Homo sapiens
atgggagttcttacg

SEQ ID NO: 1682813 - DNA, 15 bp, Homo sapiens
tgggagttcttacga

SEQ ID NO: 1682814 - DNA, 15 bp, Homo sapiens
gggagttcttacgat

SEQ ID NO: 1682815 - DNA, 15 bp, Homo sapiens
ggagttcttacgata

SEQ ID NO: 1682816 - DNA, 15 bp, Homo sapiens
gagttcttacgatac

SEQ ID NO: 1682817 - DNA, 15 bp, Homo sapiens
agttcttacgataca

SEQ ID NO: 1682818 - DNA, 15 bp, Homo sapiens
gttcttacgatacag

SEQ ID NO: 1682819 - DNA, 15 bp, Homo sapiens
ttcttacgatacagt

SEQ ID NO: 1682820 - DNA, 15 bp, Homo sapiens
tcttacgatacagta

SEQ ID NO: 1682821 - DNA, 15 bp, Homo sapiens
cttacgatacagtag

SEQ ID NO: 1682822 - DNA, 15 bp, Homo sapiens
ttacgatacagtaga

SEQ ID NO: 1682823 - DNA, 15 bp, Homo sapiens
tacgatacagtagag

SEQ ID NO: 1682824 - DNA, 15 bp, Homo sapiens
acgatacagtagagc

SEQ ID NO: 1682825 - DNA, 15 bp, Homo sapiens
cgatacagtagagca

SEQ ID NO: 1682826 - DNA, 15 bp, Homo sapiens
gatacagtagagcaa

SEQ ID NO: 1682827 - DNA, 15 bp, Homo sapiens
atacagtagagcaac

SEQ ID NO: 1682828 - DNA, 15 bp, Homo sapiens
tacagtagagcaacc

SEQ ID NO: 1682829 - DNA, 15 bp, Homo sapiens
acagtagagcaaccg

SEQ ID NO: 1682830 - DNA, 15 bp, Homo sapiens
cagtagagcaaccgt

SEQ ID NO: 1682831 - DNA, 15 bp, Homo sapiens
agtagagcaaccgtc

SEQ ID NO: 1682832 - DNA, 15 bp, Homo sapiens
gtagagcaaccgtca

SEQ ID NO: 1682833 - DNA, 15 bp, Homo sapiens
tagagcaaccgtcat

SEQ ID NO: 1682834 - DNA, 15 bp, Homo sapiens
agagcaaccgtcata

SEQ ID NO: 1682835 - DNA, 15 bp, Homo sapiens
gagcaaccgtcatag

SEQ ID NO: 1682836 - DNA, 15 bp, Homo sapiens
agcaaccgtcatagc

SEQ ID NO: 1682837 - DNA, 15 bp, Homo sapiens
gcaaccgtcatagcc

SEQ ID NO: 1682838 - DNA, 15 bp, Homo sapiens
caaccgtcatagccg

SEQ ID NO: 1682839 - DNA, 15 bp, Homo sapiens
aaccgtcatagccga

SEQ ID NO: 1682840 - DNA, 15 bp, Homo sapiens
accgtcatagccgag

SEQ ID NO: 1682841 - DNA, 15 bp, Homo sapiens
ccgtcatagccgaga

SEQ ID NO: 1682842 - DNA, 15 bp, Homo sapiens
cgtcatagccgagag

SEQ ID NO: 1682843 - DNA, 15 bp, Homo sapiens
gtcatagccgagagg

SEQ ID NO: 1682844 - DNA, 15 bp, Homo sapiens
tcatagccgagagga

SEQ ID NO: 1682845 - DNA, 15 bp, Homo sapiens
catagccgagaggag

SEQ ID NO: 1682846 - DNA, 15 bp, Homo sapiens
atagccgagaggagc

SEQ ID NO: 1682847 - DNA, 15 bp, Homo sapiens
tagccgagaggagcc

SEQ ID NO: 1682848 - DNA, 15 bp, Homo sapiens
agccgagaggagcca

SEQ ID NO: 1682849 - DNA, 15 bp, Homo sapiens
gccgagaggagccaa

SEQ ID NO: 1682850 - DNA, 15 bp, Homo sapiens
ccgagaggagccaaa

SEQ ID NO: 1682851 - DNA, 15 bp, Homo sapiens
cgagaggagccaaag

SEQ ID NO: 1682852 - DNA, 15 bp, Homo sapiens
gagaggagccaaagg

SEQ ID NO: 1682853 - DNA, 15 bp, Homo sapiens
agaggagccaaagga

SEQ ID NO: 1682854 - DNA, 15 bp, Homo sapiens
gaggagccaaaggag

SEQ ID NO: 1682855 - DNA, 15 bp, Homo sapiens
aggagccaaaggaga

SEQ ID NO: 1682856 - DNA, 15 bp, Homo sapiens
ggagccaaaggagac

SEQ ID NO: 1682857 - DNA, 15 bp, Homo sapiens
gagccaaaggagaca

SEQ ID NO: 1682858 - DNA, 15 bp, Homo sapiens
agccaaaggagacat

SEQ ID NO: 1682859 - DNA, 15 bp, Homo sapiens
gccaaaggagacata

SEQ ID NO: 1682860 - DNA, 15 bp, Homo sapiens
ccaaaggagacataa

SEQ ID NO: 1682861 - DNA, 15 bp, Homo sapiens
caaaggagacataat

SEQ ID NO: 1682862 - DNA, 15 bp, Homo sapiens
aaaggagacataatg

SEQ ID NO: 1682863 - DNA, 15 bp, Homo sapiens
aaggagacataatga

SEQ ID NO: 1682864 - DNA, 15 bp, Homo sapiens
aggagacataatgag

SEQ ID NO: 1682865 - DNA, 15 bp, Homo sapiens
ggagacataatgagt

SEQ ID NO: 1682866 - DNA, 15 bp, Homo sapiens
gagacataatgagta

SEQ ID NO: 1682867 - DNA, 15 bp, Homo sapiens
agacataatgagtaa

SEQ ID NO: 1682868 - DNA, 15 bp, Homo sapiens
gacataatgagtaaa

SEQ ID NO: 1682869 - DNA, 15 bp, Homo sapiens
acataatgagtaaat

SEQ ID NO: 1682870 - DNA, 15 bp, Homo sapiens
cataatgagtaaata

SEQ ID NO: 1682871 - DNA, 15 bp, Homo sapiens
ataatgagtaaatag

SEQ ID NO: 1682872 - DNA, 15 bp, Homo sapiens
taatgagtaaataga

SEQ ID NO: 1682873 - DNA, 15 bp, Homo sapiens
aatgagtaaatagaa

SEQ ID NO: 1682874 - DNA, 15 bp, Homo sapiens
atgagtaaatagaag

SEQ ID NO: 1682875 - DNA, 15 bp, Homo sapiens
tgagtaaatagaaga

SEQ ID NO: 1682876 - DNA, 15 bp, Homo sapiens
gagtaaatagaagat

SEQ ID NO: 1682877 - DNA, 15 bp, Homo sapiens
agtaaatagaagata

SEQ ID NO: 1682878 - DNA, 15 bp, Homo sapiens
gtaaatagaagatat

SEQ ID NO: 1682879 - DNA, 15 bp, Homo sapiens
taaatagaagatatc

SEQ ID NO: 1682880 - DNA, 15 bp, Homo sapiens
aaatagaagatatcc

SEQ ID NO: 1682881 - DNA, 15 bp, Homo sapiens
aatagaagatatcct

SEQ ID NO: 1682882 - DNA, 15 bp, Homo sapiens
atagaagatatcctg

SEQ ID NO: 1682883 - DNA, 15 bp, Homo sapiens
tagaagatatcctgg

SEQ ID NO: 1682884 - DNA, 15 bp, Homo sapiens
agaagatatcctgga

SEQ ID NO: 1682885 - DNA, 15 bp, Homo sapiens
gaagatatcctggac

SEQ ID NO: 1682886 - DNA, 15 bp, Homo sapiens
aagatatcctggacg

SEQ ID NO: 1682887 - DNA, 15 bp, Homo sapiens
agatatcctggacgc

SEQ ID NO: 1682888 - DNA, 15 bp, Homo sapiens
gatatcctggacgcg

SEQ ID NO: 1682889 - DNA, 15 bp, Homo sapiens
atatcctggacgcga

SEQ ID NO: 1682890 - DNA, 15 bp, Homo sapiens
tatcctggacgcgat

SEQ ID NO: 1682891 - DNA, 15 bp, Homo sapiens
atcctggacgcgatt

SEQ ID NO: 1682892 - DNA, 15 bp, Homo sapiens
tcctggacgcgattc

SEQ ID NO: 1682893 - DNA, 15 bp, Homo sapiens
cctggacgcgattct

SEQ ID NO: 1682894 - DNA, 15 bp, Homo sapiens
ctggacgcgattcta

SEQ ID NO: 1682895 - DNA, 15 bp, Homo sapiens
tggacgcgattctag

SEQ ID NO: 1682896 - DNA, 15 bp, Homo sapiens
ggacgcgattctaga

SEQ ID NO: 1682897 - DNA, 15 bp, Homo sapiens
gacgcgattctagaa

SEQ ID NO: 1682898 - DNA, 15 bp, Homo sapiens
acgcgattctagaac

SEQ ID NO: 1682899 - DNA, 15 bp, Homo sapiens
cgcgattctagaaca

SEQ ID NO: 1682900 - DNA, 15 bp, Homo sapiens
gcgattctagaacat

SEQ ID NO: 1682901 - DNA, 15 bp, Homo sapiens
cgattctagaacata

SEQ ID NO: 1682902 - DNA, 15 bp, Homo sapiens
gattctagaacataa

SEQ ID NO: 1682903 - DNA, 15 bp, Homo sapiens
attctagaacataaa

SEQ ID NO: 1682904 - DNA, 15 bp, Homo sapiens
ttctagaacataaaa

SEQ ID NO: 1682905 - DNA, 15 bp, Homo sapiens
tctagaacataaaaa

SEQ ID NO: 1682906 - DNA, 15 bp, Homo sapiens
ctagaacataaaaag

SEQ ID NO: 1682907 - DNA, 15 bp, Homo sapiens
tagaacataaaaaga

SEQ ID NO: 1682908 - DNA, 15 bp, Homo sapiens
agaacataaaaagaa

SEQ ID NO: 1682909 - DNA, 15 bp, Homo sapiens
gaacataaaaagaac

SEQ ID NO: 1682910 - DNA, 15 bp, Homo sapiens
aacataaaaagaaca

SEQ ID NO: 1682911 - DNA, 15 bp, Homo sapiens
acataaaaagaacaa

SEQ ID NO: 1682912 - DNA, 15 bp, Homo sapiens
cataaaaagaacaag

SEQ ID NO: 1682913 - DNA, 15 bp, Homo sapiens
ataaaaagaacaagt

SEQ ID NO: 1682914 - DNA, 15 bp, Homo sapiens
taaaaagaacaagtt

SEQ ID NO: 1682915 - DNA, 15 bp, Homo sapiens
aaaaagaacaagttt

SEQ ID NO: 1682916 - DNA, 15 bp, Homo sapiens
aaaagaacaagtttt

SEQ ID NO: 1682917 - DNA, 15 bp, Homo sapiens
aaagaacaagttttt

SEQ ID NO: 1682918 - DNA, 15 bp, Homo sapiens
aagaacaagttttta

SEQ ID NO: 1682919 - DNA, 15 bp, Homo sapiens
agaacaagtttttag

SEQ ID NO: 1682920 - DNA, 15 bp, Homo sapiens
gaacaagtttttagg

SEQ ID NO: 1682921 - DNA, 15 bp, Homo sapiens
aacaagtttttaggc

SEQ ID NO: 1682922 - DNA, 15 bp, Homo sapiens
acaagtttttaggcc

SEQ ID NO: 1682923 - DNA, 15 bp, Homo sapiens
caagtttttaggccg

SEQ ID NO: 1682924 - DNA, 15 bp, Homo sapiens
aagtttttaggccgg

SEQ ID NO: 1682925 - DNA, 15 bp, Homo sapiens
agtttttaggccggg

SEQ ID NO: 1682926 - DNA, 15 bp, Homo sapiens
gtttttaggccgggc

SEQ ID NO: 1682927 - DNA, 15 bp, Homo sapiens
tttaggccgggcaca

SEQ ID NO: 1682928 - DNA, 15 bp, Homo sapiens
ttaggccgggcacag

SEQ ID NO: 1682929 - DNA, 15 bp, Homo sapiens
taggccgggcacagt

SEQ ID NO: 1682930 - DNA, 15 bp, Homo sapiens
aggccgggcacagtg

SEQ ID NO: 1682931 - DNA, 15 bp, Homo sapiens
cactttgggagggca

SEQ ID NO: 1682932 - DNA, 15 bp, Homo sapiens
actttgggagggcaa

SEQ ID NO: 1682933 - DNA, 15 bp, Homo sapiens
ttgggagggcaagga

SEQ ID NO: 1682934 - DNA, 15 bp, Homo sapiens
tgggagggcaaggag

SEQ ID NO: 1682935 - DNA, 15 bp, Homo sapiens
gggagggcaaggagg

SEQ ID NO: 1682936 - DNA, 15 bp, Homo sapiens
gagggcaaggaggga

SEQ ID NO: 1682937 - DNA, 15 bp, Homo sapiens
agggcaaggagggag

SEQ ID NO: 1682938 - DNA, 15 bp, Homo sapiens
gggcaaggagggagg

SEQ ID NO: 1682939 - DNA, 15 bp, Homo sapiens
ggcaaggagggagga

SEQ ID NO: 1682940 - DNA, 15 bp, Homo sapiens
gcaaggagggaggat

SEQ ID NO: 1682941 - DNA, 15 bp, Homo sapiens
caaggagggaggatc

SEQ ID NO: 1682942 - DNA, 15 bp, Homo sapiens
aaggagggaggatca

SEQ ID NO: 1682943 - DNA, 15 bp, Homo sapiens
aggagggaggatcac

SEQ ID NO: 1682944 - DNA, 15 bp, Homo sapiens
ggagggaggatcact

SEQ ID NO: 1682945 - DNA, 15 bp, Homo sapiens
gagggaggatcactt

SEQ ID NO: 1682946 - DNA, 15 bp, Homo sapiens
agggaggatcacttg

SEQ ID NO: 1682947 - DNA, 15 bp, Homo sapiens
aggatcacttgagct

SEQ ID NO: 1682948 - DNA, 15 bp, Homo sapiens
atcacttgagctcag

SEQ ID NO: 1682949 - DNA, 15 bp, Homo sapiens
tcacttgagctcagg

SEQ ID NO: 1682950 - DNA, 15 bp, Homo sapiens
cacttgagctcagga

SEQ ID NO: 1682951 - DNA, 15 bp, Homo sapiens
acttgagctcaggag

SEQ ID NO: 1682952 - DNA, 15 bp, Homo sapiens
cttgagctcaggagt

SEQ ID NO: 1682953 - DNA, 15 bp, Homo sapiens
ttgagctcaggagtt

SEQ ID NO: 1682954 - DNA, 15 bp, Homo sapiens
gagctcaggagttca

SEQ ID NO: 1682955 - DNA, 15 bp, Homo sapiens
ctcaggagttcaaga

SEQ ID NO: 1682956 - DNA, 15 bp, Homo sapiens
catggtgaaacccta

SEQ ID NO: 1682957 - DNA, 15 bp, Homo sapiens
atggtgaaaccctag

SEQ ID NO: 1682958 - DNA, 15 bp, Homo sapiens
tggtgaaaccctagc

SEQ ID NO: 1682959 - DNA, 15 bp, Homo sapiens
ggtgaaaccctagct

SEQ ID NO: 1682960 - DNA, 15 bp, Homo sapiens
gtgaaaccctagctc

SEQ ID NO: 1682961 - DNA, 15 bp, Homo sapiens
tgaaaccctagctct

SEQ ID NO: 1682962 - DNA, 15 bp, Homo sapiens
gaaaccctagctcta

SEQ ID NO: 1682963 - DNA, 15 bp, Homo sapiens
aaaccctagctctac

SEQ ID NO: 1682964 - DNA, 15 bp, Homo sapiens
aaccctagctctact

SEQ ID NO: 1682965 - DNA, 15 bp, Homo sapiens
accctagctctacta

SEQ ID NO: 1682966 - DNA, 15 bp, Homo sapiens
ccctagctctactaa

SEQ ID NO: 1682967 - DNA, 15 bp, Homo sapiens
cctagctctactaaa

SEQ ID NO: 1682968 - DNA, 15 bp, Homo sapiens
ctagctctactaaaa

SEQ ID NO: 1682969 - DNA, 15 bp, Homo sapiens
tagctctactaaaaa

SEQ ID NO: 1682970 - DNA, 15 bp, Homo sapiens
agctctactaaaaat

SEQ ID NO: 1682971 - DNA, 15 bp, Homo sapiens
gctctactaaaaata

SEQ ID NO: 1682972 - DNA, 15 bp, Homo sapiens
acaaaaaattagcct

SEQ ID NO: 1682973 - DNA, 15 bp, Homo sapiens
caaaaaattagcctg

SEQ ID NO: 1682974 - DNA, 15 bp, Homo sapiens
aaaaaattagcctgg

SEQ ID NO: 1682975 - DNA, 15 bp, Homo sapiens
aaaattagcctggcg

SEQ ID NO: 1682976 - DNA, 15 bp, Homo sapiens
aaattagcctggcgt

SEQ ID NO: 1682977 - DNA, 15 bp, Homo sapiens
aattagcctggcgtg

SEQ ID NO: 1682978 - DNA, 15 bp, Homo sapiens
attagcctggcgtgg

SEQ ID NO: 1682979 - DNA, 15 bp, Homo sapiens
ttagcctggcgtggt

SEQ ID NO: 1682980 - DNA, 15 bp, Homo sapiens
tagcctggcgtggtg

SEQ ID NO: 1682981 - DNA, 15 bp, Homo sapiens
agcctggcgtggtgg

SEQ ID NO: 1682982 - DNA, 15 bp, Homo sapiens
gcctggcgtggtggc

SEQ ID NO: 1682983 - DNA, 15 bp, Homo sapiens
cctggcgtggtggct

SEQ ID NO: 1682984 - DNA, 15 bp, Homo sapiens
ctggcgtggtggctc

SEQ ID NO: 1682985 - DNA, 15 bp, Homo sapiens
tggcgtggtggctcg

SEQ ID NO: 1682986 - DNA, 15 bp, Homo sapiens
ggcgtggtggctcgt

SEQ ID NO: 1682987 - DNA, 15 bp, Homo sapiens
gcgtggtggctcgtg

SEQ ID NO: 1682988 - DNA, 15 bp, Homo sapiens
cgtggtggctcgtgc

SEQ ID NO: 1682989 - DNA, 15 bp, Homo sapiens
gtggtggctcgtgcc

SEQ ID NO: 1682990 - DNA, 15 bp, Homo sapiens
tggtggctcgtgcct

SEQ ID NO: 1682991 - DNA, 15 bp, Homo sapiens
ggtggctcgtgcctg

SEQ ID NO: 1682992 - DNA, 15 bp, Homo sapiens
gtggctcgtgcctgt

SEQ ID NO: 1682993 - DNA, 15 bp, Homo sapiens
cagctgctcgggaga

SEQ ID NO: 1682994 - DNA, 15 bp, Homo sapiens
agctgctcgggagac

SEQ ID NO: 1682995 - DNA, 15 bp, Homo sapiens
gctgctcgggagact

SEQ ID NO: 1682996 - DNA, 15 bp, Homo sapiens
ctgctcgggagactg

SEQ ID NO: 1682997 - DNA, 15 bp, Homo sapiens
tgctcgggagactga

SEQ ID NO: 1682998 - DNA, 15 bp, Homo sapiens
gctcgggagactgag

SEQ ID NO: 1682999 - DNA, 15 bp, Homo sapiens
gagaatctcttgaat

SEQ ID NO: 1683000 - DNA, 15 bp, Homo sapiens
agaatctcttgaatc

SEQ ID NO: 1683001 - DNA, 15 bp, Homo sapiens
gaatctcttgaatct

SEQ ID NO: 1683002 - DNA, 15 bp, Homo sapiens
aatctcttgaatctg

SEQ ID NO: 1683003 - DNA, 15 bp, Homo sapiens
atctcttgaatctgg

SEQ ID NO: 1683004 - DNA, 15 bp, Homo sapiens
tctcttgaatctggg

SEQ ID NO: 1683005 - DNA, 15 bp, Homo sapiens
ctcttgaatctggga

SEQ ID NO: 1683006 - DNA, 15 bp, Homo sapiens
tcttgaatctgggag

SEQ ID NO: 1683007 - DNA, 15 bp, Homo sapiens
cttgaatctgggagg

SEQ ID NO: 1683008 - DNA, 15 bp, Homo sapiens
ttgaatctgggaggt

SEQ ID NO: 1683009 - DNA, 15 bp, Homo sapiens
tgaatctgggaggtg

SEQ ID NO: 1683010 - DNA, 15 bp, Homo sapiens
gaatctgggaggtgg

SEQ ID NO: 1683011 - DNA, 15 bp, Homo sapiens
aatctgggaggtgga

SEQ ID NO: 1683012 - DNA, 15 bp, Homo sapiens
atctgggaggtggag

SEQ ID NO: 1683013 - DNA, 15 bp, Homo sapiens
tctgggaggtggagg

SEQ ID NO: 1683014 - DNA, 15 bp, Homo sapiens
tgggaggtggaggtg

SEQ ID NO: 1683015 - DNA, 15 bp, Homo sapiens
gggaggtggaggtgg

SEQ ID NO: 1683016 - DNA, 15 bp, Homo sapiens
ggaggtggaggtggc

SEQ ID NO: 1683017 - DNA, 15 bp, Homo sapiens
gaggtggaggtggca

SEQ ID NO: 1683018 - DNA, 15 bp, Homo sapiens
aggtggaggtggcag

SEQ ID NO: 1683019 - DNA, 15 bp, Homo sapiens
ggtggaggtggcagt

SEQ ID NO: 1683020 - DNA, 15 bp, Homo sapiens
gtggaggtggcagtg

SEQ ID NO: 1683021 - DNA, 15 bp, Homo sapiens
tggaggtggcagtga

SEQ ID NO: 1683022 - DNA, 15 bp, Homo sapiens
ggaggtggcagtgag

SEQ ID NO: 1683023 - DNA, 15 bp, Homo sapiens
cactccagcctagct

SEQ ID NO: 1683024 - DNA, 15 bp, Homo sapiens
actccagcctagcta

SEQ ID NO: 1683025 - DNA, 15 bp, Homo sapiens
ctccagcctagctac

SEQ ID NO: 1683026 - DNA, 15 bp, Homo sapiens
tccagcctagctaca

SEQ ID NO: 1683027 - DNA, 15 bp, Homo sapiens
ccagcctagctacag

SEQ ID NO: 1683028 - DNA, 15 bp, Homo sapiens
cagcctagctacaga

SEQ ID NO: 1683029 - DNA, 15 bp, Homo sapiens
agcctagctacagag

SEQ ID NO: 1683030 - DNA, 15 bp, Homo sapiens
gcctagctacagagt

SEQ ID NO: 1683031 - DNA, 15 bp, Homo sapiens
cctagctacagagtg

SEQ ID NO: 1683032 - DNA, 15 bp, Homo sapiens
ctagctacagagtga

SEQ ID NO: 1683033 - DNA, 15 bp, Homo sapiens
tagctacagagtgac

SEQ ID NO: 1683034 - DNA, 15 bp, Homo sapiens
agctacagagtgacc

SEQ ID NO: 1683035 - DNA, 15 bp, Homo sapiens
gctacagagtgacct

SEQ ID NO: 1683036 - DNA, 15 bp, Homo sapiens
ctacagagtgacctc

SEQ ID NO: 1683037 - DNA, 15 bp, Homo sapiens
tacagagtgacctct

SEQ ID NO: 1683038 - DNA, 15 bp, Homo sapiens
acagagtgacctctc

SEQ ID NO: 1683039 - DNA, 15 bp, Homo sapiens
cagagtgacctctca

SEQ ID NO: 1683040 - DNA, 15 bp, Homo sapiens
agagtgacctctcaa

SEQ ID NO: 1683041 - DNA, 15 bp, Homo sapiens
gagtgacctctcaaa

SEQ ID NO: 1683042 - DNA, 15 bp, Homo sapiens
agtgacctctcaaaa

SEQ ID NO: 1683043 - DNA, 15 bp, Homo sapiens
gtgacctctcaaaaa

SEQ ID NO: 1683044 - DNA, 15 bp, Homo sapiens
tgacctctcaaaaaa

SEQ ID NO: 1683045 - DNA, 15 bp, Homo sapiens
gacctctcaaaaaaa

SEQ ID NO: 1683046 - DNA, 15 bp, Homo sapiens
acctctcaaaaaaaa

SEQ ID NO: 1683047 - DNA, 15 bp, Homo sapiens
cctctcaaaaaaaaa

SEQ ID NO: 1683048 - DNA, 15 bp, Homo sapiens
aaaaaaaaaagcaca

SEQ ID NO: 1683049 - DNA, 15 bp, Homo sapiens
aaaaaaaaagcacac

SEQ ID NO: 1683050 - DNA, 15 bp, Homo sapiens
aaaaaaaagcacaca

SEQ ID NO: 1683051 - DNA, 15 bp, Homo sapiens
aaaaaaagcacacat

SEQ ID NO: 1683052 - DNA, 15 bp, Homo sapiens
aaaaaagcacacatt

SEQ ID NO: 1683053 - DNA, 15 bp, Homo sapiens
aaaaagcacacatta

SEQ ID NO: 1683054 - DNA, 15 bp, Homo sapiens
aaaagcacacattaa

SEQ ID NO: 1683055 - DNA, 15 bp, Homo sapiens
aaagcacacattaaa

SEQ ID NO: 1683056 - DNA, 15 bp, Homo sapiens
aagcacacattaaaa

SEQ ID NO: 1683057 - DNA, 15 bp, Homo sapiens
agcacacattaaaaa

SEQ ID NO: 1683058 - DNA, 15 bp, Homo sapiens
gcacacattaaaaaa

SEQ ID NO: 1683059 - DNA, 15 bp, Homo sapiens
cacacattaaaaaaa

SEQ ID NO: 1683060 - DNA, 15 bp, Homo sapiens
acacattaaaaaaac

SEQ ID NO: 1683061 - DNA, 15 bp, Homo sapiens
cacattaaaaaaaca

SEQ ID NO: 1683062 - DNA, 15 bp, Homo sapiens
acattaaaaaaacaa

SEQ ID NO: 1683063 - DNA, 15 bp, Homo sapiens
cattaaaaaaacaag

SEQ ID NO: 1683064 - DNA, 15 bp, Homo sapiens
attaaaaaaacaagt

SEQ ID NO: 1683065 - DNA, 15 bp, Homo sapiens
ttaaaaaaacaagtt

SEQ ID NO: 1683066 - DNA, 15 bp, Homo sapiens
taaaaaaacaagttt

SEQ ID NO: 1683067 - DNA, 15 bp, Homo sapiens
aaaaaaacaagtttt

SEQ ID NO: 1683068 - DNA, 15 bp, Homo sapiens
aaaaaacaagttttt

SEQ ID NO: 1683069 - DNA, 15 bp, Homo sapiens
aaaaacaagttttta

SEQ ID NO: 1683070 - DNA, 15 bp, Homo sapiens
aaaacaagtttttaa

SEQ ID NO: 1683071 - DNA, 15 bp, Homo sapiens
aaacaagtttttaat

SEQ ID NO: 1683072 - DNA, 15 bp, Homo sapiens
aacaagtttttaatc

SEQ ID NO: 1683073 - DNA, 15 bp, Homo sapiens
acaagtttttaatct

SEQ ID NO: 1683074 - DNA, 15 bp, Homo sapiens
caagtttttaatcta

SEQ ID NO: 1683075 - DNA, 15 bp, Homo sapiens
aagtttttaatctat

SEQ ID NO: 1683076 - DNA, 15 bp, Homo sapiens
agtttttaatctatg

SEQ ID NO: 1683077 - DNA, 15 bp, Homo sapiens
gtttttaatctatgg

SEQ ID NO: 1683078 - DNA, 15 bp, Homo sapiens
tttttaatctatggt

SEQ ID NO: 1683079 - DNA, 15 bp, Homo sapiens
ttttaatctatggtc

SEQ ID NO: 1683080 - DNA, 15 bp, Homo sapiens
tttaatctatggtct

SEQ ID NO: 1683081 - DNA, 15 bp, Homo sapiens
ttaatctatggtctt

SEQ ID NO: 1683082 - DNA, 15 bp, Homo sapiens
taatctatggtcttt

SEQ ID NO: 1683083 - DNA, 15 bp, Homo sapiens
aatctatggtctttt

SEQ ID NO: 1683084 - DNA, 15 bp, Homo sapiens
atctatggtcttttt

SEQ ID NO: 1683085 - DNA, 15 bp, Homo sapiens
tctatggtcttttta

SEQ ID NO: 1683086 - DNA, 15 bp, Homo sapiens
ctatggtctttttat

SEQ ID NO: 1683087 - DNA, 15 bp, Homo sapiens
tatggtctttttatg

SEQ ID NO: 1683088 - DNA, 15 bp, Homo sapiens
atggtctttttatgt

SEQ ID NO: 1683089 - DNA, 15 bp, Homo sapiens
tggtctttttatgtt

SEQ ID NO: 1683090 - DNA, 15 bp, Homo sapiens
ggtctttttatgttc

SEQ ID NO: 1683091 - DNA, 15 bp, Homo sapiens
gtctttttatgttcc

SEQ ID NO: 1683092 - DNA, 15 bp, Homo sapiens
tctttttatgttcca

SEQ ID NO: 1683093 - DNA, 15 bp, Homo sapiens
ctttttatgttccag

SEQ ID NO: 1683094 - DNA, 15 bp, Homo sapiens
tttttatgttccaga

SEQ ID NO: 1683095 - DNA, 15 bp, Homo sapiens
ttttatgttccagaa

SEQ ID NO: 1683096 - DNA, 15 bp, Homo sapiens
tttatgttccagaat

SEQ ID NO: 1683097 - DNA, 15 bp, Homo sapiens
ttatgttccagaatc

SEQ ID NO: 1683098 - DNA, 15 bp, Homo sapiens
tatgttccagaatcc

SEQ ID NO: 1683099 - DNA, 15 bp, Homo sapiens
atgttccagaatcct

SEQ ID NO: 1683100 - DNA, 15 bp, Homo sapiens
tgttccagaatccta

SEQ ID NO: 1683101 - DNA, 15 bp, Homo sapiens
gttccagaatcctaa

SEQ ID NO: 1683102 - DNA, 15 bp, Homo sapiens
ttccagaatcctaaa

SEQ ID NO: 1683103 - DNA, 15 bp, Homo sapiens
tccagaatcctaaac

SEQ ID NO: 1683104 - DNA, 15 bp, Homo sapiens
ccagaatcctaaaca

SEQ ID NO: 1683105 - DNA, 15 bp, Homo sapiens
cagaatcctaaacat

SEQ ID NO: 1683106 - DNA, 15 bp, Homo sapiens
agaatcctaaacatt

SEQ ID NO: 1683107 - DNA, 15 bp, Homo sapiens
gaatcctaaacatta

SEQ ID NO: 1683108 - DNA, 15 bp, Homo sapiens
aatcctaaacattaa

SEQ ID NO: 1683109 - DNA, 15 bp, Homo sapiens
atcctaaacattaat

SEQ ID NO: 1683110 - DNA, 15 bp, Homo sapiens
tcctaaacattaatc

SEQ ID NO: 1683111 - DNA, 15 bp, Homo sapiens
cctaaacattaatca

SEQ ID NO: 1683112 - DNA, 15 bp, Homo sapiens
ctaaacattaatcaa

SEQ ID NO: 1683113 - DNA, 15 bp, Homo sapiens
taaacattaatcaat

SEQ ID NO: 1683114 - DNA, 15 bp, Homo sapiens
aaacattaatcaata

SEQ ID NO: 1683115 - DNA, 15 bp, Homo sapiens
aacattaatcaatat

SEQ ID NO: 1683116 - DNA, 15 bp, Homo sapiens
acattaatcaatatt

SEQ ID NO: 1683117 - DNA, 15 bp, Homo sapiens
cattaatcaatatta

SEQ ID NO: 1683118 - DNA, 15 bp, Homo sapiens
attaatcaatattaa

SEQ ID NO: 1683119 - DNA, 15 bp, Homo sapiens
ttaatcaatattaat

SEQ ID NO: 1683120 - DNA, 15 bp, Homo sapiens
taatcaatattaata

SEQ ID NO: 1683121 - DNA, 15 bp, Homo sapiens
aatcaatattaataa

SEQ ID NO: 1683122 - DNA, 15 bp, Homo sapiens
atcaatattaataac

SEQ ID NO: 1683123 - DNA, 15 bp, Homo sapiens
tcaatattaataaca

SEQ ID NO: 1683124 - DNA, 15 bp, Homo sapiens
caatattaataacag

SEQ ID NO: 1683125 - DNA, 15 bp, Homo sapiens
aatattaataacagg

SEQ ID NO: 1683126 - DNA, 15 bp, Homo sapiens
atattaataacagga

SEQ ID NO: 1683127 - DNA, 15 bp, Homo sapiens
tattaataacaggat

SEQ ID NO: 1683128 - DNA, 15 bp, Homo sapiens
attaataacaggatt

SEQ ID NO: 1683129 - DNA, 15 bp, Homo sapiens
ttaataacaggattc

SEQ ID NO: 1683130 - DNA, 15 bp, Homo sapiens
taataacaggattcc

SEQ ID NO: 1683131 - DNA, 15 bp, Homo sapiens
aataacaggattcca

SEQ ID NO: 1683132 - DNA, 15 bp, Homo sapiens
ataacaggattccat

SEQ ID NO: 1683133 - DNA, 15 bp, Homo sapiens
taacaggattccatc

SEQ ID NO: 1683134 - DNA, 15 bp, Homo sapiens
aacaggattccatca

SEQ ID NO: 1683135 - DNA, 15 bp, Homo sapiens
acaggattccatcaa

SEQ ID NO: 1683136 - DNA, 15 bp, Homo sapiens
caggattccatcaag

SEQ ID NO: 1683137 - DNA, 15 bp, Homo sapiens
aggattccatcaaga

SEQ ID NO: 1683138 - DNA, 15 bp, Homo sapiens
ggattccatcaagat

SEQ ID NO: 1683139 - DNA, 15 bp, Homo sapiens
gattccatcaagatt

SEQ ID NO: 1683140 - DNA, 15 bp, Homo sapiens
attccatcaagatta

SEQ ID NO: 1683141 - DNA, 15 bp, Homo sapiens
ttccatcaagattaa

SEQ ID NO: 1683142 - DNA, 15 bp, Homo sapiens
tccatcaagattaat

SEQ ID NO: 1683143 - DNA, 15 bp, Homo sapiens
ccatcaagattaata

SEQ ID NO: 1683144 - DNA, 15 bp, Homo sapiens
catcaagattaatat

SEQ ID NO: 1683145 - DNA, 15 bp, Homo sapiens
atcaagattaatatt

SEQ ID NO: 1683146 - DNA, 15 bp, Homo sapiens
tcaagattaatattg

SEQ ID NO: 1683147 - DNA, 15 bp, Homo sapiens
caagattaatattga

SEQ ID NO: 1683148 - DNA, 15 bp, Homo sapiens
aagattaatattgat

SEQ ID NO: 1683149 - DNA, 15 bp, Homo sapiens
agattaatattgatt

SEQ ID NO: 1683150 - DNA, 15 bp, Homo sapiens
gattaatattgatta

SEQ ID NO: 1683151 - DNA, 15 bp, Homo sapiens
attaatattgattaa

SEQ ID NO: 1683152 - DNA, 15 bp, Homo sapiens
ttaatattgattaat

SEQ ID NO: 1683153 - DNA, 15 bp, Homo sapiens
taatattgattaatc

SEQ ID NO: 1683154 - DNA, 15 bp, Homo sapiens
aatattgattaatca

SEQ ID NO: 1683155 - DNA, 15 bp, Homo sapiens
atattgattaatcaa

SEQ ID NO: 1683156 - DNA, 15 bp, Homo sapiens
tattgattaatcaaa

SEQ ID NO: 1683157 - DNA, 15 bp, Homo sapiens
attgattaatcaaaa

SEQ ID NO: 1683158 - DNA, 15 bp, Homo sapiens
ttgattaatcaaaat

SEQ ID NO: 1683159 - DNA, 15 bp, Homo sapiens
tgattaatcaaaatt

SEQ ID NO: 1683160 - DNA, 15 bp, Homo sapiens
gattaatcaaaatta

SEQ ID NO: 1683161 - DNA, 15 bp, Homo sapiens
attaatcaaaattaa

SEQ ID NO: 1683162 - DNA, 15 bp, Homo sapiens
ttaatcaaaattaat

SEQ ID NO: 1683163 - DNA, 15 bp, Homo sapiens
taatcaaaattaatc

SEQ ID NO: 1683164 - DNA, 15 bp, Homo sapiens
aatcaaaattaatca

SEQ ID NO: 1683165 - DNA, 15 bp, Homo sapiens
atcaaaattaatcaa

SEQ ID NO: 1683166 - DNA, 15 bp, Homo sapiens
tcaaaattaatcaat

SEQ ID NO: 1683167 - DNA, 15 bp, Homo sapiens
caaaattaatcaata

SEQ ID NO: 1683168 - DNA, 15 bp, Homo sapiens
aaaattaatcaatat

SEQ ID NO: 1683169 - DNA, 15 bp, Homo sapiens
aaattaatcaatatt

SEQ ID NO: 1683170 - DNA, 15 bp, Homo sapiens
aattaatcaatattg

SEQ ID NO: 1683171 - DNA, 15 bp, Homo sapiens
attaatcaatattga

SEQ ID NO: 1683172 - DNA, 15 bp, Homo sapiens
ttaatcaatattgat

SEQ ID NO: 1683173 - DNA, 15 bp, Homo sapiens
taatcaatattgatt

SEQ ID NO: 1683174 - DNA, 15 bp, Homo sapiens
aatcaatattgatta

SEQ ID NO: 1683175 - DNA, 15 bp, Homo sapiens
atcaatattgattac

SEQ ID NO: 1683176 - DNA, 15 bp, Homo sapiens
tcaatattgattacc

SEQ ID NO: 1683177 - DNA, 15 bp, Homo sapiens
caatattgattaccc

SEQ ID NO: 1683178 - DNA, 15 bp, Homo sapiens
aatattgattaccca

SEQ ID NO: 1683179 - DNA, 15 bp, Homo sapiens
atattgattacccaa

SEQ ID NO: 1683180 - DNA, 15 bp, Homo sapiens
tattgattacccaat

SEQ ID NO: 1683181 - DNA, 15 bp, Homo sapiens
attgattacccaata

SEQ ID NO: 1683182 - DNA, 15 bp, Homo sapiens
ttgattacccaatat

SEQ ID NO: 1683183 - DNA, 15 bp, Homo sapiens
tgattacccaatatt

SEQ ID NO: 1683184 - DNA, 15 bp, Homo sapiens
gattacccaatattg

SEQ ID NO: 1683185 - DNA, 15 bp, Homo sapiens
attacccaatattga

SEQ ID NO: 1683186 - DNA, 15 bp, Homo sapiens
ttacccaatattgat

SEQ ID NO: 1683187 - DNA, 15 bp, Homo sapiens
tacccaatattgatt

SEQ ID NO: 1683188 - DNA, 15 bp, Homo sapiens
acccaatattgatta

SEQ ID NO: 1683189 - DNA, 15 bp, Homo sapiens
cccaatattgattaa

SEQ ID NO: 1683190 - DNA, 15 bp, Homo sapiens
ccaatattgattaat

SEQ ID NO: 1683191 - DNA, 15 bp, Homo sapiens
caatattgattaatt

SEQ ID NO: 1683192 - DNA, 15 bp, Homo sapiens
aatattgattaatta

SEQ ID NO: 1683193 - DNA, 15 bp, Homo sapiens
atattgattaattaa

SEQ ID NO: 1683194 - DNA, 15 bp, Homo sapiens
tattgattaattaat

SEQ ID NO: 1683195 - DNA, 15 bp, Homo sapiens
attgattaattaatt

SEQ ID NO: 1683196 - DNA, 15 bp, Homo sapiens
ttgattaattaattg

SEQ ID NO: 1683197 - DNA, 15 bp, Homo sapiens
tgattaattaattgt

SEQ ID NO: 1683198 - DNA, 15 bp, Homo sapiens
gattaattaattgtg

SEQ ID NO: 1683199 - DNA, 15 bp, Homo sapiens
attaattaattgtga

SEQ ID NO: 1683200 - DNA, 15 bp, Homo sapiens
ttaattaattgtgac

SEQ ID NO: 1683201 - DNA, 15 bp, Homo sapiens
taattaattgtgaca

SEQ ID NO: 1683202 - DNA, 15 bp, Homo sapiens
aattaattgtgacaa

SEQ ID NO: 1683203 - DNA, 15 bp, Homo sapiens
attaattgtgacaaa

SEQ ID NO: 1683204 - DNA, 15 bp, Homo sapiens
ttaattgtgacaaat

SEQ ID NO: 1683205 - DNA, 15 bp, Homo sapiens
taattgtgacaaatg

SEQ ID NO: 1683206 - DNA, 15 bp, Homo sapiens
aattgtgacaaatgt

SEQ ID NO: 1683207 - DNA, 15 bp, Homo sapiens
attgtgacaaatgta

SEQ ID NO: 1683208 - DNA, 15 bp, Homo sapiens
ttgtgacaaatgtac

SEQ ID NO: 1683209 - DNA, 15 bp, Homo sapiens
tgtgacaaatgtacc

SEQ ID NO: 1683210 - DNA, 15 bp, Homo sapiens
gtgacaaatgtacca

SEQ ID NO: 1683211 - DNA, 15 bp, Homo sapiens
tgacaaatgtaccat

SEQ ID NO: 1683212 - DNA, 15 bp, Homo sapiens
gacaaatgtaccatg

SEQ ID NO: 1683213 - DNA, 15 bp, Homo sapiens
acaaatgtaccatgc

SEQ ID NO: 1683214 - DNA, 15 bp, Homo sapiens
caaatgtaccatgcc

SEQ ID NO: 1683215 - DNA, 15 bp, Homo sapiens
aaatgtaccatgcct

SEQ ID NO: 1683216 - DNA, 15 bp, Homo sapiens
aatgtaccatgccta

SEQ ID NO: 1683217 - DNA, 15 bp, Homo sapiens
atgtaccatgcctag

SEQ ID NO: 1683218 - DNA, 15 bp, Homo sapiens
tgtaccatgcctagg

SEQ ID NO: 1683219 - DNA, 15 bp, Homo sapiens
gtaccatgcctaggt

SEQ ID NO: 1683220 - DNA, 15 bp, Homo sapiens
taccatgcctaggta

SEQ ID NO: 1683221 - DNA, 15 bp, Homo sapiens
accatgcctaggtaa

SEQ ID NO: 1683222 - DNA, 15 bp, Homo sapiens
ccatgcctaggtaaa

SEQ ID NO: 1683223 - DNA, 15 bp, Homo sapiens
catgcctaggtaaat

SEQ ID NO: 1683224 - DNA, 15 bp, Homo sapiens
atgcctaggtaaatg

SEQ ID NO: 1683225 - DNA, 15 bp, Homo sapiens
tgcctaggtaaatgt

SEQ ID NO: 1683226 - DNA, 15 bp, Homo sapiens
gcctaggtaaatgtt

SEQ ID NO: 1683227 - DNA, 15 bp, Homo sapiens
cctaggtaaatgtta

SEQ ID NO: 1683228 - DNA, 15 bp, Homo sapiens
ctaggtaaatgttaa

SEQ ID NO: 1683229 - DNA, 15 bp, Homo sapiens
taggtaaatgttaat

SEQ ID NO: 1683230 - DNA, 15 bp, Homo sapiens
aggtaaatgttaata

SEQ ID NO: 1683231 - DNA, 15 bp, Homo sapiens
ggtaaatgttaataa

SEQ ID NO: 1683232 - DNA, 15 bp, Homo sapiens
gtaaatgttaataat

SEQ ID NO: 1683233 - DNA, 15 bp, Homo sapiens
taaatgttaataatg

SEQ ID NO: 1683234 - DNA, 15 bp, Homo sapiens
aaatgttaataatgg

SEQ ID NO: 1683235 - DNA, 15 bp, Homo sapiens
aatgttaataatggc

SEQ ID NO: 1683236 - DNA, 15 bp, Homo sapiens
atgttaataatggca

SEQ ID NO: 1683237 - DNA, 15 bp, Homo sapiens
tgttaataatggcag

SEQ ID NO: 1683238 - DNA, 15 bp, Homo sapiens
gttaataatggcaga

SEQ ID NO: 1683239 - DNA, 15 bp, Homo sapiens
ttaataatggcagaa

SEQ ID NO: 1683240 - DNA, 15 bp, Homo sapiens
taataatggcagaac

SEQ ID NO: 1683241 - DNA, 15 bp, Homo sapiens
aataatggcagaact

SEQ ID NO: 1683242 - DNA, 15 bp, Homo sapiens
ataatggcagaactt

SEQ ID NO: 1683243 - DNA, 15 bp, Homo sapiens
taatggcagaacttg

SEQ ID NO: 1683244 - DNA, 15 bp, Homo sapiens
aatggcagaacttgg

SEQ ID NO: 1683245 - DNA, 15 bp, Homo sapiens
atggcagaacttggc

SEQ ID NO: 1683246 - DNA, 15 bp, Homo sapiens
tggcagaacttggcc

SEQ ID NO: 1683247 - DNA, 15 bp, Homo sapiens
ggcagaacttggcca

SEQ ID NO: 1683248 - DNA, 15 bp, Homo sapiens
gcagaacttggccag

SEQ ID NO: 1683249 - DNA, 15 bp, Homo sapiens
cagaacttggccagg

SEQ ID NO: 1683250 - DNA, 15 bp, Homo sapiens
aacttggccaggcat

SEQ ID NO: 1683251 - DNA, 15 bp, Homo sapiens
acttggccaggcatg

SEQ ID NO: 1683252 - DNA, 15 bp, Homo sapiens
cttggccaggcatgg

SEQ ID NO: 1683253 - DNA, 15 bp, Homo sapiens
ttggccaggcatggt

SEQ ID NO: 1683254 - DNA, 15 bp, Homo sapiens
tggccaggcatggtg

SEQ ID NO: 1683255 - DNA, 15 bp, Homo sapiens
aggcatggtggctcg

SEQ ID NO: 1683256 - DNA, 15 bp, Homo sapiens
ggcatggtggctcgc

SEQ ID NO: 1683257 - DNA, 15 bp, Homo sapiens
gcatggtggctcgca

SEQ ID NO: 1683258 - DNA, 15 bp, Homo sapiens
catggtggctcgcac

SEQ ID NO: 1683259 - DNA, 15 bp, Homo sapiens
atggtggctcgcacc

SEQ ID NO: 1683260 - DNA, 15 bp, Homo sapiens
tggtggctcgcacct

SEQ ID NO: 1683261 - DNA, 15 bp, Homo sapiens
ggtggctcgcacctg

SEQ ID NO: 1683262 - DNA, 15 bp, Homo sapiens
gtggctcgcacctgt

SEQ ID NO: 1683263 - DNA, 15 bp, Homo sapiens
tggctcgcacctgta

SEQ ID NO: 1683264 - DNA, 15 bp, Homo sapiens
ggctcgcacctgtaa

SEQ ID NO: 1683265 - DNA, 15 bp, Homo sapiens
gctcgcacctgtaat

SEQ ID NO: 1683266 - DNA, 15 bp, Homo sapiens
ctcgcacctgtaatc

SEQ ID NO: 1683267 - DNA, 15 bp, Homo sapiens
tcgcacctgtaatcc

SEQ ID NO: 1683268 - DNA, 15 bp, Homo sapiens
taatcccagcatttg

SEQ ID NO: 1683269 - DNA, 15 bp, Homo sapiens
aatcccagcatttgg

SEQ ID NO: 1683270 - DNA, 15 bp, Homo sapiens
atcccagcatttggg

SEQ ID NO: 1683271 - DNA, 15 bp, Homo sapiens
tcccagcatttggga

SEQ ID NO: 1683272 - DNA, 15 bp, Homo sapiens
cccagcatttgggag

SEQ ID NO: 1683273 - DNA, 15 bp, Homo sapiens
ccagcatttgggagg

SEQ ID NO: 1683274 - DNA, 15 bp, Homo sapiens
cagcatttgggaggc

SEQ ID NO: 1683275 - DNA, 15 bp, Homo sapiens
agcatttgggaggcc

SEQ ID NO: 1683276 - DNA, 15 bp, Homo sapiens
gcatttgggaggcca

SEQ ID NO: 1683277 - DNA, 15 bp, Homo sapiens
catttgggaggccaa

SEQ ID NO: 1683278 - DNA, 15 bp, Homo sapiens
atttgggaggccaag

SEQ ID NO: 1683279 - DNA, 15 bp, Homo sapiens
aggccaaggtgggtg

SEQ ID NO: 1683280 - DNA, 15 bp, Homo sapiens
ggccaaggtgggtgg

SEQ ID NO: 1683281 - DNA, 15 bp, Homo sapiens
gccaaggtgggtgga

SEQ ID NO: 1683282 - DNA, 15 bp, Homo sapiens
ggtgggtggatcaca

SEQ ID NO: 1683283 - DNA, 15 bp, Homo sapiens
gtgggtggatcacaa

SEQ ID NO: 1683284 - DNA, 15 bp, Homo sapiens
tgggtggatcacaag

SEQ ID NO: 1683285 - DNA, 15 bp, Homo sapiens
gatcacaaggtcagt

SEQ ID NO: 1683286 - DNA, 15 bp, Homo sapiens
atcacaaggtcagta

SEQ ID NO: 1683287 - DNA, 15 bp, Homo sapiens
tcacaaggtcagtag

SEQ ID NO: 1683288 - DNA, 15 bp, Homo sapiens
cacaaggtcagtaga

SEQ ID NO: 1683289 - DNA, 15 bp, Homo sapiens
acaaggtcagtagat

SEQ ID NO: 1683290 - DNA, 15 bp, Homo sapiens
caaggtcagtagatc

SEQ ID NO: 1683291 - DNA, 15 bp, Homo sapiens
aaggtcagtagatca

SEQ ID NO: 1683292 - DNA, 15 bp, Homo sapiens
aggtcagtagatcaa

SEQ ID NO: 1683293 - DNA, 15 bp, Homo sapiens
ggtcagtagatcaag

SEQ ID NO: 1683294 - DNA, 15 bp, Homo sapiens
gtcagtagatcaaga

SEQ ID NO: 1683295 - DNA, 15 bp, Homo sapiens
tcagtagatcaagac

SEQ ID NO: 1683296 - DNA, 15 bp, Homo sapiens
cagtagatcaagacc

SEQ ID NO: 1683297 - DNA, 15 bp, Homo sapiens
agtagatcaagacca

SEQ ID NO: 1683298 - DNA, 15 bp, Homo sapiens
gtagatcaagaccat

SEQ ID NO: 1683299 - DNA, 15 bp, Homo sapiens
tagatcaagaccatc

SEQ ID NO: 1683300 - DNA, 15 bp, Homo sapiens
caagaccatcctggg

SEQ ID NO: 1683301 - DNA, 15 bp, Homo sapiens
aagaccatcctgggc

SEQ ID NO: 1683302 - DNA, 15 bp, Homo sapiens
agaccatcctgggca

SEQ ID NO: 1683303 - DNA, 15 bp, Homo sapiens
gaccatcctgggcaa

SEQ ID NO: 1683304 - DNA, 15 bp, Homo sapiens
accatcctgggcaac

SEQ ID NO: 1683305 - DNA, 15 bp, Homo sapiens
catcctgggcaacat

SEQ ID NO: 1683306 - DNA, 15 bp, Homo sapiens
atcctgggcaacatg

SEQ ID NO: 1683307 - DNA, 15 bp, Homo sapiens
tcctgggcaacatgg

SEQ ID NO: 1683308 - DNA, 15 bp, Homo sapiens
cctgggcaacatggt

SEQ ID NO: 1683309 - DNA, 15 bp, Homo sapiens
ctgggcaacatggtg

SEQ ID NO: 1683310 - DNA, 15 bp, Homo sapiens
tgggcaacatggtga

SEQ ID NO: 1683311 - DNA, 15 bp, Homo sapiens
gggcaacatggtgaa

SEQ ID NO: 1683312 - DNA, 15 bp, Homo sapiens
gtgtggtggcacatg

SEQ ID NO: 1683313 - DNA, 15 bp, Homo sapiens
tgtggtggcacatgc

SEQ ID NO: 1683314 - DNA, 15 bp, Homo sapiens
gctacttgggaggcc

SEQ ID NO: 1683315 - DNA, 15 bp, Homo sapiens
ctacttgggaggcct

SEQ ID NO: 1683316 - DNA, 15 bp, Homo sapiens
tacttgggaggcctg

SEQ ID NO: 1683317 - DNA, 15 bp, Homo sapiens
acttgggaggcctga

SEQ ID NO: 1683318 - DNA, 15 bp, Homo sapiens
cttgggaggcctgag

SEQ ID NO: 1683319 - DNA, 15 bp, Homo sapiens
ttgggaggcctgaga

SEQ ID NO: 1683320 - DNA, 15 bp, Homo sapiens
tgggaggcctgagaa

SEQ ID NO: 1683321 - DNA, 15 bp, Homo sapiens
gggaggcctgagaat

SEQ ID NO: 1683322 - DNA, 15 bp, Homo sapiens
ggaggcctgagaatt

SEQ ID NO: 1683323 - DNA, 15 bp, Homo sapiens
gaggcctgagaattg

SEQ ID NO: 1683324 - DNA, 15 bp, Homo sapiens
aggcctgagaattgc

SEQ ID NO: 1683325 - DNA, 15 bp, Homo sapiens
ggcctgagaattgcc

SEQ ID NO: 1683326 - DNA, 15 bp, Homo sapiens
gcctgagaattgcct

SEQ ID NO: 1683327 - DNA, 15 bp, Homo sapiens
cctgagaattgcctg

SEQ ID NO: 1683328 - DNA, 15 bp, Homo sapiens
ctgagaattgcctga

SEQ ID NO: 1683329 - DNA, 15 bp, Homo sapiens
tgagaattgcctgaa

SEQ ID NO: 1683330 - DNA, 15 bp, Homo sapiens
gtggaggttgcagtc

SEQ ID NO: 1683331 - DNA, 15 bp, Homo sapiens
tggaggttgcagtca

SEQ ID NO: 1683332 - DNA, 15 bp, Homo sapiens
ggaggttgcagtcag

SEQ ID NO: 1683333 - DNA, 15 bp, Homo sapiens
gaggttgcagtcagc

SEQ ID NO: 1683334 - DNA, 15 bp, Homo sapiens
aggttgcagtcagca

SEQ ID NO: 1683335 - DNA, 15 bp, Homo sapiens
ggttgcagtcagcag

SEQ ID NO: 1683336 - DNA, 15 bp, Homo sapiens
gttgcagtcagcaga

SEQ ID NO: 1683337 - DNA, 15 bp, Homo sapiens
ttgcagtcagcagag

SEQ ID NO: 1683338 - DNA, 15 bp, Homo sapiens
tgcagtcagcagaga

SEQ ID NO: 1683339 - DNA, 15 bp, Homo sapiens
gcagtcagcagagat

SEQ ID NO: 1683340 - DNA, 15 bp, Homo sapiens
cagtcagcagagatc

SEQ ID NO: 1683341 - DNA, 15 bp, Homo sapiens
agtcagcagagatca

SEQ ID NO: 1683342 - DNA, 15 bp, Homo sapiens
gtcagcagagatcac

SEQ ID NO: 1683343 - DNA, 15 bp, Homo sapiens
tcagcagagatcacg

SEQ ID NO: 1683344 - DNA, 15 bp, Homo sapiens
cagcagagatcacgc

SEQ ID NO: 1683345 - DNA, 15 bp, Homo sapiens
agcagagatcacgcc

SEQ ID NO: 1683346 - DNA, 15 bp, Homo sapiens
cgccactgcactccg

SEQ ID NO: 1683347 - DNA, 15 bp, Homo sapiens
gccactgcactccgg

SEQ ID NO: 1683348 - DNA, 15 bp, Homo sapiens
ccactgcactccggc

SEQ ID NO: 1683349 - DNA, 15 bp, Homo sapiens
cactgcactccggcc

SEQ ID NO: 1683350 - DNA, 15 bp, Homo sapiens
actgcactccggcct

SEQ ID NO: 1683351 - DNA, 15 bp, Homo sapiens
ctgcactccggcctg

SEQ ID NO: 1683352 - DNA, 15 bp, Homo sapiens
tgcactccggcctgg

SEQ ID NO: 1683353 - DNA, 15 bp, Homo sapiens
gcactccggcctggc

SEQ ID NO: 1683354 - DNA, 15 bp, Homo sapiens
cactccggcctggca

SEQ ID NO: 1683355 - DNA, 15 bp, Homo sapiens
actccggcctggcaa

SEQ ID NO: 1683356 - DNA, 15 bp, Homo sapiens
ctccggcctggcaac

SEQ ID NO: 1683357 - DNA, 15 bp, Homo sapiens
tccggcctggcaaca

SEQ ID NO: 1683358 - DNA, 15 bp, Homo sapiens
ccggcctggcaacag

SEQ ID NO: 1683359 - DNA, 15 bp, Homo sapiens
cggcctggcaacaga

SEQ ID NO: 1683360 - DNA, 15 bp, Homo sapiens
ggcctggcaacagag

SEQ ID NO: 1683361 - DNA, 15 bp, Homo sapiens
cctggcaacagagcg

SEQ ID NO: 1683362 - DNA, 15 bp, Homo sapiens
ctggcaacagagcga

SEQ ID NO: 1683363 - DNA, 15 bp, Homo sapiens
tggcaacagagcgag

SEQ ID NO: 1683364 - DNA, 15 bp, Homo sapiens
aacagagcgagactt

SEQ ID NO: 1683365 - DNA, 15 bp, Homo sapiens
agcgagactttgtct

SEQ ID NO: 1683366 - DNA, 15 bp, Homo sapiens
gcgagactttgtctc

SEQ ID NO: 1683367 - DNA, 15 bp, Homo sapiens
cgagactttgtctca

SEQ ID NO: 1683368 - DNA, 15 bp, Homo sapiens
gagactttgtctcaa

SEQ ID NO: 1683369 - DNA, 15 bp, Homo sapiens
agactttgtctcaaa

SEQ ID NO: 1683370 - DNA, 15 bp, Homo sapiens
gactttgtctcaaaa

SEQ ID NO: 1683371 - DNA, 15 bp, Homo sapiens
actttgtctcaaaaa

SEQ ID NO: 1683372 - DNA, 15 bp, Homo sapiens
ctttgtctcaaaaaa

SEQ ID NO: 1683373 - DNA, 15 bp, Homo sapiens
tttgtctcaaaaaat

SEQ ID NO: 1683374 - DNA, 15 bp, Homo sapiens
ttgtctcaaaaaata

SEQ ID NO: 1683375 - DNA, 15 bp, Homo sapiens
ataataataataatg

SEQ ID NO: 1683376 - DNA, 15 bp, Homo sapiens
taataataataatgg

SEQ ID NO: 1683377 - DNA, 15 bp, Homo sapiens
aataataatggcaga

SEQ ID NO: 1683378 - DNA, 15 bp, Homo sapiens
ataataatggcagaa

SEQ ID NO: 1683379 - DNA, 15 bp, Homo sapiens
ataatggcagaacta

SEQ ID NO: 1683380 - DNA, 15 bp, Homo sapiens
taatggcagaactag

SEQ ID NO: 1683381 - DNA, 15 bp, Homo sapiens
aatggcagaactagg

SEQ ID NO: 1683382 - DNA, 15 bp, Homo sapiens
atggcagaactaggc

SEQ ID NO: 1683383 - DNA, 15 bp, Homo sapiens
tggcagaactaggcc

SEQ ID NO: 1683384 - DNA, 15 bp, Homo sapiens
ggcagaactaggcca

SEQ ID NO: 1683385 - DNA, 15 bp, Homo sapiens
gcagaactaggccag

SEQ ID NO: 1683386 - DNA, 15 bp, Homo sapiens
cagaactaggccagg

SEQ ID NO: 1683387 - DNA, 15 bp, Homo sapiens
agaactaggccaggc

SEQ ID NO: 1683388 - DNA, 15 bp, Homo sapiens
gaactaggccaggcg

SEQ ID NO: 1683389 - DNA, 15 bp, Homo sapiens
aactaggccaggcgc

SEQ ID NO: 1683390 - DNA, 15 bp, Homo sapiens
actaggccaggcgcg

SEQ ID NO: 1683391 - DNA, 15 bp, Homo sapiens
ctaggccaggcgcgg

SEQ ID NO: 1683392 - DNA, 15 bp, Homo sapiens
taggccaggcgcggt

SEQ ID NO: 1683393 - DNA, 15 bp, Homo sapiens
gccaggcgcggtggt

SEQ ID NO: 1683394 - DNA, 15 bp, Homo sapiens
ccaggcgcggtggtt

SEQ ID NO: 1683395 - DNA, 15 bp, Homo sapiens
caggcgcggtggttc

SEQ ID NO: 1683396 - DNA, 15 bp, Homo sapiens
aggcgcggtggttca

SEQ ID NO: 1683397 - DNA, 15 bp, Homo sapiens
cgcggtggttcacac

SEQ ID NO: 1683398 - DNA, 15 bp, Homo sapiens
gcggtggttcacacc

SEQ ID NO: 1683399 - DNA, 15 bp, Homo sapiens
cggtggttcacacct

SEQ ID NO: 1683400 - DNA, 15 bp, Homo sapiens
acacctgtaatcccc

SEQ ID NO: 1683401 - DNA, 15 bp, Homo sapiens
cacctgtaatcccca

SEQ ID NO: 1683402 - DNA, 15 bp, Homo sapiens
acctgtaatccccat

SEQ ID NO: 1683403 - DNA, 15 bp, Homo sapiens
cctgtaatccccatc

SEQ ID NO: 1683404 - DNA, 15 bp, Homo sapiens
ctgtaatccccatca

SEQ ID NO: 1683405 - DNA, 15 bp, Homo sapiens
tgtaatccccatcac

SEQ ID NO: 1683406 - DNA, 15 bp, Homo sapiens
gtaatccccatcact

SEQ ID NO: 1683407 - DNA, 15 bp, Homo sapiens
taatccccatcactt

SEQ ID NO: 1683408 - DNA, 15 bp, Homo sapiens
aatccccatcacttt

SEQ ID NO: 1683409 - DNA, 15 bp, Homo sapiens
atccccatcactttg

SEQ ID NO: 1683410 - DNA, 15 bp, Homo sapiens
tccccatcactttgg

SEQ ID NO: 1683411 - DNA, 15 bp, Homo sapiens
ccccatcactttggg

SEQ ID NO: 1683412 - DNA, 15 bp, Homo sapiens
cccatcactttgggt

SEQ ID NO: 1683413 - DNA, 15 bp, Homo sapiens
ccatcactttgggtg

SEQ ID NO: 1683414 - DNA, 15 bp, Homo sapiens
catcactttgggtgg

SEQ ID NO: 1683415 - DNA, 15 bp, Homo sapiens
atcactttgggtggc

SEQ ID NO: 1683416 - DNA, 15 bp, Homo sapiens
tcactttgggtggcc

SEQ ID NO: 1683417 - DNA, 15 bp, Homo sapiens
cactttgggtggccg

SEQ ID NO: 1683418 - DNA, 15 bp, Homo sapiens
actttgggtggccga

SEQ ID NO: 1683419 - DNA, 15 bp, Homo sapiens
ctttgggtggccgag

SEQ ID NO: 1683420 - DNA, 15 bp, Homo sapiens
tttgggtggccgagg

SEQ ID NO: 1683421 - DNA, 15 bp, Homo sapiens
ttgggtggccgaggt

SEQ ID NO: 1683422 - DNA, 15 bp, Homo sapiens
tgggtggccgaggtc

SEQ ID NO: 1683423 - DNA, 15 bp, Homo sapiens
gggtggccgaggtcg

SEQ ID NO: 1683424 - DNA, 15 bp, Homo sapiens
ggtggccgaggtcgg

SEQ ID NO: 1683425 - DNA, 15 bp, Homo sapiens
gtggccgaggtcggt

SEQ ID NO: 1683426 - DNA, 15 bp, Homo sapiens
tggccgaggtcggtg

SEQ ID NO: 1683427 - DNA, 15 bp, Homo sapiens
ggccgaggtcggtgg

SEQ ID NO: 1683428 - DNA, 15 bp, Homo sapiens
gccgaggtcggtgga

SEQ ID NO: 1683429 - DNA, 15 bp, Homo sapiens
ccgaggtcggtggat

SEQ ID NO: 1683430 - DNA, 15 bp, Homo sapiens
cgaggtcggtggatc

SEQ ID NO: 1683431 - DNA, 15 bp, Homo sapiens
gaggtcggtggatca

SEQ ID NO: 1683432 - DNA, 15 bp, Homo sapiens
aggtcggtggatcac

SEQ ID NO: 1683433 - DNA, 15 bp, Homo sapiens
ggtcggtggatcact

SEQ ID NO: 1683434 - DNA, 15 bp, Homo sapiens
gtcggtggatcactt

SEQ ID NO: 1683435 - DNA, 15 bp, Homo sapiens
tcggtggatcacttg

SEQ ID NO: 1683436 - DNA, 15 bp, Homo sapiens
cggtggatcacttga

SEQ ID NO: 1683437 - DNA, 15 bp, Homo sapiens
ttgaggtcaggggtt

SEQ ID NO: 1683438 - DNA, 15 bp, Homo sapiens
aaaccccgtctctat

SEQ ID NO: 1683439 - DNA, 15 bp, Homo sapiens
aaccccgtctctatt

SEQ ID NO: 1683440 - DNA, 15 bp, Homo sapiens
accccgtctctatta

SEQ ID NO: 1683441 - DNA, 15 bp, Homo sapiens
ccccgtctctattaa

SEQ ID NO: 1683442 - DNA, 15 bp, Homo sapiens
cccgtctctattaaa

SEQ ID NO: 1683443 - DNA, 15 bp, Homo sapiens
ccgtctctattaaaa

SEQ ID NO: 1683444 - DNA, 15 bp, Homo sapiens
aaaatacaaaaattt

SEQ ID NO: 1683445 - DNA, 15 bp, Homo sapiens
aaatacaaaaattta

SEQ ID NO: 1683446 - DNA, 15 bp, Homo sapiens
aatacaaaaatttag

SEQ ID NO: 1683447 - DNA, 15 bp, Homo sapiens
atacaaaaatttagc

SEQ ID NO: 1683448 - DNA, 15 bp, Homo sapiens
tacaaaaatttagct

SEQ ID NO: 1683449 - DNA, 15 bp, Homo sapiens
acaaaaatttagctg

SEQ ID NO: 1683450 - DNA, 15 bp, Homo sapiens
caaaaatttagctgg

SEQ ID NO: 1683451 - DNA, 15 bp, Homo sapiens
aaaaatttagctggg

SEQ ID NO: 1683452 - DNA, 15 bp, Homo sapiens
aaaatttagctgggc

SEQ ID NO: 1683453 - DNA, 15 bp, Homo sapiens
aaatttagctgggcg

SEQ ID NO: 1683454 - DNA, 15 bp, Homo sapiens
aatttagctgggcgt

SEQ ID NO: 1683455 - DNA, 15 bp, Homo sapiens
atttagctgggcgtg

SEQ ID NO: 1683456 - DNA, 15 bp, Homo sapiens
tttagctgggcgtgg

SEQ ID NO: 1683457 - DNA, 15 bp, Homo sapiens
cgtggtggcaggtgt

SEQ ID NO: 1683458 - DNA, 15 bp, Homo sapiens
gtggtggcaggtgtc

SEQ ID NO: 1683459 - DNA, 15 bp, Homo sapiens
tggtggcaggtgtct

SEQ ID NO: 1683460 - DNA, 15 bp, Homo sapiens
ggtggcaggtgtctg

SEQ ID NO: 1683461 - DNA, 15 bp, Homo sapiens
gtggcaggtgtctgt

SEQ ID NO: 1683462 - DNA, 15 bp, Homo sapiens
tggcaggtgtctgta

SEQ ID NO: 1683463 - DNA, 15 bp, Homo sapiens
ggcaggtgtctgtag

SEQ ID NO: 1683464 - DNA, 15 bp, Homo sapiens
gcaggtgtctgtagt

SEQ ID NO: 1683465 - DNA, 15 bp, Homo sapiens
caggtgtctgtagtc

SEQ ID NO: 1683466 - DNA, 15 bp, Homo sapiens
aggtgtctgtagtcc

SEQ ID NO: 1683467 - DNA, 15 bp, Homo sapiens
ctgtagtcccagcaa

SEQ ID NO: 1683468 - DNA, 15 bp, Homo sapiens
tgtagtcccagcaac

SEQ ID NO: 1683469 - DNA, 15 bp, Homo sapiens
gtagtcccagcaact

SEQ ID NO: 1683470 - DNA, 15 bp, Homo sapiens
tagtcccagcaactc

SEQ ID NO: 1683471 - DNA, 15 bp, Homo sapiens
agtcccagcaactca

SEQ ID NO: 1683472 - DNA, 15 bp, Homo sapiens
gtcccagcaactcag

SEQ ID NO: 1683473 - DNA, 15 bp, Homo sapiens
tcccagcaactcagg

SEQ ID NO: 1683474 - DNA, 15 bp, Homo sapiens
cccagcaactcagga

SEQ ID NO: 1683475 - DNA, 15 bp, Homo sapiens
ccagcaactcaggag

SEQ ID NO: 1683476 - DNA, 15 bp, Homo sapiens
cagcaactcaggagg

SEQ ID NO: 1683477 - DNA, 15 bp, Homo sapiens
agcaactcaggaggc

SEQ ID NO: 1683478 - DNA, 15 bp, Homo sapiens
gcaactcaggaggct

SEQ ID NO: 1683479 - DNA, 15 bp, Homo sapiens
caactcaggaggcta

SEQ ID NO: 1683480 - DNA, 15 bp, Homo sapiens
aactcaggaggctaa

SEQ ID NO: 1683481 - DNA, 15 bp, Homo sapiens
actcaggaggctaaa

SEQ ID NO: 1683482 - DNA, 15 bp, Homo sapiens
ctcaggaggctaaag

SEQ ID NO: 1683483 - DNA, 15 bp, Homo sapiens
tcaggaggctaaagc

SEQ ID NO: 1683484 - DNA, 15 bp, Homo sapiens
caggaggctaaagca

SEQ ID NO: 1683485 - DNA, 15 bp, Homo sapiens
aggaggctaaagcag

SEQ ID NO: 1683486 - DNA, 15 bp, Homo sapiens
ggaggctaaagcagg

SEQ ID NO: 1683487 - DNA, 15 bp, Homo sapiens
gaggctaaagcagga

SEQ ID NO: 1683488 - DNA, 15 bp, Homo sapiens
aggctaaagcaggag

SEQ ID NO: 1683489 - DNA, 15 bp, Homo sapiens
ggctaaagcaggaga

SEQ ID NO: 1683490 - DNA, 15 bp, Homo sapiens
gctaaagcaggagaa

SEQ ID NO: 1683491 - DNA, 15 bp, Homo sapiens
ctaaagcaggagaat

SEQ ID NO: 1683492 - DNA, 15 bp, Homo sapiens
taaagcaggagaatt

SEQ ID NO: 1683493 - DNA, 15 bp, Homo sapiens
aaagcaggagaattg

SEQ ID NO: 1683494 - DNA, 15 bp, Homo sapiens
aagcaggagaattgc

SEQ ID NO: 1683495 - DNA, 15 bp, Homo sapiens
agcaggagaattgct

SEQ ID NO: 1683496 - DNA, 15 bp, Homo sapiens
acctgggagatggaa

SEQ ID NO: 1683497 - DNA, 15 bp, Homo sapiens
cctgggagatggaag

SEQ ID NO: 1683498 - DNA, 15 bp, Homo sapiens
ctgggagatggaagt

SEQ ID NO: 1683499 - DNA, 15 bp, Homo sapiens
tgggagatggaagtt

SEQ ID NO: 1683500 - DNA, 15 bp, Homo sapiens
gggagatggaagttg

SEQ ID NO: 1683501 - DNA, 15 bp, Homo sapiens
ggagatggaagttgc

SEQ ID NO: 1683502 - DNA, 15 bp, Homo sapiens
gagatggaagttgca

SEQ ID NO: 1683503 - DNA, 15 bp, Homo sapiens
agatggaagttgcag

SEQ ID NO: 1683504 - DNA, 15 bp, Homo sapiens
gatggaagttgcagt

SEQ ID NO: 1683505 - DNA, 15 bp, Homo sapiens
atggaagttgcagtg

SEQ ID NO: 1683506 - DNA, 15 bp, Homo sapiens
tggaagttgcagtga

SEQ ID NO: 1683507 - DNA, 15 bp, Homo sapiens
ggaagttgcagtgag

SEQ ID NO: 1683508 - DNA, 15 bp, Homo sapiens
agttgcagtgagccc

SEQ ID NO: 1683509 - DNA, 15 bp, Homo sapiens
agtgagcccagatca

SEQ ID NO: 1683510 - DNA, 15 bp, Homo sapiens
gtgagcccagatcac

SEQ ID NO: 1683511 - DNA, 15 bp, Homo sapiens
tgagcccagatcaca

SEQ ID NO: 1683512 - DNA, 15 bp, Homo sapiens
gagcccagatcacat

SEQ ID NO: 1683513 - DNA, 15 bp, Homo sapiens
agcccagatcacatc

SEQ ID NO: 1683514 - DNA, 15 bp, Homo sapiens
gcccagatcacatca

SEQ ID NO: 1683515 - DNA, 15 bp, Homo sapiens
cccagatcacatcac

SEQ ID NO: 1683516 - DNA, 15 bp, Homo sapiens
ccagatcacatcact

SEQ ID NO: 1683517 - DNA, 15 bp, Homo sapiens
cagatcacatcactg

SEQ ID NO: 1683518 - DNA, 15 bp, Homo sapiens
agatcacatcactgc

SEQ ID NO: 1683519 - DNA, 15 bp, Homo sapiens
gatcacatcactgca

SEQ ID NO: 1683520 - DNA, 15 bp, Homo sapiens
atcacatcactgcac

SEQ ID NO: 1683521 - DNA, 15 bp, Homo sapiens
tcacatcactgcact

SEQ ID NO: 1683522 - DNA, 15 bp, Homo sapiens
cacatcactgcactc

SEQ ID NO: 1683523 - DNA, 15 bp, Homo sapiens
acatcactgcactcc

SEQ ID NO: 1683524 - DNA, 15 bp, Homo sapiens
ctgggcgacaagagt

SEQ ID NO: 1683525 - DNA, 15 bp, Homo sapiens
tgggcgacaagagtg

SEQ ID NO: 1683526 - DNA, 15 bp, Homo sapiens
gggcgacaagagtga

SEQ ID NO: 1683527 - DNA, 15 bp, Homo sapiens
ggcgacaagagtgaa

SEQ ID NO: 1683528 - DNA, 15 bp, Homo sapiens
gcgacaagagtgaaa

SEQ ID NO: 1683529 - DNA, 15 bp, Homo sapiens
cgacaagagtgaaac

SEQ ID NO: 1683530 - DNA, 15 bp, Homo sapiens
gacaagagtgaaact

SEQ ID NO: 1683531 - DNA, 15 bp, Homo sapiens
caagagtgaaactct

SEQ ID NO: 1683532 - DNA, 15 bp, Homo sapiens
aagagtgaaactctg

SEQ ID NO: 1683533 - DNA, 15 bp, Homo sapiens
gtgaaactctgtctt

SEQ ID NO: 1683534 - DNA, 15 bp, Homo sapiens
tgaaactctgtcttt

SEQ ID NO: 1683535 - DNA, 15 bp, Homo sapiens
gaaactctgtcttta

SEQ ID NO: 1683536 - DNA, 15 bp, Homo sapiens
aaactctgtctttaa

SEQ ID NO: 1683537 - DNA, 15 bp, Homo sapiens
aactctgtctttaaa

SEQ ID NO: 1683538 - DNA, 15 bp, Homo sapiens
actctgtctttaaaa

SEQ ID NO: 1683539 - DNA, 15 bp, Homo sapiens
ctctgtctttaaaaa

SEQ ID NO: 1683540 - DNA, 15 bp, Homo sapiens
tctgtctttaaaaaa

SEQ ID NO: 1683541 - DNA, 15 bp, Homo sapiens
aaaaaaaaaattatc

SEQ ID NO: 1683542 - DNA, 15 bp, Homo sapiens
aaaaaaaaattatca

SEQ ID NO: 1683543 - DNA, 15 bp, Homo sapiens
aaaaaaaattatcaa

SEQ ID NO: 1683544 - DNA, 15 bp, Homo sapiens
aaaaaaattatcaac

SEQ ID NO: 1683545 - DNA, 15 bp, Homo sapiens
aaaaaattatcaact

SEQ ID NO: 1683546 - DNA, 15 bp, Homo sapiens
aaaaattatcaactg

SEQ ID NO: 1683547 - DNA, 15 bp, Homo sapiens
aaaattatcaactgg

SEQ ID NO: 1683548 - DNA, 15 bp, Homo sapiens
aaattatcaactggg

SEQ ID NO: 1683549 - DNA, 15 bp, Homo sapiens
aattatcaactgggt

SEQ ID NO: 1683550 - DNA, 15 bp, Homo sapiens
attatcaactgggta

SEQ ID NO: 1683551 - DNA, 15 bp, Homo sapiens
ttatcaactgggtac

SEQ ID NO: 1683552 - DNA, 15 bp, Homo sapiens
tatcaactgggtaca

SEQ ID NO: 1683553 - DNA, 15 bp, Homo sapiens
atcaactgggtacag

SEQ ID NO: 1683554 - DNA, 15 bp, Homo sapiens
tcaactgggtacagt

SEQ ID NO: 1683555 - DNA, 15 bp, Homo sapiens
caactgggtacagtg

SEQ ID NO: 1683556 - DNA, 15 bp, Homo sapiens
aactgggtacagtgg

SEQ ID NO: 1683557 - DNA, 15 bp, Homo sapiens
actgggtacagtggg

SEQ ID NO: 1683558 - DNA, 15 bp, Homo sapiens
ctgggtacagtgggt

SEQ ID NO: 1683559 - DNA, 15 bp, Homo sapiens
tgggtacagtgggtc

SEQ ID NO: 1683560 - DNA, 15 bp, Homo sapiens
gggtacagtgggtca

SEQ ID NO: 1683561 - DNA, 15 bp, Homo sapiens
ggtacagtgggtcat

SEQ ID NO: 1683562 - DNA, 15 bp, Homo sapiens
gtacagtgggtcatg

SEQ ID NO: 1683563 - DNA, 15 bp, Homo sapiens
tacagtgggtcatgc

SEQ ID NO: 1683564 - DNA, 15 bp, Homo sapiens
acagtgggtcatgcc

SEQ ID NO: 1683565 - DNA, 15 bp, Homo sapiens
cagtgggtcatgcct

SEQ ID NO: 1683566 - DNA, 15 bp, Homo sapiens
agtgggtcatgcctg

SEQ ID NO: 1683567 - DNA, 15 bp, Homo sapiens
gtgggtcatgcctgt

SEQ ID NO: 1683568 - DNA, 15 bp, Homo sapiens
tgggtcatgcctgta

SEQ ID NO: 1683569 - DNA, 15 bp, Homo sapiens
gggtcatgcctgtaa

SEQ ID NO: 1683570 - DNA, 15 bp, Homo sapiens
ggtcatgcctgtaat

SEQ ID NO: 1683571 - DNA, 15 bp, Homo sapiens
gtcatgcctgtaatc

SEQ ID NO: 1683572 - DNA, 15 bp, Homo sapiens
aatcccaacactttc

SEQ ID NO: 1683573 - DNA, 15 bp, Homo sapiens
atcccaacactttcg

SEQ ID NO: 1683574 - DNA, 15 bp, Homo sapiens
tcccaacactttcgg

SEQ ID NO: 1683575 - DNA, 15 bp, Homo sapiens
cccaacactttcgga

SEQ ID NO: 1683576 - DNA, 15 bp, Homo sapiens
ccaacactttcggag

SEQ ID NO: 1683577 - DNA, 15 bp, Homo sapiens
caacactttcggagg

SEQ ID NO: 1683578 - DNA, 15 bp, Homo sapiens
aacactttcggaggc

SEQ ID NO: 1683579 - DNA, 15 bp, Homo sapiens
acactttcggaggcc

SEQ ID NO: 1683580 - DNA, 15 bp, Homo sapiens
cactttcggaggcca

SEQ ID NO: 1683581 - DNA, 15 bp, Homo sapiens
actttcggaggccaa

SEQ ID NO: 1683582 - DNA, 15 bp, Homo sapiens
ctttcggaggccaag

SEQ ID NO: 1683583 - DNA, 15 bp, Homo sapiens
tttcggaggccaagg

SEQ ID NO: 1683584 - DNA, 15 bp, Homo sapiens
ttcggaggccaaggt

SEQ ID NO: 1683585 - DNA, 15 bp, Homo sapiens
tcggaggccaaggtg

SEQ ID NO: 1683586 - DNA, 15 bp, Homo sapiens
cggaggccaaggtgg

SEQ ID NO: 1683587 - DNA, 15 bp, Homo sapiens
aaggtgggaggatcg

SEQ ID NO: 1683588 - DNA, 15 bp, Homo sapiens
cttgaacccaggagt

SEQ ID NO: 1683589 - DNA, 15 bp, Homo sapiens
acccaggagtttgaa

SEQ ID NO: 1683590 - DNA, 15 bp, Homo sapiens
cccaggagtttgaaa

SEQ ID NO: 1683591 - DNA, 15 bp, Homo sapiens
ccaggagtttgaaac

SEQ ID NO: 1683592 - DNA, 15 bp, Homo sapiens
caggagtttgaaacc

SEQ ID NO: 1683593 - DNA, 15 bp, Homo sapiens
aggagtttgaaacca

SEQ ID NO: 1683594 - DNA, 15 bp, Homo sapiens
ggagtttgaaaccag

SEQ ID NO: 1683595 - DNA, 15 bp, Homo sapiens
gagtttgaaaccagc

SEQ ID NO: 1683596 - DNA, 15 bp, Homo sapiens
agtttgaaaccagcc

SEQ ID NO: 1683597 - DNA, 15 bp, Homo sapiens
gtttgaaaccagcct

SEQ ID NO: 1683598 - DNA, 15 bp, Homo sapiens
tttgaaaccagcctg

SEQ ID NO: 1683599 - DNA, 15 bp, Homo sapiens
ttgaaaccagcctgg

SEQ ID NO: 1683600 - DNA, 15 bp, Homo sapiens
tgaaaccagcctggg

SEQ ID NO: 1683601 - DNA, 15 bp, Homo sapiens
gaaaccagcctgggc

SEQ ID NO: 1683602 - DNA, 15 bp, Homo sapiens
aaaccagcctgggct

SEQ ID NO: 1683603 - DNA, 15 bp, Homo sapiens
aaccagcctgggctg

SEQ ID NO: 1683604 - DNA, 15 bp, Homo sapiens
accagcctgggctgg

SEQ ID NO: 1683605 - DNA, 15 bp, Homo sapiens
ccagcctgggctggg

SEQ ID NO: 1683606 - DNA, 15 bp, Homo sapiens
cagcctgggctgggc

SEQ ID NO: 1683607 - DNA, 15 bp, Homo sapiens
agcctgggctgggca

SEQ ID NO: 1683608 - DNA, 15 bp, Homo sapiens
gcctgggctgggcaa

SEQ ID NO: 1683609 - DNA, 15 bp, Homo sapiens
cctgggctgggcaac

SEQ ID NO: 1683610 - DNA, 15 bp, Homo sapiens
ctgggctgggcaaca

SEQ ID NO: 1683611 - DNA, 15 bp, Homo sapiens
tgggctgggcaacat

SEQ ID NO: 1683612 - DNA, 15 bp, Homo sapiens
gggctgggcaacata

SEQ ID NO: 1683613 - DNA, 15 bp, Homo sapiens
ggctgggcaacatag

SEQ ID NO: 1683614 - DNA, 15 bp, Homo sapiens
gctgggcaacatagc

SEQ ID NO: 1683615 - DNA, 15 bp, Homo sapiens
acatagcaagacccc

SEQ ID NO: 1683616 - DNA, 15 bp, Homo sapiens
catagcaagacccca

SEQ ID NO: 1683617 - DNA, 15 bp, Homo sapiens
atagcaagaccccat

SEQ ID NO: 1683618 - DNA, 15 bp, Homo sapiens
tagcaagaccccatc

SEQ ID NO: 1683619 - DNA, 15 bp, Homo sapiens
gcaagaccccatctt

SEQ ID NO: 1683620 - DNA, 15 bp, Homo sapiens
caagaccccatcttt

SEQ ID NO: 1683621 - DNA, 15 bp, Homo sapiens
aagaccccatcttta

SEQ ID NO: 1683622 - DNA, 15 bp, Homo sapiens
agaccccatctttac

SEQ ID NO: 1683623 - DNA, 15 bp, Homo sapiens
gaccccatctttaca

SEQ ID NO: 1683624 - DNA, 15 bp, Homo sapiens
accccatctttacaa

SEQ ID NO: 1683625 - DNA, 15 bp, Homo sapiens
ccccatctttacaaa

SEQ ID NO: 1683626 - DNA, 15 bp, Homo sapiens
cccatctttacaaaa

SEQ ID NO: 1683627 - DNA, 15 bp, Homo sapiens
ccatctttacaaaac

SEQ ID NO: 1683628 - DNA, 15 bp, Homo sapiens
catctttacaaaaca

SEQ ID NO: 1683629 - DNA, 15 bp, Homo sapiens
atctttacaaaacat

SEQ ID NO: 1683630 - DNA, 15 bp, Homo sapiens
tctttacaaaacata

SEQ ID NO: 1683631 - DNA, 15 bp, Homo sapiens
ctttacaaaacataa

SEQ ID NO: 1683632 - DNA, 15 bp, Homo sapiens
tttacaaaacataaa

SEQ ID NO: 1683633 - DNA, 15 bp, Homo sapiens
ttacaaaacataaaa

SEQ ID NO: 1683634 - DNA, 15 bp, Homo sapiens
tacaaaacataaaaa

SEQ ID NO: 1683635 - DNA, 15 bp, Homo sapiens
acaaaacataaaaaa

SEQ ID NO: 1683636 - DNA, 15 bp, Homo sapiens
caaaacataaaaaaa

SEQ ID NO: 1683637 - DNA, 15 bp, Homo sapiens
aaaacataaaaaaat

SEQ ID NO: 1683638 - DNA, 15 bp, Homo sapiens
aaacataaaaaaatt

SEQ ID NO: 1683639 - DNA, 15 bp, Homo sapiens
aacataaaaaaatta

SEQ ID NO: 1683640 - DNA, 15 bp, Homo sapiens
acataaaaaaattag

SEQ ID NO: 1683641 - DNA, 15 bp, Homo sapiens
cataaaaaaattagc

SEQ ID NO: 1683642 - DNA, 15 bp, Homo sapiens
taaaaaaattagcca

SEQ ID NO: 1683643 - DNA, 15 bp, Homo sapiens
aaattagccagggca

SEQ ID NO: 1683644 - DNA, 15 bp, Homo sapiens
aattagccagggcac

SEQ ID NO: 1683645 - DNA, 15 bp, Homo sapiens
attagccagggcacg

SEQ ID NO: 1683646 - DNA, 15 bp, Homo sapiens
ttagccagggcacgt

SEQ ID NO: 1683647 - DNA, 15 bp, Homo sapiens
tagccagggcacgtg

SEQ ID NO: 1683648 - DNA, 15 bp, Homo sapiens
agccagggcacgtgc

SEQ ID NO: 1683649 - DNA, 15 bp, Homo sapiens
gccagggcacgtgcc

SEQ ID NO: 1683650 - DNA, 15 bp, Homo sapiens
ccagggcacgtgcct

SEQ ID NO: 1683651 - DNA, 15 bp, Homo sapiens
cagggcacgtgcctg

SEQ ID NO: 1683652 - DNA, 15 bp, Homo sapiens
agggcacgtgcctgt

SEQ ID NO: 1683653 - DNA, 15 bp, Homo sapiens
gggcacgtgcctgtg

SEQ ID NO: 1683654 - DNA, 15 bp, Homo sapiens
cacgtgcctgtggtc

SEQ ID NO: 1683655 - DNA, 15 bp, Homo sapiens
acgtgcctgtggtcc

SEQ ID NO: 1683656 - DNA, 15 bp, Homo sapiens
cgtgcctgtggtccc

SEQ ID NO: 1683657 - DNA, 15 bp, Homo sapiens
gtgcctgtggtccca

SEQ ID NO: 1683658 - DNA, 15 bp, Homo sapiens
tgcctgtggtcccac

SEQ ID NO: 1683659 - DNA, 15 bp, Homo sapiens
gcctgtggtcccacc

SEQ ID NO: 1683660 - DNA, 15 bp, Homo sapiens
cctgtggtcccaccg

SEQ ID NO: 1683661 - DNA, 15 bp, Homo sapiens
ctgtggtcccaccgc

SEQ ID NO: 1683662 - DNA, 15 bp, Homo sapiens
tgtggtcccaccgca

SEQ ID NO: 1683663 - DNA, 15 bp, Homo sapiens
gtggtcccaccgcac

SEQ ID NO: 1683664 - DNA, 15 bp, Homo sapiens
tggtcccaccgcact

SEQ ID NO: 1683665 - DNA, 15 bp, Homo sapiens
ggtcccaccgcactc

SEQ ID NO: 1683666 - DNA, 15 bp, Homo sapiens
gtcccaccgcactcc

SEQ ID NO: 1683667 - DNA, 15 bp, Homo sapiens
tcccaccgcactcca

SEQ ID NO: 1683668 - DNA, 15 bp, Homo sapiens
cccaccgcactccag

SEQ ID NO: 1683669 - DNA, 15 bp, Homo sapiens
gcgacagagcaagat

SEQ ID NO: 1683670 - DNA, 15 bp, Homo sapiens
cgacagagcaagatt

SEQ ID NO: 1683671 - DNA, 15 bp, Homo sapiens
gacagagcaagattc

SEQ ID NO: 1683672 - DNA, 15 bp, Homo sapiens
acagagcaagattcc

SEQ ID NO: 1683673 - DNA, 15 bp, Homo sapiens
cagagcaagattcca

SEQ ID NO: 1683674 - DNA, 15 bp, Homo sapiens
agagcaagattccat

SEQ ID NO: 1683675 - DNA, 15 bp, Homo sapiens
gagcaagattccatc

SEQ ID NO: 1683676 - DNA, 15 bp, Homo sapiens
agcaagattccatct

SEQ ID NO: 1683677 - DNA, 15 bp, Homo sapiens
gcaagattccatctt

SEQ ID NO: 1683678 - DNA, 15 bp, Homo sapiens
caagattccatctta

SEQ ID NO: 1683679 - DNA, 15 bp, Homo sapiens
aagattccatcttaa

SEQ ID NO: 1683680 - DNA, 15 bp, Homo sapiens
agattccatcttaaa

SEQ ID NO: 1683681 - DNA, 15 bp, Homo sapiens
gattccatcttaaaa

SEQ ID NO: 1683682 - DNA, 15 bp, Homo sapiens
attccatcttaaaaa

SEQ ID NO: 1683683 - DNA, 15 bp, Homo sapiens
ttccatcttaaaaaa

SEQ ID NO: 1683684 - DNA, 15 bp, Homo sapiens
ccatcttaaaaaaac

SEQ ID NO: 1683685 - DNA, 15 bp, Homo sapiens
catcttaaaaaaaca

SEQ ID NO: 1683686 - DNA, 15 bp, Homo sapiens
tcttaaaaaaacaac

SEQ ID NO: 1683687 - DNA, 15 bp, Homo sapiens
cttaaaaaaacaaca

SEQ ID NO: 1683688 - DNA, 15 bp, Homo sapiens
ttaaaaaaacaacaa

SEQ ID NO: 1683689 - DNA, 15 bp, Homo sapiens
taaaaaaacaacaaa

SEQ ID NO: 1683690 - DNA, 15 bp, Homo sapiens
aaaaaaacaacaaaa

SEQ ID NO: 1683691 - DNA, 15 bp, Homo sapiens
aaaaaacaacaaaaa

SEQ ID NO: 1683692 - DNA, 15 bp, Homo sapiens
acaacaaaaaaagac

SEQ ID NO: 1683693 - DNA, 15 bp, Homo sapiens
caacaaaaaaagact

SEQ ID NO: 1683694 - DNA, 15 bp, Homo sapiens
aacaaaaaaagactc

SEQ ID NO: 1683695 - DNA, 15 bp, Homo sapiens
acaaaaaaagactca

SEQ ID NO: 1683696 - DNA, 15 bp, Homo sapiens
caaaaaaagactcat

SEQ ID NO: 1683697 - DNA, 15 bp, Homo sapiens
aaaaaaagactcatc

SEQ ID NO: 1683698 - DNA, 15 bp, Homo sapiens
aaaaaagactcatca

SEQ ID NO: 1683699 - DNA, 15 bp, Homo sapiens
aaaaagactcatcac

SEQ ID NO: 1683700 - DNA, 15 bp, Homo sapiens
aaaagactcatcact

SEQ ID NO: 1683701 - DNA, 15 bp, Homo sapiens
aaagactcatcactt

SEQ ID NO: 1683702 - DNA, 15 bp, Homo sapiens
aagactcatcacttt

SEQ ID NO: 1683703 - DNA, 15 bp, Homo sapiens
agactcatcactttt

SEQ ID NO: 1683704 - DNA, 15 bp, Homo sapiens
gactcatcacttttg

SEQ ID NO: 1683705 - DNA, 15 bp, Homo sapiens
actcatcacttttgt

SEQ ID NO: 1683706 - DNA, 15 bp, Homo sapiens
ctcatcacttttgtg

SEQ ID NO: 1683707 - DNA, 15 bp, Homo sapiens
catcacttttgtgta

SEQ ID NO: 1683708 - DNA, 15 bp, Homo sapiens
atcacttttgtgtag

SEQ ID NO: 1683709 - DNA, 15 bp, Homo sapiens
tcacttttgtgtagc

SEQ ID NO: 1683710 - DNA, 15 bp, Homo sapiens
cacttttgtgtagca

SEQ ID NO: 1683711 - DNA, 15 bp, Homo sapiens
acttttgtgtagcac

SEQ ID NO: 1683712 - DNA, 15 bp, Homo sapiens
cttttgtgtagcacc

SEQ ID NO: 1683713 - DNA, 15 bp, Homo sapiens
ttttgtgtagcacca

SEQ ID NO: 1683714 - DNA, 15 bp, Homo sapiens
tttgtgtagcaccag

SEQ ID NO: 1683715 - DNA, 15 bp, Homo sapiens
ttgtgtagcaccagg

SEQ ID NO: 1683716 - DNA, 15 bp, Homo sapiens
tgtgtagcaccaggg

SEQ ID NO: 1683717 - DNA, 15 bp, Homo sapiens
gtgtagcaccagggt

SEQ ID NO: 1683718 - DNA, 15 bp, Homo sapiens
tgtagcaccagggtc

SEQ ID NO: 1683719 - DNA, 15 bp, Homo sapiens
gtagcaccagggtca

SEQ ID NO: 1683720 - DNA, 15 bp, Homo sapiens
tagcaccagggtcag

SEQ ID NO: 1683721 - DNA, 15 bp, Homo sapiens
agcaccagggtcagc

SEQ ID NO: 1683722 - DNA, 15 bp, Homo sapiens
gcaccagggtcagca

SEQ ID NO: 1683723 - DNA, 15 bp, Homo sapiens
caccagggtcagcaa

SEQ ID NO: 1683724 - DNA, 15 bp, Homo sapiens
accagggtcagcaaa

SEQ ID NO: 1683725 - DNA, 15 bp, Homo sapiens
ccagggtcagcaaac

SEQ ID NO: 1683726 - DNA, 15 bp, Homo sapiens
cagggtcagcaaact

SEQ ID NO: 1683727 - DNA, 15 bp, Homo sapiens
agggtcagcaaacta

SEQ ID NO: 1683728 - DNA, 15 bp, Homo sapiens
gggtcagcaaactat

SEQ ID NO: 1683729 - DNA, 15 bp, Homo sapiens
ggtcagcaaactatc

SEQ ID NO: 1683730 - DNA, 15 bp, Homo sapiens
gtcagcaaactatct

SEQ ID NO: 1683731 - DNA, 15 bp, Homo sapiens
tcagcaaactatctc

SEQ ID NO: 1683732 - DNA, 15 bp, Homo sapiens
cagcaaactatctcc

SEQ ID NO: 1683733 - DNA, 15 bp, Homo sapiens
agcaaactatctcca

SEQ ID NO: 1683734 - DNA, 15 bp, Homo sapiens
gcaaactatctccaa

SEQ ID NO: 1683735 - DNA, 15 bp, Homo sapiens
caaactatctccaaa

SEQ ID NO: 1683736 - DNA, 15 bp, Homo sapiens
aaactatctccaaag

SEQ ID NO: 1683737 - DNA, 15 bp, Homo sapiens
aactatctccaaagg

SEQ ID NO: 1683738 - DNA, 15 bp, Homo sapiens
actatctccaaaggg

SEQ ID NO: 1683739 - DNA, 15 bp, Homo sapiens
ctatctccaaagggc

SEQ ID NO: 1683740 - DNA, 15 bp, Homo sapiens
tatctccaaagggcc

SEQ ID NO: 1683741 - DNA, 15 bp, Homo sapiens
atctccaaagggcca

SEQ ID NO: 1683742 - DNA, 15 bp, Homo sapiens
tctccaaagggccaa

SEQ ID NO: 1683743 - DNA, 15 bp, Homo sapiens
ctccaaagggccaag

SEQ ID NO: 1683744 - DNA, 15 bp, Homo sapiens
tccaaagggccaagt

SEQ ID NO: 1683745 - DNA, 15 bp, Homo sapiens
ccaaagggccaagta

SEQ ID NO: 1683746 - DNA, 15 bp, Homo sapiens
caaagggccaagtag

SEQ ID NO: 1683747 - DNA, 15 bp, Homo sapiens
aaagggccaagtagt

SEQ ID NO: 1683748 - DNA, 15 bp, Homo sapiens
aagggccaagtagtc

SEQ ID NO: 1683749 - DNA, 15 bp, Homo sapiens
agggccaagtagtca

SEQ ID NO: 1683750 - DNA, 15 bp, Homo sapiens
gggccaagtagtcaa

SEQ ID NO: 1683751 - DNA, 15 bp, Homo sapiens
ggccaagtagtcaac

SEQ ID NO: 1683752 - DNA, 15 bp, Homo sapiens
gccaagtagtcaaca

SEQ ID NO: 1683753 - DNA, 15 bp, Homo sapiens
ccaagtagtcaacac

SEQ ID NO: 1683754 - DNA, 15 bp, Homo sapiens
caagtagtcaacaca

SEQ ID NO: 1683755 - DNA, 15 bp, Homo sapiens
aagtagtcaacacat

SEQ ID NO: 1683756 - DNA, 15 bp, Homo sapiens
agtagtcaacacata

SEQ ID NO: 1683757 - DNA, 15 bp, Homo sapiens
gtagtcaacacataa

SEQ ID NO: 1683758 - DNA, 15 bp, Homo sapiens
tagtcaacacataat

SEQ ID NO: 1683759 - DNA, 15 bp, Homo sapiens
agtcaacacataata

SEQ ID NO: 1683760 - DNA, 15 bp, Homo sapiens
gtcaacacataataa

SEQ ID NO: 1683761 - DNA, 15 bp, Homo sapiens
tcaacacataataat

SEQ ID NO: 1683762 - DNA, 15 bp, Homo sapiens
caacacataataatt

SEQ ID NO: 1683763 - DNA, 15 bp, Homo sapiens
aacacataataattt

SEQ ID NO: 1683764 - DNA, 15 bp, Homo sapiens
acacataataatttg

SEQ ID NO: 1683765 - DNA, 15 bp, Homo sapiens
cacataataatttgc

SEQ ID NO: 1683766 - DNA, 15 bp, Homo sapiens
acataataatttgca

SEQ ID NO: 1683767 - DNA, 15 bp, Homo sapiens
cataataatttgcag

SEQ ID NO: 1683768 - DNA, 15 bp, Homo sapiens
ataataatttgcagg

SEQ ID NO: 1683769 - DNA, 15 bp, Homo sapiens
taataatttgcaggc

SEQ ID NO: 1683770 - DNA, 15 bp, Homo sapiens
aataatttgcaggcc

SEQ ID NO: 1683771 - DNA, 15 bp, Homo sapiens
ataatttgcaggcca

SEQ ID NO: 1683772 - DNA, 15 bp, Homo sapiens
taatttgcaggccag

SEQ ID NO: 1683773 - DNA, 15 bp, Homo sapiens
aatttgcaggccagg

SEQ ID NO: 1683774 - DNA, 15 bp, Homo sapiens
atttgcaggccaggc

SEQ ID NO: 1683775 - DNA, 15 bp, Homo sapiens
tttgcaggccaggca

SEQ ID NO: 1683776 - DNA, 15 bp, Homo sapiens
ttgcaggccaggcac

SEQ ID NO: 1683777 - DNA, 15 bp, Homo sapiens
tgcaggccaggcacg

SEQ ID NO: 1683778 - DNA, 15 bp, Homo sapiens
gcaggccaggcacgg

SEQ ID NO: 1683779 - DNA, 15 bp, Homo sapiens
caggccaggcacggt

SEQ ID NO: 1683780 - DNA, 15 bp, Homo sapiens
aggccaggcacggtg

SEQ ID NO: 1683781 - DNA, 15 bp, Homo sapiens
tggctcacgcctgtg

SEQ ID NO: 1683782 - DNA, 15 bp, Homo sapiens
ggctcacgcctgtga

SEQ ID NO: 1683783 - DNA, 15 bp, Homo sapiens
gctcacgcctgtgat

SEQ ID NO: 1683784 - DNA, 15 bp, Homo sapiens
ctcacgcctgtgatc

SEQ ID NO: 1683785 - DNA, 15 bp, Homo sapiens
tcacgcctgtgatcc

SEQ ID NO: 1683786 - DNA, 15 bp, Homo sapiens
cacgcctgtgatccc

SEQ ID NO: 1683787 - DNA, 15 bp, Homo sapiens
acgcctgtgatccca

SEQ ID NO: 1683788 - DNA, 15 bp, Homo sapiens
cgcctgtgatcccaa

SEQ ID NO: 1683789 - DNA, 15 bp, Homo sapiens
gcctgtgatcccaac

SEQ ID NO: 1683790 - DNA, 15 bp, Homo sapiens
cctgtgatcccaaca

SEQ ID NO: 1683791 - DNA, 15 bp, Homo sapiens
ctgtgatcccaacat

SEQ ID NO: 1683792 - DNA, 15 bp, Homo sapiens
tgtgatcccaacatt

SEQ ID NO: 1683793 - DNA, 15 bp, Homo sapiens
gtgatcccaacattt

SEQ ID NO: 1683794 - DNA, 15 bp, Homo sapiens
tgatcccaacatttt

SEQ ID NO: 1683795 - DNA, 15 bp, Homo sapiens
gatcccaacattttg

SEQ ID NO: 1683796 - DNA, 15 bp, Homo sapiens
atcccaacattttgg

SEQ ID NO: 1683797 - DNA, 15 bp, Homo sapiens
tcccaacattttgga

SEQ ID NO: 1683798 - DNA, 15 bp, Homo sapiens
cccaacattttggat

SEQ ID NO: 1683799 - DNA, 15 bp, Homo sapiens
ccaacattttggata

SEQ ID NO: 1683800 - DNA, 15 bp, Homo sapiens
caacattttggataa

SEQ ID NO: 1683801 - DNA, 15 bp, Homo sapiens
aacattttggataac

SEQ ID NO: 1683802 - DNA, 15 bp, Homo sapiens
acattttggataaca

SEQ ID NO: 1683803 - DNA, 15 bp, Homo sapiens
cattttggataacat

SEQ ID NO: 1683804 - DNA, 15 bp, Homo sapiens
attttggataacata

SEQ ID NO: 1683805 - DNA, 15 bp, Homo sapiens
ttttggataacatag

SEQ ID NO: 1683806 - DNA, 15 bp, Homo sapiens
tttggataacatagt

SEQ ID NO: 1683807 - DNA, 15 bp, Homo sapiens
ttggataacatagtg

SEQ ID NO: 1683808 - DNA, 15 bp, Homo sapiens
tggataacatagtga

SEQ ID NO: 1683809 - DNA, 15 bp, Homo sapiens
ggataacatagtgag

SEQ ID NO: 1683810 - DNA, 15 bp, Homo sapiens
gataacatagtgaga

SEQ ID NO: 1683811 - DNA, 15 bp, Homo sapiens
ataacatagtgagac

SEQ ID NO: 1683812 - DNA, 15 bp, Homo sapiens
taacatagtgagacc

SEQ ID NO: 1683813 - DNA, 15 bp, Homo sapiens
acatagtgagaccca

SEQ ID NO: 1683814 - DNA, 15 bp, Homo sapiens
catagtgagacccat

SEQ ID NO: 1683815 - DNA, 15 bp, Homo sapiens
atagtgagacccatt

SEQ ID NO: 1683816 - DNA, 15 bp, Homo sapiens
tagtgagacccattc

SEQ ID NO: 1683817 - DNA, 15 bp, Homo sapiens
agtgagacccattct

SEQ ID NO: 1683818 - DNA, 15 bp, Homo sapiens
gtgagacccattctc

SEQ ID NO: 1683819 - DNA, 15 bp, Homo sapiens
tgagacccattctct

SEQ ID NO: 1683820 - DNA, 15 bp, Homo sapiens
gagacccattctcta

SEQ ID NO: 1683821 - DNA, 15 bp, Homo sapiens
agacccattctctac

SEQ ID NO: 1683822 - DNA, 15 bp, Homo sapiens
gacccattctctaca

SEQ ID NO: 1683823 - DNA, 15 bp, Homo sapiens
acccattctctacaa

SEQ ID NO: 1683824 - DNA, 15 bp, Homo sapiens
cccattctctacaag

SEQ ID NO: 1683825 - DNA, 15 bp, Homo sapiens
ccattctctacaagt

SEQ ID NO: 1683826 - DNA, 15 bp, Homo sapiens
cattctctacaagtg

SEQ ID NO: 1683827 - DNA, 15 bp, Homo sapiens
attctctacaagtgt

SEQ ID NO: 1683828 - DNA, 15 bp, Homo sapiens
ttctctacaagtgtt

SEQ ID NO: 1683829 - DNA, 15 bp, Homo sapiens
tctctacaagtgttt

SEQ ID NO: 1683830 - DNA, 15 bp, Homo sapiens
ctctacaagtgtttt

SEQ ID NO: 1683831 - DNA, 15 bp, Homo sapiens
tctacaagtgttttt

SEQ ID NO: 1683832 - DNA, 15 bp, Homo sapiens
ctacaagtgtttttt

SEQ ID NO: 1683833 - DNA, 15 bp, Homo sapiens
tacaagtgttttttt

SEQ ID NO: 1683834 - DNA, 15 bp, Homo sapiens
acaagtgtttttttg

SEQ ID NO: 1683835 - DNA, 15 bp, Homo sapiens
caagtgtttttttgt

SEQ ID NO: 1683836 - DNA, 15 bp, Homo sapiens
aagtgtttttttgtt

SEQ ID NO: 1683837 - DNA, 15 bp, Homo sapiens
agtgtttttttgttt

SEQ ID NO: 1683838 - DNA, 15 bp, Homo sapiens
gtgtttttttgtttt

SEQ ID NO: 1683839 - DNA, 15 bp, Homo sapiens
gtttttttgtttttg

SEQ ID NO: 1683840 - DNA, 15 bp, Homo sapiens
tgtttttgtttttta

SEQ ID NO: 1683841 - DNA, 15 bp, Homo sapiens
gtttttgttttttaa

SEQ ID NO: 1683842 - DNA, 15 bp, Homo sapiens
tttttgttttttaat

SEQ ID NO: 1683843 - DNA, 15 bp, Homo sapiens
ttttgttttttaatt

SEQ ID NO: 1683844 - DNA, 15 bp, Homo sapiens
tttgttttttaatta

SEQ ID NO: 1683845 - DNA, 15 bp, Homo sapiens
ttgttttttaattag

SEQ ID NO: 1683846 - DNA, 15 bp, Homo sapiens
tgttttttaattagc

SEQ ID NO: 1683847 - DNA, 15 bp, Homo sapiens
gttttttaattagcc

SEQ ID NO: 1683848 - DNA, 15 bp, Homo sapiens
ttttttaattagcca

SEQ ID NO: 1683849 - DNA, 15 bp, Homo sapiens
tttttaattagccag

SEQ ID NO: 1683850 - DNA, 15 bp, Homo sapiens
ttttaattagccagg

SEQ ID NO: 1683851 - DNA, 15 bp, Homo sapiens
tttaattagccaggg

SEQ ID NO: 1683852 - DNA, 15 bp, Homo sapiens
ttaattagccagggg

SEQ ID NO: 1683853 - DNA, 15 bp, Homo sapiens
taattagccaggggt

SEQ ID NO: 1683854 - DNA, 15 bp, Homo sapiens
aattagccaggggtg

SEQ ID NO: 1683855 - DNA, 15 bp, Homo sapiens
attagccaggggtgg

SEQ ID NO: 1683856 - DNA, 15 bp, Homo sapiens
ttagccaggggtggt

SEQ ID NO: 1683857 - DNA, 15 bp, Homo sapiens
tagccaggggtggtg

SEQ ID NO: 1683858 - DNA, 15 bp, Homo sapiens
agccaggggtggtgg

SEQ ID NO: 1683859 - DNA, 15 bp, Homo sapiens
gccaggggtggtggc

SEQ ID NO: 1683860 - DNA, 15 bp, Homo sapiens
ccaggggtggtggca

SEQ ID NO: 1683861 - DNA, 15 bp, Homo sapiens
caggggtggtggcac

SEQ ID NO: 1683862 - DNA, 15 bp, Homo sapiens
aggggtggtggcaca

SEQ ID NO: 1683863 - DNA, 15 bp, Homo sapiens
ggggtggtggcacac

SEQ ID NO: 1683864 - DNA, 15 bp, Homo sapiens
gggtggtggcacaca

SEQ ID NO: 1683865 - DNA, 15 bp, Homo sapiens
ggtggtggcacacac

SEQ ID NO: 1683866 - DNA, 15 bp, Homo sapiens
cacacctgtagccct

SEQ ID NO: 1683867 - DNA, 15 bp, Homo sapiens
acacctgtagcccta

SEQ ID NO: 1683868 - DNA, 15 bp, Homo sapiens
cacctgtagccctag

SEQ ID NO: 1683869 - DNA, 15 bp, Homo sapiens
acctgtagccctagg

SEQ ID NO: 1683870 - DNA, 15 bp, Homo sapiens
cctgtagccctaggg

SEQ ID NO: 1683871 - DNA, 15 bp, Homo sapiens
ctgtagccctaggga

SEQ ID NO: 1683872 - DNA, 15 bp, Homo sapiens
tgtagccctagggac

SEQ ID NO: 1683873 - DNA, 15 bp, Homo sapiens
gtagccctagggact

SEQ ID NO: 1683874 - DNA, 15 bp, Homo sapiens
tagccctagggacta

SEQ ID NO: 1683875 - DNA, 15 bp, Homo sapiens
agccctagggactag

SEQ ID NO: 1683876 - DNA, 15 bp, Homo sapiens
gccctagggactagg

SEQ ID NO: 1683877 - DNA, 15 bp, Homo sapiens
ccctagggactaggg

SEQ ID NO: 1683878 - DNA, 15 bp, Homo sapiens
cctagggactaggga

SEQ ID NO: 1683879 - DNA, 15 bp, Homo sapiens
ctagggactagggag

SEQ ID NO: 1683880 - DNA, 15 bp, Homo sapiens
tagggactagggagg

SEQ ID NO: 1683881 - DNA, 15 bp, Homo sapiens
agggactagggaggc

SEQ ID NO: 1683882 - DNA, 15 bp, Homo sapiens
gggactagggaggct

SEQ ID NO: 1683883 - DNA, 15 bp, Homo sapiens
ggactagggaggctg

SEQ ID NO: 1683884 - DNA, 15 bp, Homo sapiens
gactagggaggctgg

SEQ ID NO: 1683885 - DNA, 15 bp, Homo sapiens
actagggaggctggg

SEQ ID NO: 1683886 - DNA, 15 bp, Homo sapiens
ctagggaggctgggg

SEQ ID NO: 1683887 - DNA, 15 bp, Homo sapiens
tagggaggctggggc

SEQ ID NO: 1683888 - DNA, 15 bp, Homo sapiens
agggaggctggggca

SEQ ID NO: 1683889 - DNA, 15 bp, Homo sapiens
gggaggctggggcag

SEQ ID NO: 1683890 - DNA, 15 bp, Homo sapiens
ggaggctggggcagg

SEQ ID NO: 1683891 - DNA, 15 bp, Homo sapiens
gaggctggggcagga

SEQ ID NO: 1683892 - DNA, 15 bp, Homo sapiens
aggctggggcaggag

SEQ ID NO: 1683893 - DNA, 15 bp, Homo sapiens
ggctggggcaggaga

SEQ ID NO: 1683894 - DNA, 15 bp, Homo sapiens
gctggggcaggagaa

SEQ ID NO: 1683895 - DNA, 15 bp, Homo sapiens
ctggggcaggagaat

SEQ ID NO: 1683896 - DNA, 15 bp, Homo sapiens
tggggcaggagaatt

SEQ ID NO: 1683897 - DNA, 15 bp, Homo sapiens
ggggcaggagaattg

SEQ ID NO: 1683898 - DNA, 15 bp, Homo sapiens
gggcaggagaattgc

SEQ ID NO: 1683899 - DNA, 15 bp, Homo sapiens
caggagaattgcttc

SEQ ID NO: 1683900 - DNA, 15 bp, Homo sapiens
aggagaattgcttca

SEQ ID NO: 1683901 - DNA, 15 bp, Homo sapiens
ggagaattgcttcag

SEQ ID NO: 1683902 - DNA, 15 bp, Homo sapiens
gagaattgcttcaga

SEQ ID NO: 1683903 - DNA, 15 bp, Homo sapiens
agaattgcttcagac

SEQ ID NO: 1683904 - DNA, 15 bp, Homo sapiens
gaattgcttcagacc

SEQ ID NO: 1683905 - DNA, 15 bp, Homo sapiens
aattgcttcagacca

SEQ ID NO: 1683906 - DNA, 15 bp, Homo sapiens
attgcttcagaccag

SEQ ID NO: 1683907 - DNA, 15 bp, Homo sapiens
ttgcttcagaccagg

SEQ ID NO: 1683908 - DNA, 15 bp, Homo sapiens
tgcttcagaccagga

SEQ ID NO: 1683909 - DNA, 15 bp, Homo sapiens
gcttcagaccaggag

SEQ ID NO: 1683910 - DNA, 15 bp, Homo sapiens
cttcagaccaggagt

SEQ ID NO: 1683911 - DNA, 15 bp, Homo sapiens
ttcagaccaggagtt

SEQ ID NO: 1683912 - DNA, 15 bp, Homo sapiens
tcagaccaggagttt

SEQ ID NO: 1683913 - DNA, 15 bp, Homo sapiens
cagaccaggagtttg

SEQ ID NO: 1683914 - DNA, 15 bp, Homo sapiens
agaccaggagtttga

SEQ ID NO: 1683915 - DNA, 15 bp, Homo sapiens
gaccaggagtttgag

SEQ ID NO: 1683916 - DNA, 15 bp, Homo sapiens
accaggagtttgaga

SEQ ID NO: 1683917 - DNA, 15 bp, Homo sapiens
aggagtttgagactg

SEQ ID NO: 1683918 - DNA, 15 bp, Homo sapiens
ggagtttgagactgc

SEQ ID NO: 1683919 - DNA, 15 bp, Homo sapiens
gagtttgagactgca

SEQ ID NO: 1683920 - DNA, 15 bp, Homo sapiens
agtttgagactgcag

SEQ ID NO: 1683921 - DNA, 15 bp, Homo sapiens
gtttgagactgcagt

SEQ ID NO: 1683922 - DNA, 15 bp, Homo sapiens
tttgagactgcagtg

SEQ ID NO: 1683923 - DNA, 15 bp, Homo sapiens
gactgcagtgactta

SEQ ID NO: 1683924 - DNA, 15 bp, Homo sapiens
actgcagtgacttat

SEQ ID NO: 1683925 - DNA, 15 bp, Homo sapiens
ctgcagtgacttatg

SEQ ID NO: 1683926 - DNA, 15 bp, Homo sapiens
tgcagtgacttatga

SEQ ID NO: 1683927 - DNA, 15 bp, Homo sapiens
gcagtgacttatgac

SEQ ID NO: 1683928 - DNA, 15 bp, Homo sapiens
cagtgacttatgaca

SEQ ID NO: 1683929 - DNA, 15 bp, Homo sapiens
agtgacttatgacag

SEQ ID NO: 1683930 - DNA, 15 bp, Homo sapiens
gtgacttatgacagc

SEQ ID NO: 1683931 - DNA, 15 bp, Homo sapiens
tgacttatgacagca

SEQ ID NO: 1683932 - DNA, 15 bp, Homo sapiens
gacttatgacagcat

SEQ ID NO: 1683933 - DNA, 15 bp, Homo sapiens
acttatgacagcatc

SEQ ID NO: 1683934 - DNA, 15 bp, Homo sapiens
cttatgacagcatca

SEQ ID NO: 1683935 - DNA, 15 bp, Homo sapiens
ttatgacagcatcac

SEQ ID NO: 1683936 - DNA, 15 bp, Homo sapiens
tatgacagcatcact

SEQ ID NO: 1683937 - DNA, 15 bp, Homo sapiens
atgacagcatcactg

SEQ ID NO: 1683938 - DNA, 15 bp, Homo sapiens
tgacagcatcactgc

SEQ ID NO: 1683939 - DNA, 15 bp, Homo sapiens
gacagcatcactgca

SEQ ID NO: 1683940 - DNA, 15 bp, Homo sapiens
acagcatcactgcac

SEQ ID NO: 1683941 - DNA, 15 bp, Homo sapiens
cagcatcactgcact

SEQ ID NO: 1683942 - DNA, 15 bp, Homo sapiens
agcatcactgcactc

SEQ ID NO: 1683943 - DNA, 15 bp, Homo sapiens
gcatcactgcactca

SEQ ID NO: 1683944 - DNA, 15 bp, Homo sapiens
catcactgcactcaa

SEQ ID NO: 1683945 - DNA, 15 bp, Homo sapiens
atcactgcactcaag

SEQ ID NO: 1683946 - DNA, 15 bp, Homo sapiens
tcactgcactcaagc

SEQ ID NO: 1683947 - DNA, 15 bp, Homo sapiens
cactgcactcaagcc

SEQ ID NO: 1683948 - DNA, 15 bp, Homo sapiens
actgcactcaagcct

SEQ ID NO: 1683949 - DNA, 15 bp, Homo sapiens
ctgcactcaagcctg

SEQ ID NO: 1683950 - DNA, 15 bp, Homo sapiens
tgcactcaagcctgg

SEQ ID NO: 1683951 - DNA, 15 bp, Homo sapiens
gcactcaagcctggg

SEQ ID NO: 1683952 - DNA, 15 bp, Homo sapiens
cactcaagcctgggt

SEQ ID NO: 1683953 - DNA, 15 bp, Homo sapiens
actcaagcctgggtg

SEQ ID NO: 1683954 - DNA, 15 bp, Homo sapiens
ctcaagcctgggtga

SEQ ID NO: 1683955 - DNA, 15 bp, Homo sapiens
tcaagcctgggtgac

SEQ ID NO: 1683956 - DNA, 15 bp, Homo sapiens
caagcctgggtgaca

SEQ ID NO: 1683957 - DNA, 15 bp, Homo sapiens
aagcctgggtgacag

SEQ ID NO: 1683958 - DNA, 15 bp, Homo sapiens
gggtgacagagcaaa

SEQ ID NO: 1683959 - DNA, 15 bp, Homo sapiens
ggtgacagagcaaaa

SEQ ID NO: 1683960 - DNA, 15 bp, Homo sapiens
gtgacagagcaaaac

SEQ ID NO: 1683961 - DNA, 15 bp, Homo sapiens
tgacagagcaaaacc

SEQ ID NO: 1683962 - DNA, 15 bp, Homo sapiens
gacagagcaaaaccc

SEQ ID NO: 1683963 - DNA, 15 bp, Homo sapiens
acagagcaaaaccct

SEQ ID NO: 1683964 - DNA, 15 bp, Homo sapiens
cagagcaaaaccctg

SEQ ID NO: 1683965 - DNA, 15 bp, Homo sapiens
agagcaaaaccctgt

SEQ ID NO: 1683966 - DNA, 15 bp, Homo sapiens
gagcaaaaccctgtt

SEQ ID NO: 1683967 - DNA, 15 bp, Homo sapiens
agcaaaaccctgttt

SEQ ID NO: 1683968 - DNA, 15 bp, Homo sapiens
gcaaaaccctgtttc

SEQ ID NO: 1683969 - DNA, 15 bp, Homo sapiens
caaaaccctgtttct

SEQ ID NO: 1683970 - DNA, 15 bp, Homo sapiens
aaaaccctgtttctt

SEQ ID NO: 1683971 - DNA, 15 bp, Homo sapiens
aaaccctgtttcttt

SEQ ID NO: 1683972 - DNA, 15 bp, Homo sapiens
aaccctgtttctttt

SEQ ID NO: 1683973 - DNA, 15 bp, Homo sapiens
accctgtttcttttt

SEQ ID NO: 1683974 - DNA, 15 bp, Homo sapiens
ccctgtttctttttt

SEQ ID NO: 1683975 - DNA, 15 bp, Homo sapiens
ctgtttctttttttt

SEQ ID NO: 1683976 - DNA, 15 bp, Homo sapiens
tgagacggagtcttc

SEQ ID NO: 1683977 - DNA, 15 bp, Homo sapiens
gagacggagtcttcc

SEQ ID NO: 1683978 - DNA, 15 bp, Homo sapiens
agacggagtcttcct

SEQ ID NO: 1683979 - DNA, 15 bp, Homo sapiens
gacggagtcttcctc

SEQ ID NO: 1683980 - DNA, 15 bp, Homo sapiens
acggagtcttcctct

SEQ ID NO: 1683981 - DNA, 15 bp, Homo sapiens
cggagtcttcctctg

SEQ ID NO: 1683982 - DNA, 15 bp, Homo sapiens
ggagtcttcctctgt

SEQ ID NO: 1683983 - DNA, 15 bp, Homo sapiens
agtcttcctctgtcg

SEQ ID NO: 1683984 - DNA, 15 bp, Homo sapiens
gtcttcctctgtcgc

SEQ ID NO: 1683985 - DNA, 15 bp, Homo sapiens
tcttcctctgtcgcc

SEQ ID NO: 1683986 - DNA, 15 bp, Homo sapiens
cttcctctgtcgccc

SEQ ID NO: 1683987 - DNA, 15 bp, Homo sapiens
ttcctctgtcgccca

SEQ ID NO: 1683988 - DNA, 15 bp, Homo sapiens
tcctctgtcgcccag

SEQ ID NO: 1683989 - DNA, 15 bp, Homo sapiens
cctctgtcgcccagg

SEQ ID NO: 1683990 - DNA, 15 bp, Homo sapiens
ctgtcgcccaggccg

SEQ ID NO: 1683991 - DNA, 15 bp, Homo sapiens
tgtcgcccaggccgg

SEQ ID NO: 1683992 - DNA, 15 bp, Homo sapiens
gtcgcccaggccgga

SEQ ID NO: 1683993 - DNA, 15 bp, Homo sapiens
tcgcccaggccggag

SEQ ID NO: 1683994 - DNA, 15 bp, Homo sapiens
cgcccaggccggagt

SEQ ID NO: 1683995 - DNA, 15 bp, Homo sapiens
gcccaggccggagtg

SEQ ID NO: 1683996 - DNA, 15 bp, Homo sapiens
cccaggccggagtgc

SEQ ID NO: 1683997 - DNA, 15 bp, Homo sapiens
ccaggccggagtgca

SEQ ID NO: 1683998 - DNA, 15 bp, Homo sapiens
caggccggagtgcag

SEQ ID NO: 1683999 - DNA, 15 bp, Homo sapiens
aggccggagtgcagt

SEQ ID NO: 1684000 - DNA, 15 bp, Homo sapiens
ggccggagtgcagtg

SEQ ID NO: 1684001 - DNA, 15 bp, Homo sapiens
gccggagtgcagtgg

SEQ ID NO: 1684002 - DNA, 15 bp, Homo sapiens
ccggagtgcagtggc

SEQ ID NO: 1684003 - DNA, 15 bp, Homo sapiens
cggagtgcagtggca

SEQ ID NO: 1684004 - DNA, 15 bp, Homo sapiens
cttggctcactgcat

SEQ ID NO: 1684005 - DNA, 15 bp, Homo sapiens
ttggctcactgcatc

SEQ ID NO: 1684006 - DNA, 15 bp, Homo sapiens
tggctcactgcatca

SEQ ID NO: 1684007 - DNA, 15 bp, Homo sapiens
ggctcactgcatcat

SEQ ID NO: 1684008 - DNA, 15 bp, Homo sapiens
gctcactgcatcatc

SEQ ID NO: 1684009 - DNA, 15 bp, Homo sapiens
ctcactgcatcatcc

SEQ ID NO: 1684010 - DNA, 15 bp, Homo sapiens
tcactgcatcatccg

SEQ ID NO: 1684011 - DNA, 15 bp, Homo sapiens
cactgcatcatccgc

SEQ ID NO: 1684012 - DNA, 15 bp, Homo sapiens
actgcatcatccgcc

SEQ ID NO: 1684013 - DNA, 15 bp, Homo sapiens
ctgcatcatccgcct

SEQ ID NO: 1684014 - DNA, 15 bp, Homo sapiens
tgcatcatccgcctc

SEQ ID NO: 1684015 - DNA, 15 bp, Homo sapiens
gcatcatccgcctcc

SEQ ID NO: 1684016 - DNA, 15 bp, Homo sapiens
catcatccgcctccc

SEQ ID NO: 1684017 - DNA, 15 bp, Homo sapiens
atcatccgcctccca

SEQ ID NO: 1684018 - DNA, 15 bp, Homo sapiens
tcatccgcctcccag

SEQ ID NO: 1684019 - DNA, 15 bp, Homo sapiens
catccgcctcccagg

SEQ ID NO: 1684020 - DNA, 15 bp, Homo sapiens
atccgcctcccaggt

SEQ ID NO: 1684021 - DNA, 15 bp, Homo sapiens
cctcccaggttcaga

SEQ ID NO: 1684022 - DNA, 15 bp, Homo sapiens
ctcccaggttcagag

SEQ ID NO: 1684023 - DNA, 15 bp, Homo sapiens
tcccaggttcagaga

SEQ ID NO: 1684024 - DNA, 15 bp, Homo sapiens
cccaggttcagagat

SEQ ID NO: 1684025 - DNA, 15 bp, Homo sapiens
ccaggttcagagatt

SEQ ID NO: 1684026 - DNA, 15 bp, Homo sapiens
caggttcagagattc

SEQ ID NO: 1684027 - DNA, 15 bp, Homo sapiens
aggttcagagattct

SEQ ID NO: 1684028 - DNA, 15 bp, Homo sapiens
ggttcagagattctc

SEQ ID NO: 1684029 - DNA, 15 bp, Homo sapiens
gttcagagattctca

SEQ ID NO: 1684030 - DNA, 15 bp, Homo sapiens
ttcagagattctcat

SEQ ID NO: 1684031 - DNA, 15 bp, Homo sapiens
tcagagattctcatg

SEQ ID NO: 1684032 - DNA, 15 bp, Homo sapiens
cagagattctcatgc

SEQ ID NO: 1684033 - DNA, 15 bp, Homo sapiens
agagattctcatgcc

SEQ ID NO: 1684034 - DNA, 15 bp, Homo sapiens
gagattctcatgcct

SEQ ID NO: 1684035 - DNA, 15 bp, Homo sapiens
agattctcatgcctc

SEQ ID NO: 1684036 - DNA, 15 bp, Homo sapiens
atgcctcagcctcta

SEQ ID NO: 1684037 - DNA, 15 bp, Homo sapiens
tgcctcagcctctag

SEQ ID NO: 1684038 - DNA, 15 bp, Homo sapiens
gcctcagcctctaga

SEQ ID NO: 1684039 - DNA, 15 bp, Homo sapiens
cctcagcctctagag

SEQ ID NO: 1684040 - DNA, 15 bp, Homo sapiens
ctcagcctctagagc

SEQ ID NO: 1684041 - DNA, 15 bp, Homo sapiens
tcagcctctagagca

SEQ ID NO: 1684042 - DNA, 15 bp, Homo sapiens
cagcctctagagcag

SEQ ID NO: 1684043 - DNA, 15 bp, Homo sapiens
agcctctagagcagg

SEQ ID NO: 1684044 - DNA, 15 bp, Homo sapiens
gcctctagagcaggt

SEQ ID NO: 1684045 - DNA, 15 bp, Homo sapiens
cctctagagcaggtg

SEQ ID NO: 1684046 - DNA, 15 bp, Homo sapiens
ctctagagcaggtgg

SEQ ID NO: 1684047 - DNA, 15 bp, Homo sapiens
tctagagcaggtggg

SEQ ID NO: 1684048 - DNA, 15 bp, Homo sapiens
ctagagcaggtggga

SEQ ID NO: 1684049 - DNA, 15 bp, Homo sapiens
tagagcaggtgggat

SEQ ID NO: 1684050 - DNA, 15 bp, Homo sapiens
agagcaggtgggatt

SEQ ID NO: 1684051 - DNA, 15 bp, Homo sapiens
gagcaggtgggatta

SEQ ID NO: 1684052 - DNA, 15 bp, Homo sapiens
agcaggtgggattat

SEQ ID NO: 1684053 - DNA, 15 bp, Homo sapiens
gcaggtgggattata

SEQ ID NO: 1684054 - DNA, 15 bp, Homo sapiens
caggtgggattatag

SEQ ID NO: 1684055 - DNA, 15 bp, Homo sapiens
aggtgggattatagg

SEQ ID NO: 1684056 - DNA, 15 bp, Homo sapiens
ggtgggattataggt

SEQ ID NO: 1684057 - DNA, 15 bp, Homo sapiens
gtgggattataggtg

SEQ ID NO: 1684058 - DNA, 15 bp, Homo sapiens
ggattataggtgtag

SEQ ID NO: 1684059 - DNA, 15 bp, Homo sapiens
gattataggtgtagg

SEQ ID NO: 1684060 - DNA, 15 bp, Homo sapiens
attataggtgtaggc

SEQ ID NO: 1684061 - DNA, 15 bp, Homo sapiens
ttataggtgtaggcc

SEQ ID NO: 1684062 - DNA, 15 bp, Homo sapiens
tataggtgtaggcca

SEQ ID NO: 1684063 - DNA, 15 bp, Homo sapiens
ataggtgtaggccac

SEQ ID NO: 1684064 - DNA, 15 bp, Homo sapiens
taggtgtaggccacc

SEQ ID NO: 1684065 - DNA, 15 bp, Homo sapiens
aggtgtaggccacca

SEQ ID NO: 1684066 - DNA, 15 bp, Homo sapiens
ggtgtaggccaccat

SEQ ID NO: 1684067 - DNA, 15 bp, Homo sapiens
gtgtaggccaccatg

SEQ ID NO: 1684068 - DNA, 15 bp, Homo sapiens
tgtaggccaccatgc

SEQ ID NO: 1684069 - DNA, 15 bp, Homo sapiens
gtaggccaccatgcc

SEQ ID NO: 1684070 - DNA, 15 bp, Homo sapiens
taggccaccatgccc

SEQ ID NO: 1684071 - DNA, 15 bp, Homo sapiens
aggccaccatgccca

SEQ ID NO: 1684072 - DNA, 15 bp, Homo sapiens
ggccaccatgcccag

SEQ ID NO: 1684073 - DNA, 15 bp, Homo sapiens
ttagtagagatagag

SEQ ID NO: 1684074 - DNA, 15 bp, Homo sapiens
tagtagagatagagt

SEQ ID NO: 1684075 - DNA, 15 bp, Homo sapiens
agtagagatagagtt

SEQ ID NO: 1684076 - DNA, 15 bp, Homo sapiens
gtagagatagagttt

SEQ ID NO: 1684077 - DNA, 15 bp, Homo sapiens
tagagatagagtttc

SEQ ID NO: 1684078 - DNA, 15 bp, Homo sapiens
agagatagagtttca

SEQ ID NO: 1684079 - DNA, 15 bp, Homo sapiens
gagatagagtttcac

SEQ ID NO: 1684080 - DNA, 15 bp, Homo sapiens
agatagagtttcacc

SEQ ID NO: 1684081 - DNA, 15 bp, Homo sapiens
gatagagtttcacca

SEQ ID NO: 1684082 - DNA, 15 bp, Homo sapiens
atagagtttcaccat

SEQ ID NO: 1684083 - DNA, 15 bp, Homo sapiens
tagagtttcaccatg

SEQ ID NO: 1684084 - DNA, 15 bp, Homo sapiens
gccaggctggtcttc

SEQ ID NO: 1684085 - DNA, 15 bp, Homo sapiens
caggtgatcctccta

SEQ ID NO: 1684086 - DNA, 15 bp, Homo sapiens
aggtgatcctcctac

SEQ ID NO: 1684087 - DNA, 15 bp, Homo sapiens
ggtgatcctcctacc

SEQ ID NO: 1684088 - DNA, 15 bp, Homo sapiens
tcagcctcccaaatt

SEQ ID NO: 1684089 - DNA, 15 bp, Homo sapiens
cagcctcccaaattg

SEQ ID NO: 1684090 - DNA, 15 bp, Homo sapiens
agcctcccaaattgc

SEQ ID NO: 1684091 - DNA, 15 bp, Homo sapiens
gggattacaggcggg

SEQ ID NO: 1684092 - DNA, 15 bp, Homo sapiens
ggattacaggcggga

SEQ ID NO: 1684093 - DNA, 15 bp, Homo sapiens
gattacaggcgggag

SEQ ID NO: 1684094 - DNA, 15 bp, Homo sapiens
attacaggcgggaga

SEQ ID NO: 1684095 - DNA, 15 bp, Homo sapiens
ttacaggcgggagac

SEQ ID NO: 1684096 - DNA, 15 bp, Homo sapiens
tacaggcgggagaca

SEQ ID NO: 1684097 - DNA, 15 bp, Homo sapiens
acaggcgggagacac

SEQ ID NO: 1684098 - DNA, 15 bp, Homo sapiens
caggcgggagacacc

SEQ ID NO: 1684099 - DNA, 15 bp, Homo sapiens
aggcgggagacacct

SEQ ID NO: 1684100 - DNA, 15 bp, Homo sapiens
ggcgggagacacctt

SEQ ID NO: 1684101 - DNA, 15 bp, Homo sapiens
gcgggagacaccttg

SEQ ID NO: 1684102 - DNA, 15 bp, Homo sapiens
cgggagacaccttgc

SEQ ID NO: 1684103 - DNA, 15 bp, Homo sapiens
gggagacaccttgcc

SEQ ID NO: 1684104 - DNA, 15 bp, Homo sapiens
ggagacaccttgcct

SEQ ID NO: 1684105 - DNA, 15 bp, Homo sapiens
gagacaccttgcctg

SEQ ID NO: 1684106 - DNA, 15 bp, Homo sapiens
agacaccttgcctgg

SEQ ID NO: 1684107 - DNA, 15 bp, Homo sapiens
gacaccttgcctggc

SEQ ID NO: 1684108 - DNA, 15 bp, Homo sapiens
acaccttgcctggcc

SEQ ID NO: 1684109 - DNA, 15 bp, Homo sapiens
caccttgcctggcca

SEQ ID NO: 1684110 - DNA, 15 bp, Homo sapiens
accttgcctggccaa

SEQ ID NO: 1684111 - DNA, 15 bp, Homo sapiens
ccttgcctggccaaa

SEQ ID NO: 1684112 - DNA, 15 bp, Homo sapiens
cttgcctggccaaaa

SEQ ID NO: 1684113 - DNA, 15 bp, Homo sapiens
ttgcctggccaaaac

SEQ ID NO: 1684114 - DNA, 15 bp, Homo sapiens
tgcctggccaaaacc

SEQ ID NO: 1684115 - DNA, 15 bp, Homo sapiens
gcctggccaaaaccc

SEQ ID NO: 1684116 - DNA, 15 bp, Homo sapiens
cctggccaaaaccct

SEQ ID NO: 1684117 - DNA, 15 bp, Homo sapiens
ctggccaaaaccctg

SEQ ID NO: 1684118 - DNA, 15 bp, Homo sapiens
tggccaaaaccctgt

SEQ ID NO: 1684119 - DNA, 15 bp, Homo sapiens
ggccaaaaccctgtt

SEQ ID NO: 1684120 - DNA, 15 bp, Homo sapiens
gccaaaaccctgttt

SEQ ID NO: 1684121 - DNA, 15 bp, Homo sapiens
ccaaaaccctgtttc

SEQ ID NO: 1684122 - DNA, 15 bp, Homo sapiens
caaaaccctgtttcc

SEQ ID NO: 1684123 - DNA, 15 bp, Homo sapiens
aaaaccctgtttcct

SEQ ID NO: 1684124 - DNA, 15 bp, Homo sapiens
aaaccctgtttcctt

SEQ ID NO: 1684125 - DNA, 15 bp, Homo sapiens
aaccctgtttcctta

SEQ ID NO: 1684126 - DNA, 15 bp, Homo sapiens
accctgtttccttaa

SEQ ID NO: 1684127 - DNA, 15 bp, Homo sapiens
ccctgtttccttaaa

SEQ ID NO: 1684128 - DNA, 15 bp, Homo sapiens
cctgtttccttaaaa

SEQ ID NO: 1684129 - DNA, 15 bp, Homo sapiens
ctgtttccttaaaag

SEQ ID NO: 1684130 - DNA, 15 bp, Homo sapiens
tgtttccttaaaaga

SEQ ID NO: 1684131 - DNA, 15 bp, Homo sapiens
gtttccttaaaagaa

SEQ ID NO: 1684132 - DNA, 15 bp, Homo sapiens
tttccttaaaagaaa

SEQ ID NO: 1684133 - DNA, 15 bp, Homo sapiens
ttccttaaaagaaaa

SEQ ID NO: 1684134 - DNA, 15 bp, Homo sapiens
tccttaaaagaaaag

SEQ ID NO: 1684135 - DNA, 15 bp, Homo sapiens
ccttaaaagaaaaga

SEQ ID NO: 1684136 - DNA, 15 bp, Homo sapiens
cttaaaagaaaagaa

SEQ ID NO: 1684137 - DNA, 15 bp, Homo sapiens
ttaaaagaaaagaaa

SEQ ID NO: 1684138 - DNA, 15 bp, Homo sapiens
taaaagaaaagaaaa

SEQ ID NO: 1684139 - DNA, 15 bp, Homo sapiens
agaaaaaaaaaacaa

SEQ ID NO: 1684140 - DNA, 15 bp, Homo sapiens
gaaaaaaaaaacaaa

SEQ ID NO: 1684141 - DNA, 15 bp, Homo sapiens
aaaaaaacaaaaaag

SEQ ID NO: 1684142 - DNA, 15 bp, Homo sapiens
aaaaaacaaaaaaga

SEQ ID NO: 1684143 - DNA, 15 bp, Homo sapiens
aaaaacaaaaaagac

SEQ ID NO: 1684144 - DNA, 15 bp, Homo sapiens
aaaacaaaaaagaca

SEQ ID NO: 1684145 - DNA, 15 bp, Homo sapiens
aaacaaaaaagacac

SEQ ID NO: 1684146 - DNA, 15 bp, Homo sapiens
aacaaaaaagacaca

SEQ ID NO: 1684147 - DNA, 15 bp, Homo sapiens
acaaaaaagacacag

SEQ ID NO: 1684148 - DNA, 15 bp, Homo sapiens
caaaaaagacacaga

SEQ ID NO: 1684149 - DNA, 15 bp, Homo sapiens
aaaaaagacacagaa

SEQ ID NO: 1684150 - DNA, 15 bp, Homo sapiens
aaaaagacacagaaa

SEQ ID NO: 1684151 - DNA, 15 bp, Homo sapiens
aaaagacacagaaat

SEQ ID NO: 1684152 - DNA, 15 bp, Homo sapiens
aaagacacagaaatt

SEQ ID NO: 1684153 - DNA, 15 bp, Homo sapiens
aagacacagaaattt

SEQ ID NO: 1684154 - DNA, 15 bp, Homo sapiens
agacacagaaatttg

SEQ ID NO: 1684155 - DNA, 15 bp, Homo sapiens
gacacagaaatttga

SEQ ID NO: 1684156 - DNA, 15 bp, Homo sapiens
acacagaaatttgaa

SEQ ID NO: 1684157 - DNA, 15 bp, Homo sapiens
cacagaaatttgaat

SEQ ID NO: 1684158 - DNA, 15 bp, Homo sapiens
acagaaatttgaatt

SEQ ID NO: 1684159 - DNA, 15 bp, Homo sapiens
cagaaatttgaattt

SEQ ID NO: 1684160 - DNA, 15 bp, Homo sapiens
agaaatttgaatttt

SEQ ID NO: 1684161 - DNA, 15 bp, Homo sapiens
gaaatttgaattttg

SEQ ID NO: 1684162 - DNA, 15 bp, Homo sapiens
aaatttgaattttgt

SEQ ID NO: 1684163 - DNA, 15 bp, Homo sapiens
aatttgaattttgta

SEQ ID NO: 1684164 - DNA, 15 bp, Homo sapiens
atttgaattttgtat

SEQ ID NO: 1684165 - DNA, 15 bp, Homo sapiens
tttgaattttgtata

SEQ ID NO: 1684166 - DNA, 15 bp, Homo sapiens
ttgaattttgtatac

SEQ ID NO: 1684167 - DNA, 15 bp, Homo sapiens
tgaattttgtatact

SEQ ID NO: 1684168 - DNA, 15 bp, Homo sapiens
gaattttgtatactt

SEQ ID NO: 1684169 - DNA, 15 bp, Homo sapiens
aattttgtatacttt

SEQ ID NO: 1684170 - DNA, 15 bp, Homo sapiens
attttgtatactttt

SEQ ID NO: 1684171 - DNA, 15 bp, Homo sapiens
ttttgtatacttttc

SEQ ID NO: 1684172 - DNA, 15 bp, Homo sapiens
tttgtatacttttca

SEQ ID NO: 1684173 - DNA, 15 bp, Homo sapiens
ttgtatacttttcac

SEQ ID NO: 1684174 - DNA, 15 bp, Homo sapiens
tgtatacttttcaca

SEQ ID NO: 1684175 - DNA, 15 bp, Homo sapiens
gtatacttttcacaa

SEQ ID NO: 1684176 - DNA, 15 bp, Homo sapiens
tatacttttcacaag

SEQ ID NO: 1684177 - DNA, 15 bp, Homo sapiens
atacttttcacaagt

SEQ ID NO: 1684178 - DNA, 15 bp, Homo sapiens
tacttttcacaagtt

SEQ ID NO: 1684179 - DNA, 15 bp, Homo sapiens
acttttcacaagtta

SEQ ID NO: 1684180 - DNA, 15 bp, Homo sapiens
cttttcacaagttat

SEQ ID NO: 1684181 - DNA, 15 bp, Homo sapiens
ttttcacaagttata

SEQ ID NO: 1684182 - DNA, 15 bp, Homo sapiens
tttcacaagttataa

SEQ ID NO: 1684183 - DNA, 15 bp, Homo sapiens
ttcacaagttataaa

SEQ ID NO: 1684184 - DNA, 15 bp, Homo sapiens
tcacaagttataaaa

SEQ ID NO: 1684185 - DNA, 15 bp, Homo sapiens
cacaagttataaaat

SEQ ID NO: 1684186 - DNA, 15 bp, Homo sapiens
acaagttataaaata

SEQ ID NO: 1684187 - DNA, 15 bp, Homo sapiens
caagttataaaatat

SEQ ID NO: 1684188 - DNA, 15 bp, Homo sapiens
aagttataaaatatt

SEQ ID NO: 1684189 - DNA, 15 bp, Homo sapiens
gttataaaatattat

SEQ ID NO: 1684190 - DNA, 15 bp, Homo sapiens
ttataaaatattatt

SEQ ID NO: 1684191 - DNA, 15 bp, Homo sapiens
tataaaatattattt

SEQ ID NO: 1684192 - DNA, 15 bp, Homo sapiens
ataaaatattatttt

SEQ ID NO: 1684193 - DNA, 15 bp, Homo sapiens
taaaatattattttg

SEQ ID NO: 1684194 - DNA, 15 bp, Homo sapiens
aaaatattattttga

SEQ ID NO: 1684195 - DNA, 15 bp, Homo sapiens
aaatattattttgat

SEQ ID NO: 1684196 - DNA, 15 bp, Homo sapiens
aatattattttgatt

SEQ ID NO: 1684197 - DNA, 15 bp, Homo sapiens
tattattttgatttt

SEQ ID NO: 1684198 - DNA, 15 bp, Homo sapiens
attattttgattttt

SEQ ID NO: 1684199 - DNA, 15 bp, Homo sapiens
ttattttgatttttc

SEQ ID NO: 1684200 - DNA, 15 bp, Homo sapiens
tattttgatttttcc

SEQ ID NO: 1684201 - DNA, 15 bp, Homo sapiens
attttgatttttccc

SEQ ID NO: 1684202 - DNA, 15 bp, Homo sapiens
ttttgatttttcccc

SEQ ID NO: 1684203 - DNA, 15 bp, Homo sapiens
tttgatttttcccct

SEQ ID NO: 1684204 - DNA, 15 bp, Homo sapiens
ttgatttttccccta

SEQ ID NO: 1684205 - DNA, 15 bp, Homo sapiens
tgatttttcccctaa

SEQ ID NO: 1684206 - DNA, 15 bp, Homo sapiens
gatttttcccctaat

SEQ ID NO: 1684207 - DNA, 15 bp, Homo sapiens
atttttcccctaatc

SEQ ID NO: 1684208 - DNA, 15 bp, Homo sapiens
tttttcccctaatca

SEQ ID NO: 1684209 - DNA, 15 bp, Homo sapiens
ttttcccctaatcat

SEQ ID NO: 1684210 - DNA, 15 bp, Homo sapiens
tttcccctaatcatt

SEQ ID NO: 1684211 - DNA, 15 bp, Homo sapiens
ttcccctaatcattt

SEQ ID NO: 1684212 - DNA, 15 bp, Homo sapiens
tcccctaatcattta

SEQ ID NO: 1684213 - DNA, 15 bp, Homo sapiens
cccctaatcatttaa

SEQ ID NO: 1684214 - DNA, 15 bp, Homo sapiens
ccctaatcatttaaa

SEQ ID NO: 1684215 - DNA, 15 bp, Homo sapiens
cctaatcatttaaag

SEQ ID NO: 1684216 - DNA, 15 bp, Homo sapiens
ctaatcatttaaaga

SEQ ID NO: 1684217 - DNA, 15 bp, Homo sapiens
taatcatttaaagat

SEQ ID NO: 1684218 - DNA, 15 bp, Homo sapiens
aatcatttaaagatg

SEQ ID NO: 1684219 - DNA, 15 bp, Homo sapiens
atcatttaaagatgt

SEQ ID NO: 1684220 - DNA, 15 bp, Homo sapiens
tcatttaaagatgtg

SEQ ID NO: 1684221 - DNA, 15 bp, Homo sapiens
catttaaagatgtga

SEQ ID NO: 1684222 - DNA, 15 bp, Homo sapiens
atttaaagatgtgaa

SEQ ID NO: 1684223 - DNA, 15 bp, Homo sapiens
tttaaagatgtgaaa

SEQ ID NO: 1684224 - DNA, 15 bp, Homo sapiens
ttaaagatgtgaaaa

SEQ ID NO: 1684225 - DNA, 15 bp, Homo sapiens
taaagatgtgaaaat

SEQ ID NO: 1684226 - DNA, 15 bp, Homo sapiens
aaagatgtgaaaatc

SEQ ID NO: 1684227 - DNA, 15 bp, Homo sapiens
aagatgtgaaaatca

SEQ ID NO: 1684228 - DNA, 15 bp, Homo sapiens
agatgtgaaaatcat

SEQ ID NO: 1684229 - DNA, 15 bp, Homo sapiens
gatgtgaaaatcatc

SEQ ID NO: 1684230 - DNA, 15 bp, Homo sapiens
atgtgaaaatcatcc

SEQ ID NO: 1684231 - DNA, 15 bp, Homo sapiens
tgtgaaaatcatcct

SEQ ID NO: 1684232 - DNA, 15 bp, Homo sapiens
gtgaaaatcatcctt

SEQ ID NO: 1684233 - DNA, 15 bp, Homo sapiens
tgaaaatcatcctta

SEQ ID NO: 1684234 - DNA, 15 bp, Homo sapiens
gaaaatcatccttag

SEQ ID NO: 1684235 - DNA, 15 bp, Homo sapiens
aaaatcatccttagt

SEQ ID NO: 1684236 - DNA, 15 bp, Homo sapiens
aaatcatccttagtt

SEQ ID NO: 1684237 - DNA, 15 bp, Homo sapiens
aatcatccttagttg

SEQ ID NO: 1684238 - DNA, 15 bp, Homo sapiens
atcatccttagttgg

SEQ ID NO: 1684239 - DNA, 15 bp, Homo sapiens
tcatccttagttggc

SEQ ID NO: 1684240 - DNA, 15 bp, Homo sapiens
catccttagttggct

SEQ ID NO: 1684241 - DNA, 15 bp, Homo sapiens
atccttagttggctg

SEQ ID NO: 1684242 - DNA, 15 bp, Homo sapiens
tccttagttggctgg

SEQ ID NO: 1684243 - DNA, 15 bp, Homo sapiens
ccttagttggctggg

SEQ ID NO: 1684244 - DNA, 15 bp, Homo sapiens
cttagttggctgggc

SEQ ID NO: 1684245 - DNA, 15 bp, Homo sapiens
ttagttggctgggcg

SEQ ID NO: 1684246 - DNA, 15 bp, Homo sapiens
tagttggctgggcgt

SEQ ID NO: 1684247 - DNA, 15 bp, Homo sapiens
agttggctgggcgtg

SEQ ID NO: 1684248 - DNA, 15 bp, Homo sapiens
gttggctgggcgtgg

SEQ ID NO: 1684249 - DNA, 15 bp, Homo sapiens
ttggctgggcgtggt

SEQ ID NO: 1684250 - DNA, 15 bp, Homo sapiens
tggctgggcgtggtg

SEQ ID NO: 1684251 - DNA, 15 bp, Homo sapiens
gaggtcgggagttca

SEQ ID NO: 1684252 - DNA, 15 bp, Homo sapiens
aggtcgggagttcaa

SEQ ID NO: 1684253 - DNA, 15 bp, Homo sapiens
ggtcgggagttcaag

SEQ ID NO: 1684254 - DNA, 15 bp, Homo sapiens
gtcgggagttcaaga

SEQ ID NO: 1684255 - DNA, 15 bp, Homo sapiens
tcgggagttcaagat

SEQ ID NO: 1684256 - DNA, 15 bp, Homo sapiens
cgggagttcaagatc

SEQ ID NO: 1684257 - DNA, 15 bp, Homo sapiens
gggagttcaagatca

SEQ ID NO: 1684258 - DNA, 15 bp, Homo sapiens
ggagttcaagatcag

SEQ ID NO: 1684259 - DNA, 15 bp, Homo sapiens
gagttcaagatcagc

SEQ ID NO: 1684260 - DNA, 15 bp, Homo sapiens
agttcaagatcagcc

SEQ ID NO: 1684261 - DNA, 15 bp, Homo sapiens
gttcaagatcagcct

SEQ ID NO: 1684262 - DNA, 15 bp, Homo sapiens
ttcaagatcagcctg

SEQ ID NO: 1684263 - DNA, 15 bp, Homo sapiens
tcaagatcagcctga

SEQ ID NO: 1684264 - DNA, 15 bp, Homo sapiens
caagatcagcctgac

SEQ ID NO: 1684265 - DNA, 15 bp, Homo sapiens
aagatcagcctgacc

SEQ ID NO: 1684266 - DNA, 15 bp, Homo sapiens
agatcagcctgacca

SEQ ID NO: 1684267 - DNA, 15 bp, Homo sapiens
gatcagcctgaccaa

SEQ ID NO: 1684268 - DNA, 15 bp, Homo sapiens
atcagcctgaccaac

SEQ ID NO: 1684269 - DNA, 15 bp, Homo sapiens
tcagcctgaccaaca

SEQ ID NO: 1684270 - DNA, 15 bp, Homo sapiens
ggagaaaccccgtcg

SEQ ID NO: 1684271 - DNA, 15 bp, Homo sapiens
gagaaaccccgtcgc

SEQ ID NO: 1684272 - DNA, 15 bp, Homo sapiens
agaaaccccgtcgct

SEQ ID NO: 1684273 - DNA, 15 bp, Homo sapiens
gaaaccccgtcgcta

SEQ ID NO: 1684274 - DNA, 15 bp, Homo sapiens
aaaccccgtcgctac

SEQ ID NO: 1684275 - DNA, 15 bp, Homo sapiens
aaccccgtcgctact

SEQ ID NO: 1684276 - DNA, 15 bp, Homo sapiens
accccgtcgctacta

SEQ ID NO: 1684277 - DNA, 15 bp, Homo sapiens
ccccgtcgctactaa

SEQ ID NO: 1684278 - DNA, 15 bp, Homo sapiens
cccgtcgctactaaa

SEQ ID NO: 1684279 - DNA, 15 bp, Homo sapiens
ccgtcgctactaaaa

SEQ ID NO: 1684280 - DNA, 15 bp, Homo sapiens
cgtcgctactaaaaa

SEQ ID NO: 1684281 - DNA, 15 bp, Homo sapiens
cgctactaaaaatac

SEQ ID NO: 1684282 - DNA, 15 bp, Homo sapiens
gctactaaaaataca

SEQ ID NO: 1684283 - DNA, 15 bp, Homo sapiens
caaaattagccgggg

SEQ ID NO: 1684284 - DNA, 15 bp, Homo sapiens
gccggggtggtggcg

SEQ ID NO: 1684285 - DNA, 15 bp, Homo sapiens
ccggggtggtggcgc

SEQ ID NO: 1684286 - DNA, 15 bp, Homo sapiens
cggggtggtggcgca

SEQ ID NO: 1684287 - DNA, 15 bp, Homo sapiens
ggggtggtggcgcat

SEQ ID NO: 1684288 - DNA, 15 bp, Homo sapiens
gggtggtggcgcatg

SEQ ID NO: 1684289 - DNA, 15 bp, Homo sapiens
ggtggtggcgcatgc

SEQ ID NO: 1684290 - DNA, 15 bp, Homo sapiens
tgaacctgggagacg

SEQ ID NO: 1684291 - DNA, 15 bp, Homo sapiens
gaacctgggagacgg

SEQ ID NO: 1684292 - DNA, 15 bp, Homo sapiens
aacctgggagacgga

SEQ ID NO: 1684293 - DNA, 15 bp, Homo sapiens
acctgggagacggag

SEQ ID NO: 1684294 - DNA, 15 bp, Homo sapiens
cctgggagacggagg

SEQ ID NO: 1684295 - DNA, 15 bp, Homo sapiens
gagacggaggttgca

SEQ ID NO: 1684296 - DNA, 15 bp, Homo sapiens
agacggaggttgcag

SEQ ID NO: 1684297 - DNA, 15 bp, Homo sapiens
gacggaggttgcagt

SEQ ID NO: 1684298 - DNA, 15 bp, Homo sapiens
acggaggttgcagtg

SEQ ID NO: 1684299 - DNA, 15 bp, Homo sapiens
actgcactccagccc

SEQ ID NO: 1684300 - DNA, 15 bp, Homo sapiens
ctgcactccagccca

SEQ ID NO: 1684301 - DNA, 15 bp, Homo sapiens
agcccaggcgacaga

SEQ ID NO: 1684302 - DNA, 15 bp, Homo sapiens
gcccaggcgacagat

SEQ ID NO: 1684303 - DNA, 15 bp, Homo sapiens
cccaggcgacagatc

SEQ ID NO: 1684304 - DNA, 15 bp, Homo sapiens
ccaggcgacagatcg

SEQ ID NO: 1684305 - DNA, 15 bp, Homo sapiens
caggcgacagatcga

SEQ ID NO: 1684306 - DNA, 15 bp, Homo sapiens
aggcgacagatcgag

SEQ ID NO: 1684307 - DNA, 15 bp, Homo sapiens
ggcgacagatcgaga

SEQ ID NO: 1684308 - DNA, 15 bp, Homo sapiens
gcgacagatcgagac

SEQ ID NO: 1684309 - DNA, 15 bp, Homo sapiens
cgacagatcgagact

SEQ ID NO: 1684310 - DNA, 15 bp, Homo sapiens
gacagatcgagactc

SEQ ID NO: 1684311 - DNA, 15 bp, Homo sapiens
acagatcgagactct

SEQ ID NO: 1684312 - DNA, 15 bp, Homo sapiens
cagatcgagactctg

SEQ ID NO: 1684313 - DNA, 15 bp, Homo sapiens
agatcgagactctgt

SEQ ID NO: 1684314 - DNA, 15 bp, Homo sapiens
gatcgagactctgtc

SEQ ID NO: 1684315 - DNA, 15 bp, Homo sapiens
atcgagactctgtct

SEQ ID NO: 1684316 - DNA, 15 bp, Homo sapiens
tcgagactctgtctc

SEQ ID NO: 1684317 - DNA, 15 bp, Homo sapiens
caaaaaaaaaaaaag

SEQ ID NO: 1684318 - DNA, 15 bp, Homo sapiens
gaaagaaagaaaaat

SEQ ID NO: 1684319 - DNA, 15 bp, Homo sapiens
aaagaaagaaaaatg

SEQ ID NO: 1684320 - DNA, 15 bp, Homo sapiens
aagaaagaaaaatgt

SEQ ID NO: 1684321 - DNA, 15 bp, Homo sapiens
agaaagaaaaatgtg

SEQ ID NO: 1684322 - DNA, 15 bp, Homo sapiens
gaaagaaaaatgtgg

SEQ ID NO: 1684323 - DNA, 15 bp, Homo sapiens
aaagaaaaatgtggt

SEQ ID NO: 1684324 - DNA, 15 bp, Homo sapiens
aagaaaaatgtggta

SEQ ID NO: 1684325 - DNA, 15 bp, Homo sapiens
agaaaaatgtggtac

SEQ ID NO: 1684326 - DNA, 15 bp, Homo sapiens
gaaaaatgtggtact

SEQ ID NO: 1684327 - DNA, 15 bp, Homo sapiens
aaaaatgtggtactt

SEQ ID NO: 1684328 - DNA, 15 bp, Homo sapiens
aaaatgtggtactta

SEQ ID NO: 1684329 - DNA, 15 bp, Homo sapiens
aaatgtggtacttaa

SEQ ID NO: 1684330 - DNA, 15 bp, Homo sapiens
aatgtggtacttaaa

SEQ ID NO: 1684331 - DNA, 15 bp, Homo sapiens
atgtggtacttaaat

SEQ ID NO: 1684332 - DNA, 15 bp, Homo sapiens
tgtggtacttaaatt

SEQ ID NO: 1684333 - DNA, 15 bp, Homo sapiens
gtggtacttaaattc

SEQ ID NO: 1684334 - DNA, 15 bp, Homo sapiens
tggtacttaaattca

SEQ ID NO: 1684335 - DNA, 15 bp, Homo sapiens
ggtacttaaattcag

SEQ ID NO: 1684336 - DNA, 15 bp, Homo sapiens
gtacttaaattcagc

SEQ ID NO: 1684337 - DNA, 15 bp, Homo sapiens
tacttaaattcagcc

SEQ ID NO: 1684338 - DNA, 15 bp, Homo sapiens
acttaaattcagcct

SEQ ID NO: 1684339 - DNA, 15 bp, Homo sapiens
cttaaattcagcctt

SEQ ID NO: 1684340 - DNA, 15 bp, Homo sapiens
ttaaattcagcctta

SEQ ID NO: 1684341 - DNA, 15 bp, Homo sapiens
taaattcagccttaa

SEQ ID NO: 1684342 - DNA, 15 bp, Homo sapiens
aaattcagccttaaa

SEQ ID NO: 1684343 - DNA, 15 bp, Homo sapiens
aattcagccttaaaa

SEQ ID NO: 1684344 - DNA, 15 bp, Homo sapiens
attcagccttaaaag

SEQ ID NO: 1684345 - DNA, 15 bp, Homo sapiens
ttcagccttaaaaga

SEQ ID NO: 1684346 - DNA, 15 bp, Homo sapiens
tcagccttaaaagat

SEQ ID NO: 1684347 - DNA, 15 bp, Homo sapiens
cagccttaaaagatg

SEQ ID NO: 1684348 - DNA, 15 bp, Homo sapiens
agccttaaaagatga

SEQ ID NO: 1684349 - DNA, 15 bp, Homo sapiens
gccttaaaagatgag

SEQ ID NO: 1684350 - DNA, 15 bp, Homo sapiens
ccttaaaagatgagc

SEQ ID NO: 1684351 - DNA, 15 bp, Homo sapiens
cttaaaagatgagca

SEQ ID NO: 1684352 - DNA, 15 bp, Homo sapiens
ttaaaagatgagcag

SEQ ID NO: 1684353 - DNA, 15 bp, Homo sapiens
taaaagatgagcaga

SEQ ID NO: 1684354 - DNA, 15 bp, Homo sapiens
aaaagatgagcagag

SEQ ID NO: 1684355 - DNA, 15 bp, Homo sapiens
aaagatgagcagagg

SEQ ID NO: 1684356 - DNA, 15 bp, Homo sapiens
aagatgagcagaggc

SEQ ID NO: 1684357 - DNA, 15 bp, Homo sapiens
agatgagcagaggcc

SEQ ID NO: 1684358 - DNA, 15 bp, Homo sapiens
gatgagcagaggccg

SEQ ID NO: 1684359 - DNA, 15 bp, Homo sapiens
atgagcagaggccgg

SEQ ID NO: 1684360 - DNA, 15 bp, Homo sapiens
tgagcagaggccggg

SEQ ID NO: 1684361 - DNA, 15 bp, Homo sapiens
gagcagaggccgggc

SEQ ID NO: 1684362 - DNA, 15 bp, Homo sapiens
agcagaggccgggct

SEQ ID NO: 1684363 - DNA, 15 bp, Homo sapiens
gcagaggccgggctc

SEQ ID NO: 1684364 - DNA, 15 bp, Homo sapiens
cagaggccgggctcc

SEQ ID NO: 1684365 - DNA, 15 bp, Homo sapiens
agaggccgggctccg

SEQ ID NO: 1684366 - DNA, 15 bp, Homo sapiens
gaggccgggctccgt

SEQ ID NO: 1684367 - DNA, 15 bp, Homo sapiens
aggccgggctccgtg

SEQ ID NO: 1684368 - DNA, 15 bp, Homo sapiens
ggccgggctccgtgg

SEQ ID NO: 1684369 - DNA, 15 bp, Homo sapiens
gccgggctccgtggc

SEQ ID NO: 1684370 - DNA, 15 bp, Homo sapiens
ccgggctccgtggct

SEQ ID NO: 1684371 - DNA, 15 bp, Homo sapiens
cgggctccgtggctc

SEQ ID NO: 1684372 - DNA, 15 bp, Homo sapiens
gggctccgtggctca

SEQ ID NO: 1684373 - DNA, 15 bp, Homo sapiens
ggctccgtggctcat

SEQ ID NO: 1684374 - DNA, 15 bp, Homo sapiens
gctccgtggctcatg

SEQ ID NO: 1684375 - DNA, 15 bp, Homo sapiens
ctccgtggctcatgg

SEQ ID NO: 1684376 - DNA, 15 bp, Homo sapiens
tccgtggctcatggg

SEQ ID NO: 1684377 - DNA, 15 bp, Homo sapiens
ccgtggctcatgggc

SEQ ID NO: 1684378 - DNA, 15 bp, Homo sapiens
cgtggctcatgggcc

SEQ ID NO: 1684379 - DNA, 15 bp, Homo sapiens
gtggctcatgggccc

SEQ ID NO: 1684380 - DNA, 15 bp, Homo sapiens
tggctcatgggcccg

SEQ ID NO: 1684381 - DNA, 15 bp, Homo sapiens
ggctcatgggcccgg

SEQ ID NO: 1684382 - DNA, 15 bp, Homo sapiens
gctcatgggcccggc

SEQ ID NO: 1684383 - DNA, 15 bp, Homo sapiens
ctcatgggcccggcc

SEQ ID NO: 1684384 - DNA, 15 bp, Homo sapiens
tcatgggcccggcct

SEQ ID NO: 1684385 - DNA, 15 bp, Homo sapiens
catgggcccggcctt

SEQ ID NO: 1684386 - DNA, 15 bp, Homo sapiens
atgggcccggccttt

SEQ ID NO: 1684387 - DNA, 15 bp, Homo sapiens
tgggcccggcctttc

SEQ ID NO: 1684388 - DNA, 15 bp, Homo sapiens
gggcccggcctttcc

SEQ ID NO: 1684389 - DNA, 15 bp, Homo sapiens
ggcccggcctttcct

SEQ ID NO: 1684390 - DNA, 15 bp, Homo sapiens
gcccggcctttcctt

SEQ ID NO: 1684391 - DNA, 15 bp, Homo sapiens
cccggcctttccttc

SEQ ID NO: 1684392 - DNA, 15 bp, Homo sapiens
ccggcctttccttcc

SEQ ID NO: 1684393 - DNA, 15 bp, Homo sapiens
cggcctttccttcct

SEQ ID NO: 1684394 - DNA, 15 bp, Homo sapiens
ggcctttccttcctt

SEQ ID NO: 1684395 - DNA, 15 bp, Homo sapiens
gcctttccttccttc

SEQ ID NO: 1684396 - DNA, 15 bp, Homo sapiens
cctttccttccttcc

SEQ ID NO: 1684397 - DNA, 15 bp, Homo sapiens
ccttccttccttctc

SEQ ID NO: 1684398 - DNA, 15 bp, Homo sapiens
cttccttccttctct

SEQ ID NO: 1684399 - DNA, 15 bp, Homo sapiens
ttccttccttctctc

SEQ ID NO: 1684400 - DNA, 15 bp, Homo sapiens
tccttccttctctct

SEQ ID NO: 1684401 - DNA, 15 bp, Homo sapiens
ccttccttctctctc

SEQ ID NO: 1684402 - DNA, 15 bp, Homo sapiens
cttccttctctctcc

SEQ ID NO: 1684403 - DNA, 15 bp, Homo sapiens
ttccttctctctccc

SEQ ID NO: 1684404 - DNA, 15 bp, Homo sapiens
tccttctctctccct

SEQ ID NO: 1684405 - DNA, 15 bp, Homo sapiens
ccttctctctccctc

SEQ ID NO: 1684406 - DNA, 15 bp, Homo sapiens
cttctctctccctct

SEQ ID NO: 1684407 - DNA, 15 bp, Homo sapiens
ttctctctccctctc

SEQ ID NO: 1684408 - DNA, 15 bp, Homo sapiens
tctctctccctctct

SEQ ID NO: 1684409 - DNA, 15 bp, Homo sapiens
ctctctccctctctt

SEQ ID NO: 1684410 - DNA, 15 bp, Homo sapiens
tctctccctctcttt

SEQ ID NO: 1684411 - DNA, 15 bp, Homo sapiens
ctctccctctctttc

SEQ ID NO: 1684412 - DNA, 15 bp, Homo sapiens
tctccctctctttct

SEQ ID NO: 1684413 - DNA, 15 bp, Homo sapiens
ctccctctctttctt

SEQ ID NO: 1684414 - DNA, 15 bp, Homo sapiens
tccctctctttcttt

SEQ ID NO: 1684415 - DNA, 15 bp, Homo sapiens
ccctctctttctttc

SEQ ID NO: 1684416 - DNA, 15 bp, Homo sapiens
cctctctttctttct

SEQ ID NO: 1684417 - DNA, 15 bp, Homo sapiens
tttctttctttcttc

SEQ ID NO: 1684418 - DNA, 15 bp, Homo sapiens
ttctttctttcttcc

SEQ ID NO: 1684419 - DNA, 15 bp, Homo sapiens
tctttctttcttcct

SEQ ID NO: 1684420 - DNA, 15 bp, Homo sapiens
ctttctttcttcctt

SEQ ID NO: 1684421 - DNA, 15 bp, Homo sapiens
tttctttcttccttc

SEQ ID NO: 1684422 - DNA, 15 bp, Homo sapiens
ttctttcttccttcc

SEQ ID NO: 1684423 - DNA, 15 bp, Homo sapiens
tctttcttccttcct

SEQ ID NO: 1684424 - DNA, 15 bp, Homo sapiens
ctttcttccttcctt

SEQ ID NO: 1684425 - DNA, 15 bp, Homo sapiens
tttcttccttccttc

SEQ ID NO: 1684426 - DNA, 15 bp, Homo sapiens
ttcttccttccttcc

SEQ ID NO: 1684427 - DNA, 15 bp, Homo sapiens
tcttccttccttcct

SEQ ID NO: 1684428 - DNA, 15 bp, Homo sapiens
ttccttccttccttt

SEQ ID NO: 1684429 - DNA, 15 bp, Homo sapiens
tccttccttcctttc

SEQ ID NO: 1684430 - DNA, 15 bp, Homo sapiens
cttccttcctttctt

SEQ ID NO: 1684431 - DNA, 15 bp, Homo sapiens
ttccttcctttcttt

SEQ ID NO: 1684432 - DNA, 15 bp, Homo sapiens
tccttcctttctttt

SEQ ID NO: 1684433 - DNA, 15 bp, Homo sapiens
ccttcctttcttttc

SEQ ID NO: 1684434 - DNA, 15 bp, Homo sapiens
cttcctttcttttct

SEQ ID NO: 1684435 - DNA, 15 bp, Homo sapiens
ttcctttcttttctt

SEQ ID NO: 1684436 - DNA, 15 bp, Homo sapiens
tcctttcttttcttt

SEQ ID NO: 1684437 - DNA, 15 bp, Homo sapiens
cttttctttctttcc

SEQ ID NO: 1684438 - DNA, 15 bp, Homo sapiens
ttctttctttccttc

SEQ ID NO: 1684439 - DNA, 15 bp, Homo sapiens
tctttctttccttct

SEQ ID NO: 1684440 - DNA, 15 bp, Homo sapiens
ttctttccttctttc

SEQ ID NO: 1684441 - DNA, 15 bp, Homo sapiens
tctttccttctttct

SEQ ID NO: 1684442 - DNA, 15 bp, Homo sapiens
ctttccttctttctt

SEQ ID NO: 1684443 - DNA, 15 bp, Homo sapiens
tttccttctttcttt

SEQ ID NO: 1684444 - DNA, 15 bp, Homo sapiens
ttccttctttctttc

SEQ ID NO: 1684445 - DNA, 15 bp, Homo sapiens
tccttctttctttct

SEQ ID NO: 1684446 - DNA, 15 bp, Homo sapiens
ccttctttctttctt

SEQ ID NO: 1684447 - DNA, 15 bp, Homo sapiens
cttctttctttcttt

SEQ ID NO: 1684448 - DNA, 15 bp, Homo sapiens
ctttctttctttctc

SEQ ID NO: 1684449 - DNA, 15 bp, Homo sapiens
tttctttctttctct

SEQ ID NO: 1684450 - DNA, 15 bp, Homo sapiens
ttctttctttctctt

SEQ ID NO: 1684451 - DNA, 15 bp, Homo sapiens
tctttctttctcttt

SEQ ID NO: 1684452 - DNA, 15 bp, Homo sapiens
ctttctttctctttc

SEQ ID NO: 1684453 - DNA, 15 bp, Homo sapiens
tttctttctctttct

SEQ ID NO: 1684454 - DNA, 15 bp, Homo sapiens
ctttctctttcttct

SEQ ID NO: 1684455 - DNA, 15 bp, Homo sapiens
tttctctttcttctt

SEQ ID NO: 1684456 - DNA, 15 bp, Homo sapiens
ttctctttcttcttt

SEQ ID NO: 1684457 - DNA, 15 bp, Homo sapiens
tctctttcttctttc

SEQ ID NO: 1684458 - DNA, 15 bp, Homo sapiens
ctctttcttctttct

SEQ ID NO: 1684459 - DNA, 15 bp, Homo sapiens
tctttcttctttctc

SEQ ID NO: 1684460 - DNA, 15 bp, Homo sapiens
ctttcttctttctct

SEQ ID NO: 1684461 - DNA, 15 bp, Homo sapiens
tttcttctttctctc

SEQ ID NO: 1684462 - DNA, 15 bp, Homo sapiens
ttcttctttctctct

SEQ ID NO: 1684463 - DNA, 15 bp, Homo sapiens
tcttctttctctctc

SEQ ID NO: 1684464 - DNA, 15 bp, Homo sapiens
cttctttctctctct

SEQ ID NO: 1684465 - DNA, 15 bp, Homo sapiens
ctttctctctctctt

SEQ ID NO: 1684466 - DNA, 15 bp, Homo sapiens
ttctctctctctttc

SEQ ID NO: 1684467 - DNA, 15 bp, Homo sapiens
tctctctctttcttc

SEQ ID NO: 1684468 - DNA, 15 bp, Homo sapiens
ctctctctttcttct

SEQ ID NO: 1684469 - DNA, 15 bp, Homo sapiens
tctctctttcttctt

SEQ ID NO: 1684470 - DNA, 15 bp, Homo sapiens
ctctctttcttcttt

SEQ ID NO: 1684471 - DNA, 15 bp, Homo sapiens
tctttcttctttctt

SEQ ID NO: 1684472 - DNA, 15 bp, Homo sapiens
ctttcttctttcttt

SEQ ID NO: 1684473 - DNA, 15 bp, Homo sapiens
tttcttctttctttc

SEQ ID NO: 1684474 - DNA, 15 bp, Homo sapiens
tcttctttctttctt

SEQ ID NO: 1684475 - DNA, 15 bp, Homo sapiens
tctttctttctttcg

SEQ ID NO: 1684476 - DNA, 15 bp, Homo sapiens
ctttctttctttcga

SEQ ID NO: 1684477 - DNA, 15 bp, Homo sapiens
tttctttctttcgat

SEQ ID NO: 1684478 - DNA, 15 bp, Homo sapiens
ttctttctttcgatg

SEQ ID NO: 1684479 - DNA, 15 bp, Homo sapiens
tctttctttcgatgg

SEQ ID NO: 1684480 - DNA, 15 bp, Homo sapiens
ctttctttcgatgga

SEQ ID NO: 1684481 - DNA, 15 bp, Homo sapiens
tttctttcgatggag

SEQ ID NO: 1684482 - DNA, 15 bp, Homo sapiens
ttctttcgatggagt

SEQ ID NO: 1684483 - DNA, 15 bp, Homo sapiens
tctttcgatggagtc

SEQ ID NO: 1684484 - DNA, 15 bp, Homo sapiens
ctttcgatggagtct

SEQ ID NO: 1684485 - DNA, 15 bp, Homo sapiens
tttcgatggagtctc

SEQ ID NO: 1684486 - DNA, 15 bp, Homo sapiens
ttcgatggagtctcg

SEQ ID NO: 1684487 - DNA, 15 bp, Homo sapiens
tcgatggagtctcgc

SEQ ID NO: 1684488 - DNA, 15 bp, Homo sapiens
cgatggagtctcgct

SEQ ID NO: 1684489 - DNA, 15 bp, Homo sapiens
tctcgctctgtcaca

SEQ ID NO: 1684490 - DNA, 15 bp, Homo sapiens
ctcgctctgtcacac

SEQ ID NO: 1684491 - DNA, 15 bp, Homo sapiens
tcgctctgtcacaca

SEQ ID NO: 1684492 - DNA, 15 bp, Homo sapiens
cgctctgtcacacag

SEQ ID NO: 1684493 - DNA, 15 bp, Homo sapiens
gctctgtcacacagg

SEQ ID NO: 1684494 - DNA, 15 bp, Homo sapiens
ctctgtcacacaggc

SEQ ID NO: 1684495 - DNA, 15 bp, Homo sapiens
tctgtcacacaggct

SEQ ID NO: 1684496 - DNA, 15 bp, Homo sapiens
ctgtcacacaggctg

SEQ ID NO: 1684497 - DNA, 15 bp, Homo sapiens
tgtcacacaggctgg

SEQ ID NO: 1684498 - DNA, 15 bp, Homo sapiens
gtcacacaggctgga

SEQ ID NO: 1684499 - DNA, 15 bp, Homo sapiens
tcacacaggctggag

SEQ ID NO: 1684500 - DNA, 15 bp, Homo sapiens
cacacaggctggagt

SEQ ID NO: 1684501 - DNA, 15 bp, Homo sapiens
acacaggctggagtg

SEQ ID NO: 1684502 - DNA, 15 bp, Homo sapiens
tcaccacaacctccg

SEQ ID NO: 1684503 - DNA, 15 bp, Homo sapiens
caccacaacctccgc

SEQ ID NO: 1684504 - DNA, 15 bp, Homo sapiens
accacaacctccgcc

SEQ ID NO: 1684505 - DNA, 15 bp, Homo sapiens
ccacaacctccgcct

SEQ ID NO: 1684506 - DNA, 15 bp, Homo sapiens
cacaacctccgcctc

SEQ ID NO: 1684507 - DNA, 15 bp, Homo sapiens
cctccgcctcccagt

SEQ ID NO: 1684508 - DNA, 15 bp, Homo sapiens
ctccgcctcccagtt

SEQ ID NO: 1684509 - DNA, 15 bp, Homo sapiens
tccgcctcccagttt

SEQ ID NO: 1684510 - DNA, 15 bp, Homo sapiens
ccgcctcccagtttc

SEQ ID NO: 1684511 - DNA, 15 bp, Homo sapiens
cgcctcccagtttca

SEQ ID NO: 1684512 - DNA, 15 bp, Homo sapiens
gcctcccagtttcaa

SEQ ID NO: 1684513 - DNA, 15 bp, Homo sapiens
ctcccagtttcaagc

SEQ ID NO: 1684514 - DNA, 15 bp, Homo sapiens
tcccagtttcaagcg

SEQ ID NO: 1684515 - DNA, 15 bp, Homo sapiens
cccagtttcaagcga

SEQ ID NO: 1684516 - DNA, 15 bp, Homo sapiens
ccagtttcaagcgat

SEQ ID NO: 1684517 - DNA, 15 bp, Homo sapiens
cagtttcaagcgatt

SEQ ID NO: 1684518 - DNA, 15 bp, Homo sapiens
agtttcaagcgattc

SEQ ID NO: 1684519 - DNA, 15 bp, Homo sapiens
gtttcaagcgattct

SEQ ID NO: 1684520 - DNA, 15 bp, Homo sapiens
tttcaagcgattctc

SEQ ID NO: 1684521 - DNA, 15 bp, Homo sapiens
tcccaagtagctgaa

SEQ ID NO: 1684522 - DNA, 15 bp, Homo sapiens
cccaagtagctgaac

SEQ ID NO: 1684523 - DNA, 15 bp, Homo sapiens
ccaagtagctgaact

SEQ ID NO: 1684524 - DNA, 15 bp, Homo sapiens
caagtagctgaacta

SEQ ID NO: 1684525 - DNA, 15 bp, Homo sapiens
aagtagctgaactac

SEQ ID NO: 1684526 - DNA, 15 bp, Homo sapiens
agtagctgaactaca

SEQ ID NO: 1684527 - DNA, 15 bp, Homo sapiens
gtagctgaactacag

SEQ ID NO: 1684528 - DNA, 15 bp, Homo sapiens
tagctgaactacagg

SEQ ID NO: 1684529 - DNA, 15 bp, Homo sapiens
agctgaactacaggt

SEQ ID NO: 1684530 - DNA, 15 bp, Homo sapiens
gctgaactacaggtg

SEQ ID NO: 1684531 - DNA, 15 bp, Homo sapiens
ctgaactacaggtgc

SEQ ID NO: 1684532 - DNA, 15 bp, Homo sapiens
tgaactacaggtgcc

SEQ ID NO: 1684533 - DNA, 15 bp, Homo sapiens
gaactacaggtgcca

SEQ ID NO: 1684534 - DNA, 15 bp, Homo sapiens
aactacaggtgccac

SEQ ID NO: 1684535 - DNA, 15 bp, Homo sapiens
actacaggtgccacc

SEQ ID NO: 1684536 - DNA, 15 bp, Homo sapiens
ctacaggtgccacca

SEQ ID NO: 1684537 - DNA, 15 bp, Homo sapiens
tacaggtgccaccat

SEQ ID NO: 1684538 - DNA, 15 bp, Homo sapiens
acaggtgccaccatg

SEQ ID NO: 1684539 - DNA, 15 bp, Homo sapiens
caggtgccaccatgc

SEQ ID NO: 1684540 - DNA, 15 bp, Homo sapiens
aggtgccaccatgcc

SEQ ID NO: 1684541 - DNA, 15 bp, Homo sapiens
ggtgccaccatgccc

SEQ ID NO: 1684542 - DNA, 15 bp, Homo sapiens
gtgccaccatgcccg

SEQ ID NO: 1684543 - DNA, 15 bp, Homo sapiens
tgcccggctaattat

SEQ ID NO: 1684544 - DNA, 15 bp, Homo sapiens
gcccggctaattatt

SEQ ID NO: 1684545 - DNA, 15 bp, Homo sapiens
cccggctaattattg

SEQ ID NO: 1684546 - DNA, 15 bp, Homo sapiens
ccggctaattattgt

SEQ ID NO: 1684547 - DNA, 15 bp, Homo sapiens
cggctaattattgta

SEQ ID NO: 1684548 - DNA, 15 bp, Homo sapiens
ggctaattattgtat

SEQ ID NO: 1684549 - DNA, 15 bp, Homo sapiens
gctaattattgtatt

SEQ ID NO: 1684550 - DNA, 15 bp, Homo sapiens
ctaattattgtattt

SEQ ID NO: 1684551 - DNA, 15 bp, Homo sapiens
taattattgtatttt

SEQ ID NO: 1684552 - DNA, 15 bp, Homo sapiens
aattattgtattttt

SEQ ID NO: 1684553 - DNA, 15 bp, Homo sapiens
attattgtatttttg

SEQ ID NO: 1684554 - DNA, 15 bp, Homo sapiens
ttattgtatttttgg

SEQ ID NO: 1684555 - DNA, 15 bp, Homo sapiens
tattgtatttttggt

SEQ ID NO: 1684556 - DNA, 15 bp, Homo sapiens
attgtatttttggta

SEQ ID NO: 1684557 - DNA, 15 bp, Homo sapiens
gtttcaccatgctgt

SEQ ID NO: 1684558 - DNA, 15 bp, Homo sapiens
tttcaccatgctgtc

SEQ ID NO: 1684559 - DNA, 15 bp, Homo sapiens
ttcaccatgctgtcc

SEQ ID NO: 1684560 - DNA, 15 bp, Homo sapiens
tcaccatgctgtcca

SEQ ID NO: 1684561 - DNA, 15 bp, Homo sapiens
caccatgctgtccag

SEQ ID NO: 1684562 - DNA, 15 bp, Homo sapiens
accatgctgtccagg

SEQ ID NO: 1684563 - DNA, 15 bp, Homo sapiens
ccatgctgtccaggc

SEQ ID NO: 1684564 - DNA, 15 bp, Homo sapiens
catgctgtccaggct

SEQ ID NO: 1684565 - DNA, 15 bp, Homo sapiens
atgctgtccaggctg

SEQ ID NO: 1684566 - DNA, 15 bp, Homo sapiens
tgctgtccaggctgg

SEQ ID NO: 1684567 - DNA, 15 bp, Homo sapiens
gctgtccaggctggt

SEQ ID NO: 1684568 - DNA, 15 bp, Homo sapiens
ctgtccaggctggtt

SEQ ID NO: 1684569 - DNA, 15 bp, Homo sapiens
tgtccaggctggttt

SEQ ID NO: 1684570 - DNA, 15 bp, Homo sapiens
gtccaggctggtttc

SEQ ID NO: 1684571 - DNA, 15 bp, Homo sapiens
tccaggctggtttca

SEQ ID NO: 1684572 - DNA, 15 bp, Homo sapiens
gtttcaaactcctga

SEQ ID NO: 1684573 - DNA, 15 bp, Homo sapiens
tttcaaactcctgac

SEQ ID NO: 1684574 - DNA, 15 bp, Homo sapiens
ttcaaactcctgacc

SEQ ID NO: 1684575 - DNA, 15 bp, Homo sapiens
aaactcctgacctct

SEQ ID NO: 1684576 - DNA, 15 bp, Homo sapiens
aactcctgacctctc

SEQ ID NO: 1684577 - DNA, 15 bp, Homo sapiens
actcctgacctctcg

SEQ ID NO: 1684578 - DNA, 15 bp, Homo sapiens
ctcctgacctctcga

SEQ ID NO: 1684579 - DNA, 15 bp, Homo sapiens
tcctgacctctcgat

SEQ ID NO: 1684580 - DNA, 15 bp, Homo sapiens
cctgacctctcgatc

SEQ ID NO: 1684581 - DNA, 15 bp, Homo sapiens
ctgacctctcgatcc

SEQ ID NO: 1684582 - DNA, 15 bp, Homo sapiens
tgacctctcgatcct

SEQ ID NO: 1684583 - DNA, 15 bp, Homo sapiens
gacctctcgatcctc

SEQ ID NO: 1684584 - DNA, 15 bp, Homo sapiens
acctctcgatcctcc

SEQ ID NO: 1684585 - DNA, 15 bp, Homo sapiens
cctctcgatcctccc

SEQ ID NO: 1684586 - DNA, 15 bp, Homo sapiens
ctctcgatcctcccg

SEQ ID NO: 1684587 - DNA, 15 bp, Homo sapiens
tctcgatcctcccgc

SEQ ID NO: 1684588 - DNA, 15 bp, Homo sapiens
ctcgatcctcccgcc

SEQ ID NO: 1684589 - DNA, 15 bp, Homo sapiens
tcgatcctcccgcct

SEQ ID NO: 1684590 - DNA, 15 bp, Homo sapiens
cgatcctcccgcctc

SEQ ID NO: 1684591 - DNA, 15 bp, Homo sapiens
gatcctcccgcctcc

SEQ ID NO: 1684592 - DNA, 15 bp, Homo sapiens
atcctcccgcctccg

SEQ ID NO: 1684593 - DNA, 15 bp, Homo sapiens
tcctcccgcctccgc

SEQ ID NO: 1684594 - DNA, 15 bp, Homo sapiens
cctcccgcctccgcc

SEQ ID NO: 1684595 - DNA, 15 bp, Homo sapiens
ctcccgcctccgcct

SEQ ID NO: 1684596 - DNA, 15 bp, Homo sapiens
tcccgcctccgcctc

SEQ ID NO: 1684597 - DNA, 15 bp, Homo sapiens
ccgcctccgcctccc

SEQ ID NO: 1684598 - DNA, 15 bp, Homo sapiens
cgcctccgcctccca

SEQ ID NO: 1684599 - DNA, 15 bp, Homo sapiens
gcctccgcctcccaa

SEQ ID NO: 1684600 - DNA, 15 bp, Homo sapiens
ccgcctcccaaagta

SEQ ID NO: 1684601 - DNA, 15 bp, Homo sapiens
cgcctcccaaagtac

SEQ ID NO: 1684602 - DNA, 15 bp, Homo sapiens
aagtactgggattat

SEQ ID NO: 1684603 - DNA, 15 bp, Homo sapiens
agtactgggattata

SEQ ID NO: 1684604 - DNA, 15 bp, Homo sapiens
gtactgggattatat

SEQ ID NO: 1684605 - DNA, 15 bp, Homo sapiens
tactgggattatatg

SEQ ID NO: 1684606 - DNA, 15 bp, Homo sapiens
actgggattatatgc

SEQ ID NO: 1684607 - DNA, 15 bp, Homo sapiens
ctgggattatatgcg

SEQ ID NO: 1684608 - DNA, 15 bp, Homo sapiens
tgggattatatgcgt

SEQ ID NO: 1684609 - DNA, 15 bp, Homo sapiens
gggattatatgcgtg

SEQ ID NO: 1684610 - DNA, 15 bp, Homo sapiens
ggattatatgcgtga

SEQ ID NO: 1684611 - DNA, 15 bp, Homo sapiens
gattatatgcgtgag

SEQ ID NO: 1684612 - DNA, 15 bp, Homo sapiens
attatatgcgtgagt

SEQ ID NO: 1684613 - DNA, 15 bp, Homo sapiens
ttatatgcgtgagtc

SEQ ID NO: 1684614 - DNA, 15 bp, Homo sapiens
tatatgcgtgagtca

SEQ ID NO: 1684615 - DNA, 15 bp, Homo sapiens
atatgcgtgagtcac

SEQ ID NO: 1684616 - DNA, 15 bp, Homo sapiens
tatgcgtgagtcact

SEQ ID NO: 1684617 - DNA, 15 bp, Homo sapiens
atgcgtgagtcactg

SEQ ID NO: 1684618 - DNA, 15 bp, Homo sapiens
tgcgtgagtcactgc

SEQ ID NO: 1684619 - DNA, 15 bp, Homo sapiens
gcgtgagtcactgcg

SEQ ID NO: 1684620 - DNA, 15 bp, Homo sapiens
cgtgagtcactgcgc

SEQ ID NO: 1684621 - DNA, 15 bp, Homo sapiens
gtgagtcactgcgcc

SEQ ID NO: 1684622 - DNA, 15 bp, Homo sapiens
tgagtcactgcgcct

SEQ ID NO: 1684623 - DNA, 15 bp, Homo sapiens
gagtcactgcgcctg

SEQ ID NO: 1684624 - DNA, 15 bp, Homo sapiens
agtcactgcgcctgg

SEQ ID NO: 1684625 - DNA, 15 bp, Homo sapiens
gtcactgcgcctggc

SEQ ID NO: 1684626 - DNA, 15 bp, Homo sapiens
tcactgcgcctggcc

SEQ ID NO: 1684627 - DNA, 15 bp, Homo sapiens
ctgcgcctggccggt

SEQ ID NO: 1684628 - DNA, 15 bp, Homo sapiens
tgcgcctggccggtg

SEQ ID NO: 1684629 - DNA, 15 bp, Homo sapiens
gcgcctggccggtga

SEQ ID NO: 1684630 - DNA, 15 bp, Homo sapiens
cgcctggccggtgat

SEQ ID NO: 1684631 - DNA, 15 bp, Homo sapiens
gcctggccggtgata

SEQ ID NO: 1684632 - DNA, 15 bp, Homo sapiens
cctggccggtgatat

SEQ ID NO: 1684633 - DNA, 15 bp, Homo sapiens
ctggccggtgatata

SEQ ID NO: 1684634 - DNA, 15 bp, Homo sapiens
tggccggtgatataa

SEQ ID NO: 1684635 - DNA, 15 bp, Homo sapiens
ggccggtgatataat

SEQ ID NO: 1684636 - DNA, 15 bp, Homo sapiens
gccggtgatataatt

SEQ ID NO: 1684637 - DNA, 15 bp, Homo sapiens
ccggtgatataatta

SEQ ID NO: 1684638 - DNA, 15 bp, Homo sapiens
cggtgatataattaa

SEQ ID NO: 1684639 - DNA, 15 bp, Homo sapiens
ggtgatataattaat

SEQ ID NO: 1684640 - DNA, 15 bp, Homo sapiens
gtgatataattaatt

SEQ ID NO: 1684641 - DNA, 15 bp, Homo sapiens
tgatataattaattt

SEQ ID NO: 1684642 - DNA, 15 bp, Homo sapiens
gatataattaatttt

SEQ ID NO: 1684643 - DNA, 15 bp, Homo sapiens
atataattaattttt

SEQ ID NO: 1684644 - DNA, 15 bp, Homo sapiens
tataattaatttttt

SEQ ID NO: 1684645 - DNA, 15 bp, Homo sapiens
ataattaattttttt

SEQ ID NO: 1684646 - DNA, 15 bp, Homo sapiens
taattaatttttttc

SEQ ID NO: 1684647 - DNA, 15 bp, Homo sapiens
aattaatttttttcc

SEQ ID NO: 1684648 - DNA, 15 bp, Homo sapiens
attaatttttttcct

SEQ ID NO: 1684649 - DNA, 15 bp, Homo sapiens
ttaatttttttccta

SEQ ID NO: 1684650 - DNA, 15 bp, Homo sapiens
taatttttttcctag

SEQ ID NO: 1684651 - DNA, 15 bp, Homo sapiens
aatttttttcctagc

SEQ ID NO: 1684652 - DNA, 15 bp, Homo sapiens
atttttttcctagct

SEQ ID NO: 1684653 - DNA, 15 bp, Homo sapiens
tttttttcctagctg

SEQ ID NO: 1684654 - DNA, 15 bp, Homo sapiens
ttttttcctagctga

SEQ ID NO: 1684655 - DNA, 15 bp, Homo sapiens
tttttcctagctgaa

SEQ ID NO: 1684656 - DNA, 15 bp, Homo sapiens
ttttcctagctgaat

SEQ ID NO: 1684657 - DNA, 15 bp, Homo sapiens
tttcctagctgaata

SEQ ID NO: 1684658 - DNA, 15 bp, Homo sapiens
ttcctagctgaatag

SEQ ID NO: 1684659 - DNA, 15 bp, Homo sapiens
tcctagctgaatagc

SEQ ID NO: 1684660 - DNA, 15 bp, Homo sapiens
cctagctgaatagca

SEQ ID NO: 1684661 - DNA, 15 bp, Homo sapiens
ctagctgaatagcaa

SEQ ID NO: 1684662 - DNA, 15 bp, Homo sapiens
tagctgaatagcaat

SEQ ID NO: 1684663 - DNA, 15 bp, Homo sapiens
agctgaatagcaatc

SEQ ID NO: 1684664 - DNA, 15 bp, Homo sapiens
gctgaatagcaatct

SEQ ID NO: 1684665 - DNA, 15 bp, Homo sapiens
ctgaatagcaatctc

SEQ ID NO: 1684666 - DNA, 15 bp, Homo sapiens
tgaatagcaatctct

SEQ ID NO: 1684667 - DNA, 15 bp, Homo sapiens
gaatagcaatctctg

SEQ ID NO: 1684668 - DNA, 15 bp, Homo sapiens
aatagcaatctctgc

SEQ ID NO: 1684669 - DNA, 15 bp, Homo sapiens
atagcaatctctgct

SEQ ID NO: 1684670 - DNA, 15 bp, Homo sapiens
tagcaatctctgctc

SEQ ID NO: 1684671 - DNA, 15 bp, Homo sapiens
agcaatctctgctca

SEQ ID NO: 1684672 - DNA, 15 bp, Homo sapiens
gcaacctctgcctca

SEQ ID NO: 1684673 - DNA, 15 bp, Homo sapiens
caacctctgcctcac

SEQ ID NO: 1684674 - DNA, 15 bp, Homo sapiens
aacctctgcctcacg

SEQ ID NO: 1684675 - DNA, 15 bp, Homo sapiens
acctctgcctcacgg

SEQ ID NO: 1684676 - DNA, 15 bp, Homo sapiens
cctctgcctcacggg

SEQ ID NO: 1684677 - DNA, 15 bp, Homo sapiens
ctctgcctcacgggt

SEQ ID NO: 1684678 - DNA, 15 bp, Homo sapiens
tctgcctcacgggtt

SEQ ID NO: 1684679 - DNA, 15 bp, Homo sapiens
ctgcctcacgggttt

SEQ ID NO: 1684680 - DNA, 15 bp, Homo sapiens
tgcctcacgggtttc

SEQ ID NO: 1684681 - DNA, 15 bp, Homo sapiens
gcctcacgggtttca

SEQ ID NO: 1684682 - DNA, 15 bp, Homo sapiens
cctcacgggtttcaa

SEQ ID NO: 1684683 - DNA, 15 bp, Homo sapiens
ctcacgggtttcaag

SEQ ID NO: 1684684 - DNA, 15 bp, Homo sapiens
tcacgggtttcaagc

SEQ ID NO: 1684685 - DNA, 15 bp, Homo sapiens
cacgggtttcaagca

SEQ ID NO: 1684686 - DNA, 15 bp, Homo sapiens
acgggtttcaagcaa

SEQ ID NO: 1684687 - DNA, 15 bp, Homo sapiens
cgggtttcaagcaat

SEQ ID NO: 1684688 - DNA, 15 bp, Homo sapiens
gggtttcaagcaatt

SEQ ID NO: 1684689 - DNA, 15 bp, Homo sapiens
ggtttcaagcaattc

SEQ ID NO: 1684690 - DNA, 15 bp, Homo sapiens
gtttcaagcaattct

SEQ ID NO: 1684691 - DNA, 15 bp, Homo sapiens
tttcaagcaattctc

SEQ ID NO: 1684692 - DNA, 15 bp, Homo sapiens
ggattacaggcaagc

SEQ ID NO: 1684693 - DNA, 15 bp, Homo sapiens
gattacaggcaagcg

SEQ ID NO: 1684694 - DNA, 15 bp, Homo sapiens
attacaggcaagcgc

SEQ ID NO: 1684695 - DNA, 15 bp, Homo sapiens
ttacaggcaagcgcc

SEQ ID NO: 1684696 - DNA, 15 bp, Homo sapiens
tacaggcaagcgcca

SEQ ID NO: 1684697 - DNA, 15 bp, Homo sapiens
acaggcaagcgccac

SEQ ID NO: 1684698 - DNA, 15 bp, Homo sapiens
caggcaagcgccacc

SEQ ID NO: 1684699 - DNA, 15 bp, Homo sapiens
aggcaagcgccacca

SEQ ID NO: 1684700 - DNA, 15 bp, Homo sapiens
ggcaagcgccaccat

SEQ ID NO: 1684701 - DNA, 15 bp, Homo sapiens
gcaagcgccaccatg

SEQ ID NO: 1684702 - DNA, 15 bp, Homo sapiens
caagcgccaccatgc

SEQ ID NO: 1684703 - DNA, 15 bp, Homo sapiens
aagcgccaccatgcc

SEQ ID NO: 1684704 - DNA, 15 bp, Homo sapiens
agcgccaccatgcct

SEQ ID NO: 1684705 - DNA, 15 bp, Homo sapiens
tttttgtattttttt

SEQ ID NO: 1684706 - DNA, 15 bp, Homo sapiens
ttttgtatttttttt

SEQ ID NO: 1684707 - DNA, 15 bp, Homo sapiens
tttgtattttttttt

SEQ ID NO: 1684708 - DNA, 15 bp, Homo sapiens
ttgtatttttttttt

SEQ ID NO: 1684709 - DNA, 15 bp, Homo sapiens
gtatttttttttttt

SEQ ID NO: 1684710 - DNA, 15 bp, Homo sapiens
tttttttttttagca

SEQ ID NO: 1684711 - DNA, 15 bp, Homo sapiens
ttttttttttagcag

SEQ ID NO: 1684712 - DNA, 15 bp, Homo sapiens
tttttttttagcaga

SEQ ID NO: 1684713 - DNA, 15 bp, Homo sapiens
ttttttttagcagag

SEQ ID NO: 1684714 - DNA, 15 bp, Homo sapiens
tttttttagcagaga

SEQ ID NO: 1684715 - DNA, 15 bp, Homo sapiens
ttttttagcagagac

SEQ ID NO: 1684716 - DNA, 15 bp, Homo sapiens
atgttggtcaggcta

SEQ ID NO: 1684717 - DNA, 15 bp, Homo sapiens
tgttggtcaggctag

SEQ ID NO: 1684718 - DNA, 15 bp, Homo sapiens
gttggtcaggctaga

SEQ ID NO: 1684719 - DNA, 15 bp, Homo sapiens
ttggtcaggctagac

SEQ ID NO: 1684720 - DNA, 15 bp, Homo sapiens
tggtcaggctagact

SEQ ID NO: 1684721 - DNA, 15 bp, Homo sapiens
ggtcaggctagactc

SEQ ID NO: 1684722 - DNA, 15 bp, Homo sapiens
gtcaggctagactcg

SEQ ID NO: 1684723 - DNA, 15 bp, Homo sapiens
tcaggctagactcga

SEQ ID NO: 1684724 - DNA, 15 bp, Homo sapiens
caggctagactcgaa

SEQ ID NO: 1684725 - DNA, 15 bp, Homo sapiens
aggctagactcgaac

SEQ ID NO: 1684726 - DNA, 15 bp, Homo sapiens
ggctagactcgaact

SEQ ID NO: 1684727 - DNA, 15 bp, Homo sapiens
gctagactcgaactc

SEQ ID NO: 1684728 - DNA, 15 bp, Homo sapiens
ctagactcgaactcc

SEQ ID NO: 1684729 - DNA, 15 bp, Homo sapiens
tagactcgaactcct

SEQ ID NO: 1684730 - DNA, 15 bp, Homo sapiens
agactcgaactccta

SEQ ID NO: 1684731 - DNA, 15 bp, Homo sapiens
gactcgaactcctaa

SEQ ID NO: 1684732 - DNA, 15 bp, Homo sapiens
actcgaactcctaac

SEQ ID NO: 1684733 - DNA, 15 bp, Homo sapiens
ctcgaactcctaacc

SEQ ID NO: 1684734 - DNA, 15 bp, Homo sapiens
tcgaactcctaacct

SEQ ID NO: 1684735 - DNA, 15 bp, Homo sapiens
cgaactcctaacctc

SEQ ID NO: 1684736 - DNA, 15 bp, Homo sapiens
gaactcctaacctcg

SEQ ID NO: 1684737 - DNA, 15 bp, Homo sapiens
aactcctaacctcgt

SEQ ID NO: 1684738 - DNA, 15 bp, Homo sapiens
actcctaacctcgtg

SEQ ID NO: 1684739 - DNA, 15 bp, Homo sapiens
taacctcgtgatcca

SEQ ID NO: 1684740 - DNA, 15 bp, Homo sapiens
aacctcgtgatccac

SEQ ID NO: 1684741 - DNA, 15 bp, Homo sapiens
tgggattacaggcag

SEQ ID NO: 1684742 - DNA, 15 bp, Homo sapiens
gggattacaggcagg

SEQ ID NO: 1684743 - DNA, 15 bp, Homo sapiens
ggattacaggcagga

SEQ ID NO: 1684744 - DNA, 15 bp, Homo sapiens
gattacaggcaggag

SEQ ID NO: 1684745 - DNA, 15 bp, Homo sapiens
attacaggcaggagc

SEQ ID NO: 1684746 - DNA, 15 bp, Homo sapiens
ttacaggcaggagcc

SEQ ID NO: 1684747 - DNA, 15 bp, Homo sapiens
tacaggcaggagcca

SEQ ID NO: 1684748 - DNA, 15 bp, Homo sapiens
acaggcaggagccac

SEQ ID NO: 1684749 - DNA, 15 bp, Homo sapiens
caggcaggagccaca

SEQ ID NO: 1684750 - DNA, 15 bp, Homo sapiens
aggcaggagccacag

SEQ ID NO: 1684751 - DNA, 15 bp, Homo sapiens
ggcaggagccacagc

SEQ ID NO: 1684752 - DNA, 15 bp, Homo sapiens
gcaggagccacagca

SEQ ID NO: 1684753 - DNA, 15 bp, Homo sapiens
caggagccacagcac

SEQ ID NO: 1684754 - DNA, 15 bp, Homo sapiens
aggagccacagcacc

SEQ ID NO: 1684755 - DNA, 15 bp, Homo sapiens
ggagccacagcacct

SEQ ID NO: 1684756 - DNA, 15 bp, Homo sapiens
gagccacagcacctg

SEQ ID NO: 1684757 - DNA, 15 bp, Homo sapiens
agccacagcacctgg

SEQ ID NO: 1684758 - DNA, 15 bp, Homo sapiens
gccacagcacctggc

SEQ ID NO: 1684759 - DNA, 15 bp, Homo sapiens
ccacagcacctggct

SEQ ID NO: 1684760 - DNA, 15 bp, Homo sapiens
cacagcacctggctg

SEQ ID NO: 1684761 - DNA, 15 bp, Homo sapiens
acagcacctggctga

SEQ ID NO: 1684762 - DNA, 15 bp, Homo sapiens
cagcacctggctgaa

SEQ ID NO: 1684763 - DNA, 15 bp, Homo sapiens
agcacctggctgaac

SEQ ID NO: 1684764 - DNA, 15 bp, Homo sapiens
gcacctggctgaact

SEQ ID NO: 1684765 - DNA, 15 bp, Homo sapiens
cacctggctgaactc

SEQ ID NO: 1684766 - DNA, 15 bp, Homo sapiens
acctggctgaactct

SEQ ID NO: 1684767 - DNA, 15 bp, Homo sapiens
cctggctgaactctt

SEQ ID NO: 1684768 - DNA, 15 bp, Homo sapiens
ctggctgaactcttt

SEQ ID NO: 1684769 - DNA, 15 bp, Homo sapiens
tggctgaactctttc

SEQ ID NO: 1684770 - DNA, 15 bp, Homo sapiens
ggctgaactctttct

SEQ ID NO: 1684771 - DNA, 15 bp, Homo sapiens
gctgaactctttctt

SEQ ID NO: 1684772 - DNA, 15 bp, Homo sapiens
ctgaactctttcttt

SEQ ID NO: 1684773 - DNA, 15 bp, Homo sapiens
tgaactctttctttt

SEQ ID NO: 1684774 - DNA, 15 bp, Homo sapiens
gaactctttctttta

SEQ ID NO: 1684775 - DNA, 15 bp, Homo sapiens
aactctttcttttac

SEQ ID NO: 1684776 - DNA, 15 bp, Homo sapiens
actctttcttttaca

SEQ ID NO: 1684777 - DNA, 15 bp, Homo sapiens
ctctttcttttacat

SEQ ID NO: 1684778 - DNA, 15 bp, Homo sapiens
tctttcttttacata

SEQ ID NO: 1684779 - DNA, 15 bp, Homo sapiens
ctttcttttacataa

SEQ ID NO: 1684780 - DNA, 15 bp, Homo sapiens
tttcttttacataat

SEQ ID NO: 1684781 - DNA, 15 bp, Homo sapiens
ttcttttacataatt

SEQ ID NO: 1684782 - DNA, 15 bp, Homo sapiens
tcttttacataatta

SEQ ID NO: 1684783 - DNA, 15 bp, Homo sapiens
cttttacataattaa

SEQ ID NO: 1684784 - DNA, 15 bp, Homo sapiens
ttttacataattaaa

SEQ ID NO: 1684785 - DNA, 15 bp, Homo sapiens
tttacataattaaac

SEQ ID NO: 1684786 - DNA, 15 bp, Homo sapiens
ttacataattaaact

SEQ ID NO: 1684787 - DNA, 15 bp, Homo sapiens
tacataattaaactt

SEQ ID NO: 1684788 - DNA, 15 bp, Homo sapiens
acataattaaactta

SEQ ID NO: 1684789 - DNA, 15 bp, Homo sapiens
cataattaaacttat

SEQ ID NO: 1684790 - DNA, 15 bp, Homo sapiens
ataattaaacttatt

SEQ ID NO: 1684791 - DNA, 15 bp, Homo sapiens
taattaaacttattt

SEQ ID NO: 1684792 - DNA, 15 bp, Homo sapiens
aattaaacttatttg

SEQ ID NO: 1684793 - DNA, 15 bp, Homo sapiens
attaaacttatttgc

SEQ ID NO: 1684794 - DNA, 15 bp, Homo sapiens
ttaaacttatttgct

SEQ ID NO: 1684795 - DNA, 15 bp, Homo sapiens
taaacttatttgctc

SEQ ID NO: 1684796 - DNA, 15 bp, Homo sapiens
aaacttatttgctcc

SEQ ID NO: 1684797 - DNA, 15 bp, Homo sapiens
aacttatttgctcct

SEQ ID NO: 1684798 - DNA, 15 bp, Homo sapiens
acttatttgctcctg

SEQ ID NO: 1684799 - DNA, 15 bp, Homo sapiens
cttatttgctcctgg

SEQ ID NO: 1684800 - DNA, 15 bp, Homo sapiens
ttatttgctcctggt

SEQ ID NO: 1684801 - DNA, 15 bp, Homo sapiens
tatttgctcctggtg

SEQ ID NO: 1684802 - DNA, 15 bp, Homo sapiens
atttgctcctggtgg

SEQ ID NO: 1684803 - DNA, 15 bp, Homo sapiens
tttgctcctggtggc

SEQ ID NO: 1684804 - DNA, 15 bp, Homo sapiens
ttgctcctggtggca

SEQ ID NO: 1684805 - DNA, 15 bp, Homo sapiens
tgctcctggtggcag

SEQ ID NO: 1684806 - DNA, 15 bp, Homo sapiens
gctcctggtggcagg

SEQ ID NO: 1684807 - DNA, 15 bp, Homo sapiens
ctcctggtggcaggg

SEQ ID NO: 1684808 - DNA, 15 bp, Homo sapiens
tcctggtggcaggga

SEQ ID NO: 1684809 - DNA, 15 bp, Homo sapiens
cctggtggcagggac

SEQ ID NO: 1684810 - DNA, 15 bp, Homo sapiens
ctggtggcagggacc

SEQ ID NO: 1684811 - DNA, 15 bp, Homo sapiens
tggtggcagggacct

SEQ ID NO: 1684812 - DNA, 15 bp, Homo sapiens
ggtggcagggacctc

SEQ ID NO: 1684813 - DNA, 15 bp, Homo sapiens
gtggcagggacctct

SEQ ID NO: 1684814 - DNA, 15 bp, Homo sapiens
tggcagggacctctt

SEQ ID NO: 1684815 - DNA, 15 bp, Homo sapiens
ggcagggacctcttg

SEQ ID NO: 1684816 - DNA, 15 bp, Homo sapiens
gcagggacctcttgc

SEQ ID NO: 1684817 - DNA, 15 bp, Homo sapiens
cagggacctcttgcc

SEQ ID NO: 1684818 - DNA, 15 bp, Homo sapiens
agggacctcttgccc

SEQ ID NO: 1684819 - DNA, 15 bp, Homo sapiens
gggacctcttgcccc

SEQ ID NO: 1684820 - DNA, 15 bp, Homo sapiens
ggacctcttgccccc

SEQ ID NO: 1684821 - DNA, 15 bp, Homo sapiens
gacctcttgccccct

SEQ ID NO: 1684822 - DNA, 15 bp, Homo sapiens
acctcttgccccctc

SEQ ID NO: 1684823 - DNA, 15 bp, Homo sapiens
cctcttgccccctct

SEQ ID NO: 1684824 - DNA, 15 bp, Homo sapiens
ctcttgccccctctt

SEQ ID NO: 1684825 - DNA, 15 bp, Homo sapiens
tcttgccccctcttc

SEQ ID NO: 1684826 - DNA, 15 bp, Homo sapiens
cttgccccctcttcc

SEQ ID NO: 1684827 - DNA, 15 bp, Homo sapiens
ttgccccctcttcct

SEQ ID NO: 1684828 - DNA, 15 bp, Homo sapiens
tgccccctcttcctc

SEQ ID NO: 1684829 - DNA, 15 bp, Homo sapiens
gccccctcttcctcc

SEQ ID NO: 1684830 - DNA, 15 bp, Homo sapiens
ccccctcttcctcca

SEQ ID NO: 1684831 - DNA, 15 bp, Homo sapiens
cccctcttcctccaa

SEQ ID NO: 1684832 - DNA, 15 bp, Homo sapiens
ccctcttcctccaac

SEQ ID NO: 1684833 - DNA, 15 bp, Homo sapiens
cctcttcctccaacc

SEQ ID NO: 1684834 - DNA, 15 bp, Homo sapiens
ctcttcctccaaccc

SEQ ID NO: 1684835 - DNA, 15 bp, Homo sapiens
tcttcctccaacccc

SEQ ID NO: 1684836 - DNA, 15 bp, Homo sapiens
cttcctccaacccct

SEQ ID NO: 1684837 - DNA, 15 bp, Homo sapiens
ttcctccaacccctt

SEQ ID NO: 1684838 - DNA, 15 bp, Homo sapiens
tcctccaaccccttt

SEQ ID NO: 1684839 - DNA, 15 bp, Homo sapiens
cctccaaccccttta

SEQ ID NO: 1684840 - DNA, 15 bp, Homo sapiens
ctccaacccctttac

SEQ ID NO: 1684841 - DNA, 15 bp, Homo sapiens
tccaacccctttaca

SEQ ID NO: 1684842 - DNA, 15 bp, Homo sapiens
ccaacccctttacaa

SEQ ID NO: 1684843 - DNA, 15 bp, Homo sapiens
caacccctttacaat

SEQ ID NO: 1684844 - DNA, 15 bp, Homo sapiens
aacccctttacaata

SEQ ID NO: 1684845 - DNA, 15 bp, Homo sapiens
acccctttacaataa

SEQ ID NO: 1684846 - DNA, 15 bp, Homo sapiens
cccctttacaataac

SEQ ID NO: 1684847 - DNA, 15 bp, Homo sapiens
ccctttacaataact

SEQ ID NO: 1684848 - DNA, 15 bp, Homo sapiens
cctttacaataactg

SEQ ID NO: 1684849 - DNA, 15 bp, Homo sapiens
ctttacaataactga

SEQ ID NO: 1684850 - DNA, 15 bp, Homo sapiens
tttacaataactgaa

SEQ ID NO: 1684851 - DNA, 15 bp, Homo sapiens
ttacaataactgaaa

SEQ ID NO: 1684852 - DNA, 15 bp, Homo sapiens
tacaataactgaaat

SEQ ID NO: 1684853 - DNA, 15 bp, Homo sapiens
acaataactgaaata

SEQ ID NO: 1684854 - DNA, 15 bp, Homo sapiens
caataactgaaatac

SEQ ID NO: 1684855 - DNA, 15 bp, Homo sapiens
aataactgaaatact

SEQ ID NO: 1684856 - DNA, 15 bp, Homo sapiens
ataactgaaatactc

SEQ ID NO: 1684857 - DNA, 15 bp, Homo sapiens
taactgaaatactct

SEQ ID NO: 1684858 - DNA, 15 bp, Homo sapiens
aactgaaatactctg

SEQ ID NO: 1684859 - DNA, 15 bp, Homo sapiens
actgaaatactctga

SEQ ID NO: 1684860 - DNA, 15 bp, Homo sapiens
ctgaaatactctgat

SEQ ID NO: 1684861 - DNA, 15 bp, Homo sapiens
tgaaatactctgatg

SEQ ID NO: 1684862 - DNA, 15 bp, Homo sapiens
gaaatactctgatgt

SEQ ID NO: 1684863 - DNA, 15 bp, Homo sapiens
aaatactctgatgtc

SEQ ID NO: 1684864 - DNA, 15 bp, Homo sapiens
aatactctgatgtcc

SEQ ID NO: 1684865 - DNA, 15 bp, Homo sapiens
atactctgatgtcct

SEQ ID NO: 1684866 - DNA, 15 bp, Homo sapiens
tactctgatgtcctg

SEQ ID NO: 1684867 - DNA, 15 bp, Homo sapiens
actctgatgtcctgc

SEQ ID NO: 1684868 - DNA, 15 bp, Homo sapiens
ctctgatgtcctgca

SEQ ID NO: 1684869 - DNA, 15 bp, Homo sapiens
tctgatgtcctgcaa

SEQ ID NO: 1684870 - DNA, 15 bp, Homo sapiens
ctgatgtcctgcaat

SEQ ID NO: 1684871 - DNA, 15 bp, Homo sapiens
tgatgtcctgcaata

SEQ ID NO: 1684872 - DNA, 15 bp, Homo sapiens
gatgtcctgcaatat

SEQ ID NO: 1684873 - DNA, 15 bp, Homo sapiens
atgtcctgcaatatt

SEQ ID NO: 1684874 - DNA, 15 bp, Homo sapiens
tgtcctgcaatattc

SEQ ID NO: 1684875 - DNA, 15 bp, Homo sapiens
gtcctgcaatattct

SEQ ID NO: 1684876 - DNA, 15 bp, Homo sapiens
tcctgcaatattctt

SEQ ID NO: 1684877 - DNA, 15 bp, Homo sapiens
cctgcaatattctta

SEQ ID NO: 1684878 - DNA, 15 bp, Homo sapiens
ctgcaatattcttac

SEQ ID NO: 1684879 - DNA, 15 bp, Homo sapiens
tgcaatattcttact

SEQ ID NO: 1684880 - DNA, 15 bp, Homo sapiens
gcaatattcttacta

SEQ ID NO: 1684881 - DNA, 15 bp, Homo sapiens
caatattcttactat

SEQ ID NO: 1684882 - DNA, 15 bp, Homo sapiens
aatattcttactatt

SEQ ID NO: 1684883 - DNA, 15 bp, Homo sapiens
atattcttactattt

SEQ ID NO: 1684884 - DNA, 15 bp, Homo sapiens
tattcttactattta

SEQ ID NO: 1684885 - DNA, 15 bp, Homo sapiens
attcttactatttat

SEQ ID NO: 1684886 - DNA, 15 bp, Homo sapiens
ttcttactatttatt

SEQ ID NO: 1684887 - DNA, 15 bp, Homo sapiens
tcttactatttattt

SEQ ID NO: 1684888 - DNA, 15 bp, Homo sapiens
cttactatttattta

SEQ ID NO: 1684889 - DNA, 15 bp, Homo sapiens
actatttatttattt

SEQ ID NO: 1684890 - DNA, 15 bp, Homo sapiens
ctatttatttatttt

SEQ ID NO: 1684891 - DNA, 15 bp, Homo sapiens
ttatttattttttgt

SEQ ID NO: 1684892 - DNA, 15 bp, Homo sapiens
tatttattttttgta

SEQ ID NO: 1684893 - DNA, 15 bp, Homo sapiens
atttattttttgtaa

SEQ ID NO: 1684894 - DNA, 15 bp, Homo sapiens
tttattttttgtaaa

SEQ ID NO: 1684895 - DNA, 15 bp, Homo sapiens
ttattttttgtaaaa

SEQ ID NO: 1684896 - DNA, 15 bp, Homo sapiens
tattttttgtaaaaa

SEQ ID NO: 1684897 - DNA, 15 bp, Homo sapiens
attttttgtaaaaag

SEQ ID NO: 1684898 - DNA, 15 bp, Homo sapiens
ttttttgtaaaaagc

SEQ ID NO: 1684899 - DNA, 15 bp, Homo sapiens
tttttgtaaaaagct

SEQ ID NO: 1684900 - DNA, 15 bp, Homo sapiens
ttttgtaaaaagctt

SEQ ID NO: 1684901 - DNA, 15 bp, Homo sapiens
tttgtaaaaagcttt

SEQ ID NO: 1684902 - DNA, 15 bp, Homo sapiens
ttgtaaaaagctttt

SEQ ID NO: 1684903 - DNA, 15 bp, Homo sapiens
tgtaaaaagctttta

SEQ ID NO: 1684904 - DNA, 15 bp, Homo sapiens
gtaaaaagcttttaa

SEQ ID NO: 1684905 - DNA, 15 bp, Homo sapiens
taaaaagcttttaat

SEQ ID NO: 1684906 - DNA, 15 bp, Homo sapiens
aaaaagcttttaata

SEQ ID NO: 1684907 - DNA, 15 bp, Homo sapiens
aaaagcttttaatac

SEQ ID NO: 1684908 - DNA, 15 bp, Homo sapiens
aaagcttttaatact

SEQ ID NO: 1684909 - DNA, 15 bp, Homo sapiens
aagcttttaatacta

SEQ ID NO: 1684910 - DNA, 15 bp, Homo sapiens
agcttttaatactac

SEQ ID NO: 1684911 - DNA, 15 bp, Homo sapiens
gcttttaatactact

SEQ ID NO: 1684912 - DNA, 15 bp, Homo sapiens
cttttaatactactc

SEQ ID NO: 1684913 - DNA, 15 bp, Homo sapiens
ttttaatactactca

SEQ ID NO: 1684914 - DNA, 15 bp, Homo sapiens
tttaatactactcaa

SEQ ID NO: 1684915 - DNA, 15 bp, Homo sapiens
ttaatactactcaac

SEQ ID NO: 1684916 - DNA, 15 bp, Homo sapiens
taatactactcaact

SEQ ID NO: 1684917 - DNA, 15 bp, Homo sapiens
aatactactcaactg

SEQ ID NO: 1684918 - DNA, 15 bp, Homo sapiens
atactactcaactgc

SEQ ID NO: 1684919 - DNA, 15 bp, Homo sapiens
tactactcaactgca

SEQ ID NO: 1684920 - DNA, 15 bp, Homo sapiens
actactcaactgcag

SEQ ID NO: 1684921 - DNA, 15 bp, Homo sapiens
ctactcaactgcagt

SEQ ID NO: 1684922 - DNA, 15 bp, Homo sapiens
tactcaactgcagta

SEQ ID NO: 1684923 - DNA, 15 bp, Homo sapiens
actcaactgcagtag

SEQ ID NO: 1684924 - DNA, 15 bp, Homo sapiens
ctcaactgcagtagt

SEQ ID NO: 1684925 - DNA, 15 bp, Homo sapiens
tcaactgcagtagtg

SEQ ID NO: 1684926 - DNA, 15 bp, Homo sapiens
caactgcagtagtga

SEQ ID NO: 1684927 - DNA, 15 bp, Homo sapiens
aactgcagtagtgag

SEQ ID NO: 1684928 - DNA, 15 bp, Homo sapiens
actgcagtagtgagg

SEQ ID NO: 1684929 - DNA, 15 bp, Homo sapiens
ctgcagtagtgaggg

SEQ ID NO: 1684930 - DNA, 15 bp, Homo sapiens
tgcagtagtgagggg

SEQ ID NO: 1684931 - DNA, 15 bp, Homo sapiens
gcagtagtgaggggg

SEQ ID NO: 1684932 - DNA, 15 bp, Homo sapiens
cagtagtgagggggg

SEQ ID NO: 1684933 - DNA, 15 bp, Homo sapiens
agtagtgaggggggg

SEQ ID NO: 1684934 - DNA, 15 bp, Homo sapiens
gtagtgagggggggg

SEQ ID NO: 1684935 - DNA, 15 bp, Homo sapiens
tagtgaggggggggg

SEQ ID NO: 1684936 - DNA, 15 bp, Homo sapiens
agtgagggggggggg

SEQ ID NO: 1684937 - DNA, 15 bp, Homo sapiens
gtgaggggggggggg

SEQ ID NO: 1684938 - DNA, 15 bp, Homo sapiens
tgaggggggggggga

SEQ ID NO: 1684939 - DNA, 15 bp, Homo sapiens
gagggggggggggaa

SEQ ID NO: 1684940 - DNA, 15 bp, Homo sapiens
agggggggggggaag

SEQ ID NO: 1684941 - DNA, 15 bp, Homo sapiens
gggggggggggaagt

SEQ ID NO: 1684942 - DNA, 15 bp, Homo sapiens
ggggggggggaagta

SEQ ID NO: 1684943 - DNA, 15 bp, Homo sapiens
gggggggggaagtag

SEQ ID NO: 1684944 - DNA, 15 bp, Homo sapiens
ggggggggaagtaga

SEQ ID NO: 1684945 - DNA, 15 bp, Homo sapiens
gggggggaagtagag

SEQ ID NO: 1684946 - DNA, 15 bp, Homo sapiens
ggggggaagtagagc

SEQ ID NO: 1684947 - DNA, 15 bp, Homo sapiens
gggggaagtagagca

SEQ ID NO: 1684948 - DNA, 15 bp, Homo sapiens
ggggaagtagagcaa

SEQ ID NO: 1684949 - DNA, 15 bp, Homo sapiens
gggaagtagagcaag

SEQ ID NO: 1684950 - DNA, 15 bp, Homo sapiens
ggaagtagagcaagg

SEQ ID NO: 1684951 - DNA, 15 bp, Homo sapiens
gaagtagagcaagga

SEQ ID NO: 1684952 - DNA, 15 bp, Homo sapiens
aagtagagcaaggag

SEQ ID NO: 1684953 - DNA, 15 bp, Homo sapiens
agtagagcaaggagt

SEQ ID NO: 1684954 - DNA, 15 bp, Homo sapiens
gtagagcaaggagta

SEQ ID NO: 1684955 - DNA, 15 bp, Homo sapiens
tagagcaaggagtat

SEQ ID NO: 1684956 - DNA, 15 bp, Homo sapiens
agagcaaggagtatg

SEQ ID NO: 1684957 - DNA, 15 bp, Homo sapiens
gagcaaggagtatga

SEQ ID NO: 1684958 - DNA, 15 bp, Homo sapiens
agcaaggagtatgat

SEQ ID NO: 1684959 - DNA, 15 bp, Homo sapiens
gcaaggagtatgatc

SEQ ID NO: 1684960 - DNA, 15 bp, Homo sapiens
caaggagtatgatct

SEQ ID NO: 1684961 - DNA, 15 bp, Homo sapiens
aaggagtatgatctg

SEQ ID NO: 1684962 - DNA, 15 bp, Homo sapiens
aggagtatgatctgt

SEQ ID NO: 1684963 - DNA, 15 bp, Homo sapiens
ggagtatgatctgta

SEQ ID NO: 1684964 - DNA, 15 bp, Homo sapiens
gagtatgatctgtaa

SEQ ID NO: 1684965 - DNA, 15 bp, Homo sapiens
agtatgatctgtaac

SEQ ID NO: 1684966 - DNA, 15 bp, Homo sapiens
gtatgatctgtaact

SEQ ID NO: 1684967 - DNA, 15 bp, Homo sapiens
tatgatctgtaactg

SEQ ID NO: 1684968 - DNA, 15 bp, Homo sapiens
atgatctgtaactga

SEQ ID NO: 1684969 - DNA, 15 bp, Homo sapiens
tgatctgtaactgat

SEQ ID NO: 1684970 - DNA, 15 bp, Homo sapiens
gatctgtaactgatc

SEQ ID NO: 1684971 - DNA, 15 bp, Homo sapiens
atctgtaactgatcc

SEQ ID NO: 1684972 - DNA, 15 bp, Homo sapiens
tctgtaactgatcct

SEQ ID NO: 1684973 - DNA, 15 bp, Homo sapiens
ctgtaactgatcctg

SEQ ID NO: 1684974 - DNA, 15 bp, Homo sapiens
gtaactgatcctgaa

SEQ ID NO: 1684975 - DNA, 15 bp, Homo sapiens
taactgatcctgaac

SEQ ID NO: 1684976 - DNA, 15 bp, Homo sapiens
aactgatcctgaaca

SEQ ID NO: 1684977 - DNA, 15 bp, Homo sapiens
actgatcctgaacaa

SEQ ID NO: 1684978 - DNA, 15 bp, Homo sapiens
ctgatcctgaacaat

SEQ ID NO: 1684979 - DNA, 15 bp, Homo sapiens
tgatcctgaacaatc

SEQ ID NO: 1684980 - DNA, 15 bp, Homo sapiens
gatcctgaacaatca

SEQ ID NO: 1684981 - DNA, 15 bp, Homo sapiens
atcctgaacaatcaa

SEQ ID NO: 1684982 - DNA, 15 bp, Homo sapiens
tcctgaacaatcaat

SEQ ID NO: 1684983 - DNA, 15 bp, Homo sapiens
cctgaacaatcaatt

SEQ ID NO: 1684984 - DNA, 15 bp, Homo sapiens
ctgaacaatcaattg

SEQ ID NO: 1684985 - DNA, 15 bp, Homo sapiens
tgaacaatcaattgg

SEQ ID NO: 1684986 - DNA, 15 bp, Homo sapiens
gaacaatcaattggg

SEQ ID NO: 1684987 - DNA, 15 bp, Homo sapiens
aacaatcaattggga

SEQ ID NO: 1684988 - DNA, 15 bp, Homo sapiens
acaatcaattgggat

SEQ ID NO: 1684989 - DNA, 15 bp, Homo sapiens
caatcaattgggata

SEQ ID NO: 1684990 - DNA, 15 bp, Homo sapiens
aatcaattgggataa

SEQ ID NO: 1684991 - DNA, 15 bp, Homo sapiens
atcaattgggataac

SEQ ID NO: 1684992 - DNA, 15 bp, Homo sapiens
tcaattgggataact

SEQ ID NO: 1684993 - DNA, 15 bp, Homo sapiens
caattgggataactc

SEQ ID NO: 1684994 - DNA, 15 bp, Homo sapiens
aattgggataactca

SEQ ID NO: 1684995 - DNA, 15 bp, Homo sapiens
attgggataactcac

SEQ ID NO: 1684996 - DNA, 15 bp, Homo sapiens
ttgggataactcact

SEQ ID NO: 1684997 - DNA, 15 bp, Homo sapiens
tgggataactcactg

SEQ ID NO: 1684998 - DNA, 15 bp, Homo sapiens
gggataactcactgc

SEQ ID NO: 1684999 - DNA, 15 bp, Homo sapiens
ggataactcactgcc

SEQ ID NO: 1685000 - DNA, 15 bp, Homo sapiens
gataactcactgcct

SEQ ID NO: 1685001 - DNA, 15 bp, Homo sapiens
ataactcactgccta

SEQ ID NO: 1685002 - DNA, 15 bp, Homo sapiens
taactcactgcctag

SEQ ID NO: 1685003 - DNA, 15 bp, Homo sapiens
aactcactgcctaga

SEQ ID NO: 1685004 - DNA, 15 bp, Homo sapiens
actcactgcctagat

SEQ ID NO: 1685005 - DNA, 15 bp, Homo sapiens
ctcactgcctagata

SEQ ID NO: 1685006 - DNA, 15 bp, Homo sapiens
tcactgcctagataa

SEQ ID NO: 1685007 - DNA, 15 bp, Homo sapiens
cactgcctagataat

SEQ ID NO: 1685008 - DNA, 15 bp, Homo sapiens
actgcctagataatt

SEQ ID NO: 1685009 - DNA, 15 bp, Homo sapiens
ctgcctagataattc

SEQ ID NO: 1685010 - DNA, 15 bp, Homo sapiens
tgcctagataattca

SEQ ID NO: 1685011 - DNA, 15 bp, Homo sapiens
gcctagataattcac

SEQ ID NO: 1685012 - DNA, 15 bp, Homo sapiens
cctagataattcact

SEQ ID NO: 1685013 - DNA, 15 bp, Homo sapiens
ctagataattcacta

SEQ ID NO: 1685014 - DNA, 15 bp, Homo sapiens
tagataattcactat

SEQ ID NO: 1685015 - DNA, 15 bp, Homo sapiens
agataattcactatt

SEQ ID NO: 1685016 - DNA, 15 bp, Homo sapiens
gataattcactattt

SEQ ID NO: 1685017 - DNA, 15 bp, Homo sapiens
ataattcactattta

SEQ ID NO: 1685018 - DNA, 15 bp, Homo sapiens
taattcactatttag

SEQ ID NO: 1685019 - DNA, 15 bp, Homo sapiens
aattcactatttaga

SEQ ID NO: 1685020 - DNA, 15 bp, Homo sapiens
attcactatttagat

SEQ ID NO: 1685021 - DNA, 15 bp, Homo sapiens
ttcactatttagatg

SEQ ID NO: 1685022 - DNA, 15 bp, Homo sapiens
tcactatttagatgc

SEQ ID NO: 1685023 - DNA, 15 bp, Homo sapiens
cactatttagatgct

SEQ ID NO: 1685024 - DNA, 15 bp, Homo sapiens
actatttagatgctg

SEQ ID NO: 1685025 - DNA, 15 bp, Homo sapiens
ctatttagatgctgt

SEQ ID NO: 1685026 - DNA, 15 bp, Homo sapiens
tatttagatgctgta

SEQ ID NO: 1685027 - DNA, 15 bp, Homo sapiens
atttagatgctgtat

SEQ ID NO: 1685028 - DNA, 15 bp, Homo sapiens
tttagatgctgtatt

SEQ ID NO: 1685029 - DNA, 15 bp, Homo sapiens
ttagatgctgtatta

SEQ ID NO: 1685030 - DNA, 15 bp, Homo sapiens
tagatgctgtattat

SEQ ID NO: 1685031 - DNA, 15 bp, Homo sapiens
agatgctgtattatt

SEQ ID NO: 1685032 - DNA, 15 bp, Homo sapiens
gatgctgtattatta

SEQ ID NO: 1685033 - DNA, 15 bp, Homo sapiens
atgctgtattattag

SEQ ID NO: 1685034 - DNA, 15 bp, Homo sapiens
tgctgtattattagg

SEQ ID NO: 1685035 - DNA, 15 bp, Homo sapiens
gctgtattattaggg

SEQ ID NO: 1685036 - DNA, 15 bp, Homo sapiens
ctgtattattagggt

SEQ ID NO: 1685037 - DNA, 15 bp, Homo sapiens
tgtattattagggtc

SEQ ID NO: 1685038 - DNA, 15 bp, Homo sapiens
gtattattagggtca

SEQ ID NO: 1685039 - DNA, 15 bp, Homo sapiens
tattattagggtcaa

SEQ ID NO: 1685040 - DNA, 15 bp, Homo sapiens
attattagggtcaac

SEQ ID NO: 1685041 - DNA, 15 bp, Homo sapiens
tattagggtcaacag

SEQ ID NO: 1685042 - DNA, 15 bp, Homo sapiens
attagggtcaacagc

SEQ ID NO: 1685043 - DNA, 15 bp, Homo sapiens
ttagggtcaacagct

SEQ ID NO: 1685044 - DNA, 15 bp, Homo sapiens
tagggtcaacagcta

SEQ ID NO: 1685045 - DNA, 15 bp, Homo sapiens
agggtcaacagctaa

SEQ ID NO: 1685046 - DNA, 15 bp, Homo sapiens
gggtcaacagctaac

SEQ ID NO: 1685047 - DNA, 15 bp, Homo sapiens
ggtcaacagctaact

SEQ ID NO: 1685048 - DNA, 15 bp, Homo sapiens
gtcaacagctaactg

SEQ ID NO: 1685049 - DNA, 15 bp, Homo sapiens
tcaacagctaactgg

SEQ ID NO: 1685050 - DNA, 15 bp, Homo sapiens
caacagctaactgga

SEQ ID NO: 1685051 - DNA, 15 bp, Homo sapiens
aacagctaactggag

SEQ ID NO: 1685052 - DNA, 15 bp, Homo sapiens
acagctaactggagc

SEQ ID NO: 1685053 - DNA, 15 bp, Homo sapiens
cagctaactggagca

SEQ ID NO: 1685054 - DNA, 15 bp, Homo sapiens
agctaactggagcaa

SEQ ID NO: 1685055 - DNA, 15 bp, Homo sapiens
gctaactggagcaac

SEQ ID NO: 1685056 - DNA, 15 bp, Homo sapiens
ctaactggagcaaca

SEQ ID NO: 1685057 - DNA, 15 bp, Homo sapiens
taactggagcaacag

SEQ ID NO: 1685058 - DNA, 15 bp, Homo sapiens
aactggagcaacagc

SEQ ID NO: 1685059 - DNA, 15 bp, Homo sapiens
actggagcaacagct

SEQ ID NO: 1685060 - DNA, 15 bp, Homo sapiens
ctggagcaacagcta

SEQ ID NO: 1685061 - DNA, 15 bp, Homo sapiens
tggagcaacagctaa

SEQ ID NO: 1685062 - DNA, 15 bp, Homo sapiens
ggagcaacagctaaa

SEQ ID NO: 1685063 - DNA, 15 bp, Homo sapiens
gagcaacagctaaag

SEQ ID NO: 1685064 - DNA, 15 bp, Homo sapiens
agcaacagctaaagt

SEQ ID NO: 1685065 - DNA, 15 bp, Homo sapiens
gcaacagctaaagtc

SEQ ID NO: 1685066 - DNA, 15 bp, Homo sapiens
caacagctaaagtca

SEQ ID NO: 1685067 - DNA, 15 bp, Homo sapiens
aacagctaaagtcaa

SEQ ID NO: 1685068 - DNA, 15 bp, Homo sapiens
acagctaaagtcaag

SEQ ID NO: 1685069 - DNA, 15 bp, Homo sapiens
cagctaaagtcaaga

SEQ ID NO: 1685070 - DNA, 15 bp, Homo sapiens
agctaaagtcaagat

SEQ ID NO: 1685071 - DNA, 15 bp, Homo sapiens
gctaaagtcaagata

SEQ ID NO: 1685072 - DNA, 15 bp, Homo sapiens
ctaaagtcaagataa

SEQ ID NO: 1685073 - DNA, 15 bp, Homo sapiens
taaagtcaagataag

SEQ ID NO: 1685074 - DNA, 15 bp, Homo sapiens
aaagtcaagataaga

SEQ ID NO: 1685075 - DNA, 15 bp, Homo sapiens
aagtcaagataagag

SEQ ID NO: 1685076 - DNA, 15 bp, Homo sapiens
agtcaagataagaga

SEQ ID NO: 1685077 - DNA, 15 bp, Homo sapiens
gtcaagataagagaa

SEQ ID NO: 1685078 - DNA, 15 bp, Homo sapiens
tcaagataagagaat

SEQ ID NO: 1685079 - DNA, 15 bp, Homo sapiens
caagataagagaatt

SEQ ID NO: 1685080 - DNA, 15 bp, Homo sapiens
aagataagagaattg

SEQ ID NO: 1685081 - DNA, 15 bp, Homo sapiens
agataagagaattgt

SEQ ID NO: 1685082 - DNA, 15 bp, Homo sapiens
gataagagaattgtc

SEQ ID NO: 1685083 - DNA, 15 bp, Homo sapiens
ataagagaattgtca

SEQ ID NO: 1685084 - DNA, 15 bp, Homo sapiens
taagagaattgtcat

SEQ ID NO: 1685085 - DNA, 15 bp, Homo sapiens
aagagaattgtcata

SEQ ID NO: 1685086 - DNA, 15 bp, Homo sapiens
agagaattgtcatag

SEQ ID NO: 1685087 - DNA, 15 bp, Homo sapiens
gagaattgtcatagg

SEQ ID NO: 1685088 - DNA, 15 bp, Homo sapiens
agaattgtcataggt

SEQ ID NO: 1685089 - DNA, 15 bp, Homo sapiens
gaattgtcataggtg

SEQ ID NO: 1685090 - DNA, 15 bp, Homo sapiens
aattgtcataggtgc

SEQ ID NO: 1685091 - DNA, 15 bp, Homo sapiens
attgtcataggtgct

SEQ ID NO: 1685092 - DNA, 15 bp, Homo sapiens
ttgtcataggtgctg

SEQ ID NO: 1685093 - DNA, 15 bp, Homo sapiens
tgtcataggtgctgg

SEQ ID NO: 1685094 - DNA, 15 bp, Homo sapiens
gtcataggtgctgga

SEQ ID NO: 1685095 - DNA, 15 bp, Homo sapiens
tcataggtgctggac

SEQ ID NO: 1685096 - DNA, 15 bp, Homo sapiens
cataggtgctggact

SEQ ID NO: 1685097 - DNA, 15 bp, Homo sapiens
ataggtgctggactt

SEQ ID NO: 1685098 - DNA, 15 bp, Homo sapiens
taggtgctggacttt

SEQ ID NO: 1685099 - DNA, 15 bp, Homo sapiens
aggtgctggactttt

SEQ ID NO: 1685100 - DNA, 15 bp, Homo sapiens
ggtgctggacttttc

SEQ ID NO: 1685101 - DNA, 15 bp, Homo sapiens
gtgctggacttttct

SEQ ID NO: 1685102 - DNA, 15 bp, Homo sapiens
tgctggacttttctc

SEQ ID NO: 1685103 - DNA, 15 bp, Homo sapiens
gctggacttttctct

SEQ ID NO: 1685104 - DNA, 15 bp, Homo sapiens
ctggacttttctctc

SEQ ID NO: 1685105 - DNA, 15 bp, Homo sapiens
tggacttttctctcc

SEQ ID NO: 1685106 - DNA, 15 bp, Homo sapiens
ggacttttctctcct

SEQ ID NO: 1685107 - DNA, 15 bp, Homo sapiens
gacttttctctcctc

SEQ ID NO: 1685108 - DNA, 15 bp, Homo sapiens
acttttctctcctca

SEQ ID NO: 1685109 - DNA, 15 bp, Homo sapiens
cttttctctcctcaa

SEQ ID NO: 1685110 - DNA, 15 bp, Homo sapiens
ttttctctcctcaac

SEQ ID NO: 1685111 - DNA, 15 bp, Homo sapiens
tttctctcctcaaca

SEQ ID NO: 1685112 - DNA, 15 bp, Homo sapiens
ttctctcctcaacat

SEQ ID NO: 1685113 - DNA, 15 bp, Homo sapiens
tctctcctcaacatc

SEQ ID NO: 1685114 - DNA, 15 bp, Homo sapiens
ctctcctcaacatca

SEQ ID NO: 1685115 - DNA, 15 bp, Homo sapiens
tctcctcaacatcat

SEQ ID NO: 1685116 - DNA, 15 bp, Homo sapiens
ctcctcaacatcatc

SEQ ID NO: 1685117 - DNA, 15 bp, Homo sapiens
tcctcaacatcatca

SEQ ID NO: 1685118 - DNA, 15 bp, Homo sapiens
cctcaacatcatcac

SEQ ID NO: 1685119 - DNA, 15 bp, Homo sapiens
ctcaacatcatcact

SEQ ID NO: 1685120 - DNA, 15 bp, Homo sapiens
tcaacatcatcactt

SEQ ID NO: 1685121 - DNA, 15 bp, Homo sapiens
caacatcatcacttc

SEQ ID NO: 1685122 - DNA, 15 bp, Homo sapiens
aacatcatcacttca

SEQ ID NO: 1685123 - DNA, 15 bp, Homo sapiens
acatcatcacttcac

SEQ ID NO: 1685124 - DNA, 15 bp, Homo sapiens
catcatcacttcacc

SEQ ID NO: 1685125 - DNA, 15 bp, Homo sapiens
atcatcacttcacct

SEQ ID NO: 1685126 - DNA, 15 bp, Homo sapiens
tcatcacttcacctt

SEQ ID NO: 1685127 - DNA, 15 bp, Homo sapiens
catcacttcaccttc

SEQ ID NO: 1685128 - DNA, 15 bp, Homo sapiens
atcacttcaccttcc

SEQ ID NO: 1685129 - DNA, 15 bp, Homo sapiens
tcacttcaccttcct

SEQ ID NO: 1685130 - DNA, 15 bp, Homo sapiens
cacttcaccttcctg

SEQ ID NO: 1685131 - DNA, 15 bp, Homo sapiens
acttcaccttcctga

SEQ ID NO: 1685132 - DNA, 15 bp, Homo sapiens
cttcaccttcctgaa

SEQ ID NO: 1685133 - DNA, 15 bp, Homo sapiens
ttcaccttcctgaac

SEQ ID NO: 1685134 - DNA, 15 bp, Homo sapiens
caccttcctgaactc

SEQ ID NO: 1685135 - DNA, 15 bp, Homo sapiens
accttcctgaactcc

SEQ ID NO: 1685136 - DNA, 15 bp, Homo sapiens
ccttcctgaactccg

SEQ ID NO: 1685137 - DNA, 15 bp, Homo sapiens
cttcctgaactccgc

SEQ ID NO: 1685138 - DNA, 15 bp, Homo sapiens
ttcctgaactccgcc

SEQ ID NO: 1685139 - DNA, 15 bp, Homo sapiens
tcctgaactccgccc

SEQ ID NO: 1685140 - DNA, 15 bp, Homo sapiens
cctgaactccgccca

SEQ ID NO: 1685141 - DNA, 15 bp, Homo sapiens
ctgaactccgcccac

SEQ ID NO: 1685142 - DNA, 15 bp, Homo sapiens
tgaactccgcccaca

SEQ ID NO: 1685143 - DNA, 15 bp, Homo sapiens
gaactccgcccacat

SEQ ID NO: 1685144 - DNA, 15 bp, Homo sapiens
aactccgcccacatg

SEQ ID NO: 1685145 - DNA, 15 bp, Homo sapiens
actccgcccacatgt

SEQ ID NO: 1685146 - DNA, 15 bp, Homo sapiens
ctccgcccacatgtt

SEQ ID NO: 1685147 - DNA, 15 bp, Homo sapiens
tccgcccacatgttc

SEQ ID NO: 1685148 - DNA, 15 bp, Homo sapiens
ccgcccacatgttct

SEQ ID NO: 1685149 - DNA, 15 bp, Homo sapiens
cgcccacatgttctt

SEQ ID NO: 1685150 - DNA, 15 bp, Homo sapiens
gcccacatgttcttc

SEQ ID NO: 1685151 - DNA, 15 bp, Homo sapiens
cccacatgttcttct

SEQ ID NO: 1685152 - DNA, 15 bp, Homo sapiens
ccacatgttcttctt

SEQ ID NO: 1685153 - DNA, 15 bp, Homo sapiens
cacatgttcttcttc

SEQ ID NO: 1685154 - DNA, 15 bp, Homo sapiens
acatgttcttcttcc

SEQ ID NO: 1685155 - DNA, 15 bp, Homo sapiens
catgttcttcttcct

SEQ ID NO: 1685156 - DNA, 15 bp, Homo sapiens
atgttcttcttcctc

SEQ ID NO: 1685157 - DNA, 15 bp, Homo sapiens
tgttcttcttcctcc

SEQ ID NO: 1685158 - DNA, 15 bp, Homo sapiens
gttcttcttcctcct

SEQ ID NO: 1685159 - DNA, 15 bp, Homo sapiens
ttcttcttcctcctt

SEQ ID NO: 1685160 - DNA, 15 bp, Homo sapiens
tcttcttcctccttc

SEQ ID NO: 1685161 - DNA, 15 bp, Homo sapiens
cttcttcctccttct

SEQ ID NO: 1685162 - DNA, 15 bp, Homo sapiens
ttcttcctccttctc

SEQ ID NO: 1685163 - DNA, 15 bp, Homo sapiens
tcttcctccttctct

SEQ ID NO: 1685164 - DNA, 15 bp, Homo sapiens
cttcctccttctcta

SEQ ID NO: 1685165 - DNA, 15 bp, Homo sapiens
ttcctccttctctaa

SEQ ID NO: 1685166 - DNA, 15 bp, Homo sapiens
cctccttctctaaca

SEQ ID NO: 1685167 - DNA, 15 bp, Homo sapiens
ctccttctctaacac

SEQ ID NO: 1685168 - DNA, 15 bp, Homo sapiens
tccttctctaacacc

SEQ ID NO: 1685169 - DNA, 15 bp, Homo sapiens
ccttctctaacacct

SEQ ID NO: 1685170 - DNA, 15 bp, Homo sapiens
cttctctaacaccta

SEQ ID NO: 1685171 - DNA, 15 bp, Homo sapiens
ttctctaacacctac

SEQ ID NO: 1685172 - DNA, 15 bp, Homo sapiens
tctctaacacctact

SEQ ID NO: 1685173 - DNA, 15 bp, Homo sapiens
ctctaacacctactg

SEQ ID NO: 1685174 - DNA, 15 bp, Homo sapiens
tctaacacctactga

SEQ ID NO: 1685175 - DNA, 15 bp, Homo sapiens
ctaacacctactgag

SEQ ID NO: 1685176 - DNA, 15 bp, Homo sapiens
taacacctactgaga

SEQ ID NO: 1685177 - DNA, 15 bp, Homo sapiens
aacacctactgagaa

SEQ ID NO: 1685178 - DNA, 15 bp, Homo sapiens
acacctactgagaaa

SEQ ID NO: 1685179 - DNA, 15 bp, Homo sapiens
cacctactgagaaat

SEQ ID NO: 1685180 - DNA, 15 bp, Homo sapiens
acctactgagaaatt

SEQ ID NO: 1685181 - DNA, 15 bp, Homo sapiens
cctactgagaaattg

SEQ ID NO: 1685182 - DNA, 15 bp, Homo sapiens
ctactgagaaattga

SEQ ID NO: 1685183 - DNA, 15 bp, Homo sapiens
tactgagaaattgag

SEQ ID NO: 1685184 - DNA, 15 bp, Homo sapiens
actgagaaattgaga

SEQ ID NO: 1685185 - DNA, 15 bp, Homo sapiens
ctgagaaattgagaa

SEQ ID NO: 1685186 - DNA, 15 bp, Homo sapiens
tgagaaattgagaag

SEQ ID NO: 1685187 - DNA, 15 bp, Homo sapiens
gagaaattgagaagg

SEQ ID NO: 1685188 - DNA, 15 bp, Homo sapiens
agaaattgagaaggc

SEQ ID NO: 1685189 - DNA, 15 bp, Homo sapiens
gaaattgagaaggcg

SEQ ID NO: 1685190 - DNA, 15 bp, Homo sapiens
aaattgagaaggcga

SEQ ID NO: 1685191 - DNA, 15 bp, Homo sapiens
aattgagaaggcgat

SEQ ID NO: 1685192 - DNA, 15 bp, Homo sapiens
attgagaaggcgatt

SEQ ID NO: 1685193 - DNA, 15 bp, Homo sapiens
ttgagaaggcgattc

SEQ ID NO: 1685194 - DNA, 15 bp, Homo sapiens
tgagaaggcgattct

SEQ ID NO: 1685195 - DNA, 15 bp, Homo sapiens
gagaaggcgattctc

SEQ ID NO: 1685196 - DNA, 15 bp, Homo sapiens
agaaggcgattctct

SEQ ID NO: 1685197 - DNA, 15 bp, Homo sapiens
gaaggcgattctctt

SEQ ID NO: 1685198 - DNA, 15 bp, Homo sapiens
aaggcgattctcttc

SEQ ID NO: 1685199 - DNA, 15 bp, Homo sapiens
aggcgattctcttct

SEQ ID NO: 1685200 - DNA, 15 bp, Homo sapiens
ggcgattctcttctg

SEQ ID NO: 1685201 - DNA, 15 bp, Homo sapiens
gcgattctcttctgg

SEQ ID NO: 1685202 - DNA, 15 bp, Homo sapiens
cgattctcttctggc

SEQ ID NO: 1685203 - DNA, 15 bp, Homo sapiens
gattctcttctggcc

SEQ ID NO: 1685204 - DNA, 15 bp, Homo sapiens
attctcttctggcca

SEQ ID NO: 1685205 - DNA, 15 bp, Homo sapiens
ttctcttctggccaa

SEQ ID NO: 1685206 - DNA, 15 bp, Homo sapiens
tctcttctggccaat

SEQ ID NO: 1685207 - DNA, 15 bp, Homo sapiens
ctcttctggccaata

SEQ ID NO: 1685208 - DNA, 15 bp, Homo sapiens
tcttctggccaataa

SEQ ID NO: 1685209 - DNA, 15 bp, Homo sapiens
cttctggccaataat

SEQ ID NO: 1685210 - DNA, 15 bp, Homo sapiens
ttctggccaataata

SEQ ID NO: 1685211 - DNA, 15 bp, Homo sapiens
tctggccaataatat

SEQ ID NO: 1685212 - DNA, 15 bp, Homo sapiens
ctggccaataatatt

SEQ ID NO: 1685213 - DNA, 15 bp, Homo sapiens
tggccaataatatta

SEQ ID NO: 1685214 - DNA, 15 bp, Homo sapiens
ggccaataatattat

SEQ ID NO: 1685215 - DNA, 15 bp, Homo sapiens
gccaataatattata

SEQ ID NO: 1685216 - DNA, 15 bp, Homo sapiens
ccaataatattatac

SEQ ID NO: 1685217 - DNA, 15 bp, Homo sapiens
caataatattatact

SEQ ID NO: 1685218 - DNA, 15 bp, Homo sapiens
aataatattatacta

SEQ ID NO: 1685219 - DNA, 15 bp, Homo sapiens
ataatattatactat

SEQ ID NO: 1685220 - DNA, 15 bp, Homo sapiens
taatattatactatt

SEQ ID NO: 1685221 - DNA, 15 bp, Homo sapiens
aatattatactattt

SEQ ID NO: 1685222 - DNA, 15 bp, Homo sapiens
atattatactatttc

SEQ ID NO: 1685223 - DNA, 15 bp, Homo sapiens
tattatactatttca

SEQ ID NO: 1685224 - DNA, 15 bp, Homo sapiens
attatactatttcag

SEQ ID NO: 1685225 - DNA, 15 bp, Homo sapiens
ttatactatttcaga

SEQ ID NO: 1685226 - DNA, 15 bp, Homo sapiens
tatactatttcagag

SEQ ID NO: 1685227 - DNA, 15 bp, Homo sapiens
atactatttcagagc

SEQ ID NO: 1685228 - DNA, 15 bp, Homo sapiens
tactatttcagagca

SEQ ID NO: 1685229 - DNA, 15 bp, Homo sapiens
actatttcagagcaa

SEQ ID NO: 1685230 - DNA, 15 bp, Homo sapiens
ctatttcagagcaag

SEQ ID NO: 1685231 - DNA, 15 bp, Homo sapiens
tatttcagagcaagg

SEQ ID NO: 1685232 - DNA, 15 bp, Homo sapiens
atttcagagcaaggt

SEQ ID NO: 1685233 - DNA, 15 bp, Homo sapiens
tttcagagcaaggtt

SEQ ID NO: 1685234 - DNA, 15 bp, Homo sapiens
ttcagagcaaggttc

SEQ ID NO: 1685235 - DNA, 15 bp, Homo sapiens
tcagagcaaggttct

SEQ ID NO: 1685236 - DNA, 15 bp, Homo sapiens
cagagcaaggttcta

SEQ ID NO: 1685237 - DNA, 15 bp, Homo sapiens
agagcaaggttctat

SEQ ID NO: 1685238 - DNA, 15 bp, Homo sapiens
gagcaaggttctata

SEQ ID NO: 1685239 - DNA, 15 bp, Homo sapiens
agcaaggttctatat

SEQ ID NO: 1685240 - DNA, 15 bp, Homo sapiens
gcaaggttctatatg

SEQ ID NO: 1685241 - DNA, 15 bp, Homo sapiens
caaggttctatatgc

SEQ ID NO: 1685242 - DNA, 15 bp, Homo sapiens
aaggttctatatgct

SEQ ID NO: 1685243 - DNA, 15 bp, Homo sapiens
aggttctatatgcta

SEQ ID NO: 1685244 - DNA, 15 bp, Homo sapiens
ggttctatatgctaa

SEQ ID NO: 1685245 - DNA, 15 bp, Homo sapiens
gttctatatgctaaa

SEQ ID NO: 1685246 - DNA, 15 bp, Homo sapiens
ttctatatgctaaac

SEQ ID NO: 1685247 - DNA, 15 bp, Homo sapiens
tctatatgctaaact

SEQ ID NO: 1685248 - DNA, 15 bp, Homo sapiens
ctatatgctaaactt

SEQ ID NO: 1685249 - DNA, 15 bp, Homo sapiens
tatatgctaaacttt

SEQ ID NO: 1685250 - DNA, 15 bp, Homo sapiens
atatgctaaactttg

SEQ ID NO: 1685251 - DNA, 15 bp, Homo sapiens
tatgctaaactttgg

SEQ ID NO: 1685252 - DNA, 15 bp, Homo sapiens
atgctaaactttgga

SEQ ID NO: 1685253 - DNA, 15 bp, Homo sapiens
tgctaaactttggaa

SEQ ID NO: 1685254 - DNA, 15 bp, Homo sapiens
gctaaactttggaag

SEQ ID NO: 1685255 - DNA, 15 bp, Homo sapiens
ctaaactttggaagg

SEQ ID NO: 1685256 - DNA, 15 bp, Homo sapiens
taaactttggaaggc

SEQ ID NO: 1685257 - DNA, 15 bp, Homo sapiens
aaactttggaaggca

SEQ ID NO: 1685258 - DNA, 15 bp, Homo sapiens
aactttggaaggcat

SEQ ID NO: 1685259 - DNA, 15 bp, Homo sapiens
actttggaaggcatt

SEQ ID NO: 1685260 - DNA, 15 bp, Homo sapiens
ctttggaaggcattc

SEQ ID NO: 1685261 - DNA, 15 bp, Homo sapiens
ttggaaggcattctt

SEQ ID NO: 1685262 - DNA, 15 bp, Homo sapiens
tggaaggcattctta

SEQ ID NO: 1685263 - DNA, 15 bp, Homo sapiens
ggaaggcattcttag

SEQ ID NO: 1685264 - DNA, 15 bp, Homo sapiens
gaaggcattcttaga

SEQ ID NO: 1685265 - DNA, 15 bp, Homo sapiens
aaggcattcttagat

SEQ ID NO: 1685266 - DNA, 15 bp, Homo sapiens
aggcattcttagata

SEQ ID NO: 1685267 - DNA, 15 bp, Homo sapiens
ggcattcttagatat

SEQ ID NO: 1685268 - DNA, 15 bp, Homo sapiens
gcattcttagatatt

SEQ ID NO: 1685269 - DNA, 15 bp, Homo sapiens
cattcttagatattc

SEQ ID NO: 1685270 - DNA, 15 bp, Homo sapiens
attcttagatattcc

SEQ ID NO: 1685271 - DNA, 15 bp, Homo sapiens
ttcttagatattcct

SEQ ID NO: 1685272 - DNA, 15 bp, Homo sapiens
tcttagatattcctc

SEQ ID NO: 1685273 - DNA, 15 bp, Homo sapiens
cttagatattcctcc

SEQ ID NO: 1685274 - DNA, 15 bp, Homo sapiens
ttagatattcctcct

SEQ ID NO: 1685275 - DNA, 15 bp, Homo sapiens
tagatattcctcctc

SEQ ID NO: 1685276 - DNA, 15 bp, Homo sapiens
agatattcctcctcc

SEQ ID NO: 1685277 - DNA, 15 bp, Homo sapiens
gatattcctcctccc

SEQ ID NO: 1685278 - DNA, 15 bp, Homo sapiens
atattcctcctccct

SEQ ID NO: 1685279 - DNA, 15 bp, Homo sapiens
tattcctcctccctg

SEQ ID NO: 1685280 - DNA, 15 bp, Homo sapiens
attcctcctccctgc

SEQ ID NO: 1685281 - DNA, 15 bp, Homo sapiens
ttcctcctccctgcg

SEQ ID NO: 1685282 - DNA, 15 bp, Homo sapiens
tcctcctccctgcgg

SEQ ID NO: 1685283 - DNA, 15 bp, Homo sapiens
cctcctccctgcggg

SEQ ID NO: 1685284 - DNA, 15 bp, Homo sapiens
ctcctccctgcgggc

SEQ ID NO: 1685285 - DNA, 15 bp, Homo sapiens
tcctccctgcgggct

SEQ ID NO: 1685286 - DNA, 15 bp, Homo sapiens
cctccctgcgggcta

SEQ ID NO: 1685287 - DNA, 15 bp, Homo sapiens
ctccctgcgggctag

SEQ ID NO: 1685288 - DNA, 15 bp, Homo sapiens
tccctgcgggctaga

SEQ ID NO: 1685289 - DNA, 15 bp, Homo sapiens
ccctgcgggctagac

SEQ ID NO: 1685290 - DNA, 15 bp, Homo sapiens
cctgcgggctagact

SEQ ID NO: 1685291 - DNA, 15 bp, Homo sapiens
ctgcgggctagactt

SEQ ID NO: 1685292 - DNA, 15 bp, Homo sapiens
tgcgggctagactta

SEQ ID NO: 1685293 - DNA, 15 bp, Homo sapiens
gcgggctagacttac

SEQ ID NO: 1685294 - DNA, 15 bp, Homo sapiens
cgggctagacttact

SEQ ID NO: 1685295 - DNA, 15 bp, Homo sapiens
gggctagacttacta

SEQ ID NO: 1685296 - DNA, 15 bp, Homo sapiens
ggctagacttactag

SEQ ID NO: 1685297 - DNA, 15 bp, Homo sapiens
gctagacttactagg

SEQ ID NO: 1685298 - DNA, 15 bp, Homo sapiens
ctagacttactaggg

SEQ ID NO: 1685299 - DNA, 15 bp, Homo sapiens
tagacttactagggg

SEQ ID NO: 1685300 - DNA, 15 bp, Homo sapiens
agacttactaggggt

SEQ ID NO: 1685301 - DNA, 15 bp, Homo sapiens
gacttactaggggtt

SEQ ID NO: 1685302 - DNA, 15 bp, Homo sapiens
acttactaggggtta

SEQ ID NO: 1685303 - DNA, 15 bp, Homo sapiens
cttactaggggttaa

SEQ ID NO: 1685304 - DNA, 15 bp, Homo sapiens
ttactaggggttaaa

SEQ ID NO: 1685305 - DNA, 15 bp, Homo sapiens
tactaggggttaaaa

SEQ ID NO: 1685306 - DNA, 15 bp, Homo sapiens
actaggggttaaaaa

SEQ ID NO: 1685307 - DNA, 15 bp, Homo sapiens
ctaggggttaaaaag

SEQ ID NO: 1685308 - DNA, 15 bp, Homo sapiens
taggggttaaaaaga

SEQ ID NO: 1685309 - DNA, 15 bp, Homo sapiens
aggggttaaaaagaa

SEQ ID NO: 1685310 - DNA, 15 bp, Homo sapiens
ggggttaaaaagaaa

SEQ ID NO: 1685311 - DNA, 15 bp, Homo sapiens
gggttaaaaagaaat

SEQ ID NO: 1685312 - DNA, 15 bp, Homo sapiens
ggttaaaaagaaatc

SEQ ID NO: 1685313 - DNA, 15 bp, Homo sapiens
gttaaaaagaaatcc

SEQ ID NO: 1685314 - DNA, 15 bp, Homo sapiens
ttaaaaagaaatccc

SEQ ID NO: 1685315 - DNA, 15 bp, Homo sapiens
taaaaagaaatccct

SEQ ID NO: 1685316 - DNA, 15 bp, Homo sapiens
aaaaagaaatccctt

SEQ ID NO: 1685317 - DNA, 15 bp, Homo sapiens
aaaagaaatcccttt

SEQ ID NO: 1685318 - DNA, 15 bp, Homo sapiens
aaagaaatccctttt

SEQ ID NO: 1685319 - DNA, 15 bp, Homo sapiens
aagaaatcccttttt

SEQ ID NO: 1685320 - DNA, 15 bp, Homo sapiens
agaaatcccttttta

SEQ ID NO: 1685321 - DNA, 15 bp, Homo sapiens
gaaatccctttttac

SEQ ID NO: 1685322 - DNA, 15 bp, Homo sapiens
aaatccctttttaca

SEQ ID NO: 1685323 - DNA, 15 bp, Homo sapiens
aatccctttttacat

SEQ ID NO: 1685324 - DNA, 15 bp, Homo sapiens
atccctttttacatt

SEQ ID NO: 1685325 - DNA, 15 bp, Homo sapiens
tccctttttacattg

SEQ ID NO: 1685326 - DNA, 15 bp, Homo sapiens
ccctttttacattgg

SEQ ID NO: 1685327 - DNA, 15 bp, Homo sapiens
cctttttacattggg

SEQ ID NO: 1685328 - DNA, 15 bp, Homo sapiens
ctttttacattgggt

SEQ ID NO: 1685329 - DNA, 15 bp, Homo sapiens
tttttacattgggtc

SEQ ID NO: 1685330 - DNA, 15 bp, Homo sapiens
ttttacattgggtca

SEQ ID NO: 1685331 - DNA, 15 bp, Homo sapiens
tttacattgggtcaa

SEQ ID NO: 1685332 - DNA, 15 bp, Homo sapiens
ttacattgggtcaaa

SEQ ID NO: 1685333 - DNA, 15 bp, Homo sapiens
tacattgggtcaaag

SEQ ID NO: 1685334 - DNA, 15 bp, Homo sapiens
acattgggtcaaagg

SEQ ID NO: 1685335 - DNA, 15 bp, Homo sapiens
cattgggtcaaaggt

SEQ ID NO: 1685336 - DNA, 15 bp, Homo sapiens
attgggtcaaaggtc

SEQ ID NO: 1685337 - DNA, 15 bp, Homo sapiens
ttgggtcaaaggtcc

SEQ ID NO: 1685338 - DNA, 15 bp, Homo sapiens
tgggtcaaaggtccc

SEQ ID NO: 1685339 - DNA, 15 bp, Homo sapiens
gggtcaaaggtcccc

SEQ ID NO: 1685340 - DNA, 15 bp, Homo sapiens
ggtcaaaggtcccct

SEQ ID NO: 1685341 - DNA, 15 bp, Homo sapiens
gtcaaaggtcccctg

SEQ ID NO: 1685342 - DNA, 15 bp, Homo sapiens
tcaaaggtcccctga

SEQ ID NO: 1685343 - DNA, 15 bp, Homo sapiens
caaaggtcccctgag

SEQ ID NO: 1685344 - DNA, 15 bp, Homo sapiens
aaaggtcccctgagg

SEQ ID NO: 1685345 - DNA, 15 bp, Homo sapiens
aaggtcccctgaggg

SEQ ID NO: 1685346 - DNA, 15 bp, Homo sapiens
aggtcccctgagggt

SEQ ID NO: 1685347 - DNA, 15 bp, Homo sapiens
ggtcccctgagggta

SEQ ID NO: 1685348 - DNA, 15 bp, Homo sapiens
gtcccctgagggtag

SEQ ID NO: 1685349 - DNA, 15 bp, Homo sapiens
tcccctgagggtagg

SEQ ID NO: 1685350 - DNA, 15 bp, Homo sapiens
cccctgagggtaggg

SEQ ID NO: 1685351 - DNA, 15 bp, Homo sapiens
ccctgagggtagggt

SEQ ID NO: 1685352 - DNA, 15 bp, Homo sapiens
cctgagggtagggtg

SEQ ID NO: 1685353 - DNA, 15 bp, Homo sapiens
ctgagggtagggtgg

SEQ ID NO: 1685354 - DNA, 15 bp, Homo sapiens
tgagggtagggtggg

SEQ ID NO: 1685355 - DNA, 15 bp, Homo sapiens
gagggtagggtggga

SEQ ID NO: 1685356 - DNA, 15 bp, Homo sapiens
agggtagggtgggaa

SEQ ID NO: 1685357 - DNA, 15 bp, Homo sapiens
gggtagggtgggaag

SEQ ID NO: 1685358 - DNA, 15 bp, Homo sapiens
ggtagggtgggaagg

SEQ ID NO: 1685359 - DNA, 15 bp, Homo sapiens
gtagggtgggaagga

SEQ ID NO: 1685360 - DNA, 15 bp, Homo sapiens
tagggtgggaaggag

SEQ ID NO: 1685361 - DNA, 15 bp, Homo sapiens
agggtgggaaggagg

SEQ ID NO: 1685362 - DNA, 15 bp, Homo sapiens
gggtgggaaggagga

SEQ ID NO: 1685363 - DNA, 15 bp, Homo sapiens
ggtgggaaggaggaa

SEQ ID NO: 1685364 - DNA, 15 bp, Homo sapiens
gtgggaaggaggaag

SEQ ID NO: 1685365 - DNA, 15 bp, Homo sapiens
tgggaaggaggaagt

SEQ ID NO: 1685366 - DNA, 15 bp, Homo sapiens
gggaaggaggaagtc

SEQ ID NO: 1685367 - DNA, 15 bp, Homo sapiens
ggaaggaggaagtca

SEQ ID NO: 1685368 - DNA, 15 bp, Homo sapiens
gaaggaggaagtcat

SEQ ID NO: 1685369 - DNA, 15 bp, Homo sapiens
aaggaggaagtcata

SEQ ID NO: 1685370 - DNA, 15 bp, Homo sapiens
aggaggaagtcataa

SEQ ID NO: 1685371 - DNA, 15 bp, Homo sapiens
ggaggaagtcataaa

SEQ ID NO: 1685372 - DNA, 15 bp, Homo sapiens
gaggaagtcataaat

SEQ ID NO: 1685373 - DNA, 15 bp, Homo sapiens
aggaagtcataaata

SEQ ID NO: 1685374 - DNA, 15 bp, Homo sapiens
ggaagtcataaatac

SEQ ID NO: 1685375 - DNA, 15 bp, Homo sapiens
gaagtcataaatacc

SEQ ID NO: 1685376 - DNA, 15 bp, Homo sapiens
aagtcataaataccc

SEQ ID NO: 1685377 - DNA, 15 bp, Homo sapiens
agtcataaataccct

SEQ ID NO: 1685378 - DNA, 15 bp, Homo sapiens
gtcataaataccctg

SEQ ID NO: 1685379 - DNA, 15 bp, Homo sapiens
tcataaataccctgg

SEQ ID NO: 1685380 - DNA, 15 bp, Homo sapiens
cataaataccctggc

SEQ ID NO: 1685381 - DNA, 15 bp, Homo sapiens
ataaataccctggca

SEQ ID NO: 1685382 - DNA, 15 bp, Homo sapiens
taaataccctggcaa

SEQ ID NO: 1685383 - DNA, 15 bp, Homo sapiens
aaataccctggcaac

SEQ ID NO: 1685384 - DNA, 15 bp, Homo sapiens
aataccctggcaaca

SEQ ID NO: 1685385 - DNA, 15 bp, Homo sapiens
ataccctggcaacaa

SEQ ID NO: 1685386 - DNA, 15 bp, Homo sapiens
taccctggcaacaat

SEQ ID NO: 1685387 - DNA, 15 bp, Homo sapiens
accctggcaacaata

SEQ ID NO: 1685388 - DNA, 15 bp, Homo sapiens
ccctggcaacaatag

SEQ ID NO: 1685389 - DNA, 15 bp, Homo sapiens
cctggcaacaatagt

SEQ ID NO: 1685390 - DNA, 15 bp, Homo sapiens
ctggcaacaatagtg

SEQ ID NO: 1685391 - DNA, 15 bp, Homo sapiens
tggcaacaatagtgt

SEQ ID NO: 1685392 - DNA, 15 bp, Homo sapiens
ggcaacaatagtgtt

SEQ ID NO: 1685393 - DNA, 15 bp, Homo sapiens
gcaacaatagtgttg

SEQ ID NO: 1685394 - DNA, 15 bp, Homo sapiens
caacaatagtgttgg

SEQ ID NO: 1685395 - DNA, 15 bp, Homo sapiens
aacaatagtgttggt

SEQ ID NO: 1685396 - DNA, 15 bp, Homo sapiens
acaatagtgttggtc

SEQ ID NO: 1685397 - DNA, 15 bp, Homo sapiens
caatagtgttggtca

SEQ ID NO: 1685398 - DNA, 15 bp, Homo sapiens
aatagtgttggtcaa

SEQ ID NO: 1685399 - DNA, 15 bp, Homo sapiens
atagtgttggtcaag

SEQ ID NO: 1685400 - DNA, 15 bp, Homo sapiens
tagtgttggtcaagg

SEQ ID NO: 1685401 - DNA, 15 bp, Homo sapiens
agtgttggtcaaggt

SEQ ID NO: 1685402 - DNA, 15 bp, Homo sapiens
gtgttggtcaaggtc

SEQ ID NO: 1685403 - DNA, 15 bp, Homo sapiens
tgttggtcaaggtca

SEQ ID NO: 1685404 - DNA, 15 bp, Homo sapiens
gttggtcaaggtcag

SEQ ID NO: 1685405 - DNA, 15 bp, Homo sapiens
ttggtcaaggtcagg

SEQ ID NO: 1685406 - DNA, 15 bp, Homo sapiens
tggtcaaggtcagga

SEQ ID NO: 1685407 - DNA, 15 bp, Homo sapiens
ggtcaaggtcaggac

SEQ ID NO: 1685408 - DNA, 15 bp, Homo sapiens
gtcaaggtcaggacc

SEQ ID NO: 1685409 - DNA, 15 bp, Homo sapiens
tcaaggtcaggacca

SEQ ID NO: 1685410 - DNA, 15 bp, Homo sapiens
caaggtcaggaccat

SEQ ID NO: 1685411 - DNA, 15 bp, Homo sapiens
aaggtcaggaccatt

SEQ ID NO: 1685412 - DNA, 15 bp, Homo sapiens
aggtcaggaccattt

SEQ ID NO: 1685413 - DNA, 15 bp, Homo sapiens
ggtcaggaccatttt

SEQ ID NO: 1685414 - DNA, 15 bp, Homo sapiens
caggaccattttttt

SEQ ID NO: 1685415 - DNA, 15 bp, Homo sapiens
aggaccatttttttt

SEQ ID NO: 1685416 - DNA, 15 bp, Homo sapiens
ggaccattttttttt

SEQ ID NO: 1685417 - DNA, 15 bp, Homo sapiens
gaccatttttttttc

SEQ ID NO: 1685418 - DNA, 15 bp, Homo sapiens
accatttttttttcc

SEQ ID NO: 1685419 - DNA, 15 bp, Homo sapiens
ccatttttttttcct

SEQ ID NO: 1685420 - DNA, 15 bp, Homo sapiens
catttttttttcctc

SEQ ID NO: 1685421 - DNA, 15 bp, Homo sapiens
atttttttttcctcc

SEQ ID NO: 1685422 - DNA, 15 bp, Homo sapiens
tttttttttcctcct

SEQ ID NO: 1685423 - DNA, 15 bp, Homo sapiens
ttttttttcctccta

SEQ ID NO: 1685424 - DNA, 15 bp, Homo sapiens
tttttttcctcctat

SEQ ID NO: 1685425 - DNA, 15 bp, Homo sapiens
ttttttcctcctatt

SEQ ID NO: 1685426 - DNA, 15 bp, Homo sapiens
tttttcctcctattt

SEQ ID NO: 1685427 - DNA, 15 bp, Homo sapiens
ttttcctcctatttt

SEQ ID NO: 1685428 - DNA, 15 bp, Homo sapiens
tttcctcctattttt

SEQ ID NO: 1685429 - DNA, 15 bp, Homo sapiens
ttcctcctatttttc

SEQ ID NO: 1685430 - DNA, 15 bp, Homo sapiens
tcctcctatttttca

SEQ ID NO: 1685431 - DNA, 15 bp, Homo sapiens
cctcctatttttcag

SEQ ID NO: 1685432 - DNA, 15 bp, Homo sapiens
ctcctatttttcagg

SEQ ID NO: 1685433 - DNA, 15 bp, Homo sapiens
tcctatttttcagga

SEQ ID NO: 1685434 - DNA, 15 bp, Homo sapiens
cctatttttcaggaa

SEQ ID NO: 1685435 - DNA, 15 bp, Homo sapiens
ctatttttcaggaac

SEQ ID NO: 1685436 - DNA, 15 bp, Homo sapiens
tatttttcaggaacc

SEQ ID NO: 1685437 - DNA, 15 bp, Homo sapiens
atttttcaggaacca

SEQ ID NO: 1685438 - DNA, 15 bp, Homo sapiens
tttttcaggaaccaa

SEQ ID NO: 1685439 - DNA, 15 bp, Homo sapiens
ttttcaggaaccaaa

SEQ ID NO: 1685440 - DNA, 15 bp, Homo sapiens
tttcaggaaccaaaa

SEQ ID NO: 1685441 - DNA, 15 bp, Homo sapiens
ttcaggaaccaaaaa

SEQ ID NO: 1685442 - DNA, 15 bp, Homo sapiens
tcaggaaccaaaaaa

SEQ ID NO: 1685443 - DNA, 15 bp, Homo sapiens
caggaaccaaaaaat

SEQ ID NO: 1685444 - DNA, 15 bp, Homo sapiens
aggaaccaaaaaatg

SEQ ID NO: 1685445 - DNA, 15 bp, Homo sapiens
ggaaccaaaaaatgg

SEQ ID NO: 1685446 - DNA, 15 bp, Homo sapiens
gaaccaaaaaatggt

SEQ ID NO: 1685447 - DNA, 15 bp, Homo sapiens
aaccaaaaaatggtc

SEQ ID NO: 1685448 - DNA, 15 bp, Homo sapiens
accaaaaaatggtca

SEQ ID NO: 1685449 - DNA, 15 bp, Homo sapiens
ccaaaaaatggtcag

SEQ ID NO: 1685450 - DNA, 15 bp, Homo sapiens
caaaaaatggtcagg

SEQ ID NO: 1685451 - DNA, 15 bp, Homo sapiens
aaaaaatggtcagga

SEQ ID NO: 1685452 - DNA, 15 bp, Homo sapiens
aaaaatggtcaggac

SEQ ID NO: 1685453 - DNA, 15 bp, Homo sapiens
aaaatggtcaggact

SEQ ID NO: 1685454 - DNA, 15 bp, Homo sapiens
aaatggtcaggacta

SEQ ID NO: 1685455 - DNA, 15 bp, Homo sapiens
aatggtcaggactat

SEQ ID NO: 1685456 - DNA, 15 bp, Homo sapiens
atggtcaggactatt

SEQ ID NO: 1685457 - DNA, 15 bp, Homo sapiens
tggtcaggactattt

SEQ ID NO: 1685458 - DNA, 15 bp, Homo sapiens
ggtcaggactatttt

SEQ ID NO: 1685459 - DNA, 15 bp, Homo sapiens
gtcaggactattttt

SEQ ID NO: 1685460 - DNA, 15 bp, Homo sapiens
tcaggactatttttg

SEQ ID NO: 1685461 - DNA, 15 bp, Homo sapiens
caggactatttttga

SEQ ID NO: 1685462 - DNA, 15 bp, Homo sapiens
aggactatttttgac

SEQ ID NO: 1685463 - DNA, 15 bp, Homo sapiens
ggactatttttgaca

SEQ ID NO: 1685464 - DNA, 15 bp, Homo sapiens
gactatttttgacaa

SEQ ID NO: 1685465 - DNA, 15 bp, Homo sapiens
actatttttgacaat

SEQ ID NO: 1685466 - DNA, 15 bp, Homo sapiens
ctatttttgacaatt

SEQ ID NO: 1685467 - DNA, 15 bp, Homo sapiens
tatttttgacaattc

SEQ ID NO: 1685468 - DNA, 15 bp, Homo sapiens
atttttgacaattcg

SEQ ID NO: 1685469 - DNA, 15 bp, Homo sapiens
tttttgacaattcgg

SEQ ID NO: 1685470 - DNA, 15 bp, Homo sapiens
ttttgacaattcggc

SEQ ID NO: 1685471 - DNA, 15 bp, Homo sapiens
tttgacaattcggct

SEQ ID NO: 1685472 - DNA, 15 bp, Homo sapiens
ttgacaattcggctt

SEQ ID NO: 1685473 - DNA, 15 bp, Homo sapiens
tgacaattcggcttg

SEQ ID NO: 1685474 - DNA, 15 bp, Homo sapiens
gacaattcggcttga

SEQ ID NO: 1685475 - DNA, 15 bp, Homo sapiens
acaattcggcttgat

SEQ ID NO: 1685476 - DNA, 15 bp, Homo sapiens
caattcggcttgatg

SEQ ID NO: 1685477 - DNA, 15 bp, Homo sapiens
aattcggcttgatgg

SEQ ID NO: 1685478 - DNA, 15 bp, Homo sapiens
attcggcttgatggt

SEQ ID NO: 1685479 - DNA, 15 bp, Homo sapiens
ttcggcttgatggtt

SEQ ID NO: 1685480 - DNA, 15 bp, Homo sapiens
tcggcttgatggttt

SEQ ID NO: 1685481 - DNA, 15 bp, Homo sapiens
cggcttgatggttta

SEQ ID NO: 1685482 - DNA, 15 bp, Homo sapiens
ggcttgatggtttag

SEQ ID NO: 1685483 - DNA, 15 bp, Homo sapiens
gcttgatggtttagt

SEQ ID NO: 1685484 - DNA, 15 bp, Homo sapiens
cttgatggtttagtc

SEQ ID NO: 1685485 - DNA, 15 bp, Homo sapiens
ttgatggtttagtct

SEQ ID NO: 1685486 - DNA, 15 bp, Homo sapiens
tgatggtttagtctt

SEQ ID NO: 1685487 - DNA, 15 bp, Homo sapiens
gatggtttagtcttc

SEQ ID NO: 1685488 - DNA, 15 bp, Homo sapiens
atggtttagtcttct

SEQ ID NO: 1685489 - DNA, 15 bp, Homo sapiens
tggtttagtcttctg

SEQ ID NO: 1685490 - DNA, 15 bp, Homo sapiens
ggtttagtcttctga

SEQ ID NO: 1685491 - DNA, 15 bp, Homo sapiens
gtttagtcttctgaa

SEQ ID NO: 1685492 - DNA, 15 bp, Homo sapiens
tttagtcttctgaac

SEQ ID NO: 1685493 - DNA, 15 bp, Homo sapiens
ttagtcttctgaact

SEQ ID NO: 1685494 - DNA, 15 bp, Homo sapiens
tagtcttctgaactc

SEQ ID NO: 1685495 - DNA, 15 bp, Homo sapiens
agtcttctgaactct

SEQ ID NO: 1685496 - DNA, 15 bp, Homo sapiens
gtcttctgaactctc

SEQ ID NO: 1685497 - DNA, 15 bp, Homo sapiens
tcttctgaactctcc

SEQ ID NO: 1685498 - DNA, 15 bp, Homo sapiens
cttctgaactctcca

SEQ ID NO: 1685499 - DNA, 15 bp, Homo sapiens
ttctgaactctccag

SEQ ID NO: 1685500 - DNA, 15 bp, Homo sapiens
tctgaactctccagt

SEQ ID NO: 1685501 - DNA, 15 bp, Homo sapiens
ctgaactctccagta

SEQ ID NO: 1685502 - DNA, 15 bp, Homo sapiens
tgaactctccagtag

SEQ ID NO: 1685503 - DNA, 15 bp, Homo sapiens
gaactctccagtaga

SEQ ID NO: 1685504 - DNA, 15 bp, Homo sapiens
aactctccagtagac

SEQ ID NO: 1685505 - DNA, 15 bp, Homo sapiens
actctccagtagacc

SEQ ID NO: 1685506 - DNA, 15 bp, Homo sapiens
ctctccagtagacct

SEQ ID NO: 1685507 - DNA, 15 bp, Homo sapiens
tctccagtagacctt

SEQ ID NO: 1685508 - DNA, 15 bp, Homo sapiens
ctccagtagacctta

SEQ ID NO: 1685509 - DNA, 15 bp, Homo sapiens
tccagtagaccttag

SEQ ID NO: 1685510 - DNA, 15 bp, Homo sapiens
ccagtagaccttaga

SEQ ID NO: 1685511 - DNA, 15 bp, Homo sapiens
cagtagaccttagaa

SEQ ID NO: 1685512 - DNA, 15 bp, Homo sapiens
agtagaccttagaac

SEQ ID NO: 1685513 - DNA, 15 bp, Homo sapiens
gtagaccttagaact

SEQ ID NO: 1685514 - DNA, 15 bp, Homo sapiens
tagaccttagaactt

SEQ ID NO: 1685515 - DNA, 15 bp, Homo sapiens
agaccttagaacttg

SEQ ID NO: 1685516 - DNA, 15 bp, Homo sapiens
gaccttagaacttgg

SEQ ID NO: 1685517 - DNA, 15 bp, Homo sapiens
accttagaacttggt

SEQ ID NO: 1685518 - DNA, 15 bp, Homo sapiens
ccttagaacttggta

SEQ ID NO: 1685519 - DNA, 15 bp, Homo sapiens
cttagaacttggtat

SEQ ID NO: 1685520 - DNA, 15 bp, Homo sapiens
ttagaacttggtata

SEQ ID NO: 1685521 - DNA, 15 bp, Homo sapiens
tagaacttggtatac

SEQ ID NO: 1685522 - DNA, 15 bp, Homo sapiens
agaacttggtataca

SEQ ID NO: 1685523 - DNA, 15 bp, Homo sapiens
gaacttggtatacat

SEQ ID NO: 1685524 - DNA, 15 bp, Homo sapiens
aacttggtatacata

SEQ ID NO: 1685525 - DNA, 15 bp, Homo sapiens
acttggtatacatag

SEQ ID NO: 1685526 - DNA, 15 bp, Homo sapiens
cttggtatacatagt

SEQ ID NO: 1685527 - DNA, 15 bp, Homo sapiens
ttggtatacatagta

SEQ ID NO: 1685528 - DNA, 15 bp, Homo sapiens
tggtatacatagtaa

SEQ ID NO: 1685529 - DNA, 15 bp, Homo sapiens
ggtatacatagtaat

SEQ ID NO: 1685530 - DNA, 15 bp, Homo sapiens
gtatacatagtaatt

SEQ ID NO: 1685531 - DNA, 15 bp, Homo sapiens
tatacatagtaattc

SEQ ID NO: 1685532 - DNA, 15 bp, Homo sapiens
atacatagtaattca

SEQ ID NO: 1685533 - DNA, 15 bp, Homo sapiens
tacatagtaattcag

SEQ ID NO: 1685534 - DNA, 15 bp, Homo sapiens
acatagtaattcagt

SEQ ID NO: 1685535 - DNA, 15 bp, Homo sapiens
catagtaattcagtc

SEQ ID NO: 1685536 - DNA, 15 bp, Homo sapiens
atagtaattcagtcc

SEQ ID NO: 1685537 - DNA, 15 bp, Homo sapiens
tagtaattcagtcct

SEQ ID NO: 1685538 - DNA, 15 bp, Homo sapiens
agtaattcagtcctt

SEQ ID NO: 1685539 - DNA, 15 bp, Homo sapiens
gtaattcagtccttg

SEQ ID NO: 1685540 - DNA, 15 bp, Homo sapiens
taattcagtccttga

SEQ ID NO: 1685541 - DNA, 15 bp, Homo sapiens
aattcagtccttgaa

SEQ ID NO: 1685542 - DNA, 15 bp, Homo sapiens
attcagtccttgaat

SEQ ID NO: 1685543 - DNA, 15 bp, Homo sapiens
ttcagtccttgaata

SEQ ID NO: 1685544 - DNA, 15 bp, Homo sapiens
tcagtccttgaatat

SEQ ID NO: 1685545 - DNA, 15 bp, Homo sapiens
cagtccttgaatatt

SEQ ID NO: 1685546 - DNA, 15 bp, Homo sapiens
agtccttgaatatta

SEQ ID NO: 1685547 - DNA, 15 bp, Homo sapiens
gtccttgaatattaa

SEQ ID NO: 1685548 - DNA, 15 bp, Homo sapiens
tccttgaatattaaa

SEQ ID NO: 1685549 - DNA, 15 bp, Homo sapiens
ccttgaatattaaaa

SEQ ID NO: 1685550 - DNA, 15 bp, Homo sapiens
cttgaatattaaaag

SEQ ID NO: 1685551 - DNA, 15 bp, Homo sapiens
ttgaatattaaaagc

SEQ ID NO: 1685552 - DNA, 15 bp, Homo sapiens
tgaatattaaaagcc

SEQ ID NO: 1685553 - DNA, 15 bp, Homo sapiens
gaatattaaaagcct

SEQ ID NO: 1685554 - DNA, 15 bp, Homo sapiens
aatattaaaagcctt

SEQ ID NO: 1685555 - DNA, 15 bp, Homo sapiens
atattaaaagccttt

SEQ ID NO: 1685556 - DNA, 15 bp, Homo sapiens
tattaaaagccttta

SEQ ID NO: 1685557 - DNA, 15 bp, Homo sapiens
attaaaagcctttag

SEQ ID NO: 1685558 - DNA, 15 bp, Homo sapiens
ttaaaagcctttagt

SEQ ID NO: 1685559 - DNA, 15 bp, Homo sapiens
taaaagcctttagtt

SEQ ID NO: 1685560 - DNA, 15 bp, Homo sapiens
aaaagcctttagtta

SEQ ID NO: 1685561 - DNA, 15 bp, Homo sapiens
aaagcctttagttag

SEQ ID NO: 1685562 - DNA, 15 bp, Homo sapiens
aagcctttagttaga

SEQ ID NO: 1685563 - DNA, 15 bp, Homo sapiens
agcctttagttagag

SEQ ID NO: 1685564 - DNA, 15 bp, Homo sapiens
gcctttagttagagt

SEQ ID NO: 1685565 - DNA, 15 bp, Homo sapiens
cctttagttagagta

SEQ ID NO: 1685566 - DNA, 15 bp, Homo sapiens
ctttagttagagtaa

SEQ ID NO: 1685567 - DNA, 15 bp, Homo sapiens
tttagttagagtaag

SEQ ID NO: 1685568 - DNA, 15 bp, Homo sapiens
ttagttagagtaaga

SEQ ID NO: 1685569 - DNA, 15 bp, Homo sapiens
tagttagagtaagat

SEQ ID NO: 1685570 - DNA, 15 bp, Homo sapiens
agttagagtaagatc

SEQ ID NO: 1685571 - DNA, 15 bp, Homo sapiens
gttagagtaagatct

SEQ ID NO: 1685572 - DNA, 15 bp, Homo sapiens
ttagagtaagatctg

SEQ ID NO: 1685573 - DNA, 15 bp, Homo sapiens
tagagtaagatctga

SEQ ID NO: 1685574 - DNA, 15 bp, Homo sapiens
agagtaagatctgac

SEQ ID NO: 1685575 - DNA, 15 bp, Homo sapiens
gagtaagatctgaca

SEQ ID NO: 1685576 - DNA, 15 bp, Homo sapiens
agtaagatctgacaa

SEQ ID NO: 1685577 - DNA, 15 bp, Homo sapiens
gtaagatctgacaaa

SEQ ID NO: 1685578 - DNA, 15 bp, Homo sapiens
taagatctgacaaat

SEQ ID NO: 1685579 - DNA, 15 bp, Homo sapiens
aagatctgacaaatt

SEQ ID NO: 1685580 - DNA, 15 bp, Homo sapiens
agatctgacaaattc

SEQ ID NO: 1685581 - DNA, 15 bp, Homo sapiens
gatctgacaaattca

SEQ ID NO: 1685582 - DNA, 15 bp, Homo sapiens
atctgacaaattcaa

SEQ ID NO: 1685583 - DNA, 15 bp, Homo sapiens
tctgacaaattcaaa

SEQ ID NO: 1685584 - DNA, 15 bp, Homo sapiens
ctgacaaattcaaag

SEQ ID NO: 1685585 - DNA, 15 bp, Homo sapiens
tgacaaattcaaagc

SEQ ID NO: 1685586 - DNA, 15 bp, Homo sapiens
gacaaattcaaagct

SEQ ID NO: 1685587 - DNA, 15 bp, Homo sapiens
acaaattcaaagctg

SEQ ID NO: 1685588 - DNA, 15 bp, Homo sapiens
caaattcaaagctga

SEQ ID NO: 1685589 - DNA, 15 bp, Homo sapiens
aaattcaaagctgag

SEQ ID NO: 1685590 - DNA, 15 bp, Homo sapiens
aattcaaagctgagc

SEQ ID NO: 1685591 - DNA, 15 bp, Homo sapiens
ttcaaagctgagccg

SEQ ID NO: 1685592 - DNA, 15 bp, Homo sapiens
tcaaagctgagccgt

SEQ ID NO: 1685593 - DNA, 15 bp, Homo sapiens
caaagctgagccgtg

SEQ ID NO: 1685594 - DNA, 15 bp, Homo sapiens
aaagctgagccgtga

SEQ ID NO: 1685595 - DNA, 15 bp, Homo sapiens
aagctgagccgtgag

SEQ ID NO: 1685596 - DNA, 15 bp, Homo sapiens
agctgagccgtgagt

SEQ ID NO: 1685597 - DNA, 15 bp, Homo sapiens
gctgagccgtgagtc

SEQ ID NO: 1685598 - DNA, 15 bp, Homo sapiens
ctgagccgtgagtca

SEQ ID NO: 1685599 - DNA, 15 bp, Homo sapiens
tgagccgtgagtcag

SEQ ID NO: 1685600 - DNA, 15 bp, Homo sapiens
gagccgtgagtcaga

SEQ ID NO: 1685601 - DNA, 15 bp, Homo sapiens
agccgtgagtcagaa

SEQ ID NO: 1685602 - DNA, 15 bp, Homo sapiens
gccgtgagtcagaaa

SEQ ID NO: 1685603 - DNA, 15 bp, Homo sapiens
ccgtgagtcagaaat

SEQ ID NO: 1685604 - DNA, 15 bp, Homo sapiens
cgtgagtcagaaatt

SEQ ID NO: 1685605 - DNA, 15 bp, Homo sapiens
gtgagtcagaaattt

SEQ ID NO: 1685606 - DNA, 15 bp, Homo sapiens
tgagtcagaaatttt

SEQ ID NO: 1685607 - DNA, 15 bp, Homo sapiens
gagtcagaaattttt

SEQ ID NO: 1685608 - DNA, 15 bp, Homo sapiens
agtcagaaatttttt

SEQ ID NO: 1685609 - DNA, 15 bp, Homo sapiens
gtcagaaattttttt

SEQ ID NO: 1685610 - DNA, 15 bp, Homo sapiens
tcagaaatttttttc

SEQ ID NO: 1685611 - DNA, 15 bp, Homo sapiens
cagaaatttttttct

SEQ ID NO: 1685612 - DNA, 15 bp, Homo sapiens
agaaatttttttctc

SEQ ID NO: 1685613 - DNA, 15 bp, Homo sapiens
gaaatttttttctca

SEQ ID NO: 1685614 - DNA, 15 bp, Homo sapiens
aaatttttttctcag

SEQ ID NO: 1685615 - DNA, 15 bp, Homo sapiens
aatttttttctcagc

SEQ ID NO: 1685616 - DNA, 15 bp, Homo sapiens
atttttttctcagca

SEQ ID NO: 1685617 - DNA, 15 bp, Homo sapiens
tttttttctcagcac

SEQ ID NO: 1685618 - DNA, 15 bp, Homo sapiens
ttttttctcagcacc

SEQ ID NO: 1685619 - DNA, 15 bp, Homo sapiens
tttttctcagcacca

SEQ ID NO: 1685620 - DNA, 15 bp, Homo sapiens
ttttctcagcaccat

SEQ ID NO: 1685621 - DNA, 15 bp, Homo sapiens
tttctcagcaccata

SEQ ID NO: 1685622 - DNA, 15 bp, Homo sapiens
ttctcagcaccatag

SEQ ID NO: 1685623 - DNA, 15 bp, Homo sapiens
tctcagcaccatagg

SEQ ID NO: 1685624 - DNA, 15 bp, Homo sapiens
ctcagcaccatagga

SEQ ID NO: 1685625 - DNA, 15 bp, Homo sapiens
tcagcaccataggaa

SEQ ID NO: 1685626 - DNA, 15 bp, Homo sapiens
cagcaccataggaaa

SEQ ID NO: 1685627 - DNA, 15 bp, Homo sapiens
agcaccataggaaaa

SEQ ID NO: 1685628 - DNA, 15 bp, Homo sapiens
gcaccataggaaaaa

SEQ ID NO: 1685629 - DNA, 15 bp, Homo sapiens
caccataggaaaaaa

SEQ ID NO: 1685630 - DNA, 15 bp, Homo sapiens
accataggaaaaaaa

SEQ ID NO: 1685631 - DNA, 15 bp, Homo sapiens
ccataggaaaaaaat

SEQ ID NO: 1685632 - DNA, 15 bp, Homo sapiens
cataggaaaaaaatc

SEQ ID NO: 1685633 - DNA, 15 bp, Homo sapiens
taggaaaaaaatcat

SEQ ID NO: 1685634 - DNA, 15 bp, Homo sapiens
aggaaaaaaatcata

SEQ ID NO: 1685635 - DNA, 15 bp, Homo sapiens
ggaaaaaaatcataa

SEQ ID NO: 1685636 - DNA, 15 bp, Homo sapiens
gaaaaaaatcataat

SEQ ID NO: 1685637 - DNA, 15 bp, Homo sapiens
aaaaaaatcataata

SEQ ID NO: 1685638 - DNA, 15 bp, Homo sapiens
aaaaaatcataataa

SEQ ID NO: 1685639 - DNA, 15 bp, Homo sapiens
aaaaatcataataaa

SEQ ID NO: 1685640 - DNA, 15 bp, Homo sapiens
aaaatcataataaaa

SEQ ID NO: 1685641 - DNA, 15 bp, Homo sapiens
aaatcataataaaaa

SEQ ID NO: 1685642 - DNA, 15 bp, Homo sapiens
aatcataataaaaaa

SEQ ID NO: 1685643 - DNA, 15 bp, Homo sapiens
atcataataaaaaaa

SEQ ID NO: 1685644 - DNA, 15 bp, Homo sapiens
tcataataaaaaaat

SEQ ID NO: 1685645 - DNA, 15 bp, Homo sapiens
cataataaaaaaatt

SEQ ID NO: 1685646 - DNA, 15 bp, Homo sapiens
ataataaaaaaatta

SEQ ID NO: 1685647 - DNA, 15 bp, Homo sapiens
taataaaaaaattaa

SEQ ID NO: 1685648 - DNA, 15 bp, Homo sapiens
aataaaaaaattaag

SEQ ID NO: 1685649 - DNA, 15 bp, Homo sapiens
ataaaaaaattaaga

SEQ ID NO: 1685650 - DNA, 15 bp, Homo sapiens
taaaaaaattaagag

SEQ ID NO: 1685651 - DNA, 15 bp, Homo sapiens
aaaaaaattaagaga

SEQ ID NO: 1685652 - DNA, 15 bp, Homo sapiens
aaaaaattaagagaa

SEQ ID NO: 1685653 - DNA, 15 bp, Homo sapiens
aaaaattaagagaag

SEQ ID NO: 1685654 - DNA, 15 bp, Homo sapiens
aaaattaagagaaga

SEQ ID NO: 1685655 - DNA, 15 bp, Homo sapiens
aaattaagagaagaa

SEQ ID NO: 1685656 - DNA, 15 bp, Homo sapiens
aattaagagaagaaa

SEQ ID NO: 1685657 - DNA, 15 bp, Homo sapiens
attaagagaagaaat

SEQ ID NO: 1685658 - DNA, 15 bp, Homo sapiens
ttaagagaagaaatg

SEQ ID NO: 1685659 - DNA, 15 bp, Homo sapiens
taagagaagaaatgt

SEQ ID NO: 1685660 - DNA, 15 bp, Homo sapiens
aagagaagaaatgtg

SEQ ID NO: 1685661 - DNA, 15 bp, Homo sapiens
agagaagaaatgtgt

SEQ ID NO: 1685662 - DNA, 15 bp, Homo sapiens
gagaagaaatgtgtt

SEQ ID NO: 1685663 - DNA, 15 bp, Homo sapiens
agaagaaatgtgttg

SEQ ID NO: 1685664 - DNA, 15 bp, Homo sapiens
gaagaaatgtgttgt

SEQ ID NO: 1685665 - DNA, 15 bp, Homo sapiens
aagaaatgtgttgtt

SEQ ID NO: 1685666 - DNA, 15 bp, Homo sapiens
agaaatgtgttgttt

SEQ ID NO: 1685667 - DNA, 15 bp, Homo sapiens
gaaatgtgttgtttt

SEQ ID NO: 1685668 - DNA, 15 bp, Homo sapiens
aaatgtgttgttttg

SEQ ID NO: 1685669 - DNA, 15 bp, Homo sapiens
aatgtgttgttttgt

SEQ ID NO: 1685670 - DNA, 15 bp, Homo sapiens
atgtgttgttttgtt

SEQ ID NO: 1685671 - DNA, 15 bp, Homo sapiens
tgtgttgttttgttt

SEQ ID NO: 1685672 - DNA, 15 bp, Homo sapiens
gtgttgttttgtttt

SEQ ID NO: 1685673 - DNA, 15 bp, Homo sapiens
tgttgttttgttttg

SEQ ID NO: 1685674 - DNA, 15 bp, Homo sapiens
gttgttttgttttgg

SEQ ID NO: 1685675 - DNA, 15 bp, Homo sapiens
ttgttttgttttggg

SEQ ID NO: 1685676 - DNA, 15 bp, Homo sapiens
tgttttgttttgggt

SEQ ID NO: 1685677 - DNA, 15 bp, Homo sapiens
gttttgttttgggtt

SEQ ID NO: 1685678 - DNA, 15 bp, Homo sapiens
ttttgttttgggtta

SEQ ID NO: 1685679 - DNA, 15 bp, Homo sapiens
tttgttttgggttat

SEQ ID NO: 1685680 - DNA, 15 bp, Homo sapiens
ttgttttgggttatt

SEQ ID NO: 1685681 - DNA, 15 bp, Homo sapiens
tgttttgggttattt

SEQ ID NO: 1685682 - DNA, 15 bp, Homo sapiens
gttttgggttatttt

SEQ ID NO: 1685683 - DNA, 15 bp, Homo sapiens
ttttgggttattttt

SEQ ID NO: 1685684 - DNA, 15 bp, Homo sapiens
tttgggttatttttt

SEQ ID NO: 1685685 - DNA, 15 bp, Homo sapiens
ttgggttattttttt

SEQ ID NO: 1685686 - DNA, 15 bp, Homo sapiens
tgggttatttttttg

SEQ ID NO: 1685687 - DNA, 15 bp, Homo sapiens
gggttatttttttga

SEQ ID NO: 1685688 - DNA, 15 bp, Homo sapiens
ggttatttttttgag

SEQ ID NO: 1685689 - DNA, 15 bp, Homo sapiens
gttatttttttgaga

SEQ ID NO: 1685690 - DNA, 15 bp, Homo sapiens
tatttttttgagacg

SEQ ID NO: 1685691 - DNA, 15 bp, Homo sapiens
atttttttgagacgg

SEQ ID NO: 1685692 - DNA, 15 bp, Homo sapiens
ttttttgagacggaa

SEQ ID NO: 1685693 - DNA, 15 bp, Homo sapiens
tttttgagacggaat

SEQ ID NO: 1685694 - DNA, 15 bp, Homo sapiens
ttttgagacggaatt

SEQ ID NO: 1685695 - DNA, 15 bp, Homo sapiens
tttgagacggaattt

SEQ ID NO: 1685696 - DNA, 15 bp, Homo sapiens
ttgagacggaatttc

SEQ ID NO: 1685697 - DNA, 15 bp, Homo sapiens
tgagacggaatttcg

SEQ ID NO: 1685698 - DNA, 15 bp, Homo sapiens
gagacggaatttcgc

SEQ ID NO: 1685699 - DNA, 15 bp, Homo sapiens
agacggaatttcgct

SEQ ID NO: 1685700 - DNA, 15 bp, Homo sapiens
gacggaatttcgctc

SEQ ID NO: 1685701 - DNA, 15 bp, Homo sapiens
acggaatttcgctct

SEQ ID NO: 1685702 - DNA, 15 bp, Homo sapiens
cggaatttcgctctt

SEQ ID NO: 1685703 - DNA, 15 bp, Homo sapiens
ggaatttcgctcttg

SEQ ID NO: 1685704 - DNA, 15 bp, Homo sapiens
gaatttcgctcttgt

SEQ ID NO: 1685705 - DNA, 15 bp, Homo sapiens
aatttcgctcttgtt

SEQ ID NO: 1685706 - DNA, 15 bp, Homo sapiens
atttcgctcttgttg

SEQ ID NO: 1685707 - DNA, 15 bp, Homo sapiens
tgcccaggctggagg

SEQ ID NO: 1685708 - DNA, 15 bp, Homo sapiens
gcccaggctggaggg

SEQ ID NO: 1685709 - DNA, 15 bp, Homo sapiens
cccaggctggagggc

SEQ ID NO: 1685710 - DNA, 15 bp, Homo sapiens
ccaggctggagggca

SEQ ID NO: 1685711 - DNA, 15 bp, Homo sapiens
caggctggagggcaa

SEQ ID NO: 1685712 - DNA, 15 bp, Homo sapiens
aggctggagggcaat

SEQ ID NO: 1685713 - DNA, 15 bp, Homo sapiens
ggctggagggcaatg

SEQ ID NO: 1685714 - DNA, 15 bp, Homo sapiens
gctggagggcaatgg

SEQ ID NO: 1685715 - DNA, 15 bp, Homo sapiens
ctggagggcaatggc

SEQ ID NO: 1685716 - DNA, 15 bp, Homo sapiens
tggagggcaatggcg

SEQ ID NO: 1685717 - DNA, 15 bp, Homo sapiens
ggagggcaatggcgt

SEQ ID NO: 1685718 - DNA, 15 bp, Homo sapiens
gagggcaatggcgtg

SEQ ID NO: 1685719 - DNA, 15 bp, Homo sapiens
agggcaatggcgtga

SEQ ID NO: 1685720 - DNA, 15 bp, Homo sapiens
gggcaatggcgtgat

SEQ ID NO: 1685721 - DNA, 15 bp, Homo sapiens
ggcaatggcgtgatc

SEQ ID NO: 1685722 - DNA, 15 bp, Homo sapiens
caatggcgtgatctt

SEQ ID NO: 1685723 - DNA, 15 bp, Homo sapiens
aatggcgtgatcttg

SEQ ID NO: 1685724 - DNA, 15 bp, Homo sapiens
atggcgtgatcttgg

SEQ ID NO: 1685725 - DNA, 15 bp, Homo sapiens
gatcttggctcaccg

SEQ ID NO: 1685726 - DNA, 15 bp, Homo sapiens
atcttggctcaccgc

SEQ ID NO: 1685727 - DNA, 15 bp, Homo sapiens
tcttggctcaccgca

SEQ ID NO: 1685728 - DNA, 15 bp, Homo sapiens
cttggctcaccgcaa

SEQ ID NO: 1685729 - DNA, 15 bp, Homo sapiens
ttggctcaccgcaac

SEQ ID NO: 1685730 - DNA, 15 bp, Homo sapiens
tggctcaccgcaacc

SEQ ID NO: 1685731 - DNA, 15 bp, Homo sapiens
ggctcaccgcaacct

SEQ ID NO: 1685732 - DNA, 15 bp, Homo sapiens
ctcaccgcaacctct

SEQ ID NO: 1685733 - DNA, 15 bp, Homo sapiens
tcaccgcaacctctg

SEQ ID NO: 1685734 - DNA, 15 bp, Homo sapiens
caccgcaacctctgc

SEQ ID NO: 1685735 - DNA, 15 bp, Homo sapiens
tagctggaattacaa

SEQ ID NO: 1685736 - DNA, 15 bp, Homo sapiens
agctggaattacaaa

SEQ ID NO: 1685737 - DNA, 15 bp, Homo sapiens
gctggaattacaaac

SEQ ID NO: 1685738 - DNA, 15 bp, Homo sapiens
ctggaattacaaaca

SEQ ID NO: 1685739 - DNA, 15 bp, Homo sapiens
tggaattacaaacac

SEQ ID NO: 1685740 - DNA, 15 bp, Homo sapiens
ggaattacaaacaca

SEQ ID NO: 1685741 - DNA, 15 bp, Homo sapiens
gaattacaaacacat

SEQ ID NO: 1685742 - DNA, 15 bp, Homo sapiens
aattacaaacacatg

SEQ ID NO: 1685743 - DNA, 15 bp, Homo sapiens
attacaaacacatgc

SEQ ID NO: 1685744 - DNA, 15 bp, Homo sapiens
ttacaaacacatgcc

SEQ ID NO: 1685745 - DNA, 15 bp, Homo sapiens
tacaaacacatgcca

SEQ ID NO: 1685746 - DNA, 15 bp, Homo sapiens
acaaacacatgccac

SEQ ID NO: 1685747 - DNA, 15 bp, Homo sapiens
caaacacatgccacc

SEQ ID NO: 1685748 - DNA, 15 bp, Homo sapiens
aaacacatgccacca

SEQ ID NO: 1685749 - DNA, 15 bp, Homo sapiens
aacacatgccaccat

SEQ ID NO: 1685750 - DNA, 15 bp, Homo sapiens
acacatgccaccatc

SEQ ID NO: 1685751 - DNA, 15 bp, Homo sapiens
cacatgccaccatcc

SEQ ID NO: 1685752 - DNA, 15 bp, Homo sapiens
acatgccaccatcct

SEQ ID NO: 1685753 - DNA, 15 bp, Homo sapiens
catgccaccatcctt

SEQ ID NO: 1685754 - DNA, 15 bp, Homo sapiens
atgccaccatccttg

SEQ ID NO: 1685755 - DNA, 15 bp, Homo sapiens
tgccaccatccttgg

SEQ ID NO: 1685756 - DNA, 15 bp, Homo sapiens
gccaccatccttggc

SEQ ID NO: 1685757 - DNA, 15 bp, Homo sapiens
ccaccatccttggct

SEQ ID NO: 1685758 - DNA, 15 bp, Homo sapiens
caccatccttggcta

SEQ ID NO: 1685759 - DNA, 15 bp, Homo sapiens
accatccttggctaa

SEQ ID NO: 1685760 - DNA, 15 bp, Homo sapiens
ccatccttggctaat

SEQ ID NO: 1685761 - DNA, 15 bp, Homo sapiens
catccttggctaatt

SEQ ID NO: 1685762 - DNA, 15 bp, Homo sapiens
atccttggctaattt

SEQ ID NO: 1685763 - DNA, 15 bp, Homo sapiens
tccttggctaatttt

SEQ ID NO: 1685764 - DNA, 15 bp, Homo sapiens
ttagtagagacagga

SEQ ID NO: 1685765 - DNA, 15 bp, Homo sapiens
tagtagagacaggat

SEQ ID NO: 1685766 - DNA, 15 bp, Homo sapiens
agtagagacaggatt

SEQ ID NO: 1685767 - DNA, 15 bp, Homo sapiens
gtagagacaggattt

SEQ ID NO: 1685768 - DNA, 15 bp, Homo sapiens
tagagacaggatttt

SEQ ID NO: 1685769 - DNA, 15 bp, Homo sapiens
agagacaggatttta

SEQ ID NO: 1685770 - DNA, 15 bp, Homo sapiens
gagacaggattttac

SEQ ID NO: 1685771 - DNA, 15 bp, Homo sapiens
agacaggattttacc

SEQ ID NO: 1685772 - DNA, 15 bp, Homo sapiens
gacaggattttacca

SEQ ID NO: 1685773 - DNA, 15 bp, Homo sapiens
acaggattttaccat

SEQ ID NO: 1685774 - DNA, 15 bp, Homo sapiens
caggattttaccatg

SEQ ID NO: 1685775 - DNA, 15 bp, Homo sapiens
aggattttaccatgt

SEQ ID NO: 1685776 - DNA, 15 bp, Homo sapiens
ggattttaccatgtt

SEQ ID NO: 1685777 - DNA, 15 bp, Homo sapiens
gattttaccatgttg

SEQ ID NO: 1685778 - DNA, 15 bp, Homo sapiens
attttaccatgttgg

SEQ ID NO: 1685779 - DNA, 15 bp, Homo sapiens
ttttaccatgttggt

SEQ ID NO: 1685780 - DNA, 15 bp, Homo sapiens
tttaccatgttggtc

SEQ ID NO: 1685781 - DNA, 15 bp, Homo sapiens
ttaccatgttggtca

SEQ ID NO: 1685782 - DNA, 15 bp, Homo sapiens
taccatgttggtcag

SEQ ID NO: 1685783 - DNA, 15 bp, Homo sapiens
gagccactgcaccta

SEQ ID NO: 1685784 - DNA, 15 bp, Homo sapiens
agccactgcacctag

SEQ ID NO: 1685785 - DNA, 15 bp, Homo sapiens
gccactgcacctagc

SEQ ID NO: 1685786 - DNA, 15 bp, Homo sapiens
ccactgcacctagct

SEQ ID NO: 1685787 - DNA, 15 bp, Homo sapiens
cactgcacctagctg

SEQ ID NO: 1685788 - DNA, 15 bp, Homo sapiens
actgcacctagctgc

SEQ ID NO: 1685789 - DNA, 15 bp, Homo sapiens
ctgcacctagctgct

SEQ ID NO: 1685790 - DNA, 15 bp, Homo sapiens
tgcacctagctgctt

SEQ ID NO: 1685791 - DNA, 15 bp, Homo sapiens
gcacctagctgcttg

SEQ ID NO: 1685792 - DNA, 15 bp, Homo sapiens
cacctagctgcttgt

SEQ ID NO: 1685793 - DNA, 15 bp, Homo sapiens
acctagctgcttgtg

SEQ ID NO: 1685794 - DNA, 15 bp, Homo sapiens
cctagctgcttgtgt

SEQ ID NO: 1685795 - DNA, 15 bp, Homo sapiens
ctagctgcttgtgtt

SEQ ID NO: 1685796 - DNA, 15 bp, Homo sapiens
tagctgcttgtgttt

SEQ ID NO: 1685797 - DNA, 15 bp, Homo sapiens
agctgcttgtgtttt

SEQ ID NO: 1685798 - DNA, 15 bp, Homo sapiens
gctgcttgtgttttt

SEQ ID NO: 1685799 - DNA, 15 bp, Homo sapiens
ctgcttgtgttttta

SEQ ID NO: 1685800 - DNA, 15 bp, Homo sapiens
tgcttgtgtttttat

SEQ ID NO: 1685801 - DNA, 15 bp, Homo sapiens
gcttgtgtttttata

SEQ ID NO: 1685802 - DNA, 15 bp, Homo sapiens
cttgtgtttttatag

SEQ ID NO: 1685803 - DNA, 15 bp, Homo sapiens
ttgtgtttttatagg

SEQ ID NO: 1685804 - DNA, 15 bp, Homo sapiens
tgtgtttttataggt

SEQ ID NO: 1685805 - DNA, 15 bp, Homo sapiens
gtgtttttataggta

SEQ ID NO: 1685806 - DNA, 15 bp, Homo sapiens
tgtttttataggtat

SEQ ID NO: 1685807 - DNA, 15 bp, Homo sapiens
gtttttataggtata

SEQ ID NO: 1685808 - DNA, 15 bp, Homo sapiens
tttttataggtataa

SEQ ID NO: 1685809 - DNA, 15 bp, Homo sapiens
ttttataggtataac

SEQ ID NO: 1685810 - DNA, 15 bp, Homo sapiens
tttataggtataaca

SEQ ID NO: 1685811 - DNA, 15 bp, Homo sapiens
ttataggtataacag

SEQ ID NO: 1685812 - DNA, 15 bp, Homo sapiens
tataggtataacagg

SEQ ID NO: 1685813 - DNA, 15 bp, Homo sapiens
ataggtataacaggc

SEQ ID NO: 1685814 - DNA, 15 bp, Homo sapiens
taggtataacaggca

SEQ ID NO: 1685815 - DNA, 15 bp, Homo sapiens
aggtataacaggcaa

SEQ ID NO: 1685816 - DNA, 15 bp, Homo sapiens
ggtataacaggcaaa

SEQ ID NO: 1685817 - DNA, 15 bp, Homo sapiens
gtataacaggcaaaa

SEQ ID NO: 1685818 - DNA, 15 bp, Homo sapiens
tataacaggcaaaat

SEQ ID NO: 1685819 - DNA, 15 bp, Homo sapiens
ataacaggcaaaata

SEQ ID NO: 1685820 - DNA, 15 bp, Homo sapiens
taacaggcaaaataa

SEQ ID NO: 1685821 - DNA, 15 bp, Homo sapiens
aacaggcaaaataag

SEQ ID NO: 1685822 - DNA, 15 bp, Homo sapiens
acaggcaaaataagt

SEQ ID NO: 1685823 - DNA, 15 bp, Homo sapiens
caggcaaaataagtg

SEQ ID NO: 1685824 - DNA, 15 bp, Homo sapiens
aggcaaaataagtga

SEQ ID NO: 1685825 - DNA, 15 bp, Homo sapiens
ggcaaaataagtgaa

SEQ ID NO: 1685826 - DNA, 15 bp, Homo sapiens
gcaaaataagtgaag

SEQ ID NO: 1685827 - DNA, 15 bp, Homo sapiens
caaaataagtgaaga

SEQ ID NO: 1685828 - DNA, 15 bp, Homo sapiens
aaaataagtgaagaa

SEQ ID NO: 1685829 - DNA, 15 bp, Homo sapiens
aaataagtgaagaat

SEQ ID NO: 1685830 - DNA, 15 bp, Homo sapiens
aataagtgaagaata

SEQ ID NO: 1685831 - DNA, 15 bp, Homo sapiens
ataagtgaagaatat

SEQ ID NO: 1685832 - DNA, 15 bp, Homo sapiens
taagtgaagaatatg

SEQ ID NO: 1685833 - DNA, 15 bp, Homo sapiens
aagtgaagaatatgc

SEQ ID NO: 1685834 - DNA, 15 bp, Homo sapiens
agtgaagaatatgct

SEQ ID NO: 1685835 - DNA, 15 bp, Homo sapiens
gtgaagaatatgctg

SEQ ID NO: 1685836 - DNA, 15 bp, Homo sapiens
tgaagaatatgctgt

SEQ ID NO: 1685837 - DNA, 15 bp, Homo sapiens
gaagaatatgctgta

SEQ ID NO: 1685838 - DNA, 15 bp, Homo sapiens
aagaatatgctgtat

SEQ ID NO: 1685839 - DNA, 15 bp, Homo sapiens
agaatatgctgtata

SEQ ID NO: 1685840 - DNA, 15 bp, Homo sapiens
gaatatgctgtataa

SEQ ID NO: 1685841 - DNA, 15 bp, Homo sapiens
aatatgctgtataat

SEQ ID NO: 1685842 - DNA, 15 bp, Homo sapiens
atatgctgtataatt

SEQ ID NO: 1685843 - DNA, 15 bp, Homo sapiens
tatgctgtataattc

SEQ ID NO: 1685844 - DNA, 15 bp, Homo sapiens
atgctgtataattcc

SEQ ID NO: 1685845 - DNA, 15 bp, Homo sapiens
tgctgtataattcca

SEQ ID NO: 1685846 - DNA, 15 bp, Homo sapiens
gctgtataattccat

SEQ ID NO: 1685847 - DNA, 15 bp, Homo sapiens
ctgtataattccatc

SEQ ID NO: 1685848 - DNA, 15 bp, Homo sapiens
tgtataattccatct

SEQ ID NO: 1685849 - DNA, 15 bp, Homo sapiens
gtataattccatctg

SEQ ID NO: 1685850 - DNA, 15 bp, Homo sapiens
tataattccatctgt

SEQ ID NO: 1685851 - DNA, 15 bp, Homo sapiens
ataattccatctgta

SEQ ID NO: 1685852 - DNA, 15 bp, Homo sapiens
taattccatctgtaa

SEQ ID NO: 1685853 - DNA, 15 bp, Homo sapiens
aattccatctgtaat

SEQ ID NO: 1685854 - DNA, 15 bp, Homo sapiens
attccatctgtaatc

SEQ ID NO: 1685855 - DNA, 15 bp, Homo sapiens
ttccatctgtaatct

SEQ ID NO: 1685856 - DNA, 15 bp, Homo sapiens
tccatctgtaatctt

SEQ ID NO: 1685857 - DNA, 15 bp, Homo sapiens
ccatctgtaatcttc

SEQ ID NO: 1685858 - DNA, 15 bp, Homo sapiens
catctgtaatcttca

SEQ ID NO: 1685859 - DNA, 15 bp, Homo sapiens
atctgtaatcttcaa

SEQ ID NO: 1685860 - DNA, 15 bp, Homo sapiens
tctgtaatcttcaaa

SEQ ID NO: 1685861 - DNA, 15 bp, Homo sapiens
ctgtaatcttcaaac

SEQ ID NO: 1685862 - DNA, 15 bp, Homo sapiens
tgtaatcttcaaact

SEQ ID NO: 1685863 - DNA, 15 bp, Homo sapiens
gtaatcttcaaacta

SEQ ID NO: 1685864 - DNA, 15 bp, Homo sapiens
taatcttcaaactag

SEQ ID NO: 1685865 - DNA, 15 bp, Homo sapiens
aatcttcaaactagc

SEQ ID NO: 1685866 - DNA, 15 bp, Homo sapiens
atcttcaaactagca

SEQ ID NO: 1685867 - DNA, 15 bp, Homo sapiens
tcttcaaactagcag

SEQ ID NO: 1685868 - DNA, 15 bp, Homo sapiens
cttcaaactagcagt

SEQ ID NO: 1685869 - DNA, 15 bp, Homo sapiens
ttcaaactagcagtt

SEQ ID NO: 1685870 - DNA, 15 bp, Homo sapiens
tcaaactagcagttt

SEQ ID NO: 1685871 - DNA, 15 bp, Homo sapiens
caaactagcagtttc

SEQ ID NO: 1685872 - DNA, 15 bp, Homo sapiens
aaactagcagtttcc

SEQ ID NO: 1685873 - DNA, 15 bp, Homo sapiens
aactagcagtttccg

SEQ ID NO: 1685874 - DNA, 15 bp, Homo sapiens
actagcagtttccgt

SEQ ID NO: 1685875 - DNA, 15 bp, Homo sapiens
ctagcagtttccgta

SEQ ID NO: 1685876 - DNA, 15 bp, Homo sapiens
tagcagtttccgtag

SEQ ID NO: 1685877 - DNA, 15 bp, Homo sapiens
agcagtttccgtagc

SEQ ID NO: 1685878 - DNA, 15 bp, Homo sapiens
gcagtttccgtagct

SEQ ID NO: 1685879 - DNA, 15 bp, Homo sapiens
cagtttccgtagctg

SEQ ID NO: 1685880 - DNA, 15 bp, Homo sapiens
agtttccgtagctgt

SEQ ID NO: 1685881 - DNA, 15 bp, Homo sapiens
gtttccgtagctgtg

SEQ ID NO: 1685882 - DNA, 15 bp, Homo sapiens
tttccgtagctgtgg

SEQ ID NO: 1685883 - DNA, 15 bp, Homo sapiens
ttccgtagctgtggt

SEQ ID NO: 1685884 - DNA, 15 bp, Homo sapiens
tccgtagctgtggtg

SEQ ID NO: 1685885 - DNA, 15 bp, Homo sapiens
ccgtagctgtggtgt

SEQ ID NO: 1685886 - DNA, 15 bp, Homo sapiens
cgtagctgtggtgtt

SEQ ID NO: 1685887 - DNA, 15 bp, Homo sapiens
gtagctgtggtgttc

SEQ ID NO: 1685888 - DNA, 15 bp, Homo sapiens
tagctgtggtgttca

SEQ ID NO: 1685889 - DNA, 15 bp, Homo sapiens
agctgtggtgttcat

SEQ ID NO: 1685890 - DNA, 15 bp, Homo sapiens
gctgtggtgttcatc

SEQ ID NO: 1685891 - DNA, 15 bp, Homo sapiens
ctgtggtgttcatct

SEQ ID NO: 1685892 - DNA, 15 bp, Homo sapiens
tgtggtgttcatctt

SEQ ID NO: 1685893 - DNA, 15 bp, Homo sapiens
gtggtgttcatcttc

SEQ ID NO: 1685894 - DNA, 15 bp, Homo sapiens
tggtgttcatcttcc

SEQ ID NO: 1685895 - DNA, 15 bp, Homo sapiens
ggtgttcatcttccc

SEQ ID NO: 1685896 - DNA, 15 bp, Homo sapiens
gtgttcatcttccca

SEQ ID NO: 1685897 - DNA, 15 bp, Homo sapiens
tgttcatcttcccat

SEQ ID NO: 1685898 - DNA, 15 bp, Homo sapiens
gttcatcttcccatc

SEQ ID NO: 1685899 - DNA, 15 bp, Homo sapiens
ttcatcttcccatca

SEQ ID NO: 1685900 - DNA, 15 bp, Homo sapiens
tcatcttcccatcat

SEQ ID NO: 1685901 - DNA, 15 bp, Homo sapiens
catcttcccatcatt

SEQ ID NO: 1685902 - DNA, 15 bp, Homo sapiens
atcttcccatcattg

SEQ ID NO: 1685903 - DNA, 15 bp, Homo sapiens
tcttcccatcattgg

SEQ ID NO: 1685904 - DNA, 15 bp, Homo sapiens
cttcccatcattggt

SEQ ID NO: 1685905 - DNA, 15 bp, Homo sapiens
ttcccatcattggta

SEQ ID NO: 1685906 - DNA, 15 bp, Homo sapiens
tcccatcattggtaa

SEQ ID NO: 1685907 - DNA, 15 bp, Homo sapiens
cccatcattggtaat

SEQ ID NO: 1685908 - DNA, 15 bp, Homo sapiens
ccatcattggtaatt

SEQ ID NO: 1685909 - DNA, 15 bp, Homo sapiens
catcattggtaattg

SEQ ID NO: 1685910 - DNA, 15 bp, Homo sapiens
atcattggtaattgg

SEQ ID NO: 1685911 - DNA, 15 bp, Homo sapiens
tcattggtaattgga

SEQ ID NO: 1685912 - DNA, 15 bp, Homo sapiens
cattggtaattggag

SEQ ID NO: 1685913 - DNA, 15 bp, Homo sapiens
attggtaattggaga

SEQ ID NO: 1685914 - DNA, 15 bp, Homo sapiens
ttggtaattggagag

SEQ ID NO: 1685915 - DNA, 15 bp, Homo sapiens
tggtaattggagagt

SEQ ID NO: 1685916 - DNA, 15 bp, Homo sapiens
ggtaattggagagta

SEQ ID NO: 1685917 - DNA, 15 bp, Homo sapiens
gtaattggagagtaa

SEQ ID NO: 1685918 - DNA, 15 bp, Homo sapiens
taattggagagtaac

SEQ ID NO: 1685919 - DNA, 15 bp, Homo sapiens
aattggagagtaact

SEQ ID NO: 1685920 - DNA, 15 bp, Homo sapiens
attggagagtaactc

SEQ ID NO: 1685921 - DNA, 15 bp, Homo sapiens
ttggagagtaactct

SEQ ID NO: 1685922 - DNA, 15 bp, Homo sapiens
tggagagtaactcta

SEQ ID NO: 1685923 - DNA, 15 bp, Homo sapiens
ggagagtaactctac

SEQ ID NO: 1685924 - DNA, 15 bp, Homo sapiens
gagagtaactctacc

SEQ ID NO: 1685925 - DNA, 15 bp, Homo sapiens
agagtaactctacct

SEQ ID NO: 1685926 - DNA, 15 bp, Homo sapiens
gagtaactctacctc

SEQ ID NO: 1685927 - DNA, 15 bp, Homo sapiens
agtaactctacctcc

SEQ ID NO: 1685928 - DNA, 15 bp, Homo sapiens
gtaactctacctccc

SEQ ID NO: 1685929 - DNA, 15 bp, Homo sapiens
taactctacctccca

SEQ ID NO: 1685930 - DNA, 15 bp, Homo sapiens
aactctacctcccag

SEQ ID NO: 1685931 - DNA, 15 bp, Homo sapiens
actctacctcccaga

SEQ ID NO: 1685932 - DNA, 15 bp, Homo sapiens
ctctacctcccagag

SEQ ID NO: 1685933 - DNA, 15 bp, Homo sapiens
tctacctcccagagg

SEQ ID NO: 1685934 - DNA, 15 bp, Homo sapiens
ctacctcccagagga

SEQ ID NO: 1685935 - DNA, 15 bp, Homo sapiens
tacctcccagaggaa

SEQ ID NO: 1685936 - DNA, 15 bp, Homo sapiens
acctcccagaggaag

SEQ ID NO: 1685937 - DNA, 15 bp, Homo sapiens
cctcccagaggaagg

SEQ ID NO: 1685938 - DNA, 15 bp, Homo sapiens
ctcccagaggaagga

SEQ ID NO: 1685939 - DNA, 15 bp, Homo sapiens
tcccagaggaaggag

SEQ ID NO: 1685940 - DNA, 15 bp, Homo sapiens
cccagaggaaggagg

SEQ ID NO: 1685941 - DNA, 15 bp, Homo sapiens
ccagaggaaggagga

SEQ ID NO: 1685942 - DNA, 15 bp, Homo sapiens
cagaggaaggaggac

SEQ ID NO: 1685943 - DNA, 15 bp, Homo sapiens
agaggaaggaggact

SEQ ID NO: 1685944 - DNA, 15 bp, Homo sapiens
gaggaaggaggactg

SEQ ID NO: 1685945 - DNA, 15 bp, Homo sapiens
aggaaggaggactgt

SEQ ID NO: 1685946 - DNA, 15 bp, Homo sapiens
ggaaggaggactgtt

SEQ ID NO: 1685947 - DNA, 15 bp, Homo sapiens
gaaggaggactgttg

SEQ ID NO: 1685948 - DNA, 15 bp, Homo sapiens
aaggaggactgttgt

SEQ ID NO: 1685949 - DNA, 15 bp, Homo sapiens
aggaggactgttgta

SEQ ID NO: 1685950 - DNA, 15 bp, Homo sapiens
ggaggactgttgtaa

SEQ ID NO: 1685951 - DNA, 15 bp, Homo sapiens
gaggactgttgtaaa

SEQ ID NO: 1685952 - DNA, 15 bp, Homo sapiens
aggactgttgtaaat

SEQ ID NO: 1685953 - DNA, 15 bp, Homo sapiens
ggactgttgtaaatt

SEQ ID NO: 1685954 - DNA, 15 bp, Homo sapiens
gactgttgtaaatta

SEQ ID NO: 1685955 - DNA, 15 bp, Homo sapiens
actgttgtaaattaa

SEQ ID NO: 1685956 - DNA, 15 bp, Homo sapiens
ctgttgtaaattaaa

SEQ ID NO: 1685957 - DNA, 15 bp, Homo sapiens
tgttgtaaattaaag

SEQ ID NO: 1685958 - DNA, 15 bp, Homo sapiens
gttgtaaattaaagg

SEQ ID NO: 1685959 - DNA, 15 bp, Homo sapiens
ttgtaaattaaaggc

SEQ ID NO: 1685960 - DNA, 15 bp, Homo sapiens
tgtaaattaaaggct

SEQ ID NO: 1685961 - DNA, 15 bp, Homo sapiens
gtaaattaaaggctc

SEQ ID NO: 1685962 - DNA, 15 bp, Homo sapiens
taaattaaaggctca

SEQ ID NO: 1685963 - DNA, 15 bp, Homo sapiens
aaattaaaggctcat

SEQ ID NO: 1685964 - DNA, 15 bp, Homo sapiens
aattaaaggctcatt

SEQ ID NO: 1685965 - DNA, 15 bp, Homo sapiens
attaaaggctcattg

SEQ ID NO: 1685966 - DNA, 15 bp, Homo sapiens
ttaaaggctcattgt

SEQ ID NO: 1685967 - DNA, 15 bp, Homo sapiens
taaaggctcattgtt

SEQ ID NO: 1685968 - DNA, 15 bp, Homo sapiens
aaaggctcattgttc

SEQ ID NO: 1685969 - DNA, 15 bp, Homo sapiens
aaggctcattgttca

SEQ ID NO: 1685970 - DNA, 15 bp, Homo sapiens
aggctcattgttcaa

SEQ ID NO: 1685971 - DNA, 15 bp, Homo sapiens
ggctcattgttcaag

SEQ ID NO: 1685972 - DNA, 15 bp, Homo sapiens
gctcattgttcaagc

SEQ ID NO: 1685973 - DNA, 15 bp, Homo sapiens
ctcattgttcaagcc

SEQ ID NO: 1685974 - DNA, 15 bp, Homo sapiens
tcattgttcaagcct

SEQ ID NO: 1685975 - DNA, 15 bp, Homo sapiens
cattgttcaagcctc

SEQ ID NO: 1685976 - DNA, 15 bp, Homo sapiens
attgttcaagcctca

SEQ ID NO: 1685977 - DNA, 15 bp, Homo sapiens
ttgttcaagcctcat

SEQ ID NO: 1685978 - DNA, 15 bp, Homo sapiens
tgttcaagcctcatt

SEQ ID NO: 1685979 - DNA, 15 bp, Homo sapiens
gttcaagcctcattg

SEQ ID NO: 1685980 - DNA, 15 bp, Homo sapiens
ttcaagcctcattga

SEQ ID NO: 1685981 - DNA, 15 bp, Homo sapiens
tcaagcctcattgaa

SEQ ID NO: 1685982 - DNA, 15 bp, Homo sapiens
caagcctcattgaat

SEQ ID NO: 1685983 - DNA, 15 bp, Homo sapiens
aagcctcattgaatt

SEQ ID NO: 1685984 - DNA, 15 bp, Homo sapiens
agcctcattgaattg

SEQ ID NO: 1685985 - DNA, 15 bp, Homo sapiens
gcctcattgaattgt

SEQ ID NO: 1685986 - DNA, 15 bp, Homo sapiens
cctcattgaattgtc

SEQ ID NO: 1685987 - DNA, 15 bp, Homo sapiens
ctcattgaattgtca

SEQ ID NO: 1685988 - DNA, 15 bp, Homo sapiens
tcattgaattgtcag

SEQ ID NO: 1685989 - DNA, 15 bp, Homo sapiens
cattgaattgtcagt

SEQ ID NO: 1685990 - DNA, 15 bp, Homo sapiens
attgaattgtcagtg

SEQ ID NO: 1685991 - DNA, 15 bp, Homo sapiens
ttgaattgtcagtgt

SEQ ID NO: 1685992 - DNA, 15 bp, Homo sapiens
tgaattgtcagtgta

SEQ ID NO: 1685993 - DNA, 15 bp, Homo sapiens
gaattgtcagtgtag

SEQ ID NO: 1685994 - DNA, 15 bp, Homo sapiens
aattgtcagtgtagg

SEQ ID NO: 1685995 - DNA, 15 bp, Homo sapiens
attgtcagtgtaggg

SEQ ID NO: 1685996 - DNA, 15 bp, Homo sapiens
ttgtcagtgtagggg

SEQ ID NO: 1685997 - DNA, 15 bp, Homo sapiens
tgtcagtgtagggga

SEQ ID NO: 1685998 - DNA, 15 bp, Homo sapiens
gtcagtgtaggggac

SEQ ID NO: 1685999 - DNA, 15 bp, Homo sapiens
tcagtgtaggggacc

SEQ ID NO: 1686000 - DNA, 15 bp, Homo sapiens
cagtgtaggggacct

SEQ ID NO: 1686001 - DNA, 15 bp, Homo sapiens
agtgtaggggacctg

SEQ ID NO: 1686002 - DNA, 15 bp, Homo sapiens
gtgtaggggacctga

SEQ ID NO: 1686003 - DNA, 15 bp, Homo sapiens
tgtaggggacctgag

SEQ ID NO: 1686004 - DNA, 15 bp, Homo sapiens
gtaggggacctgagg

SEQ ID NO: 1686005 - DNA, 15 bp, Homo sapiens
taggggacctgaggc

SEQ ID NO: 1686006 - DNA, 15 bp, Homo sapiens
aggggacctgaggca

SEQ ID NO: 1686007 - DNA, 15 bp, Homo sapiens
ggggacctgaggcaa

SEQ ID NO: 1686008 - DNA, 15 bp, Homo sapiens
gggacctgaggcaaa

SEQ ID NO: 1686009 - DNA, 15 bp, Homo sapiens
ggacctgaggcaaag

SEQ ID NO: 1686010 - DNA, 15 bp, Homo sapiens
gacctgaggcaaaga

SEQ ID NO: 1686011 - DNA, 15 bp, Homo sapiens
acctgaggcaaagag

SEQ ID NO: 1686012 - DNA, 15 bp, Homo sapiens
cctgaggcaaagagc

SEQ ID NO: 1686013 - DNA, 15 bp, Homo sapiens
ctgaggcaaagagca

SEQ ID NO: 1686014 - DNA, 15 bp, Homo sapiens
tgaggcaaagagcat

SEQ ID NO: 1686015 - DNA, 15 bp, Homo sapiens
gaggcaaagagcatt

SEQ ID NO: 1686016 - DNA, 15 bp, Homo sapiens
aggcaaagagcattg

SEQ ID NO: 1686017 - DNA, 15 bp, Homo sapiens
ggcaaagagcattgt

SEQ ID NO: 1686018 - DNA, 15 bp, Homo sapiens
gcaaagagcattgtt

SEQ ID NO: 1686019 - DNA, 15 bp, Homo sapiens
caaagagcattgttg

SEQ ID NO: 1686020 - DNA, 15 bp, Homo sapiens
aaagagcattgttgt

SEQ ID NO: 1686021 - DNA, 15 bp, Homo sapiens
aagagcattgttgtt

SEQ ID NO: 1686022 - DNA, 15 bp, Homo sapiens
agagcattgttgttt

SEQ ID NO: 1686023 - DNA, 15 bp, Homo sapiens
gagcattgttgtttt

SEQ ID NO: 1686024 - DNA, 15 bp, Homo sapiens
agcattgttgttttc

SEQ ID NO: 1686025 - DNA, 15 bp, Homo sapiens
gcattgttgttttca

SEQ ID NO: 1686026 - DNA, 15 bp, Homo sapiens
cattgttgttttcaa

SEQ ID NO: 1686027 - DNA, 15 bp, Homo sapiens
attgttgttttcaag

SEQ ID NO: 1686028 - DNA, 15 bp, Homo sapiens
ttgttgttttcaaga

SEQ ID NO: 1686029 - DNA, 15 bp, Homo sapiens
tgttgttttcaagag

SEQ ID NO: 1686030 - DNA, 15 bp, Homo sapiens
gttgttttcaagagt

SEQ ID NO: 1686031 - DNA, 15 bp, Homo sapiens
ttgttttcaagagtt

SEQ ID NO: 1686032 - DNA, 15 bp, Homo sapiens
tgttttcaagagtta

SEQ ID NO: 1686033 - DNA, 15 bp, Homo sapiens
gttttcaagagttat

SEQ ID NO: 1686034 - DNA, 15 bp, Homo sapiens
ttttcaagagttatt

SEQ ID NO: 1686035 - DNA, 15 bp, Homo sapiens
tttcaagagttattc

SEQ ID NO: 1686036 - DNA, 15 bp, Homo sapiens
ttcaagagttattct

SEQ ID NO: 1686037 - DNA, 15 bp, Homo sapiens
tcaagagttattctg

SEQ ID NO: 1686038 - DNA, 15 bp, Homo sapiens
caagagttattctgt

SEQ ID NO: 1686039 - DNA, 15 bp, Homo sapiens
aagagttattctgta

SEQ ID NO: 1686040 - DNA, 15 bp, Homo sapiens
agagttattctgtat

SEQ ID NO: 1686041 - DNA, 15 bp, Homo sapiens
gagttattctgtata

SEQ ID NO: 1686042 - DNA, 15 bp, Homo sapiens
agttattctgtatat

SEQ ID NO: 1686043 - DNA, 15 bp, Homo sapiens
gttattctgtatatc

SEQ ID NO: 1686044 - DNA, 15 bp, Homo sapiens
ttattctgtatatca

SEQ ID NO: 1686045 - DNA, 15 bp, Homo sapiens
tattctgtatatcac

SEQ ID NO: 1686046 - DNA, 15 bp, Homo sapiens
attctgtatatcaca

SEQ ID NO: 1686047 - DNA, 15 bp, Homo sapiens
ttctgtatatcacat

SEQ ID NO: 1686048 - DNA, 15 bp, Homo sapiens
tctgtatatcacatt

SEQ ID NO: 1686049 - DNA, 15 bp, Homo sapiens
ctgtatatcacattg

SEQ ID NO: 1686050 - DNA, 15 bp, Homo sapiens
tgtatatcacattga

SEQ ID NO: 1686051 - DNA, 15 bp, Homo sapiens
gtatatcacattgat

SEQ ID NO: 1686052 - DNA, 15 bp, Homo sapiens
tatatcacattgatg

SEQ ID NO: 1686053 - DNA, 15 bp, Homo sapiens
atatcacattgatgt

SEQ ID NO: 1686054 - DNA, 15 bp, Homo sapiens
tatcacattgatgtg

SEQ ID NO: 1686055 - DNA, 15 bp, Homo sapiens
atcacattgatgtgc

SEQ ID NO: 1686056 - DNA, 15 bp, Homo sapiens
tcacattgatgtgca

SEQ ID NO: 1686057 - DNA, 15 bp, Homo sapiens
cacattgatgtgcag

SEQ ID NO: 1686058 - DNA, 15 bp, Homo sapiens
acattgatgtgcagt

SEQ ID NO: 1686059 - DNA, 15 bp, Homo sapiens
cattgatgtgcagtt

SEQ ID NO: 1686060 - DNA, 15 bp, Homo sapiens
attgatgtgcagttc

SEQ ID NO: 1686061 - DNA, 15 bp, Homo sapiens
ttgatgtgcagttca

SEQ ID NO: 1686062 - DNA, 15 bp, Homo sapiens
tgatgtgcagttcaa

SEQ ID NO: 1686063 - DNA, 15 bp, Homo sapiens
gatgtgcagttcaat

SEQ ID NO: 1686064 - DNA, 15 bp, Homo sapiens
atgtgcagttcaata

SEQ ID NO: 1686065 - DNA, 15 bp, Homo sapiens
tgtgcagttcaatat

SEQ ID NO: 1686066 - DNA, 15 bp, Homo sapiens
gtgcagttcaatatt

SEQ ID NO: 1686067 - DNA, 15 bp, Homo sapiens
tgcagttcaatattt

SEQ ID NO: 1686068 - DNA, 15 bp, Homo sapiens
gcagttcaatattta

SEQ ID NO: 1686069 - DNA, 15 bp, Homo sapiens
cagttcaatatttaa

SEQ ID NO: 1686070 - DNA, 15 bp, Homo sapiens
agttcaatatttaaa

SEQ ID NO: 1686071 - DNA, 15 bp, Homo sapiens
gttcaatatttaaat

SEQ ID NO: 1686072 - DNA, 15 bp, Homo sapiens
ttcaatatttaaatg

SEQ ID NO: 1686073 - DNA, 15 bp, Homo sapiens
tcaatatttaaatgt

SEQ ID NO: 1686074 - DNA, 15 bp, Homo sapiens
caatatttaaatgta

SEQ ID NO: 1686075 - DNA, 15 bp, Homo sapiens
aatatttaaatgtaa

SEQ ID NO: 1686076 - DNA, 15 bp, Homo sapiens
atatttaaatgtaag

SEQ ID NO: 1686077 - DNA, 15 bp, Homo sapiens
tatttaaatgtaagg

SEQ ID NO: 1686078 - DNA, 15 bp, Homo sapiens
atttaaatgtaagga

SEQ ID NO: 1686079 - DNA, 15 bp, Homo sapiens
tttaaatgtaaggaa

SEQ ID NO: 1686080 - DNA, 15 bp, Homo sapiens
ttaaatgtaaggaaa

SEQ ID NO: 1686081 - DNA, 15 bp, Homo sapiens
aaatgtaaggaaatg

SEQ ID NO: 1686082 - DNA, 15 bp, Homo sapiens
aatgtaaggaaatga

SEQ ID NO: 1686083 - DNA, 15 bp, Homo sapiens
atgtaaggaaatgac

SEQ ID NO: 1686084 - DNA, 15 bp, Homo sapiens
tgtaaggaaatgact

SEQ ID NO: 1686085 - DNA, 15 bp, Homo sapiens
gtaaggaaatgactc

SEQ ID NO: 1686086 - DNA, 15 bp, Homo sapiens
taaggaaatgactcc

SEQ ID NO: 1686087 - DNA, 15 bp, Homo sapiens
aaggaaatgactcct

SEQ ID NO: 1686088 - DNA, 15 bp, Homo sapiens
aggaaatgactccta

SEQ ID NO: 1686089 - DNA, 15 bp, Homo sapiens
ggaaatgactcctac

SEQ ID NO: 1686090 - DNA, 15 bp, Homo sapiens
gaaatgactcctact

SEQ ID NO: 1686091 - DNA, 15 bp, Homo sapiens
aaatgactcctactc

SEQ ID NO: 1686092 - DNA, 15 bp, Homo sapiens
aatgactcctactct

SEQ ID NO: 1686093 - DNA, 15 bp, Homo sapiens
atgactcctactctc

SEQ ID NO: 1686094 - DNA, 15 bp, Homo sapiens
tgactcctactctct

SEQ ID NO: 1686095 - DNA, 15 bp, Homo sapiens
gactcctactctcta

SEQ ID NO: 1686096 - DNA, 15 bp, Homo sapiens
actcctactctctat

SEQ ID NO: 1686097 - DNA, 15 bp, Homo sapiens
ctcctactctctatt

SEQ ID NO: 1686098 - DNA, 15 bp, Homo sapiens
tcctactctctattt

SEQ ID NO: 1686099 - DNA, 15 bp, Homo sapiens
cctactctctatttg

SEQ ID NO: 1686100 - DNA, 15 bp, Homo sapiens
ctactctctatttgt

SEQ ID NO: 1686101 - DNA, 15 bp, Homo sapiens
tactctctatttgtt

SEQ ID NO: 1686102 - DNA, 15 bp, Homo sapiens
actctctatttgttt

SEQ ID NO: 1686103 - DNA, 15 bp, Homo sapiens
ctctctatttgttta

SEQ ID NO: 1686104 - DNA, 15 bp, Homo sapiens
tctctatttgtttac

SEQ ID NO: 1686105 - DNA, 15 bp, Homo sapiens
ctctatttgtttaca

SEQ ID NO: 1686106 - DNA, 15 bp, Homo sapiens
tctatttgtttacaa

SEQ ID NO: 1686107 - DNA, 15 bp, Homo sapiens
ctatttgtttacaaa

SEQ ID NO: 1686108 - DNA, 15 bp, Homo sapiens
tatttgtttacaaaa

SEQ ID NO: 1686109 - DNA, 15 bp, Homo sapiens
atttgtttacaaaac

SEQ ID NO: 1686110 - DNA, 15 bp, Homo sapiens
tttgtttacaaaacc

SEQ ID NO: 1686111 - DNA, 15 bp, Homo sapiens
ttgtttacaaaaccc

SEQ ID NO: 1686112 - DNA, 15 bp, Homo sapiens
tgtttacaaaaccct

SEQ ID NO: 1686113 - DNA, 15 bp, Homo sapiens
gtttacaaaacccta

SEQ ID NO: 1686114 - DNA, 15 bp, Homo sapiens
tttacaaaaccctag

SEQ ID NO: 1686115 - DNA, 15 bp, Homo sapiens
ttacaaaaccctagt

SEQ ID NO: 1686116 - DNA, 15 bp, Homo sapiens
tacaaaaccctagtt

SEQ ID NO: 1686117 - DNA, 15 bp, Homo sapiens
acaaaaccctagttc

SEQ ID NO: 1686118 - DNA, 15 bp, Homo sapiens
caaaaccctagttct

SEQ ID NO: 1686119 - DNA, 15 bp, Homo sapiens
aaaaccctagttctc

SEQ ID NO: 1686120 - DNA, 15 bp, Homo sapiens
aaaccctagttctca

SEQ ID NO: 1686121 - DNA, 15 bp, Homo sapiens
aaccctagttctcat

SEQ ID NO: 1686122 - DNA, 15 bp, Homo sapiens
accctagttctcatt

SEQ ID NO: 1686123 - DNA, 15 bp, Homo sapiens
ccctagttctcattt

SEQ ID NO: 1686124 - DNA, 15 bp, Homo sapiens
cctagttctcattta

SEQ ID NO: 1686125 - DNA, 15 bp, Homo sapiens
ctagttctcatttat

SEQ ID NO: 1686126 - DNA, 15 bp, Homo sapiens
tagttctcatttatg

SEQ ID NO: 1686127 - DNA, 15 bp, Homo sapiens
agttctcatttatgc

SEQ ID NO: 1686128 - DNA, 15 bp, Homo sapiens
gttctcatttatgcc

SEQ ID NO: 1686129 - DNA, 15 bp, Homo sapiens
ttctcatttatgccc

SEQ ID NO: 1686130 - DNA, 15 bp, Homo sapiens
tctcatttatgccca

SEQ ID NO: 1686131 - DNA, 15 bp, Homo sapiens
ctcatttatgcccat

SEQ ID NO: 1686132 - DNA, 15 bp, Homo sapiens
tcatttatgcccatt

SEQ ID NO: 1686133 - DNA, 15 bp, Homo sapiens
catttatgcccattc

SEQ ID NO: 1686134 - DNA, 15 bp, Homo sapiens
atttatgcccattcc

SEQ ID NO: 1686135 - DNA, 15 bp, Homo sapiens
tttatgcccattcct

SEQ ID NO: 1686136 - DNA, 15 bp, Homo sapiens
ttatgcccattcctt

SEQ ID NO: 1686137 - DNA, 15 bp, Homo sapiens
tatgcccattccttc

SEQ ID NO: 1686138 - DNA, 15 bp, Homo sapiens
atgcccattccttca

SEQ ID NO: 1686139 - DNA, 15 bp, Homo sapiens
tgcccattccttcat

SEQ ID NO: 1686140 - DNA, 15 bp, Homo sapiens
gcccattccttcatc

SEQ ID NO: 1686141 - DNA, 15 bp, Homo sapiens
cccattccttcatca

SEQ ID NO: 1686142 - DNA, 15 bp, Homo sapiens
ccattccttcatcaa

SEQ ID NO: 1686143 - DNA, 15 bp, Homo sapiens
cattccttcatcaac

SEQ ID NO: 1686144 - DNA, 15 bp, Homo sapiens
attccttcatcaaca

SEQ ID NO: 1686145 - DNA, 15 bp, Homo sapiens
ttccttcatcaacaa

SEQ ID NO: 1686146 - DNA, 15 bp, Homo sapiens
tccttcatcaacaaa

SEQ ID NO: 1686147 - DNA, 15 bp, Homo sapiens
ccttcatcaacaaat

SEQ ID NO: 1686148 - DNA, 15 bp, Homo sapiens
cttcatcaacaaata

SEQ ID NO: 1686149 - DNA, 15 bp, Homo sapiens
ttcatcaacaaataa

SEQ ID NO: 1686150 - DNA, 15 bp, Homo sapiens
tcatcaacaaataat

SEQ ID NO: 1686151 - DNA, 15 bp, Homo sapiens
catcaacaaataatg

SEQ ID NO: 1686152 - DNA, 15 bp, Homo sapiens
atcaacaaataatga

SEQ ID NO: 1686153 - DNA, 15 bp, Homo sapiens
tcaacaaataatgat

SEQ ID NO: 1686154 - DNA, 15 bp, Homo sapiens
caacaaataatgatt

SEQ ID NO: 1686155 - DNA, 15 bp, Homo sapiens
aacaaataatgattt

SEQ ID NO: 1686156 - DNA, 15 bp, Homo sapiens
acaaataatgatttt

SEQ ID NO: 1686157 - DNA, 15 bp, Homo sapiens
caaataatgattttc

SEQ ID NO: 1686158 - DNA, 15 bp, Homo sapiens
aaataatgattttct

SEQ ID NO: 1686159 - DNA, 15 bp, Homo sapiens
aataatgattttcta

SEQ ID NO: 1686160 - DNA, 15 bp, Homo sapiens
ataatgattttctac

SEQ ID NO: 1686161 - DNA, 15 bp, Homo sapiens
taatgattttctact

SEQ ID NO: 1686162 - DNA, 15 bp, Homo sapiens
aatgattttctactt

SEQ ID NO: 1686163 - DNA, 15 bp, Homo sapiens
atgattttctacttt

SEQ ID NO: 1686164 - DNA, 15 bp, Homo sapiens
tgattttctactttt

SEQ ID NO: 1686165 - DNA, 15 bp, Homo sapiens
gattttctacttttt

SEQ ID NO: 1686166 - DNA, 15 bp, Homo sapiens
attttctactttttg

SEQ ID NO: 1686167 - DNA, 15 bp, Homo sapiens
ttttctactttttgc

SEQ ID NO: 1686168 - DNA, 15 bp, Homo sapiens
tttctactttttgcc

SEQ ID NO: 1686169 - DNA, 15 bp, Homo sapiens
ttctactttttgcct

SEQ ID NO: 1686170 - DNA, 15 bp, Homo sapiens
tctactttttgcctg

SEQ ID NO: 1686171 - DNA, 15 bp, Homo sapiens
ctactttttgcctgg

SEQ ID NO: 1686172 - DNA, 15 bp, Homo sapiens
tactttttgcctggt

SEQ ID NO: 1686173 - DNA, 15 bp, Homo sapiens
actttttgcctggtt

SEQ ID NO: 1686174 - DNA, 15 bp, Homo sapiens
ctttttgcctggttc

SEQ ID NO: 1686175 - DNA, 15 bp, Homo sapiens
tttttgcctggttct

SEQ ID NO: 1686176 - DNA, 15 bp, Homo sapiens
ttttgcctggttctc

SEQ ID NO: 1686177 - DNA, 15 bp, Homo sapiens
tttgcctggttctct

SEQ ID NO: 1686178 - DNA, 15 bp, Homo sapiens
ttgcctggttctctc

SEQ ID NO: 1686179 - DNA, 15 bp, Homo sapiens
tgcctggttctctct

SEQ ID NO: 1686180 - DNA, 15 bp, Homo sapiens
gcctggttctctcta

SEQ ID NO: 1686181 - DNA, 15 bp, Homo sapiens
cctggttctctctag

SEQ ID NO: 1686182 - DNA, 15 bp, Homo sapiens
ctggttctctctaga

SEQ ID NO: 1686183 - DNA, 15 bp, Homo sapiens
tggttctctctagaa

SEQ ID NO: 1686184 - DNA, 15 bp, Homo sapiens
ggttctctctagaag

SEQ ID NO: 1686185 - DNA, 15 bp, Homo sapiens
gttctctctagaaga

SEQ ID NO: 1686186 - DNA, 15 bp, Homo sapiens
ttctctctagaagag

SEQ ID NO: 1686187 - DNA, 15 bp, Homo sapiens
tctctctagaagagt

SEQ ID NO: 1686188 - DNA, 15 bp, Homo sapiens
ctctctagaagagta

SEQ ID NO: 1686189 - DNA, 15 bp, Homo sapiens
tctctagaagagtag

SEQ ID NO: 1686190 - DNA, 15 bp, Homo sapiens
ctctagaagagtagt

SEQ ID NO: 1686191 - DNA, 15 bp, Homo sapiens
tctagaagagtagtt

SEQ ID NO: 1686192 - DNA, 15 bp, Homo sapiens
ctagaagagtagttc

SEQ ID NO: 1686193 - DNA, 15 bp, Homo sapiens
tagaagagtagttct

SEQ ID NO: 1686194 - DNA, 15 bp, Homo sapiens
agaagagtagttctt

SEQ ID NO: 1686195 - DNA, 15 bp, Homo sapiens
gaagagtagttctta

SEQ ID NO: 1686196 - DNA, 15 bp, Homo sapiens
aagagtagttcttaa

SEQ ID NO: 1686197 - DNA, 15 bp, Homo sapiens
agagtagttcttaaa

SEQ ID NO: 1686198 - DNA, 15 bp, Homo sapiens
gagtagttcttaaac

SEQ ID NO: 1686199 - DNA, 15 bp, Homo sapiens
agtagttcttaaaca

SEQ ID NO: 1686200 - DNA, 15 bp, Homo sapiens
gtagttcttaaacaa

SEQ ID NO: 1686201 - DNA, 15 bp, Homo sapiens
tagttcttaaacaat

SEQ ID NO: 1686202 - DNA, 15 bp, Homo sapiens
agttcttaaacaata

SEQ ID NO: 1686203 - DNA, 15 bp, Homo sapiens
gttcttaaacaatag

SEQ ID NO: 1686204 - DNA, 15 bp, Homo sapiens
ttcttaaacaatagc

SEQ ID NO: 1686205 - DNA, 15 bp, Homo sapiens
tcttaaacaatagca

SEQ ID NO: 1686206 - DNA, 15 bp, Homo sapiens
cttaaacaatagcat

SEQ ID NO: 1686207 - DNA, 15 bp, Homo sapiens
ttaaacaatagcatt

SEQ ID NO: 1686208 - DNA, 15 bp, Homo sapiens
taaacaatagcattc

SEQ ID NO: 1686209 - DNA, 15 bp, Homo sapiens
aaacaatagcattca

SEQ ID NO: 1686210 - DNA, 15 bp, Homo sapiens
aacaatagcattcag

SEQ ID NO: 1686211 - DNA, 15 bp, Homo sapiens
acaatagcattcaga

SEQ ID NO: 1686212 - DNA, 15 bp, Homo sapiens
caatagcattcagaa

SEQ ID NO: 1686213 - DNA, 15 bp, Homo sapiens
aatagcattcagaaa

SEQ ID NO: 1686214 - DNA, 15 bp, Homo sapiens
atagcattcagaaaa

SEQ ID NO: 1686215 - DNA, 15 bp, Homo sapiens
tagcattcagaaaaa

SEQ ID NO: 1686216 - DNA, 15 bp, Homo sapiens
agcattcagaaaaat

SEQ ID NO: 1686217 - DNA, 15 bp, Homo sapiens
gcattcagaaaaatc

SEQ ID NO: 1686218 - DNA, 15 bp, Homo sapiens
cattcagaaaaatca

SEQ ID NO: 1686219 - DNA, 15 bp, Homo sapiens
attcagaaaaatcac

SEQ ID NO: 1686220 - DNA, 15 bp, Homo sapiens
ttcagaaaaatcacc

SEQ ID NO: 1686221 - DNA, 15 bp, Homo sapiens
tcagaaaaatcacct

SEQ ID NO: 1686222 - DNA, 15 bp, Homo sapiens
cagaaaaatcacctg

SEQ ID NO: 1686223 - DNA, 15 bp, Homo sapiens
agaaaaatcacctgg

SEQ ID NO: 1686224 - DNA, 15 bp, Homo sapiens
gaaaaatcacctggt

SEQ ID NO: 1686225 - DNA, 15 bp, Homo sapiens
aaaaatcacctggtt

SEQ ID NO: 1686226 - DNA, 15 bp, Homo sapiens
aaaatcacctggttt

SEQ ID NO: 1686227 - DNA, 15 bp, Homo sapiens
aaatcacctggtttc

SEQ ID NO: 1686228 - DNA, 15 bp, Homo sapiens
aatcacctggtttca

SEQ ID NO: 1686229 - DNA, 15 bp, Homo sapiens
atcacctggtttcaa

SEQ ID NO: 1686230 - DNA, 15 bp, Homo sapiens
tcacctggtttcaat

SEQ ID NO: 1686231 - DNA, 15 bp, Homo sapiens
cacctggtttcaatg

SEQ ID NO: 1686232 - DNA, 15 bp, Homo sapiens
acctggtttcaatgg

SEQ ID NO: 1686233 - DNA, 15 bp, Homo sapiens
cctggtttcaatggt

SEQ ID NO: 1686234 - DNA, 15 bp, Homo sapiens
ctggtttcaatggta

SEQ ID NO: 1686235 - DNA, 15 bp, Homo sapiens
tggtttcaatggtag

SEQ ID NO: 1686236 - DNA, 15 bp, Homo sapiens
ggtttcaatggtagg

SEQ ID NO: 1686237 - DNA, 15 bp, Homo sapiens
gtttcaatggtaggc

SEQ ID NO: 1686238 - DNA, 15 bp, Homo sapiens
tttcaatggtaggct

SEQ ID NO: 1686239 - DNA, 15 bp, Homo sapiens
ttcaatggtaggctg

SEQ ID NO: 1686240 - DNA, 15 bp, Homo sapiens
tcaatggtaggctgt

SEQ ID NO: 1686241 - DNA, 15 bp, Homo sapiens
caatggtaggctgtc

SEQ ID NO: 1686242 - DNA, 15 bp, Homo sapiens
aatggtaggctgtca

SEQ ID NO: 1686243 - DNA, 15 bp, Homo sapiens
atggtaggctgtcat

SEQ ID NO: 1686244 - DNA, 15 bp, Homo sapiens
tggtaggctgtcatg

SEQ ID NO: 1686245 - DNA, 15 bp, Homo sapiens
ggtaggctgtcatga

SEQ ID NO: 1686246 - DNA, 15 bp, Homo sapiens
gtaggctgtcatgaa

SEQ ID NO: 1686247 - DNA, 15 bp, Homo sapiens
taggctgtcatgaaa

SEQ ID NO: 1686248 - DNA, 15 bp, Homo sapiens
aggctgtcatgaaaa

SEQ ID NO: 1686249 - DNA, 15 bp, Homo sapiens
ggctgtcatgaaaaa

SEQ ID NO: 1686250 - DNA, 15 bp, Homo sapiens
gctgtcatgaaaaaa

SEQ ID NO: 1686251 - DNA, 15 bp, Homo sapiens
ctgtcatgaaaaaaa

SEQ ID NO: 1686252 - DNA, 15 bp, Homo sapiens
tgtcatgaaaaaaaa

SEQ ID NO: 1686253 - DNA, 15 bp, Homo sapiens
gtcatgaaaaaaaaa

SEQ ID NO: 1686254 - DNA, 15 bp, Homo sapiens
tcatgaaaaaaaaaa

SEQ ID NO: 1686255 - DNA, 15 bp, Homo sapiens
tgaaaaaaaaaaaaa

SEQ ID NO: 1686256 - DNA, 15 bp, Homo sapiens
aaaaaaaaaaaatca

SEQ ID NO: 1686257 - DNA, 15 bp, Homo sapiens
aaaaaaaaaaatcac

SEQ ID NO: 1686258 - DNA, 15 bp, Homo sapiens
aaaaaaaaaatcaca

SEQ ID NO: 1686259 - DNA, 15 bp, Homo sapiens
aaaaaaaaatcacag

SEQ ID NO: 1686260 - DNA, 15 bp, Homo sapiens
aaaaaaaatcacagg

SEQ ID NO: 1686261 - DNA, 15 bp, Homo sapiens
aaaaaaatcacaggg

SEQ ID NO: 1686262 - DNA, 15 bp, Homo sapiens
aaaaaatcacaggga

SEQ ID NO: 1686263 - DNA, 15 bp, Homo sapiens
aaaaatcacagggag

SEQ ID NO: 1686264 - DNA, 15 bp, Homo sapiens
aaaatcacagggaga

SEQ ID NO: 1686265 - DNA, 15 bp, Homo sapiens
aaatcacagggagaa

SEQ ID NO: 1686266 - DNA, 15 bp, Homo sapiens
aatcacagggagaat

SEQ ID NO: 1686267 - DNA, 15 bp, Homo sapiens
atcacagggagaatt

SEQ ID NO: 1686268 - DNA, 15 bp, Homo sapiens
tcacagggagaattt

SEQ ID NO: 1686269 - DNA, 15 bp, Homo sapiens
cacagggagaatttt

SEQ ID NO: 1686270 - DNA, 15 bp, Homo sapiens
acagggagaatttta

SEQ ID NO: 1686271 - DNA, 15 bp, Homo sapiens
cagggagaattttaa

SEQ ID NO: 1686272 - DNA, 15 bp, Homo sapiens
agggagaattttaaa

SEQ ID NO: 1686273 - DNA, 15 bp, Homo sapiens
gggagaattttaaaa

SEQ ID NO: 1686274 - DNA, 15 bp, Homo sapiens
ggagaattttaaaac

SEQ ID NO: 1686275 - DNA, 15 bp, Homo sapiens
gagaattttaaaaca

SEQ ID NO: 1686276 - DNA, 15 bp, Homo sapiens
agaattttaaaacac

SEQ ID NO: 1686277 - DNA, 15 bp, Homo sapiens
gaattttaaaacaca

SEQ ID NO: 1686278 - DNA, 15 bp, Homo sapiens
aattttaaaacacag

SEQ ID NO: 1686279 - DNA, 15 bp, Homo sapiens
attttaaaacacaga

SEQ ID NO: 1686280 - DNA, 15 bp, Homo sapiens
ttttaaaacacagat

SEQ ID NO: 1686281 - DNA, 15 bp, Homo sapiens
tttaaaacacagatt

SEQ ID NO: 1686282 - DNA, 15 bp, Homo sapiens
ttaaaacacagattc

SEQ ID NO: 1686283 - DNA, 15 bp, Homo sapiens
taaaacacagattcc

SEQ ID NO: 1686284 - DNA, 15 bp, Homo sapiens
aaaacacagattcct

SEQ ID NO: 1686285 - DNA, 15 bp, Homo sapiens
aaacacagattcctg

SEQ ID NO: 1686286 - DNA, 15 bp, Homo sapiens
aacacagattcctgg

SEQ ID NO: 1686287 - DNA, 15 bp, Homo sapiens
acacagattcctggt

SEQ ID NO: 1686288 - DNA, 15 bp, Homo sapiens
cacagattcctggtc

SEQ ID NO: 1686289 - DNA, 15 bp, Homo sapiens
acagattcctggtcc

SEQ ID NO: 1686290 - DNA, 15 bp, Homo sapiens
cagattcctggtccc

SEQ ID NO: 1686291 - DNA, 15 bp, Homo sapiens
agattcctggtccca

SEQ ID NO: 1686292 - DNA, 15 bp, Homo sapiens
gattcctggtcccaa

SEQ ID NO: 1686293 - DNA, 15 bp, Homo sapiens
attcctggtcccaac

SEQ ID NO: 1686294 - DNA, 15 bp, Homo sapiens
ttcctggtcccaacc

SEQ ID NO: 1686295 - DNA, 15 bp, Homo sapiens
tcctggtcccaacca

SEQ ID NO: 1686296 - DNA, 15 bp, Homo sapiens
cctggtcccaaccac

SEQ ID NO: 1686297 - DNA, 15 bp, Homo sapiens
ctggtcccaaccacc

SEQ ID NO: 1686298 - DNA, 15 bp, Homo sapiens
tggtcccaaccacca

SEQ ID NO: 1686299 - DNA, 15 bp, Homo sapiens
ggtcccaaccaccaa

SEQ ID NO: 1686300 - DNA, 15 bp, Homo sapiens
gtcccaaccaccaaa

SEQ ID NO: 1686301 - DNA, 15 bp, Homo sapiens
tcccaaccaccaaag

SEQ ID NO: 1686302 - DNA, 15 bp, Homo sapiens
cccaaccaccaaaga

SEQ ID NO: 1686303 - DNA, 15 bp, Homo sapiens
ccaaccaccaaagat

SEQ ID NO: 1686304 - DNA, 15 bp, Homo sapiens
caaccaccaaagatt

SEQ ID NO: 1686305 - DNA, 15 bp, Homo sapiens
aaccaccaaagattc

SEQ ID NO: 1686306 - DNA, 15 bp, Homo sapiens
accaccaaagattcc

SEQ ID NO: 1686307 - DNA, 15 bp, Homo sapiens
ccaccaaagattcct

SEQ ID NO: 1686308 - DNA, 15 bp, Homo sapiens
caccaaagattccta

SEQ ID NO: 1686309 - DNA, 15 bp, Homo sapiens
accaaagattcctat

SEQ ID NO: 1686310 - DNA, 15 bp, Homo sapiens
ccaaagattcctatt

SEQ ID NO: 1686311 - DNA, 15 bp, Homo sapiens
caaagattcctattc

SEQ ID NO: 1686312 - DNA, 15 bp, Homo sapiens
aaagattcctattca

SEQ ID NO: 1686313 - DNA, 15 bp, Homo sapiens
aagattcctattcag

SEQ ID NO: 1686314 - DNA, 15 bp, Homo sapiens
agattcctattcagt

SEQ ID NO: 1686315 - DNA, 15 bp, Homo sapiens
gattcctattcagtg

SEQ ID NO: 1686316 - DNA, 15 bp, Homo sapiens
attcctattcagtgg

SEQ ID NO: 1686317 - DNA, 15 bp, Homo sapiens
ttcctattcagtggt

SEQ ID NO: 1686318 - DNA, 15 bp, Homo sapiens
tcctattcagtggtg

SEQ ID NO: 1686319 - DNA, 15 bp, Homo sapiens
cctattcagtggtga

SEQ ID NO: 1686320 - DNA, 15 bp, Homo sapiens
ctattcagtggtgaa

SEQ ID NO: 1686321 - DNA, 15 bp, Homo sapiens
tattcagtggtgaag

SEQ ID NO: 1686322 - DNA, 15 bp, Homo sapiens
attcagtggtgaagc

SEQ ID NO: 1686323 - DNA, 15 bp, Homo sapiens
ttcagtggtgaagcc

SEQ ID NO: 1686324 - DNA, 15 bp, Homo sapiens
tcagtggtgaagccc

SEQ ID NO: 1686325 - DNA, 15 bp, Homo sapiens
cagtggtgaagccca

SEQ ID NO: 1686326 - DNA, 15 bp, Homo sapiens
agtggtgaagcccat

SEQ ID NO: 1686327 - DNA, 15 bp, Homo sapiens
gtggtgaagcccatc

SEQ ID NO: 1686328 - DNA, 15 bp, Homo sapiens
tggtgaagcccatca

SEQ ID NO: 1686329 - DNA, 15 bp, Homo sapiens
ggtgaagcccatcaa

SEQ ID NO: 1686330 - DNA, 15 bp, Homo sapiens
gtgaagcccatcaat

SEQ ID NO: 1686331 - DNA, 15 bp, Homo sapiens
tgaagcccatcaatc

SEQ ID NO: 1686332 - DNA, 15 bp, Homo sapiens
gaagcccatcaatca

SEQ ID NO: 1686333 - DNA, 15 bp, Homo sapiens
aagcccatcaatcag

SEQ ID NO: 1686334 - DNA, 15 bp, Homo sapiens
agcccatcaatcagc

SEQ ID NO: 1686335 - DNA, 15 bp, Homo sapiens
gcccatcaatcagca

SEQ ID NO: 1686336 - DNA, 15 bp, Homo sapiens
cccatcaatcagcat

SEQ ID NO: 1686337 - DNA, 15 bp, Homo sapiens
ccatcaatcagcatc

SEQ ID NO: 1686338 - DNA, 15 bp, Homo sapiens
catcaatcagcatct

SEQ ID NO: 1686339 - DNA, 15 bp, Homo sapiens
atcaatcagcatctc

SEQ ID NO: 1686340 - DNA, 15 bp, Homo sapiens
tcaatcagcatctct

SEQ ID NO: 1686341 - DNA, 15 bp, Homo sapiens
caatcagcatctcta

SEQ ID NO: 1686342 - DNA, 15 bp, Homo sapiens
aatcagcatctctaa

SEQ ID NO: 1686343 - DNA, 15 bp, Homo sapiens
atcagcatctctaac

SEQ ID NO: 1686344 - DNA, 15 bp, Homo sapiens
tcagcatctctaaca

SEQ ID NO: 1686345 - DNA, 15 bp, Homo sapiens
cagcatctctaacaa

SEQ ID NO: 1686346 - DNA, 15 bp, Homo sapiens
agcatctctaacaag

SEQ ID NO: 1686347 - DNA, 15 bp, Homo sapiens
gcatctctaacaagc

SEQ ID NO: 1686348 - DNA, 15 bp, Homo sapiens
catctctaacaagct

SEQ ID NO: 1686349 - DNA, 15 bp, Homo sapiens
atctctaacaagctt

SEQ ID NO: 1686350 - DNA, 15 bp, Homo sapiens
tctctaacaagcttc

SEQ ID NO: 1686351 - DNA, 15 bp, Homo sapiens
ctctaacaagcttcc

SEQ ID NO: 1686352 - DNA, 15 bp, Homo sapiens
tctaacaagcttcca

SEQ ID NO: 1686353 - DNA, 15 bp, Homo sapiens
ctaacaagcttccaa

SEQ ID NO: 1686354 - DNA, 15 bp, Homo sapiens
taacaagcttccaag

SEQ ID NO: 1686355 - DNA, 15 bp, Homo sapiens
aacaagcttccaagt

SEQ ID NO: 1686356 - DNA, 15 bp, Homo sapiens
acaagcttccaagtg

SEQ ID NO: 1686357 - DNA, 15 bp, Homo sapiens
caagcttccaagtgg

SEQ ID NO: 1686358 - DNA, 15 bp, Homo sapiens
aagcttccaagtggt

SEQ ID NO: 1686359 - DNA, 15 bp, Homo sapiens
agcttccaagtggtg

SEQ ID NO: 1686360 - DNA, 15 bp, Homo sapiens
gcttccaagtggtgc

SEQ ID NO: 1686361 - DNA, 15 bp, Homo sapiens
cttccaagtggtgct

SEQ ID NO: 1686362 - DNA, 15 bp, Homo sapiens
ttccaagtggtgctg

SEQ ID NO: 1686363 - DNA, 15 bp, Homo sapiens
tccaagtggtgctga

SEQ ID NO: 1686364 - DNA, 15 bp, Homo sapiens
ccaagtggtgctgag

SEQ ID NO: 1686365 - DNA, 15 bp, Homo sapiens
caagtggtgctgagg

SEQ ID NO: 1686366 - DNA, 15 bp, Homo sapiens
aagtggtgctgagga

SEQ ID NO: 1686367 - DNA, 15 bp, Homo sapiens
agtggtgctgaggat

SEQ ID NO: 1686368 - DNA, 15 bp, Homo sapiens
gtggtgctgaggatg

SEQ ID NO: 1686369 - DNA, 15 bp, Homo sapiens
tggtgctgaggatgc

SEQ ID NO: 1686370 - DNA, 15 bp, Homo sapiens
ggtgctgaggatgct

SEQ ID NO: 1686371 - DNA, 15 bp, Homo sapiens
gtgctgaggatgctg

SEQ ID NO: 1686372 - DNA, 15 bp, Homo sapiens
tgctgaggatgctgg

SEQ ID NO: 1686373 - DNA, 15 bp, Homo sapiens
gctgaggatgctggt

SEQ ID NO: 1686374 - DNA, 15 bp, Homo sapiens
ctgaggatgctggtg

SEQ ID NO: 1686375 - DNA, 15 bp, Homo sapiens
tgaggatgctggtga

SEQ ID NO: 1686376 - DNA, 15 bp, Homo sapiens
gaggatgctggtgaa

SEQ ID NO: 1686377 - DNA, 15 bp, Homo sapiens
aggatgctggtgaat

SEQ ID NO: 1686378 - DNA, 15 bp, Homo sapiens
ggatgctggtgaatg

SEQ ID NO: 1686379 - DNA, 15 bp, Homo sapiens
gatgctggtgaatga

SEQ ID NO: 1686380 - DNA, 15 bp, Homo sapiens
atgctggtgaatgat

SEQ ID NO: 1686381 - DNA, 15 bp, Homo sapiens
tgctggtgaatgatc

SEQ ID NO: 1686382 - DNA, 15 bp, Homo sapiens
gctggtgaatgatcc

SEQ ID NO: 1686383 - DNA, 15 bp, Homo sapiens
ctggtgaatgatcca

SEQ ID NO: 1686384 - DNA, 15 bp, Homo sapiens
tggtgaatgatccat

SEQ ID NO: 1686385 - DNA, 15 bp, Homo sapiens
ggtgaatgatccatt

SEQ ID NO: 1686386 - DNA, 15 bp, Homo sapiens
gtgaatgatccattc

SEQ ID NO: 1686387 - DNA, 15 bp, Homo sapiens
tgaatgatccattca

SEQ ID NO: 1686388 - DNA, 15 bp, Homo sapiens
gaatgatccattcat

SEQ ID NO: 1686389 - DNA, 15 bp, Homo sapiens
aatgatccattcata

SEQ ID NO: 1686390 - DNA, 15 bp, Homo sapiens
atgatccattcatac

SEQ ID NO: 1686391 - DNA, 15 bp, Homo sapiens
tgatccattcatact

SEQ ID NO: 1686392 - DNA, 15 bp, Homo sapiens
gatccattcatactc

SEQ ID NO: 1686393 - DNA, 15 bp, Homo sapiens
atccattcatactct

SEQ ID NO: 1686394 - DNA, 15 bp, Homo sapiens
tccattcatactctt

SEQ ID NO: 1686395 - DNA, 15 bp, Homo sapiens
ccattcatactcttc

SEQ ID NO: 1686396 - DNA, 15 bp, Homo sapiens
cattcatactcttct

SEQ ID NO: 1686397 - DNA, 15 bp, Homo sapiens
attcatactcttcta

SEQ ID NO: 1686398 - DNA, 15 bp, Homo sapiens
ttcatactcttctag

SEQ ID NO: 1686399 - DNA, 15 bp, Homo sapiens
tcatactcttctagg

SEQ ID NO: 1686400 - DNA, 15 bp, Homo sapiens
catactcttctaggg

SEQ ID NO: 1686401 - DNA, 15 bp, Homo sapiens
atactcttctagggc

SEQ ID NO: 1686402 - DNA, 15 bp, Homo sapiens
tactcttctagggct

SEQ ID NO: 1686403 - DNA, 15 bp, Homo sapiens
actcttctagggctg

SEQ ID NO: 1686404 - DNA, 15 bp, Homo sapiens
ctcttctagggctgt

SEQ ID NO: 1686405 - DNA, 15 bp, Homo sapiens
tcttctagggctgta

SEQ ID NO: 1686406 - DNA, 15 bp, Homo sapiens
cttctagggctgtag

SEQ ID NO: 1686407 - DNA, 15 bp, Homo sapiens
ttctagggctgtaga

SEQ ID NO: 1686408 - DNA, 15 bp, Homo sapiens
tctagggctgtagat

SEQ ID NO: 1686409 - DNA, 15 bp, Homo sapiens
ctagggctgtagata

SEQ ID NO: 1686410 - DNA, 15 bp, Homo sapiens
tagggctgtagataa

SEQ ID NO: 1686411 - DNA, 15 bp, Homo sapiens
agggctgtagataat

SEQ ID NO: 1686412 - DNA, 15 bp, Homo sapiens
gggctgtagataata

SEQ ID NO: 1686413 - DNA, 15 bp, Homo sapiens
ggctgtagataataa

SEQ ID NO: 1686414 - DNA, 15 bp, Homo sapiens
gctgtagataataaa

SEQ ID NO: 1686415 - DNA, 15 bp, Homo sapiens
ctgtagataataaat

SEQ ID NO: 1686416 - DNA, 15 bp, Homo sapiens
tgtagataataaatt

SEQ ID NO: 1686417 - DNA, 15 bp, Homo sapiens
gtagataataaatta

SEQ ID NO: 1686418 - DNA, 15 bp, Homo sapiens
tagataataaattaa

SEQ ID NO: 1686419 - DNA, 15 bp, Homo sapiens
agataataaattaaa

SEQ ID NO: 1686420 - DNA, 15 bp, Homo sapiens
gataataaattaaac

SEQ ID NO: 1686421 - DNA, 15 bp, Homo sapiens
ataataaattaaaca

SEQ ID NO: 1686422 - DNA, 15 bp, Homo sapiens
taataaattaaacag

SEQ ID NO: 1686423 - DNA, 15 bp, Homo sapiens
aataaattaaacagg

SEQ ID NO: 1686424 - DNA, 15 bp, Homo sapiens
ataaattaaacaggc

SEQ ID NO: 1686425 - DNA, 15 bp, Homo sapiens
taaattaaacaggca

SEQ ID NO: 1686426 - DNA, 15 bp, Homo sapiens
aaattaaacaggcaa

SEQ ID NO: 1686427 - DNA, 15 bp, Homo sapiens
aattaaacaggcaaa

SEQ ID NO: 1686428 - DNA, 15 bp, Homo sapiens
attaaacaggcaaaa

SEQ ID NO: 1686429 - DNA, 15 bp, Homo sapiens
ttaaacaggcaaaaa

SEQ ID NO: 1686430 - DNA, 15 bp, Homo sapiens
taaacaggcaaaaat

SEQ ID NO: 1686431 - DNA, 15 bp, Homo sapiens
aaacaggcaaaaata

SEQ ID NO: 1686432 - DNA, 15 bp, Homo sapiens
aacaggcaaaaataa

SEQ ID NO: 1686433 - DNA, 15 bp, Homo sapiens
acaggcaaaaataaa

SEQ ID NO: 1686434 - DNA, 15 bp, Homo sapiens
caggcaaaaataaaa

SEQ ID NO: 1686435 - DNA, 15 bp, Homo sapiens
aggcaaaaataaaaa

SEQ ID NO: 1686436 - DNA, 15 bp, Homo sapiens
ggcaaaaataaaaat

SEQ ID NO: 1686437 - DNA, 15 bp, Homo sapiens
gcaaaaataaaaata

SEQ ID NO: 1686438 - DNA, 15 bp, Homo sapiens
caaaaataaaaatag

SEQ ID NO: 1686439 - DNA, 15 bp, Homo sapiens
aaaaataaaaatagg

SEQ ID NO: 1686440 - DNA, 15 bp, Homo sapiens
aaaataaaaataggc

SEQ ID NO: 1686441 - DNA, 15 bp, Homo sapiens
aaataaaaataggct

SEQ ID NO: 1686442 - DNA, 15 bp, Homo sapiens
aataaaaataggctg

SEQ ID NO: 1686443 - DNA, 15 bp, Homo sapiens
ataaaaataggctgg

SEQ ID NO: 1686444 - DNA, 15 bp, Homo sapiens
taaaaataggctggc

SEQ ID NO: 1686445 - DNA, 15 bp, Homo sapiens
aaaaataggctggcg

SEQ ID NO: 1686446 - DNA, 15 bp, Homo sapiens
aaaataggctggcgc

SEQ ID NO: 1686447 - DNA, 15 bp, Homo sapiens
aaataggctggcgcg

SEQ ID NO: 1686448 - DNA, 15 bp, Homo sapiens
aataggctggcgcgg

SEQ ID NO: 1686449 - DNA, 15 bp, Homo sapiens
ataggctggcgcggt

SEQ ID NO: 1686450 - DNA, 15 bp, Homo sapiens
taggctggcgcggtg

SEQ ID NO: 1686451 - DNA, 15 bp, Homo sapiens
aggctggcgcggtgg

SEQ ID NO: 1686452 - DNA, 15 bp, Homo sapiens
ggctggcgcggtggc

SEQ ID NO: 1686453 - DNA, 15 bp, Homo sapiens
gctggcgcggtggct

SEQ ID NO: 1686454 - DNA, 15 bp, Homo sapiens
ctggcgcggtggctt

SEQ ID NO: 1686455 - DNA, 15 bp, Homo sapiens
tggcgcggtggctta

SEQ ID NO: 1686456 - DNA, 15 bp, Homo sapiens
ggcgcggtggcttac

SEQ ID NO: 1686457 - DNA, 15 bp, Homo sapiens
gcgcggtggcttaca

SEQ ID NO: 1686458 - DNA, 15 bp, Homo sapiens
cgcggtggcttacac

SEQ ID NO: 1686459 - DNA, 15 bp, Homo sapiens
gcggtggcttacacc

SEQ ID NO: 1686460 - DNA, 15 bp, Homo sapiens
cggtggcttacacct

SEQ ID NO: 1686461 - DNA, 15 bp, Homo sapiens
ggtggcttacacctg

SEQ ID NO: 1686462 - DNA, 15 bp, Homo sapiens
ccaaggtgggtggac

SEQ ID NO: 1686463 - DNA, 15 bp, Homo sapiens
caaggtgggtggacc

SEQ ID NO: 1686464 - DNA, 15 bp, Homo sapiens
aaggtgggtggacca

SEQ ID NO: 1686465 - DNA, 15 bp, Homo sapiens
aggtgggtggaccac

SEQ ID NO: 1686466 - DNA, 15 bp, Homo sapiens
ggtgggtggaccacc

SEQ ID NO: 1686467 - DNA, 15 bp, Homo sapiens
gtgggtggaccacct

SEQ ID NO: 1686468 - DNA, 15 bp, Homo sapiens
tgggtggaccacctg

SEQ ID NO: 1686469 - DNA, 15 bp, Homo sapiens
gggtggaccacctga

SEQ ID NO: 1686470 - DNA, 15 bp, Homo sapiens
ggtggaccacctgag

SEQ ID NO: 1686471 - DNA, 15 bp, Homo sapiens
gtggaccacctgagg

SEQ ID NO: 1686472 - DNA, 15 bp, Homo sapiens
tggaccacctgaggt

SEQ ID NO: 1686473 - DNA, 15 bp, Homo sapiens
ggaccacctgaggtc

SEQ ID NO: 1686474 - DNA, 15 bp, Homo sapiens
gaccacctgaggtca

SEQ ID NO: 1686475 - DNA, 15 bp, Homo sapiens
accacctgaggtcag

SEQ ID NO: 1686476 - DNA, 15 bp, Homo sapiens
ccacctgaggtcagg

SEQ ID NO: 1686477 - DNA, 15 bp, Homo sapiens
gaggtcaggagttct

SEQ ID NO: 1686478 - DNA, 15 bp, Homo sapiens
aggtcaggagttcta

SEQ ID NO: 1686479 - DNA, 15 bp, Homo sapiens
ggtcaggagttctag

SEQ ID NO: 1686480 - DNA, 15 bp, Homo sapiens
gtcaggagttctaga

SEQ ID NO: 1686481 - DNA, 15 bp, Homo sapiens
tcaggagttctagac

SEQ ID NO: 1686482 - DNA, 15 bp, Homo sapiens
caggagttctagacc

SEQ ID NO: 1686483 - DNA, 15 bp, Homo sapiens
aggagttctagacca

SEQ ID NO: 1686484 - DNA, 15 bp, Homo sapiens
ggagttctagaccag

SEQ ID NO: 1686485 - DNA, 15 bp, Homo sapiens
gagttctagaccagc

SEQ ID NO: 1686486 - DNA, 15 bp, Homo sapiens
agttctagaccagcc

SEQ ID NO: 1686487 - DNA, 15 bp, Homo sapiens
gttctagaccagcct

SEQ ID NO: 1686488 - DNA, 15 bp, Homo sapiens
ttctagaccagcctg

SEQ ID NO: 1686489 - DNA, 15 bp, Homo sapiens
tctagaccagcctgg

SEQ ID NO: 1686490 - DNA, 15 bp, Homo sapiens
ctagaccagcctggc

SEQ ID NO: 1686491 - DNA, 15 bp, Homo sapiens
tagaccagcctggcc

SEQ ID NO: 1686492 - DNA, 15 bp, Homo sapiens
gccaacatggtgaac

SEQ ID NO: 1686493 - DNA, 15 bp, Homo sapiens
ccaacatggtgaacc

SEQ ID NO: 1686494 - DNA, 15 bp, Homo sapiens
caacatggtgaaccc

SEQ ID NO: 1686495 - DNA, 15 bp, Homo sapiens
aacatggtgaacccc

SEQ ID NO: 1686496 - DNA, 15 bp, Homo sapiens
acatggtgaaccccg

SEQ ID NO: 1686497 - DNA, 15 bp, Homo sapiens
catggtgaaccccgt

SEQ ID NO: 1686498 - DNA, 15 bp, Homo sapiens
atggtgaaccccgtc

SEQ ID NO: 1686499 - DNA, 15 bp, Homo sapiens
tggtgaaccccgtct

SEQ ID NO: 1686500 - DNA, 15 bp, Homo sapiens
ggtgaaccccgtctc

SEQ ID NO: 1686501 - DNA, 15 bp, Homo sapiens
gtgaaccccgtctct

SEQ ID NO: 1686502 - DNA, 15 bp, Homo sapiens
tgaaccccgtctcta

SEQ ID NO: 1686503 - DNA, 15 bp, Homo sapiens
gaaccccgtctctac

SEQ ID NO: 1686504 - DNA, 15 bp, Homo sapiens
acaaaaaaattagct

SEQ ID NO: 1686505 - DNA, 15 bp, Homo sapiens
caaaaaaattagcta

SEQ ID NO: 1686506 - DNA, 15 bp, Homo sapiens
aaaaaaattagctag

SEQ ID NO: 1686507 - DNA, 15 bp, Homo sapiens
aaaaaattagctagg

SEQ ID NO: 1686508 - DNA, 15 bp, Homo sapiens
gctaggcatggtggt

SEQ ID NO: 1686509 - DNA, 15 bp, Homo sapiens
ctaggcatggtggtg

SEQ ID NO: 1686510 - DNA, 15 bp, Homo sapiens
taggcatggtggtgt

SEQ ID NO: 1686511 - DNA, 15 bp, Homo sapiens
aggcatggtggtgtg

SEQ ID NO: 1686512 - DNA, 15 bp, Homo sapiens
ggcatggtggtgtgt

SEQ ID NO: 1686513 - DNA, 15 bp, Homo sapiens
gcatggtggtgtgtg

SEQ ID NO: 1686514 - DNA, 15 bp, Homo sapiens
catggtggtgtgtgc

SEQ ID NO: 1686515 - DNA, 15 bp, Homo sapiens
atggtggtgtgtgcc

SEQ ID NO: 1686516 - DNA, 15 bp, Homo sapiens
tggtggtgtgtgcct

SEQ ID NO: 1686517 - DNA, 15 bp, Homo sapiens
ggtggtgtgtgcctg

SEQ ID NO: 1686518 - DNA, 15 bp, Homo sapiens
gtggtgtgtgcctgt

SEQ ID NO: 1686519 - DNA, 15 bp, Homo sapiens
tggtgtgtgcctgta

SEQ ID NO: 1686520 - DNA, 15 bp, Homo sapiens
ggtgtgtgcctgtaa

SEQ ID NO: 1686521 - DNA, 15 bp, Homo sapiens
gtgtgtgcctgtaat

SEQ ID NO: 1686522 - DNA, 15 bp, Homo sapiens
tgtgtgcctgtaatc

SEQ ID NO: 1686523 - DNA, 15 bp, Homo sapiens
aagaatcgcttgaac

SEQ ID NO: 1686524 - DNA, 15 bp, Homo sapiens
aaggcggaggttgcg

SEQ ID NO: 1686525 - DNA, 15 bp, Homo sapiens
cggtgagccgagatt

SEQ ID NO: 1686526 - DNA, 15 bp, Homo sapiens
gagattgcgccatta

SEQ ID NO: 1686527 - DNA, 15 bp, Homo sapiens
agattgcgccattac

SEQ ID NO: 1686528 - DNA, 15 bp, Homo sapiens
gattgcgccattaca

SEQ ID NO: 1686529 - DNA, 15 bp, Homo sapiens
attgcgccattacac

SEQ ID NO: 1686530 - DNA, 15 bp, Homo sapiens
ttgcgccattacact

SEQ ID NO: 1686531 - DNA, 15 bp, Homo sapiens
tgcgccattacactg

SEQ ID NO: 1686532 - DNA, 15 bp, Homo sapiens
gcgccattacactgt

SEQ ID NO: 1686533 - DNA, 15 bp, Homo sapiens
cgccattacactgta

SEQ ID NO: 1686534 - DNA, 15 bp, Homo sapiens
gccattacactgtag

SEQ ID NO: 1686535 - DNA, 15 bp, Homo sapiens
ccattacactgtagc

SEQ ID NO: 1686536 - DNA, 15 bp, Homo sapiens
cattacactgtagcc

SEQ ID NO: 1686537 - DNA, 15 bp, Homo sapiens
attacactgtagcct

SEQ ID NO: 1686538 - DNA, 15 bp, Homo sapiens
ttacactgtagcctg

SEQ ID NO: 1686539 - DNA, 15 bp, Homo sapiens
tacactgtagcctgg

SEQ ID NO: 1686540 - DNA, 15 bp, Homo sapiens
acactgtagcctggg

SEQ ID NO: 1686541 - DNA, 15 bp, Homo sapiens
actgtagcctgggca

SEQ ID NO: 1686542 - DNA, 15 bp, Homo sapiens
ctgtagcctgggcaa

SEQ ID NO: 1686543 - DNA, 15 bp, Homo sapiens
tgtagcctgggcaac

SEQ ID NO: 1686544 - DNA, 15 bp, Homo sapiens
gtagcctgggcaaca

SEQ ID NO: 1686545 - DNA, 15 bp, Homo sapiens
tagcctgggcaacaa

SEQ ID NO: 1686546 - DNA, 15 bp, Homo sapiens
ctgggcaacaagagg

SEQ ID NO: 1686547 - DNA, 15 bp, Homo sapiens
tgggcaacaagaggg

SEQ ID NO: 1686548 - DNA, 15 bp, Homo sapiens
gggcaacaagaggga

SEQ ID NO: 1686549 - DNA, 15 bp, Homo sapiens
ggcaacaagagggaa

SEQ ID NO: 1686550 - DNA, 15 bp, Homo sapiens
gcaacaagagggaaa

SEQ ID NO: 1686551 - DNA, 15 bp, Homo sapiens
caacaagagggaaac

SEQ ID NO: 1686552 - DNA, 15 bp, Homo sapiens
aacaagagggaaact

SEQ ID NO: 1686553 - DNA, 15 bp, Homo sapiens
acaagagggaaactc

SEQ ID NO: 1686554 - DNA, 15 bp, Homo sapiens
caagagggaaactcc

SEQ ID NO: 1686555 - DNA, 15 bp, Homo sapiens
aagagggaaactcca

SEQ ID NO: 1686556 - DNA, 15 bp, Homo sapiens
agagggaaactccat

SEQ ID NO: 1686557 - DNA, 15 bp, Homo sapiens
gagggaaactccatc

SEQ ID NO: 1686558 - DNA, 15 bp, Homo sapiens
agggaaactccatct

SEQ ID NO: 1686559 - DNA, 15 bp, Homo sapiens
gggaaactccatctc

SEQ ID NO: 1686560 - DNA, 15 bp, Homo sapiens
ggaaactccatctca

SEQ ID NO: 1686561 - DNA, 15 bp, Homo sapiens
aaaaaaaaaaattgc

SEQ ID NO: 1686562 - DNA, 15 bp, Homo sapiens
aaaaaaaaaattgcc

SEQ ID NO: 1686563 - DNA, 15 bp, Homo sapiens
aaaaaaaaattgccc

SEQ ID NO: 1686564 - DNA, 15 bp, Homo sapiens
aaaaaaaattgccct

SEQ ID NO: 1686565 - DNA, 15 bp, Homo sapiens
aaaaaaattgccctc

SEQ ID NO: 1686566 - DNA, 15 bp, Homo sapiens
aaaaaattgccctca

SEQ ID NO: 1686567 - DNA, 15 bp, Homo sapiens
aaaaattgccctcac

SEQ ID NO: 1686568 - DNA, 15 bp, Homo sapiens
aaaattgccctcaca

SEQ ID NO: 1686569 - DNA, 15 bp, Homo sapiens
aaattgccctcacag

SEQ ID NO: 1686570 - DNA, 15 bp, Homo sapiens
aattgccctcacaga

SEQ ID NO: 1686571 - DNA, 15 bp, Homo sapiens
attgccctcacagag

SEQ ID NO: 1686572 - DNA, 15 bp, Homo sapiens
ttgccctcacagagc

SEQ ID NO: 1686573 - DNA, 15 bp, Homo sapiens
tgccctcacagagct

SEQ ID NO: 1686574 - DNA, 15 bp, Homo sapiens
gccctcacagagctt

SEQ ID NO: 1686575 - DNA, 15 bp, Homo sapiens
ccctcacagagctta

SEQ ID NO: 1686576 - DNA, 15 bp, Homo sapiens
cctcacagagcttat

SEQ ID NO: 1686577 - DNA, 15 bp, Homo sapiens
ctcacagagcttata

SEQ ID NO: 1686578 - DNA, 15 bp, Homo sapiens
tcacagagcttatat

SEQ ID NO: 1686579 - DNA, 15 bp, Homo sapiens
cacagagcttatatt

SEQ ID NO: 1686580 - DNA, 15 bp, Homo sapiens
acagagcttatattc

SEQ ID NO: 1686581 - DNA, 15 bp, Homo sapiens
cagagcttatattct

SEQ ID NO: 1686582 - DNA, 15 bp, Homo sapiens
agagcttatattcta

SEQ ID NO: 1686583 - DNA, 15 bp, Homo sapiens
gagcttatattctag

SEQ ID NO: 1686584 - DNA, 15 bp, Homo sapiens
agcttatattctagt

SEQ ID NO: 1686585 - DNA, 15 bp, Homo sapiens
gcttatattctagtg

SEQ ID NO: 1686586 - DNA, 15 bp, Homo sapiens
cttatattctagtgg

SEQ ID NO: 1686587 - DNA, 15 bp, Homo sapiens
ttatattctagtggt

SEQ ID NO: 1686588 - DNA, 15 bp, Homo sapiens
tatattctagtggta

SEQ ID NO: 1686589 - DNA, 15 bp, Homo sapiens
atattctagtggtag

SEQ ID NO: 1686590 - DNA, 15 bp, Homo sapiens
tattctagtggtagt

SEQ ID NO: 1686591 - DNA, 15 bp, Homo sapiens
attctagtggtagta

SEQ ID NO: 1686592 - DNA, 15 bp, Homo sapiens
ttctagtggtagtag

SEQ ID NO: 1686593 - DNA, 15 bp, Homo sapiens
tctagtggtagtagg

SEQ ID NO: 1686594 - DNA, 15 bp, Homo sapiens
ctagtggtagtaggg

SEQ ID NO: 1686595 - DNA, 15 bp, Homo sapiens
tagtggtagtagggg

SEQ ID NO: 1686596 - DNA, 15 bp, Homo sapiens
agtggtagtaggggg

SEQ ID NO: 1686597 - DNA, 15 bp, Homo sapiens
gtggtagtaggggga

SEQ ID NO: 1686598 - DNA, 15 bp, Homo sapiens
tggtagtagggggat

SEQ ID NO: 1686599 - DNA, 15 bp, Homo sapiens
ggtagtagggggata

SEQ ID NO: 1686600 - DNA, 15 bp, Homo sapiens
gtagtagggggataa

SEQ ID NO: 1686601 - DNA, 15 bp, Homo sapiens
tagtagggggataaa

SEQ ID NO: 1686602 - DNA, 15 bp, Homo sapiens
agtagggggataaat

SEQ ID NO: 1686603 - DNA, 15 bp, Homo sapiens
gtagggggataaatc

SEQ ID NO: 1686604 - DNA, 15 bp, Homo sapiens
tagggggataaatca

SEQ ID NO: 1686605 - DNA, 15 bp, Homo sapiens
agggggataaatcag

SEQ ID NO: 1686606 - DNA, 15 bp, Homo sapiens
gggggataaatcaga

SEQ ID NO: 1686607 - DNA, 15 bp, Homo sapiens
ggggataaatcagat

SEQ ID NO: 1686608 - DNA, 15 bp, Homo sapiens
gggataaatcagata

SEQ ID NO: 1686609 - DNA, 15 bp, Homo sapiens
ggataaatcagatag

SEQ ID NO: 1686610 - DNA, 15 bp, Homo sapiens
gataaatcagatagg

SEQ ID NO: 1686611 - DNA, 15 bp, Homo sapiens
ataaatcagataggt

SEQ ID NO: 1686612 - DNA, 15 bp, Homo sapiens
taaatcagataggta

SEQ ID NO: 1686613 - DNA, 15 bp, Homo sapiens
aaatcagataggtag

SEQ ID NO: 1686614 - DNA, 15 bp, Homo sapiens
aatcagataggtagc

SEQ ID NO: 1686615 - DNA, 15 bp, Homo sapiens
atcagataggtagct

SEQ ID NO: 1686616 - DNA, 15 bp, Homo sapiens
tcagataggtagcta

SEQ ID NO: 1686617 - DNA, 15 bp, Homo sapiens
cagataggtagctag

SEQ ID NO: 1686618 - DNA, 15 bp, Homo sapiens
agataggtagctagc

SEQ ID NO: 1686619 - DNA, 15 bp, Homo sapiens
gataggtagctagct

SEQ ID NO: 1686620 - DNA, 15 bp, Homo sapiens
ataggtagctagcta

SEQ ID NO: 1686621 - DNA, 15 bp, Homo sapiens
taggtagctagctag

SEQ ID NO: 1686622 - DNA, 15 bp, Homo sapiens
aggtagctagctagc

SEQ ID NO: 1686623 - DNA, 15 bp, Homo sapiens
ggtagctagctagct

SEQ ID NO: 1686624 - DNA, 15 bp, Homo sapiens
gtagctagctagcta

SEQ ID NO: 1686625 - DNA, 15 bp, Homo sapiens
tagctagctagctag

SEQ ID NO: 1686626 - DNA, 15 bp, Homo sapiens
agctagctagctagc

SEQ ID NO: 1686627 - DNA, 15 bp, Homo sapiens
gctagctagctagct

SEQ ID NO: 1686628 - DNA, 15 bp, Homo sapiens
ctagctagctagcta

SEQ ID NO: 1686629 - DNA, 15 bp, Homo sapiens
agctagctagctaga

SEQ ID NO: 1686630 - DNA, 15 bp, Homo sapiens
gctagctagctagat

SEQ ID NO: 1686631 - DNA, 15 bp, Homo sapiens
ctagctagctagata

SEQ ID NO: 1686632 - DNA, 15 bp, Homo sapiens
tagctagctagataa

SEQ ID NO: 1686633 - DNA, 15 bp, Homo sapiens
agctagctagataaa

SEQ ID NO: 1686634 - DNA, 15 bp, Homo sapiens
gctagctagataaat

SEQ ID NO: 1686635 - DNA, 15 bp, Homo sapiens
ctagctagataaata

SEQ ID NO: 1686636 - DNA, 15 bp, Homo sapiens
tagctagataaatag

SEQ ID NO: 1686637 - DNA, 15 bp, Homo sapiens
agctagataaataga

SEQ ID NO: 1686638 - DNA, 15 bp, Homo sapiens
gctagataaatagat

SEQ ID NO: 1686639 - DNA, 15 bp, Homo sapiens
ctagataaatagata

SEQ ID NO: 1686640 - DNA, 15 bp, Homo sapiens
tagataaatagatag

SEQ ID NO: 1686641 - DNA, 15 bp, Homo sapiens
agataaatagataga

SEQ ID NO: 1686642 - DNA, 15 bp, Homo sapiens
gataaatagatagat

SEQ ID NO: 1686643 - DNA, 15 bp, Homo sapiens
ataaatagatagata

SEQ ID NO: 1686644 - DNA, 15 bp, Homo sapiens
taaatagatagatag

SEQ ID NO: 1686645 - DNA, 15 bp, Homo sapiens
aaatagatagataga

SEQ ID NO: 1686646 - DNA, 15 bp, Homo sapiens
aatagatagatagac

SEQ ID NO: 1686647 - DNA, 15 bp, Homo sapiens
atagatagatagaca

SEQ ID NO: 1686648 - DNA, 15 bp, Homo sapiens
tagatagatagacag

SEQ ID NO: 1686649 - DNA, 15 bp, Homo sapiens
agatagatagacaga

SEQ ID NO: 1686650 - DNA, 15 bp, Homo sapiens
gatagatagacagat

SEQ ID NO: 1686651 - DNA, 15 bp, Homo sapiens
atagatagacagata

SEQ ID NO: 1686652 - DNA, 15 bp, Homo sapiens
tagatagacagatag

SEQ ID NO: 1686653 - DNA, 15 bp, Homo sapiens
agatagacagatagt

SEQ ID NO: 1686654 - DNA, 15 bp, Homo sapiens
gatagacagatagta

SEQ ID NO: 1686655 - DNA, 15 bp, Homo sapiens
atagacagatagtat

SEQ ID NO: 1686656 - DNA, 15 bp, Homo sapiens
tagacagatagtata

SEQ ID NO: 1686657 - DNA, 15 bp, Homo sapiens
agacagatagtatat

SEQ ID NO: 1686658 - DNA, 15 bp, Homo sapiens
gacagatagtatatt

SEQ ID NO: 1686659 - DNA, 15 bp, Homo sapiens
acagatagtatatta

SEQ ID NO: 1686660 - DNA, 15 bp, Homo sapiens
cagatagtatattac

SEQ ID NO: 1686661 - DNA, 15 bp, Homo sapiens
agatagtatattacc

SEQ ID NO: 1686662 - DNA, 15 bp, Homo sapiens
gatagtatattacct

SEQ ID NO: 1686663 - DNA, 15 bp, Homo sapiens
atagtatattacctg

SEQ ID NO: 1686664 - DNA, 15 bp, Homo sapiens
tagtatattacctgt

SEQ ID NO: 1686665 - DNA, 15 bp, Homo sapiens
agtatattacctgtg

SEQ ID NO: 1686666 - DNA, 15 bp, Homo sapiens
gtatattacctgtgt

SEQ ID NO: 1686667 - DNA, 15 bp, Homo sapiens
tatattacctgtgtc

SEQ ID NO: 1686668 - DNA, 15 bp, Homo sapiens
atattacctgtgtcg

SEQ ID NO: 1686669 - DNA, 15 bp, Homo sapiens
tattacctgtgtcgc

SEQ ID NO: 1686670 - DNA, 15 bp, Homo sapiens
attacctgtgtcgcc

SEQ ID NO: 1686671 - DNA, 15 bp, Homo sapiens
ttacctgtgtcgcct

SEQ ID NO: 1686672 - DNA, 15 bp, Homo sapiens
tacctgtgtcgcctg

SEQ ID NO: 1686673 - DNA, 15 bp, Homo sapiens
acctgtgtcgcctgg

SEQ ID NO: 1686674 - DNA, 15 bp, Homo sapiens
cctgtgtcgcctggc

SEQ ID NO: 1686675 - DNA, 15 bp, Homo sapiens
ctgtgtcgcctggcc

SEQ ID NO: 1686676 - DNA, 15 bp, Homo sapiens
tgtgtcgcctggcca

SEQ ID NO: 1686677 - DNA, 15 bp, Homo sapiens
gtgtcgcctggccaa

SEQ ID NO: 1686678 - DNA, 15 bp, Homo sapiens
tgtcgcctggccaaa

SEQ ID NO: 1686679 - DNA, 15 bp, Homo sapiens
gtcgcctggccaaag

SEQ ID NO: 1686680 - DNA, 15 bp, Homo sapiens
tcgcctggccaaagg

SEQ ID NO: 1686681 - DNA, 15 bp, Homo sapiens
cgcctggccaaaggg

SEQ ID NO: 1686682 - DNA, 15 bp, Homo sapiens
gcctggccaaagggt

SEQ ID NO: 1686683 - DNA, 15 bp, Homo sapiens
cctggccaaagggta

SEQ ID NO: 1686684 - DNA, 15 bp, Homo sapiens
ctggccaaagggtag

SEQ ID NO: 1686685 - DNA, 15 bp, Homo sapiens
tggccaaagggtagg

SEQ ID NO: 1686686 - DNA, 15 bp, Homo sapiens
ggccaaagggtaggt

SEQ ID NO: 1686687 - DNA, 15 bp, Homo sapiens
gccaaagggtaggtt

SEQ ID NO: 1686688 - DNA, 15 bp, Homo sapiens
ccaaagggtaggttc

SEQ ID NO: 1686689 - DNA, 15 bp, Homo sapiens
caaagggtaggttca

SEQ ID NO: 1686690 - DNA, 15 bp, Homo sapiens
aaagggtaggttcac

SEQ ID NO: 1686691 - DNA, 15 bp, Homo sapiens
aagggtaggttcaca

SEQ ID NO: 1686692 - DNA, 15 bp, Homo sapiens
agggtaggttcacat

SEQ ID NO: 1686693 - DNA, 15 bp, Homo sapiens
gggtaggttcacatt

SEQ ID NO: 1686694 - DNA, 15 bp, Homo sapiens
ggtaggttcacattt

SEQ ID NO: 1686695 - DNA, 15 bp, Homo sapiens
gtaggttcacatttg

SEQ ID NO: 1686696 - DNA, 15 bp, Homo sapiens
taggttcacatttgg

SEQ ID NO: 1686697 - DNA, 15 bp, Homo sapiens
aggttcacatttggc

SEQ ID NO: 1686698 - DNA, 15 bp, Homo sapiens
ggttcacatttggca

SEQ ID NO: 1686699 - DNA, 15 bp, Homo sapiens
gttcacatttggcat

SEQ ID NO: 1686700 - DNA, 15 bp, Homo sapiens
ttcacatttggcatg

SEQ ID NO: 1686701 - DNA, 15 bp, Homo sapiens
tcacatttggcatgt

SEQ ID NO: 1686702 - DNA, 15 bp, Homo sapiens
cacatttggcatgtg

SEQ ID NO: 1686703 - DNA, 15 bp, Homo sapiens
acatttggcatgtgt

SEQ ID NO: 1686704 - DNA, 15 bp, Homo sapiens
catttggcatgtgtg

SEQ ID NO: 1686705 - DNA, 15 bp, Homo sapiens
atttggcatgtgtgt

SEQ ID NO: 1686706 - DNA, 15 bp, Homo sapiens
tttggcatgtgtgtc

SEQ ID NO: 1686707 - DNA, 15 bp, Homo sapiens
ttggcatgtgtgtca

SEQ ID NO: 1686708 - DNA, 15 bp, Homo sapiens
tggcatgtgtgtcaa

SEQ ID NO: 1686709 - DNA, 15 bp, Homo sapiens
ggcatgtgtgtcaac

SEQ ID NO: 1686710 - DNA, 15 bp, Homo sapiens
gcatgtgtgtcaact

SEQ ID NO: 1686711 - DNA, 15 bp, Homo sapiens
catgtgtgtcaactc

SEQ ID NO: 1686712 - DNA, 15 bp, Homo sapiens
atgtgtgtcaactca

SEQ ID NO: 1686713 - DNA, 15 bp, Homo sapiens
tgtgtgtcaactcaa

SEQ ID NO: 1686714 - DNA, 15 bp, Homo sapiens
gtgtgtcaactcaag

SEQ ID NO: 1686715 - DNA, 15 bp, Homo sapiens
tgtgtcaactcaagc

SEQ ID NO: 1686716 - DNA, 15 bp, Homo sapiens
gtgtcaactcaagct

SEQ ID NO: 1686717 - DNA, 15 bp, Homo sapiens
tgtcaactcaagctg

SEQ ID NO: 1686718 - DNA, 15 bp, Homo sapiens
gtcaactcaagctgc

SEQ ID NO: 1686719 - DNA, 15 bp, Homo sapiens
tcaactcaagctgca

SEQ ID NO: 1686720 - DNA, 15 bp, Homo sapiens
caactcaagctgcac

SEQ ID NO: 1686721 - DNA, 15 bp, Homo sapiens
aactcaagctgcact

SEQ ID NO: 1686722 - DNA, 15 bp, Homo sapiens
actcaagctgcactt

SEQ ID NO: 1686723 - DNA, 15 bp, Homo sapiens
ctcaagctgcacttg

SEQ ID NO: 1686724 - DNA, 15 bp, Homo sapiens
tcaagctgcacttga

SEQ ID NO: 1686725 - DNA, 15 bp, Homo sapiens
caagctgcacttgac

SEQ ID NO: 1686726 - DNA, 15 bp, Homo sapiens
aagctgcacttgacc

SEQ ID NO: 1686727 - DNA, 15 bp, Homo sapiens
agctgcacttgacct

SEQ ID NO: 1686728 - DNA, 15 bp, Homo sapiens
gctgcacttgacctt

SEQ ID NO: 1686729 - DNA, 15 bp, Homo sapiens
ctgcacttgaccttt

SEQ ID NO: 1686730 - DNA, 15 bp, Homo sapiens
tgcacttgacctttc

SEQ ID NO: 1686731 - DNA, 15 bp, Homo sapiens
gcacttgacctttcc

SEQ ID NO: 1686732 - DNA, 15 bp, Homo sapiens
cacttgacctttcct

SEQ ID NO: 1686733 - DNA, 15 bp, Homo sapiens
acttgacctttccta

SEQ ID NO: 1686734 - DNA, 15 bp, Homo sapiens
cttgacctttcctaa

SEQ ID NO: 1686735 - DNA, 15 bp, Homo sapiens
ttgacctttcctaat

SEQ ID NO: 1686736 - DNA, 15 bp, Homo sapiens
tgacctttcctaatc

SEQ ID NO: 1686737 - DNA, 15 bp, Homo sapiens
gacctttcctaatca

SEQ ID NO: 1686738 - DNA, 15 bp, Homo sapiens
acctttcctaatcat

SEQ ID NO: 1686739 - DNA, 15 bp, Homo sapiens
cctttcctaatcatc

SEQ ID NO: 1686740 - DNA, 15 bp, Homo sapiens
ctttcctaatcatct

SEQ ID NO: 1686741 - DNA, 15 bp, Homo sapiens
tttcctaatcatctc

SEQ ID NO: 1686742 - DNA, 15 bp, Homo sapiens
ttcctaatcatctcc

SEQ ID NO: 1686743 - DNA, 15 bp, Homo sapiens
tcctaatcatctcca

SEQ ID NO: 1686744 - DNA, 15 bp, Homo sapiens
cctaatcatctccaa

SEQ ID NO: 1686745 - DNA, 15 bp, Homo sapiens
ctaatcatctccaac

SEQ ID NO: 1686746 - DNA, 15 bp, Homo sapiens
taatcatctccaaca

SEQ ID NO: 1686747 - DNA, 15 bp, Homo sapiens
aatcatctccaacac

SEQ ID NO: 1686748 - DNA, 15 bp, Homo sapiens
atcatctccaacact

SEQ ID NO: 1686749 - DNA, 15 bp, Homo sapiens
tcatctccaacacta

SEQ ID NO: 1686750 - DNA, 15 bp, Homo sapiens
catctccaacactac

SEQ ID NO: 1686751 - DNA, 15 bp, Homo sapiens
atctccaacactacc

SEQ ID NO: 1686752 - DNA, 15 bp, Homo sapiens
tctccaacactacct

SEQ ID NO: 1686753 - DNA, 15 bp, Homo sapiens
ctccaacactaccta

SEQ ID NO: 1686754 - DNA, 15 bp, Homo sapiens
tccaacactacctat

SEQ ID NO: 1686755 - DNA, 15 bp, Homo sapiens
ccaacactacctatt

SEQ ID NO: 1686756 - DNA, 15 bp, Homo sapiens
caacactacctattg

SEQ ID NO: 1686757 - DNA, 15 bp, Homo sapiens
aacactacctattgc

SEQ ID NO: 1686758 - DNA, 15 bp, Homo sapiens
acactacctattgcc

SEQ ID NO: 1686759 - DNA, 15 bp, Homo sapiens
cactacctattgccc

SEQ ID NO: 1686760 - DNA, 15 bp, Homo sapiens
actacctattgccct

SEQ ID NO: 1686761 - DNA, 15 bp, Homo sapiens
ctacctattgcccta

SEQ ID NO: 1686762 - DNA, 15 bp, Homo sapiens
tacctattgccctat

SEQ ID NO: 1686763 - DNA, 15 bp, Homo sapiens
acctattgccctatc

SEQ ID NO: 1686764 - DNA, 15 bp, Homo sapiens
cctattgccctatcc

SEQ ID NO: 1686765 - DNA, 15 bp, Homo sapiens
ctattgccctatcca

SEQ ID NO: 1686766 - DNA, 15 bp, Homo sapiens
tattgccctatccaa

SEQ ID NO: 1686767 - DNA, 15 bp, Homo sapiens
attgccctatccaaa

SEQ ID NO: 1686768 - DNA, 15 bp, Homo sapiens
ttgccctatccaaat

SEQ ID NO: 1686769 - DNA, 15 bp, Homo sapiens
tgccctatccaaatc

SEQ ID NO: 1686770 - DNA, 15 bp, Homo sapiens
gccctatccaaatcc

SEQ ID NO: 1686771 - DNA, 15 bp, Homo sapiens
ccctatccaaatcct

SEQ ID NO: 1686772 - DNA, 15 bp, Homo sapiens
cctatccaaatccta

SEQ ID NO: 1686773 - DNA, 15 bp, Homo sapiens
ctatccaaatcctat

SEQ ID NO: 1686774 - DNA, 15 bp, Homo sapiens
tatccaaatcctatc

SEQ ID NO: 1686775 - DNA, 15 bp, Homo sapiens
atccaaatcctatca

SEQ ID NO: 1686776 - DNA, 15 bp, Homo sapiens
tccaaatcctatcac

SEQ ID NO: 1686777 - DNA, 15 bp, Homo sapiens
ccaaatcctatcact

SEQ ID NO: 1686778 - DNA, 15 bp, Homo sapiens
caaatcctatcactt

SEQ ID NO: 1686779 - DNA, 15 bp, Homo sapiens
aaatcctatcacttg

SEQ ID NO: 1686780 - DNA, 15 bp, Homo sapiens
aatcctatcacttga

SEQ ID NO: 1686781 - DNA, 15 bp, Homo sapiens
atcctatcacttgaa

SEQ ID NO: 1686782 - DNA, 15 bp, Homo sapiens
tcctatcacttgaat

SEQ ID NO: 1686783 - DNA, 15 bp, Homo sapiens
cctatcacttgaatt

SEQ ID NO: 1686784 - DNA, 15 bp, Homo sapiens
ctatcacttgaatta

SEQ ID NO: 1686785 - DNA, 15 bp, Homo sapiens
tatcacttgaattat

SEQ ID NO: 1686786 - DNA, 15 bp, Homo sapiens
atcacttgaattatt

SEQ ID NO: 1686787 - DNA, 15 bp, Homo sapiens
tcacttgaattattc

SEQ ID NO: 1686788 - DNA, 15 bp, Homo sapiens
cacttgaattattca

SEQ ID NO: 1686789 - DNA, 15 bp, Homo sapiens
acttgaattattcaa

SEQ ID NO: 1686790 - DNA, 15 bp, Homo sapiens
cttgaattattcaaa

SEQ ID NO: 1686791 - DNA, 15 bp, Homo sapiens
ttgaattattcaaaa

SEQ ID NO: 1686792 - DNA, 15 bp, Homo sapiens
tgaattattcaaaaa

SEQ ID NO: 1686793 - DNA, 15 bp, Homo sapiens
gaattattcaaaaag

SEQ ID NO: 1686794 - DNA, 15 bp, Homo sapiens
aattattcaaaaagt

SEQ ID NO: 1686795 - DNA, 15 bp, Homo sapiens
attattcaaaaagtc

SEQ ID NO: 1686796 - DNA, 15 bp, Homo sapiens
ttattcaaaaagtct

SEQ ID NO: 1686797 - DNA, 15 bp, Homo sapiens
tattcaaaaagtctc

SEQ ID NO: 1686798 - DNA, 15 bp, Homo sapiens
attcaaaaagtctcc

SEQ ID NO: 1686799 - DNA, 15 bp, Homo sapiens
ttcaaaaagtctccc

SEQ ID NO: 1686800 - DNA, 15 bp, Homo sapiens
tcaaaaagtctccca

SEQ ID NO: 1686801 - DNA, 15 bp, Homo sapiens
caaaaagtctcccat

SEQ ID NO: 1686802 - DNA, 15 bp, Homo sapiens
aaaaagtctcccatc

SEQ ID NO: 1686803 - DNA, 15 bp, Homo sapiens
aaaagtctcccatct

SEQ ID NO: 1686804 - DNA, 15 bp, Homo sapiens
aaagtctcccatctt

SEQ ID NO: 1686805 - DNA, 15 bp, Homo sapiens
aagtctcccatcttc

SEQ ID NO: 1686806 - DNA, 15 bp, Homo sapiens
agtctcccatcttca

SEQ ID NO: 1686807 - DNA, 15 bp, Homo sapiens
gtctcccatcttcat

SEQ ID NO: 1686808 - DNA, 15 bp, Homo sapiens
tctcccatcttcatt

SEQ ID NO: 1686809 - DNA, 15 bp, Homo sapiens
ctcccatcttcattt

SEQ ID NO: 1686810 - DNA, 15 bp, Homo sapiens
tcccatcttcatttt

SEQ ID NO: 1686811 - DNA, 15 bp, Homo sapiens
cccatcttcattttg

SEQ ID NO: 1686812 - DNA, 15 bp, Homo sapiens
ccatcttcattttgg

SEQ ID NO: 1686813 - DNA, 15 bp, Homo sapiens
catcttcattttggt

SEQ ID NO: 1686814 - DNA, 15 bp, Homo sapiens
atcttcattttggtg

SEQ ID NO: 1686815 - DNA, 15 bp, Homo sapiens
tcttcattttggtgg

SEQ ID NO: 1686816 - DNA, 15 bp, Homo sapiens
cttcattttggtggg

SEQ ID NO: 1686817 - DNA, 15 bp, Homo sapiens
ttcattttggtggga

SEQ ID NO: 1686818 - DNA, 15 bp, Homo sapiens
tcattttggtgggat

SEQ ID NO: 1686819 - DNA, 15 bp, Homo sapiens
cattttggtgggatt

SEQ ID NO: 1686820 - DNA, 15 bp, Homo sapiens
attttggtgggattt

SEQ ID NO: 1686821 - DNA, 15 bp, Homo sapiens
ttttggtgggatttg

SEQ ID NO: 1686822 - DNA, 15 bp, Homo sapiens
ttggtgggatttggt

SEQ ID NO: 1686823 - DNA, 15 bp, Homo sapiens
tggtgggatttggtc

SEQ ID NO: 1686824 - DNA, 15 bp, Homo sapiens
ggtgggatttggtca

SEQ ID NO: 1686825 - DNA, 15 bp, Homo sapiens
gtgggatttggtcag

SEQ ID NO: 1686826 - DNA, 15 bp, Homo sapiens
tgggatttggtcagc

SEQ ID NO: 1686827 - DNA, 15 bp, Homo sapiens
gggatttggtcagct

SEQ ID NO: 1686828 - DNA, 15 bp, Homo sapiens
ggatttggtcagctc

SEQ ID NO: 1686829 - DNA, 15 bp, Homo sapiens
gatttggtcagctcc

SEQ ID NO: 1686830 - DNA, 15 bp, Homo sapiens
atttggtcagctcct

SEQ ID NO: 1686831 - DNA, 15 bp, Homo sapiens
tttggtcagctcctt

SEQ ID NO: 1686832 - DNA, 15 bp, Homo sapiens
ttggtcagctccttt

SEQ ID NO: 1686833 - DNA, 15 bp, Homo sapiens
tggtcagctccttta

SEQ ID NO: 1686834 - DNA, 15 bp, Homo sapiens
ggtcagctcctttac

SEQ ID NO: 1686835 - DNA, 15 bp, Homo sapiens
gtcagctcctttact

SEQ ID NO: 1686836 - DNA, 15 bp, Homo sapiens
tcagctcctttactg

SEQ ID NO: 1686837 - DNA, 15 bp, Homo sapiens
cagctcctttactgc

SEQ ID NO: 1686838 - DNA, 15 bp, Homo sapiens
agctcctttactgca

SEQ ID NO: 1686839 - DNA, 15 bp, Homo sapiens
gctcctttactgcaa

SEQ ID NO: 1686840 - DNA, 15 bp, Homo sapiens
ctcctttactgcaac

SEQ ID NO: 1686841 - DNA, 15 bp, Homo sapiens
tcctttactgcaacc

SEQ ID NO: 1686842 - DNA, 15 bp, Homo sapiens
cctttactgcaacct

SEQ ID NO: 1686843 - DNA, 15 bp, Homo sapiens
ctttactgcaacctg

SEQ ID NO: 1686844 - DNA, 15 bp, Homo sapiens
tttactgcaacctgt

SEQ ID NO: 1686845 - DNA, 15 bp, Homo sapiens
ttactgcaacctgtt

SEQ ID NO: 1686846 - DNA, 15 bp, Homo sapiens
tactgcaacctgttt

SEQ ID NO: 1686847 - DNA, 15 bp, Homo sapiens
actgcaacctgtttt

SEQ ID NO: 1686848 - DNA, 15 bp, Homo sapiens
ctgcaacctgtttta

SEQ ID NO: 1686849 - DNA, 15 bp, Homo sapiens
tgcaacctgttttat

SEQ ID NO: 1686850 - DNA, 15 bp, Homo sapiens
gcaacctgttttatc

SEQ ID NO: 1686851 - DNA, 15 bp, Homo sapiens
caacctgttttatca

SEQ ID NO: 1686852 - DNA, 15 bp, Homo sapiens
aacctgttttatcag

SEQ ID NO: 1686853 - DNA, 15 bp, Homo sapiens
acctgttttatcagg

SEQ ID NO: 1686854 - DNA, 15 bp, Homo sapiens
cctgttttatcagga

SEQ ID NO: 1686855 - DNA, 15 bp, Homo sapiens
ctgttttatcaggaa

SEQ ID NO: 1686856 - DNA, 15 bp, Homo sapiens
tgttttatcaggaag

SEQ ID NO: 1686857 - DNA, 15 bp, Homo sapiens
gttttatcaggaagg

SEQ ID NO: 1686858 - DNA, 15 bp, Homo sapiens
ttttatcaggaaggt

SEQ ID NO: 1686859 - DNA, 15 bp, Homo sapiens
tttatcaggaaggtc

SEQ ID NO: 1686860 - DNA, 15 bp, Homo sapiens
ttatcaggaaggtct

SEQ ID NO: 1686861 - DNA, 15 bp, Homo sapiens
tatcaggaaggtctt

SEQ ID NO: 1686862 - DNA, 15 bp, Homo sapiens
atcaggaaggtcttt

SEQ ID NO: 1686863 - DNA, 15 bp, Homo sapiens
tcaggaaggtcttta

SEQ ID NO: 1686864 - DNA, 15 bp, Homo sapiens
caggaaggtctttat

SEQ ID NO: 1686865 - DNA, 15 bp, Homo sapiens
aggaaggtctttatg

SEQ ID NO: 1686866 - DNA, 15 bp, Homo sapiens
ggaaggtctttatga

SEQ ID NO: 1686867 - DNA, 15 bp, Homo sapiens
gaaggtctttatgac

SEQ ID NO: 1686868 - DNA, 15 bp, Homo sapiens
aaggtctttatgacc

SEQ ID NO: 1686869 - DNA, 15 bp, Homo sapiens
aggtctttatgacct

SEQ ID NO: 1686870 - DNA, 15 bp, Homo sapiens
ggtctttatgacctg

SEQ ID NO: 1686871 - DNA, 15 bp, Homo sapiens
gtctttatgacctgt

SEQ ID NO: 1686872 - DNA, 15 bp, Homo sapiens
tctttatgacctgta

SEQ ID NO: 1686873 - DNA, 15 bp, Homo sapiens
ctttatgacctgtat

SEQ ID NO: 1686874 - DNA, 15 bp, Homo sapiens
tttatgacctgtatt

SEQ ID NO: 1686875 - DNA, 15 bp, Homo sapiens
ttatgacctgtattt

SEQ ID NO: 1686876 - DNA, 15 bp, Homo sapiens
tatgacctgtatttt

SEQ ID NO: 1686877 - DNA, 15 bp, Homo sapiens
atgacctgtattttg

SEQ ID NO: 1686878 - DNA, 15 bp, Homo sapiens
tgacctgtattttgt

SEQ ID NO: 1686879 - DNA, 15 bp, Homo sapiens
gacctgtattttgtg

SEQ ID NO: 1686880 - DNA, 15 bp, Homo sapiens
acctgtattttgtgc

SEQ ID NO: 1686881 - DNA, 15 bp, Homo sapiens
cctgtattttgtgct

SEQ ID NO: 1686882 - DNA, 15 bp, Homo sapiens
ctgtattttgtgctg

SEQ ID NO: 1686883 - DNA, 15 bp, Homo sapiens
tgtattttgtgctga

SEQ ID NO: 1686884 - DNA, 15 bp, Homo sapiens
gtattttgtgctgac

SEQ ID NO: 1686885 - DNA, 15 bp, Homo sapiens
tattttgtgctgacc

SEQ ID NO: 1686886 - DNA, 15 bp, Homo sapiens
attttgtgctgacct

SEQ ID NO: 1686887 - DNA, 15 bp, Homo sapiens
ttttgtgctgacctc

SEQ ID NO: 1686888 - DNA, 15 bp, Homo sapiens
tttgtgctgacctcc

SEQ ID NO: 1686889 - DNA, 15 bp, Homo sapiens
ttgtgctgacctcct

SEQ ID NO: 1686890 - DNA, 15 bp, Homo sapiens
tgtgctgacctccta

SEQ ID NO: 1686891 - DNA, 15 bp, Homo sapiens
gtgctgacctcctat

SEQ ID NO: 1686892 - DNA, 15 bp, Homo sapiens
tgctgacctcctatc

SEQ ID NO: 1686893 - DNA, 15 bp, Homo sapiens
gctgacctcctatct

SEQ ID NO: 1686894 - DNA, 15 bp, Homo sapiens
ctgacctcctatctc

SEQ ID NO: 1686895 - DNA, 15 bp, Homo sapiens
tgacctcctatctca

SEQ ID NO: 1686896 - DNA, 15 bp, Homo sapiens
gacctcctatctcat

SEQ ID NO: 1686897 - DNA, 15 bp, Homo sapiens
tcctatctcatccta

SEQ ID NO: 1686898 - DNA, 15 bp, Homo sapiens
cctatctcatcctat

SEQ ID NO: 1686899 - DNA, 15 bp, Homo sapiens
ctatctcatcctatg

SEQ ID NO: 1686900 - DNA, 15 bp, Homo sapiens
tatctcatcctatga

SEQ ID NO: 1686901 - DNA, 15 bp, Homo sapiens
atctcatcctatgac

SEQ ID NO: 1686902 - DNA, 15 bp, Homo sapiens
tctcatcctatgact

SEQ ID NO: 1686903 - DNA, 15 bp, Homo sapiens
ctcatcctatgactt

SEQ ID NO: 1686904 - DNA, 15 bp, Homo sapiens
tcatcctatgactta

SEQ ID NO: 1686905 - DNA, 15 bp, Homo sapiens
catcctatgacttag

SEQ ID NO: 1686906 - DNA, 15 bp, Homo sapiens
atcctatgacttaga

SEQ ID NO: 1686907 - DNA, 15 bp, Homo sapiens
tcctatgacttagaa

SEQ ID NO: 1686908 - DNA, 15 bp, Homo sapiens
cctatgacttagaac

SEQ ID NO: 1686909 - DNA, 15 bp, Homo sapiens
ctatgacttagaaca

SEQ ID NO: 1686910 - DNA, 15 bp, Homo sapiens
tatgacttagaacac

SEQ ID NO: 1686911 - DNA, 15 bp, Homo sapiens
atgacttagaacacc

SEQ ID NO: 1686912 - DNA, 15 bp, Homo sapiens
tgacttagaacacct

SEQ ID NO: 1686913 - DNA, 15 bp, Homo sapiens
gacttagaacacctt

SEQ ID NO: 1686914 - DNA, 15 bp, Homo sapiens
acttagaacacctta

SEQ ID NO: 1686915 - DNA, 15 bp, Homo sapiens
cttagaacaccttaa

SEQ ID NO: 1686916 - DNA, 15 bp, Homo sapiens
ttagaacaccttaac

SEQ ID NO: 1686917 - DNA, 15 bp, Homo sapiens
tagaacaccttaacc

SEQ ID NO: 1686918 - DNA, 15 bp, Homo sapiens
agaacaccttaacca

SEQ ID NO: 1686919 - DNA, 15 bp, Homo sapiens
gaacaccttaaccat

SEQ ID NO: 1686920 - DNA, 15 bp, Homo sapiens
aacaccttaaccatc

SEQ ID NO: 1686921 - DNA, 15 bp, Homo sapiens
acaccttaaccatct

SEQ ID NO: 1686922 - DNA, 15 bp, Homo sapiens
caccttaaccatctg

SEQ ID NO: 1686923 - DNA, 15 bp, Homo sapiens
accttaaccatctgg

SEQ ID NO: 1686924 - DNA, 15 bp, Homo sapiens
ccttaaccatctggg

SEQ ID NO: 1686925 - DNA, 15 bp, Homo sapiens
cttaaccatctggga

SEQ ID NO: 1686926 - DNA, 15 bp, Homo sapiens
ttaaccatctgggaa

SEQ ID NO: 1686927 - DNA, 15 bp, Homo sapiens
taaccatctgggaat

SEQ ID NO: 1686928 - DNA, 15 bp, Homo sapiens
aaccatctgggaatg

SEQ ID NO: 1686929 - DNA, 15 bp, Homo sapiens
accatctgggaatgc

SEQ ID NO: 1686930 - DNA, 15 bp, Homo sapiens
ccatctgggaatgca

SEQ ID NO: 1686931 - DNA, 15 bp, Homo sapiens
catctgggaatgcag

SEQ ID NO: 1686932 - DNA, 15 bp, Homo sapiens
atctgggaatgcagc

SEQ ID NO: 1686933 - DNA, 15 bp, Homo sapiens
tctgggaatgcagcc

SEQ ID NO: 1686934 - DNA, 15 bp, Homo sapiens
ctgggaatgcagccc

SEQ ID NO: 1686935 - DNA, 15 bp, Homo sapiens
tgggaatgcagccca

SEQ ID NO: 1686936 - DNA, 15 bp, Homo sapiens
gggaatgcagcccag

SEQ ID NO: 1686937 - DNA, 15 bp, Homo sapiens
gcagcccagtaggtt

SEQ ID NO: 1686938 - DNA, 15 bp, Homo sapiens
cagcccagtaggttt

SEQ ID NO: 1686939 - DNA, 15 bp, Homo sapiens
agcccagtaggtttc

SEQ ID NO: 1686940 - DNA, 15 bp, Homo sapiens
gcccagtaggtttca

SEQ ID NO: 1686941 - DNA, 15 bp, Homo sapiens
cccagtaggtttcag

SEQ ID NO: 1686942 - DNA, 15 bp, Homo sapiens
ccagtaggtttcagc

SEQ ID NO: 1686943 - DNA, 15 bp, Homo sapiens
cagtaggtttcagcc

SEQ ID NO: 1686944 - DNA, 15 bp, Homo sapiens
agtaggtttcagcct

SEQ ID NO: 1686945 - DNA, 15 bp, Homo sapiens
gtaggtttcagcctc

SEQ ID NO: 1686946 - DNA, 15 bp, Homo sapiens
taggtttcagcctca

SEQ ID NO: 1686947 - DNA, 15 bp, Homo sapiens
aggtttcagcctcat

SEQ ID NO: 1686948 - DNA, 15 bp, Homo sapiens
ggtttcagcctcatt

SEQ ID NO: 1686949 - DNA, 15 bp, Homo sapiens
gtttcagcctcattt

SEQ ID NO: 1686950 - DNA, 15 bp, Homo sapiens
tttcagcctcatttt

SEQ ID NO: 1686951 - DNA, 15 bp, Homo sapiens
ttcagcctcatttta

SEQ ID NO: 1686952 - DNA, 15 bp, Homo sapiens
tcagcctcattttac

SEQ ID NO: 1686953 - DNA, 15 bp, Homo sapiens
cagcctcattttacc

SEQ ID NO: 1686954 - DNA, 15 bp, Homo sapiens
agcctcattttaccc

SEQ ID NO: 1686955 - DNA, 15 bp, Homo sapiens
gcctcattttaccca

SEQ ID NO: 1686956 - DNA, 15 bp, Homo sapiens
cctcattttacccag

SEQ ID NO: 1686957 - DNA, 15 bp, Homo sapiens
ctcattttacccagc

SEQ ID NO: 1686958 - DNA, 15 bp, Homo sapiens
tcattttacccagct

SEQ ID NO: 1686959 - DNA, 15 bp, Homo sapiens
cattttacccagctc

SEQ ID NO: 1686960 - DNA, 15 bp, Homo sapiens
attttacccagctcc

SEQ ID NO: 1686961 - DNA, 15 bp, Homo sapiens
ttttacccagctcct

SEQ ID NO: 1686962 - DNA, 15 bp, Homo sapiens
tttacccagctccta

SEQ ID NO: 1686963 - DNA, 15 bp, Homo sapiens
ttacccagctcctat

SEQ ID NO: 1686964 - DNA, 15 bp, Homo sapiens
tacccagctcctatt

SEQ ID NO: 1686965 - DNA, 15 bp, Homo sapiens
acccagctcctattg

SEQ ID NO: 1686966 - DNA, 15 bp, Homo sapiens
cccagctcctattga

SEQ ID NO: 1686967 - DNA, 15 bp, Homo sapiens
ccagctcctattgaa

SEQ ID NO: 1686968 - DNA, 15 bp, Homo sapiens
cagctcctattgaag

SEQ ID NO: 1686969 - DNA, 15 bp, Homo sapiens
agctcctattgaaga

SEQ ID NO: 1686970 - DNA, 15 bp, Homo sapiens
gctcctattgaagat

SEQ ID NO: 1686971 - DNA, 15 bp, Homo sapiens
ctcctattgaagatg

SEQ ID NO: 1686972 - DNA, 15 bp, Homo sapiens
tcctattgaagatgg

SEQ ID NO: 1686973 - DNA, 15 bp, Homo sapiens
cctattgaagatgga

SEQ ID NO: 1686974 - DNA, 15 bp, Homo sapiens
ctattgaagatggag

SEQ ID NO: 1686975 - DNA, 15 bp, Homo sapiens
tattgaagatggagt

SEQ ID NO: 1686976 - DNA, 15 bp, Homo sapiens
attgaagatggagtc

SEQ ID NO: 1686977 - DNA, 15 bp, Homo sapiens
ttgaagatggagtcg

SEQ ID NO: 1686978 - DNA, 15 bp, Homo sapiens
tgaagatggagtcgt

SEQ ID NO: 1686979 - DNA, 15 bp, Homo sapiens
gaagatggagtcgtt

SEQ ID NO: 1686980 - DNA, 15 bp, Homo sapiens
aagatggagtcgttc

SEQ ID NO: 1686981 - DNA, 15 bp, Homo sapiens
agatggagtcgttct

SEQ ID NO: 1686982 - DNA, 15 bp, Homo sapiens
gatggagtcgttctg

SEQ ID NO: 1686983 - DNA, 15 bp, Homo sapiens
atggagtcgttctgg

SEQ ID NO: 1686984 - DNA, 15 bp, Homo sapiens
tggagtcgttctggt

SEQ ID NO: 1686985 - DNA, 15 bp, Homo sapiens
ggagtcgttctggtt

SEQ ID NO: 1686986 - DNA, 15 bp, Homo sapiens
gagtcgttctggttc

SEQ ID NO: 1686987 - DNA, 15 bp, Homo sapiens
agtcgttctggttca

SEQ ID NO: 1686988 - DNA, 15 bp, Homo sapiens
gtcgttctggttcac

SEQ ID NO: 1686989 - DNA, 15 bp, Homo sapiens
tcgttctggttcaca

SEQ ID NO: 1686990 - DNA, 15 bp, Homo sapiens
cgttctggttcacac

SEQ ID NO: 1686991 - DNA, 15 bp, Homo sapiens
gttctggttcacaca

SEQ ID NO: 1686992 - DNA, 15 bp, Homo sapiens
ttctggttcacacag

SEQ ID NO: 1686993 - DNA, 15 bp, Homo sapiens
tctggttcacacagc

SEQ ID NO: 1686994 - DNA, 15 bp, Homo sapiens
ctggttcacacagct

SEQ ID NO: 1686995 - DNA, 15 bp, Homo sapiens
tggttcacacagctc

SEQ ID NO: 1686996 - DNA, 15 bp, Homo sapiens
ggttcacacagctct

SEQ ID NO: 1686997 - DNA, 15 bp, Homo sapiens
gttcacacagctctg

SEQ ID NO: 1686998 - DNA, 15 bp, Homo sapiens
ttcacacagctctga

SEQ ID NO: 1686999 - DNA, 15 bp, Homo sapiens
tcacacagctctgat

SEQ ID NO: 1687000 - DNA, 15 bp, Homo sapiens
cacacagctctgata

SEQ ID NO: 1687001 - DNA, 15 bp, Homo sapiens
acacagctctgatag

SEQ ID NO: 1687002 - DNA, 15 bp, Homo sapiens
cacagctctgatagt

SEQ ID NO: 1687003 - DNA, 15 bp, Homo sapiens
acagctctgatagta

SEQ ID NO: 1687004 - DNA, 15 bp, Homo sapiens
cagctctgatagtaa

SEQ ID NO: 1687005 - DNA, 15 bp, Homo sapiens
agctctgatagtaat

SEQ ID NO: 1687006 - DNA, 15 bp, Homo sapiens
gctctgatagtaatc

SEQ ID NO: 1687007 - DNA, 15 bp, Homo sapiens
ctctgatagtaatct

SEQ ID NO: 1687008 - DNA, 15 bp, Homo sapiens
tctgatagtaatctg

SEQ ID NO: 1687009 - DNA, 15 bp, Homo sapiens
ctgatagtaatctgc

SEQ ID NO: 1687010 - DNA, 15 bp, Homo sapiens
tgatagtaatctgct

SEQ ID NO: 1687011 - DNA, 15 bp, Homo sapiens
gatagtaatctgctc

SEQ ID NO: 1687012 - DNA, 15 bp, Homo sapiens
atagtaatctgctca

SEQ ID NO: 1687013 - DNA, 15 bp, Homo sapiens
tagtaatctgctcac

SEQ ID NO: 1687014 - DNA, 15 bp, Homo sapiens
agtaatctgctcact

SEQ ID NO: 1687015 - DNA, 15 bp, Homo sapiens
gtaatctgctcacta

SEQ ID NO: 1687016 - DNA, 15 bp, Homo sapiens
taatctgctcactaa

SEQ ID NO: 1687017 - DNA, 15 bp, Homo sapiens
aatctgctcactaag

SEQ ID NO: 1687018 - DNA, 15 bp, Homo sapiens
atctgctcactaagt

SEQ ID NO: 1687019 - DNA, 15 bp, Homo sapiens
tctgctcactaagtg

SEQ ID NO: 1687020 - DNA, 15 bp, Homo sapiens
ctgctcactaagtgt

SEQ ID NO: 1687021 - DNA, 15 bp, Homo sapiens
tgctcactaagtgtt

SEQ ID NO: 1687022 - DNA, 15 bp, Homo sapiens
gctcactaagtgtta

SEQ ID NO: 1687023 - DNA, 15 bp, Homo sapiens
ctcactaagtgttag

SEQ ID NO: 1687024 - DNA, 15 bp, Homo sapiens
tcactaagtgttagt

SEQ ID NO: 1687025 - DNA, 15 bp, Homo sapiens
cactaagtgttagtt

SEQ ID NO: 1687026 - DNA, 15 bp, Homo sapiens
actaagtgttagttg

SEQ ID NO: 1687027 - DNA, 15 bp, Homo sapiens
ctaagtgttagttgc

SEQ ID NO: 1687028 - DNA, 15 bp, Homo sapiens
taagtgttagttgcc

SEQ ID NO: 1687029 - DNA, 15 bp, Homo sapiens
aagtgttagttgccg

SEQ ID NO: 1687030 - DNA, 15 bp, Homo sapiens
agtgttagttgccgt

SEQ ID NO: 1687031 - DNA, 15 bp, Homo sapiens
gtgttagttgccgtg

SEQ ID NO: 1687032 - DNA, 15 bp, Homo sapiens
tgttagttgccgtgt

SEQ ID NO: 1687033 - DNA, 15 bp, Homo sapiens
gttagttgccgtgtt

SEQ ID NO: 1687034 - DNA, 15 bp, Homo sapiens
ttagttgccgtgttc

SEQ ID NO: 1687035 - DNA, 15 bp, Homo sapiens
tagttgccgtgttct

SEQ ID NO: 1687036 - DNA, 15 bp, Homo sapiens
agttgccgtgttctc

SEQ ID NO: 1687037 - DNA, 15 bp, Homo sapiens
gttgccgtgttctct

SEQ ID NO: 1687038 - DNA, 15 bp, Homo sapiens
ttgccgtgttctctc

SEQ ID NO: 1687039 - DNA, 15 bp, Homo sapiens
tgccgtgttctctcc

SEQ ID NO: 1687040 - DNA, 15 bp, Homo sapiens
gccgtgttctctccc

SEQ ID NO: 1687041 - DNA, 15 bp, Homo sapiens
ccgtgttctctccca

SEQ ID NO: 1687042 - DNA, 15 bp, Homo sapiens
cgtgttctctcccac

SEQ ID NO: 1687043 - DNA, 15 bp, Homo sapiens
gtgttctctcccaca

SEQ ID NO: 1687044 - DNA, 15 bp, Homo sapiens
tgttctctcccacaa

SEQ ID NO: 1687045 - DNA, 15 bp, Homo sapiens
gttctctcccacaac

SEQ ID NO: 1687046 - DNA, 15 bp, Homo sapiens
ttctctcccacaact

SEQ ID NO: 1687047 - DNA, 15 bp, Homo sapiens
tctctcccacaactc

SEQ ID NO: 1687048 - DNA, 15 bp, Homo sapiens
ctctcccacaactcc

SEQ ID NO: 1687049 - DNA, 15 bp, Homo sapiens
tctcccacaactccc

SEQ ID NO: 1687050 - DNA, 15 bp, Homo sapiens
ctcccacaactccct

SEQ ID NO: 1687051 - DNA, 15 bp, Homo sapiens
tcccacaactccctc

SEQ ID NO: 1687052 - DNA, 15 bp, Homo sapiens
cccacaactccctcc

SEQ ID NO: 1687053 - DNA, 15 bp, Homo sapiens
ccacaactccctcct

SEQ ID NO: 1687054 - DNA, 15 bp, Homo sapiens
cacaactccctcctg

SEQ ID NO: 1687055 - DNA, 15 bp, Homo sapiens
acaactccctcctgt

SEQ ID NO: 1687056 - DNA, 15 bp, Homo sapiens
caactccctcctgtt

SEQ ID NO: 1687057 - DNA, 15 bp, Homo sapiens
aactccctcctgttg

SEQ ID NO: 1687058 - DNA, 15 bp, Homo sapiens
actccctcctgttgc

SEQ ID NO: 1687059 - DNA, 15 bp, Homo sapiens
ctccctcctgttgca

SEQ ID NO: 1687060 - DNA, 15 bp, Homo sapiens
tccctcctgttgcac

SEQ ID NO: 1687061 - DNA, 15 bp, Homo sapiens
ccctcctgttgcacc

SEQ ID NO: 1687062 - DNA, 15 bp, Homo sapiens
cctcctgttgcaccc

SEQ ID NO: 1687063 - DNA, 15 bp, Homo sapiens
ctcctgttgcacccc

SEQ ID NO: 1687064 - DNA, 15 bp, Homo sapiens
tcctgttgcacccct

SEQ ID NO: 1687065 - DNA, 15 bp, Homo sapiens
cctgttgcacccctg

SEQ ID NO: 1687066 - DNA, 15 bp, Homo sapiens
ctgttgcacccctgc

SEQ ID NO: 1687067 - DNA, 15 bp, Homo sapiens
tgttgcacccctgcc

SEQ ID NO: 1687068 - DNA, 15 bp, Homo sapiens
gttgcacccctgcct

SEQ ID NO: 1687069 - DNA, 15 bp, Homo sapiens
ttgcacccctgcctt

SEQ ID NO: 1687070 - DNA, 15 bp, Homo sapiens
tgcacccctgccttt

SEQ ID NO: 1687071 - DNA, 15 bp, Homo sapiens
gcacccctgcctttg

SEQ ID NO: 1687072 - DNA, 15 bp, Homo sapiens
cacccctgcctttga

SEQ ID NO: 1687073 - DNA, 15 bp, Homo sapiens
acccctgcctttgag

SEQ ID NO: 1687074 - DNA, 15 bp, Homo sapiens
cccctgcctttgagt

SEQ ID NO: 1687075 - DNA, 15 bp, Homo sapiens
ccctgcctttgagtc

SEQ ID NO: 1687076 - DNA, 15 bp, Homo sapiens
cctgcctttgagtcc

SEQ ID NO: 1687077 - DNA, 15 bp, Homo sapiens
ctgcctttgagtcct

SEQ ID NO: 1687078 - DNA, 15 bp, Homo sapiens
tgcctttgagtcctg

SEQ ID NO: 1687079 - DNA, 15 bp, Homo sapiens
gcctttgagtcctgc

SEQ ID NO: 1687080 - DNA, 15 bp, Homo sapiens
cctttgagtcctgct

SEQ ID NO: 1687081 - DNA, 15 bp, Homo sapiens
ctttgagtcctgcta

SEQ ID NO: 1687082 - DNA, 15 bp, Homo sapiens
tttgagtcctgctaa

SEQ ID NO: 1687083 - DNA, 15 bp, Homo sapiens
ttgagtcctgctaaa

SEQ ID NO: 1687084 - DNA, 15 bp, Homo sapiens
tgagtcctgctaaac

SEQ ID NO: 1687085 - DNA, 15 bp, Homo sapiens
gagtcctgctaaaca

SEQ ID NO: 1687086 - DNA, 15 bp, Homo sapiens
agtcctgctaaacaa

SEQ ID NO: 1687087 - DNA, 15 bp, Homo sapiens
gtcctgctaaacaac

SEQ ID NO: 1687088 - DNA, 15 bp, Homo sapiens
tcctgctaaacaaca

SEQ ID NO: 1687089 - DNA, 15 bp, Homo sapiens
cctgctaaacaacag

SEQ ID NO: 1687090 - DNA, 15 bp, Homo sapiens
ctgctaaacaacagt

SEQ ID NO: 1687091 - DNA, 15 bp, Homo sapiens
tgctaaacaacagta

SEQ ID NO: 1687092 - DNA, 15 bp, Homo sapiens
gctaaacaacagtat

SEQ ID NO: 1687093 - DNA, 15 bp, Homo sapiens
ctaaacaacagtatt

SEQ ID NO: 1687094 - DNA, 15 bp, Homo sapiens
taaacaacagtattg

SEQ ID NO: 1687095 - DNA, 15 bp, Homo sapiens
aaacaacagtattgg

SEQ ID NO: 1687096 - DNA, 15 bp, Homo sapiens
aacaacagtattgga

SEQ ID NO: 1687097 - DNA, 15 bp, Homo sapiens
acaacagtattggaa

SEQ ID NO: 1687098 - DNA, 15 bp, Homo sapiens
caacagtattggaac

SEQ ID NO: 1687099 - DNA, 15 bp, Homo sapiens
aacagtattggaacc

SEQ ID NO: 1687100 - DNA, 15 bp, Homo sapiens
acagtattggaaccc

SEQ ID NO: 1687101 - DNA, 15 bp, Homo sapiens
cagtattggaaccca

SEQ ID NO: 1687102 - DNA, 15 bp, Homo sapiens
agtattggaacccat

SEQ ID NO: 1687103 - DNA, 15 bp, Homo sapiens
gtattggaacccatc

SEQ ID NO: 1687104 - DNA, 15 bp, Homo sapiens
tattggaacccatca

SEQ ID NO: 1687105 - DNA, 15 bp, Homo sapiens
attggaacccatcat

SEQ ID NO: 1687106 - DNA, 15 bp, Homo sapiens
ttggaacccatcatt

SEQ ID NO: 1687107 - DNA, 15 bp, Homo sapiens
tggaacccatcattt

SEQ ID NO: 1687108 - DNA, 15 bp, Homo sapiens
ggaacccatcatttt

SEQ ID NO: 1687109 - DNA, 15 bp, Homo sapiens
gaacccatcattttc

SEQ ID NO: 1687110 - DNA, 15 bp, Homo sapiens
aacccatcattttct

SEQ ID NO: 1687111 - DNA, 15 bp, Homo sapiens
acccatcattttctc

SEQ ID NO: 1687112 - DNA, 15 bp, Homo sapiens
cccatcattttctct

SEQ ID NO: 1687113 - DNA, 15 bp, Homo sapiens
ccatcattttctctc

SEQ ID NO: 1687114 - DNA, 15 bp, Homo sapiens
catcattttctctca

SEQ ID NO: 1687115 - DNA, 15 bp, Homo sapiens
atcattttctctcat

SEQ ID NO: 1687116 - DNA, 15 bp, Homo sapiens
tcattttctctcatg

SEQ ID NO: 1687117 - DNA, 15 bp, Homo sapiens
cattttctctcatgc

SEQ ID NO: 1687118 - DNA, 15 bp, Homo sapiens
attttctctcatgcc

SEQ ID NO: 1687119 - DNA, 15 bp, Homo sapiens
ttttctctcatgcct

SEQ ID NO: 1687120 - DNA, 15 bp, Homo sapiens
tttctctcatgcctt

SEQ ID NO: 1687121 - DNA, 15 bp, Homo sapiens
ttctctcatgccttt

SEQ ID NO: 1687122 - DNA, 15 bp, Homo sapiens
tctctcatgccttta

SEQ ID NO: 1687123 - DNA, 15 bp, Homo sapiens
ctctcatgcctttac

SEQ ID NO: 1687124 - DNA, 15 bp, Homo sapiens
tctcatgcctttacc

SEQ ID NO: 1687125 - DNA, 15 bp, Homo sapiens
ctcatgcctttaccc

SEQ ID NO: 1687126 - DNA, 15 bp, Homo sapiens
tcatgcctttaccca

SEQ ID NO: 1687127 - DNA, 15 bp, Homo sapiens
catgcctttacccaa

SEQ ID NO: 1687128 - DNA, 15 bp, Homo sapiens
atgcctttacccaaa

SEQ ID NO: 1687129 - DNA, 15 bp, Homo sapiens
tgcctttacccaaac

SEQ ID NO: 1687130 - DNA, 15 bp, Homo sapiens
gcctttacccaaact

SEQ ID NO: 1687131 - DNA, 15 bp, Homo sapiens
cctttacccaaactg

SEQ ID NO: 1687132 - DNA, 15 bp, Homo sapiens
ctttacccaaactgt

SEQ ID NO: 1687133 - DNA, 15 bp, Homo sapiens
tttacccaaactgtt

SEQ ID NO: 1687134 - DNA, 15 bp, Homo sapiens
ttacccaaactgtta

SEQ ID NO: 1687135 - DNA, 15 bp, Homo sapiens
tacccaaactgttag

SEQ ID NO: 1687136 - DNA, 15 bp, Homo sapiens
acccaaactgttagt

SEQ ID NO: 1687137 - DNA, 15 bp, Homo sapiens
cccaaactgttagtt

SEQ ID NO: 1687138 - DNA, 15 bp, Homo sapiens
ccaaactgttagttt

SEQ ID NO: 1687139 - DNA, 15 bp, Homo sapiens
caaactgttagtttt

SEQ ID NO: 1687140 - DNA, 15 bp, Homo sapiens
aaactgttagttttc

SEQ ID NO: 1687141 - DNA, 15 bp, Homo sapiens
aactgttagttttct

SEQ ID NO: 1687142 - DNA, 15 bp, Homo sapiens
actgttagttttctg

SEQ ID NO: 1687143 - DNA, 15 bp, Homo sapiens
ctgttagttttctgg

SEQ ID NO: 1687144 - DNA, 15 bp, Homo sapiens
tgttagttttctggt

SEQ ID NO: 1687145 - DNA, 15 bp, Homo sapiens
gttagttttctggta

SEQ ID NO: 1687146 - DNA, 15 bp, Homo sapiens
ttagttttctggtat

SEQ ID NO: 1687147 - DNA, 15 bp, Homo sapiens
tagttttctggtatt

SEQ ID NO: 1687148 - DNA, 15 bp, Homo sapiens
agttttctggtattc

SEQ ID NO: 1687149 - DNA, 15 bp, Homo sapiens
gttttctggtattcc

SEQ ID NO: 1687150 - DNA, 15 bp, Homo sapiens
ttttctggtattccc

SEQ ID NO: 1687151 - DNA, 15 bp, Homo sapiens
tttctggtattccct

SEQ ID NO: 1687152 - DNA, 15 bp, Homo sapiens
ttctggtattccctt

SEQ ID NO: 1687153 - DNA, 15 bp, Homo sapiens
tctggtattcccttc

SEQ ID NO: 1687154 - DNA, 15 bp, Homo sapiens
ctggtattcccttct

SEQ ID NO: 1687155 - DNA, 15 bp, Homo sapiens
tggtattcccttctc

SEQ ID NO: 1687156 - DNA, 15 bp, Homo sapiens
ggtattcccttctct

SEQ ID NO: 1687157 - DNA, 15 bp, Homo sapiens
gtattcccttctctc

SEQ ID NO: 1687158 - DNA, 15 bp, Homo sapiens
tattcccttctctcc

SEQ ID NO: 1687159 - DNA, 15 bp, Homo sapiens
attcccttctctcca

SEQ ID NO: 1687160 - DNA, 15 bp, Homo sapiens
ttcccttctctccac

SEQ ID NO: 1687161 - DNA, 15 bp, Homo sapiens
tcccttctctccaca

SEQ ID NO: 1687162 - DNA, 15 bp, Homo sapiens
cccttctctccacat

SEQ ID NO: 1687163 - DNA, 15 bp, Homo sapiens
ccttctctccacatt

SEQ ID NO: 1687164 - DNA, 15 bp, Homo sapiens
cttctctccacattt

SEQ ID NO: 1687165 - DNA, 15 bp, Homo sapiens
ttctctccacatttt

SEQ ID NO: 1687166 - DNA, 15 bp, Homo sapiens
tctctccacattttt

SEQ ID NO: 1687167 - DNA, 15 bp, Homo sapiens
ctctccacatttttc

SEQ ID NO: 1687168 - DNA, 15 bp, Homo sapiens
tctccacatttttcc

SEQ ID NO: 1687169 - DNA, 15 bp, Homo sapiens
ctccacatttttcct

SEQ ID NO: 1687170 - DNA, 15 bp, Homo sapiens
tccacatttttcctt

SEQ ID NO: 1687171 - DNA, 15 bp, Homo sapiens
ccacatttttccttc

SEQ ID NO: 1687172 - DNA, 15 bp, Homo sapiens
cacatttttccttct

SEQ ID NO: 1687173 - DNA, 15 bp, Homo sapiens
acatttttccttctc

SEQ ID NO: 1687174 - DNA, 15 bp, Homo sapiens
catttttccttctca

SEQ ID NO: 1687175 - DNA, 15 bp, Homo sapiens
atttttccttctcag

SEQ ID NO: 1687176 - DNA, 15 bp, Homo sapiens
tttttccttctcaga

SEQ ID NO: 1687177 - DNA, 15 bp, Homo sapiens
ttttccttctcagat

SEQ ID NO: 1687178 - DNA, 15 bp, Homo sapiens
tttccttctcagatc

SEQ ID NO: 1687179 - DNA, 15 bp, Homo sapiens
ttccttctcagatca

SEQ ID NO: 1687180 - DNA, 15 bp, Homo sapiens
tccttctcagatcac

SEQ ID NO: 1687181 - DNA, 15 bp, Homo sapiens
ccttctcagatcact

SEQ ID NO: 1687182 - DNA, 15 bp, Homo sapiens
cttctcagatcactg

SEQ ID NO: 1687183 - DNA, 15 bp, Homo sapiens
ttctcagatcactga

SEQ ID NO: 1687184 - DNA, 15 bp, Homo sapiens
tctcagatcactgag

SEQ ID NO: 1687185 - DNA, 15 bp, Homo sapiens
ctcagatcactgagg

SEQ ID NO: 1687186 - DNA, 15 bp, Homo sapiens
tcagatcactgagga

SEQ ID NO: 1687187 - DNA, 15 bp, Homo sapiens
cagatcactgaggat

SEQ ID NO: 1687188 - DNA, 15 bp, Homo sapiens
agatcactgaggatc

SEQ ID NO: 1687189 - DNA, 15 bp, Homo sapiens
gatcactgaggatcg

SEQ ID NO: 1687190 - DNA, 15 bp, Homo sapiens
atcactgaggatcgt

SEQ ID NO: 1687191 - DNA, 15 bp, Homo sapiens
tcactgaggatcgtc

SEQ ID NO: 1687192 - DNA, 15 bp, Homo sapiens
cactgaggatcgtcc

SEQ ID NO: 1687193 - DNA, 15 bp, Homo sapiens
actgaggatcgtcca

SEQ ID NO: 1687194 - DNA, 15 bp, Homo sapiens
ctgaggatcgtccaa

SEQ ID NO: 1687195 - DNA, 15 bp, Homo sapiens
tgaggatcgtccaat

SEQ ID NO: 1687196 - DNA, 15 bp, Homo sapiens
gaggatcgtccaatc

SEQ ID NO: 1687197 - DNA, 15 bp, Homo sapiens
aggatcgtccaatct

SEQ ID NO: 1687198 - DNA, 15 bp, Homo sapiens
ggatcgtccaatctt

SEQ ID NO: 1687199 - DNA, 15 bp, Homo sapiens
gatcgtccaatcttc

SEQ ID NO: 1687200 - DNA, 15 bp, Homo sapiens
atcgtccaatcttcc

SEQ ID NO: 1687201 - DNA, 15 bp, Homo sapiens
tcgtccaatcttccc

SEQ ID NO: 1687202 - DNA, 15 bp, Homo sapiens
cgtccaatcttccct

SEQ ID NO: 1687203 - DNA, 15 bp, Homo sapiens
gtccaatcttccctg

SEQ ID NO: 1687204 - DNA, 15 bp, Homo sapiens
tccaatcttccctgc

SEQ ID NO: 1687205 - DNA, 15 bp, Homo sapiens
ccaatcttccctgcc

SEQ ID NO: 1687206 - DNA, 15 bp, Homo sapiens
caatcttccctgccc

SEQ ID NO: 1687207 - DNA, 15 bp, Homo sapiens
aatcttccctgccca

SEQ ID NO: 1687208 - DNA, 15 bp, Homo sapiens
atcttccctgcccat

SEQ ID NO: 1687209 - DNA, 15 bp, Homo sapiens
tcttccctgcccatc

SEQ ID NO: 1687210 - DNA, 15 bp, Homo sapiens
cttccctgcccatcc

SEQ ID NO: 1687211 - DNA, 15 bp, Homo sapiens
ttccctgcccatccc

SEQ ID NO: 1687212 - DNA, 15 bp, Homo sapiens
tccctgcccatccct

SEQ ID NO: 1687213 - DNA, 15 bp, Homo sapiens
ccctgcccatccctc

SEQ ID NO: 1687214 - DNA, 15 bp, Homo sapiens
cctgcccatccctcc

SEQ ID NO: 1687215 - DNA, 15 bp, Homo sapiens
ctgcccatccctccc

SEQ ID NO: 1687216 - DNA, 15 bp, Homo sapiens
tgcccatccctcccc

SEQ ID NO: 1687217 - DNA, 15 bp, Homo sapiens
gcccatccctcccct

SEQ ID NO: 1687218 - DNA, 15 bp, Homo sapiens
cccatccctccccta

SEQ ID NO: 1687219 - DNA, 15 bp, Homo sapiens
ccatccctcccctac

SEQ ID NO: 1687220 - DNA, 15 bp, Homo sapiens
catccctcccctacc

SEQ ID NO: 1687221 - DNA, 15 bp, Homo sapiens
atccctcccctaccc

SEQ ID NO: 1687222 - DNA, 15 bp, Homo sapiens
tccctcccctacccc

SEQ ID NO: 1687223 - DNA, 15 bp, Homo sapiens
cctcccctaccccaa

SEQ ID NO: 1687224 - DNA, 15 bp, Homo sapiens
ctcccctaccccaac

SEQ ID NO: 1687225 - DNA, 15 bp, Homo sapiens
tcccctaccccaacc

SEQ ID NO: 1687226 - DNA, 15 bp, Homo sapiens
cccctaccccaacct

SEQ ID NO: 1687227 - DNA, 15 bp, Homo sapiens
ccctaccccaacctc

SEQ ID NO: 1687228 - DNA, 15 bp, Homo sapiens
cctaccccaacctcc

SEQ ID NO: 1687229 - DNA, 15 bp, Homo sapiens
ctaccccaacctcca

SEQ ID NO: 1687230 - DNA, 15 bp, Homo sapiens
taccccaacctccat

SEQ ID NO: 1687231 - DNA, 15 bp, Homo sapiens
accccaacctccatt

SEQ ID NO: 1687232 - DNA, 15 bp, Homo sapiens
ccccaacctccatta

SEQ ID NO: 1687233 - DNA, 15 bp, Homo sapiens
cccaacctccattat

SEQ ID NO: 1687234 - DNA, 15 bp, Homo sapiens
ccaacctccattatt

SEQ ID NO: 1687235 - DNA, 15 bp, Homo sapiens
caacctccattattt

SEQ ID NO: 1687236 - DNA, 15 bp, Homo sapiens
aacctccattatttg

SEQ ID NO: 1687237 - DNA, 15 bp, Homo sapiens
acctccattatttgt

SEQ ID NO: 1687238 - DNA, 15 bp, Homo sapiens
cctccattatttgta

SEQ ID NO: 1687239 - DNA, 15 bp, Homo sapiens
ctccattatttgtac

SEQ ID NO: 1687240 - DNA, 15 bp, Homo sapiens
tccattatttgtact

SEQ ID NO: 1687241 - DNA, 15 bp, Homo sapiens
ccattatttgtactc

SEQ ID NO: 1687242 - DNA, 15 bp, Homo sapiens
cattatttgtactct

SEQ ID NO: 1687243 - DNA, 15 bp, Homo sapiens
attatttgtactctc

SEQ ID NO: 1687244 - DNA, 15 bp, Homo sapiens
ttatttgtactctct

SEQ ID NO: 1687245 - DNA, 15 bp, Homo sapiens
tatttgtactctctt

SEQ ID NO: 1687246 - DNA, 15 bp, Homo sapiens
atttgtactctctta

SEQ ID NO: 1687247 - DNA, 15 bp, Homo sapiens
tttgtactctcttag

SEQ ID NO: 1687248 - DNA, 15 bp, Homo sapiens
ttgtactctcttagc

SEQ ID NO: 1687249 - DNA, 15 bp, Homo sapiens
tgtactctcttagca

SEQ ID NO: 1687250 - DNA, 15 bp, Homo sapiens
gtactctcttagcat

SEQ ID NO: 1687251 - DNA, 15 bp, Homo sapiens
tactctcttagcatc

SEQ ID NO: 1687252 - DNA, 15 bp, Homo sapiens
actctcttagcatcc

SEQ ID NO: 1687253 - DNA, 15 bp, Homo sapiens
ctctcttagcatcca

SEQ ID NO: 1687254 - DNA, 15 bp, Homo sapiens
tctcttagcatccag

SEQ ID NO: 1687255 - DNA, 15 bp, Homo sapiens
ctcttagcatccagt

SEQ ID NO: 1687256 - DNA, 15 bp, Homo sapiens
tcttagcatccagtg

SEQ ID NO: 1687257 - DNA, 15 bp, Homo sapiens
cttagcatccagtgc

SEQ ID NO: 1687258 - DNA, 15 bp, Homo sapiens
ttagcatccagtgca

SEQ ID NO: 1687259 - DNA, 15 bp, Homo sapiens
tagcatccagtgcac

SEQ ID NO: 1687260 - DNA, 15 bp, Homo sapiens
agcatccagtgcact

SEQ ID NO: 1687261 - DNA, 15 bp, Homo sapiens
gcatccagtgcactt

SEQ ID NO: 1687262 - DNA, 15 bp, Homo sapiens
catccagtgcacttt

SEQ ID NO: 1687263 - DNA, 15 bp, Homo sapiens
atccagtgcactttt

SEQ ID NO: 1687264 - DNA, 15 bp, Homo sapiens
tccagtgcacttttt

SEQ ID NO: 1687265 - DNA, 15 bp, Homo sapiens
ccagtgcactttttt

SEQ ID NO: 1687266 - DNA, 15 bp, Homo sapiens
cagtgcacttttttt

SEQ ID NO: 1687267 - DNA, 15 bp, Homo sapiens
agtgcactttttttc

SEQ ID NO: 1687268 - DNA, 15 bp, Homo sapiens
gtgcactttttttcc

SEQ ID NO: 1687269 - DNA, 15 bp, Homo sapiens
tgcactttttttcct

SEQ ID NO: 1687270 - DNA, 15 bp, Homo sapiens
gcactttttttcctt

SEQ ID NO: 1687271 - DNA, 15 bp, Homo sapiens
cactttttttcctta

SEQ ID NO: 1687272 - DNA, 15 bp, Homo sapiens
actttttttccttac

SEQ ID NO: 1687273 - DNA, 15 bp, Homo sapiens
ctttttttccttact

SEQ ID NO: 1687274 - DNA, 15 bp, Homo sapiens
tttttttccttactt

SEQ ID NO: 1687275 - DNA, 15 bp, Homo sapiens
ttttttccttactta

SEQ ID NO: 1687276 - DNA, 15 bp, Homo sapiens
tttttccttacttat

SEQ ID NO: 1687277 - DNA, 15 bp, Homo sapiens
ttttccttacttatt

SEQ ID NO: 1687278 - DNA, 15 bp, Homo sapiens
tttccttacttatta

SEQ ID NO: 1687279 - DNA, 15 bp, Homo sapiens
ttccttacttattac

SEQ ID NO: 1687280 - DNA, 15 bp, Homo sapiens
tccttacttattaca

SEQ ID NO: 1687281 - DNA, 15 bp, Homo sapiens
ccttacttattacac

SEQ ID NO: 1687282 - DNA, 15 bp, Homo sapiens
cttacttattacaca

SEQ ID NO: 1687283 - DNA, 15 bp, Homo sapiens
ttacttattacacaa

SEQ ID NO: 1687284 - DNA, 15 bp, Homo sapiens
tacttattacacaac

SEQ ID NO: 1687285 - DNA, 15 bp, Homo sapiens
acttattacacaact

SEQ ID NO: 1687286 - DNA, 15 bp, Homo sapiens
cttattacacaactt

SEQ ID NO: 1687287 - DNA, 15 bp, Homo sapiens
ttattacacaacttt

SEQ ID NO: 1687288 - DNA, 15 bp, Homo sapiens
tattacacaacttta

SEQ ID NO: 1687289 - DNA, 15 bp, Homo sapiens
attacacaactttac

SEQ ID NO: 1687290 - DNA, 15 bp, Homo sapiens
ttacacaactttaca

SEQ ID NO: 1687291 - DNA, 15 bp, Homo sapiens
tacacaactttacac

SEQ ID NO: 1687292 - DNA, 15 bp, Homo sapiens
acacaactttacact

SEQ ID NO: 1687293 - DNA, 15 bp, Homo sapiens
cacaactttacactt

SEQ ID NO: 1687294 - DNA, 15 bp, Homo sapiens
acaactttacactta

SEQ ID NO: 1687295 - DNA, 15 bp, Homo sapiens
caactttacacttac

SEQ ID NO: 1687296 - DNA, 15 bp, Homo sapiens
aactttacacttaca

SEQ ID NO: 1687297 - DNA, 15 bp, Homo sapiens
actttacacttacaa

SEQ ID NO: 1687298 - DNA, 15 bp, Homo sapiens
ctttacacttacaat

SEQ ID NO: 1687299 - DNA, 15 bp, Homo sapiens
tttacacttacaatt

SEQ ID NO: 1687300 - DNA, 15 bp, Homo sapiens
ttacacttacaatta

SEQ ID NO: 1687301 - DNA, 15 bp, Homo sapiens
tacacttacaattaa

SEQ ID NO: 1687302 - DNA, 15 bp, Homo sapiens
acacttacaattaac

SEQ ID NO: 1687303 - DNA, 15 bp, Homo sapiens
cacttacaattaaca

SEQ ID NO: 1687304 - DNA, 15 bp, Homo sapiens
acttacaattaacat

SEQ ID NO: 1687305 - DNA, 15 bp, Homo sapiens
cttacaattaacatt

SEQ ID NO: 1687306 - DNA, 15 bp, Homo sapiens
ttacaattaacatta

SEQ ID NO: 1687307 - DNA, 15 bp, Homo sapiens
tacaattaacattat

SEQ ID NO: 1687308 - DNA, 15 bp, Homo sapiens
acaattaacattata

SEQ ID NO: 1687309 - DNA, 15 bp, Homo sapiens
caattaacattataa

SEQ ID NO: 1687310 - DNA, 15 bp, Homo sapiens
aattaacattataat

SEQ ID NO: 1687311 - DNA, 15 bp, Homo sapiens
attaacattataatt

SEQ ID NO: 1687312 - DNA, 15 bp, Homo sapiens
ttaacattataattg

SEQ ID NO: 1687313 - DNA, 15 bp, Homo sapiens
taacattataattgt

SEQ ID NO: 1687314 - DNA, 15 bp, Homo sapiens
aacattataattgtc

SEQ ID NO: 1687315 - DNA, 15 bp, Homo sapiens
acattataattgtct

SEQ ID NO: 1687316 - DNA, 15 bp, Homo sapiens
cattataattgtctt

SEQ ID NO: 1687317 - DNA, 15 bp, Homo sapiens
attataattgtcttt

SEQ ID NO: 1687318 - DNA, 15 bp, Homo sapiens
ttataattgtctttt

SEQ ID NO: 1687319 - DNA, 15 bp, Homo sapiens
tataattgtcttttt

SEQ ID NO: 1687320 - DNA, 15 bp, Homo sapiens
ataattgtctttttg

SEQ ID NO: 1687321 - DNA, 15 bp, Homo sapiens
taattgtctttttgg

SEQ ID NO: 1687322 - DNA, 15 bp, Homo sapiens
aattgtctttttggt

SEQ ID NO: 1687323 - DNA, 15 bp, Homo sapiens
attgtctttttggtc

SEQ ID NO: 1687324 - DNA, 15 bp, Homo sapiens
ttgtctttttggtct

SEQ ID NO: 1687325 - DNA, 15 bp, Homo sapiens
tgtctttttggtcta

SEQ ID NO: 1687326 - DNA, 15 bp, Homo sapiens
gtctttttggtctat

SEQ ID NO: 1687327 - DNA, 15 bp, Homo sapiens
tctttttggtctatt

SEQ ID NO: 1687328 - DNA, 15 bp, Homo sapiens
ctttttggtctattt

SEQ ID NO: 1687329 - DNA, 15 bp, Homo sapiens
tttttggtctatttg

SEQ ID NO: 1687330 - DNA, 15 bp, Homo sapiens
ttttggtctatttga

SEQ ID NO: 1687331 - DNA, 15 bp, Homo sapiens
tttggtctatttgat

SEQ ID NO: 1687332 - DNA, 15 bp, Homo sapiens
ttggtctatttgatc

SEQ ID NO: 1687333 - DNA, 15 bp, Homo sapiens
tggtctatttgatct

SEQ ID NO: 1687334 - DNA, 15 bp, Homo sapiens
ggtctatttgatcta

SEQ ID NO: 1687335 - DNA, 15 bp, Homo sapiens
gtctatttgatctac

SEQ ID NO: 1687336 - DNA, 15 bp, Homo sapiens
tctatttgatctact

SEQ ID NO: 1687337 - DNA, 15 bp, Homo sapiens
ctatttgatctactc

SEQ ID NO: 1687338 - DNA, 15 bp, Homo sapiens
tatttgatctactct

SEQ ID NO: 1687339 - DNA, 15 bp, Homo sapiens
atttgatctactcta

SEQ ID NO: 1687340 - DNA, 15 bp, Homo sapiens
tttgatctactctac

SEQ ID NO: 1687341 - DNA, 15 bp, Homo sapiens
ttgatctactctact

SEQ ID NO: 1687342 - DNA, 15 bp, Homo sapiens
tgatctactctacta

SEQ ID NO: 1687343 - DNA, 15 bp, Homo sapiens
gatctactctactaa

SEQ ID NO: 1687344 - DNA, 15 bp, Homo sapiens
atctactctactaaa

SEQ ID NO: 1687345 - DNA, 15 bp, Homo sapiens
tctactctactaaat

SEQ ID NO: 1687346 - DNA, 15 bp, Homo sapiens
ctactctactaaatc

SEQ ID NO: 1687347 - DNA, 15 bp, Homo sapiens
tactctactaaatct

SEQ ID NO: 1687348 - DNA, 15 bp, Homo sapiens
actctactaaatctt

SEQ ID NO: 1687349 - DNA, 15 bp, Homo sapiens
ctctactaaatcttt

SEQ ID NO: 1687350 - DNA, 15 bp, Homo sapiens
tctactaaatctttt

SEQ ID NO: 1687351 - DNA, 15 bp, Homo sapiens
ctactaaatcttttt

SEQ ID NO: 1687352 - DNA, 15 bp, Homo sapiens
tactaaatctttttt

SEQ ID NO: 1687353 - DNA, 15 bp, Homo sapiens
actaaatcttttttt

SEQ ID NO: 1687354 - DNA, 15 bp, Homo sapiens
ctaaatctttttttt

SEQ ID NO: 1687355 - DNA, 15 bp, Homo sapiens
taaatcttttttttt

SEQ ID NO: 1687356 - DNA, 15 bp, Homo sapiens
gacaaggtctcactg

SEQ ID NO: 1687357 - DNA, 15 bp, Homo sapiens
acaaggtctcactgt

SEQ ID NO: 1687358 - DNA, 15 bp, Homo sapiens
caaggtctcactgtg

SEQ ID NO: 1687359 - DNA, 15 bp, Homo sapiens
aaggtctcactgtgc

SEQ ID NO: 1687360 - DNA, 15 bp, Homo sapiens
aggtctcactgtgcc

SEQ ID NO: 1687361 - DNA, 15 bp, Homo sapiens
ggtctcactgtgcct

SEQ ID NO: 1687362 - DNA, 15 bp, Homo sapiens
gtctcactgtgcctc

SEQ ID NO: 1687363 - DNA, 15 bp, Homo sapiens
tctcactgtgcctcc

SEQ ID NO: 1687364 - DNA, 15 bp, Homo sapiens
ctcactgtgcctcct

SEQ ID NO: 1687365 - DNA, 15 bp, Homo sapiens
tcactgtgcctcctc

SEQ ID NO: 1687366 - DNA, 15 bp, Homo sapiens
cactgtgcctcctcg

SEQ ID NO: 1687367 - DNA, 15 bp, Homo sapiens
actgtgcctcctcgg

SEQ ID NO: 1687368 - DNA, 15 bp, Homo sapiens
ctgtgcctcctcggc

SEQ ID NO: 1687369 - DNA, 15 bp, Homo sapiens
tgtgcctcctcggct

SEQ ID NO: 1687370 - DNA, 15 bp, Homo sapiens
gtgcctcctcggctg

SEQ ID NO: 1687371 - DNA, 15 bp, Homo sapiens
tgcctcctcggctgg

SEQ ID NO: 1687372 - DNA, 15 bp, Homo sapiens
gcctcctcggctgga

SEQ ID NO: 1687373 - DNA, 15 bp, Homo sapiens
cctcctcggctggag

SEQ ID NO: 1687374 - DNA, 15 bp, Homo sapiens
ctcctcggctggagt

SEQ ID NO: 1687375 - DNA, 15 bp, Homo sapiens
tcctcggctggagtg

SEQ ID NO: 1687376 - DNA, 15 bp, Homo sapiens
cctcggctggagtgc

SEQ ID NO: 1687377 - DNA, 15 bp, Homo sapiens
ctcggctggagtgca

SEQ ID NO: 1687378 - DNA, 15 bp, Homo sapiens
tcggctggagtgcag

SEQ ID NO: 1687379 - DNA, 15 bp, Homo sapiens
cggctggagtgcagt

SEQ ID NO: 1687380 - DNA, 15 bp, Homo sapiens
cgtgatctcggctcg

SEQ ID NO: 1687381 - DNA, 15 bp, Homo sapiens
gtgatctcggctcgc

SEQ ID NO: 1687382 - DNA, 15 bp, Homo sapiens
tgatctcggctcgct

SEQ ID NO: 1687383 - DNA, 15 bp, Homo sapiens
gctgcaacctccgcc

SEQ ID NO: 1687384 - DNA, 15 bp, Homo sapiens
gcaacctccgcctct

SEQ ID NO: 1687385 - DNA, 15 bp, Homo sapiens
caacctccgcctctg

SEQ ID NO: 1687386 - DNA, 15 bp, Homo sapiens
aacctccgcctctgg

SEQ ID NO: 1687387 - DNA, 15 bp, Homo sapiens
acctccgcctctgga

SEQ ID NO: 1687388 - DNA, 15 bp, Homo sapiens
cctccgcctctggag

SEQ ID NO: 1687389 - DNA, 15 bp, Homo sapiens
ctccgcctctggagt

SEQ ID NO: 1687390 - DNA, 15 bp, Homo sapiens
tccgcctctggagtt

SEQ ID NO: 1687391 - DNA, 15 bp, Homo sapiens
ccgcctctggagttc

SEQ ID NO: 1687392 - DNA, 15 bp, Homo sapiens
cgcctctggagttca

SEQ ID NO: 1687393 - DNA, 15 bp, Homo sapiens
gcctctggagttcaa

SEQ ID NO: 1687394 - DNA, 15 bp, Homo sapiens
cctctggagttcaag

SEQ ID NO: 1687395 - DNA, 15 bp, Homo sapiens
ctctggagttcaagt

SEQ ID NO: 1687396 - DNA, 15 bp, Homo sapiens
tctggagttcaagtg

SEQ ID NO: 1687397 - DNA, 15 bp, Homo sapiens
ctggagttcaagtga

SEQ ID NO: 1687398 - DNA, 15 bp, Homo sapiens
tggagttcaagtgat

SEQ ID NO: 1687399 - DNA, 15 bp, Homo sapiens
ggagttcaagtgatt

SEQ ID NO: 1687400 - DNA, 15 bp, Homo sapiens
aagtgattctcctgt

SEQ ID NO: 1687401 - DNA, 15 bp, Homo sapiens
agtgattctcctgtc

SEQ ID NO: 1687402 - DNA, 15 bp, Homo sapiens
gtgattctcctgtct

SEQ ID NO: 1687403 - DNA, 15 bp, Homo sapiens
tgattctcctgtctc

SEQ ID NO: 1687404 - DNA, 15 bp, Homo sapiens
tgtctcagcctccct

SEQ ID NO: 1687405 - DNA, 15 bp, Homo sapiens
gtctcagcctcccta

SEQ ID NO: 1687406 - DNA, 15 bp, Homo sapiens
tctcagcctccctag

SEQ ID NO: 1687407 - DNA, 15 bp, Homo sapiens
ctcagcctccctagt

SEQ ID NO: 1687408 - DNA, 15 bp, Homo sapiens
tcagcctccctagta

SEQ ID NO: 1687409 - DNA, 15 bp, Homo sapiens
cagcctccctagtag

SEQ ID NO: 1687410 - DNA, 15 bp, Homo sapiens
agcctccctagtaga

SEQ ID NO: 1687411 - DNA, 15 bp, Homo sapiens
gcctccctagtagat

SEQ ID NO: 1687412 - DNA, 15 bp, Homo sapiens
cctccctagtagatg

SEQ ID NO: 1687413 - DNA, 15 bp, Homo sapiens
ctccctagtagatgg

SEQ ID NO: 1687414 - DNA, 15 bp, Homo sapiens
tccctagtagatggg

SEQ ID NO: 1687415 - DNA, 15 bp, Homo sapiens
ccctagtagatggga

SEQ ID NO: 1687416 - DNA, 15 bp, Homo sapiens
cctagtagatgggat

SEQ ID NO: 1687417 - DNA, 15 bp, Homo sapiens
ctagtagatgggatt

SEQ ID NO: 1687418 - DNA, 15 bp, Homo sapiens
tagtagatgggatta

SEQ ID NO: 1687419 - DNA, 15 bp, Homo sapiens
agtagatgggattac

SEQ ID NO: 1687420 - DNA, 15 bp, Homo sapiens
gtagatgggattaca

SEQ ID NO: 1687421 - DNA, 15 bp, Homo sapiens
tagatgggattacag

SEQ ID NO: 1687422 - DNA, 15 bp, Homo sapiens
agatgggattacagg

SEQ ID NO: 1687423 - DNA, 15 bp, Homo sapiens
gattacaggcgtgca

SEQ ID NO: 1687424 - DNA, 15 bp, Homo sapiens
attacaggcgtgcac

SEQ ID NO: 1687425 - DNA, 15 bp, Homo sapiens
ttacaggcgtgcacc

SEQ ID NO: 1687426 - DNA, 15 bp, Homo sapiens
tacaggcgtgcacca

SEQ ID NO: 1687427 - DNA, 15 bp, Homo sapiens
acaggcgtgcaccac

SEQ ID NO: 1687428 - DNA, 15 bp, Homo sapiens
gcaccaccacgccca

SEQ ID NO: 1687429 - DNA, 15 bp, Homo sapiens
accaccacgcccagc

SEQ ID NO: 1687430 - DNA, 15 bp, Homo sapiens
caccacgcccagccc

SEQ ID NO: 1687431 - DNA, 15 bp, Homo sapiens
accacgcccagccca

SEQ ID NO: 1687432 - DNA, 15 bp, Homo sapiens
ccacgcccagcccag

SEQ ID NO: 1687433 - DNA, 15 bp, Homo sapiens
cacgcccagcccagt

SEQ ID NO: 1687434 - DNA, 15 bp, Homo sapiens
acgcccagcccagtt

SEQ ID NO: 1687435 - DNA, 15 bp, Homo sapiens
cgcccagcccagtta

SEQ ID NO: 1687436 - DNA, 15 bp, Homo sapiens
gcccagcccagttaa

SEQ ID NO: 1687437 - DNA, 15 bp, Homo sapiens
cccagcccagttaat

SEQ ID NO: 1687438 - DNA, 15 bp, Homo sapiens
ccagcccagttaatt

SEQ ID NO: 1687439 - DNA, 15 bp, Homo sapiens
cagcccagttaattt

SEQ ID NO: 1687440 - DNA, 15 bp, Homo sapiens
cccagttaatttttg

SEQ ID NO: 1687441 - DNA, 15 bp, Homo sapiens
ccagttaatttttgt

SEQ ID NO: 1687442 - DNA, 15 bp, Homo sapiens
cagttaatttttgta

SEQ ID NO: 1687443 - DNA, 15 bp, Homo sapiens
acagacagggtttca

SEQ ID NO: 1687444 - DNA, 15 bp, Homo sapiens
cagacagggtttcac

SEQ ID NO: 1687445 - DNA, 15 bp, Homo sapiens
tcttgaactcctgat

SEQ ID NO: 1687446 - DNA, 15 bp, Homo sapiens
cttgaactcctgatc

SEQ ID NO: 1687447 - DNA, 15 bp, Homo sapiens
ttgaactcctgatct

SEQ ID NO: 1687448 - DNA, 15 bp, Homo sapiens
tgaactcctgatctc

SEQ ID NO: 1687449 - DNA, 15 bp, Homo sapiens
actcctgatctcaga

SEQ ID NO: 1687450 - DNA, 15 bp, Homo sapiens
ctcctgatctcagat

SEQ ID NO: 1687451 - DNA, 15 bp, Homo sapiens
tcctgatctcagatg

SEQ ID NO: 1687452 - DNA, 15 bp, Homo sapiens
cctgatctcagatga

SEQ ID NO: 1687453 - DNA, 15 bp, Homo sapiens
ctgatctcagatgat

SEQ ID NO: 1687454 - DNA, 15 bp, Homo sapiens
tgatctcagatgatg

SEQ ID NO: 1687455 - DNA, 15 bp, Homo sapiens
gatctcagatgatgc

SEQ ID NO: 1687456 - DNA, 15 bp, Homo sapiens
atctcagatgatgca

SEQ ID NO: 1687457 - DNA, 15 bp, Homo sapiens
tctcagatgatgcac

SEQ ID NO: 1687458 - DNA, 15 bp, Homo sapiens
ctcagatgatgcacc

SEQ ID NO: 1687459 - DNA, 15 bp, Homo sapiens
tcagatgatgcacct

SEQ ID NO: 1687460 - DNA, 15 bp, Homo sapiens
cagatgatgcacctg

SEQ ID NO: 1687461 - DNA, 15 bp, Homo sapiens
agatgatgcacctgg

SEQ ID NO: 1687462 - DNA, 15 bp, Homo sapiens
gatgatgcacctggc

SEQ ID NO: 1687463 - DNA, 15 bp, Homo sapiens
atgatgcacctggct

SEQ ID NO: 1687464 - DNA, 15 bp, Homo sapiens
tgatgcacctggctc

SEQ ID NO: 1687465 - DNA, 15 bp, Homo sapiens
gatgcacctggctcg

SEQ ID NO: 1687466 - DNA, 15 bp, Homo sapiens
atgcacctggctcgg

SEQ ID NO: 1687467 - DNA, 15 bp, Homo sapiens
tgcacctggctcggc

SEQ ID NO: 1687468 - DNA, 15 bp, Homo sapiens
gcacctggctcggcc

SEQ ID NO: 1687469 - DNA, 15 bp, Homo sapiens
cacctggctcggcct

SEQ ID NO: 1687470 - DNA, 15 bp, Homo sapiens
acctggctcggcctc

SEQ ID NO: 1687471 - DNA, 15 bp, Homo sapiens
cctggctcggcctcg

SEQ ID NO: 1687472 - DNA, 15 bp, Homo sapiens
ctggctcggcctcgc

SEQ ID NO: 1687473 - DNA, 15 bp, Homo sapiens
tggctcggcctcgca

SEQ ID NO: 1687474 - DNA, 15 bp, Homo sapiens
ggctcggcctcgcaa

SEQ ID NO: 1687475 - DNA, 15 bp, Homo sapiens
gctcggcctcgcaaa

SEQ ID NO: 1687476 - DNA, 15 bp, Homo sapiens
ctcggcctcgcaaag

SEQ ID NO: 1687477 - DNA, 15 bp, Homo sapiens
tcggcctcgcaaagt

SEQ ID NO: 1687478 - DNA, 15 bp, Homo sapiens
cggcctcgcaaagtg

SEQ ID NO: 1687479 - DNA, 15 bp, Homo sapiens
ggcctcgcaaagtgc

SEQ ID NO: 1687480 - DNA, 15 bp, Homo sapiens
gcctcgcaaagtgct

SEQ ID NO: 1687481 - DNA, 15 bp, Homo sapiens
cctcgcaaagtgctg

SEQ ID NO: 1687482 - DNA, 15 bp, Homo sapiens
ctcgcaaagtgctgg

SEQ ID NO: 1687483 - DNA, 15 bp, Homo sapiens
tcgcaaagtgctggg

SEQ ID NO: 1687484 - DNA, 15 bp, Homo sapiens
cgcaaagtgctggga

SEQ ID NO: 1687485 - DNA, 15 bp, Homo sapiens
gcaaagtgctgggat

SEQ ID NO: 1687486 - DNA, 15 bp, Homo sapiens
gtgagccaccgtgcc

SEQ ID NO: 1687487 - DNA, 15 bp, Homo sapiens
tgagccaccgtgccc

SEQ ID NO: 1687488 - DNA, 15 bp, Homo sapiens
gagccaccgtgccca

SEQ ID NO: 1687489 - DNA, 15 bp, Homo sapiens
agccaccgtgcccag

SEQ ID NO: 1687490 - DNA, 15 bp, Homo sapiens
gccaccgtgcccagc

SEQ ID NO: 1687491 - DNA, 15 bp, Homo sapiens
ccaccgtgcccagcc

SEQ ID NO: 1687492 - DNA, 15 bp, Homo sapiens
caccgtgcccagccg

SEQ ID NO: 1687493 - DNA, 15 bp, Homo sapiens
accgtgcccagccgt

SEQ ID NO: 1687494 - DNA, 15 bp, Homo sapiens
ccgtgcccagccgtt

SEQ ID NO: 1687495 - DNA, 15 bp, Homo sapiens
cgtgcccagccgtta

SEQ ID NO: 1687496 - DNA, 15 bp, Homo sapiens
gtgcccagccgttag

SEQ ID NO: 1687497 - DNA, 15 bp, Homo sapiens
tgcccagccgttagc

SEQ ID NO: 1687498 - DNA, 15 bp, Homo sapiens
gcccagccgttagct

SEQ ID NO: 1687499 - DNA, 15 bp, Homo sapiens
cccagccgttagctc

SEQ ID NO: 1687500 - DNA, 15 bp, Homo sapiens
ccagccgttagctca

SEQ ID NO: 1687501 - DNA, 15 bp, Homo sapiens
cagccgttagctcat

SEQ ID NO: 1687502 - DNA, 15 bp, Homo sapiens
agccgttagctcatt

SEQ ID NO: 1687503 - DNA, 15 bp, Homo sapiens
gccgttagctcattt

SEQ ID NO: 1687504 - DNA, 15 bp, Homo sapiens
ccgttagctcatttt

SEQ ID NO: 1687505 - DNA, 15 bp, Homo sapiens
cgttagctcatttta

SEQ ID NO: 1687506 - DNA, 15 bp, Homo sapiens
gttagctcattttaa

SEQ ID NO: 1687507 - DNA, 15 bp, Homo sapiens
ttagctcattttaac

SEQ ID NO: 1687508 - DNA, 15 bp, Homo sapiens
tagctcattttaaca

SEQ ID NO: 1687509 - DNA, 15 bp, Homo sapiens
agctcattttaacac

SEQ ID NO: 1687510 - DNA, 15 bp, Homo sapiens
gctcattttaacaca

SEQ ID NO: 1687511 - DNA, 15 bp, Homo sapiens
ctcattttaacacat

SEQ ID NO: 1687512 - DNA, 15 bp, Homo sapiens
tcattttaacacatc

SEQ ID NO: 1687513 - DNA, 15 bp, Homo sapiens
cattttaacacatcc

SEQ ID NO: 1687514 - DNA, 15 bp, Homo sapiens
attttaacacatcct

SEQ ID NO: 1687515 - DNA, 15 bp, Homo sapiens
ttttaacacatcctt

SEQ ID NO: 1687516 - DNA, 15 bp, Homo sapiens
tttaacacatcctta

SEQ ID NO: 1687517 - DNA, 15 bp, Homo sapiens
ttaacacatccttag

SEQ ID NO: 1687518 - DNA, 15 bp, Homo sapiens
taacacatccttagt

SEQ ID NO: 1687519 - DNA, 15 bp, Homo sapiens
aacacatccttagtc

SEQ ID NO: 1687520 - DNA, 15 bp, Homo sapiens
acacatccttagtcc

SEQ ID NO: 1687521 - DNA, 15 bp, Homo sapiens
cacatccttagtcca

SEQ ID NO: 1687522 - DNA, 15 bp, Homo sapiens
acatccttagtccag

SEQ ID NO: 1687523 - DNA, 15 bp, Homo sapiens
catccttagtccagc

SEQ ID NO: 1687524 - DNA, 15 bp, Homo sapiens
atccttagtccagcc

SEQ ID NO: 1687525 - DNA, 15 bp, Homo sapiens
tccttagtccagcct

SEQ ID NO: 1687526 - DNA, 15 bp, Homo sapiens
ccttagtccagcctg

SEQ ID NO: 1687527 - DNA, 15 bp, Homo sapiens
cttagtccagcctgt

SEQ ID NO: 1687528 - DNA, 15 bp, Homo sapiens
ttagtccagcctgtt

SEQ ID NO: 1687529 - DNA, 15 bp, Homo sapiens
tagtccagcctgttc

SEQ ID NO: 1687530 - DNA, 15 bp, Homo sapiens
agtccagcctgttcc

SEQ ID NO: 1687531 - DNA, 15 bp, Homo sapiens
gtccagcctgttcca

SEQ ID NO: 1687532 - DNA, 15 bp, Homo sapiens
tccagcctgttccaa

SEQ ID NO: 1687533 - DNA, 15 bp, Homo sapiens
ccagcctgttccaaa

SEQ ID NO: 1687534 - DNA, 15 bp, Homo sapiens
cagcctgttccaaaa

SEQ ID NO: 1687535 - DNA, 15 bp, Homo sapiens
agcctgttccaaaaa

SEQ ID NO: 1687536 - DNA, 15 bp, Homo sapiens
gcctgttccaaaaaa

SEQ ID NO: 1687537 - DNA, 15 bp, Homo sapiens
cctgttccaaaaaat

SEQ ID NO: 1687538 - DNA, 15 bp, Homo sapiens
ctgttccaaaaaatc

SEQ ID NO: 1687539 - DNA, 15 bp, Homo sapiens
tgttccaaaaaatct

SEQ ID NO: 1687540 - DNA, 15 bp, Homo sapiens
gttccaaaaaatcta

SEQ ID NO: 1687541 - DNA, 15 bp, Homo sapiens
ttccaaaaaatctaa

SEQ ID NO: 1687542 - DNA, 15 bp, Homo sapiens
tccaaaaaatctaaa

SEQ ID NO: 1687543 - DNA, 15 bp, Homo sapiens
ccaaaaaatctaaag

SEQ ID NO: 1687544 - DNA, 15 bp, Homo sapiens
caaaaaatctaaagt

SEQ ID NO: 1687545 - DNA, 15 bp, Homo sapiens
aaaaaatctaaagtc

SEQ ID NO: 1687546 - DNA, 15 bp, Homo sapiens
aaaaatctaaagtca

SEQ ID NO: 1687547 - DNA, 15 bp, Homo sapiens
aaaatctaaagtcag

SEQ ID NO: 1687548 - DNA, 15 bp, Homo sapiens
aaatctaaagtcaga

SEQ ID NO: 1687549 - DNA, 15 bp, Homo sapiens
aatctaaagtcagat

SEQ ID NO: 1687550 - DNA, 15 bp, Homo sapiens
atctaaagtcagata

SEQ ID NO: 1687551 - DNA, 15 bp, Homo sapiens
tctaaagtcagatag

SEQ ID NO: 1687552 - DNA, 15 bp, Homo sapiens
ctaaagtcagatagc

SEQ ID NO: 1687553 - DNA, 15 bp, Homo sapiens
taaagtcagatagct

SEQ ID NO: 1687554 - DNA, 15 bp, Homo sapiens
aaagtcagatagctt

SEQ ID NO: 1687555 - DNA, 15 bp, Homo sapiens
aagtcagatagcttc

SEQ ID NO: 1687556 - DNA, 15 bp, Homo sapiens
agtcagatagcttcc

SEQ ID NO: 1687557 - DNA, 15 bp, Homo sapiens
gtcagatagcttcct

SEQ ID NO: 1687558 - DNA, 15 bp, Homo sapiens
tcagatagcttccta

SEQ ID NO: 1687559 - DNA, 15 bp, Homo sapiens
cagatagcttcctaa

SEQ ID NO: 1687560 - DNA, 15 bp, Homo sapiens
agatagcttcctaaa

SEQ ID NO: 1687561 - DNA, 15 bp, Homo sapiens
gatagcttcctaaac

SEQ ID NO: 1687562 - DNA, 15 bp, Homo sapiens
atagcttcctaaacc

SEQ ID NO: 1687563 - DNA, 15 bp, Homo sapiens
tagcttcctaaacct

SEQ ID NO: 1687564 - DNA, 15 bp, Homo sapiens
agcttcctaaacctc

SEQ ID NO: 1687565 - DNA, 15 bp, Homo sapiens
gcttcctaaacctca

SEQ ID NO: 1687566 - DNA, 15 bp, Homo sapiens
cttcctaaacctcaa

SEQ ID NO: 1687567 - DNA, 15 bp, Homo sapiens
ttcctaaacctcaac

SEQ ID NO: 1687568 - DNA, 15 bp, Homo sapiens
tcctaaacctcaact

SEQ ID NO: 1687569 - DNA, 15 bp, Homo sapiens
cctaaacctcaactt

SEQ ID NO: 1687570 - DNA, 15 bp, Homo sapiens
ctaaacctcaacttt

SEQ ID NO: 1687571 - DNA, 15 bp, Homo sapiens
taaacctcaacttta

SEQ ID NO: 1687572 - DNA, 15 bp, Homo sapiens
aaacctcaactttat

SEQ ID NO: 1687573 - DNA, 15 bp, Homo sapiens
aacctcaactttatt

SEQ ID NO: 1687574 - DNA, 15 bp, Homo sapiens
acctcaactttattc

SEQ ID NO: 1687575 - DNA, 15 bp, Homo sapiens
cctcaactttattcc

SEQ ID NO: 1687576 - DNA, 15 bp, Homo sapiens
ctcaactttattcca

SEQ ID NO: 1687577 - DNA, 15 bp, Homo sapiens
tcaactttattccaa

SEQ ID NO: 1687578 - DNA, 15 bp, Homo sapiens
caactttattccaat

SEQ ID NO: 1687579 - DNA, 15 bp, Homo sapiens
aactttattccaatt

SEQ ID NO: 1687580 - DNA, 15 bp, Homo sapiens
actttattccaattg

SEQ ID NO: 1687581 - DNA, 15 bp, Homo sapiens
ctttattccaattgc

SEQ ID NO: 1687582 - DNA, 15 bp, Homo sapiens
tttattccaattgct

SEQ ID NO: 1687583 - DNA, 15 bp, Homo sapiens
ttattccaattgctt

SEQ ID NO: 1687584 - DNA, 15 bp, Homo sapiens
tattccaattgcttt

SEQ ID NO: 1687585 - DNA, 15 bp, Homo sapiens
attccaattgctttc

SEQ ID NO: 1687586 - DNA, 15 bp, Homo sapiens
ttccaattgctttcc

SEQ ID NO: 1687587 - DNA, 15 bp, Homo sapiens
tccaattgctttcct

SEQ ID NO: 1687588 - DNA, 15 bp, Homo sapiens
ccaattgctttcctt

SEQ ID NO: 1687589 - DNA, 15 bp, Homo sapiens
caattgctttccttg

SEQ ID NO: 1687590 - DNA, 15 bp, Homo sapiens
aattgctttccttgg

SEQ ID NO: 1687591 - DNA, 15 bp, Homo sapiens
attgctttccttggc

SEQ ID NO: 1687592 - DNA, 15 bp, Homo sapiens
ttgctttccttggcg

SEQ ID NO: 1687593 - DNA, 15 bp, Homo sapiens
tgctttccttggcga

SEQ ID NO: 1687594 - DNA, 15 bp, Homo sapiens
gctttccttggcgaa

SEQ ID NO: 1687595 - DNA, 15 bp, Homo sapiens
ctttccttggcgaag

SEQ ID NO: 1687596 - DNA, 15 bp, Homo sapiens
tttccttggcgaaga

SEQ ID NO: 1687597 - DNA, 15 bp, Homo sapiens
ttccttggcgaagaa

SEQ ID NO: 1687598 - DNA, 15 bp, Homo sapiens
tccttggcgaagaat

SEQ ID NO: 1687599 - DNA, 15 bp, Homo sapiens
ccttggcgaagaatg

SEQ ID NO: 1687600 - DNA, 15 bp, Homo sapiens
cttggcgaagaatgt

SEQ ID NO: 1687601 - DNA, 15 bp, Homo sapiens
ttggcgaagaatgta

SEQ ID NO: 1687602 - DNA, 15 bp, Homo sapiens
tggcgaagaatgtag

SEQ ID NO: 1687603 - DNA, 15 bp, Homo sapiens
ggcgaagaatgtagt

SEQ ID NO: 1687604 - DNA, 15 bp, Homo sapiens
gcgaagaatgtagta

SEQ ID NO: 1687605 - DNA, 15 bp, Homo sapiens
cgaagaatgtagtaa

SEQ ID NO: 1687606 - DNA, 15 bp, Homo sapiens
gaagaatgtagtaag

SEQ ID NO: 1687607 - DNA, 15 bp, Homo sapiens
aagaatgtagtaagt

SEQ ID NO: 1687608 - DNA, 15 bp, Homo sapiens
agaatgtagtaagtc

SEQ ID NO: 1687609 - DNA, 15 bp, Homo sapiens
gaatgtagtaagtcg

SEQ ID NO: 1687610 - DNA, 15 bp, Homo sapiens
aatgtagtaagtcgg

SEQ ID NO: 1687611 - DNA, 15 bp, Homo sapiens
atgtagtaagtcggc

SEQ ID NO: 1687612 - DNA, 15 bp, Homo sapiens
tgtagtaagtcggcc

SEQ ID NO: 1687613 - DNA, 15 bp, Homo sapiens
gtagtaagtcggcct

SEQ ID NO: 1687614 - DNA, 15 bp, Homo sapiens
tagtaagtcggcctt

SEQ ID NO: 1687615 - DNA, 15 bp, Homo sapiens
agtaagtcggccttc

SEQ ID NO: 1687616 - DNA, 15 bp, Homo sapiens
gtaagtcggccttcc

SEQ ID NO: 1687617 - DNA, 15 bp, Homo sapiens
taagtcggccttcca

SEQ ID NO: 1687618 - DNA, 15 bp, Homo sapiens
aagtcggccttccag

SEQ ID NO: 1687619 - DNA, 15 bp, Homo sapiens
agtcggccttccagc

SEQ ID NO: 1687620 - DNA, 15 bp, Homo sapiens
gtcggccttccagcc

SEQ ID NO: 1687621 - DNA, 15 bp, Homo sapiens
tcggccttccagcca

SEQ ID NO: 1687622 - DNA, 15 bp, Homo sapiens
cggccttccagccac

SEQ ID NO: 1687623 - DNA, 15 bp, Homo sapiens
ggccttccagccacc

SEQ ID NO: 1687624 - DNA, 15 bp, Homo sapiens
gccttccagccacca

SEQ ID NO: 1687625 - DNA, 15 bp, Homo sapiens
ccttccagccaccag

SEQ ID NO: 1687626 - DNA, 15 bp, Homo sapiens
cttccagccaccagc

SEQ ID NO: 1687627 - DNA, 15 bp, Homo sapiens
ttccagccaccagcc

SEQ ID NO: 1687628 - DNA, 15 bp, Homo sapiens
tccagccaccagccc

SEQ ID NO: 1687629 - DNA, 15 bp, Homo sapiens
ccagccaccagcccc

SEQ ID NO: 1687630 - DNA, 15 bp, Homo sapiens
cagccaccagcccct

SEQ ID NO: 1687631 - DNA, 15 bp, Homo sapiens
agccaccagcccctt

SEQ ID NO: 1687632 - DNA, 15 bp, Homo sapiens
gccaccagccccttc

SEQ ID NO: 1687633 - DNA, 15 bp, Homo sapiens
ccaccagccccttcc

SEQ ID NO: 1687634 - DNA, 15 bp, Homo sapiens
caccagccccttccc

SEQ ID NO: 1687635 - DNA, 15 bp, Homo sapiens
accagccccttccct

SEQ ID NO: 1687636 - DNA, 15 bp, Homo sapiens
ccagccccttccctt

SEQ ID NO: 1687637 - DNA, 15 bp, Homo sapiens
cagccccttcccttt

SEQ ID NO: 1687638 - DNA, 15 bp, Homo sapiens
agccccttccctttg

SEQ ID NO: 1687639 - DNA, 15 bp, Homo sapiens
gccccttccctttgg

SEQ ID NO: 1687640 - DNA, 15 bp, Homo sapiens
ccccttccctttggt

SEQ ID NO: 1687641 - DNA, 15 bp, Homo sapiens
cccttccctttggtc

SEQ ID NO: 1687642 - DNA, 15 bp, Homo sapiens
ccttccctttggtct

SEQ ID NO: 1687643 - DNA, 15 bp, Homo sapiens
cttccctttggtctt

SEQ ID NO: 1687644 - DNA, 15 bp, Homo sapiens
ttccctttggtcttt

SEQ ID NO: 1687645 - DNA, 15 bp, Homo sapiens
tccctttggtctttc

SEQ ID NO: 1687646 - DNA, 15 bp, Homo sapiens
ccctttggtctttca

SEQ ID NO: 1687647 - DNA, 15 bp, Homo sapiens
cctttggtctttcac

SEQ ID NO: 1687648 - DNA, 15 bp, Homo sapiens
ctttggtctttcact

SEQ ID NO: 1687649 - DNA, 15 bp, Homo sapiens
tttggtctttcactc

SEQ ID NO: 1687650 - DNA, 15 bp, Homo sapiens
ttggtctttcactcc

SEQ ID NO: 1687651 - DNA, 15 bp, Homo sapiens
tggtctttcactccg

SEQ ID NO: 1687652 - DNA, 15 bp, Homo sapiens
ggtctttcactccgg

SEQ ID NO: 1687653 - DNA, 15 bp, Homo sapiens
gtctttcactccgga

SEQ ID NO: 1687654 - DNA, 15 bp, Homo sapiens
tctttcactccggag

SEQ ID NO: 1687655 - DNA, 15 bp, Homo sapiens
ctttcactccggagg

SEQ ID NO: 1687656 - DNA, 15 bp, Homo sapiens
tttcactccggaggc

SEQ ID NO: 1687657 - DNA, 15 bp, Homo sapiens
ttcactccggaggct

SEQ ID NO: 1687658 - DNA, 15 bp, Homo sapiens
tcactccggaggctc

SEQ ID NO: 1687659 - DNA, 15 bp, Homo sapiens
cactccggaggctct

SEQ ID NO: 1687660 - DNA, 15 bp, Homo sapiens
actccggaggctctt

SEQ ID NO: 1687661 - DNA, 15 bp, Homo sapiens
ctccggaggctctta

SEQ ID NO: 1687662 - DNA, 15 bp, Homo sapiens
tccggaggctcttac

SEQ ID NO: 1687663 - DNA, 15 bp, Homo sapiens
ccggaggctcttacc

SEQ ID NO: 1687664 - DNA, 15 bp, Homo sapiens
cggaggctcttaccc

SEQ ID NO: 1687665 - DNA, 15 bp, Homo sapiens
ggaggctcttaccct

SEQ ID NO: 1687666 - DNA, 15 bp, Homo sapiens
gaggctcttacccta

SEQ ID NO: 1687667 - DNA, 15 bp, Homo sapiens
aggctcttaccctag

SEQ ID NO: 1687668 - DNA, 15 bp, Homo sapiens
ggctcttaccctaga

SEQ ID NO: 1687669 - DNA, 15 bp, Homo sapiens
gctcttaccctagac

SEQ ID NO: 1687670 - DNA, 15 bp, Homo sapiens
ctcttaccctagaca

SEQ ID NO: 1687671 - DNA, 15 bp, Homo sapiens
tcttaccctagacac

SEQ ID NO: 1687672 - DNA, 15 bp, Homo sapiens
cttaccctagacaca

SEQ ID NO: 1687673 - DNA, 15 bp, Homo sapiens
ttaccctagacacaa

SEQ ID NO: 1687674 - DNA, 15 bp, Homo sapiens
taccctagacacaat

SEQ ID NO: 1687675 - DNA, 15 bp, Homo sapiens
accctagacacaatg

SEQ ID NO: 1687676 - DNA, 15 bp, Homo sapiens
ccctagacacaatgg

SEQ ID NO: 1687677 - DNA, 15 bp, Homo sapiens
cctagacacaatggg

SEQ ID NO: 1687678 - DNA, 15 bp, Homo sapiens
ctagacacaatggga

SEQ ID NO: 1687679 - DNA, 15 bp, Homo sapiens
tagacacaatgggac

SEQ ID NO: 1687680 - DNA, 15 bp, Homo sapiens
agacacaatgggaca

SEQ ID NO: 1687681 - DNA, 15 bp, Homo sapiens
gacacaatgggacag

SEQ ID NO: 1687682 - DNA, 15 bp, Homo sapiens
cacaatgggacaggg

SEQ ID NO: 1687683 - DNA, 15 bp, Homo sapiens
acaatgggacaggga

SEQ ID NO: 1687684 - DNA, 15 bp, Homo sapiens
caatgggacagggag

SEQ ID NO: 1687685 - DNA, 15 bp, Homo sapiens
aatgggacagggagc

SEQ ID NO: 1687686 - DNA, 15 bp, Homo sapiens
atgggacagggagcg

SEQ ID NO: 1687687 - DNA, 15 bp, Homo sapiens
tgggacagggagcgg

SEQ ID NO: 1687688 - DNA, 15 bp, Homo sapiens
gggacagggagcggg

SEQ ID NO: 1687689 - DNA, 15 bp, Homo sapiens
ggacagggagcgggg

SEQ ID NO: 1687690 - DNA, 15 bp, Homo sapiens
gacagggagcggggg

SEQ ID NO: 1687691 - DNA, 15 bp, Homo sapiens
acagggagcggggga

SEQ ID NO: 1687692 - DNA, 15 bp, Homo sapiens
cagggagcgggggat

SEQ ID NO: 1687693 - DNA, 15 bp, Homo sapiens
agggagcgggggatg

SEQ ID NO: 1687694 - DNA, 15 bp, Homo sapiens
gggagcgggggatgg

SEQ ID NO: 1687695 - DNA, 15 bp, Homo sapiens
ggagcgggggatggg

SEQ ID NO: 1687696 - DNA, 15 bp, Homo sapiens
gagcgggggatgggg

SEQ ID NO: 1687697 - DNA, 15 bp, Homo sapiens
agcgggggatggggg

SEQ ID NO: 1687698 - DNA, 15 bp, Homo sapiens
gcgggggatggggga

SEQ ID NO: 1687699 - DNA, 15 bp, Homo sapiens
cgggggatgggggaa

SEQ ID NO: 1687700 - DNA, 15 bp, Homo sapiens
gggggatgggggaat

SEQ ID NO: 1687701 - DNA, 15 bp, Homo sapiens
ggggatgggggaatt

SEQ ID NO: 1687702 - DNA, 15 bp, Homo sapiens
gggatgggggaattc

SEQ ID NO: 1687703 - DNA, 15 bp, Homo sapiens
ggatgggggaattca

SEQ ID NO: 1687704 - DNA, 15 bp, Homo sapiens
gatgggggaattcag

SEQ ID NO: 1687705 - DNA, 15 bp, Homo sapiens
atgggggaattcagc

SEQ ID NO: 1687706 - DNA, 15 bp, Homo sapiens
tgggggaattcagct

SEQ ID NO: 1687707 - DNA, 15 bp, Homo sapiens
gggggaattcagctc

SEQ ID NO: 1687708 - DNA, 15 bp, Homo sapiens
ggggaattcagctca

SEQ ID NO: 1687709 - DNA, 15 bp, Homo sapiens
gggaattcagctcag

SEQ ID NO: 1687710 - DNA, 15 bp, Homo sapiens
ggaattcagctcagg

SEQ ID NO: 1687711 - DNA, 15 bp, Homo sapiens
gaattcagctcaggc

SEQ ID NO: 1687712 - DNA, 15 bp, Homo sapiens
aattcagctcaggct

SEQ ID NO: 1687713 - DNA, 15 bp, Homo sapiens
attcagctcaggctt

SEQ ID NO: 1687714 - DNA, 15 bp, Homo sapiens
ttcagctcaggcttt

SEQ ID NO: 1687715 - DNA, 15 bp, Homo sapiens
tcagctcaggctttt

SEQ ID NO: 1687716 - DNA, 15 bp, Homo sapiens
cagctcaggctttta

SEQ ID NO: 1687717 - DNA, 15 bp, Homo sapiens
agctcaggcttttat

SEQ ID NO: 1687718 - DNA, 15 bp, Homo sapiens
gctcaggcttttatg

SEQ ID NO: 1687719 - DNA, 15 bp, Homo sapiens
ctcaggcttttatgc

SEQ ID NO: 1687720 - DNA, 15 bp, Homo sapiens
tcaggcttttatgca

SEQ ID NO: 1687721 - DNA, 15 bp, Homo sapiens
caggcttttatgcaa

SEQ ID NO: 1687722 - DNA, 15 bp, Homo sapiens
aggcttttatgcaaa

SEQ ID NO: 1687723 - DNA, 15 bp, Homo sapiens
ggcttttatgcaaag

SEQ ID NO: 1687724 - DNA, 15 bp, Homo sapiens
gcttttatgcaaaga

SEQ ID NO: 1687725 - DNA, 15 bp, Homo sapiens
cttttatgcaaagac

SEQ ID NO: 1687726 - DNA, 15 bp, Homo sapiens
ttttatgcaaagacc

SEQ ID NO: 1687727 - DNA, 15 bp, Homo sapiens
tttatgcaaagaccc

SEQ ID NO: 1687728 - DNA, 15 bp, Homo sapiens
ttatgcaaagacccc

SEQ ID NO: 1687729 - DNA, 15 bp, Homo sapiens
tatgcaaagaccccc

SEQ ID NO: 1687730 - DNA, 15 bp, Homo sapiens
atgcaaagaccccct

SEQ ID NO: 1687731 - DNA, 15 bp, Homo sapiens
tgcaaagaccccctt

SEQ ID NO: 1687732 - DNA, 15 bp, Homo sapiens
gcaaagacccccttc

SEQ ID NO: 1687733 - DNA, 15 bp, Homo sapiens
caaagacccccttct

SEQ ID NO: 1687734 - DNA, 15 bp, Homo sapiens
aaagacccccttctg

SEQ ID NO: 1687735 - DNA, 15 bp, Homo sapiens
aagacccccttctgc

SEQ ID NO: 1687736 - DNA, 15 bp, Homo sapiens
agacccccttctgca

SEQ ID NO: 1687737 - DNA, 15 bp, Homo sapiens
gacccccttctgcaa

SEQ ID NO: 1687738 - DNA, 15 bp, Homo sapiens
acccccttctgcaaa

SEQ ID NO: 1687739 - DNA, 15 bp, Homo sapiens
cccccttctgcaaag

SEQ ID NO: 1687740 - DNA, 15 bp, Homo sapiens
ccccttctgcaaaga

SEQ ID NO: 1687741 - DNA, 15 bp, Homo sapiens
cccttctgcaaagaa

SEQ ID NO: 1687742 - DNA, 15 bp, Homo sapiens
ccttctgcaaagaac

SEQ ID NO: 1687743 - DNA, 15 bp, Homo sapiens
cttctgcaaagaaca

SEQ ID NO: 1687744 - DNA, 15 bp, Homo sapiens
ttctgcaaagaacaa

SEQ ID NO: 1687745 - DNA, 15 bp, Homo sapiens
tctgcaaagaacaaa

SEQ ID NO: 1687746 - DNA, 15 bp, Homo sapiens
ctgcaaagaacaaag

SEQ ID NO: 1687747 - DNA, 15 bp, Homo sapiens
tgcaaagaacaaagc

SEQ ID NO: 1687748 - DNA, 15 bp, Homo sapiens
gcaaagaacaaagct

SEQ ID NO: 1687749 - DNA, 15 bp, Homo sapiens
caaagaacaaagctt

SEQ ID NO: 1687750 - DNA, 15 bp, Homo sapiens
aaagaacaaagcttc

SEQ ID NO: 1687751 - DNA, 15 bp, Homo sapiens
aagaacaaagcttct

SEQ ID NO: 1687752 - DNA, 15 bp, Homo sapiens
agaacaaagcttctg

SEQ ID NO: 1687753 - DNA, 15 bp, Homo sapiens
gaacaaagcttctgg

SEQ ID NO: 1687754 - DNA, 15 bp, Homo sapiens
aacaaagcttctggt

SEQ ID NO: 1687755 - DNA, 15 bp, Homo sapiens
acaaagcttctggta

SEQ ID NO: 1687756 - DNA, 15 bp, Homo sapiens
caaagcttctggtac

SEQ ID NO: 1687757 - DNA, 15 bp, Homo sapiens
aaagcttctggtacc

SEQ ID NO: 1687758 - DNA, 15 bp, Homo sapiens
aagcttctggtacct

SEQ ID NO: 1687759 - DNA, 15 bp, Homo sapiens
agcttctggtacctg

SEQ ID NO: 1687760 - DNA, 15 bp, Homo sapiens
gcttctggtacctgc

SEQ ID NO: 1687761 - DNA, 15 bp, Homo sapiens
cttctggtacctgcc

SEQ ID NO: 1687762 - DNA, 15 bp, Homo sapiens
ttctggtacctgccc

SEQ ID NO: 1687763 - DNA, 15 bp, Homo sapiens
tctggtacctgccct

SEQ ID NO: 1687764 - DNA, 15 bp, Homo sapiens
ctggtacctgccctt

SEQ ID NO: 1687765 - DNA, 15 bp, Homo sapiens
tggtacctgcccttt

SEQ ID NO: 1687766 - DNA, 15 bp, Homo sapiens
ggtacctgccctttg

SEQ ID NO: 1687767 - DNA, 15 bp, Homo sapiens
gtacctgccctttgg

SEQ ID NO: 1687768 - DNA, 15 bp, Homo sapiens
tacctgccctttgga

SEQ ID NO: 1687769 - DNA, 15 bp, Homo sapiens
acctgccctttggag

SEQ ID NO: 1687770 - DNA, 15 bp, Homo sapiens
cctgccctttggaga

SEQ ID NO: 1687771 - DNA, 15 bp, Homo sapiens
ctgccctttggagag

SEQ ID NO: 1687772 - DNA, 15 bp, Homo sapiens
tgccctttggagagc

SEQ ID NO: 1687773 - DNA, 15 bp, Homo sapiens
gccctttggagagct

SEQ ID NO: 1687774 - DNA, 15 bp, Homo sapiens
ccctttggagagctg

SEQ ID NO: 1687775 - DNA, 15 bp, Homo sapiens
cctttggagagctgc

SEQ ID NO: 1687776 - DNA, 15 bp, Homo sapiens
ctttggagagctgcg

SEQ ID NO: 1687777 - DNA, 15 bp, Homo sapiens
tttggagagctgcgg

SEQ ID NO: 1687778 - DNA, 15 bp, Homo sapiens
ttggagagctgcggg

SEQ ID NO: 1687779 - DNA, 15 bp, Homo sapiens
tggagagctgcgggc

SEQ ID NO: 1687780 - DNA, 15 bp, Homo sapiens
ggagagctgcgggca

SEQ ID NO: 1687781 - DNA, 15 bp, Homo sapiens
gagagctgcgggcaa

SEQ ID NO: 1687782 - DNA, 15 bp, Homo sapiens
agagctgcgggcaag

SEQ ID NO: 1687783 - DNA, 15 bp, Homo sapiens
gagctgcgggcaagc

SEQ ID NO: 1687784 - DNA, 15 bp, Homo sapiens
agctgcgggcaagct

SEQ ID NO: 1687785 - DNA, 15 bp, Homo sapiens
gctgcgggcaagctc

SEQ ID NO: 1687786 - DNA, 15 bp, Homo sapiens
ctgcgggcaagctca

SEQ ID NO: 1687787 - DNA, 15 bp, Homo sapiens
tgcgggcaagctcag

SEQ ID NO: 1687788 - DNA, 15 bp, Homo sapiens
gcgggcaagctcagc

SEQ ID NO: 1687789 - DNA, 15 bp, Homo sapiens
cgggcaagctcagcc

SEQ ID NO: 1687790 - DNA, 15 bp, Homo sapiens
gggcaagctcagcct

SEQ ID NO: 1687791 - DNA, 15 bp, Homo sapiens
ggcaagctcagcctc

SEQ ID NO: 1687792 - DNA, 15 bp, Homo sapiens
gcaagctcagcctcg

SEQ ID NO: 1687793 - DNA, 15 bp, Homo sapiens
caagctcagcctcgg

SEQ ID NO: 1687794 - DNA, 15 bp, Homo sapiens
aagctcagcctcggt

SEQ ID NO: 1687795 - DNA, 15 bp, Homo sapiens
agctcagcctcggtg

SEQ ID NO: 1687796 - DNA, 15 bp, Homo sapiens
gctcagcctcggtga

SEQ ID NO: 1687797 - DNA, 15 bp, Homo sapiens
ctcagcctcggtgag

SEQ ID NO: 1687798 - DNA, 15 bp, Homo sapiens
tcagcctcggtgagt

SEQ ID NO: 1687799 - DNA, 15 bp, Homo sapiens
cagcctcggtgagtc

SEQ ID NO: 1687800 - DNA, 15 bp, Homo sapiens
agcctcggtgagtct

SEQ ID NO: 1687801 - DNA, 15 bp, Homo sapiens
gcctcggtgagtctt

SEQ ID NO: 1687802 - DNA, 15 bp, Homo sapiens
cctcggtgagtcttg

SEQ ID NO: 1687803 - DNA, 15 bp, Homo sapiens
ctcggtgagtcttgg

SEQ ID NO: 1687804 - DNA, 15 bp, Homo sapiens
tcggtgagtcttggt

SEQ ID NO: 1687805 - DNA, 15 bp, Homo sapiens
cggtgagtcttggtg

SEQ ID NO: 1687806 - DNA, 15 bp, Homo sapiens
ggtgagtcttggtgg

SEQ ID NO: 1687807 - DNA, 15 bp, Homo sapiens
gtgagtcttggtggc

SEQ ID NO: 1687808 - DNA, 15 bp, Homo sapiens
tgagtcttggtggcc

SEQ ID NO: 1687809 - DNA, 15 bp, Homo sapiens
gagtcttggtggcct

SEQ ID NO: 1687810 - DNA, 15 bp, Homo sapiens
agtcttggtggcctt

SEQ ID NO: 1687811 - DNA, 15 bp, Homo sapiens
gtcttggtggccttg

SEQ ID NO: 1687812 - DNA, 15 bp, Homo sapiens
tcttggtggccttga

SEQ ID NO: 1687813 - DNA, 15 bp, Homo sapiens
cttggtggccttgac

SEQ ID NO: 1687814 - DNA, 15 bp, Homo sapiens
ttggtggccttgaca

SEQ ID NO: 1687815 - DNA, 15 bp, Homo sapiens
tggtggccttgacag

SEQ ID NO: 1687816 - DNA, 15 bp, Homo sapiens
ggtggccttgacagc

SEQ ID NO: 1687817 - DNA, 15 bp, Homo sapiens
gtggccttgacagcc

SEQ ID NO: 1687818 - DNA, 15 bp, Homo sapiens
tggccttgacagccc

SEQ ID NO: 1687819 - DNA, 15 bp, Homo sapiens
ggccttgacagcccc

SEQ ID NO: 1687820 - DNA, 15 bp, Homo sapiens
gccttgacagccccc

SEQ ID NO: 1687821 - DNA, 15 bp, Homo sapiens
ccttgacagccccca

SEQ ID NO: 1687822 - DNA, 15 bp, Homo sapiens
cttgacagcccccac

SEQ ID NO: 1687823 - DNA, 15 bp, Homo sapiens
ttgacagcccccact

SEQ ID NO: 1687824 - DNA, 15 bp, Homo sapiens
tgacagcccccactt

SEQ ID NO: 1687825 - DNA, 15 bp, Homo sapiens
gacagcccccactta

SEQ ID NO: 1687826 - DNA, 15 bp, Homo sapiens
acagcccccacttaa

SEQ ID NO: 1687827 - DNA, 15 bp, Homo sapiens
cagcccccacttaac

SEQ ID NO: 1687828 - DNA, 15 bp, Homo sapiens
agcccccacttaaca

SEQ ID NO: 1687829 - DNA, 15 bp, Homo sapiens
gcccccacttaacaa

SEQ ID NO: 1687830 - DNA, 15 bp, Homo sapiens
cccccacttaacaaa

SEQ ID NO: 1687831 - DNA, 15 bp, Homo sapiens
ccccacttaacaaac

SEQ ID NO: 1687832 - DNA, 15 bp, Homo sapiens
cccacttaacaaact

SEQ ID NO: 1687833 - DNA, 15 bp, Homo sapiens
ccacttaacaaactg

SEQ ID NO: 1687834 - DNA, 15 bp, Homo sapiens
cacttaacaaactgt

SEQ ID NO: 1687835 - DNA, 15 bp, Homo sapiens
acttaacaaactgtg

SEQ ID NO: 1687836 - DNA, 15 bp, Homo sapiens
cttaacaaactgtgc

SEQ ID NO: 1687837 - DNA, 15 bp, Homo sapiens
ttaacaaactgtgct

SEQ ID NO: 1687838 - DNA, 15 bp, Homo sapiens
taacaaactgtgctg

SEQ ID NO: 1687839 - DNA, 15 bp, Homo sapiens
aacaaactgtgctga

SEQ ID NO: 1687840 - DNA, 15 bp, Homo sapiens
acaaactgtgctgat

SEQ ID NO: 1687841 - DNA, 15 bp, Homo sapiens
caaactgtgctgatt

SEQ ID NO: 1687842 - DNA, 15 bp, Homo sapiens
aaactgtgctgatta

SEQ ID NO: 1687843 - DNA, 15 bp, Homo sapiens
aactgtgctgattaa

SEQ ID NO: 1687844 - DNA, 15 bp, Homo sapiens
actgtgctgattaag

SEQ ID NO: 1687845 - DNA, 15 bp, Homo sapiens
ctgtgctgattaaga

SEQ ID NO: 1687846 - DNA, 15 bp, Homo sapiens
tgtgctgattaagag

SEQ ID NO: 1687847 - DNA, 15 bp, Homo sapiens
gtgctgattaagaga

SEQ ID NO: 1687848 - DNA, 15 bp, Homo sapiens
tgctgattaagagag

SEQ ID NO: 1687849 - DNA, 15 bp, Homo sapiens
gctgattaagagaga

SEQ ID NO: 1687850 - DNA, 15 bp, Homo sapiens
ctgattaagagagac

SEQ ID NO: 1687851 - DNA, 15 bp, Homo sapiens
tgattaagagagaca

SEQ ID NO: 1687852 - DNA, 15 bp, Homo sapiens
gattaagagagacag

SEQ ID NO: 1687853 - DNA, 15 bp, Homo sapiens
attaagagagacagg

SEQ ID NO: 1687854 - DNA, 15 bp, Homo sapiens
ttaagagagacagga

SEQ ID NO: 1687855 - DNA, 15 bp, Homo sapiens
taagagagacaggag

SEQ ID NO: 1687856 - DNA, 15 bp, Homo sapiens
aagagagacaggagg

SEQ ID NO: 1687857 - DNA, 15 bp, Homo sapiens
agagagacaggaggg

SEQ ID NO: 1687858 - DNA, 15 bp, Homo sapiens
gagagacaggagggc

SEQ ID NO: 1687859 - DNA, 15 bp, Homo sapiens
agagacaggagggca

SEQ ID NO: 1687860 - DNA, 15 bp, Homo sapiens
gagacaggagggcaa

SEQ ID NO: 1687861 - DNA, 15 bp, Homo sapiens
agacaggagggcaag

SEQ ID NO: 1687862 - DNA, 15 bp, Homo sapiens
gacaggagggcaagt

SEQ ID NO: 1687863 - DNA, 15 bp, Homo sapiens
acaggagggcaagtt

SEQ ID NO: 1687864 - DNA, 15 bp, Homo sapiens
caggagggcaagttt

SEQ ID NO: 1687865 - DNA, 15 bp, Homo sapiens
aggagggcaagtttt

SEQ ID NO: 1687866 - DNA, 15 bp, Homo sapiens
ggagggcaagttttt

SEQ ID NO: 1687867 - DNA, 15 bp, Homo sapiens
gagggcaagtttttc

SEQ ID NO: 1687868 - DNA, 15 bp, Homo sapiens
agggcaagtttttcc

SEQ ID NO: 1687869 - DNA, 15 bp, Homo sapiens
gggcaagtttttccc

SEQ ID NO: 1687870 - DNA, 15 bp, Homo sapiens
ggcaagtttttccct

SEQ ID NO: 1687871 - DNA, 15 bp, Homo sapiens
gcaagtttttccctt

SEQ ID NO: 1687872 - DNA, 15 bp, Homo sapiens
caagtttttcccttc

SEQ ID NO: 1687873 - DNA, 15 bp, Homo sapiens
aagtttttcccttct

SEQ ID NO: 1687874 - DNA, 15 bp, Homo sapiens
agtttttcccttctt

SEQ ID NO: 1687875 - DNA, 15 bp, Homo sapiens
gtttttcccttcttt

SEQ ID NO: 1687876 - DNA, 15 bp, Homo sapiens
tttttcccttctttt

SEQ ID NO: 1687877 - DNA, 15 bp, Homo sapiens
ttttcccttctttta

SEQ ID NO: 1687878 - DNA, 15 bp, Homo sapiens
tttcccttcttttaa

SEQ ID NO: 1687879 - DNA, 15 bp, Homo sapiens
ttcccttcttttaaa

SEQ ID NO: 1687880 - DNA, 15 bp, Homo sapiens
tcccttcttttaaag

SEQ ID NO: 1687881 - DNA, 15 bp, Homo sapiens
cccttcttttaaaga

SEQ ID NO: 1687882 - DNA, 15 bp, Homo sapiens
ccttcttttaaagaa

SEQ ID NO: 1687883 - DNA, 15 bp, Homo sapiens
cttcttttaaagaaa

SEQ ID NO: 1687884 - DNA, 15 bp, Homo sapiens
ttcttttaaagaaat

SEQ ID NO: 1687885 - DNA, 15 bp, Homo sapiens
tcttttaaagaaatc

SEQ ID NO: 1687886 - DNA, 15 bp, Homo sapiens
cttttaaagaaatca

SEQ ID NO: 1687887 - DNA, 15 bp, Homo sapiens
ttttaaagaaatcat

SEQ ID NO: 1687888 - DNA, 15 bp, Homo sapiens
tttaaagaaatcatc

SEQ ID NO: 1687889 - DNA, 15 bp, Homo sapiens
ttaaagaaatcatcc

SEQ ID NO: 1687890 - DNA, 15 bp, Homo sapiens
taaagaaatcatcct

SEQ ID NO: 1687891 - DNA, 15 bp, Homo sapiens
aaagaaatcatccta

SEQ ID NO: 1687892 - DNA, 15 bp, Homo sapiens
aagaaatcatcctat

SEQ ID NO: 1687893 - DNA, 15 bp, Homo sapiens
agaaatcatcctatt

SEQ ID NO: 1687894 - DNA, 15 bp, Homo sapiens
gaaatcatcctattt

SEQ ID NO: 1687895 - DNA, 15 bp, Homo sapiens
aaatcatcctatttc

SEQ ID NO: 1687896 - DNA, 15 bp, Homo sapiens
aatcatcctatttcc

SEQ ID NO: 1687897 - DNA, 15 bp, Homo sapiens
atcatcctatttcct

SEQ ID NO: 1687898 - DNA, 15 bp, Homo sapiens
tcatcctatttccta

SEQ ID NO: 1687899 - DNA, 15 bp, Homo sapiens
catcctatttcctac

SEQ ID NO: 1687900 - DNA, 15 bp, Homo sapiens
atcctatttcctacg

SEQ ID NO: 1687901 - DNA, 15 bp, Homo sapiens
tcctatttcctacga

SEQ ID NO: 1687902 - DNA, 15 bp, Homo sapiens
cctatttcctacgag

SEQ ID NO: 1687903 - DNA, 15 bp, Homo sapiens
ctatttcctacgaga

SEQ ID NO: 1687904 - DNA, 15 bp, Homo sapiens
tatttcctacgagac

SEQ ID NO: 1687905 - DNA, 15 bp, Homo sapiens
atttcctacgagaca

SEQ ID NO: 1687906 - DNA, 15 bp, Homo sapiens
tttcctacgagacat

SEQ ID NO: 1687907 - DNA, 15 bp, Homo sapiens
ttcctacgagacata

SEQ ID NO: 1687908 - DNA, 15 bp, Homo sapiens
tcctacgagacatag

SEQ ID NO: 1687909 - DNA, 15 bp, Homo sapiens
cctacgagacataga

SEQ ID NO: 1687910 - DNA, 15 bp, Homo sapiens
ctacgagacatagac

SEQ ID NO: 1687911 - DNA, 15 bp, Homo sapiens
tacgagacatagact

SEQ ID NO: 1687912 - DNA, 15 bp, Homo sapiens
acgagacatagacta

SEQ ID NO: 1687913 - DNA, 15 bp, Homo sapiens
cgagacatagactat

SEQ ID NO: 1687914 - DNA, 15 bp, Homo sapiens
gagacatagactatc

SEQ ID NO: 1687915 - DNA, 15 bp, Homo sapiens
agacatagactatct

SEQ ID NO: 1687916 - DNA, 15 bp, Homo sapiens
gacatagactatctg

SEQ ID NO: 1687917 - DNA, 15 bp, Homo sapiens
acatagactatctgc

SEQ ID NO: 1687918 - DNA, 15 bp, Homo sapiens
catagactatctgcc

SEQ ID NO: 1687919 - DNA, 15 bp, Homo sapiens
atagactatctgcct

SEQ ID NO: 1687920 - DNA, 15 bp, Homo sapiens
tagactatctgcctg

SEQ ID NO: 1687921 - DNA, 15 bp, Homo sapiens
agactatctgcctga

SEQ ID NO: 1687922 - DNA, 15 bp, Homo sapiens
gactatctgcctgaa

SEQ ID NO: 1687923 - DNA, 15 bp, Homo sapiens
actatctgcctgaag

SEQ ID NO: 1687924 - DNA, 15 bp, Homo sapiens
ctatctgcctgaagc

SEQ ID NO: 1687925 - DNA, 15 bp, Homo sapiens
tatctgcctgaagca

SEQ ID NO: 1687926 - DNA, 15 bp, Homo sapiens
atctgcctgaagcat

SEQ ID NO: 1687927 - DNA, 15 bp, Homo sapiens
tctgcctgaagcatg

SEQ ID NO: 1687928 - DNA, 15 bp, Homo sapiens
ctgcctgaagcatga

SEQ ID NO: 1687929 - DNA, 15 bp, Homo sapiens
tgcctgaagcatgat

SEQ ID NO: 1687930 - DNA, 15 bp, Homo sapiens
gcctgaagcatgatg

SEQ ID NO: 1687931 - DNA, 15 bp, Homo sapiens
cctgaagcatgatgt

SEQ ID NO: 1687932 - DNA, 15 bp, Homo sapiens
ctgaagcatgatgta

SEQ ID NO: 1687933 - DNA, 15 bp, Homo sapiens
tgaagcatgatgtac

SEQ ID NO: 1687934 - DNA, 15 bp, Homo sapiens
gaagcatgatgtact

SEQ ID NO: 1687935 - DNA, 15 bp, Homo sapiens
aagcatgatgtacta

SEQ ID NO: 1687936 - DNA, 15 bp, Homo sapiens
agcatgatgtactag

SEQ ID NO: 1687937 - DNA, 15 bp, Homo sapiens
gcatgatgtactagc

SEQ ID NO: 1687938 - DNA, 15 bp, Homo sapiens
catgatgtactagcc

SEQ ID NO: 1687939 - DNA, 15 bp, Homo sapiens
atgatgtactagccc

SEQ ID NO: 1687940 - DNA, 15 bp, Homo sapiens
tgatgtactagcccc

SEQ ID NO: 1687941 - DNA, 15 bp, Homo sapiens
gatgtactagcccca

SEQ ID NO: 1687942 - DNA, 15 bp, Homo sapiens
atgtactagccccac

SEQ ID NO: 1687943 - DNA, 15 bp, Homo sapiens
tgtactagccccact

SEQ ID NO: 1687944 - DNA, 15 bp, Homo sapiens
gtactagccccactc

SEQ ID NO: 1687945 - DNA, 15 bp, Homo sapiens
tactagccccactca

SEQ ID NO: 1687946 - DNA, 15 bp, Homo sapiens
actagccccactcac

SEQ ID NO: 1687947 - DNA, 15 bp, Homo sapiens
ctagccccactcacc

SEQ ID NO: 1687948 - DNA, 15 bp, Homo sapiens
tagccccactcaccg

SEQ ID NO: 1687949 - DNA, 15 bp, Homo sapiens
agccccactcaccgg

SEQ ID NO: 1687950 - DNA, 15 bp, Homo sapiens
gccccactcaccggc

SEQ ID NO: 1687951 - DNA, 15 bp, Homo sapiens
ccccactcaccggct

SEQ ID NO: 1687952 - DNA, 15 bp, Homo sapiens
cccactcaccggctc

SEQ ID NO: 1687953 - DNA, 15 bp, Homo sapiens
ccactcaccggctcc

SEQ ID NO: 1687954 - DNA, 15 bp, Homo sapiens
cactcaccggctccc

SEQ ID NO: 1687955 - DNA, 15 bp, Homo sapiens
actcaccggctccct

SEQ ID NO: 1687956 - DNA, 15 bp, Homo sapiens
ctcaccggctccctg

SEQ ID NO: 1687957 - DNA, 15 bp, Homo sapiens
tcaccggctccctga

SEQ ID NO: 1687958 - DNA, 15 bp, Homo sapiens
caccggctccctgat

SEQ ID NO: 1687959 - DNA, 15 bp, Homo sapiens
accggctccctgatg

SEQ ID NO: 1687960 - DNA, 15 bp, Homo sapiens
ccggctccctgatgc

SEQ ID NO: 1687961 - DNA, 15 bp, Homo sapiens
cggctccctgatgcc

SEQ ID NO: 1687962 - DNA, 15 bp, Homo sapiens
ggctccctgatgccc

SEQ ID NO: 1687963 - DNA, 15 bp, Homo sapiens
gctccctgatgcccc

SEQ ID NO: 1687964 - DNA, 15 bp, Homo sapiens
ctccctgatgcccct

SEQ ID NO: 1687965 - DNA, 15 bp, Homo sapiens
tccctgatgccccta

SEQ ID NO: 1687966 - DNA, 15 bp, Homo sapiens
ccctgatgcccctat

SEQ ID NO: 1687967 - DNA, 15 bp, Homo sapiens
cctgatgcccctatg

SEQ ID NO: 1687968 - DNA, 15 bp, Homo sapiens
ctgatgcccctatgc

SEQ ID NO: 1687969 - DNA, 15 bp, Homo sapiens
tgatgcccctatgct

SEQ ID NO: 1687970 - DNA, 15 bp, Homo sapiens
gatgcccctatgctt

SEQ ID NO: 1687971 - DNA, 15 bp, Homo sapiens
atgcccctatgctta

SEQ ID NO: 1687972 - DNA, 15 bp, Homo sapiens
tgcccctatgcttaa

SEQ ID NO: 1687973 - DNA, 15 bp, Homo sapiens
gcccctatgcttaat

SEQ ID NO: 1687974 - DNA, 15 bp, Homo sapiens
cccctatgcttaatc

SEQ ID NO: 1687975 - DNA, 15 bp, Homo sapiens
ccctatgcttaatct

SEQ ID NO: 1687976 - DNA, 15 bp, Homo sapiens
cctatgcttaatctt

SEQ ID NO: 1687977 - DNA, 15 bp, Homo sapiens
ctatgcttaatcttc

SEQ ID NO: 1687978 - DNA, 15 bp, Homo sapiens
tatgcttaatcttct

SEQ ID NO: 1687979 - DNA, 15 bp, Homo sapiens
atgcttaatcttctc

SEQ ID NO: 1687980 - DNA, 15 bp, Homo sapiens
tgcttaatcttctcc

SEQ ID NO: 1687981 - DNA, 15 bp, Homo sapiens
gcttaatcttctccg

SEQ ID NO: 1687982 - DNA, 15 bp, Homo sapiens
cttaatcttctccgg

SEQ ID NO: 1687983 - DNA, 15 bp, Homo sapiens
ttaatcttctccgga

SEQ ID NO: 1687984 - DNA, 15 bp, Homo sapiens
taatcttctccggaa

SEQ ID NO: 1687985 - DNA, 15 bp, Homo sapiens
aatcttctccggaat

SEQ ID NO: 1687986 - DNA, 15 bp, Homo sapiens
atcttctccggaatg

SEQ ID NO: 1687987 - DNA, 15 bp, Homo sapiens
tcttctccggaatgg

SEQ ID NO: 1687988 - DNA, 15 bp, Homo sapiens
cttctccggaatggt

SEQ ID NO: 1687989 - DNA, 15 bp, Homo sapiens
ttctccggaatggta

SEQ ID NO: 1687990 - DNA, 15 bp, Homo sapiens
tctccggaatggtag

SEQ ID NO: 1687991 - DNA, 15 bp, Homo sapiens
ctccggaatggtagt

SEQ ID NO: 1687992 - DNA, 15 bp, Homo sapiens
tccggaatggtagtc

SEQ ID NO: 1687993 - DNA, 15 bp, Homo sapiens
ccggaatggtagtct

SEQ ID NO: 1687994 - DNA, 15 bp, Homo sapiens
cggaatggtagtctg

SEQ ID NO: 1687995 - DNA, 15 bp, Homo sapiens
ggaatggtagtctga

SEQ ID NO: 1687996 - DNA, 15 bp, Homo sapiens
gaatggtagtctgag

SEQ ID NO: 1687997 - DNA, 15 bp, Homo sapiens
aatggtagtctgaga

SEQ ID NO: 1687998 - DNA, 15 bp, Homo sapiens
atggtagtctgagaa

SEQ ID NO: 1687999 - DNA, 15 bp, Homo sapiens
tggtagtctgagaag

SEQ ID NO: 1688000 - DNA, 15 bp, Homo sapiens
ggtagtctgagaaga

SEQ ID NO: 1688001 - DNA, 15 bp, Homo sapiens
gtagtctgagaagaa

SEQ ID NO: 1688002 - DNA, 15 bp, Homo sapiens
tagtctgagaagaaa

SEQ ID NO: 1688003 - DNA, 15 bp, Homo sapiens
agtctgagaagaaaa

SEQ ID NO: 1688004 - DNA, 15 bp, Homo sapiens
gtctgagaagaaaaa

SEQ ID NO: 1688005 - DNA, 15 bp, Homo sapiens
tctgagaagaaaaaa

SEQ ID NO: 1688006 - DNA, 15 bp, Homo sapiens
ctgagaagaaaaaag

SEQ ID NO: 1688007 - DNA, 15 bp, Homo sapiens
tgagaagaaaaaaga

SEQ ID NO: 1688008 - DNA, 15 bp, Homo sapiens
gagaagaaaaaagat

SEQ ID NO: 1688009 - DNA, 15 bp, Homo sapiens
agaagaaaaaagatt

SEQ ID NO: 1688010 - DNA, 15 bp, Homo sapiens
gaagaaaaaagatta

SEQ ID NO: 1688011 - DNA, 15 bp, Homo sapiens
aagaaaaaagattac

SEQ ID NO: 1688012 - DNA, 15 bp, Homo sapiens
agaaaaaagattacg

SEQ ID NO: 1688013 - DNA, 15 bp, Homo sapiens
gaaaaaagattacgc

SEQ ID NO: 1688014 - DNA, 15 bp, Homo sapiens
aaaaaagattacgcc

SEQ ID NO: 1688015 - DNA, 15 bp, Homo sapiens
aaaaagattacgccc

SEQ ID NO: 1688016 - DNA, 15 bp, Homo sapiens
aaaagattacgccca

SEQ ID NO: 1688017 - DNA, 15 bp, Homo sapiens
aaagattacgcccaa

SEQ ID NO: 1688018 - DNA, 15 bp, Homo sapiens
aagattacgcccaat

SEQ ID NO: 1688019 - DNA, 15 bp, Homo sapiens
agattacgcccaatt

SEQ ID NO: 1688020 - DNA, 15 bp, Homo sapiens
gattacgcccaattt

SEQ ID NO: 1688021 - DNA, 15 bp, Homo sapiens
attacgcccaatttc

SEQ ID NO: 1688022 - DNA, 15 bp, Homo sapiens
ttacgcccaatttca

SEQ ID NO: 1688023 - DNA, 15 bp, Homo sapiens
tacgcccaatttcat

SEQ ID NO: 1688024 - DNA, 15 bp, Homo sapiens
acgcccaatttcatt

SEQ ID NO: 1688025 - DNA, 15 bp, Homo sapiens
cgcccaatttcattt

SEQ ID NO: 1688026 - DNA, 15 bp, Homo sapiens
gcccaatttcatttc

SEQ ID NO: 1688027 - DNA, 15 bp, Homo sapiens
cccaatttcatttcc

SEQ ID NO: 1688028 - DNA, 15 bp, Homo sapiens
ccaatttcatttcct

SEQ ID NO: 1688029 - DNA, 15 bp, Homo sapiens
caatttcatttcctt

SEQ ID NO: 1688030 - DNA, 15 bp, Homo sapiens
aatttcatttccttg

SEQ ID NO: 1688031 - DNA, 15 bp, Homo sapiens
atttcatttccttgt

SEQ ID NO: 1688032 - DNA, 15 bp, Homo sapiens
tttcatttccttgtt

SEQ ID NO: 1688033 - DNA, 15 bp, Homo sapiens
ttcatttccttgttt

SEQ ID NO: 1688034 - DNA, 15 bp, Homo sapiens
tcatttccttgtttc

SEQ ID NO: 1688035 - DNA, 15 bp, Homo sapiens
catttccttgtttca

SEQ ID NO: 1688036 - DNA, 15 bp, Homo sapiens
atttccttgtttcac

SEQ ID NO: 1688037 - DNA, 15 bp, Homo sapiens
tttccttgtttcaca

SEQ ID NO: 1688038 - DNA, 15 bp, Homo sapiens
ttccttgtttcacat

SEQ ID NO: 1688039 - DNA, 15 bp, Homo sapiens
tccttgtttcacatc

SEQ ID NO: 1688040 - DNA, 15 bp, Homo sapiens
ccttgtttcacatca

SEQ ID NO: 1688041 - DNA, 15 bp, Homo sapiens
cttgtttcacatcaa

SEQ ID NO: 1688042 - DNA, 15 bp, Homo sapiens
ttgtttcacatcaag

SEQ ID NO: 1688043 - DNA, 15 bp, Homo sapiens
tgtttcacatcaagc

SEQ ID NO: 1688044 - DNA, 15 bp, Homo sapiens
gtttcacatcaagca

SEQ ID NO: 1688045 - DNA, 15 bp, Homo sapiens
tttcacatcaagcaa

SEQ ID NO: 1688046 - DNA, 15 bp, Homo sapiens
ttcacatcaagcaat

SEQ ID NO: 1688047 - DNA, 15 bp, Homo sapiens
tcacatcaagcaata

SEQ ID NO: 1688048 - DNA, 15 bp, Homo sapiens
cacatcaagcaatac

SEQ ID NO: 1688049 - DNA, 15 bp, Homo sapiens
acatcaagcaatact

SEQ ID NO: 1688050 - DNA, 15 bp, Homo sapiens
catcaagcaatactt

SEQ ID NO: 1688051 - DNA, 15 bp, Homo sapiens
atcaagcaatacttt

SEQ ID NO: 1688052 - DNA, 15 bp, Homo sapiens
tcaagcaatactttt

SEQ ID NO: 1688053 - DNA, 15 bp, Homo sapiens
caagcaatacttttc

SEQ ID NO: 1688054 - DNA, 15 bp, Homo sapiens
aagcaatacttttcg

SEQ ID NO: 1688055 - DNA, 15 bp, Homo sapiens
agcaatacttttcga

SEQ ID NO: 1688056 - DNA, 15 bp, Homo sapiens
gcaatacttttcgag

SEQ ID NO: 1688057 - DNA, 15 bp, Homo sapiens
caatacttttcgagt

SEQ ID NO: 1688058 - DNA, 15 bp, Homo sapiens
aatacttttcgagtc

SEQ ID NO: 1688059 - DNA, 15 bp, Homo sapiens
atacttttcgagtct

SEQ ID NO: 1688060 - DNA, 15 bp, Homo sapiens
tacttttcgagtctt

SEQ ID NO: 1688061 - DNA, 15 bp, Homo sapiens
acttttcgagtcttt

SEQ ID NO: 1688062 - DNA, 15 bp, Homo sapiens
cttttcgagtctttg

SEQ ID NO: 1688063 - DNA, 15 bp, Homo sapiens
ttttcgagtctttgc

SEQ ID NO: 1688064 - DNA, 15 bp, Homo sapiens
tttcgagtctttgca

SEQ ID NO: 1688065 - DNA, 15 bp, Homo sapiens
ttcgagtctttgcat

SEQ ID NO: 1688066 - DNA, 15 bp, Homo sapiens
tcgagtctttgcatt

SEQ ID NO: 1688067 - DNA, 15 bp, Homo sapiens
cgagtctttgcattg

SEQ ID NO: 1688068 - DNA, 15 bp, Homo sapiens
gagtctttgcattgt

SEQ ID NO: 1688069 - DNA, 15 bp, Homo sapiens
agtctttgcattgtg

SEQ ID NO: 1688070 - DNA, 15 bp, Homo sapiens
gtctttgcattgtga

SEQ ID NO: 1688071 - DNA, 15 bp, Homo sapiens
tctttgcattgtgaa

SEQ ID NO: 1688072 - DNA, 15 bp, Homo sapiens
ctttgcattgtgaac

SEQ ID NO: 1688073 - DNA, 15 bp, Homo sapiens
tttgcattgtgaaca

SEQ ID NO: 1688074 - DNA, 15 bp, Homo sapiens
ttgcattgtgaacaa

SEQ ID NO: 1688075 - DNA, 15 bp, Homo sapiens
tgcattgtgaacaaa

SEQ ID NO: 1688076 - DNA, 15 bp, Homo sapiens
gcattgtgaacaaaa

SEQ ID NO: 1688077 - DNA, 15 bp, Homo sapiens
cattgtgaacaaaag

SEQ ID NO: 1688078 - DNA, 15 bp, Homo sapiens
attgtgaacaaaagt

SEQ ID NO: 1688079 - DNA, 15 bp, Homo sapiens
ttgtgaacaaaagtc

SEQ ID NO: 1688080 - DNA, 15 bp, Homo sapiens
tgtgaacaaaagtca

SEQ ID NO: 1688081 - DNA, 15 bp, Homo sapiens
gtgaacaaaagtcag

SEQ ID NO: 1688082 - DNA, 15 bp, Homo sapiens
tgaacaaaagtcagc

SEQ ID NO: 1688083 - DNA, 15 bp, Homo sapiens
gaacaaaagtcagct

SEQ ID NO: 1688084 - DNA, 15 bp, Homo sapiens
aacaaaagtcagctt

SEQ ID NO: 1688085 - DNA, 15 bp, Homo sapiens
acaaaagtcagcttg

SEQ ID NO: 1688086 - DNA, 15 bp, Homo sapiens
caaaagtcagcttgt

SEQ ID NO: 1688087 - DNA, 15 bp, Homo sapiens
aaaagtcagcttgtg

SEQ ID NO: 1688088 - DNA, 15 bp, Homo sapiens
aaagtcagcttgtgt

SEQ ID NO: 1688089 - DNA, 15 bp, Homo sapiens
aagtcagcttgtgtg

SEQ ID NO: 1688090 - DNA, 15 bp, Homo sapiens
agtcagcttgtgtgg

SEQ ID NO: 1688091 - DNA, 15 bp, Homo sapiens
gtcagcttgtgtggg

SEQ ID NO: 1688092 - DNA, 15 bp, Homo sapiens
tcagcttgtgtggga

SEQ ID NO: 1688093 - DNA, 15 bp, Homo sapiens
cagcttgtgtgggag

SEQ ID NO: 1688094 - DNA, 15 bp, Homo sapiens
agcttgtgtgggagc

SEQ ID NO: 1688095 - DNA, 15 bp, Homo sapiens
gcttgtgtgggagca

SEQ ID NO: 1688096 - DNA, 15 bp, Homo sapiens
cttgtgtgggagcaa

SEQ ID NO: 1688097 - DNA, 15 bp, Homo sapiens
ttgtgtgggagcaaa

SEQ ID NO: 1688098 - DNA, 15 bp, Homo sapiens
tgtgtgggagcaaag

SEQ ID NO: 1688099 - DNA, 15 bp, Homo sapiens
gtgtgggagcaaagc

SEQ ID NO: 1688100 - DNA, 15 bp, Homo sapiens
tgtgggagcaaagcc

SEQ ID NO: 1688101 - DNA, 15 bp, Homo sapiens
gtgggagcaaagcca

SEQ ID NO: 1688102 - DNA, 15 bp, Homo sapiens
tgggagcaaagccag

SEQ ID NO: 1688103 - DNA, 15 bp, Homo sapiens
gggagcaaagccagc

SEQ ID NO: 1688104 - DNA, 15 bp, Homo sapiens
ggagcaaagccagct

SEQ ID NO: 1688105 - DNA, 15 bp, Homo sapiens
gagcaaagccagctg

SEQ ID NO: 1688106 - DNA, 15 bp, Homo sapiens
agcaaagccagctgc

SEQ ID NO: 1688107 - DNA, 15 bp, Homo sapiens
gcaaagccagctgct

SEQ ID NO: 1688108 - DNA, 15 bp, Homo sapiens
caaagccagctgctc

SEQ ID NO: 1688109 - DNA, 15 bp, Homo sapiens
aaagccagctgctct

SEQ ID NO: 1688110 - DNA, 15 bp, Homo sapiens
aagccagctgctctg

SEQ ID NO: 1688111 - DNA, 15 bp, Homo sapiens
agccagctgctctgg

SEQ ID NO: 1688112 - DNA, 15 bp, Homo sapiens
gccagctgctctggg

SEQ ID NO: 1688113 - DNA, 15 bp, Homo sapiens
ccagctgctctgggt

SEQ ID NO: 1688114 - DNA, 15 bp, Homo sapiens
cagctgctctgggtg

SEQ ID NO: 1688115 - DNA, 15 bp, Homo sapiens
agctgctctgggtgc

SEQ ID NO: 1688116 - DNA, 15 bp, Homo sapiens
gctgctctgggtgca

SEQ ID NO: 1688117 - DNA, 15 bp, Homo sapiens
ctgctctgggtgcag

SEQ ID NO: 1688118 - DNA, 15 bp, Homo sapiens
tgctctgggtgcaga

SEQ ID NO: 1688119 - DNA, 15 bp, Homo sapiens
gctctgggtgcagac

SEQ ID NO: 1688120 - DNA, 15 bp, Homo sapiens
ctctgggtgcagacc

SEQ ID NO: 1688121 - DNA, 15 bp, Homo sapiens
tctgggtgcagaccc

SEQ ID NO: 1688122 - DNA, 15 bp, Homo sapiens
ctgggtgcagaccca

SEQ ID NO: 1688123 - DNA, 15 bp, Homo sapiens
tgggtgcagacccag

SEQ ID NO: 1688124 - DNA, 15 bp, Homo sapiens
gggtgcagacccagg

SEQ ID NO: 1688125 - DNA, 15 bp, Homo sapiens
ggtgcagacccagga

SEQ ID NO: 1688126 - DNA, 15 bp, Homo sapiens
gtgcagacccaggag

SEQ ID NO: 1688127 - DNA, 15 bp, Homo sapiens
tgcagacccaggagc

SEQ ID NO: 1688128 - DNA, 15 bp, Homo sapiens
gcagacccaggagca

SEQ ID NO: 1688129 - DNA, 15 bp, Homo sapiens
cagacccaggagcag

SEQ ID NO: 1688130 - DNA, 15 bp, Homo sapiens
agacccaggagcaga

SEQ ID NO: 1688131 - DNA, 15 bp, Homo sapiens
gacccaggagcagag

SEQ ID NO: 1688132 - DNA, 15 bp, Homo sapiens
acccaggagcagagt

SEQ ID NO: 1688133 - DNA, 15 bp, Homo sapiens
cccaggagcagagtg

SEQ ID NO: 1688134 - DNA, 15 bp, Homo sapiens
ccaggagcagagtgc

SEQ ID NO: 1688135 - DNA, 15 bp, Homo sapiens
caggagcagagtgca

SEQ ID NO: 1688136 - DNA, 15 bp, Homo sapiens
aggagcagagtgcag

SEQ ID NO: 1688137 - DNA, 15 bp, Homo sapiens
ggagcagagtgcaga

SEQ ID NO: 1688138 - DNA, 15 bp, Homo sapiens
gagcagagtgcagag

SEQ ID NO: 1688139 - DNA, 15 bp, Homo sapiens
agcagagtgcagagg

SEQ ID NO: 1688140 - DNA, 15 bp, Homo sapiens
gcagagtgcagagga

SEQ ID NO: 1688141 - DNA, 15 bp, Homo sapiens
cagagtgcagaggag

SEQ ID NO: 1688142 - DNA, 15 bp, Homo sapiens
agagtgcagaggaga

SEQ ID NO: 1688143 - DNA, 15 bp, Homo sapiens
gagtgcagaggagaa

SEQ ID NO: 1688144 - DNA, 15 bp, Homo sapiens
agtgcagaggagaat

SEQ ID NO: 1688145 - DNA, 15 bp, Homo sapiens
gtgcagaggagaatg

SEQ ID NO: 1688146 - DNA, 15 bp, Homo sapiens
tgcagaggagaatga

SEQ ID NO: 1688147 - DNA, 15 bp, Homo sapiens
gcagaggagaatgag

SEQ ID NO: 1688148 - DNA, 15 bp, Homo sapiens
cagaggagaatgagt

SEQ ID NO: 1688149 - DNA, 15 bp, Homo sapiens
agaggagaatgagtc

SEQ ID NO: 1688150 - DNA, 15 bp, Homo sapiens
gaggagaatgagtca

SEQ ID NO: 1688151 - DNA, 15 bp, Homo sapiens
aggagaatgagtcaa

SEQ ID NO: 1688152 - DNA, 15 bp, Homo sapiens
ggagaatgagtcaaa

SEQ ID NO: 1688153 - DNA, 15 bp, Homo sapiens
gagaatgagtcaaag

SEQ ID NO: 1688154 - DNA, 15 bp, Homo sapiens
agaatgagtcaaaga

SEQ ID NO: 1688155 - DNA, 15 bp, Homo sapiens
gaatgagtcaaagag

SEQ ID NO: 1688156 - DNA, 15 bp, Homo sapiens
aatgagtcaaagagt

SEQ ID NO: 1688157 - DNA, 15 bp, Homo sapiens
atgagtcaaagagtt

SEQ ID NO: 1688158 - DNA, 15 bp, Homo sapiens
tgagtcaaagagttt

SEQ ID NO: 1688159 - DNA, 15 bp, Homo sapiens
gagtcaaagagtttt

SEQ ID NO: 1688160 - DNA, 15 bp, Homo sapiens
agtcaaagagttttg

SEQ ID NO: 1688161 - DNA, 15 bp, Homo sapiens
gtcaaagagttttgt

SEQ ID NO: 1688162 - DNA, 15 bp, Homo sapiens
tcaaagagttttgtc

SEQ ID NO: 1688163 - DNA, 15 bp, Homo sapiens
caaagagttttgtct

SEQ ID NO: 1688164 - DNA, 15 bp, Homo sapiens
aaagagttttgtctt

SEQ ID NO: 1688165 - DNA, 15 bp, Homo sapiens
aagagttttgtcttc

SEQ ID NO: 1688166 - DNA, 15 bp, Homo sapiens
agagttttgtcttca

SEQ ID NO: 1688167 - DNA, 15 bp, Homo sapiens
gagttttgtcttcaa

SEQ ID NO: 1688168 - DNA, 15 bp, Homo sapiens
agttttgtcttcaaa

SEQ ID NO: 1688169 - DNA, 15 bp, Homo sapiens
gttttgtcttcaaaa

SEQ ID NO: 1688170 - DNA, 15 bp, Homo sapiens
ttttgtcttcaaaaa

SEQ ID NO: 1688171 - DNA, 15 bp, Homo sapiens
tttgtcttcaaaaat

SEQ ID NO: 1688172 - DNA, 15 bp, Homo sapiens
ttgtcttcaaaaatt

SEQ ID NO: 1688173 - DNA, 15 bp, Homo sapiens
tgtcttcaaaaatta

SEQ ID NO: 1688174 - DNA, 15 bp, Homo sapiens
gtcttcaaaaattac

SEQ ID NO: 1688175 - DNA, 15 bp, Homo sapiens
tcttcaaaaattaca

SEQ ID NO: 1688176 - DNA, 15 bp, Homo sapiens
cttcaaaaattacat

SEQ ID NO: 1688177 - DNA, 15 bp, Homo sapiens
ttcaaaaattacata

SEQ ID NO: 1688178 - DNA, 15 bp, Homo sapiens
tcaaaaattacataa

SEQ ID NO: 1688179 - DNA, 15 bp, Homo sapiens
caaaaattacataat

SEQ ID NO: 1688180 - DNA, 15 bp, Homo sapiens
aaaaattacataatc

SEQ ID NO: 1688181 - DNA, 15 bp, Homo sapiens
aaaattacataatcg

SEQ ID NO: 1688182 - DNA, 15 bp, Homo sapiens
aaattacataatcgg

SEQ ID NO: 1688183 - DNA, 15 bp, Homo sapiens
aattacataatcggg

SEQ ID NO: 1688184 - DNA, 15 bp, Homo sapiens
attacataatcggga

SEQ ID NO: 1688185 - DNA, 15 bp, Homo sapiens
ttacataatcgggat

SEQ ID NO: 1688186 - DNA, 15 bp, Homo sapiens
tacataatcgggatt

SEQ ID NO: 1688187 - DNA, 15 bp, Homo sapiens
acataatcgggattt

SEQ ID NO: 1688188 - DNA, 15 bp, Homo sapiens
cataatcgggatttg

SEQ ID NO: 1688189 - DNA, 15 bp, Homo sapiens
ataatcgggatttgc

SEQ ID NO: 1688190 - DNA, 15 bp, Homo sapiens
taatcgggatttgct

SEQ ID NO: 1688191 - DNA, 15 bp, Homo sapiens
aatcgggatttgcta

SEQ ID NO: 1688192 - DNA, 15 bp, Homo sapiens
atcgggatttgctaa

SEQ ID NO: 1688193 - DNA, 15 bp, Homo sapiens
tcgggatttgctaag

SEQ ID NO: 1688194 - DNA, 15 bp, Homo sapiens
cgggatttgctaaga

SEQ ID NO: 1688195 - DNA, 15 bp, Homo sapiens
gggatttgctaagag

SEQ ID NO: 1688196 - DNA, 15 bp, Homo sapiens
ggatttgctaagagt

SEQ ID NO: 1688197 - DNA, 15 bp, Homo sapiens
gatttgctaagagtt

SEQ ID NO: 1688198 - DNA, 15 bp, Homo sapiens
atttgctaagagttt

SEQ ID NO: 1688199 - DNA, 15 bp, Homo sapiens
tttgctaagagttta

SEQ ID NO: 1688200 - DNA, 15 bp, Homo sapiens
ttgctaagagtttac

SEQ ID NO: 1688201 - DNA, 15 bp, Homo sapiens
tgctaagagtttact

SEQ ID NO: 1688202 - DNA, 15 bp, Homo sapiens
gctaagagtttactt

SEQ ID NO: 1688203 - DNA, 15 bp, Homo sapiens
ctaagagtttacttt

SEQ ID NO: 1688204 - DNA, 15 bp, Homo sapiens
taagagtttactttt

SEQ ID NO: 1688205 - DNA, 15 bp, Homo sapiens
aagagtttacttttc

SEQ ID NO: 1688206 - DNA, 15 bp, Homo sapiens
agagtttacttttcg

SEQ ID NO: 1688207 - DNA, 15 bp, Homo sapiens
gagtttacttttcgg

SEQ ID NO: 1688208 - DNA, 15 bp, Homo sapiens
agtttacttttcggt

SEQ ID NO: 1688209 - DNA, 15 bp, Homo sapiens
gtttacttttcggta

SEQ ID NO: 1688210 - DNA, 15 bp, Homo sapiens
tttacttttcggtat

SEQ ID NO: 1688211 - DNA, 15 bp, Homo sapiens
ttacttttcggtatg

SEQ ID NO: 1688212 - DNA, 15 bp, Homo sapiens
tacttttcggtatgg

SEQ ID NO: 1688213 - DNA, 15 bp, Homo sapiens
acttttcggtatgga

SEQ ID NO: 1688214 - DNA, 15 bp, Homo sapiens
cttttcggtatggaa

SEQ ID NO: 1688215 - DNA, 15 bp, Homo sapiens
ttttcggtatggaag

SEQ ID NO: 1688216 - DNA, 15 bp, Homo sapiens
tttcggtatggaaga

SEQ ID NO: 1688217 - DNA, 15 bp, Homo sapiens
ttcggtatggaagac

SEQ ID NO: 1688218 - DNA, 15 bp, Homo sapiens
tcggtatggaagact

SEQ ID NO: 1688219 - DNA, 15 bp, Homo sapiens
cggtatggaagactg

SEQ ID NO: 1688220 - DNA, 15 bp, Homo sapiens
ggtatggaagactgg

SEQ ID NO: 1688221 - DNA, 15 bp, Homo sapiens
gtatggaagactgga

SEQ ID NO: 1688222 - DNA, 15 bp, Homo sapiens
tatggaagactggaa

SEQ ID NO: 1688223 - DNA, 15 bp, Homo sapiens
atggaagactggaaa

SEQ ID NO: 1688224 - DNA, 15 bp, Homo sapiens
tggaagactggaaaa

SEQ ID NO: 1688225 - DNA, 15 bp, Homo sapiens
ggaagactggaaaag

SEQ ID NO: 1688226 - DNA, 15 bp, Homo sapiens
gaagactggaaaaga

SEQ ID NO: 1688227 - DNA, 15 bp, Homo sapiens
aagactggaaaagag

SEQ ID NO: 1688228 - DNA, 15 bp, Homo sapiens
agactggaaaagaga

SEQ ID NO: 1688229 - DNA, 15 bp, Homo sapiens
gactggaaaagagaa

SEQ ID NO: 1688230 - DNA, 15 bp, Homo sapiens
actggaaaagagaaa

SEQ ID NO: 1688231 - DNA, 15 bp, Homo sapiens
ctggaaaagagaaag

SEQ ID NO: 1688232 - DNA, 15 bp, Homo sapiens
tggaaaagagaaaga

SEQ ID NO: 1688233 - DNA, 15 bp, Homo sapiens
ggaaaagagaaagaa

SEQ ID NO: 1688234 - DNA, 15 bp, Homo sapiens
gaaaagagaaagaaa

SEQ ID NO: 1688235 - DNA, 15 bp, Homo sapiens
aaaagagaaagaaat

SEQ ID NO: 1688236 - DNA, 15 bp, Homo sapiens
aaagagaaagaaatc

SEQ ID NO: 1688237 - DNA, 15 bp, Homo sapiens
aagagaaagaaatct

SEQ ID NO: 1688238 - DNA, 15 bp, Homo sapiens
agagaaagaaatctt

SEQ ID NO: 1688239 - DNA, 15 bp, Homo sapiens
gagaaagaaatctta

SEQ ID NO: 1688240 - DNA, 15 bp, Homo sapiens
agaaagaaatcttag

SEQ ID NO: 1688241 - DNA, 15 bp, Homo sapiens
gaaagaaatcttagg

SEQ ID NO: 1688242 - DNA, 15 bp, Homo sapiens
aaagaaatcttaggt

SEQ ID NO: 1688243 - DNA, 15 bp, Homo sapiens
aagaaatcttaggtt

SEQ ID NO: 1688244 - DNA, 15 bp, Homo sapiens
agaaatcttaggttt

SEQ ID NO: 1688245 - DNA, 15 bp, Homo sapiens
gaaatcttaggtttc

SEQ ID NO: 1688246 - DNA, 15 bp, Homo sapiens
aaatcttaggtttct

SEQ ID NO: 1688247 - DNA, 15 bp, Homo sapiens
aatcttaggtttctt

SEQ ID NO: 1688248 - DNA, 15 bp, Homo sapiens
atcttaggtttcttg

SEQ ID NO: 1688249 - DNA, 15 bp, Homo sapiens
tcttaggtttcttga

SEQ ID NO: 1688250 - DNA, 15 bp, Homo sapiens
cttaggtttcttgaa

SEQ ID NO: 1688251 - DNA, 15 bp, Homo sapiens
ttaggtttcttgaat

SEQ ID NO: 1688252 - DNA, 15 bp, Homo sapiens
taggtttcttgaatg

SEQ ID NO: 1688253 - DNA, 15 bp, Homo sapiens
aggtttcttgaatgt

SEQ ID NO: 1688254 - DNA, 15 bp, Homo sapiens
ggtttcttgaatgtt

SEQ ID NO: 1688255 - DNA, 15 bp, Homo sapiens
gtttcttgaatgttg

SEQ ID NO: 1688256 - DNA, 15 bp, Homo sapiens
tttcttgaatgttgg

SEQ ID NO: 1688257 - DNA, 15 bp, Homo sapiens
ttcttgaatgttggg

SEQ ID NO: 1688258 - DNA, 15 bp, Homo sapiens
tcttgaatgttgggt

SEQ ID NO: 1688259 - DNA, 15 bp, Homo sapiens
cttgaatgttgggtt

SEQ ID NO: 1688260 - DNA, 15 bp, Homo sapiens
ttgaatgttgggttt

SEQ ID NO: 1688261 - DNA, 15 bp, Homo sapiens
tgaatgttgggtttg

SEQ ID NO: 1688262 - DNA, 15 bp, Homo sapiens
gaatgttgggtttgg

SEQ ID NO: 1688263 - DNA, 15 bp, Homo sapiens
aatgttgggtttggg

SEQ ID NO: 1688264 - DNA, 15 bp, Homo sapiens
atgttgggtttggga

SEQ ID NO: 1688265 - DNA, 15 bp, Homo sapiens
tgttgggtttgggaa

SEQ ID NO: 1688266 - DNA, 15 bp, Homo sapiens
gttgggtttgggaat

SEQ ID NO: 1688267 - DNA, 15 bp, Homo sapiens
ttgggtttgggaata

SEQ ID NO: 1688268 - DNA, 15 bp, Homo sapiens
tgggtttgggaatag

SEQ ID NO: 1688269 - DNA, 15 bp, Homo sapiens
gggtttgggaatagg

SEQ ID NO: 1688270 - DNA, 15 bp, Homo sapiens
ggtttgggaatagga

SEQ ID NO: 1688271 - DNA, 15 bp, Homo sapiens
gtttgggaataggaa

SEQ ID NO: 1688272 - DNA, 15 bp, Homo sapiens
tttgggaataggaag

SEQ ID NO: 1688273 - DNA, 15 bp, Homo sapiens
ttgggaataggaagg

SEQ ID NO: 1688274 - DNA, 15 bp, Homo sapiens
tgggaataggaagga

SEQ ID NO: 1688275 - DNA, 15 bp, Homo sapiens
gggaataggaaggaa

SEQ ID NO: 1688276 - DNA, 15 bp, Homo sapiens
ggaataggaaggaaa

SEQ ID NO: 1688277 - DNA, 15 bp, Homo sapiens
gaataggaaggaaaa

SEQ ID NO: 1688278 - DNA, 15 bp, Homo sapiens
aataggaaggaaaat

SEQ ID NO: 1688279 - DNA, 15 bp, Homo sapiens
ataggaaggaaaatc

SEQ ID NO: 1688280 - DNA, 15 bp, Homo sapiens
taggaaggaaaatcg

SEQ ID NO: 1688281 - DNA, 15 bp, Homo sapiens
aggaaggaaaatcga

SEQ ID NO: 1688282 - DNA, 15 bp, Homo sapiens
ggaaggaaaatcgaa

SEQ ID NO: 1688283 - DNA, 15 bp, Homo sapiens
gaaggaaaatcgaaa

SEQ ID NO: 1688284 - DNA, 15 bp, Homo sapiens
aaggaaaatcgaaaa

SEQ ID NO: 1688285 - DNA, 15 bp, Homo sapiens
aggaaaatcgaaaac

SEQ ID NO: 1688286 - DNA, 15 bp, Homo sapiens
ggaaaatcgaaaact

SEQ ID NO: 1688287 - DNA, 15 bp, Homo sapiens
gaaaatcgaaaactg

SEQ ID NO: 1688288 - DNA, 15 bp, Homo sapiens
aaaatcgaaaactgt

SEQ ID NO: 1688289 - DNA, 15 bp, Homo sapiens
aaatcgaaaactgta

SEQ ID NO: 1688290 - DNA, 15 bp, Homo sapiens
aatcgaaaactgtag

SEQ ID NO: 1688291 - DNA, 15 bp, Homo sapiens
atcgaaaactgtaga

SEQ ID NO: 1688292 - DNA, 15 bp, Homo sapiens
tcgaaaactgtagac

SEQ ID NO: 1688293 - DNA, 15 bp, Homo sapiens
cgaaaactgtagact

SEQ ID NO: 1688294 - DNA, 15 bp, Homo sapiens
gaaaactgtagactt

SEQ ID NO: 1688295 - DNA, 15 bp, Homo sapiens
aaaactgtagacttt

SEQ ID NO: 1688296 - DNA, 15 bp, Homo sapiens
aaactgtagactttg

SEQ ID NO: 1688297 - DNA, 15 bp, Homo sapiens
aactgtagactttgt

SEQ ID NO: 1688298 - DNA, 15 bp, Homo sapiens
actgtagactttgtc

SEQ ID NO: 1688299 - DNA, 15 bp, Homo sapiens
ctgtagactttgtcc

SEQ ID NO: 1688300 - DNA, 15 bp, Homo sapiens
tgtagactttgtcca

SEQ ID NO: 1688301 - DNA, 15 bp, Homo sapiens
gtagactttgtccat

SEQ ID NO: 1688302 - DNA, 15 bp, Homo sapiens
tagactttgtccata

SEQ ID NO: 1688303 - DNA, 15 bp, Homo sapiens
agactttgtccataa

SEQ ID NO: 1688304 - DNA, 15 bp, Homo sapiens
gactttgtccataaa

SEQ ID NO: 1688305 - DNA, 15 bp, Homo sapiens
actttgtccataaat

SEQ ID NO: 1688306 - DNA, 15 bp, Homo sapiens
ctttgtccataaatg

SEQ ID NO: 1688307 - DNA, 15 bp, Homo sapiens
tttgtccataaatgt

SEQ ID NO: 1688308 - DNA, 15 bp, Homo sapiens
ttgtccataaatgtt

SEQ ID NO: 1688309 - DNA, 15 bp, Homo sapiens
tgtccataaatgtta

SEQ ID NO: 1688310 - DNA, 15 bp, Homo sapiens
gtccataaatgttag

SEQ ID NO: 1688311 - DNA, 15 bp, Homo sapiens
tccataaatgttagt

SEQ ID NO: 1688312 - DNA, 15 bp, Homo sapiens
ccataaatgttagtg

SEQ ID NO: 1688313 - DNA, 15 bp, Homo sapiens
cataaatgttagtgc

SEQ ID NO: 1688314 - DNA, 15 bp, Homo sapiens
ataaatgttagtgct

SEQ ID NO: 1688315 - DNA, 15 bp, Homo sapiens
taaatgttagtgctg

SEQ ID NO: 1688316 - DNA, 15 bp, Homo sapiens
aaatgttagtgctgg

SEQ ID NO: 1688317 - DNA, 15 bp, Homo sapiens
aatgttagtgctgga

SEQ ID NO: 1688318 - DNA, 15 bp, Homo sapiens
atgttagtgctggaa

SEQ ID NO: 1688319 - DNA, 15 bp, Homo sapiens
tgttagtgctggaac

SEQ ID NO: 1688320 - DNA, 15 bp, Homo sapiens
gttagtgctggaacc

SEQ ID NO: 1688321 - DNA, 15 bp, Homo sapiens
ttagtgctggaaccc

SEQ ID NO: 1688322 - DNA, 15 bp, Homo sapiens
tagtgctggaacccc

SEQ ID NO: 1688323 - DNA, 15 bp, Homo sapiens
agtgctggaacccca

SEQ ID NO: 1688324 - DNA, 15 bp, Homo sapiens
gtgctggaaccccac

SEQ ID NO: 1688325 - DNA, 15 bp, Homo sapiens
tgctggaaccccact

SEQ ID NO: 1688326 - DNA, 15 bp, Homo sapiens
gctggaaccccactc

SEQ ID NO: 1688327 - DNA, 15 bp, Homo sapiens
ctggaaccccactct

SEQ ID NO: 1688328 - DNA, 15 bp, Homo sapiens
tggaaccccactcta

SEQ ID NO: 1688329 - DNA, 15 bp, Homo sapiens
ggaaccccactctaa

SEQ ID NO: 1688330 - DNA, 15 bp, Homo sapiens
gaaccccactctaaa

SEQ ID NO: 1688331 - DNA, 15 bp, Homo sapiens
aaccccactctaaaa

SEQ ID NO: 1688332 - DNA, 15 bp, Homo sapiens
accccactctaaaaa

SEQ ID NO: 1688333 - DNA, 15 bp, Homo sapiens
ccccactctaaaaac

SEQ ID NO: 1688334 - DNA, 15 bp, Homo sapiens
cccactctaaaaact

SEQ ID NO: 1688335 - DNA, 15 bp, Homo sapiens
ccactctaaaaactt

SEQ ID NO: 1688336 - DNA, 15 bp, Homo sapiens
cactctaaaaacttt

SEQ ID NO: 1688337 - DNA, 15 bp, Homo sapiens
actctaaaaactttg

SEQ ID NO: 1688338 - DNA, 15 bp, Homo sapiens
ctctaaaaactttgt

SEQ ID NO: 1688339 - DNA, 15 bp, Homo sapiens
tctaaaaactttgtt

SEQ ID NO: 1688340 - DNA, 15 bp, Homo sapiens
ctaaaaactttgttc

SEQ ID NO: 1688341 - DNA, 15 bp, Homo sapiens
taaaaactttgttcc

SEQ ID NO: 1688342 - DNA, 15 bp, Homo sapiens
aaaaactttgttcct

SEQ ID NO: 1688343 - DNA, 15 bp, Homo sapiens
aaaactttgttcctt

SEQ ID NO: 1688344 - DNA, 15 bp, Homo sapiens
aaactttgttccttt

SEQ ID NO: 1688345 - DNA, 15 bp, Homo sapiens
aactttgttcctttg

SEQ ID NO: 1688346 - DNA, 15 bp, Homo sapiens
actttgttcctttgg

SEQ ID NO: 1688347 - DNA, 15 bp, Homo sapiens
ctttgttcctttgga

SEQ ID NO: 1688348 - DNA, 15 bp, Homo sapiens
tttgttcctttggaa

SEQ ID NO: 1688349 - DNA, 15 bp, Homo sapiens
ttgttcctttggaaa

SEQ ID NO: 1688350 - DNA, 15 bp, Homo sapiens
tgttcctttggaaaa

SEQ ID NO: 1688351 - DNA, 15 bp, Homo sapiens
gttcctttggaaaac

SEQ ID NO: 1688352 - DNA, 15 bp, Homo sapiens
ttcctttggaaaaca

SEQ ID NO: 1688353 - DNA, 15 bp, Homo sapiens
tcctttggaaaacac

SEQ ID NO: 1688354 - DNA, 15 bp, Homo sapiens
cctttggaaaacacc

SEQ ID NO: 1688355 - DNA, 15 bp, Homo sapiens
ctttggaaaacacct

SEQ ID NO: 1688356 - DNA, 15 bp, Homo sapiens
tttggaaaacacctc

SEQ ID NO: 1688357 - DNA, 15 bp, Homo sapiens
ttggaaaacacctcc

SEQ ID NO: 1688358 - DNA, 15 bp, Homo sapiens
tggaaaacacctccc

SEQ ID NO: 1688359 - DNA, 15 bp, Homo sapiens
ggaaaacacctccct

SEQ ID NO: 1688360 - DNA, 15 bp, Homo sapiens
gaaaacacctccctt

SEQ ID NO: 1688361 - DNA, 15 bp, Homo sapiens
aaaacacctcccttc

SEQ ID NO: 1688362 - DNA, 15 bp, Homo sapiens
aaacacctcccttcc

SEQ ID NO: 1688363 - DNA, 15 bp, Homo sapiens
aacacctcccttccc

SEQ ID NO: 1688364 - DNA, 15 bp, Homo sapiens
acacctcccttcccc

SEQ ID NO: 1688365 - DNA, 15 bp, Homo sapiens
cacctcccttccccc

SEQ ID NO: 1688366 - DNA, 15 bp, Homo sapiens
acctcccttccccca

SEQ ID NO: 1688367 - DNA, 15 bp, Homo sapiens
cctcccttcccccag

SEQ ID NO: 1688368 - DNA, 15 bp, Homo sapiens
ctcccttcccccaga

SEQ ID NO: 1688369 - DNA, 15 bp, Homo sapiens
tcccttcccccagaa

SEQ ID NO: 1688370 - DNA, 15 bp, Homo sapiens
cccttcccccagaaa

SEQ ID NO: 1688371 - DNA, 15 bp, Homo sapiens
ccttcccccagaaac

SEQ ID NO: 1688372 - DNA, 15 bp, Homo sapiens
cttcccccagaaaca

SEQ ID NO: 1688373 - DNA, 15 bp, Homo sapiens
ttcccccagaaacac

SEQ ID NO: 1688374 - DNA, 15 bp, Homo sapiens
tcccccagaaacaca

SEQ ID NO: 1688375 - DNA, 15 bp, Homo sapiens
cccccagaaacacac

SEQ ID NO: 1688376 - DNA, 15 bp, Homo sapiens
ccccagaaacacaca

SEQ ID NO: 1688377 - DNA, 15 bp, Homo sapiens
cccagaaacacacac

SEQ ID NO: 1688378 - DNA, 15 bp, Homo sapiens
ccagaaacacacaca

SEQ ID NO: 1688379 - DNA, 15 bp, Homo sapiens
cagaaacacacacac

SEQ ID NO: 1688380 - DNA, 15 bp, Homo sapiens
agaaacacacacacc

SEQ ID NO: 1688381 - DNA, 15 bp, Homo sapiens
gaaacacacacaccc

SEQ ID NO: 1688382 - DNA, 15 bp, Homo sapiens
aaacacacacaccca

SEQ ID NO: 1688383 - DNA, 15 bp, Homo sapiens
aacacacacacccac

SEQ ID NO: 1688384 - DNA, 15 bp, Homo sapiens
acacacacccacacg

SEQ ID NO: 1688385 - DNA, 15 bp, Homo sapiens
cacacacccacacga

SEQ ID NO: 1688386 - DNA, 15 bp, Homo sapiens
acacacccacacgag

SEQ ID NO: 1688387 - DNA, 15 bp, Homo sapiens
cacacccacacgaga

SEQ ID NO: 1688388 - DNA, 15 bp, Homo sapiens
acacccacacgagat

SEQ ID NO: 1688389 - DNA, 15 bp, Homo sapiens
cacccacacgagatg

SEQ ID NO: 1688390 - DNA, 15 bp, Homo sapiens
acccacacgagatgg

SEQ ID NO: 1688391 - DNA, 15 bp, Homo sapiens
cccacacgagatggg

SEQ ID NO: 1688392 - DNA, 15 bp, Homo sapiens
ccacacgagatgggc

SEQ ID NO: 1688393 - DNA, 15 bp, Homo sapiens
cacacgagatgggca

SEQ ID NO: 1688394 - DNA, 15 bp, Homo sapiens
acacgagatgggcac

SEQ ID NO: 1688395 - DNA, 15 bp, Homo sapiens
cacgagatgggcacg

SEQ ID NO: 1688396 - DNA, 15 bp, Homo sapiens
acgagatgggcacgg

SEQ ID NO: 1688397 - DNA, 15 bp, Homo sapiens
cgagatgggcacgga

SEQ ID NO: 1688398 - DNA, 15 bp, Homo sapiens
gagatgggcacggag

SEQ ID NO: 1688399 - DNA, 15 bp, Homo sapiens
agatgggcacggagt

SEQ ID NO: 1688400 - DNA, 15 bp, Homo sapiens
gatgggcacggagta

SEQ ID NO: 1688401 - DNA, 15 bp, Homo sapiens
atgggcacggagtag

SEQ ID NO: 1688402 - DNA, 15 bp, Homo sapiens
tgggcacggagtagt

SEQ ID NO: 1688403 - DNA, 15 bp, Homo sapiens
gggcacggagtagtc

SEQ ID NO: 1688404 - DNA, 15 bp, Homo sapiens
ggcacggagtagtct

SEQ ID NO: 1688405 - DNA, 15 bp, Homo sapiens
gcacggagtagtctt

SEQ ID NO: 1688406 - DNA, 15 bp, Homo sapiens
cacggagtagtcttg

SEQ ID NO: 1688407 - DNA, 15 bp, Homo sapiens
acggagtagtcttga

SEQ ID NO: 1688408 - DNA, 15 bp, Homo sapiens
cggagtagtcttgaa

SEQ ID NO: 1688409 - DNA, 15 bp, Homo sapiens
ggagtagtcttgaaa

SEQ ID NO: 1688410 - DNA, 15 bp, Homo sapiens
gagtagtcttgaaag

SEQ ID NO: 1688411 - DNA, 15 bp, Homo sapiens
agtagtcttgaaaga

SEQ ID NO: 1688412 - DNA, 15 bp, Homo sapiens
gtagtcttgaaagac

SEQ ID NO: 1688413 - DNA, 15 bp, Homo sapiens
tagtcttgaaagaca

SEQ ID NO: 1688414 - DNA, 15 bp, Homo sapiens
agtcttgaaagacat

SEQ ID NO: 1688415 - DNA, 15 bp, Homo sapiens
gtcttgaaagacatg

SEQ ID NO: 1688416 - DNA, 15 bp, Homo sapiens
tcttgaaagacatga

SEQ ID NO: 1688417 - DNA, 15 bp, Homo sapiens
cttgaaagacatgac

SEQ ID NO: 1688418 - DNA, 15 bp, Homo sapiens
ttgaaagacatgaca

SEQ ID NO: 1688419 - DNA, 15 bp, Homo sapiens
tgaaagacatgacaa

SEQ ID NO: 1688420 - DNA, 15 bp, Homo sapiens
gaaagacatgacaaa

SEQ ID NO: 1688421 - DNA, 15 bp, Homo sapiens
aaagacatgacaaat

SEQ ID NO: 1688422 - DNA, 15 bp, Homo sapiens
aagacatgacaaatc

SEQ ID NO: 1688423 - DNA, 15 bp, Homo sapiens
agacatgacaaatca

SEQ ID NO: 1688424 - DNA, 15 bp, Homo sapiens
gacatgacaaatcac

SEQ ID NO: 1688425 - DNA, 15 bp, Homo sapiens
acatgacaaatcacc

SEQ ID NO: 1688426 - DNA, 15 bp, Homo sapiens
catgacaaatcacca

SEQ ID NO: 1688427 - DNA, 15 bp, Homo sapiens
atgacaaatcaccag

SEQ ID NO: 1688428 - DNA, 15 bp, Homo sapiens
tgacaaatcaccaga

SEQ ID NO: 1688429 - DNA, 15 bp, Homo sapiens
gacaaatcaccagac

SEQ ID NO: 1688430 - DNA, 15 bp, Homo sapiens
acaaatcaccagacc

SEQ ID NO: 1688431 - DNA, 15 bp, Homo sapiens
caaatcaccagacct

SEQ ID NO: 1688432 - DNA, 15 bp, Homo sapiens
aaatcaccagacctg

SEQ ID NO: 1688433 - DNA, 15 bp, Homo sapiens
aatcaccagacctgg

SEQ ID NO: 1688434 - DNA, 15 bp, Homo sapiens
atcaccagacctggg

SEQ ID NO: 1688435 - DNA, 15 bp, Homo sapiens
tcaccagacctggga

SEQ ID NO: 1688436 - DNA, 15 bp, Homo sapiens
caccagacctgggaa

SEQ ID NO: 1688437 - DNA, 15 bp, Homo sapiens
accagacctgggaag

SEQ ID NO: 1688438 - DNA, 15 bp, Homo sapiens
ccagacctgggaaga

SEQ ID NO: 1688439 - DNA, 15 bp, Homo sapiens
cagacctgggaagaa

SEQ ID NO: 1688440 - DNA, 15 bp, Homo sapiens
agacctgggaagaag

SEQ ID NO: 1688441 - DNA, 15 bp, Homo sapiens
gacctgggaagaagc

SEQ ID NO: 1688442 - DNA, 15 bp, Homo sapiens
acctgggaagaagct

SEQ ID NO: 1688443 - DNA, 15 bp, Homo sapiens
cctgggaagaagcta

SEQ ID NO: 1688444 - DNA, 15 bp, Homo sapiens
ctgggaagaagctaa

SEQ ID NO: 1688445 - DNA, 15 bp, Homo sapiens
tgggaagaagctaaa

SEQ ID NO: 1688446 - DNA, 15 bp, Homo sapiens
gggaagaagctaaag

SEQ ID NO: 1688447 - DNA, 15 bp, Homo sapiens
ggaagaagctaaaga

SEQ ID NO: 1688448 - DNA, 15 bp, Homo sapiens
gaagaagctaaagag

SEQ ID NO: 1688449 - DNA, 15 bp, Homo sapiens
gaagctaaagagcca

SEQ ID NO: 1688450 - DNA, 15 bp, Homo sapiens
aagctaaagagccag

SEQ ID NO: 1688451 - DNA, 15 bp, Homo sapiens
agctaaagagccaga

SEQ ID NO: 1688452 - DNA, 15 bp, Homo sapiens
gctaaagagccagag

SEQ ID NO: 1688453 - DNA, 15 bp, Homo sapiens
ctaaagagccagagg

SEQ ID NO: 1688454 - DNA, 15 bp, Homo sapiens
taaagagccagaggg

SEQ ID NO: 1688455 - DNA, 15 bp, Homo sapiens
aaagagccagaggga

SEQ ID NO: 1688456 - DNA, 15 bp, Homo sapiens
aagagccagagggaa

SEQ ID NO: 1688457 - DNA, 15 bp, Homo sapiens
agagccagagggaaa

SEQ ID NO: 1688458 - DNA, 15 bp, Homo sapiens
gagccagagggaaaa

SEQ ID NO: 1688459 - DNA, 15 bp, Homo sapiens
agccagagggaaaaa

SEQ ID NO: 1688460 - DNA, 15 bp, Homo sapiens
gccagagggaaaaag

SEQ ID NO: 1688461 - DNA, 15 bp, Homo sapiens
ccagagggaaaaagc

SEQ ID NO: 1688462 - DNA, 15 bp, Homo sapiens
cagagggaaaaagcc

SEQ ID NO: 1688463 - DNA, 15 bp, Homo sapiens
agagggaaaaagcca

SEQ ID NO: 1688464 - DNA, 15 bp, Homo sapiens
gagggaaaaagccag

SEQ ID NO: 1688465 - DNA, 15 bp, Homo sapiens
agggaaaaagccaga

SEQ ID NO: 1688466 - DNA, 15 bp, Homo sapiens
gggaaaaagccagaa

SEQ ID NO: 1688467 - DNA, 15 bp, Homo sapiens
ggaaaaagccagaag

SEQ ID NO: 1688468 - DNA, 15 bp, Homo sapiens
gaaaaagccagaagt

SEQ ID NO: 1688469 - DNA, 15 bp, Homo sapiens
aaaaagccagaagtc

SEQ ID NO: 1688470 - DNA, 15 bp, Homo sapiens
aaaagccagaagtcg

SEQ ID NO: 1688471 - DNA, 15 bp, Homo sapiens
aaagccagaagtcga

SEQ ID NO: 1688472 - DNA, 15 bp, Homo sapiens
aagccagaagtcgac

SEQ ID NO: 1688473 - DNA, 15 bp, Homo sapiens
agccagaagtcgact

SEQ ID NO: 1688474 - DNA, 15 bp, Homo sapiens
gccagaagtcgacta

SEQ ID NO: 1688475 - DNA, 15 bp, Homo sapiens
ccagaagtcgactac

SEQ ID NO: 1688476 - DNA, 15 bp, Homo sapiens
cagaagtcgactacc

SEQ ID NO: 1688477 - DNA, 15 bp, Homo sapiens
agaagtcgactacct

SEQ ID NO: 1688478 - DNA, 15 bp, Homo sapiens
gaagtcgactacctg

SEQ ID NO: 1688479 - DNA, 15 bp, Homo sapiens
aagtcgactacctgg

SEQ ID NO: 1688480 - DNA, 15 bp, Homo sapiens
agtcgactacctggg

SEQ ID NO: 1688481 - DNA, 15 bp, Homo sapiens
gtcgactacctggga

SEQ ID NO: 1688482 - DNA, 15 bp, Homo sapiens
tcgactacctgggag

SEQ ID NO: 1688483 - DNA, 15 bp, Homo sapiens
cgactacctgggagg

SEQ ID NO: 1688484 - DNA, 15 bp, Homo sapiens
gactacctgggagga

SEQ ID NO: 1688485 - DNA, 15 bp, Homo sapiens
actacctgggaggag

SEQ ID NO: 1688486 - DNA, 15 bp, Homo sapiens
ctacctgggaggagg

SEQ ID NO: 1688487 - DNA, 15 bp, Homo sapiens
tacctgggaggaggg

SEQ ID NO: 1688488 - DNA, 15 bp, Homo sapiens
acctgggaggaggga

SEQ ID NO: 1688489 - DNA, 15 bp, Homo sapiens
cctgggaggagggat

SEQ ID NO: 1688490 - DNA, 15 bp, Homo sapiens
ctgggaggagggata

SEQ ID NO: 1688491 - DNA, 15 bp, Homo sapiens
tgggaggagggatag

SEQ ID NO: 1688492 - DNA, 15 bp, Homo sapiens
gggaggagggataga

SEQ ID NO: 1688493 - DNA, 15 bp, Homo sapiens
ggaggagggatagac

SEQ ID NO: 1688494 - DNA, 15 bp, Homo sapiens
gaggagggatagaca

SEQ ID NO: 1688495 - DNA, 15 bp, Homo sapiens
aggagggatagacaa

SEQ ID NO: 1688496 - DNA, 15 bp, Homo sapiens
ggagggatagacaag

SEQ ID NO: 1688497 - DNA, 15 bp, Homo sapiens
gagggatagacaaga

SEQ ID NO: 1688498 - DNA, 15 bp, Homo sapiens
agggatagacaagaa

SEQ ID NO: 1688499 - DNA, 15 bp, Homo sapiens
gggatagacaagaaa

SEQ ID NO: 1688500 - DNA, 15 bp, Homo sapiens
ggatagacaagaaac

SEQ ID NO: 1688501 - DNA, 15 bp, Homo sapiens
gatagacaagaaacc

SEQ ID NO: 1688502 - DNA, 15 bp, Homo sapiens
atagacaagaaacca

SEQ ID NO: 1688503 - DNA, 15 bp, Homo sapiens
tagacaagaaaccaa

SEQ ID NO: 1688504 - DNA, 15 bp, Homo sapiens
agacaagaaaccaaa

SEQ ID NO: 1688505 - DNA, 15 bp, Homo sapiens
gacaagaaaccaaac

SEQ ID NO: 1688506 - DNA, 15 bp, Homo sapiens
acaagaaaccaaact

SEQ ID NO: 1688507 - DNA, 15 bp, Homo sapiens
caagaaaccaaacta

SEQ ID NO: 1688508 - DNA, 15 bp, Homo sapiens
aagaaaccaaactaa

SEQ ID NO: 1688509 - DNA, 15 bp, Homo sapiens
agaaaccaaactaaa

SEQ ID NO: 1688510 - DNA, 15 bp, Homo sapiens
gaaaccaaactaaag

SEQ ID NO: 1688511 - DNA, 15 bp, Homo sapiens
aaaccaaactaaagg

SEQ ID NO: 1688512 - DNA, 15 bp, Homo sapiens
aaccaaactaaagga

SEQ ID NO: 1688513 - DNA, 15 bp, Homo sapiens
accaaactaaaggaa

SEQ ID NO: 1688514 - DNA, 15 bp, Homo sapiens
ccaaactaaaggaaa

SEQ ID NO: 1688515 - DNA, 15 bp, Homo sapiens
caaactaaaggaaac

SEQ ID NO: 1688516 - DNA, 15 bp, Homo sapiens
aaactaaaggaaact

SEQ ID NO: 1688517 - DNA, 15 bp, Homo sapiens
aactaaaggaaacta

SEQ ID NO: 1688518 - DNA, 15 bp, Homo sapiens
actaaaggaaactaa

SEQ ID NO: 1688519 - DNA, 15 bp, Homo sapiens
ctaaaggaaactaag

SEQ ID NO: 1688520 - DNA, 15 bp, Homo sapiens
taaaggaaactaagg

SEQ ID NO: 1688521 - DNA, 15 bp, Homo sapiens
aaaggaaactaaggt

SEQ ID NO: 1688522 - DNA, 15 bp, Homo sapiens
aaggaaactaaggta

SEQ ID NO: 1688523 - DNA, 15 bp, Homo sapiens
aggaaactaaggtag

SEQ ID NO: 1688524 - DNA, 15 bp, Homo sapiens
ggaaactaaggtagg

SEQ ID NO: 1688525 - DNA, 15 bp, Homo sapiens
gaaactaaggtaggt

SEQ ID NO: 1688526 - DNA, 15 bp, Homo sapiens
aaactaaggtaggtg

SEQ ID NO: 1688527 - DNA, 15 bp, Homo sapiens
aactaaggtaggtgc

SEQ ID NO: 1688528 - DNA, 15 bp, Homo sapiens
actaaggtaggtgct

SEQ ID NO: 1688529 - DNA, 15 bp, Homo sapiens
ctaaggtaggtgctg

SEQ ID NO: 1688530 - DNA, 15 bp, Homo sapiens
taaggtaggtgctga

SEQ ID NO: 1688531 - DNA, 15 bp, Homo sapiens
aaggtaggtgctgaa

SEQ ID NO: 1688532 - DNA, 15 bp, Homo sapiens
aggtaggtgctgaaa

SEQ ID NO: 1688533 - DNA, 15 bp, Homo sapiens
ggtaggtgctgaaaa

SEQ ID NO: 1688534 - DNA, 15 bp, Homo sapiens
gtaggtgctgaaaac

SEQ ID NO: 1688535 - DNA, 15 bp, Homo sapiens
taggtgctgaaaaca

SEQ ID NO: 1688536 - DNA, 15 bp, Homo sapiens
aggtgctgaaaacaa

SEQ ID NO: 1688537 - DNA, 15 bp, Homo sapiens
ggtgctgaaaacaag

SEQ ID NO: 1688538 - DNA, 15 bp, Homo sapiens
gtgctgaaaacaagt

SEQ ID NO: 1688539 - DNA, 15 bp, Homo sapiens
tgctgaaaacaagta

SEQ ID NO: 1688540 - DNA, 15 bp, Homo sapiens
gctgaaaacaagtac

SEQ ID NO: 1688541 - DNA, 15 bp, Homo sapiens
ctgaaaacaagtacc

SEQ ID NO: 1688542 - DNA, 15 bp, Homo sapiens
tgaaaacaagtacca

SEQ ID NO: 1688543 - DNA, 15 bp, Homo sapiens
gaaaacaagtaccat

SEQ ID NO: 1688544 - DNA, 15 bp, Homo sapiens
aaaacaagtaccatt

SEQ ID NO: 1688545 - DNA, 15 bp, Homo sapiens
aaacaagtaccattt

SEQ ID NO: 1688546 - DNA, 15 bp, Homo sapiens
aacaagtaccatttt

SEQ ID NO: 1688547 - DNA, 15 bp, Homo sapiens
acaagtaccattttc

SEQ ID NO: 1688548 - DNA, 15 bp, Homo sapiens
caagtaccattttca

SEQ ID NO: 1688549 - DNA, 15 bp, Homo sapiens
aagtaccattttcaa

SEQ ID NO: 1688550 - DNA, 15 bp, Homo sapiens
agtaccattttcaac

SEQ ID NO: 1688551 - DNA, 15 bp, Homo sapiens
gtaccattttcaaca

SEQ ID NO: 1688552 - DNA, 15 bp, Homo sapiens
taccattttcaacat

SEQ ID NO: 1688553 - DNA, 15 bp, Homo sapiens
accattttcaacatt

SEQ ID NO: 1688554 - DNA, 15 bp, Homo sapiens
ccattttcaacatta

SEQ ID NO: 1688555 - DNA, 15 bp, Homo sapiens
cattttcaacattaa

SEQ ID NO: 1688556 - DNA, 15 bp, Homo sapiens
tttcaacattaactg

SEQ ID NO: 1688557 - DNA, 15 bp, Homo sapiens
ttcaacattaactga

SEQ ID NO: 1688558 - DNA, 15 bp, Homo sapiens
tcaacattaactgat

SEQ ID NO: 1688559 - DNA, 15 bp, Homo sapiens
caacattaactgatg

SEQ ID NO: 1688560 - DNA, 15 bp, Homo sapiens
aacattaactgatgc

SEQ ID NO: 1688561 - DNA, 15 bp, Homo sapiens
acattaactgatgcc

SEQ ID NO: 1688562 - DNA, 15 bp, Homo sapiens
cattaactgatgcct

SEQ ID NO: 1688563 - DNA, 15 bp, Homo sapiens
attaactgatgcctt

SEQ ID NO: 1688564 - DNA, 15 bp, Homo sapiens
ttaactgatgccttg

SEQ ID NO: 1688565 - DNA, 15 bp, Homo sapiens
taactgatgccttgg

SEQ ID NO: 1688566 - DNA, 15 bp, Homo sapiens
aactgatgccttggc

SEQ ID NO: 1688567 - DNA, 15 bp, Homo sapiens
actgatgccttggct

SEQ ID NO: 1688568 - DNA, 15 bp, Homo sapiens
ctgatgccttggctt

SEQ ID NO: 1688569 - DNA, 15 bp, Homo sapiens
tgatgccttggcttc

SEQ ID NO: 1688570 - DNA, 15 bp, Homo sapiens
gatgccttggcttca

SEQ ID NO: 1688571 - DNA, 15 bp, Homo sapiens
atgccttggcttcat

SEQ ID NO: 1688572 - DNA, 15 bp, Homo sapiens
tgccttggcttcatg

SEQ ID NO: 1688573 - DNA, 15 bp, Homo sapiens
gccttggcttcatgc

SEQ ID NO: 1688574 - DNA, 15 bp, Homo sapiens
ccttggcttcatgct

SEQ ID NO: 1688575 - DNA, 15 bp, Homo sapiens
cttggcttcatgcta

SEQ ID NO: 1688576 - DNA, 15 bp, Homo sapiens
ttggcttcatgctat

SEQ ID NO: 1688577 - DNA, 15 bp, Homo sapiens
tggcttcatgctata

SEQ ID NO: 1688578 - DNA, 15 bp, Homo sapiens
ggcttcatgctataa

SEQ ID NO: 1688579 - DNA, 15 bp, Homo sapiens
gcttcatgctataat

SEQ ID NO: 1688580 - DNA, 15 bp, Homo sapiens
cttcatgctataatg

SEQ ID NO: 1688581 - DNA, 15 bp, Homo sapiens
ttcatgctataatgc

SEQ ID NO: 1688582 - DNA, 15 bp, Homo sapiens
tcatgctataatgcc

SEQ ID NO: 1688583 - DNA, 15 bp, Homo sapiens
catgctataatgcca

SEQ ID NO: 1688584 - DNA, 15 bp, Homo sapiens
atgctataatgccat

SEQ ID NO: 1688585 - DNA, 15 bp, Homo sapiens
tgctataatgccatg

SEQ ID NO: 1688586 - DNA, 15 bp, Homo sapiens
gctataatgccatgt

SEQ ID NO: 1688587 - DNA, 15 bp, Homo sapiens
ctataatgccatgtt

SEQ ID NO: 1688588 - DNA, 15 bp, Homo sapiens
tataatgccatgttg

SEQ ID NO: 1688589 - DNA, 15 bp, Homo sapiens
ataatgccatgttgt

SEQ ID NO: 1688590 - DNA, 15 bp, Homo sapiens
taatgccatgttgtg

SEQ ID NO: 1688591 - DNA, 15 bp, Homo sapiens
aatgccatgttgtgt

SEQ ID NO: 1688592 - DNA, 15 bp, Homo sapiens
atgccatgttgtgtt

SEQ ID NO: 1688593 - DNA, 15 bp, Homo sapiens
tgccatgttgtgttt

SEQ ID NO: 1688594 - DNA, 15 bp, Homo sapiens
gccatgttgtgtttc

SEQ ID NO: 1688595 - DNA, 15 bp, Homo sapiens
ccatgttgtgtttca

SEQ ID NO: 1688596 - DNA, 15 bp, Homo sapiens
catgttgtgtttcac

SEQ ID NO: 1688597 - DNA, 15 bp, Homo sapiens
atgttgtgtttcact

SEQ ID NO: 1688598 - DNA, 15 bp, Homo sapiens
tgttgtgtttcacta

SEQ ID NO: 1688599 - DNA, 15 bp, Homo sapiens
gttgtgtttcactat

SEQ ID NO: 1688600 - DNA, 15 bp, Homo sapiens
ttgtgtttcactata

SEQ ID NO: 1688601 - DNA, 15 bp, Homo sapiens
tgtgtttcactataa

SEQ ID NO: 1688602 - DNA, 15 bp, Homo sapiens
gtgtttcactataac

SEQ ID NO: 1688603 - DNA, 15 bp, Homo sapiens
tgtttcactataacc

SEQ ID NO: 1688604 - DNA, 15 bp, Homo sapiens
gtttcactataacct

SEQ ID NO: 1688605 - DNA, 15 bp, Homo sapiens
tttcactataacctc

SEQ ID NO: 1688606 - DNA, 15 bp, Homo sapiens
ttcactataacctca

SEQ ID NO: 1688607 - DNA, 15 bp, Homo sapiens
tcactataacctcag

SEQ ID NO: 1688608 - DNA, 15 bp, Homo sapiens
cactataacctcaga

SEQ ID NO: 1688609 - DNA, 15 bp, Homo sapiens
actataacctcagag

SEQ ID NO: 1688610 - DNA, 15 bp, Homo sapiens
ctataacctcagagt

SEQ ID NO: 1688611 - DNA, 15 bp, Homo sapiens
tataacctcagagtg

SEQ ID NO: 1688612 - DNA, 15 bp, Homo sapiens
ataacctcagagtga

SEQ ID NO: 1688613 - DNA, 15 bp, Homo sapiens
taacctcagagtgaa

SEQ ID NO: 1688614 - DNA, 15 bp, Homo sapiens
aacctcagagtgaat

SEQ ID NO: 1688615 - DNA, 15 bp, Homo sapiens
acctcagagtgaatg

SEQ ID NO: 1688616 - DNA, 15 bp, Homo sapiens
cctcagagtgaatga

SEQ ID NO: 1688617 - DNA, 15 bp, Homo sapiens
ctcagagtgaatgaa

SEQ ID NO: 1688618 - DNA, 15 bp, Homo sapiens
tcagagtgaatgaaa

SEQ ID NO: 1688619 - DNA, 15 bp, Homo sapiens
cagagtgaatgaaag

SEQ ID NO: 1688620 - DNA, 15 bp, Homo sapiens
agagtgaatgaaaga

SEQ ID NO: 1688621 - DNA, 15 bp, Homo sapiens
gagtgaatgaaagag

SEQ ID NO: 1688622 - DNA, 15 bp, Homo sapiens
agtgaatgaaagagg

SEQ ID NO: 1688623 - DNA, 15 bp, Homo sapiens
gtgaatgaaagagga

SEQ ID NO: 1688624 - DNA, 15 bp, Homo sapiens
tgaatgaaagaggaa

SEQ ID NO: 1688625 - DNA, 15 bp, Homo sapiens
gaatgaaagaggaaa

SEQ ID NO: 1688626 - DNA, 15 bp, Homo sapiens
aatgaaagaggaaaa

SEQ ID NO: 1688627 - DNA, 15 bp, Homo sapiens
atgaaagaggaaaat

SEQ ID NO: 1688628 - DNA, 15 bp, Homo sapiens
tgaaagaggaaaatg

SEQ ID NO: 1688629 - DNA, 15 bp, Homo sapiens
gaaagaggaaaatgg

SEQ ID NO: 1688630 - DNA, 15 bp, Homo sapiens
aaagaggaaaatgga

SEQ ID NO: 1688631 - DNA, 15 bp, Homo sapiens
aagaggaaaatggag

SEQ ID NO: 1688632 - DNA, 15 bp, Homo sapiens
agaggaaaatggagc

SEQ ID NO: 1688633 - DNA, 15 bp, Homo sapiens
gaggaaaatggagct

SEQ ID NO: 1688634 - DNA, 15 bp, Homo sapiens
aggaaaatggagcta

SEQ ID NO: 1688635 - DNA, 15 bp, Homo sapiens
ggaaaatggagctag

SEQ ID NO: 1688636 - DNA, 15 bp, Homo sapiens
gaaaatggagctagt

SEQ ID NO: 1688637 - DNA, 15 bp, Homo sapiens
aaaatggagctagtt

SEQ ID NO: 1688638 - DNA, 15 bp, Homo sapiens
aaatggagctagttg

SEQ ID NO: 1688639 - DNA, 15 bp, Homo sapiens
aatggagctagttga

SEQ ID NO: 1688640 - DNA, 15 bp, Homo sapiens
atggagctagttgaa

SEQ ID NO: 1688641 - DNA, 15 bp, Homo sapiens
tggagctagttgaaa

SEQ ID NO: 1688642 - DNA, 15 bp, Homo sapiens
ggagctagttgaaat

SEQ ID NO: 1688643 - DNA, 15 bp, Homo sapiens
gagctagttgaaatt

SEQ ID NO: 1688644 - DNA, 15 bp, Homo sapiens
agctagttgaaattt

SEQ ID NO: 1688645 - DNA, 15 bp, Homo sapiens
gctagttgaaatttc

SEQ ID NO: 1688646 - DNA, 15 bp, Homo sapiens
ctagttgaaatttct

SEQ ID NO: 1688647 - DNA, 15 bp, Homo sapiens
tagttgaaatttctg

SEQ ID NO: 1688648 - DNA, 15 bp, Homo sapiens
agttgaaatttctgc

SEQ ID NO: 1688649 - DNA, 15 bp, Homo sapiens
gttgaaatttctgcc

SEQ ID NO: 1688650 - DNA, 15 bp, Homo sapiens
ttgaaatttctgcct

SEQ ID NO: 1688651 - DNA, 15 bp, Homo sapiens
tgaaatttctgccta

SEQ ID NO: 1688652 - DNA, 15 bp, Homo sapiens
gaaatttctgcctaa

SEQ ID NO: 1688653 - DNA, 15 bp, Homo sapiens
aaatttctgcctaaa

SEQ ID NO: 1688654 - DNA, 15 bp, Homo sapiens
aatttctgcctaaac

SEQ ID NO: 1688655 - DNA, 15 bp, Homo sapiens
atttctgcctaaact

SEQ ID NO: 1688656 - DNA, 15 bp, Homo sapiens
tttctgcctaaacta

SEQ ID NO: 1688657 - DNA, 15 bp, Homo sapiens
ttctgcctaaactag

SEQ ID NO: 1688658 - DNA, 15 bp, Homo sapiens
tctgcctaaactagc

SEQ ID NO: 1688659 - DNA, 15 bp, Homo sapiens
ctgcctaaactagcc

SEQ ID NO: 1688660 - DNA, 15 bp, Homo sapiens
tgcctaaactagcca

SEQ ID NO: 1688661 - DNA, 15 bp, Homo sapiens
gcctaaactagccag

SEQ ID NO: 1688662 - DNA, 15 bp, Homo sapiens
cctaaactagccaga

SEQ ID NO: 1688663 - DNA, 15 bp, Homo sapiens
ctaaactagccagat

SEQ ID NO: 1688664 - DNA, 15 bp, Homo sapiens
taaactagccagatt

SEQ ID NO: 1688665 - DNA, 15 bp, Homo sapiens
aaactagccagattt

SEQ ID NO: 1688666 - DNA, 15 bp, Homo sapiens
aactagccagatttt

SEQ ID NO: 1688667 - DNA, 15 bp, Homo sapiens
actagccagattttg

SEQ ID NO: 1688668 - DNA, 15 bp, Homo sapiens
ctagccagattttga

SEQ ID NO: 1688669 - DNA, 15 bp, Homo sapiens
tagccagattttgag

SEQ ID NO: 1688670 - DNA, 15 bp, Homo sapiens
agccagattttgaga

SEQ ID NO: 1688671 - DNA, 15 bp, Homo sapiens
gccagattttgagac

SEQ ID NO: 1688672 - DNA, 15 bp, Homo sapiens
ccagattttgagaca

SEQ ID NO: 1688673 - DNA, 15 bp, Homo sapiens
cagattttgagacac

SEQ ID NO: 1688674 - DNA, 15 bp, Homo sapiens
agattttgagacact

SEQ ID NO: 1688675 - DNA, 15 bp, Homo sapiens
gattttgagacacta

SEQ ID NO: 1688676 - DNA, 15 bp, Homo sapiens
attttgagacactaa

SEQ ID NO: 1688677 - DNA, 15 bp, Homo sapiens
ttttgagacactaag

SEQ ID NO: 1688678 - DNA, 15 bp, Homo sapiens
tttgagacactaagt

SEQ ID NO: 1688679 - DNA, 15 bp, Homo sapiens
ttgagacactaagtt

SEQ ID NO: 1688680 - DNA, 15 bp, Homo sapiens
tgagacactaagtta

SEQ ID NO: 1688681 - DNA, 15 bp, Homo sapiens
gagacactaagttat

SEQ ID NO: 1688682 - DNA, 15 bp, Homo sapiens
agacactaagttatc

SEQ ID NO: 1688683 - DNA, 15 bp, Homo sapiens
gacactaagttatct

SEQ ID NO: 1688684 - DNA, 15 bp, Homo sapiens
acactaagttatctc

SEQ ID NO: 1688685 - DNA, 15 bp, Homo sapiens
cactaagttatctca

SEQ ID NO: 1688686 - DNA, 15 bp, Homo sapiens
actaagttatctcaa

SEQ ID NO: 1688687 - DNA, 15 bp, Homo sapiens
ctaagttatctcaaa

SEQ ID NO: 1688688 - DNA, 15 bp, Homo sapiens
taagttatctcaaat

SEQ ID NO: 1688689 - DNA, 15 bp, Homo sapiens
aagttatctcaaatc

SEQ ID NO: 1688690 - DNA, 15 bp, Homo sapiens
agttatctcaaatca

SEQ ID NO: 1688691 - DNA, 15 bp, Homo sapiens
gttatctcaaatcaa

SEQ ID NO: 1688692 - DNA, 15 bp, Homo sapiens
ttatctcaaatcaag

SEQ ID NO: 1688693 - DNA, 15 bp, Homo sapiens
tatctcaaatcaaga

SEQ ID NO: 1688694 - DNA, 15 bp, Homo sapiens
atctcaaatcaagaa

SEQ ID NO: 1688695 - DNA, 15 bp, Homo sapiens
tctcaaatcaagaaa

SEQ ID NO: 1688696 - DNA, 15 bp, Homo sapiens
ctcaaatcaagaaat

SEQ ID NO: 1688697 - DNA, 15 bp, Homo sapiens
tcaaatcaagaaatc

SEQ ID NO: 1688698 - DNA, 15 bp, Homo sapiens
caaatcaagaaatca

SEQ ID NO: 1688699 - DNA, 15 bp, Homo sapiens
aaatcaagaaatcac

SEQ ID NO: 1688700 - DNA, 15 bp, Homo sapiens
aatcaagaaatcacc

SEQ ID NO: 1688701 - DNA, 15 bp, Homo sapiens
atcaagaaatcaccc

SEQ ID NO: 1688702 - DNA, 15 bp, Homo sapiens
tcaagaaatcaccct

SEQ ID NO: 1688703 - DNA, 15 bp, Homo sapiens
caagaaatcacccta

SEQ ID NO: 1688704 - DNA, 15 bp, Homo sapiens
aagaaatcaccctaa

SEQ ID NO: 1688705 - DNA, 15 bp, Homo sapiens
agaaatcaccctaat

SEQ ID NO: 1688706 - DNA, 15 bp, Homo sapiens
gaaatcaccctaatg

SEQ ID NO: 1688707 - DNA, 15 bp, Homo sapiens
aaatcaccctaatga

SEQ ID NO: 1688708 - DNA, 15 bp, Homo sapiens
aatcaccctaatgag

SEQ ID NO: 1688709 - DNA, 15 bp, Homo sapiens
atcaccctaatgaga

SEQ ID NO: 1688710 - DNA, 15 bp, Homo sapiens
tcaccctaatgagaa

SEQ ID NO: 1688711 - DNA, 15 bp, Homo sapiens
caccctaatgagaat

SEQ ID NO: 1688712 - DNA, 15 bp, Homo sapiens
accctaatgagaatt

SEQ ID NO: 1688713 - DNA, 15 bp, Homo sapiens
ccctaatgagaattt

SEQ ID NO: 1688714 - DNA, 15 bp, Homo sapiens
cctaatgagaatttc

SEQ ID NO: 1688715 - DNA, 15 bp, Homo sapiens
ctaatgagaatttca

SEQ ID NO: 1688716 - DNA, 15 bp, Homo sapiens
taatgagaatttcaa

SEQ ID NO: 1688717 - DNA, 15 bp, Homo sapiens
aatgagaatttcaat

SEQ ID NO: 1688718 - DNA, 15 bp, Homo sapiens
atgagaatttcaata

SEQ ID NO: 1688719 - DNA, 15 bp, Homo sapiens
tgagaatttcaataa

SEQ ID NO: 1688720 - DNA, 15 bp, Homo sapiens
gagaatttcaataac

SEQ ID NO: 1688721 - DNA, 15 bp, Homo sapiens
agaatttcaataacc

SEQ ID NO: 1688722 - DNA, 15 bp, Homo sapiens
gaatttcaataacct

SEQ ID NO: 1688723 - DNA, 15 bp, Homo sapiens
aatttcaataacctc

SEQ ID NO: 1688724 - DNA, 15 bp, Homo sapiens
atttcaataacctca

SEQ ID NO: 1688725 - DNA, 15 bp, Homo sapiens
tttcaataacctcag

SEQ ID NO: 1688726 - DNA, 15 bp, Homo sapiens
ttcaataacctcagg

SEQ ID NO: 1688727 - DNA, 15 bp, Homo sapiens
tcaataacctcagga

SEQ ID NO: 1688728 - DNA, 15 bp, Homo sapiens
caataacctcaggaa

SEQ ID NO: 1688729 - DNA, 15 bp, Homo sapiens
aataacctcaggaat

SEQ ID NO: 1688730 - DNA, 15 bp, Homo sapiens
ataacctcaggaatt

SEQ ID NO: 1688731 - DNA, 15 bp, Homo sapiens
taacctcaggaattt

SEQ ID NO: 1688732 - DNA, 15 bp, Homo sapiens
aacctcaggaattta

SEQ ID NO: 1688733 - DNA, 15 bp, Homo sapiens
acctcaggaatttaa

SEQ ID NO: 1688734 - DNA, 15 bp, Homo sapiens
cctcaggaatttaag

SEQ ID NO: 1688735 - DNA, 15 bp, Homo sapiens
ctcaggaatttaagg

SEQ ID NO: 1688736 - DNA, 15 bp, Homo sapiens
tcaggaatttaaggt

SEQ ID NO: 1688737 - DNA, 15 bp, Homo sapiens
caggaatttaaggtg

SEQ ID NO: 1688738 - DNA, 15 bp, Homo sapiens
aggaatttaaggtgc

SEQ ID NO: 1688739 - DNA, 15 bp, Homo sapiens
ggaatttaaggtgca

SEQ ID NO: 1688740 - DNA, 15 bp, Homo sapiens
gaatttaaggtgcat

SEQ ID NO: 1688741 - DNA, 15 bp, Homo sapiens
aatttaaggtgcatg

SEQ ID NO: 1688742 - DNA, 15 bp, Homo sapiens
atttaaggtgcatgc

SEQ ID NO: 1688743 - DNA, 15 bp, Homo sapiens
tttaaggtgcatgca

SEQ ID NO: 1688744 - DNA, 15 bp, Homo sapiens
ttaaggtgcatgcat

SEQ ID NO: 1688745 - DNA, 15 bp, Homo sapiens
taaggtgcatgcatc

SEQ ID NO: 1688746 - DNA, 15 bp, Homo sapiens
aaggtgcatgcatcc

SEQ ID NO: 1688747 - DNA, 15 bp, Homo sapiens
aggtgcatgcatccc

SEQ ID NO: 1688748 - DNA, 15 bp, Homo sapiens
ggtgcatgcatcccc

SEQ ID NO: 1688749 - DNA, 15 bp, Homo sapiens
gtgcatgcatccccc

SEQ ID NO: 1688750 - DNA, 15 bp, Homo sapiens
tgcatgcatccccca

SEQ ID NO: 1688751 - DNA, 15 bp, Homo sapiens
gcatgcatcccccac

SEQ ID NO: 1688752 - DNA, 15 bp, Homo sapiens
catgcatcccccacc

SEQ ID NO: 1688753 - DNA, 15 bp, Homo sapiens
atgcatcccccaccc

SEQ ID NO: 1688754 - DNA, 15 bp, Homo sapiens
tgcatcccccacccc

SEQ ID NO: 1688755 - DNA, 15 bp, Homo sapiens
gcatcccccaccccc

SEQ ID NO: 1688756 - DNA, 15 bp, Homo sapiens
catcccccacccccc

SEQ ID NO: 1688757 - DNA, 15 bp, Homo sapiens
atcccccaccccccc

SEQ ID NO: 1688758 - DNA, 15 bp, Homo sapiens
tcccccacccccccc

SEQ ID NO: 1688759 - DNA, 15 bp, Homo sapiens
cccccacccccccct

SEQ ID NO: 1688760 - DNA, 15 bp, Homo sapiens
ccccacccccccctt

SEQ ID NO: 1688761 - DNA, 15 bp, Homo sapiens
cccaccccccccttt

SEQ ID NO: 1688762 - DNA, 15 bp, Homo sapiens
ccacccccccctttt

SEQ ID NO: 1688763 - DNA, 15 bp, Homo sapiens
caccccccccttttt

SEQ ID NO: 1688764 - DNA, 15 bp, Homo sapiens
acccccccctttttt

SEQ ID NO: 1688765 - DNA, 15 bp, Homo sapiens
ccccccccttttttt

SEQ ID NO: 1688766 - DNA, 15 bp, Homo sapiens
ccccccctttttttt

SEQ ID NO: 1688767 - DNA, 15 bp, Homo sapiens
ccccccttttttttt

SEQ ID NO: 1688768 - DNA, 15 bp, Homo sapiens
ccccctttttttttt

SEQ ID NO: 1688769 - DNA, 15 bp, Homo sapiens
ccccttttttttttg

SEQ ID NO: 1688770 - DNA, 15 bp, Homo sapiens
cccttttttttttga

SEQ ID NO: 1688771 - DNA, 15 bp, Homo sapiens
ccttttttttttgag

SEQ ID NO: 1688772 - DNA, 15 bp, Homo sapiens
ttttttttgagacgt

SEQ ID NO: 1688773 - DNA, 15 bp, Homo sapiens
tttttttgagacgta

SEQ ID NO: 1688774 - DNA, 15 bp, Homo sapiens
ttttttgagacgtag

SEQ ID NO: 1688775 - DNA, 15 bp, Homo sapiens
tttttgagacgtagt

SEQ ID NO: 1688776 - DNA, 15 bp, Homo sapiens
ttttgagacgtagtc

SEQ ID NO: 1688777 - DNA, 15 bp, Homo sapiens
tttgagacgtagtcc

SEQ ID NO: 1688778 - DNA, 15 bp, Homo sapiens
ttgagacgtagtccc

SEQ ID NO: 1688779 - DNA, 15 bp, Homo sapiens
tgagacgtagtcccg

SEQ ID NO: 1688780 - DNA, 15 bp, Homo sapiens
gagacgtagtcccgc

SEQ ID NO: 1688781 - DNA, 15 bp, Homo sapiens
agacgtagtcccgct

SEQ ID NO: 1688782 - DNA, 15 bp, Homo sapiens
gacgtagtcccgctc

SEQ ID NO: 1688783 - DNA, 15 bp, Homo sapiens
acgtagtcccgctct

SEQ ID NO: 1688784 - DNA, 15 bp, Homo sapiens
cgtagtcccgctctg

SEQ ID NO: 1688785 - DNA, 15 bp, Homo sapiens
gtagtcccgctctgt

SEQ ID NO: 1688786 - DNA, 15 bp, Homo sapiens
tagtcccgctctgtt

SEQ ID NO: 1688787 - DNA, 15 bp, Homo sapiens
agtcccgctctgttg

SEQ ID NO: 1688788 - DNA, 15 bp, Homo sapiens
gtcccgctctgttgc

SEQ ID NO: 1688789 - DNA, 15 bp, Homo sapiens
tcccgctctgttgcc

SEQ ID NO: 1688790 - DNA, 15 bp, Homo sapiens
cccgctctgttgccc

SEQ ID NO: 1688791 - DNA, 15 bp, Homo sapiens
ccgctctgttgccca

SEQ ID NO: 1688792 - DNA, 15 bp, Homo sapiens
tacagtggcgcgata

SEQ ID NO: 1688793 - DNA, 15 bp, Homo sapiens
acagtggcgcgatat

SEQ ID NO: 1688794 - DNA, 15 bp, Homo sapiens
cagtggcgcgatatc

SEQ ID NO: 1688795 - DNA, 15 bp, Homo sapiens
agtggcgcgatatcg

SEQ ID NO: 1688796 - DNA, 15 bp, Homo sapiens
gtggcgcgatatcgg

SEQ ID NO: 1688797 - DNA, 15 bp, Homo sapiens
tggcgcgatatcggc

SEQ ID NO: 1688798 - DNA, 15 bp, Homo sapiens
ggcgcgatatcggct

SEQ ID NO: 1688799 - DNA, 15 bp, Homo sapiens
gcgcgatatcggctc

SEQ ID NO: 1688800 - DNA, 15 bp, Homo sapiens
cgcgatatcggctca

SEQ ID NO: 1688801 - DNA, 15 bp, Homo sapiens
cgatatcggctcacc

SEQ ID NO: 1688802 - DNA, 15 bp, Homo sapiens
gatatcggctcacca

SEQ ID NO: 1688803 - DNA, 15 bp, Homo sapiens
atatcggctcaccac

SEQ ID NO: 1688804 - DNA, 15 bp, Homo sapiens
tatcggctcaccaca

SEQ ID NO: 1688805 - DNA, 15 bp, Homo sapiens
atcggctcaccacaa

SEQ ID NO: 1688806 - DNA, 15 bp, Homo sapiens
tcccaggttcaaggg

SEQ ID NO: 1688807 - DNA, 15 bp, Homo sapiens
cccaggttcaaggga

SEQ ID NO: 1688808 - DNA, 15 bp, Homo sapiens
ccaggttcaagggat

SEQ ID NO: 1688809 - DNA, 15 bp, Homo sapiens
caggttcaagggatt

SEQ ID NO: 1688810 - DNA, 15 bp, Homo sapiens
aggttcaagggattc

SEQ ID NO: 1688811 - DNA, 15 bp, Homo sapiens
tcaagggattctccc

SEQ ID NO: 1688812 - DNA, 15 bp, Homo sapiens
caagggattctcccg

SEQ ID NO: 1688813 - DNA, 15 bp, Homo sapiens
aagggattctcccgc

SEQ ID NO: 1688814 - DNA, 15 bp, Homo sapiens
agggattctcccgcc

SEQ ID NO: 1688815 - DNA, 15 bp, Homo sapiens
gggattctcccgcct

SEQ ID NO: 1688816 - DNA, 15 bp, Homo sapiens
ggattctcccgcctc

SEQ ID NO: 1688817 - DNA, 15 bp, Homo sapiens
tctcccgcctcagct

SEQ ID NO: 1688818 - DNA, 15 bp, Homo sapiens
ctcccgcctcagctt

SEQ ID NO: 1688819 - DNA, 15 bp, Homo sapiens
tcccgcctcagcttc

SEQ ID NO: 1688820 - DNA, 15 bp, Homo sapiens
cccgcctcagcttcc

SEQ ID NO: 1688821 - DNA, 15 bp, Homo sapiens
ccgcctcagcttcca

SEQ ID NO: 1688822 - DNA, 15 bp, Homo sapiens
cgcctcagcttccag

SEQ ID NO: 1688823 - DNA, 15 bp, Homo sapiens
gcctcagcttccaga

SEQ ID NO: 1688824 - DNA, 15 bp, Homo sapiens
cctcagcttccagag

SEQ ID NO: 1688825 - DNA, 15 bp, Homo sapiens
ctcagcttccagagt

SEQ ID NO: 1688826 - DNA, 15 bp, Homo sapiens
tcagcttccagagta

SEQ ID NO: 1688827 - DNA, 15 bp, Homo sapiens
cagcttccagagtag

SEQ ID NO: 1688828 - DNA, 15 bp, Homo sapiens
agcttccagagtagc

SEQ ID NO: 1688829 - DNA, 15 bp, Homo sapiens
gcttccagagtagct

SEQ ID NO: 1688830 - DNA, 15 bp, Homo sapiens
cttccagagtagctg

SEQ ID NO: 1688831 - DNA, 15 bp, Homo sapiens
ttccagagtagctgg

SEQ ID NO: 1688832 - DNA, 15 bp, Homo sapiens
gggactacagacacc

SEQ ID NO: 1688833 - DNA, 15 bp, Homo sapiens
ggactacagacaccc

SEQ ID NO: 1688834 - DNA, 15 bp, Homo sapiens
gactacagacaccca

SEQ ID NO: 1688835 - DNA, 15 bp, Homo sapiens
actacagacacccac

SEQ ID NO: 1688836 - DNA, 15 bp, Homo sapiens
ctacagacacccacc

SEQ ID NO: 1688837 - DNA, 15 bp, Homo sapiens
tacagacacccacca

SEQ ID NO: 1688838 - DNA, 15 bp, Homo sapiens
acagacacccaccac

SEQ ID NO: 1688839 - DNA, 15 bp, Homo sapiens
cagacacccaccacc

SEQ ID NO: 1688840 - DNA, 15 bp, Homo sapiens
agacacccaccacca

SEQ ID NO: 1688841 - DNA, 15 bp, Homo sapiens
gacacccaccaccat

SEQ ID NO: 1688842 - DNA, 15 bp, Homo sapiens
acacccaccaccatg

SEQ ID NO: 1688843 - DNA, 15 bp, Homo sapiens
cacccaccaccatgc

SEQ ID NO: 1688844 - DNA, 15 bp, Homo sapiens
acccaccaccatgcg

SEQ ID NO: 1688845 - DNA, 15 bp, Homo sapiens
cccaccaccatgcgt

SEQ ID NO: 1688846 - DNA, 15 bp, Homo sapiens
ccaccaccatgcgtg

SEQ ID NO: 1688847 - DNA, 15 bp, Homo sapiens
caccaccatgcgtgg

SEQ ID NO: 1688848 - DNA, 15 bp, Homo sapiens
accaccatgcgtggc

SEQ ID NO: 1688849 - DNA, 15 bp, Homo sapiens
ccaccatgcgtggct

SEQ ID NO: 1688850 - DNA, 15 bp, Homo sapiens
caccatgcgtggcta

SEQ ID NO: 1688851 - DNA, 15 bp, Homo sapiens
accatgcgtggctaa

SEQ ID NO: 1688852 - DNA, 15 bp, Homo sapiens
ccatgcgtggctaat

SEQ ID NO: 1688853 - DNA, 15 bp, Homo sapiens
catgcgtggctaatt

SEQ ID NO: 1688854 - DNA, 15 bp, Homo sapiens
atgcgtggctaattt

SEQ ID NO: 1688855 - DNA, 15 bp, Homo sapiens
tgcgtggctaatttt

SEQ ID NO: 1688856 - DNA, 15 bp, Homo sapiens
gcgtggctaattttt

SEQ ID NO: 1688857 - DNA, 15 bp, Homo sapiens
cgtggctaatttttg

SEQ ID NO: 1688858 - DNA, 15 bp, Homo sapiens
gtggctaatttttgt

SEQ ID NO: 1688859 - DNA, 15 bp, Homo sapiens
tttttagtagagagg

SEQ ID NO: 1688860 - DNA, 15 bp, Homo sapiens
ttttagtagagaggg

SEQ ID NO: 1688861 - DNA, 15 bp, Homo sapiens
tttagtagagagggg

SEQ ID NO: 1688862 - DNA, 15 bp, Homo sapiens
ttagtagagaggggg

SEQ ID NO: 1688863 - DNA, 15 bp, Homo sapiens
tagtagagagggggt

SEQ ID NO: 1688864 - DNA, 15 bp, Homo sapiens
agtagagagggggtt

SEQ ID NO: 1688865 - DNA, 15 bp, Homo sapiens
gtagagagggggttt

SEQ ID NO: 1688866 - DNA, 15 bp, Homo sapiens
tagagagggggtttc

SEQ ID NO: 1688867 - DNA, 15 bp, Homo sapiens
agagagggggtttcg

SEQ ID NO: 1688868 - DNA, 15 bp, Homo sapiens
gagagggggtttcgc

SEQ ID NO: 1688869 - DNA, 15 bp, Homo sapiens
agagggggtttcgcc

SEQ ID NO: 1688870 - DNA, 15 bp, Homo sapiens
gagggggtttcgcca

SEQ ID NO: 1688871 - DNA, 15 bp, Homo sapiens
agggggtttcgccat

SEQ ID NO: 1688872 - DNA, 15 bp, Homo sapiens
gccaggctggtttca

SEQ ID NO: 1688873 - DNA, 15 bp, Homo sapiens
ttcaaactcctgact

SEQ ID NO: 1688874 - DNA, 15 bp, Homo sapiens
gtgatccgcctgcca

SEQ ID NO: 1688875 - DNA, 15 bp, Homo sapiens
tgatccgcctgccac

SEQ ID NO: 1688876 - DNA, 15 bp, Homo sapiens
gatccgcctgccacg

SEQ ID NO: 1688877 - DNA, 15 bp, Homo sapiens
atccgcctgccacgg

SEQ ID NO: 1688878 - DNA, 15 bp, Homo sapiens
tccgcctgccacggc

SEQ ID NO: 1688879 - DNA, 15 bp, Homo sapiens
ccgcctgccacggcc

SEQ ID NO: 1688880 - DNA, 15 bp, Homo sapiens
cgcctgccacggcct

SEQ ID NO: 1688881 - DNA, 15 bp, Homo sapiens
gcctgccacggcctc

SEQ ID NO: 1688882 - DNA, 15 bp, Homo sapiens
cctgccacggcctcc

SEQ ID NO: 1688883 - DNA, 15 bp, Homo sapiens
ctgccacggcctccc

SEQ ID NO: 1688884 - DNA, 15 bp, Homo sapiens
tgccacggcctccca

SEQ ID NO: 1688885 - DNA, 15 bp, Homo sapiens
gccacggcctcccaa

SEQ ID NO: 1688886 - DNA, 15 bp, Homo sapiens
ccacggcctcccaat

SEQ ID NO: 1688887 - DNA, 15 bp, Homo sapiens
cacggcctcccaatt

SEQ ID NO: 1688888 - DNA, 15 bp, Homo sapiens
acggcctcccaattt

SEQ ID NO: 1688889 - DNA, 15 bp, Homo sapiens
cggcctcccaattta

SEQ ID NO: 1688890 - DNA, 15 bp, Homo sapiens
ggcctcccaatttac

SEQ ID NO: 1688891 - DNA, 15 bp, Homo sapiens
gcctcccaatttact

SEQ ID NO: 1688892 - DNA, 15 bp, Homo sapiens
cctcccaatttactg

SEQ ID NO: 1688893 - DNA, 15 bp, Homo sapiens
ctcccaatttactgg

SEQ ID NO: 1688894 - DNA, 15 bp, Homo sapiens
tcccaatttactggg

SEQ ID NO: 1688895 - DNA, 15 bp, Homo sapiens
cccaatttactggga

SEQ ID NO: 1688896 - DNA, 15 bp, Homo sapiens
ccaatttactgggat

SEQ ID NO: 1688897 - DNA, 15 bp, Homo sapiens
caatttactgggatt

SEQ ID NO: 1688898 - DNA, 15 bp, Homo sapiens
aatttactgggatta

SEQ ID NO: 1688899 - DNA, 15 bp, Homo sapiens
atttactgggattac

SEQ ID NO: 1688900 - DNA, 15 bp, Homo sapiens
tttactgggattaca

SEQ ID NO: 1688901 - DNA, 15 bp, Homo sapiens
ttactgggattacag

SEQ ID NO: 1688902 - DNA, 15 bp, Homo sapiens
actgggattacaggg

SEQ ID NO: 1688903 - DNA, 15 bp, Homo sapiens
ctgggattacagggg

SEQ ID NO: 1688904 - DNA, 15 bp, Homo sapiens
tgggattacaggggt

SEQ ID NO: 1688905 - DNA, 15 bp, Homo sapiens
gggattacaggggtg

SEQ ID NO: 1688906 - DNA, 15 bp, Homo sapiens
ggattacaggggtgg

SEQ ID NO: 1688907 - DNA, 15 bp, Homo sapiens
attacaggggtgggc

SEQ ID NO: 1688908 - DNA, 15 bp, Homo sapiens
ttacaggggtgggcc

SEQ ID NO: 1688909 - DNA, 15 bp, Homo sapiens
tacaggggtgggcca

SEQ ID NO: 1688910 - DNA, 15 bp, Homo sapiens
acaggggtgggccac

SEQ ID NO: 1688911 - DNA, 15 bp, Homo sapiens
caggggtgggccacc

SEQ ID NO: 1688912 - DNA, 15 bp, Homo sapiens
aggggtgggccaccg

SEQ ID NO: 1688913 - DNA, 15 bp, Homo sapiens
ggggtgggccaccgc

SEQ ID NO: 1688914 - DNA, 15 bp, Homo sapiens
gggtgggccaccgcg

SEQ ID NO: 1688915 - DNA, 15 bp, Homo sapiens
ggtgggccaccgcgc

SEQ ID NO: 1688916 - DNA, 15 bp, Homo sapiens
gtgggccaccgcgcc

SEQ ID NO: 1688917 - DNA, 15 bp, Homo sapiens
tgggccaccgcgccc

SEQ ID NO: 1688918 - DNA, 15 bp, Homo sapiens
gggccaccgcgcccg

SEQ ID NO: 1688919 - DNA, 15 bp, Homo sapiens
ggccaccgcgcccgg

SEQ ID NO: 1688920 - DNA, 15 bp, Homo sapiens
accgcgcccggcctt

SEQ ID NO: 1688921 - DNA, 15 bp, Homo sapiens
ccgcgcccggccttt

SEQ ID NO: 1688922 - DNA, 15 bp, Homo sapiens
cgcgcccggcctttt

SEQ ID NO: 1688923 - DNA, 15 bp, Homo sapiens
gcgcccggccttttt

SEQ ID NO: 1688924 - DNA, 15 bp, Homo sapiens
cgcccggcctttttc

SEQ ID NO: 1688925 - DNA, 15 bp, Homo sapiens
gcccggcctttttct

SEQ ID NO: 1688926 - DNA, 15 bp, Homo sapiens
cccggcctttttctt

SEQ ID NO: 1688927 - DNA, 15 bp, Homo sapiens
ccggcctttttctta

SEQ ID NO: 1688928 - DNA, 15 bp, Homo sapiens
cggcctttttcttaa

SEQ ID NO: 1688929 - DNA, 15 bp, Homo sapiens
ggcctttttcttaat

SEQ ID NO: 1688930 - DNA, 15 bp, Homo sapiens
gcctttttcttaatt

SEQ ID NO: 1688931 - DNA, 15 bp, Homo sapiens
cctttttcttaattt

SEQ ID NO: 1688932 - DNA, 15 bp, Homo sapiens
tttttcttaattttt

SEQ ID NO: 1688933 - DNA, 15 bp, Homo sapiens
ttttcttaattttta

SEQ ID NO: 1688934 - DNA, 15 bp, Homo sapiens
tttcttaatttttaa

SEQ ID NO: 1688935 - DNA, 15 bp, Homo sapiens
ttcttaatttttaaa

SEQ ID NO: 1688936 - DNA, 15 bp, Homo sapiens
tcttaatttttaaaa

SEQ ID NO: 1688937 - DNA, 15 bp, Homo sapiens
cttaatttttaaaaa

SEQ ID NO: 1688938 - DNA, 15 bp, Homo sapiens
ttaatttttaaaaat

SEQ ID NO: 1688939 - DNA, 15 bp, Homo sapiens
atttttaaaaatatt

SEQ ID NO: 1688940 - DNA, 15 bp, Homo sapiens
tttttaaaaatatta

SEQ ID NO: 1688941 - DNA, 15 bp, Homo sapiens
ttttaaaaatattaa

SEQ ID NO: 1688942 - DNA, 15 bp, Homo sapiens
ttaaaaatattaaag

SEQ ID NO: 1688943 - DNA, 15 bp, Homo sapiens
taaaaatattaaagt

SEQ ID NO: 1688944 - DNA, 15 bp, Homo sapiens
aaaaatattaaagtt

SEQ ID NO: 1688945 - DNA, 15 bp, Homo sapiens
aaaatattaaagttt

SEQ ID NO: 1688946 - DNA, 15 bp, Homo sapiens
aaatattaaagtttt

SEQ ID NO: 1688947 - DNA, 15 bp, Homo sapiens
aatattaaagtttta

SEQ ID NO: 1688948 - DNA, 15 bp, Homo sapiens
atattaaagttttat

SEQ ID NO: 1688949 - DNA, 15 bp, Homo sapiens
tattaaagttttatc

SEQ ID NO: 1688950 - DNA, 15 bp, Homo sapiens
attaaagttttatcc

SEQ ID NO: 1688951 - DNA, 15 bp, Homo sapiens
ttaaagttttatccc

SEQ ID NO: 1688952 - DNA, 15 bp, Homo sapiens
taaagttttatccca

SEQ ID NO: 1688953 - DNA, 15 bp, Homo sapiens
aaagttttatcccat

SEQ ID NO: 1688954 - DNA, 15 bp, Homo sapiens
aagttttatcccatt

SEQ ID NO: 1688955 - DNA, 15 bp, Homo sapiens
agttttatcccattc

SEQ ID NO: 1688956 - DNA, 15 bp, Homo sapiens
gttttatcccattcc

SEQ ID NO: 1688957 - DNA, 15 bp, Homo sapiens
ttttatcccattcct

SEQ ID NO: 1688958 - DNA, 15 bp, Homo sapiens
tttatcccattcctg

SEQ ID NO: 1688959 - DNA, 15 bp, Homo sapiens
ttatcccattcctgt

SEQ ID NO: 1688960 - DNA, 15 bp, Homo sapiens
tatcccattcctgtt

SEQ ID NO: 1688961 - DNA, 15 bp, Homo sapiens
atcccattcctgttg

SEQ ID NO: 1688962 - DNA, 15 bp, Homo sapiens
tcccattcctgttga

SEQ ID NO: 1688963 - DNA, 15 bp, Homo sapiens
cccattcctgttgaa

SEQ ID NO: 1688964 - DNA, 15 bp, Homo sapiens
ccattcctgttgaac

SEQ ID NO: 1688965 - DNA, 15 bp, Homo sapiens
cattcctgttgaacc

SEQ ID NO: 1688966 - DNA, 15 bp, Homo sapiens
attcctgttgaacca

SEQ ID NO: 1688967 - DNA, 15 bp, Homo sapiens
ttcctgttgaaccat

SEQ ID NO: 1688968 - DNA, 15 bp, Homo sapiens
tcctgttgaaccata

SEQ ID NO: 1688969 - DNA, 15 bp, Homo sapiens
cctgttgaaccatat

SEQ ID NO: 1688970 - DNA, 15 bp, Homo sapiens
ctgttgaaccatatt

SEQ ID NO: 1688971 - DNA, 15 bp, Homo sapiens
tgttgaaccatattc

SEQ ID NO: 1688972 - DNA, 15 bp, Homo sapiens
gttgaaccatattcc

SEQ ID NO: 1688973 - DNA, 15 bp, Homo sapiens
ttgaaccatattcct

SEQ ID NO: 1688974 - DNA, 15 bp, Homo sapiens
tgaaccatattcctg

SEQ ID NO: 1688975 - DNA, 15 bp, Homo sapiens
gaaccatattcctga

SEQ ID NO: 1688976 - DNA, 15 bp, Homo sapiens
aaccatattcctgat

SEQ ID NO: 1688977 - DNA, 15 bp, Homo sapiens
accatattcctgatt

SEQ ID NO: 1688978 - DNA, 15 bp, Homo sapiens
ccatattcctgattt

SEQ ID NO: 1688979 - DNA, 15 bp, Homo sapiens
catattcctgattta

SEQ ID NO: 1688980 - DNA, 15 bp, Homo sapiens
atattcctgatttaa

SEQ ID NO: 1688981 - DNA, 15 bp, Homo sapiens
tattcctgatttaaa

SEQ ID NO: 1688982 - DNA, 15 bp, Homo sapiens
attcctgatttaaaa

SEQ ID NO: 1688983 - DNA, 15 bp, Homo sapiens
ttcctgatttaaaag

SEQ ID NO: 1688984 - DNA, 15 bp, Homo sapiens
tcctgatttaaaagt

SEQ ID NO: 1688985 - DNA, 15 bp, Homo sapiens
cctgatttaaaagtt

SEQ ID NO: 1688986 - DNA, 15 bp, Homo sapiens
ctgatttaaaagttg

SEQ ID NO: 1688987 - DNA, 15 bp, Homo sapiens
tgatttaaaagttgg

SEQ ID NO: 1688988 - DNA, 15 bp, Homo sapiens
gatttaaaagttgga

SEQ ID NO: 1688989 - DNA, 15 bp, Homo sapiens
atttaaaagttggaa

SEQ ID NO: 1688990 - DNA, 15 bp, Homo sapiens
tttaaaagttggaaa

SEQ ID NO: 1688991 - DNA, 15 bp, Homo sapiens
ttaaaagttggaaac

SEQ ID NO: 1688992 - DNA, 15 bp, Homo sapiens
taaaagttggaaacg

SEQ ID NO: 1688993 - DNA, 15 bp, Homo sapiens
aaaagttggaaacgt

SEQ ID NO: 1688994 - DNA, 15 bp, Homo sapiens
aaagttggaaacgtg

SEQ ID NO: 1688995 - DNA, 15 bp, Homo sapiens
aagttggaaacgtgg

SEQ ID NO: 1688996 - DNA, 15 bp, Homo sapiens
agttggaaacgtggt

SEQ ID NO: 1688997 - DNA, 15 bp, Homo sapiens
gttggaaacgtggtg

SEQ ID NO: 1688998 - DNA, 15 bp, Homo sapiens
ttggaaacgtggtga

SEQ ID NO: 1688999 - DNA, 15 bp, Homo sapiens
tggaaacgtggtgaa

SEQ ID NO: 1689000 - DNA, 15 bp, Homo sapiens
ggaaacgtggtgaac

SEQ ID NO: 1689001 - DNA, 15 bp, Homo sapiens
gaaacgtggtgaacc

SEQ ID NO: 1689002 - DNA, 15 bp, Homo sapiens
aaacgtggtgaacct

SEQ ID NO: 1689003 - DNA, 15 bp, Homo sapiens
aacgtggtgaaccta

SEQ ID NO: 1689004 - DNA, 15 bp, Homo sapiens
acgtggtgaacctag

SEQ ID NO: 1689005 - DNA, 15 bp, Homo sapiens
cgtggtgaacctaga

SEQ ID NO: 1689006 - DNA, 15 bp, Homo sapiens
gtggtgaacctagaa

SEQ ID NO: 1689007 - DNA, 15 bp, Homo sapiens
tggtgaacctagaag

SEQ ID NO: 1689008 - DNA, 15 bp, Homo sapiens
ggtgaacctagaagt

SEQ ID NO: 1689009 - DNA, 15 bp, Homo sapiens
gtgaacctagaagta

SEQ ID NO: 1689010 - DNA, 15 bp, Homo sapiens
tgaacctagaagtat

SEQ ID NO: 1689011 - DNA, 15 bp, Homo sapiens
gaacctagaagtatt

SEQ ID NO: 1689012 - DNA, 15 bp, Homo sapiens
aacctagaagtattt

SEQ ID NO: 1689013 - DNA, 15 bp, Homo sapiens
acctagaagtatttg

SEQ ID NO: 1689014 - DNA, 15 bp, Homo sapiens
cctagaagtatttgt

SEQ ID NO: 1689015 - DNA, 15 bp, Homo sapiens
ctagaagtatttgtt

SEQ ID NO: 1689016 - DNA, 15 bp, Homo sapiens
tagaagtatttgttg

SEQ ID NO: 1689017 - DNA, 15 bp, Homo sapiens
agaagtatttgttgc

SEQ ID NO: 1689018 - DNA, 15 bp, Homo sapiens
gaagtatttgttgct

SEQ ID NO: 1689019 - DNA, 15 bp, Homo sapiens
aagtatttgttgctg

SEQ ID NO: 1689020 - DNA, 15 bp, Homo sapiens
agtatttgttgctgg

SEQ ID NO: 1689021 - DNA, 15 bp, Homo sapiens
gtatttgttgctggg

SEQ ID NO: 1689022 - DNA, 15 bp, Homo sapiens
tatttgttgctgggt

SEQ ID NO: 1689023 - DNA, 15 bp, Homo sapiens
atttgttgctgggtt

SEQ ID NO: 1689024 - DNA, 15 bp, Homo sapiens
tttgttgctgggttt

SEQ ID NO: 1689025 - DNA, 15 bp, Homo sapiens
ttgttgctgggtttg

SEQ ID NO: 1689026 - DNA, 15 bp, Homo sapiens
tgttgctgggtttgt

SEQ ID NO: 1689027 - DNA, 15 bp, Homo sapiens
gttgctgggtttgtc

SEQ ID NO: 1689028 - DNA, 15 bp, Homo sapiens
ttgctgggtttgtct

SEQ ID NO: 1689029 - DNA, 15 bp, Homo sapiens
tgctgggtttgtctt

SEQ ID NO: 1689030 - DNA, 15 bp, Homo sapiens
gctgggtttgtcttc

SEQ ID NO: 1689031 - DNA, 15 bp, Homo sapiens
ctgggtttgtcttca

SEQ ID NO: 1689032 - DNA, 15 bp, Homo sapiens
tgggtttgtcttcag

SEQ ID NO: 1689033 - DNA, 15 bp, Homo sapiens
gggtttgtcttcagg

SEQ ID NO: 1689034 - DNA, 15 bp, Homo sapiens
ggtttgtcttcaggt

SEQ ID NO: 1689035 - DNA, 15 bp, Homo sapiens
gtttgtcttcaggtt

SEQ ID NO: 1689036 - DNA, 15 bp, Homo sapiens
tttgtcttcaggttc

SEQ ID NO: 1689037 - DNA, 15 bp, Homo sapiens
ttgtcttcaggttct

SEQ ID NO: 1689038 - DNA, 15 bp, Homo sapiens
tgtcttcaggttctg

SEQ ID NO: 1689039 - DNA, 15 bp, Homo sapiens
gtcttcaggttctgt

SEQ ID NO: 1689040 - DNA, 15 bp, Homo sapiens
tcttcaggttctgtt

SEQ ID NO: 1689041 - DNA, 15 bp, Homo sapiens
cttcaggttctgttg

SEQ ID NO: 1689042 - DNA, 15 bp, Homo sapiens
ttcaggttctgttgc

SEQ ID NO: 1689043 - DNA, 15 bp, Homo sapiens
tcaggttctgttgct

SEQ ID NO: 1689044 - DNA, 15 bp, Homo sapiens
caggttctgttgctc

SEQ ID NO: 1689045 - DNA, 15 bp, Homo sapiens
aggttctgttgctcg

SEQ ID NO: 1689046 - DNA, 15 bp, Homo sapiens
ggttctgttgctcgg

SEQ ID NO: 1689047 - DNA, 15 bp, Homo sapiens
gttctgttgctcggt

SEQ ID NO: 1689048 - DNA, 15 bp, Homo sapiens
ttctgttgctcggtt

SEQ ID NO: 1689049 - DNA, 15 bp, Homo sapiens
tctgttgctcggttt

SEQ ID NO: 1689050 - DNA, 15 bp, Homo sapiens
ctgttgctcggtttt

SEQ ID NO: 1689051 - DNA, 15 bp, Homo sapiens
tgttgctcggttttc

SEQ ID NO: 1689052 - DNA, 15 bp, Homo sapiens
gttgctcggttttct

SEQ ID NO: 1689053 - DNA, 15 bp, Homo sapiens
ttgctcggttttcta

SEQ ID NO: 1689054 - DNA, 15 bp, Homo sapiens
tgctcggttttctag

SEQ ID NO: 1689055 - DNA, 15 bp, Homo sapiens
gctcggttttctagt

SEQ ID NO: 1689056 - DNA, 15 bp, Homo sapiens
ctcggttttctagtt

SEQ ID NO: 1689057 - DNA, 15 bp, Homo sapiens
tcggttttctagttc

SEQ ID NO: 1689058 - DNA, 15 bp, Homo sapiens
cggttttctagttcc

SEQ ID NO: 1689059 - DNA, 15 bp, Homo sapiens
ggttttctagttccc

SEQ ID NO: 1689060 - DNA, 15 bp, Homo sapiens
gttttctagttcccc

SEQ ID NO: 1689061 - DNA, 15 bp, Homo sapiens
ttttctagttcccca

SEQ ID NO: 1689062 - DNA, 15 bp, Homo sapiens
tttctagttccccac

SEQ ID NO: 1689063 - DNA, 15 bp, Homo sapiens
ttctagttccccacc

SEQ ID NO: 1689064 - DNA, 15 bp, Homo sapiens
tctagttccccacct

SEQ ID NO: 1689065 - DNA, 15 bp, Homo sapiens
ctagttccccaccta

SEQ ID NO: 1689066 - DNA, 15 bp, Homo sapiens
tagttccccacctag

SEQ ID NO: 1689067 - DNA, 15 bp, Homo sapiens
agttccccacctagt

SEQ ID NO: 1689068 - DNA, 15 bp, Homo sapiens
gttccccacctagtc

SEQ ID NO: 1689069 - DNA, 15 bp, Homo sapiens
ttccccacctagtct

SEQ ID NO: 1689070 - DNA, 15 bp, Homo sapiens
tccccacctagtctg

SEQ ID NO: 1689071 - DNA, 15 bp, Homo sapiens
ccccacctagtctgg

SEQ ID NO: 1689072 - DNA, 15 bp, Homo sapiens
cccacctagtctggg

SEQ ID NO: 1689073 - DNA, 15 bp, Homo sapiens
ccacctagtctgggt

SEQ ID NO: 1689074 - DNA, 15 bp, Homo sapiens
cacctagtctgggtt

SEQ ID NO: 1689075 - DNA, 15 bp, Homo sapiens
acctagtctgggtta

SEQ ID NO: 1689076 - DNA, 15 bp, Homo sapiens
cctagtctgggttac

SEQ ID NO: 1689077 - DNA, 15 bp, Homo sapiens
ctagtctgggttact

SEQ ID NO: 1689078 - DNA, 15 bp, Homo sapiens
tagtctgggttactc

SEQ ID NO: 1689079 - DNA, 15 bp, Homo sapiens
agtctgggttactct

SEQ ID NO: 1689080 - DNA, 15 bp, Homo sapiens
gtctgggttactctg

SEQ ID NO: 1689081 - DNA, 15 bp, Homo sapiens
tctgggttactctgc

SEQ ID NO: 1689082 - DNA, 15 bp, Homo sapiens
ctgggttactctgca

SEQ ID NO: 1689083 - DNA, 15 bp, Homo sapiens
tgggttactctgcag

SEQ ID NO: 1689084 - DNA, 15 bp, Homo sapiens
gggttactctgcagc

SEQ ID NO: 1689085 - DNA, 15 bp, Homo sapiens
ggttactctgcagct

SEQ ID NO: 1689086 - DNA, 15 bp, Homo sapiens
gttactctgcagcta

SEQ ID NO: 1689087 - DNA, 15 bp, Homo sapiens
ttactctgcagctac

SEQ ID NO: 1689088 - DNA, 15 bp, Homo sapiens
tactctgcagctact

SEQ ID NO: 1689089 - DNA, 15 bp, Homo sapiens
actctgcagctactt

SEQ ID NO: 1689090 - DNA, 15 bp, Homo sapiens
ctctgcagctacttt

SEQ ID NO: 1689091 - DNA, 15 bp, Homo sapiens
tctgcagctactttt

SEQ ID NO: 1689092 - DNA, 15 bp, Homo sapiens
ctgcagctacttttg

SEQ ID NO: 1689093 - DNA, 15 bp, Homo sapiens
tgcagctacttttgc

SEQ ID NO: 1689094 - DNA, 15 bp, Homo sapiens
gcagctacttttgca

SEQ ID NO: 1689095 - DNA, 15 bp, Homo sapiens
cagctacttttgcat

SEQ ID NO: 1689096 - DNA, 15 bp, Homo sapiens
agctacttttgcatt

SEQ ID NO: 1689097 - DNA, 15 bp, Homo sapiens
gctacttttgcatta

SEQ ID NO: 1689098 - DNA, 15 bp, Homo sapiens
ctacttttgcattac

SEQ ID NO: 1689099 - DNA, 15 bp, Homo sapiens
tacttttgcattaca

SEQ ID NO: 1689100 - DNA, 15 bp, Homo sapiens
acttttgcattacaa

SEQ ID NO: 1689101 - DNA, 15 bp, Homo sapiens
cttttgcattacaat

SEQ ID NO: 1689102 - DNA, 15 bp, Homo sapiens
ttttgcattacaatg

SEQ ID NO: 1689103 - DNA, 15 bp, Homo sapiens
tttgcattacaatgg

SEQ ID NO: 1689104 - DNA, 15 bp, Homo sapiens
ttgcattacaatggc

SEQ ID NO: 1689105 - DNA, 15 bp, Homo sapiens
tgcattacaatggcc

SEQ ID NO: 1689106 - DNA, 15 bp, Homo sapiens
gcattacaatggcct

SEQ ID NO: 1689107 - DNA, 15 bp, Homo sapiens
cattacaatggcctt

SEQ ID NO: 1689108 - DNA, 15 bp, Homo sapiens
attacaatggccttg

SEQ ID NO: 1689109 - DNA, 15 bp, Homo sapiens
ttacaatggccttgg

SEQ ID NO: 1689110 - DNA, 15 bp, Homo sapiens
tacaatggccttggt

SEQ ID NO: 1689111 - DNA, 15 bp, Homo sapiens
caatggccttggtga

SEQ ID NO: 1689112 - DNA, 15 bp, Homo sapiens
aatggccttggtgag

SEQ ID NO: 1689113 - DNA, 15 bp, Homo sapiens
atggccttggtgaga

SEQ ID NO: 1689114 - DNA, 15 bp, Homo sapiens
tggccttggtgagac

SEQ ID NO: 1689115 - DNA, 15 bp, Homo sapiens
ggccttggtgagact

SEQ ID NO: 1689116 - DNA, 15 bp, Homo sapiens
gccttggtgagactg

SEQ ID NO: 1689117 - DNA, 15 bp, Homo sapiens
ccttggtgagactgg

SEQ ID NO: 1689118 - DNA, 15 bp, Homo sapiens
cttggtgagactggt

SEQ ID NO: 1689119 - DNA, 15 bp, Homo sapiens
ttggtgagactggta

SEQ ID NO: 1689120 - DNA, 15 bp, Homo sapiens
tggtgagactggtag

SEQ ID NO: 1689121 - DNA, 15 bp, Homo sapiens
ggtgagactggtaga

SEQ ID NO: 1689122 - DNA, 15 bp, Homo sapiens
gtgagactggtagac

SEQ ID NO: 1689123 - DNA, 15 bp, Homo sapiens
tgagactggtagacg

SEQ ID NO: 1689124 - DNA, 15 bp, Homo sapiens
gagactggtagacgg

SEQ ID NO: 1689125 - DNA, 15 bp, Homo sapiens
agactggtagacggg

SEQ ID NO: 1689126 - DNA, 15 bp, Homo sapiens
gactggtagacggga

SEQ ID NO: 1689127 - DNA, 15 bp, Homo sapiens
actggtagacgggat

SEQ ID NO: 1689128 - DNA, 15 bp, Homo sapiens
ctggtagacgggatt

SEQ ID NO: 1689129 - DNA, 15 bp, Homo sapiens
tggtagacgggatta

SEQ ID NO: 1689130 - DNA, 15 bp, Homo sapiens
ggtagacgggattaa

SEQ ID NO: 1689131 - DNA, 15 bp, Homo sapiens
gtagacgggattaac

SEQ ID NO: 1689132 - DNA, 15 bp, Homo sapiens
tagacgggattaact

SEQ ID NO: 1689133 - DNA, 15 bp, Homo sapiens
agacgggattaactg

SEQ ID NO: 1689134 - DNA, 15 bp, Homo sapiens
gacgggattaactga

SEQ ID NO: 1689135 - DNA, 15 bp, Homo sapiens
acgggattaactgag

SEQ ID NO: 1689136 - DNA, 15 bp, Homo sapiens
cgggattaactgaga

SEQ ID NO: 1689137 - DNA, 15 bp, Homo sapiens
gggattaactgagaa

SEQ ID NO: 1689138 - DNA, 15 bp, Homo sapiens
ggattaactgagaat

SEQ ID NO: 1689139 - DNA, 15 bp, Homo sapiens
gattaactgagaatt

SEQ ID NO: 1689140 - DNA, 15 bp, Homo sapiens
attaactgagaattc

SEQ ID NO: 1689141 - DNA, 15 bp, Homo sapiens
ttaactgagaattca

SEQ ID NO: 1689142 - DNA, 15 bp, Homo sapiens
taactgagaattcac

SEQ ID NO: 1689143 - DNA, 15 bp, Homo sapiens
aactgagaattcaca

SEQ ID NO: 1689144 - DNA, 15 bp, Homo sapiens
actgagaattcacaa

SEQ ID NO: 1689145 - DNA, 15 bp, Homo sapiens
ctgagaattcacaag

SEQ ID NO: 1689146 - DNA, 15 bp, Homo sapiens
tgagaattcacaagg

SEQ ID NO: 1689147 - DNA, 15 bp, Homo sapiens
gagaattcacaaggg

SEQ ID NO: 1689148 - DNA, 15 bp, Homo sapiens
agaattcacaagggt

SEQ ID NO: 1689149 - DNA, 15 bp, Homo sapiens
gaattcacaagggtg

SEQ ID NO: 1689150 - DNA, 15 bp, Homo sapiens
aattcacaagggtgg

SEQ ID NO: 1689151 - DNA, 15 bp, Homo sapiens
attcacaagggtggg

SEQ ID NO: 1689152 - DNA, 15 bp, Homo sapiens
ttcacaagggtgggt

SEQ ID NO: 1689153 - DNA, 15 bp, Homo sapiens
tcacaagggtgggtc

SEQ ID NO: 1689154 - DNA, 15 bp, Homo sapiens
cacaagggtgggtca

SEQ ID NO: 1689155 - DNA, 15 bp, Homo sapiens
acaagggtgggtcag

SEQ ID NO: 1689156 - DNA, 15 bp, Homo sapiens
caagggtgggtcagt

SEQ ID NO: 1689157 - DNA, 15 bp, Homo sapiens
aagggtgggtcagta

SEQ ID NO: 1689158 - DNA, 15 bp, Homo sapiens
agggtgggtcagtag

SEQ ID NO: 1689159 - DNA, 15 bp, Homo sapiens
gggtgggtcagtagg

SEQ ID NO: 1689160 - DNA, 15 bp, Homo sapiens
ggtgggtcagtaggg

SEQ ID NO: 1689161 - DNA, 15 bp, Homo sapiens
gtgggtcagtagggg

SEQ ID NO: 1689162 - DNA, 15 bp, Homo sapiens
tgggtcagtaggggg

SEQ ID NO: 1689163 - DNA, 15 bp, Homo sapiens
gggtcagtagggggt

SEQ ID NO: 1689164 - DNA, 15 bp, Homo sapiens
ggtcagtagggggtg

SEQ ID NO: 1689165 - DNA, 15 bp, Homo sapiens
gtcagtagggggtgt

SEQ ID NO: 1689166 - DNA, 15 bp, Homo sapiens
tcagtagggggtgtg

SEQ ID NO: 1689167 - DNA, 15 bp, Homo sapiens
cagtagggggtgtgc

SEQ ID NO: 1689168 - DNA, 15 bp, Homo sapiens
agtagggggtgtgcc

SEQ ID NO: 1689169 - DNA, 15 bp, Homo sapiens
gtagggggtgtgccc

SEQ ID NO: 1689170 - DNA, 15 bp, Homo sapiens
tagggggtgtgcccg

SEQ ID NO: 1689171 - DNA, 15 bp, Homo sapiens
agggggtgtgcccgc

SEQ ID NO: 1689172 - DNA, 15 bp, Homo sapiens
gggggtgtgcccgcc

SEQ ID NO: 1689173 - DNA, 15 bp, Homo sapiens
ggggtgtgcccgcca

SEQ ID NO: 1689174 - DNA, 15 bp, Homo sapiens
gggtgtgcccgccag

SEQ ID NO: 1689175 - DNA, 15 bp, Homo sapiens
ggtgtgcccgccagg

SEQ ID NO: 1689176 - DNA, 15 bp, Homo sapiens
gtgtgcccgccagga

SEQ ID NO: 1689177 - DNA, 15 bp, Homo sapiens
tgtgcccgccaggag

SEQ ID NO: 1689178 - DNA, 15 bp, Homo sapiens
gtgcccgccaggagg

SEQ ID NO: 1689179 - DNA, 15 bp, Homo sapiens
tgcccgccaggaggg

SEQ ID NO: 1689180 - DNA, 15 bp, Homo sapiens
gcccgccaggagggg

SEQ ID NO: 1689181 - DNA, 15 bp, Homo sapiens
cccgccaggaggggt

SEQ ID NO: 1689182 - DNA, 15 bp, Homo sapiens
ccgccaggaggggtg

SEQ ID NO: 1689183 - DNA, 15 bp, Homo sapiens
cgccaggaggggtgg

SEQ ID NO: 1689184 - DNA, 15 bp, Homo sapiens
gccaggaggggtggg

SEQ ID NO: 1689185 - DNA, 15 bp, Homo sapiens
ccaggaggggtgggt

SEQ ID NO: 1689186 - DNA, 15 bp, Homo sapiens
caggaggggtgggtc

SEQ ID NO: 1689187 - DNA, 15 bp, Homo sapiens
aggaggggtgggtct

SEQ ID NO: 1689188 - DNA, 15 bp, Homo sapiens
ggaggggtgggtcta

SEQ ID NO: 1689189 - DNA, 15 bp, Homo sapiens
gaggggtgggtctaa

SEQ ID NO: 1689190 - DNA, 15 bp, Homo sapiens
aggggtgggtctaag

SEQ ID NO: 1689191 - DNA, 15 bp, Homo sapiens
ggggtgggtctaagg

SEQ ID NO: 1689192 - DNA, 15 bp, Homo sapiens
gggtgggtctaaggt

SEQ ID NO: 1689193 - DNA, 15 bp, Homo sapiens
ggtgggtctaaggtg

SEQ ID NO: 1689194 - DNA, 15 bp, Homo sapiens
gtgggtctaaggtga

SEQ ID NO: 1689195 - DNA, 15 bp, Homo sapiens
tgggtctaaggtgat

SEQ ID NO: 1689196 - DNA, 15 bp, Homo sapiens
gggtctaaggtgata

SEQ ID NO: 1689197 - DNA, 15 bp, Homo sapiens
ggtctaaggtgatag

SEQ ID NO: 1689198 - DNA, 15 bp, Homo sapiens
gtctaaggtgataga

SEQ ID NO: 1689199 - DNA, 15 bp, Homo sapiens
tctaaggtgatagag

SEQ ID NO: 1689200 - DNA, 15 bp, Homo sapiens
ctaaggtgatagagc

SEQ ID NO: 1689201 - DNA, 15 bp, Homo sapiens
taaggtgatagagcc

SEQ ID NO: 1689202 - DNA, 15 bp, Homo sapiens
aaggtgatagagcct

SEQ ID NO: 1689203 - DNA, 15 bp, Homo sapiens
aggtgatagagcctt

SEQ ID NO: 1689204 - DNA, 15 bp, Homo sapiens
ggtgatagagccttc

SEQ ID NO: 1689205 - DNA, 15 bp, Homo sapiens
gtgatagagccttca

SEQ ID NO: 1689206 - DNA, 15 bp, Homo sapiens
tgatagagccttcat

SEQ ID NO: 1689207 - DNA, 15 bp, Homo sapiens
gatagagccttcatt

SEQ ID NO: 1689208 - DNA, 15 bp, Homo sapiens
atagagccttcatta

SEQ ID NO: 1689209 - DNA, 15 bp, Homo sapiens
tagagccttcattat

SEQ ID NO: 1689210 - DNA, 15 bp, Homo sapiens
agagccttcattata

SEQ ID NO: 1689211 - DNA, 15 bp, Homo sapiens
gagccttcattataa

SEQ ID NO: 1689212 - DNA, 15 bp, Homo sapiens
agccttcattataaa

SEQ ID NO: 1689213 - DNA, 15 bp, Homo sapiens
gccttcattataaat

SEQ ID NO: 1689214 - DNA, 15 bp, Homo sapiens
ccttcattataaatc

SEQ ID NO: 1689215 - DNA, 15 bp, Homo sapiens
cttcattataaatct

SEQ ID NO: 1689216 - DNA, 15 bp, Homo sapiens
ttcattataaatcta

SEQ ID NO: 1689217 - DNA, 15 bp, Homo sapiens
tcattataaatctag

SEQ ID NO: 1689218 - DNA, 15 bp, Homo sapiens
cattataaatctaga

SEQ ID NO: 1689219 - DNA, 15 bp, Homo sapiens
attataaatctagag

SEQ ID NO: 1689220 - DNA, 15 bp, Homo sapiens
ttataaatctagaga

SEQ ID NO: 1689221 - DNA, 15 bp, Homo sapiens
tataaatctagagac

SEQ ID NO: 1689222 - DNA, 15 bp, Homo sapiens
ataaatctagagact

SEQ ID NO: 1689223 - DNA, 15 bp, Homo sapiens
taaatctagagactc

SEQ ID NO: 1689224 - DNA, 15 bp, Homo sapiens
aaatctagagactcc

SEQ ID NO: 1689225 - DNA, 15 bp, Homo sapiens
aatctagagactcca

SEQ ID NO: 1689226 - DNA, 15 bp, Homo sapiens
atctagagactccag

SEQ ID NO: 1689227 - DNA, 15 bp, Homo sapiens
tctagagactccagg

SEQ ID NO: 1689228 - DNA, 15 bp, Homo sapiens
ctagagactccagga

SEQ ID NO: 1689229 - DNA, 15 bp, Homo sapiens
tagagactccaggat

SEQ ID NO: 1689230 - DNA, 15 bp, Homo sapiens
agagactccaggatt

SEQ ID NO: 1689231 - DNA, 15 bp, Homo sapiens
gagactccaggattt

SEQ ID NO: 1689232 - DNA, 15 bp, Homo sapiens
agactccaggatttt

SEQ ID NO: 1689233 - DNA, 15 bp, Homo sapiens
gactccaggatttta

SEQ ID NO: 1689234 - DNA, 15 bp, Homo sapiens
actccaggattttaa

SEQ ID NO: 1689235 - DNA, 15 bp, Homo sapiens
ctccaggattttaac

SEQ ID NO: 1689236 - DNA, 15 bp, Homo sapiens
tccaggattttaacg

SEQ ID NO: 1689237 - DNA, 15 bp, Homo sapiens
ccaggattttaacgt

SEQ ID NO: 1689238 - DNA, 15 bp, Homo sapiens
caggattttaacgtt

SEQ ID NO: 1689239 - DNA, 15 bp, Homo sapiens
aggattttaacgttc

SEQ ID NO: 1689240 - DNA, 15 bp, Homo sapiens
ggattttaacgttct

SEQ ID NO: 1689241 - DNA, 15 bp, Homo sapiens
gattttaacgttctg

SEQ ID NO: 1689242 - DNA, 15 bp, Homo sapiens
attttaacgttctgc

SEQ ID NO: 1689243 - DNA, 15 bp, Homo sapiens
ttttaacgttctgct

SEQ ID NO: 1689244 - DNA, 15 bp, Homo sapiens
tttaacgttctgctg

SEQ ID NO: 1689245 - DNA, 15 bp, Homo sapiens
ttaacgttctgctgg

SEQ ID NO: 1689246 - DNA, 15 bp, Homo sapiens
taacgttctgctgga

SEQ ID NO: 1689247 - DNA, 15 bp, Homo sapiens
aacgttctgctggac

SEQ ID NO: 1689248 - DNA, 15 bp, Homo sapiens
acgttctgctggact

SEQ ID NO: 1689249 - DNA, 15 bp, Homo sapiens
cgttctgctggactg

SEQ ID NO: 1689250 - DNA, 15 bp, Homo sapiens
gttctgctggactga

SEQ ID NO: 1689251 - DNA, 15 bp, Homo sapiens
ttctgctggactgag

SEQ ID NO: 1689252 - DNA, 15 bp, Homo sapiens
tctgctggactgagc

SEQ ID NO: 1689253 - DNA, 15 bp, Homo sapiens
ctgctggactgagct

SEQ ID NO: 1689254 - DNA, 15 bp, Homo sapiens
tgctggactgagctg

SEQ ID NO: 1689255 - DNA, 15 bp, Homo sapiens
gctggactgagctgg

SEQ ID NO: 1689256 - DNA, 15 bp, Homo sapiens
ctggactgagctggt

SEQ ID NO: 1689257 - DNA, 15 bp, Homo sapiens
tggactgagctggtt

SEQ ID NO: 1689258 - DNA, 15 bp, Homo sapiens
ggactgagctggttg

SEQ ID NO: 1689259 - DNA, 15 bp, Homo sapiens
gactgagctggttgc

SEQ ID NO: 1689260 - DNA, 15 bp, Homo sapiens
actgagctggttgcc

SEQ ID NO: 1689261 - DNA, 15 bp, Homo sapiens
ctgagctggttgcct

SEQ ID NO: 1689262 - DNA, 15 bp, Homo sapiens
tgagctggttgcctc

SEQ ID NO: 1689263 - DNA, 15 bp, Homo sapiens
gagctggttgcctca

SEQ ID NO: 1689264 - DNA, 15 bp, Homo sapiens
agctggttgcctcat

SEQ ID NO: 1689265 - DNA, 15 bp, Homo sapiens
gctggttgcctcatg

SEQ ID NO: 1689266 - DNA, 15 bp, Homo sapiens
ctggttgcctcatgt

SEQ ID NO: 1689267 - DNA, 15 bp, Homo sapiens
tggttgcctcatgtt

SEQ ID NO: 1689268 - DNA, 15 bp, Homo sapiens
ggttgcctcatgtta

SEQ ID NO: 1689269 - DNA, 15 bp, Homo sapiens
gttgcctcatgttat

SEQ ID NO: 1689270 - DNA, 15 bp, Homo sapiens
ttgcctcatgttatt

SEQ ID NO: 1689271 - DNA, 15 bp, Homo sapiens
tgcctcatgttatta

SEQ ID NO: 1689272 - DNA, 15 bp, Homo sapiens
gcctcatgttattat

SEQ ID NO: 1689273 - DNA, 15 bp, Homo sapiens
cctcatgttattatg

SEQ ID NO: 1689274 - DNA, 15 bp, Homo sapiens
ctcatgttattatgc

SEQ ID NO: 1689275 - DNA, 15 bp, Homo sapiens
tcatgttattatgca

SEQ ID NO: 1689276 - DNA, 15 bp, Homo sapiens
catgttattatgcag

SEQ ID NO: 1689277 - DNA, 15 bp, Homo sapiens
atgttattatgcagg

SEQ ID NO: 1689278 - DNA, 15 bp, Homo sapiens
tgttattatgcaggc

SEQ ID NO: 1689279 - DNA, 15 bp, Homo sapiens
gttattatgcaggca

SEQ ID NO: 1689280 - DNA, 15 bp, Homo sapiens
ttattatgcaggcaa

SEQ ID NO: 1689281 - DNA, 15 bp, Homo sapiens
tattatgcaggcaac

SEQ ID NO: 1689282 - DNA, 15 bp, Homo sapiens
attatgcaggcaact

SEQ ID NO: 1689283 - DNA, 15 bp, Homo sapiens
ttatgcaggcaactc

SEQ ID NO: 1689284 - DNA, 15 bp, Homo sapiens
tatgcaggcaactca

SEQ ID NO: 1689285 - DNA, 15 bp, Homo sapiens
atgcaggcaactcac

SEQ ID NO: 1689286 - DNA, 15 bp, Homo sapiens
tgcaggcaactcact

SEQ ID NO: 1689287 - DNA, 15 bp, Homo sapiens
gcaggcaactcactt

SEQ ID NO: 1689288 - DNA, 15 bp, Homo sapiens
caggcaactcacttt

SEQ ID NO: 1689289 - DNA, 15 bp, Homo sapiens
aggcaactcacttta

SEQ ID NO: 1689290 - DNA, 15 bp, Homo sapiens
ggcaactcactttat

SEQ ID NO: 1689291 - DNA, 15 bp, Homo sapiens
gcaactcactttatc

SEQ ID NO: 1689292 - DNA, 15 bp, Homo sapiens
caactcactttatcc

SEQ ID NO: 1689293 - DNA, 15 bp, Homo sapiens
aactcactttatccc

SEQ ID NO: 1689294 - DNA, 15 bp, Homo sapiens
actcactttatccca

SEQ ID NO: 1689295 - DNA, 15 bp, Homo sapiens
ctcactttatcccaa

SEQ ID NO: 1689296 - DNA, 15 bp, Homo sapiens
tcactttatcccaat

SEQ ID NO: 1689297 - DNA, 15 bp, Homo sapiens
cactttatcccaatt

SEQ ID NO: 1689298 - DNA, 15 bp, Homo sapiens
actttatcccaattt

SEQ ID NO: 1689299 - DNA, 15 bp, Homo sapiens
ctttatcccaatttc

SEQ ID NO: 1689300 - DNA, 15 bp, Homo sapiens
tttatcccaatttct

SEQ ID NO: 1689301 - DNA, 15 bp, Homo sapiens
ttatcccaatttctt

SEQ ID NO: 1689302 - DNA, 15 bp, Homo sapiens
tatcccaatttcttg

SEQ ID NO: 1689303 - DNA, 15 bp, Homo sapiens
atcccaatttcttga

SEQ ID NO: 1689304 - DNA, 15 bp, Homo sapiens
tcccaatttcttgat

SEQ ID NO: 1689305 - DNA, 15 bp, Homo sapiens
cccaatttcttgata

SEQ ID NO: 1689306 - DNA, 15 bp, Homo sapiens
ccaatttcttgatac

SEQ ID NO: 1689307 - DNA, 15 bp, Homo sapiens
caatttcttgatact

SEQ ID NO: 1689308 - DNA, 15 bp, Homo sapiens
aatttcttgatactt

SEQ ID NO: 1689309 - DNA, 15 bp, Homo sapiens
atttcttgatacttt

SEQ ID NO: 1689310 - DNA, 15 bp, Homo sapiens
tttcttgatactttt

SEQ ID NO: 1689311 - DNA, 15 bp, Homo sapiens
ttcttgatacttttc

SEQ ID NO: 1689312 - DNA, 15 bp, Homo sapiens
tcttgatacttttcc

SEQ ID NO: 1689313 - DNA, 15 bp, Homo sapiens
cttgatacttttcct

SEQ ID NO: 1689314 - DNA, 15 bp, Homo sapiens
ttgatacttttcctt

SEQ ID NO: 1689315 - DNA, 15 bp, Homo sapiens
tgatacttttccttc

SEQ ID NO: 1689316 - DNA, 15 bp, Homo sapiens
gatacttttccttct

SEQ ID NO: 1689317 - DNA, 15 bp, Homo sapiens
atacttttccttctg

SEQ ID NO: 1689318 - DNA, 15 bp, Homo sapiens
tacttttccttctgg

SEQ ID NO: 1689319 - DNA, 15 bp, Homo sapiens
acttttccttctgga

SEQ ID NO: 1689320 - DNA, 15 bp, Homo sapiens
cttttccttctggag

SEQ ID NO: 1689321 - DNA, 15 bp, Homo sapiens
ttttccttctggagg

SEQ ID NO: 1689322 - DNA, 15 bp, Homo sapiens
tttccttctggaggt

SEQ ID NO: 1689323 - DNA, 15 bp, Homo sapiens
ttccttctggaggtc

SEQ ID NO: 1689324 - DNA, 15 bp, Homo sapiens
tccttctggaggtcc

SEQ ID NO: 1689325 - DNA, 15 bp, Homo sapiens
ccttctggaggtcct

SEQ ID NO: 1689326 - DNA, 15 bp, Homo sapiens
cttctggaggtccta

SEQ ID NO: 1689327 - DNA, 15 bp, Homo sapiens
ttctggaggtcctat

SEQ ID NO: 1689328 - DNA, 15 bp, Homo sapiens
tctggaggtcctatt

SEQ ID NO: 1689329 - DNA, 15 bp, Homo sapiens
ctggaggtcctattt

SEQ ID NO: 1689330 - DNA, 15 bp, Homo sapiens
tggaggtcctatttc

SEQ ID NO: 1689331 - DNA, 15 bp, Homo sapiens
ggaggtcctatttct

SEQ ID NO: 1689332 - DNA, 15 bp, Homo sapiens
gaggtcctatttctc

SEQ ID NO: 1689333 - DNA, 15 bp, Homo sapiens
aggtcctatttctct

SEQ ID NO: 1689334 - DNA, 15 bp, Homo sapiens
ggtcctatttctcta

SEQ ID NO: 1689335 - DNA, 15 bp, Homo sapiens
gtcctatttctctaa

SEQ ID NO: 1689336 - DNA, 15 bp, Homo sapiens
tcctatttctctaac

SEQ ID NO: 1689337 - DNA, 15 bp, Homo sapiens
cctatttctctaaca

SEQ ID NO: 1689338 - DNA, 15 bp, Homo sapiens
ctatttctctaacat

SEQ ID NO: 1689339 - DNA, 15 bp, Homo sapiens
tatttctctaacatc

SEQ ID NO: 1689340 - DNA, 15 bp, Homo sapiens
atttctctaacatct

SEQ ID NO: 1689341 - DNA, 15 bp, Homo sapiens
tttctctaacatctt

SEQ ID NO: 1689342 - DNA, 15 bp, Homo sapiens
ttctctaacatcttc

SEQ ID NO: 1689343 - DNA, 15 bp, Homo sapiens
tctctaacatcttcc

SEQ ID NO: 1689344 - DNA, 15 bp, Homo sapiens
ctctaacatcttcca

SEQ ID NO: 1689345 - DNA, 15 bp, Homo sapiens
tctaacatcttccag

SEQ ID NO: 1689346 - DNA, 15 bp, Homo sapiens
ctaacatcttccaga

SEQ ID NO: 1689347 - DNA, 15 bp, Homo sapiens
taacatcttccagaa

SEQ ID NO: 1689348 - DNA, 15 bp, Homo sapiens
aacatcttccagaaa

SEQ ID NO: 1689349 - DNA, 15 bp, Homo sapiens
acatcttccagaaaa

SEQ ID NO: 1689350 - DNA, 15 bp, Homo sapiens
catcttccagaaaag

SEQ ID NO: 1689351 - DNA, 15 bp, Homo sapiens
atcttccagaaaagt

SEQ ID NO: 1689352 - DNA, 15 bp, Homo sapiens
tcttccagaaaagtc

SEQ ID NO: 1689353 - DNA, 15 bp, Homo sapiens
cttccagaaaagtct

SEQ ID NO: 1689354 - DNA, 15 bp, Homo sapiens
ttccagaaaagtctt

SEQ ID NO: 1689355 - DNA, 15 bp, Homo sapiens
tccagaaaagtctta

SEQ ID NO: 1689356 - DNA, 15 bp, Homo sapiens
ccagaaaagtcttaa

SEQ ID NO: 1689357 - DNA, 15 bp, Homo sapiens
cagaaaagtcttaaa

SEQ ID NO: 1689358 - DNA, 15 bp, Homo sapiens
agaaaagtcttaaag

SEQ ID NO: 1689359 - DNA, 15 bp, Homo sapiens
gaaaagtcttaaagc

SEQ ID NO: 1689360 - DNA, 15 bp, Homo sapiens
aaaagtcttaaagct

SEQ ID NO: 1689361 - DNA, 15 bp, Homo sapiens
aaagtcttaaagctg

SEQ ID NO: 1689362 - DNA, 15 bp, Homo sapiens
aagtcttaaagctgc

SEQ ID NO: 1689363 - DNA, 15 bp, Homo sapiens
agtcttaaagctgcc

SEQ ID NO: 1689364 - DNA, 15 bp, Homo sapiens
gtcttaaagctgcct

SEQ ID NO: 1689365 - DNA, 15 bp, Homo sapiens
tcttaaagctgcctt

SEQ ID NO: 1689366 - DNA, 15 bp, Homo sapiens
cttaaagctgcctta

SEQ ID NO: 1689367 - DNA, 15 bp, Homo sapiens
ttaaagctgccttaa

SEQ ID NO: 1689368 - DNA, 15 bp, Homo sapiens
taaagctgccttaac

SEQ ID NO: 1689369 - DNA, 15 bp, Homo sapiens
aaagctgccttaacc

SEQ ID NO: 1689370 - DNA, 15 bp, Homo sapiens
aagctgccttaacct

SEQ ID NO: 1689371 - DNA, 15 bp, Homo sapiens
agctgccttaacctt

SEQ ID NO: 1689372 - DNA, 15 bp, Homo sapiens
gctgccttaaccttt

SEQ ID NO: 1689373 - DNA, 15 bp, Homo sapiens
ctgccttaacctttt

SEQ ID NO: 1689374 - DNA, 15 bp, Homo sapiens
tgccttaaccttttt

SEQ ID NO: 1689375 - DNA, 15 bp, Homo sapiens
gccttaacctttttt

SEQ ID NO: 1689376 - DNA, 15 bp, Homo sapiens
ccttaaccttttttc

SEQ ID NO: 1689377 - DNA, 15 bp, Homo sapiens
cttaaccttttttcc

SEQ ID NO: 1689378 - DNA, 15 bp, Homo sapiens
ttaaccttttttcca

SEQ ID NO: 1689379 - DNA, 15 bp, Homo sapiens
taaccttttttccag

SEQ ID NO: 1689380 - DNA, 15 bp, Homo sapiens
aaccttttttccagt

SEQ ID NO: 1689381 - DNA, 15 bp, Homo sapiens
accttttttccagtc

SEQ ID NO: 1689382 - DNA, 15 bp, Homo sapiens
ccttttttccagtcc

SEQ ID NO: 1689383 - DNA, 15 bp, Homo sapiens
cttttttccagtcca

SEQ ID NO: 1689384 - DNA, 15 bp, Homo sapiens
ttttttccagtccac

SEQ ID NO: 1689385 - DNA, 15 bp, Homo sapiens
tttttccagtccacc

SEQ ID NO: 1689386 - DNA, 15 bp, Homo sapiens
ttttccagtccacct

SEQ ID NO: 1689387 - DNA, 15 bp, Homo sapiens
ccttgctttgaagca

SEQ ID NO: 1689388 - DNA, 15 bp, Homo sapiens
cttgctttgaagcat

SEQ ID NO: 1689389 - DNA, 15 bp, Homo sapiens
ttgctttgaagcatc

SEQ ID NO: 1689390 - DNA, 15 bp, Homo sapiens
tgctttgaagcatcc

SEQ ID NO: 1689391 - DNA, 15 bp, Homo sapiens
gctttgaagcatccg

SEQ ID NO: 1689392 - DNA, 15 bp, Homo sapiens
ctttgaagcatccga

SEQ ID NO: 1689393 - DNA, 15 bp, Homo sapiens
tttgaagcatccgac

SEQ ID NO: 1689394 - DNA, 15 bp, Homo sapiens
ttgaagcatccgact

SEQ ID NO: 1689395 - DNA, 15 bp, Homo sapiens
tgaagcatccgactg

SEQ ID NO: 1689396 - DNA, 15 bp, Homo sapiens
gaagcatccgactgt

SEQ ID NO: 1689397 - DNA, 15 bp, Homo sapiens
aagcatccgactgta

SEQ ID NO: 1689398 - DNA, 15 bp, Homo sapiens
agcatccgactgtaa

SEQ ID NO: 1689399 - DNA, 15 bp, Homo sapiens
gcatccgactgtaaa

SEQ ID NO: 1689400 - DNA, 15 bp, Homo sapiens
catccgactgtaaag

SEQ ID NO: 1689401 - DNA, 15 bp, Homo sapiens
atccgactgtaaaga

SEQ ID NO: 1689402 - DNA, 15 bp, Homo sapiens
tccgactgtaaagaa

SEQ ID NO: 1689403 - DNA, 15 bp, Homo sapiens
ccgactgtaaagaat

SEQ ID NO: 1689404 - DNA, 15 bp, Homo sapiens
cgactgtaaagaatc

SEQ ID NO: 1689405 - DNA, 15 bp, Homo sapiens
gactgtaaagaatct

SEQ ID NO: 1689406 - DNA, 15 bp, Homo sapiens
actgtaaagaatctt

SEQ ID NO: 1689407 - DNA, 15 bp, Homo sapiens
ctgtaaagaatcttc

SEQ ID NO: 1689408 - DNA, 15 bp, Homo sapiens
tgtaaagaatcttca

SEQ ID NO: 1689409 - DNA, 15 bp, Homo sapiens
gtaaagaatcttcac

SEQ ID NO: 1689410 - DNA, 15 bp, Homo sapiens
taaagaatcttcacc

SEQ ID NO: 1689411 - DNA, 15 bp, Homo sapiens
aaagaatcttcacct

SEQ ID NO: 1689412 - DNA, 15 bp, Homo sapiens
aagaatcttcaccta

SEQ ID NO: 1689413 - DNA, 15 bp, Homo sapiens
agaatcttcacctat

SEQ ID NO: 1689414 - DNA, 15 bp, Homo sapiens
gaatcttcacctatg

SEQ ID NO: 1689415 - DNA, 15 bp, Homo sapiens
aatcttcacctatgc

SEQ ID NO: 1689416 - DNA, 15 bp, Homo sapiens
atcttcacctatgcc

SEQ ID NO: 1689417 - DNA, 15 bp, Homo sapiens
tcttcacctatgcct

SEQ ID NO: 1689418 - DNA, 15 bp, Homo sapiens
cttcacctatgcctg

SEQ ID NO: 1689419 - DNA, 15 bp, Homo sapiens
ttcacctatgcctgt

SEQ ID NO: 1689420 - DNA, 15 bp, Homo sapiens
tcacctatgcctgtg

SEQ ID NO: 1689421 - DNA, 15 bp, Homo sapiens
cacctatgcctgtga

SEQ ID NO: 1689422 - DNA, 15 bp, Homo sapiens
acctatgcctgtgat

SEQ ID NO: 1689423 - DNA, 15 bp, Homo sapiens
cctatgcctgtgatt

SEQ ID NO: 1689424 - DNA, 15 bp, Homo sapiens
ctatgcctgtgattt

SEQ ID NO: 1689425 - DNA, 15 bp, Homo sapiens
tatgcctgtgatttg

SEQ ID NO: 1689426 - DNA, 15 bp, Homo sapiens
atgcctgtgatttgt

SEQ ID NO: 1689427 - DNA, 15 bp, Homo sapiens
tgcctgtgatttgtg

SEQ ID NO: 1689428 - DNA, 15 bp, Homo sapiens
gtgaaggacaaggtt

SEQ ID NO: 1689429 - DNA, 15 bp, Homo sapiens
tgaaggacaaggtta

SEQ ID NO: 1689430 - DNA, 15 bp, Homo sapiens
gaaggacaaggttaa

SEQ ID NO: 1689431 - DNA, 15 bp, Homo sapiens
aaggacaaggttaat

SEQ ID NO: 1689432 - DNA, 15 bp, Homo sapiens
aggacaaggttaatt

SEQ ID NO: 1689433 - DNA, 15 bp, Homo sapiens
ggacaaggttaattc

SEQ ID NO: 1689434 - DNA, 15 bp, Homo sapiens
gacaaggttaattct

SEQ ID NO: 1689435 - DNA, 15 bp, Homo sapiens
acaaggttaattcta

SEQ ID NO: 1689436 - DNA, 15 bp, Homo sapiens
caaggttaattctac

SEQ ID NO: 1689437 - DNA, 15 bp, Homo sapiens
aaggttaattctact

SEQ ID NO: 1689438 - DNA, 15 bp, Homo sapiens
aggttaattctactc

SEQ ID NO: 1689439 - DNA, 15 bp, Homo sapiens
ggttaattctactct

SEQ ID NO: 1689440 - DNA, 15 bp, Homo sapiens
gttaattctactctg

SEQ ID NO: 1689441 - DNA, 15 bp, Homo sapiens
ttaattctactctga

SEQ ID NO: 1689442 - DNA, 15 bp, Homo sapiens
taattctactctgag

SEQ ID NO: 1689443 - DNA, 15 bp, Homo sapiens
aattctactctgagt

SEQ ID NO: 1689444 - DNA, 15 bp, Homo sapiens
attctactctgagta

SEQ ID NO: 1689445 - DNA, 15 bp, Homo sapiens
ttctactctgagtaa

SEQ ID NO: 1689446 - DNA, 15 bp, Homo sapiens
tctactctgagtaat

SEQ ID NO: 1689447 - DNA, 15 bp, Homo sapiens
ctactctgagtaatt

SEQ ID NO: 1689448 - DNA, 15 bp, Homo sapiens
tactctgagtaattc

SEQ ID NO: 1689449 - DNA, 15 bp, Homo sapiens
actctgagtaattct

SEQ ID NO: 1689450 - DNA, 15 bp, Homo sapiens
ctctgagtaattcta

SEQ ID NO: 1689451 - DNA, 15 bp, Homo sapiens
tctgagtaattctac

SEQ ID NO: 1689452 - DNA, 15 bp, Homo sapiens
ctgagtaattctacc

SEQ ID NO: 1689453 - DNA, 15 bp, Homo sapiens
tgagtaattctaccg

SEQ ID NO: 1689454 - DNA, 15 bp, Homo sapiens
gagtaattctaccgt

SEQ ID NO: 1689455 - DNA, 15 bp, Homo sapiens
agtaattctaccgtt

SEQ ID NO: 1689456 - DNA, 15 bp, Homo sapiens
gtaattctaccgttc

SEQ ID NO: 1689457 - DNA, 15 bp, Homo sapiens
taattctaccgttca

SEQ ID NO: 1689458 - DNA, 15 bp, Homo sapiens
aattctaccgttcag

SEQ ID NO: 1689459 - DNA, 15 bp, Homo sapiens
attctaccgttcaga

SEQ ID NO: 1689460 - DNA, 15 bp, Homo sapiens
ttctaccgttcagaa

SEQ ID NO: 1689461 - DNA, 15 bp, Homo sapiens
tctaccgttcagaaa

SEQ ID NO: 1689462 - DNA, 15 bp, Homo sapiens
ctaccgttcagaaaa

SEQ ID NO: 1689463 - DNA, 15 bp, Homo sapiens
taccgttcagaaaac

SEQ ID NO: 1689464 - DNA, 15 bp, Homo sapiens
accgttcagaaaacc

SEQ ID NO: 1689465 - DNA, 15 bp, Homo sapiens
ccgttcagaaaacct

SEQ ID NO: 1689466 - DNA, 15 bp, Homo sapiens
cgttcagaaaacctg

SEQ ID NO: 1689467 - DNA, 15 bp, Homo sapiens
gttcagaaaacctgg

SEQ ID NO: 1689468 - DNA, 15 bp, Homo sapiens
ttcagaaaacctggt

SEQ ID NO: 1689469 - DNA, 15 bp, Homo sapiens
tcagaaaacctggtg

SEQ ID NO: 1689470 - DNA, 15 bp, Homo sapiens
cagaaaacctggtgt

SEQ ID NO: 1689471 - DNA, 15 bp, Homo sapiens
agaaaacctggtgtg

SEQ ID NO: 1689472 - DNA, 15 bp, Homo sapiens
gaaaacctggtgtgt

SEQ ID NO: 1689473 - DNA, 15 bp, Homo sapiens
aaaacctggtgtgtc

SEQ ID NO: 1689474 - DNA, 15 bp, Homo sapiens
aaacctggtgtgtct

SEQ ID NO: 1689475 - DNA, 15 bp, Homo sapiens
aacctggtgtgtcta

SEQ ID NO: 1689476 - DNA, 15 bp, Homo sapiens
acctggtgtgtctac

SEQ ID NO: 1689477 - DNA, 15 bp, Homo sapiens
cctggtgtgtctaca

SEQ ID NO: 1689478 - DNA, 15 bp, Homo sapiens
ctggtgtgtctacag

SEQ ID NO: 1689479 - DNA, 15 bp, Homo sapiens
tggtgtgtctacagg

SEQ ID NO: 1689480 - DNA, 15 bp, Homo sapiens
ggtgtgtctacagga

SEQ ID NO: 1689481 - DNA, 15 bp, Homo sapiens
gtgtgtctacaggaa

SEQ ID NO: 1689482 - DNA, 15 bp, Homo sapiens
tgtgtctacaggaaa

SEQ ID NO: 1689483 - DNA, 15 bp, Homo sapiens
gtgtctacaggaaaa

SEQ ID NO: 1689484 - DNA, 15 bp, Homo sapiens
tgtctacaggaaaaa

SEQ ID NO: 1689485 - DNA, 15 bp, Homo sapiens
gtctacaggaaaaaa

SEQ ID NO: 1689486 - DNA, 15 bp, Homo sapiens
tctacaggaaaaaat

SEQ ID NO: 1689487 - DNA, 15 bp, Homo sapiens
ctacaggaaaaaata

SEQ ID NO: 1689488 - DNA, 15 bp, Homo sapiens
tacaggaaaaaatac

SEQ ID NO: 1689489 - DNA, 15 bp, Homo sapiens
acaggaaaaaataca

SEQ ID NO: 1689490 - DNA, 15 bp, Homo sapiens
ggaaaaaatacaggc

SEQ ID NO: 1689491 - DNA, 15 bp, Homo sapiens
gaaaaaatacaggct

SEQ ID NO: 1689492 - DNA, 15 bp, Homo sapiens
aaaaaatacaggctg

SEQ ID NO: 1689493 - DNA, 15 bp, Homo sapiens
aaaaatacaggctgt

SEQ ID NO: 1689494 - DNA, 15 bp, Homo sapiens
aaaatacaggctgtg

SEQ ID NO: 1689495 - DNA, 15 bp, Homo sapiens
aaatacaggctgtga

SEQ ID NO: 1689496 - DNA, 15 bp, Homo sapiens
aatacaggctgtgac

SEQ ID NO: 1689497 - DNA, 15 bp, Homo sapiens
atacaggctgtgact

SEQ ID NO: 1689498 - DNA, 15 bp, Homo sapiens
tacaggctgtgacta

SEQ ID NO: 1689499 - DNA, 15 bp, Homo sapiens
acaggctgtgactac

SEQ ID NO: 1689500 - DNA, 15 bp, Homo sapiens
caggctgtgactaca

SEQ ID NO: 1689501 - DNA, 15 bp, Homo sapiens
aggctgtgactacaa

SEQ ID NO: 1689502 - DNA, 15 bp, Homo sapiens
ggctgtgactacaaa

SEQ ID NO: 1689503 - DNA, 15 bp, Homo sapiens
gctgtgactacaaac

SEQ ID NO: 1689504 - DNA, 15 bp, Homo sapiens
ctgtgactacaaacc

SEQ ID NO: 1689505 - DNA, 15 bp, Homo sapiens
tgtgactacaaacct

SEQ ID NO: 1689506 - DNA, 15 bp, Homo sapiens
gtgactacaaaccta

SEQ ID NO: 1689507 - DNA, 15 bp, Homo sapiens
tgactacaaacctaa

SEQ ID NO: 1689508 - DNA, 15 bp, Homo sapiens
gactacaaacctaaa

SEQ ID NO: 1689509 - DNA, 15 bp, Homo sapiens
actacaaacctaaaa

SEQ ID NO: 1689510 - DNA, 15 bp, Homo sapiens
ctacaaacctaaaag

SEQ ID NO: 1689511 - DNA, 15 bp, Homo sapiens
tacaaacctaaaagt

SEQ ID NO: 1689512 - DNA, 15 bp, Homo sapiens
acaaacctaaaagta

SEQ ID NO: 1689513 - DNA, 15 bp, Homo sapiens
caaacctaaaagtaa

SEQ ID NO: 1689514 - DNA, 15 bp, Homo sapiens
aaacctaaaagtaaa

SEQ ID NO: 1689515 - DNA, 15 bp, Homo sapiens
aacctaaaagtaaag

SEQ ID NO: 1689516 - DNA, 15 bp, Homo sapiens
acctaaaagtaaagg

SEQ ID NO: 1689517 - DNA, 15 bp, Homo sapiens
cctaaaagtaaaggc

SEQ ID NO: 1689518 - DNA, 15 bp, Homo sapiens
ctaaaagtaaaggca

SEQ ID NO: 1689519 - DNA, 15 bp, Homo sapiens
taaaagtaaaggcaa

SEQ ID NO: 1689520 - DNA, 15 bp, Homo sapiens
aaaagtaaaggcaaa

SEQ ID NO: 1689521 - DNA, 15 bp, Homo sapiens
aaagtaaaggcaaac

SEQ ID NO: 1689522 - DNA, 15 bp, Homo sapiens
aagtaaaggcaaaca

SEQ ID NO: 1689523 - DNA, 15 bp, Homo sapiens
agtaaaggcaaacaa

SEQ ID NO: 1689524 - DNA, 15 bp, Homo sapiens
gtaaaggcaaacaac

SEQ ID NO: 1689525 - DNA, 15 bp, Homo sapiens
taaaggcaaacaact

SEQ ID NO: 1689526 - DNA, 15 bp, Homo sapiens
aaaggcaaacaactg

SEQ ID NO: 1689527 - DNA, 15 bp, Homo sapiens
aaggcaaacaactgc

SEQ ID NO: 1689528 - DNA, 15 bp, Homo sapiens
aggcaaacaactgcc

SEQ ID NO: 1689529 - DNA, 15 bp, Homo sapiens
ggcaaacaactgcca

SEQ ID NO: 1689530 - DNA, 15 bp, Homo sapiens
gcaaacaactgccag

SEQ ID NO: 1689531 - DNA, 15 bp, Homo sapiens
caaacaactgccaga

SEQ ID NO: 1689532 - DNA, 15 bp, Homo sapiens
aaacaactgccagac

SEQ ID NO: 1689533 - DNA, 15 bp, Homo sapiens
aacaactgccagaca

SEQ ID NO: 1689534 - DNA, 15 bp, Homo sapiens
acaactgccagacag

SEQ ID NO: 1689535 - DNA, 15 bp, Homo sapiens
caactgccagacaga

SEQ ID NO: 1689536 - DNA, 15 bp, Homo sapiens
aactgccagacagag

SEQ ID NO: 1689537 - DNA, 15 bp, Homo sapiens
actgccagacagagg

SEQ ID NO: 1689538 - DNA, 15 bp, Homo sapiens
ctgccagacagaggc

SEQ ID NO: 1689539 - DNA, 15 bp, Homo sapiens
tgccagacagaggca

SEQ ID NO: 1689540 - DNA, 15 bp, Homo sapiens
gccagacagaggcag

SEQ ID NO: 1689541 - DNA, 15 bp, Homo sapiens
ccagacagaggcagg

SEQ ID NO: 1689542 - DNA, 15 bp, Homo sapiens
cagacagaggcagga

SEQ ID NO: 1689543 - DNA, 15 bp, Homo sapiens
agacagaggcaggaa

SEQ ID NO: 1689544 - DNA, 15 bp, Homo sapiens
gacagaggcaggaaa

SEQ ID NO: 1689545 - DNA, 15 bp, Homo sapiens
acagaggcaggaaag

SEQ ID NO: 1689546 - DNA, 15 bp, Homo sapiens
cagaggcaggaaagt

SEQ ID NO: 1689547 - DNA, 15 bp, Homo sapiens
agaggcaggaaagtg

SEQ ID NO: 1689548 - DNA, 15 bp, Homo sapiens
gaggcaggaaagtgg

SEQ ID NO: 1689549 - DNA, 15 bp, Homo sapiens
aggcaggaaagtggg

SEQ ID NO: 1689550 - DNA, 15 bp, Homo sapiens
ggcaggaaagtgggg

SEQ ID NO: 1689551 - DNA, 15 bp, Homo sapiens
gcaggaaagtggggg

SEQ ID NO: 1689552 - DNA, 15 bp, Homo sapiens
caggaaagtggggga

SEQ ID NO: 1689553 - DNA, 15 bp, Homo sapiens
aggaaagtgggggag

SEQ ID NO: 1689554 - DNA, 15 bp, Homo sapiens
ggaaagtgggggaga

SEQ ID NO: 1689555 - DNA, 15 bp, Homo sapiens
gaaagtgggggagag

SEQ ID NO: 1689556 - DNA, 15 bp, Homo sapiens
aaagtgggggagagc

SEQ ID NO: 1689557 - DNA, 15 bp, Homo sapiens
aagtgggggagagcc

SEQ ID NO: 1689558 - DNA, 15 bp, Homo sapiens
agtgggggagagccc

SEQ ID NO: 1689559 - DNA, 15 bp, Homo sapiens
gtgggggagagccct

SEQ ID NO: 1689560 - DNA, 15 bp, Homo sapiens
tgggggagagccctt

SEQ ID NO: 1689561 - DNA, 15 bp, Homo sapiens
gggggagagcccttg

SEQ ID NO: 1689562 - DNA, 15 bp, Homo sapiens
ggggagagcccttgg

SEQ ID NO: 1689563 - DNA, 15 bp, Homo sapiens
gggagagcccttggt

SEQ ID NO: 1689564 - DNA, 15 bp, Homo sapiens
ggagagcccttggta

SEQ ID NO: 1689565 - DNA, 15 bp, Homo sapiens
gagagcccttggtaa

SEQ ID NO: 1689566 - DNA, 15 bp, Homo sapiens
agagcccttggtaaa

SEQ ID NO: 1689567 - DNA, 15 bp, Homo sapiens
gagcccttggtaaat

SEQ ID NO: 1689568 - DNA, 15 bp, Homo sapiens
agcccttggtaaata

SEQ ID NO: 1689569 - DNA, 15 bp, Homo sapiens
gcccttggtaaatat

SEQ ID NO: 1689570 - DNA, 15 bp, Homo sapiens
cccttggtaaatatt

SEQ ID NO: 1689571 - DNA, 15 bp, Homo sapiens
ccttggtaaatattg

SEQ ID NO: 1689572 - DNA, 15 bp, Homo sapiens
cttggtaaatattgc

SEQ ID NO: 1689573 - DNA, 15 bp, Homo sapiens
ttggtaaatattgca

SEQ ID NO: 1689574 - DNA, 15 bp, Homo sapiens
tggtaaatattgcat

SEQ ID NO: 1689575 - DNA, 15 bp, Homo sapiens
ggtaaatattgcatg

SEQ ID NO: 1689576 - DNA, 15 bp, Homo sapiens
gtaaatattgcatgc

SEQ ID NO: 1689577 - DNA, 15 bp, Homo sapiens
taaatattgcatgcc

SEQ ID NO: 1689578 - DNA, 15 bp, Homo sapiens
aaatattgcatgcct

SEQ ID NO: 1689579 - DNA, 15 bp, Homo sapiens
aatattgcatgcctc

SEQ ID NO: 1689580 - DNA, 15 bp, Homo sapiens
atattgcatgcctcc

SEQ ID NO: 1689581 - DNA, 15 bp, Homo sapiens
tattgcatgcctcct

SEQ ID NO: 1689582 - DNA, 15 bp, Homo sapiens
attgcatgcctcctg

SEQ ID NO: 1689583 - DNA, 15 bp, Homo sapiens
ttgcatgcctcctgg

SEQ ID NO: 1689584 - DNA, 15 bp, Homo sapiens
tgcatgcctcctggg

SEQ ID NO: 1689585 - DNA, 15 bp, Homo sapiens
gcatgcctcctgggg

SEQ ID NO: 1689586 - DNA, 15 bp, Homo sapiens
catgcctcctggggc

SEQ ID NO: 1689587 - DNA, 15 bp, Homo sapiens
atgcctcctggggcc

SEQ ID NO: 1689588 - DNA, 15 bp, Homo sapiens
tgcctcctggggccc

SEQ ID NO: 1689589 - DNA, 15 bp, Homo sapiens
gcctcctggggcccc

SEQ ID NO: 1689590 - DNA, 15 bp, Homo sapiens
cctcctggggccccc

SEQ ID NO: 1689591 - DNA, 15 bp, Homo sapiens
ctcctggggccccca

SEQ ID NO: 1689592 - DNA, 15 bp, Homo sapiens
tcctggggcccccat

SEQ ID NO: 1689593 - DNA, 15 bp, Homo sapiens
cctggggcccccatg

SEQ ID NO: 1689594 - DNA, 15 bp, Homo sapiens
ctggggcccccatgg

SEQ ID NO: 1689595 - DNA, 15 bp, Homo sapiens
tggggcccccatggg

SEQ ID NO: 1689596 - DNA, 15 bp, Homo sapiens
ggggcccccatgggc

SEQ ID NO: 1689597 - DNA, 15 bp, Homo sapiens
gggcccccatgggct

SEQ ID NO: 1689598 - DNA, 15 bp, Homo sapiens
ggcccccatgggctt

SEQ ID NO: 1689599 - DNA, 15 bp, Homo sapiens
gcccccatgggcttt

SEQ ID NO: 1689600 - DNA, 15 bp, Homo sapiens
cccccatgggctttg

SEQ ID NO: 1689601 - DNA, 15 bp, Homo sapiens
ccccatgggctttga

SEQ ID NO: 1689602 - DNA, 15 bp, Homo sapiens
cccatgggctttgac

SEQ ID NO: 1689603 - DNA, 15 bp, Homo sapiens
ccatgggctttgact

SEQ ID NO: 1689604 - DNA, 15 bp, Homo sapiens
catgggctttgactc

SEQ ID NO: 1689605 - DNA, 15 bp, Homo sapiens
atgggctttgactca

SEQ ID NO: 1689606 - DNA, 15 bp, Homo sapiens
tgggctttgactcaa

SEQ ID NO: 1689607 - DNA, 15 bp, Homo sapiens
gggctttgactcaag

SEQ ID NO: 1689608 - DNA, 15 bp, Homo sapiens
ggctttgactcaagg

SEQ ID NO: 1689609 - DNA, 15 bp, Homo sapiens
gctttgactcaaggg

SEQ ID NO: 1689610 - DNA, 15 bp, Homo sapiens
ctttgactcaagggg

SEQ ID NO: 1689611 - DNA, 15 bp, Homo sapiens
tttgactcaaggggg

SEQ ID NO: 1689612 - DNA, 15 bp, Homo sapiens
ttgactcaaggggga

SEQ ID NO: 1689613 - DNA, 15 bp, Homo sapiens
tgactcaagggggag

SEQ ID NO: 1689614 - DNA, 15 bp, Homo sapiens
gactcaagggggaga

SEQ ID NO: 1689615 - DNA, 15 bp, Homo sapiens
actcaagggggagat

SEQ ID NO: 1689616 - DNA, 15 bp, Homo sapiens
ctcaagggggagatg

SEQ ID NO: 1689617 - DNA, 15 bp, Homo sapiens
tcaagggggagatga

SEQ ID NO: 1689618 - DNA, 15 bp, Homo sapiens
caagggggagatgaa

SEQ ID NO: 1689619 - DNA, 15 bp, Homo sapiens
aagggggagatgaag

SEQ ID NO: 1689620 - DNA, 15 bp, Homo sapiens
agggggagatgaagg

SEQ ID NO: 1689621 - DNA, 15 bp, Homo sapiens
gggggagatgaaggg

SEQ ID NO: 1689622 - DNA, 15 bp, Homo sapiens
ggggagatgaaggga

SEQ ID NO: 1689623 - DNA, 15 bp, Homo sapiens
gggagatgaagggaa

SEQ ID NO: 1689624 - DNA, 15 bp, Homo sapiens
ggagatgaagggaat

SEQ ID NO: 1689625 - DNA, 15 bp, Homo sapiens
gagatgaagggaatt

SEQ ID NO: 1689626 - DNA, 15 bp, Homo sapiens
agatgaagggaattt

SEQ ID NO: 1689627 - DNA, 15 bp, Homo sapiens
gatgaagggaatttg

SEQ ID NO: 1689628 - DNA, 15 bp, Homo sapiens
atgaagggaatttgt

SEQ ID NO: 1689629 - DNA, 15 bp, Homo sapiens
tgaagggaatttgtt

SEQ ID NO: 1689630 - DNA, 15 bp, Homo sapiens
gaagggaatttgtta

SEQ ID NO: 1689631 - DNA, 15 bp, Homo sapiens
aagggaatttgttaa

SEQ ID NO: 1689632 - DNA, 15 bp, Homo sapiens
gaatttgttaaagaa

SEQ ID NO: 1689633 - DNA, 15 bp, Homo sapiens
aatttgttaaagaaa

SEQ ID NO: 1689634 - DNA, 15 bp, Homo sapiens
atttgttaaagaaag

SEQ ID NO: 1689635 - DNA, 15 bp, Homo sapiens
tttgttaaagaaaga

SEQ ID NO: 1689636 - DNA, 15 bp, Homo sapiens
ttgttaaagaaagaa

SEQ ID NO: 1689637 - DNA, 15 bp, Homo sapiens
tgttaaagaaagaag

SEQ ID NO: 1689638 - DNA, 15 bp, Homo sapiens
gttaaagaaagaagt

SEQ ID NO: 1689639 - DNA, 15 bp, Homo sapiens
ttaaagaaagaagtc

SEQ ID NO: 1689640 - DNA, 15 bp, Homo sapiens
taaagaaagaagtca

SEQ ID NO: 1689641 - DNA, 15 bp, Homo sapiens
aaagaaagaagtcac

SEQ ID NO: 1689642 - DNA, 15 bp, Homo sapiens
aagaaagaagtcact

SEQ ID NO: 1689643 - DNA, 15 bp, Homo sapiens
agaaagaagtcactg

SEQ ID NO: 1689644 - DNA, 15 bp, Homo sapiens
gaaagaagtcactgg

SEQ ID NO: 1689645 - DNA, 15 bp, Homo sapiens
aaagaagtcactggg

SEQ ID NO: 1689646 - DNA, 15 bp, Homo sapiens
aagaagtcactggga

SEQ ID NO: 1689647 - DNA, 15 bp, Homo sapiens
agaagtcactgggac

SEQ ID NO: 1689648 - DNA, 15 bp, Homo sapiens
gaagtcactgggaca

SEQ ID NO: 1689649 - DNA, 15 bp, Homo sapiens
aagtcactgggacag

SEQ ID NO: 1689650 - DNA, 15 bp, Homo sapiens
agtcactgggacaga

SEQ ID NO: 1689651 - DNA, 15 bp, Homo sapiens
gtcactgggacagac

SEQ ID NO: 1689652 - DNA, 15 bp, Homo sapiens
tcactgggacagaca

SEQ ID NO: 1689653 - DNA, 15 bp, Homo sapiens
cactgggacagacaa

SEQ ID NO: 1689654 - DNA, 15 bp, Homo sapiens
actgggacagacaaa

SEQ ID NO: 1689655 - DNA, 15 bp, Homo sapiens
ctgggacagacaaaa

SEQ ID NO: 1689656 - DNA, 15 bp, Homo sapiens
tgggacagacaaaag

SEQ ID NO: 1689657 - DNA, 15 bp, Homo sapiens
gggacagacaaaagc

SEQ ID NO: 1689658 - DNA, 15 bp, Homo sapiens
ggacagacaaaagct

SEQ ID NO: 1689659 - DNA, 15 bp, Homo sapiens
gacagacaaaagctt

SEQ ID NO: 1689660 - DNA, 15 bp, Homo sapiens
acagacaaaagcttc

SEQ ID NO: 1689661 - DNA, 15 bp, Homo sapiens
cagacaaaagcttcc

SEQ ID NO: 1689662 - DNA, 15 bp, Homo sapiens
agacaaaagcttccg

SEQ ID NO: 1689663 - DNA, 15 bp, Homo sapiens
gacaaaagcttccgg

SEQ ID NO: 1689664 - DNA, 15 bp, Homo sapiens
acaaaagcttccggc

SEQ ID NO: 1689665 - DNA, 15 bp, Homo sapiens
caaaagcttccggca

SEQ ID NO: 1689666 - DNA, 15 bp, Homo sapiens
aaaagcttccggcac

SEQ ID NO: 1689667 - DNA, 15 bp, Homo sapiens
aaagcttccggcaca

SEQ ID NO: 1689668 - DNA, 15 bp, Homo sapiens
aagcttccggcacag

SEQ ID NO: 1689669 - DNA, 15 bp, Homo sapiens
agcttccggcacagg

SEQ ID NO: 1689670 - DNA, 15 bp, Homo sapiens
gcttccggcacagga

SEQ ID NO: 1689671 - DNA, 15 bp, Homo sapiens
cttccggcacaggaa

SEQ ID NO: 1689672 - DNA, 15 bp, Homo sapiens
ttccggcacaggaag

SEQ ID NO: 1689673 - DNA, 15 bp, Homo sapiens
tccggcacaggaagt

SEQ ID NO: 1689674 - DNA, 15 bp, Homo sapiens
ccggcacaggaagtt

SEQ ID NO: 1689675 - DNA, 15 bp, Homo sapiens
cggcacaggaagtta

SEQ ID NO: 1689676 - DNA, 15 bp, Homo sapiens
ggcacaggaagttag

SEQ ID NO: 1689677 - DNA, 15 bp, Homo sapiens
gcacaggaagttagt

SEQ ID NO: 1689678 - DNA, 15 bp, Homo sapiens
cacaggaagttagtt

SEQ ID NO: 1689679 - DNA, 15 bp, Homo sapiens
acaggaagttagttc

SEQ ID NO: 1689680 - DNA, 15 bp, Homo sapiens
caggaagttagttcg

SEQ ID NO: 1689681 - DNA, 15 bp, Homo sapiens
aggaagttagttcga

SEQ ID NO: 1689682 - DNA, 15 bp, Homo sapiens
ggaagttagttcgac

SEQ ID NO: 1689683 - DNA, 15 bp, Homo sapiens
gaagttagttcgact

SEQ ID NO: 1689684 - DNA, 15 bp, Homo sapiens
aagttagttcgacta

SEQ ID NO: 1689685 - DNA, 15 bp, Homo sapiens
agttagttcgactaa

SEQ ID NO: 1689686 - DNA, 15 bp, Homo sapiens
gttagttcgactaag

SEQ ID NO: 1689687 - DNA, 15 bp, Homo sapiens
ttagttcgactaagg

SEQ ID NO: 1689688 - DNA, 15 bp, Homo sapiens
tagttcgactaagga

SEQ ID NO: 1689689 - DNA, 15 bp, Homo sapiens
agttcgactaaggat

SEQ ID NO: 1689690 - DNA, 15 bp, Homo sapiens
gttcgactaaggata

SEQ ID NO: 1689691 - DNA, 15 bp, Homo sapiens
ttcgactaaggatac

SEQ ID NO: 1689692 - DNA, 15 bp, Homo sapiens
tcgactaaggatacc

SEQ ID NO: 1689693 - DNA, 15 bp, Homo sapiens
cgactaaggataccg

SEQ ID NO: 1689694 - DNA, 15 bp, Homo sapiens
gactaaggataccga

SEQ ID NO: 1689695 - DNA, 15 bp, Homo sapiens
actaaggataccgaa

SEQ ID NO: 1689696 - DNA, 15 bp, Homo sapiens
ctaaggataccgaaa

SEQ ID NO: 1689697 - DNA, 15 bp, Homo sapiens
taaggataccgaaat

SEQ ID NO: 1689698 - DNA, 15 bp, Homo sapiens
aaggataccgaaatg

SEQ ID NO: 1689699 - DNA, 15 bp, Homo sapiens
aggataccgaaatgt

SEQ ID NO: 1689700 - DNA, 15 bp, Homo sapiens
ggataccgaaatgta

SEQ ID NO: 1689701 - DNA, 15 bp, Homo sapiens
gataccgaaatgtag

SEQ ID NO: 1689702 - DNA, 15 bp, Homo sapiens
ataccgaaatgtagg

SEQ ID NO: 1689703 - DNA, 15 bp, Homo sapiens
taccgaaatgtagga

SEQ ID NO: 1689704 - DNA, 15 bp, Homo sapiens
accgaaatgtaggaa

SEQ ID NO: 1689705 - DNA, 15 bp, Homo sapiens
ccgaaatgtaggaat

SEQ ID NO: 1689706 - DNA, 15 bp, Homo sapiens
cgaaatgtaggaatt

SEQ ID NO: 1689707 - DNA, 15 bp, Homo sapiens
gaaatgtaggaattt

SEQ ID NO: 1689708 - DNA, 15 bp, Homo sapiens
aaatgtaggaatttg

SEQ ID NO: 1689709 - DNA, 15 bp, Homo sapiens
aatgtaggaatttga

SEQ ID NO: 1689710 - DNA, 15 bp, Homo sapiens
atgtaggaatttgaa

SEQ ID NO: 1689711 - DNA, 15 bp, Homo sapiens
tgtaggaatttgaat

SEQ ID NO: 1689712 - DNA, 15 bp, Homo sapiens
gtaggaatttgaatg

SEQ ID NO: 1689713 - DNA, 15 bp, Homo sapiens
taggaatttgaatgg

SEQ ID NO: 1689714 - DNA, 15 bp, Homo sapiens
aggaatttgaatggg

SEQ ID NO: 1689715 - DNA, 15 bp, Homo sapiens
ggaatttgaatgggt

SEQ ID NO: 1689716 - DNA, 15 bp, Homo sapiens
gaatttgaatgggtt

SEQ ID NO: 1689717 - DNA, 15 bp, Homo sapiens
aatttgaatgggttc

SEQ ID NO: 1689718 - DNA, 15 bp, Homo sapiens
atttgaatgggttcc

SEQ ID NO: 1689719 - DNA, 15 bp, Homo sapiens
tttgaatgggttcct

SEQ ID NO: 1689720 - DNA, 15 bp, Homo sapiens
ttgaatgggttcctg

SEQ ID NO: 1689721 - DNA, 15 bp, Homo sapiens
tgaatgggttcctgg

SEQ ID NO: 1689722 - DNA, 15 bp, Homo sapiens
gaatgggttcctggg

SEQ ID NO: 1689723 - DNA, 15 bp, Homo sapiens
aatgggttcctgggt

SEQ ID NO: 1689724 - DNA, 15 bp, Homo sapiens
atgggttcctgggtg

SEQ ID NO: 1689725 - DNA, 15 bp, Homo sapiens
tgggttcctgggtgt

SEQ ID NO: 1689726 - DNA, 15 bp, Homo sapiens
gggttcctgggtgtg

SEQ ID NO: 1689727 - DNA, 15 bp, Homo sapiens
ggttcctgggtgtga

SEQ ID NO: 1689728 - DNA, 15 bp, Homo sapiens
gttcctgggtgtgag

SEQ ID NO: 1689729 - DNA, 15 bp, Homo sapiens
ttcctgggtgtgagg

SEQ ID NO: 1689730 - DNA, 15 bp, Homo sapiens
tcctgggtgtgaggt

SEQ ID NO: 1689731 - DNA, 15 bp, Homo sapiens
cctgggtgtgaggtt

SEQ ID NO: 1689732 - DNA, 15 bp, Homo sapiens
ctgggtgtgaggttg

SEQ ID NO: 1689733 - DNA, 15 bp, Homo sapiens
tgggtgtgaggttga

SEQ ID NO: 1689734 - DNA, 15 bp, Homo sapiens
gggtgtgaggttgaa

SEQ ID NO: 1689735 - DNA, 15 bp, Homo sapiens
ggtgtgaggttgaag

SEQ ID NO: 1689736 - DNA, 15 bp, Homo sapiens
gtgtgaggttgaagt

SEQ ID NO: 1689737 - DNA, 15 bp, Homo sapiens
tgtgaggttgaagtg

SEQ ID NO: 1689738 - DNA, 15 bp, Homo sapiens
gtgaggttgaagtga

SEQ ID NO: 1689739 - DNA, 15 bp, Homo sapiens
tgaggttgaagtgaa

SEQ ID NO: 1689740 - DNA, 15 bp, Homo sapiens
gaggttgaagtgaaa

SEQ ID NO: 1689741 - DNA, 15 bp, Homo sapiens
aggttgaagtgaaac

SEQ ID NO: 1689742 - DNA, 15 bp, Homo sapiens
ggttgaagtgaaact

SEQ ID NO: 1689743 - DNA, 15 bp, Homo sapiens
gttgaagtgaaactt

SEQ ID NO: 1689744 - DNA, 15 bp, Homo sapiens
ttgaagtgaaacttg

SEQ ID NO: 1689745 - DNA, 15 bp, Homo sapiens
tgaagtgaaacttga

SEQ ID NO: 1689746 - DNA, 15 bp, Homo sapiens
gaagtgaaacttgat

SEQ ID NO: 1689747 - DNA, 15 bp, Homo sapiens
aagtgaaacttgatt

SEQ ID NO: 1689748 - DNA, 15 bp, Homo sapiens
agtgaaacttgattg

SEQ ID NO: 1689749 - DNA, 15 bp, Homo sapiens
gtgaaacttgattga

SEQ ID NO: 1689750 - DNA, 15 bp, Homo sapiens
tgaaacttgattgaa

SEQ ID NO: 1689751 - DNA, 15 bp, Homo sapiens
gaaacttgattgaaa

SEQ ID NO: 1689752 - DNA, 15 bp, Homo sapiens
aaacttgattgaaaa

SEQ ID NO: 1689753 - DNA, 15 bp, Homo sapiens
aacttgattgaaaag

SEQ ID NO: 1689754 - DNA, 15 bp, Homo sapiens
acttgattgaaaaga

SEQ ID NO: 1689755 - DNA, 15 bp, Homo sapiens
cttgattgaaaagaa

SEQ ID NO: 1689756 - DNA, 15 bp, Homo sapiens
ttgattgaaaagaag

SEQ ID NO: 1689757 - DNA, 15 bp, Homo sapiens
tgattgaaaagaagc

SEQ ID NO: 1689758 - DNA, 15 bp, Homo sapiens
gattgaaaagaagct

SEQ ID NO: 1689759 - DNA, 15 bp, Homo sapiens
attgaaaagaagctg

SEQ ID NO: 1689760 - DNA, 15 bp, Homo sapiens
ttgaaaagaagctgc

SEQ ID NO: 1689761 - DNA, 15 bp, Homo sapiens
tgaaaagaagctgct

SEQ ID NO: 1689762 - DNA, 15 bp, Homo sapiens
gaaaagaagctgctg

SEQ ID NO: 1689763 - DNA, 15 bp, Homo sapiens
aaaagaagctgctgg

SEQ ID NO: 1689764 - DNA, 15 bp, Homo sapiens
aaagaagctgctggt

SEQ ID NO: 1689765 - DNA, 15 bp, Homo sapiens
aagaagctgctggtg

SEQ ID NO: 1689766 - DNA, 15 bp, Homo sapiens
agaagctgctggtgg

SEQ ID NO: 1689767 - DNA, 15 bp, Homo sapiens
gaagctgctggtggt

SEQ ID NO: 1689768 - DNA, 15 bp, Homo sapiens
aagctgctggtggtg

SEQ ID NO: 1689769 - DNA, 15 bp, Homo sapiens
agctgctggtggtga

SEQ ID NO: 1689770 - DNA, 15 bp, Homo sapiens
gctgctggtggtgag

SEQ ID NO: 1689771 - DNA, 15 bp, Homo sapiens
ctgctggtggtgagt

SEQ ID NO: 1689772 - DNA, 15 bp, Homo sapiens
tgctggtggtgagtc

SEQ ID NO: 1689773 - DNA, 15 bp, Homo sapiens
gctggtggtgagtct

SEQ ID NO: 1689774 - DNA, 15 bp, Homo sapiens
ctggtggtgagtctc

SEQ ID NO: 1689775 - DNA, 15 bp, Homo sapiens
tggtggtgagtctct

SEQ ID NO: 1689776 - DNA, 15 bp, Homo sapiens
ggtggtgagtctctc

SEQ ID NO: 1689777 - DNA, 15 bp, Homo sapiens
gtggtgagtctctcc

SEQ ID NO: 1689778 - DNA, 15 bp, Homo sapiens
tggtgagtctctcct

SEQ ID NO: 1689779 - DNA, 15 bp, Homo sapiens
ggtgagtctctcctt

SEQ ID NO: 1689780 - DNA, 15 bp, Homo sapiens
gtgagtctctcctta

SEQ ID NO: 1689781 - DNA, 15 bp, Homo sapiens
tgagtctctccttaa

SEQ ID NO: 1689782 - DNA, 15 bp, Homo sapiens
gagtctctccttaag

SEQ ID NO: 1689783 - DNA, 15 bp, Homo sapiens
agtctctccttaagc

SEQ ID NO: 1689784 - DNA, 15 bp, Homo sapiens
gtctctccttaagct

SEQ ID NO: 1689785 - DNA, 15 bp, Homo sapiens
tctctccttaagcta

SEQ ID NO: 1689786 - DNA, 15 bp, Homo sapiens
ctctccttaagctat

SEQ ID NO: 1689787 - DNA, 15 bp, Homo sapiens
tctccttaagctatt

SEQ ID NO: 1689788 - DNA, 15 bp, Homo sapiens
ctccttaagctattc

SEQ ID NO: 1689789 - DNA, 15 bp, Homo sapiens
tccttaagctattcc

SEQ ID NO: 1689790 - DNA, 15 bp, Homo sapiens
ccttaagctattcct

SEQ ID NO: 1689791 - DNA, 15 bp, Homo sapiens
cttaagctattcctg

SEQ ID NO: 1689792 - DNA, 15 bp, Homo sapiens
ttaagctattcctgg

SEQ ID NO: 1689793 - DNA, 15 bp, Homo sapiens
taagctattcctggc

SEQ ID NO: 1689794 - DNA, 15 bp, Homo sapiens
aagctattcctggct

SEQ ID NO: 1689795 - DNA, 15 bp, Homo sapiens
agctattcctggctt

SEQ ID NO: 1689796 - DNA, 15 bp, Homo sapiens
gctattcctggcttc

SEQ ID NO: 1689797 - DNA, 15 bp, Homo sapiens
ctattcctggcttct

SEQ ID NO: 1689798 - DNA, 15 bp, Homo sapiens
tattcctggcttctg

SEQ ID NO: 1689799 - DNA, 15 bp, Homo sapiens
attcctggcttctgg

SEQ ID NO: 1689800 - DNA, 15 bp, Homo sapiens
ttcctggcttctggg

SEQ ID NO: 1689801 - DNA, 15 bp, Homo sapiens
tcctggcttctgggt

SEQ ID NO: 1689802 - DNA, 15 bp, Homo sapiens
cctggcttctgggta

SEQ ID NO: 1689803 - DNA, 15 bp, Homo sapiens
ctggcttctgggtag

SEQ ID NO: 1689804 - DNA, 15 bp, Homo sapiens
tggcttctgggtagt

SEQ ID NO: 1689805 - DNA, 15 bp, Homo sapiens
ggcttctgggtagtt

SEQ ID NO: 1689806 - DNA, 15 bp, Homo sapiens
gcttctgggtagttg

SEQ ID NO: 1689807 - DNA, 15 bp, Homo sapiens
cttctgggtagttgg

SEQ ID NO: 1689808 - DNA, 15 bp, Homo sapiens
ttctgggtagttggt

SEQ ID NO: 1689809 - DNA, 15 bp, Homo sapiens
tctgggtagttggtg

SEQ ID NO: 1689810 - DNA, 15 bp, Homo sapiens
ctgggtagttggtgt

SEQ ID NO: 1689811 - DNA, 15 bp, Homo sapiens
tgggtagttggtgta

SEQ ID NO: 1689812 - DNA, 15 bp, Homo sapiens
gggtagttggtgtaa

SEQ ID NO: 1689813 - DNA, 15 bp, Homo sapiens
ggtagttggtgtaaa

SEQ ID NO: 1689814 - DNA, 15 bp, Homo sapiens
gtagttggtgtaaac

SEQ ID NO: 1689815 - DNA, 15 bp, Homo sapiens
tagttggtgtaaact

SEQ ID NO: 1689816 - DNA, 15 bp, Homo sapiens
agttggtgtaaactc

SEQ ID NO: 1689817 - DNA, 15 bp, Homo sapiens
gttggtgtaaactct

SEQ ID NO: 1689818 - DNA, 15 bp, Homo sapiens
ttggtgtaaactctg

SEQ ID NO: 1689819 - DNA, 15 bp, Homo sapiens
tggtgtaaactctgt

SEQ ID NO: 1689820 - DNA, 15 bp, Homo sapiens
ggtgtaaactctgtg

SEQ ID NO: 1689821 - DNA, 15 bp, Homo sapiens
gtgtaaactctgtgg

SEQ ID NO: 1689822 - DNA, 15 bp, Homo sapiens
tgtaaactctgtggt

SEQ ID NO: 1689823 - DNA, 15 bp, Homo sapiens
gtaaactctgtggtc

SEQ ID NO: 1689824 - DNA, 15 bp, Homo sapiens
taaactctgtggtcc

SEQ ID NO: 1689825 - DNA, 15 bp, Homo sapiens
aaactctgtggtcct

SEQ ID NO: 1689826 - DNA, 15 bp, Homo sapiens
aactctgtggtcctt

SEQ ID NO: 1689827 - DNA, 15 bp, Homo sapiens
actctgtggtccttg

SEQ ID NO: 1689828 - DNA, 15 bp, Homo sapiens
ctctgtggtccttga

SEQ ID NO: 1689829 - DNA, 15 bp, Homo sapiens
tctgtggtccttgaa

SEQ ID NO: 1689830 - DNA, 15 bp, Homo sapiens
ctgtggtccttgaat

SEQ ID NO: 1689831 - DNA, 15 bp, Homo sapiens
tgtggtccttgaata

SEQ ID NO: 1689832 - DNA, 15 bp, Homo sapiens
gtggtccttgaataa

SEQ ID NO: 1689833 - DNA, 15 bp, Homo sapiens
tggtccttgaataaa

SEQ ID NO: 1689834 - DNA, 15 bp, Homo sapiens
ggtccttgaataaag

SEQ ID NO: 1689835 - DNA, 15 bp, Homo sapiens
gtccttgaataaagt

SEQ ID NO: 1689836 - DNA, 15 bp, Homo sapiens
tccttgaataaagtg

SEQ ID NO: 1689837 - DNA, 15 bp, Homo sapiens
ccttgaataaagtgt

SEQ ID NO: 1689838 - DNA, 15 bp, Homo sapiens
cttgaataaagtgtg

SEQ ID NO: 1689839 - DNA, 15 bp, Homo sapiens
ttgaataaagtgtgc

SEQ ID NO: 1689840 - DNA, 15 bp, Homo sapiens
tgaataaagtgtgct

SEQ ID NO: 1689841 - DNA, 15 bp, Homo sapiens
gaataaagtgtgctt

SEQ ID NO: 1689842 - DNA, 15 bp, Homo sapiens
aataaagtgtgcttg

SEQ ID NO: 1689843 - DNA, 15 bp, Homo sapiens
ataaagtgtgcttga

SEQ ID NO: 1689844 - DNA, 15 bp, Homo sapiens
taaagtgtgcttgag

SEQ ID NO: 1689845 - DNA, 15 bp, Homo sapiens
aaagtgtgcttgaga

SEQ ID NO: 1689846 - DNA, 15 bp, Homo sapiens
aagtgtgcttgagaa

SEQ ID NO: 1689847 - DNA, 15 bp, Homo sapiens
agtgtgcttgagaat

SEQ ID NO: 1689848 - DNA, 15 bp, Homo sapiens
gtgtgcttgagaatt

SEQ ID NO: 1689849 - DNA, 15 bp, Homo sapiens
tgtgcttgagaattt

SEQ ID NO: 1689850 - DNA, 15 bp, Homo sapiens
gtgcttgagaatttt

SEQ ID NO: 1689851 - DNA, 15 bp, Homo sapiens
tgcttgagaatttta

SEQ ID NO: 1689852 - DNA, 15 bp, Homo sapiens
gcttgagaattttag

SEQ ID NO: 1689853 - DNA, 15 bp, Homo sapiens
cttgagaattttaga

SEQ ID NO: 1689854 - DNA, 15 bp, Homo sapiens
ttgagaattttagaa

SEQ ID NO: 1689855 - DNA, 15 bp, Homo sapiens
tgagaattttagaag

SEQ ID NO: 1689856 - DNA, 15 bp, Homo sapiens
gagaattttagaagg

SEQ ID NO: 1689857 - DNA, 15 bp, Homo sapiens
agaattttagaaggt

SEQ ID NO: 1689858 - DNA, 15 bp, Homo sapiens
gaattttagaaggtt

SEQ ID NO: 1689859 - DNA, 15 bp, Homo sapiens
aattttagaaggtta

SEQ ID NO: 1689860 - DNA, 15 bp, Homo sapiens
attttagaaggttaa

SEQ ID NO: 1689861 - DNA, 15 bp, Homo sapiens
ttttagaaggttaag

SEQ ID NO: 1689862 - DNA, 15 bp, Homo sapiens
tttagaaggttaagc

SEQ ID NO: 1689863 - DNA, 15 bp, Homo sapiens
ttagaaggttaagca

SEQ ID NO: 1689864 - DNA, 15 bp, Homo sapiens
tagaaggttaagcat

SEQ ID NO: 1689865 - DNA, 15 bp, Homo sapiens
agaaggttaagcatc

SEQ ID NO: 1689866 - DNA, 15 bp, Homo sapiens
gaaggttaagcatct

SEQ ID NO: 1689867 - DNA, 15 bp, Homo sapiens
aaggttaagcatctg

SEQ ID NO: 1689868 - DNA, 15 bp, Homo sapiens
aggttaagcatctga

SEQ ID NO: 1689869 - DNA, 15 bp, Homo sapiens
ggttaagcatctgag

SEQ ID NO: 1689870 - DNA, 15 bp, Homo sapiens
gttaagcatctgaga

SEQ ID NO: 1689871 - DNA, 15 bp, Homo sapiens
ttaagcatctgagaa

SEQ ID NO: 1689872 - DNA, 15 bp, Homo sapiens
taagcatctgagaaa

SEQ ID NO: 1689873 - DNA, 15 bp, Homo sapiens
aagcatctgagaaat

SEQ ID NO: 1689874 - DNA, 15 bp, Homo sapiens
agcatctgagaaatt

SEQ ID NO: 1689875 - DNA, 15 bp, Homo sapiens
gcatctgagaaatta

SEQ ID NO: 1689876 - DNA, 15 bp, Homo sapiens
catctgagaaattac

SEQ ID NO: 1689877 - DNA, 15 bp, Homo sapiens
atctgagaaattact

SEQ ID NO: 1689878 - DNA, 15 bp, Homo sapiens
tctgagaaattactt

SEQ ID NO: 1689879 - DNA, 15 bp, Homo sapiens
ctgagaaattacttc

SEQ ID NO: 1689880 - DNA, 15 bp, Homo sapiens
tgagaaattacttca

SEQ ID NO: 1689881 - DNA, 15 bp, Homo sapiens
gagaaattacttcaa

SEQ ID NO: 1689882 - DNA, 15 bp, Homo sapiens
agaaattacttcaat

SEQ ID NO: 1689883 - DNA, 15 bp, Homo sapiens
gaaattacttcaatg

SEQ ID NO: 1689884 - DNA, 15 bp, Homo sapiens
aaattacttcaatgc

SEQ ID NO: 1689885 - DNA, 15 bp, Homo sapiens
aattacttcaatgca

SEQ ID NO: 1689886 - DNA, 15 bp, Homo sapiens
attacttcaatgcag

SEQ ID NO: 1689887 - DNA, 15 bp, Homo sapiens
ttacttcaatgcagt

SEQ ID NO: 1689888 - DNA, 15 bp, Homo sapiens
tacttcaatgcagtg

SEQ ID NO: 1689889 - DNA, 15 bp, Homo sapiens
acttcaatgcagtgg

SEQ ID NO: 1689890 - DNA, 15 bp, Homo sapiens
cttcaatgcagtggt

SEQ ID NO: 1689891 - DNA, 15 bp, Homo sapiens
ttcaatgcagtggta

SEQ ID NO: 1689892 - DNA, 15 bp, Homo sapiens
tcaatgcagtggtag

SEQ ID NO: 1689893 - DNA, 15 bp, Homo sapiens
caatgcagtggtagc

SEQ ID NO: 1689894 - DNA, 15 bp, Homo sapiens
aatgcagtggtagca

SEQ ID NO: 1689895 - DNA, 15 bp, Homo sapiens
atgcagtggtagcac

SEQ ID NO: 1689896 - DNA, 15 bp, Homo sapiens
tgcagtggtagcact

SEQ ID NO: 1689897 - DNA, 15 bp, Homo sapiens
gcagtggtagcacta

SEQ ID NO: 1689898 - DNA, 15 bp, Homo sapiens
cagtggtagcactac

SEQ ID NO: 1689899 - DNA, 15 bp, Homo sapiens
agtggtagcactacc

SEQ ID NO: 1689900 - DNA, 15 bp, Homo sapiens
gtggtagcactacct

SEQ ID NO: 1689901 - DNA, 15 bp, Homo sapiens
tggtagcactacctc

SEQ ID NO: 1689902 - DNA, 15 bp, Homo sapiens
ggtagcactacctct

SEQ ID NO: 1689903 - DNA, 15 bp, Homo sapiens
gtagcactacctctg

SEQ ID NO: 1689904 - DNA, 15 bp, Homo sapiens
tagcactacctctga

SEQ ID NO: 1689905 - DNA, 15 bp, Homo sapiens
agcactacctctgat

SEQ ID NO: 1689906 - DNA, 15 bp, Homo sapiens
gcactacctctgatg

SEQ ID NO: 1689907 - DNA, 15 bp, Homo sapiens
cactacctctgatga

SEQ ID NO: 1689908 - DNA, 15 bp, Homo sapiens
actacctctgatgat

SEQ ID NO: 1689909 - DNA, 15 bp, Homo sapiens
ctacctctgatgata

SEQ ID NO: 1689910 - DNA, 15 bp, Homo sapiens
tacctctgatgatac

SEQ ID NO: 1689911 - DNA, 15 bp, Homo sapiens
acctctgatgatact

SEQ ID NO: 1689912 - DNA, 15 bp, Homo sapiens
cctctgatgatacta

SEQ ID NO: 1689913 - DNA, 15 bp, Homo sapiens
ctctgatgatactac

SEQ ID NO: 1689914 - DNA, 15 bp, Homo sapiens
tctgatgatactacc

SEQ ID NO: 1689915 - DNA, 15 bp, Homo sapiens
ctgatgatactacca

SEQ ID NO: 1689916 - DNA, 15 bp, Homo sapiens
tgatgatactaccaa

SEQ ID NO: 1689917 - DNA, 15 bp, Homo sapiens
gatgatactaccaag

SEQ ID NO: 1689918 - DNA, 15 bp, Homo sapiens
atgatactaccaagc

SEQ ID NO: 1689919 - DNA, 15 bp, Homo sapiens
tgatactaccaagca

SEQ ID NO: 1689920 - DNA, 15 bp, Homo sapiens
gatactaccaagcaa

SEQ ID NO: 1689921 - DNA, 15 bp, Homo sapiens
atactaccaagcaaa

SEQ ID NO: 1689922 - DNA, 15 bp, Homo sapiens
tactaccaagcaaac

SEQ ID NO: 1689923 - DNA, 15 bp, Homo sapiens
actaccaagcaaact

SEQ ID NO: 1689924 - DNA, 15 bp, Homo sapiens
ctaccaagcaaacta

SEQ ID NO: 1689925 - DNA, 15 bp, Homo sapiens
taccaagcaaactat

SEQ ID NO: 1689926 - DNA, 15 bp, Homo sapiens
accaagcaaactatt

SEQ ID NO: 1689927 - DNA, 15 bp, Homo sapiens
ccaagcaaactatta

SEQ ID NO: 1689928 - DNA, 15 bp, Homo sapiens
caagcaaactattaa

SEQ ID NO: 1689929 - DNA, 15 bp, Homo sapiens
aagcaaactattaag

SEQ ID NO: 1689930 - DNA, 15 bp, Homo sapiens
agcaaactattaaga

SEQ ID NO: 1689931 - DNA, 15 bp, Homo sapiens
gcaaactattaagaa

SEQ ID NO: 1689932 - DNA, 15 bp, Homo sapiens
aaactattaagaaac

SEQ ID NO: 1689933 - DNA, 15 bp, Homo sapiens
aactattaagaaaca

SEQ ID NO: 1689934 - DNA, 15 bp, Homo sapiens
actattaagaaacag

SEQ ID NO: 1689935 - DNA, 15 bp, Homo sapiens
ctattaagaaacaga

SEQ ID NO: 1689936 - DNA, 15 bp, Homo sapiens
tattaagaaacagaa

SEQ ID NO: 1689937 - DNA, 15 bp, Homo sapiens
attaagaaacagaaa

SEQ ID NO: 1689938 - DNA, 15 bp, Homo sapiens
ttaagaaacagaaaa

SEQ ID NO: 1689939 - DNA, 15 bp, Homo sapiens
taagaaacagaaaag

SEQ ID NO: 1689940 - DNA, 15 bp, Homo sapiens
aagaaacagaaaagc

SEQ ID NO: 1689941 - DNA, 15 bp, Homo sapiens
agaaacagaaaagct

SEQ ID NO: 1689942 - DNA, 15 bp, Homo sapiens
gaaacagaaaagctc

SEQ ID NO: 1689943 - DNA, 15 bp, Homo sapiens
aaacagaaaagctca

SEQ ID NO: 1689944 - DNA, 15 bp, Homo sapiens
aacagaaaagctcac

SEQ ID NO: 1689945 - DNA, 15 bp, Homo sapiens
acagaaaagctcaca

SEQ ID NO: 1689946 - DNA, 15 bp, Homo sapiens
cagaaaagctcacag

SEQ ID NO: 1689947 - DNA, 15 bp, Homo sapiens
agaaaagctcacaga

SEQ ID NO: 1689948 - DNA, 15 bp, Homo sapiens
gaaaagctcacagat

SEQ ID NO: 1689949 - DNA, 15 bp, Homo sapiens
aaaagctcacagatc

SEQ ID NO: 1689950 - DNA, 15 bp, Homo sapiens
aaagctcacagatca

SEQ ID NO: 1689951 - DNA, 15 bp, Homo sapiens
aagctcacagatcaa

SEQ ID NO: 1689952 - DNA, 15 bp, Homo sapiens
agctcacagatcaaa

SEQ ID NO: 1689953 - DNA, 15 bp, Homo sapiens
gctcacagatcaaat

SEQ ID NO: 1689954 - DNA, 15 bp, Homo sapiens
ctcacagatcaaatt

SEQ ID NO: 1689955 - DNA, 15 bp, Homo sapiens
tcacagatcaaatta

SEQ ID NO: 1689956 - DNA, 15 bp, Homo sapiens
cacagatcaaattaa

SEQ ID NO: 1689957 - DNA, 15 bp, Homo sapiens
acagatcaaattaag

SEQ ID NO: 1689958 - DNA, 15 bp, Homo sapiens
cagatcaaattaaga

SEQ ID NO: 1689959 - DNA, 15 bp, Homo sapiens
agatcaaattaagat

SEQ ID NO: 1689960 - DNA, 15 bp, Homo sapiens
gatcaaattaagatg

SEQ ID NO: 1689961 - DNA, 15 bp, Homo sapiens
atcaaattaagatgc

SEQ ID NO: 1689962 - DNA, 15 bp, Homo sapiens
tcaaattaagatgct

SEQ ID NO: 1689963 - DNA, 15 bp, Homo sapiens
caaattaagatgcta

SEQ ID NO: 1689964 - DNA, 15 bp, Homo sapiens
aaattaagatgctag

SEQ ID NO: 1689965 - DNA, 15 bp, Homo sapiens
aattaagatgctaga

SEQ ID NO: 1689966 - DNA, 15 bp, Homo sapiens
attaagatgctagaa

SEQ ID NO: 1689967 - DNA, 15 bp, Homo sapiens
ttaagatgctagaat

SEQ ID NO: 1689968 - DNA, 15 bp, Homo sapiens
taagatgctagaatc

SEQ ID NO: 1689969 - DNA, 15 bp, Homo sapiens
aagatgctagaatcg

SEQ ID NO: 1689970 - DNA, 15 bp, Homo sapiens
agatgctagaatcgt

SEQ ID NO: 1689971 - DNA, 15 bp, Homo sapiens
gatgctagaatcgta

SEQ ID NO: 1689972 - DNA, 15 bp, Homo sapiens
atgctagaatcgtat

SEQ ID NO: 1689973 - DNA, 15 bp, Homo sapiens
tgctagaatcgtatt

SEQ ID NO: 1689974 - DNA, 15 bp, Homo sapiens
gctagaatcgtatta

SEQ ID NO: 1689975 - DNA, 15 bp, Homo sapiens
ctagaatcgtattaa

SEQ ID NO: 1689976 - DNA, 15 bp, Homo sapiens
tagaatcgtattaaa

SEQ ID NO: 1689977 - DNA, 15 bp, Homo sapiens
agaatcgtattaaat

SEQ ID NO: 1689978 - DNA, 15 bp, Homo sapiens
gaatcgtattaaatc

SEQ ID NO: 1689979 - DNA, 15 bp, Homo sapiens
aatcgtattaaatca

SEQ ID NO: 1689980 - DNA, 15 bp, Homo sapiens
atcgtattaaatcaa

SEQ ID NO: 1689981 - DNA, 15 bp, Homo sapiens
tcgtattaaatcaat

SEQ ID NO: 1689982 - DNA, 15 bp, Homo sapiens
cgtattaaatcaatt

SEQ ID NO: 1689983 - DNA, 15 bp, Homo sapiens
gtattaaatcaatta

SEQ ID NO: 1689984 - DNA, 15 bp, Homo sapiens
tattaaatcaattaa

SEQ ID NO: 1689985 - DNA, 15 bp, Homo sapiens
attaaatcaattaaa

SEQ ID NO: 1689986 - DNA, 15 bp, Homo sapiens
ttaaatcaattaaat

SEQ ID NO: 1689987 - DNA, 15 bp, Homo sapiens
taaatcaattaaata

SEQ ID NO: 1689988 - DNA, 15 bp, Homo sapiens
aaatcaattaaatac

SEQ ID NO: 1689989 - DNA, 15 bp, Homo sapiens
aatcaattaaataca

SEQ ID NO: 1689990 - DNA, 15 bp, Homo sapiens
atcaattaaatacat

SEQ ID NO: 1689991 - DNA, 15 bp, Homo sapiens
tcaattaaatacatg

SEQ ID NO: 1689992 - DNA, 15 bp, Homo sapiens
caattaaatacatgg

SEQ ID NO: 1689993 - DNA, 15 bp, Homo sapiens
aattaaatacatgga

SEQ ID NO: 1689994 - DNA, 15 bp, Homo sapiens
attaaatacatggaa

SEQ ID NO: 1689995 - DNA, 15 bp, Homo sapiens
ttaaatacatggaac

SEQ ID NO: 1689996 - DNA, 15 bp, Homo sapiens
taaatacatggaaca

SEQ ID NO: 1689997 - DNA, 15 bp, Homo sapiens
aaatacatggaacaa

SEQ ID NO: 1689998 - DNA, 15 bp, Homo sapiens
aatacatggaacaaa

SEQ ID NO: 1689999 - DNA, 15 bp, Homo sapiens
atacatggaacaaaa

SEQ ID NO: 1690000 - DNA, 15 bp, Homo sapiens
tacatggaacaaaac

SEQ ID NO: 1690001 - DNA, 15 bp, Homo sapiens
acatggaacaaaaca

SEQ ID NO: 1690002 - DNA, 15 bp, Homo sapiens
catggaacaaaacag

SEQ ID NO: 1690003 - DNA, 15 bp, Homo sapiens
atggaacaaaacagg

SEQ ID NO: 1690004 - DNA, 15 bp, Homo sapiens
tggaacaaaacaggc

SEQ ID NO: 1690005 - DNA, 15 bp, Homo sapiens
ggaacaaaacaggca

SEQ ID NO: 1690006 - DNA, 15 bp, Homo sapiens
gaacaaaacaggcaa

SEQ ID NO: 1690007 - DNA, 15 bp, Homo sapiens
aacaaaacaggcaaa

SEQ ID NO: 1690008 - DNA, 15 bp, Homo sapiens
acaaaacaggcaaaa

SEQ ID NO: 1690009 - DNA, 15 bp, Homo sapiens
caaaacaggcaaaaa

SEQ ID NO: 1690010 - DNA, 15 bp, Homo sapiens
aaaacaggcaaaaag

SEQ ID NO: 1690011 - DNA, 15 bp, Homo sapiens
aaacaggcaaaaaga

SEQ ID NO: 1690012 - DNA, 15 bp, Homo sapiens
aacaggcaaaaagat

SEQ ID NO: 1690013 - DNA, 15 bp, Homo sapiens
acaggcaaaaagatg

SEQ ID NO: 1690014 - DNA, 15 bp, Homo sapiens
caggcaaaaagatgg

SEQ ID NO: 1690015 - DNA, 15 bp, Homo sapiens
aggcaaaaagatggg

SEQ ID NO: 1690016 - DNA, 15 bp, Homo sapiens
ggcaaaaagatggga

SEQ ID NO: 1690017 - DNA, 15 bp, Homo sapiens
gcaaaaagatgggat

SEQ ID NO: 1690018 - DNA, 15 bp, Homo sapiens
caaaaagatgggata

SEQ ID NO: 1690019 - DNA, 15 bp, Homo sapiens
aaaaagatgggatac

SEQ ID NO: 1690020 - DNA, 15 bp, Homo sapiens
aaaagatgggataca

SEQ ID NO: 1690021 - DNA, 15 bp, Homo sapiens
aaagatgggatacat

SEQ ID NO: 1690022 - DNA, 15 bp, Homo sapiens
aagatgggatacatt

SEQ ID NO: 1690023 - DNA, 15 bp, Homo sapiens
agatgggatacatta

SEQ ID NO: 1690024 - DNA, 15 bp, Homo sapiens
gatgggatacattaa

SEQ ID NO: 1690025 - DNA, 15 bp, Homo sapiens
atgggatacattaat

SEQ ID NO: 1690026 - DNA, 15 bp, Homo sapiens
tgggatacattaatc

SEQ ID NO: 1690027 - DNA, 15 bp, Homo sapiens
gggatacattaatcc

SEQ ID NO: 1690028 - DNA, 15 bp, Homo sapiens
ggatacattaatcca

SEQ ID NO: 1690029 - DNA, 15 bp, Homo sapiens
gatacattaatccat

SEQ ID NO: 1690030 - DNA, 15 bp, Homo sapiens
atacattaatccatt

SEQ ID NO: 1690031 - DNA, 15 bp, Homo sapiens
tacattaatccattt

SEQ ID NO: 1690032 - DNA, 15 bp, Homo sapiens
acattaatccattta

SEQ ID NO: 1690033 - DNA, 15 bp, Homo sapiens
cattaatccatttag

SEQ ID NO: 1690034 - DNA, 15 bp, Homo sapiens
attaatccatttagg

SEQ ID NO: 1690035 - DNA, 15 bp, Homo sapiens
ttaatccatttagga

SEQ ID NO: 1690036 - DNA, 15 bp, Homo sapiens
taatccatttaggat

SEQ ID NO: 1690037 - DNA, 15 bp, Homo sapiens
aatccatttaggata

SEQ ID NO: 1690038 - DNA, 15 bp, Homo sapiens
atccatttaggataa

SEQ ID NO: 1690039 - DNA, 15 bp, Homo sapiens
tccatttaggataag

SEQ ID NO: 1690040 - DNA, 15 bp, Homo sapiens
ccatttaggataagg

SEQ ID NO: 1690041 - DNA, 15 bp, Homo sapiens
catttaggataaggt

SEQ ID NO: 1690042 - DNA, 15 bp, Homo sapiens
atttaggataaggtg

SEQ ID NO: 1690043 - DNA, 15 bp, Homo sapiens
tttaggataaggtgc

SEQ ID NO: 1690044 - DNA, 15 bp, Homo sapiens
ttaggataaggtgca

SEQ ID NO: 1690045 - DNA, 15 bp, Homo sapiens
taggataaggtgcat

SEQ ID NO: 1690046 - DNA, 15 bp, Homo sapiens
aggataaggtgcatg

SEQ ID NO: 1690047 - DNA, 15 bp, Homo sapiens
ggataaggtgcatgt

SEQ ID NO: 1690048 - DNA, 15 bp, Homo sapiens
gataaggtgcatgtg

SEQ ID NO: 1690049 - DNA, 15 bp, Homo sapiens
ataaggtgcatgtgg

SEQ ID NO: 1690050 - DNA, 15 bp, Homo sapiens
taaggtgcatgtgga

SEQ ID NO: 1690051 - DNA, 15 bp, Homo sapiens
aaggtgcatgtggag

SEQ ID NO: 1690052 - DNA, 15 bp, Homo sapiens
aggtgcatgtggagt

SEQ ID NO: 1690053 - DNA, 15 bp, Homo sapiens
ggtgcatgtggagta

SEQ ID NO: 1690054 - DNA, 15 bp, Homo sapiens
gtgcatgtggagtag

SEQ ID NO: 1690055 - DNA, 15 bp, Homo sapiens
tgcatgtggagtaga

SEQ ID NO: 1690056 - DNA, 15 bp, Homo sapiens
gcatgtggagtagaa

SEQ ID NO: 1690057 - DNA, 15 bp, Homo sapiens
catgtggagtagaaa

SEQ ID NO: 1690058 - DNA, 15 bp, Homo sapiens
atgtggagtagaaag

SEQ ID NO: 1690059 - DNA, 15 bp, Homo sapiens
tgtggagtagaaagg

SEQ ID NO: 1690060 - DNA, 15 bp, Homo sapiens
gtggagtagaaaggg

SEQ ID NO: 1690061 - DNA, 15 bp, Homo sapiens
tggagtagaaagggt

SEQ ID NO: 1690062 - DNA, 15 bp, Homo sapiens
ggagtagaaagggta

SEQ ID NO: 1690063 - DNA, 15 bp, Homo sapiens
gagtagaaagggtag

SEQ ID NO: 1690064 - DNA, 15 bp, Homo sapiens
agtagaaagggtagc

SEQ ID NO: 1690065 - DNA, 15 bp, Homo sapiens
gtagaaagggtagca

SEQ ID NO: 1690066 - DNA, 15 bp, Homo sapiens
tagaaagggtagcag

SEQ ID NO: 1690067 - DNA, 15 bp, Homo sapiens
agaaagggtagcagt

SEQ ID NO: 1690068 - DNA, 15 bp, Homo sapiens
gaaagggtagcagtg

SEQ ID NO: 1690069 - DNA, 15 bp, Homo sapiens
aaagggtagcagtgt

SEQ ID NO: 1690070 - DNA, 15 bp, Homo sapiens
aagggtagcagtgtt

SEQ ID NO: 1690071 - DNA, 15 bp, Homo sapiens
agggtagcagtgttt

SEQ ID NO: 1690072 - DNA, 15 bp, Homo sapiens
gggtagcagtgttta

SEQ ID NO: 1690073 - DNA, 15 bp, Homo sapiens
ggtagcagtgtttac

SEQ ID NO: 1690074 - DNA, 15 bp, Homo sapiens
gtagcagtgtttaca

SEQ ID NO: 1690075 - DNA, 15 bp, Homo sapiens
tagcagtgtttacat

SEQ ID NO: 1690076 - DNA, 15 bp, Homo sapiens
agcagtgtttacatg

SEQ ID NO: 1690077 - DNA, 15 bp, Homo sapiens
gcagtgtttacatgt

SEQ ID NO: 1690078 - DNA, 15 bp, Homo sapiens
cagtgtttacatgtc

SEQ ID NO: 1690079 - DNA, 15 bp, Homo sapiens
agtgtttacatgtcc

SEQ ID NO: 1690080 - DNA, 15 bp, Homo sapiens
gtgtttacatgtcct

SEQ ID NO: 1690081 - DNA, 15 bp, Homo sapiens
tgtttacatgtcctc

SEQ ID NO: 1690082 - DNA, 15 bp, Homo sapiens
gtttacatgtcctct

SEQ ID NO: 1690083 - DNA, 15 bp, Homo sapiens
tttacatgtcctctg

SEQ ID NO: 1690084 - DNA, 15 bp, Homo sapiens
ttacatgtcctctga

SEQ ID NO: 1690085 - DNA, 15 bp, Homo sapiens
tacatgtcctctgat

SEQ ID NO: 1690086 - DNA, 15 bp, Homo sapiens
acatgtcctctgata

SEQ ID NO: 1690087 - DNA, 15 bp, Homo sapiens
catgtcctctgataa

SEQ ID NO: 1690088 - DNA, 15 bp, Homo sapiens
atgtcctctgataac

SEQ ID NO: 1690089 - DNA, 15 bp, Homo sapiens
tgtcctctgataaca

SEQ ID NO: 1690090 - DNA, 15 bp, Homo sapiens
gtcctctgataacac

SEQ ID NO: 1690091 - DNA, 15 bp, Homo sapiens
tcctctgataacact

SEQ ID NO: 1690092 - DNA, 15 bp, Homo sapiens
cctctgataacactg

SEQ ID NO: 1690093 - DNA, 15 bp, Homo sapiens
ctctgataacactgg

SEQ ID NO: 1690094 - DNA, 15 bp, Homo sapiens
tctgataacactggc

SEQ ID NO: 1690095 - DNA, 15 bp, Homo sapiens
ctgataacactggcg

SEQ ID NO: 1690096 - DNA, 15 bp, Homo sapiens
tgataacactggcgt

SEQ ID NO: 1690097 - DNA, 15 bp, Homo sapiens
gataacactggcgta

SEQ ID NO: 1690098 - DNA, 15 bp, Homo sapiens
ataacactggcgtag

SEQ ID NO: 1690099 - DNA, 15 bp, Homo sapiens
taacactggcgtagt

SEQ ID NO: 1690100 - DNA, 15 bp, Homo sapiens
aacactggcgtagtc

SEQ ID NO: 1690101 - DNA, 15 bp, Homo sapiens
acactggcgtagtca

SEQ ID NO: 1690102 - DNA, 15 bp, Homo sapiens
cactggcgtagtcac

SEQ ID NO: 1690103 - DNA, 15 bp, Homo sapiens
actggcgtagtcaca

SEQ ID NO: 1690104 - DNA, 15 bp, Homo sapiens
ctggcgtagtcacaa

SEQ ID NO: 1690105 - DNA, 15 bp, Homo sapiens
tggcgtagtcacaag

SEQ ID NO: 1690106 - DNA, 15 bp, Homo sapiens
ggcgtagtcacaaga

SEQ ID NO: 1690107 - DNA, 15 bp, Homo sapiens
gcgtagtcacaagag

SEQ ID NO: 1690108 - DNA, 15 bp, Homo sapiens
cgtagtcacaagagc

SEQ ID NO: 1690109 - DNA, 15 bp, Homo sapiens
gtagtcacaagagct

SEQ ID NO: 1690110 - DNA, 15 bp, Homo sapiens
tagtcacaagagcta

SEQ ID NO: 1690111 - DNA, 15 bp, Homo sapiens
agtcacaagagctaa

SEQ ID NO: 1690112 - DNA, 15 bp, Homo sapiens
gtcacaagagctaag

SEQ ID NO: 1690113 - DNA, 15 bp, Homo sapiens
tcacaagagctaagg

SEQ ID NO: 1690114 - DNA, 15 bp, Homo sapiens
cacaagagctaagga

SEQ ID NO: 1690115 - DNA, 15 bp, Homo sapiens
acaagagctaaggac

SEQ ID NO: 1690116 - DNA, 15 bp, Homo sapiens
caagagctaaggaca

SEQ ID NO: 1690117 - DNA, 15 bp, Homo sapiens
aagagctaaggacaa

SEQ ID NO: 1690118 - DNA, 15 bp, Homo sapiens
agagctaaggacaag

SEQ ID NO: 1690119 - DNA, 15 bp, Homo sapiens
gagctaaggacaaga

SEQ ID NO: 1690120 - DNA, 15 bp, Homo sapiens
agctaaggacaagaa

SEQ ID NO: 1690121 - DNA, 15 bp, Homo sapiens
gctaaggacaagaac

SEQ ID NO: 1690122 - DNA, 15 bp, Homo sapiens
ctaaggacaagaacc

SEQ ID NO: 1690123 - DNA, 15 bp, Homo sapiens
taaggacaagaacca

SEQ ID NO: 1690124 - DNA, 15 bp, Homo sapiens
aaggacaagaaccaa

SEQ ID NO: 1690125 - DNA, 15 bp, Homo sapiens
aggacaagaaccaag

SEQ ID NO: 1690126 - DNA, 15 bp, Homo sapiens
gacaagaaccaaggg

SEQ ID NO: 1690127 - DNA, 15 bp, Homo sapiens
acaagaaccaagggt

SEQ ID NO: 1690128 - DNA, 15 bp, Homo sapiens
caagaaccaagggtg

SEQ ID NO: 1690129 - DNA, 15 bp, Homo sapiens
aagaaccaagggtga

SEQ ID NO: 1690130 - DNA, 15 bp, Homo sapiens
agaaccaagggtgag

SEQ ID NO: 1690131 - DNA, 15 bp, Homo sapiens
gaaccaagggtgaga

SEQ ID NO: 1690132 - DNA, 15 bp, Homo sapiens
aaccaagggtgagaa

SEQ ID NO: 1690133 - DNA, 15 bp, Homo sapiens
accaagggtgagaat

SEQ ID NO: 1690134 - DNA, 15 bp, Homo sapiens
ccaagggtgagaatt

SEQ ID NO: 1690135 - DNA, 15 bp, Homo sapiens
caagggtgagaattt

SEQ ID NO: 1690136 - DNA, 15 bp, Homo sapiens
aagggtgagaatttg

SEQ ID NO: 1690137 - DNA, 15 bp, Homo sapiens
agggtgagaatttga

SEQ ID NO: 1690138 - DNA, 15 bp, Homo sapiens
gggtgagaatttgag

SEQ ID NO: 1690139 - DNA, 15 bp, Homo sapiens
ggtgagaatttgaga

SEQ ID NO: 1690140 - DNA, 15 bp, Homo sapiens
gtgagaatttgagat

SEQ ID NO: 1690141 - DNA, 15 bp, Homo sapiens
tgagaatttgagatt

SEQ ID NO: 1690142 - DNA, 15 bp, Homo sapiens
gagaatttgagattc

SEQ ID NO: 1690143 - DNA, 15 bp, Homo sapiens
agaatttgagattca

SEQ ID NO: 1690144 - DNA, 15 bp, Homo sapiens
gaatttgagattcaa

SEQ ID NO: 1690145 - DNA, 15 bp, Homo sapiens
aatttgagattcaat

SEQ ID NO: 1690146 - DNA, 15 bp, Homo sapiens
atttgagattcaatt

SEQ ID NO: 1690147 - DNA, 15 bp, Homo sapiens
tttgagattcaatta

SEQ ID NO: 1690148 - DNA, 15 bp, Homo sapiens
ttgagattcaattag

SEQ ID NO: 1690149 - DNA, 15 bp, Homo sapiens
tgagattcaattagg

SEQ ID NO: 1690150 - DNA, 15 bp, Homo sapiens
gagattcaattaggg

SEQ ID NO: 1690151 - DNA, 15 bp, Homo sapiens
agattcaattagggc

SEQ ID NO: 1690152 - DNA, 15 bp, Homo sapiens
gattcaattagggcc

SEQ ID NO: 1690153 - DNA, 15 bp, Homo sapiens
attcaattagggcca

SEQ ID NO: 1690154 - DNA, 15 bp, Homo sapiens
ttcaattagggccag

SEQ ID NO: 1690155 - DNA, 15 bp, Homo sapiens
tcaattagggccagg

SEQ ID NO: 1690156 - DNA, 15 bp, Homo sapiens
caattagggccaggg

SEQ ID NO: 1690157 - DNA, 15 bp, Homo sapiens
aattagggccaggga

SEQ ID NO: 1690158 - DNA, 15 bp, Homo sapiens
attagggccagggat

SEQ ID NO: 1690159 - DNA, 15 bp, Homo sapiens
ttagggccagggatc

SEQ ID NO: 1690160 - DNA, 15 bp, Homo sapiens
tagggccagggatct

SEQ ID NO: 1690161 - DNA, 15 bp, Homo sapiens
agggccagggatctg

SEQ ID NO: 1690162 - DNA, 15 bp, Homo sapiens
gggccagggatctgc

SEQ ID NO: 1690163 - DNA, 15 bp, Homo sapiens
ggccagggatctgca

SEQ ID NO: 1690164 - DNA, 15 bp, Homo sapiens
gccagggatctgcag

SEQ ID NO: 1690165 - DNA, 15 bp, Homo sapiens
ccagggatctgcaga

SEQ ID NO: 1690166 - DNA, 15 bp, Homo sapiens
cagggatctgcagaa

SEQ ID NO: 1690167 - DNA, 15 bp, Homo sapiens
agggatctgcagaac

SEQ ID NO: 1690168 - DNA, 15 bp, Homo sapiens
gggatctgcagaaca

SEQ ID NO: 1690169 - DNA, 15 bp, Homo sapiens
ggatctgcagaacag

SEQ ID NO: 1690170 - DNA, 15 bp, Homo sapiens
gatctgcagaacaga

SEQ ID NO: 1690171 - DNA, 15 bp, Homo sapiens
atctgcagaacagat

SEQ ID NO: 1690172 - DNA, 15 bp, Homo sapiens
tctgcagaacagatg

SEQ ID NO: 1690173 - DNA, 15 bp, Homo sapiens
ctgcagaacagatgt

SEQ ID NO: 1690174 - DNA, 15 bp, Homo sapiens
tgcagaacagatgta

SEQ ID NO: 1690175 - DNA, 15 bp, Homo sapiens
gcagaacagatgtac

SEQ ID NO: 1690176 - DNA, 15 bp, Homo sapiens
cagaacagatgtacc

SEQ ID NO: 1690177 - DNA, 15 bp, Homo sapiens
agaacagatgtacct

SEQ ID NO: 1690178 - DNA, 15 bp, Homo sapiens
gaacagatgtacctg

SEQ ID NO: 1690179 - DNA, 15 bp, Homo sapiens
aacagatgtacctgg

SEQ ID NO: 1690180 - DNA, 15 bp, Homo sapiens
acagatgtacctgga

SEQ ID NO: 1690181 - DNA, 15 bp, Homo sapiens
cagatgtacctggaa

SEQ ID NO: 1690182 - DNA, 15 bp, Homo sapiens
agatgtacctggaac

SEQ ID NO: 1690183 - DNA, 15 bp, Homo sapiens
gatgtacctggaaca

SEQ ID NO: 1690184 - DNA, 15 bp, Homo sapiens
atgtacctggaacat

SEQ ID NO: 1690185 - DNA, 15 bp, Homo sapiens
tgtacctggaacatg

SEQ ID NO: 1690186 - DNA, 15 bp, Homo sapiens
gtacctggaacatgg

SEQ ID NO: 1690187 - DNA, 15 bp, Homo sapiens
tacctggaacatggg

SEQ ID NO: 1690188 - DNA, 15 bp, Homo sapiens
acctggaacatgggt

SEQ ID NO: 1690189 - DNA, 15 bp, Homo sapiens
cctggaacatgggtg

SEQ ID NO: 1690190 - DNA, 15 bp, Homo sapiens
ctggaacatgggtgt

SEQ ID NO: 1690191 - DNA, 15 bp, Homo sapiens
tggaacatgggtgtc

SEQ ID NO: 1690192 - DNA, 15 bp, Homo sapiens
ggaacatgggtgtca

SEQ ID NO: 1690193 - DNA, 15 bp, Homo sapiens
gaacatgggtgtcaa

SEQ ID NO: 1690194 - DNA, 15 bp, Homo sapiens
aacatgggtgtcaat

SEQ ID NO: 1690195 - DNA, 15 bp, Homo sapiens
acatgggtgtcaatg

SEQ ID NO: 1690196 - DNA, 15 bp, Homo sapiens
catgggtgtcaatgt

SEQ ID NO: 1690197 - DNA, 15 bp, Homo sapiens
atgggtgtcaatgtg

SEQ ID NO: 1690198 - DNA, 15 bp, Homo sapiens
tgggtgtcaatgtgc

SEQ ID NO: 1690199 - DNA, 15 bp, Homo sapiens
gggtgtcaatgtgct

SEQ ID NO: 1690200 - DNA, 15 bp, Homo sapiens
ggtgtcaatgtgctc

SEQ ID NO: 1690201 - DNA, 15 bp, Homo sapiens
gtgtcaatgtgctct

SEQ ID NO: 1690202 - DNA, 15 bp, Homo sapiens
tgtcaatgtgctctt

SEQ ID NO: 1690203 - DNA, 15 bp, Homo sapiens
gtcaatgtgctctta

SEQ ID NO: 1690204 - DNA, 15 bp, Homo sapiens
tcaatgtgctcttat

SEQ ID NO: 1690205 - DNA, 15 bp, Homo sapiens
caatgtgctcttatc

SEQ ID NO: 1690206 - DNA, 15 bp, Homo sapiens
aatgtgctcttatca

SEQ ID NO: 1690207 - DNA, 15 bp, Homo sapiens
atgtgctcttatcag

SEQ ID NO: 1690208 - DNA, 15 bp, Homo sapiens
tgtgctcttatcaga

SEQ ID NO: 1690209 - DNA, 15 bp, Homo sapiens
gtgctcttatcagag

SEQ ID NO: 1690210 - DNA, 15 bp, Homo sapiens
tgctcttatcagaga

SEQ ID NO: 1690211 - DNA, 15 bp, Homo sapiens
gctcttatcagagag

SEQ ID NO: 1690212 - DNA, 15 bp, Homo sapiens
ctcttatcagagaga

SEQ ID NO: 1690213 - DNA, 15 bp, Homo sapiens
tcttatcagagagac

SEQ ID NO: 1690214 - DNA, 15 bp, Homo sapiens
cttatcagagagaca

SEQ ID NO: 1690215 - DNA, 15 bp, Homo sapiens
ttatcagagagacaa

SEQ ID NO: 1690216 - DNA, 15 bp, Homo sapiens
tatcagagagacaaa

SEQ ID NO: 1690217 - DNA, 15 bp, Homo sapiens
atcagagagacaaag

SEQ ID NO: 1690218 - DNA, 15 bp, Homo sapiens
tcagagagacaaagg

SEQ ID NO: 1690219 - DNA, 15 bp, Homo sapiens
cagagagacaaaggg

SEQ ID NO: 1690220 - DNA, 15 bp, Homo sapiens
agagagacaaagggg

SEQ ID NO: 1690221 - DNA, 15 bp, Homo sapiens
gagagacaaaggggc

SEQ ID NO: 1690222 - DNA, 15 bp, Homo sapiens
agagacaaaggggca

SEQ ID NO: 1690223 - DNA, 15 bp, Homo sapiens
gagacaaaggggcag

SEQ ID NO: 1690224 - DNA, 15 bp, Homo sapiens
agacaaaggggcagt

SEQ ID NO: 1690225 - DNA, 15 bp, Homo sapiens
gacaaaggggcagtt

SEQ ID NO: 1690226 - DNA, 15 bp, Homo sapiens
acaaaggggcagtta

SEQ ID NO: 1690227 - DNA, 15 bp, Homo sapiens
caaaggggcagttat

SEQ ID NO: 1690228 - DNA, 15 bp, Homo sapiens
aaaggggcagttatt

SEQ ID NO: 1690229 - DNA, 15 bp, Homo sapiens
aaggggcagttattc

SEQ ID NO: 1690230 - DNA, 15 bp, Homo sapiens
aggggcagttattcc

SEQ ID NO: 1690231 - DNA, 15 bp, Homo sapiens
ggggcagttattcct

SEQ ID NO: 1690232 - DNA, 15 bp, Homo sapiens
gggcagttattcctg

SEQ ID NO: 1690233 - DNA, 15 bp, Homo sapiens
ggcagttattcctgg

SEQ ID NO: 1690234 - DNA, 15 bp, Homo sapiens
gcagttattcctggc

SEQ ID NO: 1690235 - DNA, 15 bp, Homo sapiens
cagttattcctggcc

SEQ ID NO: 1690236 - DNA, 15 bp, Homo sapiens
agttattcctggcca

SEQ ID NO: 1690237 - DNA, 15 bp, Homo sapiens
gttattcctggccac

SEQ ID NO: 1690238 - DNA, 15 bp, Homo sapiens
ttattcctggccacg

SEQ ID NO: 1690239 - DNA, 15 bp, Homo sapiens
tattcctggccacga

SEQ ID NO: 1690240 - DNA, 15 bp, Homo sapiens
attcctggccacgaa

SEQ ID NO: 1690241 - DNA, 15 bp, Homo sapiens
ttcctggccacgaaa

SEQ ID NO: 1690242 - DNA, 15 bp, Homo sapiens
tcctggccacgaaag

SEQ ID NO: 1690243 - DNA, 15 bp, Homo sapiens
cctggccacgaaagt

SEQ ID NO: 1690244 - DNA, 15 bp, Homo sapiens
ctggccacgaaagta

SEQ ID NO: 1690245 - DNA, 15 bp, Homo sapiens
tggccacgaaagtag

SEQ ID NO: 1690246 - DNA, 15 bp, Homo sapiens
ggccacgaaagtagt

SEQ ID NO: 1690247 - DNA, 15 bp, Homo sapiens
gccacgaaagtagtt

SEQ ID NO: 1690248 - DNA, 15 bp, Homo sapiens
ccacgaaagtagttc

SEQ ID NO: 1690249 - DNA, 15 bp, Homo sapiens
cacgaaagtagttct

SEQ ID NO: 1690250 - DNA, 15 bp, Homo sapiens
acgaaagtagttctt

SEQ ID NO: 1690251 - DNA, 15 bp, Homo sapiens
cgaaagtagttcttg

SEQ ID NO: 1690252 - DNA, 15 bp, Homo sapiens
gaaagtagttcttgg

SEQ ID NO: 1690253 - DNA, 15 bp, Homo sapiens
aaagtagttcttggc

SEQ ID NO: 1690254 - DNA, 15 bp, Homo sapiens
aagtagttcttggct

SEQ ID NO: 1690255 - DNA, 15 bp, Homo sapiens
agtagttcttggctc

SEQ ID NO: 1690256 - DNA, 15 bp, Homo sapiens
gtagttcttggctca

SEQ ID NO: 1690257 - DNA, 15 bp, Homo sapiens
tagttcttggctcat

SEQ ID NO: 1690258 - DNA, 15 bp, Homo sapiens
agttcttggctcatt

SEQ ID NO: 1690259 - DNA, 15 bp, Homo sapiens
gttcttggctcattg

SEQ ID NO: 1690260 - DNA, 15 bp, Homo sapiens
ttcttggctcattga

SEQ ID NO: 1690261 - DNA, 15 bp, Homo sapiens
tcttggctcattgag

SEQ ID NO: 1690262 - DNA, 15 bp, Homo sapiens
cttggctcattgagc

SEQ ID NO: 1690263 - DNA, 15 bp, Homo sapiens
ttggctcattgagca

SEQ ID NO: 1690264 - DNA, 15 bp, Homo sapiens
tggctcattgagcag

SEQ ID NO: 1690265 - DNA, 15 bp, Homo sapiens
ggctcattgagcagc

SEQ ID NO: 1690266 - DNA, 15 bp, Homo sapiens
gctcattgagcagct

SEQ ID NO: 1690267 - DNA, 15 bp, Homo sapiens
ctcattgagcagcta

SEQ ID NO: 1690268 - DNA, 15 bp, Homo sapiens
tcattgagcagctat

SEQ ID NO: 1690269 - DNA, 15 bp, Homo sapiens
cattgagcagctatg

SEQ ID NO: 1690270 - DNA, 15 bp, Homo sapiens
attgagcagctatga

SEQ ID NO: 1690271 - DNA, 15 bp, Homo sapiens
ttgagcagctatgaa

SEQ ID NO: 1690272 - DNA, 15 bp, Homo sapiens
tgagcagctatgaaa

SEQ ID NO: 1690273 - DNA, 15 bp, Homo sapiens
gagcagctatgaaat

SEQ ID NO: 1690274 - DNA, 15 bp, Homo sapiens
agcagctatgaaatc

SEQ ID NO: 1690275 - DNA, 15 bp, Homo sapiens
gcagctatgaaatct

SEQ ID NO: 1690276 - DNA, 15 bp, Homo sapiens
cagctatgaaatcta

SEQ ID NO: 1690277 - DNA, 15 bp, Homo sapiens
agctatgaaatctat

SEQ ID NO: 1690278 - DNA, 15 bp, Homo sapiens
gctatgaaatctatt

SEQ ID NO: 1690279 - DNA, 15 bp, Homo sapiens
ctatgaaatctattt

SEQ ID NO: 1690280 - DNA, 15 bp, Homo sapiens
tatgaaatctatttg

SEQ ID NO: 1690281 - DNA, 15 bp, Homo sapiens
atgaaatctatttgc

SEQ ID NO: 1690282 - DNA, 15 bp, Homo sapiens
tgaaatctatttgca

SEQ ID NO: 1690283 - DNA, 15 bp, Homo sapiens
gaaatctatttgcag

SEQ ID NO: 1690284 - DNA, 15 bp, Homo sapiens
aaatctatttgcagg

SEQ ID NO: 1690285 - DNA, 15 bp, Homo sapiens
aatctatttgcaggc

SEQ ID NO: 1690286 - DNA, 15 bp, Homo sapiens
atctatttgcaggcc

SEQ ID NO: 1690287 - DNA, 15 bp, Homo sapiens
tctatttgcaggcca

SEQ ID NO: 1690288 - DNA, 15 bp, Homo sapiens
ctatttgcaggccag

SEQ ID NO: 1690289 - DNA, 15 bp, Homo sapiens
tatttgcaggccagg

SEQ ID NO: 1690290 - DNA, 15 bp, Homo sapiens
ttgcaggccaggcat

SEQ ID NO: 1690291 - DNA, 15 bp, Homo sapiens
tgcaggccaggcatg

SEQ ID NO: 1690292 - DNA, 15 bp, Homo sapiens
gcaggccaggcatgg

SEQ ID NO: 1690293 - DNA, 15 bp, Homo sapiens
caggccaggcatggt

SEQ ID NO: 1690294 - DNA, 15 bp, Homo sapiens
ggccaggcatggtgt

SEQ ID NO: 1690295 - DNA, 15 bp, Homo sapiens
gccaggcatggtgtc

SEQ ID NO: 1690296 - DNA, 15 bp, Homo sapiens
ccaggcatggtgtct

SEQ ID NO: 1690297 - DNA, 15 bp, Homo sapiens
caggcatggtgtctc

SEQ ID NO: 1690298 - DNA, 15 bp, Homo sapiens
aggcatggtgtctca

SEQ ID NO: 1690299 - DNA, 15 bp, Homo sapiens
ggcatggtgtctcaa

SEQ ID NO: 1690300 - DNA, 15 bp, Homo sapiens
gcatggtgtctcaag

SEQ ID NO: 1690301 - DNA, 15 bp, Homo sapiens
catggtgtctcaagc

SEQ ID NO: 1690302 - DNA, 15 bp, Homo sapiens
atggtgtctcaagct

SEQ ID NO: 1690303 - DNA, 15 bp, Homo sapiens
tggtgtctcaagctt

SEQ ID NO: 1690304 - DNA, 15 bp, Homo sapiens
ggtgtctcaagctta

SEQ ID NO: 1690305 - DNA, 15 bp, Homo sapiens
gtgtctcaagcttat

SEQ ID NO: 1690306 - DNA, 15 bp, Homo sapiens
tgtctcaagcttata

SEQ ID NO: 1690307 - DNA, 15 bp, Homo sapiens
gtctcaagcttataa

SEQ ID NO: 1690308 - DNA, 15 bp, Homo sapiens
tctcaagcttataat

SEQ ID NO: 1690309 - DNA, 15 bp, Homo sapiens
ctcaagcttataatc

SEQ ID NO: 1690310 - DNA, 15 bp, Homo sapiens
tcaagcttataatct

SEQ ID NO: 1690311 - DNA, 15 bp, Homo sapiens
caagcttataatctt

SEQ ID NO: 1690312 - DNA, 15 bp, Homo sapiens
aagcttataatctta

SEQ ID NO: 1690313 - DNA, 15 bp, Homo sapiens
agcttataatcttaa

SEQ ID NO: 1690314 - DNA, 15 bp, Homo sapiens
gcttataatcttaac

SEQ ID NO: 1690315 - DNA, 15 bp, Homo sapiens
cttataatcttaaca

SEQ ID NO: 1690316 - DNA, 15 bp, Homo sapiens
ttataatcttaacac

SEQ ID NO: 1690317 - DNA, 15 bp, Homo sapiens
tataatcttaacact

SEQ ID NO: 1690318 - DNA, 15 bp, Homo sapiens
ataatcttaacactt

SEQ ID NO: 1690319 - DNA, 15 bp, Homo sapiens
tggatcacctgagga

SEQ ID NO: 1690320 - DNA, 15 bp, Homo sapiens
ggatcacctgaggac

SEQ ID NO: 1690321 - DNA, 15 bp, Homo sapiens
gatcacctgaggaca

SEQ ID NO: 1690322 - DNA, 15 bp, Homo sapiens
atcacctgaggacag

SEQ ID NO: 1690323 - DNA, 15 bp, Homo sapiens
tcacctgaggacagg

SEQ ID NO: 1690324 - DNA, 15 bp, Homo sapiens
cacctgaggacagga

SEQ ID NO: 1690325 - DNA, 15 bp, Homo sapiens
acctgaggacaggag

SEQ ID NO: 1690326 - DNA, 15 bp, Homo sapiens
cctgaggacaggagt

SEQ ID NO: 1690327 - DNA, 15 bp, Homo sapiens
ctgaggacaggagtt

SEQ ID NO: 1690328 - DNA, 15 bp, Homo sapiens
tgaggacaggagttc

SEQ ID NO: 1690329 - DNA, 15 bp, Homo sapiens
gaggacaggagttca

SEQ ID NO: 1690330 - DNA, 15 bp, Homo sapiens
aggacaggagttcaa

SEQ ID NO: 1690331 - DNA, 15 bp, Homo sapiens
ggacaggagttcaag

SEQ ID NO: 1690332 - DNA, 15 bp, Homo sapiens
gacaggagttcaaga

SEQ ID NO: 1690333 - DNA, 15 bp, Homo sapiens
acaggagttcaagac

SEQ ID NO: 1690334 - DNA, 15 bp, Homo sapiens
acgtggcgaaacccc

SEQ ID NO: 1690335 - DNA, 15 bp, Homo sapiens
cgtggcgaaaccccg

SEQ ID NO: 1690336 - DNA, 15 bp, Homo sapiens
gtggcgaaaccccgt

SEQ ID NO: 1690337 - DNA, 15 bp, Homo sapiens
cgaaaccccgtctcc

SEQ ID NO: 1690338 - DNA, 15 bp, Homo sapiens
gaaaccccgtctcct

SEQ ID NO: 1690339 - DNA, 15 bp, Homo sapiens
aaaccccgtctccta

SEQ ID NO: 1690340 - DNA, 15 bp, Homo sapiens
aaccccgtctcctaa

SEQ ID NO: 1690341 - DNA, 15 bp, Homo sapiens
accccgtctcctaaa

SEQ ID NO: 1690342 - DNA, 15 bp, Homo sapiens
ccccgtctcctaaat

SEQ ID NO: 1690343 - DNA, 15 bp, Homo sapiens
cccgtctcctaaata

SEQ ID NO: 1690344 - DNA, 15 bp, Homo sapiens
ccgtctcctaaataa

SEQ ID NO: 1690345 - DNA, 15 bp, Homo sapiens
cgtctcctaaataaa

SEQ ID NO: 1690346 - DNA, 15 bp, Homo sapiens
gtctcctaaataaaa

SEQ ID NO: 1690347 - DNA, 15 bp, Homo sapiens
tctcctaaataaaaa

SEQ ID NO: 1690348 - DNA, 15 bp, Homo sapiens
ctcctaaataaaaag

SEQ ID NO: 1690349 - DNA, 15 bp, Homo sapiens
tcctaaataaaaagt

SEQ ID NO: 1690350 - DNA, 15 bp, Homo sapiens
cctaaataaaaagta

SEQ ID NO: 1690351 - DNA, 15 bp, Homo sapiens
ctaaataaaaagtag

SEQ ID NO: 1690352 - DNA, 15 bp, Homo sapiens
taaataaaaagtagc

SEQ ID NO: 1690353 - DNA, 15 bp, Homo sapiens
aaataaaaagtagcc

SEQ ID NO: 1690354 - DNA, 15 bp, Homo sapiens
aataaaaagtagccg

SEQ ID NO: 1690355 - DNA, 15 bp, Homo sapiens
ataaaaagtagccgg

SEQ ID NO: 1690356 - DNA, 15 bp, Homo sapiens
taaaaagtagccggg

SEQ ID NO: 1690357 - DNA, 15 bp, Homo sapiens
aaaaagtagccgggc

SEQ ID NO: 1690358 - DNA, 15 bp, Homo sapiens
aaaagtagccgggca

SEQ ID NO: 1690359 - DNA, 15 bp, Homo sapiens
aaagtagccgggcat

SEQ ID NO: 1690360 - DNA, 15 bp, Homo sapiens
aagtagccgggcatg

SEQ ID NO: 1690361 - DNA, 15 bp, Homo sapiens
agtagccgggcatga

SEQ ID NO: 1690362 - DNA, 15 bp, Homo sapiens
gtagccgggcatgat

SEQ ID NO: 1690363 - DNA, 15 bp, Homo sapiens
tagccgggcatgatg

SEQ ID NO: 1690364 - DNA, 15 bp, Homo sapiens
agccgggcatgatgg

SEQ ID NO: 1690365 - DNA, 15 bp, Homo sapiens
gccgggcatgatggc

SEQ ID NO: 1690366 - DNA, 15 bp, Homo sapiens
ccgggcatgatggca

SEQ ID NO: 1690367 - DNA, 15 bp, Homo sapiens
cgggcatgatggcag

SEQ ID NO: 1690368 - DNA, 15 bp, Homo sapiens
ggcatgatggcaggg

SEQ ID NO: 1690369 - DNA, 15 bp, Homo sapiens
gcatgatggcagggg

SEQ ID NO: 1690370 - DNA, 15 bp, Homo sapiens
catgatggcaggggc

SEQ ID NO: 1690371 - DNA, 15 bp, Homo sapiens
atgatggcaggggcc

SEQ ID NO: 1690372 - DNA, 15 bp, Homo sapiens
tgatggcaggggcct

SEQ ID NO: 1690373 - DNA, 15 bp, Homo sapiens
gatggcaggggccta

SEQ ID NO: 1690374 - DNA, 15 bp, Homo sapiens
atggcaggggcctat

SEQ ID NO: 1690375 - DNA, 15 bp, Homo sapiens
tggcaggggcctata

SEQ ID NO: 1690376 - DNA, 15 bp, Homo sapiens
ggcaggggcctataa

SEQ ID NO: 1690377 - DNA, 15 bp, Homo sapiens
gcaggggcctataat

SEQ ID NO: 1690378 - DNA, 15 bp, Homo sapiens
caggggcctataatc

SEQ ID NO: 1690379 - DNA, 15 bp, Homo sapiens
aggggcctataatcc

SEQ ID NO: 1690380 - DNA, 15 bp, Homo sapiens
ggggcctataatccc

SEQ ID NO: 1690381 - DNA, 15 bp, Homo sapiens
gggcctataatcccg

SEQ ID NO: 1690382 - DNA, 15 bp, Homo sapiens
ggcctataatcccgg

SEQ ID NO: 1690383 - DNA, 15 bp, Homo sapiens
gcctataatcccggc

SEQ ID NO: 1690384 - DNA, 15 bp, Homo sapiens
cctataatcccggct

SEQ ID NO: 1690385 - DNA, 15 bp, Homo sapiens
ctataatcccggcta

SEQ ID NO: 1690386 - DNA, 15 bp, Homo sapiens
tataatcccggctac

SEQ ID NO: 1690387 - DNA, 15 bp, Homo sapiens
ataatcccggctact

SEQ ID NO: 1690388 - DNA, 15 bp, Homo sapiens
taatcccggctactc

SEQ ID NO: 1690389 - DNA, 15 bp, Homo sapiens
aatcccggctactca

SEQ ID NO: 1690390 - DNA, 15 bp, Homo sapiens
atcccggctactcag

SEQ ID NO: 1690391 - DNA, 15 bp, Homo sapiens
tcccggctactcagg

SEQ ID NO: 1690392 - DNA, 15 bp, Homo sapiens
cccggctactcagga

SEQ ID NO: 1690393 - DNA, 15 bp, Homo sapiens
ccggctactcaggag

SEQ ID NO: 1690394 - DNA, 15 bp, Homo sapiens
cggctactcaggagg

SEQ ID NO: 1690395 - DNA, 15 bp, Homo sapiens
ggctactcaggaggc

SEQ ID NO: 1690396 - DNA, 15 bp, Homo sapiens
aggctgaggcagaat

SEQ ID NO: 1690397 - DNA, 15 bp, Homo sapiens
ggctgaggcagaatt

SEQ ID NO: 1690398 - DNA, 15 bp, Homo sapiens
gctgaggcagaattg

SEQ ID NO: 1690399 - DNA, 15 bp, Homo sapiens
ctgaggcagaattgc

SEQ ID NO: 1690400 - DNA, 15 bp, Homo sapiens
tgaggcagaattgct

SEQ ID NO: 1690401 - DNA, 15 bp, Homo sapiens
gaggcagaattgctt

SEQ ID NO: 1690402 - DNA, 15 bp, Homo sapiens
aggcagaattgcttg

SEQ ID NO: 1690403 - DNA, 15 bp, Homo sapiens
ggcagaattgcttga

SEQ ID NO: 1690404 - DNA, 15 bp, Homo sapiens
gcagaattgcttgaa

SEQ ID NO: 1690405 - DNA, 15 bp, Homo sapiens
cagaattgcttgaac

SEQ ID NO: 1690406 - DNA, 15 bp, Homo sapiens
gcggaggttgcagta

SEQ ID NO: 1690407 - DNA, 15 bp, Homo sapiens
cggaggttgcagtaa

SEQ ID NO: 1690408 - DNA, 15 bp, Homo sapiens
ggttgcagtaagccg

SEQ ID NO: 1690409 - DNA, 15 bp, Homo sapiens
gttgcagtaagccga

SEQ ID NO: 1690410 - DNA, 15 bp, Homo sapiens
agtaagccgagatcg

SEQ ID NO: 1690411 - DNA, 15 bp, Homo sapiens
gtaagccgagatcgc

SEQ ID NO: 1690412 - DNA, 15 bp, Homo sapiens
taagccgagatcgca

SEQ ID NO: 1690413 - DNA, 15 bp, Homo sapiens
aagccgagatcgcac

SEQ ID NO: 1690414 - DNA, 15 bp, Homo sapiens
cactccagcctgtga

SEQ ID NO: 1690415 - DNA, 15 bp, Homo sapiens
actccagcctgtgag

SEQ ID NO: 1690416 - DNA, 15 bp, Homo sapiens
ctccagcctgtgaga

SEQ ID NO: 1690417 - DNA, 15 bp, Homo sapiens
tccagcctgtgagac

SEQ ID NO: 1690418 - DNA, 15 bp, Homo sapiens
ccagcctgtgagaca

SEQ ID NO: 1690419 - DNA, 15 bp, Homo sapiens
cagcctgtgagacag

SEQ ID NO: 1690420 - DNA, 15 bp, Homo sapiens
agcctgtgagacaga

SEQ ID NO: 1690421 - DNA, 15 bp, Homo sapiens
gcctgtgagacagag

SEQ ID NO: 1690422 - DNA, 15 bp, Homo sapiens
cctgtgagacagagc

SEQ ID NO: 1690423 - DNA, 15 bp, Homo sapiens
ctgtgagacagagca

SEQ ID NO: 1690424 - DNA, 15 bp, Homo sapiens
tgtgagacagagcaa

SEQ ID NO: 1690425 - DNA, 15 bp, Homo sapiens
gtgagacagagcaag

SEQ ID NO: 1690426 - DNA, 15 bp, Homo sapiens
tgagacagagcaaga

SEQ ID NO: 1690427 - DNA, 15 bp, Homo sapiens
gagacagagcaagac

SEQ ID NO: 1690428 - DNA, 15 bp, Homo sapiens
agacagagcaagacc

SEQ ID NO: 1690429 - DNA, 15 bp, Homo sapiens
caagaccccgtctcc

SEQ ID NO: 1690430 - DNA, 15 bp, Homo sapiens
aagaccccgtctcca

SEQ ID NO: 1690431 - DNA, 15 bp, Homo sapiens
agaccccgtctccaa

SEQ ID NO: 1690432 - DNA, 15 bp, Homo sapiens
gaccccgtctccaaa

SEQ ID NO: 1690433 - DNA, 15 bp, Homo sapiens
accccgtctccaaaa

SEQ ID NO: 1690434 - DNA, 15 bp, Homo sapiens
ccccgtctccaaaaa

SEQ ID NO: 1690435 - DNA, 15 bp, Homo sapiens
cccgtctccaaaaaa

SEQ ID NO: 1690436 - DNA, 15 bp, Homo sapiens
ccgtctccaaaaaaa

SEQ ID NO: 1690437 - DNA, 15 bp, Homo sapiens
cgtctccaaaaaaaa

SEQ ID NO: 1690438 - DNA, 15 bp, Homo sapiens
gtctccaaaaaaaaa

SEQ ID NO: 1690439 - DNA, 15 bp, Homo sapiens
tctccaaaaaaaaaa

SEQ ID NO: 1690440 - DNA, 15 bp, Homo sapiens
ctccaaaaaaaaaaa

SEQ ID NO: 1690441 - DNA, 15 bp, Homo sapiens
tccaaaaaaaaaaac

SEQ ID NO: 1690442 - DNA, 15 bp, Homo sapiens
ccaaaaaaaaaaacc

SEQ ID NO: 1690443 - DNA, 15 bp, Homo sapiens
caaaaaaaaaaacca

SEQ ID NO: 1690444 - DNA, 15 bp, Homo sapiens
aaaaaaaaccaaaaa

SEQ ID NO: 1690445 - DNA, 15 bp, Homo sapiens
aaaaaaaccaaaaaa

SEQ ID NO: 1690446 - DNA, 15 bp, Homo sapiens
aaaaaaccaaaaaaa

SEQ ID NO: 1690447 - DNA, 15 bp, Homo sapiens
aaaaaccaaaaaaac

SEQ ID NO: 1690448 - DNA, 15 bp, Homo sapiens
aaaaccaaaaaaaca

SEQ ID NO: 1690449 - DNA, 15 bp, Homo sapiens
aaaccaaaaaaacaa

SEQ ID NO: 1690450 - DNA, 15 bp, Homo sapiens
aaccaaaaaaacaaa

SEQ ID NO: 1690451 - DNA, 15 bp, Homo sapiens
accaaaaaaacaaaa

SEQ ID NO: 1690452 - DNA, 15 bp, Homo sapiens
ccaaaaaaacaaaaa

SEQ ID NO: 1690453 - DNA, 15 bp, Homo sapiens
aaaaaacaaaaaaac

SEQ ID NO: 1690454 - DNA, 15 bp, Homo sapiens
aaaaacaaaaaaact

SEQ ID NO: 1690455 - DNA, 15 bp, Homo sapiens
aaaacaaaaaaactg

SEQ ID NO: 1690456 - DNA, 15 bp, Homo sapiens
aaacaaaaaaactga

SEQ ID NO: 1690457 - DNA, 15 bp, Homo sapiens
aacaaaaaaactgaa

SEQ ID NO: 1690458 - DNA, 15 bp, Homo sapiens
acaaaaaaactgaaa

SEQ ID NO: 1690459 - DNA, 15 bp, Homo sapiens
caaaaaaactgaaat

SEQ ID NO: 1690460 - DNA, 15 bp, Homo sapiens
aaaaaactgaaatta

SEQ ID NO: 1690461 - DNA, 15 bp, Homo sapiens
aaaaactgaaattaa

SEQ ID NO: 1690462 - DNA, 15 bp, Homo sapiens
aaaactgaaattaaa

SEQ ID NO: 1690463 - DNA, 15 bp, Homo sapiens
aaactgaaattaaaa

SEQ ID NO: 1690464 - DNA, 15 bp, Homo sapiens
aactgaaattaaaat

SEQ ID NO: 1690465 - DNA, 15 bp, Homo sapiens
actgaaattaaaatg

SEQ ID NO: 1690466 - DNA, 15 bp, Homo sapiens
ctgaaattaaaatga

SEQ ID NO: 1690467 - DNA, 15 bp, Homo sapiens
tgaaattaaaatgag

SEQ ID NO: 1690468 - DNA, 15 bp, Homo sapiens
gaaattaaaatgagt

SEQ ID NO: 1690469 - DNA, 15 bp, Homo sapiens
aaattaaaatgagtt

SEQ ID NO: 1690470 - DNA, 15 bp, Homo sapiens
aattaaaatgagttc

SEQ ID NO: 1690471 - DNA, 15 bp, Homo sapiens
attaaaatgagttcc

SEQ ID NO: 1690472 - DNA, 15 bp, Homo sapiens
ttaaaatgagttccg

SEQ ID NO: 1690473 - DNA, 15 bp, Homo sapiens
taaaatgagttccgt

SEQ ID NO: 1690474 - DNA, 15 bp, Homo sapiens
aaaatgagttccgtt

SEQ ID NO: 1690475 - DNA, 15 bp, Homo sapiens
aaatgagttccgttt

SEQ ID NO: 1690476 - DNA, 15 bp, Homo sapiens
aatgagttccgtttg

SEQ ID NO: 1690477 - DNA, 15 bp, Homo sapiens
atgagttccgtttgg

SEQ ID NO: 1690478 - DNA, 15 bp, Homo sapiens
tgagttccgtttgga

SEQ ID NO: 1690479 - DNA, 15 bp, Homo sapiens
gagttccgtttggag

SEQ ID NO: 1690480 - DNA, 15 bp, Homo sapiens
agttccgtttggagg

SEQ ID NO: 1690481 - DNA, 15 bp, Homo sapiens
gttccgtttggaggt

SEQ ID NO: 1690482 - DNA, 15 bp, Homo sapiens
ttccgtttggaggta

SEQ ID NO: 1690483 - DNA, 15 bp, Homo sapiens
tccgtttggaggtaa

SEQ ID NO: 1690484 - DNA, 15 bp, Homo sapiens
ccgtttggaggtaaa

SEQ ID NO: 1690485 - DNA, 15 bp, Homo sapiens
cgtttggaggtaaat

SEQ ID NO: 1690486 - DNA, 15 bp, Homo sapiens
gtttggaggtaaata

SEQ ID NO: 1690487 - DNA, 15 bp, Homo sapiens
tttggaggtaaatac

SEQ ID NO: 1690488 - DNA, 15 bp, Homo sapiens
ttggaggtaaatacc

SEQ ID NO: 1690489 - DNA, 15 bp, Homo sapiens
tggaggtaaatacct

SEQ ID NO: 1690490 - DNA, 15 bp, Homo sapiens
ggaggtaaatacctt

SEQ ID NO: 1690491 - DNA, 15 bp, Homo sapiens
gaggtaaataccttt

SEQ ID NO: 1690492 - DNA, 15 bp, Homo sapiens
aggtaaataccttta

SEQ ID NO: 1690493 - DNA, 15 bp, Homo sapiens
ggtaaatacctttaa

SEQ ID NO: 1690494 - DNA, 15 bp, Homo sapiens
gtaaatacctttaag

SEQ ID NO: 1690495 - DNA, 15 bp, Homo sapiens
taaatacctttaaga

SEQ ID NO: 1690496 - DNA, 15 bp, Homo sapiens
aaatacctttaagag

SEQ ID NO: 1690497 - DNA, 15 bp, Homo sapiens
aatacctttaagagt

SEQ ID NO: 1690498 - DNA, 15 bp, Homo sapiens
atacctttaagagta

SEQ ID NO: 1690499 - DNA, 15 bp, Homo sapiens
tacctttaagagtac

SEQ ID NO: 1690500 - DNA, 15 bp, Homo sapiens
acctttaagagtact

SEQ ID NO: 1690501 - DNA, 15 bp, Homo sapiens
cctttaagagtactt

SEQ ID NO: 1690502 - DNA, 15 bp, Homo sapiens
ctttaagagtacttt

SEQ ID NO: 1690503 - DNA, 15 bp, Homo sapiens
tttaagagtacttta

SEQ ID NO: 1690504 - DNA, 15 bp, Homo sapiens
ttaagagtactttag

SEQ ID NO: 1690505 - DNA, 15 bp, Homo sapiens
taagagtactttaga

SEQ ID NO: 1690506 - DNA, 15 bp, Homo sapiens
aagagtactttagat

SEQ ID NO: 1690507 - DNA, 15 bp, Homo sapiens
agagtactttagatt

SEQ ID NO: 1690508 - DNA, 15 bp, Homo sapiens
gagtactttagattt

SEQ ID NO: 1690509 - DNA, 15 bp, Homo sapiens
agtactttagattta

SEQ ID NO: 1690510 - DNA, 15 bp, Homo sapiens
gtactttagatttac

SEQ ID NO: 1690511 - DNA, 15 bp, Homo sapiens
tactttagatttaca

SEQ ID NO: 1690512 - DNA, 15 bp, Homo sapiens
actttagatttacat

SEQ ID NO: 1690513 - DNA, 15 bp, Homo sapiens
ctttagatttacata

SEQ ID NO: 1690514 - DNA, 15 bp, Homo sapiens
tttagatttacatag

SEQ ID NO: 1690515 - DNA, 15 bp, Homo sapiens
ttagatttacatagc

SEQ ID NO: 1690516 - DNA, 15 bp, Homo sapiens
tagatttacatagca

SEQ ID NO: 1690517 - DNA, 15 bp, Homo sapiens
agatttacatagcac

SEQ ID NO: 1690518 - DNA, 15 bp, Homo sapiens
gatttacatagcact

SEQ ID NO: 1690519 - DNA, 15 bp, Homo sapiens
atttacatagcactg

SEQ ID NO: 1690520 - DNA, 15 bp, Homo sapiens
tacatagcactgggc

SEQ ID NO: 1690521 - DNA, 15 bp, Homo sapiens
acatagcactgggct

SEQ ID NO: 1690522 - DNA, 15 bp, Homo sapiens
catagcactgggctg

SEQ ID NO: 1690523 - DNA, 15 bp, Homo sapiens
atagcactgggctgg

SEQ ID NO: 1690524 - DNA, 15 bp, Homo sapiens
tagcactgggctggg

SEQ ID NO: 1690525 - DNA, 15 bp, Homo sapiens
agcactgggctgggc

SEQ ID NO: 1690526 - DNA, 15 bp, Homo sapiens
gcactgggctgggca

SEQ ID NO: 1690527 - DNA, 15 bp, Homo sapiens
cactgggctgggcac

SEQ ID NO: 1690528 - DNA, 15 bp, Homo sapiens
actgggctgggcacg

SEQ ID NO: 1690529 - DNA, 15 bp, Homo sapiens
tgggctgggcacggt

SEQ ID NO: 1690530 - DNA, 15 bp, Homo sapiens
gggctgggcacggtg

SEQ ID NO: 1690531 - DNA, 15 bp, Homo sapiens
tgggaggctgaggct

SEQ ID NO: 1690532 - DNA, 15 bp, Homo sapiens
gggaggctgaggctg

SEQ ID NO: 1690533 - DNA, 15 bp, Homo sapiens
ggaggctgaggctgg

SEQ ID NO: 1690534 - DNA, 15 bp, Homo sapiens
gaggctgaggctggt

SEQ ID NO: 1690535 - DNA, 15 bp, Homo sapiens
aggctgaggctggtg

SEQ ID NO: 1690536 - DNA, 15 bp, Homo sapiens
ggctgaggctggtgg

SEQ ID NO: 1690537 - DNA, 15 bp, Homo sapiens
gctgaggctggtgga

SEQ ID NO: 1690538 - DNA, 15 bp, Homo sapiens
ctgaggctggtggat

SEQ ID NO: 1690539 - DNA, 15 bp, Homo sapiens
tgaggctggtggatc

SEQ ID NO: 1690540 - DNA, 15 bp, Homo sapiens
gaggctggtggatca

SEQ ID NO: 1690541 - DNA, 15 bp, Homo sapiens
aggctggtggatcac

SEQ ID NO: 1690542 - DNA, 15 bp, Homo sapiens
ggctggtggatcaca

SEQ ID NO: 1690543 - DNA, 15 bp, Homo sapiens
gctggtggatcacaa

SEQ ID NO: 1690544 - DNA, 15 bp, Homo sapiens
ctggtggatcacaag

SEQ ID NO: 1690545 - DNA, 15 bp, Homo sapiens
tggtggatcacaagc

SEQ ID NO: 1690546 - DNA, 15 bp, Homo sapiens
ggtggatcacaagct

SEQ ID NO: 1690547 - DNA, 15 bp, Homo sapiens
gtggatcacaagctc

SEQ ID NO: 1690548 - DNA, 15 bp, Homo sapiens
tggatcacaagctca

SEQ ID NO: 1690549 - DNA, 15 bp, Homo sapiens
ggatcacaagctcag

SEQ ID NO: 1690550 - DNA, 15 bp, Homo sapiens
gatcacaagctcagg

SEQ ID NO: 1690551 - DNA, 15 bp, Homo sapiens
atcacaagctcaggg

SEQ ID NO: 1690552 - DNA, 15 bp, Homo sapiens
tcacaagctcagggg

SEQ ID NO: 1690553 - DNA, 15 bp, Homo sapiens
cacaagctcaggggt

SEQ ID NO: 1690554 - DNA, 15 bp, Homo sapiens
acaagctcaggggtt

SEQ ID NO: 1690555 - DNA, 15 bp, Homo sapiens
caagctcaggggttt

SEQ ID NO: 1690556 - DNA, 15 bp, Homo sapiens
aagctcaggggtttg

SEQ ID NO: 1690557 - DNA, 15 bp, Homo sapiens
agctcaggggtttga

SEQ ID NO: 1690558 - DNA, 15 bp, Homo sapiens
gctcaggggtttgag

SEQ ID NO: 1690559 - DNA, 15 bp, Homo sapiens
ctcaggggtttgaga

SEQ ID NO: 1690560 - DNA, 15 bp, Homo sapiens
tcaggggtttgagat

SEQ ID NO: 1690561 - DNA, 15 bp, Homo sapiens
caggggtttgagatc

SEQ ID NO: 1690562 - DNA, 15 bp, Homo sapiens
aggggtttgagatca

SEQ ID NO: 1690563 - DNA, 15 bp, Homo sapiens
ggggtttgagatcag

SEQ ID NO: 1690564 - DNA, 15 bp, Homo sapiens
gggtttgagatcagc

SEQ ID NO: 1690565 - DNA, 15 bp, Homo sapiens
ggtttgagatcagcc

SEQ ID NO: 1690566 - DNA, 15 bp, Homo sapiens
gagatcagcctgacc

SEQ ID NO: 1690567 - DNA, 15 bp, Homo sapiens
gcctgaccaacatga

SEQ ID NO: 1690568 - DNA, 15 bp, Homo sapiens
cctgaccaacatgat

SEQ ID NO: 1690569 - DNA, 15 bp, Homo sapiens
ctgaccaacatgata

SEQ ID NO: 1690570 - DNA, 15 bp, Homo sapiens
tgaccaacatgataa

SEQ ID NO: 1690571 - DNA, 15 bp, Homo sapiens
gaccaacatgataaa

SEQ ID NO: 1690572 - DNA, 15 bp, Homo sapiens
accaacatgataaaa

SEQ ID NO: 1690573 - DNA, 15 bp, Homo sapiens
ccaacatgataaaac

SEQ ID NO: 1690574 - DNA, 15 bp, Homo sapiens
caacatgataaaacc

SEQ ID NO: 1690575 - DNA, 15 bp, Homo sapiens
aacatgataaaacct

SEQ ID NO: 1690576 - DNA, 15 bp, Homo sapiens
acatgataaaacctt

SEQ ID NO: 1690577 - DNA, 15 bp, Homo sapiens
catgataaaaccttg

SEQ ID NO: 1690578 - DNA, 15 bp, Homo sapiens
atgataaaaccttgt

SEQ ID NO: 1690579 - DNA, 15 bp, Homo sapiens
tgataaaaccttgtc

SEQ ID NO: 1690580 - DNA, 15 bp, Homo sapiens
gataaaaccttgtct

SEQ ID NO: 1690581 - DNA, 15 bp, Homo sapiens
ataaaaccttgtctc

SEQ ID NO: 1690582 - DNA, 15 bp, Homo sapiens
taaaaccttgtctcc

SEQ ID NO: 1690583 - DNA, 15 bp, Homo sapiens
aaaaccttgtctcca

SEQ ID NO: 1690584 - DNA, 15 bp, Homo sapiens
aaaccttgtctccac

SEQ ID NO: 1690585 - DNA, 15 bp, Homo sapiens
aaccttgtctccact

SEQ ID NO: 1690586 - DNA, 15 bp, Homo sapiens
accttgtctccacta

SEQ ID NO: 1690587 - DNA, 15 bp, Homo sapiens
ccttgtctccactaa

SEQ ID NO: 1690588 - DNA, 15 bp, Homo sapiens
cttgtctccactaaa

SEQ ID NO: 1690589 - DNA, 15 bp, Homo sapiens
ttgtctccactaaaa

SEQ ID NO: 1690590 - DNA, 15 bp, Homo sapiens
tgtctccactaaaaa

SEQ ID NO: 1690591 - DNA, 15 bp, Homo sapiens
ctccactaaaaatat

SEQ ID NO: 1690592 - DNA, 15 bp, Homo sapiens
tccactaaaaatata

SEQ ID NO: 1690593 - DNA, 15 bp, Homo sapiens
ccactaaaaatataa

SEQ ID NO: 1690594 - DNA, 15 bp, Homo sapiens
cactaaaaatataaa

SEQ ID NO: 1690595 - DNA, 15 bp, Homo sapiens
tataaaaattagctg

SEQ ID NO: 1690596 - DNA, 15 bp, Homo sapiens
ataaaaattagctgg

SEQ ID NO: 1690597 - DNA, 15 bp, Homo sapiens
taaaaattagctggg

SEQ ID NO: 1690598 - DNA, 15 bp, Homo sapiens
tgcctgtaatcttaa

SEQ ID NO: 1690599 - DNA, 15 bp, Homo sapiens
gcctgtaatcttaac

SEQ ID NO: 1690600 - DNA, 15 bp, Homo sapiens
cctgtaatcttaact

SEQ ID NO: 1690601 - DNA, 15 bp, Homo sapiens
ctgtaatcttaacta

SEQ ID NO: 1690602 - DNA, 15 bp, Homo sapiens
tgtaatcttaactac

SEQ ID NO: 1690603 - DNA, 15 bp, Homo sapiens
gtaatcttaactact

SEQ ID NO: 1690604 - DNA, 15 bp, Homo sapiens
taatcttaactactc

SEQ ID NO: 1690605 - DNA, 15 bp, Homo sapiens
aatcttaactactca

SEQ ID NO: 1690606 - DNA, 15 bp, Homo sapiens
atcttaactactcag

SEQ ID NO: 1690607 - DNA, 15 bp, Homo sapiens
tcttaactactcaga

SEQ ID NO: 1690608 - DNA, 15 bp, Homo sapiens
cttaactactcagaa

SEQ ID NO: 1690609 - DNA, 15 bp, Homo sapiens
ttaactactcagaag

SEQ ID NO: 1690610 - DNA, 15 bp, Homo sapiens
taactactcagaagt

SEQ ID NO: 1690611 - DNA, 15 bp, Homo sapiens
aactactcagaagtc

SEQ ID NO: 1690612 - DNA, 15 bp, Homo sapiens
actactcagaagtct

SEQ ID NO: 1690613 - DNA, 15 bp, Homo sapiens
ctactcagaagtctg

SEQ ID NO: 1690614 - DNA, 15 bp, Homo sapiens
tactcagaagtctga

SEQ ID NO: 1690615 - DNA, 15 bp, Homo sapiens
actcagaagtctgag

SEQ ID NO: 1690616 - DNA, 15 bp, Homo sapiens
ctcagaagtctgagg

SEQ ID NO: 1690617 - DNA, 15 bp, Homo sapiens
tcagaagtctgaggc

SEQ ID NO: 1690618 - DNA, 15 bp, Homo sapiens
cagaagtctgaggca

SEQ ID NO: 1690619 - DNA, 15 bp, Homo sapiens
agaagtctgaggcag

SEQ ID NO: 1690620 - DNA, 15 bp, Homo sapiens
gaagtctgaggcagg

SEQ ID NO: 1690621 - DNA, 15 bp, Homo sapiens
aagtctgaggcagga

SEQ ID NO: 1690622 - DNA, 15 bp, Homo sapiens
atcacttgaacccgt

SEQ ID NO: 1690623 - DNA, 15 bp, Homo sapiens
tcacttgaacccgta

SEQ ID NO: 1690624 - DNA, 15 bp, Homo sapiens
cacttgaacccgtag

SEQ ID NO: 1690625 - DNA, 15 bp, Homo sapiens
acttgaacccgtagg

SEQ ID NO: 1690626 - DNA, 15 bp, Homo sapiens
cttgaacccgtaggt

SEQ ID NO: 1690627 - DNA, 15 bp, Homo sapiens
ttgaacccgtaggtg

SEQ ID NO: 1690628 - DNA, 15 bp, Homo sapiens
tgaacccgtaggtgg

SEQ ID NO: 1690629 - DNA, 15 bp, Homo sapiens
gaacccgtaggtgga

SEQ ID NO: 1690630 - DNA, 15 bp, Homo sapiens
aacccgtaggtggag

SEQ ID NO: 1690631 - DNA, 15 bp, Homo sapiens
acccgtaggtggagg

SEQ ID NO: 1690632 - DNA, 15 bp, Homo sapiens
cccgtaggtggaggt

SEQ ID NO: 1690633 - DNA, 15 bp, Homo sapiens
ccgtaggtggaggtt

SEQ ID NO: 1690634 - DNA, 15 bp, Homo sapiens
cgtaggtggaggttg

SEQ ID NO: 1690635 - DNA, 15 bp, Homo sapiens
gcagtgagccgagag

SEQ ID NO: 1690636 - DNA, 15 bp, Homo sapiens
cagtgagccgagagc

SEQ ID NO: 1690637 - DNA, 15 bp, Homo sapiens
agtgagccgagagcg

SEQ ID NO: 1690638 - DNA, 15 bp, Homo sapiens
gtgagccgagagcgc

SEQ ID NO: 1690639 - DNA, 15 bp, Homo sapiens
tgagccgagagcgcc

SEQ ID NO: 1690640 - DNA, 15 bp, Homo sapiens
gagccgagagcgcca

SEQ ID NO: 1690641 - DNA, 15 bp, Homo sapiens
agccgagagcgccac

SEQ ID NO: 1690642 - DNA, 15 bp, Homo sapiens
gccgagagcgccact

SEQ ID NO: 1690643 - DNA, 15 bp, Homo sapiens
ccgagagcgccactg

SEQ ID NO: 1690644 - DNA, 15 bp, Homo sapiens
cgagagcgccactgc

SEQ ID NO: 1690645 - DNA, 15 bp, Homo sapiens
gagagcgccactgca

SEQ ID NO: 1690646 - DNA, 15 bp, Homo sapiens
agagcgccactgcac

SEQ ID NO: 1690647 - DNA, 15 bp, Homo sapiens
gagcgccactgcact

SEQ ID NO: 1690648 - DNA, 15 bp, Homo sapiens
cgccactgcactccc

SEQ ID NO: 1690649 - DNA, 15 bp, Homo sapiens
gccactgcactcccg

SEQ ID NO: 1690650 - DNA, 15 bp, Homo sapiens
ccactgcactcccgc

SEQ ID NO: 1690651 - DNA, 15 bp, Homo sapiens
cactgcactcccgcc

SEQ ID NO: 1690652 - DNA, 15 bp, Homo sapiens
actgcactcccgcct

SEQ ID NO: 1690653 - DNA, 15 bp, Homo sapiens
ctgcactcccgcctg

SEQ ID NO: 1690654 - DNA, 15 bp, Homo sapiens
tgcactcccgcctgg

SEQ ID NO: 1690655 - DNA, 15 bp, Homo sapiens
gcactcccgcctggg

SEQ ID NO: 1690656 - DNA, 15 bp, Homo sapiens
cactcccgcctgggc

SEQ ID NO: 1690657 - DNA, 15 bp, Homo sapiens
actcccgcctgggca

SEQ ID NO: 1690658 - DNA, 15 bp, Homo sapiens
ctcccgcctgggcaa

SEQ ID NO: 1690659 - DNA, 15 bp, Homo sapiens
tcccgcctgggcaac

SEQ ID NO: 1690660 - DNA, 15 bp, Homo sapiens
ccgcctgggcaacag

SEQ ID NO: 1690661 - DNA, 15 bp, Homo sapiens
cgcctgggcaacaga

SEQ ID NO: 1690662 - DNA, 15 bp, Homo sapiens
aaaaaaaaaagattt

SEQ ID NO: 1690663 - DNA, 15 bp, Homo sapiens
aaaaaaaaagattta

SEQ ID NO: 1690664 - DNA, 15 bp, Homo sapiens
aaaaaaaagatttac

SEQ ID NO: 1690665 - DNA, 15 bp, Homo sapiens
aaaaaaagatttaca

SEQ ID NO: 1690666 - DNA, 15 bp, Homo sapiens
aaaaaagatttacac

SEQ ID NO: 1690667 - DNA, 15 bp, Homo sapiens
aaaaagatttacaca

SEQ ID NO: 1690668 - DNA, 15 bp, Homo sapiens
aaaagatttacacag

SEQ ID NO: 1690669 - DNA, 15 bp, Homo sapiens
aaagatttacacagc

SEQ ID NO: 1690670 - DNA, 15 bp, Homo sapiens
aagatttacacagca

SEQ ID NO: 1690671 - DNA, 15 bp, Homo sapiens
agatttacacagcac

SEQ ID NO: 1690672 - DNA, 15 bp, Homo sapiens
gatttacacagcact

SEQ ID NO: 1690673 - DNA, 15 bp, Homo sapiens
atttacacagcactc

SEQ ID NO: 1690674 - DNA, 15 bp, Homo sapiens
tttacacagcactca

SEQ ID NO: 1690675 - DNA, 15 bp, Homo sapiens
ttacacagcactcaa

SEQ ID NO: 1690676 - DNA, 15 bp, Homo sapiens
tacacagcactcaac

SEQ ID NO: 1690677 - DNA, 15 bp, Homo sapiens
acacagcactcaaca

SEQ ID NO: 1690678 - DNA, 15 bp, Homo sapiens
cacagcactcaacaa

SEQ ID NO: 1690679 - DNA, 15 bp, Homo sapiens
acagcactcaacaac

SEQ ID NO: 1690680 - DNA, 15 bp, Homo sapiens
cagcactcaacaaca

SEQ ID NO: 1690681 - DNA, 15 bp, Homo sapiens
agcactcaacaacat

SEQ ID NO: 1690682 - DNA, 15 bp, Homo sapiens
gcactcaacaacata

SEQ ID NO: 1690683 - DNA, 15 bp, Homo sapiens
cactcaacaacatag

SEQ ID NO: 1690684 - DNA, 15 bp, Homo sapiens
actcaacaacatagg

SEQ ID NO: 1690685 - DNA, 15 bp, Homo sapiens
ctcaacaacatagga

SEQ ID NO: 1690686 - DNA, 15 bp, Homo sapiens
tcaacaacataggaa

SEQ ID NO: 1690687 - DNA, 15 bp, Homo sapiens
caacaacataggaaa

SEQ ID NO: 1690688 - DNA, 15 bp, Homo sapiens
aacaacataggaaaa

SEQ ID NO: 1690689 - DNA, 15 bp, Homo sapiens
acaacataggaaaat

SEQ ID NO: 1690690 - DNA, 15 bp, Homo sapiens
caacataggaaaata

SEQ ID NO: 1690691 - DNA, 15 bp, Homo sapiens
aacataggaaaatat

SEQ ID NO: 1690692 - DNA, 15 bp, Homo sapiens
acataggaaaatatt

SEQ ID NO: 1690693 - DNA, 15 bp, Homo sapiens
cataggaaaatattt

SEQ ID NO: 1690694 - DNA, 15 bp, Homo sapiens
ataggaaaatattta

SEQ ID NO: 1690695 - DNA, 15 bp, Homo sapiens
taggaaaatatttat

SEQ ID NO: 1690696 - DNA, 15 bp, Homo sapiens
aggaaaatatttata

SEQ ID NO: 1690697 - DNA, 15 bp, Homo sapiens
ggaaaatatttataa

SEQ ID NO: 1690698 - DNA, 15 bp, Homo sapiens
gaaaatatttataaa

SEQ ID NO: 1690699 - DNA, 15 bp, Homo sapiens
aaaatatttataaac

SEQ ID NO: 1690700 - DNA, 15 bp, Homo sapiens
aaatatttataaact

SEQ ID NO: 1690701 - DNA, 15 bp, Homo sapiens
aatatttataaactg

SEQ ID NO: 1690702 - DNA, 15 bp, Homo sapiens
atatttataaactgt

SEQ ID NO: 1690703 - DNA, 15 bp, Homo sapiens
tatttataaactgta

SEQ ID NO: 1690704 - DNA, 15 bp, Homo sapiens
atttataaactgtat

SEQ ID NO: 1690705 - DNA, 15 bp, Homo sapiens
tttataaactgtatt

SEQ ID NO: 1690706 - DNA, 15 bp, Homo sapiens
ttataaactgtatta

SEQ ID NO: 1690707 - DNA, 15 bp, Homo sapiens
tataaactgtattac

SEQ ID NO: 1690708 - DNA, 15 bp, Homo sapiens
ataaactgtattaca

SEQ ID NO: 1690709 - DNA, 15 bp, Homo sapiens
taaactgtattacac

SEQ ID NO: 1690710 - DNA, 15 bp, Homo sapiens
aaactgtattacact

SEQ ID NO: 1690711 - DNA, 15 bp, Homo sapiens
aactgtattacactt

SEQ ID NO: 1690712 - DNA, 15 bp, Homo sapiens
actgtattacacttg

SEQ ID NO: 1690713 - DNA, 15 bp, Homo sapiens
ctgtattacacttga

SEQ ID NO: 1690714 - DNA, 15 bp, Homo sapiens
tgtattacacttgaa

SEQ ID NO: 1690715 - DNA, 15 bp, Homo sapiens
gtattacacttgaac

SEQ ID NO: 1690716 - DNA, 15 bp, Homo sapiens
tattacacttgaacc

SEQ ID NO: 1690717 - DNA, 15 bp, Homo sapiens
attacacttgaacct

SEQ ID NO: 1690718 - DNA, 15 bp, Homo sapiens
ttacacttgaacctt

SEQ ID NO: 1690719 - DNA, 15 bp, Homo sapiens
tacacttgaacctta

SEQ ID NO: 1690720 - DNA, 15 bp, Homo sapiens
acacttgaaccttaa

SEQ ID NO: 1690721 - DNA, 15 bp, Homo sapiens
cacttgaaccttaag

SEQ ID NO: 1690722 - DNA, 15 bp, Homo sapiens
acttgaaccttaagc

SEQ ID NO: 1690723 - DNA, 15 bp, Homo sapiens
cttgaaccttaagct

SEQ ID NO: 1690724 - DNA, 15 bp, Homo sapiens
ttgaaccttaagcta

SEQ ID NO: 1690725 - DNA, 15 bp, Homo sapiens
tgaaccttaagctat

SEQ ID NO: 1690726 - DNA, 15 bp, Homo sapiens
gaaccttaagctata

SEQ ID NO: 1690727 - DNA, 15 bp, Homo sapiens
aaccttaagctatac

SEQ ID NO: 1690728 - DNA, 15 bp, Homo sapiens
accttaagctatact

SEQ ID NO: 1690729 - DNA, 15 bp, Homo sapiens
ccttaagctatactc

SEQ ID NO: 1690730 - DNA, 15 bp, Homo sapiens
cttaagctatactct

SEQ ID NO: 1690731 - DNA, 15 bp, Homo sapiens
ttaagctatactctg

SEQ ID NO: 1690732 - DNA, 15 bp, Homo sapiens
taagctatactctga

SEQ ID NO: 1690733 - DNA, 15 bp, Homo sapiens
aagctatactctgag

SEQ ID NO: 1690734 - DNA, 15 bp, Homo sapiens
agctatactctgagg

SEQ ID NO: 1690735 - DNA, 15 bp, Homo sapiens
gctatactctgaggt

SEQ ID NO: 1690736 - DNA, 15 bp, Homo sapiens
ctatactctgaggtt

SEQ ID NO: 1690737 - DNA, 15 bp, Homo sapiens
tatactctgaggtta

SEQ ID NO: 1690738 - DNA, 15 bp, Homo sapiens
atactctgaggttaa

SEQ ID NO: 1690739 - DNA, 15 bp, Homo sapiens
tactctgaggttaac

SEQ ID NO: 1690740 - DNA, 15 bp, Homo sapiens
actctgaggttaact

SEQ ID NO: 1690741 - DNA, 15 bp, Homo sapiens
ctctgaggttaacta

SEQ ID NO: 1690742 - DNA, 15 bp, Homo sapiens
tctgaggttaactac

SEQ ID NO: 1690743 - DNA, 15 bp, Homo sapiens
ctgaggttaactacc

SEQ ID NO: 1690744 - DNA, 15 bp, Homo sapiens
tgaggttaactacca

SEQ ID NO: 1690745 - DNA, 15 bp, Homo sapiens
gaggttaactaccat

SEQ ID NO: 1690746 - DNA, 15 bp, Homo sapiens
aggttaactaccatt

SEQ ID NO: 1690747 - DNA, 15 bp, Homo sapiens
ggttaactaccattt

SEQ ID NO: 1690748 - DNA, 15 bp, Homo sapiens
gttaactaccatttg

SEQ ID NO: 1690749 - DNA, 15 bp, Homo sapiens
ttaactaccatttgt

SEQ ID NO: 1690750 - DNA, 15 bp, Homo sapiens
taactaccatttgtg

SEQ ID NO: 1690751 - DNA, 15 bp, Homo sapiens
aactaccatttgtgg

SEQ ID NO: 1690752 - DNA, 15 bp, Homo sapiens
actaccatttgtggg

SEQ ID NO: 1690753 - DNA, 15 bp, Homo sapiens
ctaccatttgtgggt

SEQ ID NO: 1690754 - DNA, 15 bp, Homo sapiens
taccatttgtgggtt

SEQ ID NO: 1690755 - DNA, 15 bp, Homo sapiens
accatttgtgggtta

SEQ ID NO: 1690756 - DNA, 15 bp, Homo sapiens
ccatttgtgggttaa

SEQ ID NO: 1690757 - DNA, 15 bp, Homo sapiens
catttgtgggttaag

SEQ ID NO: 1690758 - DNA, 15 bp, Homo sapiens
atttgtgggttaaga

SEQ ID NO: 1690759 - DNA, 15 bp, Homo sapiens
tttgtgggttaagaa

SEQ ID NO: 1690760 - DNA, 15 bp, Homo sapiens
ttgtgggttaagaag

SEQ ID NO: 1690761 - DNA, 15 bp, Homo sapiens
tgtgggttaagaagc

SEQ ID NO: 1690762 - DNA, 15 bp, Homo sapiens
gtgggttaagaagct

SEQ ID NO: 1690763 - DNA, 15 bp, Homo sapiens
tgggttaagaagcta

SEQ ID NO: 1690764 - DNA, 15 bp, Homo sapiens
gggttaagaagctaa

SEQ ID NO: 1690765 - DNA, 15 bp, Homo sapiens
ggttaagaagctaaa

SEQ ID NO: 1690766 - DNA, 15 bp, Homo sapiens
gttaagaagctaaag

SEQ ID NO: 1690767 - DNA, 15 bp, Homo sapiens
ttaagaagctaaagc

SEQ ID NO: 1690768 - DNA, 15 bp, Homo sapiens
taagaagctaaagct

SEQ ID NO: 1690769 - DNA, 15 bp, Homo sapiens
aagaagctaaagctc

SEQ ID NO: 1690770 - DNA, 15 bp, Homo sapiens
agaagctaaagctct

SEQ ID NO: 1690771 - DNA, 15 bp, Homo sapiens
gaagctaaagctctg

SEQ ID NO: 1690772 - DNA, 15 bp, Homo sapiens
aagctaaagctctgt

SEQ ID NO: 1690773 - DNA, 15 bp, Homo sapiens
agctaaagctctgtt

SEQ ID NO: 1690774 - DNA, 15 bp, Homo sapiens
gctaaagctctgttt

SEQ ID NO: 1690775 - DNA, 15 bp, Homo sapiens
ctaaagctctgtttt

SEQ ID NO: 1690776 - DNA, 15 bp, Homo sapiens
taaagctctgttttt

SEQ ID NO: 1690777 - DNA, 15 bp, Homo sapiens
aaagctctgtttttc

SEQ ID NO: 1690778 - DNA, 15 bp, Homo sapiens
aagctctgtttttct

SEQ ID NO: 1690779 - DNA, 15 bp, Homo sapiens
agctctgtttttctt

SEQ ID NO: 1690780 - DNA, 15 bp, Homo sapiens
gctctgtttttcttt

SEQ ID NO: 1690781 - DNA, 15 bp, Homo sapiens
ctctgtttttcttta

SEQ ID NO: 1690782 - DNA, 15 bp, Homo sapiens
tctgtttttctttaa

SEQ ID NO: 1690783 - DNA, 15 bp, Homo sapiens
tgtttttctttaaga

SEQ ID NO: 1690784 - DNA, 15 bp, Homo sapiens
gtttttctttaagac

SEQ ID NO: 1690785 - DNA, 15 bp, Homo sapiens
tttttctttaagaca

SEQ ID NO: 1690786 - DNA, 15 bp, Homo sapiens
ttttctttaagacaa

SEQ ID NO: 1690787 - DNA, 15 bp, Homo sapiens
tttctttaagacaag

SEQ ID NO: 1690788 - DNA, 15 bp, Homo sapiens
ttctttaagacaagt

SEQ ID NO: 1690789 - DNA, 15 bp, Homo sapiens
tctttaagacaagtg

SEQ ID NO: 1690790 - DNA, 15 bp, Homo sapiens
ctttaagacaagtgc

SEQ ID NO: 1690791 - DNA, 15 bp, Homo sapiens
tttaagacaagtgca

SEQ ID NO: 1690792 - DNA, 15 bp, Homo sapiens
ttaagacaagtgcag

SEQ ID NO: 1690793 - DNA, 15 bp, Homo sapiens
taagacaagtgcagt

SEQ ID NO: 1690794 - DNA, 15 bp, Homo sapiens
aagacaagtgcagta

SEQ ID NO: 1690795 - DNA, 15 bp, Homo sapiens
agacaagtgcagtag

SEQ ID NO: 1690796 - DNA, 15 bp, Homo sapiens
gacaagtgcagtagt

SEQ ID NO: 1690797 - DNA, 15 bp, Homo sapiens
acaagtgcagtagtg

SEQ ID NO: 1690798 - DNA, 15 bp, Homo sapiens
caagtgcagtagtga

SEQ ID NO: 1690799 - DNA, 15 bp, Homo sapiens
aagtgcagtagtgag

SEQ ID NO: 1690800 - DNA, 15 bp, Homo sapiens
agtgcagtagtgaga

SEQ ID NO: 1690801 - DNA, 15 bp, Homo sapiens
gtgcagtagtgagaa

SEQ ID NO: 1690802 - DNA, 15 bp, Homo sapiens
tgcagtagtgagaag

SEQ ID NO: 1690803 - DNA, 15 bp, Homo sapiens
gcagtagtgagaagt

SEQ ID NO: 1690804 - DNA, 15 bp, Homo sapiens
cagtagtgagaagtg

SEQ ID NO: 1690805 - DNA, 15 bp, Homo sapiens
agtagtgagaagtgg

SEQ ID NO: 1690806 - DNA, 15 bp, Homo sapiens
gtagtgagaagtggg

SEQ ID NO: 1690807 - DNA, 15 bp, Homo sapiens
tagtgagaagtgggg

SEQ ID NO: 1690808 - DNA, 15 bp, Homo sapiens
agtgagaagtgggga

SEQ ID NO: 1690809 - DNA, 15 bp, Homo sapiens
gtgagaagtggggaa

SEQ ID NO: 1690810 - DNA, 15 bp, Homo sapiens
tgagaagtggggaag

SEQ ID NO: 1690811 - DNA, 15 bp, Homo sapiens
gagaagtggggaaga

SEQ ID NO: 1690812 - DNA, 15 bp, Homo sapiens
agaagtggggaagag

SEQ ID NO: 1690813 - DNA, 15 bp, Homo sapiens
gaagtggggaagagt

SEQ ID NO: 1690814 - DNA, 15 bp, Homo sapiens
aagtggggaagagta

SEQ ID NO: 1690815 - DNA, 15 bp, Homo sapiens
agtggggaagagtag

SEQ ID NO: 1690816 - DNA, 15 bp, Homo sapiens
gtggggaagagtaga

SEQ ID NO: 1690817 - DNA, 15 bp, Homo sapiens
tggggaagagtagaa

SEQ ID NO: 1690818 - DNA, 15 bp, Homo sapiens
ggggaagagtagaac

SEQ ID NO: 1690819 - DNA, 15 bp, Homo sapiens
gggaagagtagaaca

SEQ ID NO: 1690820 - DNA, 15 bp, Homo sapiens
ggaagagtagaacaa

SEQ ID NO: 1690821 - DNA, 15 bp, Homo sapiens
gaagagtagaacaag

SEQ ID NO: 1690822 - DNA, 15 bp, Homo sapiens
aagagtagaacaagg

SEQ ID NO: 1690823 - DNA, 15 bp, Homo sapiens
agagtagaacaagga

SEQ ID NO: 1690824 - DNA, 15 bp, Homo sapiens
gagtagaacaaggag

SEQ ID NO: 1690825 - DNA, 15 bp, Homo sapiens
agtagaacaaggagt

SEQ ID NO: 1690826 - DNA, 15 bp, Homo sapiens
gtagaacaaggagtt

SEQ ID NO: 1690827 - DNA, 15 bp, Homo sapiens
tagaacaaggagttc

SEQ ID NO: 1690828 - DNA, 15 bp, Homo sapiens
agaacaaggagttcg

SEQ ID NO: 1690829 - DNA, 15 bp, Homo sapiens
gaacaaggagttcga

SEQ ID NO: 1690830 - DNA, 15 bp, Homo sapiens
aacaaggagttcgat

SEQ ID NO: 1690831 - DNA, 15 bp, Homo sapiens
acaaggagttcgatc

SEQ ID NO: 1690832 - DNA, 15 bp, Homo sapiens
caaggagttcgatct

SEQ ID NO: 1690833 - DNA, 15 bp, Homo sapiens
aaggagttcgatctg

SEQ ID NO: 1690834 - DNA, 15 bp, Homo sapiens
aggagttcgatctgt

SEQ ID NO: 1690835 - DNA, 15 bp, Homo sapiens
ggagttcgatctgta

SEQ ID NO: 1690836 - DNA, 15 bp, Homo sapiens
gagttcgatctgtaa

SEQ ID NO: 1690837 - DNA, 15 bp, Homo sapiens
agttcgatctgtaat

SEQ ID NO: 1690838 - DNA, 15 bp, Homo sapiens
gttcgatctgtaatt

SEQ ID NO: 1690839 - DNA, 15 bp, Homo sapiens
ttcgatctgtaattc

SEQ ID NO: 1690840 - DNA, 15 bp, Homo sapiens
tcgatctgtaattca

SEQ ID NO: 1690841 - DNA, 15 bp, Homo sapiens
cgatctgtaattcac

SEQ ID NO: 1690842 - DNA, 15 bp, Homo sapiens
gatctgtaattcact

SEQ ID NO: 1690843 - DNA, 15 bp, Homo sapiens
atctgtaattcactg

SEQ ID NO: 1690844 - DNA, 15 bp, Homo sapiens
tctgtaattcactgt

SEQ ID NO: 1690845 - DNA, 15 bp, Homo sapiens
ctgtaattcactgtg

SEQ ID NO: 1690846 - DNA, 15 bp, Homo sapiens
tgtaattcactgtga

SEQ ID NO: 1690847 - DNA, 15 bp, Homo sapiens
gtaattcactgtgaa

SEQ ID NO: 1690848 - DNA, 15 bp, Homo sapiens
taattcactgtgaac

SEQ ID NO: 1690849 - DNA, 15 bp, Homo sapiens
aattcactgtgaaca

SEQ ID NO: 1690850 - DNA, 15 bp, Homo sapiens
attcactgtgaacaa

SEQ ID NO: 1690851 - DNA, 15 bp, Homo sapiens
ttcactgtgaacaaa

SEQ ID NO: 1690852 - DNA, 15 bp, Homo sapiens
tcactgtgaacaaac

SEQ ID NO: 1690853 - DNA, 15 bp, Homo sapiens
cactgtgaacaaaca

SEQ ID NO: 1690854 - DNA, 15 bp, Homo sapiens
actgtgaacaaacaa

SEQ ID NO: 1690855 - DNA, 15 bp, Homo sapiens
ctgtgaacaaacaat

SEQ ID NO: 1690856 - DNA, 15 bp, Homo sapiens
tgtgaacaaacaatt

SEQ ID NO: 1690857 - DNA, 15 bp, Homo sapiens
gtgaacaaacaattg

SEQ ID NO: 1690858 - DNA, 15 bp, Homo sapiens
tgaacaaacaattga

SEQ ID NO: 1690859 - DNA, 15 bp, Homo sapiens
gaacaaacaattgag

SEQ ID NO: 1690860 - DNA, 15 bp, Homo sapiens
aacaaacaattgagg

SEQ ID NO: 1690861 - DNA, 15 bp, Homo sapiens
acaaacaattgaggt

SEQ ID NO: 1690862 - DNA, 15 bp, Homo sapiens
caaacaattgaggta

SEQ ID NO: 1690863 - DNA, 15 bp, Homo sapiens
aaacaattgaggtaa

SEQ ID NO: 1690864 - DNA, 15 bp, Homo sapiens
aacaattgaggtaac

SEQ ID NO: 1690865 - DNA, 15 bp, Homo sapiens
acaattgaggtaact

SEQ ID NO: 1690866 - DNA, 15 bp, Homo sapiens
caattgaggtaactg

SEQ ID NO: 1690867 - DNA, 15 bp, Homo sapiens
aattgaggtaactga

SEQ ID NO: 1690868 - DNA, 15 bp, Homo sapiens
attgaggtaactgac

SEQ ID NO: 1690869 - DNA, 15 bp, Homo sapiens
ttgaggtaactgact

SEQ ID NO: 1690870 - DNA, 15 bp, Homo sapiens
tgaggtaactgacta

SEQ ID NO: 1690871 - DNA, 15 bp, Homo sapiens
gaggtaactgactac

SEQ ID NO: 1690872 - DNA, 15 bp, Homo sapiens
aggtaactgactacc

SEQ ID NO: 1690873 - DNA, 15 bp, Homo sapiens
ggtaactgactacct

SEQ ID NO: 1690874 - DNA, 15 bp, Homo sapiens
gtaactgactacctt

SEQ ID NO: 1690875 - DNA, 15 bp, Homo sapiens
taactgactaccttc

SEQ ID NO: 1690876 - DNA, 15 bp, Homo sapiens
aactgactaccttca

SEQ ID NO: 1690877 - DNA, 15 bp, Homo sapiens
actgactaccttcag

SEQ ID NO: 1690878 - DNA, 15 bp, Homo sapiens
ctgactaccttcaga

SEQ ID NO: 1690879 - DNA, 15 bp, Homo sapiens
tgactaccttcagac

SEQ ID NO: 1690880 - DNA, 15 bp, Homo sapiens
gactaccttcagacg

SEQ ID NO: 1690881 - DNA, 15 bp, Homo sapiens
actaccttcagacga

SEQ ID NO: 1690882 - DNA, 15 bp, Homo sapiens
ctaccttcagacgag

SEQ ID NO: 1690883 - DNA, 15 bp, Homo sapiens
taccttcagacgagg

SEQ ID NO: 1690884 - DNA, 15 bp, Homo sapiens
accttcagacgaggc

SEQ ID NO: 1690885 - DNA, 15 bp, Homo sapiens
ccttcagacgaggct

SEQ ID NO: 1690886 - DNA, 15 bp, Homo sapiens
cttcagacgaggctg

SEQ ID NO: 1690887 - DNA, 15 bp, Homo sapiens
ttcagacgaggctgg

SEQ ID NO: 1690888 - DNA, 15 bp, Homo sapiens
tcagacgaggctgga

SEQ ID NO: 1690889 - DNA, 15 bp, Homo sapiens
cagacgaggctggaa

SEQ ID NO: 1690890 - DNA, 15 bp, Homo sapiens
agacgaggctggaag

SEQ ID NO: 1690891 - DNA, 15 bp, Homo sapiens
gacgaggctggaagt

SEQ ID NO: 1690892 - DNA, 15 bp, Homo sapiens
acgaggctggaagtt

SEQ ID NO: 1690893 - DNA, 15 bp, Homo sapiens
cgaggctggaagttt

SEQ ID NO: 1690894 - DNA, 15 bp, Homo sapiens
gaggctggaagtttt

SEQ ID NO: 1690895 - DNA, 15 bp, Homo sapiens
aggctggaagttttt

SEQ ID NO: 1690896 - DNA, 15 bp, Homo sapiens
ggctggaagttttta

SEQ ID NO: 1690897 - DNA, 15 bp, Homo sapiens
gctggaagtttttat

SEQ ID NO: 1690898 - DNA, 15 bp, Homo sapiens
ctggaagtttttatt

SEQ ID NO: 1690899 - DNA, 15 bp, Homo sapiens
tggaagtttttattt

SEQ ID NO: 1690900 - DNA, 15 bp, Homo sapiens
ggaagtttttattta

SEQ ID NO: 1690901 - DNA, 15 bp, Homo sapiens
gaagtttttatttat

SEQ ID NO: 1690902 - DNA, 15 bp, Homo sapiens
aagtttttatttatt

SEQ ID NO: 1690903 - DNA, 15 bp, Homo sapiens
agtttttatttattt

SEQ ID NO: 1690904 - DNA, 15 bp, Homo sapiens
gtttttatttattta

SEQ ID NO: 1690905 - DNA, 15 bp, Homo sapiens
tttttatttatttag

SEQ ID NO: 1690906 - DNA, 15 bp, Homo sapiens
ttttatttatttagt

SEQ ID NO: 1690907 - DNA, 15 bp, Homo sapiens
tttatttatttagtg

SEQ ID NO: 1690908 - DNA, 15 bp, Homo sapiens
ttatttatttagtga

SEQ ID NO: 1690909 - DNA, 15 bp, Homo sapiens
tatttatttagtgac

SEQ ID NO: 1690910 - DNA, 15 bp, Homo sapiens
atttatttagtgacc

SEQ ID NO: 1690911 - DNA, 15 bp, Homo sapiens
tttatttagtgaccg

SEQ ID NO: 1690912 - DNA, 15 bp, Homo sapiens
ttatttagtgaccga

SEQ ID NO: 1690913 - DNA, 15 bp, Homo sapiens
tatttagtgaccgac

SEQ ID NO: 1690914 - DNA, 15 bp, Homo sapiens
atttagtgaccgact

SEQ ID NO: 1690915 - DNA, 15 bp, Homo sapiens
tttagtgaccgactt

SEQ ID NO: 1690916 - DNA, 15 bp, Homo sapiens
ttagtgaccgacttt

SEQ ID NO: 1690917 - DNA, 15 bp, Homo sapiens
tagtgaccgactttt

SEQ ID NO: 1690918 - DNA, 15 bp, Homo sapiens
agtgaccgacttttg

SEQ ID NO: 1690919 - DNA, 15 bp, Homo sapiens
gtgaccgacttttgg

SEQ ID NO: 1690920 - DNA, 15 bp, Homo sapiens
tgaccgacttttggt

SEQ ID NO: 1690921 - DNA, 15 bp, Homo sapiens
gaccgacttttggtc

SEQ ID NO: 1690922 - DNA, 15 bp, Homo sapiens
accgacttttggtct

SEQ ID NO: 1690923 - DNA, 15 bp, Homo sapiens
ccgacttttggtctt

SEQ ID NO: 1690924 - DNA, 15 bp, Homo sapiens
cgacttttggtcttg

SEQ ID NO: 1690925 - DNA, 15 bp, Homo sapiens
gacttttggtcttgt

SEQ ID NO: 1690926 - DNA, 15 bp, Homo sapiens
acttttggtcttgtt

SEQ ID NO: 1690927 - DNA, 15 bp, Homo sapiens
cttttggtcttgttt

SEQ ID NO: 1690928 - DNA, 15 bp, Homo sapiens
ttttggtcttgtttc

SEQ ID NO: 1690929 - DNA, 15 bp, Homo sapiens
tttggtcttgtttcc

SEQ ID NO: 1690930 - DNA, 15 bp, Homo sapiens
ttggtcttgtttccc

SEQ ID NO: 1690931 - DNA, 15 bp, Homo sapiens
tggtcttgtttccca

SEQ ID NO: 1690932 - DNA, 15 bp, Homo sapiens
ggtcttgtttcccag

SEQ ID NO: 1690933 - DNA, 15 bp, Homo sapiens
gtcttgtttcccagg

SEQ ID NO: 1690934 - DNA, 15 bp, Homo sapiens
tcttgtttcccaggt

SEQ ID NO: 1690935 - DNA, 15 bp, Homo sapiens
cttgtttcccaggtt

SEQ ID NO: 1690936 - DNA, 15 bp, Homo sapiens
ttgtttcccaggttg

SEQ ID NO: 1690937 - DNA, 15 bp, Homo sapiens
tgtttcccaggttgg

SEQ ID NO: 1690938 - DNA, 15 bp, Homo sapiens
gtttcccaggttgga

SEQ ID NO: 1690939 - DNA, 15 bp, Homo sapiens
tttcccaggttggag

SEQ ID NO: 1690940 - DNA, 15 bp, Homo sapiens
ttcccaggttggagt

SEQ ID NO: 1690941 - DNA, 15 bp, Homo sapiens
tcccaggttggagtg

SEQ ID NO: 1690942 - DNA, 15 bp, Homo sapiens
tgcaacctccacctt

SEQ ID NO: 1690943 - DNA, 15 bp, Homo sapiens
gcaacctccaccttc

SEQ ID NO: 1690944 - DNA, 15 bp, Homo sapiens
caacctccaccttcc

SEQ ID NO: 1690945 - DNA, 15 bp, Homo sapiens
aacctccaccttccg

SEQ ID NO: 1690946 - DNA, 15 bp, Homo sapiens
acctccaccttccgg

SEQ ID NO: 1690947 - DNA, 15 bp, Homo sapiens
cctccaccttccggg

SEQ ID NO: 1690948 - DNA, 15 bp, Homo sapiens
ctccaccttccgggt

SEQ ID NO: 1690949 - DNA, 15 bp, Homo sapiens
tccaccttccgggtt

SEQ ID NO: 1690950 - DNA, 15 bp, Homo sapiens
ccaccttccgggttc

SEQ ID NO: 1690951 - DNA, 15 bp, Homo sapiens
caccttccgggttca

SEQ ID NO: 1690952 - DNA, 15 bp, Homo sapiens
accttccgggttcaa

SEQ ID NO: 1690953 - DNA, 15 bp, Homo sapiens
ccttccgggttcaag

SEQ ID NO: 1690954 - DNA, 15 bp, Homo sapiens
cttccgggttcaagt

SEQ ID NO: 1690955 - DNA, 15 bp, Homo sapiens
ttccgggttcaagtg

SEQ ID NO: 1690956 - DNA, 15 bp, Homo sapiens
tccgggttcaagtga

SEQ ID NO: 1690957 - DNA, 15 bp, Homo sapiens
caagtgattctcttc

SEQ ID NO: 1690958 - DNA, 15 bp, Homo sapiens
aagtgattctcttcc

SEQ ID NO: 1690959 - DNA, 15 bp, Homo sapiens
agtgattctcttccc

SEQ ID NO: 1690960 - DNA, 15 bp, Homo sapiens
gtgattctcttccct

SEQ ID NO: 1690961 - DNA, 15 bp, Homo sapiens
tgattctcttccctc

SEQ ID NO: 1690962 - DNA, 15 bp, Homo sapiens
gattctcttccctca

SEQ ID NO: 1690963 - DNA, 15 bp, Homo sapiens
attctcttccctcag

SEQ ID NO: 1690964 - DNA, 15 bp, Homo sapiens
ttctcttccctcagc

SEQ ID NO: 1690965 - DNA, 15 bp, Homo sapiens
tctcttccctcagcc

SEQ ID NO: 1690966 - DNA, 15 bp, Homo sapiens
ctcttccctcagcct

SEQ ID NO: 1690967 - DNA, 15 bp, Homo sapiens
tcttccctcagcctc

SEQ ID NO: 1690968 - DNA, 15 bp, Homo sapiens
cttccctcagcctcc

SEQ ID NO: 1690969 - DNA, 15 bp, Homo sapiens
ttccctcagcctcct

SEQ ID NO: 1690970 - DNA, 15 bp, Homo sapiens
tccctcagcctcctg

SEQ ID NO: 1690971 - DNA, 15 bp, Homo sapiens
ccctcagcctcctga

SEQ ID NO: 1690972 - DNA, 15 bp, Homo sapiens
ctggaactacaggca

SEQ ID NO: 1690973 - DNA, 15 bp, Homo sapiens
tggaactacaggcac

SEQ ID NO: 1690974 - DNA, 15 bp, Homo sapiens
ggaactacaggcacc

SEQ ID NO: 1690975 - DNA, 15 bp, Homo sapiens
gaactacaggcaccc

SEQ ID NO: 1690976 - DNA, 15 bp, Homo sapiens
aactacaggcaccca

SEQ ID NO: 1690977 - DNA, 15 bp, Homo sapiens
acaggcacccaccag

SEQ ID NO: 1690978 - DNA, 15 bp, Homo sapiens
caggcacccaccagc

SEQ ID NO: 1690979 - DNA, 15 bp, Homo sapiens
aggcacccaccagca

SEQ ID NO: 1690980 - DNA, 15 bp, Homo sapiens
ggcacccaccagcat

SEQ ID NO: 1690981 - DNA, 15 bp, Homo sapiens
gcacccaccagcatg

SEQ ID NO: 1690982 - DNA, 15 bp, Homo sapiens
cacccaccagcatgc

SEQ ID NO: 1690983 - DNA, 15 bp, Homo sapiens
acccaccagcatgcc

SEQ ID NO: 1690984 - DNA, 15 bp, Homo sapiens
cccaccagcatgccc

SEQ ID NO: 1690985 - DNA, 15 bp, Homo sapiens
ccaccagcatgcccg

SEQ ID NO: 1690986 - DNA, 15 bp, Homo sapiens
caccagcatgcccgg

SEQ ID NO: 1690987 - DNA, 15 bp, Homo sapiens
accagcatgcccggc

SEQ ID NO: 1690988 - DNA, 15 bp, Homo sapiens
ccagcatgcccggct

SEQ ID NO: 1690989 - DNA, 15 bp, Homo sapiens
cagcatgcccggcta

SEQ ID NO: 1690990 - DNA, 15 bp, Homo sapiens
cccggctaattttta

SEQ ID NO: 1690991 - DNA, 15 bp, Homo sapiens
ccggctaatttttat

SEQ ID NO: 1690992 - DNA, 15 bp, Homo sapiens
cggctaatttttata

SEQ ID NO: 1690993 - DNA, 15 bp, Homo sapiens
ttagtagagacggtg

SEQ ID NO: 1690994 - DNA, 15 bp, Homo sapiens
tagtagagacggtgt

SEQ ID NO: 1690995 - DNA, 15 bp, Homo sapiens
agtagagacggtgtt

SEQ ID NO: 1690996 - DNA, 15 bp, Homo sapiens
gtagagacggtgttt

SEQ ID NO: 1690997 - DNA, 15 bp, Homo sapiens
tagagacggtgtttc

SEQ ID NO: 1690998 - DNA, 15 bp, Homo sapiens
agagacggtgtttca

SEQ ID NO: 1690999 - DNA, 15 bp, Homo sapiens
gagacggtgtttcac

SEQ ID NO: 1691000 - DNA, 15 bp, Homo sapiens
agacggtgtttcacc

SEQ ID NO: 1691001 - DNA, 15 bp, Homo sapiens
gacggtgtttcacca

SEQ ID NO: 1691002 - DNA, 15 bp, Homo sapiens
acggtgtttcaccat

SEQ ID NO: 1691003 - DNA, 15 bp, Homo sapiens
cggtgtttcaccatg

SEQ ID NO: 1691004 - DNA, 15 bp, Homo sapiens
ggtgtttcaccatgg

SEQ ID NO: 1691005 - DNA, 15 bp, Homo sapiens
gtgtttcaccatggt

SEQ ID NO: 1691006 - DNA, 15 bp, Homo sapiens
tgtttcaccatggtg

SEQ ID NO: 1691007 - DNA, 15 bp, Homo sapiens
gtttcaccatggtgg

SEQ ID NO: 1691008 - DNA, 15 bp, Homo sapiens
tttcaccatggtggc

SEQ ID NO: 1691009 - DNA, 15 bp, Homo sapiens
ttcaccatggtggcc

SEQ ID NO: 1691010 - DNA, 15 bp, Homo sapiens
tcaccatggtggcca

SEQ ID NO: 1691011 - DNA, 15 bp, Homo sapiens
caccatggtggccag

SEQ ID NO: 1691012 - DNA, 15 bp, Homo sapiens
accatggtggccagg

SEQ ID NO: 1691013 - DNA, 15 bp, Homo sapiens
ggccaggctggtctg

SEQ ID NO: 1691014 - DNA, 15 bp, Homo sapiens
gccaggctggtctgg

SEQ ID NO: 1691015 - DNA, 15 bp, Homo sapiens
ccaggctggtctgga

SEQ ID NO: 1691016 - DNA, 15 bp, Homo sapiens
ggtctggaactcctc

SEQ ID NO: 1691017 - DNA, 15 bp, Homo sapiens
gtctggaactcctcc

SEQ ID NO: 1691018 - DNA, 15 bp, Homo sapiens
tctggaactcctcct

SEQ ID NO: 1691019 - DNA, 15 bp, Homo sapiens
ctggaactcctcctg

SEQ ID NO: 1691020 - DNA, 15 bp, Homo sapiens
tggaactcctcctga

SEQ ID NO: 1691021 - DNA, 15 bp, Homo sapiens
ggaactcctcctgac

SEQ ID NO: 1691022 - DNA, 15 bp, Homo sapiens
gaactcctcctgacc

SEQ ID NO: 1691023 - DNA, 15 bp, Homo sapiens
aactcctcctgacca

SEQ ID NO: 1691024 - DNA, 15 bp, Homo sapiens
actcctcctgaccac

SEQ ID NO: 1691025 - DNA, 15 bp, Homo sapiens
ctcctcctgaccaca

SEQ ID NO: 1691026 - DNA, 15 bp, Homo sapiens
tcctcctgaccacag

SEQ ID NO: 1691027 - DNA, 15 bp, Homo sapiens
cctcctgaccacagg

SEQ ID NO: 1691028 - DNA, 15 bp, Homo sapiens
ctcctgaccacaggt

SEQ ID NO: 1691029 - DNA, 15 bp, Homo sapiens
tcctgaccacaggtg

SEQ ID NO: 1691030 - DNA, 15 bp, Homo sapiens
cctgaccacaggtga

SEQ ID NO: 1691031 - DNA, 15 bp, Homo sapiens
ctgaccacaggtgat

SEQ ID NO: 1691032 - DNA, 15 bp, Homo sapiens
tgaccacaggtgatc

SEQ ID NO: 1691033 - DNA, 15 bp, Homo sapiens
gaccacaggtgatcc

SEQ ID NO: 1691034 - DNA, 15 bp, Homo sapiens
accacaggtgatcca

SEQ ID NO: 1691035 - DNA, 15 bp, Homo sapiens
ccacaggtgatccac

SEQ ID NO: 1691036 - DNA, 15 bp, Homo sapiens
cacaggtgatccacg

SEQ ID NO: 1691037 - DNA, 15 bp, Homo sapiens
acaggtgatccacgt

SEQ ID NO: 1691038 - DNA, 15 bp, Homo sapiens
caggtgatccacgtg

SEQ ID NO: 1691039 - DNA, 15 bp, Homo sapiens
aggtgatccacgtgc

SEQ ID NO: 1691040 - DNA, 15 bp, Homo sapiens
ggtgatccacgtgcc

SEQ ID NO: 1691041 - DNA, 15 bp, Homo sapiens
gatccacgtgcctcg

SEQ ID NO: 1691042 - DNA, 15 bp, Homo sapiens
atccacgtgcctcgg

SEQ ID NO: 1691043 - DNA, 15 bp, Homo sapiens
tccacgtgcctcggc

SEQ ID NO: 1691044 - DNA, 15 bp, Homo sapiens
ccacgtgcctcggcc

SEQ ID NO: 1691045 - DNA, 15 bp, Homo sapiens
cacgtgcctcggcct

SEQ ID NO: 1691046 - DNA, 15 bp, Homo sapiens
acgtgcctcggcctc

SEQ ID NO: 1691047 - DNA, 15 bp, Homo sapiens
cgtgcctcggcctct

SEQ ID NO: 1691048 - DNA, 15 bp, Homo sapiens
gtgcctcggcctctg

SEQ ID NO: 1691049 - DNA, 15 bp, Homo sapiens
ggcctctgaaagtgt

SEQ ID NO: 1691050 - DNA, 15 bp, Homo sapiens
gcctctgaaagtgtt

SEQ ID NO: 1691051 - DNA, 15 bp, Homo sapiens
cctctgaaagtgttg

SEQ ID NO: 1691052 - DNA, 15 bp, Homo sapiens
ctctgaaagtgttgg

SEQ ID NO: 1691053 - DNA, 15 bp, Homo sapiens
tctgaaagtgttgga

SEQ ID NO: 1691054 - DNA, 15 bp, Homo sapiens
ctgaaagtgttggag

SEQ ID NO: 1691055 - DNA, 15 bp, Homo sapiens
tgaaagtgttggagt

SEQ ID NO: 1691056 - DNA, 15 bp, Homo sapiens
gaaagtgttggagtt

SEQ ID NO: 1691057 - DNA, 15 bp, Homo sapiens
aaagtgttggagtta

SEQ ID NO: 1691058 - DNA, 15 bp, Homo sapiens
aagtgttggagttac

SEQ ID NO: 1691059 - DNA, 15 bp, Homo sapiens
agtgttggagttaca

SEQ ID NO: 1691060 - DNA, 15 bp, Homo sapiens
gtgttggagttacag

SEQ ID NO: 1691061 - DNA, 15 bp, Homo sapiens
tgttggagttacagg

SEQ ID NO: 1691062 - DNA, 15 bp, Homo sapiens
gttggagttacaggc

SEQ ID NO: 1691063 - DNA, 15 bp, Homo sapiens
ttggagttacaggca

SEQ ID NO: 1691064 - DNA, 15 bp, Homo sapiens
tggagttacaggcat

SEQ ID NO: 1691065 - DNA, 15 bp, Homo sapiens
ggagttacaggcatg

SEQ ID NO: 1691066 - DNA, 15 bp, Homo sapiens
gagttacaggcatga

SEQ ID NO: 1691067 - DNA, 15 bp, Homo sapiens
agttacaggcatgag

SEQ ID NO: 1691068 - DNA, 15 bp, Homo sapiens
gttacaggcatgagc

SEQ ID NO: 1691069 - DNA, 15 bp, Homo sapiens
aggcatgagccaccc

SEQ ID NO: 1691070 - DNA, 15 bp, Homo sapiens
ggcatgagccacccc

SEQ ID NO: 1691071 - DNA, 15 bp, Homo sapiens
gcatgagccacccca

SEQ ID NO: 1691072 - DNA, 15 bp, Homo sapiens
catgagccaccccac

SEQ ID NO: 1691073 - DNA, 15 bp, Homo sapiens
atgagccaccccacc

SEQ ID NO: 1691074 - DNA, 15 bp, Homo sapiens
tgagccaccccaccc

SEQ ID NO: 1691075 - DNA, 15 bp, Homo sapiens
gagccaccccaccca

SEQ ID NO: 1691076 - DNA, 15 bp, Homo sapiens
agccaccccacccag

SEQ ID NO: 1691077 - DNA, 15 bp, Homo sapiens
gccaccccacccagc

SEQ ID NO: 1691078 - DNA, 15 bp, Homo sapiens
ccaccccacccagcc

SEQ ID NO: 1691079 - DNA, 15 bp, Homo sapiens
caccccacccagcca

SEQ ID NO: 1691080 - DNA, 15 bp, Homo sapiens
accccacccagccac

SEQ ID NO: 1691081 - DNA, 15 bp, Homo sapiens
ccccacccagccaca

SEQ ID NO: 1691082 - DNA, 15 bp, Homo sapiens
cccacccagccacat

SEQ ID NO: 1691083 - DNA, 15 bp, Homo sapiens
ccacccagccacatt

SEQ ID NO: 1691084 - DNA, 15 bp, Homo sapiens
cacccagccacatta

SEQ ID NO: 1691085 - DNA, 15 bp, Homo sapiens
acccagccacattat

SEQ ID NO: 1691086 - DNA, 15 bp, Homo sapiens
cccagccacattata

SEQ ID NO: 1691087 - DNA, 15 bp, Homo sapiens
ccagccacattatat

SEQ ID NO: 1691088 - DNA, 15 bp, Homo sapiens
cagccacattatatg

SEQ ID NO: 1691089 - DNA, 15 bp, Homo sapiens
agccacattatatgt

SEQ ID NO: 1691090 - DNA, 15 bp, Homo sapiens
gccacattatatgtt

SEQ ID NO: 1691091 - DNA, 15 bp, Homo sapiens
ccacattatatgttt

SEQ ID NO: 1691092 - DNA, 15 bp, Homo sapiens
cacattatatgttta

SEQ ID NO: 1691093 - DNA, 15 bp, Homo sapiens
acattatatgtttaa

SEQ ID NO: 1691094 - DNA, 15 bp, Homo sapiens
cattatatgtttaaa

SEQ ID NO: 1691095 - DNA, 15 bp, Homo sapiens
attatatgtttaaat

SEQ ID NO: 1691096 - DNA, 15 bp, Homo sapiens
ttatatgtttaaatt

SEQ ID NO: 1691097 - DNA, 15 bp, Homo sapiens
tatatgtttaaattt

SEQ ID NO: 1691098 - DNA, 15 bp, Homo sapiens
atatgtttaaatttt

SEQ ID NO: 1691099 - DNA, 15 bp, Homo sapiens
tatgtttaaattttg

SEQ ID NO: 1691100 - DNA, 15 bp, Homo sapiens
atgtttaaattttga

SEQ ID NO: 1691101 - DNA, 15 bp, Homo sapiens
tgtttaaattttgat

SEQ ID NO: 1691102 - DNA, 15 bp, Homo sapiens
gtttaaattttgatt

SEQ ID NO: 1691103 - DNA, 15 bp, Homo sapiens
tttaaattttgattt

SEQ ID NO: 1691104 - DNA, 15 bp, Homo sapiens
ttaaattttgattta

SEQ ID NO: 1691105 - DNA, 15 bp, Homo sapiens
taaattttgatttaa

SEQ ID NO: 1691106 - DNA, 15 bp, Homo sapiens
aaattttgatttaaa

SEQ ID NO: 1691107 - DNA, 15 bp, Homo sapiens
aattttgatttaaat

SEQ ID NO: 1691108 - DNA, 15 bp, Homo sapiens
attttgatttaaatt

SEQ ID NO: 1691109 - DNA, 15 bp, Homo sapiens
ttttgatttaaattt

SEQ ID NO: 1691110 - DNA, 15 bp, Homo sapiens
tttgatttaaattta

SEQ ID NO: 1691111 - DNA, 15 bp, Homo sapiens
ttgatttaaatttaa

SEQ ID NO: 1691112 - DNA, 15 bp, Homo sapiens
tgatttaaatttaaa

SEQ ID NO: 1691113 - DNA, 15 bp, Homo sapiens
gatttaaatttaaaa

SEQ ID NO: 1691114 - DNA, 15 bp, Homo sapiens
atttaaatttaaaat

SEQ ID NO: 1691115 - DNA, 15 bp, Homo sapiens
tttaaatttaaaatt

SEQ ID NO: 1691116 - DNA, 15 bp, Homo sapiens
ttaaatttaaaattt

SEQ ID NO: 1691117 - DNA, 15 bp, Homo sapiens
taaatttaaaatttg

SEQ ID NO: 1691118 - DNA, 15 bp, Homo sapiens
aaatttaaaatttga

SEQ ID NO: 1691119 - DNA, 15 bp, Homo sapiens
aatttaaaatttgaa

SEQ ID NO: 1691120 - DNA, 15 bp, Homo sapiens
atttaaaatttgaat

SEQ ID NO: 1691121 - DNA, 15 bp, Homo sapiens
tttaaaatttgaatt

SEQ ID NO: 1691122 - DNA, 15 bp, Homo sapiens
ttaaaatttgaattt

SEQ ID NO: 1691123 - DNA, 15 bp, Homo sapiens
taaaatttgaatttt

SEQ ID NO: 1691124 - DNA, 15 bp, Homo sapiens
aaaatttgaatttta

SEQ ID NO: 1691125 - DNA, 15 bp, Homo sapiens
aaatttgaattttaa

SEQ ID NO: 1691126 - DNA, 15 bp, Homo sapiens
aatttgaattttaac

SEQ ID NO: 1691127 - DNA, 15 bp, Homo sapiens
atttgaattttaact

SEQ ID NO: 1691128 - DNA, 15 bp, Homo sapiens
tttgaattttaactt

SEQ ID NO: 1691129 - DNA, 15 bp, Homo sapiens
ttgaattttaacttt

SEQ ID NO: 1691130 - DNA, 15 bp, Homo sapiens
tgaattttaactttt

SEQ ID NO: 1691131 - DNA, 15 bp, Homo sapiens
gaattttaactttta

SEQ ID NO: 1691132 - DNA, 15 bp, Homo sapiens
aattttaacttttaa

SEQ ID NO: 1691133 - DNA, 15 bp, Homo sapiens
attttaacttttaaa

SEQ ID NO: 1691134 - DNA, 15 bp, Homo sapiens
ttttaacttttaaac

SEQ ID NO: 1691135 - DNA, 15 bp, Homo sapiens
tttaacttttaaact

SEQ ID NO: 1691136 - DNA, 15 bp, Homo sapiens
ttaacttttaaacta

SEQ ID NO: 1691137 - DNA, 15 bp, Homo sapiens
taacttttaaactaa

SEQ ID NO: 1691138 - DNA, 15 bp, Homo sapiens
aacttttaaactaaa

SEQ ID NO: 1691139 - DNA, 15 bp, Homo sapiens
acttttaaactaaaa

SEQ ID NO: 1691140 - DNA, 15 bp, Homo sapiens
cttttaaactaaaat

SEQ ID NO: 1691141 - DNA, 15 bp, Homo sapiens
ttttaaactaaaatt

SEQ ID NO: 1691142 - DNA, 15 bp, Homo sapiens
tttaaactaaaattt

SEQ ID NO: 1691143 - DNA, 15 bp, Homo sapiens
ttaaactaaaattta

SEQ ID NO: 1691144 - DNA, 15 bp, Homo sapiens
taaactaaaatttaa

SEQ ID NO: 1691145 - DNA, 15 bp, Homo sapiens
aaactaaaatttaaa

SEQ ID NO: 1691146 - DNA, 15 bp, Homo sapiens
aactaaaatttaaat

SEQ ID NO: 1691147 - DNA, 15 bp, Homo sapiens
actaaaatttaaatt

SEQ ID NO: 1691148 - DNA, 15 bp, Homo sapiens
ctaaaatttaaatta

SEQ ID NO: 1691149 - DNA, 15 bp, Homo sapiens
taaaatttaaattaa

SEQ ID NO: 1691150 - DNA, 15 bp, Homo sapiens
atttaaattaaaaat

SEQ ID NO: 1691151 - DNA, 15 bp, Homo sapiens
tttaaattaaaaatt

SEQ ID NO: 1691152 - DNA, 15 bp, Homo sapiens
ttaaattaaaaatta

SEQ ID NO: 1691153 - DNA, 15 bp, Homo sapiens
taaattaaaaattaa

SEQ ID NO: 1691154 - DNA, 15 bp, Homo sapiens
aaattaaaaattaaa

SEQ ID NO: 1691155 - DNA, 15 bp, Homo sapiens
aattaaaaattaaat

SEQ ID NO: 1691156 - DNA, 15 bp, Homo sapiens
attaaaaattaaatt

SEQ ID NO: 1691157 - DNA, 15 bp, Homo sapiens
ttaaaaattaaattt

SEQ ID NO: 1691158 - DNA, 15 bp, Homo sapiens
taaaaattaaatttt

SEQ ID NO: 1691159 - DNA, 15 bp, Homo sapiens
aaaaattaaatttta

SEQ ID NO: 1691160 - DNA, 15 bp, Homo sapiens
aaaattaaattttaa

SEQ ID NO: 1691161 - DNA, 15 bp, Homo sapiens
aaattaaattttaaa

SEQ ID NO: 1691162 - DNA, 15 bp, Homo sapiens
aattaaattttaaat

SEQ ID NO: 1691163 - DNA, 15 bp, Homo sapiens
attaaattttaaatt

SEQ ID NO: 1691164 - DNA, 15 bp, Homo sapiens
ttaaattttaaattt

SEQ ID NO: 1691165 - DNA, 15 bp, Homo sapiens
taaattttaaattta

SEQ ID NO: 1691166 - DNA, 15 bp, Homo sapiens
aaattttaaatttaa

SEQ ID NO: 1691167 - DNA, 15 bp, Homo sapiens
aattttaaatttaaa

SEQ ID NO: 1691168 - DNA, 15 bp, Homo sapiens
attttaaatttaaat

SEQ ID NO: 1691169 - DNA, 15 bp, Homo sapiens
ttttaaatttaaatt

SEQ ID NO: 1691170 - DNA, 15 bp, Homo sapiens
tttaaatttaaatta

SEQ ID NO: 1691171 - DNA, 15 bp, Homo sapiens
ttaaatttaaattaa

SEQ ID NO: 1691172 - DNA, 15 bp, Homo sapiens
taaatttaaattaaa

SEQ ID NO: 1691173 - DNA, 15 bp, Homo sapiens
taaattaaaaaaatt

SEQ ID NO: 1691174 - DNA, 15 bp, Homo sapiens
aaattaaaaaaatta

SEQ ID NO: 1691175 - DNA, 15 bp, Homo sapiens
aattaaaaaaattaa

SEQ ID NO: 1691176 - DNA, 15 bp, Homo sapiens
attaaaaaaattaaa

SEQ ID NO: 1691177 - DNA, 15 bp, Homo sapiens
taaaaaaattaaaaa

SEQ ID NO: 1691178 - DNA, 15 bp, Homo sapiens
aaaaaaattaaaaac

SEQ ID NO: 1691179 - DNA, 15 bp, Homo sapiens
aaaaaattaaaaacc

SEQ ID NO: 1691180 - DNA, 15 bp, Homo sapiens
aaaaattaaaaaccc

SEQ ID NO: 1691181 - DNA, 15 bp, Homo sapiens
aaaattaaaaaccct

SEQ ID NO: 1691182 - DNA, 15 bp, Homo sapiens
aaattaaaaaccctg

SEQ ID NO: 1691183 - DNA, 15 bp, Homo sapiens
aattaaaaaccctgt

SEQ ID NO: 1691184 - DNA, 15 bp, Homo sapiens
attaaaaaccctgtt

SEQ ID NO: 1691185 - DNA, 15 bp, Homo sapiens
ttaaaaaccctgtta

SEQ ID NO: 1691186 - DNA, 15 bp, Homo sapiens
taaaaaccctgttac

SEQ ID NO: 1691187 - DNA, 15 bp, Homo sapiens
aaaaaccctgttacc

SEQ ID NO: 1691188 - DNA, 15 bp, Homo sapiens
aaaaccctgttaccc

SEQ ID NO: 1691189 - DNA, 15 bp, Homo sapiens
aaaccctgttaccca

SEQ ID NO: 1691190 - DNA, 15 bp, Homo sapiens
aaccctgttacccag

SEQ ID NO: 1691191 - DNA, 15 bp, Homo sapiens
accctgttacccaga

SEQ ID NO: 1691192 - DNA, 15 bp, Homo sapiens
ccctgttacccagac

SEQ ID NO: 1691193 - DNA, 15 bp, Homo sapiens
cctgttacccagact

SEQ ID NO: 1691194 - DNA, 15 bp, Homo sapiens
ctgttacccagactg

SEQ ID NO: 1691195 - DNA, 15 bp, Homo sapiens
tgttacccagactgg

SEQ ID NO: 1691196 - DNA, 15 bp, Homo sapiens
gttacccagactgga

SEQ ID NO: 1691197 - DNA, 15 bp, Homo sapiens
ttacccagactggag

SEQ ID NO: 1691198 - DNA, 15 bp, Homo sapiens
tacccagactggagt

SEQ ID NO: 1691199 - DNA, 15 bp, Homo sapiens
agtgcagtggtgcat

SEQ ID NO: 1691200 - DNA, 15 bp, Homo sapiens
gtgcagtggtgcatt

SEQ ID NO: 1691201 - DNA, 15 bp, Homo sapiens
tgcagtggtgcattc

SEQ ID NO: 1691202 - DNA, 15 bp, Homo sapiens
gcagtggtgcattca

SEQ ID NO: 1691203 - DNA, 15 bp, Homo sapiens
cagtggtgcattcat

SEQ ID NO: 1691204 - DNA, 15 bp, Homo sapiens
agtggtgcattcatg

SEQ ID NO: 1691205 - DNA, 15 bp, Homo sapiens
gtggtgcattcatgg

SEQ ID NO: 1691206 - DNA, 15 bp, Homo sapiens
tggtgcattcatggc

SEQ ID NO: 1691207 - DNA, 15 bp, Homo sapiens
ggtgcattcatggct

SEQ ID NO: 1691208 - DNA, 15 bp, Homo sapiens
gtgcattcatggctc

SEQ ID NO: 1691209 - DNA, 15 bp, Homo sapiens
tgcattcatggctca

SEQ ID NO: 1691210 - DNA, 15 bp, Homo sapiens
gcattcatggctcac

SEQ ID NO: 1691211 - DNA, 15 bp, Homo sapiens
cattcatggctcact

SEQ ID NO: 1691212 - DNA, 15 bp, Homo sapiens
attcatggctcactg

SEQ ID NO: 1691213 - DNA, 15 bp, Homo sapiens
ttcatggctcactgc

SEQ ID NO: 1691214 - DNA, 15 bp, Homo sapiens
cactgcagcctcaat

SEQ ID NO: 1691215 - DNA, 15 bp, Homo sapiens
actgcagcctcaatc

SEQ ID NO: 1691216 - DNA, 15 bp, Homo sapiens
ctgcagcctcaatct

SEQ ID NO: 1691217 - DNA, 15 bp, Homo sapiens
tgcagcctcaatctc

SEQ ID NO: 1691218 - DNA, 15 bp, Homo sapiens
gcagcctcaatctcc

SEQ ID NO: 1691219 - DNA, 15 bp, Homo sapiens
cagcctcaatctcct

SEQ ID NO: 1691220 - DNA, 15 bp, Homo sapiens
agcctcaatctccta

SEQ ID NO: 1691221 - DNA, 15 bp, Homo sapiens
gcctcaatctcctag

SEQ ID NO: 1691222 - DNA, 15 bp, Homo sapiens
cctcaatctcctagg

SEQ ID NO: 1691223 - DNA, 15 bp, Homo sapiens
ctcaatctcctaggc

SEQ ID NO: 1691224 - DNA, 15 bp, Homo sapiens
tcaatctcctaggct

SEQ ID NO: 1691225 - DNA, 15 bp, Homo sapiens
caatctcctaggctc

SEQ ID NO: 1691226 - DNA, 15 bp, Homo sapiens
aatctcctaggctca

SEQ ID NO: 1691227 - DNA, 15 bp, Homo sapiens
atctcctaggctcaa

SEQ ID NO: 1691228 - DNA, 15 bp, Homo sapiens
tctcctaggctcaaa

SEQ ID NO: 1691229 - DNA, 15 bp, Homo sapiens
ctcctaggctcaaat

SEQ ID NO: 1691230 - DNA, 15 bp, Homo sapiens
tcctaggctcaaatg

SEQ ID NO: 1691231 - DNA, 15 bp, Homo sapiens
cctaggctcaaatga

SEQ ID NO: 1691232 - DNA, 15 bp, Homo sapiens
ctaggctcaaatgat

SEQ ID NO: 1691233 - DNA, 15 bp, Homo sapiens
taggctcaaatgatc

SEQ ID NO: 1691234 - DNA, 15 bp, Homo sapiens
aggctcaaatgatcc

SEQ ID NO: 1691235 - DNA, 15 bp, Homo sapiens
ggctcaaatgatcct

SEQ ID NO: 1691236 - DNA, 15 bp, Homo sapiens
gctcaaatgatcctt

SEQ ID NO: 1691237 - DNA, 15 bp, Homo sapiens
ctcaaatgatccttc

SEQ ID NO: 1691238 - DNA, 15 bp, Homo sapiens
tcaaatgatccttcc

SEQ ID NO: 1691239 - DNA, 15 bp, Homo sapiens
caaatgatccttccg

SEQ ID NO: 1691240 - DNA, 15 bp, Homo sapiens
aaatgatccttccgc

SEQ ID NO: 1691241 - DNA, 15 bp, Homo sapiens
aatgatccttccgcc

SEQ ID NO: 1691242 - DNA, 15 bp, Homo sapiens
atgatccttccgcct

SEQ ID NO: 1691243 - DNA, 15 bp, Homo sapiens
tgatccttccgcctc

SEQ ID NO: 1691244 - DNA, 15 bp, Homo sapiens
gatccttccgcctca

SEQ ID NO: 1691245 - DNA, 15 bp, Homo sapiens
atccttccgcctcaa

SEQ ID NO: 1691246 - DNA, 15 bp, Homo sapiens
tccttccgcctcaac

SEQ ID NO: 1691247 - DNA, 15 bp, Homo sapiens
ccttccgcctcaacc

SEQ ID NO: 1691248 - DNA, 15 bp, Homo sapiens
cttccgcctcaacct

SEQ ID NO: 1691249 - DNA, 15 bp, Homo sapiens
ttccgcctcaacctc

SEQ ID NO: 1691250 - DNA, 15 bp, Homo sapiens
tccgcctcaacctcc

SEQ ID NO: 1691251 - DNA, 15 bp, Homo sapiens
ccgcctcaacctcct

SEQ ID NO: 1691252 - DNA, 15 bp, Homo sapiens
cgcctcaacctcctc

SEQ ID NO: 1691253 - DNA, 15 bp, Homo sapiens
gcctcaacctcctca

SEQ ID NO: 1691254 - DNA, 15 bp, Homo sapiens
cctcaacctcctcag

SEQ ID NO: 1691255 - DNA, 15 bp, Homo sapiens
ctcaacctcctcagt

SEQ ID NO: 1691256 - DNA, 15 bp, Homo sapiens
tcaacctcctcagta

SEQ ID NO: 1691257 - DNA, 15 bp, Homo sapiens
caacctcctcagtag

SEQ ID NO: 1691258 - DNA, 15 bp, Homo sapiens
aacctcctcagtagc

SEQ ID NO: 1691259 - DNA, 15 bp, Homo sapiens
acctcctcagtagct

SEQ ID NO: 1691260 - DNA, 15 bp, Homo sapiens
cctcctcagtagctg

SEQ ID NO: 1691261 - DNA, 15 bp, Homo sapiens
ctcctcagtagctgg

SEQ ID NO: 1691262 - DNA, 15 bp, Homo sapiens
tcctcagtagctggg

SEQ ID NO: 1691263 - DNA, 15 bp, Homo sapiens
cctcagtagctgggg

SEQ ID NO: 1691264 - DNA, 15 bp, Homo sapiens
ctcagtagctggggc

SEQ ID NO: 1691265 - DNA, 15 bp, Homo sapiens
tcagtagctggggct

SEQ ID NO: 1691266 - DNA, 15 bp, Homo sapiens
cagtagctggggcta

SEQ ID NO: 1691267 - DNA, 15 bp, Homo sapiens
agtagctggggctat

SEQ ID NO: 1691268 - DNA, 15 bp, Homo sapiens
gtagctggggctata

SEQ ID NO: 1691269 - DNA, 15 bp, Homo sapiens
tagctggggctatag

SEQ ID NO: 1691270 - DNA, 15 bp, Homo sapiens
agctggggctatagg

SEQ ID NO: 1691271 - DNA, 15 bp, Homo sapiens
gctggggctataggt

SEQ ID NO: 1691272 - DNA, 15 bp, Homo sapiens
ctggggctataggtg

SEQ ID NO: 1691273 - DNA, 15 bp, Homo sapiens
tggggctataggtgc

SEQ ID NO: 1691274 - DNA, 15 bp, Homo sapiens
ggggctataggtgca

SEQ ID NO: 1691275 - DNA, 15 bp, Homo sapiens
gggctataggtgcac

SEQ ID NO: 1691276 - DNA, 15 bp, Homo sapiens
ggctataggtgcaca

SEQ ID NO: 1691277 - DNA, 15 bp, Homo sapiens
gctataggtgcacac

SEQ ID NO: 1691278 - DNA, 15 bp, Homo sapiens
ctataggtgcacact

SEQ ID NO: 1691279 - DNA, 15 bp, Homo sapiens
tataggtgcacactg

SEQ ID NO: 1691280 - DNA, 15 bp, Homo sapiens
ataggtgcacactgc

SEQ ID NO: 1691281 - DNA, 15 bp, Homo sapiens
taggtgcacactgcc

SEQ ID NO: 1691282 - DNA, 15 bp, Homo sapiens
aggtgcacactgcca

SEQ ID NO: 1691283 - DNA, 15 bp, Homo sapiens
ggtgcacactgccac

SEQ ID NO: 1691284 - DNA, 15 bp, Homo sapiens
gtgcacactgccaca

SEQ ID NO: 1691285 - DNA, 15 bp, Homo sapiens
tgcacactgccacac

SEQ ID NO: 1691286 - DNA, 15 bp, Homo sapiens
gcacactgccacact

SEQ ID NO: 1691287 - DNA, 15 bp, Homo sapiens
cacactgccacactc

SEQ ID NO: 1691288 - DNA, 15 bp, Homo sapiens
acactgccacactca

SEQ ID NO: 1691289 - DNA, 15 bp, Homo sapiens
cactgccacactcag

SEQ ID NO: 1691290 - DNA, 15 bp, Homo sapiens
actgccacactcagc

SEQ ID NO: 1691291 - DNA, 15 bp, Homo sapiens
ctgccacactcagcc

SEQ ID NO: 1691292 - DNA, 15 bp, Homo sapiens
tgccacactcagcca

SEQ ID NO: 1691293 - DNA, 15 bp, Homo sapiens
gccacactcagccaa

SEQ ID NO: 1691294 - DNA, 15 bp, Homo sapiens
ccacactcagccaat

SEQ ID NO: 1691295 - DNA, 15 bp, Homo sapiens
cacactcagccaatt

SEQ ID NO: 1691296 - DNA, 15 bp, Homo sapiens
acactcagccaattt

SEQ ID NO: 1691297 - DNA, 15 bp, Homo sapiens
cactcagccaatttt

SEQ ID NO: 1691298 - DNA, 15 bp, Homo sapiens
actcagccaattttt

SEQ ID NO: 1691299 - DNA, 15 bp, Homo sapiens
ctcagccaattttta

SEQ ID NO: 1691300 - DNA, 15 bp, Homo sapiens
tcagccaatttttaa

SEQ ID NO: 1691301 - DNA, 15 bp, Homo sapiens
cagccaatttttaaa

SEQ ID NO: 1691302 - DNA, 15 bp, Homo sapiens
agccaatttttaaaa

SEQ ID NO: 1691303 - DNA, 15 bp, Homo sapiens
gccaatttttaaaat

SEQ ID NO: 1691304 - DNA, 15 bp, Homo sapiens
ccaatttttaaaatc

SEQ ID NO: 1691305 - DNA, 15 bp, Homo sapiens
caatttttaaaatct

SEQ ID NO: 1691306 - DNA, 15 bp, Homo sapiens
aatttttaaaatctt

SEQ ID NO: 1691307 - DNA, 15 bp, Homo sapiens
atttttaaaatcttt

SEQ ID NO: 1691308 - DNA, 15 bp, Homo sapiens
tttttaaaatctttt

SEQ ID NO: 1691309 - DNA, 15 bp, Homo sapiens
ttttaaaatcttttt

SEQ ID NO: 1691310 - DNA, 15 bp, Homo sapiens
tttaaaatctttttt

SEQ ID NO: 1691311 - DNA, 15 bp, Homo sapiens
ttaaaatcttttttg

SEQ ID NO: 1691312 - DNA, 15 bp, Homo sapiens
taaaatcttttttgt

SEQ ID NO: 1691313 - DNA, 15 bp, Homo sapiens
aaaatcttttttgta

SEQ ID NO: 1691314 - DNA, 15 bp, Homo sapiens
aaatcttttttgtag

SEQ ID NO: 1691315 - DNA, 15 bp, Homo sapiens
aatcttttttgtaga

SEQ ID NO: 1691316 - DNA, 15 bp, Homo sapiens
atcttttttgtagag

SEQ ID NO: 1691317 - DNA, 15 bp, Homo sapiens
tcttttttgtagaga

SEQ ID NO: 1691318 - DNA, 15 bp, Homo sapiens
ttgtagagacagggc

SEQ ID NO: 1691319 - DNA, 15 bp, Homo sapiens
tgtagagacagggct

SEQ ID NO: 1691320 - DNA, 15 bp, Homo sapiens
gtagagacagggctc

SEQ ID NO: 1691321 - DNA, 15 bp, Homo sapiens
tagagacagggctct

SEQ ID NO: 1691322 - DNA, 15 bp, Homo sapiens
agagacagggctctt

SEQ ID NO: 1691323 - DNA, 15 bp, Homo sapiens
agacagggctcttgc

SEQ ID NO: 1691324 - DNA, 15 bp, Homo sapiens
gacagggctcttgct

SEQ ID NO: 1691325 - DNA, 15 bp, Homo sapiens
acagggctcttgcta

SEQ ID NO: 1691326 - DNA, 15 bp, Homo sapiens
cagggctcttgctat

SEQ ID NO: 1691327 - DNA, 15 bp, Homo sapiens
agggctcttgctatg

SEQ ID NO: 1691328 - DNA, 15 bp, Homo sapiens
gggctcttgctatgt

SEQ ID NO: 1691329 - DNA, 15 bp, Homo sapiens
ggctcttgctatgtt

SEQ ID NO: 1691330 - DNA, 15 bp, Homo sapiens
gctcttgctatgttg

SEQ ID NO: 1691331 - DNA, 15 bp, Homo sapiens
ctcttgctatgttgc

SEQ ID NO: 1691332 - DNA, 15 bp, Homo sapiens
aggctagtcttgaat

SEQ ID NO: 1691333 - DNA, 15 bp, Homo sapiens
ggctagtcttgaatt

SEQ ID NO: 1691334 - DNA, 15 bp, Homo sapiens
gctagtcttgaattc

SEQ ID NO: 1691335 - DNA, 15 bp, Homo sapiens
ctagtcttgaattcc

SEQ ID NO: 1691336 - DNA, 15 bp, Homo sapiens
tagtcttgaattcct

SEQ ID NO: 1691337 - DNA, 15 bp, Homo sapiens
agtcttgaattcctg

SEQ ID NO: 1691338 - DNA, 15 bp, Homo sapiens
gtcttgaattcctgg

SEQ ID NO: 1691339 - DNA, 15 bp, Homo sapiens
tcttgaattcctggg

SEQ ID NO: 1691340 - DNA, 15 bp, Homo sapiens
cttgaattcctgggc

SEQ ID NO: 1691341 - DNA, 15 bp, Homo sapiens
ttgaattcctgggct

SEQ ID NO: 1691342 - DNA, 15 bp, Homo sapiens
tgaattcctgggctc

SEQ ID NO: 1691343 - DNA, 15 bp, Homo sapiens
aattcctgggctcaa

SEQ ID NO: 1691344 - DNA, 15 bp, Homo sapiens
attcctgggctcaag

SEQ ID NO: 1691345 - DNA, 15 bp, Homo sapiens
ttcctgggctcaagt

SEQ ID NO: 1691346 - DNA, 15 bp, Homo sapiens
ctgggctcaagtgac

SEQ ID NO: 1691347 - DNA, 15 bp, Homo sapiens
tgggctcaagtgacc

SEQ ID NO: 1691348 - DNA, 15 bp, Homo sapiens
gggctcaagtgaccc

SEQ ID NO: 1691349 - DNA, 15 bp, Homo sapiens
ggctcaagtgaccct

SEQ ID NO: 1691350 - DNA, 15 bp, Homo sapiens
gctcaagtgaccctc

SEQ ID NO: 1691351 - DNA, 15 bp, Homo sapiens
ctcaagtgaccctct

SEQ ID NO: 1691352 - DNA, 15 bp, Homo sapiens
tcaagtgaccctctc

SEQ ID NO: 1691353 - DNA, 15 bp, Homo sapiens
caagtgaccctctcg

SEQ ID NO: 1691354 - DNA, 15 bp, Homo sapiens
aagtgaccctctcgc

SEQ ID NO: 1691355 - DNA, 15 bp, Homo sapiens
agtgaccctctcgcc

SEQ ID NO: 1691356 - DNA, 15 bp, Homo sapiens
gtgaccctctcgcct

SEQ ID NO: 1691357 - DNA, 15 bp, Homo sapiens
tgaccctctcgcctg

SEQ ID NO: 1691358 - DNA, 15 bp, Homo sapiens
gaccctctcgcctgg

SEQ ID NO: 1691359 - DNA, 15 bp, Homo sapiens
accctctcgcctggg

SEQ ID NO: 1691360 - DNA, 15 bp, Homo sapiens
ccctctcgcctgggc

SEQ ID NO: 1691361 - DNA, 15 bp, Homo sapiens
cctctcgcctgggcc

SEQ ID NO: 1691362 - DNA, 15 bp, Homo sapiens
ctctcgcctgggcct

SEQ ID NO: 1691363 - DNA, 15 bp, Homo sapiens
tctcgcctgggcctc

SEQ ID NO: 1691364 - DNA, 15 bp, Homo sapiens
ctcgcctgggcctct

SEQ ID NO: 1691365 - DNA, 15 bp, Homo sapiens
tcgcctgggcctctc

SEQ ID NO: 1691366 - DNA, 15 bp, Homo sapiens
cgcctgggcctctca

SEQ ID NO: 1691367 - DNA, 15 bp, Homo sapiens
gcctgggcctctcaa

SEQ ID NO: 1691368 - DNA, 15 bp, Homo sapiens
cctgggcctctcaaa

SEQ ID NO: 1691369 - DNA, 15 bp, Homo sapiens
ctgggcctctcaaag

SEQ ID NO: 1691370 - DNA, 15 bp, Homo sapiens
tgggcctctcaaagt

SEQ ID NO: 1691371 - DNA, 15 bp, Homo sapiens
gggcctctcaaagtg

SEQ ID NO: 1691372 - DNA, 15 bp, Homo sapiens
ggcctctcaaagtgc

SEQ ID NO: 1691373 - DNA, 15 bp, Homo sapiens
catgagccactgcat

SEQ ID NO: 1691374 - DNA, 15 bp, Homo sapiens
atgagccactgcatc

SEQ ID NO: 1691375 - DNA, 15 bp, Homo sapiens
gccactgcatctggc

SEQ ID NO: 1691376 - DNA, 15 bp, Homo sapiens
ccactgcatctggcc

SEQ ID NO: 1691377 - DNA, 15 bp, Homo sapiens
cactgcatctggcct

SEQ ID NO: 1691378 - DNA, 15 bp, Homo sapiens
actgcatctggcctc

SEQ ID NO: 1691379 - DNA, 15 bp, Homo sapiens
ctgcatctggcctcg

SEQ ID NO: 1691380 - DNA, 15 bp, Homo sapiens
tgcatctggcctcgg

SEQ ID NO: 1691381 - DNA, 15 bp, Homo sapiens
gcatctggcctcggt

SEQ ID NO: 1691382 - DNA, 15 bp, Homo sapiens
catctggcctcggta

SEQ ID NO: 1691383 - DNA, 15 bp, Homo sapiens
atctggcctcggtaa

SEQ ID NO: 1691384 - DNA, 15 bp, Homo sapiens
tctggcctcggtaat

SEQ ID NO: 1691385 - DNA, 15 bp, Homo sapiens
ctggcctcggtaata

SEQ ID NO: 1691386 - DNA, 15 bp, Homo sapiens
tggcctcggtaataa

SEQ ID NO: 1691387 - DNA, 15 bp, Homo sapiens
ggcctcggtaataat

SEQ ID NO: 1691388 - DNA, 15 bp, Homo sapiens
gcctcggtaataatt

SEQ ID NO: 1691389 - DNA, 15 bp, Homo sapiens
cctcggtaataattt

SEQ ID NO: 1691390 - DNA, 15 bp, Homo sapiens
ctcggtaataatttt

SEQ ID NO: 1691391 - DNA, 15 bp, Homo sapiens
tcggtaataattttt

SEQ ID NO: 1691392 - DNA, 15 bp, Homo sapiens
cggtaataattttta

SEQ ID NO: 1691393 - DNA, 15 bp, Homo sapiens
ggtaataatttttat

SEQ ID NO: 1691394 - DNA, 15 bp, Homo sapiens
gtaataatttttata

SEQ ID NO: 1691395 - DNA, 15 bp, Homo sapiens
taataatttttatag

SEQ ID NO: 1691396 - DNA, 15 bp, Homo sapiens
aataatttttataga

SEQ ID NO: 1691397 - DNA, 15 bp, Homo sapiens
ataatttttatagaa

SEQ ID NO: 1691398 - DNA, 15 bp, Homo sapiens
taatttttatagaag

SEQ ID NO: 1691399 - DNA, 15 bp, Homo sapiens
aatttttatagaaga

SEQ ID NO: 1691400 - DNA, 15 bp, Homo sapiens
atttttatagaagaa

SEQ ID NO: 1691401 - DNA, 15 bp, Homo sapiens
tttttatagaagaaa

SEQ ID NO: 1691402 - DNA, 15 bp, Homo sapiens
tttatagaagaaaaa

SEQ ID NO: 1691403 - DNA, 15 bp, Homo sapiens
ttatagaagaaaaaa

SEQ ID NO: 1691404 - DNA, 15 bp, Homo sapiens
tatagaagaaaaaag

SEQ ID NO: 1691405 - DNA, 15 bp, Homo sapiens
atagaagaaaaaagc

SEQ ID NO: 1691406 - DNA, 15 bp, Homo sapiens
tagaagaaaaaagct

SEQ ID NO: 1691407 - DNA, 15 bp, Homo sapiens
agaagaaaaaagcta

SEQ ID NO: 1691408 - DNA, 15 bp, Homo sapiens
gaagaaaaaagctaa

SEQ ID NO: 1691409 - DNA, 15 bp, Homo sapiens
aagaaaaaagctaaa

SEQ ID NO: 1691410 - DNA, 15 bp, Homo sapiens
agaaaaaagctaaaa

SEQ ID NO: 1691411 - DNA, 15 bp, Homo sapiens
gaaaaaagctaaaag

SEQ ID NO: 1691412 - DNA, 15 bp, Homo sapiens
aaaaaagctaaaagc

SEQ ID NO: 1691413 - DNA, 15 bp, Homo sapiens
aaaaagctaaaagct

SEQ ID NO: 1691414 - DNA, 15 bp, Homo sapiens
aaaagctaaaagctt

SEQ ID NO: 1691415 - DNA, 15 bp, Homo sapiens
aaagctaaaagctta

SEQ ID NO: 1691416 - DNA, 15 bp, Homo sapiens
aagctaaaagcttaa

SEQ ID NO: 1691417 - DNA, 15 bp, Homo sapiens
agctaaaagcttaag

SEQ ID NO: 1691418 - DNA, 15 bp, Homo sapiens
gctaaaagcttaagc

SEQ ID NO: 1691419 - DNA, 15 bp, Homo sapiens
ctaaaagcttaagca

SEQ ID NO: 1691420 - DNA, 15 bp, Homo sapiens
taaaagcttaagcaa

SEQ ID NO: 1691421 - DNA, 15 bp, Homo sapiens
aaaagcttaagcaac

SEQ ID NO: 1691422 - DNA, 15 bp, Homo sapiens
aaagcttaagcaaca

SEQ ID NO: 1691423 - DNA, 15 bp, Homo sapiens
aagcttaagcaacat

SEQ ID NO: 1691424 - DNA, 15 bp, Homo sapiens
agcttaagcaacatg

SEQ ID NO: 1691425 - DNA, 15 bp, Homo sapiens
gcttaagcaacatgc

SEQ ID NO: 1691426 - DNA, 15 bp, Homo sapiens
cttaagcaacatgcc

SEQ ID NO: 1691427 - DNA, 15 bp, Homo sapiens
ttaagcaacatgcca

SEQ ID NO: 1691428 - DNA, 15 bp, Homo sapiens
taagcaacatgccaa

SEQ ID NO: 1691429 - DNA, 15 bp, Homo sapiens
aagcaacatgccaaa

SEQ ID NO: 1691430 - DNA, 15 bp, Homo sapiens
agcaacatgccaaag

SEQ ID NO: 1691431 - DNA, 15 bp, Homo sapiens
gcaacatgccaaagg

SEQ ID NO: 1691432 - DNA, 15 bp, Homo sapiens
caacatgccaaaggt

SEQ ID NO: 1691433 - DNA, 15 bp, Homo sapiens
aacatgccaaaggtg

SEQ ID NO: 1691434 - DNA, 15 bp, Homo sapiens
acatgccaaaggtgg

SEQ ID NO: 1691435 - DNA, 15 bp, Homo sapiens
catgccaaaggtggt

SEQ ID NO: 1691436 - DNA, 15 bp, Homo sapiens
atgccaaaggtggta

SEQ ID NO: 1691437 - DNA, 15 bp, Homo sapiens
tgccaaaggtggtac

SEQ ID NO: 1691438 - DNA, 15 bp, Homo sapiens
gccaaaggtggtact

SEQ ID NO: 1691439 - DNA, 15 bp, Homo sapiens
ccaaaggtggtactg

SEQ ID NO: 1691440 - DNA, 15 bp, Homo sapiens
caaaggtggtactgg

SEQ ID NO: 1691441 - DNA, 15 bp, Homo sapiens
aaaggtggtactggt

SEQ ID NO: 1691442 - DNA, 15 bp, Homo sapiens
aaggtggtactggtt

SEQ ID NO: 1691443 - DNA, 15 bp, Homo sapiens
aggtggtactggttg

SEQ ID NO: 1691444 - DNA, 15 bp, Homo sapiens
ggtggtactggttgt

SEQ ID NO: 1691445 - DNA, 15 bp, Homo sapiens
gtggtactggttgta

SEQ ID NO: 1691446 - DNA, 15 bp, Homo sapiens
tggtactggttgtat

SEQ ID NO: 1691447 - DNA, 15 bp, Homo sapiens
ggtactggttgtatg

SEQ ID NO: 1691448 - DNA, 15 bp, Homo sapiens
gtactggttgtatgt

SEQ ID NO: 1691449 - DNA, 15 bp, Homo sapiens
tactggttgtatgtg

SEQ ID NO: 1691450 - DNA, 15 bp, Homo sapiens
actggttgtatgtgg

SEQ ID NO: 1691451 - DNA, 15 bp, Homo sapiens
ctggttgtatgtggt

SEQ ID NO: 1691452 - DNA, 15 bp, Homo sapiens
tggttgtatgtggta

SEQ ID NO: 1691453 - DNA, 15 bp, Homo sapiens
ggttgtatgtggtaa

SEQ ID NO: 1691454 - DNA, 15 bp, Homo sapiens
gttgtatgtggtaaa

SEQ ID NO: 1691455 - DNA, 15 bp, Homo sapiens
ttgtatgtggtaaaa

SEQ ID NO: 1691456 - DNA, 15 bp, Homo sapiens
tgtatgtggtaaaat

SEQ ID NO: 1691457 - DNA, 15 bp, Homo sapiens
gtatgtggtaaaatc

SEQ ID NO: 1691458 - DNA, 15 bp, Homo sapiens
tatgtggtaaaatct

SEQ ID NO: 1691459 - DNA, 15 bp, Homo sapiens
atgtggtaaaatctg

SEQ ID NO: 1691460 - DNA, 15 bp, Homo sapiens
tgtggtaaaatctgg

SEQ ID NO: 1691461 - DNA, 15 bp, Homo sapiens
gtggtaaaatctgga

SEQ ID NO: 1691462 - DNA, 15 bp, Homo sapiens
tggtaaaatctggat

SEQ ID NO: 1691463 - DNA, 15 bp, Homo sapiens
ggtaaaatctggatt

SEQ ID NO: 1691464 - DNA, 15 bp, Homo sapiens
gtaaaatctggattc

SEQ ID NO: 1691465 - DNA, 15 bp, Homo sapiens
taaaatctggattca

SEQ ID NO: 1691466 - DNA, 15 bp, Homo sapiens
aaaatctggattcaa

SEQ ID NO: 1691467 - DNA, 15 bp, Homo sapiens
aaatctggattcaag

SEQ ID NO: 1691468 - DNA, 15 bp, Homo sapiens
aatctggattcaagc

SEQ ID NO: 1691469 - DNA, 15 bp, Homo sapiens
atctggattcaagcc

SEQ ID NO: 1691470 - DNA, 15 bp, Homo sapiens
tctggattcaagccc

SEQ ID NO: 1691471 - DNA, 15 bp, Homo sapiens
ctggattcaagccct

SEQ ID NO: 1691472 - DNA, 15 bp, Homo sapiens
tggattcaagccctt

SEQ ID NO: 1691473 - DNA, 15 bp, Homo sapiens
ggattcaagccctta

SEQ ID NO: 1691474 - DNA, 15 bp, Homo sapiens
gattcaagcccttaa

SEQ ID NO: 1691475 - DNA, 15 bp, Homo sapiens
attcaagcccttaat

SEQ ID NO: 1691476 - DNA, 15 bp, Homo sapiens
ttcaagcccttaatt

SEQ ID NO: 1691477 - DNA, 15 bp, Homo sapiens
tcaagcccttaattg

SEQ ID NO: 1691478 - DNA, 15 bp, Homo sapiens
caagcccttaattgc

SEQ ID NO: 1691479 - DNA, 15 bp, Homo sapiens
aagcccttaattgct

SEQ ID NO: 1691480 - DNA, 15 bp, Homo sapiens
agcccttaattgctt

SEQ ID NO: 1691481 - DNA, 15 bp, Homo sapiens
gcccttaattgcttg

SEQ ID NO: 1691482 - DNA, 15 bp, Homo sapiens
cccttaattgcttga

SEQ ID NO: 1691483 - DNA, 15 bp, Homo sapiens
ccttaattgcttgac

SEQ ID NO: 1691484 - DNA, 15 bp, Homo sapiens
cttaattgcttgact

SEQ ID NO: 1691485 - DNA, 15 bp, Homo sapiens
ttaattgcttgactc

SEQ ID NO: 1691486 - DNA, 15 bp, Homo sapiens
taattgcttgactcc

SEQ ID NO: 1691487 - DNA, 15 bp, Homo sapiens
aattgcttgactcca

SEQ ID NO: 1691488 - DNA, 15 bp, Homo sapiens
attgcttgactccaa

SEQ ID NO: 1691489 - DNA, 15 bp, Homo sapiens
ttgcttgactccaaa

SEQ ID NO: 1691490 - DNA, 15 bp, Homo sapiens
tgcttgactccaaag

SEQ ID NO: 1691491 - DNA, 15 bp, Homo sapiens
gcttgactccaaagc

SEQ ID NO: 1691492 - DNA, 15 bp, Homo sapiens
cttgactccaaagcc

SEQ ID NO: 1691493 - DNA, 15 bp, Homo sapiens
ttgactccaaagccc

SEQ ID NO: 1691494 - DNA, 15 bp, Homo sapiens
tgactccaaagcccc

SEQ ID NO: 1691495 - DNA, 15 bp, Homo sapiens
gactccaaagcccca

SEQ ID NO: 1691496 - DNA, 15 bp, Homo sapiens
actccaaagccccag

SEQ ID NO: 1691497 - DNA, 15 bp, Homo sapiens
ctccaaagccccaga

SEQ ID NO: 1691498 - DNA, 15 bp, Homo sapiens
tccaaagccccagat

SEQ ID NO: 1691499 - DNA, 15 bp, Homo sapiens
ccaaagccccagatg

SEQ ID NO: 1691500 - DNA, 15 bp, Homo sapiens
caaagccccagatgt

SEQ ID NO: 1691501 - DNA, 15 bp, Homo sapiens
aaagccccagatgtt

SEQ ID NO: 1691502 - DNA, 15 bp, Homo sapiens
aagccccagatgttg

SEQ ID NO: 1691503 - DNA, 15 bp, Homo sapiens
agccccagatgttgc

SEQ ID NO: 1691504 - DNA, 15 bp, Homo sapiens
gccccagatgttgct

SEQ ID NO: 1691505 - DNA, 15 bp, Homo sapiens
ccccagatgttgctc

SEQ ID NO: 1691506 - DNA, 15 bp, Homo sapiens
cccagatgttgctct

SEQ ID NO: 1691507 - DNA, 15 bp, Homo sapiens
ccagatgttgctctc

SEQ ID NO: 1691508 - DNA, 15 bp, Homo sapiens
cagatgttgctctct

SEQ ID NO: 1691509 - DNA, 15 bp, Homo sapiens
agatgttgctctctg

SEQ ID NO: 1691510 - DNA, 15 bp, Homo sapiens
gatgttgctctctgt

SEQ ID NO: 1691511 - DNA, 15 bp, Homo sapiens
atgttgctctctgtt

SEQ ID NO: 1691512 - DNA, 15 bp, Homo sapiens
tgttgctctctgttg

SEQ ID NO: 1691513 - DNA, 15 bp, Homo sapiens
gttgctctctgttgc

SEQ ID NO: 1691514 - DNA, 15 bp, Homo sapiens
ttgctctctgttgca

SEQ ID NO: 1691515 - DNA, 15 bp, Homo sapiens
tgctctctgttgcat

SEQ ID NO: 1691516 - DNA, 15 bp, Homo sapiens
gctctctgttgcatt

SEQ ID NO: 1691517 - DNA, 15 bp, Homo sapiens
ctctctgttgcatta

SEQ ID NO: 1691518 - DNA, 15 bp, Homo sapiens
tctctgttgcattat

SEQ ID NO: 1691519 - DNA, 15 bp, Homo sapiens
ctctgttgcattatg

SEQ ID NO: 1691520 - DNA, 15 bp, Homo sapiens
tctgttgcattatgt

SEQ ID NO: 1691521 - DNA, 15 bp, Homo sapiens
ctgttgcattatgtt

SEQ ID NO: 1691522 - DNA, 15 bp, Homo sapiens
tgttgcattatgtta

SEQ ID NO: 1691523 - DNA, 15 bp, Homo sapiens
gttgcattatgttat

SEQ ID NO: 1691524 - DNA, 15 bp, Homo sapiens
ttgcattatgttata

SEQ ID NO: 1691525 - DNA, 15 bp, Homo sapiens
tgcattatgttatat

SEQ ID NO: 1691526 - DNA, 15 bp, Homo sapiens
gcattatgttatata

SEQ ID NO: 1691527 - DNA, 15 bp, Homo sapiens
cattatgttatatag

SEQ ID NO: 1691528 - DNA, 15 bp, Homo sapiens
attatgttatatagc

SEQ ID NO: 1691529 - DNA, 15 bp, Homo sapiens
ttatgttatatagct

SEQ ID NO: 1691530 - DNA, 15 bp, Homo sapiens
tatgttatatagctt

SEQ ID NO: 1691531 - DNA, 15 bp, Homo sapiens
atgttatatagcttt

SEQ ID NO: 1691532 - DNA, 15 bp, Homo sapiens
tgttatatagctttg

SEQ ID NO: 1691533 - DNA, 15 bp, Homo sapiens
gttatatagctttgc

SEQ ID NO: 1691534 - DNA, 15 bp, Homo sapiens
ttatatagctttgca

SEQ ID NO: 1691535 - DNA, 15 bp, Homo sapiens
tatatagctttgcaa

SEQ ID NO: 1691536 - DNA, 15 bp, Homo sapiens
atatagctttgcaat

SEQ ID NO: 1691537 - DNA, 15 bp, Homo sapiens
tatagctttgcaata

SEQ ID NO: 1691538 - DNA, 15 bp, Homo sapiens
atagctttgcaataa

SEQ ID NO: 1691539 - DNA, 15 bp, Homo sapiens
tagctttgcaataac

SEQ ID NO: 1691540 - DNA, 15 bp, Homo sapiens
agctttgcaataacc

SEQ ID NO: 1691541 - DNA, 15 bp, Homo sapiens
gctttgcaataaccc

SEQ ID NO: 1691542 - DNA, 15 bp, Homo sapiens
ctttgcaataacccc

SEQ ID NO: 1691543 - DNA, 15 bp, Homo sapiens
tttgcaataacccca

SEQ ID NO: 1691544 - DNA, 15 bp, Homo sapiens
ttgcaataaccccag

SEQ ID NO: 1691545 - DNA, 15 bp, Homo sapiens
tgcaataaccccaga

SEQ ID NO: 1691546 - DNA, 15 bp, Homo sapiens
gcaataaccccagaa

SEQ ID NO: 1691547 - DNA, 15 bp, Homo sapiens
caataaccccagaaa

SEQ ID NO: 1691548 - DNA, 15 bp, Homo sapiens
aataaccccagaaag

SEQ ID NO: 1691549 - DNA, 15 bp, Homo sapiens
ataaccccagaaagt

SEQ ID NO: 1691550 - DNA, 15 bp, Homo sapiens
taaccccagaaagtt

SEQ ID NO: 1691551 - DNA, 15 bp, Homo sapiens
aaccccagaaagtta

SEQ ID NO: 1691552 - DNA, 15 bp, Homo sapiens
accccagaaagttac

SEQ ID NO: 1691553 - DNA, 15 bp, Homo sapiens
ccccagaaagttaca

SEQ ID NO: 1691554 - DNA, 15 bp, Homo sapiens
cccagaaagttacat

SEQ ID NO: 1691555 - DNA, 15 bp, Homo sapiens
ccagaaagttacata

SEQ ID NO: 1691556 - DNA, 15 bp, Homo sapiens
cagaaagttacatag

SEQ ID NO: 1691557 - DNA, 15 bp, Homo sapiens
agaaagttacatagt

SEQ ID NO: 1691558 - DNA, 15 bp, Homo sapiens
gaaagttacatagtt

SEQ ID NO: 1691559 - DNA, 15 bp, Homo sapiens
aaagttacatagttt

SEQ ID NO: 1691560 - DNA, 15 bp, Homo sapiens
aagttacatagtttg

SEQ ID NO: 1691561 - DNA, 15 bp, Homo sapiens
agttacatagtttga

SEQ ID NO: 1691562 - DNA, 15 bp, Homo sapiens
gttacatagtttgat

SEQ ID NO: 1691563 - DNA, 15 bp, Homo sapiens
ttacatagtttgatg

SEQ ID NO: 1691564 - DNA, 15 bp, Homo sapiens
tacatagtttgatgt

SEQ ID NO: 1691565 - DNA, 15 bp, Homo sapiens
acatagtttgatgtg

SEQ ID NO: 1691566 - DNA, 15 bp, Homo sapiens
catagtttgatgtgg

SEQ ID NO: 1691567 - DNA, 15 bp, Homo sapiens
atagtttgatgtgga

SEQ ID NO: 1691568 - DNA, 15 bp, Homo sapiens
tagtttgatgtggaa

SEQ ID NO: 1691569 - DNA, 15 bp, Homo sapiens
agtttgatgtggaat

SEQ ID NO: 1691570 - DNA, 15 bp, Homo sapiens
gtttgatgtggaatg

SEQ ID NO: 1691571 - DNA, 15 bp, Homo sapiens
tttgatgtggaatga

SEQ ID NO: 1691572 - DNA, 15 bp, Homo sapiens
ttgatgtggaatgaa

SEQ ID NO: 1691573 - DNA, 15 bp, Homo sapiens
tgatgtggaatgaac

SEQ ID NO: 1691574 - DNA, 15 bp, Homo sapiens
gatgtggaatgaact

SEQ ID NO: 1691575 - DNA, 15 bp, Homo sapiens
atgtggaatgaactc

SEQ ID NO: 1691576 - DNA, 15 bp, Homo sapiens
tgtggaatgaactcc

SEQ ID NO: 1691577 - DNA, 15 bp, Homo sapiens
gtggaatgaactccc

SEQ ID NO: 1691578 - DNA, 15 bp, Homo sapiens
tggaatgaactcccc

SEQ ID NO: 1691579 - DNA, 15 bp, Homo sapiens
ggaatgaactcccct

SEQ ID NO: 1691580 - DNA, 15 bp, Homo sapiens
gaatgaactcccctc

SEQ ID NO: 1691581 - DNA, 15 bp, Homo sapiens
aatgaactcccctct

SEQ ID NO: 1691582 - DNA, 15 bp, Homo sapiens
atgaactcccctctt

SEQ ID NO: 1691583 - DNA, 15 bp, Homo sapiens
tgaactcccctcttc

SEQ ID NO: 1691584 - DNA, 15 bp, Homo sapiens
gaactcccctcttcc

SEQ ID NO: 1691585 - DNA, 15 bp, Homo sapiens
aactcccctcttcct

SEQ ID NO: 1691586 - DNA, 15 bp, Homo sapiens
actcccctcttcctt

SEQ ID NO: 1691587 - DNA, 15 bp, Homo sapiens
ctcccctcttccttc

SEQ ID NO: 1691588 - DNA, 15 bp, Homo sapiens
tcccctcttccttcg

SEQ ID NO: 1691589 - DNA, 15 bp, Homo sapiens
cccctcttccttcga

SEQ ID NO: 1691590 - DNA, 15 bp, Homo sapiens
ccctcttccttcgag

SEQ ID NO: 1691591 - DNA, 15 bp, Homo sapiens
cctcttccttcgagt

SEQ ID NO: 1691592 - DNA, 15 bp, Homo sapiens
ctcttccttcgagtc

SEQ ID NO: 1691593 - DNA, 15 bp, Homo sapiens
tcttccttcgagtct

SEQ ID NO: 1691594 - DNA, 15 bp, Homo sapiens
cttccttcgagtctg

SEQ ID NO: 1691595 - DNA, 15 bp, Homo sapiens
ttccttcgagtctga

SEQ ID NO: 1691596 - DNA, 15 bp, Homo sapiens
tccttcgagtctgat

SEQ ID NO: 1691597 - DNA, 15 bp, Homo sapiens
ccttcgagtctgatg

SEQ ID NO: 1691598 - DNA, 15 bp, Homo sapiens
cttcgagtctgatgt

SEQ ID NO: 1691599 - DNA, 15 bp, Homo sapiens
ttcgagtctgatgtc

SEQ ID NO: 1691600 - DNA, 15 bp, Homo sapiens
tcgagtctgatgtct

SEQ ID NO: 1691601 - DNA, 15 bp, Homo sapiens
cgagtctgatgtctt

SEQ ID NO: 1691602 - DNA, 15 bp, Homo sapiens
gagtctgatgtctta

SEQ ID NO: 1691603 - DNA, 15 bp, Homo sapiens
agtctgatgtcttat

SEQ ID NO: 1691604 - DNA, 15 bp, Homo sapiens
gtctgatgtcttatc

SEQ ID NO: 1691605 - DNA, 15 bp, Homo sapiens
tctgatgtcttatca

SEQ ID NO: 1691606 - DNA, 15 bp, Homo sapiens
ctgatgtcttatcag

SEQ ID NO: 1691607 - DNA, 15 bp, Homo sapiens
tgatgtcttatcaga

SEQ ID NO: 1691608 - DNA, 15 bp, Homo sapiens
gatgtcttatcagac

SEQ ID NO: 1691609 - DNA, 15 bp, Homo sapiens
atgtcttatcagaca

SEQ ID NO: 1691610 - DNA, 15 bp, Homo sapiens
tgtcttatcagacac

SEQ ID NO: 1691611 - DNA, 15 bp, Homo sapiens
gtcttatcagacacc

SEQ ID NO: 1691612 - DNA, 15 bp, Homo sapiens
tcttatcagacacca

SEQ ID NO: 1691613 - DNA, 15 bp, Homo sapiens
cttatcagacaccat

SEQ ID NO: 1691614 - DNA, 15 bp, Homo sapiens
ttatcagacaccata

SEQ ID NO: 1691615 - DNA, 15 bp, Homo sapiens
tatcagacaccatat

SEQ ID NO: 1691616 - DNA, 15 bp, Homo sapiens
atcagacaccatatg

SEQ ID NO: 1691617 - DNA, 15 bp, Homo sapiens
tcagacaccatatgt

SEQ ID NO: 1691618 - DNA, 15 bp, Homo sapiens
cagacaccatatgtg

SEQ ID NO: 1691619 - DNA, 15 bp, Homo sapiens
agacaccatatgtga

SEQ ID NO: 1691620 - DNA, 15 bp, Homo sapiens
gacaccatatgtgag

SEQ ID NO: 1691621 - DNA, 15 bp, Homo sapiens
acaccatatgtgaga

SEQ ID NO: 1691622 - DNA, 15 bp, Homo sapiens
caccatatgtgagaa

SEQ ID NO: 1691623 - DNA, 15 bp, Homo sapiens
accatatgtgagaac

SEQ ID NO: 1691624 - DNA, 15 bp, Homo sapiens
ccatatgtgagaact

SEQ ID NO: 1691625 - DNA, 15 bp, Homo sapiens
catatgtgagaactt

SEQ ID NO: 1691626 - DNA, 15 bp, Homo sapiens
atatgtgagaacttg

SEQ ID NO: 1691627 - DNA, 15 bp, Homo sapiens
tatgtgagaacttgg

SEQ ID NO: 1691628 - DNA, 15 bp, Homo sapiens
atgtgagaacttggg

SEQ ID NO: 1691629 - DNA, 15 bp, Homo sapiens
tgtgagaacttggga

SEQ ID NO: 1691630 - DNA, 15 bp, Homo sapiens
gtgagaacttgggag

SEQ ID NO: 1691631 - DNA, 15 bp, Homo sapiens
tgagaacttgggagt

SEQ ID NO: 1691632 - DNA, 15 bp, Homo sapiens
gagaacttgggagtg

SEQ ID NO: 1691633 - DNA, 15 bp, Homo sapiens
agaacttgggagtga

SEQ ID NO: 1691634 - DNA, 15 bp, Homo sapiens
gaacttgggagtgaa

SEQ ID NO: 1691635 - DNA, 15 bp, Homo sapiens
aacttgggagtgaac

SEQ ID NO: 1691636 - DNA, 15 bp, Homo sapiens
acttgggagtgaact

SEQ ID NO: 1691637 - DNA, 15 bp, Homo sapiens
cttgggagtgaactc

SEQ ID NO: 1691638 - DNA, 15 bp, Homo sapiens
ttgggagtgaactca

SEQ ID NO: 1691639 - DNA, 15 bp, Homo sapiens
tgggagtgaactcaa

SEQ ID NO: 1691640 - DNA, 15 bp, Homo sapiens
gggagtgaactcaag

SEQ ID NO: 1691641 - DNA, 15 bp, Homo sapiens
ggagtgaactcaagc

SEQ ID NO: 1691642 - DNA, 15 bp, Homo sapiens
gagtgaactcaagct

SEQ ID NO: 1691643 - DNA, 15 bp, Homo sapiens
agtgaactcaagctt

SEQ ID NO: 1691644 - DNA, 15 bp, Homo sapiens
gtgaactcaagcttc

SEQ ID NO: 1691645 - DNA, 15 bp, Homo sapiens
tgaactcaagcttcc

SEQ ID NO: 1691646 - DNA, 15 bp, Homo sapiens
gaactcaagcttccc

SEQ ID NO: 1691647 - DNA, 15 bp, Homo sapiens
aactcaagcttccct

SEQ ID NO: 1691648 - DNA, 15 bp, Homo sapiens
actcaagcttccctc

SEQ ID NO: 1691649 - DNA, 15 bp, Homo sapiens
ctcaagcttccctca

SEQ ID NO: 1691650 - DNA, 15 bp, Homo sapiens
tcaagcttccctcaa

SEQ ID NO: 1691651 - DNA, 15 bp, Homo sapiens
caagcttccctcaag

SEQ ID NO: 1691652 - DNA, 15 bp, Homo sapiens
aagcttccctcaaga

SEQ ID NO: 1691653 - DNA, 15 bp, Homo sapiens
agcttccctcaagaa

SEQ ID NO: 1691654 - DNA, 15 bp, Homo sapiens
gcttccctcaagaat

SEQ ID NO: 1691655 - DNA, 15 bp, Homo sapiens
cttccctcaagaatg

SEQ ID NO: 1691656 - DNA, 15 bp, Homo sapiens
ttccctcaagaatgt

SEQ ID NO: 1691657 - DNA, 15 bp, Homo sapiens
tccctcaagaatgtt

SEQ ID NO: 1691658 - DNA, 15 bp, Homo sapiens
ccctcaagaatgtta

SEQ ID NO: 1691659 - DNA, 15 bp, Homo sapiens
cctcaagaatgttaa

SEQ ID NO: 1691660 - DNA, 15 bp, Homo sapiens
ctcaagaatgttaac

SEQ ID NO: 1691661 - DNA, 15 bp, Homo sapiens
tcaagaatgttaaca

SEQ ID NO: 1691662 - DNA, 15 bp, Homo sapiens
caagaatgttaacat

SEQ ID NO: 1691663 - DNA, 15 bp, Homo sapiens
aagaatgttaacatc

SEQ ID NO: 1691664 - DNA, 15 bp, Homo sapiens
agaatgttaacatca

SEQ ID NO: 1691665 - DNA, 15 bp, Homo sapiens
gaatgttaacatcaa

SEQ ID NO: 1691666 - DNA, 15 bp, Homo sapiens
aatgttaacatcaaa

SEQ ID NO: 1691667 - DNA, 15 bp, Homo sapiens
atgttaacatcaaat

SEQ ID NO: 1691668 - DNA, 15 bp, Homo sapiens
tgttaacatcaaatt

SEQ ID NO: 1691669 - DNA, 15 bp, Homo sapiens
gttaacatcaaattc

SEQ ID NO: 1691670 - DNA, 15 bp, Homo sapiens
ttaacatcaaattcg

SEQ ID NO: 1691671 - DNA, 15 bp, Homo sapiens
taacatcaaattcga

SEQ ID NO: 1691672 - DNA, 15 bp, Homo sapiens
aacatcaaattcgat

SEQ ID NO: 1691673 - DNA, 15 bp, Homo sapiens
acatcaaattcgatc

SEQ ID NO: 1691674 - DNA, 15 bp, Homo sapiens
catcaaattcgatca

SEQ ID NO: 1691675 - DNA, 15 bp, Homo sapiens
atcaaattcgatcag

SEQ ID NO: 1691676 - DNA, 15 bp, Homo sapiens
tcaaattcgatcaga

SEQ ID NO: 1691677 - DNA, 15 bp, Homo sapiens
caaattcgatcagat

SEQ ID NO: 1691678 - DNA, 15 bp, Homo sapiens
aaattcgatcagatc

SEQ ID NO: 1691679 - DNA, 15 bp, Homo sapiens
aattcgatcagatcc

SEQ ID NO: 1691680 - DNA, 15 bp, Homo sapiens
attcgatcagatcca

SEQ ID NO: 1691681 - DNA, 15 bp, Homo sapiens
ttcgatcagatccaa

SEQ ID NO: 1691682 - DNA, 15 bp, Homo sapiens
tcgatcagatccaac

SEQ ID NO: 1691683 - DNA, 15 bp, Homo sapiens
cgatcagatccaacc

SEQ ID NO: 1691684 - DNA, 15 bp, Homo sapiens
gatcagatccaaccc

SEQ ID NO: 1691685 - DNA, 15 bp, Homo sapiens
atcagatccaacccc

SEQ ID NO: 1691686 - DNA, 15 bp, Homo sapiens
tcagatccaacccca

SEQ ID NO: 1691687 - DNA, 15 bp, Homo sapiens
cagatccaaccccaa

SEQ ID NO: 1691688 - DNA, 15 bp, Homo sapiens
agatccaaccccaaa

SEQ ID NO: 1691689 - DNA, 15 bp, Homo sapiens
gatccaaccccaaag

SEQ ID NO: 1691690 - DNA, 15 bp, Homo sapiens
atccaaccccaaagg

SEQ ID NO: 1691691 - DNA, 15 bp, Homo sapiens
tccaaccccaaaggt

SEQ ID NO: 1691692 - DNA, 15 bp, Homo sapiens
ccaaccccaaaggtg

SEQ ID NO: 1691693 - DNA, 15 bp, Homo sapiens
caaccccaaaggtgg

SEQ ID NO: 1691694 - DNA, 15 bp, Homo sapiens
aaccccaaaggtggg

SEQ ID NO: 1691695 - DNA, 15 bp, Homo sapiens
accccaaaggtgggt

SEQ ID NO: 1691696 - DNA, 15 bp, Homo sapiens
ccccaaaggtgggtg

SEQ ID NO: 1691697 - DNA, 15 bp, Homo sapiens
cccaaaggtgggtgt

SEQ ID NO: 1691698 - DNA, 15 bp, Homo sapiens
ccaaaggtgggtgtt

SEQ ID NO: 1691699 - DNA, 15 bp, Homo sapiens
caaaggtgggtgttt

SEQ ID NO: 1691700 - DNA, 15 bp, Homo sapiens
aaaggtgggtgtttt

SEQ ID NO: 1691701 - DNA, 15 bp, Homo sapiens
aaggtgggtgttttg

SEQ ID NO: 1691702 - DNA, 15 bp, Homo sapiens
aggtgggtgttttga

SEQ ID NO: 1691703 - DNA, 15 bp, Homo sapiens
ggtgggtgttttgac

SEQ ID NO: 1691704 - DNA, 15 bp, Homo sapiens
gtgggtgttttgacc

SEQ ID NO: 1691705 - DNA, 15 bp, Homo sapiens
tgggtgttttgacct

SEQ ID NO: 1691706 - DNA, 15 bp, Homo sapiens
gggtgttttgacctc

SEQ ID NO: 1691707 - DNA, 15 bp, Homo sapiens
ggtgttttgacctca

SEQ ID NO: 1691708 - DNA, 15 bp, Homo sapiens
gtgttttgacctcaa

SEQ ID NO: 1691709 - DNA, 15 bp, Homo sapiens
tgttttgacctcaac

SEQ ID NO: 1691710 - DNA, 15 bp, Homo sapiens
gttttgacctcaact

SEQ ID NO: 1691711 - DNA, 15 bp, Homo sapiens
ttttgacctcaacta

SEQ ID NO: 1691712 - DNA, 15 bp, Homo sapiens
tttgacctcaactac

SEQ ID NO: 1691713 - DNA, 15 bp, Homo sapiens
ttgacctcaactact

SEQ ID NO: 1691714 - DNA, 15 bp, Homo sapiens
tgacctcaactactg

SEQ ID NO: 1691715 - DNA, 15 bp, Homo sapiens
gacctcaactactga

SEQ ID NO: 1691716 - DNA, 15 bp, Homo sapiens
acctcaactactgaa

SEQ ID NO: 1691717 - DNA, 15 bp, Homo sapiens
cctcaactactgaac

SEQ ID NO: 1691718 - DNA, 15 bp, Homo sapiens
ctcaactactgaact

SEQ ID NO: 1691719 - DNA, 15 bp, Homo sapiens
tcaactactgaactt

SEQ ID NO: 1691720 - DNA, 15 bp, Homo sapiens
caactactgaacttc

SEQ ID NO: 1691721 - DNA, 15 bp, Homo sapiens
aactactgaacttca

SEQ ID NO: 1691722 - DNA, 15 bp, Homo sapiens
actactgaacttcaa

SEQ ID NO: 1691723 - DNA, 15 bp, Homo sapiens
ctactgaacttcaaa

SEQ ID NO: 1691724 - DNA, 15 bp, Homo sapiens
tactgaacttcaaaa

SEQ ID NO: 1691725 - DNA, 15 bp, Homo sapiens
actgaacttcaaaaa

SEQ ID NO: 1691726 - DNA, 15 bp, Homo sapiens
ctgaacttcaaaaat

SEQ ID NO: 1691727 - DNA, 15 bp, Homo sapiens
tgaacttcaaaaata

SEQ ID NO: 1691728 - DNA, 15 bp, Homo sapiens
gaacttcaaaaatac

SEQ ID NO: 1691729 - DNA, 15 bp, Homo sapiens
aacttcaaaaataca

SEQ ID NO: 1691730 - DNA, 15 bp, Homo sapiens
acttcaaaaatacat

SEQ ID NO: 1691731 - DNA, 15 bp, Homo sapiens
cttcaaaaatacata

SEQ ID NO: 1691732 - DNA, 15 bp, Homo sapiens
ttcaaaaatacatat

SEQ ID NO: 1691733 - DNA, 15 bp, Homo sapiens
tcaaaaatacatata

SEQ ID NO: 1691734 - DNA, 15 bp, Homo sapiens
caaaaatacatataa

SEQ ID NO: 1691735 - DNA, 15 bp, Homo sapiens
aaaaatacatataaa

SEQ ID NO: 1691736 - DNA, 15 bp, Homo sapiens
aaaatacatataaac

SEQ ID NO: 1691737 - DNA, 15 bp, Homo sapiens
aaatacatataaact

SEQ ID NO: 1691738 - DNA, 15 bp, Homo sapiens
aatacatataaactc

SEQ ID NO: 1691739 - DNA, 15 bp, Homo sapiens
atacatataaactca

SEQ ID NO: 1691740 - DNA, 15 bp, Homo sapiens
tacatataaactcaa

SEQ ID NO: 1691741 - DNA, 15 bp, Homo sapiens
acatataaactcaag

SEQ ID NO: 1691742 - DNA, 15 bp, Homo sapiens
catataaactcaaga

SEQ ID NO: 1691743 - DNA, 15 bp, Homo sapiens
atataaactcaagag

SEQ ID NO: 1691744 - DNA, 15 bp, Homo sapiens
tataaactcaagagt

SEQ ID NO: 1691745 - DNA, 15 bp, Homo sapiens
ataaactcaagagtt

SEQ ID NO: 1691746 - DNA, 15 bp, Homo sapiens
taaactcaagagttt

SEQ ID NO: 1691747 - DNA, 15 bp, Homo sapiens
aaactcaagagtttg

SEQ ID NO: 1691748 - DNA, 15 bp, Homo sapiens
aactcaagagtttga

SEQ ID NO: 1691749 - DNA, 15 bp, Homo sapiens
actcaagagtttgac

SEQ ID NO: 1691750 - DNA, 15 bp, Homo sapiens
ctcaagagtttgaca

SEQ ID NO: 1691751 - DNA, 15 bp, Homo sapiens
tcaagagtttgacag

SEQ ID NO: 1691752 - DNA, 15 bp, Homo sapiens
caagagtttgacaga

SEQ ID NO: 1691753 - DNA, 15 bp, Homo sapiens
aagagtttgacagac

SEQ ID NO: 1691754 - DNA, 15 bp, Homo sapiens
agagtttgacagaca

SEQ ID NO: 1691755 - DNA, 15 bp, Homo sapiens
gagtttgacagacac

SEQ ID NO: 1691756 - DNA, 15 bp, Homo sapiens
agtttgacagacact

SEQ ID NO: 1691757 - DNA, 15 bp, Homo sapiens
gtttgacagacactt

SEQ ID NO: 1691758 - DNA, 15 bp, Homo sapiens
tttgacagacacttt

SEQ ID NO: 1691759 - DNA, 15 bp, Homo sapiens
ttgacagacactttg

SEQ ID NO: 1691760 - DNA, 15 bp, Homo sapiens
tgacagacactttga

SEQ ID NO: 1691761 - DNA, 15 bp, Homo sapiens
gacagacactttgag

SEQ ID NO: 1691762 - DNA, 15 bp, Homo sapiens
acagacactttgaga

SEQ ID NO: 1691763 - DNA, 15 bp, Homo sapiens
cagacactttgagag

SEQ ID NO: 1691764 - DNA, 15 bp, Homo sapiens
agacactttgagagc

SEQ ID NO: 1691765 - DNA, 15 bp, Homo sapiens
gacactttgagagct

SEQ ID NO: 1691766 - DNA, 15 bp, Homo sapiens
acactttgagagctt

SEQ ID NO: 1691767 - DNA, 15 bp, Homo sapiens
cactttgagagctta

SEQ ID NO: 1691768 - DNA, 15 bp, Homo sapiens
actttgagagcttag

SEQ ID NO: 1691769 - DNA, 15 bp, Homo sapiens
ctttgagagcttagg

SEQ ID NO: 1691770 - DNA, 15 bp, Homo sapiens
tttgagagcttaggc

SEQ ID NO: 1691771 - DNA, 15 bp, Homo sapiens
ttgagagcttaggca

SEQ ID NO: 1691772 - DNA, 15 bp, Homo sapiens
tgagagcttaggcag

SEQ ID NO: 1691773 - DNA, 15 bp, Homo sapiens
gagagcttaggcagt

SEQ ID NO: 1691774 - DNA, 15 bp, Homo sapiens
agagcttaggcagta

SEQ ID NO: 1691775 - DNA, 15 bp, Homo sapiens
gagcttaggcagtag

SEQ ID NO: 1691776 - DNA, 15 bp, Homo sapiens
agcttaggcagtagc

SEQ ID NO: 1691777 - DNA, 15 bp, Homo sapiens
gcttaggcagtagca

SEQ ID NO: 1691778 - DNA, 15 bp, Homo sapiens
cttaggcagtagcag

SEQ ID NO: 1691779 - DNA, 15 bp, Homo sapiens
ttaggcagtagcagg

SEQ ID NO: 1691780 - DNA, 15 bp, Homo sapiens
taggcagtagcaggg

SEQ ID NO: 1691781 - DNA, 15 bp, Homo sapiens
aggcagtagcagggt

SEQ ID NO: 1691782 - DNA, 15 bp, Homo sapiens
ggcagtagcagggtt

SEQ ID NO: 1691783 - DNA, 15 bp, Homo sapiens
gcagtagcagggtta

SEQ ID NO: 1691784 - DNA, 15 bp, Homo sapiens
cagtagcagggttaa

SEQ ID NO: 1691785 - DNA, 15 bp, Homo sapiens
agtagcagggttaaa

SEQ ID NO: 1691786 - DNA, 15 bp, Homo sapiens
gtagcagggttaaac

SEQ ID NO: 1691787 - DNA, 15 bp, Homo sapiens
tagcagggttaaact

SEQ ID NO: 1691788 - DNA, 15 bp, Homo sapiens
agcagggttaaactt

SEQ ID NO: 1691789 - DNA, 15 bp, Homo sapiens
gcagggttaaacttt

SEQ ID NO: 1691790 - DNA, 15 bp, Homo sapiens
cagggttaaactttg

SEQ ID NO: 1691791 - DNA, 15 bp, Homo sapiens
agggttaaactttgt

SEQ ID NO: 1691792 - DNA, 15 bp, Homo sapiens
gggttaaactttgtt

SEQ ID NO: 1691793 - DNA, 15 bp, Homo sapiens
ggttaaactttgttg

SEQ ID NO: 1691794 - DNA, 15 bp, Homo sapiens
gttaaactttgttga

SEQ ID NO: 1691795 - DNA, 15 bp, Homo sapiens
ttaaactttgttgat

SEQ ID NO: 1691796 - DNA, 15 bp, Homo sapiens
taaactttgttgatc

SEQ ID NO: 1691797 - DNA, 15 bp, Homo sapiens
aaactttgttgatcg

SEQ ID NO: 1691798 - DNA, 15 bp, Homo sapiens
aactttgttgatcgt

SEQ ID NO: 1691799 - DNA, 15 bp, Homo sapiens
actttgttgatcgtt

SEQ ID NO: 1691800 - DNA, 15 bp, Homo sapiens
ctttgttgatcgttt

SEQ ID NO: 1691801 - DNA, 15 bp, Homo sapiens
tttgttgatcgtttc

SEQ ID NO: 1691802 - DNA, 15 bp, Homo sapiens
ttgttgatcgtttct

SEQ ID NO: 1691803 - DNA, 15 bp, Homo sapiens
tgttgatcgtttctc

SEQ ID NO: 1691804 - DNA, 15 bp, Homo sapiens
gttgatcgtttctca

SEQ ID NO: 1691805 - DNA, 15 bp, Homo sapiens
ttgatcgtttctcag

SEQ ID NO: 1691806 - DNA, 15 bp, Homo sapiens
tgatcgtttctcaga

SEQ ID NO: 1691807 - DNA, 15 bp, Homo sapiens
gatcgtttctcagaa

SEQ ID NO: 1691808 - DNA, 15 bp, Homo sapiens
atcgtttctcagaaa

SEQ ID NO: 1691809 - DNA, 15 bp, Homo sapiens
tcgtttctcagaaaa

SEQ ID NO: 1691810 - DNA, 15 bp, Homo sapiens
cgtttctcagaaaat

SEQ ID NO: 1691811 - DNA, 15 bp, Homo sapiens
gtttctcagaaaatc

SEQ ID NO: 1691812 - DNA, 15 bp, Homo sapiens
tttctcagaaaatca

SEQ ID NO: 1691813 - DNA, 15 bp, Homo sapiens
ttctcagaaaatcaa

SEQ ID NO: 1691814 - DNA, 15 bp, Homo sapiens
tctcagaaaatcaag

SEQ ID NO: 1691815 - DNA, 15 bp, Homo sapiens
ctcagaaaatcaaga

SEQ ID NO: 1691816 - DNA, 15 bp, Homo sapiens
tcagaaaatcaagag

SEQ ID NO: 1691817 - DNA, 15 bp, Homo sapiens
cagaaaatcaagagt

SEQ ID NO: 1691818 - DNA, 15 bp, Homo sapiens
agaaaatcaagagtg

SEQ ID NO: 1691819 - DNA, 15 bp, Homo sapiens
gaaaatcaagagtgc

SEQ ID NO: 1691820 - DNA, 15 bp, Homo sapiens
aaaatcaagagtgca

SEQ ID NO: 1691821 - DNA, 15 bp, Homo sapiens
aaatcaagagtgcat

SEQ ID NO: 1691822 - DNA, 15 bp, Homo sapiens
aatcaagagtgcatg

SEQ ID NO: 1691823 - DNA, 15 bp, Homo sapiens
atcaagagtgcatgc

SEQ ID NO: 1691824 - DNA, 15 bp, Homo sapiens
tcaagagtgcatgct

SEQ ID NO: 1691825 - DNA, 15 bp, Homo sapiens
caagagtgcatgcta

SEQ ID NO: 1691826 - DNA, 15 bp, Homo sapiens
aagagtgcatgctat

SEQ ID NO: 1691827 - DNA, 15 bp, Homo sapiens
agagtgcatgctata

SEQ ID NO: 1691828 - DNA, 15 bp, Homo sapiens
gagtgcatgctatag

SEQ ID NO: 1691829 - DNA, 15 bp, Homo sapiens
agtgcatgctatagg

SEQ ID NO: 1691830 - DNA, 15 bp, Homo sapiens
gtgcatgctataggc

SEQ ID NO: 1691831 - DNA, 15 bp, Homo sapiens
tgcatgctataggcg

SEQ ID NO: 1691832 - DNA, 15 bp, Homo sapiens
gcatgctataggcgg

SEQ ID NO: 1691833 - DNA, 15 bp, Homo sapiens
catgctataggcggg

SEQ ID NO: 1691834 - DNA, 15 bp, Homo sapiens
atgctataggcgggg

SEQ ID NO: 1691835 - DNA, 15 bp, Homo sapiens
tgctataggcggggt

SEQ ID NO: 1691836 - DNA, 15 bp, Homo sapiens
gctataggcggggtg

SEQ ID NO: 1691837 - DNA, 15 bp, Homo sapiens
ctataggcggggtgt

SEQ ID NO: 1691838 - DNA, 15 bp, Homo sapiens
tataggcggggtgtg

SEQ ID NO: 1691839 - DNA, 15 bp, Homo sapiens
ataggcggggtgtgg

SEQ ID NO: 1691840 - DNA, 15 bp, Homo sapiens
taggcggggtgtggc

SEQ ID NO: 1691841 - DNA, 15 bp, Homo sapiens
aggcggggtgtggca

SEQ ID NO: 1691842 - DNA, 15 bp, Homo sapiens
ggcggggtgtggcag

SEQ ID NO: 1691843 - DNA, 15 bp, Homo sapiens
gcggggtgtggcagc

SEQ ID NO: 1691844 - DNA, 15 bp, Homo sapiens
cggggtgtggcagct

SEQ ID NO: 1691845 - DNA, 15 bp, Homo sapiens
ggggtgtggcagctc

SEQ ID NO: 1691846 - DNA, 15 bp, Homo sapiens
gggtgtggcagctcg

SEQ ID NO: 1691847 - DNA, 15 bp, Homo sapiens
ggtgtggcagctcgc

SEQ ID NO: 1691848 - DNA, 15 bp, Homo sapiens
gtgtggcagctcgca

SEQ ID NO: 1691849 - DNA, 15 bp, Homo sapiens
tgtggcagctcgcac

SEQ ID NO: 1691850 - DNA, 15 bp, Homo sapiens
gtggcagctcgcacc

SEQ ID NO: 1691851 - DNA, 15 bp, Homo sapiens
tggcagctcgcacct

SEQ ID NO: 1691852 - DNA, 15 bp, Homo sapiens
ggcagctcgcacctg

SEQ ID NO: 1691853 - DNA, 15 bp, Homo sapiens
gcagctcgcacctgt

SEQ ID NO: 1691854 - DNA, 15 bp, Homo sapiens
cagctcgcacctgta

SEQ ID NO: 1691855 - DNA, 15 bp, Homo sapiens
agctcgcacctgtaa

SEQ ID NO: 1691856 - DNA, 15 bp, Homo sapiens
caacactttgggaag

SEQ ID NO: 1691857 - DNA, 15 bp, Homo sapiens
aacactttgggaagc

SEQ ID NO: 1691858 - DNA, 15 bp, Homo sapiens
acactttgggaagct

SEQ ID NO: 1691859 - DNA, 15 bp, Homo sapiens
tttgggaagctgaga

SEQ ID NO: 1691860 - DNA, 15 bp, Homo sapiens
ttgggaagctgagac

SEQ ID NO: 1691861 - DNA, 15 bp, Homo sapiens
tgggaagctgagaca

SEQ ID NO: 1691862 - DNA, 15 bp, Homo sapiens
gggaagctgagacag

SEQ ID NO: 1691863 - DNA, 15 bp, Homo sapiens
gaagctgagacaggt

SEQ ID NO: 1691864 - DNA, 15 bp, Homo sapiens
aagctgagacaggtg

SEQ ID NO: 1691865 - DNA, 15 bp, Homo sapiens
agctgagacaggtgg

SEQ ID NO: 1691866 - DNA, 15 bp, Homo sapiens
gctgagacaggtgga

SEQ ID NO: 1691867 - DNA, 15 bp, Homo sapiens
ctgagacaggtggat

SEQ ID NO: 1691868 - DNA, 15 bp, Homo sapiens
tgagacaggtggatt

SEQ ID NO: 1691869 - DNA, 15 bp, Homo sapiens
gagacaggtggattg

SEQ ID NO: 1691870 - DNA, 15 bp, Homo sapiens
agacaggtggattgc

SEQ ID NO: 1691871 - DNA, 15 bp, Homo sapiens
gacaggtggattgct

SEQ ID NO: 1691872 - DNA, 15 bp, Homo sapiens
acaggtggattgctt

SEQ ID NO: 1691873 - DNA, 15 bp, Homo sapiens
caggtggattgcttg

SEQ ID NO: 1691874 - DNA, 15 bp, Homo sapiens
aggtggattgcttga

SEQ ID NO: 1691875 - DNA, 15 bp, Homo sapiens
cagcctgggcagcat

SEQ ID NO: 1691876 - DNA, 15 bp, Homo sapiens
gcatagtgagacccc

SEQ ID NO: 1691877 - DNA, 15 bp, Homo sapiens
atagtgagaccccag

SEQ ID NO: 1691878 - DNA, 15 bp, Homo sapiens
tagtgagaccccagc

SEQ ID NO: 1691879 - DNA, 15 bp, Homo sapiens
agtgagaccccagct

SEQ ID NO: 1691880 - DNA, 15 bp, Homo sapiens
gtgagaccccagctc

SEQ ID NO: 1691881 - DNA, 15 bp, Homo sapiens
tgagaccccagctct

SEQ ID NO: 1691882 - DNA, 15 bp, Homo sapiens
gagaccccagctcta

SEQ ID NO: 1691883 - DNA, 15 bp, Homo sapiens
agaccccagctctag

SEQ ID NO: 1691884 - DNA, 15 bp, Homo sapiens
gaccccagctctaga

SEQ ID NO: 1691885 - DNA, 15 bp, Homo sapiens
accccagctctagaa

SEQ ID NO: 1691886 - DNA, 15 bp, Homo sapiens
ccccagctctagaaa

SEQ ID NO: 1691887 - DNA, 15 bp, Homo sapiens
cccagctctagaaaa

SEQ ID NO: 1691888 - DNA, 15 bp, Homo sapiens
ccagctctagaaaaa

SEQ ID NO: 1691889 - DNA, 15 bp, Homo sapiens
cagctctagaaaaaa

SEQ ID NO: 1691890 - DNA, 15 bp, Homo sapiens
agctctagaaaaaat

SEQ ID NO: 1691891 - DNA, 15 bp, Homo sapiens
gctctagaaaaaata

SEQ ID NO: 1691892 - DNA, 15 bp, Homo sapiens
ctctagaaaaaatac

SEQ ID NO: 1691893 - DNA, 15 bp, Homo sapiens
tctagaaaaaataca

SEQ ID NO: 1691894 - DNA, 15 bp, Homo sapiens
ctagaaaaaatacaa

SEQ ID NO: 1691895 - DNA, 15 bp, Homo sapiens
tagaaaaaatacaaa

SEQ ID NO: 1691896 - DNA, 15 bp, Homo sapiens
agaaaaaatacaaaa

SEQ ID NO: 1691897 - DNA, 15 bp, Homo sapiens
gaaaaaatacaaaaa

SEQ ID NO: 1691898 - DNA, 15 bp, Homo sapiens
aaaaaaaaaaagtag

SEQ ID NO: 1691899 - DNA, 15 bp, Homo sapiens
aaaaaaaaaagtagc

SEQ ID NO: 1691900 - DNA, 15 bp, Homo sapiens
aaaaaaaaagtagcc

SEQ ID NO: 1691901 - DNA, 15 bp, Homo sapiens
aaaaaaaagtagcca

SEQ ID NO: 1691902 - DNA, 15 bp, Homo sapiens
aaaaaaagtagccag

SEQ ID NO: 1691903 - DNA, 15 bp, Homo sapiens
aaaaaagtagccagt

SEQ ID NO: 1691904 - DNA, 15 bp, Homo sapiens
aaaaagtagccagtt

SEQ ID NO: 1691905 - DNA, 15 bp, Homo sapiens
aaaagtagccagtta

SEQ ID NO: 1691906 - DNA, 15 bp, Homo sapiens
aaagtagccagttat

SEQ ID NO: 1691907 - DNA, 15 bp, Homo sapiens
aagtagccagttatg

SEQ ID NO: 1691908 - DNA, 15 bp, Homo sapiens
agtagccagttatgc

SEQ ID NO: 1691909 - DNA, 15 bp, Homo sapiens
gtagccagttatgct

SEQ ID NO: 1691910 - DNA, 15 bp, Homo sapiens
tagccagttatgctc

SEQ ID NO: 1691911 - DNA, 15 bp, Homo sapiens
agccagttatgctcg

SEQ ID NO: 1691912 - DNA, 15 bp, Homo sapiens
gccagttatgctcgt

SEQ ID NO: 1691913 - DNA, 15 bp, Homo sapiens
ccagttatgctcgtg

SEQ ID NO: 1691914 - DNA, 15 bp, Homo sapiens
cagttatgctcgtgc

SEQ ID NO: 1691915 - DNA, 15 bp, Homo sapiens
agttatgctcgtgca

SEQ ID NO: 1691916 - DNA, 15 bp, Homo sapiens
gttatgctcgtgcac

SEQ ID NO: 1691917 - DNA, 15 bp, Homo sapiens
ttatgctcgtgcaca

SEQ ID NO: 1691918 - DNA, 15 bp, Homo sapiens
tatgctcgtgcacac

SEQ ID NO: 1691919 - DNA, 15 bp, Homo sapiens
atgctcgtgcacacc

SEQ ID NO: 1691920 - DNA, 15 bp, Homo sapiens
tgctcgtgcacacct

SEQ ID NO: 1691921 - DNA, 15 bp, Homo sapiens
gctcgtgcacacctg

SEQ ID NO: 1691922 - DNA, 15 bp, Homo sapiens
ctcgtgcacacctgt

SEQ ID NO: 1691923 - DNA, 15 bp, Homo sapiens
tcgtgcacacctgta

SEQ ID NO: 1691924 - DNA, 15 bp, Homo sapiens
cgtgcacacctgtag

SEQ ID NO: 1691925 - DNA, 15 bp, Homo sapiens
tgcacacctgtagtt

SEQ ID NO: 1691926 - DNA, 15 bp, Homo sapiens
gcacacctgtagttc

SEQ ID NO: 1691927 - DNA, 15 bp, Homo sapiens
cacacctgtagttct

SEQ ID NO: 1691928 - DNA, 15 bp, Homo sapiens
acacctgtagttcta

SEQ ID NO: 1691929 - DNA, 15 bp, Homo sapiens
cacctgtagttctag

SEQ ID NO: 1691930 - DNA, 15 bp, Homo sapiens
agttctagctacttt

SEQ ID NO: 1691931 - DNA, 15 bp, Homo sapiens
gttctagctactttg

SEQ ID NO: 1691932 - DNA, 15 bp, Homo sapiens
ttctagctactttgg

SEQ ID NO: 1691933 - DNA, 15 bp, Homo sapiens
tctagctactttgga

SEQ ID NO: 1691934 - DNA, 15 bp, Homo sapiens
ctagctactttggag

SEQ ID NO: 1691935 - DNA, 15 bp, Homo sapiens
tagctactttggagg

SEQ ID NO: 1691936 - DNA, 15 bp, Homo sapiens
agctactttggaggc

SEQ ID NO: 1691937 - DNA, 15 bp, Homo sapiens
gctactttggaggct

SEQ ID NO: 1691938 - DNA, 15 bp, Homo sapiens
ctactttggaggctg

SEQ ID NO: 1691939 - DNA, 15 bp, Homo sapiens
tactttggaggctga

SEQ ID NO: 1691940 - DNA, 15 bp, Homo sapiens
actttggaggctgag

SEQ ID NO: 1691941 - DNA, 15 bp, Homo sapiens
ctttggaggctgagg

SEQ ID NO: 1691942 - DNA, 15 bp, Homo sapiens
tttggaggctgaggc

SEQ ID NO: 1691943 - DNA, 15 bp, Homo sapiens
ttggaggctgaggca

SEQ ID NO: 1691944 - DNA, 15 bp, Homo sapiens
aggctgaggcagggt

SEQ ID NO: 1691945 - DNA, 15 bp, Homo sapiens
ggctgaggcagggtg

SEQ ID NO: 1691946 - DNA, 15 bp, Homo sapiens
gctgaggcagggtga

SEQ ID NO: 1691947 - DNA, 15 bp, Homo sapiens
ctgaggcagggtgat

SEQ ID NO: 1691948 - DNA, 15 bp, Homo sapiens
tgaggcagggtgatc

SEQ ID NO: 1691949 - DNA, 15 bp, Homo sapiens
gaggcagggtgatcc

SEQ ID NO: 1691950 - DNA, 15 bp, Homo sapiens
aggcagggtgatccc

SEQ ID NO: 1691951 - DNA, 15 bp, Homo sapiens
ggcagggtgatccct

SEQ ID NO: 1691952 - DNA, 15 bp, Homo sapiens
gcagggtgatccctt

SEQ ID NO: 1691953 - DNA, 15 bp, Homo sapiens
cagggtgatcccttg

SEQ ID NO: 1691954 - DNA, 15 bp, Homo sapiens
agggtgatcccttga

SEQ ID NO: 1691955 - DNA, 15 bp, Homo sapiens
gggtgatcccttgag

SEQ ID NO: 1691956 - DNA, 15 bp, Homo sapiens
ggtgatcccttgagc

SEQ ID NO: 1691957 - DNA, 15 bp, Homo sapiens
gtgatcccttgagcc

SEQ ID NO: 1691958 - DNA, 15 bp, Homo sapiens
atcccttgagcccat

SEQ ID NO: 1691959 - DNA, 15 bp, Homo sapiens
tcccttgagcccatg

SEQ ID NO: 1691960 - DNA, 15 bp, Homo sapiens
cccttgagcccatga

SEQ ID NO: 1691961 - DNA, 15 bp, Homo sapiens
ccttgagcccatgat

SEQ ID NO: 1691962 - DNA, 15 bp, Homo sapiens
cttgagcccatgatt

SEQ ID NO: 1691963 - DNA, 15 bp, Homo sapiens
ttgagcccatgattt

SEQ ID NO: 1691964 - DNA, 15 bp, Homo sapiens
tgagcccatgatttt

SEQ ID NO: 1691965 - DNA, 15 bp, Homo sapiens
gagcccatgattttg

SEQ ID NO: 1691966 - DNA, 15 bp, Homo sapiens
agcccatgattttga

SEQ ID NO: 1691967 - DNA, 15 bp, Homo sapiens
gcccatgattttgag

SEQ ID NO: 1691968 - DNA, 15 bp, Homo sapiens
cccatgattttgaga

SEQ ID NO: 1691969 - DNA, 15 bp, Homo sapiens
ccatgattttgagac

SEQ ID NO: 1691970 - DNA, 15 bp, Homo sapiens
catgattttgagact

SEQ ID NO: 1691971 - DNA, 15 bp, Homo sapiens
atgattttgagactg

SEQ ID NO: 1691972 - DNA, 15 bp, Homo sapiens
tgattttgagactgc

SEQ ID NO: 1691973 - DNA, 15 bp, Homo sapiens
gattttgagactgca

SEQ ID NO: 1691974 - DNA, 15 bp, Homo sapiens
attttgagactgcag

SEQ ID NO: 1691975 - DNA, 15 bp, Homo sapiens
ttttgagactgcagt

SEQ ID NO: 1691976 - DNA, 15 bp, Homo sapiens
gactgcagtgagcct

SEQ ID NO: 1691977 - DNA, 15 bp, Homo sapiens
actgcagtgagcctg

SEQ ID NO: 1691978 - DNA, 15 bp, Homo sapiens
ctgcagtgagcctgt

SEQ ID NO: 1691979 - DNA, 15 bp, Homo sapiens
tgcagtgagcctgtg

SEQ ID NO: 1691980 - DNA, 15 bp, Homo sapiens
gcagtgagcctgtgt

SEQ ID NO: 1691981 - DNA, 15 bp, Homo sapiens
cagtgagcctgtgtg

SEQ ID NO: 1691982 - DNA, 15 bp, Homo sapiens
agtgagcctgtgtga

SEQ ID NO: 1691983 - DNA, 15 bp, Homo sapiens
gtgagcctgtgtgac

SEQ ID NO: 1691984 - DNA, 15 bp, Homo sapiens
tgagcctgtgtgaca

SEQ ID NO: 1691985 - DNA, 15 bp, Homo sapiens
gagcctgtgtgacag

SEQ ID NO: 1691986 - DNA, 15 bp, Homo sapiens
agcctgtgtgacaga

SEQ ID NO: 1691987 - DNA, 15 bp, Homo sapiens
gcctgtgtgacagat

SEQ ID NO: 1691988 - DNA, 15 bp, Homo sapiens
cctgtgtgacagatg

SEQ ID NO: 1691989 - DNA, 15 bp, Homo sapiens
ctgtgtgacagatga

SEQ ID NO: 1691990 - DNA, 15 bp, Homo sapiens
tgtgtgacagatgaa

SEQ ID NO: 1691991 - DNA, 15 bp, Homo sapiens
gtgtgacagatgaag

SEQ ID NO: 1691992 - DNA, 15 bp, Homo sapiens
tgtgacagatgaaga

SEQ ID NO: 1691993 - DNA, 15 bp, Homo sapiens
gtgacagatgaagac

SEQ ID NO: 1691994 - DNA, 15 bp, Homo sapiens
tgacagatgaagact

SEQ ID NO: 1691995 - DNA, 15 bp, Homo sapiens
gacagatgaagactc

SEQ ID NO: 1691996 - DNA, 15 bp, Homo sapiens
acagatgaagactct

SEQ ID NO: 1691997 - DNA, 15 bp, Homo sapiens
cagatgaagactctt

SEQ ID NO: 1691998 - DNA, 15 bp, Homo sapiens
agatgaagactcttg

SEQ ID NO: 1691999 - DNA, 15 bp, Homo sapiens
gatgaagactcttgt

SEQ ID NO: 1692000 - DNA, 15 bp, Homo sapiens
atgaagactcttgtt

SEQ ID NO: 1692001 - DNA, 15 bp, Homo sapiens
tgaagactcttgttt

SEQ ID NO: 1692002 - DNA, 15 bp, Homo sapiens
gaagactcttgtttg

SEQ ID NO: 1692003 - DNA, 15 bp, Homo sapiens
aagactcttgtttgt

SEQ ID NO: 1692004 - DNA, 15 bp, Homo sapiens
agactcttgtttgtt

SEQ ID NO: 1692005 - DNA, 15 bp, Homo sapiens
gactcttgtttgttt

SEQ ID NO: 1692006 - DNA, 15 bp, Homo sapiens
actcttgtttgtttg

SEQ ID NO: 1692007 - DNA, 15 bp, Homo sapiens
ctcttgtttgtttgt

SEQ ID NO: 1692008 - DNA, 15 bp, Homo sapiens
tcttgtttgtttgtt

SEQ ID NO: 1692009 - DNA, 15 bp, Homo sapiens
cttgtttgtttgttt

SEQ ID NO: 1692010 - DNA, 15 bp, Homo sapiens
ttgtttgttttttgt

SEQ ID NO: 1692011 - DNA, 15 bp, Homo sapiens
tgtttgttttttgtt

SEQ ID NO: 1692012 - DNA, 15 bp, Homo sapiens
gtttgttttttgttc

SEQ ID NO: 1692013 - DNA, 15 bp, Homo sapiens
tttgttttttgttct

SEQ ID NO: 1692014 - DNA, 15 bp, Homo sapiens
ttgttttttgttctt

SEQ ID NO: 1692015 - DNA, 15 bp, Homo sapiens
tgttttttgttcttt

SEQ ID NO: 1692016 - DNA, 15 bp, Homo sapiens
gttttttgttctttt

SEQ ID NO: 1692017 - DNA, 15 bp, Homo sapiens
ttttttgttcttttg

SEQ ID NO: 1692018 - DNA, 15 bp, Homo sapiens
tttttgttcttttgt

SEQ ID NO: 1692019 - DNA, 15 bp, Homo sapiens
ttttgttcttttgtt

SEQ ID NO: 1692020 - DNA, 15 bp, Homo sapiens
tttgttcttttgttt

SEQ ID NO: 1692021 - DNA, 15 bp, Homo sapiens
ttgttcttttgtttt

SEQ ID NO: 1692022 - DNA, 15 bp, Homo sapiens
tgttcttttgttttt

SEQ ID NO: 1692023 - DNA, 15 bp, Homo sapiens
gttcttttgtttttg

SEQ ID NO: 1692024 - DNA, 15 bp, Homo sapiens
ttcttttgtttttgt

SEQ ID NO: 1692025 - DNA, 15 bp, Homo sapiens
tcttttgtttttgtt

SEQ ID NO: 1692026 - DNA, 15 bp, Homo sapiens
cttttgtttttgttt

SEQ ID NO: 1692027 - DNA, 15 bp, Homo sapiens
ttgtttttgttttct

SEQ ID NO: 1692028 - DNA, 15 bp, Homo sapiens
tgtttttgttttctt

SEQ ID NO: 1692029 - DNA, 15 bp, Homo sapiens
gtttttgttttctta

SEQ ID NO: 1692030 - DNA, 15 bp, Homo sapiens
tttttgttttcttaa

SEQ ID NO: 1692031 - DNA, 15 bp, Homo sapiens
ttttgttttcttaat

SEQ ID NO: 1692032 - DNA, 15 bp, Homo sapiens
tttgttttcttaatg

SEQ ID NO: 1692033 - DNA, 15 bp, Homo sapiens
ttgttttcttaatga

SEQ ID NO: 1692034 - DNA, 15 bp, Homo sapiens
tgttttcttaatgag

SEQ ID NO: 1692035 - DNA, 15 bp, Homo sapiens
gttttcttaatgagt

SEQ ID NO: 1692036 - DNA, 15 bp, Homo sapiens
ttttcttaatgagtg

SEQ ID NO: 1692037 - DNA, 15 bp, Homo sapiens
tttcttaatgagtgt

SEQ ID NO: 1692038 - DNA, 15 bp, Homo sapiens
ttcttaatgagtgtg

SEQ ID NO: 1692039 - DNA, 15 bp, Homo sapiens
tcttaatgagtgtgc

SEQ ID NO: 1692040 - DNA, 15 bp, Homo sapiens
cttaatgagtgtgct

SEQ ID NO: 1692041 - DNA, 15 bp, Homo sapiens
ttaatgagtgtgctc

SEQ ID NO: 1692042 - DNA, 15 bp, Homo sapiens
taatgagtgtgctct

SEQ ID NO: 1692043 - DNA, 15 bp, Homo sapiens
aatgagtgtgctctc

SEQ ID NO: 1692044 - DNA, 15 bp, Homo sapiens
atgagtgtgctctct

SEQ ID NO: 1692045 - DNA, 15 bp, Homo sapiens
tgagtgtgctctcta

SEQ ID NO: 1692046 - DNA, 15 bp, Homo sapiens
gagtgtgctctctaa

SEQ ID NO: 1692047 - DNA, 15 bp, Homo sapiens
agtgtgctctctaat

SEQ ID NO: 1692048 - DNA, 15 bp, Homo sapiens
gtgtgctctctaata

SEQ ID NO: 1692049 - DNA, 15 bp, Homo sapiens
tgtgctctctaatat

SEQ ID NO: 1692050 - DNA, 15 bp, Homo sapiens
gtgctctctaatatg

SEQ ID NO: 1692051 - DNA, 15 bp, Homo sapiens
tgctctctaatatgc

SEQ ID NO: 1692052 - DNA, 15 bp, Homo sapiens
gctctctaatatgct

SEQ ID NO: 1692053 - DNA, 15 bp, Homo sapiens
ctctctaatatgctg

SEQ ID NO: 1692054 - DNA, 15 bp, Homo sapiens
tctctaatatgctgc

SEQ ID NO: 1692055 - DNA, 15 bp, Homo sapiens
ctctaatatgctgca

SEQ ID NO: 1692056 - DNA, 15 bp, Homo sapiens
tctaatatgctgcac

SEQ ID NO: 1692057 - DNA, 15 bp, Homo sapiens
ctaatatgctgcact

SEQ ID NO: 1692058 - DNA, 15 bp, Homo sapiens
taatatgctgcactc

SEQ ID NO: 1692059 - DNA, 15 bp, Homo sapiens
aatatgctgcactct

SEQ ID NO: 1692060 - DNA, 15 bp, Homo sapiens
atatgctgcactctg

SEQ ID NO: 1692061 - DNA, 15 bp, Homo sapiens
tatgctgcactctgc

SEQ ID NO: 1692062 - DNA, 15 bp, Homo sapiens
atgctgcactctgca

SEQ ID NO: 1692063 - DNA, 15 bp, Homo sapiens
tgctgcactctgcac

SEQ ID NO: 1692064 - DNA, 15 bp, Homo sapiens
gctgcactctgcact

SEQ ID NO: 1692065 - DNA, 15 bp, Homo sapiens
ctgcactctgcactc

SEQ ID NO: 1692066 - DNA, 15 bp, Homo sapiens
tgcactctgcactca

SEQ ID NO: 1692067 - DNA, 15 bp, Homo sapiens
gcactctgcactcaa

SEQ ID NO: 1692068 - DNA, 15 bp, Homo sapiens
cactctgcactcaag

SEQ ID NO: 1692069 - DNA, 15 bp, Homo sapiens
actctgcactcaagc

SEQ ID NO: 1692070 - DNA, 15 bp, Homo sapiens
ctctgcactcaagcc

SEQ ID NO: 1692071 - DNA, 15 bp, Homo sapiens
tctgcactcaagccc

SEQ ID NO: 1692072 - DNA, 15 bp, Homo sapiens
ctgcactcaagccct

SEQ ID NO: 1692073 - DNA, 15 bp, Homo sapiens
tgcactcaagccctc

SEQ ID NO: 1692074 - DNA, 15 bp, Homo sapiens
gcactcaagccctct

SEQ ID NO: 1692075 - DNA, 15 bp, Homo sapiens
cactcaagccctctt

SEQ ID NO: 1692076 - DNA, 15 bp, Homo sapiens
actcaagccctcttc

SEQ ID NO: 1692077 - DNA, 15 bp, Homo sapiens
ctcaagccctcttct

SEQ ID NO: 1692078 - DNA, 15 bp, Homo sapiens
tcaagccctcttcta

SEQ ID NO: 1692079 - DNA, 15 bp, Homo sapiens
caagccctcttctag

SEQ ID NO: 1692080 - DNA, 15 bp, Homo sapiens
aagccctcttctagc

SEQ ID NO: 1692081 - DNA, 15 bp, Homo sapiens
agccctcttctagct

SEQ ID NO: 1692082 - DNA, 15 bp, Homo sapiens
gccctcttctagctt

SEQ ID NO: 1692083 - DNA, 15 bp, Homo sapiens
ccctcttctagcttc

SEQ ID NO: 1692084 - DNA, 15 bp, Homo sapiens
cctcttctagcttct

SEQ ID NO: 1692085 - DNA, 15 bp, Homo sapiens
ctcttctagcttctg

SEQ ID NO: 1692086 - DNA, 15 bp, Homo sapiens
tcttctagcttctga

SEQ ID NO: 1692087 - DNA, 15 bp, Homo sapiens
cttctagcttctgag

SEQ ID NO: 1692088 - DNA, 15 bp, Homo sapiens
ttctagcttctgaga

SEQ ID NO: 1692089 - DNA, 15 bp, Homo sapiens
tctagcttctgagag

SEQ ID NO: 1692090 - DNA, 15 bp, Homo sapiens
ctagcttctgagagc

SEQ ID NO: 1692091 - DNA, 15 bp, Homo sapiens
tagcttctgagagct

SEQ ID NO: 1692092 - DNA, 15 bp, Homo sapiens
agcttctgagagctc

SEQ ID NO: 1692093 - DNA, 15 bp, Homo sapiens
gcttctgagagctca

SEQ ID NO: 1692094 - DNA, 15 bp, Homo sapiens
cttctgagagctcag

SEQ ID NO: 1692095 - DNA, 15 bp, Homo sapiens
ttctgagagctcagg

SEQ ID NO: 1692096 - DNA, 15 bp, Homo sapiens
tctgagagctcaggc

SEQ ID NO: 1692097 - DNA, 15 bp, Homo sapiens
ctgagagctcaggct

SEQ ID NO: 1692098 - DNA, 15 bp, Homo sapiens
tgagagctcaggcta

SEQ ID NO: 1692099 - DNA, 15 bp, Homo sapiens
gagagctcaggctac

SEQ ID NO: 1692100 - DNA, 15 bp, Homo sapiens
agagctcaggctaca

SEQ ID NO: 1692101 - DNA, 15 bp, Homo sapiens
gagctcaggctacaa

SEQ ID NO: 1692102 - DNA, 15 bp, Homo sapiens
agctcaggctacaat

SEQ ID NO: 1692103 - DNA, 15 bp, Homo sapiens
gctcaggctacaata

SEQ ID NO: 1692104 - DNA, 15 bp, Homo sapiens
ctcaggctacaatag

SEQ ID NO: 1692105 - DNA, 15 bp, Homo sapiens
tcaggctacaatagg

SEQ ID NO: 1692106 - DNA, 15 bp, Homo sapiens
caggctacaatagga

SEQ ID NO: 1692107 - DNA, 15 bp, Homo sapiens
aggctacaataggaa

SEQ ID NO: 1692108 - DNA, 15 bp, Homo sapiens
ggctacaataggaag

SEQ ID NO: 1692109 - DNA, 15 bp, Homo sapiens
gctacaataggaaga

SEQ ID NO: 1692110 - DNA, 15 bp, Homo sapiens
ctacaataggaagat

SEQ ID NO: 1692111 - DNA, 15 bp, Homo sapiens
tacaataggaagata

SEQ ID NO: 1692112 - DNA, 15 bp, Homo sapiens
acaataggaagatac

SEQ ID NO: 1692113 - DNA, 15 bp, Homo sapiens
caataggaagatact

SEQ ID NO: 1692114 - DNA, 15 bp, Homo sapiens
aataggaagatactc

SEQ ID NO: 1692115 - DNA, 15 bp, Homo sapiens
ataggaagatactct

SEQ ID NO: 1692116 - DNA, 15 bp, Homo sapiens
taggaagatactctg

SEQ ID NO: 1692117 - DNA, 15 bp, Homo sapiens
aggaagatactctgt

SEQ ID NO: 1692118 - DNA, 15 bp, Homo sapiens
ggaagatactctgtt

SEQ ID NO: 1692119 - DNA, 15 bp, Homo sapiens
gaagatactctgtta

SEQ ID NO: 1692120 - DNA, 15 bp, Homo sapiens
aagatactctgttag

SEQ ID NO: 1692121 - DNA, 15 bp, Homo sapiens
agatactctgttagc

SEQ ID NO: 1692122 - DNA, 15 bp, Homo sapiens
gatactctgttagcc

SEQ ID NO: 1692123 - DNA, 15 bp, Homo sapiens
atactctgttagcct

SEQ ID NO: 1692124 - DNA, 15 bp, Homo sapiens
tactctgttagcctt

SEQ ID NO: 1692125 - DNA, 15 bp, Homo sapiens
actctgttagccttg

SEQ ID NO: 1692126 - DNA, 15 bp, Homo sapiens
ctctgttagccttga

SEQ ID NO: 1692127 - DNA, 15 bp, Homo sapiens
tctgttagccttgaa

SEQ ID NO: 1692128 - DNA, 15 bp, Homo sapiens
ctgttagccttgaag

SEQ ID NO: 1692129 - DNA, 15 bp, Homo sapiens
tgttagccttgaagc

SEQ ID NO: 1692130 - DNA, 15 bp, Homo sapiens
gttagccttgaagct

SEQ ID NO: 1692131 - DNA, 15 bp, Homo sapiens
ttagccttgaagcta

SEQ ID NO: 1692132 - DNA, 15 bp, Homo sapiens
tagccttgaagctaa

SEQ ID NO: 1692133 - DNA, 15 bp, Homo sapiens
agccttgaagctaat

SEQ ID NO: 1692134 - DNA, 15 bp, Homo sapiens
gccttgaagctaatc

SEQ ID NO: 1692135 - DNA, 15 bp, Homo sapiens
ccttgaagctaatct

SEQ ID NO: 1692136 - DNA, 15 bp, Homo sapiens
cttgaagctaatctt

SEQ ID NO: 1692137 - DNA, 15 bp, Homo sapiens
ttgaagctaatcttt

SEQ ID NO: 1692138 - DNA, 15 bp, Homo sapiens
tgaagctaatcttta

SEQ ID NO: 1692139 - DNA, 15 bp, Homo sapiens
gaagctaatctttat

SEQ ID NO: 1692140 - DNA, 15 bp, Homo sapiens
agctaatctttattt

SEQ ID NO: 1692141 - DNA, 15 bp, Homo sapiens
gctaatctttatttt

SEQ ID NO: 1692142 - DNA, 15 bp, Homo sapiens
ctaatctttattttt

SEQ ID NO: 1692143 - DNA, 15 bp, Homo sapiens
taatctttatttttc

SEQ ID NO: 1692144 - DNA, 15 bp, Homo sapiens
aatctttatttttct

SEQ ID NO: 1692145 - DNA, 15 bp, Homo sapiens
atctttatttttctt

SEQ ID NO: 1692146 - DNA, 15 bp, Homo sapiens
tctttatttttcttt

SEQ ID NO: 1692147 - DNA, 15 bp, Homo sapiens
ctttatttttcttta

SEQ ID NO: 1692148 - DNA, 15 bp, Homo sapiens
tttatttttctttat

SEQ ID NO: 1692149 - DNA, 15 bp, Homo sapiens
ttatttttctttatt

SEQ ID NO: 1692150 - DNA, 15 bp, Homo sapiens
tatttttctttattt

SEQ ID NO: 1692151 - DNA, 15 bp, Homo sapiens
tttttctttatttta

SEQ ID NO: 1692152 - DNA, 15 bp, Homo sapiens
ttttctttattttat

SEQ ID NO: 1692153 - DNA, 15 bp, Homo sapiens
tttctttattttatt

SEQ ID NO: 1692154 - DNA, 15 bp, Homo sapiens
ttctttattttattt

SEQ ID NO: 1692155 - DNA, 15 bp, Homo sapiens
ctttattttatttta

SEQ ID NO: 1692156 - DNA, 15 bp, Homo sapiens
ttattttattttttg

SEQ ID NO: 1692157 - DNA, 15 bp, Homo sapiens
attttattttttgag

SEQ ID NO: 1692158 - DNA, 15 bp, Homo sapiens
ttttattttttgaga

SEQ ID NO: 1692159 - DNA, 15 bp, Homo sapiens
attttttgagacaga

SEQ ID NO: 1692160 - DNA, 15 bp, Homo sapiens
tggcgcaatctcggc

SEQ ID NO: 1692161 - DNA, 15 bp, Homo sapiens
ggcgcaatctcggct

SEQ ID NO: 1692162 - DNA, 15 bp, Homo sapiens
gcgcaatctcggctc

SEQ ID NO: 1692163 - DNA, 15 bp, Homo sapiens
cgcaatctcggctca

SEQ ID NO: 1692164 - DNA, 15 bp, Homo sapiens
tcaagcaattctgcc

SEQ ID NO: 1692165 - DNA, 15 bp, Homo sapiens
caagcaattctgcct

SEQ ID NO: 1692166 - DNA, 15 bp, Homo sapiens
aagcaattctgcctc

SEQ ID NO: 1692167 - DNA, 15 bp, Homo sapiens
agcaattctgcctca

SEQ ID NO: 1692168 - DNA, 15 bp, Homo sapiens
gcaattctgcctcag

SEQ ID NO: 1692169 - DNA, 15 bp, Homo sapiens
caattctgcctcaga

SEQ ID NO: 1692170 - DNA, 15 bp, Homo sapiens
aattctgcctcagac

SEQ ID NO: 1692171 - DNA, 15 bp, Homo sapiens
attctgcctcagact

SEQ ID NO: 1692172 - DNA, 15 bp, Homo sapiens
ttctgcctcagactc

SEQ ID NO: 1692173 - DNA, 15 bp, Homo sapiens
tctgcctcagactcc

SEQ ID NO: 1692174 - DNA, 15 bp, Homo sapiens
ggcacacgccaccat

SEQ ID NO: 1692175 - DNA, 15 bp, Homo sapiens
gcacacgccaccatg

SEQ ID NO: 1692176 - DNA, 15 bp, Homo sapiens
cacacgccaccatgc

SEQ ID NO: 1692177 - DNA, 15 bp, Homo sapiens
acacgccaccatgcc

SEQ ID NO: 1692178 - DNA, 15 bp, Homo sapiens
tattttcagtagagg

SEQ ID NO: 1692179 - DNA, 15 bp, Homo sapiens
attttcagtagaggc

SEQ ID NO: 1692180 - DNA, 15 bp, Homo sapiens
ttttcagtagaggca

SEQ ID NO: 1692181 - DNA, 15 bp, Homo sapiens
tttcagtagaggcag

SEQ ID NO: 1692182 - DNA, 15 bp, Homo sapiens
ttcagtagaggcagg

SEQ ID NO: 1692183 - DNA, 15 bp, Homo sapiens
tcagtagaggcaggg

SEQ ID NO: 1692184 - DNA, 15 bp, Homo sapiens
cagtagaggcagggt

SEQ ID NO: 1692185 - DNA, 15 bp, Homo sapiens
agtagaggcagggtt

SEQ ID NO: 1692186 - DNA, 15 bp, Homo sapiens
gtagaggcagggttt

SEQ ID NO: 1692187 - DNA, 15 bp, Homo sapiens
tagaggcagggtttc

SEQ ID NO: 1692188 - DNA, 15 bp, Homo sapiens
gaggcagggtttcac

SEQ ID NO: 1692189 - DNA, 15 bp, Homo sapiens
aggcagggtttcacc

SEQ ID NO: 1692190 - DNA, 15 bp, Homo sapiens
ggcagggtttcaccg

SEQ ID NO: 1692191 - DNA, 15 bp, Homo sapiens
gcagggtttcaccgt

SEQ ID NO: 1692192 - DNA, 15 bp, Homo sapiens
ggtttcaccgtgttg

SEQ ID NO: 1692193 - DNA, 15 bp, Homo sapiens
gtttcaccgtgttgg

SEQ ID NO: 1692194 - DNA, 15 bp, Homo sapiens
tttcaccgtgttggt

SEQ ID NO: 1692195 - DNA, 15 bp, Homo sapiens
ttcaccgtgttggtc

SEQ ID NO: 1692196 - DNA, 15 bp, Homo sapiens
tcaccgtgttggtca

SEQ ID NO: 1692197 - DNA, 15 bp, Homo sapiens
caccgtgttggtcag

SEQ ID NO: 1692198 - DNA, 15 bp, Homo sapiens
accgtgttggtcagg

SEQ ID NO: 1692199 - DNA, 15 bp, Homo sapiens
ctccaactcctgatt

SEQ ID NO: 1692200 - DNA, 15 bp, Homo sapiens
tccaactcctgattt

SEQ ID NO: 1692201 - DNA, 15 bp, Homo sapiens
ccaactcctgatttc

SEQ ID NO: 1692202 - DNA, 15 bp, Homo sapiens
caactcctgatttcg

SEQ ID NO: 1692203 - DNA, 15 bp, Homo sapiens
aactcctgatttcgt

SEQ ID NO: 1692204 - DNA, 15 bp, Homo sapiens
actcctgatttcgtg

SEQ ID NO: 1692205 - DNA, 15 bp, Homo sapiens
ctcctgatttcgtga

SEQ ID NO: 1692206 - DNA, 15 bp, Homo sapiens
tcctgatttcgtgat

SEQ ID NO: 1692207 - DNA, 15 bp, Homo sapiens
cctgatttcgtgatc

SEQ ID NO: 1692208 - DNA, 15 bp, Homo sapiens
ctgatttcgtgatct

SEQ ID NO: 1692209 - DNA, 15 bp, Homo sapiens
tgatttcgtgatctg

SEQ ID NO: 1692210 - DNA, 15 bp, Homo sapiens
gatttcgtgatctgc

SEQ ID NO: 1692211 - DNA, 15 bp, Homo sapiens
atttcgtgatctgcc

SEQ ID NO: 1692212 - DNA, 15 bp, Homo sapiens
tttcgtgatctgcct

SEQ ID NO: 1692213 - DNA, 15 bp, Homo sapiens
ttcgtgatctgcctg

SEQ ID NO: 1692214 - DNA, 15 bp, Homo sapiens
gatctgcctgcctca

SEQ ID NO: 1692215 - DNA, 15 bp, Homo sapiens
agtgctgggattgca

SEQ ID NO: 1692216 - DNA, 15 bp, Homo sapiens
gctgggattgcagga

SEQ ID NO: 1692217 - DNA, 15 bp, Homo sapiens
ctgggattgcaggaa

SEQ ID NO: 1692218 - DNA, 15 bp, Homo sapiens
tgggattgcaggaat

SEQ ID NO: 1692219 - DNA, 15 bp, Homo sapiens
gggattgcaggaatg

SEQ ID NO: 1692220 - DNA, 15 bp, Homo sapiens
ggattgcaggaatga

SEQ ID NO: 1692221 - DNA, 15 bp, Homo sapiens
gattgcaggaatgag

SEQ ID NO: 1692222 - DNA, 15 bp, Homo sapiens
attgcaggaatgagc

SEQ ID NO: 1692223 - DNA, 15 bp, Homo sapiens
ttgcaggaatgagcc

SEQ ID NO: 1692224 - DNA, 15 bp, Homo sapiens
tgcaggaatgagcca

SEQ ID NO: 1692225 - DNA, 15 bp, Homo sapiens
gcaggaatgagccac

SEQ ID NO: 1692226 - DNA, 15 bp, Homo sapiens
ggaatgagccaccat

SEQ ID NO: 1692227 - DNA, 15 bp, Homo sapiens
gaatgagccaccatg

SEQ ID NO: 1692228 - DNA, 15 bp, Homo sapiens
aatgagccaccatgc

SEQ ID NO: 1692229 - DNA, 15 bp, Homo sapiens
caccatgcccagctt

SEQ ID NO: 1692230 - DNA, 15 bp, Homo sapiens
accatgcccagcttt

SEQ ID NO: 1692231 - DNA, 15 bp, Homo sapiens
ccatgcccagctttt

SEQ ID NO: 1692232 - DNA, 15 bp, Homo sapiens
catgcccagcttttt

SEQ ID NO: 1692233 - DNA, 15 bp, Homo sapiens
atgcccagctttttt

SEQ ID NO: 1692234 - DNA, 15 bp, Homo sapiens
tgcccagcttttttt

SEQ ID NO: 1692235 - DNA, 15 bp, Homo sapiens
gcccagctttttttt

SEQ ID NO: 1692236 - DNA, 15 bp, Homo sapiens
cccagcttttttttt

SEQ ID NO: 1692237 - DNA, 15 bp, Homo sapiens
ccagctttttttttt

SEQ ID NO: 1692238 - DNA, 15 bp, Homo sapiens
cagcttttttttttt

SEQ ID NO: 1692239 - DNA, 15 bp, Homo sapiens
ttttttgagatggac

SEQ ID NO: 1692240 - DNA, 15 bp, Homo sapiens
tttttgagatggact

SEQ ID NO: 1692241 - DNA, 15 bp, Homo sapiens
ttttgagatggactc

SEQ ID NO: 1692242 - DNA, 15 bp, Homo sapiens
tttgagatggactct

SEQ ID NO: 1692243 - DNA, 15 bp, Homo sapiens
ttgagatggactctt

SEQ ID NO: 1692244 - DNA, 15 bp, Homo sapiens
tgagatggactcttt

SEQ ID NO: 1692245 - DNA, 15 bp, Homo sapiens
gagatggactctttt

SEQ ID NO: 1692246 - DNA, 15 bp, Homo sapiens
agatggactcttttt

SEQ ID NO: 1692247 - DNA, 15 bp, Homo sapiens
gatggactctttttc

SEQ ID NO: 1692248 - DNA, 15 bp, Homo sapiens
atggactctttttct

SEQ ID NO: 1692249 - DNA, 15 bp, Homo sapiens
tggactctttttctg

SEQ ID NO: 1692250 - DNA, 15 bp, Homo sapiens
ggactctttttctgt

SEQ ID NO: 1692251 - DNA, 15 bp, Homo sapiens
gactctttttctgtc

SEQ ID NO: 1692252 - DNA, 15 bp, Homo sapiens
actctttttctgtct

SEQ ID NO: 1692253 - DNA, 15 bp, Homo sapiens
ctctttttctgtctc

SEQ ID NO: 1692254 - DNA, 15 bp, Homo sapiens
tctttttctgtctct

SEQ ID NO: 1692255 - DNA, 15 bp, Homo sapiens
ctttttctgtctctc

SEQ ID NO: 1692256 - DNA, 15 bp, Homo sapiens
tttttctgtctctca

SEQ ID NO: 1692257 - DNA, 15 bp, Homo sapiens
ttttctgtctctcag

SEQ ID NO: 1692258 - DNA, 15 bp, Homo sapiens
tttctgtctctcagg

SEQ ID NO: 1692259 - DNA, 15 bp, Homo sapiens
ttctgtctctcaggc

SEQ ID NO: 1692260 - DNA, 15 bp, Homo sapiens
tctgtctctcaggct

SEQ ID NO: 1692261 - DNA, 15 bp, Homo sapiens
ctgtctctcaggctg

SEQ ID NO: 1692262 - DNA, 15 bp, Homo sapiens
tgtctctcaggctgg

SEQ ID NO: 1692263 - DNA, 15 bp, Homo sapiens
gtctctcaggctgga

SEQ ID NO: 1692264 - DNA, 15 bp, Homo sapiens
tctctcaggctggag

SEQ ID NO: 1692265 - DNA, 15 bp, Homo sapiens
ctctcaggctggagt

SEQ ID NO: 1692266 - DNA, 15 bp, Homo sapiens
tctcaggctggagtg

SEQ ID NO: 1692267 - DNA, 15 bp, Homo sapiens
ctcaggctggagtgt

SEQ ID NO: 1692268 - DNA, 15 bp, Homo sapiens
tcaggctggagtgta

SEQ ID NO: 1692269 - DNA, 15 bp, Homo sapiens
ggagtgtagtggctc

SEQ ID NO: 1692270 - DNA, 15 bp, Homo sapiens
gagtgtagtggctca

SEQ ID NO: 1692271 - DNA, 15 bp, Homo sapiens
agtgtagtggctcac

SEQ ID NO: 1692272 - DNA, 15 bp, Homo sapiens
gtgtagtggctcact

SEQ ID NO: 1692273 - DNA, 15 bp, Homo sapiens
tgtagtggctcactg

SEQ ID NO: 1692274 - DNA, 15 bp, Homo sapiens
gtagtggctcactgc

SEQ ID NO: 1692275 - DNA, 15 bp, Homo sapiens
tagtggctcactgca

SEQ ID NO: 1692276 - DNA, 15 bp, Homo sapiens
agtggctcactgcaa

SEQ ID NO: 1692277 - DNA, 15 bp, Homo sapiens
gtggctcactgcaac

SEQ ID NO: 1692278 - DNA, 15 bp, Homo sapiens
gttcaagcaattcta

SEQ ID NO: 1692279 - DNA, 15 bp, Homo sapiens
ttcaagcaattctac

SEQ ID NO: 1692280 - DNA, 15 bp, Homo sapiens
tcaagcaattctacc

SEQ ID NO: 1692281 - DNA, 15 bp, Homo sapiens
caagcaattctacct

SEQ ID NO: 1692282 - DNA, 15 bp, Homo sapiens
aagcaattctacctc

SEQ ID NO: 1692283 - DNA, 15 bp, Homo sapiens
agcaattctacctca

SEQ ID NO: 1692284 - DNA, 15 bp, Homo sapiens
gcaattctacctcag

SEQ ID NO: 1692285 - DNA, 15 bp, Homo sapiens
caattctacctcagc

SEQ ID NO: 1692286 - DNA, 15 bp, Homo sapiens
aattctacctcagcc

SEQ ID NO: 1692287 - DNA, 15 bp, Homo sapiens
attctacctcagcct

SEQ ID NO: 1692288 - DNA, 15 bp, Homo sapiens
tacctcagcctcccg

SEQ ID NO: 1692289 - DNA, 15 bp, Homo sapiens
ggattacaggtatgt

SEQ ID NO: 1692290 - DNA, 15 bp, Homo sapiens
gattacaggtatgtg

SEQ ID NO: 1692291 - DNA, 15 bp, Homo sapiens
attacaggtatgtgc

SEQ ID NO: 1692292 - DNA, 15 bp, Homo sapiens
ttacaggtatgtgcc

SEQ ID NO: 1692293 - DNA, 15 bp, Homo sapiens
tacaggtatgtgcca

SEQ ID NO: 1692294 - DNA, 15 bp, Homo sapiens
acaggtatgtgccac

SEQ ID NO: 1692295 - DNA, 15 bp, Homo sapiens
caggtatgtgccacc

SEQ ID NO: 1692296 - DNA, 15 bp, Homo sapiens
aggtatgtgccacca

SEQ ID NO: 1692297 - DNA, 15 bp, Homo sapiens
ggtatgtgccaccac

SEQ ID NO: 1692298 - DNA, 15 bp, Homo sapiens
gtatgtgccaccaca

SEQ ID NO: 1692299 - DNA, 15 bp, Homo sapiens
tatgtgccaccacac

SEQ ID NO: 1692300 - DNA, 15 bp, Homo sapiens
agtagagatggggtc

SEQ ID NO: 1692301 - DNA, 15 bp, Homo sapiens
agagatggggtctca

SEQ ID NO: 1692302 - DNA, 15 bp, Homo sapiens
gagatggggtctcaa

SEQ ID NO: 1692303 - DNA, 15 bp, Homo sapiens
agatggggtctcaaa

SEQ ID NO: 1692304 - DNA, 15 bp, Homo sapiens
gatggggtctcaaaa

SEQ ID NO: 1692305 - DNA, 15 bp, Homo sapiens
atggggtctcaaaaa

SEQ ID NO: 1692306 - DNA, 15 bp, Homo sapiens
tggggtctcaaaaaa

SEQ ID NO: 1692307 - DNA, 15 bp, Homo sapiens
ggggtctcaaaaaaa

SEQ ID NO: 1692308 - DNA, 15 bp, Homo sapiens
gggtctcaaaaaaaa

SEQ ID NO: 1692309 - DNA, 15 bp, Homo sapiens
ggtctcaaaaaaaaa

SEQ ID NO: 1692310 - DNA, 15 bp, Homo sapiens
ctcaaaaaaaaaaag

SEQ ID NO: 1692311 - DNA, 15 bp, Homo sapiens
tcaaaaaaaaaaagg

SEQ ID NO: 1692312 - DNA, 15 bp, Homo sapiens
caaaaaaaaaaaggg

SEQ ID NO: 1692313 - DNA, 15 bp, Homo sapiens
aaaaaaaaaagggag

SEQ ID NO: 1692314 - DNA, 15 bp, Homo sapiens
aaaaaaaaagggaga

SEQ ID NO: 1692315 - DNA, 15 bp, Homo sapiens
aaaaaaaagggagaa

SEQ ID NO: 1692316 - DNA, 15 bp, Homo sapiens
aaaaaaagggagaaa

SEQ ID NO: 1692317 - DNA, 15 bp, Homo sapiens
aaaaaagggagaaag

SEQ ID NO: 1692318 - DNA, 15 bp, Homo sapiens
aaaaagggagaaagg

SEQ ID NO: 1692319 - DNA, 15 bp, Homo sapiens
aaaagggagaaagga

SEQ ID NO: 1692320 - DNA, 15 bp, Homo sapiens
aaagggagaaaggat

SEQ ID NO: 1692321 - DNA, 15 bp, Homo sapiens
aagggagaaaggatg

SEQ ID NO: 1692322 - DNA, 15 bp, Homo sapiens
agggagaaaggatgg

SEQ ID NO: 1692323 - DNA, 15 bp, Homo sapiens
gggagaaaggatggt

SEQ ID NO: 1692324 - DNA, 15 bp, Homo sapiens
ggagaaaggatggta

SEQ ID NO: 1692325 - DNA, 15 bp, Homo sapiens
gagaaaggatggtag

SEQ ID NO: 1692326 - DNA, 15 bp, Homo sapiens
agaaaggatggtagc

SEQ ID NO: 1692327 - DNA, 15 bp, Homo sapiens
gaaaggatggtagca

SEQ ID NO: 1692328 - DNA, 15 bp, Homo sapiens
aaaggatggtagcat

SEQ ID NO: 1692329 - DNA, 15 bp, Homo sapiens
aaggatggtagcata

SEQ ID NO: 1692330 - DNA, 15 bp, Homo sapiens
aggatggtagcataa

SEQ ID NO: 1692331 - DNA, 15 bp, Homo sapiens
ggatggtagcataag

SEQ ID NO: 1692332 - DNA, 15 bp, Homo sapiens
gatggtagcataaga

SEQ ID NO: 1692333 - DNA, 15 bp, Homo sapiens
atggtagcataagac

SEQ ID NO: 1692334 - DNA, 15 bp, Homo sapiens
tggtagcataagacg

SEQ ID NO: 1692335 - DNA, 15 bp, Homo sapiens
ggtagcataagacgg

SEQ ID NO: 1692336 - DNA, 15 bp, Homo sapiens
gtagcataagacggt

SEQ ID NO: 1692337 - DNA, 15 bp, Homo sapiens
tagcataagacggta

SEQ ID NO: 1692338 - DNA, 15 bp, Homo sapiens
agcataagacggtat

SEQ ID NO: 1692339 - DNA, 15 bp, Homo sapiens
gcataagacggtata

SEQ ID NO: 1692340 - DNA, 15 bp, Homo sapiens
cataagacggtatac

SEQ ID NO: 1692341 - DNA, 15 bp, Homo sapiens
ataagacggtatact

SEQ ID NO: 1692342 - DNA, 15 bp, Homo sapiens
taagacggtatacta

SEQ ID NO: 1692343 - DNA, 15 bp, Homo sapiens
aagacggtatactag

SEQ ID NO: 1692344 - DNA, 15 bp, Homo sapiens
agacggtatactaga

SEQ ID NO: 1692345 - DNA, 15 bp, Homo sapiens
gacggtatactagag

SEQ ID NO: 1692346 - DNA, 15 bp, Homo sapiens
acggtatactagaga

SEQ ID NO: 1692347 - DNA, 15 bp, Homo sapiens
cggtatactagagaa

SEQ ID NO: 1692348 - DNA, 15 bp, Homo sapiens
ggtatactagagaaa

SEQ ID NO: 1692349 - DNA, 15 bp, Homo sapiens
gtatactagagaaac

SEQ ID NO: 1692350 - DNA, 15 bp, Homo sapiens
tatactagagaaaca

SEQ ID NO: 1692351 - DNA, 15 bp, Homo sapiens
atactagagaaacac

SEQ ID NO: 1692352 - DNA, 15 bp, Homo sapiens
tactagagaaacact

SEQ ID NO: 1692353 - DNA, 15 bp, Homo sapiens
actagagaaacacta

SEQ ID NO: 1692354 - DNA, 15 bp, Homo sapiens
ctagagaaacactaa

SEQ ID NO: 1692355 - DNA, 15 bp, Homo sapiens
tagagaaacactaaa

SEQ ID NO: 1692356 - DNA, 15 bp, Homo sapiens
agagaaacactaaaa

SEQ ID NO: 1692357 - DNA, 15 bp, Homo sapiens
gagaaacactaaaat

SEQ ID NO: 1692358 - DNA, 15 bp, Homo sapiens
agaaacactaaaata

SEQ ID NO: 1692359 - DNA, 15 bp, Homo sapiens
gaaacactaaaatag

SEQ ID NO: 1692360 - DNA, 15 bp, Homo sapiens
aaacactaaaatagg

SEQ ID NO: 1692361 - DNA, 15 bp, Homo sapiens
aacactaaaatagga

SEQ ID NO: 1692362 - DNA, 15 bp, Homo sapiens
acactaaaataggat

SEQ ID NO: 1692363 - DNA, 15 bp, Homo sapiens
cactaaaataggata

SEQ ID NO: 1692364 - DNA, 15 bp, Homo sapiens
actaaaataggatag

SEQ ID NO: 1692365 - DNA, 15 bp, Homo sapiens
ctaaaataggatagg

SEQ ID NO: 1692366 - DNA, 15 bp, Homo sapiens
taaaataggataggc

SEQ ID NO: 1692367 - DNA, 15 bp, Homo sapiens
aaaataggataggca

SEQ ID NO: 1692368 - DNA, 15 bp, Homo sapiens
aaataggataggcaa

SEQ ID NO: 1692369 - DNA, 15 bp, Homo sapiens
aataggataggcaaa

SEQ ID NO: 1692370 - DNA, 15 bp, Homo sapiens
ataggataggcaaaa

SEQ ID NO: 1692371 - DNA, 15 bp, Homo sapiens
taggataggcaaaat

SEQ ID NO: 1692372 - DNA, 15 bp, Homo sapiens
aggataggcaaaata

SEQ ID NO: 1692373 - DNA, 15 bp, Homo sapiens
ggataggcaaaatat

SEQ ID NO: 1692374 - DNA, 15 bp, Homo sapiens
gataggcaaaatatg

SEQ ID NO: 1692375 - DNA, 15 bp, Homo sapiens
ataggcaaaatatga

SEQ ID NO: 1692376 - DNA, 15 bp, Homo sapiens
taggcaaaatatgag

SEQ ID NO: 1692377 - DNA, 15 bp, Homo sapiens
aggcaaaatatgagc

SEQ ID NO: 1692378 - DNA, 15 bp, Homo sapiens
ggcaaaatatgagcc

SEQ ID NO: 1692379 - DNA, 15 bp, Homo sapiens
gcaaaatatgagcct

SEQ ID NO: 1692380 - DNA, 15 bp, Homo sapiens
caaaatatgagcctt

SEQ ID NO: 1692381 - DNA, 15 bp, Homo sapiens
aaaatatgagccttt

SEQ ID NO: 1692382 - DNA, 15 bp, Homo sapiens
aaatatgagccttta

SEQ ID NO: 1692383 - DNA, 15 bp, Homo sapiens
aatatgagcctttaa

SEQ ID NO: 1692384 - DNA, 15 bp, Homo sapiens
atatgagcctttaaa

SEQ ID NO: 1692385 - DNA, 15 bp, Homo sapiens
tatgagcctttaaaa

SEQ ID NO: 1692386 - DNA, 15 bp, Homo sapiens
atgagcctttaaaag

SEQ ID NO: 1692387 - DNA, 15 bp, Homo sapiens
tgagcctttaaaagc

SEQ ID NO: 1692388 - DNA, 15 bp, Homo sapiens
gagcctttaaaagct

SEQ ID NO: 1692389 - DNA, 15 bp, Homo sapiens
agcctttaaaagctt

SEQ ID NO: 1692390 - DNA, 15 bp, Homo sapiens
gcctttaaaagcttt

SEQ ID NO: 1692391 - DNA, 15 bp, Homo sapiens
cctttaaaagcttta

SEQ ID NO: 1692392 - DNA, 15 bp, Homo sapiens
ctttaaaagctttaa

SEQ ID NO: 1692393 - DNA, 15 bp, Homo sapiens
tttaaaagctttaag

SEQ ID NO: 1692394 - DNA, 15 bp, Homo sapiens
ttaaaagctttaagg

SEQ ID NO: 1692395 - DNA, 15 bp, Homo sapiens
taaaagctttaagga

SEQ ID NO: 1692396 - DNA, 15 bp, Homo sapiens
aaaagctttaaggag

SEQ ID NO: 1692397 - DNA, 15 bp, Homo sapiens
aaagctttaaggagt

SEQ ID NO: 1692398 - DNA, 15 bp, Homo sapiens
aagctttaaggagta

SEQ ID NO: 1692399 - DNA, 15 bp, Homo sapiens
agctttaaggagtaa

SEQ ID NO: 1692400 - DNA, 15 bp, Homo sapiens
gctttaaggagtaac

SEQ ID NO: 1692401 - DNA, 15 bp, Homo sapiens
ctttaaggagtaaca

SEQ ID NO: 1692402 - DNA, 15 bp, Homo sapiens
tttaaggagtaacat

SEQ ID NO: 1692403 - DNA, 15 bp, Homo sapiens
ttaaggagtaacata

SEQ ID NO: 1692404 - DNA, 15 bp, Homo sapiens
taaggagtaacatac

SEQ ID NO: 1692405 - DNA, 15 bp, Homo sapiens
aaggagtaacatact

SEQ ID NO: 1692406 - DNA, 15 bp, Homo sapiens
aggagtaacatactt

SEQ ID NO: 1692407 - DNA, 15 bp, Homo sapiens
ggagtaacatactta

SEQ ID NO: 1692408 - DNA, 15 bp, Homo sapiens
gagtaacatacttag

SEQ ID NO: 1692409 - DNA, 15 bp, Homo sapiens
agtaacatacttaga

SEQ ID NO: 1692410 - DNA, 15 bp, Homo sapiens
gtaacatacttagat

SEQ ID NO: 1692411 - DNA, 15 bp, Homo sapiens
taacatacttagatt

SEQ ID NO: 1692412 - DNA, 15 bp, Homo sapiens
aacatacttagattt

SEQ ID NO: 1692413 - DNA, 15 bp, Homo sapiens
acatacttagatttg

SEQ ID NO: 1692414 - DNA, 15 bp, Homo sapiens
catacttagatttgc

SEQ ID NO: 1692415 - DNA, 15 bp, Homo sapiens
atacttagatttgca

SEQ ID NO: 1692416 - DNA, 15 bp, Homo sapiens
tacttagatttgcat

SEQ ID NO: 1692417 - DNA, 15 bp, Homo sapiens
acttagatttgcatt

SEQ ID NO: 1692418 - DNA, 15 bp, Homo sapiens
cttagatttgcattt

SEQ ID NO: 1692419 - DNA, 15 bp, Homo sapiens
ttagatttgcatttt

SEQ ID NO: 1692420 - DNA, 15 bp, Homo sapiens
tagatttgcatttta

SEQ ID NO: 1692421 - DNA, 15 bp, Homo sapiens
agatttgcattttag

SEQ ID NO: 1692422 - DNA, 15 bp, Homo sapiens
gatttgcattttaga

SEQ ID NO: 1692423 - DNA, 15 bp, Homo sapiens
atttgcattttagat

SEQ ID NO: 1692424 - DNA, 15 bp, Homo sapiens
tttgcattttagatt

SEQ ID NO: 1692425 - DNA, 15 bp, Homo sapiens
ttgcattttagattg

SEQ ID NO: 1692426 - DNA, 15 bp, Homo sapiens
tgcattttagattgt

SEQ ID NO: 1692427 - DNA, 15 bp, Homo sapiens
gcattttagattgtt

SEQ ID NO: 1692428 - DNA, 15 bp, Homo sapiens
cattttagattgttc

SEQ ID NO: 1692429 - DNA, 15 bp, Homo sapiens
attttagattgttct

SEQ ID NO: 1692430 - DNA, 15 bp, Homo sapiens
ttttagattgttctc

SEQ ID NO: 1692431 - DNA, 15 bp, Homo sapiens
tttagattgttctcc

SEQ ID NO: 1692432 - DNA, 15 bp, Homo sapiens
ttagattgttctccc

SEQ ID NO: 1692433 - DNA, 15 bp, Homo sapiens
tagattgttctccct

SEQ ID NO: 1692434 - DNA, 15 bp, Homo sapiens
agattgttctccctg

SEQ ID NO: 1692435 - DNA, 15 bp, Homo sapiens
gattgttctccctgt

SEQ ID NO: 1692436 - DNA, 15 bp, Homo sapiens
attgttctccctgta

SEQ ID NO: 1692437 - DNA, 15 bp, Homo sapiens
ttgttctccctgtac

SEQ ID NO: 1692438 - DNA, 15 bp, Homo sapiens
tgttctccctgtact

SEQ ID NO: 1692439 - DNA, 15 bp, Homo sapiens
gttctccctgtacta

SEQ ID NO: 1692440 - DNA, 15 bp, Homo sapiens
ttctccctgtactac

SEQ ID NO: 1692441 - DNA, 15 bp, Homo sapiens
tctccctgtactacg

SEQ ID NO: 1692442 - DNA, 15 bp, Homo sapiens
ctccctgtactacgg

SEQ ID NO: 1692443 - DNA, 15 bp, Homo sapiens
tccctgtactacggg

SEQ ID NO: 1692444 - DNA, 15 bp, Homo sapiens
ccctgtactacggga

SEQ ID NO: 1692445 - DNA, 15 bp, Homo sapiens
cctgtactacgggaa

SEQ ID NO: 1692446 - DNA, 15 bp, Homo sapiens
ctgtactacgggaag

SEQ ID NO: 1692447 - DNA, 15 bp, Homo sapiens
tgtactacgggaagg

SEQ ID NO: 1692448 - DNA, 15 bp, Homo sapiens
gtactacgggaaggt

SEQ ID NO: 1692449 - DNA, 15 bp, Homo sapiens
tactacgggaaggta

SEQ ID NO: 1692450 - DNA, 15 bp, Homo sapiens
actacgggaaggtat

SEQ ID NO: 1692451 - DNA, 15 bp, Homo sapiens
ctacgggaaggtatt

SEQ ID NO: 1692452 - DNA, 15 bp, Homo sapiens
tacgggaaggtattg

SEQ ID NO: 1692453 - DNA, 15 bp, Homo sapiens
acgggaaggtattgg

SEQ ID NO: 1692454 - DNA, 15 bp, Homo sapiens
cgggaaggtattgga

SEQ ID NO: 1692455 - DNA, 15 bp, Homo sapiens
gggaaggtattggaa

SEQ ID NO: 1692456 - DNA, 15 bp, Homo sapiens
ggaaggtattggaag

SEQ ID NO: 1692457 - DNA, 15 bp, Homo sapiens
gaaggtattggaagg

SEQ ID NO: 1692458 - DNA, 15 bp, Homo sapiens
aaggtattggaaggg

SEQ ID NO: 1692459 - DNA, 15 bp, Homo sapiens
aggtattggaaggga

SEQ ID NO: 1692460 - DNA, 15 bp, Homo sapiens
ggtattggaagggag

SEQ ID NO: 1692461 - DNA, 15 bp, Homo sapiens
gtattggaagggagc

SEQ ID NO: 1692462 - DNA, 15 bp, Homo sapiens
tattggaagggagca

SEQ ID NO: 1692463 - DNA, 15 bp, Homo sapiens
attggaagggagcaa

SEQ ID NO: 1692464 - DNA, 15 bp, Homo sapiens
ttggaagggagcaag

SEQ ID NO: 1692465 - DNA, 15 bp, Homo sapiens
tggaagggagcaaga

SEQ ID NO: 1692466 - DNA, 15 bp, Homo sapiens
ggaagggagcaagac

SEQ ID NO: 1692467 - DNA, 15 bp, Homo sapiens
gaagggagcaagacc

SEQ ID NO: 1692468 - DNA, 15 bp, Homo sapiens
aagggagcaagacca

SEQ ID NO: 1692469 - DNA, 15 bp, Homo sapiens
agggagcaagaccag

SEQ ID NO: 1692470 - DNA, 15 bp, Homo sapiens
gggagcaagaccaga

SEQ ID NO: 1692471 - DNA, 15 bp, Homo sapiens
ggagcaagaccagag

SEQ ID NO: 1692472 - DNA, 15 bp, Homo sapiens
gagcaagaccagaga

SEQ ID NO: 1692473 - DNA, 15 bp, Homo sapiens
agcaagaccagagat

SEQ ID NO: 1692474 - DNA, 15 bp, Homo sapiens
gcaagaccagagatt

SEQ ID NO: 1692475 - DNA, 15 bp, Homo sapiens
caagaccagagatta

SEQ ID NO: 1692476 - DNA, 15 bp, Homo sapiens
aagaccagagattag

SEQ ID NO: 1692477 - DNA, 15 bp, Homo sapiens
agaccagagattagt

SEQ ID NO: 1692478 - DNA, 15 bp, Homo sapiens
gaccagagattagtc

SEQ ID NO: 1692479 - DNA, 15 bp, Homo sapiens
accagagattagtct

SEQ ID NO: 1692480 - DNA, 15 bp, Homo sapiens
ccagagattagtcta

SEQ ID NO: 1692481 - DNA, 15 bp, Homo sapiens
cagagattagtctat

SEQ ID NO: 1692482 - DNA, 15 bp, Homo sapiens
agagattagtctatt

SEQ ID NO: 1692483 - DNA, 15 bp, Homo sapiens
gagattagtctattt

SEQ ID NO: 1692484 - DNA, 15 bp, Homo sapiens
agattagtctatttt

SEQ ID NO: 1692485 - DNA, 15 bp, Homo sapiens
gattagtctatttta

SEQ ID NO: 1692486 - DNA, 15 bp, Homo sapiens
attagtctattttaa

SEQ ID NO: 1692487 - DNA, 15 bp, Homo sapiens
ttagtctattttaat

SEQ ID NO: 1692488 - DNA, 15 bp, Homo sapiens
tagtctattttaatg

SEQ ID NO: 1692489 - DNA, 15 bp, Homo sapiens
agtctattttaatga

SEQ ID NO: 1692490 - DNA, 15 bp, Homo sapiens
gtctattttaatgat

SEQ ID NO: 1692491 - DNA, 15 bp, Homo sapiens
tctattttaatgatt

SEQ ID NO: 1692492 - DNA, 15 bp, Homo sapiens
ctattttaatgatta

SEQ ID NO: 1692493 - DNA, 15 bp, Homo sapiens
tattttaatgattat

SEQ ID NO: 1692494 - DNA, 15 bp, Homo sapiens
attttaatgattatg

SEQ ID NO: 1692495 - DNA, 15 bp, Homo sapiens
ttttaatgattatgc

SEQ ID NO: 1692496 - DNA, 15 bp, Homo sapiens
tttaatgattatgcc

SEQ ID NO: 1692497 - DNA, 15 bp, Homo sapiens
ttaatgattatgcct

SEQ ID NO: 1692498 - DNA, 15 bp, Homo sapiens
taatgattatgccta

SEQ ID NO: 1692499 - DNA, 15 bp, Homo sapiens
aatgattatgcctat

SEQ ID NO: 1692500 - DNA, 15 bp, Homo sapiens
atgattatgcctatt

SEQ ID NO: 1692501 - DNA, 15 bp, Homo sapiens
tgattatgcctattt

SEQ ID NO: 1692502 - DNA, 15 bp, Homo sapiens
gattatgcctattta

SEQ ID NO: 1692503 - DNA, 15 bp, Homo sapiens
attatgcctatttat

SEQ ID NO: 1692504 - DNA, 15 bp, Homo sapiens
ttatgcctatttata

SEQ ID NO: 1692505 - DNA, 15 bp, Homo sapiens
tatgcctatttataa

SEQ ID NO: 1692506 - DNA, 15 bp, Homo sapiens
atgcctatttataag

SEQ ID NO: 1692507 - DNA, 15 bp, Homo sapiens
tgcctatttataagg

SEQ ID NO: 1692508 - DNA, 15 bp, Homo sapiens
gcctatttataaggg

SEQ ID NO: 1692509 - DNA, 15 bp, Homo sapiens
cctatttataagggc

SEQ ID NO: 1692510 - DNA, 15 bp, Homo sapiens
ctatttataagggcc

SEQ ID NO: 1692511 - DNA, 15 bp, Homo sapiens
tatttataagggcct

SEQ ID NO: 1692512 - DNA, 15 bp, Homo sapiens
atttataagggccta

SEQ ID NO: 1692513 - DNA, 15 bp, Homo sapiens
tttataagggcctag

SEQ ID NO: 1692514 - DNA, 15 bp, Homo sapiens
ttataagggcctaga

SEQ ID NO: 1692515 - DNA, 15 bp, Homo sapiens
tataagggcctagat

SEQ ID NO: 1692516 - DNA, 15 bp, Homo sapiens
ataagggcctagatt

SEQ ID NO: 1692517 - DNA, 15 bp, Homo sapiens
taagggcctagatta

SEQ ID NO: 1692518 - DNA, 15 bp, Homo sapiens
aagggcctagattag

SEQ ID NO: 1692519 - DNA, 15 bp, Homo sapiens
agggcctagattagg

SEQ ID NO: 1692520 - DNA, 15 bp, Homo sapiens
gggcctagattagga

SEQ ID NO: 1692521 - DNA, 15 bp, Homo sapiens
ggcctagattaggat

SEQ ID NO: 1692522 - DNA, 15 bp, Homo sapiens
gcctagattaggatt

SEQ ID NO: 1692523 - DNA, 15 bp, Homo sapiens
cctagattaggattc

SEQ ID NO: 1692524 - DNA, 15 bp, Homo sapiens
ctagattaggattca

SEQ ID NO: 1692525 - DNA, 15 bp, Homo sapiens
tagattaggattcat

SEQ ID NO: 1692526 - DNA, 15 bp, Homo sapiens
agattaggattcatt

SEQ ID NO: 1692527 - DNA, 15 bp, Homo sapiens
gattaggattcattg

SEQ ID NO: 1692528 - DNA, 15 bp, Homo sapiens
attaggattcattgg

SEQ ID NO: 1692529 - DNA, 15 bp, Homo sapiens
ttaggattcattggg

SEQ ID NO: 1692530 - DNA, 15 bp, Homo sapiens
taggattcattggga

SEQ ID NO: 1692531 - DNA, 15 bp, Homo sapiens
aggattcattgggaa

SEQ ID NO: 1692532 - DNA, 15 bp, Homo sapiens
ggattcattgggaaa

SEQ ID NO: 1692533 - DNA, 15 bp, Homo sapiens
gattcattgggaaac

SEQ ID NO: 1692534 - DNA, 15 bp, Homo sapiens
attcattgggaaaca

SEQ ID NO: 1692535 - DNA, 15 bp, Homo sapiens
ttcattgggaaacag

SEQ ID NO: 1692536 - DNA, 15 bp, Homo sapiens
tcattgggaaacagt

SEQ ID NO: 1692537 - DNA, 15 bp, Homo sapiens
cattgggaaacagtg

SEQ ID NO: 1692538 - DNA, 15 bp, Homo sapiens
attgggaaacagtgt

SEQ ID NO: 1692539 - DNA, 15 bp, Homo sapiens
ttgggaaacagtgtg

SEQ ID NO: 1692540 - DNA, 15 bp, Homo sapiens
tgggaaacagtgtgt

SEQ ID NO: 1692541 - DNA, 15 bp, Homo sapiens
gggaaacagtgtgtt

SEQ ID NO: 1692542 - DNA, 15 bp, Homo sapiens
ggaaacagtgtgtta

SEQ ID NO: 1692543 - DNA, 15 bp, Homo sapiens
gaaacagtgtgttac

SEQ ID NO: 1692544 - DNA, 15 bp, Homo sapiens
aaacagtgtgttaca

SEQ ID NO: 1692545 - DNA, 15 bp, Homo sapiens
aacagtgtgttacat

SEQ ID NO: 1692546 - DNA, 15 bp, Homo sapiens
acagtgtgttacata

SEQ ID NO: 1692547 - DNA, 15 bp, Homo sapiens
cagtgtgttacatat

SEQ ID NO: 1692548 - DNA, 15 bp, Homo sapiens
agtgtgttacatatg

SEQ ID NO: 1692549 - DNA, 15 bp, Homo sapiens
gtgtgttacatatga

SEQ ID NO: 1692550 - DNA, 15 bp, Homo sapiens
tgtgttacatatgac

SEQ ID NO: 1692551 - DNA, 15 bp, Homo sapiens
gtgttacatatgaca

SEQ ID NO: 1692552 - DNA, 15 bp, Homo sapiens
tgttacatatgacag

SEQ ID NO: 1692553 - DNA, 15 bp, Homo sapiens
gttacatatgacaga

SEQ ID NO: 1692554 - DNA, 15 bp, Homo sapiens
ttacatatgacagaa

SEQ ID NO: 1692555 - DNA, 15 bp, Homo sapiens
tacatatgacagaag

SEQ ID NO: 1692556 - DNA, 15 bp, Homo sapiens
acatatgacagaagt

SEQ ID NO: 1692557 - DNA, 15 bp, Homo sapiens
catatgacagaagta

SEQ ID NO: 1692558 - DNA, 15 bp, Homo sapiens
atatgacagaagtaa

SEQ ID NO: 1692559 - DNA, 15 bp, Homo sapiens
tatgacagaagtaag

SEQ ID NO: 1692560 - DNA, 15 bp, Homo sapiens
atgacagaagtaagg

SEQ ID NO: 1692561 - DNA, 15 bp, Homo sapiens
tgacagaagtaagga

SEQ ID NO: 1692562 - DNA, 15 bp, Homo sapiens
gacagaagtaaggag

SEQ ID NO: 1692563 - DNA, 15 bp, Homo sapiens
acagaagtaaggaga

SEQ ID NO: 1692564 - DNA, 15 bp, Homo sapiens
cagaagtaaggagat

SEQ ID NO: 1692565 - DNA, 15 bp, Homo sapiens
agaagtaaggagatg

SEQ ID NO: 1692566 - DNA, 15 bp, Homo sapiens
gaagtaaggagatga

SEQ ID NO: 1692567 - DNA, 15 bp, Homo sapiens
aagtaaggagatgat

SEQ ID NO: 1692568 - DNA, 15 bp, Homo sapiens
agtaaggagatgatc

SEQ ID NO: 1692569 - DNA, 15 bp, Homo sapiens
gtaaggagatgatca

SEQ ID NO: 1692570 - DNA, 15 bp, Homo sapiens
taaggagatgatcaa

SEQ ID NO: 1692571 - DNA, 15 bp, Homo sapiens
aaggagatgatcaaa

SEQ ID NO: 1692572 - DNA, 15 bp, Homo sapiens
gaatgggatcctaga

SEQ ID NO: 1692573 - DNA, 15 bp, Homo sapiens
aatgggatcctagaa

SEQ ID NO: 1692574 - DNA, 15 bp, Homo sapiens
atgggatcctagaac

SEQ ID NO: 1692575 - DNA, 15 bp, Homo sapiens
tgggatcctagaaca

SEQ ID NO: 1692576 - DNA, 15 bp, Homo sapiens
gggatcctagaacag

SEQ ID NO: 1692577 - DNA, 15 bp, Homo sapiens
ggatcctagaacaga

SEQ ID NO: 1692578 - DNA, 15 bp, Homo sapiens
gatcctagaacagac

SEQ ID NO: 1692579 - DNA, 15 bp, Homo sapiens
atcctagaacagaca

SEQ ID NO: 1692580 - DNA, 15 bp, Homo sapiens
tcctagaacagacaa

SEQ ID NO: 1692581 - DNA, 15 bp, Homo sapiens
cctagaacagacaaa

SEQ ID NO: 1692582 - DNA, 15 bp, Homo sapiens
ctagaacagacaaag

SEQ ID NO: 1692583 - DNA, 15 bp, Homo sapiens
tagaacagacaaagg

SEQ ID NO: 1692584 - DNA, 15 bp, Homo sapiens
agaacagacaaagga

SEQ ID NO: 1692585 - DNA, 15 bp, Homo sapiens
gaacagacaaaggac

SEQ ID NO: 1692586 - DNA, 15 bp, Homo sapiens
aacagacaaaggact

SEQ ID NO: 1692587 - DNA, 15 bp, Homo sapiens
acagacaaaggactt

SEQ ID NO: 1692588 - DNA, 15 bp, Homo sapiens
cagacaaaggacttt

SEQ ID NO: 1692589 - DNA, 15 bp, Homo sapiens
agacaaaggacttta

SEQ ID NO: 1692590 - DNA, 15 bp, Homo sapiens
gacaaaggactttag

SEQ ID NO: 1692591 - DNA, 15 bp, Homo sapiens
acaaaggactttaga

SEQ ID NO: 1692592 - DNA, 15 bp, Homo sapiens
caaaggactttagat

SEQ ID NO: 1692593 - DNA, 15 bp, Homo sapiens
aaaggactttagata

SEQ ID NO: 1692594 - DNA, 15 bp, Homo sapiens
aaggactttagatat

SEQ ID NO: 1692595 - DNA, 15 bp, Homo sapiens
aggactttagatata

SEQ ID NO: 1692596 - DNA, 15 bp, Homo sapiens
ggactttagatataa

SEQ ID NO: 1692597 - DNA, 15 bp, Homo sapiens
gactttagatataaa

SEQ ID NO: 1692598 - DNA, 15 bp, Homo sapiens
actttagatataaac

SEQ ID NO: 1692599 - DNA, 15 bp, Homo sapiens
ctttagatataaact

SEQ ID NO: 1692600 - DNA, 15 bp, Homo sapiens
tttagatataaacta

SEQ ID NO: 1692601 - DNA, 15 bp, Homo sapiens
ttagatataaactaa

SEQ ID NO: 1692602 - DNA, 15 bp, Homo sapiens
tagatataaactaaa

SEQ ID NO: 1692603 - DNA, 15 bp, Homo sapiens
agatataaactaaag

SEQ ID NO: 1692604 - DNA, 15 bp, Homo sapiens
gatataaactaaaga

SEQ ID NO: 1692605 - DNA, 15 bp, Homo sapiens
atataaactaaagaa

SEQ ID NO: 1692606 - DNA, 15 bp, Homo sapiens
tataaactaaagaaa

SEQ ID NO: 1692607 - DNA, 15 bp, Homo sapiens
ataaactaaagaaat

SEQ ID NO: 1692608 - DNA, 15 bp, Homo sapiens
taaactaaagaaatt

SEQ ID NO: 1692609 - DNA, 15 bp, Homo sapiens
aaactaaagaaattt

SEQ ID NO: 1692610 - DNA, 15 bp, Homo sapiens
aactaaagaaatttg

SEQ ID NO: 1692611 - DNA, 15 bp, Homo sapiens
actaaagaaatttga

SEQ ID NO: 1692612 - DNA, 15 bp, Homo sapiens
ctaaagaaatttgaa

SEQ ID NO: 1692613 - DNA, 15 bp, Homo sapiens
taaagaaatttgaat

SEQ ID NO: 1692614 - DNA, 15 bp, Homo sapiens
aaagaaatttgaata

SEQ ID NO: 1692615 - DNA, 15 bp, Homo sapiens
aagaaatttgaataa

SEQ ID NO: 1692616 - DNA, 15 bp, Homo sapiens
agaaatttgaataaa

SEQ ID NO: 1692617 - DNA, 15 bp, Homo sapiens
gaaatttgaataaag

SEQ ID NO: 1692618 - DNA, 15 bp, Homo sapiens
aaatttgaataaagt

SEQ ID NO: 1692619 - DNA, 15 bp, Homo sapiens
aatttgaataaagta

SEQ ID NO: 1692620 - DNA, 15 bp, Homo sapiens
atttgaataaagtat

SEQ ID NO: 1692621 - DNA, 15 bp, Homo sapiens
tttgaataaagtatg

SEQ ID NO: 1692622 - DNA, 15 bp, Homo sapiens
ttgaataaagtatgg

SEQ ID NO: 1692623 - DNA, 15 bp, Homo sapiens
tgaataaagtatggt

SEQ ID NO: 1692624 - DNA, 15 bp, Homo sapiens
gaataaagtatggtc

SEQ ID NO: 1692625 - DNA, 15 bp, Homo sapiens
aataaagtatggtct

SEQ ID NO: 1692626 - DNA, 15 bp, Homo sapiens
ataaagtatggtctt

SEQ ID NO: 1692627 - DNA, 15 bp, Homo sapiens
taaagtatggtcttt

SEQ ID NO: 1692628 - DNA, 15 bp, Homo sapiens
aaagtatggtctttc

SEQ ID NO: 1692629 - DNA, 15 bp, Homo sapiens
aagtatggtctttcg

SEQ ID NO: 1692630 - DNA, 15 bp, Homo sapiens
agtatggtctttcgt

SEQ ID NO: 1692631 - DNA, 15 bp, Homo sapiens
gtatggtctttcgtt

SEQ ID NO: 1692632 - DNA, 15 bp, Homo sapiens
tatggtctttcgttt

SEQ ID NO: 1692633 - DNA, 15 bp, Homo sapiens
atggtctttcgttta

SEQ ID NO: 1692634 - DNA, 15 bp, Homo sapiens
tggtctttcgtttat

SEQ ID NO: 1692635 - DNA, 15 bp, Homo sapiens
ggtctttcgtttata

SEQ ID NO: 1692636 - DNA, 15 bp, Homo sapiens
gtctttcgtttataa

SEQ ID NO: 1692637 - DNA, 15 bp, Homo sapiens
tctttcgtttataac

SEQ ID NO: 1692638 - DNA, 15 bp, Homo sapiens
ctttcgtttataacg

SEQ ID NO: 1692639 - DNA, 15 bp, Homo sapiens
tttcgtttataacgt

SEQ ID NO: 1692640 - DNA, 15 bp, Homo sapiens
ttcgtttataacgtg

SEQ ID NO: 1692641 - DNA, 15 bp, Homo sapiens
tcgtttataacgtgc

SEQ ID NO: 1692642 - DNA, 15 bp, Homo sapiens
cgtttataacgtgca

SEQ ID NO: 1692643 - DNA, 15 bp, Homo sapiens
gtttataacgtgcat

SEQ ID NO: 1692644 - DNA, 15 bp, Homo sapiens
tttataacgtgcatc

SEQ ID NO: 1692645 - DNA, 15 bp, Homo sapiens
ttataacgtgcatca

SEQ ID NO: 1692646 - DNA, 15 bp, Homo sapiens
tataacgtgcatcaa

SEQ ID NO: 1692647 - DNA, 15 bp, Homo sapiens
ataacgtgcatcaat

SEQ ID NO: 1692648 - DNA, 15 bp, Homo sapiens
taacgtgcatcaata

SEQ ID NO: 1692649 - DNA, 15 bp, Homo sapiens
aacgtgcatcaatat

SEQ ID NO: 1692650 - DNA, 15 bp, Homo sapiens
acgtgcatcaatatt

SEQ ID NO: 1692651 - DNA, 15 bp, Homo sapiens
cgtgcatcaatattg

SEQ ID NO: 1692652 - DNA, 15 bp, Homo sapiens
gtgcatcaatattgg

SEQ ID NO: 1692653 - DNA, 15 bp, Homo sapiens
tgcatcaatattggt

SEQ ID NO: 1692654 - DNA, 15 bp, Homo sapiens
gcatcaatattggtt

SEQ ID NO: 1692655 - DNA, 15 bp, Homo sapiens
catcaatattggttc

SEQ ID NO: 1692656 - DNA, 15 bp, Homo sapiens
atcaatattggttca

SEQ ID NO: 1692657 - DNA, 15 bp, Homo sapiens
tcaatattggttcat

SEQ ID NO: 1692658 - DNA, 15 bp, Homo sapiens
caatattggttcatt

SEQ ID NO: 1692659 - DNA, 15 bp, Homo sapiens
aatattggttcatta

SEQ ID NO: 1692660 - DNA, 15 bp, Homo sapiens
atattggttcattaa

SEQ ID NO: 1692661 - DNA, 15 bp, Homo sapiens
tattggttcattaat

SEQ ID NO: 1692662 - DNA, 15 bp, Homo sapiens
attggttcattaatt

SEQ ID NO: 1692663 - DNA, 15 bp, Homo sapiens
ttggttcattaattg

SEQ ID NO: 1692664 - DNA, 15 bp, Homo sapiens
tggttcattaattgt

SEQ ID NO: 1692665 - DNA, 15 bp, Homo sapiens
ggttcattaattgta

SEQ ID NO: 1692666 - DNA, 15 bp, Homo sapiens
gttcattaattgtaa

SEQ ID NO: 1692667 - DNA, 15 bp, Homo sapiens
ttcattaattgtaac

SEQ ID NO: 1692668 - DNA, 15 bp, Homo sapiens
tcattaattgtaacc

SEQ ID NO: 1692669 - DNA, 15 bp, Homo sapiens
cattaattgtaacct

SEQ ID NO: 1692670 - DNA, 15 bp, Homo sapiens
attaattgtaaccta

SEQ ID NO: 1692671 - DNA, 15 bp, Homo sapiens
ttaattgtaacctat

SEQ ID NO: 1692672 - DNA, 15 bp, Homo sapiens
taattgtaacctatg

SEQ ID NO: 1692673 - DNA, 15 bp, Homo sapiens
aattgtaacctatgt

SEQ ID NO: 1692674 - DNA, 15 bp, Homo sapiens
attgtaacctatgtt

SEQ ID NO: 1692675 - DNA, 15 bp, Homo sapiens
ttgtaacctatgttc

SEQ ID NO: 1692676 - DNA, 15 bp, Homo sapiens
tgtaacctatgttcc

SEQ ID NO: 1692677 - DNA, 15 bp, Homo sapiens
gtaacctatgttcca

SEQ ID NO: 1692678 - DNA, 15 bp, Homo sapiens
taacctatgttccac

SEQ ID NO: 1692679 - DNA, 15 bp, Homo sapiens
aacctatgttccaca

SEQ ID NO: 1692680 - DNA, 15 bp, Homo sapiens
acctatgttccacat

SEQ ID NO: 1692681 - DNA, 15 bp, Homo sapiens
cctatgttccacatt

SEQ ID NO: 1692682 - DNA, 15 bp, Homo sapiens
ctatgttccacatta

SEQ ID NO: 1692683 - DNA, 15 bp, Homo sapiens
tatgttccacattaa

SEQ ID NO: 1692684 - DNA, 15 bp, Homo sapiens
atgttccacattaat

SEQ ID NO: 1692685 - DNA, 15 bp, Homo sapiens
tgttccacattaatg

SEQ ID NO: 1692686 - DNA, 15 bp, Homo sapiens
gttccacattaatgt

SEQ ID NO: 1692687 - DNA, 15 bp, Homo sapiens
ttccacattaatgta

SEQ ID NO: 1692688 - DNA, 15 bp, Homo sapiens
tccacattaatgtaa

SEQ ID NO: 1692689 - DNA, 15 bp, Homo sapiens
ccacattaatgtaag

SEQ ID NO: 1692690 - DNA, 15 bp, Homo sapiens
cacattaatgtaaga

SEQ ID NO: 1692691 - DNA, 15 bp, Homo sapiens
acattaatgtaagat

SEQ ID NO: 1692692 - DNA, 15 bp, Homo sapiens
cattaatgtaagatg

SEQ ID NO: 1692693 - DNA, 15 bp, Homo sapiens
attaatgtaagatgt

SEQ ID NO: 1692694 - DNA, 15 bp, Homo sapiens
ttaatgtaagatgtt

SEQ ID NO: 1692695 - DNA, 15 bp, Homo sapiens
taatgtaagatgttc

SEQ ID NO: 1692696 - DNA, 15 bp, Homo sapiens
aatgtaagatgttca

SEQ ID NO: 1692697 - DNA, 15 bp, Homo sapiens
tgtaagatgttcata

SEQ ID NO: 1692698 - DNA, 15 bp, Homo sapiens
gtaagatgttcatat

SEQ ID NO: 1692699 - DNA, 15 bp, Homo sapiens
taagatgttcatatg

SEQ ID NO: 1692700 - DNA, 15 bp, Homo sapiens
aagatgttcatatgt

SEQ ID NO: 1692701 - DNA, 15 bp, Homo sapiens
agatgttcatatgtt

SEQ ID NO: 1692702 - DNA, 15 bp, Homo sapiens
gatgttcatatgttc

SEQ ID NO: 1692703 - DNA, 15 bp, Homo sapiens
atgttcatatgttca

SEQ ID NO: 1692704 - DNA, 15 bp, Homo sapiens
tgttcatatgttcat

SEQ ID NO: 1692705 - DNA, 15 bp, Homo sapiens
gttcatatgttcata

SEQ ID NO: 1692706 - DNA, 15 bp, Homo sapiens
ttcatatgttcataa

SEQ ID NO: 1692707 - DNA, 15 bp, Homo sapiens
tcatatgttcataat

SEQ ID NO: 1692708 - DNA, 15 bp, Homo sapiens
catatgttcataatg

SEQ ID NO: 1692709 - DNA, 15 bp, Homo sapiens
atatgttcataatgg

SEQ ID NO: 1692710 - DNA, 15 bp, Homo sapiens
tatgttcataatggg

SEQ ID NO: 1692711 - DNA, 15 bp, Homo sapiens
atgttcataatgggg

SEQ ID NO: 1692712 - DNA, 15 bp, Homo sapiens
tgttcataatggggg

SEQ ID NO: 1692713 - DNA, 15 bp, Homo sapiens
gttcataatggggga

SEQ ID NO: 1692714 - DNA, 15 bp, Homo sapiens
ttcataatgggggac

SEQ ID NO: 1692715 - DNA, 15 bp, Homo sapiens
tcataatgggggaca

SEQ ID NO: 1692716 - DNA, 15 bp, Homo sapiens
cataatgggggacac

SEQ ID NO: 1692717 - DNA, 15 bp, Homo sapiens
ataatgggggacact

SEQ ID NO: 1692718 - DNA, 15 bp, Homo sapiens
taatgggggacactg

SEQ ID NO: 1692719 - DNA, 15 bp, Homo sapiens
aatgggggacactga

SEQ ID NO: 1692720 - DNA, 15 bp, Homo sapiens
atgggggacactgag

SEQ ID NO: 1692721 - DNA, 15 bp, Homo sapiens
tgggggacactgagt

SEQ ID NO: 1692722 - DNA, 15 bp, Homo sapiens
gggggacactgagtc

SEQ ID NO: 1692723 - DNA, 15 bp, Homo sapiens
ggggacactgagtcc

SEQ ID NO: 1692724 - DNA, 15 bp, Homo sapiens
gggacactgagtcca

SEQ ID NO: 1692725 - DNA, 15 bp, Homo sapiens
ggacactgagtccag

SEQ ID NO: 1692726 - DNA, 15 bp, Homo sapiens
gacactgagtccagg

SEQ ID NO: 1692727 - DNA, 15 bp, Homo sapiens
acactgagtccaggt

SEQ ID NO: 1692728 - DNA, 15 bp, Homo sapiens
cactgagtccaggtt

SEQ ID NO: 1692729 - DNA, 15 bp, Homo sapiens
actgagtccaggtta

SEQ ID NO: 1692730 - DNA, 15 bp, Homo sapiens
ctgagtccaggttat

SEQ ID NO: 1692731 - DNA, 15 bp, Homo sapiens
tgagtccaggttatg

SEQ ID NO: 1692732 - DNA, 15 bp, Homo sapiens
gagtccaggttatgt

SEQ ID NO: 1692733 - DNA, 15 bp, Homo sapiens
agtccaggttatgtg

SEQ ID NO: 1692734 - DNA, 15 bp, Homo sapiens
gtccaggttatgtgg

SEQ ID NO: 1692735 - DNA, 15 bp, Homo sapiens
tccaggttatgtgga

SEQ ID NO: 1692736 - DNA, 15 bp, Homo sapiens
ccaggttatgtggaa

SEQ ID NO: 1692737 - DNA, 15 bp, Homo sapiens
caggttatgtggaaa

SEQ ID NO: 1692738 - DNA, 15 bp, Homo sapiens
aggttatgtggaaac

SEQ ID NO: 1692739 - DNA, 15 bp, Homo sapiens
ggttatgtggaaact

SEQ ID NO: 1692740 - DNA, 15 bp, Homo sapiens
gttatgtggaaactc

SEQ ID NO: 1692741 - DNA, 15 bp, Homo sapiens
ttatgtggaaactct

SEQ ID NO: 1692742 - DNA, 15 bp, Homo sapiens
tatgtggaaactctg

SEQ ID NO: 1692743 - DNA, 15 bp, Homo sapiens
atgtggaaactctgt

SEQ ID NO: 1692744 - DNA, 15 bp, Homo sapiens
tgtggaaactctgtg

SEQ ID NO: 1692745 - DNA, 15 bp, Homo sapiens
gtggaaactctgtgc

SEQ ID NO: 1692746 - DNA, 15 bp, Homo sapiens
tggaaactctgtgct

SEQ ID NO: 1692747 - DNA, 15 bp, Homo sapiens
ggaaactctgtgcta

SEQ ID NO: 1692748 - DNA, 15 bp, Homo sapiens
gaaactctgtgctat

SEQ ID NO: 1692749 - DNA, 15 bp, Homo sapiens
aaactctgtgctatc

SEQ ID NO: 1692750 - DNA, 15 bp, Homo sapiens
aactctgtgctatca

SEQ ID NO: 1692751 - DNA, 15 bp, Homo sapiens
actctgtgctatcat

SEQ ID NO: 1692752 - DNA, 15 bp, Homo sapiens
ctctgtgctatcatt

SEQ ID NO: 1692753 - DNA, 15 bp, Homo sapiens
tctgtgctatcattt

SEQ ID NO: 1692754 - DNA, 15 bp, Homo sapiens
ctgtgctatcatttc

SEQ ID NO: 1692755 - DNA, 15 bp, Homo sapiens
tgtgctatcatttct

SEQ ID NO: 1692756 - DNA, 15 bp, Homo sapiens
gtgctatcatttcta

SEQ ID NO: 1692757 - DNA, 15 bp, Homo sapiens
tgctatcatttctat

SEQ ID NO: 1692758 - DNA, 15 bp, Homo sapiens
gctatcatttctatt

SEQ ID NO: 1692759 - DNA, 15 bp, Homo sapiens
ctatcatttctattt

SEQ ID NO: 1692760 - DNA, 15 bp, Homo sapiens
tatcatttctatttt

SEQ ID NO: 1692761 - DNA, 15 bp, Homo sapiens
atcatttctattttt

SEQ ID NO: 1692762 - DNA, 15 bp, Homo sapiens
tcatttctatttttt

SEQ ID NO: 1692763 - DNA, 15 bp, Homo sapiens
catttctattttttc

SEQ ID NO: 1692764 - DNA, 15 bp, Homo sapiens
atttctattttttca

SEQ ID NO: 1692765 - DNA, 15 bp, Homo sapiens
tttctattttttcat

SEQ ID NO: 1692766 - DNA, 15 bp, Homo sapiens
ttctattttttcata

SEQ ID NO: 1692767 - DNA, 15 bp, Homo sapiens
tctattttttcataa

SEQ ID NO: 1692768 - DNA, 15 bp, Homo sapiens
ctattttttcataaa

SEQ ID NO: 1692769 - DNA, 15 bp, Homo sapiens
tattttttcataaat

SEQ ID NO: 1692770 - DNA, 15 bp, Homo sapiens
attttttcataaatc

SEQ ID NO: 1692771 - DNA, 15 bp, Homo sapiens
ttttttcataaatca

SEQ ID NO: 1692772 - DNA, 15 bp, Homo sapiens
tttttcataaatcaa

SEQ ID NO: 1692773 - DNA, 15 bp, Homo sapiens
ttttcataaatcaaa

SEQ ID NO: 1692774 - DNA, 15 bp, Homo sapiens
tttcataaatcaaaa

SEQ ID NO: 1692775 - DNA, 15 bp, Homo sapiens
ttcataaatcaaaat

SEQ ID NO: 1692776 - DNA, 15 bp, Homo sapiens
tcataaatcaaaatt

SEQ ID NO: 1692777 - DNA, 15 bp, Homo sapiens
cataaatcaaaatta

SEQ ID NO: 1692778 - DNA, 15 bp, Homo sapiens
ataaatcaaaattat

SEQ ID NO: 1692779 - DNA, 15 bp, Homo sapiens
taaatcaaaattatt

SEQ ID NO: 1692780 - DNA, 15 bp, Homo sapiens
aaatcaaaattattc

SEQ ID NO: 1692781 - DNA, 15 bp, Homo sapiens
aatcaaaattattct

SEQ ID NO: 1692782 - DNA, 15 bp, Homo sapiens
atcaaaattattctt

SEQ ID NO: 1692783 - DNA, 15 bp, Homo sapiens
tcaaaattattcttt

SEQ ID NO: 1692784 - DNA, 15 bp, Homo sapiens
caaaattattcttta

SEQ ID NO: 1692785 - DNA, 15 bp, Homo sapiens
ttattctttaaaaac

SEQ ID NO: 1692786 - DNA, 15 bp, Homo sapiens
tattctttaaaaact

SEQ ID NO: 1692787 - DNA, 15 bp, Homo sapiens
attctttaaaaactg

SEQ ID NO: 1692788 - DNA, 15 bp, Homo sapiens
ttctttaaaaactgc

SEQ ID NO: 1692789 - DNA, 15 bp, Homo sapiens
tctttaaaaactgcc

SEQ ID NO: 1692790 - DNA, 15 bp, Homo sapiens
ctttaaaaactgcct

SEQ ID NO: 1692791 - DNA, 15 bp, Homo sapiens
tttaaaaactgcctt

SEQ ID NO: 1692792 - DNA, 15 bp, Homo sapiens
ttaaaaactgcctta

SEQ ID NO: 1692793 - DNA, 15 bp, Homo sapiens
taaaaactgccttaa

SEQ ID NO: 1692794 - DNA, 15 bp, Homo sapiens
aaaaactgccttaaa

SEQ ID NO: 1692795 - DNA, 15 bp, Homo sapiens
aaaactgccttaaaa

SEQ ID NO: 1692796 - DNA, 15 bp, Homo sapiens
aaactgccttaaaaa

SEQ ID NO: 1692797 - DNA, 15 bp, Homo sapiens
aactgccttaaaaaa

SEQ ID NO: 1692798 - DNA, 15 bp, Homo sapiens
actgccttaaaaaat

SEQ ID NO: 1692799 - DNA, 15 bp, Homo sapiens
ctgccttaaaaaatt

SEQ ID NO: 1692800 - DNA, 15 bp, Homo sapiens
ttaaaaaattaaacc

SEQ ID NO: 1692801 - DNA, 15 bp, Homo sapiens
taaaaaattaaacct

SEQ ID NO: 1692802 - DNA, 15 bp, Homo sapiens
aaaaaattaaacctg

SEQ ID NO: 1692803 - DNA, 15 bp, Homo sapiens
aaaaattaaacctgg

SEQ ID NO: 1692804 - DNA, 15 bp, Homo sapiens
aaaattaaacctggg

SEQ ID NO: 1692805 - DNA, 15 bp, Homo sapiens
aaattaaacctgggg

SEQ ID NO: 1692806 - DNA, 15 bp, Homo sapiens
aattaaacctggggg

SEQ ID NO: 1692807 - DNA, 15 bp, Homo sapiens
attaaacctggggga

SEQ ID NO: 1692808 - DNA, 15 bp, Homo sapiens
ttaaacctgggggag

SEQ ID NO: 1692809 - DNA, 15 bp, Homo sapiens
taaacctgggggagg

SEQ ID NO: 1692810 - DNA, 15 bp, Homo sapiens
aaacctgggggagga

SEQ ID NO: 1692811 - DNA, 15 bp, Homo sapiens
aacctgggggaggag

SEQ ID NO: 1692812 - DNA, 15 bp, Homo sapiens
acctgggggaggaga

SEQ ID NO: 1692813 - DNA, 15 bp, Homo sapiens
cctgggggaggagaa

SEQ ID NO: 1692814 - DNA, 15 bp, Homo sapiens
ctgggggaggagaat

SEQ ID NO: 1692815 - DNA, 15 bp, Homo sapiens
tgggggaggagaatg

SEQ ID NO: 1692816 - DNA, 15 bp, Homo sapiens
gggggaggagaatgt

SEQ ID NO: 1692817 - DNA, 15 bp, Homo sapiens
ggggaggagaatgta

SEQ ID NO: 1692818 - DNA, 15 bp, Homo sapiens
gggaggagaatgtat

SEQ ID NO: 1692819 - DNA, 15 bp, Homo sapiens
ggaggagaatgtatg

SEQ ID NO: 1692820 - DNA, 15 bp, Homo sapiens
gaggagaatgtatgt

SEQ ID NO: 1692821 - DNA, 15 bp, Homo sapiens
aggagaatgtatgtc

SEQ ID NO: 1692822 - DNA, 15 bp, Homo sapiens
ggagaatgtatgtct

SEQ ID NO: 1692823 - DNA, 15 bp, Homo sapiens
gagaatgtatgtctg

SEQ ID NO: 1692824 - DNA, 15 bp, Homo sapiens
agaatgtatgtctga

SEQ ID NO: 1692825 - DNA, 15 bp, Homo sapiens
gaatgtatgtctgag

SEQ ID NO: 1692826 - DNA, 15 bp, Homo sapiens
aatgtatgtctgagt

SEQ ID NO: 1692827 - DNA, 15 bp, Homo sapiens
atgtatgtctgagtg

SEQ ID NO: 1692828 - DNA, 15 bp, Homo sapiens
tgtatgtctgagtga

SEQ ID NO: 1692829 - DNA, 15 bp, Homo sapiens
gtatgtctgagtgag

SEQ ID NO: 1692830 - DNA, 15 bp, Homo sapiens
tatgtctgagtgaga

SEQ ID NO: 1692831 - DNA, 15 bp, Homo sapiens
atgtctgagtgagag

SEQ ID NO: 1692832 - DNA, 15 bp, Homo sapiens
tgtctgagtgagagc

SEQ ID NO: 1692833 - DNA, 15 bp, Homo sapiens
gtctgagtgagagca

SEQ ID NO: 1692834 - DNA, 15 bp, Homo sapiens
tctgagtgagagcaa

SEQ ID NO: 1692835 - DNA, 15 bp, Homo sapiens
ctgagtgagagcaag

SEQ ID NO: 1692836 - DNA, 15 bp, Homo sapiens
tgagtgagagcaagc

SEQ ID NO: 1692837 - DNA, 15 bp, Homo sapiens
gagtgagagcaagcg

SEQ ID NO: 1692838 - DNA, 15 bp, Homo sapiens
agtgagagcaagcga

SEQ ID NO: 1692839 - DNA, 15 bp, Homo sapiens
gtgagagcaagcgag

SEQ ID NO: 1692840 - DNA, 15 bp, Homo sapiens
tgagagcaagcgagc

SEQ ID NO: 1692841 - DNA, 15 bp, Homo sapiens
gagagcaagcgagca

SEQ ID NO: 1692842 - DNA, 15 bp, Homo sapiens
agagcaagcgagcaa

SEQ ID NO: 1692843 - DNA, 15 bp, Homo sapiens
gagcaagcgagcaat

SEQ ID NO: 1692844 - DNA, 15 bp, Homo sapiens
agcaagcgagcaatg

SEQ ID NO: 1692845 - DNA, 15 bp, Homo sapiens
gcaagcgagcaatgg

SEQ ID NO: 1692846 - DNA, 15 bp, Homo sapiens
caagcgagcaatggg

SEQ ID NO: 1692847 - DNA, 15 bp, Homo sapiens
aagcgagcaatgggt

SEQ ID NO: 1692848 - DNA, 15 bp, Homo sapiens
agcgagcaatgggtg

SEQ ID NO: 1692849 - DNA, 15 bp, Homo sapiens
gcgagcaatgggtgt

SEQ ID NO: 1692850 - DNA, 15 bp, Homo sapiens
cgagcaatgggtgta

SEQ ID NO: 1692851 - DNA, 15 bp, Homo sapiens
gagcaatgggtgtag

SEQ ID NO: 1692852 - DNA, 15 bp, Homo sapiens
agcaatgggtgtaga

SEQ ID NO: 1692853 - DNA, 15 bp, Homo sapiens
gcaatgggtgtagag

SEQ ID NO: 1692854 - DNA, 15 bp, Homo sapiens
caatgggtgtagaga

SEQ ID NO: 1692855 - DNA, 15 bp, Homo sapiens
aatgggtgtagagaa

SEQ ID NO: 1692856 - DNA, 15 bp, Homo sapiens
atgggtgtagagaag

SEQ ID NO: 1692857 - DNA, 15 bp, Homo sapiens
tgggtgtagagaaga

SEQ ID NO: 1692858 - DNA, 15 bp, Homo sapiens
gggtgtagagaagag

SEQ ID NO: 1692859 - DNA, 15 bp, Homo sapiens
ggtgtagagaagaga

SEQ ID NO: 1692860 - DNA, 15 bp, Homo sapiens
gtgtagagaagagag

SEQ ID NO: 1692861 - DNA, 15 bp, Homo sapiens
tgtagagaagagaga

SEQ ID NO: 1692862 - DNA, 15 bp, Homo sapiens
gtagagaagagagac

SEQ ID NO: 1692863 - DNA, 15 bp, Homo sapiens
tagagaagagagaca

SEQ ID NO: 1692864 - DNA, 15 bp, Homo sapiens
gagaagagagacagc

SEQ ID NO: 1692865 - DNA, 15 bp, Homo sapiens
agaagagagacagca

SEQ ID NO: 1692866 - DNA, 15 bp, Homo sapiens
gaagagagacagcat

SEQ ID NO: 1692867 - DNA, 15 bp, Homo sapiens
aagagagacagcatt

SEQ ID NO: 1692868 - DNA, 15 bp, Homo sapiens
agagagacagcattt

SEQ ID NO: 1692869 - DNA, 15 bp, Homo sapiens
gagagacagcatttt

SEQ ID NO: 1692870 - DNA, 15 bp, Homo sapiens
agagacagcattttc

SEQ ID NO: 1692871 - DNA, 15 bp, Homo sapiens
gagacagcattttct

SEQ ID NO: 1692872 - DNA, 15 bp, Homo sapiens
agacagcattttctg

SEQ ID NO: 1692873 - DNA, 15 bp, Homo sapiens
gacagcattttctga

SEQ ID NO: 1692874 - DNA, 15 bp, Homo sapiens
acagcattttctgag

SEQ ID NO: 1692875 - DNA, 15 bp, Homo sapiens
cagcattttctgagc

SEQ ID NO: 1692876 - DNA, 15 bp, Homo sapiens
agcattttctgagca

SEQ ID NO: 1692877 - DNA, 15 bp, Homo sapiens
gcattttctgagcaa

SEQ ID NO: 1692878 - DNA, 15 bp, Homo sapiens
cattttctgagcaac

SEQ ID NO: 1692879 - DNA, 15 bp, Homo sapiens
attttctgagcaaca

SEQ ID NO: 1692880 - DNA, 15 bp, Homo sapiens
ttttctgagcaacaa

SEQ ID NO: 1692881 - DNA, 15 bp, Homo sapiens
tttctgagcaacaaa

SEQ ID NO: 1692882 - DNA, 15 bp, Homo sapiens
ttctgagcaacaaac

SEQ ID NO: 1692883 - DNA, 15 bp, Homo sapiens
tctgagcaacaaact

SEQ ID NO: 1692884 - DNA, 15 bp, Homo sapiens
ctgagcaacaaactg

SEQ ID NO: 1692885 - DNA, 15 bp, Homo sapiens
tgagcaacaaactgt

SEQ ID NO: 1692886 - DNA, 15 bp, Homo sapiens
gagcaacaaactgtc

SEQ ID NO: 1692887 - DNA, 15 bp, Homo sapiens
agcaacaaactgtcc

SEQ ID NO: 1692888 - DNA, 15 bp, Homo sapiens
gcaacaaactgtcca

SEQ ID NO: 1692889 - DNA, 15 bp, Homo sapiens
caacaaactgtccat

SEQ ID NO: 1692890 - DNA, 15 bp, Homo sapiens
aacaaactgtccatg

SEQ ID NO: 1692891 - DNA, 15 bp, Homo sapiens
acaaactgtccatga

SEQ ID NO: 1692892 - DNA, 15 bp, Homo sapiens
caaactgtccatgag

SEQ ID NO: 1692893 - DNA, 15 bp, Homo sapiens
aaactgtccatgaga

SEQ ID NO: 1692894 - DNA, 15 bp, Homo sapiens
aactgtccatgagaa

SEQ ID NO: 1692895 - DNA, 15 bp, Homo sapiens
actgtccatgagaaa

SEQ ID NO: 1692896 - DNA, 15 bp, Homo sapiens
ctgtccatgagaaag

SEQ ID NO: 1692897 - DNA, 15 bp, Homo sapiens
tgtccatgagaaaga

SEQ ID NO: 1692898 - DNA, 15 bp, Homo sapiens
gtccatgagaaagaa

SEQ ID NO: 1692899 - DNA, 15 bp, Homo sapiens
tccatgagaaagaat

SEQ ID NO: 1692900 - DNA, 15 bp, Homo sapiens
ccatgagaaagaata

SEQ ID NO: 1692901 - DNA, 15 bp, Homo sapiens
catgagaaagaatat

SEQ ID NO: 1692902 - DNA, 15 bp, Homo sapiens
atgagaaagaatata

SEQ ID NO: 1692903 - DNA, 15 bp, Homo sapiens
tgagaaagaatatat

SEQ ID NO: 1692904 - DNA, 15 bp, Homo sapiens
gagaaagaatatatc

SEQ ID NO: 1692905 - DNA, 15 bp, Homo sapiens
agaaagaatatatct

SEQ ID NO: 1692906 - DNA, 15 bp, Homo sapiens
gaaagaatatatctg

SEQ ID NO: 1692907 - DNA, 15 bp, Homo sapiens
aaagaatatatctgt

SEQ ID NO: 1692908 - DNA, 15 bp, Homo sapiens
aagaatatatctgta

SEQ ID NO: 1692909 - DNA, 15 bp, Homo sapiens
agaatatatctgtaa

SEQ ID NO: 1692910 - DNA, 15 bp, Homo sapiens
gaatatatctgtaaa

SEQ ID NO: 1692911 - DNA, 15 bp, Homo sapiens
aatatatctgtaaaa

SEQ ID NO: 1692912 - DNA, 15 bp, Homo sapiens
atatatctgtaaaat

SEQ ID NO: 1692913 - DNA, 15 bp, Homo sapiens
tatatctgtaaaatg

SEQ ID NO: 1692914 - DNA, 15 bp, Homo sapiens
atatctgtaaaatgc

SEQ ID NO: 1692915 - DNA, 15 bp, Homo sapiens
tatctgtaaaatgca

SEQ ID NO: 1692916 - DNA, 15 bp, Homo sapiens
atctgtaaaatgcac

SEQ ID NO: 1692917 - DNA, 15 bp, Homo sapiens
tctgtaaaatgcacc

SEQ ID NO: 1692918 - DNA, 15 bp, Homo sapiens
ctgtaaaatgcacct

SEQ ID NO: 1692919 - DNA, 15 bp, Homo sapiens
tgtaaaatgcaccta

SEQ ID NO: 1692920 - DNA, 15 bp, Homo sapiens
gtaaaatgcacctat

SEQ ID NO: 1692921 - DNA, 15 bp, Homo sapiens
taaaatgcacctatg

SEQ ID NO: 1692922 - DNA, 15 bp, Homo sapiens
aaaatgcacctatgt

SEQ ID NO: 1692923 - DNA, 15 bp, Homo sapiens
aaatgcacctatgta

SEQ ID NO: 1692924 - DNA, 15 bp, Homo sapiens
aatgcacctatgtaa

SEQ ID NO: 1692925 - DNA, 15 bp, Homo sapiens
atgcacctatgtaac

SEQ ID NO: 1692926 - DNA, 15 bp, Homo sapiens
tgcacctatgtaact

SEQ ID NO: 1692927 - DNA, 15 bp, Homo sapiens
gcacctatgtaactt

SEQ ID NO: 1692928 - DNA, 15 bp, Homo sapiens
cacctatgtaacttt

SEQ ID NO: 1692929 - DNA, 15 bp, Homo sapiens
acctatgtaactttt

SEQ ID NO: 1692930 - DNA, 15 bp, Homo sapiens
cctatgtaacttttt

SEQ ID NO: 1692931 - DNA, 15 bp, Homo sapiens
ctatgtaacttttta

SEQ ID NO: 1692932 - DNA, 15 bp, Homo sapiens
tatgtaactttttag

SEQ ID NO: 1692933 - DNA, 15 bp, Homo sapiens
atgtaactttttagc

SEQ ID NO: 1692934 - DNA, 15 bp, Homo sapiens
tgtaactttttagct

SEQ ID NO: 1692935 - DNA, 15 bp, Homo sapiens
gtaactttttagctt

SEQ ID NO: 1692936 - DNA, 15 bp, Homo sapiens
taactttttagcttt

SEQ ID NO: 1692937 - DNA, 15 bp, Homo sapiens
aactttttagctttt

SEQ ID NO: 1692938 - DNA, 15 bp, Homo sapiens
actttttagctttta

SEQ ID NO: 1692939 - DNA, 15 bp, Homo sapiens
ctttttagcttttat

SEQ ID NO: 1692940 - DNA, 15 bp, Homo sapiens
tttttagcttttata

SEQ ID NO: 1692941 - DNA, 15 bp, Homo sapiens
ttttagcttttatat

SEQ ID NO: 1692942 - DNA, 15 bp, Homo sapiens
tttagcttttatatt

SEQ ID NO: 1692943 - DNA, 15 bp, Homo sapiens
ttagcttttatatta

SEQ ID NO: 1692944 - DNA, 15 bp, Homo sapiens
tagcttttatattag

SEQ ID NO: 1692945 - DNA, 15 bp, Homo sapiens
agcttttatattaga

SEQ ID NO: 1692946 - DNA, 15 bp, Homo sapiens
gcttttatattagat

SEQ ID NO: 1692947 - DNA, 15 bp, Homo sapiens
cttttatattagata

SEQ ID NO: 1692948 - DNA, 15 bp, Homo sapiens
ttttatattagataa

SEQ ID NO: 1692949 - DNA, 15 bp, Homo sapiens
tttatattagataat

SEQ ID NO: 1692950 - DNA, 15 bp, Homo sapiens
ttatattagataatc

SEQ ID NO: 1692951 - DNA, 15 bp, Homo sapiens
tatattagataatca

SEQ ID NO: 1692952 - DNA, 15 bp, Homo sapiens
atattagataatcag

SEQ ID NO: 1692953 - DNA, 15 bp, Homo sapiens
tattagataatcagc

SEQ ID NO: 1692954 - DNA, 15 bp, Homo sapiens
attagataatcagca

SEQ ID NO: 1692955 - DNA, 15 bp, Homo sapiens
ttagataatcagcat

SEQ ID NO: 1692956 - DNA, 15 bp, Homo sapiens
tagataatcagcatt

SEQ ID NO: 1692957 - DNA, 15 bp, Homo sapiens
agataatcagcattt

SEQ ID NO: 1692958 - DNA, 15 bp, Homo sapiens
gataatcagcatttt

SEQ ID NO: 1692959 - DNA, 15 bp, Homo sapiens
ataatcagcattttc

SEQ ID NO: 1692960 - DNA, 15 bp, Homo sapiens
taatcagcattttct

SEQ ID NO: 1692961 - DNA, 15 bp, Homo sapiens
aatcagcattttctc

SEQ ID NO: 1692962 - DNA, 15 bp, Homo sapiens
atcagcattttctcc

SEQ ID NO: 1692963 - DNA, 15 bp, Homo sapiens
tcagcattttctcct

SEQ ID NO: 1692964 - DNA, 15 bp, Homo sapiens
cagcattttctcctt

SEQ ID NO: 1692965 - DNA, 15 bp, Homo sapiens
agcattttctccttg

SEQ ID NO: 1692966 - DNA, 15 bp, Homo sapiens
gcattttctccttga

SEQ ID NO: 1692967 - DNA, 15 bp, Homo sapiens
cattttctccttgag

SEQ ID NO: 1692968 - DNA, 15 bp, Homo sapiens
attttctccttgaga

SEQ ID NO: 1692969 - DNA, 15 bp, Homo sapiens
ttttctccttgagag

SEQ ID NO: 1692970 - DNA, 15 bp, Homo sapiens
tttctccttgagagg

SEQ ID NO: 1692971 - DNA, 15 bp, Homo sapiens
ttctccttgagaggt

SEQ ID NO: 1692972 - DNA, 15 bp, Homo sapiens
tctccttgagaggtt

SEQ ID NO: 1692973 - DNA, 15 bp, Homo sapiens
ctccttgagaggttg

SEQ ID NO: 1692974 - DNA, 15 bp, Homo sapiens
tccttgagaggttgc

SEQ ID NO: 1692975 - DNA, 15 bp, Homo sapiens
ccttgagaggttgcc

SEQ ID NO: 1692976 - DNA, 15 bp, Homo sapiens
cttgagaggttgccc

SEQ ID NO: 1692977 - DNA, 15 bp, Homo sapiens
ttgagaggttgcccc

SEQ ID NO: 1692978 - DNA, 15 bp, Homo sapiens
tgagaggttgcccct

SEQ ID NO: 1692979 - DNA, 15 bp, Homo sapiens
gagaggttgcccctt

SEQ ID NO: 1692980 - DNA, 15 bp, Homo sapiens
agaggttgcccctta

SEQ ID NO: 1692981 - DNA, 15 bp, Homo sapiens
gaggttgccccttag

SEQ ID NO: 1692982 - DNA, 15 bp, Homo sapiens
aggttgccccttagg

SEQ ID NO: 1692983 - DNA, 15 bp, Homo sapiens
ggttgccccttaggc

SEQ ID NO: 1692984 - DNA, 15 bp, Homo sapiens
gttgccccttaggcc

SEQ ID NO: 1692985 - DNA, 15 bp, Homo sapiens
ttgccccttaggcct

SEQ ID NO: 1692986 - DNA, 15 bp, Homo sapiens
tgccccttaggccta

SEQ ID NO: 1692987 - DNA, 15 bp, Homo sapiens
gccccttaggcctaa

SEQ ID NO: 1692988 - DNA, 15 bp, Homo sapiens
ccccttaggcctaag

SEQ ID NO: 1692989 - DNA, 15 bp, Homo sapiens
cccttaggcctaagt

SEQ ID NO: 1692990 - DNA, 15 bp, Homo sapiens
ccttaggcctaagtc

SEQ ID NO: 1692991 - DNA, 15 bp, Homo sapiens
cttaggcctaagtca

SEQ ID NO: 1692992 - DNA, 15 bp, Homo sapiens
ttaggcctaagtcag

SEQ ID NO: 1692993 - DNA, 15 bp, Homo sapiens
taggcctaagtcaga

SEQ ID NO: 1692994 - DNA, 15 bp, Homo sapiens
aggcctaagtcagag

SEQ ID NO: 1692995 - DNA, 15 bp, Homo sapiens
ggcctaagtcagagt

SEQ ID NO: 1692996 - DNA, 15 bp, Homo sapiens
gcctaagtcagagtt

SEQ ID NO: 1692997 - DNA, 15 bp, Homo sapiens
cctaagtcagagtta

SEQ ID NO: 1692998 - DNA, 15 bp, Homo sapiens
ctaagtcagagttaa

SEQ ID NO: 1692999 - DNA, 15 bp, Homo sapiens
taagtcagagttaat

SEQ ID NO: 1693000 - DNA, 15 bp, Homo sapiens
aagtcagagttaata

SEQ ID NO: 1693001 - DNA, 15 bp, Homo sapiens
agtcagagttaatag

SEQ ID NO: 1693002 - DNA, 15 bp, Homo sapiens
gtcagagttaataga

SEQ ID NO: 1693003 - DNA, 15 bp, Homo sapiens
tcagagttaatagat

SEQ ID NO: 1693004 - DNA, 15 bp, Homo sapiens
cagagttaatagatt

SEQ ID NO: 1693005 - DNA, 15 bp, Homo sapiens
agagttaatagatta

SEQ ID NO: 1693006 - DNA, 15 bp, Homo sapiens
gagttaatagattaa

SEQ ID NO: 1693007 - DNA, 15 bp, Homo sapiens
agttaatagattaaa

SEQ ID NO: 1693008 - DNA, 15 bp, Homo sapiens
gttaatagattaaat

SEQ ID NO: 1693009 - DNA, 15 bp, Homo sapiens
ttaatagattaaata

SEQ ID NO: 1693010 - DNA, 15 bp, Homo sapiens
taatagattaaataa

SEQ ID NO: 1693011 - DNA, 15 bp, Homo sapiens
aatagattaaataat

SEQ ID NO: 1693012 - DNA, 15 bp, Homo sapiens
atagattaaataata

SEQ ID NO: 1693013 - DNA, 15 bp, Homo sapiens
tagattaaataatag

SEQ ID NO: 1693014 - DNA, 15 bp, Homo sapiens
agattaaataatagt

SEQ ID NO: 1693015 - DNA, 15 bp, Homo sapiens
gattaaataatagta

SEQ ID NO: 1693016 - DNA, 15 bp, Homo sapiens
attaaataatagtaa

SEQ ID NO: 1693017 - DNA, 15 bp, Homo sapiens
ttaaataatagtaaa

SEQ ID NO: 1693018 - DNA, 15 bp, Homo sapiens
taaataatagtaaat

SEQ ID NO: 1693019 - DNA, 15 bp, Homo sapiens
aaataatagtaaatg

SEQ ID NO: 1693020 - DNA, 15 bp, Homo sapiens
aataatagtaaatga

SEQ ID NO: 1693021 - DNA, 15 bp, Homo sapiens
ataatagtaaatgaa

SEQ ID NO: 1693022 - DNA, 15 bp, Homo sapiens
taatagtaaatgaac

SEQ ID NO: 1693023 - DNA, 15 bp, Homo sapiens
aatagtaaatgaaca

SEQ ID NO: 1693024 - DNA, 15 bp, Homo sapiens
atagtaaatgaacag

SEQ ID NO: 1693025 - DNA, 15 bp, Homo sapiens
tagtaaatgaacaga

SEQ ID NO: 1693026 - DNA, 15 bp, Homo sapiens
agtaaatgaacagaa

SEQ ID NO: 1693027 - DNA, 15 bp, Homo sapiens
gtaaatgaacagaat

SEQ ID NO: 1693028 - DNA, 15 bp, Homo sapiens
taaatgaacagaatg

SEQ ID NO: 1693029 - DNA, 15 bp, Homo sapiens
aaatgaacagaatgt

SEQ ID NO: 1693030 - DNA, 15 bp, Homo sapiens
aatgaacagaatgtt

SEQ ID NO: 1693031 - DNA, 15 bp, Homo sapiens
atgaacagaatgttt

SEQ ID NO: 1693032 - DNA, 15 bp, Homo sapiens
tgaacagaatgtttt

SEQ ID NO: 1693033 - DNA, 15 bp, Homo sapiens
gaacagaatgttttc

SEQ ID NO: 1693034 - DNA, 15 bp, Homo sapiens
aacagaatgttttca

SEQ ID NO: 1693035 - DNA, 15 bp, Homo sapiens
acagaatgttttcaa

SEQ ID NO: 1693036 - DNA, 15 bp, Homo sapiens
cagaatgttttcaac

SEQ ID NO: 1693037 - DNA, 15 bp, Homo sapiens
agaatgttttcaacc

SEQ ID NO: 1693038 - DNA, 15 bp, Homo sapiens
gaatgttttcaacct

SEQ ID NO: 1693039 - DNA, 15 bp, Homo sapiens
aatgttttcaaccta

SEQ ID NO: 1693040 - DNA, 15 bp, Homo sapiens
atgttttcaacctaa

SEQ ID NO: 1693041 - DNA, 15 bp, Homo sapiens
tgttttcaacctaat

SEQ ID NO: 1693042 - DNA, 15 bp, Homo sapiens
gttttcaacctaata

SEQ ID NO: 1693043 - DNA, 15 bp, Homo sapiens
ttttcaacctaataa

SEQ ID NO: 1693044 - DNA, 15 bp, Homo sapiens
tttcaacctaataaa

SEQ ID NO: 1693045 - DNA, 15 bp, Homo sapiens
ttcaacctaataaat

SEQ ID NO: 1693046 - DNA, 15 bp, Homo sapiens
tcaacctaataaata

SEQ ID NO: 1693047 - DNA, 15 bp, Homo sapiens
caacctaataaataa

SEQ ID NO: 1693048 - DNA, 15 bp, Homo sapiens
aacctaataaataaa

SEQ ID NO: 1693049 - DNA, 15 bp, Homo sapiens
acctaataaataaac

SEQ ID NO: 1693050 - DNA, 15 bp, Homo sapiens
cctaataaataaacg

SEQ ID NO: 1693051 - DNA, 15 bp, Homo sapiens
ctaataaataaacga

SEQ ID NO: 1693052 - DNA, 15 bp, Homo sapiens
taataaataaacgac

SEQ ID NO: 1693053 - DNA, 15 bp, Homo sapiens
aataaataaacgaca

SEQ ID NO: 1693054 - DNA, 15 bp, Homo sapiens
ataaataaacgacaa

SEQ ID NO: 1693055 - DNA, 15 bp, Homo sapiens
taaataaacgacaag

SEQ ID NO: 1693056 - DNA, 15 bp, Homo sapiens
aaataaacgacaagt

SEQ ID NO: 1693057 - DNA, 15 bp, Homo sapiens
aataaacgacaagta

SEQ ID NO: 1693058 - DNA, 15 bp, Homo sapiens
ataaacgacaagtaa

SEQ ID NO: 1693059 - DNA, 15 bp, Homo sapiens
taaacgacaagtaac

SEQ ID NO: 1693060 - DNA, 15 bp, Homo sapiens
aaacgacaagtaact

SEQ ID NO: 1693061 - DNA, 15 bp, Homo sapiens
aacgacaagtaacta

SEQ ID NO: 1693062 - DNA, 15 bp, Homo sapiens
acgacaagtaactaa

SEQ ID NO: 1693063 - DNA, 15 bp, Homo sapiens
cgacaagtaactaaa

SEQ ID NO: 1693064 - DNA, 15 bp, Homo sapiens
gacaagtaactaaat

SEQ ID NO: 1693065 - DNA, 15 bp, Homo sapiens
acaagtaactaaatt

SEQ ID NO: 1693066 - DNA, 15 bp, Homo sapiens
caagtaactaaatta

SEQ ID NO: 1693067 - DNA, 15 bp, Homo sapiens
aagtaactaaattac

SEQ ID NO: 1693068 - DNA, 15 bp, Homo sapiens
agtaactaaattacc

SEQ ID NO: 1693069 - DNA, 15 bp, Homo sapiens
gtaactaaattacca

SEQ ID NO: 1693070 - DNA, 15 bp, Homo sapiens
taactaaattaccag

SEQ ID NO: 1693071 - DNA, 15 bp, Homo sapiens
aactaaattaccaga

SEQ ID NO: 1693072 - DNA, 15 bp, Homo sapiens
actaaattaccagaa

SEQ ID NO: 1693073 - DNA, 15 bp, Homo sapiens
ctaaattaccagaat

SEQ ID NO: 1693074 - DNA, 15 bp, Homo sapiens
taaattaccagaatt

SEQ ID NO: 1693075 - DNA, 15 bp, Homo sapiens
aaattaccagaattg

SEQ ID NO: 1693076 - DNA, 15 bp, Homo sapiens
aattaccagaattgg

SEQ ID NO: 1693077 - DNA, 15 bp, Homo sapiens
attaccagaattgga

SEQ ID NO: 1693078 - DNA, 15 bp, Homo sapiens
ttaccagaattggat

SEQ ID NO: 1693079 - DNA, 15 bp, Homo sapiens
taccagaattggatg

SEQ ID NO: 1693080 - DNA, 15 bp, Homo sapiens
accagaattggatgg

SEQ ID NO: 1693081 - DNA, 15 bp, Homo sapiens
ccagaattggatgga

SEQ ID NO: 1693082 - DNA, 15 bp, Homo sapiens
cagaattggatggaa

SEQ ID NO: 1693083 - DNA, 15 bp, Homo sapiens
agaattggatggaat

SEQ ID NO: 1693084 - DNA, 15 bp, Homo sapiens
gaattggatggaatg

SEQ ID NO: 1693085 - DNA, 15 bp, Homo sapiens
aattggatggaatgc

SEQ ID NO: 1693086 - DNA, 15 bp, Homo sapiens
attggatggaatgca

SEQ ID NO: 1693087 - DNA, 15 bp, Homo sapiens
ttggatggaatgcac

SEQ ID NO: 1693088 - DNA, 15 bp, Homo sapiens
tggatggaatgcact

SEQ ID NO: 1693089 - DNA, 15 bp, Homo sapiens
ggatggaatgcactc

SEQ ID NO: 1693090 - DNA, 15 bp, Homo sapiens
gatggaatgcactca

SEQ ID NO: 1693091 - DNA, 15 bp, Homo sapiens
atggaatgcactcaa

SEQ ID NO: 1693092 - DNA, 15 bp, Homo sapiens
tggaatgcactcaag

SEQ ID NO: 1693093 - DNA, 15 bp, Homo sapiens
ggaatgcactcaaga

SEQ ID NO: 1693094 - DNA, 15 bp, Homo sapiens
gaatgcactcaagac

SEQ ID NO: 1693095 - DNA, 15 bp, Homo sapiens
aatgcactcaagaca

SEQ ID NO: 1693096 - DNA, 15 bp, Homo sapiens
atgcactcaagacat

SEQ ID NO: 1693097 - DNA, 15 bp, Homo sapiens
tgcactcaagacatg

SEQ ID NO: 1693098 - DNA, 15 bp, Homo sapiens
gcactcaagacatgt

SEQ ID NO: 1693099 - DNA, 15 bp, Homo sapiens
cactcaagacatgtg

SEQ ID NO: 1693100 - DNA, 15 bp, Homo sapiens
actcaagacatgtgt

SEQ ID NO: 1693101 - DNA, 15 bp, Homo sapiens
ctcaagacatgtgtg

SEQ ID NO: 1693102 - DNA, 15 bp, Homo sapiens
tcaagacatgtgtgt

SEQ ID NO: 1693103 - DNA, 15 bp, Homo sapiens
caagacatgtgtgtt

SEQ ID NO: 1693104 - DNA, 15 bp, Homo sapiens
aagacatgtgtgttt

SEQ ID NO: 1693105 - DNA, 15 bp, Homo sapiens
agacatgtgtgtttg

SEQ ID NO: 1693106 - DNA, 15 bp, Homo sapiens
gacatgtgtgtttgt

SEQ ID NO: 1693107 - DNA, 15 bp, Homo sapiens
acatgtgtgtttgtg

SEQ ID NO: 1693108 - DNA, 15 bp, Homo sapiens
catgtgtgtttgtgt

SEQ ID NO: 1693109 - DNA, 15 bp, Homo sapiens
atgtgtgtttgtgtg

SEQ ID NO: 1693110 - DNA, 15 bp, Homo sapiens
gtgtgtttgtgtgtg

SEQ ID NO: 1693111 - DNA, 15 bp, Homo sapiens
gtttgtgtgtgtgtg

SEQ ID NO: 1693112 - DNA, 15 bp, Homo sapiens
tgtgtgtgtgtgtcg

SEQ ID NO: 1693113 - DNA, 15 bp, Homo sapiens
gtgtgtgtgtgtcgg

SEQ ID NO: 1693114 - DNA, 15 bp, Homo sapiens
tgtgtgtgtgtcggg

SEQ ID NO: 1693115 - DNA, 15 bp, Homo sapiens
gtgtgtgtgtcgggg

SEQ ID NO: 1693116 - DNA, 15 bp, Homo sapiens
tgtgtgtgtcggggc

SEQ ID NO: 1693117 - DNA, 15 bp, Homo sapiens
gtgtgtgtcggggct

SEQ ID NO: 1693118 - DNA, 15 bp, Homo sapiens
tgtgtgtcggggctg

SEQ ID NO: 1693119 - DNA, 15 bp, Homo sapiens
gtgtgtcggggctgc

SEQ ID NO: 1693120 - DNA, 15 bp, Homo sapiens
tgtgtcggggctgca

SEQ ID NO: 1693121 - DNA, 15 bp, Homo sapiens
gtgtcggggctgcag

SEQ ID NO: 1693122 - DNA, 15 bp, Homo sapiens
tgtcggggctgcagg

SEQ ID NO: 1693123 - DNA, 15 bp, Homo sapiens
gtcggggctgcaggg

SEQ ID NO: 1693124 - DNA, 15 bp, Homo sapiens
tcggggctgcagggg

SEQ ID NO: 1693125 - DNA, 15 bp, Homo sapiens
cggggctgcaggggg

SEQ ID NO: 1693126 - DNA, 15 bp, Homo sapiens
ggggctgcagggggt

SEQ ID NO: 1693127 - DNA, 15 bp, Homo sapiens
gggctgcagggggtg

SEQ ID NO: 1693128 - DNA, 15 bp, Homo sapiens
ggctgcagggggtgg

SEQ ID NO: 1693129 - DNA, 15 bp, Homo sapiens
gctgcagggggtggt

SEQ ID NO: 1693130 - DNA, 15 bp, Homo sapiens
ctgcagggggtggta

SEQ ID NO: 1693131 - DNA, 15 bp, Homo sapiens
tgcagggggtggtag

SEQ ID NO: 1693132 - DNA, 15 bp, Homo sapiens
gcagggggtggtagg

SEQ ID NO: 1693133 - DNA, 15 bp, Homo sapiens
cagggggtggtaggg

SEQ ID NO: 1693134 - DNA, 15 bp, Homo sapiens
agggggtggtaggga

SEQ ID NO: 1693135 - DNA, 15 bp, Homo sapiens
gggggtggtagggag

SEQ ID NO: 1693136 - DNA, 15 bp, Homo sapiens
ggggtggtagggagg

SEQ ID NO: 1693137 - DNA, 15 bp, Homo sapiens
gggtggtagggaggg

SEQ ID NO: 1693138 - DNA, 15 bp, Homo sapiens
ggtggtagggagggg

SEQ ID NO: 1693139 - DNA, 15 bp, Homo sapiens
gtggtagggaggggg

SEQ ID NO: 1693140 - DNA, 15 bp, Homo sapiens
tggtagggagggggg

SEQ ID NO: 1693141 - DNA, 15 bp, Homo sapiens
ggtagggaggggggc

SEQ ID NO: 1693142 - DNA, 15 bp, Homo sapiens
gtagggaggggggcg

SEQ ID NO: 1693143 - DNA, 15 bp, Homo sapiens
tagggaggggggcgc

SEQ ID NO: 1693144 - DNA, 15 bp, Homo sapiens
agggaggggggcgca

SEQ ID NO: 1693145 - DNA, 15 bp, Homo sapiens
gggaggggggcgcat

SEQ ID NO: 1693146 - DNA, 15 bp, Homo sapiens
ggaggggggcgcatg

SEQ ID NO: 1693147 - DNA, 15 bp, Homo sapiens
gaggggggcgcatgc

SEQ ID NO: 1693148 - DNA, 15 bp, Homo sapiens
aggggggcgcatgca

SEQ ID NO: 1693149 - DNA, 15 bp, Homo sapiens
ggggggcgcatgcat

SEQ ID NO: 1693150 - DNA, 15 bp, Homo sapiens
gggggcgcatgcatg

SEQ ID NO: 1693151 - DNA, 15 bp, Homo sapiens
ggggcgcatgcatgt

SEQ ID NO: 1693152 - DNA, 15 bp, Homo sapiens
gggcgcatgcatgta

SEQ ID NO: 1693153 - DNA, 15 bp, Homo sapiens
ggcgcatgcatgtat

SEQ ID NO: 1693154 - DNA, 15 bp, Homo sapiens
gcgcatgcatgtatg

SEQ ID NO: 1693155 - DNA, 15 bp, Homo sapiens
cgcatgcatgtatgt

SEQ ID NO: 1693156 - DNA, 15 bp, Homo sapiens
gcatgcatgtatgtg

SEQ ID NO: 1693157 - DNA, 15 bp, Homo sapiens
catgcatgtatgtga

SEQ ID NO: 1693158 - DNA, 15 bp, Homo sapiens
atgcatgtatgtgaa

SEQ ID NO: 1693159 - DNA, 15 bp, Homo sapiens
tgcatgtatgtgaac

SEQ ID NO: 1693160 - DNA, 15 bp, Homo sapiens
gcatgtatgtgaact

SEQ ID NO: 1693161 - DNA, 15 bp, Homo sapiens
catgtatgtgaactc

SEQ ID NO: 1693162 - DNA, 15 bp, Homo sapiens
atgtatgtgaactct

SEQ ID NO: 1693163 - DNA, 15 bp, Homo sapiens
tgtatgtgaactctg

SEQ ID NO: 1693164 - DNA, 15 bp, Homo sapiens
gtatgtgaactctgg

SEQ ID NO: 1693165 - DNA, 15 bp, Homo sapiens
tatgtgaactctggg

SEQ ID NO: 1693166 - DNA, 15 bp, Homo sapiens
atgtgaactctgggt

SEQ ID NO: 1693167 - DNA, 15 bp, Homo sapiens
tgtgaactctgggtg

SEQ ID NO: 1693168 - DNA, 15 bp, Homo sapiens
gtgaactctgggtga

SEQ ID NO: 1693169 - DNA, 15 bp, Homo sapiens
tgaactctgggtgaa

SEQ ID NO: 1693170 - DNA, 15 bp, Homo sapiens
gaactctgggtgaac

SEQ ID NO: 1693171 - DNA, 15 bp, Homo sapiens
aactctgggtgaact

SEQ ID NO: 1693172 - DNA, 15 bp, Homo sapiens
actctgggtgaactc

SEQ ID NO: 1693173 - DNA, 15 bp, Homo sapiens
ctctgggtgaactct

SEQ ID NO: 1693174 - DNA, 15 bp, Homo sapiens
tctgggtgaactctc

SEQ ID NO: 1693175 - DNA, 15 bp, Homo sapiens
ctgggtgaactctct

SEQ ID NO: 1693176 - DNA, 15 bp, Homo sapiens
tgggtgaactctctg

SEQ ID NO: 1693177 - DNA, 15 bp, Homo sapiens
gggtgaactctctga

SEQ ID NO: 1693178 - DNA, 15 bp, Homo sapiens
ggtgaactctctgaa

SEQ ID NO: 1693179 - DNA, 15 bp, Homo sapiens
gtgaactctctgaag

SEQ ID NO: 1693180 - DNA, 15 bp, Homo sapiens
tgaactctctgaagc

SEQ ID NO: 1693181 - DNA, 15 bp, Homo sapiens
gaactctctgaagca

SEQ ID NO: 1693182 - DNA, 15 bp, Homo sapiens
aactctctgaagcat

SEQ ID NO: 1693183 - DNA, 15 bp, Homo sapiens
actctctgaagcatt

SEQ ID NO: 1693184 - DNA, 15 bp, Homo sapiens
ctctctgaagcatta

SEQ ID NO: 1693185 - DNA, 15 bp, Homo sapiens
tctctgaagcattat

SEQ ID NO: 1693186 - DNA, 15 bp, Homo sapiens
ctctgaagcattatc

SEQ ID NO: 1693187 - DNA, 15 bp, Homo sapiens
tctgaagcattatcc

SEQ ID NO: 1693188 - DNA, 15 bp, Homo sapiens
ctgaagcattatcca

SEQ ID NO: 1693189 - DNA, 15 bp, Homo sapiens
tgaagcattatccag

SEQ ID NO: 1693190 - DNA, 15 bp, Homo sapiens
gaagcattatccaga

SEQ ID NO: 1693191 - DNA, 15 bp, Homo sapiens
aagcattatccagaa

SEQ ID NO: 1693192 - DNA, 15 bp, Homo sapiens
agcattatccagaat

SEQ ID NO: 1693193 - DNA, 15 bp, Homo sapiens
gcattatccagaatc

SEQ ID NO: 1693194 - DNA, 15 bp, Homo sapiens
cattatccagaatct

SEQ ID NO: 1693195 - DNA, 15 bp, Homo sapiens
attatccagaatctc

SEQ ID NO: 1693196 - DNA, 15 bp, Homo sapiens
ttatccagaatctca

SEQ ID NO: 1693197 - DNA, 15 bp, Homo sapiens
tatccagaatctcaa

SEQ ID NO: 1693198 - DNA, 15 bp, Homo sapiens
atccagaatctcaac

SEQ ID NO: 1693199 - DNA, 15 bp, Homo sapiens
tccagaatctcaact

SEQ ID NO: 1693200 - DNA, 15 bp, Homo sapiens
ccagaatctcaactg

SEQ ID NO: 1693201 - DNA, 15 bp, Homo sapiens
cagaatctcaactgc

SEQ ID NO: 1693202 - DNA, 15 bp, Homo sapiens
agaatctcaactgca

SEQ ID NO: 1693203 - DNA, 15 bp, Homo sapiens
gaatctcaactgcac

SEQ ID NO: 1693204 - DNA, 15 bp, Homo sapiens
aatctcaactgcaca

SEQ ID NO: 1693205 - DNA, 15 bp, Homo sapiens
atctcaactgcacag

SEQ ID NO: 1693206 - DNA, 15 bp, Homo sapiens
tctcaactgcacagg

SEQ ID NO: 1693207 - DNA, 15 bp, Homo sapiens
ctcaactgcacaggt

SEQ ID NO: 1693208 - DNA, 15 bp, Homo sapiens
tcaactgcacaggtc

SEQ ID NO: 1693209 - DNA, 15 bp, Homo sapiens
caactgcacaggtca

SEQ ID NO: 1693210 - DNA, 15 bp, Homo sapiens
aactgcacaggtcag

SEQ ID NO: 1693211 - DNA, 15 bp, Homo sapiens
actgcacaggtcagt

SEQ ID NO: 1693212 - DNA, 15 bp, Homo sapiens
ctgcacaggtcagta

SEQ ID NO: 1693213 - DNA, 15 bp, Homo sapiens
tgcacaggtcagtaa

SEQ ID NO: 1693214 - DNA, 15 bp, Homo sapiens
gcacaggtcagtaag

SEQ ID NO: 1693215 - DNA, 15 bp, Homo sapiens
cacaggtcagtaagt

SEQ ID NO: 1693216 - DNA, 15 bp, Homo sapiens
acaggtcagtaagtg

SEQ ID NO: 1693217 - DNA, 15 bp, Homo sapiens
caggtcagtaagtga

SEQ ID NO: 1693218 - DNA, 15 bp, Homo sapiens
aggtcagtaagtgat

SEQ ID NO: 1693219 - DNA, 15 bp, Homo sapiens
ggtcagtaagtgatg

SEQ ID NO: 1693220 - DNA, 15 bp, Homo sapiens
gtcagtaagtgatgt

SEQ ID NO: 1693221 - DNA, 15 bp, Homo sapiens
tcagtaagtgatgtt

SEQ ID NO: 1693222 - DNA, 15 bp, Homo sapiens
cagtaagtgatgtta

SEQ ID NO: 1693223 - DNA, 15 bp, Homo sapiens
agtaagtgatgttat

SEQ ID NO: 1693224 - DNA, 15 bp, Homo sapiens
gtaagtgatgttatt

SEQ ID NO: 1693225 - DNA, 15 bp, Homo sapiens
taagtgatgttatta

SEQ ID NO: 1693226 - DNA, 15 bp, Homo sapiens
aagtgatgttattac

SEQ ID NO: 1693227 - DNA, 15 bp, Homo sapiens
agtgatgttattaca

SEQ ID NO: 1693228 - DNA, 15 bp, Homo sapiens
gtgatgttattacac

SEQ ID NO: 1693229 - DNA, 15 bp, Homo sapiens
tgatgttattacacc

SEQ ID NO: 1693230 - DNA, 15 bp, Homo sapiens
gatgttattacaccc

SEQ ID NO: 1693231 - DNA, 15 bp, Homo sapiens
atgttattacaccca

SEQ ID NO: 1693232 - DNA, 15 bp, Homo sapiens
tgttattacacccat

SEQ ID NO: 1693233 - DNA, 15 bp, Homo sapiens
gttattacacccatt

SEQ ID NO: 1693234 - DNA, 15 bp, Homo sapiens
ttattacacccattt

SEQ ID NO: 1693235 - DNA, 15 bp, Homo sapiens
tattacacccatttt

SEQ ID NO: 1693236 - DNA, 15 bp, Homo sapiens
attacacccatttta

SEQ ID NO: 1693237 - DNA, 15 bp, Homo sapiens
ttacacccattttac

SEQ ID NO: 1693238 - DNA, 15 bp, Homo sapiens
tacacccattttaca

SEQ ID NO: 1693239 - DNA, 15 bp, Homo sapiens
acacccattttacag

SEQ ID NO: 1693240 - DNA, 15 bp, Homo sapiens
cacccattttacaga

SEQ ID NO: 1693241 - DNA, 15 bp, Homo sapiens
acccattttacagaa

SEQ ID NO: 1693242 - DNA, 15 bp, Homo sapiens
cccattttacagaag

SEQ ID NO: 1693243 - DNA, 15 bp, Homo sapiens
ccattttacagaaga

SEQ ID NO: 1693244 - DNA, 15 bp, Homo sapiens
tacagaagaggaaac

SEQ ID NO: 1693245 - DNA, 15 bp, Homo sapiens
acagaagaggaaaca

SEQ ID NO: 1693246 - DNA, 15 bp, Homo sapiens
cagaagaggaaacag

SEQ ID NO: 1693247 - DNA, 15 bp, Homo sapiens
agaagaggaaacaga

SEQ ID NO: 1693248 - DNA, 15 bp, Homo sapiens
gaagaggaaacagag

SEQ ID NO: 1693249 - DNA, 15 bp, Homo sapiens
aagaggaaacagagg

SEQ ID NO: 1693250 - DNA, 15 bp, Homo sapiens
agaggaaacagaggt

SEQ ID NO: 1693251 - DNA, 15 bp, Homo sapiens
gaggaaacagaggtc

SEQ ID NO: 1693252 - DNA, 15 bp, Homo sapiens
aggaaacagaggtca

SEQ ID NO: 1693253 - DNA, 15 bp, Homo sapiens
ggaaacagaggtcac

SEQ ID NO: 1693254 - DNA, 15 bp, Homo sapiens
gaaacagaggtcact

SEQ ID NO: 1693255 - DNA, 15 bp, Homo sapiens
aaacagaggtcactg

SEQ ID NO: 1693256 - DNA, 15 bp, Homo sapiens
aacagaggtcactgt

SEQ ID NO: 1693257 - DNA, 15 bp, Homo sapiens
acagaggtcactgta

SEQ ID NO: 1693258 - DNA, 15 bp, Homo sapiens
cagaggtcactgtat

SEQ ID NO: 1693259 - DNA, 15 bp, Homo sapiens
agaggtcactgtatt

SEQ ID NO: 1693260 - DNA, 15 bp, Homo sapiens
gaggtcactgtattg

SEQ ID NO: 1693261 - DNA, 15 bp, Homo sapiens
aggtcactgtattgg

SEQ ID NO: 1693262 - DNA, 15 bp, Homo sapiens
ggtcactgtattggg

SEQ ID NO: 1693263 - DNA, 15 bp, Homo sapiens
gtcactgtattgggt

SEQ ID NO: 1693264 - DNA, 15 bp, Homo sapiens
tcactgtattgggtg

SEQ ID NO: 1693265 - DNA, 15 bp, Homo sapiens
cactgtattgggtga

SEQ ID NO: 1693266 - DNA, 15 bp, Homo sapiens
actgtattgggtgat

SEQ ID NO: 1693267 - DNA, 15 bp, Homo sapiens
ctgtattgggtgatt

SEQ ID NO: 1693268 - DNA, 15 bp, Homo sapiens
tgtattgggtgattg

SEQ ID NO: 1693269 - DNA, 15 bp, Homo sapiens
gtattgggtgattga

SEQ ID NO: 1693270 - DNA, 15 bp, Homo sapiens
tattgggtgattgaa

SEQ ID NO: 1693271 - DNA, 15 bp, Homo sapiens
attgggtgattgaag

SEQ ID NO: 1693272 - DNA, 15 bp, Homo sapiens
ttgggtgattgaaga

SEQ ID NO: 1693273 - DNA, 15 bp, Homo sapiens
tgggtgattgaagaa

SEQ ID NO: 1693274 - DNA, 15 bp, Homo sapiens
gggtgattgaagaag

SEQ ID NO: 1693275 - DNA, 15 bp, Homo sapiens
ggtgattgaagaagg

SEQ ID NO: 1693276 - DNA, 15 bp, Homo sapiens
gtgattgaagaaggg

SEQ ID NO: 1693277 - DNA, 15 bp, Homo sapiens
tgattgaagaagggt

SEQ ID NO: 1693278 - DNA, 15 bp, Homo sapiens
gattgaagaagggtt

SEQ ID NO: 1693279 - DNA, 15 bp, Homo sapiens
attgaagaagggttg

SEQ ID NO: 1693280 - DNA, 15 bp, Homo sapiens
ttgaagaagggttgt

SEQ ID NO: 1693281 - DNA, 15 bp, Homo sapiens
tgaagaagggttgtt

SEQ ID NO: 1693282 - DNA, 15 bp, Homo sapiens
gaagaagggttgtta

SEQ ID NO: 1693283 - DNA, 15 bp, Homo sapiens
aagaagggttgttag

SEQ ID NO: 1693284 - DNA, 15 bp, Homo sapiens
agaagggttgttagt

SEQ ID NO: 1693285 - DNA, 15 bp, Homo sapiens
gaagggttgttagtg

SEQ ID NO: 1693286 - DNA, 15 bp, Homo sapiens
aagggttgttagtga

SEQ ID NO: 1693287 - DNA, 15 bp, Homo sapiens
agggttgttagtgag

SEQ ID NO: 1693288 - DNA, 15 bp, Homo sapiens
gggttgttagtgagt

SEQ ID NO: 1693289 - DNA, 15 bp, Homo sapiens
ggttgttagtgagta

SEQ ID NO: 1693290 - DNA, 15 bp, Homo sapiens
gttgttagtgagtat

SEQ ID NO: 1693291 - DNA, 15 bp, Homo sapiens
ttgttagtgagtatt

SEQ ID NO: 1693292 - DNA, 15 bp, Homo sapiens
tgttagtgagtattg

SEQ ID NO: 1693293 - DNA, 15 bp, Homo sapiens
gttagtgagtattga

SEQ ID NO: 1693294 - DNA, 15 bp, Homo sapiens
ttagtgagtattgat

SEQ ID NO: 1693295 - DNA, 15 bp, Homo sapiens
tagtgagtattgatt

SEQ ID NO: 1693296 - DNA, 15 bp, Homo sapiens
agtgagtattgattt

SEQ ID NO: 1693297 - DNA, 15 bp, Homo sapiens
gtgagtattgatttt

SEQ ID NO: 1693298 - DNA, 15 bp, Homo sapiens
tgagtattgattttt

SEQ ID NO: 1693299 - DNA, 15 bp, Homo sapiens
gagtattgatttttt

SEQ ID NO: 1693300 - DNA, 15 bp, Homo sapiens
agtattgattttttt

SEQ ID NO: 1693301 - DNA, 15 bp, Homo sapiens
gtattgatttttttt

SEQ ID NO: 1693302 - DNA, 15 bp, Homo sapiens
tattgattttttttt

SEQ ID NO: 1693303 - DNA, 15 bp, Homo sapiens
attgatttttttttt

SEQ ID NO: 1693304 - DNA, 15 bp, Homo sapiens
ttgattttttttttt

SEQ ID NO: 1693305 - DNA, 15 bp, Homo sapiens
gatttttttttttcc

SEQ ID NO: 1693306 - DNA, 15 bp, Homo sapiens
atttttttttttcca

SEQ ID NO: 1693307 - DNA, 15 bp, Homo sapiens
ttttttttttccaaa

SEQ ID NO: 1693308 - DNA, 15 bp, Homo sapiens
tttttttttccaaac

SEQ ID NO: 1693309 - DNA, 15 bp, Homo sapiens
ttttttttccaaaca

SEQ ID NO: 1693310 - DNA, 15 bp, Homo sapiens
tttttttccaaacat

SEQ ID NO: 1693311 - DNA, 15 bp, Homo sapiens
ttttttccaaacata

SEQ ID NO: 1693312 - DNA, 15 bp, Homo sapiens
tttttccaaacatac

SEQ ID NO: 1693313 - DNA, 15 bp, Homo sapiens
ttttccaaacatact

SEQ ID NO: 1693314 - DNA, 15 bp, Homo sapiens
tttccaaacatactt

SEQ ID NO: 1693315 - DNA, 15 bp, Homo sapiens
ttccaaacatacttc

SEQ ID NO: 1693316 - DNA, 15 bp, Homo sapiens
tccaaacatacttca

SEQ ID NO: 1693317 - DNA, 15 bp, Homo sapiens
ccaaacatacttcag

SEQ ID NO: 1693318 - DNA, 15 bp, Homo sapiens
caaacatacttcaga

SEQ ID NO: 1693319 - DNA, 15 bp, Homo sapiens
aaacatacttcagaa

SEQ ID NO: 1693320 - DNA, 15 bp, Homo sapiens
aacatacttcagaag

SEQ ID NO: 1693321 - DNA, 15 bp, Homo sapiens
acatacttcagaagt

SEQ ID NO: 1693322 - DNA, 15 bp, Homo sapiens
catacttcagaagtt

SEQ ID NO: 1693323 - DNA, 15 bp, Homo sapiens
atacttcagaagttg

SEQ ID NO: 1693324 - DNA, 15 bp, Homo sapiens
tacttcagaagttgc

SEQ ID NO: 1693325 - DNA, 15 bp, Homo sapiens
acttcagaagttgct

SEQ ID NO: 1693326 - DNA, 15 bp, Homo sapiens
cttcagaagttgctg

SEQ ID NO: 1693327 - DNA, 15 bp, Homo sapiens
ttcagaagttgctgt

SEQ ID NO: 1693328 - DNA, 15 bp, Homo sapiens
tcagaagttgctgta

SEQ ID NO: 1693329 - DNA, 15 bp, Homo sapiens
cagaagttgctgtat

SEQ ID NO: 1693330 - DNA, 15 bp, Homo sapiens
agaagttgctgtata

SEQ ID NO: 1693331 - DNA, 15 bp, Homo sapiens
gaagttgctgtataa

SEQ ID NO: 1693332 - DNA, 15 bp, Homo sapiens
aagttgctgtataaa

SEQ ID NO: 1693333 - DNA, 15 bp, Homo sapiens
agttgctgtataaat

SEQ ID NO: 1693334 - DNA, 15 bp, Homo sapiens
gttgctgtataaatt

SEQ ID NO: 1693335 - DNA, 15 bp, Homo sapiens
ttgctgtataaattg

SEQ ID NO: 1693336 - DNA, 15 bp, Homo sapiens
tgctgtataaattgt

SEQ ID NO: 1693337 - DNA, 15 bp, Homo sapiens
gctgtataaattgta

SEQ ID NO: 1693338 - DNA, 15 bp, Homo sapiens
ctgtataaattgtat

SEQ ID NO: 1693339 - DNA, 15 bp, Homo sapiens
tgtataaattgtata

SEQ ID NO: 1693340 - DNA, 15 bp, Homo sapiens
gtataaattgtatag

SEQ ID NO: 1693341 - DNA, 15 bp, Homo sapiens
tataaattgtatagg

SEQ ID NO: 1693342 - DNA, 15 bp, Homo sapiens
ataaattgtataggc

SEQ ID NO: 1693343 - DNA, 15 bp, Homo sapiens
taaattgtataggcc

SEQ ID NO: 1693344 - DNA, 15 bp, Homo sapiens
aaattgtataggcca

SEQ ID NO: 1693345 - DNA, 15 bp, Homo sapiens
aattgtataggccag

SEQ ID NO: 1693346 - DNA, 15 bp, Homo sapiens
attgtataggccagt

SEQ ID NO: 1693347 - DNA, 15 bp, Homo sapiens
ttgtataggccagta

SEQ ID NO: 1693348 - DNA, 15 bp, Homo sapiens
tgtataggccagtat

SEQ ID NO: 1693349 - DNA, 15 bp, Homo sapiens
gtataggccagtata

SEQ ID NO: 1693350 - DNA, 15 bp, Homo sapiens
tataggccagtatac

SEQ ID NO: 1693351 - DNA, 15 bp, Homo sapiens
ataggccagtatact

SEQ ID NO: 1693352 - DNA, 15 bp, Homo sapiens
taggccagtatactt

SEQ ID NO: 1693353 - DNA, 15 bp, Homo sapiens
aggccagtatacttc

SEQ ID NO: 1693354 - DNA, 15 bp, Homo sapiens
ggccagtatacttct

SEQ ID NO: 1693355 - DNA, 15 bp, Homo sapiens
gccagtatacttctc

SEQ ID NO: 1693356 - DNA, 15 bp, Homo sapiens
ccagtatacttctcg

SEQ ID NO: 1693357 - DNA, 15 bp, Homo sapiens
cagtatacttctcgc

SEQ ID NO: 1693358 - DNA, 15 bp, Homo sapiens
agtatacttctcgcc

SEQ ID NO: 1693359 - DNA, 15 bp, Homo sapiens
gtatacttctcgcct

SEQ ID NO: 1693360 - DNA, 15 bp, Homo sapiens
tatacttctcgcctt

SEQ ID NO: 1693361 - DNA, 15 bp, Homo sapiens
atacttctcgcctta

SEQ ID NO: 1693362 - DNA, 15 bp, Homo sapiens
tacttctcgccttag

SEQ ID NO: 1693363 - DNA, 15 bp, Homo sapiens
acttctcgccttagt

SEQ ID NO: 1693364 - DNA, 15 bp, Homo sapiens
cttctcgccttagta

SEQ ID NO: 1693365 - DNA, 15 bp, Homo sapiens
ttctcgccttagtaa

SEQ ID NO: 1693366 - DNA, 15 bp, Homo sapiens
tctcgccttagtaac

SEQ ID NO: 1693367 - DNA, 15 bp, Homo sapiens
ctcgccttagtaaca

SEQ ID NO: 1693368 - DNA, 15 bp, Homo sapiens
tcgccttagtaacag

SEQ ID NO: 1693369 - DNA, 15 bp, Homo sapiens
cgccttagtaacagc

SEQ ID NO: 1693370 - DNA, 15 bp, Homo sapiens
gccttagtaacagcc

SEQ ID NO: 1693371 - DNA, 15 bp, Homo sapiens
ccttagtaacagcct

SEQ ID NO: 1693372 - DNA, 15 bp, Homo sapiens
cttagtaacagcctg

SEQ ID NO: 1693373 - DNA, 15 bp, Homo sapiens
ttagtaacagcctgg

SEQ ID NO: 1693374 - DNA, 15 bp, Homo sapiens
tagtaacagcctggc

SEQ ID NO: 1693375 - DNA, 15 bp, Homo sapiens
agtaacagcctggca

SEQ ID NO: 1693376 - DNA, 15 bp, Homo sapiens
gtaacagcctggcaa

SEQ ID NO: 1693377 - DNA, 15 bp, Homo sapiens
taacagcctggcaaa

SEQ ID NO: 1693378 - DNA, 15 bp, Homo sapiens
aacagcctggcaaaa

SEQ ID NO: 1693379 - DNA, 15 bp, Homo sapiens
acagcctggcaaaat

SEQ ID NO: 1693380 - DNA, 15 bp, Homo sapiens
cagcctggcaaaatg

SEQ ID NO: 1693381 - DNA, 15 bp, Homo sapiens
agcctggcaaaatgt

SEQ ID NO: 1693382 - DNA, 15 bp, Homo sapiens
gcctggcaaaatgtt

SEQ ID NO: 1693383 - DNA, 15 bp, Homo sapiens
cctggcaaaatgtta

SEQ ID NO: 1693384 - DNA, 15 bp, Homo sapiens
ctggcaaaatgttaa

SEQ ID NO: 1693385 - DNA, 15 bp, Homo sapiens
tggcaaaatgttaaa

SEQ ID NO: 1693386 - DNA, 15 bp, Homo sapiens
ggcaaaatgttaaaa

SEQ ID NO: 1693387 - DNA, 15 bp, Homo sapiens
gcaaaatgttaaaat

SEQ ID NO: 1693388 - DNA, 15 bp, Homo sapiens
caaaatgttaaaatc

SEQ ID NO: 1693389 - DNA, 15 bp, Homo sapiens
aaaatgttaaaatca

SEQ ID NO: 1693390 - DNA, 15 bp, Homo sapiens
aaatgttaaaatcac

SEQ ID NO: 1693391 - DNA, 15 bp, Homo sapiens
aatgttaaaatcact

SEQ ID NO: 1693392 - DNA, 15 bp, Homo sapiens
atgttaaaatcactc

SEQ ID NO: 1693393 - DNA, 15 bp, Homo sapiens
tgttaaaatcactca

SEQ ID NO: 1693394 - DNA, 15 bp, Homo sapiens
gttaaaatcactcaa

SEQ ID NO: 1693395 - DNA, 15 bp, Homo sapiens
ttaaaatcactcaaa

SEQ ID NO: 1693396 - DNA, 15 bp, Homo sapiens
taaaatcactcaaag

SEQ ID NO: 1693397 - DNA, 15 bp, Homo sapiens
aaaatcactcaaagt

SEQ ID NO: 1693398 - DNA, 15 bp, Homo sapiens
aaatcactcaaagtg

SEQ ID NO: 1693399 - DNA, 15 bp, Homo sapiens
aatcactcaaagtgc

SEQ ID NO: 1693400 - DNA, 15 bp, Homo sapiens
atcactcaaagtgct

SEQ ID NO: 1693401 - DNA, 15 bp, Homo sapiens
tcactcaaagtgctg

SEQ ID NO: 1693402 - DNA, 15 bp, Homo sapiens
cactcaaagtgctga

SEQ ID NO: 1693403 - DNA, 15 bp, Homo sapiens
actcaaagtgctgag

SEQ ID NO: 1693404 - DNA, 15 bp, Homo sapiens
ctcaaagtgctgagt

SEQ ID NO: 1693405 - DNA, 15 bp, Homo sapiens
tcaaagtgctgagtt

SEQ ID NO: 1693406 - DNA, 15 bp, Homo sapiens
caaagtgctgagtta

SEQ ID NO: 1693407 - DNA, 15 bp, Homo sapiens
aaagtgctgagttaa

SEQ ID NO: 1693408 - DNA, 15 bp, Homo sapiens
aagtgctgagttaag

SEQ ID NO: 1693409 - DNA, 15 bp, Homo sapiens
agtgctgagttaagg

SEQ ID NO: 1693410 - DNA, 15 bp, Homo sapiens
gtgctgagttaaggc

SEQ ID NO: 1693411 - DNA, 15 bp, Homo sapiens
tgctgagttaaggct

SEQ ID NO: 1693412 - DNA, 15 bp, Homo sapiens
gctgagttaaggctg

SEQ ID NO: 1693413 - DNA, 15 bp, Homo sapiens
ctgagttaaggctgg

SEQ ID NO: 1693414 - DNA, 15 bp, Homo sapiens
tgagttaaggctggg

SEQ ID NO: 1693415 - DNA, 15 bp, Homo sapiens
gagttaaggctgggc

SEQ ID NO: 1693416 - DNA, 15 bp, Homo sapiens
agttaaggctgggca

SEQ ID NO: 1693417 - DNA, 15 bp, Homo sapiens
gttaaggctgggcat

SEQ ID NO: 1693418 - DNA, 15 bp, Homo sapiens
ttaaggctgggcatg

SEQ ID NO: 1693419 - DNA, 15 bp, Homo sapiens
taaggctgggcatgg

SEQ ID NO: 1693420 - DNA, 15 bp, Homo sapiens
aaggctgggcatggt

SEQ ID NO: 1693421 - DNA, 15 bp, Homo sapiens
aggctgggcatggtg

SEQ ID NO: 1693422 - DNA, 15 bp, Homo sapiens
cctgtagtcccagca

SEQ ID NO: 1693423 - DNA, 15 bp, Homo sapiens
gcgggcagatcactt

SEQ ID NO: 1693424 - DNA, 15 bp, Homo sapiens
gccaggagttcaaac

SEQ ID NO: 1693425 - DNA, 15 bp, Homo sapiens
ccaggagttcaaacc

SEQ ID NO: 1693426 - DNA, 15 bp, Homo sapiens
caggagttcaaacca

SEQ ID NO: 1693427 - DNA, 15 bp, Homo sapiens
aggagttcaaaccag

SEQ ID NO: 1693428 - DNA, 15 bp, Homo sapiens
ggagttcaaaccagc

SEQ ID NO: 1693429 - DNA, 15 bp, Homo sapiens
gagttcaaaccagcc

SEQ ID NO: 1693430 - DNA, 15 bp, Homo sapiens
agttcaaaccagcct

SEQ ID NO: 1693431 - DNA, 15 bp, Homo sapiens
gttcaaaccagcctg

SEQ ID NO: 1693432 - DNA, 15 bp, Homo sapiens
ttcaaaccagcctgg

SEQ ID NO: 1693433 - DNA, 15 bp, Homo sapiens
tcaaaccagcctggc

SEQ ID NO: 1693434 - DNA, 15 bp, Homo sapiens
caaaccagcctggcc

SEQ ID NO: 1693435 - DNA, 15 bp, Homo sapiens
cctggccaaaatggc

SEQ ID NO: 1693436 - DNA, 15 bp, Homo sapiens
ctggccaaaatggcg

SEQ ID NO: 1693437 - DNA, 15 bp, Homo sapiens
tggccaaaatggcga

SEQ ID NO: 1693438 - DNA, 15 bp, Homo sapiens
ggccaaaatggcgaa

SEQ ID NO: 1693439 - DNA, 15 bp, Homo sapiens
gccaaaatggcgaat

SEQ ID NO: 1693440 - DNA, 15 bp, Homo sapiens
ccaaaatggcgaatc

SEQ ID NO: 1693441 - DNA, 15 bp, Homo sapiens
caaaatggcgaatcc

SEQ ID NO: 1693442 - DNA, 15 bp, Homo sapiens
aaaatggcgaatccc

SEQ ID NO: 1693443 - DNA, 15 bp, Homo sapiens
aaatggcgaatcccc

SEQ ID NO: 1693444 - DNA, 15 bp, Homo sapiens
aatggcgaatcccca

SEQ ID NO: 1693445 - DNA, 15 bp, Homo sapiens
atggcgaatccccat

SEQ ID NO: 1693446 - DNA, 15 bp, Homo sapiens
tggcgaatccccatc

SEQ ID NO: 1693447 - DNA, 15 bp, Homo sapiens
ggcgaatccccatca

SEQ ID NO: 1693448 - DNA, 15 bp, Homo sapiens
gcgaatccccatcac

SEQ ID NO: 1693449 - DNA, 15 bp, Homo sapiens
cgaatccccatcact

SEQ ID NO: 1693450 - DNA, 15 bp, Homo sapiens
gaatccccatcacta

SEQ ID NO: 1693451 - DNA, 15 bp, Homo sapiens
aatccccatcactac

SEQ ID NO: 1693452 - DNA, 15 bp, Homo sapiens
atccccatcactact

SEQ ID NO: 1693453 - DNA, 15 bp, Homo sapiens
tccccatcactacta

SEQ ID NO: 1693454 - DNA, 15 bp, Homo sapiens
ccccatcactactaa

SEQ ID NO: 1693455 - DNA, 15 bp, Homo sapiens
cccatcactactaaa

SEQ ID NO: 1693456 - DNA, 15 bp, Homo sapiens
ccatcactactaaaa

SEQ ID NO: 1693457 - DNA, 15 bp, Homo sapiens
catcactactaaaaa

SEQ ID NO: 1693458 - DNA, 15 bp, Homo sapiens
atcactactaaaaat

SEQ ID NO: 1693459 - DNA, 15 bp, Homo sapiens
tcactactaaaaata

SEQ ID NO: 1693460 - DNA, 15 bp, Homo sapiens
cactactaaaaatac

SEQ ID NO: 1693461 - DNA, 15 bp, Homo sapiens
actactaaaaataca

SEQ ID NO: 1693462 - DNA, 15 bp, Homo sapiens
attatctgggcgtga

SEQ ID NO: 1693463 - DNA, 15 bp, Homo sapiens
ttatctgggcgtgat

SEQ ID NO: 1693464 - DNA, 15 bp, Homo sapiens
tatctgggcgtgatg

SEQ ID NO: 1693465 - DNA, 15 bp, Homo sapiens
atctgggcgtgatgg

SEQ ID NO: 1693466 - DNA, 15 bp, Homo sapiens
tctgggcgtgatggc

SEQ ID NO: 1693467 - DNA, 15 bp, Homo sapiens
ctgggcgtgatggcg

SEQ ID NO: 1693468 - DNA, 15 bp, Homo sapiens
tgggcgtgatggcgc

SEQ ID NO: 1693469 - DNA, 15 bp, Homo sapiens
gggcgtgatggcgca

SEQ ID NO: 1693470 - DNA, 15 bp, Homo sapiens
ggcgtgatggcgcat

SEQ ID NO: 1693471 - DNA, 15 bp, Homo sapiens
gcgtgatggcgcata

SEQ ID NO: 1693472 - DNA, 15 bp, Homo sapiens
cgtgatggcgcatac

SEQ ID NO: 1693473 - DNA, 15 bp, Homo sapiens
gtgatggcgcatact

SEQ ID NO: 1693474 - DNA, 15 bp, Homo sapiens
tgatggcgcatactt

SEQ ID NO: 1693475 - DNA, 15 bp, Homo sapiens
gatggcgcatacttg

SEQ ID NO: 1693476 - DNA, 15 bp, Homo sapiens
atggcgcatacttgt

SEQ ID NO: 1693477 - DNA, 15 bp, Homo sapiens
tggcgcatacttgta

SEQ ID NO: 1693478 - DNA, 15 bp, Homo sapiens
ggcgcatacttgtaa

SEQ ID NO: 1693479 - DNA, 15 bp, Homo sapiens
gcgcatacttgtaat

SEQ ID NO: 1693480 - DNA, 15 bp, Homo sapiens
cgcatacttgtaatc

SEQ ID NO: 1693481 - DNA, 15 bp, Homo sapiens
gcatacttgtaatcc

SEQ ID NO: 1693482 - DNA, 15 bp, Homo sapiens
catacttgtaatccc

SEQ ID NO: 1693483 - DNA, 15 bp, Homo sapiens
atacttgtaatccca

SEQ ID NO: 1693484 - DNA, 15 bp, Homo sapiens
tacttgtaatcccag

SEQ ID NO: 1693485 - DNA, 15 bp, Homo sapiens
acttgtaatcccagc

SEQ ID NO: 1693486 - DNA, 15 bp, Homo sapiens
cccagctactaaggt

SEQ ID NO: 1693487 - DNA, 15 bp, Homo sapiens
ccagctactaaggtg

SEQ ID NO: 1693488 - DNA, 15 bp, Homo sapiens
cagctactaaggtgg

SEQ ID NO: 1693489 - DNA, 15 bp, Homo sapiens
agctactaaggtggc

SEQ ID NO: 1693490 - DNA, 15 bp, Homo sapiens
gctactaaggtggct

SEQ ID NO: 1693491 - DNA, 15 bp, Homo sapiens
ctactaaggtggctg

SEQ ID NO: 1693492 - DNA, 15 bp, Homo sapiens
tactaaggtggctga

SEQ ID NO: 1693493 - DNA, 15 bp, Homo sapiens
actaaggtggctgag

SEQ ID NO: 1693494 - DNA, 15 bp, Homo sapiens
ctaaggtggctgagg

SEQ ID NO: 1693495 - DNA, 15 bp, Homo sapiens
taaggtggctgaggc

SEQ ID NO: 1693496 - DNA, 15 bp, Homo sapiens
aaggtggctgaggca

SEQ ID NO: 1693497 - DNA, 15 bp, Homo sapiens
aggtggctgaggcat

SEQ ID NO: 1693498 - DNA, 15 bp, Homo sapiens
ggtggctgaggcatg

SEQ ID NO: 1693499 - DNA, 15 bp, Homo sapiens
gtggctgaggcatga

SEQ ID NO: 1693500 - DNA, 15 bp, Homo sapiens
tggctgaggcatgag

SEQ ID NO: 1693501 - DNA, 15 bp, Homo sapiens
ggctgaggcatgaga

SEQ ID NO: 1693502 - DNA, 15 bp, Homo sapiens
gctgaggcatgagaa

SEQ ID NO: 1693503 - DNA, 15 bp, Homo sapiens
ctgaggcatgagaat

SEQ ID NO: 1693504 - DNA, 15 bp, Homo sapiens
gcatgagaattgctt

SEQ ID NO: 1693505 - DNA, 15 bp, Homo sapiens
cccaggaggcagagt

SEQ ID NO: 1693506 - DNA, 15 bp, Homo sapiens
ccaggaggcagagtt

SEQ ID NO: 1693507 - DNA, 15 bp, Homo sapiens
caggaggcagagttt

SEQ ID NO: 1693508 - DNA, 15 bp, Homo sapiens
aggaggcagagtttg

SEQ ID NO: 1693509 - DNA, 15 bp, Homo sapiens
ggaggcagagtttga

SEQ ID NO: 1693510 - DNA, 15 bp, Homo sapiens
gaggcagagtttgaa

SEQ ID NO: 1693511 - DNA, 15 bp, Homo sapiens
aggcagagtttgaag

SEQ ID NO: 1693512 - DNA, 15 bp, Homo sapiens
ggcagagtttgaagt

SEQ ID NO: 1693513 - DNA, 15 bp, Homo sapiens
gcagagtttgaagtt

SEQ ID NO: 1693514 - DNA, 15 bp, Homo sapiens
cagagtttgaagtta

SEQ ID NO: 1693515 - DNA, 15 bp, Homo sapiens
agagtttgaagttag

SEQ ID NO: 1693516 - DNA, 15 bp, Homo sapiens
gagtttgaagttagc

SEQ ID NO: 1693517 - DNA, 15 bp, Homo sapiens
agtttgaagttagct

SEQ ID NO: 1693518 - DNA, 15 bp, Homo sapiens
gtttgaagttagcta

SEQ ID NO: 1693519 - DNA, 15 bp, Homo sapiens
tttgaagttagctaa

SEQ ID NO: 1693520 - DNA, 15 bp, Homo sapiens
ttgaagttagctaag

SEQ ID NO: 1693521 - DNA, 15 bp, Homo sapiens
tgaagttagctaaga

SEQ ID NO: 1693522 - DNA, 15 bp, Homo sapiens
gaagttagctaagat

SEQ ID NO: 1693523 - DNA, 15 bp, Homo sapiens
aagttagctaagatc

SEQ ID NO: 1693524 - DNA, 15 bp, Homo sapiens
agttagctaagatca

SEQ ID NO: 1693525 - DNA, 15 bp, Homo sapiens
gttagctaagatcac

SEQ ID NO: 1693526 - DNA, 15 bp, Homo sapiens
ttagctaagatcacc

SEQ ID NO: 1693527 - DNA, 15 bp, Homo sapiens
tagctaagatcaccc

SEQ ID NO: 1693528 - DNA, 15 bp, Homo sapiens
agctaagatcacccc

SEQ ID NO: 1693529 - DNA, 15 bp, Homo sapiens
gctaagatcacccca

SEQ ID NO: 1693530 - DNA, 15 bp, Homo sapiens
ctaagatcaccccac

SEQ ID NO: 1693531 - DNA, 15 bp, Homo sapiens
taagatcaccccact

SEQ ID NO: 1693532 - DNA, 15 bp, Homo sapiens
aagatcaccccactg

SEQ ID NO: 1693533 - DNA, 15 bp, Homo sapiens
agatcaccccactgc

SEQ ID NO: 1693534 - DNA, 15 bp, Homo sapiens
gatcaccccactgca

SEQ ID NO: 1693535 - DNA, 15 bp, Homo sapiens
atcaccccactgcac

SEQ ID NO: 1693536 - DNA, 15 bp, Homo sapiens
tcaccccactgcact

SEQ ID NO: 1693537 - DNA, 15 bp, Homo sapiens
caccccactgcactc

SEQ ID NO: 1693538 - DNA, 15 bp, Homo sapiens
accccactgcactcc

SEQ ID NO: 1693539 - DNA, 15 bp, Homo sapiens
ccccactgcactcca

SEQ ID NO: 1693540 - DNA, 15 bp, Homo sapiens
cccactgcactccag

SEQ ID NO: 1693541 - DNA, 15 bp, Homo sapiens
gtgagactctgtccg

SEQ ID NO: 1693542 - DNA, 15 bp, Homo sapiens
tgagactctgtccgc

SEQ ID NO: 1693543 - DNA, 15 bp, Homo sapiens
gagactctgtccgcc

SEQ ID NO: 1693544 - DNA, 15 bp, Homo sapiens
agactctgtccgccc

SEQ ID NO: 1693545 - DNA, 15 bp, Homo sapiens
gactctgtccgcccc

SEQ ID NO: 1693546 - DNA, 15 bp, Homo sapiens
actctgtccgccccc

SEQ ID NO: 1693547 - DNA, 15 bp, Homo sapiens
ctctgtccgccccct

SEQ ID NO: 1693548 - DNA, 15 bp, Homo sapiens
tctgtccgccccctc

SEQ ID NO: 1693549 - DNA, 15 bp, Homo sapiens
ctgtccgccccctcc

SEQ ID NO: 1693550 - DNA, 15 bp, Homo sapiens
tgtccgccccctccc

SEQ ID NO: 1693551 - DNA, 15 bp, Homo sapiens
gtccgccccctccct

SEQ ID NO: 1693552 - DNA, 15 bp, Homo sapiens
tccgccccctccctc

SEQ ID NO: 1693553 - DNA, 15 bp, Homo sapiens
ccgccccctccctcc

SEQ ID NO: 1693554 - DNA, 15 bp, Homo sapiens
cgccccctccctccc

SEQ ID NO: 1693555 - DNA, 15 bp, Homo sapiens
gccccctccctcccc

SEQ ID NO: 1693556 - DNA, 15 bp, Homo sapiens
ccccctccctcccca

SEQ ID NO: 1693557 - DNA, 15 bp, Homo sapiens
cccctccctccccac

SEQ ID NO: 1693558 - DNA, 15 bp, Homo sapiens
ccctccctccccaca

SEQ ID NO: 1693559 - DNA, 15 bp, Homo sapiens
cctccctccccacaa

SEQ ID NO: 1693560 - DNA, 15 bp, Homo sapiens
ctccctccccacaaa

SEQ ID NO: 1693561 - DNA, 15 bp, Homo sapiens
tccctccccacaaaa

SEQ ID NO: 1693562 - DNA, 15 bp, Homo sapiens
ccctccccacaaaaa

SEQ ID NO: 1693563 - DNA, 15 bp, Homo sapiens
cctccccacaaaaaa

SEQ ID NO: 1693564 - DNA, 15 bp, Homo sapiens
ctccccacaaaaaaa

SEQ ID NO: 1693565 - DNA, 15 bp, Homo sapiens
tccccacaaaaaaaa

SEQ ID NO: 1693566 - DNA, 15 bp, Homo sapiens
ccccacaaaaaaaaa

SEQ ID NO: 1693567 - DNA, 15 bp, Homo sapiens
cccacaaaaaaaaaa

SEQ ID NO: 1693568 - DNA, 15 bp, Homo sapiens
cacaaaaaaaaaaag

SEQ ID NO: 1693569 - DNA, 15 bp, Homo sapiens
acaaaaaaaaaaaga

SEQ ID NO: 1693570 - DNA, 15 bp, Homo sapiens
caaaaaaaaaaagaa

SEQ ID NO: 1693571 - DNA, 15 bp, Homo sapiens
agaaaagaaaagaag

SEQ ID NO: 1693572 - DNA, 15 bp, Homo sapiens
gaaaagaaaagaagg

SEQ ID NO: 1693573 - DNA, 15 bp, Homo sapiens
agaaaagaaggaaaa

SEQ ID NO: 1693574 - DNA, 15 bp, Homo sapiens
gaaaagaaggaaaaa

SEQ ID NO: 1693575 - DNA, 15 bp, Homo sapiens
aaaagaaggaaaaag

SEQ ID NO: 1693576 - DNA, 15 bp, Homo sapiens
aaagaaggaaaaaga

SEQ ID NO: 1693577 - DNA, 15 bp, Homo sapiens
aagaaggaaaaagat

SEQ ID NO: 1693578 - DNA, 15 bp, Homo sapiens
agaaggaaaaagatg

SEQ ID NO: 1693579 - DNA, 15 bp, Homo sapiens
gaaggaaaaagatgc

SEQ ID NO: 1693580 - DNA, 15 bp, Homo sapiens
aaggaaaaagatgct

SEQ ID NO: 1693581 - DNA, 15 bp, Homo sapiens
aggaaaaagatgcta

SEQ ID NO: 1693582 - DNA, 15 bp, Homo sapiens
ggaaaaagatgctac

SEQ ID NO: 1693583 - DNA, 15 bp, Homo sapiens
gaaaaagatgctacg

SEQ ID NO: 1693584 - DNA, 15 bp, Homo sapiens
aaaaagatgctacgt

SEQ ID NO: 1693585 - DNA, 15 bp, Homo sapiens
aaaagatgctacgtt

SEQ ID NO: 1693586 - DNA, 15 bp, Homo sapiens
aaagatgctacgtta

SEQ ID NO: 1693587 - DNA, 15 bp, Homo sapiens
aagatgctacgttaa

SEQ ID NO: 1693588 - DNA, 15 bp, Homo sapiens
agatgctacgttaag

SEQ ID NO: 1693589 - DNA, 15 bp, Homo sapiens
gatgctacgttaaga

SEQ ID NO: 1693590 - DNA, 15 bp, Homo sapiens
atgctacgttaagag

SEQ ID NO: 1693591 - DNA, 15 bp, Homo sapiens
tgctacgttaagaga

SEQ ID NO: 1693592 - DNA, 15 bp, Homo sapiens
gctacgttaagagag

SEQ ID NO: 1693593 - DNA, 15 bp, Homo sapiens
ctacgttaagagaga

SEQ ID NO: 1693594 - DNA, 15 bp, Homo sapiens
tacgttaagagagag

SEQ ID NO: 1693595 - DNA, 15 bp, Homo sapiens
acgttaagagagaga

SEQ ID NO: 1693596 - DNA, 15 bp, Homo sapiens
cgttaagagagagaa

SEQ ID NO: 1693597 - DNA, 15 bp, Homo sapiens
gttaagagagagaat

SEQ ID NO: 1693598 - DNA, 15 bp, Homo sapiens
ttaagagagagaatc

SEQ ID NO: 1693599 - DNA, 15 bp, Homo sapiens
taagagagagaatca

SEQ ID NO: 1693600 - DNA, 15 bp, Homo sapiens
aagagagagaatcaa

SEQ ID NO: 1693601 - DNA, 15 bp, Homo sapiens
agagagagaatcaaa

SEQ ID NO: 1693602 - DNA, 15 bp, Homo sapiens
gagagagaatcaaat

SEQ ID NO: 1693603 - DNA, 15 bp, Homo sapiens
agagagaatcaaatt

SEQ ID NO: 1693604 - DNA, 15 bp, Homo sapiens
gagagaatcaaattc

SEQ ID NO: 1693605 - DNA, 15 bp, Homo sapiens
agagaatcaaattct

SEQ ID NO: 1693606 - DNA, 15 bp, Homo sapiens
gagaatcaaattcta

SEQ ID NO: 1693607 - DNA, 15 bp, Homo sapiens
agaatcaaattctag

SEQ ID NO: 1693608 - DNA, 15 bp, Homo sapiens
gaatcaaattctagt

SEQ ID NO: 1693609 - DNA, 15 bp, Homo sapiens
aatcaaattctagta

SEQ ID NO: 1693610 - DNA, 15 bp, Homo sapiens
atcaaattctagtat

SEQ ID NO: 1693611 - DNA, 15 bp, Homo sapiens
tcaaattctagtatt

SEQ ID NO: 1693612 - DNA, 15 bp, Homo sapiens
caaattctagtattt

SEQ ID NO: 1693613 - DNA, 15 bp, Homo sapiens
aaattctagtatttg

SEQ ID NO: 1693614 - DNA, 15 bp, Homo sapiens
aattctagtatttgt

SEQ ID NO: 1693615 - DNA, 15 bp, Homo sapiens
attctagtatttgtg

SEQ ID NO: 1693616 - DNA, 15 bp, Homo sapiens
ttctagtatttgtgg

SEQ ID NO: 1693617 - DNA, 15 bp, Homo sapiens
tctagtatttgtgga

SEQ ID NO: 1693618 - DNA, 15 bp, Homo sapiens
ctagtatttgtggaa

SEQ ID NO: 1693619 - DNA, 15 bp, Homo sapiens
tagtatttgtggaac

SEQ ID NO: 1693620 - DNA, 15 bp, Homo sapiens
agtatttgtggaacc

SEQ ID NO: 1693621 - DNA, 15 bp, Homo sapiens
gtatttgtggaaccg

SEQ ID NO: 1693622 - DNA, 15 bp, Homo sapiens
tatttgtggaaccgc

SEQ ID NO: 1693623 - DNA, 15 bp, Homo sapiens
atttgtggaaccgca

SEQ ID NO: 1693624 - DNA, 15 bp, Homo sapiens
tttgtggaaccgcat

SEQ ID NO: 1693625 - DNA, 15 bp, Homo sapiens
ttgtggaaccgcatt

SEQ ID NO: 1693626 - DNA, 15 bp, Homo sapiens
tgtggaaccgcatta

SEQ ID NO: 1693627 - DNA, 15 bp, Homo sapiens
gtggaaccgcattat

SEQ ID NO: 1693628 - DNA, 15 bp, Homo sapiens
tggaaccgcattatg

SEQ ID NO: 1693629 - DNA, 15 bp, Homo sapiens
ggaaccgcattatgc

SEQ ID NO: 1693630 - DNA, 15 bp, Homo sapiens
gaaccgcattatgca

SEQ ID NO: 1693631 - DNA, 15 bp, Homo sapiens
aaccgcattatgcaa

SEQ ID NO: 1693632 - DNA, 15 bp, Homo sapiens
accgcattatgcaat

SEQ ID NO: 1693633 - DNA, 15 bp, Homo sapiens
ccgcattatgcaatg

SEQ ID NO: 1693634 - DNA, 15 bp, Homo sapiens
cgcattatgcaatga

SEQ ID NO: 1693635 - DNA, 15 bp, Homo sapiens
gcattatgcaatgag

SEQ ID NO: 1693636 - DNA, 15 bp, Homo sapiens
cattatgcaatgagc

SEQ ID NO: 1693637 - DNA, 15 bp, Homo sapiens
attatgcaatgagct

SEQ ID NO: 1693638 - DNA, 15 bp, Homo sapiens
ttatgcaatgagctg

SEQ ID NO: 1693639 - DNA, 15 bp, Homo sapiens
tatgcaatgagctgg

SEQ ID NO: 1693640 - DNA, 15 bp, Homo sapiens
atgcaatgagctggg

SEQ ID NO: 1693641 - DNA, 15 bp, Homo sapiens
tgcaatgagctgggc

SEQ ID NO: 1693642 - DNA, 15 bp, Homo sapiens
gcaatgagctgggca

SEQ ID NO: 1693643 - DNA, 15 bp, Homo sapiens
caatgagctgggcac

SEQ ID NO: 1693644 - DNA, 15 bp, Homo sapiens
aatgagctgggcaca

SEQ ID NO: 1693645 - DNA, 15 bp, Homo sapiens
atgagctgggcacat

SEQ ID NO: 1693646 - DNA, 15 bp, Homo sapiens
tgagctgggcacata

SEQ ID NO: 1693647 - DNA, 15 bp, Homo sapiens
gagctgggcacatat

SEQ ID NO: 1693648 - DNA, 15 bp, Homo sapiens
agctgggcacatatg

SEQ ID NO: 1693649 - DNA, 15 bp, Homo sapiens
gctgggcacatatga

SEQ ID NO: 1693650 - DNA, 15 bp, Homo sapiens
ctgggcacatatgac

SEQ ID NO: 1693651 - DNA, 15 bp, Homo sapiens
tgggcacatatgact

SEQ ID NO: 1693652 - DNA, 15 bp, Homo sapiens
gggcacatatgactc

SEQ ID NO: 1693653 - DNA, 15 bp, Homo sapiens
ggcacatatgactct

SEQ ID NO: 1693654 - DNA, 15 bp, Homo sapiens
gcacatatgactctt

SEQ ID NO: 1693655 - DNA, 15 bp, Homo sapiens
cacatatgactcttc

SEQ ID NO: 1693656 - DNA, 15 bp, Homo sapiens
acatatgactcttca

SEQ ID NO: 1693657 - DNA, 15 bp, Homo sapiens
catatgactcttcat

SEQ ID NO: 1693658 - DNA, 15 bp, Homo sapiens
atatgactcttcatt

SEQ ID NO: 1693659 - DNA, 15 bp, Homo sapiens
tatgactcttcattt

SEQ ID NO: 1693660 - DNA, 15 bp, Homo sapiens
atgactcttcattta

SEQ ID NO: 1693661 - DNA, 15 bp, Homo sapiens
tgactcttcatttaa

SEQ ID NO: 1693662 - DNA, 15 bp, Homo sapiens
gactcttcatttaat

SEQ ID NO: 1693663 - DNA, 15 bp, Homo sapiens
actcttcatttaatc

SEQ ID NO: 1693664 - DNA, 15 bp, Homo sapiens
ctcttcatttaatcc

SEQ ID NO: 1693665 - DNA, 15 bp, Homo sapiens
tcttcatttaatccg

SEQ ID NO: 1693666 - DNA, 15 bp, Homo sapiens
cttcatttaatccgc

SEQ ID NO: 1693667 - DNA, 15 bp, Homo sapiens
ttcatttaatccgca

SEQ ID NO: 1693668 - DNA, 15 bp, Homo sapiens
tcatttaatccgcat

SEQ ID NO: 1693669 - DNA, 15 bp, Homo sapiens
catttaatccgcatt

SEQ ID NO: 1693670 - DNA, 15 bp, Homo sapiens
atttaatccgcatta

SEQ ID NO: 1693671 - DNA, 15 bp, Homo sapiens
tttaatccgcattaa

SEQ ID NO: 1693672 - DNA, 15 bp, Homo sapiens
ttaatccgcattaaa

SEQ ID NO: 1693673 - DNA, 15 bp, Homo sapiens
taatccgcattaaac

SEQ ID NO: 1693674 - DNA, 15 bp, Homo sapiens
aatccgcattaaact

SEQ ID NO: 1693675 - DNA, 15 bp, Homo sapiens
atccgcattaaacta

SEQ ID NO: 1693676 - DNA, 15 bp, Homo sapiens
tccgcattaaactaa

SEQ ID NO: 1693677 - DNA, 15 bp, Homo sapiens
ccgcattaaactaag

SEQ ID NO: 1693678 - DNA, 15 bp, Homo sapiens
cgcattaaactaagt

SEQ ID NO: 1693679 - DNA, 15 bp, Homo sapiens
gcattaaactaagtg

SEQ ID NO: 1693680 - DNA, 15 bp, Homo sapiens
cattaaactaagtga

SEQ ID NO: 1693681 - DNA, 15 bp, Homo sapiens
attaaactaagtgaa

SEQ ID NO: 1693682 - DNA, 15 bp, Homo sapiens
ttaaactaagtgaag

SEQ ID NO: 1693683 - DNA, 15 bp, Homo sapiens
taaactaagtgaagg

SEQ ID NO: 1693684 - DNA, 15 bp, Homo sapiens
aaactaagtgaaggt

SEQ ID NO: 1693685 - DNA, 15 bp, Homo sapiens
aactaagtgaaggtg

SEQ ID NO: 1693686 - DNA, 15 bp, Homo sapiens
actaagtgaaggtgg

SEQ ID NO: 1693687 - DNA, 15 bp, Homo sapiens
ctaagtgaaggtggt

SEQ ID NO: 1693688 - DNA, 15 bp, Homo sapiens
taagtgaaggtggta

SEQ ID NO: 1693689 - DNA, 15 bp, Homo sapiens
aagtgaaggtggtac

SEQ ID NO: 1693690 - DNA, 15 bp, Homo sapiens
agtgaaggtggtact

SEQ ID NO: 1693691 - DNA, 15 bp, Homo sapiens
gtgaaggtggtactc

SEQ ID NO: 1693692 - DNA, 15 bp, Homo sapiens
tgaaggtggtactct

SEQ ID NO: 1693693 - DNA, 15 bp, Homo sapiens
gaaggtggtactctc

SEQ ID NO: 1693694 - DNA, 15 bp, Homo sapiens
aaggtggtactctca

SEQ ID NO: 1693695 - DNA, 15 bp, Homo sapiens
aggtggtactctcac

SEQ ID NO: 1693696 - DNA, 15 bp, Homo sapiens
ggtggtactctcact

SEQ ID NO: 1693697 - DNA, 15 bp, Homo sapiens
gtggtactctcactt

SEQ ID NO: 1693698 - DNA, 15 bp, Homo sapiens
tggtactctcacttt

SEQ ID NO: 1693699 - DNA, 15 bp, Homo sapiens
ggtactctcacttta

SEQ ID NO: 1693700 - DNA, 15 bp, Homo sapiens
gtactctcactttat

SEQ ID NO: 1693701 - DNA, 15 bp, Homo sapiens
tactctcactttatg

SEQ ID NO: 1693702 - DNA, 15 bp, Homo sapiens
actctcactttatgg

SEQ ID NO: 1693703 - DNA, 15 bp, Homo sapiens
ctctcactttatgga

SEQ ID NO: 1693704 - DNA, 15 bp, Homo sapiens
tctcactttatggat

SEQ ID NO: 1693705 - DNA, 15 bp, Homo sapiens
ctcactttatggatg

SEQ ID NO: 1693706 - DNA, 15 bp, Homo sapiens
tcactttatggatga

SEQ ID NO: 1693707 - DNA, 15 bp, Homo sapiens
cactttatggatgag

SEQ ID NO: 1693708 - DNA, 15 bp, Homo sapiens
actttatggatgagg

SEQ ID NO: 1693709 - DNA, 15 bp, Homo sapiens
ctttatggatgaggg

SEQ ID NO: 1693710 - DNA, 15 bp, Homo sapiens
tttatggatgaggga

SEQ ID NO: 1693711 - DNA, 15 bp, Homo sapiens
ttatggatgagggaa

SEQ ID NO: 1693712 - DNA, 15 bp, Homo sapiens
tatggatgagggaac

SEQ ID NO: 1693713 - DNA, 15 bp, Homo sapiens
atggatgagggaact

SEQ ID NO: 1693714 - DNA, 15 bp, Homo sapiens
tggatgagggaactg

SEQ ID NO: 1693715 - DNA, 15 bp, Homo sapiens
ggatgagggaactga

SEQ ID NO: 1693716 - DNA, 15 bp, Homo sapiens
gatgagggaactgag

SEQ ID NO: 1693717 - DNA, 15 bp, Homo sapiens
atgagggaactgagg

SEQ ID NO: 1693718 - DNA, 15 bp, Homo sapiens
tgagggaactgaggt

SEQ ID NO: 1693719 - DNA, 15 bp, Homo sapiens
gagggaactgaggtt

SEQ ID NO: 1693720 - DNA, 15 bp, Homo sapiens
agggaactgaggttc

SEQ ID NO: 1693721 - DNA, 15 bp, Homo sapiens
gggaactgaggttca

SEQ ID NO: 1693722 - DNA, 15 bp, Homo sapiens
ggaactgaggttcag

SEQ ID NO: 1693723 - DNA, 15 bp, Homo sapiens
gaactgaggttcaga

SEQ ID NO: 1693724 - DNA, 15 bp, Homo sapiens
aactgaggttcagag

SEQ ID NO: 1693725 - DNA, 15 bp, Homo sapiens
actgaggttcagagc

SEQ ID NO: 1693726 - DNA, 15 bp, Homo sapiens
ctgaggttcagagcg

SEQ ID NO: 1693727 - DNA, 15 bp, Homo sapiens
tgaggttcagagcgg

SEQ ID NO: 1693728 - DNA, 15 bp, Homo sapiens
gaggttcagagcggt

SEQ ID NO: 1693729 - DNA, 15 bp, Homo sapiens
aggttcagagcggtt

SEQ ID NO: 1693730 - DNA, 15 bp, Homo sapiens
ggttcagagcggttg

SEQ ID NO: 1693731 - DNA, 15 bp, Homo sapiens
gttcagagcggttga

SEQ ID NO: 1693732 - DNA, 15 bp, Homo sapiens
ttcagagcggttgag

SEQ ID NO: 1693733 - DNA, 15 bp, Homo sapiens
tcagagcggttgagt

SEQ ID NO: 1693734 - DNA, 15 bp, Homo sapiens
cagagcggttgagta

SEQ ID NO: 1693735 - DNA, 15 bp, Homo sapiens
agagcggttgagtaa

SEQ ID NO: 1693736 - DNA, 15 bp, Homo sapiens
gagcggttgagtaat

SEQ ID NO: 1693737 - DNA, 15 bp, Homo sapiens
agcggttgagtaatt

SEQ ID NO: 1693738 - DNA, 15 bp, Homo sapiens
gcggttgagtaattt

SEQ ID NO: 1693739 - DNA, 15 bp, Homo sapiens
cggttgagtaatttg

SEQ ID NO: 1693740 - DNA, 15 bp, Homo sapiens
ggttgagtaatttgc

SEQ ID NO: 1693741 - DNA, 15 bp, Homo sapiens
gttgagtaatttgct

SEQ ID NO: 1693742 - DNA, 15 bp, Homo sapiens
ttgagtaatttgctc

SEQ ID NO: 1693743 - DNA, 15 bp, Homo sapiens
tgagtaatttgctca

SEQ ID NO: 1693744 - DNA, 15 bp, Homo sapiens
gagtaatttgctcaa

SEQ ID NO: 1693745 - DNA, 15 bp, Homo sapiens
agtaatttgctcaag

SEQ ID NO: 1693746 - DNA, 15 bp, Homo sapiens
gtaatttgctcaaga

SEQ ID NO: 1693747 - DNA, 15 bp, Homo sapiens
taatttgctcaagat

SEQ ID NO: 1693748 - DNA, 15 bp, Homo sapiens
aatttgctcaagatc

SEQ ID NO: 1693749 - DNA, 15 bp, Homo sapiens
atttgctcaagatca

SEQ ID NO: 1693750 - DNA, 15 bp, Homo sapiens
tttgctcaagatcac

SEQ ID NO: 1693751 - DNA, 15 bp, Homo sapiens
ttgctcaagatcaca

SEQ ID NO: 1693752 - DNA, 15 bp, Homo sapiens
tgctcaagatcacac

SEQ ID NO: 1693753 - DNA, 15 bp, Homo sapiens
gctcaagatcacaca

SEQ ID NO: 1693754 - DNA, 15 bp, Homo sapiens
ctcaagatcacacag

SEQ ID NO: 1693755 - DNA, 15 bp, Homo sapiens
tcaagatcacacagc

SEQ ID NO: 1693756 - DNA, 15 bp, Homo sapiens
caagatcacacagct

SEQ ID NO: 1693757 - DNA, 15 bp, Homo sapiens
aagatcacacagcta

SEQ ID NO: 1693758 - DNA, 15 bp, Homo sapiens
agatcacacagctaa

SEQ ID NO: 1693759 - DNA, 15 bp, Homo sapiens
gatcacacagctaat

SEQ ID NO: 1693760 - DNA, 15 bp, Homo sapiens
atcacacagctaatg

SEQ ID NO: 1693761 - DNA, 15 bp, Homo sapiens
tcacacagctaatgt

SEQ ID NO: 1693762 - DNA, 15 bp, Homo sapiens
cacacagctaatgtg

SEQ ID NO: 1693763 - DNA, 15 bp, Homo sapiens
acacagctaatgtgc

SEQ ID NO: 1693764 - DNA, 15 bp, Homo sapiens
cacagctaatgtgca

SEQ ID NO: 1693765 - DNA, 15 bp, Homo sapiens
acagctaatgtgcag

SEQ ID NO: 1693766 - DNA, 15 bp, Homo sapiens
cagctaatgtgcagt

SEQ ID NO: 1693767 - DNA, 15 bp, Homo sapiens
agctaatgtgcagtg

SEQ ID NO: 1693768 - DNA, 15 bp, Homo sapiens
gctaatgtgcagtgg

SEQ ID NO: 1693769 - DNA, 15 bp, Homo sapiens
ctaatgtgcagtgga

SEQ ID NO: 1693770 - DNA, 15 bp, Homo sapiens
taatgtgcagtggaa

SEQ ID NO: 1693771 - DNA, 15 bp, Homo sapiens
aatgtgcagtggaaa

SEQ ID NO: 1693772 - DNA, 15 bp, Homo sapiens
atgtgcagtggaaat

SEQ ID NO: 1693773 - DNA, 15 bp, Homo sapiens
tgtgcagtggaaatg

SEQ ID NO: 1693774 - DNA, 15 bp, Homo sapiens
gtgcagtggaaatgg

SEQ ID NO: 1693775 - DNA, 15 bp, Homo sapiens
tgcagtggaaatggc

SEQ ID NO: 1693776 - DNA, 15 bp, Homo sapiens
gcagtggaaatggca

SEQ ID NO: 1693777 - DNA, 15 bp, Homo sapiens
cagtggaaatggcat

SEQ ID NO: 1693778 - DNA, 15 bp, Homo sapiens
agtggaaatggcatt

SEQ ID NO: 1693779 - DNA, 15 bp, Homo sapiens
gtggaaatggcattg

SEQ ID NO: 1693780 - DNA, 15 bp, Homo sapiens
tggaaatggcattga

SEQ ID NO: 1693781 - DNA, 15 bp, Homo sapiens
ggaaatggcattgaa

SEQ ID NO: 1693782 - DNA, 15 bp, Homo sapiens
gaaatggcattgaac

SEQ ID NO: 1693783 - DNA, 15 bp, Homo sapiens
aaatggcattgaact

SEQ ID NO: 1693784 - DNA, 15 bp, Homo sapiens
aatggcattgaactc

SEQ ID NO: 1693785 - DNA, 15 bp, Homo sapiens
atggcattgaactct

SEQ ID NO: 1693786 - DNA, 15 bp, Homo sapiens
tggcattgaactctg

SEQ ID NO: 1693787 - DNA, 15 bp, Homo sapiens
ggcattgaactctga

SEQ ID NO: 1693788 - DNA, 15 bp, Homo sapiens
gcattgaactctgaa

SEQ ID NO: 1693789 - DNA, 15 bp, Homo sapiens
cattgaactctgaat

SEQ ID NO: 1693790 - DNA, 15 bp, Homo sapiens
attgaactctgaatc

SEQ ID NO: 1693791 - DNA, 15 bp, Homo sapiens
ttgaactctgaatct

SEQ ID NO: 1693792 - DNA, 15 bp, Homo sapiens
tgaactctgaatctc

SEQ ID NO: 1693793 - DNA, 15 bp, Homo sapiens
gaactctgaatctca

SEQ ID NO: 1693794 - DNA, 15 bp, Homo sapiens
aactctgaatctcag

SEQ ID NO: 1693795 - DNA, 15 bp, Homo sapiens
actctgaatctcaga

SEQ ID NO: 1693796 - DNA, 15 bp, Homo sapiens
ctctgaatctcagat

SEQ ID NO: 1693797 - DNA, 15 bp, Homo sapiens
tctgaatctcagatt

SEQ ID NO: 1693798 - DNA, 15 bp, Homo sapiens
ctgaatctcagattc

SEQ ID NO: 1693799 - DNA, 15 bp, Homo sapiens
tgaatctcagattcc

SEQ ID NO: 1693800 - DNA, 15 bp, Homo sapiens
gaatctcagattccg

SEQ ID NO: 1693801 - DNA, 15 bp, Homo sapiens
aatctcagattccga

SEQ ID NO: 1693802 - DNA, 15 bp, Homo sapiens
atctcagattccgaa

SEQ ID NO: 1693803 - DNA, 15 bp, Homo sapiens
tctcagattccgaag

SEQ ID NO: 1693804 - DNA, 15 bp, Homo sapiens
ctcagattccgaagc

SEQ ID NO: 1693805 - DNA, 15 bp, Homo sapiens
tcagattccgaagcc

SEQ ID NO: 1693806 - DNA, 15 bp, Homo sapiens
cagattccgaagccc

SEQ ID NO: 1693807 - DNA, 15 bp, Homo sapiens
agattccgaagccca

SEQ ID NO: 1693808 - DNA, 15 bp, Homo sapiens
gattccgaagcccat

SEQ ID NO: 1693809 - DNA, 15 bp, Homo sapiens
attccgaagcccatg

SEQ ID NO: 1693810 - DNA, 15 bp, Homo sapiens
ttccgaagcccatga

SEQ ID NO: 1693811 - DNA, 15 bp, Homo sapiens
tccgaagcccatgat

SEQ ID NO: 1693812 - DNA, 15 bp, Homo sapiens
ccgaagcccatgatc

SEQ ID NO: 1693813 - DNA, 15 bp, Homo sapiens
cgaagcccatgatct

SEQ ID NO: 1693814 - DNA, 15 bp, Homo sapiens
gaagcccatgatctt

SEQ ID NO: 1693815 - DNA, 15 bp, Homo sapiens
aagcccatgatcttt

SEQ ID NO: 1693816 - DNA, 15 bp, Homo sapiens
agcccatgatctttc

SEQ ID NO: 1693817 - DNA, 15 bp, Homo sapiens
gcccatgatctttct

SEQ ID NO: 1693818 - DNA, 15 bp, Homo sapiens
cccatgatctttcta

SEQ ID NO: 1693819 - DNA, 15 bp, Homo sapiens
ccatgatctttctat

SEQ ID NO: 1693820 - DNA, 15 bp, Homo sapiens
catgatctttctatt

SEQ ID NO: 1693821 - DNA, 15 bp, Homo sapiens
atgatctttctatta

SEQ ID NO: 1693822 - DNA, 15 bp, Homo sapiens
tgatctttctattac

SEQ ID NO: 1693823 - DNA, 15 bp, Homo sapiens
gatctttctattaca

SEQ ID NO: 1693824 - DNA, 15 bp, Homo sapiens
atctttctattacac

SEQ ID NO: 1693825 - DNA, 15 bp, Homo sapiens
tctttctattacacc

SEQ ID NO: 1693826 - DNA, 15 bp, Homo sapiens
ctttctattacaccc

SEQ ID NO: 1693827 - DNA, 15 bp, Homo sapiens
tttctattacacccc

SEQ ID NO: 1693828 - DNA, 15 bp, Homo sapiens
ttctattacacccca

SEQ ID NO: 1693829 - DNA, 15 bp, Homo sapiens
tctattacaccccac

SEQ ID NO: 1693830 - DNA, 15 bp, Homo sapiens
ctattacaccccaca

SEQ ID NO: 1693831 - DNA, 15 bp, Homo sapiens
tattacaccccacac

SEQ ID NO: 1693832 - DNA, 15 bp, Homo sapiens
attacaccccacacc

SEQ ID NO: 1693833 - DNA, 15 bp, Homo sapiens
ttacaccccacacct

SEQ ID NO: 1693834 - DNA, 15 bp, Homo sapiens
tacaccccacacctc

SEQ ID NO: 1693835 - DNA, 15 bp, Homo sapiens
acaccccacacctct

SEQ ID NO: 1693836 - DNA, 15 bp, Homo sapiens
caccccacacctctg

SEQ ID NO: 1693837 - DNA, 15 bp, Homo sapiens
accccacacctctgc

SEQ ID NO: 1693838 - DNA, 15 bp, Homo sapiens
ccccacacctctgcc

SEQ ID NO: 1693839 - DNA, 15 bp, Homo sapiens
cccacacctctgcca

SEQ ID NO: 1693840 - DNA, 15 bp, Homo sapiens
ccacacctctgccaa

SEQ ID NO: 1693841 - DNA, 15 bp, Homo sapiens
cacacctctgccaaa

SEQ ID NO: 1693842 - DNA, 15 bp, Homo sapiens
acacctctgccaaat

SEQ ID NO: 1693843 - DNA, 15 bp, Homo sapiens
cacctctgccaaata

SEQ ID NO: 1693844 - DNA, 15 bp, Homo sapiens
acctctgccaaatac

SEQ ID NO: 1693845 - DNA, 15 bp, Homo sapiens
cctctgccaaataca

SEQ ID NO: 1693846 - DNA, 15 bp, Homo sapiens
ctctgccaaatacag

SEQ ID NO: 1693847 - DNA, 15 bp, Homo sapiens
tctgccaaatacagc

SEQ ID NO: 1693848 - DNA, 15 bp, Homo sapiens
ctgccaaatacagct

SEQ ID NO: 1693849 - DNA, 15 bp, Homo sapiens
tgccaaatacagcta

SEQ ID NO: 1693850 - DNA, 15 bp, Homo sapiens
gccaaatacagctat

SEQ ID NO: 1693851 - DNA, 15 bp, Homo sapiens
ccaaatacagctatc

SEQ ID NO: 1693852 - DNA, 15 bp, Homo sapiens
caaatacagctatcc

SEQ ID NO: 1693853 - DNA, 15 bp, Homo sapiens
aaatacagctatccc

SEQ ID NO: 1693854 - DNA, 15 bp, Homo sapiens
aatacagctatccct

SEQ ID NO: 1693855 - DNA, 15 bp, Homo sapiens
atacagctatccctg

SEQ ID NO: 1693856 - DNA, 15 bp, Homo sapiens
tacagctatccctga

SEQ ID NO: 1693857 - DNA, 15 bp, Homo sapiens
acagctatccctgaa

SEQ ID NO: 1693858 - DNA, 15 bp, Homo sapiens
cagctatccctgaac

SEQ ID NO: 1693859 - DNA, 15 bp, Homo sapiens
agctatccctgaaca

SEQ ID NO: 1693860 - DNA, 15 bp, Homo sapiens
gctatccctgaacat

SEQ ID NO: 1693861 - DNA, 15 bp, Homo sapiens
ctatccctgaacatc

SEQ ID NO: 1693862 - DNA, 15 bp, Homo sapiens
tatccctgaacatct

SEQ ID NO: 1693863 - DNA, 15 bp, Homo sapiens
atccctgaacatctg

SEQ ID NO: 1693864 - DNA, 15 bp, Homo sapiens
tccctgaacatctga

SEQ ID NO: 1693865 - DNA, 15 bp, Homo sapiens
ccctgaacatctgaa

SEQ ID NO: 1693866 - DNA, 15 bp, Homo sapiens
cctgaacatctgaat

SEQ ID NO: 1693867 - DNA, 15 bp, Homo sapiens
ctgaacatctgaatc

SEQ ID NO: 1693868 - DNA, 15 bp, Homo sapiens
tgaacatctgaatca

SEQ ID NO: 1693869 - DNA, 15 bp, Homo sapiens
gaacatctgaatcac

SEQ ID NO: 1693870 - DNA, 15 bp, Homo sapiens
aacatctgaatcact

SEQ ID NO: 1693871 - DNA, 15 bp, Homo sapiens
acatctgaatcactc

SEQ ID NO: 1693872 - DNA, 15 bp, Homo sapiens
catctgaatcactct

SEQ ID NO: 1693873 - DNA, 15 bp, Homo sapiens
atctgaatcactctg

SEQ ID NO: 1693874 - DNA, 15 bp, Homo sapiens
tctgaatcactctgg

SEQ ID NO: 1693875 - DNA, 15 bp, Homo sapiens
ctgaatcactctgga

SEQ ID NO: 1693876 - DNA, 15 bp, Homo sapiens
tgaatcactctggag

SEQ ID NO: 1693877 - DNA, 15 bp, Homo sapiens
gaatcactctggagt

SEQ ID NO: 1693878 - DNA, 15 bp, Homo sapiens
aatcactctggagtt

SEQ ID NO: 1693879 - DNA, 15 bp, Homo sapiens
atcactctggagttt

SEQ ID NO: 1693880 - DNA, 15 bp, Homo sapiens
tcactctggagtttt

SEQ ID NO: 1693881 - DNA, 15 bp, Homo sapiens
cactctggagttttt

SEQ ID NO: 1693882 - DNA, 15 bp, Homo sapiens
actctggagtttttt

SEQ ID NO: 1693883 - DNA, 15 bp, Homo sapiens
ctctggagtttttta

SEQ ID NO: 1693884 - DNA, 15 bp, Homo sapiens
tctggagttttttaa

SEQ ID NO: 1693885 - DNA, 15 bp, Homo sapiens
ctggagttttttaaa

SEQ ID NO: 1693886 - DNA, 15 bp, Homo sapiens
tggagttttttaaaa

SEQ ID NO: 1693887 - DNA, 15 bp, Homo sapiens
ggagttttttaaaaa

SEQ ID NO: 1693888 - DNA, 15 bp, Homo sapiens
gagttttttaaaaaa

SEQ ID NO: 1693889 - DNA, 15 bp, Homo sapiens
agttttttaaaaaat

SEQ ID NO: 1693890 - DNA, 15 bp, Homo sapiens
gttttttaaaaaatg

SEQ ID NO: 1693891 - DNA, 15 bp, Homo sapiens
ttttttaaaaaatgc

SEQ ID NO: 1693892 - DNA, 15 bp, Homo sapiens
tttttaaaaaatgca

SEQ ID NO: 1693893 - DNA, 15 bp, Homo sapiens
ttttaaaaaatgcaa

SEQ ID NO: 1693894 - DNA, 15 bp, Homo sapiens
tttaaaaaatgcaaa

SEQ ID NO: 1693895 - DNA, 15 bp, Homo sapiens
ttaaaaaatgcaaat

SEQ ID NO: 1693896 - DNA, 15 bp, Homo sapiens
taaaaaatgcaaata

SEQ ID NO: 1693897 - DNA, 15 bp, Homo sapiens
aaaaaatgcaaatat

SEQ ID NO: 1693898 - DNA, 15 bp, Homo sapiens
aaaaatgcaaatatc

SEQ ID NO: 1693899 - DNA, 15 bp, Homo sapiens
aaaatgcaaatatcc

SEQ ID NO: 1693900 - DNA, 15 bp, Homo sapiens
aaatgcaaatatcct

SEQ ID NO: 1693901 - DNA, 15 bp, Homo sapiens
aatgcaaatatcctg

SEQ ID NO: 1693902 - DNA, 15 bp, Homo sapiens
atgcaaatatcctgg

SEQ ID NO: 1693903 - DNA, 15 bp, Homo sapiens
tgcaaatatcctggt

SEQ ID NO: 1693904 - DNA, 15 bp, Homo sapiens
gcaaatatcctggtc

SEQ ID NO: 1693905 - DNA, 15 bp, Homo sapiens
caaatatcctggtcc

SEQ ID NO: 1693906 - DNA, 15 bp, Homo sapiens
aaatatcctggtccc

SEQ ID NO: 1693907 - DNA, 15 bp, Homo sapiens
aatatcctggtccca

SEQ ID NO: 1693908 - DNA, 15 bp, Homo sapiens
atatcctggtcccag

SEQ ID NO: 1693909 - DNA, 15 bp, Homo sapiens
tatcctggtcccagt

SEQ ID NO: 1693910 - DNA, 15 bp, Homo sapiens
atcctggtcccagtc

SEQ ID NO: 1693911 - DNA, 15 bp, Homo sapiens
tcctggtcccagtct

SEQ ID NO: 1693912 - DNA, 15 bp, Homo sapiens
cctggtcccagtctc

SEQ ID NO: 1693913 - DNA, 15 bp, Homo sapiens
ctggtcccagtctct

SEQ ID NO: 1693914 - DNA, 15 bp, Homo sapiens
tggtcccagtctctc

SEQ ID NO: 1693915 - DNA, 15 bp, Homo sapiens
ggtcccagtctctca

SEQ ID NO: 1693916 - DNA, 15 bp, Homo sapiens
gtcccagtctctcat

SEQ ID NO: 1693917 - DNA, 15 bp, Homo sapiens
tcccagtctctcatt

SEQ ID NO: 1693918 - DNA, 15 bp, Homo sapiens
cccagtctctcattc

SEQ ID NO: 1693919 - DNA, 15 bp, Homo sapiens
ccagtctctcattct

SEQ ID NO: 1693920 - DNA, 15 bp, Homo sapiens
cagtctctcattctt

SEQ ID NO: 1693921 - DNA, 15 bp, Homo sapiens
agtctctcattcttg

SEQ ID NO: 1693922 - DNA, 15 bp, Homo sapiens
gtctctcattcttgg

SEQ ID NO: 1693923 - DNA, 15 bp, Homo sapiens
tctctcattcttggg

SEQ ID NO: 1693924 - DNA, 15 bp, Homo sapiens
ctctcattcttgggg

SEQ ID NO: 1693925 - DNA, 15 bp, Homo sapiens
tctcattcttggggt

SEQ ID NO: 1693926 - DNA, 15 bp, Homo sapiens
ctcattcttggggtg

SEQ ID NO: 1693927 - DNA, 15 bp, Homo sapiens
tcattcttggggtga

SEQ ID NO: 1693928 - DNA, 15 bp, Homo sapiens
cattcttggggtgag

SEQ ID NO: 1693929 - DNA, 15 bp, Homo sapiens
attcttggggtgagg

SEQ ID NO: 1693930 - DNA, 15 bp, Homo sapiens
ttcttggggtgaggg

SEQ ID NO: 1693931 - DNA, 15 bp, Homo sapiens
tcttggggtgagggg

SEQ ID NO: 1693932 - DNA, 15 bp, Homo sapiens
cttggggtgaggggg

SEQ ID NO: 1693933 - DNA, 15 bp, Homo sapiens
ttggggtgagggggc

SEQ ID NO: 1693934 - DNA, 15 bp, Homo sapiens
tggggtgagggggca

SEQ ID NO: 1693935 - DNA, 15 bp, Homo sapiens
ggggtgagggggcaa

SEQ ID NO: 1693936 - DNA, 15 bp, Homo sapiens
gggtgagggggcaaa

SEQ ID NO: 1693937 - DNA, 15 bp, Homo sapiens
ggtgagggggcaaaa

SEQ ID NO: 1693938 - DNA, 15 bp, Homo sapiens
gtgagggggcaaaag

SEQ ID NO: 1693939 - DNA, 15 bp, Homo sapiens
tgagggggcaaaagt

SEQ ID NO: 1693940 - DNA, 15 bp, Homo sapiens
gagggggcaaaagta

SEQ ID NO: 1693941 - DNA, 15 bp, Homo sapiens
agggggcaaaagtac

SEQ ID NO: 1693942 - DNA, 15 bp, Homo sapiens
gggggcaaaagtacc

SEQ ID NO: 1693943 - DNA, 15 bp, Homo sapiens
ggggcaaaagtacct

SEQ ID NO: 1693944 - DNA, 15 bp, Homo sapiens
gggcaaaagtacctg

SEQ ID NO: 1693945 - DNA, 15 bp, Homo sapiens
ggcaaaagtacctgt

SEQ ID NO: 1693946 - DNA, 15 bp, Homo sapiens
gcaaaagtacctgtc

SEQ ID NO: 1693947 - DNA, 15 bp, Homo sapiens
caaaagtacctgtct

SEQ ID NO: 1693948 - DNA, 15 bp, Homo sapiens
aaaagtacctgtctc

SEQ ID NO: 1693949 - DNA, 15 bp, Homo sapiens
aaagtacctgtctct

SEQ ID NO: 1693950 - DNA, 15 bp, Homo sapiens
aagtacctgtctctg

SEQ ID NO: 1693951 - DNA, 15 bp, Homo sapiens
agtacctgtctctgg

SEQ ID NO: 1693952 - DNA, 15 bp, Homo sapiens
gtacctgtctctggg

SEQ ID NO: 1693953 - DNA, 15 bp, Homo sapiens
tacctgtctctgggt

SEQ ID NO: 1693954 - DNA, 15 bp, Homo sapiens
acctgtctctgggta

SEQ ID NO: 1693955 - DNA, 15 bp, Homo sapiens
cctgtctctgggtat

SEQ ID NO: 1693956 - DNA, 15 bp, Homo sapiens
ctgtctctgggtatt

SEQ ID NO: 1693957 - DNA, 15 bp, Homo sapiens
tgtctctgggtattt

SEQ ID NO: 1693958 - DNA, 15 bp, Homo sapiens
gtctctgggtatttt

SEQ ID NO: 1693959 - DNA, 15 bp, Homo sapiens
tctctgggtattttt

SEQ ID NO: 1693960 - DNA, 15 bp, Homo sapiens
ctctgggtatttttt

SEQ ID NO: 1693961 - DNA, 15 bp, Homo sapiens
tctgggtattttttc

SEQ ID NO: 1693962 - DNA, 15 bp, Homo sapiens
ctgggtattttttct

SEQ ID NO: 1693963 - DNA, 15 bp, Homo sapiens
tgggtattttttctt

SEQ ID NO: 1693964 - DNA, 15 bp, Homo sapiens
gggtattttttcttt

SEQ ID NO: 1693965 - DNA, 15 bp, Homo sapiens
ggtattttttctttc

SEQ ID NO: 1693966 - DNA, 15 bp, Homo sapiens
gtattttttctttca

SEQ ID NO: 1693967 - DNA, 15 bp, Homo sapiens
ttttttctttcatat

SEQ ID NO: 1693968 - DNA, 15 bp, Homo sapiens
tttttctttcatatt

SEQ ID NO: 1693969 - DNA, 15 bp, Homo sapiens
ttttctttcatattg

SEQ ID NO: 1693970 - DNA, 15 bp, Homo sapiens
tttctttcatattga

SEQ ID NO: 1693971 - DNA, 15 bp, Homo sapiens
ttctttcatattgaa

SEQ ID NO: 1693972 - DNA, 15 bp, Homo sapiens
tctttcatattgaaa

SEQ ID NO: 1693973 - DNA, 15 bp, Homo sapiens
ctttcatattgaaaa

SEQ ID NO: 1693974 - DNA, 15 bp, Homo sapiens
tttcatattgaaaaa

SEQ ID NO: 1693975 - DNA, 15 bp, Homo sapiens
tcatattgaaaaatg

SEQ ID NO: 1693976 - DNA, 15 bp, Homo sapiens
catattgaaaaatgc

SEQ ID NO: 1693977 - DNA, 15 bp, Homo sapiens
atattgaaaaatgca

SEQ ID NO: 1693978 - DNA, 15 bp, Homo sapiens
tattgaaaaatgcat

SEQ ID NO: 1693979 - DNA, 15 bp, Homo sapiens
attgaaaaatgcatt

SEQ ID NO: 1693980 - DNA, 15 bp, Homo sapiens
ttgaaaaatgcattt

SEQ ID NO: 1693981 - DNA, 15 bp, Homo sapiens
tgaaaaatgcattta

SEQ ID NO: 1693982 - DNA, 15 bp, Homo sapiens
gaaaaatgcatttaa

SEQ ID NO: 1693983 - DNA, 15 bp, Homo sapiens
aaaaatgcatttaaa

SEQ ID NO: 1693984 - DNA, 15 bp, Homo sapiens
aaaatgcatttaaat

SEQ ID NO: 1693985 - DNA, 15 bp, Homo sapiens
aaatgcatttaaatg

SEQ ID NO: 1693986 - DNA, 15 bp, Homo sapiens
aatgcatttaaatgc

SEQ ID NO: 1693987 - DNA, 15 bp, Homo sapiens
atgcatttaaatgca

SEQ ID NO: 1693988 - DNA, 15 bp, Homo sapiens
tgcatttaaatgcaa

SEQ ID NO: 1693989 - DNA, 15 bp, Homo sapiens
gcatttaaatgcaag

SEQ ID NO: 1693990 - DNA, 15 bp, Homo sapiens
catttaaatgcaaga

SEQ ID NO: 1693991 - DNA, 15 bp, Homo sapiens
atttaaatgcaagac

SEQ ID NO: 1693992 - DNA, 15 bp, Homo sapiens
tttaaatgcaagaca

SEQ ID NO: 1693993 - DNA, 15 bp, Homo sapiens
ttaaatgcaagacaa

SEQ ID NO: 1693994 - DNA, 15 bp, Homo sapiens
taaatgcaagacaat

SEQ ID NO: 1693995 - DNA, 15 bp, Homo sapiens
aaatgcaagacaatt

SEQ ID NO: 1693996 - DNA, 15 bp, Homo sapiens
aatgcaagacaatta

SEQ ID NO: 1693997 - DNA, 15 bp, Homo sapiens
atgcaagacaattaa

SEQ ID NO: 1693998 - DNA, 15 bp, Homo sapiens
tgcaagacaattaac

SEQ ID NO: 1693999 - DNA, 15 bp, Homo sapiens
gcaagacaattaact

SEQ ID NO: 1694000 - DNA, 15 bp, Homo sapiens
caagacaattaacta

SEQ ID NO: 1694001 - DNA, 15 bp, Homo sapiens
aagacaattaactac

SEQ ID NO: 1694002 - DNA, 15 bp, Homo sapiens
agacaattaactact

SEQ ID NO: 1694003 - DNA, 15 bp, Homo sapiens
gacaattaactacta

SEQ ID NO: 1694004 - DNA, 15 bp, Homo sapiens
acaattaactactaa

SEQ ID NO: 1694005 - DNA, 15 bp, Homo sapiens
caattaactactaat

SEQ ID NO: 1694006 - DNA, 15 bp, Homo sapiens
aattaactactaata

SEQ ID NO: 1694007 - DNA, 15 bp, Homo sapiens
attaactactaatat

SEQ ID NO: 1694008 - DNA, 15 bp, Homo sapiens
ttaactactaatatt

SEQ ID NO: 1694009 - DNA, 15 bp, Homo sapiens
taactactaatattc

SEQ ID NO: 1694010 - DNA, 15 bp, Homo sapiens
aactactaatattcc

SEQ ID NO: 1694011 - DNA, 15 bp, Homo sapiens
actactaatattcct

SEQ ID NO: 1694012 - DNA, 15 bp, Homo sapiens
ctactaatattcctt

SEQ ID NO: 1694013 - DNA, 15 bp, Homo sapiens
tactaatattccttc

SEQ ID NO: 1694014 - DNA, 15 bp, Homo sapiens
actaatattccttcc

SEQ ID NO: 1694015 - DNA, 15 bp, Homo sapiens
ctaatattccttcca

SEQ ID NO: 1694016 - DNA, 15 bp, Homo sapiens
taatattccttccat

SEQ ID NO: 1694017 - DNA, 15 bp, Homo sapiens
aatattccttccatc

SEQ ID NO: 1694018 - DNA, 15 bp, Homo sapiens
atattccttccatct

SEQ ID NO: 1694019 - DNA, 15 bp, Homo sapiens
tattccttccatcta

SEQ ID NO: 1694020 - DNA, 15 bp, Homo sapiens
attccttccatctat

SEQ ID NO: 1694021 - DNA, 15 bp, Homo sapiens
ttccttccatctatt

SEQ ID NO: 1694022 - DNA, 15 bp, Homo sapiens
tccttccatctatta

SEQ ID NO: 1694023 - DNA, 15 bp, Homo sapiens
ccttccatctattat

SEQ ID NO: 1694024 - DNA, 15 bp, Homo sapiens
cttccatctattatc

SEQ ID NO: 1694025 - DNA, 15 bp, Homo sapiens
ttccatctattatca

SEQ ID NO: 1694026 - DNA, 15 bp, Homo sapiens
tccatctattatcaa

SEQ ID NO: 1694027 - DNA, 15 bp, Homo sapiens
ccatctattatcaac

SEQ ID NO: 1694028 - DNA, 15 bp, Homo sapiens
catctattatcaacc

SEQ ID NO: 1694029 - DNA, 15 bp, Homo sapiens
atctattatcaaccg

SEQ ID NO: 1694030 - DNA, 15 bp, Homo sapiens
tctattatcaaccgc

SEQ ID NO: 1694031 - DNA, 15 bp, Homo sapiens
ctattatcaaccgct

SEQ ID NO: 1694032 - DNA, 15 bp, Homo sapiens
tattatcaaccgctg

SEQ ID NO: 1694033 - DNA, 15 bp, Homo sapiens
attatcaaccgctgt

SEQ ID NO: 1694034 - DNA, 15 bp, Homo sapiens
ttatcaaccgctgtt

SEQ ID NO: 1694035 - DNA, 15 bp, Homo sapiens
tatcaaccgctgtta

SEQ ID NO: 1694036 - DNA, 15 bp, Homo sapiens
atcaaccgctgttaa

SEQ ID NO: 1694037 - DNA, 15 bp, Homo sapiens
tcaaccgctgttaac

SEQ ID NO: 1694038 - DNA, 15 bp, Homo sapiens
caaccgctgttaaca

SEQ ID NO: 1694039 - DNA, 15 bp, Homo sapiens
aaccgctgttaacat

SEQ ID NO: 1694040 - DNA, 15 bp, Homo sapiens
accgctgttaacatt

SEQ ID NO: 1694041 - DNA, 15 bp, Homo sapiens
ccgctgttaacattt

SEQ ID NO: 1694042 - DNA, 15 bp, Homo sapiens
cgctgttaacatttg

SEQ ID NO: 1694043 - DNA, 15 bp, Homo sapiens
gctgttaacatttgg

SEQ ID NO: 1694044 - DNA, 15 bp, Homo sapiens
ctgttaacatttgga

SEQ ID NO: 1694045 - DNA, 15 bp, Homo sapiens
tgttaacatttggac

SEQ ID NO: 1694046 - DNA, 15 bp, Homo sapiens
gttaacatttggaca

SEQ ID NO: 1694047 - DNA, 15 bp, Homo sapiens
ttaacatttggacat

SEQ ID NO: 1694048 - DNA, 15 bp, Homo sapiens
taacatttggacata

SEQ ID NO: 1694049 - DNA, 15 bp, Homo sapiens
aacatttggacatat

SEQ ID NO: 1694050 - DNA, 15 bp, Homo sapiens
acatttggacatatc

SEQ ID NO: 1694051 - DNA, 15 bp, Homo sapiens
catttggacatatca

SEQ ID NO: 1694052 - DNA, 15 bp, Homo sapiens
atttggacatatcac

SEQ ID NO: 1694053 - DNA, 15 bp, Homo sapiens
tttggacatatcact

SEQ ID NO: 1694054 - DNA, 15 bp, Homo sapiens
ttggacatatcactt

SEQ ID NO: 1694055 - DNA, 15 bp, Homo sapiens
tggacatatcacttt

SEQ ID NO: 1694056 - DNA, 15 bp, Homo sapiens
ggacatatcactttc

SEQ ID NO: 1694057 - DNA, 15 bp, Homo sapiens
gacatatcactttca

SEQ ID NO: 1694058 - DNA, 15 bp, Homo sapiens
acatatcactttcat

SEQ ID NO: 1694059 - DNA, 15 bp, Homo sapiens
catatcactttcatt

SEQ ID NO: 1694060 - DNA, 15 bp, Homo sapiens
atatcactttcattt

SEQ ID NO: 1694061 - DNA, 15 bp, Homo sapiens
tatcactttcatttt

SEQ ID NO: 1694062 - DNA, 15 bp, Homo sapiens
atcactttcattttt

SEQ ID NO: 1694063 - DNA, 15 bp, Homo sapiens
tcactttcatttttt

SEQ ID NO: 1694064 - DNA, 15 bp, Homo sapiens
cactttcattttttc

SEQ ID NO: 1694065 - DNA, 15 bp, Homo sapiens
actttcattttttcc

SEQ ID NO: 1694066 - DNA, 15 bp, Homo sapiens
ctttcattttttcct

SEQ ID NO: 1694067 - DNA, 15 bp, Homo sapiens
tttcattttttcctg

SEQ ID NO: 1694068 - DNA, 15 bp, Homo sapiens
ttcattttttcctgt

SEQ ID NO: 1694069 - DNA, 15 bp, Homo sapiens
tcattttttcctgtg

SEQ ID NO: 1694070 - DNA, 15 bp, Homo sapiens
cattttttcctgtgt

SEQ ID NO: 1694071 - DNA, 15 bp, Homo sapiens
attttttcctgtgtc

SEQ ID NO: 1694072 - DNA, 15 bp, Homo sapiens
ttttttcctgtgtca

SEQ ID NO: 1694073 - DNA, 15 bp, Homo sapiens
tttttcctgtgtcat

SEQ ID NO: 1694074 - DNA, 15 bp, Homo sapiens
ttttcctgtgtcatt

SEQ ID NO: 1694075 - DNA, 15 bp, Homo sapiens
tttcctgtgtcattg

SEQ ID NO: 1694076 - DNA, 15 bp, Homo sapiens
ttcctgtgtcattgc

SEQ ID NO: 1694077 - DNA, 15 bp, Homo sapiens
tcctgtgtcattgca

SEQ ID NO: 1694078 - DNA, 15 bp, Homo sapiens
cctgtgtcattgcag

SEQ ID NO: 1694079 - DNA, 15 bp, Homo sapiens
ctgtgtcattgcagt

SEQ ID NO: 1694080 - DNA, 15 bp, Homo sapiens
tgtgtcattgcagtt

SEQ ID NO: 1694081 - DNA, 15 bp, Homo sapiens
gtgtcattgcagttt

SEQ ID NO: 1694082 - DNA, 15 bp, Homo sapiens
tgtcattgcagtttc

SEQ ID NO: 1694083 - DNA, 15 bp, Homo sapiens
gtcattgcagtttca

SEQ ID NO: 1694084 - DNA, 15 bp, Homo sapiens
tcattgcagtttcaa

SEQ ID NO: 1694085 - DNA, 15 bp, Homo sapiens
cattgcagtttcaaa

SEQ ID NO: 1694086 - DNA, 15 bp, Homo sapiens
attgcagtttcaaat

SEQ ID NO: 1694087 - DNA, 15 bp, Homo sapiens
ttgcagtttcaaata

SEQ ID NO: 1694088 - DNA, 15 bp, Homo sapiens
tgcagtttcaaatat

SEQ ID NO: 1694089 - DNA, 15 bp, Homo sapiens
gcagtttcaaatatt

SEQ ID NO: 1694090 - DNA, 15 bp, Homo sapiens
cagtttcaaatatta

SEQ ID NO: 1694091 - DNA, 15 bp, Homo sapiens
agtttcaaatattac

SEQ ID NO: 1694092 - DNA, 15 bp, Homo sapiens
gtttcaaatattaca

SEQ ID NO: 1694093 - DNA, 15 bp, Homo sapiens
tttcaaatattacaa

SEQ ID NO: 1694094 - DNA, 15 bp, Homo sapiens
ttcaaatattacaaa

SEQ ID NO: 1694095 - DNA, 15 bp, Homo sapiens
tcaaatattacaaat

SEQ ID NO: 1694096 - DNA, 15 bp, Homo sapiens
caaatattacaaatt

SEQ ID NO: 1694097 - DNA, 15 bp, Homo sapiens
aaatattacaaatta

SEQ ID NO: 1694098 - DNA, 15 bp, Homo sapiens
aatattacaaattaa

SEQ ID NO: 1694099 - DNA, 15 bp, Homo sapiens
atattacaaattaac

SEQ ID NO: 1694100 - DNA, 15 bp, Homo sapiens
tattacaaattaaca

SEQ ID NO: 1694101 - DNA, 15 bp, Homo sapiens
attacaaattaacat

SEQ ID NO: 1694102 - DNA, 15 bp, Homo sapiens
ttacaaattaacata

SEQ ID NO: 1694103 - DNA, 15 bp, Homo sapiens
tacaaattaacatat

SEQ ID NO: 1694104 - DNA, 15 bp, Homo sapiens
acaaattaacatatc

SEQ ID NO: 1694105 - DNA, 15 bp, Homo sapiens
caaattaacatatca

SEQ ID NO: 1694106 - DNA, 15 bp, Homo sapiens
aaattaacatatcat

SEQ ID NO: 1694107 - DNA, 15 bp, Homo sapiens
aattaacatatcatt

SEQ ID NO: 1694108 - DNA, 15 bp, Homo sapiens
attaacatatcattt

SEQ ID NO: 1694109 - DNA, 15 bp, Homo sapiens
ttaacatatcatttc

SEQ ID NO: 1694110 - DNA, 15 bp, Homo sapiens
taacatatcatttct

SEQ ID NO: 1694111 - DNA, 15 bp, Homo sapiens
aacatatcatttctt

SEQ ID NO: 1694112 - DNA, 15 bp, Homo sapiens
acatatcatttctta

SEQ ID NO: 1694113 - DNA, 15 bp, Homo sapiens
catatcatttcttaa

SEQ ID NO: 1694114 - DNA, 15 bp, Homo sapiens
atatcatttcttaag

SEQ ID NO: 1694115 - DNA, 15 bp, Homo sapiens
tatcatttcttaaga

SEQ ID NO: 1694116 - DNA, 15 bp, Homo sapiens
atcatttcttaagaa

SEQ ID NO: 1694117 - DNA, 15 bp, Homo sapiens
tcatttcttaagaaa

SEQ ID NO: 1694118 - DNA, 15 bp, Homo sapiens
catttcttaagaaaa

SEQ ID NO: 1694119 - DNA, 15 bp, Homo sapiens
atttcttaagaaaaa

SEQ ID NO: 1694120 - DNA, 15 bp, Homo sapiens
tttcttaagaaaaaa

SEQ ID NO: 1694121 - DNA, 15 bp, Homo sapiens
ttcttaagaaaaaaa

SEQ ID NO: 1694122 - DNA, 15 bp, Homo sapiens
tcttaagaaaaaaat

SEQ ID NO: 1694123 - DNA, 15 bp, Homo sapiens
cttaagaaaaaaatt

SEQ ID NO: 1694124 - DNA, 15 bp, Homo sapiens
ttaagaaaaaaatta

SEQ ID NO: 1694125 - DNA, 15 bp, Homo sapiens
taagaaaaaaattag

SEQ ID NO: 1694126 - DNA, 15 bp, Homo sapiens
aagaaaaaaattaga

SEQ ID NO: 1694127 - DNA, 15 bp, Homo sapiens
agaaaaaaattagaa

SEQ ID NO: 1694128 - DNA, 15 bp, Homo sapiens
gaaaaaaattagaag

SEQ ID NO: 1694129 - DNA, 15 bp, Homo sapiens
aaaaaaattagaaga

SEQ ID NO: 1694130 - DNA, 15 bp, Homo sapiens
aaaaaattagaagat

SEQ ID NO: 1694131 - DNA, 15 bp, Homo sapiens
aaaaattagaagata

SEQ ID NO: 1694132 - DNA, 15 bp, Homo sapiens
aaaattagaagataa

SEQ ID NO: 1694133 - DNA, 15 bp, Homo sapiens
aaattagaagataaa

SEQ ID NO: 1694134 - DNA, 15 bp, Homo sapiens
aattagaagataaag

SEQ ID NO: 1694135 - DNA, 15 bp, Homo sapiens
attagaagataaagc

SEQ ID NO: 1694136 - DNA, 15 bp, Homo sapiens
ttagaagataaagct

SEQ ID NO: 1694137 - DNA, 15 bp, Homo sapiens
tagaagataaagcta

SEQ ID NO: 1694138 - DNA, 15 bp, Homo sapiens
agaagataaagctac

SEQ ID NO: 1694139 - DNA, 15 bp, Homo sapiens
gaagataaagctaca

SEQ ID NO: 1694140 - DNA, 15 bp, Homo sapiens
aagataaagctacag

SEQ ID NO: 1694141 - DNA, 15 bp, Homo sapiens
agataaagctacagt

SEQ ID NO: 1694142 - DNA, 15 bp, Homo sapiens
gataaagctacagtc

SEQ ID NO: 1694143 - DNA, 15 bp, Homo sapiens
ataaagctacagtct

SEQ ID NO: 1694144 - DNA, 15 bp, Homo sapiens
taaagctacagtctt

SEQ ID NO: 1694145 - DNA, 15 bp, Homo sapiens
aaagctacagtcttt

SEQ ID NO: 1694146 - DNA, 15 bp, Homo sapiens
aagctacagtctttt

SEQ ID NO: 1694147 - DNA, 15 bp, Homo sapiens
agctacagtcttttc

SEQ ID NO: 1694148 - DNA, 15 bp, Homo sapiens
gctacagtcttttct

SEQ ID NO: 1694149 - DNA, 15 bp, Homo sapiens
ctacagtcttttctc

SEQ ID NO: 1694150 - DNA, 15 bp, Homo sapiens
tacagtcttttctca

SEQ ID NO: 1694151 - DNA, 15 bp, Homo sapiens
acagtcttttctcat

SEQ ID NO: 1694152 - DNA, 15 bp, Homo sapiens
cagtcttttctcatc

SEQ ID NO: 1694153 - DNA, 15 bp, Homo sapiens
agtcttttctcatct

SEQ ID NO: 1694154 - DNA, 15 bp, Homo sapiens
gtcttttctcatctc

SEQ ID NO: 1694155 - DNA, 15 bp, Homo sapiens
tcttttctcatctct

SEQ ID NO: 1694156 - DNA, 15 bp, Homo sapiens
cttttctcatctctc

SEQ ID NO: 1694157 - DNA, 15 bp, Homo sapiens
ttttctcatctctcc

SEQ ID NO: 1694158 - DNA, 15 bp, Homo sapiens
tttctcatctctcct

SEQ ID NO: 1694159 - DNA, 15 bp, Homo sapiens
ttctcatctctcctc

SEQ ID NO: 1694160 - DNA, 15 bp, Homo sapiens
tctcatctctcctct

SEQ ID NO: 1694161 - DNA, 15 bp, Homo sapiens
ctcatctctcctcta

SEQ ID NO: 1694162 - DNA, 15 bp, Homo sapiens
tcatctctcctctat

SEQ ID NO: 1694163 - DNA, 15 bp, Homo sapiens
catctctcctctatc

SEQ ID NO: 1694164 - DNA, 15 bp, Homo sapiens
atctctcctctatcc

SEQ ID NO: 1694165 - DNA, 15 bp, Homo sapiens
tctctcctctatcct

SEQ ID NO: 1694166 - DNA, 15 bp, Homo sapiens
ctctcctctatcctg

SEQ ID NO: 1694167 - DNA, 15 bp, Homo sapiens
tctcctctatcctga

SEQ ID NO: 1694168 - DNA, 15 bp, Homo sapiens
ctcctctatcctgat

SEQ ID NO: 1694169 - DNA, 15 bp, Homo sapiens
tcctctatcctgatc

SEQ ID NO: 1694170 - DNA, 15 bp, Homo sapiens
cctctatcctgatca

SEQ ID NO: 1694171 - DNA, 15 bp, Homo sapiens
ctctatcctgatcat

SEQ ID NO: 1694172 - DNA, 15 bp, Homo sapiens
tctatcctgatcatt

SEQ ID NO: 1694173 - DNA, 15 bp, Homo sapiens
ctatcctgatcattc

SEQ ID NO: 1694174 - DNA, 15 bp, Homo sapiens
tatcctgatcattct

SEQ ID NO: 1694175 - DNA, 15 bp, Homo sapiens
atcctgatcattcta

SEQ ID NO: 1694176 - DNA, 15 bp, Homo sapiens
tcctgatcattctaa

SEQ ID NO: 1694177 - DNA, 15 bp, Homo sapiens
cctgatcattctaat

SEQ ID NO: 1694178 - DNA, 15 bp, Homo sapiens
ctgatcattctaatt

SEQ ID NO: 1694179 - DNA, 15 bp, Homo sapiens
tgatcattctaattc

SEQ ID NO: 1694180 - DNA, 15 bp, Homo sapiens
gatcattctaattct

SEQ ID NO: 1694181 - DNA, 15 bp, Homo sapiens
atcattctaattcta

SEQ ID NO: 1694182 - DNA, 15 bp, Homo sapiens
tcattctaattctac

SEQ ID NO: 1694183 - DNA, 15 bp, Homo sapiens
cattctaattctaca

SEQ ID NO: 1694184 - DNA, 15 bp, Homo sapiens
attctaattctacaa

SEQ ID NO: 1694185 - DNA, 15 bp, Homo sapiens
ttctaattctacaaa

SEQ ID NO: 1694186 - DNA, 15 bp, Homo sapiens
tctaattctacaaac

SEQ ID NO: 1694187 - DNA, 15 bp, Homo sapiens
ctaattctacaaact

SEQ ID NO: 1694188 - DNA, 15 bp, Homo sapiens
taattctacaaactt

SEQ ID NO: 1694189 - DNA, 15 bp, Homo sapiens
aattctacaaacttt

SEQ ID NO: 1694190 - DNA, 15 bp, Homo sapiens
attctacaaactttc

SEQ ID NO: 1694191 - DNA, 15 bp, Homo sapiens
ttctacaaactttct

SEQ ID NO: 1694192 - DNA, 15 bp, Homo sapiens
tctacaaactttcta

SEQ ID NO: 1694193 - DNA, 15 bp, Homo sapiens
ctacaaactttctag

SEQ ID NO: 1694194 - DNA, 15 bp, Homo sapiens
tacaaactttctagc

SEQ ID NO: 1694195 - DNA, 15 bp, Homo sapiens
acaaactttctagcc

SEQ ID NO: 1694196 - DNA, 15 bp, Homo sapiens
caaactttctagcca

SEQ ID NO: 1694197 - DNA, 15 bp, Homo sapiens
aaactttctagccaa

SEQ ID NO: 1694198 - DNA, 15 bp, Homo sapiens
aactttctagccaag

SEQ ID NO: 1694199 - DNA, 15 bp, Homo sapiens
actttctagccaaga

SEQ ID NO: 1694200 - DNA, 15 bp, Homo sapiens
ctttctagccaagac

SEQ ID NO: 1694201 - DNA, 15 bp, Homo sapiens
tttctagccaagaca

SEQ ID NO: 1694202 - DNA, 15 bp, Homo sapiens
ttctagccaagacag

SEQ ID NO: 1694203 - DNA, 15 bp, Homo sapiens
tctagccaagacagc

SEQ ID NO: 1694204 - DNA, 15 bp, Homo sapiens
ctagccaagacagca

SEQ ID NO: 1694205 - DNA, 15 bp, Homo sapiens
tagccaagacagcat

SEQ ID NO: 1694206 - DNA, 15 bp, Homo sapiens
agccaagacagcatc

SEQ ID NO: 1694207 - DNA, 15 bp, Homo sapiens
gccaagacagcatca

SEQ ID NO: 1694208 - DNA, 15 bp, Homo sapiens
ccaagacagcatcat

SEQ ID NO: 1694209 - DNA, 15 bp, Homo sapiens
caagacagcatcatt

SEQ ID NO: 1694210 - DNA, 15 bp, Homo sapiens
aagacagcatcatta

SEQ ID NO: 1694211 - DNA, 15 bp, Homo sapiens
agacagcatcattat

SEQ ID NO: 1694212 - DNA, 15 bp, Homo sapiens
gacagcatcattatg

SEQ ID NO: 1694213 - DNA, 15 bp, Homo sapiens
acagcatcattatga

SEQ ID NO: 1694214 - DNA, 15 bp, Homo sapiens
cagcatcattatgag

SEQ ID NO: 1694215 - DNA, 15 bp, Homo sapiens
agcatcattatgagt

SEQ ID NO: 1694216 - DNA, 15 bp, Homo sapiens
gcatcattatgagtt

SEQ ID NO: 1694217 - DNA, 15 bp, Homo sapiens
catcattatgagttt

SEQ ID NO: 1694218 - DNA, 15 bp, Homo sapiens
atcattatgagttta

SEQ ID NO: 1694219 - DNA, 15 bp, Homo sapiens
tcattatgagtttag

SEQ ID NO: 1694220 - DNA, 15 bp, Homo sapiens
cattatgagtttagc

SEQ ID NO: 1694221 - DNA, 15 bp, Homo sapiens
attatgagtttagca

SEQ ID NO: 1694222 - DNA, 15 bp, Homo sapiens
ttatgagtttagcat

SEQ ID NO: 1694223 - DNA, 15 bp, Homo sapiens
tatgagtttagcata

SEQ ID NO: 1694224 - DNA, 15 bp, Homo sapiens
atgagtttagcatat

SEQ ID NO: 1694225 - DNA, 15 bp, Homo sapiens
tgagtttagcatatt

SEQ ID NO: 1694226 - DNA, 15 bp, Homo sapiens
gagtttagcatattt

SEQ ID NO: 1694227 - DNA, 15 bp, Homo sapiens
agtttagcatatttc

SEQ ID NO: 1694228 - DNA, 15 bp, Homo sapiens
gtttagcatatttcc

SEQ ID NO: 1694229 - DNA, 15 bp, Homo sapiens
tttagcatatttcct

SEQ ID NO: 1694230 - DNA, 15 bp, Homo sapiens
ttagcatatttcctt

SEQ ID NO: 1694231 - DNA, 15 bp, Homo sapiens
tagcatatttccttc

SEQ ID NO: 1694232 - DNA, 15 bp, Homo sapiens
agcatatttccttcc

SEQ ID NO: 1694233 - DNA, 15 bp, Homo sapiens
gcatatttccttcca

SEQ ID NO: 1694234 - DNA, 15 bp, Homo sapiens
catatttccttccag

SEQ ID NO: 1694235 - DNA, 15 bp, Homo sapiens
atatttccttccagt

SEQ ID NO: 1694236 - DNA, 15 bp, Homo sapiens
tatttccttccagtc

SEQ ID NO: 1694237 - DNA, 15 bp, Homo sapiens
atttccttccagtcc

SEQ ID NO: 1694238 - DNA, 15 bp, Homo sapiens
tttccttccagtcct

SEQ ID NO: 1694239 - DNA, 15 bp, Homo sapiens
ttccttccagtcctt

SEQ ID NO: 1694240 - DNA, 15 bp, Homo sapiens
tccttccagtccttt

SEQ ID NO: 1694241 - DNA, 15 bp, Homo sapiens
ccttccagtcctttg

SEQ ID NO: 1694242 - DNA, 15 bp, Homo sapiens
cttccagtcctttgg

SEQ ID NO: 1694243 - DNA, 15 bp, Homo sapiens
ttccagtcctttgga

SEQ ID NO: 1694244 - DNA, 15 bp, Homo sapiens
tccagtcctttggaa

SEQ ID NO: 1694245 - DNA, 15 bp, Homo sapiens
ccagtcctttggaaa

SEQ ID NO: 1694246 - DNA, 15 bp, Homo sapiens
cagtcctttggaaaa

SEQ ID NO: 1694247 - DNA, 15 bp, Homo sapiens
agtcctttggaaaag

SEQ ID NO: 1694248 - DNA, 15 bp, Homo sapiens
gtcctttggaaaagt

SEQ ID NO: 1694249 - DNA, 15 bp, Homo sapiens
tcctttggaaaagta

SEQ ID NO: 1694250 - DNA, 15 bp, Homo sapiens
ctttggaaaagtatg

SEQ ID NO: 1694251 - DNA, 15 bp, Homo sapiens
tttggaaaagtatgt

SEQ ID NO: 1694252 - DNA, 15 bp, Homo sapiens
ttggaaaagtatgtt

SEQ ID NO: 1694253 - DNA, 15 bp, Homo sapiens
tggaaaagtatgttg

SEQ ID NO: 1694254 - DNA, 15 bp, Homo sapiens
ggaaaagtatgttga

SEQ ID NO: 1694255 - DNA, 15 bp, Homo sapiens
gaaaagtatgttgat

SEQ ID NO: 1694256 - DNA, 15 bp, Homo sapiens
aaaagtatgttgata

SEQ ID NO: 1694257 - DNA, 15 bp, Homo sapiens
aaagtatgttgatat

SEQ ID NO: 1694258 - DNA, 15 bp, Homo sapiens
aagtatgttgatatt

SEQ ID NO: 1694259 - DNA, 15 bp, Homo sapiens
agtatgttgatattg

SEQ ID NO: 1694260 - DNA, 15 bp, Homo sapiens
gtatgttgatattga

SEQ ID NO: 1694261 - DNA, 15 bp, Homo sapiens
tatgttgatattgac

SEQ ID NO: 1694262 - DNA, 15 bp, Homo sapiens
atgttgatattgaca

SEQ ID NO: 1694263 - DNA, 15 bp, Homo sapiens
tgttgatattgacaa

SEQ ID NO: 1694264 - DNA, 15 bp, Homo sapiens
gttgatattgacaag

SEQ ID NO: 1694265 - DNA, 15 bp, Homo sapiens
ttgatattgacaagt

SEQ ID NO: 1694266 - DNA, 15 bp, Homo sapiens
tgatattgacaagtg

SEQ ID NO: 1694267 - DNA, 15 bp, Homo sapiens
gatattgacaagtgt

SEQ ID NO: 1694268 - DNA, 15 bp, Homo sapiens
atattgacaagtgtc

SEQ ID NO: 1694269 - DNA, 15 bp, Homo sapiens
tattgacaagtgtca

SEQ ID NO: 1694270 - DNA, 15 bp, Homo sapiens
attgacaagtgtcat

SEQ ID NO: 1694271 - DNA, 15 bp, Homo sapiens
ttgacaagtgtcatg

SEQ ID NO: 1694272 - DNA, 15 bp, Homo sapiens
tgacaagtgtcatgc

SEQ ID NO: 1694273 - DNA, 15 bp, Homo sapiens
gacaagtgtcatgct

SEQ ID NO: 1694274 - DNA, 15 bp, Homo sapiens
acaagtgtcatgcta

SEQ ID NO: 1694275 - DNA, 15 bp, Homo sapiens
caagtgtcatgctat

SEQ ID NO: 1694276 - DNA, 15 bp, Homo sapiens
aagtgtcatgctatg

SEQ ID NO: 1694277 - DNA, 15 bp, Homo sapiens
agtgtcatgctatgc

SEQ ID NO: 1694278 - DNA, 15 bp, Homo sapiens
gtgtcatgctatgca

SEQ ID NO: 1694279 - DNA, 15 bp, Homo sapiens
tgtcatgctatgcac

SEQ ID NO: 1694280 - DNA, 15 bp, Homo sapiens
gtcatgctatgcaca

SEQ ID NO: 1694281 - DNA, 15 bp, Homo sapiens
tcatgctatgcacat

SEQ ID NO: 1694282 - DNA, 15 bp, Homo sapiens
catgctatgcacatt

SEQ ID NO: 1694283 - DNA, 15 bp, Homo sapiens
atgctatgcacattg

SEQ ID NO: 1694284 - DNA, 15 bp, Homo sapiens
tgctatgcacattgg

SEQ ID NO: 1694285 - DNA, 15 bp, Homo sapiens
gctatgcacattggt

SEQ ID NO: 1694286 - DNA, 15 bp, Homo sapiens
ctatgcacattggtc

SEQ ID NO: 1694287 - DNA, 15 bp, Homo sapiens
tatgcacattggtct

SEQ ID NO: 1694288 - DNA, 15 bp, Homo sapiens
atgcacattggtctg

SEQ ID NO: 1694289 - DNA, 15 bp, Homo sapiens
tgcacattggtctgc

SEQ ID NO: 1694290 - DNA, 15 bp, Homo sapiens
gcacattggtctgca

SEQ ID NO: 1694291 - DNA, 15 bp, Homo sapiens
cacattggtctgcag

SEQ ID NO: 1694292 - DNA, 15 bp, Homo sapiens
acattggtctgcagc

SEQ ID NO: 1694293 - DNA, 15 bp, Homo sapiens
cattggtctgcagcc

SEQ ID NO: 1694294 - DNA, 15 bp, Homo sapiens
attggtctgcagcct

SEQ ID NO: 1694295 - DNA, 15 bp, Homo sapiens
ttggtctgcagcctc

SEQ ID NO: 1694296 - DNA, 15 bp, Homo sapiens
tggtctgcagcctct

SEQ ID NO: 1694297 - DNA, 15 bp, Homo sapiens
ggtctgcagcctctt

SEQ ID NO: 1694298 - DNA, 15 bp, Homo sapiens
gtctgcagcctcttt

SEQ ID NO: 1694299 - DNA, 15 bp, Homo sapiens
tctgcagcctctttc

SEQ ID NO: 1694300 - DNA, 15 bp, Homo sapiens
ctgcagcctctttca

SEQ ID NO: 1694301 - DNA, 15 bp, Homo sapiens
tgcagcctctttcag

SEQ ID NO: 1694302 - DNA, 15 bp, Homo sapiens
gcagcctctttcagt

SEQ ID NO: 1694303 - DNA, 15 bp, Homo sapiens
cagcctctttcagta

SEQ ID NO: 1694304 - DNA, 15 bp, Homo sapiens
agcctctttcagtaa

SEQ ID NO: 1694305 - DNA, 15 bp, Homo sapiens
gcctctttcagtaag

SEQ ID NO: 1694306 - DNA, 15 bp, Homo sapiens
cctctttcagtaagc

SEQ ID NO: 1694307 - DNA, 15 bp, Homo sapiens
ctctttcagtaagca

SEQ ID NO: 1694308 - DNA, 15 bp, Homo sapiens
tctttcagtaagcac

SEQ ID NO: 1694309 - DNA, 15 bp, Homo sapiens
ctttcagtaagcaca

SEQ ID NO: 1694310 - DNA, 15 bp, Homo sapiens
tttcagtaagcacaa

SEQ ID NO: 1694311 - DNA, 15 bp, Homo sapiens
ttcagtaagcacaat

SEQ ID NO: 1694312 - DNA, 15 bp, Homo sapiens
tcagtaagcacaatg

SEQ ID NO: 1694313 - DNA, 15 bp, Homo sapiens
cagtaagcacaatgg

SEQ ID NO: 1694314 - DNA, 15 bp, Homo sapiens
agtaagcacaatgga

SEQ ID NO: 1694315 - DNA, 15 bp, Homo sapiens
gtaagcacaatggag

SEQ ID NO: 1694316 - DNA, 15 bp, Homo sapiens
taagcacaatggagt

SEQ ID NO: 1694317 - DNA, 15 bp, Homo sapiens
aagcacaatggagtg

SEQ ID NO: 1694318 - DNA, 15 bp, Homo sapiens
agcacaatggagtgg

SEQ ID NO: 1694319 - DNA, 15 bp, Homo sapiens
gcacaatggagtggc

SEQ ID NO: 1694320 - DNA, 15 bp, Homo sapiens
cacaatggagtggcc

SEQ ID NO: 1694321 - DNA, 15 bp, Homo sapiens
acaatggagtggcca

SEQ ID NO: 1694322 - DNA, 15 bp, Homo sapiens
caatggagtggccaa

SEQ ID NO: 1694323 - DNA, 15 bp, Homo sapiens
aatggagtggccaag

SEQ ID NO: 1694324 - DNA, 15 bp, Homo sapiens
atggagtggccaaga

SEQ ID NO: 1694325 - DNA, 15 bp, Homo sapiens
tggagtggccaagag

SEQ ID NO: 1694326 - DNA, 15 bp, Homo sapiens
ggagtggccaagagg

SEQ ID NO: 1694327 - DNA, 15 bp, Homo sapiens
gagtggccaagagga

SEQ ID NO: 1694328 - DNA, 15 bp, Homo sapiens
agtggccaagaggat

SEQ ID NO: 1694329 - DNA, 15 bp, Homo sapiens
gtggccaagaggatg

SEQ ID NO: 1694330 - DNA, 15 bp, Homo sapiens
tggccaagaggatgg

SEQ ID NO: 1694331 - DNA, 15 bp, Homo sapiens
ggccaagaggatgga

SEQ ID NO: 1694332 - DNA, 15 bp, Homo sapiens
gccaagaggatggac

SEQ ID NO: 1694333 - DNA, 15 bp, Homo sapiens
ccaagaggatggact

SEQ ID NO: 1694334 - DNA, 15 bp, Homo sapiens
caagaggatggactc

SEQ ID NO: 1694335 - DNA, 15 bp, Homo sapiens
aagaggatggactcc

SEQ ID NO: 1694336 - DNA, 15 bp, Homo sapiens
agaggatggactcca

SEQ ID NO: 1694337 - DNA, 15 bp, Homo sapiens
gaggatggactccat

SEQ ID NO: 1694338 - DNA, 15 bp, Homo sapiens
aggatggactccatg

SEQ ID NO: 1694339 - DNA, 15 bp, Homo sapiens
ggatggactccatgg

SEQ ID NO: 1694340 - DNA, 15 bp, Homo sapiens
gatggactccatgga

SEQ ID NO: 1694341 - DNA, 15 bp, Homo sapiens
atggactccatggat

SEQ ID NO: 1694342 - DNA, 15 bp, Homo sapiens
tggactccatggatg

SEQ ID NO: 1694343 - DNA, 15 bp, Homo sapiens
ggactccatggatgc

SEQ ID NO: 1694344 - DNA, 15 bp, Homo sapiens
gactccatggatgca

SEQ ID NO: 1694345 - DNA, 15 bp, Homo sapiens
actccatggatgcag

SEQ ID NO: 1694346 - DNA, 15 bp, Homo sapiens
ctccatggatgcagg

SEQ ID NO: 1694347 - DNA, 15 bp, Homo sapiens
tccatggatgcaggg

SEQ ID NO: 1694348 - DNA, 15 bp, Homo sapiens
ccatggatgcagggc

SEQ ID NO: 1694349 - DNA, 15 bp, Homo sapiens
catggatgcagggct

SEQ ID NO: 1694350 - DNA, 15 bp, Homo sapiens
atggatgcagggctg

SEQ ID NO: 1694351 - DNA, 15 bp, Homo sapiens
tggatgcagggctgt

SEQ ID NO: 1694352 - DNA, 15 bp, Homo sapiens
ggatgcagggctgtg

SEQ ID NO: 1694353 - DNA, 15 bp, Homo sapiens
gatgcagggctgtgg

SEQ ID NO: 1694354 - DNA, 15 bp, Homo sapiens
atgcagggctgtggc

SEQ ID NO: 1694355 - DNA, 15 bp, Homo sapiens
tgcagggctgtggct

SEQ ID NO: 1694356 - DNA, 15 bp, Homo sapiens
gcagggctgtggctt

SEQ ID NO: 1694357 - DNA, 15 bp, Homo sapiens
cagggctgtggctta

SEQ ID NO: 1694358 - DNA, 15 bp, Homo sapiens
agggctgtggcttag

SEQ ID NO: 1694359 - DNA, 15 bp, Homo sapiens
gggctgtggcttaga

SEQ ID NO: 1694360 - DNA, 15 bp, Homo sapiens
ggctgtggcttagag

SEQ ID NO: 1694361 - DNA, 15 bp, Homo sapiens
gctgtggcttagaga

SEQ ID NO: 1694362 - DNA, 15 bp, Homo sapiens
ctgtggcttagagag

SEQ ID NO: 1694363 - DNA, 15 bp, Homo sapiens
tgtggcttagagagg

SEQ ID NO: 1694364 - DNA, 15 bp, Homo sapiens
gtggcttagagaggg

SEQ ID NO: 1694365 - DNA, 15 bp, Homo sapiens
tggcttagagagggt

SEQ ID NO: 1694366 - DNA, 15 bp, Homo sapiens
ggcttagagagggtg

SEQ ID NO: 1694367 - DNA, 15 bp, Homo sapiens
gcttagagagggtga

SEQ ID NO: 1694368 - DNA, 15 bp, Homo sapiens
cttagagagggtgac

SEQ ID NO: 1694369 - DNA, 15 bp, Homo sapiens
ttagagagggtgact

SEQ ID NO: 1694370 - DNA, 15 bp, Homo sapiens
tagagagggtgactt

SEQ ID NO: 1694371 - DNA, 15 bp, Homo sapiens
agagagggtgacttg

SEQ ID NO: 1694372 - DNA, 15 bp, Homo sapiens
gagagggtgacttga

SEQ ID NO: 1694373 - DNA, 15 bp, Homo sapiens
agagggtgacttgac

SEQ ID NO: 1694374 - DNA, 15 bp, Homo sapiens
gagggtgacttgact

SEQ ID NO: 1694375 - DNA, 15 bp, Homo sapiens
agggtgacttgactt

SEQ ID NO: 1694376 - DNA, 15 bp, Homo sapiens
gggtgacttgacttc

SEQ ID NO: 1694377 - DNA, 15 bp, Homo sapiens
ggtgacttgacttct

SEQ ID NO: 1694378 - DNA, 15 bp, Homo sapiens
gtgacttgacttctc

SEQ ID NO: 1694379 - DNA, 15 bp, Homo sapiens
tgacttgacttctct

SEQ ID NO: 1694380 - DNA, 15 bp, Homo sapiens
gacttgacttctctg

SEQ ID NO: 1694381 - DNA, 15 bp, Homo sapiens
acttgacttctctgt

SEQ ID NO: 1694382 - DNA, 15 bp, Homo sapiens
cttgacttctctgtg

SEQ ID NO: 1694383 - DNA, 15 bp, Homo sapiens
ttgacttctctgtgc

SEQ ID NO: 1694384 - DNA, 15 bp, Homo sapiens
tgacttctctgtgcc

SEQ ID NO: 1694385 - DNA, 15 bp, Homo sapiens
gacttctctgtgcct

SEQ ID NO: 1694386 - DNA, 15 bp, Homo sapiens
acttctctgtgcctc

SEQ ID NO: 1694387 - DNA, 15 bp, Homo sapiens
cttctctgtgcctca

SEQ ID NO: 1694388 - DNA, 15 bp, Homo sapiens
tctgtgcctcagttc

SEQ ID NO: 1694389 - DNA, 15 bp, Homo sapiens
ctgtgcctcagttcc

SEQ ID NO: 1694390 - DNA, 15 bp, Homo sapiens
tgtgcctcagttcct

SEQ ID NO: 1694391 - DNA, 15 bp, Homo sapiens
gtgcctcagttcctc

SEQ ID NO: 1694392 - DNA, 15 bp, Homo sapiens
tgcctcagttcctca

SEQ ID NO: 1694393 - DNA, 15 bp, Homo sapiens
gcctcagttcctcat

SEQ ID NO: 1694394 - DNA, 15 bp, Homo sapiens
cctcagttcctcatc

SEQ ID NO: 1694395 - DNA, 15 bp, Homo sapiens
ctcagttcctcatct

SEQ ID NO: 1694396 - DNA, 15 bp, Homo sapiens
tcagttcctcatctg

SEQ ID NO: 1694397 - DNA, 15 bp, Homo sapiens
cagttcctcatctgt

SEQ ID NO: 1694398 - DNA, 15 bp, Homo sapiens
agttcctcatctgta

SEQ ID NO: 1694399 - DNA, 15 bp, Homo sapiens
gttcctcatctgtaa

SEQ ID NO: 1694400 - DNA, 15 bp, Homo sapiens
ttcctcatctgtaaa

SEQ ID NO: 1694401 - DNA, 15 bp, Homo sapiens
tcctcatctgtaaaa

SEQ ID NO: 1694402 - DNA, 15 bp, Homo sapiens
catctgtaaaatgga

SEQ ID NO: 1694403 - DNA, 15 bp, Homo sapiens
atctgtaaaatggaa

SEQ ID NO: 1694404 - DNA, 15 bp, Homo sapiens
tctgtaaaatggaaa

SEQ ID NO: 1694405 - DNA, 15 bp, Homo sapiens
ctgtaaaatggaaat

SEQ ID NO: 1694406 - DNA, 15 bp, Homo sapiens
gtaaaatggaaatag

SEQ ID NO: 1694407 - DNA, 15 bp, Homo sapiens
taaaatggaaatagt

SEQ ID NO: 1694408 - DNA, 15 bp, Homo sapiens
aaaatggaaatagta

SEQ ID NO: 1694409 - DNA, 15 bp, Homo sapiens
aaatggaaatagtaa

SEQ ID NO: 1694410 - DNA, 15 bp, Homo sapiens
aatggaaatagtaat

SEQ ID NO: 1694411 - DNA, 15 bp, Homo sapiens
atggaaatagtaatc

SEQ ID NO: 1694412 - DNA, 15 bp, Homo sapiens
tggaaatagtaatcg

SEQ ID NO: 1694413 - DNA, 15 bp, Homo sapiens
ggaaatagtaatcgt

SEQ ID NO: 1694414 - DNA, 15 bp, Homo sapiens
gaaatagtaatcgta

SEQ ID NO: 1694415 - DNA, 15 bp, Homo sapiens
aaatagtaatcgtat

SEQ ID NO: 1694416 - DNA, 15 bp, Homo sapiens
aatagtaatcgtatc

SEQ ID NO: 1694417 - DNA, 15 bp, Homo sapiens
atagtaatcgtatct

SEQ ID NO: 1694418 - DNA, 15 bp, Homo sapiens
tagtaatcgtatctg

SEQ ID NO: 1694419 - DNA, 15 bp, Homo sapiens
agtaatcgtatctgc

SEQ ID NO: 1694420 - DNA, 15 bp, Homo sapiens
gtaatcgtatctgct

SEQ ID NO: 1694421 - DNA, 15 bp, Homo sapiens
taatcgtatctgctt

SEQ ID NO: 1694422 - DNA, 15 bp, Homo sapiens
aatcgtatctgcttc

SEQ ID NO: 1694423 - DNA, 15 bp, Homo sapiens
atcgtatctgcttca

SEQ ID NO: 1694424 - DNA, 15 bp, Homo sapiens
tcgtatctgcttcat

SEQ ID NO: 1694425 - DNA, 15 bp, Homo sapiens
cgtatctgcttcata

SEQ ID NO: 1694426 - DNA, 15 bp, Homo sapiens
gtatctgcttcatag

SEQ ID NO: 1694427 - DNA, 15 bp, Homo sapiens
tatctgcttcatagg

SEQ ID NO: 1694428 - DNA, 15 bp, Homo sapiens
atctgcttcataggg

SEQ ID NO: 1694429 - DNA, 15 bp, Homo sapiens
tctgcttcatagggt

SEQ ID NO: 1694430 - DNA, 15 bp, Homo sapiens
ctgcttcatagggta

SEQ ID NO: 1694431 - DNA, 15 bp, Homo sapiens
tgcttcatagggtag

SEQ ID NO: 1694432 - DNA, 15 bp, Homo sapiens
gcttcatagggtagt

SEQ ID NO: 1694433 - DNA, 15 bp, Homo sapiens
cttcatagggtagtt

SEQ ID NO: 1694434 - DNA, 15 bp, Homo sapiens
ttcatagggtagttc

SEQ ID NO: 1694435 - DNA, 15 bp, Homo sapiens
tcatagggtagttct

SEQ ID NO: 1694436 - DNA, 15 bp, Homo sapiens
catagggtagttcta

SEQ ID NO: 1694437 - DNA, 15 bp, Homo sapiens
atagggtagttctaa

SEQ ID NO: 1694438 - DNA, 15 bp, Homo sapiens
tagggtagttctaaa

SEQ ID NO: 1694439 - DNA, 15 bp, Homo sapiens
agggtagttctaaag

SEQ ID NO: 1694440 - DNA, 15 bp, Homo sapiens
gggtagttctaaaga

SEQ ID NO: 1694441 - DNA, 15 bp, Homo sapiens
ggtagttctaaagat

SEQ ID NO: 1694442 - DNA, 15 bp, Homo sapiens
gtagttctaaagatt

SEQ ID NO: 1694443 - DNA, 15 bp, Homo sapiens
tagttctaaagatta

SEQ ID NO: 1694444 - DNA, 15 bp, Homo sapiens
agttctaaagattaa

SEQ ID NO: 1694445 - DNA, 15 bp, Homo sapiens
gttctaaagattaaa

SEQ ID NO: 1694446 - DNA, 15 bp, Homo sapiens
ttctaaagattaaat

SEQ ID NO: 1694447 - DNA, 15 bp, Homo sapiens
tctaaagattaaatc

SEQ ID NO: 1694448 - DNA, 15 bp, Homo sapiens
ctaaagattaaatca

SEQ ID NO: 1694449 - DNA, 15 bp, Homo sapiens
taaagattaaatcac

SEQ ID NO: 1694450 - DNA, 15 bp, Homo sapiens
aaagattaaatcact

SEQ ID NO: 1694451 - DNA, 15 bp, Homo sapiens
attaaatcacttaat

SEQ ID NO: 1694452 - DNA, 15 bp, Homo sapiens
ttaaatcacttaatg

SEQ ID NO: 1694453 - DNA, 15 bp, Homo sapiens
taaatcacttaatgc

SEQ ID NO: 1694454 - DNA, 15 bp, Homo sapiens
aaatcacttaatgca

SEQ ID NO: 1694455 - DNA, 15 bp, Homo sapiens
aatcacttaatgcat

SEQ ID NO: 1694456 - DNA, 15 bp, Homo sapiens
atcacttaatgcatg

SEQ ID NO: 1694457 - DNA, 15 bp, Homo sapiens
tcacttaatgcatgt

SEQ ID NO: 1694458 - DNA, 15 bp, Homo sapiens
cacttaatgcatgtg

SEQ ID NO: 1694459 - DNA, 15 bp, Homo sapiens
acttaatgcatgtga

SEQ ID NO: 1694460 - DNA, 15 bp, Homo sapiens
cttaatgcatgtgat

SEQ ID NO: 1694461 - DNA, 15 bp, Homo sapiens
ttaatgcatgtgatc

SEQ ID NO: 1694462 - DNA, 15 bp, Homo sapiens
taatgcatgtgatct

SEQ ID NO: 1694463 - DNA, 15 bp, Homo sapiens
aatgcatgtgatcta

SEQ ID NO: 1694464 - DNA, 15 bp, Homo sapiens
atgcatgtgatctaa

SEQ ID NO: 1694465 - DNA, 15 bp, Homo sapiens
tgcatgtgatctaaa

SEQ ID NO: 1694466 - DNA, 15 bp, Homo sapiens
gcatgtgatctaaag

SEQ ID NO: 1694467 - DNA, 15 bp, Homo sapiens
catgtgatctaaaga

SEQ ID NO: 1694468 - DNA, 15 bp, Homo sapiens
atgtgatctaaagat

SEQ ID NO: 1694469 - DNA, 15 bp, Homo sapiens
tgtgatctaaagatt

SEQ ID NO: 1694470 - DNA, 15 bp, Homo sapiens
gtgatctaaagatta

SEQ ID NO: 1694471 - DNA, 15 bp, Homo sapiens
tgatctaaagattaa

SEQ ID NO: 1694472 - DNA, 15 bp, Homo sapiens
gatctaaagattaaa

SEQ ID NO: 1694473 - DNA, 15 bp, Homo sapiens
atctaaagattaaat

SEQ ID NO: 1694474 - DNA, 15 bp, Homo sapiens
taaatcacttaatgt

SEQ ID NO: 1694475 - DNA, 15 bp, Homo sapiens
aaatcacttaatgtg

SEQ ID NO: 1694476 - DNA, 15 bp, Homo sapiens
aatcacttaatgtgc

SEQ ID NO: 1694477 - DNA, 15 bp, Homo sapiens
atcacttaatgtgcc

SEQ ID NO: 1694478 - DNA, 15 bp, Homo sapiens
tcacttaatgtgccc

SEQ ID NO: 1694479 - DNA, 15 bp, Homo sapiens
cacttaatgtgccct

SEQ ID NO: 1694480 - DNA, 15 bp, Homo sapiens
acttaatgtgccctc

SEQ ID NO: 1694481 - DNA, 15 bp, Homo sapiens
cttaatgtgccctca

SEQ ID NO: 1694482 - DNA, 15 bp, Homo sapiens
ttaatgtgccctcag

SEQ ID NO: 1694483 - DNA, 15 bp, Homo sapiens
taatgtgccctcaga

SEQ ID NO: 1694484 - DNA, 15 bp, Homo sapiens
aatgtgccctcagaa

SEQ ID NO: 1694485 - DNA, 15 bp, Homo sapiens
atgtgccctcagaat

SEQ ID NO: 1694486 - DNA, 15 bp, Homo sapiens
tgtgccctcagaata

SEQ ID NO: 1694487 - DNA, 15 bp, Homo sapiens
gtgccctcagaatat

SEQ ID NO: 1694488 - DNA, 15 bp, Homo sapiens
tgccctcagaatatt

SEQ ID NO: 1694489 - DNA, 15 bp, Homo sapiens
gccctcagaatattt

SEQ ID NO: 1694490 - DNA, 15 bp, Homo sapiens
ccctcagaatattta

SEQ ID NO: 1694491 - DNA, 15 bp, Homo sapiens
cctcagaatatttat

SEQ ID NO: 1694492 - DNA, 15 bp, Homo sapiens
tcagaatatttatta

SEQ ID NO: 1694493 - DNA, 15 bp, Homo sapiens
cagaatatttattaa

SEQ ID NO: 1694494 - DNA, 15 bp, Homo sapiens
agaatatttattaac

SEQ ID NO: 1694495 - DNA, 15 bp, Homo sapiens
gaatatttattaact

SEQ ID NO: 1694496 - DNA, 15 bp, Homo sapiens
aatatttattaactg

SEQ ID NO: 1694497 - DNA, 15 bp, Homo sapiens
atatttattaactgt

SEQ ID NO: 1694498 - DNA, 15 bp, Homo sapiens
tatttattaactgtt

SEQ ID NO: 1694499 - DNA, 15 bp, Homo sapiens
atttattaactgtta

SEQ ID NO: 1694500 - DNA, 15 bp, Homo sapiens
tttattaactgttaa

SEQ ID NO: 1694501 - DNA, 15 bp, Homo sapiens
ttattaactgttaag

SEQ ID NO: 1694502 - DNA, 15 bp, Homo sapiens
tattaactgttaagt

SEQ ID NO: 1694503 - DNA, 15 bp, Homo sapiens
attaactgttaagta

SEQ ID NO: 1694504 - DNA, 15 bp, Homo sapiens
ttaactgttaagtaa

SEQ ID NO: 1694505 - DNA, 15 bp, Homo sapiens
taactgttaagtaag

SEQ ID NO: 1694506 - DNA, 15 bp, Homo sapiens
aactgttaagtaaga

SEQ ID NO: 1694507 - DNA, 15 bp, Homo sapiens
actgttaagtaagaa

SEQ ID NO: 1694508 - DNA, 15 bp, Homo sapiens
ctgttaagtaagaat

SEQ ID NO: 1694509 - DNA, 15 bp, Homo sapiens
tgttaagtaagaatt

SEQ ID NO: 1694510 - DNA, 15 bp, Homo sapiens
gttaagtaagaatta

SEQ ID NO: 1694511 - DNA, 15 bp, Homo sapiens
ttaagtaagaattac

SEQ ID NO: 1694512 - DNA, 15 bp, Homo sapiens
taagtaagaattact

SEQ ID NO: 1694513 - DNA, 15 bp, Homo sapiens
aagtaagaattacta

SEQ ID NO: 1694514 - DNA, 15 bp, Homo sapiens
agtaagaattactat

SEQ ID NO: 1694515 - DNA, 15 bp, Homo sapiens
gtaagaattactata

SEQ ID NO: 1694516 - DNA, 15 bp, Homo sapiens
taagaattactatat

SEQ ID NO: 1694517 - DNA, 15 bp, Homo sapiens
aagaattactatata

SEQ ID NO: 1694518 - DNA, 15 bp, Homo sapiens
agaattactatatat

SEQ ID NO: 1694519 - DNA, 15 bp, Homo sapiens
gaattactatatata

SEQ ID NO: 1694520 - DNA, 15 bp, Homo sapiens
aattactatatatat

SEQ ID NO: 1694521 - DNA, 15 bp, Homo sapiens
attactatatatata

SEQ ID NO: 1694522 - DNA, 15 bp, Homo sapiens
ttactatatatatat

SEQ ID NO: 1694523 - DNA, 15 bp, Homo sapiens
tactatatatatatt

SEQ ID NO: 1694524 - DNA, 15 bp, Homo sapiens
actatatatatattt

SEQ ID NO: 1694525 - DNA, 15 bp, Homo sapiens
ctatatatatatttt

SEQ ID NO: 1694526 - DNA, 15 bp, Homo sapiens
tatatatatattttg

SEQ ID NO: 1694527 - DNA, 15 bp, Homo sapiens
atatatatattttgt

SEQ ID NO: 1694528 - DNA, 15 bp, Homo sapiens
tatatatattttgtg

SEQ ID NO: 1694529 - DNA, 15 bp, Homo sapiens
atatatattttgtga

SEQ ID NO: 1694530 - DNA, 15 bp, Homo sapiens
tatatattttgtgaa

SEQ ID NO: 1694531 - DNA, 15 bp, Homo sapiens
atatattttgtgaat

SEQ ID NO: 1694532 - DNA, 15 bp, Homo sapiens
tatattttgtgaatg

SEQ ID NO: 1694533 - DNA, 15 bp, Homo sapiens
atattttgtgaatgc

SEQ ID NO: 1694534 - DNA, 15 bp, Homo sapiens
tattttgtgaatgca

SEQ ID NO: 1694535 - DNA, 15 bp, Homo sapiens
attttgtgaatgcaa

SEQ ID NO: 1694536 - DNA, 15 bp, Homo sapiens
ttttgtgaatgcaac

SEQ ID NO: 1694537 - DNA, 15 bp, Homo sapiens
tttgtgaatgcaaca

SEQ ID NO: 1694538 - DNA, 15 bp, Homo sapiens
ttgtgaatgcaacat

SEQ ID NO: 1694539 - DNA, 15 bp, Homo sapiens
tgtgaatgcaacatt

SEQ ID NO: 1694540 - DNA, 15 bp, Homo sapiens
gtgaatgcaacattt

SEQ ID NO: 1694541 - DNA, 15 bp, Homo sapiens
tgaatgcaacattta

SEQ ID NO: 1694542 - DNA, 15 bp, Homo sapiens
gaatgcaacatttaa

SEQ ID NO: 1694543 - DNA, 15 bp, Homo sapiens
aatgcaacatttaaa

SEQ ID NO: 1694544 - DNA, 15 bp, Homo sapiens
atgcaacatttaaaa

SEQ ID NO: 1694545 - DNA, 15 bp, Homo sapiens
tgcaacatttaaaaa

SEQ ID NO: 1694546 - DNA, 15 bp, Homo sapiens
gcaacatttaaaaaa

SEQ ID NO: 1694547 - DNA, 15 bp, Homo sapiens
caacatttaaaaaat

SEQ ID NO: 1694548 - DNA, 15 bp, Homo sapiens
aacatttaaaaaatg

SEQ ID NO: 1694549 - DNA, 15 bp, Homo sapiens
acatttaaaaaatgt

SEQ ID NO: 1694550 - DNA, 15 bp, Homo sapiens
catttaaaaaatgta

SEQ ID NO: 1694551 - DNA, 15 bp, Homo sapiens
atttaaaaaatgtat

SEQ ID NO: 1694552 - DNA, 15 bp, Homo sapiens
tttaaaaaatgtata

SEQ ID NO: 1694553 - DNA, 15 bp, Homo sapiens
ttaaaaaatgtatac

SEQ ID NO: 1694554 - DNA, 15 bp, Homo sapiens
taaaaaatgtataca

SEQ ID NO: 1694555 - DNA, 15 bp, Homo sapiens
aaaaaatgtatacat

SEQ ID NO: 1694556 - DNA, 15 bp, Homo sapiens
aaaaatgtatacatg

SEQ ID NO: 1694557 - DNA, 15 bp, Homo sapiens
aaaatgtatacatgc

SEQ ID NO: 1694558 - DNA, 15 bp, Homo sapiens
aaatgtatacatgct

SEQ ID NO: 1694559 - DNA, 15 bp, Homo sapiens
aatgtatacatgctg

SEQ ID NO: 1694560 - DNA, 15 bp, Homo sapiens
atgtatacatgctga

SEQ ID NO: 1694561 - DNA, 15 bp, Homo sapiens
tgtatacatgctgat

SEQ ID NO: 1694562 - DNA, 15 bp, Homo sapiens
gtatacatgctgata

SEQ ID NO: 1694563 - DNA, 15 bp, Homo sapiens
tatacatgctgatac

SEQ ID NO: 1694564 - DNA, 15 bp, Homo sapiens
atacatgctgataca

SEQ ID NO: 1694565 - DNA, 15 bp, Homo sapiens
tacatgctgatacat

SEQ ID NO: 1694566 - DNA, 15 bp, Homo sapiens
acatgctgatacata

SEQ ID NO: 1694567 - DNA, 15 bp, Homo sapiens
catgctgatacatat

SEQ ID NO: 1694568 - DNA, 15 bp, Homo sapiens
atgctgatacatata

SEQ ID NO: 1694569 - DNA, 15 bp, Homo sapiens
tgctgatacatatag

SEQ ID NO: 1694570 - DNA, 15 bp, Homo sapiens
gctgatacatataga

SEQ ID NO: 1694571 - DNA, 15 bp, Homo sapiens
ctgatacatatagat

SEQ ID NO: 1694572 - DNA, 15 bp, Homo sapiens
tgatacatatagatc

SEQ ID NO: 1694573 - DNA, 15 bp, Homo sapiens
gatacatatagatca

SEQ ID NO: 1694574 - DNA, 15 bp, Homo sapiens
atacatatagatcag

SEQ ID NO: 1694575 - DNA, 15 bp, Homo sapiens
tacatatagatcagg

SEQ ID NO: 1694576 - DNA, 15 bp, Homo sapiens
acatatagatcaggt

SEQ ID NO: 1694577 - DNA, 15 bp, Homo sapiens
catatagatcaggtt

SEQ ID NO: 1694578 - DNA, 15 bp, Homo sapiens
atatagatcaggttc

SEQ ID NO: 1694579 - DNA, 15 bp, Homo sapiens
tatagatcaggttca

SEQ ID NO: 1694580 - DNA, 15 bp, Homo sapiens
atagatcaggttcat

SEQ ID NO: 1694581 - DNA, 15 bp, Homo sapiens
tagatcaggttcata

SEQ ID NO: 1694582 - DNA, 15 bp, Homo sapiens
agatcaggttcataa

SEQ ID NO: 1694583 - DNA, 15 bp, Homo sapiens
gatcaggttcataac

SEQ ID NO: 1694584 - DNA, 15 bp, Homo sapiens
atcaggttcataact

SEQ ID NO: 1694585 - DNA, 15 bp, Homo sapiens
tcaggttcataactt

SEQ ID NO: 1694586 - DNA, 15 bp, Homo sapiens
caggttcataacttt

SEQ ID NO: 1694587 - DNA, 15 bp, Homo sapiens
aggttcataactttt

SEQ ID NO: 1694588 - DNA, 15 bp, Homo sapiens
ggttcataactttta

SEQ ID NO: 1694589 - DNA, 15 bp, Homo sapiens
gttcataacttttaa

SEQ ID NO: 1694590 - DNA, 15 bp, Homo sapiens
ttcataacttttaac

SEQ ID NO: 1694591 - DNA, 15 bp, Homo sapiens
tcataacttttaacc

SEQ ID NO: 1694592 - DNA, 15 bp, Homo sapiens
cataacttttaacct

SEQ ID NO: 1694593 - DNA, 15 bp, Homo sapiens
ataacttttaacctc

SEQ ID NO: 1694594 - DNA, 15 bp, Homo sapiens
taacttttaacctct

SEQ ID NO: 1694595 - DNA, 15 bp, Homo sapiens
aacttttaacctctg

SEQ ID NO: 1694596 - DNA, 15 bp, Homo sapiens
acttttaacctctga

SEQ ID NO: 1694597 - DNA, 15 bp, Homo sapiens
cttttaacctctgaa

SEQ ID NO: 1694598 - DNA, 15 bp, Homo sapiens
ttttaacctctgaag

SEQ ID NO: 1694599 - DNA, 15 bp, Homo sapiens
tttaacctctgaagt

SEQ ID NO: 1694600 - DNA, 15 bp, Homo sapiens
ttaacctctgaagta

SEQ ID NO: 1694601 - DNA, 15 bp, Homo sapiens
taacctctgaagtat

SEQ ID NO: 1694602 - DNA, 15 bp, Homo sapiens
aacctctgaagtata

SEQ ID NO: 1694603 - DNA, 15 bp, Homo sapiens
acctctgaagtatag

SEQ ID NO: 1694604 - DNA, 15 bp, Homo sapiens
cctctgaagtatagt

SEQ ID NO: 1694605 - DNA, 15 bp, Homo sapiens
ctctgaagtatagtt

SEQ ID NO: 1694606 - DNA, 15 bp, Homo sapiens
tctgaagtatagttc

SEQ ID NO: 1694607 - DNA, 15 bp, Homo sapiens
ctgaagtatagttct

SEQ ID NO: 1694608 - DNA, 15 bp, Homo sapiens
tgaagtatagttctt

SEQ ID NO: 1694609 - DNA, 15 bp, Homo sapiens
gaagtatagttctta

SEQ ID NO: 1694610 - DNA, 15 bp, Homo sapiens
aagtatagttcttaa

SEQ ID NO: 1694611 - DNA, 15 bp, Homo sapiens
agtatagttcttaat

SEQ ID NO: 1694612 - DNA, 15 bp, Homo sapiens
gtatagttcttaata

SEQ ID NO: 1694613 - DNA, 15 bp, Homo sapiens
tatagttcttaatat

SEQ ID NO: 1694614 - DNA, 15 bp, Homo sapiens
atagttcttaatatc

SEQ ID NO: 1694615 - DNA, 15 bp, Homo sapiens
tagttcttaatatct

SEQ ID NO: 1694616 - DNA, 15 bp, Homo sapiens
agttcttaatatctg

SEQ ID NO: 1694617 - DNA, 15 bp, Homo sapiens
gttcttaatatctgt

SEQ ID NO: 1694618 - DNA, 15 bp, Homo sapiens
ttcttaatatctgtg

SEQ ID NO: 1694619 - DNA, 15 bp, Homo sapiens
tcttaatatctgtgt

SEQ ID NO: 1694620 - DNA, 15 bp, Homo sapiens
cttaatatctgtgta

SEQ ID NO: 1694621 - DNA, 15 bp, Homo sapiens
ttaatatctgtgtat

SEQ ID NO: 1694622 - DNA, 15 bp, Homo sapiens
taatatctgtgtatc

SEQ ID NO: 1694623 - DNA, 15 bp, Homo sapiens
aatatctgtgtatca

SEQ ID NO: 1694624 - DNA, 15 bp, Homo sapiens
atatctgtgtatcat

SEQ ID NO: 1694625 - DNA, 15 bp, Homo sapiens
tatctgtgtatcata

SEQ ID NO: 1694626 - DNA, 15 bp, Homo sapiens
atctgtgtatcatat

SEQ ID NO: 1694627 - DNA, 15 bp, Homo sapiens
tctgtgtatcatatt

SEQ ID NO: 1694628 - DNA, 15 bp, Homo sapiens
ctgtgtatcatattt

SEQ ID NO: 1694629 - DNA, 15 bp, Homo sapiens
tgtgtatcatatttt

SEQ ID NO: 1694630 - DNA, 15 bp, Homo sapiens
gtgtatcatatttta

SEQ ID NO: 1694631 - DNA, 15 bp, Homo sapiens
tgtatcatattttat

SEQ ID NO: 1694632 - DNA, 15 bp, Homo sapiens
gtatcatattttatt

SEQ ID NO: 1694633 - DNA, 15 bp, Homo sapiens
tatcatattttattt

SEQ ID NO: 1694634 - DNA, 15 bp, Homo sapiens
atcatattttattta

SEQ ID NO: 1694635 - DNA, 15 bp, Homo sapiens
tcatattttatttat

SEQ ID NO: 1694636 - DNA, 15 bp, Homo sapiens
catattttatttatc

SEQ ID NO: 1694637 - DNA, 15 bp, Homo sapiens
atattttatttatca

SEQ ID NO: 1694638 - DNA, 15 bp, Homo sapiens
tattttatttatcat

SEQ ID NO: 1694639 - DNA, 15 bp, Homo sapiens
attttatttatcatc

SEQ ID NO: 1694640 - DNA, 15 bp, Homo sapiens
ttttatttatcatcc

SEQ ID NO: 1694641 - DNA, 15 bp, Homo sapiens
tttatttatcatccc

SEQ ID NO: 1694642 - DNA, 15 bp, Homo sapiens
ttatttatcatccct

SEQ ID NO: 1694643 - DNA, 15 bp, Homo sapiens
tatttatcatccctc

SEQ ID NO: 1694644 - DNA, 15 bp, Homo sapiens
atttatcatccctct

SEQ ID NO: 1694645 - DNA, 15 bp, Homo sapiens
tttatcatccctcta

SEQ ID NO: 1694646 - DNA, 15 bp, Homo sapiens
ttatcatccctctat

SEQ ID NO: 1694647 - DNA, 15 bp, Homo sapiens
tatcatccctctatt

SEQ ID NO: 1694648 - DNA, 15 bp, Homo sapiens
atcatccctctattt

SEQ ID NO: 1694649 - DNA, 15 bp, Homo sapiens
tcatccctctatttt

SEQ ID NO: 1694650 - DNA, 15 bp, Homo sapiens
catccctctattttt

SEQ ID NO: 1694651 - DNA, 15 bp, Homo sapiens
atccctctatttttg

SEQ ID NO: 1694652 - DNA, 15 bp, Homo sapiens
tccctctatttttgg

SEQ ID NO: 1694653 - DNA, 15 bp, Homo sapiens
ccctctatttttggc

SEQ ID NO: 1694654 - DNA, 15 bp, Homo sapiens
cctctatttttggca

SEQ ID NO: 1694655 - DNA, 15 bp, Homo sapiens
ctctatttttggcat

SEQ ID NO: 1694656 - DNA, 15 bp, Homo sapiens
tctatttttggcatc

SEQ ID NO: 1694657 - DNA, 15 bp, Homo sapiens
ctatttttggcatcc

SEQ ID NO: 1694658 - DNA, 15 bp, Homo sapiens
tatttttggcatcca

SEQ ID NO: 1694659 - DNA, 15 bp, Homo sapiens
atttttggcatccat

SEQ ID NO: 1694660 - DNA, 15 bp, Homo sapiens
tttttggcatccatg

SEQ ID NO: 1694661 - DNA, 15 bp, Homo sapiens
ttttggcatccatgg

SEQ ID NO: 1694662 - DNA, 15 bp, Homo sapiens
tttggcatccatggt

SEQ ID NO: 1694663 - DNA, 15 bp, Homo sapiens
ttggcatccatggtg

SEQ ID NO: 1694664 - DNA, 15 bp, Homo sapiens
tggcatccatggtgt

SEQ ID NO: 1694665 - DNA, 15 bp, Homo sapiens
ggcatccatggtgtt

SEQ ID NO: 1694666 - DNA, 15 bp, Homo sapiens
gcatccatggtgttt

SEQ ID NO: 1694667 - DNA, 15 bp, Homo sapiens
catccatggtgtttt

SEQ ID NO: 1694668 - DNA, 15 bp, Homo sapiens
atccatggtgttttc

SEQ ID NO: 1694669 - DNA, 15 bp, Homo sapiens
tccatggtgttttct

SEQ ID NO: 1694670 - DNA, 15 bp, Homo sapiens
ccatggtgttttcta

SEQ ID NO: 1694671 - DNA, 15 bp, Homo sapiens
catggtgttttctag

SEQ ID NO: 1694672 - DNA, 15 bp, Homo sapiens
atggtgttttctagt

SEQ ID NO: 1694673 - DNA, 15 bp, Homo sapiens
tggtgttttctagtt

SEQ ID NO: 1694674 - DNA, 15 bp, Homo sapiens
ggtgttttctagttt

SEQ ID NO: 1694675 - DNA, 15 bp, Homo sapiens
gtgttttctagtttc

SEQ ID NO: 1694676 - DNA, 15 bp, Homo sapiens
tgttttctagtttct

SEQ ID NO: 1694677 - DNA, 15 bp, Homo sapiens
gttttctagtttcta

SEQ ID NO: 1694678 - DNA, 15 bp, Homo sapiens
ttttctagtttctat

SEQ ID NO: 1694679 - DNA, 15 bp, Homo sapiens
tttctagtttctata

SEQ ID NO: 1694680 - DNA, 15 bp, Homo sapiens
ttctagtttctatag

SEQ ID NO: 1694681 - DNA, 15 bp, Homo sapiens
tctagtttctatagt

SEQ ID NO: 1694682 - DNA, 15 bp, Homo sapiens
ctagtttctatagtc

SEQ ID NO: 1694683 - DNA, 15 bp, Homo sapiens
tagtttctatagtca

SEQ ID NO: 1694684 - DNA, 15 bp, Homo sapiens
agtttctatagtcac

SEQ ID NO: 1694685 - DNA, 15 bp, Homo sapiens
gtttctatagtcaca

SEQ ID NO: 1694686 - DNA, 15 bp, Homo sapiens
tttctatagtcacag

SEQ ID NO: 1694687 - DNA, 15 bp, Homo sapiens
ttctatagtcacaga

SEQ ID NO: 1694688 - DNA, 15 bp, Homo sapiens
tctatagtcacagac

SEQ ID NO: 1694689 - DNA, 15 bp, Homo sapiens
ctatagtcacagaca

SEQ ID NO: 1694690 - DNA, 15 bp, Homo sapiens
tatagtcacagacaa

SEQ ID NO: 1694691 - DNA, 15 bp, Homo sapiens
atagtcacagacaat

SEQ ID NO: 1694692 - DNA, 15 bp, Homo sapiens
tagtcacagacaatt

SEQ ID NO: 1694693 - DNA, 15 bp, Homo sapiens
agtcacagacaattc

SEQ ID NO: 1694694 - DNA, 15 bp, Homo sapiens
gtcacagacaattct

SEQ ID NO: 1694695 - DNA, 15 bp, Homo sapiens
tcacagacaattctg

SEQ ID NO: 1694696 - DNA, 15 bp, Homo sapiens
cacagacaattctgc

SEQ ID NO: 1694697 - DNA, 15 bp, Homo sapiens
acagacaattctgca

SEQ ID NO: 1694698 - DNA, 15 bp, Homo sapiens
cagacaattctgcag

SEQ ID NO: 1694699 - DNA, 15 bp, Homo sapiens
agacaattctgcagt

SEQ ID NO: 1694700 - DNA, 15 bp, Homo sapiens
gacaattctgcagta

SEQ ID NO: 1694701 - DNA, 15 bp, Homo sapiens
acaattctgcagtat

SEQ ID NO: 1694702 - DNA, 15 bp, Homo sapiens
caattctgcagtatt

SEQ ID NO: 1694703 - DNA, 15 bp, Homo sapiens
aattctgcagtattt

SEQ ID NO: 1694704 - DNA, 15 bp, Homo sapiens
attctgcagtatttt

SEQ ID NO: 1694705 - DNA, 15 bp, Homo sapiens
ttctgcagtattttg

SEQ ID NO: 1694706 - DNA, 15 bp, Homo sapiens
tctgcagtattttgt

SEQ ID NO: 1694707 - DNA, 15 bp, Homo sapiens
ctgcagtattttgtt

SEQ ID NO: 1694708 - DNA, 15 bp, Homo sapiens
tgcagtattttgttc

SEQ ID NO: 1694709 - DNA, 15 bp, Homo sapiens
gcagtattttgttca

SEQ ID NO: 1694710 - DNA, 15 bp, Homo sapiens
cagtattttgttcaa

SEQ ID NO: 1694711 - DNA, 15 bp, Homo sapiens
agtattttgttcaat

SEQ ID NO: 1694712 - DNA, 15 bp, Homo sapiens
gtattttgttcaatt

SEQ ID NO: 1694713 - DNA, 15 bp, Homo sapiens
tattttgttcaattt

SEQ ID NO: 1694714 - DNA, 15 bp, Homo sapiens
attttgttcaatttt

SEQ ID NO: 1694715 - DNA, 15 bp, Homo sapiens
ttttgttcaattttt

SEQ ID NO: 1694716 - DNA, 15 bp, Homo sapiens
tttgttcaatttttt

SEQ ID NO: 1694717 - DNA, 15 bp, Homo sapiens
ttgttcaattttttt

SEQ ID NO: 1694718 - DNA, 15 bp, Homo sapiens
tgttcaatttttttg

SEQ ID NO: 1694719 - DNA, 15 bp, Homo sapiens
gttcaatttttttgg

SEQ ID NO: 1694720 - DNA, 15 bp, Homo sapiens
ttcaatttttttggt

SEQ ID NO: 1694721 - DNA, 15 bp, Homo sapiens
tcaatttttttggta

SEQ ID NO: 1694722 - DNA, 15 bp, Homo sapiens
caatttttttggtaa

SEQ ID NO: 1694723 - DNA, 15 bp, Homo sapiens
aatttttttggtaag

SEQ ID NO: 1694724 - DNA, 15 bp, Homo sapiens
atttttttggtaagt

SEQ ID NO: 1694725 - DNA, 15 bp, Homo sapiens
tttttttggtaagta

SEQ ID NO: 1694726 - DNA, 15 bp, Homo sapiens
ttttttggtaagtaa

SEQ ID NO: 1694727 - DNA, 15 bp, Homo sapiens
tttttggtaagtaat

SEQ ID NO: 1694728 - DNA, 15 bp, Homo sapiens
ttttggtaagtaata

SEQ ID NO: 1694729 - DNA, 15 bp, Homo sapiens
tttggtaagtaatat

SEQ ID NO: 1694730 - DNA, 15 bp, Homo sapiens
ttggtaagtaatatg

SEQ ID NO: 1694731 - DNA, 15 bp, Homo sapiens
tggtaagtaatatgc

SEQ ID NO: 1694732 - DNA, 15 bp, Homo sapiens
ggtaagtaatatgca

SEQ ID NO: 1694733 - DNA, 15 bp, Homo sapiens
gtaagtaatatgcaa

SEQ ID NO: 1694734 - DNA, 15 bp, Homo sapiens
taagtaatatgcaaa

SEQ ID NO: 1694735 - DNA, 15 bp, Homo sapiens
aagtaatatgcaaaa

SEQ ID NO: 1694736 - DNA, 15 bp, Homo sapiens
agtaatatgcaaaaa

SEQ ID NO: 1694737 - DNA, 15 bp, Homo sapiens
gtaatatgcaaaaat

SEQ ID NO: 1694738 - DNA, 15 bp, Homo sapiens
taatatgcaaaaatt

SEQ ID NO: 1694739 - DNA, 15 bp, Homo sapiens
aatatgcaaaaattt

SEQ ID NO: 1694740 - DNA, 15 bp, Homo sapiens
atatgcaaaaatttc

SEQ ID NO: 1694741 - DNA, 15 bp, Homo sapiens
tatgcaaaaatttct

SEQ ID NO: 1694742 - DNA, 15 bp, Homo sapiens
atgcaaaaatttctt

SEQ ID NO: 1694743 - DNA, 15 bp, Homo sapiens
tgcaaaaatttcttt

SEQ ID NO: 1694744 - DNA, 15 bp, Homo sapiens
gcaaaaatttcttta

SEQ ID NO: 1694745 - DNA, 15 bp, Homo sapiens
caaaaatttctttag

SEQ ID NO: 1694746 - DNA, 15 bp, Homo sapiens
aaaaatttctttagg

SEQ ID NO: 1694747 - DNA, 15 bp, Homo sapiens
aaaatttctttaggg

SEQ ID NO: 1694748 - DNA, 15 bp, Homo sapiens
aaatttctttagggt

SEQ ID NO: 1694749 - DNA, 15 bp, Homo sapiens
aatttctttagggta

SEQ ID NO: 1694750 - DNA, 15 bp, Homo sapiens
atttctttagggtag

SEQ ID NO: 1694751 - DNA, 15 bp, Homo sapiens
tttctttagggtaga

SEQ ID NO: 1694752 - DNA, 15 bp, Homo sapiens
ttctttagggtagat

SEQ ID NO: 1694753 - DNA, 15 bp, Homo sapiens
tctttagggtagata

SEQ ID NO: 1694754 - DNA, 15 bp, Homo sapiens
ctttagggtagatac

SEQ ID NO: 1694755 - DNA, 15 bp, Homo sapiens
tttagggtagatacc

SEQ ID NO: 1694756 - DNA, 15 bp, Homo sapiens
ttagggtagatacct

SEQ ID NO: 1694757 - DNA, 15 bp, Homo sapiens
tagggtagataccta

SEQ ID NO: 1694758 - DNA, 15 bp, Homo sapiens
agggtagatacctag

SEQ ID NO: 1694759 - DNA, 15 bp, Homo sapiens
gggtagatacctaga

SEQ ID NO: 1694760 - DNA, 15 bp, Homo sapiens
ggtagatacctagaa

SEQ ID NO: 1694761 - DNA, 15 bp, Homo sapiens
gtagatacctagaag

SEQ ID NO: 1694762 - DNA, 15 bp, Homo sapiens
tagatacctagaagt

SEQ ID NO: 1694763 - DNA, 15 bp, Homo sapiens
agatacctagaagtg

SEQ ID NO: 1694764 - DNA, 15 bp, Homo sapiens
gatacctagaagtgg

SEQ ID NO: 1694765 - DNA, 15 bp, Homo sapiens
atacctagaagtgga

SEQ ID NO: 1694766 - DNA, 15 bp, Homo sapiens
tacctagaagtggaa

SEQ ID NO: 1694767 - DNA, 15 bp, Homo sapiens
acctagaagtggaat

SEQ ID NO: 1694768 - DNA, 15 bp, Homo sapiens
cctagaagtggaatc

SEQ ID NO: 1694769 - DNA, 15 bp, Homo sapiens
ctagaagtggaatct

SEQ ID NO: 1694770 - DNA, 15 bp, Homo sapiens
tagaagtggaatctg

SEQ ID NO: 1694771 - DNA, 15 bp, Homo sapiens
agaagtggaatctgg

SEQ ID NO: 1694772 - DNA, 15 bp, Homo sapiens
gaagtggaatctggt

SEQ ID NO: 1694773 - DNA, 15 bp, Homo sapiens
aagtggaatctggtc

SEQ ID NO: 1694774 - DNA, 15 bp, Homo sapiens
agtggaatctggtcg

SEQ ID NO: 1694775 - DNA, 15 bp, Homo sapiens
gtggaatctggtcgt

SEQ ID NO: 1694776 - DNA, 15 bp, Homo sapiens
tggaatctggtcgta

SEQ ID NO: 1694777 - DNA, 15 bp, Homo sapiens
ggaatctggtcgtag

SEQ ID NO: 1694778 - DNA, 15 bp, Homo sapiens
gaatctggtcgtagg

SEQ ID NO: 1694779 - DNA, 15 bp, Homo sapiens
aatctggtcgtagga

SEQ ID NO: 1694780 - DNA, 15 bp, Homo sapiens
atctggtcgtaggat

SEQ ID NO: 1694781 - DNA, 15 bp, Homo sapiens
tctggtcgtaggata

SEQ ID NO: 1694782 - DNA, 15 bp, Homo sapiens
ctggtcgtaggatat

SEQ ID NO: 1694783 - DNA, 15 bp, Homo sapiens
tggtcgtaggatatg

SEQ ID NO: 1694784 - DNA, 15 bp, Homo sapiens
ggtcgtaggatatgg

SEQ ID NO: 1694785 - DNA, 15 bp, Homo sapiens
gtcgtaggatatgga

SEQ ID NO: 1694786 - DNA, 15 bp, Homo sapiens
tcgtaggatatggac

SEQ ID NO: 1694787 - DNA, 15 bp, Homo sapiens
cgtaggatatggaca

SEQ ID NO: 1694788 - DNA, 15 bp, Homo sapiens
gtaggatatggacat

SEQ ID NO: 1694789 - DNA, 15 bp, Homo sapiens
taggatatggacatt

SEQ ID NO: 1694790 - DNA, 15 bp, Homo sapiens
aggatatggacattt

SEQ ID NO: 1694791 - DNA, 15 bp, Homo sapiens
ggatatggacatttt

SEQ ID NO: 1694792 - DNA, 15 bp, Homo sapiens
gatatggacattttt

SEQ ID NO: 1694793 - DNA, 15 bp, Homo sapiens
atatggacattttta

SEQ ID NO: 1694794 - DNA, 15 bp, Homo sapiens
tatggacatttttag

SEQ ID NO: 1694795 - DNA, 15 bp, Homo sapiens
atggacatttttagt

SEQ ID NO: 1694796 - DNA, 15 bp, Homo sapiens
tggacatttttagtt

SEQ ID NO: 1694797 - DNA, 15 bp, Homo sapiens
ggacatttttagttt

SEQ ID NO: 1694798 - DNA, 15 bp, Homo sapiens
gacatttttagtttt

SEQ ID NO: 1694799 - DNA, 15 bp, Homo sapiens
acatttttagtttta

SEQ ID NO: 1694800 - DNA, 15 bp, Homo sapiens
catttttagttttaa

SEQ ID NO: 1694801 - DNA, 15 bp, Homo sapiens
atttttagttttaat

SEQ ID NO: 1694802 - DNA, 15 bp, Homo sapiens
tttttagttttaatc

SEQ ID NO: 1694803 - DNA, 15 bp, Homo sapiens
ttttagttttaatca

SEQ ID NO: 1694804 - DNA, 15 bp, Homo sapiens
tttagttttaatcag

SEQ ID NO: 1694805 - DNA, 15 bp, Homo sapiens
ttagttttaatcaga

SEQ ID NO: 1694806 - DNA, 15 bp, Homo sapiens
tagttttaatcagaa

SEQ ID NO: 1694807 - DNA, 15 bp, Homo sapiens
agttttaatcagaac

SEQ ID NO: 1694808 - DNA, 15 bp, Homo sapiens
gttttaatcagaact

SEQ ID NO: 1694809 - DNA, 15 bp, Homo sapiens
ttttaatcagaacta

SEQ ID NO: 1694810 - DNA, 15 bp, Homo sapiens
tttaatcagaactac

SEQ ID NO: 1694811 - DNA, 15 bp, Homo sapiens
ttaatcagaactaca

SEQ ID NO: 1694812 - DNA, 15 bp, Homo sapiens
taatcagaactacaa

SEQ ID NO: 1694813 - DNA, 15 bp, Homo sapiens
aatcagaactacaaa

SEQ ID NO: 1694814 - DNA, 15 bp, Homo sapiens
atcagaactacaaag

SEQ ID NO: 1694815 - DNA, 15 bp, Homo sapiens
tcagaactacaaagt

SEQ ID NO: 1694816 - DNA, 15 bp, Homo sapiens
cagaactacaaagtt

SEQ ID NO: 1694817 - DNA, 15 bp, Homo sapiens
agaactacaaagttt

SEQ ID NO: 1694818 - DNA, 15 bp, Homo sapiens
gaactacaaagtttt

SEQ ID NO: 1694819 - DNA, 15 bp, Homo sapiens
aactacaaagttttt

SEQ ID NO: 1694820 - DNA, 15 bp, Homo sapiens
actacaaagtttttc

SEQ ID NO: 1694821 - DNA, 15 bp, Homo sapiens
ctacaaagtttttct

SEQ ID NO: 1694822 - DNA, 15 bp, Homo sapiens
tacaaagtttttctc

SEQ ID NO: 1694823 - DNA, 15 bp, Homo sapiens
acaaagtttttctcc

SEQ ID NO: 1694824 - DNA, 15 bp, Homo sapiens
caaagtttttctcca

SEQ ID NO: 1694825 - DNA, 15 bp, Homo sapiens
aaagtttttctccaa

SEQ ID NO: 1694826 - DNA, 15 bp, Homo sapiens
aagtttttctccaaa

SEQ ID NO: 1694827 - DNA, 15 bp, Homo sapiens
agtttttctccaaat

SEQ ID NO: 1694828 - DNA, 15 bp, Homo sapiens
gtttttctccaaatg

SEQ ID NO: 1694829 - DNA, 15 bp, Homo sapiens
tttttctccaaatgt

SEQ ID NO: 1694830 - DNA, 15 bp, Homo sapiens
ttttctccaaatgtc

SEQ ID NO: 1694831 - DNA, 15 bp, Homo sapiens
tttctccaaatgtcc

SEQ ID NO: 1694832 - DNA, 15 bp, Homo sapiens
ttctccaaatgtcct

SEQ ID NO: 1694833 - DNA, 15 bp, Homo sapiens
tctccaaatgtcctg

SEQ ID NO: 1694834 - DNA, 15 bp, Homo sapiens
ctccaaatgtcctgt

SEQ ID NO: 1694835 - DNA, 15 bp, Homo sapiens
tccaaatgtcctgta

SEQ ID NO: 1694836 - DNA, 15 bp, Homo sapiens
ccaaatgtcctgtaa

SEQ ID NO: 1694837 - DNA, 15 bp, Homo sapiens
caaatgtcctgtaag

SEQ ID NO: 1694838 - DNA, 15 bp, Homo sapiens
aaatgtcctgtaaga

SEQ ID NO: 1694839 - DNA, 15 bp, Homo sapiens
aatgtcctgtaagaa

SEQ ID NO: 1694840 - DNA, 15 bp, Homo sapiens
atgtcctgtaagaat

SEQ ID NO: 1694841 - DNA, 15 bp, Homo sapiens
tgtcctgtaagaatt

SEQ ID NO: 1694842 - DNA, 15 bp, Homo sapiens
gtcctgtaagaattt

SEQ ID NO: 1694843 - DNA, 15 bp, Homo sapiens
tcctgtaagaattta

SEQ ID NO: 1694844 - DNA, 15 bp, Homo sapiens
cctgtaagaatttat

SEQ ID NO: 1694845 - DNA, 15 bp, Homo sapiens
ctgtaagaatttata

SEQ ID NO: 1694846 - DNA, 15 bp, Homo sapiens
tgtaagaatttatac

SEQ ID NO: 1694847 - DNA, 15 bp, Homo sapiens
gtaagaatttatact

SEQ ID NO: 1694848 - DNA, 15 bp, Homo sapiens
taagaatttatactc

SEQ ID NO: 1694849 - DNA, 15 bp, Homo sapiens
aagaatttatactcc

SEQ ID NO: 1694850 - DNA, 15 bp, Homo sapiens
agaatttatactccc

SEQ ID NO: 1694851 - DNA, 15 bp, Homo sapiens
gaatttatactccca

SEQ ID NO: 1694852 - DNA, 15 bp, Homo sapiens
aatttatactcccac

SEQ ID NO: 1694853 - DNA, 15 bp, Homo sapiens
atttatactcccact

SEQ ID NO: 1694854 - DNA, 15 bp, Homo sapiens
tttatactcccactg

SEQ ID NO: 1694855 - DNA, 15 bp, Homo sapiens
ttatactcccactgg

SEQ ID NO: 1694856 - DNA, 15 bp, Homo sapiens
tatactcccactggt

SEQ ID NO: 1694857 - DNA, 15 bp, Homo sapiens
atactcccactggtt

SEQ ID NO: 1694858 - DNA, 15 bp, Homo sapiens
tactcccactggttc

SEQ ID NO: 1694859 - DNA, 15 bp, Homo sapiens
actcccactggttca

SEQ ID NO: 1694860 - DNA, 15 bp, Homo sapiens
ctcccactggttcaa

SEQ ID NO: 1694861 - DNA, 15 bp, Homo sapiens
tcccactggttcaac

SEQ ID NO: 1694862 - DNA, 15 bp, Homo sapiens
cccactggttcaaca

SEQ ID NO: 1694863 - DNA, 15 bp, Homo sapiens
ccactggttcaacat

SEQ ID NO: 1694864 - DNA, 15 bp, Homo sapiens
cactggttcaacatg

SEQ ID NO: 1694865 - DNA, 15 bp, Homo sapiens
actggttcaacatga

SEQ ID NO: 1694866 - DNA, 15 bp, Homo sapiens
ctggttcaacatgag

SEQ ID NO: 1694867 - DNA, 15 bp, Homo sapiens
ggttcaacatgagaa

SEQ ID NO: 1694868 - DNA, 15 bp, Homo sapiens
gttcaacatgagaat

SEQ ID NO: 1694869 - DNA, 15 bp, Homo sapiens
ttcaacatgagaata

SEQ ID NO: 1694870 - DNA, 15 bp, Homo sapiens
tcaacatgagaatac

SEQ ID NO: 1694871 - DNA, 15 bp, Homo sapiens
caacatgagaatact

SEQ ID NO: 1694872 - DNA, 15 bp, Homo sapiens
aacatgagaatactc

SEQ ID NO: 1694873 - DNA, 15 bp, Homo sapiens
acatgagaatactca

SEQ ID NO: 1694874 - DNA, 15 bp, Homo sapiens
catgagaatactcat

SEQ ID NO: 1694875 - DNA, 15 bp, Homo sapiens
atgagaatactcatt

SEQ ID NO: 1694876 - DNA, 15 bp, Homo sapiens
tgagaatactcattt

SEQ ID NO: 1694877 - DNA, 15 bp, Homo sapiens
gagaatactcatttc

SEQ ID NO: 1694878 - DNA, 15 bp, Homo sapiens
agaatactcatttct

SEQ ID NO: 1694879 - DNA, 15 bp, Homo sapiens
gaatactcatttctc

SEQ ID NO: 1694880 - DNA, 15 bp, Homo sapiens
aatactcatttctct

SEQ ID NO: 1694881 - DNA, 15 bp, Homo sapiens
atactcatttctcta

SEQ ID NO: 1694882 - DNA, 15 bp, Homo sapiens
tactcatttctctat

SEQ ID NO: 1694883 - DNA, 15 bp, Homo sapiens
actcatttctctata

SEQ ID NO: 1694884 - DNA, 15 bp, Homo sapiens
ctcatttctctatac

SEQ ID NO: 1694885 - DNA, 15 bp, Homo sapiens
tcatttctctataca

SEQ ID NO: 1694886 - DNA, 15 bp, Homo sapiens
catttctctatacat

SEQ ID NO: 1694887 - DNA, 15 bp, Homo sapiens
atttctctatacatt

SEQ ID NO: 1694888 - DNA, 15 bp, Homo sapiens
tttctctatacattt

SEQ ID NO: 1694889 - DNA, 15 bp, Homo sapiens
ttctctatacattta

SEQ ID NO: 1694890 - DNA, 15 bp, Homo sapiens
tctctatacatttaa

SEQ ID NO: 1694891 - DNA, 15 bp, Homo sapiens
ctctatacatttaag

SEQ ID NO: 1694892 - DNA, 15 bp, Homo sapiens
tctatacatttaaga

SEQ ID NO: 1694893 - DNA, 15 bp, Homo sapiens
ctatacatttaagaa

SEQ ID NO: 1694894 - DNA, 15 bp, Homo sapiens
tatacatttaagaat

SEQ ID NO: 1694895 - DNA, 15 bp, Homo sapiens
atacatttaagaata

SEQ ID NO: 1694896 - DNA, 15 bp, Homo sapiens
tacatttaagaatat

SEQ ID NO: 1694897 - DNA, 15 bp, Homo sapiens
acatttaagaatata

SEQ ID NO: 1694898 - DNA, 15 bp, Homo sapiens
catttaagaatatat

SEQ ID NO: 1694899 - DNA, 15 bp, Homo sapiens
atttaagaatatatg

SEQ ID NO: 1694900 - DNA, 15 bp, Homo sapiens
tttaagaatatatgc

SEQ ID NO: 1694901 - DNA, 15 bp, Homo sapiens
ttaagaatatatgct

SEQ ID NO: 1694902 - DNA, 15 bp, Homo sapiens
taagaatatatgctt

SEQ ID NO: 1694903 - DNA, 15 bp, Homo sapiens
aagaatatatgctta

SEQ ID NO: 1694904 - DNA, 15 bp, Homo sapiens
agaatatatgcttat

SEQ ID NO: 1694905 - DNA, 15 bp, Homo sapiens
gaatatatgcttatt

SEQ ID NO: 1694906 - DNA, 15 bp, Homo sapiens
aatatatgcttatta

SEQ ID NO: 1694907 - DNA, 15 bp, Homo sapiens
atatatgcttattat

SEQ ID NO: 1694908 - DNA, 15 bp, Homo sapiens
tatatgcttattatt

SEQ ID NO: 1694909 - DNA, 15 bp, Homo sapiens
atatgcttattattg

SEQ ID NO: 1694910 - DNA, 15 bp, Homo sapiens
tatgcttattattgc

SEQ ID NO: 1694911 - DNA, 15 bp, Homo sapiens
atgcttattattgcc

SEQ ID NO: 1694912 - DNA, 15 bp, Homo sapiens
tgcttattattgcct

SEQ ID NO: 1694913 - DNA, 15 bp, Homo sapiens
gcttattattgcctt

SEQ ID NO: 1694914 - DNA, 15 bp, Homo sapiens
cttattattgccttt

SEQ ID NO: 1694915 - DNA, 15 bp, Homo sapiens
ttattattgccttta

SEQ ID NO: 1694916 - DNA, 15 bp, Homo sapiens
tattattgcctttaa

SEQ ID NO: 1694917 - DNA, 15 bp, Homo sapiens
attattgcctttaat

SEQ ID NO: 1694918 - DNA, 15 bp, Homo sapiens
ttattgcctttaatc

SEQ ID NO: 1694919 - DNA, 15 bp, Homo sapiens
tattgcctttaatct

SEQ ID NO: 1694920 - DNA, 15 bp, Homo sapiens
attgcctttaatctt

SEQ ID NO: 1694921 - DNA, 15 bp, Homo sapiens
ttgcctttaatcttg

SEQ ID NO: 1694922 - DNA, 15 bp, Homo sapiens
tgcctttaatcttga

SEQ ID NO: 1694923 - DNA, 15 bp, Homo sapiens
gcctttaatcttgaa

SEQ ID NO: 1694924 - DNA, 15 bp, Homo sapiens
cctttaatcttgaac

SEQ ID NO: 1694925 - DNA, 15 bp, Homo sapiens
ctttaatcttgaaca

SEQ ID NO: 1694926 - DNA, 15 bp, Homo sapiens
tttaatcttgaacaa

SEQ ID NO: 1694927 - DNA, 15 bp, Homo sapiens
ttaatcttgaacaat

SEQ ID NO: 1694928 - DNA, 15 bp, Homo sapiens
taatcttgaacaata

SEQ ID NO: 1694929 - DNA, 15 bp, Homo sapiens
aatcttgaacaatat

SEQ ID NO: 1694930 - DNA, 15 bp, Homo sapiens
atcttgaacaatata

SEQ ID NO: 1694931 - DNA, 15 bp, Homo sapiens
tcttgaacaatataa

SEQ ID NO: 1694932 - DNA, 15 bp, Homo sapiens
cttgaacaatataat

SEQ ID NO: 1694933 - DNA, 15 bp, Homo sapiens
ttgaacaatataatg

SEQ ID NO: 1694934 - DNA, 15 bp, Homo sapiens
tgaacaatataatga

SEQ ID NO: 1694935 - DNA, 15 bp, Homo sapiens
gaacaatataatgag

SEQ ID NO: 1694936 - DNA, 15 bp, Homo sapiens
aacaatataatgagt

SEQ ID NO: 1694937 - DNA, 15 bp, Homo sapiens
acaatataatgagtg

SEQ ID NO: 1694938 - DNA, 15 bp, Homo sapiens
caatataatgagtga

SEQ ID NO: 1694939 - DNA, 15 bp, Homo sapiens
aatataatgagtgaa

SEQ ID NO: 1694940 - DNA, 15 bp, Homo sapiens
atataatgagtgaaa

SEQ ID NO: 1694941 - DNA, 15 bp, Homo sapiens
tataatgagtgaaat

SEQ ID NO: 1694942 - DNA, 15 bp, Homo sapiens
ataatgagtgaaata

SEQ ID NO: 1694943 - DNA, 15 bp, Homo sapiens
taatgagtgaaatat

SEQ ID NO: 1694944 - DNA, 15 bp, Homo sapiens
aatgagtgaaatatg

SEQ ID NO: 1694945 - DNA, 15 bp, Homo sapiens
atgagtgaaatatgg

SEQ ID NO: 1694946 - DNA, 15 bp, Homo sapiens
tgagtgaaatatggt

SEQ ID NO: 1694947 - DNA, 15 bp, Homo sapiens
gagtgaaatatggta

SEQ ID NO: 1694948 - DNA, 15 bp, Homo sapiens
agtgaaatatggtaa

SEQ ID NO: 1694949 - DNA, 15 bp, Homo sapiens
gtgaaatatggtaat

SEQ ID NO: 1694950 - DNA, 15 bp, Homo sapiens
tgaaatatggtaatt

SEQ ID NO: 1694951 - DNA, 15 bp, Homo sapiens
gaaatatggtaattt

SEQ ID NO: 1694952 - DNA, 15 bp, Homo sapiens
aaatatggtaatttg

SEQ ID NO: 1694953 - DNA, 15 bp, Homo sapiens
aatatggtaatttgt

SEQ ID NO: 1694954 - DNA, 15 bp, Homo sapiens
atatggtaatttgtt

SEQ ID NO: 1694955 - DNA, 15 bp, Homo sapiens
tatggtaatttgttg

SEQ ID NO: 1694956 - DNA, 15 bp, Homo sapiens
atggtaatttgttga

SEQ ID NO: 1694957 - DNA, 15 bp, Homo sapiens
tggtaatttgttgat

SEQ ID NO: 1694958 - DNA, 15 bp, Homo sapiens
ggtaatttgttgatt

SEQ ID NO: 1694959 - DNA, 15 bp, Homo sapiens
gtaatttgttgattt

SEQ ID NO: 1694960 - DNA, 15 bp, Homo sapiens
taatttgttgattta

SEQ ID NO: 1694961 - DNA, 15 bp, Homo sapiens
aatttgttgatttaa

SEQ ID NO: 1694962 - DNA, 15 bp, Homo sapiens
atttgttgatttaat

SEQ ID NO: 1694963 - DNA, 15 bp, Homo sapiens
tttgttgatttaatg

SEQ ID NO: 1694964 - DNA, 15 bp, Homo sapiens
ttgttgatttaatgt

SEQ ID NO: 1694965 - DNA, 15 bp, Homo sapiens
tgttgatttaatgtt

SEQ ID NO: 1694966 - DNA, 15 bp, Homo sapiens
gttgatttaatgttc

SEQ ID NO: 1694967 - DNA, 15 bp, Homo sapiens
ttgatttaatgttca

SEQ ID NO: 1694968 - DNA, 15 bp, Homo sapiens
tgatttaatgttcat

SEQ ID NO: 1694969 - DNA, 15 bp, Homo sapiens
gatttaatgttcatt

SEQ ID NO: 1694970 - DNA, 15 bp, Homo sapiens
atttaatgttcattt

SEQ ID NO: 1694971 - DNA, 15 bp, Homo sapiens
tttaatgttcatttt

SEQ ID NO: 1694972 - DNA, 15 bp, Homo sapiens
ttaatgttcattttt

SEQ ID NO: 1694973 - DNA, 15 bp, Homo sapiens
taatgttcatttttc

SEQ ID NO: 1694974 - DNA, 15 bp, Homo sapiens
aatgttcatttttct

SEQ ID NO: 1694975 - DNA, 15 bp, Homo sapiens
atgttcatttttctg

SEQ ID NO: 1694976 - DNA, 15 bp, Homo sapiens
tgttcatttttctga

SEQ ID NO: 1694977 - DNA, 15 bp, Homo sapiens
gttcatttttctgac

SEQ ID NO: 1694978 - DNA, 15 bp, Homo sapiens
ttcatttttctgact

SEQ ID NO: 1694979 - DNA, 15 bp, Homo sapiens
tcatttttctgacta

SEQ ID NO: 1694980 - DNA, 15 bp, Homo sapiens
catttttctgactat

SEQ ID NO: 1694981 - DNA, 15 bp, Homo sapiens
atttttctgactatt

SEQ ID NO: 1694982 - DNA, 15 bp, Homo sapiens
tttttctgactatta

SEQ ID NO: 1694983 - DNA, 15 bp, Homo sapiens
ttttctgactattag

SEQ ID NO: 1694984 - DNA, 15 bp, Homo sapiens
tttctgactattagt

SEQ ID NO: 1694985 - DNA, 15 bp, Homo sapiens
ttctgactattagtg

SEQ ID NO: 1694986 - DNA, 15 bp, Homo sapiens
tctgactattagtga

SEQ ID NO: 1694987 - DNA, 15 bp, Homo sapiens
ctgactattagtgag

SEQ ID NO: 1694988 - DNA, 15 bp, Homo sapiens
tgactattagtgaga

SEQ ID NO: 1694989 - DNA, 15 bp, Homo sapiens
gactattagtgagat

SEQ ID NO: 1694990 - DNA, 15 bp, Homo sapiens
actattagtgagatg

SEQ ID NO: 1694991 - DNA, 15 bp, Homo sapiens
ctattagtgagatgt

SEQ ID NO: 1694992 - DNA, 15 bp, Homo sapiens
tattagtgagatgta

SEQ ID NO: 1694993 - DNA, 15 bp, Homo sapiens
attagtgagatgtag

SEQ ID NO: 1694994 - DNA, 15 bp, Homo sapiens
ttagtgagatgtagg

SEQ ID NO: 1694995 - DNA, 15 bp, Homo sapiens
tagtgagatgtaggt

SEQ ID NO: 1694996 - DNA, 15 bp, Homo sapiens
agtgagatgtaggtc

SEQ ID NO: 1694997 - DNA, 15 bp, Homo sapiens
gtgagatgtaggtca

SEQ ID NO: 1694998 - DNA, 15 bp, Homo sapiens
tgagatgtaggtcat

SEQ ID NO: 1694999 - DNA, 15 bp, Homo sapiens
gagatgtaggtcata

SEQ ID NO: 1695000 - DNA, 15 bp, Homo sapiens
agatgtaggtcatat

SEQ ID NO: 1695001 - DNA, 15 bp, Homo sapiens
gatgtaggtcatatt

SEQ ID NO: 1695002 - DNA, 15 bp, Homo sapiens
atgtaggtcatattt

SEQ ID NO: 1695003 - DNA, 15 bp, Homo sapiens
tgtaggtcatatttc

SEQ ID NO: 1695004 - DNA, 15 bp, Homo sapiens
gtaggtcatatttca

SEQ ID NO: 1695005 - DNA, 15 bp, Homo sapiens
taggtcatatttcat

SEQ ID NO: 1695006 - DNA, 15 bp, Homo sapiens
aggtcatatttcata

SEQ ID NO: 1695007 - DNA, 15 bp, Homo sapiens
ggtcatatttcataa

SEQ ID NO: 1695008 - DNA, 15 bp, Homo sapiens
gtcatatttcataac

SEQ ID NO: 1695009 - DNA, 15 bp, Homo sapiens
tcatatttcataaca

SEQ ID NO: 1695010 - DNA, 15 bp, Homo sapiens
catatttcataacat

SEQ ID NO: 1695011 - DNA, 15 bp, Homo sapiens
atatttcataacatt

SEQ ID NO: 1695012 - DNA, 15 bp, Homo sapiens
tatttcataacattt

SEQ ID NO: 1695013 - DNA, 15 bp, Homo sapiens
atttcataacattta

SEQ ID NO: 1695014 - DNA, 15 bp, Homo sapiens
tttcataacatttat

SEQ ID NO: 1695015 - DNA, 15 bp, Homo sapiens
ttcataacatttata

SEQ ID NO: 1695016 - DNA, 15 bp, Homo sapiens
tcataacatttataa

SEQ ID NO: 1695017 - DNA, 15 bp, Homo sapiens
cataacatttataat

SEQ ID NO: 1695018 - DNA, 15 bp, Homo sapiens
ataacatttataatt

SEQ ID NO: 1695019 - DNA, 15 bp, Homo sapiens
taacatttataattt

SEQ ID NO: 1695020 - DNA, 15 bp, Homo sapiens
aacatttataatttg

SEQ ID NO: 1695021 - DNA, 15 bp, Homo sapiens
acatttataatttgt

SEQ ID NO: 1695022 - DNA, 15 bp, Homo sapiens
catttataatttgtc

SEQ ID NO: 1695023 - DNA, 15 bp, Homo sapiens
atttataatttgtct

SEQ ID NO: 1695024 - DNA, 15 bp, Homo sapiens
tttataatttgtctt

SEQ ID NO: 1695025 - DNA, 15 bp, Homo sapiens
ttataatttgtcttt

SEQ ID NO: 1695026 - DNA, 15 bp, Homo sapiens
tataatttgtctttt

SEQ ID NO: 1695027 - DNA, 15 bp, Homo sapiens
ataatttgtcttttt

SEQ ID NO: 1695028 - DNA, 15 bp, Homo sapiens
taatttgtctttttg

SEQ ID NO: 1695029 - DNA, 15 bp, Homo sapiens
aatttgtctttttgt

SEQ ID NO: 1695030 - DNA, 15 bp, Homo sapiens
atttgtctttttgta

SEQ ID NO: 1695031 - DNA, 15 bp, Homo sapiens
tttgtctttttgtaa

SEQ ID NO: 1695032 - DNA, 15 bp, Homo sapiens
ttgtctttttgtaaa

SEQ ID NO: 1695033 - DNA, 15 bp, Homo sapiens
tgtctttttgtaaat

SEQ ID NO: 1695034 - DNA, 15 bp, Homo sapiens
gtctttttgtaaatt

SEQ ID NO: 1695035 - DNA, 15 bp, Homo sapiens
tctttttgtaaattg

SEQ ID NO: 1695036 - DNA, 15 bp, Homo sapiens
ctttttgtaaattgt

SEQ ID NO: 1695037 - DNA, 15 bp, Homo sapiens
tttttgtaaattgtg

SEQ ID NO: 1695038 - DNA, 15 bp, Homo sapiens
ttttgtaaattgtga

SEQ ID NO: 1695039 - DNA, 15 bp, Homo sapiens
tttgtaaattgtgat

SEQ ID NO: 1695040 - DNA, 15 bp, Homo sapiens
ttgtaaattgtgatt

SEQ ID NO: 1695041 - DNA, 15 bp, Homo sapiens
tgtaaattgtgattt

SEQ ID NO: 1695042 - DNA, 15 bp, Homo sapiens
gtaaattgtgatttg

SEQ ID NO: 1695043 - DNA, 15 bp, Homo sapiens
taaattgtgatttgt

SEQ ID NO: 1695044 - DNA, 15 bp, Homo sapiens
aaattgtgatttgtc

SEQ ID NO: 1695045 - DNA, 15 bp, Homo sapiens
aattgtgatttgtct

SEQ ID NO: 1695046 - DNA, 15 bp, Homo sapiens
attgtgatttgtcta

SEQ ID NO: 1695047 - DNA, 15 bp, Homo sapiens
ttgtgatttgtctac

SEQ ID NO: 1695048 - DNA, 15 bp, Homo sapiens
tgtgatttgtctaca

SEQ ID NO: 1695049 - DNA, 15 bp, Homo sapiens
gtgatttgtctacac

SEQ ID NO: 1695050 - DNA, 15 bp, Homo sapiens
tgatttgtctacaca

SEQ ID NO: 1695051 - DNA, 15 bp, Homo sapiens
gatttgtctacacat

SEQ ID NO: 1695052 - DNA, 15 bp, Homo sapiens
atttgtctacacatt

SEQ ID NO: 1695053 - DNA, 15 bp, Homo sapiens
tttgtctacacattg

SEQ ID NO: 1695054 - DNA, 15 bp, Homo sapiens
ttgtctacacattgt

SEQ ID NO: 1695055 - DNA, 15 bp, Homo sapiens
tgtctacacattgta

SEQ ID NO: 1695056 - DNA, 15 bp, Homo sapiens
gtctacacattgtat

SEQ ID NO: 1695057 - DNA, 15 bp, Homo sapiens
tctacacattgtatt

SEQ ID NO: 1695058 - DNA, 15 bp, Homo sapiens
ctacacattgtattt

SEQ ID NO: 1695059 - DNA, 15 bp, Homo sapiens
tacacattgtatttt

SEQ ID NO: 1695060 - DNA, 15 bp, Homo sapiens
acacattgtattttt

SEQ ID NO: 1695061 - DNA, 15 bp, Homo sapiens
cacattgtatttttt

SEQ ID NO: 1695062 - DNA, 15 bp, Homo sapiens
acattgtattttttg

SEQ ID NO: 1695063 - DNA, 15 bp, Homo sapiens
cattgtattttttgt

SEQ ID NO: 1695064 - DNA, 15 bp, Homo sapiens
attgtattttttgtg

SEQ ID NO: 1695065 - DNA, 15 bp, Homo sapiens
ttgtattttttgtgg

SEQ ID NO: 1695066 - DNA, 15 bp, Homo sapiens
tgtattttttgtggc

SEQ ID NO: 1695067 - DNA, 15 bp, Homo sapiens
gtattttttgtggca

SEQ ID NO: 1695068 - DNA, 15 bp, Homo sapiens
tattttttgtggcaa

SEQ ID NO: 1695069 - DNA, 15 bp, Homo sapiens
attttttgtggcaaa

SEQ ID NO: 1695070 - DNA, 15 bp, Homo sapiens
ttttttgtggcaaat

SEQ ID NO: 1695071 - DNA, 15 bp, Homo sapiens
tttttgtggcaaatg

SEQ ID NO: 1695072 - DNA, 15 bp, Homo sapiens
ttttgtggcaaatgt

SEQ ID NO: 1695073 - DNA, 15 bp, Homo sapiens
tttgtggcaaatgtg

SEQ ID NO: 1695074 - DNA, 15 bp, Homo sapiens
ttgtggcaaatgtgc

SEQ ID NO: 1695075 - DNA, 15 bp, Homo sapiens
tgtggcaaatgtgcc

SEQ ID NO: 1695076 - DNA, 15 bp, Homo sapiens
gtggcaaatgtgcct

SEQ ID NO: 1695077 - DNA, 15 bp, Homo sapiens
tggcaaatgtgcctt

SEQ ID NO: 1695078 - DNA, 15 bp, Homo sapiens
ggcaaatgtgccttt

SEQ ID NO: 1695079 - DNA, 15 bp, Homo sapiens
gcaaatgtgcctttt

SEQ ID NO: 1695080 - DNA, 15 bp, Homo sapiens
caaatgtgccttttt

SEQ ID NO: 1695081 - DNA, 15 bp, Homo sapiens
aaatgtgcctttttc

SEQ ID NO: 1695082 - DNA, 15 bp, Homo sapiens
aatgtgcctttttct

SEQ ID NO: 1695083 - DNA, 15 bp, Homo sapiens
atgtgcctttttctt

SEQ ID NO: 1695084 - DNA, 15 bp, Homo sapiens
tgtgcctttttctta

SEQ ID NO: 1695085 - DNA, 15 bp, Homo sapiens
gtgcctttttcttac

SEQ ID NO: 1695086 - DNA, 15 bp, Homo sapiens
tgcctttttcttacc

SEQ ID NO: 1695087 - DNA, 15 bp, Homo sapiens
gcctttttcttaccg

SEQ ID NO: 1695088 - DNA, 15 bp, Homo sapiens
cctttttcttaccga

SEQ ID NO: 1695089 - DNA, 15 bp, Homo sapiens
ctttttcttaccgat

SEQ ID NO: 1695090 - DNA, 15 bp, Homo sapiens
tttttcttaccgatt

SEQ ID NO: 1695091 - DNA, 15 bp, Homo sapiens
ttttcttaccgattt

SEQ ID NO: 1695092 - DNA, 15 bp, Homo sapiens
tttcttaccgatttt

SEQ ID NO: 1695093 - DNA, 15 bp, Homo sapiens
ttcttaccgattttt

SEQ ID NO: 1695094 - DNA, 15 bp, Homo sapiens
tcttaccgatttttt

SEQ ID NO: 1695095 - DNA, 15 bp, Homo sapiens
cttaccgattttttg

SEQ ID NO: 1695096 - DNA, 15 bp, Homo sapiens
ttaccgattttttga

SEQ ID NO: 1695097 - DNA, 15 bp, Homo sapiens
taccgattttttgac

SEQ ID NO: 1695098 - DNA, 15 bp, Homo sapiens
accgattttttgaca

SEQ ID NO: 1695099 - DNA, 15 bp, Homo sapiens
ccgattttttgacat

SEQ ID NO: 1695100 - DNA, 15 bp, Homo sapiens
cgattttttgacatt

SEQ ID NO: 1695101 - DNA, 15 bp, Homo sapiens
gattttttgacattt

SEQ ID NO: 1695102 - DNA, 15 bp, Homo sapiens
attttttgacatttt

SEQ ID NO: 1695103 - DNA, 15 bp, Homo sapiens
ttttttgacatttta

SEQ ID NO: 1695104 - DNA, 15 bp, Homo sapiens
tttttgacattttat

SEQ ID NO: 1695105 - DNA, 15 bp, Homo sapiens
ttttgacattttata

SEQ ID NO: 1695106 - DNA, 15 bp, Homo sapiens
tttgacattttatat

SEQ ID NO: 1695107 - DNA, 15 bp, Homo sapiens
ttgacattttatata

SEQ ID NO: 1695108 - DNA, 15 bp, Homo sapiens
tgacattttatatac

SEQ ID NO: 1695109 - DNA, 15 bp, Homo sapiens
gacattttatatact

SEQ ID NO: 1695110 - DNA, 15 bp, Homo sapiens
acattttatatactc

SEQ ID NO: 1695111 - DNA, 15 bp, Homo sapiens
cattttatatactct

SEQ ID NO: 1695112 - DNA, 15 bp, Homo sapiens
attttatatactctg

SEQ ID NO: 1695113 - DNA, 15 bp, Homo sapiens
ttttatatactctga

SEQ ID NO: 1695114 - DNA, 15 bp, Homo sapiens
tttatatactctgaa

SEQ ID NO: 1695115 - DNA, 15 bp, Homo sapiens
ttatatactctgaat

SEQ ID NO: 1695116 - DNA, 15 bp, Homo sapiens
tatatactctgaata

SEQ ID NO: 1695117 - DNA, 15 bp, Homo sapiens
atatactctgaatac

SEQ ID NO: 1695118 - DNA, 15 bp, Homo sapiens
tatactctgaatact

SEQ ID NO: 1695119 - DNA, 15 bp, Homo sapiens
atactctgaatactg

SEQ ID NO: 1695120 - DNA, 15 bp, Homo sapiens
tactctgaatactgt

SEQ ID NO: 1695121 - DNA, 15 bp, Homo sapiens
actctgaatactgtt

SEQ ID NO: 1695122 - DNA, 15 bp, Homo sapiens
ctctgaatactgtta

SEQ ID NO: 1695123 - DNA, 15 bp, Homo sapiens
tctgaatactgttat

SEQ ID NO: 1695124 - DNA, 15 bp, Homo sapiens
ctgaatactgttatg

SEQ ID NO: 1695125 - DNA, 15 bp, Homo sapiens
tgaatactgttatgt

SEQ ID NO: 1695126 - DNA, 15 bp, Homo sapiens
gaatactgttatgtg

SEQ ID NO: 1695127 - DNA, 15 bp, Homo sapiens
aatactgttatgtgt

SEQ ID NO: 1695128 - DNA, 15 bp, Homo sapiens
atactgttatgtgtg

SEQ ID NO: 1695129 - DNA, 15 bp, Homo sapiens
tactgttatgtgtgt

SEQ ID NO: 1695130 - DNA, 15 bp, Homo sapiens
actgttatgtgtgtt

SEQ ID NO: 1695131 - DNA, 15 bp, Homo sapiens
ctgttatgtgtgtta

SEQ ID NO: 1695132 - DNA, 15 bp, Homo sapiens
tgttatgtgtgttac

SEQ ID NO: 1695133 - DNA, 15 bp, Homo sapiens
gttatgtgtgttaca

SEQ ID NO: 1695134 - DNA, 15 bp, Homo sapiens
ttatgtgtgttacaa

SEQ ID NO: 1695135 - DNA, 15 bp, Homo sapiens
tatgtgtgttacaaa

SEQ ID NO: 1695136 - DNA, 15 bp, Homo sapiens
atgtgtgttacaaag

SEQ ID NO: 1695137 - DNA, 15 bp, Homo sapiens
tgtgtgttacaaaga

SEQ ID NO: 1695138 - DNA, 15 bp, Homo sapiens
gtgtgttacaaagat

SEQ ID NO: 1695139 - DNA, 15 bp, Homo sapiens
tgtgttacaaagatt

SEQ ID NO: 1695140 - DNA, 15 bp, Homo sapiens
gtgttacaaagattt

SEQ ID NO: 1695141 - DNA, 15 bp, Homo sapiens
tgttacaaagatttt

SEQ ID NO: 1695142 - DNA, 15 bp, Homo sapiens
gttacaaagattttc

SEQ ID NO: 1695143 - DNA, 15 bp, Homo sapiens
ttacaaagattttct

SEQ ID NO: 1695144 - DNA, 15 bp, Homo sapiens
tacaaagattttctc

SEQ ID NO: 1695145 - DNA, 15 bp, Homo sapiens
acaaagattttctcc

SEQ ID NO: 1695146 - DNA, 15 bp, Homo sapiens
caaagattttctccc

SEQ ID NO: 1695147 - DNA, 15 bp, Homo sapiens
aaagattttctccca

SEQ ID NO: 1695148 - DNA, 15 bp, Homo sapiens
aagattttctcccag

SEQ ID NO: 1695149 - DNA, 15 bp, Homo sapiens
agattttctcccagt

SEQ ID NO: 1695150 - DNA, 15 bp, Homo sapiens
gattttctcccagtc

SEQ ID NO: 1695151 - DNA, 15 bp, Homo sapiens
attttctcccagtct

SEQ ID NO: 1695152 - DNA, 15 bp, Homo sapiens
ttttctcccagtctt

SEQ ID NO: 1695153 - DNA, 15 bp, Homo sapiens
tttctcccagtcttt

SEQ ID NO: 1695154 - DNA, 15 bp, Homo sapiens
ttctcccagtctttc

SEQ ID NO: 1695155 - DNA, 15 bp, Homo sapiens
tctcccagtctttct

SEQ ID NO: 1695156 - DNA, 15 bp, Homo sapiens
ctcccagtctttctc

SEQ ID NO: 1695157 - DNA, 15 bp, Homo sapiens
tcccagtctttctca

SEQ ID NO: 1695158 - DNA, 15 bp, Homo sapiens
cccagtctttctcat

SEQ ID NO: 1695159 - DNA, 15 bp, Homo sapiens
ccagtctttctcatt

SEQ ID NO: 1695160 - DNA, 15 bp, Homo sapiens
cagtctttctcattt

SEQ ID NO: 1695161 - DNA, 15 bp, Homo sapiens
agtctttctcatttt

SEQ ID NO: 1695162 - DNA, 15 bp, Homo sapiens
gtctttctcatttta

SEQ ID NO: 1695163 - DNA, 15 bp, Homo sapiens
tctttctcattttac

SEQ ID NO: 1695164 - DNA, 15 bp, Homo sapiens
ctttctcattttact

SEQ ID NO: 1695165 - DNA, 15 bp, Homo sapiens
tttctcattttactt

SEQ ID NO: 1695166 - DNA, 15 bp, Homo sapiens
ttctcattttacttg

SEQ ID NO: 1695167 - DNA, 15 bp, Homo sapiens
tctcattttacttgg

SEQ ID NO: 1695168 - DNA, 15 bp, Homo sapiens
ctcattttacttggg

SEQ ID NO: 1695169 - DNA, 15 bp, Homo sapiens
tcattttacttgggt

SEQ ID NO: 1695170 - DNA, 15 bp, Homo sapiens
cattttacttgggtt

SEQ ID NO: 1695171 - DNA, 15 bp, Homo sapiens
attttacttgggttt

SEQ ID NO: 1695172 - DNA, 15 bp, Homo sapiens
ttttacttgggttta

SEQ ID NO: 1695173 - DNA, 15 bp, Homo sapiens
tttacttgggtttat

SEQ ID NO: 1695174 - DNA, 15 bp, Homo sapiens
ttacttgggtttatg

SEQ ID NO: 1695175 - DNA, 15 bp, Homo sapiens
tacttgggtttatgg

SEQ ID NO: 1695176 - DNA, 15 bp, Homo sapiens
acttgggtttatggt

SEQ ID NO: 1695177 - DNA, 15 bp, Homo sapiens
cttgggtttatggta

SEQ ID NO: 1695178 - DNA, 15 bp, Homo sapiens
ttgggtttatggtat

SEQ ID NO: 1695179 - DNA, 15 bp, Homo sapiens
tgggtttatggtata

SEQ ID NO: 1695180 - DNA, 15 bp, Homo sapiens
gggtttatggtataa

SEQ ID NO: 1695181 - DNA, 15 bp, Homo sapiens
ggtttatggtataat

SEQ ID NO: 1695182 - DNA, 15 bp, Homo sapiens
gtttatggtataatt

SEQ ID NO: 1695183 - DNA, 15 bp, Homo sapiens
tttatggtataattt

SEQ ID NO: 1695184 - DNA, 15 bp, Homo sapiens
ttatggtataatttg

SEQ ID NO: 1695185 - DNA, 15 bp, Homo sapiens
tatggtataatttgt

SEQ ID NO: 1695186 - DNA, 15 bp, Homo sapiens
atggtataatttgtc

SEQ ID NO: 1695187 - DNA, 15 bp, Homo sapiens
tggtataatttgtca

SEQ ID NO: 1695188 - DNA, 15 bp, Homo sapiens
ggtataatttgtcat

SEQ ID NO: 1695189 - DNA, 15 bp, Homo sapiens
gtataatttgtcata

SEQ ID NO: 1695190 - DNA, 15 bp, Homo sapiens
tataatttgtcatac

SEQ ID NO: 1695191 - DNA, 15 bp, Homo sapiens
ataatttgtcatact

SEQ ID NO: 1695192 - DNA, 15 bp, Homo sapiens
taatttgtcatactg

SEQ ID NO: 1695193 - DNA, 15 bp, Homo sapiens
aatttgtcatactga

SEQ ID NO: 1695194 - DNA, 15 bp, Homo sapiens
atttgtcatactgaa

SEQ ID NO: 1695195 - DNA, 15 bp, Homo sapiens
tttgtcatactgaaa

SEQ ID NO: 1695196 - DNA, 15 bp, Homo sapiens
ttgtcatactgaaat

SEQ ID NO: 1695197 - DNA, 15 bp, Homo sapiens
tgtcatactgaaatt

SEQ ID NO: 1695198 - DNA, 15 bp, Homo sapiens
gtcatactgaaattt

SEQ ID NO: 1695199 - DNA, 15 bp, Homo sapiens
tcatactgaaattta

SEQ ID NO: 1695200 - DNA, 15 bp, Homo sapiens
catactgaaatttaa

SEQ ID NO: 1695201 - DNA, 15 bp, Homo sapiens
atactgaaatttaaa

SEQ ID NO: 1695202 - DNA, 15 bp, Homo sapiens
tactgaaatttaaaa

SEQ ID NO: 1695203 - DNA, 15 bp, Homo sapiens
actgaaatttaaaat

SEQ ID NO: 1695204 - DNA, 15 bp, Homo sapiens
ctgaaatttaaaatt

SEQ ID NO: 1695205 - DNA, 15 bp, Homo sapiens
tgaaatttaaaattc

SEQ ID NO: 1695206 - DNA, 15 bp, Homo sapiens
gaaatttaaaattct

SEQ ID NO: 1695207 - DNA, 15 bp, Homo sapiens
aaatttaaaattctg

SEQ ID NO: 1695208 - DNA, 15 bp, Homo sapiens
aatttaaaattctga

SEQ ID NO: 1695209 - DNA, 15 bp, Homo sapiens
atttaaaattctgat

SEQ ID NO: 1695210 - DNA, 15 bp, Homo sapiens
tttaaaattctgata

SEQ ID NO: 1695211 - DNA, 15 bp, Homo sapiens
ttaaaattctgatat

SEQ ID NO: 1695212 - DNA, 15 bp, Homo sapiens
taaaattctgatata

SEQ ID NO: 1695213 - DNA, 15 bp, Homo sapiens
aaaattctgatataa

SEQ ID NO: 1695214 - DNA, 15 bp, Homo sapiens
aaattctgatataat

SEQ ID NO: 1695215 - DNA, 15 bp, Homo sapiens
aattctgatataatc

SEQ ID NO: 1695216 - DNA, 15 bp, Homo sapiens
attctgatataatca

SEQ ID NO: 1695217 - DNA, 15 bp, Homo sapiens
ttctgatataatcaa

SEQ ID NO: 1695218 - DNA, 15 bp, Homo sapiens
tctgatataatcaat

SEQ ID NO: 1695219 - DNA, 15 bp, Homo sapiens
ctgatataatcaata

SEQ ID NO: 1695220 - DNA, 15 bp, Homo sapiens
tgatataatcaatac

SEQ ID NO: 1695221 - DNA, 15 bp, Homo sapiens
gatataatcaatact

SEQ ID NO: 1695222 - DNA, 15 bp, Homo sapiens
atataatcaatactt

SEQ ID NO: 1695223 - DNA, 15 bp, Homo sapiens
tataatcaatacttt

SEQ ID NO: 1695224 - DNA, 15 bp, Homo sapiens
ataatcaatactttc

SEQ ID NO: 1695225 - DNA, 15 bp, Homo sapiens
taatcaatactttca

SEQ ID NO: 1695226 - DNA, 15 bp, Homo sapiens
aatcaatactttcag

SEQ ID NO: 1695227 - DNA, 15 bp, Homo sapiens
atcaatactttcagt

SEQ ID NO: 1695228 - DNA, 15 bp, Homo sapiens
tcaatactttcagtc

SEQ ID NO: 1695229 - DNA, 15 bp, Homo sapiens
caatactttcagtca

SEQ ID NO: 1695230 - DNA, 15 bp, Homo sapiens
aatactttcagtcat

SEQ ID NO: 1695231 - DNA, 15 bp, Homo sapiens
atactttcagtcatt

SEQ ID NO: 1695232 - DNA, 15 bp, Homo sapiens
tactttcagtcattt

SEQ ID NO: 1695233 - DNA, 15 bp, Homo sapiens
actttcagtcatttt

SEQ ID NO: 1695234 - DNA, 15 bp, Homo sapiens
ctttcagtcattttt

SEQ ID NO: 1695235 - DNA, 15 bp, Homo sapiens
tttcagtcatttttt

SEQ ID NO: 1695236 - DNA, 15 bp, Homo sapiens
ttcagtcattttttc

SEQ ID NO: 1695237 - DNA, 15 bp, Homo sapiens
tcagtcattttttca

SEQ ID NO: 1695238 - DNA, 15 bp, Homo sapiens
cagtcattttttcat

SEQ ID NO: 1695239 - DNA, 15 bp, Homo sapiens
agtcattttttcatg

SEQ ID NO: 1695240 - DNA, 15 bp, Homo sapiens
gtcattttttcatgt

SEQ ID NO: 1695241 - DNA, 15 bp, Homo sapiens
tcattttttcatgtg

SEQ ID NO: 1695242 - DNA, 15 bp, Homo sapiens
attttttcatgtgtt

SEQ ID NO: 1695243 - DNA, 15 bp, Homo sapiens
ttttttcatgtgttt

SEQ ID NO: 1695244 - DNA, 15 bp, Homo sapiens
tttttcatgtgtttt

SEQ ID NO: 1695245 - DNA, 15 bp, Homo sapiens
ttttcatgtgttttg

SEQ ID NO: 1695246 - DNA, 15 bp, Homo sapiens
tttcatgtgttttgg

SEQ ID NO: 1695247 - DNA, 15 bp, Homo sapiens
ttcatgtgttttgga

SEQ ID NO: 1695248 - DNA, 15 bp, Homo sapiens
tcatgtgttttggat

SEQ ID NO: 1695249 - DNA, 15 bp, Homo sapiens
catgtgttttggatt

SEQ ID NO: 1695250 - DNA, 15 bp, Homo sapiens
atgtgttttggattt

SEQ ID NO: 1695251 - DNA, 15 bp, Homo sapiens
tgtgttttggatttt

SEQ ID NO: 1695252 - DNA, 15 bp, Homo sapiens
gtgttttggattttt

SEQ ID NO: 1695253 - DNA, 15 bp, Homo sapiens
tgttttggatttttg

SEQ ID NO: 1695254 - DNA, 15 bp, Homo sapiens
gttttggatttttgt

SEQ ID NO: 1695255 - DNA, 15 bp, Homo sapiens
ttttggatttttgtt

SEQ ID NO: 1695256 - DNA, 15 bp, Homo sapiens
tttggatttttgttt

SEQ ID NO: 1695257 - DNA, 15 bp, Homo sapiens
ttggatttttgttta

SEQ ID NO: 1695258 - DNA, 15 bp, Homo sapiens
tggatttttgtttat

SEQ ID NO: 1695259 - DNA, 15 bp, Homo sapiens
ggatttttgtttatt

SEQ ID NO: 1695260 - DNA, 15 bp, Homo sapiens
gatttttgtttattc

SEQ ID NO: 1695261 - DNA, 15 bp, Homo sapiens
atttttgtttattct

SEQ ID NO: 1695262 - DNA, 15 bp, Homo sapiens
tttttgtttattctt

SEQ ID NO: 1695263 - DNA, 15 bp, Homo sapiens
ttttgtttattcttg

SEQ ID NO: 1695264 - DNA, 15 bp, Homo sapiens
tttgtttattcttga

SEQ ID NO: 1695265 - DNA, 15 bp, Homo sapiens
ttgtttattcttgaa

SEQ ID NO: 1695266 - DNA, 15 bp, Homo sapiens
tgtttattcttgaat

SEQ ID NO: 1695267 - DNA, 15 bp, Homo sapiens
gtttattcttgaatt

SEQ ID NO: 1695268 - DNA, 15 bp, Homo sapiens
tttattcttgaattt

SEQ ID NO: 1695269 - DNA, 15 bp, Homo sapiens
ttattcttgaatttt

SEQ ID NO: 1695270 - DNA, 15 bp, Homo sapiens
tattcttgaattttt

SEQ ID NO: 1695271 - DNA, 15 bp, Homo sapiens
attcttgaatttttt

SEQ ID NO: 1695272 - DNA, 15 bp, Homo sapiens
ttcttgaattttttt

SEQ ID NO: 1695273 - DNA, 15 bp, Homo sapiens
tcttgaatttttttt

SEQ ID NO: 1695274 - DNA, 15 bp, Homo sapiens
cttgaattttttttt

SEQ ID NO: 1695275 - DNA, 15 bp, Homo sapiens
ttgaatttttttttt

SEQ ID NO: 1695276 - DNA, 15 bp, Homo sapiens
ttttttaaattccac

SEQ ID NO: 1695277 - DNA, 15 bp, Homo sapiens
tttttaaattccact

SEQ ID NO: 1695278 - DNA, 15 bp, Homo sapiens
ttttaaattccactg

SEQ ID NO: 1695279 - DNA, 15 bp, Homo sapiens
tttaaattccactgg

SEQ ID NO: 1695280 - DNA, 15 bp, Homo sapiens
ttaaattccactggt

SEQ ID NO: 1695281 - DNA, 15 bp, Homo sapiens
taaattccactggtg

SEQ ID NO: 1695282 - DNA, 15 bp, Homo sapiens
aaattccactggtga

SEQ ID NO: 1695283 - DNA, 15 bp, Homo sapiens
aattccactggtgac

SEQ ID NO: 1695284 - DNA, 15 bp, Homo sapiens
attccactggtgact

SEQ ID NO: 1695285 - DNA, 15 bp, Homo sapiens
ttccactggtgactc

SEQ ID NO: 1695286 - DNA, 15 bp, Homo sapiens
tccactggtgactct

SEQ ID NO: 1695287 - DNA, 15 bp, Homo sapiens
ccactggtgactctg

SEQ ID NO: 1695288 - DNA, 15 bp, Homo sapiens
cactggtgactctga

SEQ ID NO: 1695289 - DNA, 15 bp, Homo sapiens
actggtgactctgat

SEQ ID NO: 1695290 - DNA, 15 bp, Homo sapiens
ctggtgactctgatg

SEQ ID NO: 1695291 - DNA, 15 bp, Homo sapiens
tggtgactctgatgc

SEQ ID NO: 1695292 - DNA, 15 bp, Homo sapiens
ggtgactctgatgcc

SEQ ID NO: 1695293 - DNA, 15 bp, Homo sapiens
gtgactctgatgcca

SEQ ID NO: 1695294 - DNA, 15 bp, Homo sapiens
tgactctgatgccaa

SEQ ID NO: 1695295 - DNA, 15 bp, Homo sapiens
gactctgatgccaag

SEQ ID NO: 1695296 - DNA, 15 bp, Homo sapiens
actctgatgccaagt

SEQ ID NO: 1695297 - DNA, 15 bp, Homo sapiens
ctctgatgccaagtc

SEQ ID NO: 1695298 - DNA, 15 bp, Homo sapiens
tctgatgccaagtcg

SEQ ID NO: 1695299 - DNA, 15 bp, Homo sapiens
ctgatgccaagtcgg

SEQ ID NO: 1695300 - DNA, 15 bp, Homo sapiens
tgatgccaagtcggg

SEQ ID NO: 1695301 - DNA, 15 bp, Homo sapiens
gatgccaagtcggga

SEQ ID NO: 1695302 - DNA, 15 bp, Homo sapiens
atgccaagtcgggaa

SEQ ID NO: 1695303 - DNA, 15 bp, Homo sapiens
tgccaagtcgggaat

SEQ ID NO: 1695304 - DNA, 15 bp, Homo sapiens
gccaagtcgggaatg

SEQ ID NO: 1695305 - DNA, 15 bp, Homo sapiens
ccaagtcgggaatga

SEQ ID NO: 1695306 - DNA, 15 bp, Homo sapiens
caagtcgggaatgag

SEQ ID NO: 1695307 - DNA, 15 bp, Homo sapiens
aagtcgggaatgaga

SEQ ID NO: 1695308 - DNA, 15 bp, Homo sapiens
agtcgggaatgagaa

SEQ ID NO: 1695309 - DNA, 15 bp, Homo sapiens
gtcgggaatgagaac

SEQ ID NO: 1695310 - DNA, 15 bp, Homo sapiens
tcgggaatgagaacc

SEQ ID NO: 1695311 - DNA, 15 bp, Homo sapiens
cgggaatgagaacca

SEQ ID NO: 1695312 - DNA, 15 bp, Homo sapiens
gggaatgagaaccat

SEQ ID NO: 1695313 - DNA, 15 bp, Homo sapiens
ggaatgagaaccatt

SEQ ID NO: 1695314 - DNA, 15 bp, Homo sapiens
gaatgagaaccattg

SEQ ID NO: 1695315 - DNA, 15 bp, Homo sapiens
aatgagaaccattgt

SEQ ID NO: 1695316 - DNA, 15 bp, Homo sapiens
atgagaaccattgtt

SEQ ID NO: 1695317 - DNA, 15 bp, Homo sapiens
tgagaaccattgttc

SEQ ID NO: 1695318 - DNA, 15 bp, Homo sapiens
gagaaccattgttct

SEQ ID NO: 1695319 - DNA, 15 bp, Homo sapiens
agaaccattgttcta

SEQ ID NO: 1695320 - DNA, 15 bp, Homo sapiens
gaaccattgttctaa

SEQ ID NO: 1695321 - DNA, 15 bp, Homo sapiens
accattgttctaagc

SEQ ID NO: 1695322 - DNA, 15 bp, Homo sapiens
ccattgttctaagct

SEQ ID NO: 1695323 - DNA, 15 bp, Homo sapiens
cattgttctaagcta

SEQ ID NO: 1695324 - DNA, 15 bp, Homo sapiens
attgttctaagctat

SEQ ID NO: 1695325 - DNA, 15 bp, Homo sapiens
ttgttctaagctatt

SEQ ID NO: 1695326 - DNA, 15 bp, Homo sapiens
tgttctaagctattg

SEQ ID NO: 1695327 - DNA, 15 bp, Homo sapiens
gttctaagctattgc

SEQ ID NO: 1695328 - DNA, 15 bp, Homo sapiens
ttctaagctattgcc

SEQ ID NO: 1695329 - DNA, 15 bp, Homo sapiens
tctaagctattgccc

SEQ ID NO: 1695330 - DNA, 15 bp, Homo sapiens
ctaagctattgcccg

SEQ ID NO: 1695331 - DNA, 15 bp, Homo sapiens
taagctattgcccgg

SEQ ID NO: 1695332 - DNA, 15 bp, Homo sapiens
aagctattgcccggg

SEQ ID NO: 1695333 - DNA, 15 bp, Homo sapiens
agctattgcccggga

SEQ ID NO: 1695334 - DNA, 15 bp, Homo sapiens
gctattgcccgggaa

SEQ ID NO: 1695335 - DNA, 15 bp, Homo sapiens
ctattgcccgggaag

SEQ ID NO: 1695336 - DNA, 15 bp, Homo sapiens
tattgcccgggaagg

SEQ ID NO: 1695337 - DNA, 15 bp, Homo sapiens
attgcccgggaaggg

SEQ ID NO: 1695338 - DNA, 15 bp, Homo sapiens
ttgcccgggaagggg

SEQ ID NO: 1695339 - DNA, 15 bp, Homo sapiens
tgcccgggaaggggt

SEQ ID NO: 1695340 - DNA, 15 bp, Homo sapiens
gcccgggaaggggtt

SEQ ID NO: 1695341 - DNA, 15 bp, Homo sapiens
cccgggaaggggttc

SEQ ID NO: 1695342 - DNA, 15 bp, Homo sapiens
ccgggaaggggttct

SEQ ID NO: 1695343 - DNA, 15 bp, Homo sapiens
cgggaaggggttctt

SEQ ID NO: 1695344 - DNA, 15 bp, Homo sapiens
gggaaggggttcttg

SEQ ID NO: 1695345 - DNA, 15 bp, Homo sapiens
ggaaggggttcttgc

SEQ ID NO: 1695346 - DNA, 15 bp, Homo sapiens
gaaggggttcttgct

SEQ ID NO: 1695347 - DNA, 15 bp, Homo sapiens
aaggggttcttgctg

SEQ ID NO: 1695348 - DNA, 15 bp, Homo sapiens
aggggttcttgctgt

SEQ ID NO: 1695349 - DNA, 15 bp, Homo sapiens
ggggttcttgctgtg

SEQ ID NO: 1695350 - DNA, 15 bp, Homo sapiens
gggttcttgctgtgc

SEQ ID NO: 1695351 - DNA, 15 bp, Homo sapiens
ggttcttgctgtgca

SEQ ID NO: 1695352 - DNA, 15 bp, Homo sapiens
gttcttgctgtgcat

SEQ ID NO: 1695353 - DNA, 15 bp, Homo sapiens
ttcttgctgtgcatg

SEQ ID NO: 1695354 - DNA, 15 bp, Homo sapiens
tcttgctgtgcatga

SEQ ID NO: 1695355 - DNA, 15 bp, Homo sapiens
cttgctgtgcatgag

SEQ ID NO: 1695356 - DNA, 15 bp, Homo sapiens
ttgctgtgcatgaga

SEQ ID NO: 1695357 - DNA, 15 bp, Homo sapiens
tgctgtgcatgagag

SEQ ID NO: 1695358 - DNA, 15 bp, Homo sapiens
gctgtgcatgagaga

SEQ ID NO: 1695359 - DNA, 15 bp, Homo sapiens
ctgtgcatgagagac

SEQ ID NO: 1695360 - DNA, 15 bp, Homo sapiens
tgtgcatgagagact

SEQ ID NO: 1695361 - DNA, 15 bp, Homo sapiens
gtgcatgagagactg

SEQ ID NO: 1695362 - DNA, 15 bp, Homo sapiens
tgcatgagagactgt

SEQ ID NO: 1695363 - DNA, 15 bp, Homo sapiens
gcatgagagactgtg

SEQ ID NO: 1695364 - DNA, 15 bp, Homo sapiens
catgagagactgtgt

SEQ ID NO: 1695365 - DNA, 15 bp, Homo sapiens
atgagagactgtgtt

SEQ ID NO: 1695366 - DNA, 15 bp, Homo sapiens
tgagagactgtgtta

SEQ ID NO: 1695367 - DNA, 15 bp, Homo sapiens
gagagactgtgttat

SEQ ID NO: 1695368 - DNA, 15 bp, Homo sapiens
agagactgtgttatc

SEQ ID NO: 1695369 - DNA, 15 bp, Homo sapiens
gagactgtgttatca

SEQ ID NO: 1695370 - DNA, 15 bp, Homo sapiens
agactgtgttatcac

SEQ ID NO: 1695371 - DNA, 15 bp, Homo sapiens
gactgtgttatcact

SEQ ID NO: 1695372 - DNA, 15 bp, Homo sapiens
actgtgttatcactt

SEQ ID NO: 1695373 - DNA, 15 bp, Homo sapiens
ctgtgttatcacttc

SEQ ID NO: 1695374 - DNA, 15 bp, Homo sapiens
tgtgttatcacttca

SEQ ID NO: 1695375 - DNA, 15 bp, Homo sapiens
gtgttatcacttcac

SEQ ID NO: 1695376 - DNA, 15 bp, Homo sapiens
tgttatcacttcaca

SEQ ID NO: 1695377 - DNA, 15 bp, Homo sapiens
gttatcacttcacat

SEQ ID NO: 1695378 - DNA, 15 bp, Homo sapiens
ttatcacttcacatg

SEQ ID NO: 1695379 - DNA, 15 bp, Homo sapiens
tatcacttcacatga

SEQ ID NO: 1695380 - DNA, 15 bp, Homo sapiens
atcacttcacatgaa

SEQ ID NO: 1695381 - DNA, 15 bp, Homo sapiens
tcacttcacatgaat

SEQ ID NO: 1695382 - DNA, 15 bp, Homo sapiens
cacttcacatgaatt

SEQ ID NO: 1695383 - DNA, 15 bp, Homo sapiens
acttcacatgaatta

SEQ ID NO: 1695384 - DNA, 15 bp, Homo sapiens
cttcacatgaattaa

SEQ ID NO: 1695385 - DNA, 15 bp, Homo sapiens
ttcacatgaattaag

SEQ ID NO: 1695386 - DNA, 15 bp, Homo sapiens
tcacatgaattaagt

SEQ ID NO: 1695387 - DNA, 15 bp, Homo sapiens
cacatgaattaagtc

SEQ ID NO: 1695388 - DNA, 15 bp, Homo sapiens
acatgaattaagtca

SEQ ID NO: 1695389 - DNA, 15 bp, Homo sapiens
catgaattaagtcat

SEQ ID NO: 1695390 - DNA, 15 bp, Homo sapiens
atgaattaagtcata

SEQ ID NO: 1695391 - DNA, 15 bp, Homo sapiens
tgaattaagtcatat

SEQ ID NO: 1695392 - DNA, 15 bp, Homo sapiens
gaattaagtcatatt

SEQ ID NO: 1695393 - DNA, 15 bp, Homo sapiens
aattaagtcatattt

SEQ ID NO: 1695394 - DNA, 15 bp, Homo sapiens
attaagtcatattta

SEQ ID NO: 1695395 - DNA, 15 bp, Homo sapiens
ttaagtcatatttaa

SEQ ID NO: 1695396 - DNA, 15 bp, Homo sapiens
taagtcatatttaat

SEQ ID NO: 1695397 - DNA, 15 bp, Homo sapiens
aagtcatatttaata

SEQ ID NO: 1695398 - DNA, 15 bp, Homo sapiens
agtcatatttaatac

SEQ ID NO: 1695399 - DNA, 15 bp, Homo sapiens
gtcatatttaatact

SEQ ID NO: 1695400 - DNA, 15 bp, Homo sapiens
tcatatttaatactc

SEQ ID NO: 1695401 - DNA, 15 bp, Homo sapiens
catatttaatactca

SEQ ID NO: 1695402 - DNA, 15 bp, Homo sapiens
atatttaatactcat

SEQ ID NO: 1695403 - DNA, 15 bp, Homo sapiens
tatttaatactcatc

SEQ ID NO: 1695404 - DNA, 15 bp, Homo sapiens
atttaatactcatca

SEQ ID NO: 1695405 - DNA, 15 bp, Homo sapiens
tttaatactcatcac

SEQ ID NO: 1695406 - DNA, 15 bp, Homo sapiens
ttaatactcatcaca

SEQ ID NO: 1695407 - DNA, 15 bp, Homo sapiens
taatactcatcacag

SEQ ID NO: 1695408 - DNA, 15 bp, Homo sapiens
aatactcatcacagt

SEQ ID NO: 1695409 - DNA, 15 bp, Homo sapiens
atactcatcacagtg

SEQ ID NO: 1695410 - DNA, 15 bp, Homo sapiens
tactcatcacagtgc

SEQ ID NO: 1695411 - DNA, 15 bp, Homo sapiens
actcatcacagtgct

SEQ ID NO: 1695412 - DNA, 15 bp, Homo sapiens
ctcatcacagtgctg

SEQ ID NO: 1695413 - DNA, 15 bp, Homo sapiens
tcatcacagtgctgt

SEQ ID NO: 1695414 - DNA, 15 bp, Homo sapiens
catcacagtgctgtg

SEQ ID NO: 1695415 - DNA, 15 bp, Homo sapiens
atcacagtgctgtgg

SEQ ID NO: 1695416 - DNA, 15 bp, Homo sapiens
tcacagtgctgtggg

SEQ ID NO: 1695417 - DNA, 15 bp, Homo sapiens
cacagtgctgtgggg

SEQ ID NO: 1695418 - DNA, 15 bp, Homo sapiens
acagtgctgtgggga

SEQ ID NO: 1695419 - DNA, 15 bp, Homo sapiens
cagtgctgtggggag

SEQ ID NO: 1695420 - DNA, 15 bp, Homo sapiens
agtgctgtggggagt

SEQ ID NO: 1695421 - DNA, 15 bp, Homo sapiens
gtgctgtggggagtc

SEQ ID NO: 1695422 - DNA, 15 bp, Homo sapiens
tgctgtggggagtca

SEQ ID NO: 1695423 - DNA, 15 bp, Homo sapiens
gctgtggggagtcag

SEQ ID NO: 1695424 - DNA, 15 bp, Homo sapiens
ctgtggggagtcagc

SEQ ID NO: 1695425 - DNA, 15 bp, Homo sapiens
tgtggggagtcagcg

SEQ ID NO: 1695426 - DNA, 15 bp, Homo sapiens
gtggggagtcagcga

SEQ ID NO: 1695427 - DNA, 15 bp, Homo sapiens
tggggagtcagcgat

SEQ ID NO: 1695428 - DNA, 15 bp, Homo sapiens
ggggagtcagcgatg

SEQ ID NO: 1695429 - DNA, 15 bp, Homo sapiens
gggagtcagcgatgc

SEQ ID NO: 1695430 - DNA, 15 bp, Homo sapiens
ggagtcagcgatgcc

SEQ ID NO: 1695431 - DNA, 15 bp, Homo sapiens
gagtcagcgatgcca

SEQ ID NO: 1695432 - DNA, 15 bp, Homo sapiens
agtcagcgatgccat

SEQ ID NO: 1695433 - DNA, 15 bp, Homo sapiens
gtcagcgatgccata

SEQ ID NO: 1695434 - DNA, 15 bp, Homo sapiens
tcagcgatgccatac

SEQ ID NO: 1695435 - DNA, 15 bp, Homo sapiens
cagcgatgccatact

SEQ ID NO: 1695436 - DNA, 15 bp, Homo sapiens
agcgatgccatactg

SEQ ID NO: 1695437 - DNA, 15 bp, Homo sapiens
gcgatgccatactga

SEQ ID NO: 1695438 - DNA, 15 bp, Homo sapiens
cgatgccatactgat

SEQ ID NO: 1695439 - DNA, 15 bp, Homo sapiens
gatgccatactgatc

SEQ ID NO: 1695440 - DNA, 15 bp, Homo sapiens
atgccatactgatct

SEQ ID NO: 1695441 - DNA, 15 bp, Homo sapiens
tgccatactgatctt

SEQ ID NO: 1695442 - DNA, 15 bp, Homo sapiens
gccatactgatctta

SEQ ID NO: 1695443 - DNA, 15 bp, Homo sapiens
ccatactgatcttag

SEQ ID NO: 1695444 - DNA, 15 bp, Homo sapiens
catactgatcttaga

SEQ ID NO: 1695445 - DNA, 15 bp, Homo sapiens
atactgatcttagag

SEQ ID NO: 1695446 - DNA, 15 bp, Homo sapiens
tactgatcttagaga

SEQ ID NO: 1695447 - DNA, 15 bp, Homo sapiens
actgatcttagagag

SEQ ID NO: 1695448 - DNA, 15 bp, Homo sapiens
ctgatcttagagagg

SEQ ID NO: 1695449 - DNA, 15 bp, Homo sapiens
tgatcttagagagga

SEQ ID NO: 1695450 - DNA, 15 bp, Homo sapiens
gatcttagagaggag

SEQ ID NO: 1695451 - DNA, 15 bp, Homo sapiens
atcttagagaggagg

SEQ ID NO: 1695452 - DNA, 15 bp, Homo sapiens
tcttagagaggagga

SEQ ID NO: 1695453 - DNA, 15 bp, Homo sapiens
cttagagaggaggaa

SEQ ID NO: 1695454 - DNA, 15 bp, Homo sapiens
ttagagaggaggaaa

SEQ ID NO: 1695455 - DNA, 15 bp, Homo sapiens
tagagaggaggaaac

SEQ ID NO: 1695456 - DNA, 15 bp, Homo sapiens
agagaggaggaaact

SEQ ID NO: 1695457 - DNA, 15 bp, Homo sapiens
gagaggaggaaacta

SEQ ID NO: 1695458 - DNA, 15 bp, Homo sapiens
agaggaggaaactaa

SEQ ID NO: 1695459 - DNA, 15 bp, Homo sapiens
gaggaggaaactaaa

SEQ ID NO: 1695460 - DNA, 15 bp, Homo sapiens
aggaggaaactaaac

SEQ ID NO: 1695461 - DNA, 15 bp, Homo sapiens
ggaggaaactaaacc

SEQ ID NO: 1695462 - DNA, 15 bp, Homo sapiens
gaggaaactaaacct

SEQ ID NO: 1695463 - DNA, 15 bp, Homo sapiens
aggaaactaaacctc

SEQ ID NO: 1695464 - DNA, 15 bp, Homo sapiens
ggaaactaaacctca

SEQ ID NO: 1695465 - DNA, 15 bp, Homo sapiens
gaaactaaacctcag

SEQ ID NO: 1695466 - DNA, 15 bp, Homo sapiens
aaactaaacctcaga

SEQ ID NO: 1695467 - DNA, 15 bp, Homo sapiens
aactaaacctcagag

SEQ ID NO: 1695468 - DNA, 15 bp, Homo sapiens
actaaacctcagaga

SEQ ID NO: 1695469 - DNA, 15 bp, Homo sapiens
ctaaacctcagagac

SEQ ID NO: 1695470 - DNA, 15 bp, Homo sapiens
taaacctcagagact

SEQ ID NO: 1695471 - DNA, 15 bp, Homo sapiens
aaacctcagagactc

SEQ ID NO: 1695472 - DNA, 15 bp, Homo sapiens
aacctcagagactca

SEQ ID NO: 1695473 - DNA, 15 bp, Homo sapiens
acctcagagactcag

SEQ ID NO: 1695474 - DNA, 15 bp, Homo sapiens
cctcagagactcagt

SEQ ID NO: 1695475 - DNA, 15 bp, Homo sapiens
ctcagagactcagta

SEQ ID NO: 1695476 - DNA, 15 bp, Homo sapiens
tcagagactcagtag

SEQ ID NO: 1695477 - DNA, 15 bp, Homo sapiens
cagagactcagtagc

SEQ ID NO: 1695478 - DNA, 15 bp, Homo sapiens
agagactcagtagct

SEQ ID NO: 1695479 - DNA, 15 bp, Homo sapiens
gagactcagtagctt

SEQ ID NO: 1695480 - DNA, 15 bp, Homo sapiens
agactcagtagcttg

SEQ ID NO: 1695481 - DNA, 15 bp, Homo sapiens
gactcagtagcttgt

SEQ ID NO: 1695482 - DNA, 15 bp, Homo sapiens
actcagtagcttgtc

SEQ ID NO: 1695483 - DNA, 15 bp, Homo sapiens
ctcagtagcttgtct

SEQ ID NO: 1695484 - DNA, 15 bp, Homo sapiens
tcagtagcttgtcta

SEQ ID NO: 1695485 - DNA, 15 bp, Homo sapiens
cagtagcttgtctaa

SEQ ID NO: 1695486 - DNA, 15 bp, Homo sapiens
agtagcttgtctaag

SEQ ID NO: 1695487 - DNA, 15 bp, Homo sapiens
gtagcttgtctaagg

SEQ ID NO: 1695488 - DNA, 15 bp, Homo sapiens
tagcttgtctaaggt

SEQ ID NO: 1695489 - DNA, 15 bp, Homo sapiens
agcttgtctaaggta

SEQ ID NO: 1695490 - DNA, 15 bp, Homo sapiens
gcttgtctaaggtag

SEQ ID NO: 1695491 - DNA, 15 bp, Homo sapiens
cttgtctaaggtaga

SEQ ID NO: 1695492 - DNA, 15 bp, Homo sapiens
ttgtctaaggtagac

SEQ ID NO: 1695493 - DNA, 15 bp, Homo sapiens
tgtctaaggtagaca

SEQ ID NO: 1695494 - DNA, 15 bp, Homo sapiens
gtctaaggtagacaa

SEQ ID NO: 1695495 - DNA, 15 bp, Homo sapiens
tctaaggtagacaag

SEQ ID NO: 1695496 - DNA, 15 bp, Homo sapiens
ctaaggtagacaagg

SEQ ID NO: 1695497 - DNA, 15 bp, Homo sapiens
taaggtagacaaggt

SEQ ID NO: 1695498 - DNA, 15 bp, Homo sapiens
aaggtagacaaggtg

SEQ ID NO: 1695499 - DNA, 15 bp, Homo sapiens
aggtagacaaggtgg

SEQ ID NO: 1695500 - DNA, 15 bp, Homo sapiens
ggtagacaaggtggt

SEQ ID NO: 1695501 - DNA, 15 bp, Homo sapiens
gtagacaaggtggta

SEQ ID NO: 1695502 - DNA, 15 bp, Homo sapiens
tagacaaggtggtag

SEQ ID NO: 1695503 - DNA, 15 bp, Homo sapiens
agacaaggtggtagg

SEQ ID NO: 1695504 - DNA, 15 bp, Homo sapiens
gacaaggtggtagga

SEQ ID NO: 1695505 - DNA, 15 bp, Homo sapiens
acaaggtggtaggac

SEQ ID NO: 1695506 - DNA, 15 bp, Homo sapiens
caaggtggtaggact

SEQ ID NO: 1695507 - DNA, 15 bp, Homo sapiens
aaggtggtaggactt

SEQ ID NO: 1695508 - DNA, 15 bp, Homo sapiens
aggtggtaggacttc

SEQ ID NO: 1695509 - DNA, 15 bp, Homo sapiens
ggtggtaggacttca

SEQ ID NO: 1695510 - DNA, 15 bp, Homo sapiens
gtggtaggacttcag

SEQ ID NO: 1695511 - DNA, 15 bp, Homo sapiens
tggtaggacttcaga

SEQ ID NO: 1695512 - DNA, 15 bp, Homo sapiens
ggtaggacttcagaa

SEQ ID NO: 1695513 - DNA, 15 bp, Homo sapiens
gtaggacttcagaaa

SEQ ID NO: 1695514 - DNA, 15 bp, Homo sapiens
taggacttcagaaat

SEQ ID NO: 1695515 - DNA, 15 bp, Homo sapiens
aggacttcagaaatt

SEQ ID NO: 1695516 - DNA, 15 bp, Homo sapiens
ggacttcagaaattg

SEQ ID NO: 1695517 - DNA, 15 bp, Homo sapiens
gacttcagaaattga

SEQ ID NO: 1695518 - DNA, 15 bp, Homo sapiens
acttcagaaattgac

SEQ ID NO: 1695519 - DNA, 15 bp, Homo sapiens
cttcagaaattgacc

SEQ ID NO: 1695520 - DNA, 15 bp, Homo sapiens
ttcagaaattgacct

SEQ ID NO: 1695521 - DNA, 15 bp, Homo sapiens
tcagaaattgaccta

SEQ ID NO: 1695522 - DNA, 15 bp, Homo sapiens
cagaaattgacctag

SEQ ID NO: 1695523 - DNA, 15 bp, Homo sapiens
agaaattgacctagg

SEQ ID NO: 1695524 - DNA, 15 bp, Homo sapiens
gaaattgacctaggt

SEQ ID NO: 1695525 - DNA, 15 bp, Homo sapiens
aaattgacctaggtc

SEQ ID NO: 1695526 - DNA, 15 bp, Homo sapiens
aattgacctaggtct

SEQ ID NO: 1695527 - DNA, 15 bp, Homo sapiens
attgacctaggtcta

SEQ ID NO: 1695528 - DNA, 15 bp, Homo sapiens
ttgacctaggtctat

SEQ ID NO: 1695529 - DNA, 15 bp, Homo sapiens
tgacctaggtctatt

SEQ ID NO: 1695530 - DNA, 15 bp, Homo sapiens
gacctaggtctatta

SEQ ID NO: 1695531 - DNA, 15 bp, Homo sapiens
acctaggtctattat

SEQ ID NO: 1695532 - DNA, 15 bp, Homo sapiens
cctaggtctattatg

SEQ ID NO: 1695533 - DNA, 15 bp, Homo sapiens
ctaggtctattatgc

SEQ ID NO: 1695534 - DNA, 15 bp, Homo sapiens
taggtctattatgct

SEQ ID NO: 1695535 - DNA, 15 bp, Homo sapiens
aggtctattatgcta

SEQ ID NO: 1695536 - DNA, 15 bp, Homo sapiens
ggtctattatgctaa

SEQ ID NO: 1695537 - DNA, 15 bp, Homo sapiens
gtctattatgctaaa

SEQ ID NO: 1695538 - DNA, 15 bp, Homo sapiens
tctattatgctaaaa

SEQ ID NO: 1695539 - DNA, 15 bp, Homo sapiens
ctattatgctaaaac

SEQ ID NO: 1695540 - DNA, 15 bp, Homo sapiens
tattatgctaaaacc

SEQ ID NO: 1695541 - DNA, 15 bp, Homo sapiens
attatgctaaaacct

SEQ ID NO: 1695542 - DNA, 15 bp, Homo sapiens
ttatgctaaaacctc

SEQ ID NO: 1695543 - DNA, 15 bp, Homo sapiens
tatgctaaaacctcc

SEQ ID NO: 1695544 - DNA, 15 bp, Homo sapiens
atgctaaaacctccg

SEQ ID NO: 1695545 - DNA, 15 bp, Homo sapiens
tgctaaaacctccgg

SEQ ID NO: 1695546 - DNA, 15 bp, Homo sapiens
gctaaaacctccggc

SEQ ID NO: 1695547 - DNA, 15 bp, Homo sapiens
ctaaaacctccggcc

SEQ ID NO: 1695548 - DNA, 15 bp, Homo sapiens
taaaacctccggcct

SEQ ID NO: 1695549 - DNA, 15 bp, Homo sapiens
aaaacctccggcctt

SEQ ID NO: 1695550 - DNA, 15 bp, Homo sapiens
aaacctccggcctta

SEQ ID NO: 1695551 - DNA, 15 bp, Homo sapiens
aacctccggccttat

SEQ ID NO: 1695552 - DNA, 15 bp, Homo sapiens
acctccggccttata

SEQ ID NO: 1695553 - DNA, 15 bp, Homo sapiens
cctccggccttatat

SEQ ID NO: 1695554 - DNA, 15 bp, Homo sapiens
ctccggccttatatt

SEQ ID NO: 1695555 - DNA, 15 bp, Homo sapiens
tccggccttatattt

SEQ ID NO: 1695556 - DNA, 15 bp, Homo sapiens
ccggccttatatttt

SEQ ID NO: 1695557 - DNA, 15 bp, Homo sapiens
cggccttatattttt

SEQ ID NO: 1695558 - DNA, 15 bp, Homo sapiens
ggccttatatttttt

SEQ ID NO: 1695559 - DNA, 15 bp, Homo sapiens
gccttatattttttt

SEQ ID NO: 1695560 - DNA, 15 bp, Homo sapiens
ccttatatttttttt

SEQ ID NO: 1695561 - DNA, 15 bp, Homo sapiens
cttatatttttttta

SEQ ID NO: 1695562 - DNA, 15 bp, Homo sapiens
ttatattttttttaa

SEQ ID NO: 1695563 - DNA, 15 bp, Homo sapiens
tatattttttttaat

SEQ ID NO: 1695564 - DNA, 15 bp, Homo sapiens
atattttttttaatc

SEQ ID NO: 1695565 - DNA, 15 bp, Homo sapiens
tattttttttaatca

SEQ ID NO: 1695566 - DNA, 15 bp, Homo sapiens
attttttttaatcag

SEQ ID NO: 1695567 - DNA, 15 bp, Homo sapiens
ttttttttaatcaga

SEQ ID NO: 1695568 - DNA, 15 bp, Homo sapiens
tttttttaatcagag

SEQ ID NO: 1695569 - DNA, 15 bp, Homo sapiens
ttttttaatcagaga

SEQ ID NO: 1695570 - DNA, 15 bp, Homo sapiens
tttttaatcagagaa

SEQ ID NO: 1695571 - DNA, 15 bp, Homo sapiens
ttttaatcagagaaa

SEQ ID NO: 1695572 - DNA, 15 bp, Homo sapiens
tttaatcagagaaaa

SEQ ID NO: 1695573 - DNA, 15 bp, Homo sapiens
ttaatcagagaaaaa

SEQ ID NO: 1695574 - DNA, 15 bp, Homo sapiens
taatcagagaaaaac

SEQ ID NO: 1695575 - DNA, 15 bp, Homo sapiens
aatcagagaaaaacc

SEQ ID NO: 1695576 - DNA, 15 bp, Homo sapiens
atcagagaaaaacca

SEQ ID NO: 1695577 - DNA, 15 bp, Homo sapiens
tcagagaaaaaccaa

SEQ ID NO: 1695578 - DNA, 15 bp, Homo sapiens
cagagaaaaaccaat

SEQ ID NO: 1695579 - DNA, 15 bp, Homo sapiens
agagaaaaaccaatt

SEQ ID NO: 1695580 - DNA, 15 bp, Homo sapiens
gagaaaaaccaattg

SEQ ID NO: 1695581 - DNA, 15 bp, Homo sapiens
agaaaaaccaattgt

SEQ ID NO: 1695582 - DNA, 15 bp, Homo sapiens
gaaaaaccaattgtt

SEQ ID NO: 1695583 - DNA, 15 bp, Homo sapiens
aaaaaccaattgtta

SEQ ID NO: 1695584 - DNA, 15 bp, Homo sapiens
aaaaccaattgttat

SEQ ID NO: 1695585 - DNA, 15 bp, Homo sapiens
aaaccaattgttatg

SEQ ID NO: 1695586 - DNA, 15 bp, Homo sapiens
aaccaattgttatga

SEQ ID NO: 1695587 - DNA, 15 bp, Homo sapiens
accaattgttatgag

SEQ ID NO: 1695588 - DNA, 15 bp, Homo sapiens
ccaattgttatgaga

SEQ ID NO: 1695589 - DNA, 15 bp, Homo sapiens
caattgttatgagaa

SEQ ID NO: 1695590 - DNA, 15 bp, Homo sapiens
aattgttatgagaaa

SEQ ID NO: 1695591 - DNA, 15 bp, Homo sapiens
attgttatgagaaag

SEQ ID NO: 1695592 - DNA, 15 bp, Homo sapiens
ttgttatgagaaagc

SEQ ID NO: 1695593 - DNA, 15 bp, Homo sapiens
tgttatgagaaagca

SEQ ID NO: 1695594 - DNA, 15 bp, Homo sapiens
gttatgagaaagcag

SEQ ID NO: 1695595 - DNA, 15 bp, Homo sapiens
ttatgagaaagcaga

SEQ ID NO: 1695596 - DNA, 15 bp, Homo sapiens
tatgagaaagcagaa

SEQ ID NO: 1695597 - DNA, 15 bp, Homo sapiens
atgagaaagcagaat

SEQ ID NO: 1695598 - DNA, 15 bp, Homo sapiens
tgagaaagcagaatg

SEQ ID NO: 1695599 - DNA, 15 bp, Homo sapiens
gagaaagcagaatga

SEQ ID NO: 1695600 - DNA, 15 bp, Homo sapiens
agaaagcagaatgac

SEQ ID NO: 1695601 - DNA, 15 bp, Homo sapiens
gaaagcagaatgaca

SEQ ID NO: 1695602 - DNA, 15 bp, Homo sapiens
aaagcagaatgacac

SEQ ID NO: 1695603 - DNA, 15 bp, Homo sapiens
aagcagaatgacaca

SEQ ID NO: 1695604 - DNA, 15 bp, Homo sapiens
agcagaatgacacag

SEQ ID NO: 1695605 - DNA, 15 bp, Homo sapiens
gcagaatgacacagc

SEQ ID NO: 1695606 - DNA, 15 bp, Homo sapiens
cagaatgacacagca

SEQ ID NO: 1695607 - DNA, 15 bp, Homo sapiens
agaatgacacagcag

SEQ ID NO: 1695608 - DNA, 15 bp, Homo sapiens
gaatgacacagcagt

SEQ ID NO: 1695609 - DNA, 15 bp, Homo sapiens
aatgacacagcagtt

SEQ ID NO: 1695610 - DNA, 15 bp, Homo sapiens
atgacacagcagtta

SEQ ID NO: 1695611 - DNA, 15 bp, Homo sapiens
tgacacagcagttat

SEQ ID NO: 1695612 - DNA, 15 bp, Homo sapiens
gacacagcagttatt

SEQ ID NO: 1695613 - DNA, 15 bp, Homo sapiens
acacagcagttattt

SEQ ID NO: 1695614 - DNA, 15 bp, Homo sapiens
cacagcagttatttt

SEQ ID NO: 1695615 - DNA, 15 bp, Homo sapiens
acagcagttattttg

SEQ ID NO: 1695616 - DNA, 15 bp, Homo sapiens
cagcagttattttgc

SEQ ID NO: 1695617 - DNA, 15 bp, Homo sapiens
agcagttattttgca

SEQ ID NO: 1695618 - DNA, 15 bp, Homo sapiens
gcagttattttgcat

SEQ ID NO: 1695619 - DNA, 15 bp, Homo sapiens
cagttattttgcatc

SEQ ID NO: 1695620 - DNA, 15 bp, Homo sapiens
agttattttgcatct

SEQ ID NO: 1695621 - DNA, 15 bp, Homo sapiens
gttattttgcatctc

SEQ ID NO: 1695622 - DNA, 15 bp, Homo sapiens
ttattttgcatctct

SEQ ID NO: 1695623 - DNA, 15 bp, Homo sapiens
tattttgcatctctt

SEQ ID NO: 1695624 - DNA, 15 bp, Homo sapiens
attttgcatctcttt

SEQ ID NO: 1695625 - DNA, 15 bp, Homo sapiens
ttttgcatctctttt

SEQ ID NO: 1695626 - DNA, 15 bp, Homo sapiens
tttgcatctcttttt

SEQ ID NO: 1695627 - DNA, 15 bp, Homo sapiens
ttgcatctctttttg

SEQ ID NO: 1695628 - DNA, 15 bp, Homo sapiens
tgcatctctttttgt

SEQ ID NO: 1695629 - DNA, 15 bp, Homo sapiens
gcatctctttttgtt

SEQ ID NO: 1695630 - DNA, 15 bp, Homo sapiens
catctctttttgttg

SEQ ID NO: 1695631 - DNA, 15 bp, Homo sapiens
atctctttttgttgt

SEQ ID NO: 1695632 - DNA, 15 bp, Homo sapiens
tctctttttgttgta

SEQ ID NO: 1695633 - DNA, 15 bp, Homo sapiens
ctctttttgttgtaa

SEQ ID NO: 1695634 - DNA, 15 bp, Homo sapiens
tctttttgttgtaaa

SEQ ID NO: 1695635 - DNA, 15 bp, Homo sapiens
ctttttgttgtaaag

SEQ ID NO: 1695636 - DNA, 15 bp, Homo sapiens
tttttgttgtaaaga

SEQ ID NO: 1695637 - DNA, 15 bp, Homo sapiens
ttttgttgtaaagag

SEQ ID NO: 1695638 - DNA, 15 bp, Homo sapiens
tttgttgtaaagaga

SEQ ID NO: 1695639 - DNA, 15 bp, Homo sapiens
ttgttgtaaagagaa

SEQ ID NO: 1695640 - DNA, 15 bp, Homo sapiens
tgttgtaaagagaac

SEQ ID NO: 1695641 - DNA, 15 bp, Homo sapiens
gttgtaaagagaacg

SEQ ID NO: 1695642 - DNA, 15 bp, Homo sapiens
ttgtaaagagaacga

SEQ ID NO: 1695643 - DNA, 15 bp, Homo sapiens
tgtaaagagaacgat

SEQ ID NO: 1695644 - DNA, 15 bp, Homo sapiens
gtaaagagaacgatc

SEQ ID NO: 1695645 - DNA, 15 bp, Homo sapiens
taaagagaacgatct

SEQ ID NO: 1695646 - DNA, 15 bp, Homo sapiens
aaagagaacgatctt

SEQ ID NO: 1695647 - DNA, 15 bp, Homo sapiens
aagagaacgatcttt

SEQ ID NO: 1695648 - DNA, 15 bp, Homo sapiens
agagaacgatcttta

SEQ ID NO: 1695649 - DNA, 15 bp, Homo sapiens
gagaacgatctttaa

SEQ ID NO: 1695650 - DNA, 15 bp, Homo sapiens
agaacgatctttaaa

SEQ ID NO: 1695651 - DNA, 15 bp, Homo sapiens
gaacgatctttaaac

SEQ ID NO: 1695652 - DNA, 15 bp, Homo sapiens
aacgatctttaaact

SEQ ID NO: 1695653 - DNA, 15 bp, Homo sapiens
acgatctttaaactg

SEQ ID NO: 1695654 - DNA, 15 bp, Homo sapiens
cgatctttaaactgg

SEQ ID NO: 1695655 - DNA, 15 bp, Homo sapiens
gatctttaaactggg

SEQ ID NO: 1695656 - DNA, 15 bp, Homo sapiens
atctttaaactggga

SEQ ID NO: 1695657 - DNA, 15 bp, Homo sapiens
tctttaaactgggaa

SEQ ID NO: 1695658 - DNA, 15 bp, Homo sapiens
ctttaaactgggaat

SEQ ID NO: 1695659 - DNA, 15 bp, Homo sapiens
tttaaactgggaatg

SEQ ID NO: 1695660 - DNA, 15 bp, Homo sapiens
ttaaactgggaatgt

SEQ ID NO: 1695661 - DNA, 15 bp, Homo sapiens
taaactgggaatgtt

SEQ ID NO: 1695662 - DNA, 15 bp, Homo sapiens
aaactgggaatgttg

SEQ ID NO: 1695663 - DNA, 15 bp, Homo sapiens
aactgggaatgttga

SEQ ID NO: 1695664 - DNA, 15 bp, Homo sapiens
actgggaatgttgaa

SEQ ID NO: 1695665 - DNA, 15 bp, Homo sapiens
ctgggaatgttgaaa

SEQ ID NO: 1695666 - DNA, 15 bp, Homo sapiens
tgggaatgttgaaac

SEQ ID NO: 1695667 - DNA, 15 bp, Homo sapiens
gggaatgttgaaaca

SEQ ID NO: 1695668 - DNA, 15 bp, Homo sapiens
ggaatgttgaaacaa

SEQ ID NO: 1695669 - DNA, 15 bp, Homo sapiens
gaatgttgaaacaaa

SEQ ID NO: 1695670 - DNA, 15 bp, Homo sapiens
aatgttgaaacaaaa

SEQ ID NO: 1695671 - DNA, 15 bp, Homo sapiens
atgttgaaacaaaat

SEQ ID NO: 1695672 - DNA, 15 bp, Homo sapiens
tgttgaaacaaaata

SEQ ID NO: 1695673 - DNA, 15 bp, Homo sapiens
gttgaaacaaaatat

SEQ ID NO: 1695674 - DNA, 15 bp, Homo sapiens
ttgaaacaaaatatt

SEQ ID NO: 1695675 - DNA, 15 bp, Homo sapiens
tgaaacaaaatattg

SEQ ID NO: 1695676 - DNA, 15 bp, Homo sapiens
gaaacaaaatattga

SEQ ID NO: 1695677 - DNA, 15 bp, Homo sapiens
aaacaaaatattgag

SEQ ID NO: 1695678 - DNA, 15 bp, Homo sapiens
aacaaaatattgaga

SEQ ID NO: 1695679 - DNA, 15 bp, Homo sapiens
acaaaatattgagag

SEQ ID NO: 1695680 - DNA, 15 bp, Homo sapiens
caaaatattgagagc

SEQ ID NO: 1695681 - DNA, 15 bp, Homo sapiens
aaaatattgagagcc

SEQ ID NO: 1695682 - DNA, 15 bp, Homo sapiens
aaatattgagagcca

SEQ ID NO: 1695683 - DNA, 15 bp, Homo sapiens
aatattgagagccaa

SEQ ID NO: 1695684 - DNA, 15 bp, Homo sapiens
atattgagagccaag

SEQ ID NO: 1695685 - DNA, 15 bp, Homo sapiens
tattgagagccaaga

SEQ ID NO: 1695686 - DNA, 15 bp, Homo sapiens
attgagagccaagag

SEQ ID NO: 1695687 - DNA, 15 bp, Homo sapiens
ttgagagccaagaga

SEQ ID NO: 1695688 - DNA, 15 bp, Homo sapiens
tgagagccaagagaa

SEQ ID NO: 1695689 - DNA, 15 bp, Homo sapiens
gagagccaagagaag

SEQ ID NO: 1695690 - DNA, 15 bp, Homo sapiens
agagccaagagaagc

SEQ ID NO: 1695691 - DNA, 15 bp, Homo sapiens
gagccaagagaagct

SEQ ID NO: 1695692 - DNA, 15 bp, Homo sapiens
agccaagagaagctt

SEQ ID NO: 1695693 - DNA, 15 bp, Homo sapiens
gccaagagaagcttg

SEQ ID NO: 1695694 - DNA, 15 bp, Homo sapiens
ccaagagaagcttgg

SEQ ID NO: 1695695 - DNA, 15 bp, Homo sapiens
caagagaagcttggc

SEQ ID NO: 1695696 - DNA, 15 bp, Homo sapiens
aagagaagcttggct

SEQ ID NO: 1695697 - DNA, 15 bp, Homo sapiens
agagaagcttggctg

SEQ ID NO: 1695698 - DNA, 15 bp, Homo sapiens
gagaagcttggctgg

SEQ ID NO: 1695699 - DNA, 15 bp, Homo sapiens
agaagcttggctggt

SEQ ID NO: 1695700 - DNA, 15 bp, Homo sapiens
gaagcttggctggta

SEQ ID NO: 1695701 - DNA, 15 bp, Homo sapiens
aagcttggctggtag

SEQ ID NO: 1695702 - DNA, 15 bp, Homo sapiens
agcttggctggtaga

SEQ ID NO: 1695703 - DNA, 15 bp, Homo sapiens
gcttggctggtagat

SEQ ID NO: 1695704 - DNA, 15 bp, Homo sapiens
cttggctggtagatc

SEQ ID NO: 1695705 - DNA, 15 bp, Homo sapiens
ttggctggtagatct

SEQ ID NO: 1695706 - DNA, 15 bp, Homo sapiens
tggctggtagatctt

SEQ ID NO: 1695707 - DNA, 15 bp, Homo sapiens
ggctggtagatcttg

SEQ ID NO: 1695708 - DNA, 15 bp, Homo sapiens
gctggtagatcttgg

SEQ ID NO: 1695709 - DNA, 15 bp, Homo sapiens
ctggtagatcttggt

SEQ ID NO: 1695710 - DNA, 15 bp, Homo sapiens
tggtagatcttggta

SEQ ID NO: 1695711 - DNA, 15 bp, Homo sapiens
ggtagatcttggtac

SEQ ID NO: 1695712 - DNA, 15 bp, Homo sapiens
gtagatcttggtacc

SEQ ID NO: 1695713 - DNA, 15 bp, Homo sapiens
tagatcttggtaccc

SEQ ID NO: 1695714 - DNA, 15 bp, Homo sapiens
agatcttggtaccct

SEQ ID NO: 1695715 - DNA, 15 bp, Homo sapiens
gatcttggtaccctg

SEQ ID NO: 1695716 - DNA, 15 bp, Homo sapiens
atcttggtaccctgt

SEQ ID NO: 1695717 - DNA, 15 bp, Homo sapiens
tcttggtaccctgtc

SEQ ID NO: 1695718 - DNA, 15 bp, Homo sapiens
cttggtaccctgtcc

SEQ ID NO: 1695719 - DNA, 15 bp, Homo sapiens
ttggtaccctgtcct

SEQ ID NO: 1695720 - DNA, 15 bp, Homo sapiens
tggtaccctgtcctt

SEQ ID NO: 1695721 - DNA, 15 bp, Homo sapiens
ggtaccctgtccttg

SEQ ID NO: 1695722 - DNA, 15 bp, Homo sapiens
gtaccctgtccttgg

SEQ ID NO: 1695723 - DNA, 15 bp, Homo sapiens
taccctgtccttgga

SEQ ID NO: 1695724 - DNA, 15 bp, Homo sapiens
accctgtccttggac

SEQ ID NO: 1695725 - DNA, 15 bp, Homo sapiens
ccctgtccttggact

SEQ ID NO: 1695726 - DNA, 15 bp, Homo sapiens
cctgtccttggacta

SEQ ID NO: 1695727 - DNA, 15 bp, Homo sapiens
ctgtccttggactag

SEQ ID NO: 1695728 - DNA, 15 bp, Homo sapiens
tgtccttggactagt

SEQ ID NO: 1695729 - DNA, 15 bp, Homo sapiens
gtccttggactagtg

SEQ ID NO: 1695730 - DNA, 15 bp, Homo sapiens
tccttggactagtga

SEQ ID NO: 1695731 - DNA, 15 bp, Homo sapiens
ccttggactagtgac

SEQ ID NO: 1695732 - DNA, 15 bp, Homo sapiens
cttggactagtgact

SEQ ID NO: 1695733 - DNA, 15 bp, Homo sapiens
ttggactagtgactt

SEQ ID NO: 1695734 - DNA, 15 bp, Homo sapiens
tggactagtgacttc

SEQ ID NO: 1695735 - DNA, 15 bp, Homo sapiens
ggactagtgacttca

SEQ ID NO: 1695736 - DNA, 15 bp, Homo sapiens
gactagtgacttcac

SEQ ID NO: 1695737 - DNA, 15 bp, Homo sapiens
actagtgacttcacc

SEQ ID NO: 1695738 - DNA, 15 bp, Homo sapiens
ctagtgacttcaccc

SEQ ID NO: 1695739 - DNA, 15 bp, Homo sapiens
tagtgacttcacccc

SEQ ID NO: 1695740 - DNA, 15 bp, Homo sapiens
agtgacttcacccca

SEQ ID NO: 1695741 - DNA, 15 bp, Homo sapiens
gtgacttcaccccat

SEQ ID NO: 1695742 - DNA, 15 bp, Homo sapiens
tgacttcaccccatc

SEQ ID NO: 1695743 - DNA, 15 bp, Homo sapiens
gacttcaccccatca

SEQ ID NO: 1695744 - DNA, 15 bp, Homo sapiens
acttcaccccatcac

SEQ ID NO: 1695745 - DNA, 15 bp, Homo sapiens
cttcaccccatcacc

SEQ ID NO: 1695746 - DNA, 15 bp, Homo sapiens
ttcaccccatcacct

SEQ ID NO: 1695747 - DNA, 15 bp, Homo sapiens
tcaccccatcaccta

SEQ ID NO: 1695748 - DNA, 15 bp, Homo sapiens
caccccatcacctat

SEQ ID NO: 1695749 - DNA, 15 bp, Homo sapiens
accccatcacctatc

SEQ ID NO: 1695750 - DNA, 15 bp, Homo sapiens
ccccatcacctatct

SEQ ID NO: 1695751 - DNA, 15 bp, Homo sapiens
cccatcacctatctg

SEQ ID NO: 1695752 - DNA, 15 bp, Homo sapiens
ccatcacctatctgt

SEQ ID NO: 1695753 - DNA, 15 bp, Homo sapiens
catcacctatctgtt

SEQ ID NO: 1695754 - DNA, 15 bp, Homo sapiens
atcacctatctgtta

SEQ ID NO: 1695755 - DNA, 15 bp, Homo sapiens
tcacctatctgttac

SEQ ID NO: 1695756 - DNA, 15 bp, Homo sapiens
cacctatctgttact

SEQ ID NO: 1695757 - DNA, 15 bp, Homo sapiens
acctatctgttactt

SEQ ID NO: 1695758 - DNA, 15 bp, Homo sapiens
cctatctgttactta

SEQ ID NO: 1695759 - DNA, 15 bp, Homo sapiens
ctatctgttacttac

SEQ ID NO: 1695760 - DNA, 15 bp, Homo sapiens
tatctgttacttaca

SEQ ID NO: 1695761 - DNA, 15 bp, Homo sapiens
atctgttacttacaa

SEQ ID NO: 1695762 - DNA, 15 bp, Homo sapiens
tctgttacttacaag

SEQ ID NO: 1695763 - DNA, 15 bp, Homo sapiens
ctgttacttacaagg

SEQ ID NO: 1695764 - DNA, 15 bp, Homo sapiens
tgttacttacaaggg

SEQ ID NO: 1695765 - DNA, 15 bp, Homo sapiens
gttacttacaagggg

SEQ ID NO: 1695766 - DNA, 15 bp, Homo sapiens
ttacttacaaggggg

SEQ ID NO: 1695767 - DNA, 15 bp, Homo sapiens
tacttacaagggggt

SEQ ID NO: 1695768 - DNA, 15 bp, Homo sapiens
acttacaagggggtg

SEQ ID NO: 1695769 - DNA, 15 bp, Homo sapiens
cttacaagggggtga

SEQ ID NO: 1695770 - DNA, 15 bp, Homo sapiens
ttacaagggggtgaa

SEQ ID NO: 1695771 - DNA, 15 bp, Homo sapiens
tacaagggggtgaat

SEQ ID NO: 1695772 - DNA, 15 bp, Homo sapiens
acaagggggtgaatc

SEQ ID NO: 1695773 - DNA, 15 bp, Homo sapiens
caagggggtgaatca

SEQ ID NO: 1695774 - DNA, 15 bp, Homo sapiens
aagggggtgaatcag

SEQ ID NO: 1695775 - DNA, 15 bp, Homo sapiens
agggggtgaatcagg

SEQ ID NO: 1695776 - DNA, 15 bp, Homo sapiens
gggggtgaatcaggg

SEQ ID NO: 1695777 - DNA, 15 bp, Homo sapiens
ggggtgaatcaggga

SEQ ID NO: 1695778 - DNA, 15 bp, Homo sapiens
gggtgaatcagggag

SEQ ID NO: 1695779 - DNA, 15 bp, Homo sapiens
ggtgaatcagggagc

SEQ ID NO: 1695780 - DNA, 15 bp, Homo sapiens
gtgaatcagggagct

SEQ ID NO: 1695781 - DNA, 15 bp, Homo sapiens
tgaatcagggagcta

SEQ ID NO: 1695782 - DNA, 15 bp, Homo sapiens
gaatcagggagctat

SEQ ID NO: 1695783 - DNA, 15 bp, Homo sapiens
aatcagggagctatt

SEQ ID NO: 1695784 - DNA, 15 bp, Homo sapiens
atcagggagctattt

SEQ ID NO: 1695785 - DNA, 15 bp, Homo sapiens
tcagggagctatttg

SEQ ID NO: 1695786 - DNA, 15 bp, Homo sapiens
cagggagctatttgg

SEQ ID NO: 1695787 - DNA, 15 bp, Homo sapiens
agggagctatttggg

SEQ ID NO: 1695788 - DNA, 15 bp, Homo sapiens
gggagctatttgggg

SEQ ID NO: 1695789 - DNA, 15 bp, Homo sapiens
ggagctatttggggc

SEQ ID NO: 1695790 - DNA, 15 bp, Homo sapiens
gagctatttggggcc

SEQ ID NO: 1695791 - DNA, 15 bp, Homo sapiens
agctatttggggcca

SEQ ID NO: 1695792 - DNA, 15 bp, Homo sapiens
gctatttggggccaa

SEQ ID NO: 1695793 - DNA, 15 bp, Homo sapiens
ctatttggggccaag

SEQ ID NO: 1695794 - DNA, 15 bp, Homo sapiens
tatttggggccaagg

SEQ ID NO: 1695795 - DNA, 15 bp, Homo sapiens
atttggggccaaggt

SEQ ID NO: 1695796 - DNA, 15 bp, Homo sapiens
tttggggccaaggtt

SEQ ID NO: 1695797 - DNA, 15 bp, Homo sapiens
ttggggccaaggttt

SEQ ID NO: 1695798 - DNA, 15 bp, Homo sapiens
tggggccaaggtttt

SEQ ID NO: 1695799 - DNA, 15 bp, Homo sapiens
ggggccaaggtttta

SEQ ID NO: 1695800 - DNA, 15 bp, Homo sapiens
gggccaaggttttat

SEQ ID NO: 1695801 - DNA, 15 bp, Homo sapiens
ggccaaggttttatg

SEQ ID NO: 1695802 - DNA, 15 bp, Homo sapiens
gccaaggttttatga

SEQ ID NO: 1695803 - DNA, 15 bp, Homo sapiens
ccaaggttttatgag

SEQ ID NO: 1695804 - DNA, 15 bp, Homo sapiens
caaggttttatgaga

SEQ ID NO: 1695805 - DNA, 15 bp, Homo sapiens
aaggttttatgagaa

SEQ ID NO: 1695806 - DNA, 15 bp, Homo sapiens
aggttttatgagaaa

SEQ ID NO: 1695807 - DNA, 15 bp, Homo sapiens
ggttttatgagaaat

SEQ ID NO: 1695808 - DNA, 15 bp, Homo sapiens
gttttatgagaaatc

SEQ ID NO: 1695809 - DNA, 15 bp, Homo sapiens
ttttatgagaaatca

SEQ ID NO: 1695810 - DNA, 15 bp, Homo sapiens
tttatgagaaatcaa

SEQ ID NO: 1695811 - DNA, 15 bp, Homo sapiens
ttatgagaaatcaag

SEQ ID NO: 1695812 - DNA, 15 bp, Homo sapiens
tatgagaaatcaaga

SEQ ID NO: 1695813 - DNA, 15 bp, Homo sapiens
atgagaaatcaagag

SEQ ID NO: 1695814 - DNA, 15 bp, Homo sapiens
tgagaaatcaagaga

SEQ ID NO: 1695815 - DNA, 15 bp, Homo sapiens
gagaaatcaagagat

SEQ ID NO: 1695816 - DNA, 15 bp, Homo sapiens
agaaatcaagagatc

SEQ ID NO: 1695817 - DNA, 15 bp, Homo sapiens
gaaatcaagagatca

SEQ ID NO: 1695818 - DNA, 15 bp, Homo sapiens
aaatcaagagatcac

SEQ ID NO: 1695819 - DNA, 15 bp, Homo sapiens
aatcaagagatcact

SEQ ID NO: 1695820 - DNA, 15 bp, Homo sapiens
atcaagagatcacta

SEQ ID NO: 1695821 - DNA, 15 bp, Homo sapiens
tcaagagatcactat

SEQ ID NO: 1695822 - DNA, 15 bp, Homo sapiens
caagagatcactatt

SEQ ID NO: 1695823 - DNA, 15 bp, Homo sapiens
aagagatcactattt

SEQ ID NO: 1695824 - DNA, 15 bp, Homo sapiens
agagatcactatttg

SEQ ID NO: 1695825 - DNA, 15 bp, Homo sapiens
gagatcactatttgc

SEQ ID NO: 1695826 - DNA, 15 bp, Homo sapiens
agatcactatttgcc

SEQ ID NO: 1695827 - DNA, 15 bp, Homo sapiens
gatcactatttgccc

SEQ ID NO: 1695828 - DNA, 15 bp, Homo sapiens
atcactatttgcccg

SEQ ID NO: 1695829 - DNA, 15 bp, Homo sapiens
tcactatttgcccgt

SEQ ID NO: 1695830 - DNA, 15 bp, Homo sapiens
cactatttgcccgta

SEQ ID NO: 1695831 - DNA, 15 bp, Homo sapiens
actatttgcccgtag

SEQ ID NO: 1695832 - DNA, 15 bp, Homo sapiens
ctatttgcccgtaga

SEQ ID NO: 1695833 - DNA, 15 bp, Homo sapiens
tatttgcccgtagaa

SEQ ID NO: 1695834 - DNA, 15 bp, Homo sapiens
atttgcccgtagaag

SEQ ID NO: 1695835 - DNA, 15 bp, Homo sapiens
tttgcccgtagaaga

SEQ ID NO: 1695836 - DNA, 15 bp, Homo sapiens
ttgcccgtagaagaa

SEQ ID NO: 1695837 - DNA, 15 bp, Homo sapiens
tgcccgtagaagaat

SEQ ID NO: 1695838 - DNA, 15 bp, Homo sapiens
gcccgtagaagaatt

SEQ ID NO: 1695839 - DNA, 15 bp, Homo sapiens
cccgtagaagaattc

SEQ ID NO: 1695840 - DNA, 15 bp, Homo sapiens
ccgtagaagaattca

SEQ ID NO: 1695841 - DNA, 15 bp, Homo sapiens
cgtagaagaattcat

SEQ ID NO: 1695842 - DNA, 15 bp, Homo sapiens
gtagaagaattcata

SEQ ID NO: 1695843 - DNA, 15 bp, Homo sapiens
tagaagaattcatat

SEQ ID NO: 1695844 - DNA, 15 bp, Homo sapiens
agaagaattcatatc

SEQ ID NO: 1695845 - DNA, 15 bp, Homo sapiens
gaagaattcatatct

SEQ ID NO: 1695846 - DNA, 15 bp, Homo sapiens
aagaattcatatctt

SEQ ID NO: 1695847 - DNA, 15 bp, Homo sapiens
agaattcatatcttt

SEQ ID NO: 1695848 - DNA, 15 bp, Homo sapiens
gaattcatatctttg

SEQ ID NO: 1695849 - DNA, 15 bp, Homo sapiens
aattcatatctttgg

SEQ ID NO: 1695850 - DNA, 15 bp, Homo sapiens
attcatatctttggt

SEQ ID NO: 1695851 - DNA, 15 bp, Homo sapiens
ttcatatctttggtt

SEQ ID NO: 1695852 - DNA, 15 bp, Homo sapiens
tcatatctttggttc

SEQ ID NO: 1695853 - DNA, 15 bp, Homo sapiens
catatctttggttcc

SEQ ID NO: 1695854 - DNA, 15 bp, Homo sapiens
atatctttggttcca

SEQ ID NO: 1695855 - DNA, 15 bp, Homo sapiens
tatctttggttccaa

SEQ ID NO: 1695856 - DNA, 15 bp, Homo sapiens
atctttggttccaaa

SEQ ID NO: 1695857 - DNA, 15 bp, Homo sapiens
tctttggttccaaac

SEQ ID NO: 1695858 - DNA, 15 bp, Homo sapiens
ctttggttccaaaca

SEQ ID NO: 1695859 - DNA, 15 bp, Homo sapiens
tttggttccaaacat

SEQ ID NO: 1695860 - DNA, 15 bp, Homo sapiens
ttggttccaaacatt

SEQ ID NO: 1695861 - DNA, 15 bp, Homo sapiens
tggttccaaacatta

SEQ ID NO: 1695862 - DNA, 15 bp, Homo sapiens
ggttccaaacattat

SEQ ID NO: 1695863 - DNA, 15 bp, Homo sapiens
gttccaaacattata

SEQ ID NO: 1695864 - DNA, 15 bp, Homo sapiens
ttccaaacattatag

SEQ ID NO: 1695865 - DNA, 15 bp, Homo sapiens
tccaaacattatagt

SEQ ID NO: 1695866 - DNA, 15 bp, Homo sapiens
ccaaacattatagta

SEQ ID NO: 1695867 - DNA, 15 bp, Homo sapiens
caaacattatagtag

SEQ ID NO: 1695868 - DNA, 15 bp, Homo sapiens
aaacattatagtagc

SEQ ID NO: 1695869 - DNA, 15 bp, Homo sapiens
aacattatagtagcc

SEQ ID NO: 1695870 - DNA, 15 bp, Homo sapiens
acattatagtagccc

SEQ ID NO: 1695871 - DNA, 15 bp, Homo sapiens
cattatagtagcccc

SEQ ID NO: 1695872 - DNA, 15 bp, Homo sapiens
attatagtagcccca

SEQ ID NO: 1695873 - DNA, 15 bp, Homo sapiens
ttatagtagccccat

SEQ ID NO: 1695874 - DNA, 15 bp, Homo sapiens
tatagtagccccatg

SEQ ID NO: 1695875 - DNA, 15 bp, Homo sapiens
atagtagccccatgt

SEQ ID NO: 1695876 - DNA, 15 bp, Homo sapiens
tagtagccccatgtt

SEQ ID NO: 1695877 - DNA, 15 bp, Homo sapiens
agtagccccatgtta

SEQ ID NO: 1695878 - DNA, 15 bp, Homo sapiens
gtagccccatgttat

SEQ ID NO: 1695879 - DNA, 15 bp, Homo sapiens
tagccccatgttatg

SEQ ID NO: 1695880 - DNA, 15 bp, Homo sapiens
agccccatgttatga

SEQ ID NO: 1695881 - DNA, 15 bp, Homo sapiens
gccccatgttatgac

SEQ ID NO: 1695882 - DNA, 15 bp, Homo sapiens
ccccatgttatgaca

SEQ ID NO: 1695883 - DNA, 15 bp, Homo sapiens
cccatgttatgacat

SEQ ID NO: 1695884 - DNA, 15 bp, Homo sapiens
ccatgttatgacata

SEQ ID NO: 1695885 - DNA, 15 bp, Homo sapiens
catgttatgacataa

SEQ ID NO: 1695886 - DNA, 15 bp, Homo sapiens
atgttatgacataaa

SEQ ID NO: 1695887 - DNA, 15 bp, Homo sapiens
tgttatgacataaag

SEQ ID NO: 1695888 - DNA, 15 bp, Homo sapiens
gttatgacataaaga

SEQ ID NO: 1695889 - DNA, 15 bp, Homo sapiens
ttatgacataaagag

SEQ ID NO: 1695890 - DNA, 15 bp, Homo sapiens
tatgacataaagagt

SEQ ID NO: 1695891 - DNA, 15 bp, Homo sapiens
atgacataaagagta

SEQ ID NO: 1695892 - DNA, 15 bp, Homo sapiens
tgacataaagagtag

SEQ ID NO: 1695893 - DNA, 15 bp, Homo sapiens
gacataaagagtagg

SEQ ID NO: 1695894 - DNA, 15 bp, Homo sapiens
acataaagagtagga

SEQ ID NO: 1695895 - DNA, 15 bp, Homo sapiens
cataaagagtaggag

SEQ ID NO: 1695896 - DNA, 15 bp, Homo sapiens
ataaagagtaggagg

SEQ ID NO: 1695897 - DNA, 15 bp, Homo sapiens
taaagagtaggagga

SEQ ID NO: 1695898 - DNA, 15 bp, Homo sapiens
aaagagtaggaggaa

SEQ ID NO: 1695899 - DNA, 15 bp, Homo sapiens
aagagtaggaggaat

SEQ ID NO: 1695900 - DNA, 15 bp, Homo sapiens
agagtaggaggaata

SEQ ID NO: 1695901 - DNA, 15 bp, Homo sapiens
gagtaggaggaatat

SEQ ID NO: 1695902 - DNA, 15 bp, Homo sapiens
agtaggaggaatata

SEQ ID NO: 1695903 - DNA, 15 bp, Homo sapiens
gtaggaggaatatag

SEQ ID NO: 1695904 - DNA, 15 bp, Homo sapiens
taggaggaatatagg

SEQ ID NO: 1695905 - DNA, 15 bp, Homo sapiens
aggaggaatataggc

SEQ ID NO: 1695906 - DNA, 15 bp, Homo sapiens
ggaggaatataggct

SEQ ID NO: 1695907 - DNA, 15 bp, Homo sapiens
gaggaatataggctt

SEQ ID NO: 1695908 - DNA, 15 bp, Homo sapiens
aggaatataggcttg

SEQ ID NO: 1695909 - DNA, 15 bp, Homo sapiens
ggaatataggcttga

SEQ ID NO: 1695910 - DNA, 15 bp, Homo sapiens
gaatataggcttgat

SEQ ID NO: 1695911 - DNA, 15 bp, Homo sapiens
aatataggcttgata

SEQ ID NO: 1695912 - DNA, 15 bp, Homo sapiens
atataggcttgatat

SEQ ID NO: 1695913 - DNA, 15 bp, Homo sapiens
tataggcttgatatt

SEQ ID NO: 1695914 - DNA, 15 bp, Homo sapiens
ataggcttgatattg

SEQ ID NO: 1695915 - DNA, 15 bp, Homo sapiens
taggcttgatattgg

SEQ ID NO: 1695916 - DNA, 15 bp, Homo sapiens
aggcttgatattggg

SEQ ID NO: 1695917 - DNA, 15 bp, Homo sapiens
ggcttgatattgggc

SEQ ID NO: 1695918 - DNA, 15 bp, Homo sapiens
gcttgatattgggca

SEQ ID NO: 1695919 - DNA, 15 bp, Homo sapiens
cttgatattgggcat

SEQ ID NO: 1695920 - DNA, 15 bp, Homo sapiens
ttgatattgggcatc

SEQ ID NO: 1695921 - DNA, 15 bp, Homo sapiens
tgatattgggcatct

SEQ ID NO: 1695922 - DNA, 15 bp, Homo sapiens
gatattgggcatcta

SEQ ID NO: 1695923 - DNA, 15 bp, Homo sapiens
atattgggcatctaa

SEQ ID NO: 1695924 - DNA, 15 bp, Homo sapiens
tattgggcatctaaa

SEQ ID NO: 1695925 - DNA, 15 bp, Homo sapiens
attgggcatctaaat

SEQ ID NO: 1695926 - DNA, 15 bp, Homo sapiens
ttgggcatctaaatc

SEQ ID NO: 1695927 - DNA, 15 bp, Homo sapiens
tgggcatctaaatcc

SEQ ID NO: 1695928 - DNA, 15 bp, Homo sapiens
gggcatctaaatccc

SEQ ID NO: 1695929 - DNA, 15 bp, Homo sapiens
ggcatctaaatccca

SEQ ID NO: 1695930 - DNA, 15 bp, Homo sapiens
gcatctaaatcccag

SEQ ID NO: 1695931 - DNA, 15 bp, Homo sapiens
catctaaatcccaga

SEQ ID NO: 1695932 - DNA, 15 bp, Homo sapiens
atctaaatcccagat

SEQ ID NO: 1695933 - DNA, 15 bp, Homo sapiens
tctaaatcccagatc

SEQ ID NO: 1695934 - DNA, 15 bp, Homo sapiens
ctaaatcccagatct

SEQ ID NO: 1695935 - DNA, 15 bp, Homo sapiens
taaatcccagatcta

SEQ ID NO: 1695936 - DNA, 15 bp, Homo sapiens
aaatcccagatctac

SEQ ID NO: 1695937 - DNA, 15 bp, Homo sapiens
aatcccagatctacc

SEQ ID NO: 1695938 - DNA, 15 bp, Homo sapiens
atcccagatctacca

SEQ ID NO: 1695939 - DNA, 15 bp, Homo sapiens
tcccagatctaccag

SEQ ID NO: 1695940 - DNA, 15 bp, Homo sapiens
cccagatctaccagt

SEQ ID NO: 1695941 - DNA, 15 bp, Homo sapiens
ccagatctaccagtg

SEQ ID NO: 1695942 - DNA, 15 bp, Homo sapiens
cagatctaccagtga

SEQ ID NO: 1695943 - DNA, 15 bp, Homo sapiens
agatctaccagtgat

SEQ ID NO: 1695944 - DNA, 15 bp, Homo sapiens
gatctaccagtgatt

SEQ ID NO: 1695945 - DNA, 15 bp, Homo sapiens
atctaccagtgattg

SEQ ID NO: 1695946 - DNA, 15 bp, Homo sapiens
tctaccagtgattga

SEQ ID NO: 1695947 - DNA, 15 bp, Homo sapiens
ctaccagtgattgac

SEQ ID NO: 1695948 - DNA, 15 bp, Homo sapiens
taccagtgattgact

SEQ ID NO: 1695949 - DNA, 15 bp, Homo sapiens
accagtgattgactt

SEQ ID NO: 1695950 - DNA, 15 bp, Homo sapiens
ccagtgattgactta

SEQ ID NO: 1695951 - DNA, 15 bp, Homo sapiens
cagtgattgacttac

SEQ ID NO: 1695952 - DNA, 15 bp, Homo sapiens
agtgattgacttact

SEQ ID NO: 1695953 - DNA, 15 bp, Homo sapiens
gtgattgacttactg

SEQ ID NO: 1695954 - DNA, 15 bp, Homo sapiens
tgattgacttactgg

SEQ ID NO: 1695955 - DNA, 15 bp, Homo sapiens
gattgacttactggt

SEQ ID NO: 1695956 - DNA, 15 bp, Homo sapiens
attgacttactggtc

SEQ ID NO: 1695957 - DNA, 15 bp, Homo sapiens
ttgacttactggtct

SEQ ID NO: 1695958 - DNA, 15 bp, Homo sapiens
tgacttactggtctt

SEQ ID NO: 1695959 - DNA, 15 bp, Homo sapiens
gacttactggtcttg

SEQ ID NO: 1695960 - DNA, 15 bp, Homo sapiens
acttactggtcttgc

SEQ ID NO: 1695961 - DNA, 15 bp, Homo sapiens
cttactggtcttgct

SEQ ID NO: 1695962 - DNA, 15 bp, Homo sapiens
ttactggtcttgcta

SEQ ID NO: 1695963 - DNA, 15 bp, Homo sapiens
tactggtcttgctat

SEQ ID NO: 1695964 - DNA, 15 bp, Homo sapiens
actggtcttgctatg

SEQ ID NO: 1695965 - DNA, 15 bp, Homo sapiens
ctggtcttgctatgc

SEQ ID NO: 1695966 - DNA, 15 bp, Homo sapiens
tggtcttgctatgcc

SEQ ID NO: 1695967 - DNA, 15 bp, Homo sapiens
ggtcttgctatgcct

SEQ ID NO: 1695968 - DNA, 15 bp, Homo sapiens
gtcttgctatgcctg

SEQ ID NO: 1695969 - DNA, 15 bp, Homo sapiens
tcttgctatgcctgg

SEQ ID NO: 1695970 - DNA, 15 bp, Homo sapiens
cttgctatgcctggt

SEQ ID NO: 1695971 - DNA, 15 bp, Homo sapiens
ttgctatgcctggtg

SEQ ID NO: 1695972 - DNA, 15 bp, Homo sapiens
tgctatgcctggtgt

SEQ ID NO: 1695973 - DNA, 15 bp, Homo sapiens
gctatgcctggtgtg

SEQ ID NO: 1695974 - DNA, 15 bp, Homo sapiens
ctatgcctggtgtga

SEQ ID NO: 1695975 - DNA, 15 bp, Homo sapiens
tatgcctggtgtgac

SEQ ID NO: 1695976 - DNA, 15 bp, Homo sapiens
atgcctggtgtgact

SEQ ID NO: 1695977 - DNA, 15 bp, Homo sapiens
tgcctggtgtgactc

SEQ ID NO: 1695978 - DNA, 15 bp, Homo sapiens
gcctggtgtgactct

SEQ ID NO: 1695979 - DNA, 15 bp, Homo sapiens
cctggtgtgactctg

SEQ ID NO: 1695980 - DNA, 15 bp, Homo sapiens
ctggtgtgactctga

SEQ ID NO: 1695981 - DNA, 15 bp, Homo sapiens
tggtgtgactctgag

SEQ ID NO: 1695982 - DNA, 15 bp, Homo sapiens
ggtgtgactctgagg

SEQ ID NO: 1695983 - DNA, 15 bp, Homo sapiens
gtgtgactctgaggc

SEQ ID NO: 1695984 - DNA, 15 bp, Homo sapiens
tgtgactctgaggcc

SEQ ID NO: 1695985 - DNA, 15 bp, Homo sapiens
gtgactctgaggcca

SEQ ID NO: 1695986 - DNA, 15 bp, Homo sapiens
tgactctgaggccac

SEQ ID NO: 1695987 - DNA, 15 bp, Homo sapiens
gactctgaggccaca

SEQ ID NO: 1695988 - DNA, 15 bp, Homo sapiens
actctgaggccacag

SEQ ID NO: 1695989 - DNA, 15 bp, Homo sapiens
ctctgaggccacaga

SEQ ID NO: 1695990 - DNA, 15 bp, Homo sapiens
tctgaggccacagaa

SEQ ID NO: 1695991 - DNA, 15 bp, Homo sapiens
ctgaggccacagaag

SEQ ID NO: 1695992 - DNA, 15 bp, Homo sapiens
tgaggccacagaaga

SEQ ID NO: 1695993 - DNA, 15 bp, Homo sapiens
gaggccacagaagat

SEQ ID NO: 1695994 - DNA, 15 bp, Homo sapiens
aggccacagaagatg

SEQ ID NO: 1695995 - DNA, 15 bp, Homo sapiens
ggccacagaagatgc

SEQ ID NO: 1695996 - DNA, 15 bp, Homo sapiens
gccacagaagatgct

SEQ ID NO: 1695997 - DNA, 15 bp, Homo sapiens
ccacagaagatgctc

SEQ ID NO: 1695998 - DNA, 15 bp, Homo sapiens
cacagaagatgctca

SEQ ID NO: 1695999 - DNA, 15 bp, Homo sapiens
acagaagatgctcac

SEQ ID NO: 1696000 - DNA, 15 bp, Homo sapiens
cagaagatgctcaca

SEQ ID NO: 1696001 - DNA, 15 bp, Homo sapiens
agaagatgctcacac

SEQ ID NO: 1696002 - DNA, 15 bp, Homo sapiens
gaagatgctcacaca

SEQ ID NO: 1696003 - DNA, 15 bp, Homo sapiens
aagatgctcacacaa

SEQ ID NO: 1696004 - DNA, 15 bp, Homo sapiens
agatgctcacacaat

SEQ ID NO: 1696005 - DNA, 15 bp, Homo sapiens
gatgctcacacaatt

SEQ ID NO: 1696006 - DNA, 15 bp, Homo sapiens
atgctcacacaattt

SEQ ID NO: 1696007 - DNA, 15 bp, Homo sapiens
tgctcacacaatttt

SEQ ID NO: 1696008 - DNA, 15 bp, Homo sapiens
gctcacacaattttt

SEQ ID NO: 1696009 - DNA, 15 bp, Homo sapiens
ctcacacaattttta

SEQ ID NO: 1696010 - DNA, 15 bp, Homo sapiens
tcacacaatttttat

SEQ ID NO: 1696011 - DNA, 15 bp, Homo sapiens
cacacaatttttatt

SEQ ID NO: 1696012 - DNA, 15 bp, Homo sapiens
acacaatttttattc

SEQ ID NO: 1696013 - DNA, 15 bp, Homo sapiens
cacaatttttattcc

SEQ ID NO: 1696014 - DNA, 15 bp, Homo sapiens
acaatttttattcct

SEQ ID NO: 1696015 - DNA, 15 bp, Homo sapiens
caatttttattcctt

SEQ ID NO: 1696016 - DNA, 15 bp, Homo sapiens
aatttttattccttt

SEQ ID NO: 1696017 - DNA, 15 bp, Homo sapiens
atttttattccttta

SEQ ID NO: 1696018 - DNA, 15 bp, Homo sapiens
tttttattcctttac

SEQ ID NO: 1696019 - DNA, 15 bp, Homo sapiens
ttttattcctttacc

SEQ ID NO: 1696020 - DNA, 15 bp, Homo sapiens
tttattcctttaccc

SEQ ID NO: 1696021 - DNA, 15 bp, Homo sapiens
ttattcctttacccc

SEQ ID NO: 1696022 - DNA, 15 bp, Homo sapiens
tattcctttacccct

SEQ ID NO: 1696023 - DNA, 15 bp, Homo sapiens
attcctttacccctt

SEQ ID NO: 1696024 - DNA, 15 bp, Homo sapiens
ttcctttaccccttt

SEQ ID NO: 1696025 - DNA, 15 bp, Homo sapiens
tcctttacccctttc

SEQ ID NO: 1696026 - DNA, 15 bp, Homo sapiens
cctttacccctttca

SEQ ID NO: 1696027 - DNA, 15 bp, Homo sapiens
ctttacccctttcac

SEQ ID NO: 1696028 - DNA, 15 bp, Homo sapiens
tttacccctttcacg

SEQ ID NO: 1696029 - DNA, 15 bp, Homo sapiens
ttacccctttcacgt

SEQ ID NO: 1696030 - DNA, 15 bp, Homo sapiens
tacccctttcacgtg

SEQ ID NO: 1696031 - DNA, 15 bp, Homo sapiens
acccctttcacgtgt

SEQ ID NO: 1696032 - DNA, 15 bp, Homo sapiens
cccctttcacgtgtt

SEQ ID NO: 1696033 - DNA, 15 bp, Homo sapiens
ccctttcacgtgttt

SEQ ID NO: 1696034 - DNA, 15 bp, Homo sapiens
cctttcacgtgtttt

SEQ ID NO: 1696035 - DNA, 15 bp, Homo sapiens
ctttcacgtgtttta

SEQ ID NO: 1696036 - DNA, 15 bp, Homo sapiens
tttcacgtgttttat

SEQ ID NO: 1696037 - DNA, 15 bp, Homo sapiens
ttcacgtgttttatt

SEQ ID NO: 1696038 - DNA, 15 bp, Homo sapiens
tcacgtgttttattt

SEQ ID NO: 1696039 - DNA, 15 bp, Homo sapiens
cacgtgttttatttt

SEQ ID NO: 1696040 - DNA, 15 bp, Homo sapiens
acgtgttttatttta

SEQ ID NO: 1696041 - DNA, 15 bp, Homo sapiens
cgtgttttattttac

SEQ ID NO: 1696042 - DNA, 15 bp, Homo sapiens
gtgttttattttacc

SEQ ID NO: 1696043 - DNA, 15 bp, Homo sapiens
tgttttattttaccc

SEQ ID NO: 1696044 - DNA, 15 bp, Homo sapiens
gttttattttacccc

SEQ ID NO: 1696045 - DNA, 15 bp, Homo sapiens
ttttattttacccca

SEQ ID NO: 1696046 - DNA, 15 bp, Homo sapiens
tttattttaccccat

SEQ ID NO: 1696047 - DNA, 15 bp, Homo sapiens
ttattttaccccatc

SEQ ID NO: 1696048 - DNA, 15 bp, Homo sapiens
tattttaccccatca

SEQ ID NO: 1696049 - DNA, 15 bp, Homo sapiens
attttaccccatcag

SEQ ID NO: 1696050 - DNA, 15 bp, Homo sapiens
ttttaccccatcagg

SEQ ID NO: 1696051 - DNA, 15 bp, Homo sapiens
tttaccccatcagga

SEQ ID NO: 1696052 - DNA, 15 bp, Homo sapiens
ttaccccatcaggaa

SEQ ID NO: 1696053 - DNA, 15 bp, Homo sapiens
taccccatcaggaat

SEQ ID NO: 1696054 - DNA, 15 bp, Homo sapiens
accccatcaggaatc

SEQ ID NO: 1696055 - DNA, 15 bp, Homo sapiens
ccccatcaggaatct

SEQ ID NO: 1696056 - DNA, 15 bp, Homo sapiens
cccatcaggaatctt

SEQ ID NO: 1696057 - DNA, 15 bp, Homo sapiens
ccatcaggaatcttt

SEQ ID NO: 1696058 - DNA, 15 bp, Homo sapiens
catcaggaatctttg

SEQ ID NO: 1696059 - DNA, 15 bp, Homo sapiens
atcaggaatctttga

SEQ ID NO: 1696060 - DNA, 15 bp, Homo sapiens
tcaggaatctttgag

SEQ ID NO: 1696061 - DNA, 15 bp, Homo sapiens
caggaatctttgaga

SEQ ID NO: 1696062 - DNA, 15 bp, Homo sapiens
aggaatctttgagaa

SEQ ID NO: 1696063 - DNA, 15 bp, Homo sapiens
ggaatctttgagaaa

SEQ ID NO: 1696064 - DNA, 15 bp, Homo sapiens
gaatctttgagaaag

SEQ ID NO: 1696065 - DNA, 15 bp, Homo sapiens
aatctttgagaaagc

SEQ ID NO: 1696066 - DNA, 15 bp, Homo sapiens
atctttgagaaagcg

SEQ ID NO: 1696067 - DNA, 15 bp, Homo sapiens
tctttgagaaagcgt

SEQ ID NO: 1696068 - DNA, 15 bp, Homo sapiens
ctttgagaaagcgtg

SEQ ID NO: 1696069 - DNA, 15 bp, Homo sapiens
tttgagaaagcgtga

SEQ ID NO: 1696070 - DNA, 15 bp, Homo sapiens
ttgagaaagcgtgaa

SEQ ID NO: 1696071 - DNA, 15 bp, Homo sapiens
tgagaaagcgtgaag

SEQ ID NO: 1696072 - DNA, 15 bp, Homo sapiens
gagaaagcgtgaaga

SEQ ID NO: 1696073 - DNA, 15 bp, Homo sapiens
agaaagcgtgaagat

SEQ ID NO: 1696074 - DNA, 15 bp, Homo sapiens
gaaagcgtgaagatg

SEQ ID NO: 1696075 - DNA, 15 bp, Homo sapiens
aaagcgtgaagatga

SEQ ID NO: 1696076 - DNA, 15 bp, Homo sapiens
aagcgtgaagatgag

SEQ ID NO: 1696077 - DNA, 15 bp, Homo sapiens
agcgtgaagatgaga

SEQ ID NO: 1696078 - DNA, 15 bp, Homo sapiens
gcgtgaagatgagaa

SEQ ID NO: 1696079 - DNA, 15 bp, Homo sapiens
cgtgaagatgagaaa

SEQ ID NO: 1696080 - DNA, 15 bp, Homo sapiens
gtgaagatgagaaag

SEQ ID NO: 1696081 - DNA, 15 bp, Homo sapiens
tgaagatgagaaaga

SEQ ID NO: 1696082 - DNA, 15 bp, Homo sapiens
gaagatgagaaagat

SEQ ID NO: 1696083 - DNA, 15 bp, Homo sapiens
aagatgagaaagatg

SEQ ID NO: 1696084 - DNA, 15 bp, Homo sapiens
agatgagaaagatgt

SEQ ID NO: 1696085 - DNA, 15 bp, Homo sapiens
gatgagaaagatgtt

SEQ ID NO: 1696086 - DNA, 15 bp, Homo sapiens
atgagaaagatgttg

SEQ ID NO: 1696087 - DNA, 15 bp, Homo sapiens
tgagaaagatgttgg

SEQ ID NO: 1696088 - DNA, 15 bp, Homo sapiens
gagaaagatgttgga

SEQ ID NO: 1696089 - DNA, 15 bp, Homo sapiens
agaaagatgttggaa

SEQ ID NO: 1696090 - DNA, 15 bp, Homo sapiens
gaaagatgttggaag

SEQ ID NO: 1696091 - DNA, 15 bp, Homo sapiens
aaagatgttggaaga

SEQ ID NO: 1696092 - DNA, 15 bp, Homo sapiens
aagatgttggaagac

SEQ ID NO: 1696093 - DNA, 15 bp, Homo sapiens
agatgttggaagact

SEQ ID NO: 1696094 - DNA, 15 bp, Homo sapiens
gatgttggaagacta

SEQ ID NO: 1696095 - DNA, 15 bp, Homo sapiens
atgttggaagactag

SEQ ID NO: 1696096 - DNA, 15 bp, Homo sapiens
tgttggaagactagg

SEQ ID NO: 1696097 - DNA, 15 bp, Homo sapiens
gttggaagactaggg

SEQ ID NO: 1696098 - DNA, 15 bp, Homo sapiens
ttggaagactaggga

SEQ ID NO: 1696099 - DNA, 15 bp, Homo sapiens
tggaagactagggag

SEQ ID NO: 1696100 - DNA, 15 bp, Homo sapiens
ggaagactagggaga

SEQ ID NO: 1696101 - DNA, 15 bp, Homo sapiens
gaagactagggagag

SEQ ID NO: 1696102 - DNA, 15 bp, Homo sapiens
aagactagggagagt

SEQ ID NO: 1696103 - DNA, 15 bp, Homo sapiens
agactagggagagta

SEQ ID NO: 1696104 - DNA, 15 bp, Homo sapiens
gactagggagagtag

SEQ ID NO: 1696105 - DNA, 15 bp, Homo sapiens
actagggagagtaga

SEQ ID NO: 1696106 - DNA, 15 bp, Homo sapiens
ctagggagagtagaa

SEQ ID NO: 1696107 - DNA, 15 bp, Homo sapiens
tagggagagtagaaa

SEQ ID NO: 1696108 - DNA, 15 bp, Homo sapiens
agggagagtagaaag

SEQ ID NO: 1696109 - DNA, 15 bp, Homo sapiens
gggagagtagaaagc

SEQ ID NO: 1696110 - DNA, 15 bp, Homo sapiens
ggagagtagaaagct

SEQ ID NO: 1696111 - DNA, 15 bp, Homo sapiens
gagagtagaaagctt

SEQ ID NO: 1696112 - DNA, 15 bp, Homo sapiens
agagtagaaagcttt

SEQ ID NO: 1696113 - DNA, 15 bp, Homo sapiens
gagtagaaagctttt

SEQ ID NO: 1696114 - DNA, 15 bp, Homo sapiens
agtagaaagctttta

SEQ ID NO: 1696115 - DNA, 15 bp, Homo sapiens
gtagaaagcttttat

SEQ ID NO: 1696116 - DNA, 15 bp, Homo sapiens
tagaaagcttttatt

SEQ ID NO: 1696117 - DNA, 15 bp, Homo sapiens
agaaagcttttattt

SEQ ID NO: 1696118 - DNA, 15 bp, Homo sapiens
gaaagcttttatttt

SEQ ID NO: 1696119 - DNA, 15 bp, Homo sapiens
aaagcttttatttta

SEQ ID NO: 1696120 - DNA, 15 bp, Homo sapiens
aagcttttattttaa

SEQ ID NO: 1696121 - DNA, 15 bp, Homo sapiens
agcttttattttaaa

SEQ ID NO: 1696122 - DNA, 15 bp, Homo sapiens
gcttttattttaaag

SEQ ID NO: 1696123 - DNA, 15 bp, Homo sapiens
cttttattttaaagt

SEQ ID NO: 1696124 - DNA, 15 bp, Homo sapiens
ttttattttaaagtg

SEQ ID NO: 1696125 - DNA, 15 bp, Homo sapiens
tttattttaaagtgt

SEQ ID NO: 1696126 - DNA, 15 bp, Homo sapiens
ttattttaaagtgtt

SEQ ID NO: 1696127 - DNA, 15 bp, Homo sapiens
tattttaaagtgttg

SEQ ID NO: 1696128 - DNA, 15 bp, Homo sapiens
attttaaagtgttgt

SEQ ID NO: 1696129 - DNA, 15 bp, Homo sapiens
ttttaaagtgttgtt

SEQ ID NO: 1696130 - DNA, 15 bp, Homo sapiens
tttaaagtgttgttt

SEQ ID NO: 1696131 - DNA, 15 bp, Homo sapiens
ttaaagtgttgtttt

SEQ ID NO: 1696132 - DNA, 15 bp, Homo sapiens
taaagtgttgttttt

SEQ ID NO: 1696133 - DNA, 15 bp, Homo sapiens
aaagtgttgtttttt

SEQ ID NO: 1696134 - DNA, 15 bp, Homo sapiens
aagtgttgttttttg

SEQ ID NO: 1696135 - DNA, 15 bp, Homo sapiens
agtgttgttttttgt

SEQ ID NO: 1696136 - DNA, 15 bp, Homo sapiens
gtgttgttttttgtt

SEQ ID NO: 1696137 - DNA, 15 bp, Homo sapiens
tgttgttttttgttt

SEQ ID NO: 1696138 - DNA, 15 bp, Homo sapiens
gttgttttttgtttt

SEQ ID NO: 1696139 - DNA, 15 bp, Homo sapiens
ttgttttttgtttta

SEQ ID NO: 1696140 - DNA, 15 bp, Homo sapiens
tgttttttgttttaa

SEQ ID NO: 1696141 - DNA, 15 bp, Homo sapiens
gttttttgttttaat

SEQ ID NO: 1696142 - DNA, 15 bp, Homo sapiens
ttttttgttttaatg

SEQ ID NO: 1696143 - DNA, 15 bp, Homo sapiens
tttttgttttaatga

SEQ ID NO: 1696144 - DNA, 15 bp, Homo sapiens
ttttgttttaatgaa

SEQ ID NO: 1696145 - DNA, 15 bp, Homo sapiens
tttgttttaatgaaa

SEQ ID NO: 1696146 - DNA, 15 bp, Homo sapiens
ttgttttaatgaaaa

SEQ ID NO: 1696147 - DNA, 15 bp, Homo sapiens
tgttttaatgaaaat

SEQ ID NO: 1696148 - DNA, 15 bp, Homo sapiens
gttttaatgaaaatc

SEQ ID NO: 1696149 - DNA, 15 bp, Homo sapiens
ttttaatgaaaatct

SEQ ID NO: 1696150 - DNA, 15 bp, Homo sapiens
tttaatgaaaatcta

SEQ ID NO: 1696151 - DNA, 15 bp, Homo sapiens
ttaatgaaaatctag

SEQ ID NO: 1696152 - DNA, 15 bp, Homo sapiens
taatgaaaatctaga

SEQ ID NO: 1696153 - DNA, 15 bp, Homo sapiens
aatgaaaatctagaa

SEQ ID NO: 1696154 - DNA, 15 bp, Homo sapiens
atgaaaatctagaat

SEQ ID NO: 1696155 - DNA, 15 bp, Homo sapiens
tgaaaatctagaatg

SEQ ID NO: 1696156 - DNA, 15 bp, Homo sapiens
gaaaatctagaatga

SEQ ID NO: 1696157 - DNA, 15 bp, Homo sapiens
aaaatctagaatgaa

SEQ ID NO: 1696158 - DNA, 15 bp, Homo sapiens
aaatctagaatgaat

SEQ ID NO: 1696159 - DNA, 15 bp, Homo sapiens
aatctagaatgaatg

SEQ ID NO: 1696160 - DNA, 15 bp, Homo sapiens
atctagaatgaatga

SEQ ID NO: 1696161 - DNA, 15 bp, Homo sapiens
tctagaatgaatgac

SEQ ID NO: 1696162 - DNA, 15 bp, Homo sapiens
ctagaatgaatgact

SEQ ID NO: 1696163 - DNA, 15 bp, Homo sapiens
tagaatgaatgactt

SEQ ID NO: 1696164 - DNA, 15 bp, Homo sapiens
agaatgaatgacttg

SEQ ID NO: 1696165 - DNA, 15 bp, Homo sapiens
gaatgaatgacttgt

SEQ ID NO: 1696166 - DNA, 15 bp, Homo sapiens
aatgaatgacttgta

SEQ ID NO: 1696167 - DNA, 15 bp, Homo sapiens
atgaatgacttgtat

SEQ ID NO: 1696168 - DNA, 15 bp, Homo sapiens
tgaatgacttgtatt

SEQ ID NO: 1696169 - DNA, 15 bp, Homo sapiens
gaatgacttgtattg

SEQ ID NO: 1696170 - DNA, 15 bp, Homo sapiens
aatgacttgtattgt

SEQ ID NO: 1696171 - DNA, 15 bp, Homo sapiens
atgacttgtattgtt

SEQ ID NO: 1696172 - DNA, 15 bp, Homo sapiens
tgacttgtattgttt

SEQ ID NO: 1696173 - DNA, 15 bp, Homo sapiens
gacttgtattgtttg

SEQ ID NO: 1696174 - DNA, 15 bp, Homo sapiens
acttgtattgtttgt

SEQ ID NO: 1696175 - DNA, 15 bp, Homo sapiens
cttgtattgtttgtg

SEQ ID NO: 1696176 - DNA, 15 bp, Homo sapiens
ttgtattgtttgtga

SEQ ID NO: 1696177 - DNA, 15 bp, Homo sapiens
tgtattgtttgtgaa

SEQ ID NO: 1696178 - DNA, 15 bp, Homo sapiens
gtattgtttgtgaat

SEQ ID NO: 1696179 - DNA, 15 bp, Homo sapiens
tattgtttgtgaata

SEQ ID NO: 1696180 - DNA, 15 bp, Homo sapiens
attgtttgtgaatac

SEQ ID NO: 1696181 - DNA, 15 bp, Homo sapiens
ttgtttgtgaatact

SEQ ID NO: 1696182 - DNA, 15 bp, Homo sapiens
tgtttgtgaatactt

SEQ ID NO: 1696183 - DNA, 15 bp, Homo sapiens
gtttgtgaatactta

SEQ ID NO: 1696184 - DNA, 15 bp, Homo sapiens
tttgtgaatacttac

SEQ ID NO: 1696185 - DNA, 15 bp, Homo sapiens
ttgtgaatacttaca

SEQ ID NO: 1696186 - DNA, 15 bp, Homo sapiens
tgtgaatacttacag

SEQ ID NO: 1696187 - DNA, 15 bp, Homo sapiens
gtgaatacttacaga

SEQ ID NO: 1696188 - DNA, 15 bp, Homo sapiens
tgaatacttacagaa

SEQ ID NO: 1696189 - DNA, 15 bp, Homo sapiens
gaatacttacagaaa

SEQ ID NO: 1696190 - DNA, 15 bp, Homo sapiens
aatacttacagaaaa

SEQ ID NO: 1696191 - DNA, 15 bp, Homo sapiens
atacttacagaaaaa

SEQ ID NO: 1696192 - DNA, 15 bp, Homo sapiens
tacttacagaaaaat

SEQ ID NO: 1696193 - DNA, 15 bp, Homo sapiens
acttacagaaaaatg

SEQ ID NO: 1696194 - DNA, 15 bp, Homo sapiens
cttacagaaaaatgg

SEQ ID NO: 1696195 - DNA, 15 bp, Homo sapiens
ttacagaaaaatggc

SEQ ID NO: 1696196 - DNA, 15 bp, Homo sapiens
tacagaaaaatggca

SEQ ID NO: 1696197 - DNA, 15 bp, Homo sapiens
acagaaaaatggcaa

SEQ ID NO: 1696198 - DNA, 15 bp, Homo sapiens
cagaaaaatggcaat

SEQ ID NO: 1696199 - DNA, 15 bp, Homo sapiens
agaaaaatggcaatg

SEQ ID NO: 1696200 - DNA, 15 bp, Homo sapiens
gaaaaatggcaatga

SEQ ID NO: 1696201 - DNA, 15 bp, Homo sapiens
aaaaatggcaatgag

SEQ ID NO: 1696202 - DNA, 15 bp, Homo sapiens
aaaatggcaatgagc

SEQ ID NO: 1696203 - DNA, 15 bp, Homo sapiens
aaatggcaatgagca

SEQ ID NO: 1696204 - DNA, 15 bp, Homo sapiens
aatggcaatgagcaa

SEQ ID NO: 1696205 - DNA, 15 bp, Homo sapiens
atggcaatgagcaat

SEQ ID NO: 1696206 - DNA, 15 bp, Homo sapiens
tggcaatgagcaata

SEQ ID NO: 1696207 - DNA, 15 bp, Homo sapiens
ggcaatgagcaataa

SEQ ID NO: 1696208 - DNA, 15 bp, Homo sapiens
gcaatgagcaataag

SEQ ID NO: 1696209 - DNA, 15 bp, Homo sapiens
caatgagcaataaga

SEQ ID NO: 1696210 - DNA, 15 bp, Homo sapiens
aatgagcaataagag

SEQ ID NO: 1696211 - DNA, 15 bp, Homo sapiens
atgagcaataagagc

SEQ ID NO: 1696212 - DNA, 15 bp, Homo sapiens
tgagcaataagagct

SEQ ID NO: 1696213 - DNA, 15 bp, Homo sapiens
gagcaataagagctg

SEQ ID NO: 1696214 - DNA, 15 bp, Homo sapiens
agcaataagagctgg

SEQ ID NO: 1696215 - DNA, 15 bp, Homo sapiens
gcaataagagctggg

SEQ ID NO: 1696216 - DNA, 15 bp, Homo sapiens
caataagagctgggg

SEQ ID NO: 1696217 - DNA, 15 bp, Homo sapiens
aataagagctggggt

SEQ ID NO: 1696218 - DNA, 15 bp, Homo sapiens
ataagagctggggtt

SEQ ID NO: 1696219 - DNA, 15 bp, Homo sapiens
taagagctggggttg

SEQ ID NO: 1696220 - DNA, 15 bp, Homo sapiens
aagagctggggttga

SEQ ID NO: 1696221 - DNA, 15 bp, Homo sapiens
agagctggggttgag

SEQ ID NO: 1696222 - DNA, 15 bp, Homo sapiens
gagctggggttgagc

SEQ ID NO: 1696223 - DNA, 15 bp, Homo sapiens
agctggggttgagcc

SEQ ID NO: 1696224 - DNA, 15 bp, Homo sapiens
gctggggttgagcca

SEQ ID NO: 1696225 - DNA, 15 bp, Homo sapiens
ctggggttgagccat

SEQ ID NO: 1696226 - DNA, 15 bp, Homo sapiens
tggggttgagccatt

SEQ ID NO: 1696227 - DNA, 15 bp, Homo sapiens
ggggttgagccattc

SEQ ID NO: 1696228 - DNA, 15 bp, Homo sapiens
gggttgagccattcg

SEQ ID NO: 1696229 - DNA, 15 bp, Homo sapiens
ggttgagccattcgc

SEQ ID NO: 1696230 - DNA, 15 bp, Homo sapiens
gttgagccattcgcc

SEQ ID NO: 1696231 - DNA, 15 bp, Homo sapiens
ttgagccattcgcca

SEQ ID NO: 1696232 - DNA, 15 bp, Homo sapiens
tgagccattcgccag

SEQ ID NO: 1696233 - DNA, 15 bp, Homo sapiens
gagccattcgccaga

SEQ ID NO: 1696234 - DNA, 15 bp, Homo sapiens
agccattcgccagaa

SEQ ID NO: 1696235 - DNA, 15 bp, Homo sapiens
gccattcgccagaag

SEQ ID NO: 1696236 - DNA, 15 bp, Homo sapiens
ccattcgccagaaga

SEQ ID NO: 1696237 - DNA, 15 bp, Homo sapiens
cattcgccagaagaa

SEQ ID NO: 1696238 - DNA, 15 bp, Homo sapiens
attcgccagaagaaa

SEQ ID NO: 1696239 - DNA, 15 bp, Homo sapiens
ttcgccagaagaaaa

SEQ ID NO: 1696240 - DNA, 15 bp, Homo sapiens
tcgccagaagaaaag

SEQ ID NO: 1696241 - DNA, 15 bp, Homo sapiens
cgccagaagaaaagt

SEQ ID NO: 1696242 - DNA, 15 bp, Homo sapiens
gccagaagaaaagta

SEQ ID NO: 1696243 - DNA, 15 bp, Homo sapiens
ccagaagaaaagtag

SEQ ID NO: 1696244 - DNA, 15 bp, Homo sapiens
cagaagaaaagtagc

SEQ ID NO: 1696245 - DNA, 15 bp, Homo sapiens
agaagaaaagtagct

SEQ ID NO: 1696246 - DNA, 15 bp, Homo sapiens
gaagaaaagtagctt

SEQ ID NO: 1696247 - DNA, 15 bp, Homo sapiens
aagaaaagtagcttg

SEQ ID NO: 1696248 - DNA, 15 bp, Homo sapiens
agaaaagtagcttgg

SEQ ID NO: 1696249 - DNA, 15 bp, Homo sapiens
gaaaagtagcttggt

SEQ ID NO: 1696250 - DNA, 15 bp, Homo sapiens
aaaagtagcttggta

SEQ ID NO: 1696251 - DNA, 15 bp, Homo sapiens
aaagtagcttggtag

SEQ ID NO: 1696252 - DNA, 15 bp, Homo sapiens
aagtagcttggtaga

SEQ ID NO: 1696253 - DNA, 15 bp, Homo sapiens
agtagcttggtagag

SEQ ID NO: 1696254 - DNA, 15 bp, Homo sapiens
gtagcttggtagagc

SEQ ID NO: 1696255 - DNA, 15 bp, Homo sapiens
tagcttggtagagca

SEQ ID NO: 1696256 - DNA, 15 bp, Homo sapiens
agcttggtagagcag

SEQ ID NO: 1696257 - DNA, 15 bp, Homo sapiens
gcttggtagagcagg

SEQ ID NO: 1696258 - DNA, 15 bp, Homo sapiens
cttggtagagcaggg

SEQ ID NO: 1696259 - DNA, 15 bp, Homo sapiens
ttggtagagcagggg

SEQ ID NO: 1696260 - DNA, 15 bp, Homo sapiens
tggtagagcaggggg

SEQ ID NO: 1696261 - DNA, 15 bp, Homo sapiens
ggtagagcaggggga

SEQ ID NO: 1696262 - DNA, 15 bp, Homo sapiens
gtagagcagggggac

SEQ ID NO: 1696263 - DNA, 15 bp, Homo sapiens
tagagcagggggact

SEQ ID NO: 1696264 - DNA, 15 bp, Homo sapiens
agagcagggggactg

SEQ ID NO: 1696265 - DNA, 15 bp, Homo sapiens
gagcagggggactgt

SEQ ID NO: 1696266 - DNA, 15 bp, Homo sapiens
agcagggggactgtg

SEQ ID NO: 1696267 - DNA, 15 bp, Homo sapiens
gcagggggactgtgg

SEQ ID NO: 1696268 - DNA, 15 bp, Homo sapiens
cagggggactgtggt

SEQ ID NO: 1696269 - DNA, 15 bp, Homo sapiens
agggggactgtggtg

SEQ ID NO: 1696270 - DNA, 15 bp, Homo sapiens
gggggactgtggtgt

SEQ ID NO: 1696271 - DNA, 15 bp, Homo sapiens
ggggactgtggtgtg

SEQ ID NO: 1696272 - DNA, 15 bp, Homo sapiens
gggactgtggtgtgc

SEQ ID NO: 1696273 - DNA, 15 bp, Homo sapiens
ggactgtggtgtgca

SEQ ID NO: 1696274 - DNA, 15 bp, Homo sapiens
gactgtggtgtgcat

SEQ ID NO: 1696275 - DNA, 15 bp, Homo sapiens
actgtggtgtgcata

SEQ ID NO: 1696276 - DNA, 15 bp, Homo sapiens
ctgtggtgtgcatag

SEQ ID NO: 1696277 - DNA, 15 bp, Homo sapiens
tgtggtgtgcatagt

SEQ ID NO: 1696278 - DNA, 15 bp, Homo sapiens
gtggtgtgcatagtc

SEQ ID NO: 1696279 - DNA, 15 bp, Homo sapiens
tggtgtgcatagtct

SEQ ID NO: 1696280 - DNA, 15 bp, Homo sapiens
ggtgtgcatagtcta

SEQ ID NO: 1696281 - DNA, 15 bp, Homo sapiens
gtgtgcatagtctac

SEQ ID NO: 1696282 - DNA, 15 bp, Homo sapiens
tgtgcatagtctact

SEQ ID NO: 1696283 - DNA, 15 bp, Homo sapiens
gtgcatagtctactc

SEQ ID NO: 1696284 - DNA, 15 bp, Homo sapiens
tgcatagtctactcg

SEQ ID NO: 1696285 - DNA, 15 bp, Homo sapiens
gcatagtctactcgg

SEQ ID NO: 1696286 - DNA, 15 bp, Homo sapiens
catagtctactcggg

SEQ ID NO: 1696287 - DNA, 15 bp, Homo sapiens
atagtctactcgggt

SEQ ID NO: 1696288 - DNA, 15 bp, Homo sapiens
tagtctactcgggtg

SEQ ID NO: 1696289 - DNA, 15 bp, Homo sapiens
agtctactcgggtgt

SEQ ID NO: 1696290 - DNA, 15 bp, Homo sapiens
gtctactcgggtgtt

SEQ ID NO: 1696291 - DNA, 15 bp, Homo sapiens
tctactcgggtgttt

SEQ ID NO: 1696292 - DNA, 15 bp, Homo sapiens
ctactcgggtgttta

SEQ ID NO: 1696293 - DNA, 15 bp, Homo sapiens
tactcgggtgtttac

SEQ ID NO: 1696294 - DNA, 15 bp, Homo sapiens
actcgggtgtttaca

SEQ ID NO: 1696295 - DNA, 15 bp, Homo sapiens
ctcgggtgtttacat

SEQ ID NO: 1696296 - DNA, 15 bp, Homo sapiens
tcgggtgtttacatc

SEQ ID NO: 1696297 - DNA, 15 bp, Homo sapiens
cgggtgtttacatct

SEQ ID NO: 1696298 - DNA, 15 bp, Homo sapiens
gggtgtttacatctc

SEQ ID NO: 1696299 - DNA, 15 bp, Homo sapiens
ggtgtttacatctct

SEQ ID NO: 1696300 - DNA, 15 bp, Homo sapiens
gtgtttacatctctc

SEQ ID NO: 1696301 - DNA, 15 bp, Homo sapiens
tgtttacatctctcc

SEQ ID NO: 1696302 - DNA, 15 bp, Homo sapiens
gtttacatctctccc

SEQ ID NO: 1696303 - DNA, 15 bp, Homo sapiens
tttacatctctccca

SEQ ID NO: 1696304 - DNA, 15 bp, Homo sapiens
ttacatctctcccaa

SEQ ID NO: 1696305 - DNA, 15 bp, Homo sapiens
tacatctctcccaac

SEQ ID NO: 1696306 - DNA, 15 bp, Homo sapiens
acatctctcccaaca

SEQ ID NO: 1696307 - DNA, 15 bp, Homo sapiens
catctctcccaacat

SEQ ID NO: 1696308 - DNA, 15 bp, Homo sapiens
atctctcccaacatc

SEQ ID NO: 1696309 - DNA, 15 bp, Homo sapiens
tctctcccaacatct

SEQ ID NO: 1696310 - DNA, 15 bp, Homo sapiens
ctctcccaacatctt

SEQ ID NO: 1696311 - DNA, 15 bp, Homo sapiens
tctcccaacatcttt

SEQ ID NO: 1696312 - DNA, 15 bp, Homo sapiens
ctcccaacatctttg

SEQ ID NO: 1696313 - DNA, 15 bp, Homo sapiens
tcccaacatctttgt

SEQ ID NO: 1696314 - DNA, 15 bp, Homo sapiens
cccaacatctttgtg

SEQ ID NO: 1696315 - DNA, 15 bp, Homo sapiens
ccaacatctttgtga

SEQ ID NO: 1696316 - DNA, 15 bp, Homo sapiens
caacatctttgtgaa

SEQ ID NO: 1696317 - DNA, 15 bp, Homo sapiens
aacatctttgtgaat

SEQ ID NO: 1696318 - DNA, 15 bp, Homo sapiens
acatctttgtgaatg

SEQ ID NO: 1696319 - DNA, 15 bp, Homo sapiens
catctttgtgaatga

SEQ ID NO: 1696320 - DNA, 15 bp, Homo sapiens
atctttgtgaatgaa

SEQ ID NO: 1696321 - DNA, 15 bp, Homo sapiens
tctttgtgaatgaaa

SEQ ID NO: 1696322 - DNA, 15 bp, Homo sapiens
ctttgtgaatgaaat

SEQ ID NO: 1696323 - DNA, 15 bp, Homo sapiens
tttgtgaatgaaatg

SEQ ID NO: 1696324 - DNA, 15 bp, Homo sapiens
ttgtgaatgaaatgg

SEQ ID NO: 1696325 - DNA, 15 bp, Homo sapiens
tgtgaatgaaatgga

SEQ ID NO: 1696326 - DNA, 15 bp, Homo sapiens
gtgaatgaaatggag

SEQ ID NO: 1696327 - DNA, 15 bp, Homo sapiens
tgaatgaaatggaga

SEQ ID NO: 1696328 - DNA, 15 bp, Homo sapiens
gaatgaaatggagaa

SEQ ID NO: 1696329 - DNA, 15 bp, Homo sapiens
aatgaaatggagaag

SEQ ID NO: 1696330 - DNA, 15 bp, Homo sapiens
atgaaatggagaagc

SEQ ID NO: 1696331 - DNA, 15 bp, Homo sapiens
tgaaatggagaagca

SEQ ID NO: 1696332 - DNA, 15 bp, Homo sapiens
gaaatggagaagcaa

SEQ ID NO: 1696333 - DNA, 15 bp, Homo sapiens
aaatggagaagcaag

SEQ ID NO: 1696334 - DNA, 15 bp, Homo sapiens
aatggagaagcaagc

SEQ ID NO: 1696335 - DNA, 15 bp, Homo sapiens
atggagaagcaagcc

SEQ ID NO: 1696336 - DNA, 15 bp, Homo sapiens
tggagaagcaagcca

SEQ ID NO: 1696337 - DNA, 15 bp, Homo sapiens
ggagaagcaagccat

SEQ ID NO: 1696338 - DNA, 15 bp, Homo sapiens
gagaagcaagccata

SEQ ID NO: 1696339 - DNA, 15 bp, Homo sapiens
agaagcaagccatag

SEQ ID NO: 1696340 - DNA, 15 bp, Homo sapiens
gaagcaagccataga

SEQ ID NO: 1696341 - DNA, 15 bp, Homo sapiens
aagcaagccatagat

SEQ ID NO: 1696342 - DNA, 15 bp, Homo sapiens
agcaagccatagatg

SEQ ID NO: 1696343 - DNA, 15 bp, Homo sapiens
gcaagccatagatga

SEQ ID NO: 1696344 - DNA, 15 bp, Homo sapiens
caagccatagatgaa

SEQ ID NO: 1696345 - DNA, 15 bp, Homo sapiens
aagccatagatgaaa

SEQ ID NO: 1696346 - DNA, 15 bp, Homo sapiens
agccatagatgaaaa

SEQ ID NO: 1696347 - DNA, 15 bp, Homo sapiens
gccatagatgaaaat

SEQ ID NO: 1696348 - DNA, 15 bp, Homo sapiens
ccatagatgaaaata

SEQ ID NO: 1696349 - DNA, 15 bp, Homo sapiens
catagatgaaaatac

SEQ ID NO: 1696350 - DNA, 15 bp, Homo sapiens
atagatgaaaatacg

SEQ ID NO: 1696351 - DNA, 15 bp, Homo sapiens
tagatgaaaatacgg

SEQ ID NO: 1696352 - DNA, 15 bp, Homo sapiens
agatgaaaatacgga

SEQ ID NO: 1696353 - DNA, 15 bp, Homo sapiens
gatgaaaatacggat

SEQ ID NO: 1696354 - DNA, 15 bp, Homo sapiens
atgaaaatacggatg

SEQ ID NO: 1696355 - DNA, 15 bp, Homo sapiens
tgaaaatacggatga

SEQ ID NO: 1696356 - DNA, 15 bp, Homo sapiens
gaaaatacggatgag

SEQ ID NO: 1696357 - DNA, 15 bp, Homo sapiens
aaaatacggatgaga

SEQ ID NO: 1696358 - DNA, 15 bp, Homo sapiens
aaatacggatgagac

SEQ ID NO: 1696359 - DNA, 15 bp, Homo sapiens
aatacggatgagacc

SEQ ID NO: 1696360 - DNA, 15 bp, Homo sapiens
atacggatgagacct

SEQ ID NO: 1696361 - DNA, 15 bp, Homo sapiens
tacggatgagacctt

SEQ ID NO: 1696362 - DNA, 15 bp, Homo sapiens
acggatgagaccttt

SEQ ID NO: 1696363 - DNA, 15 bp, Homo sapiens
gtttcgccatgttgt

SEQ ID NO: 1696364 - DNA, 15 bp, Homo sapiens
tttcgccatgttgtt

SEQ ID NO: 1696365 - DNA, 15 bp, Homo sapiens
ttcgccatgttgttc

SEQ ID NO: 1696366 - DNA, 15 bp, Homo sapiens
tcgccatgttgttca

SEQ ID NO: 1696367 - DNA, 15 bp, Homo sapiens
cgccatgttgttcag

SEQ ID NO: 1696368 - DNA, 15 bp, Homo sapiens
gccatgttgttcagg

SEQ ID NO: 1696369 - DNA, 15 bp, Homo sapiens
ccatgttgttcaggc

SEQ ID NO: 1696370 - DNA, 15 bp, Homo sapiens
catgttgttcaggct

SEQ ID NO: 1696371 - DNA, 15 bp, Homo sapiens
atgttgttcaggctg

SEQ ID NO: 1696372 - DNA, 15 bp, Homo sapiens
tgttgttcaggctgg

SEQ ID NO: 1696373 - DNA, 15 bp, Homo sapiens
gttgttcaggctggt

SEQ ID NO: 1696374 - DNA, 15 bp, Homo sapiens
ttgttcaggctggtc

SEQ ID NO: 1696375 - DNA, 15 bp, Homo sapiens
tgttcaggctggtct

SEQ ID NO: 1696376 - DNA, 15 bp, Homo sapiens
gttcaggctggtctc

SEQ ID NO: 1696377 - DNA, 15 bp, Homo sapiens
ttcaggctggtctca

SEQ ID NO: 1696378 - DNA, 15 bp, Homo sapiens
tcaggctggtctcac

SEQ ID NO: 1696379 - DNA, 15 bp, Homo sapiens
tgatccgcccacctc

SEQ ID NO: 1696380 - DNA, 15 bp, Homo sapiens
gctgagattacaagt

SEQ ID NO: 1696381 - DNA, 15 bp, Homo sapiens
ctgagattacaagtg

SEQ ID NO: 1696382 - DNA, 15 bp, Homo sapiens
tgagattacaagtgt

SEQ ID NO: 1696383 - DNA, 15 bp, Homo sapiens
gagattacaagtgtg

SEQ ID NO: 1696384 - DNA, 15 bp, Homo sapiens
agattacaagtgtga

SEQ ID NO: 1696385 - DNA, 15 bp, Homo sapiens
caagtgtgagccaca

SEQ ID NO: 1696386 - DNA, 15 bp, Homo sapiens
aagtgtgagccacag

SEQ ID NO: 1696387 - DNA, 15 bp, Homo sapiens
agtgtgagccacagt

SEQ ID NO: 1696388 - DNA, 15 bp, Homo sapiens
gtgtgagccacagtg

SEQ ID NO: 1696389 - DNA, 15 bp, Homo sapiens
tgtgagccacagtgc

SEQ ID NO: 1696390 - DNA, 15 bp, Homo sapiens
tgagccacagtgccc

SEQ ID NO: 1696391 - DNA, 15 bp, Homo sapiens
gagccacagtgcccg

SEQ ID NO: 1696392 - DNA, 15 bp, Homo sapiens
agccacagtgcccgg

SEQ ID NO: 1696393 - DNA, 15 bp, Homo sapiens
gccacagtgcccggc

SEQ ID NO: 1696394 - DNA, 15 bp, Homo sapiens
ccacagtgcccggcc

SEQ ID NO: 1696395 - DNA, 15 bp, Homo sapiens
cacagtgcccggcct

SEQ ID NO: 1696396 - DNA, 15 bp, Homo sapiens
acagtgcccggccta

SEQ ID NO: 1696397 - DNA, 15 bp, Homo sapiens
cagtgcccggcctaa

SEQ ID NO: 1696398 - DNA, 15 bp, Homo sapiens
agtgcccggcctaaa

SEQ ID NO: 1696399 - DNA, 15 bp, Homo sapiens
gtgcccggcctaaaa

SEQ ID NO: 1696400 - DNA, 15 bp, Homo sapiens
tgcccggcctaaaaa

SEQ ID NO: 1696401 - DNA, 15 bp, Homo sapiens
gcccggcctaaaaag

SEQ ID NO: 1696402 - DNA, 15 bp, Homo sapiens
cccggcctaaaaagt

SEQ ID NO: 1696403 - DNA, 15 bp, Homo sapiens
ccggcctaaaaagtt

SEQ ID NO: 1696404 - DNA, 15 bp, Homo sapiens
cggcctaaaaagtta

SEQ ID NO: 1696405 - DNA, 15 bp, Homo sapiens
ggcctaaaaagttaa

SEQ ID NO: 1696406 - DNA, 15 bp, Homo sapiens
gcctaaaaagttaat

SEQ ID NO: 1696407 - DNA, 15 bp, Homo sapiens
cctaaaaagttaatg

SEQ ID NO: 1696408 - DNA, 15 bp, Homo sapiens
ctaaaaagttaatgt

SEQ ID NO: 1696409 - DNA, 15 bp, Homo sapiens
taaaaagttaatgtt

SEQ ID NO: 1696410 - DNA, 15 bp, Homo sapiens
aaaaagttaatgttt

SEQ ID NO: 1696411 - DNA, 15 bp, Homo sapiens
aaaagttaatgtttt

SEQ ID NO: 1696412 - DNA, 15 bp, Homo sapiens
aaagttaatgttttc

SEQ ID NO: 1696413 - DNA, 15 bp, Homo sapiens
aagttaatgttttca

SEQ ID NO: 1696414 - DNA, 15 bp, Homo sapiens
agttaatgttttcac

SEQ ID NO: 1696415 - DNA, 15 bp, Homo sapiens
gttaatgttttcaca

SEQ ID NO: 1696416 - DNA, 15 bp, Homo sapiens
ttaatgttttcacat

SEQ ID NO: 1696417 - DNA, 15 bp, Homo sapiens
taatgttttcacata

SEQ ID NO: 1696418 - DNA, 15 bp, Homo sapiens
aatgttttcacatag

SEQ ID NO: 1696419 - DNA, 15 bp, Homo sapiens
atgttttcacataga

SEQ ID NO: 1696420 - DNA, 15 bp, Homo sapiens
tgttttcacatagag

SEQ ID NO: 1696421 - DNA, 15 bp, Homo sapiens
gttttcacatagagg

SEQ ID NO: 1696422 - DNA, 15 bp, Homo sapiens
ttttcacatagaggc

SEQ ID NO: 1696423 - DNA, 15 bp, Homo sapiens
tttcacatagaggca

SEQ ID NO: 1696424 - DNA, 15 bp, Homo sapiens
ttcacatagaggcat

SEQ ID NO: 1696425 - DNA, 15 bp, Homo sapiens
tcacatagaggcatc

SEQ ID NO: 1696426 - DNA, 15 bp, Homo sapiens
cacatagaggcatca

SEQ ID NO: 1696427 - DNA, 15 bp, Homo sapiens
acatagaggcatcat

SEQ ID NO: 1696428 - DNA, 15 bp, Homo sapiens
catagaggcatcatg

SEQ ID NO: 1696429 - DNA, 15 bp, Homo sapiens
atagaggcatcatgt

SEQ ID NO: 1696430 - DNA, 15 bp, Homo sapiens
tagaggcatcatgta

SEQ ID NO: 1696431 - DNA, 15 bp, Homo sapiens
agaggcatcatgtaa

SEQ ID NO: 1696432 - DNA, 15 bp, Homo sapiens
gaggcatcatgtaat

SEQ ID NO: 1696433 - DNA, 15 bp, Homo sapiens
aggcatcatgtaata

SEQ ID NO: 1696434 - DNA, 15 bp, Homo sapiens
ggcatcatgtaataa

SEQ ID NO: 1696435 - DNA, 15 bp, Homo sapiens
gcatcatgtaataaa

SEQ ID NO: 1696436 - DNA, 15 bp, Homo sapiens
catcatgtaataaaa

SEQ ID NO: 1696437 - DNA, 15 bp, Homo sapiens
atcatgtaataaaag

SEQ ID NO: 1696438 - DNA, 15 bp, Homo sapiens
tcatgtaataaaagt

SEQ ID NO: 1696439 - DNA, 15 bp, Homo sapiens
catgtaataaaagtt

SEQ ID NO: 1696440 - DNA, 15 bp, Homo sapiens
atgtaataaaagttg

SEQ ID NO: 1696441 - DNA, 15 bp, Homo sapiens
tgtaataaaagttgg

SEQ ID NO: 1696442 - DNA, 15 bp, Homo sapiens
gtaataaaagttggg

SEQ ID NO: 1696443 - DNA, 15 bp, Homo sapiens
taataaaagttgggt

SEQ ID NO: 1696444 - DNA, 15 bp, Homo sapiens
aataaaagttgggtt

SEQ ID NO: 1696445 - DNA, 15 bp, Homo sapiens
ataaaagttgggttt

SEQ ID NO: 1696446 - DNA, 15 bp, Homo sapiens
taaaagttgggttta

SEQ ID NO: 1696447 - DNA, 15 bp, Homo sapiens
aaaagttgggtttat

SEQ ID NO: 1696448 - DNA, 15 bp, Homo sapiens
aaagttgggtttatt

SEQ ID NO: 1696449 - DNA, 15 bp, Homo sapiens
aagttgggtttattg

SEQ ID NO: 1696450 - DNA, 15 bp, Homo sapiens
agttgggtttattgg

SEQ ID NO: 1696451 - DNA, 15 bp, Homo sapiens
gttgggtttattgga

SEQ ID NO: 1696452 - DNA, 15 bp, Homo sapiens
ttgggtttattggag

SEQ ID NO: 1696453 - DNA, 15 bp, Homo sapiens
tgggtttattggagc

SEQ ID NO: 1696454 - DNA, 15 bp, Homo sapiens
gggtttattggagcc

SEQ ID NO: 1696455 - DNA, 15 bp, Homo sapiens
ggtttattggagcct

SEQ ID NO: 1696456 - DNA, 15 bp, Homo sapiens
gtttattggagcctg

SEQ ID NO: 1696457 - DNA, 15 bp, Homo sapiens
tttattggagcctgg

SEQ ID NO: 1696458 - DNA, 15 bp, Homo sapiens
ttattggagcctgga

SEQ ID NO: 1696459 - DNA, 15 bp, Homo sapiens
tattggagcctggag

SEQ ID NO: 1696460 - DNA, 15 bp, Homo sapiens
attggagcctggagg

SEQ ID NO: 1696461 - DNA, 15 bp, Homo sapiens
ttggagcctggagga

SEQ ID NO: 1696462 - DNA, 15 bp, Homo sapiens
tggagcctggaggaa

SEQ ID NO: 1696463 - DNA, 15 bp, Homo sapiens
ggagcctggaggaag

SEQ ID NO: 1696464 - DNA, 15 bp, Homo sapiens
gagcctggaggaagc

SEQ ID NO: 1696465 - DNA, 15 bp, Homo sapiens
agcctggaggaagca

SEQ ID NO: 1696466 - DNA, 15 bp, Homo sapiens
gcctggaggaagcac

SEQ ID NO: 1696467 - DNA, 15 bp, Homo sapiens
cctggaggaagcaca

SEQ ID NO: 1696468 - DNA, 15 bp, Homo sapiens
ctggaggaagcacag

SEQ ID NO: 1696469 - DNA, 15 bp, Homo sapiens
tggaggaagcacaga

SEQ ID NO: 1696470 - DNA, 15 bp, Homo sapiens
ggaggaagcacagat

SEQ ID NO: 1696471 - DNA, 15 bp, Homo sapiens
gaggaagcacagatt

SEQ ID NO: 1696472 - DNA, 15 bp, Homo sapiens
aggaagcacagattc

SEQ ID NO: 1696473 - DNA, 15 bp, Homo sapiens
ggaagcacagattca

SEQ ID NO: 1696474 - DNA, 15 bp, Homo sapiens
gaagcacagattcaa

SEQ ID NO: 1696475 - DNA, 15 bp, Homo sapiens
aagcacagattcaat

SEQ ID NO: 1696476 - DNA, 15 bp, Homo sapiens
agcacagattcaatt

SEQ ID NO: 1696477 - DNA, 15 bp, Homo sapiens
gcacagattcaattc

SEQ ID NO: 1696478 - DNA, 15 bp, Homo sapiens
cacagattcaattcc

SEQ ID NO: 1696479 - DNA, 15 bp, Homo sapiens
acagattcaattccc

SEQ ID NO: 1696480 - DNA, 15 bp, Homo sapiens
cagattcaattccct

SEQ ID NO: 1696481 - DNA, 15 bp, Homo sapiens
agattcaattcccta

SEQ ID NO: 1696482 - DNA, 15 bp, Homo sapiens
gattcaattccctaa

SEQ ID NO: 1696483 - DNA, 15 bp, Homo sapiens
attcaattccctaat

SEQ ID NO: 1696484 - DNA, 15 bp, Homo sapiens
ttcaattccctaatg

SEQ ID NO: 1696485 - DNA, 15 bp, Homo sapiens
tcaattccctaatgg

SEQ ID NO: 1696486 - DNA, 15 bp, Homo sapiens
caattccctaatggg

SEQ ID NO: 1696487 - DNA, 15 bp, Homo sapiens
aattccctaatgggg

SEQ ID NO: 1696488 - DNA, 15 bp, Homo sapiens
attccctaatggggc

SEQ ID NO: 1696489 - DNA, 15 bp, Homo sapiens
ttccctaatggggct

SEQ ID NO: 1696490 - DNA, 15 bp, Homo sapiens
tccctaatggggctt

SEQ ID NO: 1696491 - DNA, 15 bp, Homo sapiens
ccctaatggggcttc

SEQ ID NO: 1696492 - DNA, 15 bp, Homo sapiens
cctaatggggcttct

SEQ ID NO: 1696493 - DNA, 15 bp, Homo sapiens
ctaatggggcttctc

SEQ ID NO: 1696494 - DNA, 15 bp, Homo sapiens
taatggggcttctcg

SEQ ID NO: 1696495 - DNA, 15 bp, Homo sapiens
aatggggcttctcgc

SEQ ID NO: 1696496 - DNA, 15 bp, Homo sapiens
atggggcttctcgct

SEQ ID NO: 1696497 - DNA, 15 bp, Homo sapiens
tggggcttctcgctt

SEQ ID NO: 1696498 - DNA, 15 bp, Homo sapiens
ggggcttctcgcttt

SEQ ID NO: 1696499 - DNA, 15 bp, Homo sapiens
gggcttctcgctttc

SEQ ID NO: 1696500 - DNA, 15 bp, Homo sapiens
ggcttctcgctttct

SEQ ID NO: 1696501 - DNA, 15 bp, Homo sapiens
gcttctcgctttctt

SEQ ID NO: 1696502 - DNA, 15 bp, Homo sapiens
cttctcgctttcttg

SEQ ID NO: 1696503 - DNA, 15 bp, Homo sapiens
ttctcgctttcttgc

SEQ ID NO: 1696504 - DNA, 15 bp, Homo sapiens
tctcgctttcttgct

SEQ ID NO: 1696505 - DNA, 15 bp, Homo sapiens
ctcgctttcttgctc

SEQ ID NO: 1696506 - DNA, 15 bp, Homo sapiens
tcgctttcttgctca

SEQ ID NO: 1696507 - DNA, 15 bp, Homo sapiens
cgctttcttgctcaa

SEQ ID NO: 1696508 - DNA, 15 bp, Homo sapiens
gctttcttgctcaaa

SEQ ID NO: 1696509 - DNA, 15 bp, Homo sapiens
ctttcttgctcaaaa

SEQ ID NO: 1696510 - DNA, 15 bp, Homo sapiens
tttcttgctcaaaat

SEQ ID NO: 1696511 - DNA, 15 bp, Homo sapiens
ttcttgctcaaaatg

SEQ ID NO: 1696512 - DNA, 15 bp, Homo sapiens
tcttgctcaaaatgt

SEQ ID NO: 1696513 - DNA, 15 bp, Homo sapiens
cttgctcaaaatgtc

SEQ ID NO: 1696514 - DNA, 15 bp, Homo sapiens
ttgctcaaaatgtca

SEQ ID NO: 1696515 - DNA, 15 bp, Homo sapiens
tgctcaaaatgtcaa

SEQ ID NO: 1696516 - DNA, 15 bp, Homo sapiens
gctcaaaatgtcaaa

SEQ ID NO: 1696517 - DNA, 15 bp, Homo sapiens
ctcaaaatgtcaaag

SEQ ID NO: 1696518 - DNA, 15 bp, Homo sapiens
tcaaaatgtcaaagt

SEQ ID NO: 1696519 - DNA, 15 bp, Homo sapiens
caaaatgtcaaagtt

SEQ ID NO: 1696520 - DNA, 15 bp, Homo sapiens
aaaatgtcaaagttg

SEQ ID NO: 1696521 - DNA, 15 bp, Homo sapiens
aaatgtcaaagttgt

SEQ ID NO: 1696522 - DNA, 15 bp, Homo sapiens
aatgtcaaagttgtt

SEQ ID NO: 1696523 - DNA, 15 bp, Homo sapiens
atgtcaaagttgttg

SEQ ID NO: 1696524 - DNA, 15 bp, Homo sapiens
tgtcaaagttgttga

SEQ ID NO: 1696525 - DNA, 15 bp, Homo sapiens
gtcaaagttgttgat

SEQ ID NO: 1696526 - DNA, 15 bp, Homo sapiens
tcaaagttgttgata

SEQ ID NO: 1696527 - DNA, 15 bp, Homo sapiens
caaagttgttgatat

SEQ ID NO: 1696528 - DNA, 15 bp, Homo sapiens
aaagttgttgatatt

SEQ ID NO: 1696529 - DNA, 15 bp, Homo sapiens
aagttgttgatattt

SEQ ID NO: 1696530 - DNA, 15 bp, Homo sapiens
agttgttgatatttg

SEQ ID NO: 1696531 - DNA, 15 bp, Homo sapiens
gttgttgatatttga

SEQ ID NO: 1696532 - DNA, 15 bp, Homo sapiens
ttgttgatatttgaa

SEQ ID NO: 1696533 - DNA, 15 bp, Homo sapiens
tgttgatatttgaag

SEQ ID NO: 1696534 - DNA, 15 bp, Homo sapiens
gttgatatttgaagt

SEQ ID NO: 1696535 - DNA, 15 bp, Homo sapiens
ttgatatttgaagtg

SEQ ID NO: 1696536 - DNA, 15 bp, Homo sapiens
tgatatttgaagtgg

SEQ ID NO: 1696537 - DNA, 15 bp, Homo sapiens
gatatttgaagtggg

SEQ ID NO: 1696538 - DNA, 15 bp, Homo sapiens
atatttgaagtggga

SEQ ID NO: 1696539 - DNA, 15 bp, Homo sapiens
tatttgaagtgggat

SEQ ID NO: 1696540 - DNA, 15 bp, Homo sapiens
atttgaagtgggatg

SEQ ID NO: 1696541 - DNA, 15 bp, Homo sapiens
tttgaagtgggatga

SEQ ID NO: 1696542 - DNA, 15 bp, Homo sapiens
ttgaagtgggatgac

SEQ ID NO: 1696543 - DNA, 15 bp, Homo sapiens
tgaagtgggatgaca

SEQ ID NO: 1696544 - DNA, 15 bp, Homo sapiens
gaagtgggatgacat

SEQ ID NO: 1696545 - DNA, 15 bp, Homo sapiens
aagtgggatgacatt

SEQ ID NO: 1696546 - DNA, 15 bp, Homo sapiens
agtgggatgacattt

SEQ ID NO: 1696547 - DNA, 15 bp, Homo sapiens
gtgggatgacatttt

SEQ ID NO: 1696548 - DNA, 15 bp, Homo sapiens
tgggatgacattttc

SEQ ID NO: 1696549 - DNA, 15 bp, Homo sapiens
gggatgacattttcc

SEQ ID NO: 1696550 - DNA, 15 bp, Homo sapiens
ggatgacattttccc

SEQ ID NO: 1696551 - DNA, 15 bp, Homo sapiens
gatgacattttccct

SEQ ID NO: 1696552 - DNA, 15 bp, Homo sapiens
atgacattttcccta

SEQ ID NO: 1696553 - DNA, 15 bp, Homo sapiens
tgacattttccctag

SEQ ID NO: 1696554 - DNA, 15 bp, Homo sapiens
gacattttccctagg

SEQ ID NO: 1696555 - DNA, 15 bp, Homo sapiens
acattttccctaggg

SEQ ID NO: 1696556 - DNA, 15 bp, Homo sapiens
cattttccctaggga

SEQ ID NO: 1696557 - DNA, 15 bp, Homo sapiens
attttccctagggaa

SEQ ID NO: 1696558 - DNA, 15 bp, Homo sapiens
ttttccctagggaag

SEQ ID NO: 1696559 - DNA, 15 bp, Homo sapiens
tttccctagggaaga

SEQ ID NO: 1696560 - DNA, 15 bp, Homo sapiens
ttccctagggaagaa

SEQ ID NO: 1696561 - DNA, 15 bp, Homo sapiens
tccctagggaagaaa

SEQ ID NO: 1696562 - DNA, 15 bp, Homo sapiens
ccctagggaagaaaa

SEQ ID NO: 1696563 - DNA, 15 bp, Homo sapiens
cctagggaagaaaaa

SEQ ID NO: 1696564 - DNA, 15 bp, Homo sapiens
ctagggaagaaaaac

SEQ ID NO: 1696565 - DNA, 15 bp, Homo sapiens
tagggaagaaaaact

SEQ ID NO: 1696566 - DNA, 15 bp, Homo sapiens
agggaagaaaaacta

SEQ ID NO: 1696567 - DNA, 15 bp, Homo sapiens
gggaagaaaaactag

SEQ ID NO: 1696568 - DNA, 15 bp, Homo sapiens
ggaagaaaaactagc

SEQ ID NO: 1696569 - DNA, 15 bp, Homo sapiens
gaagaaaaactagct

SEQ ID NO: 1696570 - DNA, 15 bp, Homo sapiens
aagaaaaactagcta

SEQ ID NO: 1696571 - DNA, 15 bp, Homo sapiens
agaaaaactagctaa

SEQ ID NO: 1696572 - DNA, 15 bp, Homo sapiens
gaaaaactagctaag

SEQ ID NO: 1696573 - DNA, 15 bp, Homo sapiens
aaaaactagctaaga

SEQ ID NO: 1696574 - DNA, 15 bp, Homo sapiens
aaaactagctaagac

SEQ ID NO: 1696575 - DNA, 15 bp, Homo sapiens
aaactagctaagacc

SEQ ID NO: 1696576 - DNA, 15 bp, Homo sapiens
aactagctaagacca

SEQ ID NO: 1696577 - DNA, 15 bp, Homo sapiens
actagctaagaccaa

SEQ ID NO: 1696578 - DNA, 15 bp, Homo sapiens
ctagctaagaccaac

SEQ ID NO: 1696579 - DNA, 15 bp, Homo sapiens
tagctaagaccaacc

SEQ ID NO: 1696580 - DNA, 15 bp, Homo sapiens
agctaagaccaaccc

SEQ ID NO: 1696581 - DNA, 15 bp, Homo sapiens
gctaagaccaaccct

SEQ ID NO: 1696582 - DNA, 15 bp, Homo sapiens
ctaagaccaaccctt

SEQ ID NO: 1696583 - DNA, 15 bp, Homo sapiens
taagaccaacccttt

SEQ ID NO: 1696584 - DNA, 15 bp, Homo sapiens
aagaccaacccttta

SEQ ID NO: 1696585 - DNA, 15 bp, Homo sapiens
agaccaaccctttaa

SEQ ID NO: 1696586 - DNA, 15 bp, Homo sapiens
gaccaaccctttaaa

SEQ ID NO: 1696587 - DNA, 15 bp, Homo sapiens
accaaccctttaaaa

SEQ ID NO: 1696588 - DNA, 15 bp, Homo sapiens
ccaaccctttaaaat

SEQ ID NO: 1696589 - DNA, 15 bp, Homo sapiens
caaccctttaaaata

SEQ ID NO: 1696590 - DNA, 15 bp, Homo sapiens
aaccctttaaaataa

SEQ ID NO: 1696591 - DNA, 15 bp, Homo sapiens
accctttaaaataac

SEQ ID NO: 1696592 - DNA, 15 bp, Homo sapiens
ccctttaaaataaca

SEQ ID NO: 1696593 - DNA, 15 bp, Homo sapiens
cctttaaaataacat

SEQ ID NO: 1696594 - DNA, 15 bp, Homo sapiens
ctttaaaataacatg

SEQ ID NO: 1696595 - DNA, 15 bp, Homo sapiens
tttaaaataacatgt

SEQ ID NO: 1696596 - DNA, 15 bp, Homo sapiens
ttaaaataacatgtg

SEQ ID NO: 1696597 - DNA, 15 bp, Homo sapiens
taaaataacatgtgt

SEQ ID NO: 1696598 - DNA, 15 bp, Homo sapiens
aaaataacatgtgtt

SEQ ID NO: 1696599 - DNA, 15 bp, Homo sapiens
aaataacatgtgttt

SEQ ID NO: 1696600 - DNA, 15 bp, Homo sapiens
aataacatgtgtttt

SEQ ID NO: 1696601 - DNA, 15 bp, Homo sapiens
ataacatgtgttttg

SEQ ID NO: 1696602 - DNA, 15 bp, Homo sapiens
taacatgtgttttgt

SEQ ID NO: 1696603 - DNA, 15 bp, Homo sapiens
aacatgtgttttgtg

SEQ ID NO: 1696604 - DNA, 15 bp, Homo sapiens
acatgtgttttgtga

SEQ ID NO: 1696605 - DNA, 15 bp, Homo sapiens
catgtgttttgtgac

SEQ ID NO: 1696606 - DNA, 15 bp, Homo sapiens
atgtgttttgtgacc

SEQ ID NO: 1696607 - DNA, 15 bp, Homo sapiens
tgtgttttgtgaccc

SEQ ID NO: 1696608 - DNA, 15 bp, Homo sapiens
gtgttttgtgaccct

SEQ ID NO: 1696609 - DNA, 15 bp, Homo sapiens
tgttttgtgaccctt

SEQ ID NO: 1696610 - DNA, 15 bp, Homo sapiens
gttttgtgaccctta

SEQ ID NO: 1696611 - DNA, 15 bp, Homo sapiens
ttttgtgacccttat

SEQ ID NO: 1696612 - DNA, 15 bp, Homo sapiens
tttgtgacccttatt

SEQ ID NO: 1696613 - DNA, 15 bp, Homo sapiens
ttgtgacccttattt

SEQ ID NO: 1696614 - DNA, 15 bp, Homo sapiens
tgtgacccttatttc

SEQ ID NO: 1696615 - DNA, 15 bp, Homo sapiens
gtgacccttatttct

SEQ ID NO: 1696616 - DNA, 15 bp, Homo sapiens
tgacccttatttctt

SEQ ID NO: 1696617 - DNA, 15 bp, Homo sapiens
gacccttatttcttc

SEQ ID NO: 1696618 - DNA, 15 bp, Homo sapiens
acccttatttcttca

SEQ ID NO: 1696619 - DNA, 15 bp, Homo sapiens
cccttatttcttcag

SEQ ID NO: 1696620 - DNA, 15 bp, Homo sapiens
ccttatttcttcaga

SEQ ID NO: 1696621 - DNA, 15 bp, Homo sapiens
cttatttcttcagat

SEQ ID NO: 1696622 - DNA, 15 bp, Homo sapiens
ttatttcttcagatg

SEQ ID NO: 1696623 - DNA, 15 bp, Homo sapiens
tatttcttcagatga

SEQ ID NO: 1696624 - DNA, 15 bp, Homo sapiens
atttcttcagatgat

SEQ ID NO: 1696625 - DNA, 15 bp, Homo sapiens
tttcttcagatgatt

SEQ ID NO: 1696626 - DNA, 15 bp, Homo sapiens
ttcttcagatgattg

SEQ ID NO: 1696627 - DNA, 15 bp, Homo sapiens
tcttcagatgattgg

SEQ ID NO: 1696628 - DNA, 15 bp, Homo sapiens
cttcagatgattggt

SEQ ID NO: 1696629 - DNA, 15 bp, Homo sapiens
ttcagatgattggtc

SEQ ID NO: 1696630 - DNA, 15 bp, Homo sapiens
tcagatgattggtca

SEQ ID NO: 1696631 - DNA, 15 bp, Homo sapiens
cagatgattggtcac

SEQ ID NO: 1696632 - DNA, 15 bp, Homo sapiens
agatgattggtcacc

SEQ ID NO: 1696633 - DNA, 15 bp, Homo sapiens
gatgattggtcaccc

SEQ ID NO: 1696634 - DNA, 15 bp, Homo sapiens
atgattggtcaccca

SEQ ID NO: 1696635 - DNA, 15 bp, Homo sapiens
tgattggtcacccaa

SEQ ID NO: 1696636 - DNA, 15 bp, Homo sapiens
gattggtcacccaat

SEQ ID NO: 1696637 - DNA, 15 bp, Homo sapiens
attggtcacccaatc

SEQ ID NO: 1696638 - DNA, 15 bp, Homo sapiens
ttggtcacccaatcc

SEQ ID NO: 1696639 - DNA, 15 bp, Homo sapiens
tggtcacccaatccc

SEQ ID NO: 1696640 - DNA, 15 bp, Homo sapiens
ggtcacccaatccca

SEQ ID NO: 1696641 - DNA, 15 bp, Homo sapiens
gtcacccaatcccat

SEQ ID NO: 1696642 - DNA, 15 bp, Homo sapiens
tcacccaatcccata

SEQ ID NO: 1696643 - DNA, 15 bp, Homo sapiens
cacccaatcccatag

SEQ ID NO: 1696644 - DNA, 15 bp, Homo sapiens
acccaatcccatagt

SEQ ID NO: 1696645 - DNA, 15 bp, Homo sapiens
cccaatcccatagtg

SEQ ID NO: 1696646 - DNA, 15 bp, Homo sapiens
ccaatcccatagtgg

SEQ ID NO: 1696647 - DNA, 15 bp, Homo sapiens
caatcccatagtggc

SEQ ID NO: 1696648 - DNA, 15 bp, Homo sapiens
aatcccatagtggct

SEQ ID NO: 1696649 - DNA, 15 bp, Homo sapiens
atcccatagtggctg

SEQ ID NO: 1696650 - DNA, 15 bp, Homo sapiens
tcccatagtggctgc

SEQ ID NO: 1696651 - DNA, 15 bp, Homo sapiens
cccatagtggctgcc

SEQ ID NO: 1696652 - DNA, 15 bp, Homo sapiens
ccatagtggctgccc

SEQ ID NO: 1696653 - DNA, 15 bp, Homo sapiens
catagtggctgcccc

SEQ ID NO: 1696654 - DNA, 15 bp, Homo sapiens
atagtggctgccccc

SEQ ID NO: 1696655 - DNA, 15 bp, Homo sapiens
tagtggctgccccca

SEQ ID NO: 1696656 - DNA, 15 bp, Homo sapiens
agtggctgcccccac

SEQ ID NO: 1696657 - DNA, 15 bp, Homo sapiens
gtggctgcccccacc

SEQ ID NO: 1696658 - DNA, 15 bp, Homo sapiens
tggctgcccccacct

SEQ ID NO: 1696659 - DNA, 15 bp, Homo sapiens
ggctgcccccacctg

SEQ ID NO: 1696660 - DNA, 15 bp, Homo sapiens
gctgcccccacctga

SEQ ID NO: 1696661 - DNA, 15 bp, Homo sapiens
ctgcccccacctgac

SEQ ID NO: 1696662 - DNA, 15 bp, Homo sapiens
tgcccccacctgacc

SEQ ID NO: 1696663 - DNA, 15 bp, Homo sapiens
gcccccacctgacct

SEQ ID NO: 1696664 - DNA, 15 bp, Homo sapiens
cccccacctgacctt

SEQ ID NO: 1696665 - DNA, 15 bp, Homo sapiens
ccccacctgacctta

SEQ ID NO: 1696666 - DNA, 15 bp, Homo sapiens
cccacctgaccttac

SEQ ID NO: 1696667 - DNA, 15 bp, Homo sapiens
ccacctgaccttacc

SEQ ID NO: 1696668 - DNA, 15 bp, Homo sapiens
cacctgaccttacca

SEQ ID NO: 1696669 - DNA, 15 bp, Homo sapiens
acctgaccttaccat

SEQ ID NO: 1696670 - DNA, 15 bp, Homo sapiens
cctgaccttaccata

SEQ ID NO: 1696671 - DNA, 15 bp, Homo sapiens
ctgaccttaccatac

SEQ ID NO: 1696672 - DNA, 15 bp, Homo sapiens
tgaccttaccatacc

SEQ ID NO: 1696673 - DNA, 15 bp, Homo sapiens
gaccttaccatacct

SEQ ID NO: 1696674 - DNA, 15 bp, Homo sapiens
accttaccatacctg

SEQ ID NO: 1696675 - DNA, 15 bp, Homo sapiens
ccttaccatacctgt

SEQ ID NO: 1696676 - DNA, 15 bp, Homo sapiens
cttaccatacctgta

SEQ ID NO: 1696677 - DNA, 15 bp, Homo sapiens
ttaccatacctgtaa

SEQ ID NO: 1696678 - DNA, 15 bp, Homo sapiens
taccatacctgtaat

SEQ ID NO: 1696679 - DNA, 15 bp, Homo sapiens
accatacctgtaatg

SEQ ID NO: 1696680 - DNA, 15 bp, Homo sapiens
ccatacctgtaatga

SEQ ID NO: 1696681 - DNA, 15 bp, Homo sapiens
catacctgtaatgag

SEQ ID NO: 1696682 - DNA, 15 bp, Homo sapiens
atacctgtaatgaga

SEQ ID NO: 1696683 - DNA, 15 bp, Homo sapiens
tacctgtaatgagag

SEQ ID NO: 1696684 - DNA, 15 bp, Homo sapiens
acctgtaatgagaga

SEQ ID NO: 1696685 - DNA, 15 bp, Homo sapiens
cctgtaatgagagag

SEQ ID NO: 1696686 - DNA, 15 bp, Homo sapiens
ctgtaatgagagagc

SEQ ID NO: 1696687 - DNA, 15 bp, Homo sapiens
tgtaatgagagagct

SEQ ID NO: 1696688 - DNA, 15 bp, Homo sapiens
gtaatgagagagctg

SEQ ID NO: 1696689 - DNA, 15 bp, Homo sapiens
taatgagagagctga

SEQ ID NO: 1696690 - DNA, 15 bp, Homo sapiens
aatgagagagctgat

SEQ ID NO: 1696691 - DNA, 15 bp, Homo sapiens
atgagagagctgatg

SEQ ID NO: 1696692 - DNA, 15 bp, Homo sapiens
tgagagagctgatgt

SEQ ID NO: 1696693 - DNA, 15 bp, Homo sapiens
gagagagctgatgtt

SEQ ID NO: 1696694 - DNA, 15 bp, Homo sapiens
agagagctgatgttg

SEQ ID NO: 1696695 - DNA, 15 bp, Homo sapiens
gagagctgatgttga

SEQ ID NO: 1696696 - DNA, 15 bp, Homo sapiens
agagctgatgttgac

SEQ ID NO: 1696697 - DNA, 15 bp, Homo sapiens
gagctgatgttgaca

SEQ ID NO: 1696698 - DNA, 15 bp, Homo sapiens
agctgatgttgacat

SEQ ID NO: 1696699 - DNA, 15 bp, Homo sapiens
gctgatgttgacatg

SEQ ID NO: 1696700 - DNA, 15 bp, Homo sapiens
ctgatgttgacatgc

SEQ ID NO: 1696701 - DNA, 15 bp, Homo sapiens
tgatgttgacatgcc

SEQ ID NO: 1696702 - DNA, 15 bp, Homo sapiens
gatgttgacatgcca

SEQ ID NO: 1696703 - DNA, 15 bp, Homo sapiens
atgttgacatgccac

SEQ ID NO: 1696704 - DNA, 15 bp, Homo sapiens
tgttgacatgccacg

SEQ ID NO: 1696705 - DNA, 15 bp, Homo sapiens
gttgacatgccacga

SEQ ID NO: 1696706 - DNA, 15 bp, Homo sapiens
ttgacatgccacgac

SEQ ID NO: 1696707 - DNA, 15 bp, Homo sapiens
tgacatgccacgacc

SEQ ID NO: 1696708 - DNA, 15 bp, Homo sapiens
gacatgccacgacct

SEQ ID NO: 1696709 - DNA, 15 bp, Homo sapiens
acatgccacgacctg

SEQ ID NO: 1696710 - DNA, 15 bp, Homo sapiens
catgccacgacctgg

SEQ ID NO: 1696711 - DNA, 15 bp, Homo sapiens
atgccacgacctggc

SEQ ID NO: 1696712 - DNA, 15 bp, Homo sapiens
tgccacgacctggca

SEQ ID NO: 1696713 - DNA, 15 bp, Homo sapiens
gccacgacctggcat

SEQ ID NO: 1696714 - DNA, 15 bp, Homo sapiens
ccacgacctggcatc

SEQ ID NO: 1696715 - DNA, 15 bp, Homo sapiens
cacgacctggcatct

SEQ ID NO: 1696716 - DNA, 15 bp, Homo sapiens
acgacctggcatctg

SEQ ID NO: 1696717 - DNA, 15 bp, Homo sapiens
cgacctggcatctgc

SEQ ID NO: 1696718 - DNA, 15 bp, Homo sapiens
gacctggcatctgcc

SEQ ID NO: 1696719 - DNA, 15 bp, Homo sapiens
acctggcatctgcca

SEQ ID NO: 1696720 - DNA, 15 bp, Homo sapiens
cctggcatctgccaa

SEQ ID NO: 1696721 - DNA, 15 bp, Homo sapiens
ctggcatctgccaag

SEQ ID NO: 1696722 - DNA, 15 bp, Homo sapiens
tggcatctgccaaga

SEQ ID NO: 1696723 - DNA, 15 bp, Homo sapiens
ggcatctgccaagaa

SEQ ID NO: 1696724 - DNA, 15 bp, Homo sapiens
gcatctgccaagaaa

SEQ ID NO: 1696725 - DNA, 15 bp, Homo sapiens
catctgccaagaaag

SEQ ID NO: 1696726 - DNA, 15 bp, Homo sapiens
atctgccaagaaaga

SEQ ID NO: 1696727 - DNA, 15 bp, Homo sapiens
tctgccaagaaagac

SEQ ID NO: 1696728 - DNA, 15 bp, Homo sapiens
ctgccaagaaagact

SEQ ID NO: 1696729 - DNA, 15 bp, Homo sapiens
tgccaagaaagactc

SEQ ID NO: 1696730 - DNA, 15 bp, Homo sapiens
gccaagaaagactct

SEQ ID NO: 1696731 - DNA, 15 bp, Homo sapiens
ccaagaaagactctt

SEQ ID NO: 1696732 - DNA, 15 bp, Homo sapiens
caagaaagactcttt

SEQ ID NO: 1696733 - DNA, 15 bp, Homo sapiens
aagaaagactctttg

SEQ ID NO: 1696734 - DNA, 15 bp, Homo sapiens
agaaagactctttgg

SEQ ID NO: 1696735 - DNA, 15 bp, Homo sapiens
gaaagactctttggg

SEQ ID NO: 1696736 - DNA, 15 bp, Homo sapiens
aaagactctttgggt

SEQ ID NO: 1696737 - DNA, 15 bp, Homo sapiens
aagactctttgggtt

SEQ ID NO: 1696738 - DNA, 15 bp, Homo sapiens
agactctttgggttt

SEQ ID NO: 1696739 - DNA, 15 bp, Homo sapiens
gactctttgggtttc

SEQ ID NO: 1696740 - DNA, 15 bp, Homo sapiens
actctttgggtttct

SEQ ID NO: 1696741 - DNA, 15 bp, Homo sapiens
ctctttgggtttctg

SEQ ID NO: 1696742 - DNA, 15 bp, Homo sapiens
tctttgggtttctgt

SEQ ID NO: 1696743 - DNA, 15 bp, Homo sapiens
ctttgggtttctgtg

SEQ ID NO: 1696744 - DNA, 15 bp, Homo sapiens
tttgggtttctgtgg

SEQ ID NO: 1696745 - DNA, 15 bp, Homo sapiens
ttgggtttctgtggt

SEQ ID NO: 1696746 - DNA, 15 bp, Homo sapiens
tgggtttctgtggta

SEQ ID NO: 1696747 - DNA, 15 bp, Homo sapiens
gggtttctgtggtag

SEQ ID NO: 1696748 - DNA, 15 bp, Homo sapiens
ggtttctgtggtagt

SEQ ID NO: 1696749 - DNA, 15 bp, Homo sapiens
gtttctgtggtagtt

SEQ ID NO: 1696750 - DNA, 15 bp, Homo sapiens
tttctgtggtagttt

SEQ ID NO: 1696751 - DNA, 15 bp, Homo sapiens
ttctgtggtagtttc

SEQ ID NO: 1696752 - DNA, 15 bp, Homo sapiens
tctgtggtagtttcc

SEQ ID NO: 1696753 - DNA, 15 bp, Homo sapiens
ctgtggtagtttccg

SEQ ID NO: 1696754 - DNA, 15 bp, Homo sapiens
tgtggtagtttccgt

SEQ ID NO: 1696755 - DNA, 15 bp, Homo sapiens
gtggtagtttccgtg

SEQ ID NO: 1696756 - DNA, 15 bp, Homo sapiens
tggtagtttccgtga

SEQ ID NO: 1696757 - DNA, 15 bp, Homo sapiens
ggtagtttccgtgaa

SEQ ID NO: 1696758 - DNA, 15 bp, Homo sapiens
gtagtttccgtgaag

SEQ ID NO: 1696759 - DNA, 15 bp, Homo sapiens
tagtttccgtgaagt

SEQ ID NO: 1696760 - DNA, 15 bp, Homo sapiens
agtttccgtgaagtg

SEQ ID NO: 1696761 - DNA, 15 bp, Homo sapiens
gtttccgtgaagtgg

SEQ ID NO: 1696762 - DNA, 15 bp, Homo sapiens
tttccgtgaagtggg

SEQ ID NO: 1696763 - DNA, 15 bp, Homo sapiens
ttccgtgaagtgggg

SEQ ID NO: 1696764 - DNA, 15 bp, Homo sapiens
tccgtgaagtggggt

SEQ ID NO: 1696765 - DNA, 15 bp, Homo sapiens
ccgtgaagtggggtc

SEQ ID NO: 1696766 - DNA, 15 bp, Homo sapiens
cgtgaagtggggtct

SEQ ID NO: 1696767 - DNA, 15 bp, Homo sapiens
gtgaagtggggtctg

SEQ ID NO: 1696768 - DNA, 15 bp, Homo sapiens
tgaagtggggtctgg

SEQ ID NO: 1696769 - DNA, 15 bp, Homo sapiens
gaagtggggtctggg

SEQ ID NO: 1696770 - DNA, 15 bp, Homo sapiens
aagtggggtctgggc

SEQ ID NO: 1696771 - DNA, 15 bp, Homo sapiens
agtggggtctgggcc

SEQ ID NO: 1696772 - DNA, 15 bp, Homo sapiens
gtggggtctgggcca

SEQ ID NO: 1696773 - DNA, 15 bp, Homo sapiens
tggggtctgggccaa

SEQ ID NO: 1696774 - DNA, 15 bp, Homo sapiens
ggggtctgggccaag

SEQ ID NO: 1696775 - DNA, 15 bp, Homo sapiens
gggtctgggccaaga

SEQ ID NO: 1696776 - DNA, 15 bp, Homo sapiens
ggtctgggccaagaa

SEQ ID NO: 1696777 - DNA, 15 bp, Homo sapiens
gtctgggccaagaaa

SEQ ID NO: 1696778 - DNA, 15 bp, Homo sapiens
tctgggccaagaaac

SEQ ID NO: 1696779 - DNA, 15 bp, Homo sapiens
ctgggccaagaaaca

SEQ ID NO: 1696780 - DNA, 15 bp, Homo sapiens
tgggccaagaaacag

SEQ ID NO: 1696781 - DNA, 15 bp, Homo sapiens
gggccaagaaacagg

SEQ ID NO: 1696782 - DNA, 15 bp, Homo sapiens
ggccaagaaacaggt

SEQ ID NO: 1696783 - DNA, 15 bp, Homo sapiens
gccaagaaacaggtt

SEQ ID NO: 1696784 - DNA, 15 bp, Homo sapiens
ccaagaaacaggttt

SEQ ID NO: 1696785 - DNA, 15 bp, Homo sapiens
caagaaacaggtttt

SEQ ID NO: 1696786 - DNA, 15 bp, Homo sapiens
aagaaacaggttttt

SEQ ID NO: 1696787 - DNA, 15 bp, Homo sapiens
agaaacaggtttttc

SEQ ID NO: 1696788 - DNA, 15 bp, Homo sapiens
gaaacaggtttttct

SEQ ID NO: 1696789 - DNA, 15 bp, Homo sapiens
aaacaggtttttctt

SEQ ID NO: 1696790 - DNA, 15 bp, Homo sapiens
aacaggtttttctta

SEQ ID NO: 1696791 - DNA, 15 bp, Homo sapiens
acaggtttttcttaa

SEQ ID NO: 1696792 - DNA, 15 bp, Homo sapiens
caggtttttcttaag

SEQ ID NO: 1696793 - DNA, 15 bp, Homo sapiens
aggtttttcttaagg

SEQ ID NO: 1696794 - DNA, 15 bp, Homo sapiens
ggtttttcttaaggg

SEQ ID NO: 1696795 - DNA, 15 bp, Homo sapiens
gtttttcttaagggg

SEQ ID NO: 1696796 - DNA, 15 bp, Homo sapiens
tttttcttaagggga

SEQ ID NO: 1696797 - DNA, 15 bp, Homo sapiens
ttttcttaaggggaa

SEQ ID NO: 1696798 - DNA, 15 bp, Homo sapiens
tttcttaaggggaac

SEQ ID NO: 1696799 - DNA, 15 bp, Homo sapiens
ttcttaaggggaaca

SEQ ID NO: 1696800 - DNA, 15 bp, Homo sapiens
tcttaaggggaacaa

SEQ ID NO: 1696801 - DNA, 15 bp, Homo sapiens
cttaaggggaacaac

SEQ ID NO: 1696802 - DNA, 15 bp, Homo sapiens
ttaaggggaacaacc

SEQ ID NO: 1696803 - DNA, 15 bp, Homo sapiens
taaggggaacaacca

SEQ ID NO: 1696804 - DNA, 15 bp, Homo sapiens
aaggggaacaaccat

SEQ ID NO: 1696805 - DNA, 15 bp, Homo sapiens
aggggaacaaccatt

SEQ ID NO: 1696806 - DNA, 15 bp, Homo sapiens
ggggaacaaccattc

SEQ ID NO: 1696807 - DNA, 15 bp, Homo sapiens
gggaacaaccattcc

SEQ ID NO: 1696808 - DNA, 15 bp, Homo sapiens
ggaacaaccattcct

SEQ ID NO: 1696809 - DNA, 15 bp, Homo sapiens
gaacaaccattcctt

SEQ ID NO: 1696810 - DNA, 15 bp, Homo sapiens
aacaaccattccttt

SEQ ID NO: 1696811 - DNA, 15 bp, Homo sapiens
acaaccattcctttg

SEQ ID NO: 1696812 - DNA, 15 bp, Homo sapiens
caaccattcctttgc

SEQ ID NO: 1696813 - DNA, 15 bp, Homo sapiens
aaccattcctttgca

SEQ ID NO: 1696814 - DNA, 15 bp, Homo sapiens
accattcctttgcaa

SEQ ID NO: 1696815 - DNA, 15 bp, Homo sapiens
ccattcctttgcaaa

SEQ ID NO: 1696816 - DNA, 15 bp, Homo sapiens
cattcctttgcaaag

SEQ ID NO: 1696817 - DNA, 15 bp, Homo sapiens
attcctttgcaaagt

SEQ ID NO: 1696818 - DNA, 15 bp, Homo sapiens
ttcctttgcaaagtt

SEQ ID NO: 1696819 - DNA, 15 bp, Homo sapiens
tcctttgcaaagttg

SEQ ID NO: 1696820 - DNA, 15 bp, Homo sapiens
cctttgcaaagttgc

SEQ ID NO: 1696821 - DNA, 15 bp, Homo sapiens
ctttgcaaagttgcc

SEQ ID NO: 1696822 - DNA, 15 bp, Homo sapiens
tttgcaaagttgccc

SEQ ID NO: 1696823 - DNA, 15 bp, Homo sapiens
ttgcaaagttgccct

SEQ ID NO: 1696824 - DNA, 15 bp, Homo sapiens
tgcaaagttgccctt

SEQ ID NO: 1696825 - DNA, 15 bp, Homo sapiens
gcaaagttgcccttt

SEQ ID NO: 1696826 - DNA, 15 bp, Homo sapiens
caaagttgccctttc

SEQ ID NO: 1696827 - DNA, 15 bp, Homo sapiens
aaagttgccctttct

SEQ ID NO: 1696828 - DNA, 15 bp, Homo sapiens
aagttgccctttcta

SEQ ID NO: 1696829 - DNA, 15 bp, Homo sapiens
agttgccctttctat

SEQ ID NO: 1696830 - DNA, 15 bp, Homo sapiens
gttgccctttctata

SEQ ID NO: 1696831 - DNA, 15 bp, Homo sapiens
ttgccctttctatag

SEQ ID NO: 1696832 - DNA, 15 bp, Homo sapiens
tgccctttctatagg

SEQ ID NO: 1696833 - DNA, 15 bp, Homo sapiens
gccctttctatagga

SEQ ID NO: 1696834 - DNA, 15 bp, Homo sapiens
ccctttctataggac

SEQ ID NO: 1696835 - DNA, 15 bp, Homo sapiens
cctttctataggact

SEQ ID NO: 1696836 - DNA, 15 bp, Homo sapiens
ctttctataggactc

SEQ ID NO: 1696837 - DNA, 15 bp, Homo sapiens
tttctataggactca

SEQ ID NO: 1696838 - DNA, 15 bp, Homo sapiens
ttctataggactcag

SEQ ID NO: 1696839 - DNA, 15 bp, Homo sapiens
tctataggactcagt

SEQ ID NO: 1696840 - DNA, 15 bp, Homo sapiens
ctataggactcagtg

SEQ ID NO: 1696841 - DNA, 15 bp, Homo sapiens
tataggactcagtgg

SEQ ID NO: 1696842 - DNA, 15 bp, Homo sapiens
ataggactcagtggg

SEQ ID NO: 1696843 - DNA, 15 bp, Homo sapiens
taggactcagtggga

SEQ ID NO: 1696844 - DNA, 15 bp, Homo sapiens
aggactcagtgggag

SEQ ID NO: 1696845 - DNA, 15 bp, Homo sapiens
ggactcagtgggaga

SEQ ID NO: 1696846 - DNA, 15 bp, Homo sapiens
gactcagtgggagaa

SEQ ID NO: 1696847 - DNA, 15 bp, Homo sapiens
actcagtgggagaac

SEQ ID NO: 1696848 - DNA, 15 bp, Homo sapiens
ctcagtgggagaaca

SEQ ID NO: 1696849 - DNA, 15 bp, Homo sapiens
tcagtgggagaacag

SEQ ID NO: 1696850 - DNA, 15 bp, Homo sapiens
cagtgggagaacagt

SEQ ID NO: 1696851 - DNA, 15 bp, Homo sapiens
agtgggagaacagtc

SEQ ID NO: 1696852 - DNA, 15 bp, Homo sapiens
gtgggagaacagtca

SEQ ID NO: 1696853 - DNA, 15 bp, Homo sapiens
tgggagaacagtcag

SEQ ID NO: 1696854 - DNA, 15 bp, Homo sapiens
gggagaacagtcaga

SEQ ID NO: 1696855 - DNA, 15 bp, Homo sapiens
ggagaacagtcagag

SEQ ID NO: 1696856 - DNA, 15 bp, Homo sapiens
gagaacagtcagagg

SEQ ID NO: 1696857 - DNA, 15 bp, Homo sapiens
agaacagtcagagga

SEQ ID NO: 1696858 - DNA, 15 bp, Homo sapiens
gaacagtcagaggaa

SEQ ID NO: 1696859 - DNA, 15 bp, Homo sapiens
aacagtcagaggaag

SEQ ID NO: 1696860 - DNA, 15 bp, Homo sapiens
acagtcagaggaaga

SEQ ID NO: 1696861 - DNA, 15 bp, Homo sapiens
cagtcagaggaagaa

SEQ ID NO: 1696862 - DNA, 15 bp, Homo sapiens
agtcagaggaagaaa

SEQ ID NO: 1696863 - DNA, 15 bp, Homo sapiens
gtcagaggaagaaaa

SEQ ID NO: 1696864 - DNA, 15 bp, Homo sapiens
tcagaggaagaaaag

SEQ ID NO: 1696865 - DNA, 15 bp, Homo sapiens
cagaggaagaaaagc

SEQ ID NO: 1696866 - DNA, 15 bp, Homo sapiens
agaggaagaaaagca

SEQ ID NO: 1696867 - DNA, 15 bp, Homo sapiens
gaggaagaaaagcat

SEQ ID NO: 1696868 - DNA, 15 bp, Homo sapiens
aggaagaaaagcatt

SEQ ID NO: 1696869 - DNA, 15 bp, Homo sapiens
ggaagaaaagcattg

SEQ ID NO: 1696870 - DNA, 15 bp, Homo sapiens
gaagaaaagcattgt

SEQ ID NO: 1696871 - DNA, 15 bp, Homo sapiens
aagaaaagcattgta

SEQ ID NO: 1696872 - DNA, 15 bp, Homo sapiens
agaaaagcattgtag

SEQ ID NO: 1696873 - DNA, 15 bp, Homo sapiens
gaaaagcattgtagt

SEQ ID NO: 1696874 - DNA, 15 bp, Homo sapiens
aaaagcattgtagta

SEQ ID NO: 1696875 - DNA, 15 bp, Homo sapiens
aaagcattgtagtag

SEQ ID NO: 1696876 - DNA, 15 bp, Homo sapiens
aagcattgtagtaga

SEQ ID NO: 1696877 - DNA, 15 bp, Homo sapiens
agcattgtagtagat

SEQ ID NO: 1696878 - DNA, 15 bp, Homo sapiens
gcattgtagtagatc

SEQ ID NO: 1696879 - DNA, 15 bp, Homo sapiens
cattgtagtagatct

SEQ ID NO: 1696880 - DNA, 15 bp, Homo sapiens
attgtagtagatctg

SEQ ID NO: 1696881 - DNA, 15 bp, Homo sapiens
ttgtagtagatctga

SEQ ID NO: 1696882 - DNA, 15 bp, Homo sapiens
tgtagtagatctgaa

SEQ ID NO: 1696883 - DNA, 15 bp, Homo sapiens
gtagtagatctgaac

SEQ ID NO: 1696884 - DNA, 15 bp, Homo sapiens
tagtagatctgaacc

SEQ ID NO: 1696885 - DNA, 15 bp, Homo sapiens
agtagatctgaacct

SEQ ID NO: 1696886 - DNA, 15 bp, Homo sapiens
gtagatctgaacctt

SEQ ID NO: 1696887 - DNA, 15 bp, Homo sapiens
tagatctgaaccttt

SEQ ID NO: 1696888 - DNA, 15 bp, Homo sapiens
agatctgaacctttg

SEQ ID NO: 1696889 - DNA, 15 bp, Homo sapiens
gatctgaacctttga

SEQ ID NO: 1696890 - DNA, 15 bp, Homo sapiens
atctgaacctttgat

SEQ ID NO: 1696891 - DNA, 15 bp, Homo sapiens
tctgaacctttgatt

SEQ ID NO: 1696892 - DNA, 15 bp, Homo sapiens
ctgaacctttgattc

SEQ ID NO: 1696893 - DNA, 15 bp, Homo sapiens
tgaacctttgattct

SEQ ID NO: 1696894 - DNA, 15 bp, Homo sapiens
gaacctttgattctt

SEQ ID NO: 1696895 - DNA, 15 bp, Homo sapiens
aacctttgattcttt

SEQ ID NO: 1696896 - DNA, 15 bp, Homo sapiens
acctttgattctttc

SEQ ID NO: 1696897 - DNA, 15 bp, Homo sapiens
cctttgattctttct

SEQ ID NO: 1696898 - DNA, 15 bp, Homo sapiens
ctttgattctttctc

SEQ ID NO: 1696899 - DNA, 15 bp, Homo sapiens
tttgattctttctcc

SEQ ID NO: 1696900 - DNA, 15 bp, Homo sapiens
ttgattctttctccg

SEQ ID NO: 1696901 - DNA, 15 bp, Homo sapiens
tgattctttctccgg

SEQ ID NO: 1696902 - DNA, 15 bp, Homo sapiens
gattctttctccgga

SEQ ID NO: 1696903 - DNA, 15 bp, Homo sapiens
attctttctccggac

SEQ ID NO: 1696904 - DNA, 15 bp, Homo sapiens
ttctttctccggaca

SEQ ID NO: 1696905 - DNA, 15 bp, Homo sapiens
tctttctccggacaa

SEQ ID NO: 1696906 - DNA, 15 bp, Homo sapiens
ctttctccggacaaa

SEQ ID NO: 1696907 - DNA, 15 bp, Homo sapiens
tttctccggacaaaa

SEQ ID NO: 1696908 - DNA, 15 bp, Homo sapiens
ttctccggacaaaat

SEQ ID NO: 1696909 - DNA, 15 bp, Homo sapiens
tctccggacaaaatg

SEQ ID NO: 1696910 - DNA, 15 bp, Homo sapiens
ctccggacaaaatgc

SEQ ID NO: 1696911 - DNA, 15 bp, Homo sapiens
tccggacaaaatgcc

SEQ ID NO: 1696912 - DNA, 15 bp, Homo sapiens
ccggacaaaatgccc

SEQ ID NO: 1696913 - DNA, 15 bp, Homo sapiens
cggacaaaatgccct

SEQ ID NO: 1696914 - DNA, 15 bp, Homo sapiens
ggacaaaatgccctt

SEQ ID NO: 1696915 - DNA, 15 bp, Homo sapiens
gacaaaatgcccttt

SEQ ID NO: 1696916 - DNA, 15 bp, Homo sapiens
acaaaatgccctttt

SEQ ID NO: 1696917 - DNA, 15 bp, Homo sapiens
caaaatgcccttttt

SEQ ID NO: 1696918 - DNA, 15 bp, Homo sapiens
aaaatgcccttttta

SEQ ID NO: 1696919 - DNA, 15 bp, Homo sapiens
aaatgccctttttat

SEQ ID NO: 1696920 - DNA, 15 bp, Homo sapiens
aatgccctttttatt

SEQ ID NO: 1696921 - DNA, 15 bp, Homo sapiens
atgccctttttattg

SEQ ID NO: 1696922 - DNA, 15 bp, Homo sapiens
tgccctttttattgt

SEQ ID NO: 1696923 - DNA, 15 bp, Homo sapiens
gccctttttattgtg

SEQ ID NO: 1696924 - DNA, 15 bp, Homo sapiens
ccctttttattgtgg

SEQ ID NO: 1696925 - DNA, 15 bp, Homo sapiens
cctttttattgtggg

SEQ ID NO: 1696926 - DNA, 15 bp, Homo sapiens
ctttttattgtgggg

SEQ ID NO: 1696927 - DNA, 15 bp, Homo sapiens
tttttattgtggggc

SEQ ID NO: 1696928 - DNA, 15 bp, Homo sapiens
ttttattgtggggct

SEQ ID NO: 1696929 - DNA, 15 bp, Homo sapiens
tttattgtggggctc

SEQ ID NO: 1696930 - DNA, 15 bp, Homo sapiens
ttattgtggggctca

SEQ ID NO: 1696931 - DNA, 15 bp, Homo sapiens
tattgtggggctcag

SEQ ID NO: 1696932 - DNA, 15 bp, Homo sapiens
attgtggggctcaga

SEQ ID NO: 1696933 - DNA, 15 bp, Homo sapiens
ttgtggggctcagat

SEQ ID NO: 1696934 - DNA, 15 bp, Homo sapiens
tgtggggctcagatc

SEQ ID NO: 1696935 - DNA, 15 bp, Homo sapiens
gtggggctcagatct

SEQ ID NO: 1696936 - DNA, 15 bp, Homo sapiens
tggggctcagatctc

SEQ ID NO: 1696937 - DNA, 15 bp, Homo sapiens
ggggctcagatctca

SEQ ID NO: 1696938 - DNA, 15 bp, Homo sapiens
gggctcagatctcag

SEQ ID NO: 1696939 - DNA, 15 bp, Homo sapiens
ggctcagatctcaga

SEQ ID NO: 1696940 - DNA, 15 bp, Homo sapiens
gctcagatctcagag

SEQ ID NO: 1696941 - DNA, 15 bp, Homo sapiens
ctcagatctcagagg

SEQ ID NO: 1696942 - DNA, 15 bp, Homo sapiens
tcagatctcagaggc

SEQ ID NO: 1696943 - DNA, 15 bp, Homo sapiens
cagatctcagaggcg

SEQ ID NO: 1696944 - DNA, 15 bp, Homo sapiens
agatctcagaggcga

SEQ ID NO: 1696945 - DNA, 15 bp, Homo sapiens
gatctcagaggcgag

SEQ ID NO: 1696946 - DNA, 15 bp, Homo sapiens
atctcagaggcgagt

SEQ ID NO: 1696947 - DNA, 15 bp, Homo sapiens
tctcagaggcgagtc

SEQ ID NO: 1696948 - DNA, 15 bp, Homo sapiens
ctcagaggcgagtct

SEQ ID NO: 1696949 - DNA, 15 bp, Homo sapiens
tcagaggcgagtctg

SEQ ID NO: 1696950 - DNA, 15 bp, Homo sapiens
cagaggcgagtctga

SEQ ID NO: 1696951 - DNA, 15 bp, Homo sapiens
agaggcgagtctgac

SEQ ID NO: 1696952 - DNA, 15 bp, Homo sapiens
gaggcgagtctgaca

SEQ ID NO: 1696953 - DNA, 15 bp, Homo sapiens
aggcgagtctgacag

SEQ ID NO: 1696954 - DNA, 15 bp, Homo sapiens
ggcgagtctgacagc

SEQ ID NO: 1696955 - DNA, 15 bp, Homo sapiens
gcgagtctgacagca

SEQ ID NO: 1696956 - DNA, 15 bp, Homo sapiens
cgagtctgacagcag

SEQ ID NO: 1696957 - DNA, 15 bp, Homo sapiens
gagtctgacagcagg

SEQ ID NO: 1696958 - DNA, 15 bp, Homo sapiens
agtctgacagcaggt

SEQ ID NO: 1696959 - DNA, 15 bp, Homo sapiens
gtctgacagcaggtt

SEQ ID NO: 1696960 - DNA, 15 bp, Homo sapiens
tctgacagcaggttc

SEQ ID NO: 1696961 - DNA, 15 bp, Homo sapiens
ctgacagcaggttca

SEQ ID NO: 1696962 - DNA, 15 bp, Homo sapiens
tgacagcaggttcaa

SEQ ID NO: 1696963 - DNA, 15 bp, Homo sapiens
gacagcaggttcaag

SEQ ID NO: 1696964 - DNA, 15 bp, Homo sapiens
acagcaggttcaagt

SEQ ID NO: 1696965 - DNA, 15 bp, Homo sapiens
cagcaggttcaagta

SEQ ID NO: 1696966 - DNA, 15 bp, Homo sapiens
agcaggttcaagtag

SEQ ID NO: 1696967 - DNA, 15 bp, Homo sapiens
gcaggttcaagtagg

SEQ ID NO: 1696968 - DNA, 15 bp, Homo sapiens
caggttcaagtagga

SEQ ID NO: 1696969 - DNA, 15 bp, Homo sapiens
aggttcaagtaggag

SEQ ID NO: 1696970 - DNA, 15 bp, Homo sapiens
ggttcaagtaggaga

SEQ ID NO: 1696971 - DNA, 15 bp, Homo sapiens
gttcaagtaggagat

SEQ ID NO: 1696972 - DNA, 15 bp, Homo sapiens
ttcaagtaggagatc

SEQ ID NO: 1696973 - DNA, 15 bp, Homo sapiens
tcaagtaggagatct

SEQ ID NO: 1696974 - DNA, 15 bp, Homo sapiens
caagtaggagatctg

SEQ ID NO: 1696975 - DNA, 15 bp, Homo sapiens
aagtaggagatctga

SEQ ID NO: 1696976 - DNA, 15 bp, Homo sapiens
agtaggagatctgaa

SEQ ID NO: 1696977 - DNA, 15 bp, Homo sapiens
gtaggagatctgaac

SEQ ID NO: 1696978 - DNA, 15 bp, Homo sapiens
taggagatctgaacc

SEQ ID NO: 1696979 - DNA, 15 bp, Homo sapiens
aggagatctgaaccc

SEQ ID NO: 1696980 - DNA, 15 bp, Homo sapiens
ggagatctgaacccc

SEQ ID NO: 1696981 - DNA, 15 bp, Homo sapiens
gagatctgaacccct

SEQ ID NO: 1696982 - DNA, 15 bp, Homo sapiens
agatctgaacccctc

SEQ ID NO: 1696983 - DNA, 15 bp, Homo sapiens
gatctgaacccctca

SEQ ID NO: 1696984 - DNA, 15 bp, Homo sapiens
atctgaacccctcaa

SEQ ID NO: 1696985 - DNA, 15 bp, Homo sapiens
tctgaacccctcaaa

SEQ ID NO: 1696986 - DNA, 15 bp, Homo sapiens
ctgaacccctcaaat

SEQ ID NO: 1696987 - DNA, 15 bp, Homo sapiens
tgaacccctcaaatc

SEQ ID NO: 1696988 - DNA, 15 bp, Homo sapiens
gaacccctcaaatca

SEQ ID NO: 1696989 - DNA, 15 bp, Homo sapiens
aacccctcaaatcaa

SEQ ID NO: 1696990 - DNA, 15 bp, Homo sapiens
acccctcaaatcaat

SEQ ID NO: 1696991 - DNA, 15 bp, Homo sapiens
cccctcaaatcaatt

SEQ ID NO: 1696992 - DNA, 15 bp, Homo sapiens
ccctcaaatcaatta

SEQ ID NO: 1696993 - DNA, 15 bp, Homo sapiens
cctcaaatcaattaa

SEQ ID NO: 1696994 - DNA, 15 bp, Homo sapiens
ctcaaatcaattaag

SEQ ID NO: 1696995 - DNA, 15 bp, Homo sapiens
tcaaatcaattaagc

SEQ ID NO: 1696996 - DNA, 15 bp, Homo sapiens
caaatcaattaagct

SEQ ID NO: 1696997 - DNA, 15 bp, Homo sapiens
aaatcaattaagcta

SEQ ID NO: 1696998 - DNA, 15 bp, Homo sapiens
aatcaattaagctaa

SEQ ID NO: 1696999 - DNA, 15 bp, Homo sapiens
atcaattaagctaaa

SEQ ID NO: 1697000 - DNA, 15 bp, Homo sapiens
tcaattaagctaaac

SEQ ID NO: 1697001 - DNA, 15 bp, Homo sapiens
caattaagctaaact

SEQ ID NO: 1697002 - DNA, 15 bp, Homo sapiens
aattaagctaaacta

SEQ ID NO: 1697003 - DNA, 15 bp, Homo sapiens
attaagctaaactac

SEQ ID NO: 1697004 - DNA, 15 bp, Homo sapiens
ttaagctaaactact

SEQ ID NO: 1697005 - DNA, 15 bp, Homo sapiens
taagctaaactactt

SEQ ID NO: 1697006 - DNA, 15 bp, Homo sapiens
aagctaaactacttt

SEQ ID NO: 1697007 - DNA, 15 bp, Homo sapiens
agctaaactactttc

SEQ ID NO: 1697008 - DNA, 15 bp, Homo sapiens
gctaaactactttcc

SEQ ID NO: 1697009 - DNA, 15 bp, Homo sapiens
ctaaactactttcca

SEQ ID NO: 1697010 - DNA, 15 bp, Homo sapiens
taaactactttccac

SEQ ID NO: 1697011 - DNA, 15 bp, Homo sapiens
aaactactttccact

SEQ ID NO: 1697012 - DNA, 15 bp, Homo sapiens
aactactttccactc

SEQ ID NO: 1697013 - DNA, 15 bp, Homo sapiens
actactttccactct

SEQ ID NO: 1697014 - DNA, 15 bp, Homo sapiens
ctactttccactcta

SEQ ID NO: 1697015 - DNA, 15 bp, Homo sapiens
tactttccactctag

SEQ ID NO: 1697016 - DNA, 15 bp, Homo sapiens
actttccactctagt

SEQ ID NO: 1697017 - DNA, 15 bp, Homo sapiens
ctttccactctagtt

SEQ ID NO: 1697018 - DNA, 15 bp, Homo sapiens
tttccactctagttt

SEQ ID NO: 1697019 - DNA, 15 bp, Homo sapiens
ttccactctagtttt

SEQ ID NO: 1697020 - DNA, 15 bp, Homo sapiens
tccactctagttttt

SEQ ID NO: 1697021 - DNA, 15 bp, Homo sapiens
ccactctagttttta

SEQ ID NO: 1697022 - DNA, 15 bp, Homo sapiens
cactctagtttttaa

SEQ ID NO: 1697023 - DNA, 15 bp, Homo sapiens
actctagtttttaaa

SEQ ID NO: 1697024 - DNA, 15 bp, Homo sapiens
ctctagtttttaaac

SEQ ID NO: 1697025 - DNA, 15 bp, Homo sapiens
tctagtttttaaacc

SEQ ID NO: 1697026 - DNA, 15 bp, Homo sapiens
ctagtttttaaacca

SEQ ID NO: 1697027 - DNA, 15 bp, Homo sapiens
tagtttttaaaccat

SEQ ID NO: 1697028 - DNA, 15 bp, Homo sapiens
agtttttaaaccatt

SEQ ID NO: 1697029 - DNA, 15 bp, Homo sapiens
gtttttaaaccattc

SEQ ID NO: 1697030 - DNA, 15 bp, Homo sapiens
tttttaaaccattca

SEQ ID NO: 1697031 - DNA, 15 bp, Homo sapiens
ttttaaaccattcaa

SEQ ID NO: 1697032 - DNA, 15 bp, Homo sapiens
tttaaaccattcaaa

SEQ ID NO: 1697033 - DNA, 15 bp, Homo sapiens
ttaaaccattcaaaa

SEQ ID NO: 1697034 - DNA, 15 bp, Homo sapiens
taaaccattcaaaaa

SEQ ID NO: 1697035 - DNA, 15 bp, Homo sapiens
aaaccattcaaaaag

SEQ ID NO: 1697036 - DNA, 15 bp, Homo sapiens
aaccattcaaaaagc

SEQ ID NO: 1697037 - DNA, 15 bp, Homo sapiens
accattcaaaaagcc

SEQ ID NO: 1697038 - DNA, 15 bp, Homo sapiens
ccattcaaaaagcca

SEQ ID NO: 1697039 - DNA, 15 bp, Homo sapiens
cattcaaaaagccat

SEQ ID NO: 1697040 - DNA, 15 bp, Homo sapiens
attcaaaaagccatg

SEQ ID NO: 1697041 - DNA, 15 bp, Homo sapiens
ttcaaaaagccatgt

SEQ ID NO: 1697042 - DNA, 15 bp, Homo sapiens
tcaaaaagccatgtg

SEQ ID NO: 1697043 - DNA, 15 bp, Homo sapiens
caaaaagccatgtgg

SEQ ID NO: 1697044 - DNA, 15 bp, Homo sapiens
aaaaagccatgtggg

SEQ ID NO: 1697045 - DNA, 15 bp, Homo sapiens
aaaagccatgtgggt

SEQ ID NO: 1697046 - DNA, 15 bp, Homo sapiens
aaagccatgtgggtg

SEQ ID NO: 1697047 - DNA, 15 bp, Homo sapiens
aagccatgtgggtga

SEQ ID NO: 1697048 - DNA, 15 bp, Homo sapiens
agccatgtgggtgat

SEQ ID NO: 1697049 - DNA, 15 bp, Homo sapiens
gccatgtgggtgata

SEQ ID NO: 1697050 - DNA, 15 bp, Homo sapiens
ccatgtgggtgatag

SEQ ID NO: 1697051 - DNA, 15 bp, Homo sapiens
catgtgggtgataga

SEQ ID NO: 1697052 - DNA, 15 bp, Homo sapiens
atgtgggtgatagaa

SEQ ID NO: 1697053 - DNA, 15 bp, Homo sapiens
tgtgggtgatagaaa

SEQ ID NO: 1697054 - DNA, 15 bp, Homo sapiens
gtgggtgatagaaaa

SEQ ID NO: 1697055 - DNA, 15 bp, Homo sapiens
tgggtgatagaaaat

SEQ ID NO: 1697056 - DNA, 15 bp, Homo sapiens
gggtgatagaaaata

SEQ ID NO: 1697057 - DNA, 15 bp, Homo sapiens
ggtgatagaaaataa

SEQ ID NO: 1697058 - DNA, 15 bp, Homo sapiens
gtgatagaaaataaa

SEQ ID NO: 1697059 - DNA, 15 bp, Homo sapiens
tgatagaaaataaaa

SEQ ID NO: 1697060 - DNA, 15 bp, Homo sapiens
gatagaaaataaaag

SEQ ID NO: 1697061 - DNA, 15 bp, Homo sapiens
atagaaaataaaagt

SEQ ID NO: 1697062 - DNA, 15 bp, Homo sapiens
tagaaaataaaagtt

SEQ ID NO: 1697063 - DNA, 15 bp, Homo sapiens
agaaaataaaagttt

SEQ ID NO: 1697064 - DNA, 15 bp, Homo sapiens
gaaaataaaagtttt

SEQ ID NO: 1697065 - DNA, 15 bp, Homo sapiens
aaaataaaagttttt

SEQ ID NO: 1697066 - DNA, 15 bp, Homo sapiens
aaataaaagtttttc

SEQ ID NO: 1697067 - DNA, 15 bp, Homo sapiens
aataaaagtttttca

SEQ ID NO: 1697068 - DNA, 15 bp, Homo sapiens
tcagcctcctgagtg

SEQ ID NO: 1697069 - DNA, 15 bp, Homo sapiens
cagcctcctgagtgg

SEQ ID NO: 1697070 - DNA, 15 bp, Homo sapiens
agcctcctgagtggc

SEQ ID NO: 1697071 - DNA, 15 bp, Homo sapiens
gcctcctgagtggct

SEQ ID NO: 1697072 - DNA, 15 bp, Homo sapiens
cctcctgagtggctg

SEQ ID NO: 1697073 - DNA, 15 bp, Homo sapiens
ctcctgagtggctgg

SEQ ID NO: 1697074 - DNA, 15 bp, Homo sapiens
tcctgagtggctggg

SEQ ID NO: 1697075 - DNA, 15 bp, Homo sapiens
cctgagtggctggga

SEQ ID NO: 1697076 - DNA, 15 bp, Homo sapiens
ctgagtggctgggac

SEQ ID NO: 1697077 - DNA, 15 bp, Homo sapiens
tgagtggctgggact

SEQ ID NO: 1697078 - DNA, 15 bp, Homo sapiens
gagtggctgggacta

SEQ ID NO: 1697079 - DNA, 15 bp, Homo sapiens
agtggctgggactac

SEQ ID NO: 1697080 - DNA, 15 bp, Homo sapiens
gtggctgggactaca

SEQ ID NO: 1697081 - DNA, 15 bp, Homo sapiens
tggctgggactacaa

SEQ ID NO: 1697082 - DNA, 15 bp, Homo sapiens
ggctgggactacaag

SEQ ID NO: 1697083 - DNA, 15 bp, Homo sapiens
gctgggactacaagc

SEQ ID NO: 1697084 - DNA, 15 bp, Homo sapiens
ctgggactacaagca

SEQ ID NO: 1697085 - DNA, 15 bp, Homo sapiens
tgggactacaagcac

SEQ ID NO: 1697086 - DNA, 15 bp, Homo sapiens
gggactacaagcaca

SEQ ID NO: 1697087 - DNA, 15 bp, Homo sapiens
ggactacaagcacat

SEQ ID NO: 1697088 - DNA, 15 bp, Homo sapiens
gactacaagcacata

SEQ ID NO: 1697089 - DNA, 15 bp, Homo sapiens
actacaagcacatac

SEQ ID NO: 1697090 - DNA, 15 bp, Homo sapiens
ctacaagcacatact

SEQ ID NO: 1697091 - DNA, 15 bp, Homo sapiens
tacaagcacatactt

SEQ ID NO: 1697092 - DNA, 15 bp, Homo sapiens
acaagcacatacttt

SEQ ID NO: 1697093 - DNA, 15 bp, Homo sapiens
caagcacatactttc

SEQ ID NO: 1697094 - DNA, 15 bp, Homo sapiens
aagcacatactttca

SEQ ID NO: 1697095 - DNA, 15 bp, Homo sapiens
agcacatactttcat

SEQ ID NO: 1697096 - DNA, 15 bp, Homo sapiens
gcacatactttcatg

SEQ ID NO: 1697097 - DNA, 15 bp, Homo sapiens
cacatactttcatgc

SEQ ID NO: 1697098 - DNA, 15 bp, Homo sapiens
acatactttcatgcc

SEQ ID NO: 1697099 - DNA, 15 bp, Homo sapiens
catactttcatgcct

SEQ ID NO: 1697100 - DNA, 15 bp, Homo sapiens
atactttcatgcctg

SEQ ID NO: 1697101 - DNA, 15 bp, Homo sapiens
tactttcatgcctgg

SEQ ID NO: 1697102 - DNA, 15 bp, Homo sapiens
actttcatgcctggc

SEQ ID NO: 1697103 - DNA, 15 bp, Homo sapiens
ctttcatgcctggct

SEQ ID NO: 1697104 - DNA, 15 bp, Homo sapiens
tttcatgcctggctg

SEQ ID NO: 1697105 - DNA, 15 bp, Homo sapiens
ttcatgcctggctga

SEQ ID NO: 1697106 - DNA, 15 bp, Homo sapiens
tcatgcctggctgaa

SEQ ID NO: 1697107 - DNA, 15 bp, Homo sapiens
catgcctggctgaat

SEQ ID NO: 1697108 - DNA, 15 bp, Homo sapiens
atgcctggctgaatg

SEQ ID NO: 1697109 - DNA, 15 bp, Homo sapiens
tgcctggctgaatgt

SEQ ID NO: 1697110 - DNA, 15 bp, Homo sapiens
gcctggctgaatgtt

SEQ ID NO: 1697111 - DNA, 15 bp, Homo sapiens
cctggctgaatgttt

SEQ ID NO: 1697112 - DNA, 15 bp, Homo sapiens
ctggctgaatgtttt

SEQ ID NO: 1697113 - DNA, 15 bp, Homo sapiens
tggctgaatgtttta

SEQ ID NO: 1697114 - DNA, 15 bp, Homo sapiens
ggctgaatgttttaa

SEQ ID NO: 1697115 - DNA, 15 bp, Homo sapiens
gctgaatgttttaat

SEQ ID NO: 1697116 - DNA, 15 bp, Homo sapiens
ctgaatgttttaatt

SEQ ID NO: 1697117 - DNA, 15 bp, Homo sapiens
tgaatgttttaattt

SEQ ID NO: 1697118 - DNA, 15 bp, Homo sapiens
gaatgttttaatttt

SEQ ID NO: 1697119 - DNA, 15 bp, Homo sapiens
atgttttaatttttg

SEQ ID NO: 1697120 - DNA, 15 bp, Homo sapiens
tgttttaatttttgt

SEQ ID NO: 1697121 - DNA, 15 bp, Homo sapiens
gttttaatttttgtg

SEQ ID NO: 1697122 - DNA, 15 bp, Homo sapiens
tttaatttttgtgga

SEQ ID NO: 1697123 - DNA, 15 bp, Homo sapiens
ttaatttttgtggag

SEQ ID NO: 1697124 - DNA, 15 bp, Homo sapiens
aatttttgtggagac

SEQ ID NO: 1697125 - DNA, 15 bp, Homo sapiens
atttttgtggagaca

SEQ ID NO: 1697126 - DNA, 15 bp, Homo sapiens
tttttgtggagacag

SEQ ID NO: 1697127 - DNA, 15 bp, Homo sapiens
acagagtctcactac

SEQ ID NO: 1697128 - DNA, 15 bp, Homo sapiens
cagagtctcactaca

SEQ ID NO: 1697129 - DNA, 15 bp, Homo sapiens
agagtctcactacat

SEQ ID NO: 1697130 - DNA, 15 bp, Homo sapiens
gagtctcactacatt

SEQ ID NO: 1697131 - DNA, 15 bp, Homo sapiens
agtctcactacattg

SEQ ID NO: 1697132 - DNA, 15 bp, Homo sapiens
gtctcactacattgc

SEQ ID NO: 1697133 - DNA, 15 bp, Homo sapiens
tctcactacattgct

SEQ ID NO: 1697134 - DNA, 15 bp, Homo sapiens
ctcactacattgctg

SEQ ID NO: 1697135 - DNA, 15 bp, Homo sapiens
tcactacattgctga

SEQ ID NO: 1697136 - DNA, 15 bp, Homo sapiens
cactacattgctgag

SEQ ID NO: 1697137 - DNA, 15 bp, Homo sapiens
actacattgctgagg

SEQ ID NO: 1697138 - DNA, 15 bp, Homo sapiens
ctacattgctgaggc

SEQ ID NO: 1697139 - DNA, 15 bp, Homo sapiens
tacattgctgaggct

SEQ ID NO: 1697140 - DNA, 15 bp, Homo sapiens
acattgctgaggctg

SEQ ID NO: 1697141 - DNA, 15 bp, Homo sapiens
cattgctgaggctga

SEQ ID NO: 1697142 - DNA, 15 bp, Homo sapiens
attgctgaggctgac

SEQ ID NO: 1697143 - DNA, 15 bp, Homo sapiens
ttgctgaggctgacc

SEQ ID NO: 1697144 - DNA, 15 bp, Homo sapiens
tgctgaggctgacct

SEQ ID NO: 1697145 - DNA, 15 bp, Homo sapiens
gctgaggctgacctc

SEQ ID NO: 1697146 - DNA, 15 bp, Homo sapiens
ctgaggctgacctca

SEQ ID NO: 1697147 - DNA, 15 bp, Homo sapiens
tgaggctgacctcaa

SEQ ID NO: 1697148 - DNA, 15 bp, Homo sapiens
gaggctgacctcaaa

SEQ ID NO: 1697149 - DNA, 15 bp, Homo sapiens
aggctgacctcaaac

SEQ ID NO: 1697150 - DNA, 15 bp, Homo sapiens
ggctgacctcaaact

SEQ ID NO: 1697151 - DNA, 15 bp, Homo sapiens
gctgacctcaaactc

SEQ ID NO: 1697152 - DNA, 15 bp, Homo sapiens
ctgacctcaaactct

SEQ ID NO: 1697153 - DNA, 15 bp, Homo sapiens
tgacctcaaactctt

SEQ ID NO: 1697154 - DNA, 15 bp, Homo sapiens
gacctcaaactcttg

SEQ ID NO: 1697155 - DNA, 15 bp, Homo sapiens
acctcaaactcttgg

SEQ ID NO: 1697156 - DNA, 15 bp, Homo sapiens
cctcaaactcttggc

SEQ ID NO: 1697157 - DNA, 15 bp, Homo sapiens
ctcaaactcttggcc

SEQ ID NO: 1697158 - DNA, 15 bp, Homo sapiens
tcaaactcttggcct

SEQ ID NO: 1697159 - DNA, 15 bp, Homo sapiens
caaactcttggcctc

SEQ ID NO: 1697160 - DNA, 15 bp, Homo sapiens
aaactcttggcctca

SEQ ID NO: 1697161 - DNA, 15 bp, Homo sapiens
aactcttggcctcaa

SEQ ID NO: 1697162 - DNA, 15 bp, Homo sapiens
actcttggcctcaat

SEQ ID NO: 1697163 - DNA, 15 bp, Homo sapiens
ctcttggcctcaatc

SEQ ID NO: 1697164 - DNA, 15 bp, Homo sapiens
tcttggcctcaatcc

SEQ ID NO: 1697165 - DNA, 15 bp, Homo sapiens
cttggcctcaatcct

SEQ ID NO: 1697166 - DNA, 15 bp, Homo sapiens
ttggcctcaatcctc

SEQ ID NO: 1697167 - DNA, 15 bp, Homo sapiens
tggcctcaatcctcc

SEQ ID NO: 1697168 - DNA, 15 bp, Homo sapiens
ggcctcaatcctccc

SEQ ID NO: 1697169 - DNA, 15 bp, Homo sapiens
gcctcaatcctccca

SEQ ID NO: 1697170 - DNA, 15 bp, Homo sapiens
cctcaatcctcccat

SEQ ID NO: 1697171 - DNA, 15 bp, Homo sapiens
ctcaatcctcccatc

SEQ ID NO: 1697172 - DNA, 15 bp, Homo sapiens
tcaatcctcccatct

SEQ ID NO: 1697173 - DNA, 15 bp, Homo sapiens
caatcctcccatctc

SEQ ID NO: 1697174 - DNA, 15 bp, Homo sapiens
aatcctcccatctca

SEQ ID NO: 1697175 - DNA, 15 bp, Homo sapiens
atcctcccatctcac

SEQ ID NO: 1697176 - DNA, 15 bp, Homo sapiens
tcctcccatctcacc

SEQ ID NO: 1697177 - DNA, 15 bp, Homo sapiens
cctcccatctcaccc

SEQ ID NO: 1697178 - DNA, 15 bp, Homo sapiens
ctcccatctcaccct

SEQ ID NO: 1697179 - DNA, 15 bp, Homo sapiens
tcccatctcaccctc

SEQ ID NO: 1697180 - DNA, 15 bp, Homo sapiens
cccatctcaccctcc

SEQ ID NO: 1697181 - DNA, 15 bp, Homo sapiens
ccatctcaccctccc

SEQ ID NO: 1697182 - DNA, 15 bp, Homo sapiens
catctcaccctccca

SEQ ID NO: 1697183 - DNA, 15 bp, Homo sapiens
atctcaccctcccaa

SEQ ID NO: 1697184 - DNA, 15 bp, Homo sapiens
tctcaccctcccaaa

SEQ ID NO: 1697185 - DNA, 15 bp, Homo sapiens
gctaagattacaggc

SEQ ID NO: 1697186 - DNA, 15 bp, Homo sapiens
ctaagattacaggca

SEQ ID NO: 1697187 - DNA, 15 bp, Homo sapiens
taagattacaggcaa

SEQ ID NO: 1697188 - DNA, 15 bp, Homo sapiens
aagattacaggcaag

SEQ ID NO: 1697189 - DNA, 15 bp, Homo sapiens
agattacaggcaaga

SEQ ID NO: 1697190 - DNA, 15 bp, Homo sapiens
caggcaagagccacc

SEQ ID NO: 1697191 - DNA, 15 bp, Homo sapiens
aggcaagagccacca

SEQ ID NO: 1697192 - DNA, 15 bp, Homo sapiens
ggcaagagccaccac

SEQ ID NO: 1697193 - DNA, 15 bp, Homo sapiens
gcaagagccaccaca

SEQ ID NO: 1697194 - DNA, 15 bp, Homo sapiens
caagagccaccacac

SEQ ID NO: 1697195 - DNA, 15 bp, Homo sapiens
aagagccaccacacc

SEQ ID NO: 1697196 - DNA, 15 bp, Homo sapiens
agagccaccacacct

SEQ ID NO: 1697197 - DNA, 15 bp, Homo sapiens
cacacctggccaaaa

SEQ ID NO: 1697198 - DNA, 15 bp, Homo sapiens
acacctggccaaaaa

SEQ ID NO: 1697199 - DNA, 15 bp, Homo sapiens
cacctggccaaaaaa

SEQ ID NO: 1697200 - DNA, 15 bp, Homo sapiens
acctggccaaaaaag

SEQ ID NO: 1697201 - DNA, 15 bp, Homo sapiens
cctggccaaaaaaga

SEQ ID NO: 1697202 - DNA, 15 bp, Homo sapiens
ctggccaaaaaagaa

SEQ ID NO: 1697203 - DNA, 15 bp, Homo sapiens
tggccaaaaaagaaa

SEQ ID NO: 1697204 - DNA, 15 bp, Homo sapiens
ggccaaaaaagaaag

SEQ ID NO: 1697205 - DNA, 15 bp, Homo sapiens
gccaaaaaagaaagt

SEQ ID NO: 1697206 - DNA, 15 bp, Homo sapiens
ccaaaaaagaaagtt

SEQ ID NO: 1697207 - DNA, 15 bp, Homo sapiens
caaaaaagaaagttt

SEQ ID NO: 1697208 - DNA, 15 bp, Homo sapiens
aaaaaagaaagtttt

SEQ ID NO: 1697209 - DNA, 15 bp, Homo sapiens
aaaaagaaagttttg

SEQ ID NO: 1697210 - DNA, 15 bp, Homo sapiens
aaaagaaagttttgg

SEQ ID NO: 1697211 - DNA, 15 bp, Homo sapiens
aaagaaagttttggg

SEQ ID NO: 1697212 - DNA, 15 bp, Homo sapiens
aagaaagttttgggc

SEQ ID NO: 1697213 - DNA, 15 bp, Homo sapiens
agaaagttttgggct

SEQ ID NO: 1697214 - DNA, 15 bp, Homo sapiens
gaaagttttgggctg

SEQ ID NO: 1697215 - DNA, 15 bp, Homo sapiens
aaagttttgggctga

SEQ ID NO: 1697216 - DNA, 15 bp, Homo sapiens
aagttttgggctgag

SEQ ID NO: 1697217 - DNA, 15 bp, Homo sapiens
agttttgggctgagt

SEQ ID NO: 1697218 - DNA, 15 bp, Homo sapiens
gttttgggctgagta

SEQ ID NO: 1697219 - DNA, 15 bp, Homo sapiens
ttttgggctgagtaa

SEQ ID NO: 1697220 - DNA, 15 bp, Homo sapiens
tttgggctgagtaaa

SEQ ID NO: 1697221 - DNA, 15 bp, Homo sapiens
ttgggctgagtaaaa

SEQ ID NO: 1697222 - DNA, 15 bp, Homo sapiens
tgggctgagtaaaat

SEQ ID NO: 1697223 - DNA, 15 bp, Homo sapiens
gggctgagtaaaata

SEQ ID NO: 1697224 - DNA, 15 bp, Homo sapiens
ggctgagtaaaataa

SEQ ID NO: 1697225 - DNA, 15 bp, Homo sapiens
gctgagtaaaataat

SEQ ID NO: 1697226 - DNA, 15 bp, Homo sapiens
ctgagtaaaataatg

SEQ ID NO: 1697227 - DNA, 15 bp, Homo sapiens
tgagtaaaataatgc

SEQ ID NO: 1697228 - DNA, 15 bp, Homo sapiens
gagtaaaataatgct

SEQ ID NO: 1697229 - DNA, 15 bp, Homo sapiens
agtaaaataatgcta

SEQ ID NO: 1697230 - DNA, 15 bp, Homo sapiens
gtaaaataatgctac

SEQ ID NO: 1697231 - DNA, 15 bp, Homo sapiens
taaaataatgctacc

SEQ ID NO: 1697232 - DNA, 15 bp, Homo sapiens
aaaataatgctacca

SEQ ID NO: 1697233 - DNA, 15 bp, Homo sapiens
aaataatgctaccaa

SEQ ID NO: 1697234 - DNA, 15 bp, Homo sapiens
aataatgctaccaat

SEQ ID NO: 1697235 - DNA, 15 bp, Homo sapiens
ataatgctaccaatt

SEQ ID NO: 1697236 - DNA, 15 bp, Homo sapiens
taatgctaccaattc

SEQ ID NO: 1697237 - DNA, 15 bp, Homo sapiens
aatgctaccaattct

SEQ ID NO: 1697238 - DNA, 15 bp, Homo sapiens
atgctaccaattctc

SEQ ID NO: 1697239 - DNA, 15 bp, Homo sapiens
tgctaccaattctct

SEQ ID NO: 1697240 - DNA, 15 bp, Homo sapiens
gctaccaattctctc

SEQ ID NO: 1697241 - DNA, 15 bp, Homo sapiens
ctaccaattctctcc

SEQ ID NO: 1697242 - DNA, 15 bp, Homo sapiens
taccaattctctcca

SEQ ID NO: 1697243 - DNA, 15 bp, Homo sapiens
accaattctctccag

SEQ ID NO: 1697244 - DNA, 15 bp, Homo sapiens
ccaattctctccagg

SEQ ID NO: 1697245 - DNA, 15 bp, Homo sapiens
caattctctccaggc

SEQ ID NO: 1697246 - DNA, 15 bp, Homo sapiens
aattctctccaggca

SEQ ID NO: 1697247 - DNA, 15 bp, Homo sapiens
attctctccaggcac

SEQ ID NO: 1697248 - DNA, 15 bp, Homo sapiens
ttctctccaggcact

SEQ ID NO: 1697249 - DNA, 15 bp, Homo sapiens
tctctccaggcactg

SEQ ID NO: 1697250 - DNA, 15 bp, Homo sapiens
ctctccaggcactga

SEQ ID NO: 1697251 - DNA, 15 bp, Homo sapiens
tctccaggcactgag

SEQ ID NO: 1697252 - DNA, 15 bp, Homo sapiens
ctccaggcactgaga

SEQ ID NO: 1697253 - DNA, 15 bp, Homo sapiens
tccaggcactgagag

SEQ ID NO: 1697254 - DNA, 15 bp, Homo sapiens
ccaggcactgagagg

SEQ ID NO: 1697255 - DNA, 15 bp, Homo sapiens
caggcactgagaggc

SEQ ID NO: 1697256 - DNA, 15 bp, Homo sapiens
aggcactgagaggca

SEQ ID NO: 1697257 - DNA, 15 bp, Homo sapiens
ggcactgagaggcag

SEQ ID NO: 1697258 - DNA, 15 bp, Homo sapiens
gcactgagaggcagc

SEQ ID NO: 1697259 - DNA, 15 bp, Homo sapiens
cactgagaggcagcc

SEQ ID NO: 1697260 - DNA, 15 bp, Homo sapiens
actgagaggcagcct

SEQ ID NO: 1697261 - DNA, 15 bp, Homo sapiens
ctgagaggcagccta

SEQ ID NO: 1697262 - DNA, 15 bp, Homo sapiens
tgagaggcagcctaa

SEQ ID NO: 1697263 - DNA, 15 bp, Homo sapiens
gagaggcagcctaaa

SEQ ID NO: 1697264 - DNA, 15 bp, Homo sapiens
agaggcagcctaaaa

SEQ ID NO: 1697265 - DNA, 15 bp, Homo sapiens
gaggcagcctaaaac

SEQ ID NO: 1697266 - DNA, 15 bp, Homo sapiens
aggcagcctaaaacc

SEQ ID NO: 1697267 - DNA, 15 bp, Homo sapiens
ggcagcctaaaacca

SEQ ID NO: 1697268 - DNA, 15 bp, Homo sapiens
gcagcctaaaaccat

SEQ ID NO: 1697269 - DNA, 15 bp, Homo sapiens
cagcctaaaaccatg

SEQ ID NO: 1697270 - DNA, 15 bp, Homo sapiens
agcctaaaaccatgg

SEQ ID NO: 1697271 - DNA, 15 bp, Homo sapiens
gcctaaaaccatggt

SEQ ID NO: 1697272 - DNA, 15 bp, Homo sapiens
cctaaaaccatggtt

SEQ ID NO: 1697273 - DNA, 15 bp, Homo sapiens
ctaaaaccatggttt

SEQ ID NO: 1697274 - DNA, 15 bp, Homo sapiens
taaaaccatggtttg

SEQ ID NO: 1697275 - DNA, 15 bp, Homo sapiens
aaaaccatggtttgg

SEQ ID NO: 1697276 - DNA, 15 bp, Homo sapiens
aaaccatggtttggt

SEQ ID NO: 1697277 - DNA, 15 bp, Homo sapiens
aaccatggtttggta

SEQ ID NO: 1697278 - DNA, 15 bp, Homo sapiens
accatggtttggtag

SEQ ID NO: 1697279 - DNA, 15 bp, Homo sapiens
ccatggtttggtagc

SEQ ID NO: 1697280 - DNA, 15 bp, Homo sapiens
catggtttggtagct

SEQ ID NO: 1697281 - DNA, 15 bp, Homo sapiens
atggtttggtagctg

SEQ ID NO: 1697282 - DNA, 15 bp, Homo sapiens
tggtttggtagctgg

SEQ ID NO: 1697283 - DNA, 15 bp, Homo sapiens
ggtttggtagctggg

SEQ ID NO: 1697284 - DNA, 15 bp, Homo sapiens
gtttggtagctggga

SEQ ID NO: 1697285 - DNA, 15 bp, Homo sapiens
tttggtagctgggat

SEQ ID NO: 1697286 - DNA, 15 bp, Homo sapiens
ttggtagctgggatc

SEQ ID NO: 1697287 - DNA, 15 bp, Homo sapiens
tggtagctgggatca

SEQ ID NO: 1697288 - DNA, 15 bp, Homo sapiens
ggtagctgggatcat

SEQ ID NO: 1697289 - DNA, 15 bp, Homo sapiens
gtagctgggatcatg

SEQ ID NO: 1697290 - DNA, 15 bp, Homo sapiens
tagctgggatcatga

SEQ ID NO: 1697291 - DNA, 15 bp, Homo sapiens
agctgggatcatgag

SEQ ID NO: 1697292 - DNA, 15 bp, Homo sapiens
gctgggatcatgaga

SEQ ID NO: 1697293 - DNA, 15 bp, Homo sapiens
ctgggatcatgagaa

SEQ ID NO: 1697294 - DNA, 15 bp, Homo sapiens
tgggatcatgagaag

SEQ ID NO: 1697295 - DNA, 15 bp, Homo sapiens
gggatcatgagaagg

SEQ ID NO: 1697296 - DNA, 15 bp, Homo sapiens
ggatcatgagaaggt

SEQ ID NO: 1697297 - DNA, 15 bp, Homo sapiens
gatcatgagaaggtt

SEQ ID NO: 1697298 - DNA, 15 bp, Homo sapiens
atcatgagaaggttg

SEQ ID NO: 1697299 - DNA, 15 bp, Homo sapiens
tcatgagaaggttga

SEQ ID NO: 1697300 - DNA, 15 bp, Homo sapiens
catgagaaggttgaa

SEQ ID NO: 1697301 - DNA, 15 bp, Homo sapiens
atgagaaggttgaat

SEQ ID NO: 1697302 - DNA, 15 bp, Homo sapiens
tgagaaggttgaatg

SEQ ID NO: 1697303 - DNA, 15 bp, Homo sapiens
gagaaggttgaatgg

SEQ ID NO: 1697304 - DNA, 15 bp, Homo sapiens
agaaggttgaatggt

SEQ ID NO: 1697305 - DNA, 15 bp, Homo sapiens
gaaggttgaatggtg

SEQ ID NO: 1697306 - DNA, 15 bp, Homo sapiens
aaggttgaatggtgt

SEQ ID NO: 1697307 - DNA, 15 bp, Homo sapiens
aggttgaatggtgtt

SEQ ID NO: 1697308 - DNA, 15 bp, Homo sapiens
ggttgaatggtgttc

SEQ ID NO: 1697309 - DNA, 15 bp, Homo sapiens
gttgaatggtgttct

SEQ ID NO: 1697310 - DNA, 15 bp, Homo sapiens
ttgaatggtgttctg

SEQ ID NO: 1697311 - DNA, 15 bp, Homo sapiens
tgaatggtgttctga

SEQ ID NO: 1697312 - DNA, 15 bp, Homo sapiens
gaatggtgttctgat

SEQ ID NO: 1697313 - DNA, 15 bp, Homo sapiens
aatggtgttctgatg

SEQ ID NO: 1697314 - DNA, 15 bp, Homo sapiens
atggtgttctgatgt

SEQ ID NO: 1697315 - DNA, 15 bp, Homo sapiens
tggtgttctgatgta

SEQ ID NO: 1697316 - DNA, 15 bp, Homo sapiens
ggtgttctgatgtac

SEQ ID NO: 1697317 - DNA, 15 bp, Homo sapiens
gtgttctgatgtacc

SEQ ID NO: 1697318 - DNA, 15 bp, Homo sapiens
tgttctgatgtacct

SEQ ID NO: 1697319 - DNA, 15 bp, Homo sapiens
gttctgatgtaccta

SEQ ID NO: 1697320 - DNA, 15 bp, Homo sapiens
ttctgatgtacctag

SEQ ID NO: 1697321 - DNA, 15 bp, Homo sapiens
tctgatgtacctagg

SEQ ID NO: 1697322 - DNA, 15 bp, Homo sapiens
ctgatgtacctaggc

SEQ ID NO: 1697323 - DNA, 15 bp, Homo sapiens
tgatgtacctaggct

SEQ ID NO: 1697324 - DNA, 15 bp, Homo sapiens
gatgtacctaggctc

SEQ ID NO: 1697325 - DNA, 15 bp, Homo sapiens
atgtacctaggctcc

SEQ ID NO: 1697326 - DNA, 15 bp, Homo sapiens
tgtacctaggctcca

SEQ ID NO: 1697327 - DNA, 15 bp, Homo sapiens
gtacctaggctccaa

SEQ ID NO: 1697328 - DNA, 15 bp, Homo sapiens
tacctaggctccaac

SEQ ID NO: 1697329 - DNA, 15 bp, Homo sapiens
acctaggctccaacc

SEQ ID NO: 1697330 - DNA, 15 bp, Homo sapiens
cctaggctccaaccc

SEQ ID NO: 1697331 - DNA, 15 bp, Homo sapiens
ctaggctccaaccct

SEQ ID NO: 1697332 - DNA, 15 bp, Homo sapiens
taggctccaaccctg

SEQ ID NO: 1697333 - DNA, 15 bp, Homo sapiens
aggctccaaccctgc

SEQ ID NO: 1697334 - DNA, 15 bp, Homo sapiens
ggctccaaccctgcc

SEQ ID NO: 1697335 - DNA, 15 bp, Homo sapiens
gctccaaccctgcca

SEQ ID NO: 1697336 - DNA, 15 bp, Homo sapiens
ctccaaccctgccac

SEQ ID NO: 1697337 - DNA, 15 bp, Homo sapiens
tccaaccctgccact

SEQ ID NO: 1697338 - DNA, 15 bp, Homo sapiens
ccaaccctgccacta

SEQ ID NO: 1697339 - DNA, 15 bp, Homo sapiens
caaccctgccactaa

SEQ ID NO: 1697340 - DNA, 15 bp, Homo sapiens
aaccctgccactaac

SEQ ID NO: 1697341 - DNA, 15 bp, Homo sapiens
accctgccactaacc

SEQ ID NO: 1697342 - DNA, 15 bp, Homo sapiens
ccctgccactaacca

SEQ ID NO: 1697343 - DNA, 15 bp, Homo sapiens
cctgccactaaccag

SEQ ID NO: 1697344 - DNA, 15 bp, Homo sapiens
ctgccactaaccagc

SEQ ID NO: 1697345 - DNA, 15 bp, Homo sapiens
tgccactaaccagct

SEQ ID NO: 1697346 - DNA, 15 bp, Homo sapiens
gccactaaccagctg

SEQ ID NO: 1697347 - DNA, 15 bp, Homo sapiens
ccactaaccagctgt

SEQ ID NO: 1697348 - DNA, 15 bp, Homo sapiens
cactaaccagctgtg

SEQ ID NO: 1697349 - DNA, 15 bp, Homo sapiens
actaaccagctgtgt

SEQ ID NO: 1697350 - DNA, 15 bp, Homo sapiens
ctaaccagctgtgtg

SEQ ID NO: 1697351 - DNA, 15 bp, Homo sapiens
taaccagctgtgtga

SEQ ID NO: 1697352 - DNA, 15 bp, Homo sapiens
aaccagctgtgtgac

SEQ ID NO: 1697353 - DNA, 15 bp, Homo sapiens
accagctgtgtgacc

SEQ ID NO: 1697354 - DNA, 15 bp, Homo sapiens
ccagctgtgtgacct

SEQ ID NO: 1697355 - DNA, 15 bp, Homo sapiens
cagctgtgtgacctg

SEQ ID NO: 1697356 - DNA, 15 bp, Homo sapiens
agctgtgtgacctgg

SEQ ID NO: 1697357 - DNA, 15 bp, Homo sapiens
gctgtgtgacctggg

SEQ ID NO: 1697358 - DNA, 15 bp, Homo sapiens
ctgtgtgacctgggg

SEQ ID NO: 1697359 - DNA, 15 bp, Homo sapiens
tgtgtgacctggggt

SEQ ID NO: 1697360 - DNA, 15 bp, Homo sapiens
gtgtgacctggggtt

SEQ ID NO: 1697361 - DNA, 15 bp, Homo sapiens
tgtgacctggggtta

SEQ ID NO: 1697362 - DNA, 15 bp, Homo sapiens
gtgacctggggttac

SEQ ID NO: 1697363 - DNA, 15 bp, Homo sapiens
tgacctggggttaca

SEQ ID NO: 1697364 - DNA, 15 bp, Homo sapiens
gacctggggttacat

SEQ ID NO: 1697365 - DNA, 15 bp, Homo sapiens
acctggggttacatt

SEQ ID NO: 1697366 - DNA, 15 bp, Homo sapiens
cctggggttacatta

SEQ ID NO: 1697367 - DNA, 15 bp, Homo sapiens
ctggggttacattat

SEQ ID NO: 1697368 - DNA, 15 bp, Homo sapiens
tggggttacattatc

SEQ ID NO: 1697369 - DNA, 15 bp, Homo sapiens
ggggttacattatca

SEQ ID NO: 1697370 - DNA, 15 bp, Homo sapiens
gggttacattatcag

SEQ ID NO: 1697371 - DNA, 15 bp, Homo sapiens
ggttacattatcagc

SEQ ID NO: 1697372 - DNA, 15 bp, Homo sapiens
gttacattatcagcc

SEQ ID NO: 1697373 - DNA, 15 bp, Homo sapiens
ttacattatcagcca

SEQ ID NO: 1697374 - DNA, 15 bp, Homo sapiens
tacattatcagccac

SEQ ID NO: 1697375 - DNA, 15 bp, Homo sapiens
acattatcagccacc

SEQ ID NO: 1697376 - DNA, 15 bp, Homo sapiens
cattatcagccaccc

SEQ ID NO: 1697377 - DNA, 15 bp, Homo sapiens
attatcagccaccct

SEQ ID NO: 1697378 - DNA, 15 bp, Homo sapiens
ttatcagccaccctg

SEQ ID NO: 1697379 - DNA, 15 bp, Homo sapiens
tatcagccaccctgt

SEQ ID NO: 1697380 - DNA, 15 bp, Homo sapiens
atcagccaccctgtg

SEQ ID NO: 1697381 - DNA, 15 bp, Homo sapiens
tcagccaccctgtgc

SEQ ID NO: 1697382 - DNA, 15 bp, Homo sapiens
cagccaccctgtgcc

SEQ ID NO: 1697383 - DNA, 15 bp, Homo sapiens
agccaccctgtgcct

SEQ ID NO: 1697384 - DNA, 15 bp, Homo sapiens
gccaccctgtgcctc

SEQ ID NO: 1697385 - DNA, 15 bp, Homo sapiens
ccaccctgtgcctca

SEQ ID NO: 1697386 - DNA, 15 bp, Homo sapiens
caccctgtgcctcag

SEQ ID NO: 1697387 - DNA, 15 bp, Homo sapiens
accctgtgcctcagt

SEQ ID NO: 1697388 - DNA, 15 bp, Homo sapiens
ccctgtgcctcagtt

SEQ ID NO: 1697389 - DNA, 15 bp, Homo sapiens
cctgtgcctcagttt

SEQ ID NO: 1697390 - DNA, 15 bp, Homo sapiens
ctgtgcctcagtttt

SEQ ID NO: 1697391 - DNA, 15 bp, Homo sapiens
tgtgcctcagtttta

SEQ ID NO: 1697392 - DNA, 15 bp, Homo sapiens
gtgcctcagttttaa

SEQ ID NO: 1697393 - DNA, 15 bp, Homo sapiens
tgcctcagttttaat

SEQ ID NO: 1697394 - DNA, 15 bp, Homo sapiens
gcctcagttttaata

SEQ ID NO: 1697395 - DNA, 15 bp, Homo sapiens
cctcagttttaataa

SEQ ID NO: 1697396 - DNA, 15 bp, Homo sapiens
ctcagttttaataaa

SEQ ID NO: 1697397 - DNA, 15 bp, Homo sapiens
tcagttttaataaaa

SEQ ID NO: 1697398 - DNA, 15 bp, Homo sapiens
cagttttaataaaag

SEQ ID NO: 1697399 - DNA, 15 bp, Homo sapiens
agttttaataaaagt

SEQ ID NO: 1697400 - DNA, 15 bp, Homo sapiens
gttttaataaaagtg

SEQ ID NO: 1697401 - DNA, 15 bp, Homo sapiens
ttttaataaaagtgg

SEQ ID NO: 1697402 - DNA, 15 bp, Homo sapiens
tttaataaaagtgga

SEQ ID NO: 1697403 - DNA, 15 bp, Homo sapiens
ttaataaaagtggat

SEQ ID NO: 1697404 - DNA, 15 bp, Homo sapiens
taataaaagtggatc

SEQ ID NO: 1697405 - DNA, 15 bp, Homo sapiens
aataaaagtggatca

SEQ ID NO: 1697406 - DNA, 15 bp, Homo sapiens
ataaaagtggatcag

SEQ ID NO: 1697407 - DNA, 15 bp, Homo sapiens
taaaagtggatcagt

SEQ ID NO: 1697408 - DNA, 15 bp, Homo sapiens
aaaagtggatcagtc

SEQ ID NO: 1697409 - DNA, 15 bp, Homo sapiens
aaagtggatcagtca

SEQ ID NO: 1697410 - DNA, 15 bp, Homo sapiens
aagtggatcagtcaa

SEQ ID NO: 1697411 - DNA, 15 bp, Homo sapiens
agtggatcagtcaaa

SEQ ID NO: 1697412 - DNA, 15 bp, Homo sapiens
gtggatcagtcaaaa

SEQ ID NO: 1697413 - DNA, 15 bp, Homo sapiens
tggatcagtcaaaag

SEQ ID NO: 1697414 - DNA, 15 bp, Homo sapiens
ggatcagtcaaaagc

SEQ ID NO: 1697415 - DNA, 15 bp, Homo sapiens
gatcagtcaaaagcc

SEQ ID NO: 1697416 - DNA, 15 bp, Homo sapiens
atcagtcaaaagccc

SEQ ID NO: 1697417 - DNA, 15 bp, Homo sapiens
tcagtcaaaagccct

SEQ ID NO: 1697418 - DNA, 15 bp, Homo sapiens
cagtcaaaagccctc

SEQ ID NO: 1697419 - DNA, 15 bp, Homo sapiens
agtcaaaagccctct

SEQ ID NO: 1697420 - DNA, 15 bp, Homo sapiens
gtcaaaagccctctc

SEQ ID NO: 1697421 - DNA, 15 bp, Homo sapiens
tcaaaagccctctcc

SEQ ID NO: 1697422 - DNA, 15 bp, Homo sapiens
caaaagccctctcca

SEQ ID NO: 1697423 - DNA, 15 bp, Homo sapiens
aaaagccctctccac

SEQ ID NO: 1697424 - DNA, 15 bp, Homo sapiens
aaagccctctccacc

SEQ ID NO: 1697425 - DNA, 15 bp, Homo sapiens
aagccctctccacca

SEQ ID NO: 1697426 - DNA, 15 bp, Homo sapiens
agccctctccaccag

SEQ ID NO: 1697427 - DNA, 15 bp, Homo sapiens
gccctctccaccagt

SEQ ID NO: 1697428 - DNA, 15 bp, Homo sapiens
ccctctccaccagtc

SEQ ID NO: 1697429 - DNA, 15 bp, Homo sapiens
cctctccaccagtca

SEQ ID NO: 1697430 - DNA, 15 bp, Homo sapiens
ctctccaccagtcat

SEQ ID NO: 1697431 - DNA, 15 bp, Homo sapiens
tctccaccagtcatc

SEQ ID NO: 1697432 - DNA, 15 bp, Homo sapiens
ctccaccagtcatct

SEQ ID NO: 1697433 - DNA, 15 bp, Homo sapiens
tccaccagtcatctt

SEQ ID NO: 1697434 - DNA, 15 bp, Homo sapiens
ccaccagtcatcttc

SEQ ID NO: 1697435 - DNA, 15 bp, Homo sapiens
caccagtcatcttcc

SEQ ID NO: 1697436 - DNA, 15 bp, Homo sapiens
accagtcatcttcct

SEQ ID NO: 1697437 - DNA, 15 bp, Homo sapiens
ccagtcatcttcctc

SEQ ID NO: 1697438 - DNA, 15 bp, Homo sapiens
cagtcatcttcctca

SEQ ID NO: 1697439 - DNA, 15 bp, Homo sapiens
agtcatcttcctcac

SEQ ID NO: 1697440 - DNA, 15 bp, Homo sapiens
gtcatcttcctcaca

SEQ ID NO: 1697441 - DNA, 15 bp, Homo sapiens
tcatcttcctcacaa

SEQ ID NO: 1697442 - DNA, 15 bp, Homo sapiens
catcttcctcacaaa

SEQ ID NO: 1697443 - DNA, 15 bp, Homo sapiens
atcttcctcacaaag

SEQ ID NO: 1697444 - DNA, 15 bp, Homo sapiens
tcttcctcacaaaga

SEQ ID NO: 1697445 - DNA, 15 bp, Homo sapiens
cttcctcacaaagaa

SEQ ID NO: 1697446 - DNA, 15 bp, Homo sapiens
ttcctcacaaagaag

SEQ ID NO: 1697447 - DNA, 15 bp, Homo sapiens
tcctcacaaagaagc

SEQ ID NO: 1697448 - DNA, 15 bp, Homo sapiens
cctcacaaagaagca

SEQ ID NO: 1697449 - DNA, 15 bp, Homo sapiens
ctcacaaagaagcac

SEQ ID NO: 1697450 - DNA, 15 bp, Homo sapiens
tcacaaagaagcaca

SEQ ID NO: 1697451 - DNA, 15 bp, Homo sapiens
cacaaagaagcacaa

SEQ ID NO: 1697452 - DNA, 15 bp, Homo sapiens
acaaagaagcacaag

SEQ ID NO: 1697453 - DNA, 15 bp, Homo sapiens
caaagaagcacaaga

SEQ ID NO: 1697454 - DNA, 15 bp, Homo sapiens
aaagaagcacaagaa

SEQ ID NO: 1697455 - DNA, 15 bp, Homo sapiens
aagaagcacaagaat

SEQ ID NO: 1697456 - DNA, 15 bp, Homo sapiens
agaagcacaagaatc

SEQ ID NO: 1697457 - DNA, 15 bp, Homo sapiens
aagcacaagaatcaa

SEQ ID NO: 1697458 - DNA, 15 bp, Homo sapiens
agcacaagaatcaaa

SEQ ID NO: 1697459 - DNA, 15 bp, Homo sapiens
gcacaagaatcaaat

SEQ ID NO: 1697460 - DNA, 15 bp, Homo sapiens
cacaagaatcaaatg

SEQ ID NO: 1697461 - DNA, 15 bp, Homo sapiens
acaagaatcaaatgg

SEQ ID NO: 1697462 - DNA, 15 bp, Homo sapiens
caagaatcaaatgga

SEQ ID NO: 1697463 - DNA, 15 bp, Homo sapiens
aagaatcaaatggaa

SEQ ID NO: 1697464 - DNA, 15 bp, Homo sapiens
agaatcaaatggaat

SEQ ID NO: 1697465 - DNA, 15 bp, Homo sapiens
gaatcaaatggaatg

SEQ ID NO: 1697466 - DNA, 15 bp, Homo sapiens
aatcaaatggaatga

SEQ ID NO: 1697467 - DNA, 15 bp, Homo sapiens
atcaaatggaatgac

SEQ ID NO: 1697468 - DNA, 15 bp, Homo sapiens
tcaaatggaatgacc

SEQ ID NO: 1697469 - DNA, 15 bp, Homo sapiens
caaatggaatgacct

SEQ ID NO: 1697470 - DNA, 15 bp, Homo sapiens
aaatggaatgaccta

SEQ ID NO: 1697471 - DNA, 15 bp, Homo sapiens
aatggaatgacctat

SEQ ID NO: 1697472 - DNA, 15 bp, Homo sapiens
atggaatgacctatg

SEQ ID NO: 1697473 - DNA, 15 bp, Homo sapiens
tggaatgacctatga

SEQ ID NO: 1697474 - DNA, 15 bp, Homo sapiens
ggaatgacctatgag

SEQ ID NO: 1697475 - DNA, 15 bp, Homo sapiens
gaatgacctatgagc

SEQ ID NO: 1697476 - DNA, 15 bp, Homo sapiens
aatgacctatgagca

SEQ ID NO: 1697477 - DNA, 15 bp, Homo sapiens
atgacctatgagcaa

SEQ ID NO: 1697478 - DNA, 15 bp, Homo sapiens
tgacctatgagcaaa

SEQ ID NO: 1697479 - DNA, 15 bp, Homo sapiens
gacctatgagcaaat

SEQ ID NO: 1697480 - DNA, 15 bp, Homo sapiens
acctatgagcaaatg

SEQ ID NO: 1697481 - DNA, 15 bp, Homo sapiens
cctatgagcaaatgc

SEQ ID NO: 1697482 - DNA, 15 bp, Homo sapiens
ctatgagcaaatgct

SEQ ID NO: 1697483 - DNA, 15 bp, Homo sapiens
tatgagcaaatgctg

SEQ ID NO: 1697484 - DNA, 15 bp, Homo sapiens
atgagcaaatgctga

SEQ ID NO: 1697485 - DNA, 15 bp, Homo sapiens
tgagcaaatgctgag

SEQ ID NO: 1697486 - DNA, 15 bp, Homo sapiens
gagcaaatgctgagc

SEQ ID NO: 1697487 - DNA, 15 bp, Homo sapiens
agcaaatgctgagcc

SEQ ID NO: 1697488 - DNA, 15 bp, Homo sapiens
gcaaatgctgagcca

SEQ ID NO: 1697489 - DNA, 15 bp, Homo sapiens
caaatgctgagccaa

SEQ ID NO: 1697490 - DNA, 15 bp, Homo sapiens
aaatgctgagccaag

SEQ ID NO: 1697491 - DNA, 15 bp, Homo sapiens
aatgctgagccaagt

SEQ ID NO: 1697492 - DNA, 15 bp, Homo sapiens
atgctgagccaagta

SEQ ID NO: 1697493 - DNA, 15 bp, Homo sapiens
tgctgagccaagtat

SEQ ID NO: 1697494 - DNA, 15 bp, Homo sapiens
gctgagccaagtatt

SEQ ID NO: 1697495 - DNA, 15 bp, Homo sapiens
ctgagccaagtattg

SEQ ID NO: 1697496 - DNA, 15 bp, Homo sapiens
tgagccaagtattgg

SEQ ID NO: 1697497 - DNA, 15 bp, Homo sapiens
gagccaagtattggg

SEQ ID NO: 1697498 - DNA, 15 bp, Homo sapiens
agccaagtattggga

SEQ ID NO: 1697499 - DNA, 15 bp, Homo sapiens
gccaagtattgggat

SEQ ID NO: 1697500 - DNA, 15 bp, Homo sapiens
ccaagtattgggatt

SEQ ID NO: 1697501 - DNA, 15 bp, Homo sapiens
caagtattgggattt

SEQ ID NO: 1697502 - DNA, 15 bp, Homo sapiens
aagtattgggatttc

SEQ ID NO: 1697503 - DNA, 15 bp, Homo sapiens
agtattgggatttca

SEQ ID NO: 1697504 - DNA, 15 bp, Homo sapiens
gtattgggatttcag

SEQ ID NO: 1697505 - DNA, 15 bp, Homo sapiens
tattgggatttcaga

SEQ ID NO: 1697506 - DNA, 15 bp, Homo sapiens
attgggatttcagaa

SEQ ID NO: 1697507 - DNA, 15 bp, Homo sapiens
ttgggatttcagaat

SEQ ID NO: 1697508 - DNA, 15 bp, Homo sapiens
tgggatttcagaata

SEQ ID NO: 1697509 - DNA, 15 bp, Homo sapiens
gggatttcagaataa

SEQ ID NO: 1697510 - DNA, 15 bp, Homo sapiens
ggatttcagaataat

SEQ ID NO: 1697511 - DNA, 15 bp, Homo sapiens
gatttcagaataatg

SEQ ID NO: 1697512 - DNA, 15 bp, Homo sapiens
atttcagaataatgg

SEQ ID NO: 1697513 - DNA, 15 bp, Homo sapiens
tttcagaataatggg

SEQ ID NO: 1697514 - DNA, 15 bp, Homo sapiens
ttcagaataatggga

SEQ ID NO: 1697515 - DNA, 15 bp, Homo sapiens
tcagaataatgggat

SEQ ID NO: 1697516 - DNA, 15 bp, Homo sapiens
cagaataatgggatt

SEQ ID NO: 1697517 - DNA, 15 bp, Homo sapiens
agaataatgggattg

SEQ ID NO: 1697518 - DNA, 15 bp, Homo sapiens
gaataatgggattgt

SEQ ID NO: 1697519 - DNA, 15 bp, Homo sapiens
aataatgggattgtg

SEQ ID NO: 1697520 - DNA, 15 bp, Homo sapiens
ataatgggattgtgt

SEQ ID NO: 1697521 - DNA, 15 bp, Homo sapiens
taatgggattgtgtg

SEQ ID NO: 1697522 - DNA, 15 bp, Homo sapiens
aatgggattgtgtgt

SEQ ID NO: 1697523 - DNA, 15 bp, Homo sapiens
atgggattgtgtgtg

SEQ ID NO: 1697524 - DNA, 15 bp, Homo sapiens
tgggattgtgtgtga

SEQ ID NO: 1697525 - DNA, 15 bp, Homo sapiens
gggattgtgtgtgaa

SEQ ID NO: 1697526 - DNA, 15 bp, Homo sapiens
ggattgtgtgtgaat

SEQ ID NO: 1697527 - DNA, 15 bp, Homo sapiens
gattgtgtgtgaatt

SEQ ID NO: 1697528 - DNA, 15 bp, Homo sapiens
attgtgtgtgaattt

SEQ ID NO: 1697529 - DNA, 15 bp, Homo sapiens
ttgtgtgtgaattta

SEQ ID NO: 1697530 - DNA, 15 bp, Homo sapiens
tgtgtgtgaatttaa

SEQ ID NO: 1697531 - DNA, 15 bp, Homo sapiens
gtgtgtgaatttaat

SEQ ID NO: 1697532 - DNA, 15 bp, Homo sapiens
tgtgtgaatttaatg

SEQ ID NO: 1697533 - DNA, 15 bp, Homo sapiens
gtgtgaatttaatgg

SEQ ID NO: 1697534 - DNA, 15 bp, Homo sapiens
tgtgaatttaatggg

SEQ ID NO: 1697535 - DNA, 15 bp, Homo sapiens
gtgaatttaatgggc

SEQ ID NO: 1697536 - DNA, 15 bp, Homo sapiens
tgaatttaatgggca

SEQ ID NO: 1697537 - DNA, 15 bp, Homo sapiens
gaatttaatgggcat

SEQ ID NO: 1697538 - DNA, 15 bp, Homo sapiens
aatttaatgggcatt

SEQ ID NO: 1697539 - DNA, 15 bp, Homo sapiens
atttaatgggcattt

SEQ ID NO: 1697540 - DNA, 15 bp, Homo sapiens
tttaatgggcatttt

SEQ ID NO: 1697541 - DNA, 15 bp, Homo sapiens
ttaatgggcattttc

SEQ ID NO: 1697542 - DNA, 15 bp, Homo sapiens
taatgggcattttcc

SEQ ID NO: 1697543 - DNA, 15 bp, Homo sapiens
aatgggcattttccc

SEQ ID NO: 1697544 - DNA, 15 bp, Homo sapiens
atgggcattttccct

SEQ ID NO: 1697545 - DNA, 15 bp, Homo sapiens
tgggcattttccctc

SEQ ID NO: 1697546 - DNA, 15 bp, Homo sapiens
gggcattttccctca

SEQ ID NO: 1697547 - DNA, 15 bp, Homo sapiens
ggcattttccctcag

SEQ ID NO: 1697548 - DNA, 15 bp, Homo sapiens
gcattttccctcagc

SEQ ID NO: 1697549 - DNA, 15 bp, Homo sapiens
cattttccctcagct

SEQ ID NO: 1697550 - DNA, 15 bp, Homo sapiens
attttccctcagctg

SEQ ID NO: 1697551 - DNA, 15 bp, Homo sapiens
ttttccctcagctgg

SEQ ID NO: 1697552 - DNA, 15 bp, Homo sapiens
tttccctcagctggc

SEQ ID NO: 1697553 - DNA, 15 bp, Homo sapiens
ttccctcagctggca

SEQ ID NO: 1697554 - DNA, 15 bp, Homo sapiens
tccctcagctggcag

SEQ ID NO: 1697555 - DNA, 15 bp, Homo sapiens
ccctcagctggcaga

SEQ ID NO: 1697556 - DNA, 15 bp, Homo sapiens
cctcagctggcagaa

SEQ ID NO: 1697557 - DNA, 15 bp, Homo sapiens
ctcagctggcagaaa

SEQ ID NO: 1697558 - DNA, 15 bp, Homo sapiens
tcagctggcagaaat

SEQ ID NO: 1697559 - DNA, 15 bp, Homo sapiens
cagctggcagaaata

SEQ ID NO: 1697560 - DNA, 15 bp, Homo sapiens
agctggcagaaataa

SEQ ID NO: 1697561 - DNA, 15 bp, Homo sapiens
gctggcagaaataaa

SEQ ID NO: 1697562 - DNA, 15 bp, Homo sapiens
ctggcagaaataaac

SEQ ID NO: 1697563 - DNA, 15 bp, Homo sapiens
tggcagaaataaaca

SEQ ID NO: 1697564 - DNA, 15 bp, Homo sapiens
ggcagaaataaacat

SEQ ID NO: 1697565 - DNA, 15 bp, Homo sapiens
gcagaaataaacatt

SEQ ID NO: 1697566 - DNA, 15 bp, Homo sapiens
cagaaataaacattc

SEQ ID NO: 1697567 - DNA, 15 bp, Homo sapiens
agaaataaacattcc

SEQ ID NO: 1697568 - DNA, 15 bp, Homo sapiens
gaaataaacattccc

SEQ ID NO: 1697569 - DNA, 15 bp, Homo sapiens
aaataaacattccca

SEQ ID NO: 1697570 - DNA, 15 bp, Homo sapiens
aataaacattcccac

SEQ ID NO: 1697571 - DNA, 15 bp, Homo sapiens
ataaacattcccact

SEQ ID NO: 1697572 - DNA, 15 bp, Homo sapiens
taaacattcccactg

SEQ ID NO: 1697573 - DNA, 15 bp, Homo sapiens
aaacattcccactgt

SEQ ID NO: 1697574 - DNA, 15 bp, Homo sapiens
aacattcccactgtc

SEQ ID NO: 1697575 - DNA, 15 bp, Homo sapiens
acattcccactgtca

SEQ ID NO: 1697576 - DNA, 15 bp, Homo sapiens
cattcccactgtcaa

SEQ ID NO: 1697577 - DNA, 15 bp, Homo sapiens
attcccactgtcaaa

SEQ ID NO: 1697578 - DNA, 15 bp, Homo sapiens
ttcccactgtcaaat

SEQ ID NO: 1697579 - DNA, 15 bp, Homo sapiens
tcccactgtcaaata

SEQ ID NO: 1697580 - DNA, 15 bp, Homo sapiens
cccactgtcaaataa

SEQ ID NO: 1697581 - DNA, 15 bp, Homo sapiens
ccactgtcaaataaa

SEQ ID NO: 1697582 - DNA, 15 bp, Homo sapiens
cactgtcaaataaag

SEQ ID NO: 1697583 - DNA, 15 bp, Homo sapiens
actgtcaaataaaga

SEQ ID NO: 1697584 - DNA, 15 bp, Homo sapiens
ctgtcaaataaagaa

SEQ ID NO: 1697585 - DNA, 15 bp, Homo sapiens
tgtcaaataaagaag

SEQ ID NO: 1697586 - DNA, 15 bp, Homo sapiens
gtcaaataaagaagc

SEQ ID NO: 1697587 - DNA, 15 bp, Homo sapiens
tcaaataaagaagct

SEQ ID NO: 1697588 - DNA, 15 bp, Homo sapiens
caaataaagaagcta

SEQ ID NO: 1697589 - DNA, 15 bp, Homo sapiens
aaataaagaagctac

SEQ ID NO: 1697590 - DNA, 15 bp, Homo sapiens
aataaagaagctacc

SEQ ID NO: 1697591 - DNA, 15 bp, Homo sapiens
ataaagaagctacca

SEQ ID NO: 1697592 - DNA, 15 bp, Homo sapiens
taaagaagctaccac

SEQ ID NO: 1697593 - DNA, 15 bp, Homo sapiens
aaagaagctaccact

SEQ ID NO: 1697594 - DNA, 15 bp, Homo sapiens
aagaagctaccacta

SEQ ID NO: 1697595 - DNA, 15 bp, Homo sapiens
agaagctaccactaa

SEQ ID NO: 1697596 - DNA, 15 bp, Homo sapiens
gaagctaccactaaa

SEQ ID NO: 1697597 - DNA, 15 bp, Homo sapiens
aagctaccactaaat

SEQ ID NO: 1697598 - DNA, 15 bp, Homo sapiens
agctaccactaaata

SEQ ID NO: 1697599 - DNA, 15 bp, Homo sapiens
gctaccactaaatat

SEQ ID NO: 1697600 - DNA, 15 bp, Homo sapiens
ctaccactaaatatt

SEQ ID NO: 1697601 - DNA, 15 bp, Homo sapiens
taccactaaatattt

SEQ ID NO: 1697602 - DNA, 15 bp, Homo sapiens
accactaaatatttg

SEQ ID NO: 1697603 - DNA, 15 bp, Homo sapiens
ccactaaatatttga

SEQ ID NO: 1697604 - DNA, 15 bp, Homo sapiens
cactaaatatttgaa

SEQ ID NO: 1697605 - DNA, 15 bp, Homo sapiens
actaaatatttgaaa

SEQ ID NO: 1697606 - DNA, 15 bp, Homo sapiens
ctaaatatttgaaac

SEQ ID NO: 1697607 - DNA, 15 bp, Homo sapiens
taaatatttgaaaca

SEQ ID NO: 1697608 - DNA, 15 bp, Homo sapiens
aaatatttgaaacaa

SEQ ID NO: 1697609 - DNA, 15 bp, Homo sapiens
aatatttgaaacaaa

SEQ ID NO: 1697610 - DNA, 15 bp, Homo sapiens
atatttgaaacaaac

SEQ ID NO: 1697611 - DNA, 15 bp, Homo sapiens
tatttgaaacaaaca

SEQ ID NO: 1697612 - DNA, 15 bp, Homo sapiens
atttgaaacaaacaa

SEQ ID NO: 1697613 - DNA, 15 bp, Homo sapiens
tttgaaacaaacaaa

SEQ ID NO: 1697614 - DNA, 15 bp, Homo sapiens
ttgaaacaaacaaac

SEQ ID NO: 1697615 - DNA, 15 bp, Homo sapiens
aacaaacaaaaaagt

SEQ ID NO: 1697616 - DNA, 15 bp, Homo sapiens
acaaacaaaaaagtg

SEQ ID NO: 1697617 - DNA, 15 bp, Homo sapiens
caaacaaaaaagtgg

SEQ ID NO: 1697618 - DNA, 15 bp, Homo sapiens
aaacaaaaaagtgga

SEQ ID NO: 1697619 - DNA, 15 bp, Homo sapiens
aacaaaaaagtggaa

SEQ ID NO: 1697620 - DNA, 15 bp, Homo sapiens
acaaaaaagtggaat

SEQ ID NO: 1697621 - DNA, 15 bp, Homo sapiens
caaaaaagtggaatt

SEQ ID NO: 1697622 - DNA, 15 bp, Homo sapiens
aaaaaagtggaattt

SEQ ID NO: 1697623 - DNA, 15 bp, Homo sapiens
aaaaagtggaattta

SEQ ID NO: 1697624 - DNA, 15 bp, Homo sapiens
aaaagtggaatttat

SEQ ID NO: 1697625 - DNA, 15 bp, Homo sapiens
aaagtggaatttatt

SEQ ID NO: 1697626 - DNA, 15 bp, Homo sapiens
aagtggaatttattg

SEQ ID NO: 1697627 - DNA, 15 bp, Homo sapiens
agtggaatttattgc

SEQ ID NO: 1697628 - DNA, 15 bp, Homo sapiens
gtggaatttattgct

SEQ ID NO: 1697629 - DNA, 15 bp, Homo sapiens
tggaatttattgctt

SEQ ID NO: 1697630 - DNA, 15 bp, Homo sapiens
ggaatttattgcttg

SEQ ID NO: 1697631 - DNA, 15 bp, Homo sapiens
gaatttattgcttgc

SEQ ID NO: 1697632 - DNA, 15 bp, Homo sapiens
aatttattgcttgct

SEQ ID NO: 1697633 - DNA, 15 bp, Homo sapiens
atttattgcttgcta

SEQ ID NO: 1697634 - DNA, 15 bp, Homo sapiens
tttattgcttgctaa

SEQ ID NO: 1697635 - DNA, 15 bp, Homo sapiens
ttattgcttgctaag

SEQ ID NO: 1697636 - DNA, 15 bp, Homo sapiens
tattgcttgctaagt

SEQ ID NO: 1697637 - DNA, 15 bp, Homo sapiens
attgcttgctaagtg

SEQ ID NO: 1697638 - DNA, 15 bp, Homo sapiens
ttgcttgctaagtga

SEQ ID NO: 1697639 - DNA, 15 bp, Homo sapiens
tgcttgctaagtgag

SEQ ID NO: 1697640 - DNA, 15 bp, Homo sapiens
gcttgctaagtgagg

SEQ ID NO: 1697641 - DNA, 15 bp, Homo sapiens
cttgctaagtgaggg

SEQ ID NO: 1697642 - DNA, 15 bp, Homo sapiens
ttgctaagtgaggga

SEQ ID NO: 1697643 - DNA, 15 bp, Homo sapiens
tgctaagtgagggaa

SEQ ID NO: 1697644 - DNA, 15 bp, Homo sapiens
gctaagtgagggaaa

SEQ ID NO: 1697645 - DNA, 15 bp, Homo sapiens
ctaagtgagggaaaa

SEQ ID NO: 1697646 - DNA, 15 bp, Homo sapiens
taagtgagggaaaac

SEQ ID NO: 1697647 - DNA, 15 bp, Homo sapiens
aagtgagggaaaact

SEQ ID NO: 1697648 - DNA, 15 bp, Homo sapiens
agtgagggaaaactg

SEQ ID NO: 1697649 - DNA, 15 bp, Homo sapiens
gtgagggaaaactgt

SEQ ID NO: 1697650 - DNA, 15 bp, Homo sapiens
tgagggaaaactgta

SEQ ID NO: 1697651 - DNA, 15 bp, Homo sapiens
gagggaaaactgtac

SEQ ID NO: 1697652 - DNA, 15 bp, Homo sapiens
agggaaaactgtact

SEQ ID NO: 1697653 - DNA, 15 bp, Homo sapiens
gggaaaactgtactt

SEQ ID NO: 1697654 - DNA, 15 bp, Homo sapiens
ggaaaactgtacttg

SEQ ID NO: 1697655 - DNA, 15 bp, Homo sapiens
gaaaactgtacttgt

SEQ ID NO: 1697656 - DNA, 15 bp, Homo sapiens
aaaactgtacttgta

SEQ ID NO: 1697657 - DNA, 15 bp, Homo sapiens
aaactgtacttgtaa

SEQ ID NO: 1697658 - DNA, 15 bp, Homo sapiens
aactgtacttgtaag

SEQ ID NO: 1697659 - DNA, 15 bp, Homo sapiens
actgtacttgtaaga

SEQ ID NO: 1697660 - DNA, 15 bp, Homo sapiens
ctgtacttgtaagat

SEQ ID NO: 1697661 - DNA, 15 bp, Homo sapiens
tgtacttgtaagatg

SEQ ID NO: 1697662 - DNA, 15 bp, Homo sapiens
gtacttgtaagatgc

SEQ ID NO: 1697663 - DNA, 15 bp, Homo sapiens
tacttgtaagatgca

SEQ ID NO: 1697664 - DNA, 15 bp, Homo sapiens
acttgtaagatgcag

SEQ ID NO: 1697665 - DNA, 15 bp, Homo sapiens
cttgtaagatgcagc

SEQ ID NO: 1697666 - DNA, 15 bp, Homo sapiens
ttgtaagatgcagcc

SEQ ID NO: 1697667 - DNA, 15 bp, Homo sapiens
tgtaagatgcagcct

SEQ ID NO: 1697668 - DNA, 15 bp, Homo sapiens
gtaagatgcagcctc

SEQ ID NO: 1697669 - DNA, 15 bp, Homo sapiens
taagatgcagcctct

SEQ ID NO: 1697670 - DNA, 15 bp, Homo sapiens
aagatgcagcctctc

SEQ ID NO: 1697671 - DNA, 15 bp, Homo sapiens
agatgcagcctctct

SEQ ID NO: 1697672 - DNA, 15 bp, Homo sapiens
gatgcagcctctcta

SEQ ID NO: 1697673 - DNA, 15 bp, Homo sapiens
atgcagcctctctaa

SEQ ID NO: 1697674 - DNA, 15 bp, Homo sapiens
tgcagcctctctaaa

SEQ ID NO: 1697675 - DNA, 15 bp, Homo sapiens
gcagcctctctaaac

SEQ ID NO: 1697676 - DNA, 15 bp, Homo sapiens
cagcctctctaaaca

SEQ ID NO: 1697677 - DNA, 15 bp, Homo sapiens
agcctctctaaacaa

SEQ ID NO: 1697678 - DNA, 15 bp, Homo sapiens
gcctctctaaacaaa

SEQ ID NO: 1697679 - DNA, 15 bp, Homo sapiens
cctctctaaacaaaa

SEQ ID NO: 1697680 - DNA, 15 bp, Homo sapiens
ctctctaaacaaaag

SEQ ID NO: 1697681 - DNA, 15 bp, Homo sapiens
tctctaaacaaaagg

SEQ ID NO: 1697682 - DNA, 15 bp, Homo sapiens
ctctaaacaaaagga

SEQ ID NO: 1697683 - DNA, 15 bp, Homo sapiens
tctaaacaaaaggaa

SEQ ID NO: 1697684 - DNA, 15 bp, Homo sapiens
ctaaacaaaaggaaa

SEQ ID NO: 1697685 - DNA, 15 bp, Homo sapiens
taaacaaaaggaaaa

SEQ ID NO: 1697686 - DNA, 15 bp, Homo sapiens
aaacaaaaggaaaat

SEQ ID NO: 1697687 - DNA, 15 bp, Homo sapiens
aacaaaaggaaaatt

SEQ ID NO: 1697688 - DNA, 15 bp, Homo sapiens
acaaaaggaaaatta

SEQ ID NO: 1697689 - DNA, 15 bp, Homo sapiens
caaaaggaaaattac

SEQ ID NO: 1697690 - DNA, 15 bp, Homo sapiens
aaaaggaaaattact

SEQ ID NO: 1697691 - DNA, 15 bp, Homo sapiens
aaaggaaaattactt

SEQ ID NO: 1697692 - DNA, 15 bp, Homo sapiens
aaggaaaattacttt

SEQ ID NO: 1697693 - DNA, 15 bp, Homo sapiens
aggaaaattactttt

SEQ ID NO: 1697694 - DNA, 15 bp, Homo sapiens
ggaaaattactttta

SEQ ID NO: 1697695 - DNA, 15 bp, Homo sapiens
gaaaattacttttat

SEQ ID NO: 1697696 - DNA, 15 bp, Homo sapiens
aaaattacttttatg

SEQ ID NO: 1697697 - DNA, 15 bp, Homo sapiens
aaattacttttatgt

SEQ ID NO: 1697698 - DNA, 15 bp, Homo sapiens
aattacttttatgtg

SEQ ID NO: 1697699 - DNA, 15 bp, Homo sapiens
tcctggtgtcccatc

SEQ ID NO: 1697700 - DNA, 15 bp, Homo sapiens
cctggtgtcccatct

SEQ ID NO: 1697701 - DNA, 15 bp, Homo sapiens
ctggtgtcccatcta

SEQ ID NO: 1697702 - DNA, 15 bp, Homo sapiens
tggtgtcccatctac

SEQ ID NO: 1697703 - DNA, 15 bp, Homo sapiens
ggtgtcccatctaca

SEQ ID NO: 1697704 - DNA, 15 bp, Homo sapiens
gtgtcccatctacac

SEQ ID NO: 1697705 - DNA, 15 bp, Homo sapiens
tgtcccatctacact

SEQ ID NO: 1697706 - DNA, 15 bp, Homo sapiens
gtcccatctacactc

SEQ ID NO: 1697707 - DNA, 15 bp, Homo sapiens
tcccatctacactca

SEQ ID NO: 1697708 - DNA, 15 bp, Homo sapiens
cccatctacactcag

SEQ ID NO: 1697709 - DNA, 15 bp, Homo sapiens
ccatctacactcagc

SEQ ID NO: 1697710 - DNA, 15 bp, Homo sapiens
catctacactcagcc

SEQ ID NO: 1697711 - DNA, 15 bp, Homo sapiens
atctacactcagcct

SEQ ID NO: 1697712 - DNA, 15 bp, Homo sapiens
tctacactcagcctt

SEQ ID NO: 1697713 - DNA, 15 bp, Homo sapiens
ctacactcagccttt

SEQ ID NO: 1697714 - DNA, 15 bp, Homo sapiens
tacactcagcctttc

SEQ ID NO: 1697715 - DNA, 15 bp, Homo sapiens
acactcagcctttct

SEQ ID NO: 1697716 - DNA, 15 bp, Homo sapiens
cactcagcctttcta

SEQ ID NO: 1697717 - DNA, 15 bp, Homo sapiens
actcagcctttctag

SEQ ID NO: 1697718 - DNA, 15 bp, Homo sapiens
ctcagcctttctagt

SEQ ID NO: 1697719 - DNA, 15 bp, Homo sapiens
tcagcctttctagtg

SEQ ID NO: 1697720 - DNA, 15 bp, Homo sapiens
cagcctttctagtgt

SEQ ID NO: 1697721 - DNA, 15 bp, Homo sapiens
agcctttctagtgtc

SEQ ID NO: 1697722 - DNA, 15 bp, Homo sapiens
gcctttctagtgtcc

SEQ ID NO: 1697723 - DNA, 15 bp, Homo sapiens
cctttctagtgtcct

SEQ ID NO: 1697724 - DNA, 15 bp, Homo sapiens
ctttctagtgtcctg

SEQ ID NO: 1697725 - DNA, 15 bp, Homo sapiens
tttctagtgtcctgg

SEQ ID NO: 1697726 - DNA, 15 bp, Homo sapiens
ttctagtgtcctggt

SEQ ID NO: 1697727 - DNA, 15 bp, Homo sapiens
tctagtgtcctggtg

SEQ ID NO: 1697728 - DNA, 15 bp, Homo sapiens
ctagtgtcctggtgt

SEQ ID NO: 1697729 - DNA, 15 bp, Homo sapiens
tagtgtcctggtgtc

SEQ ID NO: 1697730 - DNA, 15 bp, Homo sapiens
ggtgtcccgtctacc

SEQ ID NO: 1697731 - DNA, 15 bp, Homo sapiens
gtgtcccgtctaccc

SEQ ID NO: 1697732 - DNA, 15 bp, Homo sapiens
tgtcccgtctaccct

SEQ ID NO: 1697733 - DNA, 15 bp, Homo sapiens
gtcccgtctaccctc

SEQ ID NO: 1697734 - DNA, 15 bp, Homo sapiens
tcccgtctaccctcc

SEQ ID NO: 1697735 - DNA, 15 bp, Homo sapiens
cccgtctaccctcca

SEQ ID NO: 1697736 - DNA, 15 bp, Homo sapiens
ccgtctaccctccac

SEQ ID NO: 1697737 - DNA, 15 bp, Homo sapiens
cgtctaccctccacc

SEQ ID NO: 1697738 - DNA, 15 bp, Homo sapiens
taccctccacctctt

SEQ ID NO: 1697739 - DNA, 15 bp, Homo sapiens
accctccacctcttc

SEQ ID NO: 1697740 - DNA, 15 bp, Homo sapiens
ccctccacctcttca

SEQ ID NO: 1697741 - DNA, 15 bp, Homo sapiens
cctccacctcttcag

SEQ ID NO: 1697742 - DNA, 15 bp, Homo sapiens
ctccacctcttcagt

SEQ ID NO: 1697743 - DNA, 15 bp, Homo sapiens
tccacctcttcagtc

SEQ ID NO: 1697744 - DNA, 15 bp, Homo sapiens
ccacctcttcagtct

SEQ ID NO: 1697745 - DNA, 15 bp, Homo sapiens
cacctcttcagtctc

SEQ ID NO: 1697746 - DNA, 15 bp, Homo sapiens
acctcttcagtctcc

SEQ ID NO: 1697747 - DNA, 15 bp, Homo sapiens
cctcttcagtctcct

SEQ ID NO: 1697748 - DNA, 15 bp, Homo sapiens
ctcttcagtctcctg

SEQ ID NO: 1697749 - DNA, 15 bp, Homo sapiens
tcttcagtctcctgg

SEQ ID NO: 1697750 - DNA, 15 bp, Homo sapiens
cttcagtctcctggt

SEQ ID NO: 1697751 - DNA, 15 bp, Homo sapiens
ttcagtctcctggta

SEQ ID NO: 1697752 - DNA, 15 bp, Homo sapiens
tcagtctcctggtat

SEQ ID NO: 1697753 - DNA, 15 bp, Homo sapiens
cagtctcctggtatc

SEQ ID NO: 1697754 - DNA, 15 bp, Homo sapiens
agtctcctggtatcc

SEQ ID NO: 1697755 - DNA, 15 bp, Homo sapiens
gtctcctggtatcct

SEQ ID NO: 1697756 - DNA, 15 bp, Homo sapiens
tctcctggtatcctg

SEQ ID NO: 1697757 - DNA, 15 bp, Homo sapiens
ctcctggtatcctgt

SEQ ID NO: 1697758 - DNA, 15 bp, Homo sapiens
tcctggtatcctgtc

SEQ ID NO: 1697759 - DNA, 15 bp, Homo sapiens
cctggtatcctgtct

SEQ ID NO: 1697760 - DNA, 15 bp, Homo sapiens
ctggtatcctgtcta

SEQ ID NO: 1697761 - DNA, 15 bp, Homo sapiens
tggtatcctgtctac

SEQ ID NO: 1697762 - DNA, 15 bp, Homo sapiens
ggtatcctgtctacc

SEQ ID NO: 1697763 - DNA, 15 bp, Homo sapiens
gtatcctgtctaccc

SEQ ID NO: 1697764 - DNA, 15 bp, Homo sapiens
tatcctgtctaccct

SEQ ID NO: 1697765 - DNA, 15 bp, Homo sapiens
atcctgtctaccctc

SEQ ID NO: 1697766 - DNA, 15 bp, Homo sapiens
gtcctgtctacactt

SEQ ID NO: 1697767 - DNA, 15 bp, Homo sapiens
tcctgtctacactta

SEQ ID NO: 1697768 - DNA, 15 bp, Homo sapiens
cctgtctacacttaa

SEQ ID NO: 1697769 - DNA, 15 bp, Homo sapiens
ctgtctacacttaac

SEQ ID NO: 1697770 - DNA, 15 bp, Homo sapiens
tgtctacacttaacc

SEQ ID NO: 1697771 - DNA, 15 bp, Homo sapiens
gtctacacttaacct

SEQ ID NO: 1697772 - DNA, 15 bp, Homo sapiens
tctacacttaacctc

SEQ ID NO: 1697773 - DNA, 15 bp, Homo sapiens
ctacacttaacctct

SEQ ID NO: 1697774 - DNA, 15 bp, Homo sapiens
tacacttaacctctc

SEQ ID NO: 1697775 - DNA, 15 bp, Homo sapiens
acacttaacctctcc

SEQ ID NO: 1697776 - DNA, 15 bp, Homo sapiens
cacttaacctctcca

SEQ ID NO: 1697777 - DNA, 15 bp, Homo sapiens
acttaacctctccag

SEQ ID NO: 1697778 - DNA, 15 bp, Homo sapiens
cttaacctctccagt

SEQ ID NO: 1697779 - DNA, 15 bp, Homo sapiens
ttaacctctccagtc

SEQ ID NO: 1697780 - DNA, 15 bp, Homo sapiens
taacctctccagtct

SEQ ID NO: 1697781 - DNA, 15 bp, Homo sapiens
gtctatcctcaaccc

SEQ ID NO: 1697782 - DNA, 15 bp, Homo sapiens
tctatcctcaacccc

SEQ ID NO: 1697783 - DNA, 15 bp, Homo sapiens
ctatcctcaacccct

SEQ ID NO: 1697784 - DNA, 15 bp, Homo sapiens
tatcctcaacccctt

SEQ ID NO: 1697785 - DNA, 15 bp, Homo sapiens
atcctcaaccccttc

SEQ ID NO: 1697786 - DNA, 15 bp, Homo sapiens
tcctcaaccccttca

SEQ ID NO: 1697787 - DNA, 15 bp, Homo sapiens
cctcaaccccttcag

SEQ ID NO: 1697788 - DNA, 15 bp, Homo sapiens
ctcaaccccttcagt

SEQ ID NO: 1697789 - DNA, 15 bp, Homo sapiens
tcaaccccttcagtc

SEQ ID NO: 1697790 - DNA, 15 bp, Homo sapiens
caaccccttcagtct

SEQ ID NO: 1697791 - DNA, 15 bp, Homo sapiens
aaccccttcagtctc

SEQ ID NO: 1697792 - DNA, 15 bp, Homo sapiens
accccttcagtctcc

SEQ ID NO: 1697793 - DNA, 15 bp, Homo sapiens
ccccttcagtctcct

SEQ ID NO: 1697794 - DNA, 15 bp, Homo sapiens
cccttcagtctcctt

SEQ ID NO: 1697795 - DNA, 15 bp, Homo sapiens
ccttcagtctccttg

SEQ ID NO: 1697796 - DNA, 15 bp, Homo sapiens
cttcagtctccttgt

SEQ ID NO: 1697797 - DNA, 15 bp, Homo sapiens
ttcagtctccttgtt

SEQ ID NO: 1697798 - DNA, 15 bp, Homo sapiens
tcagtctccttgttc

SEQ ID NO: 1697799 - DNA, 15 bp, Homo sapiens
cagtctccttgttcc

SEQ ID NO: 1697800 - DNA, 15 bp, Homo sapiens
agtctccttgttccc

SEQ ID NO: 1697801 - DNA, 15 bp, Homo sapiens
gtctccttgttccct

SEQ ID NO: 1697802 - DNA, 15 bp, Homo sapiens
tctccttgttccctg

SEQ ID NO: 1697803 - DNA, 15 bp, Homo sapiens
ctccttgttccctgt

SEQ ID NO: 1697804 - DNA, 15 bp, Homo sapiens
tccttgttccctgtc

SEQ ID NO: 1697805 - DNA, 15 bp, Homo sapiens
ccttgttccctgtct

SEQ ID NO: 1697806 - DNA, 15 bp, Homo sapiens
cttgttccctgtcta

SEQ ID NO: 1697807 - DNA, 15 bp, Homo sapiens
ttgttccctgtctac

SEQ ID NO: 1697808 - DNA, 15 bp, Homo sapiens
tgttccctgtctacc

SEQ ID NO: 1697809 - DNA, 15 bp, Homo sapiens
gttccctgtctaccc

SEQ ID NO: 1697810 - DNA, 15 bp, Homo sapiens
ttccctgtctaccct

SEQ ID NO: 1697811 - DNA, 15 bp, Homo sapiens
tccctgtctaccctc

SEQ ID NO: 1697812 - DNA, 15 bp, Homo sapiens
ccctgtctaccctcc

SEQ ID NO: 1697813 - DNA, 15 bp, Homo sapiens
ctgtctaccctccag

SEQ ID NO: 1697814 - DNA, 15 bp, Homo sapiens
tgtctaccctccagt

SEQ ID NO: 1697815 - DNA, 15 bp, Homo sapiens
gtctaccctccagtc

SEQ ID NO: 1697816 - DNA, 15 bp, Homo sapiens
tctaccctccagtct

SEQ ID NO: 1697817 - DNA, 15 bp, Homo sapiens
ctaccctccagtctc

SEQ ID NO: 1697818 - DNA, 15 bp, Homo sapiens
taccctccagtctcc

SEQ ID NO: 1697819 - DNA, 15 bp, Homo sapiens
accctccagtctcct

SEQ ID NO: 1697820 - DNA, 15 bp, Homo sapiens
ccctccagtctcctg

SEQ ID NO: 1697821 - DNA, 15 bp, Homo sapiens
cctccagtctcctgg

SEQ ID NO: 1697822 - DNA, 15 bp, Homo sapiens
tctcctggtgtccta

SEQ ID NO: 1697823 - DNA, 15 bp, Homo sapiens
ctcctggtgtcctac

SEQ ID NO: 1697824 - DNA, 15 bp, Homo sapiens
tcctggtgtcctact

SEQ ID NO: 1697825 - DNA, 15 bp, Homo sapiens
cctggtgtcctactc

SEQ ID NO: 1697826 - DNA, 15 bp, Homo sapiens
ctggtgtcctactct

SEQ ID NO: 1697827 - DNA, 15 bp, Homo sapiens
tggtgtcctactcta

SEQ ID NO: 1697828 - DNA, 15 bp, Homo sapiens
ggtgtcctactctac

SEQ ID NO: 1697829 - DNA, 15 bp, Homo sapiens
gtgtcctactctacc

SEQ ID NO: 1697830 - DNA, 15 bp, Homo sapiens
tgtcctactctaccc

SEQ ID NO: 1697831 - DNA, 15 bp, Homo sapiens
gtcctactctaccct

SEQ ID NO: 1697832 - DNA, 15 bp, Homo sapiens
tcctactctaccctc

SEQ ID NO: 1697833 - DNA, 15 bp, Homo sapiens
cctactctaccctca

SEQ ID NO: 1697834 - DNA, 15 bp, Homo sapiens
ctactctaccctcaa

SEQ ID NO: 1697835 - DNA, 15 bp, Homo sapiens
tactctaccctcaac

SEQ ID NO: 1697836 - DNA, 15 bp, Homo sapiens
actctaccctcaacc

SEQ ID NO: 1697837 - DNA, 15 bp, Homo sapiens
ctctaccctcaaccc

SEQ ID NO: 1697838 - DNA, 15 bp, Homo sapiens
tctaccctcaacccc

SEQ ID NO: 1697839 - DNA, 15 bp, Homo sapiens
ctaccctcaacccct

SEQ ID NO: 1697840 - DNA, 15 bp, Homo sapiens
taccctcaaccccta

SEQ ID NO: 1697841 - DNA, 15 bp, Homo sapiens
accctcaacccctac

SEQ ID NO: 1697842 - DNA, 15 bp, Homo sapiens
ccctcaacccctacc

SEQ ID NO: 1697843 - DNA, 15 bp, Homo sapiens
cctcaacccctacca

SEQ ID NO: 1697844 - DNA, 15 bp, Homo sapiens
ctcaacccctaccat

SEQ ID NO: 1697845 - DNA, 15 bp, Homo sapiens
tcaacccctaccatc

SEQ ID NO: 1697846 - DNA, 15 bp, Homo sapiens
caacccctaccatct

SEQ ID NO: 1697847 - DNA, 15 bp, Homo sapiens
aacccctaccatctc

SEQ ID NO: 1697848 - DNA, 15 bp, Homo sapiens
acccctaccatctct

SEQ ID NO: 1697849 - DNA, 15 bp, Homo sapiens
cccctaccatctctt

SEQ ID NO: 1697850 - DNA, 15 bp, Homo sapiens
ccctaccatctcttg

SEQ ID NO: 1697851 - DNA, 15 bp, Homo sapiens
cctaccatctcttgg

SEQ ID NO: 1697852 - DNA, 15 bp, Homo sapiens
ctaccatctcttggt

SEQ ID NO: 1697853 - DNA, 15 bp, Homo sapiens
taccatctcttggtg

SEQ ID NO: 1697854 - DNA, 15 bp, Homo sapiens
accatctcttggtgt

SEQ ID NO: 1697855 - DNA, 15 bp, Homo sapiens
ccatctcttggtgtc

SEQ ID NO: 1697856 - DNA, 15 bp, Homo sapiens
catctcttggtgtcc

SEQ ID NO: 1697857 - DNA, 15 bp, Homo sapiens
atctcttggtgtcct

SEQ ID NO: 1697858 - DNA, 15 bp, Homo sapiens
tctcttggtgtcctg

SEQ ID NO: 1697859 - DNA, 15 bp, Homo sapiens
ctcttggtgtcctgc

SEQ ID NO: 1697860 - DNA, 15 bp, Homo sapiens
tcttggtgtcctgcc

SEQ ID NO: 1697861 - DNA, 15 bp, Homo sapiens
cttggtgtcctgcct

SEQ ID NO: 1697862 - DNA, 15 bp, Homo sapiens
ttggtgtcctgcctc

SEQ ID NO: 1697863 - DNA, 15 bp, Homo sapiens
tggtgtcctgcctct

SEQ ID NO: 1697864 - DNA, 15 bp, Homo sapiens
ggtgtcctgcctcta

SEQ ID NO: 1697865 - DNA, 15 bp, Homo sapiens
gtgtcctgcctctac

SEQ ID NO: 1697866 - DNA, 15 bp, Homo sapiens
tgtcctgcctctacc

SEQ ID NO: 1697867 - DNA, 15 bp, Homo sapiens
gtcctgcctctaccc

SEQ ID NO: 1697868 - DNA, 15 bp, Homo sapiens
tcctgcctctaccct

SEQ ID NO: 1697869 - DNA, 15 bp, Homo sapiens
cctgcctctaccctc

SEQ ID NO: 1697870 - DNA, 15 bp, Homo sapiens
ctgcctctaccctca

SEQ ID NO: 1697871 - DNA, 15 bp, Homo sapiens
tgcctctaccctcaa

SEQ ID NO: 1697872 - DNA, 15 bp, Homo sapiens
gcctctaccctcaac

SEQ ID NO: 1697873 - DNA, 15 bp, Homo sapiens
cctctaccctcaact

SEQ ID NO: 1697874 - DNA, 15 bp, Homo sapiens
ctctaccctcaactg

SEQ ID NO: 1697875 - DNA, 15 bp, Homo sapiens
tctaccctcaactgc

SEQ ID NO: 1697876 - DNA, 15 bp, Homo sapiens
ctaccctcaactgct

SEQ ID NO: 1697877 - DNA, 15 bp, Homo sapiens
taccctcaactgcta

SEQ ID NO: 1697878 - DNA, 15 bp, Homo sapiens
accctcaactgctac

SEQ ID NO: 1697879 - DNA, 15 bp, Homo sapiens
ccctcaactgctacc

SEQ ID NO: 1697880 - DNA, 15 bp, Homo sapiens
cctcaactgctacca

SEQ ID NO: 1697881 - DNA, 15 bp, Homo sapiens
ctcaactgctaccat

SEQ ID NO: 1697882 - DNA, 15 bp, Homo sapiens
tcaactgctaccatc

SEQ ID NO: 1697883 - DNA, 15 bp, Homo sapiens
caactgctaccatct

SEQ ID NO: 1697884 - DNA, 15 bp, Homo sapiens
aactgctaccatcta

SEQ ID NO: 1697885 - DNA, 15 bp, Homo sapiens
actgctaccatctat

SEQ ID NO: 1697886 - DNA, 15 bp, Homo sapiens
ctgctaccatctatt

SEQ ID NO: 1697887 - DNA, 15 bp, Homo sapiens
tgctaccatctattc

SEQ ID NO: 1697888 - DNA, 15 bp, Homo sapiens
gctaccatctattct

SEQ ID NO: 1697889 - DNA, 15 bp, Homo sapiens
ctaccatctattctc

SEQ ID NO: 1697890 - DNA, 15 bp, Homo sapiens
taccatctattctca

SEQ ID NO: 1697891 - DNA, 15 bp, Homo sapiens
accatctattctcat

SEQ ID NO: 1697892 - DNA, 15 bp, Homo sapiens
ccatctattctcata

SEQ ID NO: 1697893 - DNA, 15 bp, Homo sapiens
catctattctcatac

SEQ ID NO: 1697894 - DNA, 15 bp, Homo sapiens
atctattctcataca

SEQ ID NO: 1697895 - DNA, 15 bp, Homo sapiens
tctattctcatacag

SEQ ID NO: 1697896 - DNA, 15 bp, Homo sapiens
ctattctcatacagc

SEQ ID NO: 1697897 - DNA, 15 bp, Homo sapiens
tattctcatacagca

SEQ ID NO: 1697898 - DNA, 15 bp, Homo sapiens
attctcatacagcag

SEQ ID NO: 1697899 - DNA, 15 bp, Homo sapiens
ttctcatacagcagg

SEQ ID NO: 1697900 - DNA, 15 bp, Homo sapiens
tctcatacagcaggc

SEQ ID NO: 1697901 - DNA, 15 bp, Homo sapiens
ctcatacagcaggca

SEQ ID NO: 1697902 - DNA, 15 bp, Homo sapiens
tcatacagcaggcag

SEQ ID NO: 1697903 - DNA, 15 bp, Homo sapiens
catacagcaggcaga

SEQ ID NO: 1697904 - DNA, 15 bp, Homo sapiens
atacagcaggcagaa

SEQ ID NO: 1697905 - DNA, 15 bp, Homo sapiens
tacagcaggcagaag

SEQ ID NO: 1697906 - DNA, 15 bp, Homo sapiens
acagcaggcagaagg

SEQ ID NO: 1697907 - DNA, 15 bp, Homo sapiens
cagcaggcagaagga

SEQ ID NO: 1697908 - DNA, 15 bp, Homo sapiens
agcaggcagaaggag

SEQ ID NO: 1697909 - DNA, 15 bp, Homo sapiens
gcaggcagaaggagt

SEQ ID NO: 1697910 - DNA, 15 bp, Homo sapiens
caggcagaaggagtg

SEQ ID NO: 1697911 - DNA, 15 bp, Homo sapiens
aggcagaaggagtgc

SEQ ID NO: 1697912 - DNA, 15 bp, Homo sapiens
ggcagaaggagtgct

SEQ ID NO: 1697913 - DNA, 15 bp, Homo sapiens
gcagaaggagtgctt

SEQ ID NO: 1697914 - DNA, 15 bp, Homo sapiens
cagaaggagtgcttg

SEQ ID NO: 1697915 - DNA, 15 bp, Homo sapiens
agaaggagtgcttgg

SEQ ID NO: 1697916 - DNA, 15 bp, Homo sapiens
gaaggagtgcttggt

SEQ ID NO: 1697917 - DNA, 15 bp, Homo sapiens
aaggagtgcttggta

SEQ ID NO: 1697918 - DNA, 15 bp, Homo sapiens
aggagtgcttggtaa

SEQ ID NO: 1697919 - DNA, 15 bp, Homo sapiens
ggagtgcttggtaac

SEQ ID NO: 1697920 - DNA, 15 bp, Homo sapiens
gagtgcttggtaaca

SEQ ID NO: 1697921 - DNA, 15 bp, Homo sapiens
agtgcttggtaacac

SEQ ID NO: 1697922 - DNA, 15 bp, Homo sapiens
gtgcttggtaacaca

SEQ ID NO: 1697923 - DNA, 15 bp, Homo sapiens
tgcttggtaacacaa

SEQ ID NO: 1697924 - DNA, 15 bp, Homo sapiens
gcttggtaacacaag

SEQ ID NO: 1697925 - DNA, 15 bp, Homo sapiens
cttggtaacacaagt

SEQ ID NO: 1697926 - DNA, 15 bp, Homo sapiens
ttggtaacacaagtg

SEQ ID NO: 1697927 - DNA, 15 bp, Homo sapiens
tggtaacacaagtga

SEQ ID NO: 1697928 - DNA, 15 bp, Homo sapiens
ggtaacacaagtgag

SEQ ID NO: 1697929 - DNA, 15 bp, Homo sapiens
gtaacacaagtgaga

SEQ ID NO: 1697930 - DNA, 15 bp, Homo sapiens
taacacaagtgagat

SEQ ID NO: 1697931 - DNA, 15 bp, Homo sapiens
aacacaagtgagatc

SEQ ID NO: 1697932 - DNA, 15 bp, Homo sapiens
acacaagtgagatca

SEQ ID NO: 1697933 - DNA, 15 bp, Homo sapiens
cacaagtgagatcat

SEQ ID NO: 1697934 - DNA, 15 bp, Homo sapiens
acaagtgagatcatg

SEQ ID NO: 1697935 - DNA, 15 bp, Homo sapiens
caagtgagatcatga

SEQ ID NO: 1697936 - DNA, 15 bp, Homo sapiens
aagtgagatcatgac

SEQ ID NO: 1697937 - DNA, 15 bp, Homo sapiens
agtgagatcatgacc

SEQ ID NO: 1697938 - DNA, 15 bp, Homo sapiens
gtgagatcatgacca

SEQ ID NO: 1697939 - DNA, 15 bp, Homo sapiens
tgagatcatgaccat

SEQ ID NO: 1697940 - DNA, 15 bp, Homo sapiens
gagatcatgaccatc

SEQ ID NO: 1697941 - DNA, 15 bp, Homo sapiens
agatcatgaccatct

SEQ ID NO: 1697942 - DNA, 15 bp, Homo sapiens
gatcatgaccatcta

SEQ ID NO: 1697943 - DNA, 15 bp, Homo sapiens
atcatgaccatctat

SEQ ID NO: 1697944 - DNA, 15 bp, Homo sapiens
tcatgaccatctatc

SEQ ID NO: 1697945 - DNA, 15 bp, Homo sapiens
catgaccatctatct

SEQ ID NO: 1697946 - DNA, 15 bp, Homo sapiens
atgaccatctatctg

SEQ ID NO: 1697947 - DNA, 15 bp, Homo sapiens
tgaccatctatctgc

SEQ ID NO: 1697948 - DNA, 15 bp, Homo sapiens
gaccatctatctgct

SEQ ID NO: 1697949 - DNA, 15 bp, Homo sapiens
accatctatctgctc

SEQ ID NO: 1697950 - DNA, 15 bp, Homo sapiens
ccatctatctgctca

SEQ ID NO: 1697951 - DNA, 15 bp, Homo sapiens
catctatctgctcat

SEQ ID NO: 1697952 - DNA, 15 bp, Homo sapiens
atctatctgctcatt

SEQ ID NO: 1697953 - DNA, 15 bp, Homo sapiens
tctatctgctcatta

SEQ ID NO: 1697954 - DNA, 15 bp, Homo sapiens
ctatctgctcattac

SEQ ID NO: 1697955 - DNA, 15 bp, Homo sapiens
tatctgctcattacc

SEQ ID NO: 1697956 - DNA, 15 bp, Homo sapiens
atctgctcattaccc

SEQ ID NO: 1697957 - DNA, 15 bp, Homo sapiens
tctgctcattaccct

SEQ ID NO: 1697958 - DNA, 15 bp, Homo sapiens
ctgctcattaccctg

SEQ ID NO: 1697959 - DNA, 15 bp, Homo sapiens
tgctcattaccctgc

SEQ ID NO: 1697960 - DNA, 15 bp, Homo sapiens
gctcattaccctgca

SEQ ID NO: 1697961 - DNA, 15 bp, Homo sapiens
ctcattaccctgcaa

SEQ ID NO: 1697962 - DNA, 15 bp, Homo sapiens
tcattaccctgcaat

SEQ ID NO: 1697963 - DNA, 15 bp, Homo sapiens
cattaccctgcaatg

SEQ ID NO: 1697964 - DNA, 15 bp, Homo sapiens
attaccctgcaatgg

SEQ ID NO: 1697965 - DNA, 15 bp, Homo sapiens
ttaccctgcaatggc

SEQ ID NO: 1697966 - DNA, 15 bp, Homo sapiens
taccctgcaatggct

SEQ ID NO: 1697967 - DNA, 15 bp, Homo sapiens
accctgcaatggctc

SEQ ID NO: 1697968 - DNA, 15 bp, Homo sapiens
ccctgcaatggctcc

SEQ ID NO: 1697969 - DNA, 15 bp, Homo sapiens
cctgcaatggctcct

SEQ ID NO: 1697970 - DNA, 15 bp, Homo sapiens
ctgcaatggctcctg

SEQ ID NO: 1697971 - DNA, 15 bp, Homo sapiens
tgcaatggctcctgt

SEQ ID NO: 1697972 - DNA, 15 bp, Homo sapiens
gcaatggctcctgtt

SEQ ID NO: 1697973 - DNA, 15 bp, Homo sapiens
caatggctcctgttt

SEQ ID NO: 1697974 - DNA, 15 bp, Homo sapiens
aatggctcctgtttc

SEQ ID NO: 1697975 - DNA, 15 bp, Homo sapiens
atggctcctgtttca

SEQ ID NO: 1697976 - DNA, 15 bp, Homo sapiens
tggctcctgtttcac

SEQ ID NO: 1697977 - DNA, 15 bp, Homo sapiens
ggctcctgtttcact

SEQ ID NO: 1697978 - DNA, 15 bp, Homo sapiens
gctcctgtttcactg

SEQ ID NO: 1697979 - DNA, 15 bp, Homo sapiens
ctcctgtttcactga

SEQ ID NO: 1697980 - DNA, 15 bp, Homo sapiens
tcctgtttcactgaa

SEQ ID NO: 1697981 - DNA, 15 bp, Homo sapiens
cctgtttcactgaaa

SEQ ID NO: 1697982 - DNA, 15 bp, Homo sapiens
ctgtttcactgaaag

SEQ ID NO: 1697983 - DNA, 15 bp, Homo sapiens
tgtttcactgaaagg

SEQ ID NO: 1697984 - DNA, 15 bp, Homo sapiens
gtttcactgaaagga

SEQ ID NO: 1697985 - DNA, 15 bp, Homo sapiens
tttcactgaaaggaa

SEQ ID NO: 1697986 - DNA, 15 bp, Homo sapiens
ttcactgaaaggaaa

SEQ ID NO: 1697987 - DNA, 15 bp, Homo sapiens
tcactgaaaggaaaa

SEQ ID NO: 1697988 - DNA, 15 bp, Homo sapiens
cactgaaaggaaaaa

SEQ ID NO: 1697989 - DNA, 15 bp, Homo sapiens
actgaaaggaaaaac

SEQ ID NO: 1697990 - DNA, 15 bp, Homo sapiens
ctgaaaggaaaaact

SEQ ID NO: 1697991 - DNA, 15 bp, Homo sapiens
tgaaaggaaaaactc

SEQ ID NO: 1697992 - DNA, 15 bp, Homo sapiens
gaaaggaaaaactca

SEQ ID NO: 1697993 - DNA, 15 bp, Homo sapiens
aaaggaaaaactcaa

SEQ ID NO: 1697994 - DNA, 15 bp, Homo sapiens
aaggaaaaactcaag

SEQ ID NO: 1697995 - DNA, 15 bp, Homo sapiens
aggaaaaactcaagc

SEQ ID NO: 1697996 - DNA, 15 bp, Homo sapiens
ggaaaaactcaagcc

SEQ ID NO: 1697997 - DNA, 15 bp, Homo sapiens
gaaaaactcaagccc

SEQ ID NO: 1697998 - DNA, 15 bp, Homo sapiens
aaaaactcaagccct

SEQ ID NO: 1697999 - DNA, 15 bp, Homo sapiens
aaaactcaagcccta

SEQ ID NO: 1698000 - DNA, 15 bp, Homo sapiens
aaactcaagccctaa

SEQ ID NO: 1698001 - DNA, 15 bp, Homo sapiens
aactcaagccctaaa

SEQ ID NO: 1698002 - DNA, 15 bp, Homo sapiens
actcaagccctaaaa

SEQ ID NO: 1698003 - DNA, 15 bp, Homo sapiens
ctcaagccctaaaac

SEQ ID NO: 1698004 - DNA, 15 bp, Homo sapiens
tcaagccctaaaaca

SEQ ID NO: 1698005 - DNA, 15 bp, Homo sapiens
caagccctaaaacat

SEQ ID NO: 1698006 - DNA, 15 bp, Homo sapiens
aagccctaaaacatc

SEQ ID NO: 1698007 - DNA, 15 bp, Homo sapiens
agccctaaaacatct

SEQ ID NO: 1698008 - DNA, 15 bp, Homo sapiens
gccctaaaacatcta

SEQ ID NO: 1698009 - DNA, 15 bp, Homo sapiens
ccctaaaacatctaa

SEQ ID NO: 1698010 - DNA, 15 bp, Homo sapiens
cctaaaacatctaaa

SEQ ID NO: 1698011 - DNA, 15 bp, Homo sapiens
ctaaaacatctaaaa

SEQ ID NO: 1698012 - DNA, 15 bp, Homo sapiens
taaaacatctaaaaa

SEQ ID NO: 1698013 - DNA, 15 bp, Homo sapiens
aaaacatctaaaaat

SEQ ID NO: 1698014 - DNA, 15 bp, Homo sapiens
aaacatctaaaaata

SEQ ID NO: 1698015 - DNA, 15 bp, Homo sapiens
acatctaaaaatatt

SEQ ID NO: 1698016 - DNA, 15 bp, Homo sapiens
catctaaaaatattc

SEQ ID NO: 1698017 - DNA, 15 bp, Homo sapiens
atctaaaaatattct

SEQ ID NO: 1698018 - DNA, 15 bp, Homo sapiens
tctaaaaatattcta

SEQ ID NO: 1698019 - DNA, 15 bp, Homo sapiens
ctaaaaatattctac

SEQ ID NO: 1698020 - DNA, 15 bp, Homo sapiens
taaaaatattctaca

SEQ ID NO: 1698021 - DNA, 15 bp, Homo sapiens
aaaaatattctacat

SEQ ID NO: 1698022 - DNA, 15 bp, Homo sapiens
aaaatattctacatg

SEQ ID NO: 1698023 - DNA, 15 bp, Homo sapiens
aaatattctacatga

SEQ ID NO: 1698024 - DNA, 15 bp, Homo sapiens
aatattctacatgat

SEQ ID NO: 1698025 - DNA, 15 bp, Homo sapiens
atattctacatgatc

SEQ ID NO: 1698026 - DNA, 15 bp, Homo sapiens
tattctacatgatct

SEQ ID NO: 1698027 - DNA, 15 bp, Homo sapiens
attctacatgatctg

SEQ ID NO: 1698028 - DNA, 15 bp, Homo sapiens
ttctacatgatctgg

SEQ ID NO: 1698029 - DNA, 15 bp, Homo sapiens
tctacatgatctggc

SEQ ID NO: 1698030 - DNA, 15 bp, Homo sapiens
ctacatgatctggct

SEQ ID NO: 1698031 - DNA, 15 bp, Homo sapiens
tacatgatctggctc

SEQ ID NO: 1698032 - DNA, 15 bp, Homo sapiens
acatgatctggctct

SEQ ID NO: 1698033 - DNA, 15 bp, Homo sapiens
catgatctggctctg

SEQ ID NO: 1698034 - DNA, 15 bp, Homo sapiens
atgatctggctctgg

SEQ ID NO: 1698035 - DNA, 15 bp, Homo sapiens
tgatctggctctgga

SEQ ID NO: 1698036 - DNA, 15 bp, Homo sapiens
gatctggctctggat

SEQ ID NO: 1698037 - DNA, 15 bp, Homo sapiens
atctggctctggatc

SEQ ID NO: 1698038 - DNA, 15 bp, Homo sapiens
tctggctctggatcc

SEQ ID NO: 1698039 - DNA, 15 bp, Homo sapiens
ctggctctggatccc

SEQ ID NO: 1698040 - DNA, 15 bp, Homo sapiens
tggctctggatccct

SEQ ID NO: 1698041 - DNA, 15 bp, Homo sapiens
ggctctggatccctc

SEQ ID NO: 1698042 - DNA, 15 bp, Homo sapiens
gctctggatccctct

SEQ ID NO: 1698043 - DNA, 15 bp, Homo sapiens
ctctggatccctctt

SEQ ID NO: 1698044 - DNA, 15 bp, Homo sapiens
tctggatccctcttt

SEQ ID NO: 1698045 - DNA, 15 bp, Homo sapiens
ctggatccctctttg

SEQ ID NO: 1698046 - DNA, 15 bp, Homo sapiens
tggatccctctttga

SEQ ID NO: 1698047 - DNA, 15 bp, Homo sapiens
ggatccctctttgat

SEQ ID NO: 1698048 - DNA, 15 bp, Homo sapiens
gatccctctttgata

SEQ ID NO: 1698049 - DNA, 15 bp, Homo sapiens
atccctctttgatat

SEQ ID NO: 1698050 - DNA, 15 bp, Homo sapiens
tccctctttgatatc

SEQ ID NO: 1698051 - DNA, 15 bp, Homo sapiens
ccctctttgatatca

SEQ ID NO: 1698052 - DNA, 15 bp, Homo sapiens
cctctttgatatcac

SEQ ID NO: 1698053 - DNA, 15 bp, Homo sapiens
ctctttgatatcacc

SEQ ID NO: 1698054 - DNA, 15 bp, Homo sapiens
tctttgatatcacct

SEQ ID NO: 1698055 - DNA, 15 bp, Homo sapiens
ctttgatatcacctg

SEQ ID NO: 1698056 - DNA, 15 bp, Homo sapiens
tttgatatcacctgc

SEQ ID NO: 1698057 - DNA, 15 bp, Homo sapiens
ttgatatcacctgcc

SEQ ID NO: 1698058 - DNA, 15 bp, Homo sapiens
tgatatcacctgcca

SEQ ID NO: 1698059 - DNA, 15 bp, Homo sapiens
gatatcacctgccac

SEQ ID NO: 1698060 - DNA, 15 bp, Homo sapiens
atatcacctgccact

SEQ ID NO: 1698061 - DNA, 15 bp, Homo sapiens
tatcacctgccactg

SEQ ID NO: 1698062 - DNA, 15 bp, Homo sapiens
atcacctgccactgc

SEQ ID NO: 1698063 - DNA, 15 bp, Homo sapiens
tcacctgccactgcc

SEQ ID NO: 1698064 - DNA, 15 bp, Homo sapiens
cacctgccactgccc

SEQ ID NO: 1698065 - DNA, 15 bp, Homo sapiens
acctgccactgcccc

SEQ ID NO: 1698066 - DNA, 15 bp, Homo sapiens
cctgccactgccccc

SEQ ID NO: 1698067 - DNA, 15 bp, Homo sapiens
ctgccactgccccct

SEQ ID NO: 1698068 - DNA, 15 bp, Homo sapiens
tgccactgccccctc

SEQ ID NO: 1698069 - DNA, 15 bp, Homo sapiens
gccactgccccctca

SEQ ID NO: 1698070 - DNA, 15 bp, Homo sapiens
ccactgccccctcac

SEQ ID NO: 1698071 - DNA, 15 bp, Homo sapiens
cactgccccctcact

SEQ ID NO: 1698072 - DNA, 15 bp, Homo sapiens
actgccccctcacta

SEQ ID NO: 1698073 - DNA, 15 bp, Homo sapiens
ctgccccctcactaa

SEQ ID NO: 1698074 - DNA, 15 bp, Homo sapiens
tgccccctcactaat

SEQ ID NO: 1698075 - DNA, 15 bp, Homo sapiens
gccccctcactaatt

SEQ ID NO: 1698076 - DNA, 15 bp, Homo sapiens
ccccctcactaattc

SEQ ID NO: 1698077 - DNA, 15 bp, Homo sapiens
cccctcactaattct

SEQ ID NO: 1698078 - DNA, 15 bp, Homo sapiens
ccctcactaattctt

SEQ ID NO: 1698079 - DNA, 15 bp, Homo sapiens
cctcactaattcttc

SEQ ID NO: 1698080 - DNA, 15 bp, Homo sapiens
ctcactaattcttct

SEQ ID NO: 1698081 - DNA, 15 bp, Homo sapiens
tcactaattcttctc

SEQ ID NO: 1698082 - DNA, 15 bp, Homo sapiens
cactaattcttctcc

SEQ ID NO: 1698083 - DNA, 15 bp, Homo sapiens
actaattcttctcca

SEQ ID NO: 1698084 - DNA, 15 bp, Homo sapiens
ctaattcttctccag

SEQ ID NO: 1698085 - DNA, 15 bp, Homo sapiens
taattcttctccagc

SEQ ID NO: 1698086 - DNA, 15 bp, Homo sapiens
aattcttctccagcc

SEQ ID NO: 1698087 - DNA, 15 bp, Homo sapiens
attcttctccagcca

SEQ ID NO: 1698088 - DNA, 15 bp, Homo sapiens
ttcttctccagccac

SEQ ID NO: 1698089 - DNA, 15 bp, Homo sapiens
tcttctccagccaca

SEQ ID NO: 1698090 - DNA, 15 bp, Homo sapiens
cttctccagccacat

SEQ ID NO: 1698091 - DNA, 15 bp, Homo sapiens
ttctccagccacatt

SEQ ID NO: 1698092 - DNA, 15 bp, Homo sapiens
tctccagccacattg

SEQ ID NO: 1698093 - DNA, 15 bp, Homo sapiens
ctccagccacattgg

SEQ ID NO: 1698094 - DNA, 15 bp, Homo sapiens
tccagccacattggt

SEQ ID NO: 1698095 - DNA, 15 bp, Homo sapiens
ccagccacattggtt

SEQ ID NO: 1698096 - DNA, 15 bp, Homo sapiens
cagccacattggttc

SEQ ID NO: 1698097 - DNA, 15 bp, Homo sapiens
agccacattggttcc

SEQ ID NO: 1698098 - DNA, 15 bp, Homo sapiens
gccacattggttcct

SEQ ID NO: 1698099 - DNA, 15 bp, Homo sapiens
ccacattggttcctc

SEQ ID NO: 1698100 - DNA, 15 bp, Homo sapiens
cacattggttcctcc

SEQ ID NO: 1698101 - DNA, 15 bp, Homo sapiens
acattggttcctccc

SEQ ID NO: 1698102 - DNA, 15 bp, Homo sapiens
cattggttcctccct

SEQ ID NO: 1698103 - DNA, 15 bp, Homo sapiens
attggttcctccctg

SEQ ID NO: 1698104 - DNA, 15 bp, Homo sapiens
ttggttcctccctgt

SEQ ID NO: 1698105 - DNA, 15 bp, Homo sapiens
tggttcctccctgtg

SEQ ID NO: 1698106 - DNA, 15 bp, Homo sapiens
ggttcctccctgtgt

SEQ ID NO: 1698107 - DNA, 15 bp, Homo sapiens
gttcctccctgtgtc

SEQ ID NO: 1698108 - DNA, 15 bp, Homo sapiens
ttcctccctgtgtct

SEQ ID NO: 1698109 - DNA, 15 bp, Homo sapiens
tcctccctgtgtctt

SEQ ID NO: 1698110 - DNA, 15 bp, Homo sapiens
cctccctgtgtcttg

SEQ ID NO: 1698111 - DNA, 15 bp, Homo sapiens
ctccctgtgtcttga

SEQ ID NO: 1698112 - DNA, 15 bp, Homo sapiens
tccctgtgtcttgac

SEQ ID NO: 1698113 - DNA, 15 bp, Homo sapiens
ccctgtgtcttgacc

SEQ ID NO: 1698114 - DNA, 15 bp, Homo sapiens
cctgtgtcttgaccc

SEQ ID NO: 1698115 - DNA, 15 bp, Homo sapiens
ctgtgtcttgaccca

SEQ ID NO: 1698116 - DNA, 15 bp, Homo sapiens
tgtgtcttgacccaa

SEQ ID NO: 1698117 - DNA, 15 bp, Homo sapiens
gtgtcttgacccaaa

SEQ ID NO: 1698118 - DNA, 15 bp, Homo sapiens
tgtcttgacccaaac

SEQ ID NO: 1698119 - DNA, 15 bp, Homo sapiens
gtcttgacccaaaca

SEQ ID NO: 1698120 - DNA, 15 bp, Homo sapiens
tcttgacccaaacaa

SEQ ID NO: 1698121 - DNA, 15 bp, Homo sapiens
cttgacccaaacaac

SEQ ID NO: 1698122 - DNA, 15 bp, Homo sapiens
ttgacccaaacaacg

SEQ ID NO: 1698123 - DNA, 15 bp, Homo sapiens
tgacccaaacaacgc

SEQ ID NO: 1698124 - DNA, 15 bp, Homo sapiens
gacccaaacaacgct

SEQ ID NO: 1698125 - DNA, 15 bp, Homo sapiens
acccaaacaacgctg

SEQ ID NO: 1698126 - DNA, 15 bp, Homo sapiens
cccaaacaacgctgc

SEQ ID NO: 1698127 - DNA, 15 bp, Homo sapiens
ccaaacaacgctgcc

SEQ ID NO: 1698128 - DNA, 15 bp, Homo sapiens
caaacaacgctgcct

SEQ ID NO: 1698129 - DNA, 15 bp, Homo sapiens
aaacaacgctgcctt

SEQ ID NO: 1698130 - DNA, 15 bp, Homo sapiens
aacaacgctgccttt

SEQ ID NO: 1698131 - DNA, 15 bp, Homo sapiens
acaacgctgcctttt

SEQ ID NO: 1698132 - DNA, 15 bp, Homo sapiens
caacgctgccttttc

SEQ ID NO: 1698133 - DNA, 15 bp, Homo sapiens
aacgctgccttttct

SEQ ID NO: 1698134 - DNA, 15 bp, Homo sapiens
acgctgccttttctt

SEQ ID NO: 1698135 - DNA, 15 bp, Homo sapiens
cgctgccttttcttg

SEQ ID NO: 1698136 - DNA, 15 bp, Homo sapiens
gctgccttttcttgg

SEQ ID NO: 1698137 - DNA, 15 bp, Homo sapiens
ctgccttttcttggg

SEQ ID NO: 1698138 - DNA, 15 bp, Homo sapiens
tgccttttcttggga

SEQ ID NO: 1698139 - DNA, 15 bp, Homo sapiens
gccttttcttgggaa

SEQ ID NO: 1698140 - DNA, 15 bp, Homo sapiens
ccttttcttgggaaa

SEQ ID NO: 1698141 - DNA, 15 bp, Homo sapiens
cttttcttgggaaag

SEQ ID NO: 1698142 - DNA, 15 bp, Homo sapiens
ttttcttgggaaaga

SEQ ID NO: 1698143 - DNA, 15 bp, Homo sapiens
tttcttgggaaagaa

SEQ ID NO: 1698144 - DNA, 15 bp, Homo sapiens
ttcttgggaaagaaa

SEQ ID NO: 1698145 - DNA, 15 bp, Homo sapiens
tcttgggaaagaaat

SEQ ID NO: 1698146 - DNA, 15 bp, Homo sapiens
cttgggaaagaaatg

SEQ ID NO: 1698147 - DNA, 15 bp, Homo sapiens
ttgggaaagaaatgc

SEQ ID NO: 1698148 - DNA, 15 bp, Homo sapiens
tgggaaagaaatgca

SEQ ID NO: 1698149 - DNA, 15 bp, Homo sapiens
gggaaagaaatgcaa

SEQ ID NO: 1698150 - DNA, 15 bp, Homo sapiens
ggaaagaaatgcaag

SEQ ID NO: 1698151 - DNA, 15 bp, Homo sapiens
gaaagaaatgcaagc

SEQ ID NO: 1698152 - DNA, 15 bp, Homo sapiens
aaagaaatgcaagct

SEQ ID NO: 1698153 - DNA, 15 bp, Homo sapiens
aagaaatgcaagctt

SEQ ID NO: 1698154 - DNA, 15 bp, Homo sapiens
agaaatgcaagcttt

SEQ ID NO: 1698155 - DNA, 15 bp, Homo sapiens
gaaatgcaagctttt

SEQ ID NO: 1698156 - DNA, 15 bp, Homo sapiens
aaatgcaagcttttg

SEQ ID NO: 1698157 - DNA, 15 bp, Homo sapiens
aatgcaagcttttgc

SEQ ID NO: 1698158 - DNA, 15 bp, Homo sapiens
atgcaagcttttgca

SEQ ID NO: 1698159 - DNA, 15 bp, Homo sapiens
tgcaagcttttgcac

SEQ ID NO: 1698160 - DNA, 15 bp, Homo sapiens
gcaagcttttgcact

SEQ ID NO: 1698161 - DNA, 15 bp, Homo sapiens
caagcttttgcactg

SEQ ID NO: 1698162 - DNA, 15 bp, Homo sapiens
aagcttttgcactgg

SEQ ID NO: 1698163 - DNA, 15 bp, Homo sapiens
agcttttgcactggc

SEQ ID NO: 1698164 - DNA, 15 bp, Homo sapiens
gcttttgcactggct

SEQ ID NO: 1698165 - DNA, 15 bp, Homo sapiens
cttttgcactggcta

SEQ ID NO: 1698166 - DNA, 15 bp, Homo sapiens
ttttgcactggctat

SEQ ID NO: 1698167 - DNA, 15 bp, Homo sapiens
tttgcactggctata

SEQ ID NO: 1698168 - DNA, 15 bp, Homo sapiens
ttgcactggctatat

SEQ ID NO: 1698169 - DNA, 15 bp, Homo sapiens
tgcactggctatatg

SEQ ID NO: 1698170 - DNA, 15 bp, Homo sapiens
gcactggctatatgc

SEQ ID NO: 1698171 - DNA, 15 bp, Homo sapiens
cactggctatatgct

SEQ ID NO: 1698172 - DNA, 15 bp, Homo sapiens
actggctatatgctt

SEQ ID NO: 1698173 - DNA, 15 bp, Homo sapiens
ctggctatatgcttg

SEQ ID NO: 1698174 - DNA, 15 bp, Homo sapiens
tggctatatgcttgg

SEQ ID NO: 1698175 - DNA, 15 bp, Homo sapiens
ggctatatgcttggc

SEQ ID NO: 1698176 - DNA, 15 bp, Homo sapiens
gctatatgcttggcc

SEQ ID NO: 1698177 - DNA, 15 bp, Homo sapiens
ctatatgcttggcca

SEQ ID NO: 1698178 - DNA, 15 bp, Homo sapiens
tatatgcttggccaa

SEQ ID NO: 1698179 - DNA, 15 bp, Homo sapiens
atatgcttggccaac

SEQ ID NO: 1698180 - DNA, 15 bp, Homo sapiens
tatgcttggccaaca

SEQ ID NO: 1698181 - DNA, 15 bp, Homo sapiens
atgcttggccaacag

SEQ ID NO: 1698182 - DNA, 15 bp, Homo sapiens
tgcttggccaacagt

SEQ ID NO: 1698183 - DNA, 15 bp, Homo sapiens
gcttggccaacagtg

SEQ ID NO: 1698184 - DNA, 15 bp, Homo sapiens
cttggccaacagtgt

SEQ ID NO: 1698185 - DNA, 15 bp, Homo sapiens
ttggccaacagtgtg

SEQ ID NO: 1698186 - DNA, 15 bp, Homo sapiens
tggccaacagtgtgc

SEQ ID NO: 1698187 - DNA, 15 bp, Homo sapiens
ggccaacagtgtgct

SEQ ID NO: 1698188 - DNA, 15 bp, Homo sapiens
gccaacagtgtgctt

SEQ ID NO: 1698189 - DNA, 15 bp, Homo sapiens
ccaacagtgtgcttc

SEQ ID NO: 1698190 - DNA, 15 bp, Homo sapiens
caacagtgtgcttcc

SEQ ID NO: 1698191 - DNA, 15 bp, Homo sapiens
aacagtgtgcttccc

SEQ ID NO: 1698192 - DNA, 15 bp, Homo sapiens
acagtgtgcttccct

SEQ ID NO: 1698193 - DNA, 15 bp, Homo sapiens
cagtgtgcttccctc

SEQ ID NO: 1698194 - DNA, 15 bp, Homo sapiens
agtgtgcttccctca

SEQ ID NO: 1698195 - DNA, 15 bp, Homo sapiens
gtgtgcttccctcag

SEQ ID NO: 1698196 - DNA, 15 bp, Homo sapiens
tgtgcttccctcaga

SEQ ID NO: 1698197 - DNA, 15 bp, Homo sapiens
gtgcttccctcagaa

SEQ ID NO: 1698198 - DNA, 15 bp, Homo sapiens
tgcttccctcagaag

SEQ ID NO: 1698199 - DNA, 15 bp, Homo sapiens
gcttccctcagaagt

SEQ ID NO: 1698200 - DNA, 15 bp, Homo sapiens
cttccctcagaagtc

SEQ ID NO: 1698201 - DNA, 15 bp, Homo sapiens
ttccctcagaagtca

SEQ ID NO: 1698202 - DNA, 15 bp, Homo sapiens
tccctcagaagtcag

SEQ ID NO: 1698203 - DNA, 15 bp, Homo sapiens
ccctcagaagtcagt

SEQ ID NO: 1698204 - DNA, 15 bp, Homo sapiens
cctcagaagtcagta

SEQ ID NO: 1698205 - DNA, 15 bp, Homo sapiens
ctcagaagtcagtat

SEQ ID NO: 1698206 - DNA, 15 bp, Homo sapiens
tcagaagtcagtata

SEQ ID NO: 1698207 - DNA, 15 bp, Homo sapiens
cagaagtcagtataa

SEQ ID NO: 1698208 - DNA, 15 bp, Homo sapiens
agaagtcagtataac

SEQ ID NO: 1698209 - DNA, 15 bp, Homo sapiens
gaagtcagtataacc

SEQ ID NO: 1698210 - DNA, 15 bp, Homo sapiens
aagtcagtataacca

SEQ ID NO: 1698211 - DNA, 15 bp, Homo sapiens
agtcagtataaccaa

SEQ ID NO: 1698212 - DNA, 15 bp, Homo sapiens
gtcagtataaccaac

SEQ ID NO: 1698213 - DNA, 15 bp, Homo sapiens
tcagtataaccaaca

SEQ ID NO: 1698214 - DNA, 15 bp, Homo sapiens
cagtataaccaacaa

SEQ ID NO: 1698215 - DNA, 15 bp, Homo sapiens
agtataaccaacaac

SEQ ID NO: 1698216 - DNA, 15 bp, Homo sapiens
gtataaccaacaact

SEQ ID NO: 1698217 - DNA, 15 bp, Homo sapiens
tataaccaacaactc

SEQ ID NO: 1698218 - DNA, 15 bp, Homo sapiens
ataaccaacaactcc

SEQ ID NO: 1698219 - DNA, 15 bp, Homo sapiens
taaccaacaactcca

SEQ ID NO: 1698220 - DNA, 15 bp, Homo sapiens
aaccaacaactccac

SEQ ID NO: 1698221 - DNA, 15 bp, Homo sapiens
accaacaactccact

SEQ ID NO: 1698222 - DNA, 15 bp, Homo sapiens
ccaacaactccactt

SEQ ID NO: 1698223 - DNA, 15 bp, Homo sapiens
caacaactccacttc

SEQ ID NO: 1698224 - DNA, 15 bp, Homo sapiens
aacaactccacttcc

SEQ ID NO: 1698225 - DNA, 15 bp, Homo sapiens
acaactccacttcct

SEQ ID NO: 1698226 - DNA, 15 bp, Homo sapiens
caactccacttcctt

SEQ ID NO: 1698227 - DNA, 15 bp, Homo sapiens
aactccacttccttc

SEQ ID NO: 1698228 - DNA, 15 bp, Homo sapiens
actccacttccttca

SEQ ID NO: 1698229 - DNA, 15 bp, Homo sapiens
ctccacttccttcaa

SEQ ID NO: 1698230 - DNA, 15 bp, Homo sapiens
tccacttccttcaag

SEQ ID NO: 1698231 - DNA, 15 bp, Homo sapiens
ccacttccttcaagt

SEQ ID NO: 1698232 - DNA, 15 bp, Homo sapiens
cacttccttcaagtc

SEQ ID NO: 1698233 - DNA, 15 bp, Homo sapiens
acttccttcaagtct

SEQ ID NO: 1698234 - DNA, 15 bp, Homo sapiens
cttccttcaagtctg

SEQ ID NO: 1698235 - DNA, 15 bp, Homo sapiens
ttccttcaagtctgt

SEQ ID NO: 1698236 - DNA, 15 bp, Homo sapiens
tccttcaagtctgtg

SEQ ID NO: 1698237 - DNA, 15 bp, Homo sapiens
ccttcaagtctgtgc

SEQ ID NO: 1698238 - DNA, 15 bp, Homo sapiens
cttcaagtctgtgct

SEQ ID NO: 1698239 - DNA, 15 bp, Homo sapiens
ttcaagtctgtgctc

SEQ ID NO: 1698240 - DNA, 15 bp, Homo sapiens
tcaagtctgtgctca

SEQ ID NO: 1698241 - DNA, 15 bp, Homo sapiens
caagtctgtgctcaa

SEQ ID NO: 1698242 - DNA, 15 bp, Homo sapiens
aagtctgtgctcaaa

SEQ ID NO: 1698243 - DNA, 15 bp, Homo sapiens
agtctgtgctcaaat

SEQ ID NO: 1698244 - DNA, 15 bp, Homo sapiens
gtctgtgctcaaata

SEQ ID NO: 1698245 - DNA, 15 bp, Homo sapiens
tctgtgctcaaatat

SEQ ID NO: 1698246 - DNA, 15 bp, Homo sapiens
ctgtgctcaaatatg

SEQ ID NO: 1698247 - DNA, 15 bp, Homo sapiens
tgtgctcaaatatga

SEQ ID NO: 1698248 - DNA, 15 bp, Homo sapiens
gtgctcaaatatgac

SEQ ID NO: 1698249 - DNA, 15 bp, Homo sapiens
tgctcaaatatgacc

SEQ ID NO: 1698250 - DNA, 15 bp, Homo sapiens
gctcaaatatgacct

SEQ ID NO: 1698251 - DNA, 15 bp, Homo sapiens
ctcaaatatgacctt

SEQ ID NO: 1698252 - DNA, 15 bp, Homo sapiens
tcaaatatgaccttc

SEQ ID NO: 1698253 - DNA, 15 bp, Homo sapiens
caaatatgaccttct

SEQ ID NO: 1698254 - DNA, 15 bp, Homo sapiens
aaatatgaccttctc

SEQ ID NO: 1698255 - DNA, 15 bp, Homo sapiens
aatatgaccttctca

SEQ ID NO: 1698256 - DNA, 15 bp, Homo sapiens
atatgaccttctcaa

SEQ ID NO: 1698257 - DNA, 15 bp, Homo sapiens
tatgaccttctcaat

SEQ ID NO: 1698258 - DNA, 15 bp, Homo sapiens
atgaccttctcaatg

SEQ ID NO: 1698259 - DNA, 15 bp, Homo sapiens
tgaccttctcaatga

SEQ ID NO: 1698260 - DNA, 15 bp, Homo sapiens
gaccttctcaatgat

SEQ ID NO: 1698261 - DNA, 15 bp, Homo sapiens
accttctcaatgatg

SEQ ID NO: 1698262 - DNA, 15 bp, Homo sapiens
ccttctcaatgatgc

SEQ ID NO: 1698263 - DNA, 15 bp, Homo sapiens
cttctcaatgatgct

SEQ ID NO: 1698264 - DNA, 15 bp, Homo sapiens
ttctcaatgatgctt

SEQ ID NO: 1698265 - DNA, 15 bp, Homo sapiens
tctcaatgatgctta

SEQ ID NO: 1698266 - DNA, 15 bp, Homo sapiens
ctcaatgatgcttac

SEQ ID NO: 1698267 - DNA, 15 bp, Homo sapiens
tcaatgatgcttacc

SEQ ID NO: 1698268 - DNA, 15 bp, Homo sapiens
caatgatgcttaccc

SEQ ID NO: 1698269 - DNA, 15 bp, Homo sapiens
aatgatgcttaccct

SEQ ID NO: 1698270 - DNA, 15 bp, Homo sapiens
atgatgcttaccctg

SEQ ID NO: 1698271 - DNA, 15 bp, Homo sapiens
tgatgcttaccctgg

SEQ ID NO: 1698272 - DNA, 15 bp, Homo sapiens
gatgcttaccctgga

SEQ ID NO: 1698273 - DNA, 15 bp, Homo sapiens
atgcttaccctggaa

SEQ ID NO: 1698274 - DNA, 15 bp, Homo sapiens
tgcttaccctggaac

SEQ ID NO: 1698275 - DNA, 15 bp, Homo sapiens
gcttaccctggaacc

SEQ ID NO: 1698276 - DNA, 15 bp, Homo sapiens
cttaccctggaaccc

SEQ ID NO: 1698277 - DNA, 15 bp, Homo sapiens
ttaccctggaaccct

SEQ ID NO: 1698278 - DNA, 15 bp, Homo sapiens
taccctggaacccta

SEQ ID NO: 1698279 - DNA, 15 bp, Homo sapiens
accctggaaccctat

SEQ ID NO: 1698280 - DNA, 15 bp, Homo sapiens
ccctggaaccctatt

SEQ ID NO: 1698281 - DNA, 15 bp, Homo sapiens
cctggaaccctattt

SEQ ID NO: 1698282 - DNA, 15 bp, Homo sapiens
ctggaaccctattta

SEQ ID NO: 1698283 - DNA, 15 bp, Homo sapiens
tggaaccctatttaa

SEQ ID NO: 1698284 - DNA, 15 bp, Homo sapiens
ggaaccctatttaaa

SEQ ID NO: 1698285 - DNA, 15 bp, Homo sapiens
gaaccctatttaaaa

SEQ ID NO: 1698286 - DNA, 15 bp, Homo sapiens
aaccctatttaaaat

SEQ ID NO: 1698287 - DNA, 15 bp, Homo sapiens
accctatttaaaatt

SEQ ID NO: 1698288 - DNA, 15 bp, Homo sapiens
ccctatttaaaattg

SEQ ID NO: 1698289 - DNA, 15 bp, Homo sapiens
cctatttaaaattga

SEQ ID NO: 1698290 - DNA, 15 bp, Homo sapiens
ctatttaaaattgaa

SEQ ID NO: 1698291 - DNA, 15 bp, Homo sapiens
tatttaaaattgaag

SEQ ID NO: 1698292 - DNA, 15 bp, Homo sapiens
atttaaaattgaagt

SEQ ID NO: 1698293 - DNA, 15 bp, Homo sapiens
tttaaaattgaagtc

SEQ ID NO: 1698294 - DNA, 15 bp, Homo sapiens
ttaaaattgaagtct

SEQ ID NO: 1698295 - DNA, 15 bp, Homo sapiens
taaaattgaagtctc

SEQ ID NO: 1698296 - DNA, 15 bp, Homo sapiens
aaaattgaagtctcc

SEQ ID NO: 1698297 - DNA, 15 bp, Homo sapiens
aaattgaagtctccc

SEQ ID NO: 1698298 - DNA, 15 bp, Homo sapiens
aattgaagtctcccc

SEQ ID NO: 1698299 - DNA, 15 bp, Homo sapiens
attgaagtctcccct

SEQ ID NO: 1698300 - DNA, 15 bp, Homo sapiens
ttgaagtctcccctg

SEQ ID NO: 1698301 - DNA, 15 bp, Homo sapiens
tgaagtctcccctga

SEQ ID NO: 1698302 - DNA, 15 bp, Homo sapiens
gaagtctcccctgaa

SEQ ID NO: 1698303 - DNA, 15 bp, Homo sapiens
aagtctcccctgaat

SEQ ID NO: 1698304 - DNA, 15 bp, Homo sapiens
agtctcccctgaatc

SEQ ID NO: 1698305 - DNA, 15 bp, Homo sapiens
gtctcccctgaatcc

SEQ ID NO: 1698306 - DNA, 15 bp, Homo sapiens
tctcccctgaatccc

SEQ ID NO: 1698307 - DNA, 15 bp, Homo sapiens
ctcccctgaatcccc

SEQ ID NO: 1698308 - DNA, 15 bp, Homo sapiens
tcccctgaatcccct

SEQ ID NO: 1698309 - DNA, 15 bp, Homo sapiens
cccctgaatcccctg

SEQ ID NO: 1698310 - DNA, 15 bp, Homo sapiens
ccctgaatcccctgg

SEQ ID NO: 1698311 - DNA, 15 bp, Homo sapiens
cctgaatcccctgga

SEQ ID NO: 1698312 - DNA, 15 bp, Homo sapiens
ctgaatcccctggag

SEQ ID NO: 1698313 - DNA, 15 bp, Homo sapiens
tgaatcccctggagc

SEQ ID NO: 1698314 - DNA, 15 bp, Homo sapiens
gaatcccctggagct

SEQ ID NO: 1698315 - DNA, 15 bp, Homo sapiens
aatcccctggagctc

SEQ ID NO: 1698316 - DNA, 15 bp, Homo sapiens
atcccctggagctct

SEQ ID NO: 1698317 - DNA, 15 bp, Homo sapiens
tcccctggagctctt

SEQ ID NO: 1698318 - DNA, 15 bp, Homo sapiens
cccctggagctctta

SEQ ID NO: 1698319 - DNA, 15 bp, Homo sapiens
ccctggagctcttag

SEQ ID NO: 1698320 - DNA, 15 bp, Homo sapiens
cctggagctcttagt

SEQ ID NO: 1698321 - DNA, 15 bp, Homo sapiens
ctggagctcttagtc

SEQ ID NO: 1698322 - DNA, 15 bp, Homo sapiens
tggagctcttagtcc

SEQ ID NO: 1698323 - DNA, 15 bp, Homo sapiens
ggagctcttagtccc

SEQ ID NO: 1698324 - DNA, 15 bp, Homo sapiens
gagctcttagtccct

SEQ ID NO: 1698325 - DNA, 15 bp, Homo sapiens
agctcttagtccctc

SEQ ID NO: 1698326 - DNA, 15 bp, Homo sapiens
gctcttagtccctct

SEQ ID NO: 1698327 - DNA, 15 bp, Homo sapiens
ctcttagtccctctt

SEQ ID NO: 1698328 - DNA, 15 bp, Homo sapiens
tcttagtccctcttg

SEQ ID NO: 1698329 - DNA, 15 bp, Homo sapiens
cttagtccctcttgt

SEQ ID NO: 1698330 - DNA, 15 bp, Homo sapiens
ttagtccctcttgtt

SEQ ID NO: 1698331 - DNA, 15 bp, Homo sapiens
tagtccctcttgttt

SEQ ID NO: 1698332 - DNA, 15 bp, Homo sapiens
agtccctcttgttta

SEQ ID NO: 1698333 - DNA, 15 bp, Homo sapiens
gtccctcttgtttat

SEQ ID NO: 1698334 - DNA, 15 bp, Homo sapiens
tccctcttgtttatt

SEQ ID NO: 1698335 - DNA, 15 bp, Homo sapiens
ccctcttgtttattt

SEQ ID NO: 1698336 - DNA, 15 bp, Homo sapiens
cctcttgtttatttc

SEQ ID NO: 1698337 - DNA, 15 bp, Homo sapiens
ctcttgtttatttct

SEQ ID NO: 1698338 - DNA, 15 bp, Homo sapiens
tcttgtttatttctt

SEQ ID NO: 1698339 - DNA, 15 bp, Homo sapiens
cttgtttatttcttc

SEQ ID NO: 1698340 - DNA, 15 bp, Homo sapiens
ttgtttatttcttct

SEQ ID NO: 1698341 - DNA, 15 bp, Homo sapiens
tgtttatttcttctt

SEQ ID NO: 1698342 - DNA, 15 bp, Homo sapiens
gtttatttcttcttt

SEQ ID NO: 1698343 - DNA, 15 bp, Homo sapiens
tttatttcttctttt

SEQ ID NO: 1698344 - DNA, 15 bp, Homo sapiens
ttatttcttcttttg

SEQ ID NO: 1698345 - DNA, 15 bp, Homo sapiens
tatttcttcttttgt

SEQ ID NO: 1698346 - DNA, 15 bp, Homo sapiens
atttcttcttttgtt

SEQ ID NO: 1698347 - DNA, 15 bp, Homo sapiens
tttcttcttttgttt

SEQ ID NO: 1698348 - DNA, 15 bp, Homo sapiens
ttcttcttttgtttc

SEQ ID NO: 1698349 - DNA, 15 bp, Homo sapiens
tcttcttttgtttct

SEQ ID NO: 1698350 - DNA, 15 bp, Homo sapiens
cttcttttgtttctt

SEQ ID NO: 1698351 - DNA, 15 bp, Homo sapiens
ttcttttgtttcttc

SEQ ID NO: 1698352 - DNA, 15 bp, Homo sapiens
tcttttgtttcttct

SEQ ID NO: 1698353 - DNA, 15 bp, Homo sapiens
cttttgtttcttctt

SEQ ID NO: 1698354 - DNA, 15 bp, Homo sapiens
ttttgtttcttcttt

SEQ ID NO: 1698355 - DNA, 15 bp, Homo sapiens
tttgtttcttctttc

SEQ ID NO: 1698356 - DNA, 15 bp, Homo sapiens
ttgtttcttctttcc

SEQ ID NO: 1698357 - DNA, 15 bp, Homo sapiens
tgtttcttctttcca

SEQ ID NO: 1698358 - DNA, 15 bp, Homo sapiens
gtttcttctttccaa

SEQ ID NO: 1698359 - DNA, 15 bp, Homo sapiens
tttcttctttccaaa

SEQ ID NO: 1698360 - DNA, 15 bp, Homo sapiens
ttcttctttccaaag

SEQ ID NO: 1698361 - DNA, 15 bp, Homo sapiens
tcttctttccaaaga

SEQ ID NO: 1698362 - DNA, 15 bp, Homo sapiens
cttctttccaaagaa

SEQ ID NO: 1698363 - DNA, 15 bp, Homo sapiens
ttctttccaaagaac

SEQ ID NO: 1698364 - DNA, 15 bp, Homo sapiens
tctttccaaagaact

SEQ ID NO: 1698365 - DNA, 15 bp, Homo sapiens
ctttccaaagaactt

SEQ ID NO: 1698366 - DNA, 15 bp, Homo sapiens
tttccaaagaactta

SEQ ID NO: 1698367 - DNA, 15 bp, Homo sapiens
ttccaaagaacttat

SEQ ID NO: 1698368 - DNA, 15 bp, Homo sapiens
tccaaagaacttata

SEQ ID NO: 1698369 - DNA, 15 bp, Homo sapiens
ccaaagaacttatat

SEQ ID NO: 1698370 - DNA, 15 bp, Homo sapiens
caaagaacttatatt

SEQ ID NO: 1698371 - DNA, 15 bp, Homo sapiens
aaagaacttatattc

SEQ ID NO: 1698372 - DNA, 15 bp, Homo sapiens
aagaacttatattct

SEQ ID NO: 1698373 - DNA, 15 bp, Homo sapiens
agaacttatattctt

SEQ ID NO: 1698374 - DNA, 15 bp, Homo sapiens
gaacttatattcttc

SEQ ID NO: 1698375 - DNA, 15 bp, Homo sapiens
aacttatattcttct

SEQ ID NO: 1698376 - DNA, 15 bp, Homo sapiens
acttatattcttcta

SEQ ID NO: 1698377 - DNA, 15 bp, Homo sapiens
cttatattcttctaa

SEQ ID NO: 1698378 - DNA, 15 bp, Homo sapiens
ttatattcttctaac

SEQ ID NO: 1698379 - DNA, 15 bp, Homo sapiens
tatattcttctaaca

SEQ ID NO: 1698380 - DNA, 15 bp, Homo sapiens
atattcttctaacat

SEQ ID NO: 1698381 - DNA, 15 bp, Homo sapiens
tattcttctaacata

SEQ ID NO: 1698382 - DNA, 15 bp, Homo sapiens
attcttctaacatag

SEQ ID NO: 1698383 - DNA, 15 bp, Homo sapiens
ttcttctaacatagt

SEQ ID NO: 1698384 - DNA, 15 bp, Homo sapiens
tcttctaacatagtt

SEQ ID NO: 1698385 - DNA, 15 bp, Homo sapiens
cttctaacatagtta

SEQ ID NO: 1698386 - DNA, 15 bp, Homo sapiens
ttctaacatagttat

SEQ ID NO: 1698387 - DNA, 15 bp, Homo sapiens
tctaacatagttatg

SEQ ID NO: 1698388 - DNA, 15 bp, Homo sapiens
ctaacatagttatgt

SEQ ID NO: 1698389 - DNA, 15 bp, Homo sapiens
taacatagttatgta

SEQ ID NO: 1698390 - DNA, 15 bp, Homo sapiens
aacatagttatgtat

SEQ ID NO: 1698391 - DNA, 15 bp, Homo sapiens
acatagttatgtata

SEQ ID NO: 1698392 - DNA, 15 bp, Homo sapiens
catagttatgtatat

SEQ ID NO: 1698393 - DNA, 15 bp, Homo sapiens
atagttatgtatatg

SEQ ID NO: 1698394 - DNA, 15 bp, Homo sapiens
tagttatgtatatgt

SEQ ID NO: 1698395 - DNA, 15 bp, Homo sapiens
agttatgtatatgtt

SEQ ID NO: 1698396 - DNA, 15 bp, Homo sapiens
gttatgtatatgttc

SEQ ID NO: 1698397 - DNA, 15 bp, Homo sapiens
ttatgtatatgttca

SEQ ID NO: 1698398 - DNA, 15 bp, Homo sapiens
tatgtatatgttcat

SEQ ID NO: 1698399 - DNA, 15 bp, Homo sapiens
atgtatatgttcatt

SEQ ID NO: 1698400 - DNA, 15 bp, Homo sapiens
tgtatatgttcatta

SEQ ID NO: 1698401 - DNA, 15 bp, Homo sapiens
gtatatgttcattat

SEQ ID NO: 1698402 - DNA, 15 bp, Homo sapiens
tatatgttcattatt

SEQ ID NO: 1698403 - DNA, 15 bp, Homo sapiens
atatgttcattattt

SEQ ID NO: 1698404 - DNA, 15 bp, Homo sapiens
tatgttcattattta

SEQ ID NO: 1698405 - DNA, 15 bp, Homo sapiens
atgttcattatttat

SEQ ID NO: 1698406 - DNA, 15 bp, Homo sapiens
tgttcattatttatt

SEQ ID NO: 1698407 - DNA, 15 bp, Homo sapiens
gttcattatttattg

SEQ ID NO: 1698408 - DNA, 15 bp, Homo sapiens
ttcattatttattgt

SEQ ID NO: 1698409 - DNA, 15 bp, Homo sapiens
tcattatttattgtc

SEQ ID NO: 1698410 - DNA, 15 bp, Homo sapiens
cattatttattgtct

SEQ ID NO: 1698411 - DNA, 15 bp, Homo sapiens
attatttattgtctg

SEQ ID NO: 1698412 - DNA, 15 bp, Homo sapiens
ttatttattgtctgt

SEQ ID NO: 1698413 - DNA, 15 bp, Homo sapiens
tatttattgtctgtc

SEQ ID NO: 1698414 - DNA, 15 bp, Homo sapiens
atttattgtctgtct

SEQ ID NO: 1698415 - DNA, 15 bp, Homo sapiens
tttattgtctgtctc

SEQ ID NO: 1698416 - DNA, 15 bp, Homo sapiens
ttattgtctgtctcc

SEQ ID NO: 1698417 - DNA, 15 bp, Homo sapiens
tattgtctgtctcca

SEQ ID NO: 1698418 - DNA, 15 bp, Homo sapiens
attgtctgtctccac

SEQ ID NO: 1698419 - DNA, 15 bp, Homo sapiens
ttgtctgtctccact

SEQ ID NO: 1698420 - DNA, 15 bp, Homo sapiens
tgtctgtctccacta

SEQ ID NO: 1698421 - DNA, 15 bp, Homo sapiens
gtctgtctccactaa

SEQ ID NO: 1698422 - DNA, 15 bp, Homo sapiens
tctgtctccactaaa

SEQ ID NO: 1698423 - DNA, 15 bp, Homo sapiens
ctgtctccactaaaa

SEQ ID NO: 1698424 - DNA, 15 bp, Homo sapiens
tgtctccactaaaac

SEQ ID NO: 1698425 - DNA, 15 bp, Homo sapiens
gtctccactaaaact

SEQ ID NO: 1698426 - DNA, 15 bp, Homo sapiens
tctccactaaaactc

SEQ ID NO: 1698427 - DNA, 15 bp, Homo sapiens
ctccactaaaactca

SEQ ID NO: 1698428 - DNA, 15 bp, Homo sapiens
tccactaaaactcac

SEQ ID NO: 1698429 - DNA, 15 bp, Homo sapiens
ccactaaaactcaca

SEQ ID NO: 1698430 - DNA, 15 bp, Homo sapiens
cactaaaactcacaa

SEQ ID NO: 1698431 - DNA, 15 bp, Homo sapiens
actaaaactcacaag

SEQ ID NO: 1698432 - DNA, 15 bp, Homo sapiens
ctaaaactcacaaga

SEQ ID NO: 1698433 - DNA, 15 bp, Homo sapiens
taaaactcacaagat

SEQ ID NO: 1698434 - DNA, 15 bp, Homo sapiens
aaaactcacaagatg

SEQ ID NO: 1698435 - DNA, 15 bp, Homo sapiens
aaactcacaagatgt

SEQ ID NO: 1698436 - DNA, 15 bp, Homo sapiens
aactcacaagatgtc

SEQ ID NO: 1698437 - DNA, 15 bp, Homo sapiens
actcacaagatgtct

SEQ ID NO: 1698438 - DNA, 15 bp, Homo sapiens
ctcacaagatgtctt

SEQ ID NO: 1698439 - DNA, 15 bp, Homo sapiens
tcacaagatgtcttt

SEQ ID NO: 1698440 - DNA, 15 bp, Homo sapiens
cacaagatgtcttta

SEQ ID NO: 1698441 - DNA, 15 bp, Homo sapiens
acaagatgtctttac

SEQ ID NO: 1698442 - DNA, 15 bp, Homo sapiens
caagatgtctttact

SEQ ID NO: 1698443 - DNA, 15 bp, Homo sapiens
aagatgtctttactg

SEQ ID NO: 1698444 - DNA, 15 bp, Homo sapiens
agatgtctttactga

SEQ ID NO: 1698445 - DNA, 15 bp, Homo sapiens
gatgtctttactgat

SEQ ID NO: 1698446 - DNA, 15 bp, Homo sapiens
atgtctttactgatt

SEQ ID NO: 1698447 - DNA, 15 bp, Homo sapiens
tgtctttactgattt

SEQ ID NO: 1698448 - DNA, 15 bp, Homo sapiens
gtctttactgatttt

SEQ ID NO: 1698449 - DNA, 15 bp, Homo sapiens
tctttactgatttta

SEQ ID NO: 1698450 - DNA, 15 bp, Homo sapiens
ctttactgattttat

SEQ ID NO: 1698451 - DNA, 15 bp, Homo sapiens
tttactgattttata

SEQ ID NO: 1698452 - DNA, 15 bp, Homo sapiens
ttactgattttatac

SEQ ID NO: 1698453 - DNA, 15 bp, Homo sapiens
tactgattttataca

SEQ ID NO: 1698454 - DNA, 15 bp, Homo sapiens
actgattttatacac

SEQ ID NO: 1698455 - DNA, 15 bp, Homo sapiens
ctgattttatacact

SEQ ID NO: 1698456 - DNA, 15 bp, Homo sapiens
tgattttatacactg

SEQ ID NO: 1698457 - DNA, 15 bp, Homo sapiens
gattttatacactgc

SEQ ID NO: 1698458 - DNA, 15 bp, Homo sapiens
attttatacactgcc

SEQ ID NO: 1698459 - DNA, 15 bp, Homo sapiens
ttttatacactgcct

SEQ ID NO: 1698460 - DNA, 15 bp, Homo sapiens
tttatacactgcctg

SEQ ID NO: 1698461 - DNA, 15 bp, Homo sapiens
ttatacactgcctgg

SEQ ID NO: 1698462 - DNA, 15 bp, Homo sapiens
tatacactgcctggc

SEQ ID NO: 1698463 - DNA, 15 bp, Homo sapiens
atacactgcctggca

SEQ ID NO: 1698464 - DNA, 15 bp, Homo sapiens
tacactgcctggcac

SEQ ID NO: 1698465 - DNA, 15 bp, Homo sapiens
acactgcctggcaca

SEQ ID NO: 1698466 - DNA, 15 bp, Homo sapiens
cactgcctggcacat

SEQ ID NO: 1698467 - DNA, 15 bp, Homo sapiens
actgcctggcacatc

SEQ ID NO: 1698468 - DNA, 15 bp, Homo sapiens
ctgcctggcacatca

SEQ ID NO: 1698469 - DNA, 15 bp, Homo sapiens
tgcctggcacatcaa

SEQ ID NO: 1698470 - DNA, 15 bp, Homo sapiens
gcctggcacatcaaa

SEQ ID NO: 1698471 - DNA, 15 bp, Homo sapiens
cctggcacatcaaat

SEQ ID NO: 1698472 - DNA, 15 bp, Homo sapiens
ctggcacatcaaatg

SEQ ID NO: 1698473 - DNA, 15 bp, Homo sapiens
tggcacatcaaatga

SEQ ID NO: 1698474 - DNA, 15 bp, Homo sapiens
ggcacatcaaatgaa

SEQ ID NO: 1698475 - DNA, 15 bp, Homo sapiens
gcacatcaaatgaac

SEQ ID NO: 1698476 - DNA, 15 bp, Homo sapiens
cacatcaaatgaact

SEQ ID NO: 1698477 - DNA, 15 bp, Homo sapiens
acatcaaatgaactt

SEQ ID NO: 1698478 - DNA, 15 bp, Homo sapiens
catcaaatgaactta

SEQ ID NO: 1698479 - DNA, 15 bp, Homo sapiens
atcaaatgaacttaa

SEQ ID NO: 1698480 - DNA, 15 bp, Homo sapiens
tcaaatgaacttaat

SEQ ID NO: 1698481 - DNA, 15 bp, Homo sapiens
caaatgaacttaata

SEQ ID NO: 1698482 - DNA, 15 bp, Homo sapiens
aaatgaacttaataa

SEQ ID NO: 1698483 - DNA, 15 bp, Homo sapiens
aatgaacttaataaa

SEQ ID NO: 1698484 - DNA, 15 bp, Homo sapiens
atgaacttaataaat

SEQ ID NO: 1698485 - DNA, 15 bp, Homo sapiens
tgaacttaataaata

SEQ ID NO: 1698486 - DNA, 15 bp, Homo sapiens
gaacttaataaatat

SEQ ID NO: 1698487 - DNA, 15 bp, Homo sapiens
aacttaataaatatt

SEQ ID NO: 1698488 - DNA, 15 bp, Homo sapiens
acttaataaatattt

SEQ ID NO: 1698489 - DNA, 15 bp, Homo sapiens
ttaataaatattttg

SEQ ID NO: 1698490 - DNA, 15 bp, Homo sapiens
taataaatattttga

SEQ ID NO: 1698491 - DNA, 15 bp, Homo sapiens
aataaatattttgag

SEQ ID NO: 1698492 - DNA, 15 bp, Homo sapiens
ataaatattttgaga

SEQ ID NO: 1698493 - DNA, 15 bp, Homo sapiens
taaatattttgagag

SEQ ID NO: 1698494 - DNA, 15 bp, Homo sapiens
aaatattttgagagt

SEQ ID NO: 1698495 - DNA, 15 bp, Homo sapiens
aatattttgagagtg

SEQ ID NO: 1698496 - DNA, 15 bp, Homo sapiens
atattttgagagtga

SEQ ID NO: 1698497 - DNA, 15 bp, Homo sapiens
tattttgagagtgaa

SEQ ID NO: 1698498 - DNA, 15 bp, Homo sapiens
attttgagagtgaat

SEQ ID NO: 1698499 - DNA, 15 bp, Homo sapiens
ttttgagagtgaatt

SEQ ID NO: 1698500 - DNA, 15 bp, Homo sapiens
tttgagagtgaatta

SEQ ID NO: 1698501 - DNA, 15 bp, Homo sapiens
ttgagagtgaattaa

SEQ ID NO: 1698502 - DNA, 15 bp, Homo sapiens
tgagagtgaattaat

SEQ ID NO: 1698503 - DNA, 15 bp, Homo sapiens
gagagtgaattaata

SEQ ID NO: 1698504 - DNA, 15 bp, Homo sapiens
agagtgaattaatat

SEQ ID NO: 1698505 - DNA, 15 bp, Homo sapiens
gagtgaattaatata

SEQ ID NO: 1698506 - DNA, 15 bp, Homo sapiens
agtgaattaatatat

SEQ ID NO: 1698507 - DNA, 15 bp, Homo sapiens
gtgaattaatatata

SEQ ID NO: 1698508 - DNA, 15 bp, Homo sapiens
tgaattaatatatac

SEQ ID NO: 1698509 - DNA, 15 bp, Homo sapiens
gaattaatatataca

SEQ ID NO: 1698510 - DNA, 15 bp, Homo sapiens
aattaatatatacag

SEQ ID NO: 1698511 - DNA, 15 bp, Homo sapiens
attaatatatacagt

SEQ ID NO: 1698512 - DNA, 15 bp, Homo sapiens
ttaatatatacagta

SEQ ID NO: 1698513 - DNA, 15 bp, Homo sapiens
taatatatacagtag

SEQ ID NO: 1698514 - DNA, 15 bp, Homo sapiens
aatatatacagtagg

SEQ ID NO: 1698515 - DNA, 15 bp, Homo sapiens
atatatacagtagga

SEQ ID NO: 1698516 - DNA, 15 bp, Homo sapiens
tatatacagtaggaa

SEQ ID NO: 1698517 - DNA, 15 bp, Homo sapiens
atatacagtaggaaa

SEQ ID NO: 1698518 - DNA, 15 bp, Homo sapiens
tatacagtaggaaag

SEQ ID NO: 1698519 - DNA, 15 bp, Homo sapiens
atacagtaggaaaga

SEQ ID NO: 1698520 - DNA, 15 bp, Homo sapiens
tacagtaggaaagac

SEQ ID NO: 1698521 - DNA, 15 bp, Homo sapiens
acagtaggaaagaca

SEQ ID NO: 1698522 - DNA, 15 bp, Homo sapiens
cagtaggaaagacac

SEQ ID NO: 1698523 - DNA, 15 bp, Homo sapiens
agtaggaaagacaca

SEQ ID NO: 1698524 - DNA, 15 bp, Homo sapiens
gtaggaaagacacat

SEQ ID NO: 1698525 - DNA, 15 bp, Homo sapiens
taggaaagacacata

SEQ ID NO: 1698526 - DNA, 15 bp, Homo sapiens
aggaaagacacatac

SEQ ID NO: 1698527 - DNA, 15 bp, Homo sapiens
ggaaagacacataca

SEQ ID NO: 1698528 - DNA, 15 bp, Homo sapiens
gaaagacacatacac

SEQ ID NO: 1698529 - DNA, 15 bp, Homo sapiens
aaagacacatacaca

SEQ ID NO: 1698530 - DNA, 15 bp, Homo sapiens
aagacacatacacac

SEQ ID NO: 1698531 - DNA, 15 bp, Homo sapiens
agacacatacacaca

SEQ ID NO: 1698532 - DNA, 15 bp, Homo sapiens
gacacatacacacaa

SEQ ID NO: 1698533 - DNA, 15 bp, Homo sapiens
acacatacacacaag

SEQ ID NO: 1698534 - DNA, 15 bp, Homo sapiens
cacatacacacaagg

SEQ ID NO: 1698535 - DNA, 15 bp, Homo sapiens
acatacacacaaggc

SEQ ID NO: 1698536 - DNA, 15 bp, Homo sapiens
catacacacaaggca

SEQ ID NO: 1698537 - DNA, 15 bp, Homo sapiens
atacacacaaggcag

SEQ ID NO: 1698538 - DNA, 15 bp, Homo sapiens
tacacacaaggcagg

SEQ ID NO: 1698539 - DNA, 15 bp, Homo sapiens
acacacaaggcaggc

SEQ ID NO: 1698540 - DNA, 15 bp, Homo sapiens
cacacaaggcaggct

SEQ ID NO: 1698541 - DNA, 15 bp, Homo sapiens
acacaaggcaggctg

SEQ ID NO: 1698542 - DNA, 15 bp, Homo sapiens
cacaaggcaggctgc

SEQ ID NO: 1698543 - DNA, 15 bp, Homo sapiens
acaaggcaggctgca

SEQ ID NO: 1698544 - DNA, 15 bp, Homo sapiens
caaggcaggctgcag

SEQ ID NO: 1698545 - DNA, 15 bp, Homo sapiens
aaggcaggctgcagt

SEQ ID NO: 1698546 - DNA, 15 bp, Homo sapiens
aggcaggctgcagta

SEQ ID NO: 1698547 - DNA, 15 bp, Homo sapiens
ggcaggctgcagtaa

SEQ ID NO: 1698548 - DNA, 15 bp, Homo sapiens
gcaggctgcagtaag

SEQ ID NO: 1698549 - DNA, 15 bp, Homo sapiens
caggctgcagtaagt

SEQ ID NO: 1698550 - DNA, 15 bp, Homo sapiens
aggctgcagtaagtg

SEQ ID NO: 1698551 - DNA, 15 bp, Homo sapiens
ggctgcagtaagtgc

SEQ ID NO: 1698552 - DNA, 15 bp, Homo sapiens
gctgcagtaagtgct

SEQ ID NO: 1698553 - DNA, 15 bp, Homo sapiens
ctgcagtaagtgctg

SEQ ID NO: 1698554 - DNA, 15 bp, Homo sapiens
tgcagtaagtgctgt

SEQ ID NO: 1698555 - DNA, 15 bp, Homo sapiens
gcagtaagtgctgta

SEQ ID NO: 1698556 - DNA, 15 bp, Homo sapiens
cagtaagtgctgtaa

SEQ ID NO: 1698557 - DNA, 15 bp, Homo sapiens
agtaagtgctgtaaa

SEQ ID NO: 1698558 - DNA, 15 bp, Homo sapiens
gtaagtgctgtaaaa

SEQ ID NO: 1698559 - DNA, 15 bp, Homo sapiens
taagtgctgtaaaag

SEQ ID NO: 1698560 - DNA, 15 bp, Homo sapiens
aagtgctgtaaaaga

SEQ ID NO: 1698561 - DNA, 15 bp, Homo sapiens
agtgctgtaaaagag

SEQ ID NO: 1698562 - DNA, 15 bp, Homo sapiens
gtgctgtaaaagaga

SEQ ID NO: 1698563 - DNA, 15 bp, Homo sapiens
tgctgtaaaagagac

SEQ ID NO: 1698564 - DNA, 15 bp, Homo sapiens
gctgtaaaagagaca

SEQ ID NO: 1698565 - DNA, 15 bp, Homo sapiens
ctgtaaaagagacaa

SEQ ID NO: 1698566 - DNA, 15 bp, Homo sapiens
tgtaaaagagacaat

SEQ ID NO: 1698567 - DNA, 15 bp, Homo sapiens
gtaaaagagacaatg

SEQ ID NO: 1698568 - DNA, 15 bp, Homo sapiens
taaaagagacaatga

SEQ ID NO: 1698569 - DNA, 15 bp, Homo sapiens
aaaagagacaatgag

SEQ ID NO: 1698570 - DNA, 15 bp, Homo sapiens
aaagagacaatgaga

SEQ ID NO: 1698571 - DNA, 15 bp, Homo sapiens
aagagacaatgagac

SEQ ID NO: 1698572 - DNA, 15 bp, Homo sapiens
agagacaatgagaca

SEQ ID NO: 1698573 - DNA, 15 bp, Homo sapiens
gagacaatgagacag

SEQ ID NO: 1698574 - DNA, 15 bp, Homo sapiens
agacaatgagacagt

SEQ ID NO: 1698575 - DNA, 15 bp, Homo sapiens
gacaatgagacagta

SEQ ID NO: 1698576 - DNA, 15 bp, Homo sapiens
acaatgagacagtag

SEQ ID NO: 1698577 - DNA, 15 bp, Homo sapiens
caatgagacagtaga

SEQ ID NO: 1698578 - DNA, 15 bp, Homo sapiens
aatgagacagtagag

SEQ ID NO: 1698579 - DNA, 15 bp, Homo sapiens
atgagacagtagagg

SEQ ID NO: 1698580 - DNA, 15 bp, Homo sapiens
tgagacagtagagga

SEQ ID NO: 1698581 - DNA, 15 bp, Homo sapiens
gagacagtagaggaa

SEQ ID NO: 1698582 - DNA, 15 bp, Homo sapiens
agacagtagaggaat

SEQ ID NO: 1698583 - DNA, 15 bp, Homo sapiens
gacagtagaggaatt

SEQ ID NO: 1698584 - DNA, 15 bp, Homo sapiens
acagtagaggaattc

SEQ ID NO: 1698585 - DNA, 15 bp, Homo sapiens
cagtagaggaattct

SEQ ID NO: 1698586 - DNA, 15 bp, Homo sapiens
agtagaggaattctg

SEQ ID NO: 1698587 - DNA, 15 bp, Homo sapiens
gtagaggaattctgc

SEQ ID NO: 1698588 - DNA, 15 bp, Homo sapiens
tagaggaattctgca

SEQ ID NO: 1698589 - DNA, 15 bp, Homo sapiens
agaggaattctgcaa

SEQ ID NO: 1698590 - DNA, 15 bp, Homo sapiens
gaggaattctgcaac

SEQ ID NO: 1698591 - DNA, 15 bp, Homo sapiens
aggaattctgcaaca

SEQ ID NO: 1698592 - DNA, 15 bp, Homo sapiens
ggaattctgcaacag

SEQ ID NO: 1698593 - DNA, 15 bp, Homo sapiens
gaattctgcaacaga

SEQ ID NO: 1698594 - DNA, 15 bp, Homo sapiens
aattctgcaacagaa

SEQ ID NO: 1698595 - DNA, 15 bp, Homo sapiens
attctgcaacagaag

SEQ ID NO: 1698596 - DNA, 15 bp, Homo sapiens
ttctgcaacagaagc

SEQ ID NO: 1698597 - DNA, 15 bp, Homo sapiens
tctgcaacagaagct

SEQ ID NO: 1698598 - DNA, 15 bp, Homo sapiens
ctgcaacagaagctg

SEQ ID NO: 1698599 - DNA, 15 bp, Homo sapiens
tgcaacagaagctgt

SEQ ID NO: 1698600 - DNA, 15 bp, Homo sapiens
gcaacagaagctgtg

SEQ ID NO: 1698601 - DNA, 15 bp, Homo sapiens
caacagaagctgtgg

SEQ ID NO: 1698602 - DNA, 15 bp, Homo sapiens
aacagaagctgtggt

SEQ ID NO: 1698603 - DNA, 15 bp, Homo sapiens
acagaagctgtggtg

SEQ ID NO: 1698604 - DNA, 15 bp, Homo sapiens
cagaagctgtggtga

SEQ ID NO: 1698605 - DNA, 15 bp, Homo sapiens
agaagctgtggtgag

SEQ ID NO: 1698606 - DNA, 15 bp, Homo sapiens
gaagctgtggtgaga

SEQ ID NO: 1698607 - DNA, 15 bp, Homo sapiens
aagctgtggtgagaa

SEQ ID NO: 1698608 - DNA, 15 bp, Homo sapiens
agctgtggtgagaat

SEQ ID NO: 1698609 - DNA, 15 bp, Homo sapiens
gctgtggtgagaatt

SEQ ID NO: 1698610 - DNA, 15 bp, Homo sapiens
ctgtggtgagaatta

SEQ ID NO: 1698611 - DNA, 15 bp, Homo sapiens
tgtggtgagaattaa

SEQ ID NO: 1698612 - DNA, 15 bp, Homo sapiens
gtggtgagaattaat

SEQ ID NO: 1698613 - DNA, 15 bp, Homo sapiens
tggtgagaattaatc

SEQ ID NO: 1698614 - DNA, 15 bp, Homo sapiens
ggtgagaattaatct

SEQ ID NO: 1698615 - DNA, 15 bp, Homo sapiens
gtgagaattaatcta

SEQ ID NO: 1698616 - DNA, 15 bp, Homo sapiens
tgagaattaatctat

SEQ ID NO: 1698617 - DNA, 15 bp, Homo sapiens
gagaattaatctatg

SEQ ID NO: 1698618 - DNA, 15 bp, Homo sapiens
agaattaatctatga

SEQ ID NO: 1698619 - DNA, 15 bp, Homo sapiens
gaattaatctatgat

SEQ ID NO: 1698620 - DNA, 15 bp, Homo sapiens
aattaatctatgatg

SEQ ID NO: 1698621 - DNA, 15 bp, Homo sapiens
attaatctatgatgt

SEQ ID NO: 1698622 - DNA, 15 bp, Homo sapiens
ttaatctatgatgtg

SEQ ID NO: 1698623 - DNA, 15 bp, Homo sapiens
taatctatgatgtgt

SEQ ID NO: 1698624 - DNA, 15 bp, Homo sapiens
aatctatgatgtgtt

SEQ ID NO: 1698625 - DNA, 15 bp, Homo sapiens
atctatgatgtgtta

SEQ ID NO: 1698626 - DNA, 15 bp, Homo sapiens
tctatgatgtgttag

SEQ ID NO: 1698627 - DNA, 15 bp, Homo sapiens
ctatgatgtgttaga

SEQ ID NO: 1698628 - DNA, 15 bp, Homo sapiens
tatgatgtgttagac

SEQ ID NO: 1698629 - DNA, 15 bp, Homo sapiens
atgatgtgttagact

SEQ ID NO: 1698630 - DNA, 15 bp, Homo sapiens
tgatgtgttagactc

SEQ ID NO: 1698631 - DNA, 15 bp, Homo sapiens
gatgtgttagactct

SEQ ID NO: 1698632 - DNA, 15 bp, Homo sapiens
atgtgttagactctc

SEQ ID NO: 1698633 - DNA, 15 bp, Homo sapiens
tgtgttagactctcc

SEQ ID NO: 1698634 - DNA, 15 bp, Homo sapiens
gtgttagactctcca

SEQ ID NO: 1698635 - DNA, 15 bp, Homo sapiens
tgttagactctccag

SEQ ID NO: 1698636 - DNA, 15 bp, Homo sapiens
gttagactctccagc

SEQ ID NO: 1698637 - DNA, 15 bp, Homo sapiens
ttagactctccagct

SEQ ID NO: 1698638 - DNA, 15 bp, Homo sapiens
tagactctccagcta

SEQ ID NO: 1698639 - DNA, 15 bp, Homo sapiens
agactctccagctat

SEQ ID NO: 1698640 - DNA, 15 bp, Homo sapiens
gactctccagctata

SEQ ID NO: 1698641 - DNA, 15 bp, Homo sapiens
actctccagctatat

SEQ ID NO: 1698642 - DNA, 15 bp, Homo sapiens
ctctccagctatata

SEQ ID NO: 1698643 - DNA, 15 bp, Homo sapiens
tctccagctatatat

SEQ ID NO: 1698644 - DNA, 15 bp, Homo sapiens
ctccagctatatata

SEQ ID NO: 1698645 - DNA, 15 bp, Homo sapiens
tccagctatatatat

SEQ ID NO: 1698646 - DNA, 15 bp, Homo sapiens
ccagctatatatatg

SEQ ID NO: 1698647 - DNA, 15 bp, Homo sapiens
cagctatatatatgc

SEQ ID NO: 1698648 - DNA, 15 bp, Homo sapiens
agctatatatatgcc

SEQ ID NO: 1698649 - DNA, 15 bp, Homo sapiens
gctatatatatgcct

SEQ ID NO: 1698650 - DNA, 15 bp, Homo sapiens
ctatatatatgcctg

SEQ ID NO: 1698651 - DNA, 15 bp, Homo sapiens
tatatatatgcctgg

SEQ ID NO: 1698652 - DNA, 15 bp, Homo sapiens
atatatatgcctgga

SEQ ID NO: 1698653 - DNA, 15 bp, Homo sapiens
tatatatgcctggac

SEQ ID NO: 1698654 - DNA, 15 bp, Homo sapiens
atatatgcctggacc

SEQ ID NO: 1698655 - DNA, 15 bp, Homo sapiens
tatatgcctggaccg

SEQ ID NO: 1698656 - DNA, 15 bp, Homo sapiens
atatgcctggaccga

SEQ ID NO: 1698657 - DNA, 15 bp, Homo sapiens
tatgcctggaccgat

SEQ ID NO: 1698658 - DNA, 15 bp, Homo sapiens
atgcctggaccgatg

SEQ ID NO: 1698659 - DNA, 15 bp, Homo sapiens
tgcctggaccgatgt

SEQ ID NO: 1698660 - DNA, 15 bp, Homo sapiens
gcctggaccgatgtc

SEQ ID NO: 1698661 - DNA, 15 bp, Homo sapiens
cctggaccgatgtca

SEQ ID NO: 1698662 - DNA, 15 bp, Homo sapiens
ctggaccgatgtcac

SEQ ID NO: 1698663 - DNA, 15 bp, Homo sapiens
tggaccgatgtcacc

SEQ ID NO: 1698664 - DNA, 15 bp, Homo sapiens
ggaccgatgtcacca

SEQ ID NO: 1698665 - DNA, 15 bp, Homo sapiens
gaccgatgtcaccac

SEQ ID NO: 1698666 - DNA, 15 bp, Homo sapiens
accgatgtcaccact

SEQ ID NO: 1698667 - DNA, 15 bp, Homo sapiens
ccgatgtcaccactt

SEQ ID NO: 1698668 - DNA, 15 bp, Homo sapiens
cgatgtcaccactta

SEQ ID NO: 1698669 - DNA, 15 bp, Homo sapiens
gatgtcaccacttat

SEQ ID NO: 1698670 - DNA, 15 bp, Homo sapiens
atgtcaccacttatc

SEQ ID NO: 1698671 - DNA, 15 bp, Homo sapiens
tgtcaccacttatct

SEQ ID NO: 1698672 - DNA, 15 bp, Homo sapiens
gtcaccacttatctg

SEQ ID NO: 1698673 - DNA, 15 bp, Homo sapiens
tcaccacttatctgc

SEQ ID NO: 1698674 - DNA, 15 bp, Homo sapiens
caccacttatctgca

SEQ ID NO: 1698675 - DNA, 15 bp, Homo sapiens
accacttatctgcag

SEQ ID NO: 1698676 - DNA, 15 bp, Homo sapiens
ccacttatctgcagt

SEQ ID NO: 1698677 - DNA, 15 bp, Homo sapiens
cacttatctgcagtt

SEQ ID NO: 1698678 - DNA, 15 bp, Homo sapiens
acttatctgcagttc

SEQ ID NO: 1698679 - DNA, 15 bp, Homo sapiens
cttatctgcagttct

SEQ ID NO: 1698680 - DNA, 15 bp, Homo sapiens
ttatctgcagttctc

SEQ ID NO: 1698681 - DNA, 15 bp, Homo sapiens
tatctgcagttctcc

SEQ ID NO: 1698682 - DNA, 15 bp, Homo sapiens
atctgcagttctcct

SEQ ID NO: 1698683 - DNA, 15 bp, Homo sapiens
tctgcagttctcctg

SEQ ID NO: 1698684 - DNA, 15 bp, Homo sapiens
ctgcagttctcctgt

SEQ ID NO: 1698685 - DNA, 15 bp, Homo sapiens
tgcagttctcctgtg

SEQ ID NO: 1698686 - DNA, 15 bp, Homo sapiens
gcagttctcctgtga

SEQ ID NO: 1698687 - DNA, 15 bp, Homo sapiens
cagttctcctgtgat

SEQ ID NO: 1698688 - DNA, 15 bp, Homo sapiens
agttctcctgtgatg

SEQ ID NO: 1698689 - DNA, 15 bp, Homo sapiens
gttctcctgtgatgt

SEQ ID NO: 1698690 - DNA, 15 bp, Homo sapiens
ttctcctgtgatgtt

SEQ ID NO: 1698691 - DNA, 15 bp, Homo sapiens
tctcctgtgatgttt

SEQ ID NO: 1698692 - DNA, 15 bp, Homo sapiens
ctcctgtgatgtttc

SEQ ID NO: 1698693 - DNA, 15 bp, Homo sapiens
tcctgtgatgtttcc

SEQ ID NO: 1698694 - DNA, 15 bp, Homo sapiens
cctgtgatgtttcca

SEQ ID NO: 1698695 - DNA, 15 bp, Homo sapiens
ctgtgatgtttccag

SEQ ID NO: 1698696 - DNA, 15 bp, Homo sapiens
tgtgatgtttccagg

SEQ ID NO: 1698697 - DNA, 15 bp, Homo sapiens
gtgatgtttccaggg

SEQ ID NO: 1698698 - DNA, 15 bp, Homo sapiens
tgatgtttccagggt

SEQ ID NO: 1698699 - DNA, 15 bp, Homo sapiens
gatgtttccagggta

SEQ ID NO: 1698700 - DNA, 15 bp, Homo sapiens
atgtttccagggtac

SEQ ID NO: 1698701 - DNA, 15 bp, Homo sapiens
tgtttccagggtaca

SEQ ID NO: 1698702 - DNA, 15 bp, Homo sapiens
gtttccagggtacat

SEQ ID NO: 1698703 - DNA, 15 bp, Homo sapiens
tttccagggtacatg

SEQ ID NO: 1698704 - DNA, 15 bp, Homo sapiens
ttccagggtacatga

SEQ ID NO: 1698705 - DNA, 15 bp, Homo sapiens
tccagggtacatgat

SEQ ID NO: 1698706 - DNA, 15 bp, Homo sapiens
ccagggtacatgatt

SEQ ID NO: 1698707 - DNA, 15 bp, Homo sapiens
cagggtacatgatta

SEQ ID NO: 1698708 - DNA, 15 bp, Homo sapiens
agggtacatgattaa

SEQ ID NO: 1698709 - DNA, 15 bp, Homo sapiens
gggtacatgattaag

SEQ ID NO: 1698710 - DNA, 15 bp, Homo sapiens
ggtacatgattaaga

SEQ ID NO: 1698711 - DNA, 15 bp, Homo sapiens
gtacatgattaagac

SEQ ID NO: 1698712 - DNA, 15 bp, Homo sapiens
tacatgattaagact

SEQ ID NO: 1698713 - DNA, 15 bp, Homo sapiens
acatgattaagactc

SEQ ID NO: 1698714 - DNA, 15 bp, Homo sapiens
catgattaagactca

SEQ ID NO: 1698715 - DNA, 15 bp, Homo sapiens
atgattaagactcat

SEQ ID NO: 1698716 - DNA, 15 bp, Homo sapiens
tgattaagactcatt

SEQ ID NO: 1698717 - DNA, 15 bp, Homo sapiens
gattaagactcattt

SEQ ID NO: 1698718 - DNA, 15 bp, Homo sapiens
attaagactcattta

SEQ ID NO: 1698719 - DNA, 15 bp, Homo sapiens
ttaagactcatttaa

SEQ ID NO: 1698720 - DNA, 15 bp, Homo sapiens
taagactcatttaac

SEQ ID NO: 1698721 - DNA, 15 bp, Homo sapiens
aagactcatttaaca

SEQ ID NO: 1698722 - DNA, 15 bp, Homo sapiens
agactcatttaacat

SEQ ID NO: 1698723 - DNA, 15 bp, Homo sapiens
gactcatttaacatt

SEQ ID NO: 1698724 - DNA, 15 bp, Homo sapiens
actcatttaacattc

SEQ ID NO: 1698725 - DNA, 15 bp, Homo sapiens
ctcatttaacattcc

SEQ ID NO: 1698726 - DNA, 15 bp, Homo sapiens
tcatttaacattcca

SEQ ID NO: 1698727 - DNA, 15 bp, Homo sapiens
catttaacattccag

SEQ ID NO: 1698728 - DNA, 15 bp, Homo sapiens
atttaacattccagg

SEQ ID NO: 1698729 - DNA, 15 bp, Homo sapiens
tttaacattccagga

SEQ ID NO: 1698730 - DNA, 15 bp, Homo sapiens
ttaacattccaggaa

SEQ ID NO: 1698731 - DNA, 15 bp, Homo sapiens
taacattccaggaat

SEQ ID NO: 1698732 - DNA, 15 bp, Homo sapiens
aacattccaggaata

SEQ ID NO: 1698733 - DNA, 15 bp, Homo sapiens
acattccaggaatat

SEQ ID NO: 1698734 - DNA, 15 bp, Homo sapiens
cattccaggaatatt

SEQ ID NO: 1698735 - DNA, 15 bp, Homo sapiens
attccaggaatattc

SEQ ID NO: 1698736 - DNA, 15 bp, Homo sapiens
ttccaggaatattct

SEQ ID NO: 1698737 - DNA, 15 bp, Homo sapiens
tccaggaatattctg

SEQ ID NO: 1698738 - DNA, 15 bp, Homo sapiens
ccaggaatattctgc

SEQ ID NO: 1698739 - DNA, 15 bp, Homo sapiens
caggaatattctgct

SEQ ID NO: 1698740 - DNA, 15 bp, Homo sapiens
aggaatattctgctg

SEQ ID NO: 1698741 - DNA, 15 bp, Homo sapiens
ggaatattctgctga

SEQ ID NO: 1698742 - DNA, 15 bp, Homo sapiens
gaatattctgctgat

SEQ ID NO: 1698743 - DNA, 15 bp, Homo sapiens
aatattctgctgatg

SEQ ID NO: 1698744 - DNA, 15 bp, Homo sapiens
atattctgctgatga

SEQ ID NO: 1698745 - DNA, 15 bp, Homo sapiens
tattctgctgatgaa

SEQ ID NO: 1698746 - DNA, 15 bp, Homo sapiens
attctgctgatgaat

SEQ ID NO: 1698747 - DNA, 15 bp, Homo sapiens
ttctgctgatgaata

SEQ ID NO: 1698748 - DNA, 15 bp, Homo sapiens
tctgctgatgaataa

SEQ ID NO: 1698749 - DNA, 15 bp, Homo sapiens
ctgctgatgaataat

SEQ ID NO: 1698750 - DNA, 15 bp, Homo sapiens
tgctgatgaataatc

SEQ ID NO: 1698751 - DNA, 15 bp, Homo sapiens
gctgatgaataatca

SEQ ID NO: 1698752 - DNA, 15 bp, Homo sapiens
ctgatgaataatcac

SEQ ID NO: 1698753 - DNA, 15 bp, Homo sapiens
tgatgaataatcact

SEQ ID NO: 1698754 - DNA, 15 bp, Homo sapiens
gatgaataatcactg

SEQ ID NO: 1698755 - DNA, 15 bp, Homo sapiens
atgaataatcactga

SEQ ID NO: 1698756 - DNA, 15 bp, Homo sapiens
tgaataatcactgag

SEQ ID NO: 1698757 - DNA, 15 bp, Homo sapiens
gaataatcactgagc

SEQ ID NO: 1698758 - DNA, 15 bp, Homo sapiens
aataatcactgagct

SEQ ID NO: 1698759 - DNA, 15 bp, Homo sapiens
ataatcactgagctg

SEQ ID NO: 1698760 - DNA, 15 bp, Homo sapiens
taatcactgagctgg

SEQ ID NO: 1698761 - DNA, 15 bp, Homo sapiens
aatcactgagctgga

SEQ ID NO: 1698762 - DNA, 15 bp, Homo sapiens
atcactgagctggag

SEQ ID NO: 1698763 - DNA, 15 bp, Homo sapiens
tcactgagctggagt

SEQ ID NO: 1698764 - DNA, 15 bp, Homo sapiens
cactgagctggagtc

SEQ ID NO: 1698765 - DNA, 15 bp, Homo sapiens
actgagctggagtca

SEQ ID NO: 1698766 - DNA, 15 bp, Homo sapiens
ctgagctggagtcaa

SEQ ID NO: 1698767 - DNA, 15 bp, Homo sapiens
tgagctggagtcaag

SEQ ID NO: 1698768 - DNA, 15 bp, Homo sapiens
gagctggagtcaaga

SEQ ID NO: 1698769 - DNA, 15 bp, Homo sapiens
agctggagtcaagag

SEQ ID NO: 1698770 - DNA, 15 bp, Homo sapiens
gctggagtcaagaga

SEQ ID NO: 1698771 - DNA, 15 bp, Homo sapiens
ctggagtcaagagaa

SEQ ID NO: 1698772 - DNA, 15 bp, Homo sapiens
tggagtcaagagaag

SEQ ID NO: 1698773 - DNA, 15 bp, Homo sapiens
ggagtcaagagaaga

SEQ ID NO: 1698774 - DNA, 15 bp, Homo sapiens
gagtcaagagaagaa

SEQ ID NO: 1698775 - DNA, 15 bp, Homo sapiens
agtcaagagaagaag

SEQ ID NO: 1698776 - DNA, 15 bp, Homo sapiens
gtcaagagaagaagc

SEQ ID NO: 1698777 - DNA, 15 bp, Homo sapiens
tcaagagaagaagct

SEQ ID NO: 1698778 - DNA, 15 bp, Homo sapiens
caagagaagaagctt

SEQ ID NO: 1698779 - DNA, 15 bp, Homo sapiens
aagagaagaagcttt

SEQ ID NO: 1698780 - DNA, 15 bp, Homo sapiens
agagaagaagcttta

SEQ ID NO: 1698781 - DNA, 15 bp, Homo sapiens
gagaagaagctttag

SEQ ID NO: 1698782 - DNA, 15 bp, Homo sapiens
agaagaagctttaga

SEQ ID NO: 1698783 - DNA, 15 bp, Homo sapiens
gaagaagctttagat

SEQ ID NO: 1698784 - DNA, 15 bp, Homo sapiens
aagaagctttagata

SEQ ID NO: 1698785 - DNA, 15 bp, Homo sapiens
agaagctttagatac

SEQ ID NO: 1698786 - DNA, 15 bp, Homo sapiens
gaagctttagatact

SEQ ID NO: 1698787 - DNA, 15 bp, Homo sapiens
aagctttagatacta

SEQ ID NO: 1698788 - DNA, 15 bp, Homo sapiens
agctttagatactaa

SEQ ID NO: 1698789 - DNA, 15 bp, Homo sapiens
gctttagatactaac

SEQ ID NO: 1698790 - DNA, 15 bp, Homo sapiens
ctttagatactaacc

SEQ ID NO: 1698791 - DNA, 15 bp, Homo sapiens
tttagatactaaccg

SEQ ID NO: 1698792 - DNA, 15 bp, Homo sapiens
ttagatactaaccga

SEQ ID NO: 1698793 - DNA, 15 bp, Homo sapiens
tagatactaaccgac

SEQ ID NO: 1698794 - DNA, 15 bp, Homo sapiens
agatactaaccgacc

SEQ ID NO: 1698795 - DNA, 15 bp, Homo sapiens
gatactaaccgaccc

SEQ ID NO: 1698796 - DNA, 15 bp, Homo sapiens
atactaaccgaccct

SEQ ID NO: 1698797 - DNA, 15 bp, Homo sapiens
tactaaccgaccctg

SEQ ID NO: 1698798 - DNA, 15 bp, Homo sapiens
actaaccgaccctgt

SEQ ID NO: 1698799 - DNA, 15 bp, Homo sapiens
ctaaccgaccctgtg

SEQ ID NO: 1698800 - DNA, 15 bp, Homo sapiens
taaccgaccctgtga

SEQ ID NO: 1698801 - DNA, 15 bp, Homo sapiens
aaccgaccctgtgat

SEQ ID NO: 1698802 - DNA, 15 bp, Homo sapiens
accgaccctgtgatc

SEQ ID NO: 1698803 - DNA, 15 bp, Homo sapiens
ccgaccctgtgatca

SEQ ID NO: 1698804 - DNA, 15 bp, Homo sapiens
cgaccctgtgatcat

SEQ ID NO: 1698805 - DNA, 15 bp, Homo sapiens
gaccctgtgatcatg

SEQ ID NO: 1698806 - DNA, 15 bp, Homo sapiens
accctgtgatcatga

SEQ ID NO: 1698807 - DNA, 15 bp, Homo sapiens
ccctgtgatcatgag

SEQ ID NO: 1698808 - DNA, 15 bp, Homo sapiens
cctgtgatcatgagc

SEQ ID NO: 1698809 - DNA, 15 bp, Homo sapiens
ctgtgatcatgagca

SEQ ID NO: 1698810 - DNA, 15 bp, Homo sapiens
tgtgatcatgagcaa

SEQ ID NO: 1698811 - DNA, 15 bp, Homo sapiens
gtgatcatgagcaag

SEQ ID NO: 1698812 - DNA, 15 bp, Homo sapiens
tgatcatgagcaagt

SEQ ID NO: 1698813 - DNA, 15 bp, Homo sapiens
gatcatgagcaagtc

SEQ ID NO: 1698814 - DNA, 15 bp, Homo sapiens
atcatgagcaagtca

SEQ ID NO: 1698815 - DNA, 15 bp, Homo sapiens
tcatgagcaagtcac

SEQ ID NO: 1698816 - DNA, 15 bp, Homo sapiens
catgagcaagtcact

SEQ ID NO: 1698817 - DNA, 15 bp, Homo sapiens
atgagcaagtcactt

SEQ ID NO: 1698818 - DNA, 15 bp, Homo sapiens
tgagcaagtcacttc

SEQ ID NO: 1698819 - DNA, 15 bp, Homo sapiens
gagcaagtcacttcc

SEQ ID NO: 1698820 - DNA, 15 bp, Homo sapiens
agcaagtcacttccc

SEQ ID NO: 1698821 - DNA, 15 bp, Homo sapiens
gcaagtcacttccct

SEQ ID NO: 1698822 - DNA, 15 bp, Homo sapiens
caagtcacttccctt

SEQ ID NO: 1698823 - DNA, 15 bp, Homo sapiens
aagtcacttcccttc

SEQ ID NO: 1698824 - DNA, 15 bp, Homo sapiens
agtcacttcccttct

SEQ ID NO: 1698825 - DNA, 15 bp, Homo sapiens
gtcacttcccttctc

SEQ ID NO: 1698826 - DNA, 15 bp, Homo sapiens
tcacttcccttctct

SEQ ID NO: 1698827 - DNA, 15 bp, Homo sapiens
cacttcccttctctg

SEQ ID NO: 1698828 - DNA, 15 bp, Homo sapiens
acttcccttctctgt

SEQ ID NO: 1698829 - DNA, 15 bp, Homo sapiens
cttcccttctctgtg

SEQ ID NO: 1698830 - DNA, 15 bp, Homo sapiens
ttcccttctctgtgc

SEQ ID NO: 1698831 - DNA, 15 bp, Homo sapiens
tcccttctctgtgcc

SEQ ID NO: 1698832 - DNA, 15 bp, Homo sapiens
cccttctctgtgcct

SEQ ID NO: 1698833 - DNA, 15 bp, Homo sapiens
ccttctctgtgcctc

SEQ ID NO: 1698834 - DNA, 15 bp, Homo sapiens
ttctctgtgcctcaa

SEQ ID NO: 1698835 - DNA, 15 bp, Homo sapiens
tctctgtgcctcaat

SEQ ID NO: 1698836 - DNA, 15 bp, Homo sapiens
cctcaatttcctcac

SEQ ID NO: 1698837 - DNA, 15 bp, Homo sapiens
ctcaatttcctcact

SEQ ID NO: 1698838 - DNA, 15 bp, Homo sapiens
tcaatttcctcactt

SEQ ID NO: 1698839 - DNA, 15 bp, Homo sapiens
caatttcctcactta

SEQ ID NO: 1698840 - DNA, 15 bp, Homo sapiens
aatttcctcacttat

SEQ ID NO: 1698841 - DNA, 15 bp, Homo sapiens
atttcctcacttata

SEQ ID NO: 1698842 - DNA, 15 bp, Homo sapiens
tttcctcacttataa

SEQ ID NO: 1698843 - DNA, 15 bp, Homo sapiens
ttcctcacttataaa

SEQ ID NO: 1698844 - DNA, 15 bp, Homo sapiens
tcctcacttataaag

SEQ ID NO: 1698845 - DNA, 15 bp, Homo sapiens
cctcacttataaagt

SEQ ID NO: 1698846 - DNA, 15 bp, Homo sapiens
ctcacttataaagtg

SEQ ID NO: 1698847 - DNA, 15 bp, Homo sapiens
tcacttataaagtga

SEQ ID NO: 1698848 - DNA, 15 bp, Homo sapiens
cacttataaagtgaa

SEQ ID NO: 1698849 - DNA, 15 bp, Homo sapiens
acttataaagtgaaa

SEQ ID NO: 1698850 - DNA, 15 bp, Homo sapiens
cttataaagtgaaaa

SEQ ID NO: 1698851 - DNA, 15 bp, Homo sapiens
ttataaagtgaaaac

SEQ ID NO: 1698852 - DNA, 15 bp, Homo sapiens
tataaagtgaaaaca

SEQ ID NO: 1698853 - DNA, 15 bp, Homo sapiens
ataaagtgaaaacaa

SEQ ID NO: 1698854 - DNA, 15 bp, Homo sapiens
taaagtgaaaacaaa

SEQ ID NO: 1698855 - DNA, 15 bp, Homo sapiens
aaagtgaaaacaaag

SEQ ID NO: 1698856 - DNA, 15 bp, Homo sapiens
aagtgaaaacaaagg

SEQ ID NO: 1698857 - DNA, 15 bp, Homo sapiens
agtgaaaacaaaggg

SEQ ID NO: 1698858 - DNA, 15 bp, Homo sapiens
gtgaaaacaaagggc

SEQ ID NO: 1698859 - DNA, 15 bp, Homo sapiens
tgaaaacaaagggcc

SEQ ID NO: 1698860 - DNA, 15 bp, Homo sapiens
gaaaacaaagggcca

SEQ ID NO: 1698861 - DNA, 15 bp, Homo sapiens
aaaacaaagggccaa

SEQ ID NO: 1698862 - DNA, 15 bp, Homo sapiens
aaacaaagggccaag

SEQ ID NO: 1698863 - DNA, 15 bp, Homo sapiens
aacaaagggccaagt

SEQ ID NO: 1698864 - DNA, 15 bp, Homo sapiens
acaaagggccaagtg

SEQ ID NO: 1698865 - DNA, 15 bp, Homo sapiens
caaagggccaagtga

SEQ ID NO: 1698866 - DNA, 15 bp, Homo sapiens
aaagggccaagtgag

SEQ ID NO: 1698867 - DNA, 15 bp, Homo sapiens
aagggccaagtgagg

SEQ ID NO: 1698868 - DNA, 15 bp, Homo sapiens
agggccaagtgaggg

SEQ ID NO: 1698869 - DNA, 15 bp, Homo sapiens
gggccaagtgagggt

SEQ ID NO: 1698870 - DNA, 15 bp, Homo sapiens
ggccaagtgagggtg

SEQ ID NO: 1698871 - DNA, 15 bp, Homo sapiens
gccaagtgagggtgg

SEQ ID NO: 1698872 - DNA, 15 bp, Homo sapiens
ccaagtgagggtgga

SEQ ID NO: 1698873 - DNA, 15 bp, Homo sapiens
caagtgagggtggaa

SEQ ID NO: 1698874 - DNA, 15 bp, Homo sapiens
aagtgagggtggaag

SEQ ID NO: 1698875 - DNA, 15 bp, Homo sapiens
agtgagggtggaagg

SEQ ID NO: 1698876 - DNA, 15 bp, Homo sapiens
gtgagggtggaagga

SEQ ID NO: 1698877 - DNA, 15 bp, Homo sapiens
tgagggtggaaggat

SEQ ID NO: 1698878 - DNA, 15 bp, Homo sapiens
gagggtggaaggatc

SEQ ID NO: 1698879 - DNA, 15 bp, Homo sapiens
agggtggaaggatcc

SEQ ID NO: 1698880 - DNA, 15 bp, Homo sapiens
gggtggaaggatccc

SEQ ID NO: 1698881 - DNA, 15 bp, Homo sapiens
ggtggaaggatcccc

SEQ ID NO: 1698882 - DNA, 15 bp, Homo sapiens
gtggaaggatccccc

SEQ ID NO: 1698883 - DNA, 15 bp, Homo sapiens
tggaaggatccccct

SEQ ID NO: 1698884 - DNA, 15 bp, Homo sapiens
ggaaggatcccccta

SEQ ID NO: 1698885 - DNA, 15 bp, Homo sapiens
gaaggatccccctac

SEQ ID NO: 1698886 - DNA, 15 bp, Homo sapiens
aaggatccccctacc

SEQ ID NO: 1698887 - DNA, 15 bp, Homo sapiens
aggatccccctaccc

SEQ ID NO: 1698888 - DNA, 15 bp, Homo sapiens
ggatccccctaccct

SEQ ID NO: 1698889 - DNA, 15 bp, Homo sapiens
gatccccctaccctg

SEQ ID NO: 1698890 - DNA, 15 bp, Homo sapiens
atccccctaccctgg

SEQ ID NO: 1698891 - DNA, 15 bp, Homo sapiens
tccccctaccctgga

SEQ ID NO: 1698892 - DNA, 15 bp, Homo sapiens
ccccctaccctggag

SEQ ID NO: 1698893 - DNA, 15 bp, Homo sapiens
cccctaccctggaga

SEQ ID NO: 1698894 - DNA, 15 bp, Homo sapiens
ccctaccctggagat

SEQ ID NO: 1698895 - DNA, 15 bp, Homo sapiens
cctaccctggagatc

SEQ ID NO: 1698896 - DNA, 15 bp, Homo sapiens
ctaccctggagatct

SEQ ID NO: 1698897 - DNA, 15 bp, Homo sapiens
taccctggagatctg

SEQ ID NO: 1698898 - DNA, 15 bp, Homo sapiens
accctggagatctgt

SEQ ID NO: 1698899 - DNA, 15 bp, Homo sapiens
ccctggagatctgtg

SEQ ID NO: 1698900 - DNA, 15 bp, Homo sapiens
cctggagatctgtga

SEQ ID NO: 1698901 - DNA, 15 bp, Homo sapiens
ctggagatctgtgat

SEQ ID NO: 1698902 - DNA, 15 bp, Homo sapiens
tggagatctgtgatt

SEQ ID NO: 1698903 - DNA, 15 bp, Homo sapiens
ggagatctgtgattc

SEQ ID NO: 1698904 - DNA, 15 bp, Homo sapiens
gagatctgtgattct

SEQ ID NO: 1698905 - DNA, 15 bp, Homo sapiens
agatctgtgattcta

SEQ ID NO: 1698906 - DNA, 15 bp, Homo sapiens
gatctgtgattctat

SEQ ID NO: 1698907 - DNA, 15 bp, Homo sapiens
atctgtgattctata

SEQ ID NO: 1698908 - DNA, 15 bp, Homo sapiens
tctgtgattctataa

SEQ ID NO: 1698909 - DNA, 15 bp, Homo sapiens
ctgtgattctataac

SEQ ID NO: 1698910 - DNA, 15 bp, Homo sapiens
tgtgattctataaca

SEQ ID NO: 1698911 - DNA, 15 bp, Homo sapiens
gtgattctataacat

SEQ ID NO: 1698912 - DNA, 15 bp, Homo sapiens
tgattctataacata

SEQ ID NO: 1698913 - DNA, 15 bp, Homo sapiens
gattctataacatat

SEQ ID NO: 1698914 - DNA, 15 bp, Homo sapiens
attctataacatatg

SEQ ID NO: 1698915 - DNA, 15 bp, Homo sapiens
ttctataacatatgg

SEQ ID NO: 1698916 - DNA, 15 bp, Homo sapiens
tctataacatatggg

SEQ ID NO: 1698917 - DNA, 15 bp, Homo sapiens
ctataacatatgggc

SEQ ID NO: 1698918 - DNA, 15 bp, Homo sapiens
tataacatatgggca

SEQ ID NO: 1698919 - DNA, 15 bp, Homo sapiens
ataacatatgggcag

SEQ ID NO: 1698920 - DNA, 15 bp, Homo sapiens
taacatatgggcagg

SEQ ID NO: 1698921 - DNA, 15 bp, Homo sapiens
aacatatgggcagga

SEQ ID NO: 1698922 - DNA, 15 bp, Homo sapiens
acatatgggcaggaa

SEQ ID NO: 1698923 - DNA, 15 bp, Homo sapiens
catatgggcaggaaa

SEQ ID NO: 1698924 - DNA, 15 bp, Homo sapiens
atatgggcaggaaag

SEQ ID NO: 1698925 - DNA, 15 bp, Homo sapiens
atgggcaggaaagac

SEQ ID NO: 1698926 - DNA, 15 bp, Homo sapiens
tgggcaggaaagact

SEQ ID NO: 1698927 - DNA, 15 bp, Homo sapiens
gggcaggaaagactt

SEQ ID NO: 1698928 - DNA, 15 bp, Homo sapiens
ggcaggaaagacttg

SEQ ID NO: 1698929 - DNA, 15 bp, Homo sapiens
gcaggaaagacttga

SEQ ID NO: 1698930 - DNA, 15 bp, Homo sapiens
caggaaagacttgat

SEQ ID NO: 1698931 - DNA, 15 bp, Homo sapiens
aggaaagacttgata

SEQ ID NO: 1698932 - DNA, 15 bp, Homo sapiens
ggaaagacttgataa

SEQ ID NO: 1698933 - DNA, 15 bp, Homo sapiens
gaaagacttgataac

SEQ ID NO: 1698934 - DNA, 15 bp, Homo sapiens
aaagacttgataaca

SEQ ID NO: 1698935 - DNA, 15 bp, Homo sapiens
aagacttgataacac

SEQ ID NO: 1698936 - DNA, 15 bp, Homo sapiens
agacttgataacaca

SEQ ID NO: 1698937 - DNA, 15 bp, Homo sapiens
gacttgataacacac

SEQ ID NO: 1698938 - DNA, 15 bp, Homo sapiens
acttgataacacact

SEQ ID NO: 1698939 - DNA, 15 bp, Homo sapiens
cttgataacacactc

SEQ ID NO: 1698940 - DNA, 15 bp, Homo sapiens
ttgataacacactca

SEQ ID NO: 1698941 - DNA, 15 bp, Homo sapiens
tgataacacactcag

SEQ ID NO: 1698942 - DNA, 15 bp, Homo sapiens
gataacacactcagg

SEQ ID NO: 1698943 - DNA, 15 bp, Homo sapiens
ataacacactcaggg

SEQ ID NO: 1698944 - DNA, 15 bp, Homo sapiens
taacacactcagggt

SEQ ID NO: 1698945 - DNA, 15 bp, Homo sapiens
aacacactcagggtc

SEQ ID NO: 1698946 - DNA, 15 bp, Homo sapiens
acacactcagggtct

SEQ ID NO: 1698947 - DNA, 15 bp, Homo sapiens
cacactcagggtcta

SEQ ID NO: 1698948 - DNA, 15 bp, Homo sapiens
acactcagggtctat

SEQ ID NO: 1698949 - DNA, 15 bp, Homo sapiens
cactcagggtctatg

SEQ ID NO: 1698950 - DNA, 15 bp, Homo sapiens
actcagggtctatgt

SEQ ID NO: 1698951 - DNA, 15 bp, Homo sapiens
ctcagggtctatgtg

SEQ ID NO: 1698952 - DNA, 15 bp, Homo sapiens
tcagggtctatgtgg

SEQ ID NO: 1698953 - DNA, 15 bp, Homo sapiens
cagggtctatgtggg

SEQ ID NO: 1698954 - DNA, 15 bp, Homo sapiens
agggtctatgtgggc

SEQ ID NO: 1698955 - DNA, 15 bp, Homo sapiens
gggtctatgtgggct

SEQ ID NO: 1698956 - DNA, 15 bp, Homo sapiens
ggtctatgtgggctg

SEQ ID NO: 1698957 - DNA, 15 bp, Homo sapiens
gtctatgtgggctgt

SEQ ID NO: 1698958 - DNA, 15 bp, Homo sapiens
tctatgtgggctgtt

SEQ ID NO: 1698959 - DNA, 15 bp, Homo sapiens
ctatgtgggctgttc

SEQ ID NO: 1698960 - DNA, 15 bp, Homo sapiens
tatgtgggctgttct

SEQ ID NO: 1698961 - DNA, 15 bp, Homo sapiens
atgtgggctgttctg

SEQ ID NO: 1698962 - DNA, 15 bp, Homo sapiens
tgtgggctgttctga

SEQ ID NO: 1698963 - DNA, 15 bp, Homo sapiens
gtgggctgttctgaa

SEQ ID NO: 1698964 - DNA, 15 bp, Homo sapiens
tgggctgttctgaag

SEQ ID NO: 1698965 - DNA, 15 bp, Homo sapiens
gggctgttctgaagg

SEQ ID NO: 1698966 - DNA, 15 bp, Homo sapiens
ggctgttctgaaggc

SEQ ID NO: 1698967 - DNA, 15 bp, Homo sapiens
gctgttctgaaggca

SEQ ID NO: 1698968 - DNA, 15 bp, Homo sapiens
ctgttctgaaggcat

SEQ ID NO: 1698969 - DNA, 15 bp, Homo sapiens
tgttctgaaggcatc

SEQ ID NO: 1698970 - DNA, 15 bp, Homo sapiens
gttctgaaggcatct

SEQ ID NO: 1698971 - DNA, 15 bp, Homo sapiens
ttctgaaggcatctg

SEQ ID NO: 1698972 - DNA, 15 bp, Homo sapiens
tctgaaggcatctgg

SEQ ID NO: 1698973 - DNA, 15 bp, Homo sapiens
ctgaaggcatctggc

SEQ ID NO: 1698974 - DNA, 15 bp, Homo sapiens
tgaaggcatctggcc

SEQ ID NO: 1698975 - DNA, 15 bp, Homo sapiens
gaaggcatctggcca

SEQ ID NO: 1698976 - DNA, 15 bp, Homo sapiens
aaggcatctggccac

SEQ ID NO: 1698977 - DNA, 15 bp, Homo sapiens
aggcatctggccacc

SEQ ID NO: 1698978 - DNA, 15 bp, Homo sapiens
ggcatctggccaccc

SEQ ID NO: 1698979 - DNA, 15 bp, Homo sapiens
gcatctggccaccca

SEQ ID NO: 1698980 - DNA, 15 bp, Homo sapiens
catctggccacccat

SEQ ID NO: 1698981 - DNA, 15 bp, Homo sapiens
atctggccacccatc

SEQ ID NO: 1698982 - DNA, 15 bp, Homo sapiens
tctggccacccatca

SEQ ID NO: 1698983 - DNA, 15 bp, Homo sapiens
ctggccacccatcac

SEQ ID NO: 1698984 - DNA, 15 bp, Homo sapiens
tggccacccatcacc

SEQ ID NO: 1698985 - DNA, 15 bp, Homo sapiens
ggccacccatcacct

SEQ ID NO: 1698986 - DNA, 15 bp, Homo sapiens
gccacccatcacctt

SEQ ID NO: 1698987 - DNA, 15 bp, Homo sapiens
ccacccatcaccttt

SEQ ID NO: 1698988 - DNA, 15 bp, Homo sapiens
cacccatcacctttt

SEQ ID NO: 1698989 - DNA, 15 bp, Homo sapiens
acccatcaccttttt

SEQ ID NO: 1698990 - DNA, 15 bp, Homo sapiens
cccatcaccttttta

SEQ ID NO: 1698991 - DNA, 15 bp, Homo sapiens
ccatcacctttttat

SEQ ID NO: 1698992 - DNA, 15 bp, Homo sapiens
catcacctttttatg

SEQ ID NO: 1698993 - DNA, 15 bp, Homo sapiens
atcacctttttatgg

SEQ ID NO: 1698994 - DNA, 15 bp, Homo sapiens
tcacctttttatggc

SEQ ID NO: 1698995 - DNA, 15 bp, Homo sapiens
cacctttttatggcc

SEQ ID NO: 1698996 - DNA, 15 bp, Homo sapiens
acctttttatggcca

SEQ ID NO: 1698997 - DNA, 15 bp, Homo sapiens
cctttttatggccaa

SEQ ID NO: 1698998 - DNA, 15 bp, Homo sapiens
ctttttatggccaag

SEQ ID NO: 1698999 - DNA, 15 bp, Homo sapiens
tttttatggccaagt

SEQ ID NO: 1699000 - DNA, 15 bp, Homo sapiens
ttttatggccaagta

SEQ ID NO: 1699001 - DNA, 15 bp, Homo sapiens
tttatggccaagtac

SEQ ID NO: 1699002 - DNA, 15 bp, Homo sapiens
ttatggccaagtact

SEQ ID NO: 1699003 - DNA, 15 bp, Homo sapiens
tatggccaagtacta

SEQ ID NO: 1699004 - DNA, 15 bp, Homo sapiens
atggccaagtactag

SEQ ID NO: 1699005 - DNA, 15 bp, Homo sapiens
tggccaagtactagg

SEQ ID NO: 1699006 - DNA, 15 bp, Homo sapiens
ggccaagtactaggt

SEQ ID NO: 1699007 - DNA, 15 bp, Homo sapiens
gccaagtactaggtt

SEQ ID NO: 1699008 - DNA, 15 bp, Homo sapiens
ccaagtactaggttg

SEQ ID NO: 1699009 - DNA, 15 bp, Homo sapiens
caagtactaggttgg

SEQ ID NO: 1699010 - DNA, 15 bp, Homo sapiens
aagtactaggttggt

SEQ ID NO: 1699011 - DNA, 15 bp, Homo sapiens
agtactaggttggtt

SEQ ID NO: 1699012 - DNA, 15 bp, Homo sapiens
gtactaggttggttc

SEQ ID NO: 1699013 - DNA, 15 bp, Homo sapiens
tactaggttggttct

SEQ ID NO: 1699014 - DNA, 15 bp, Homo sapiens
actaggttggttctg

SEQ ID NO: 1699015 - DNA, 15 bp, Homo sapiens
ctaggttggttctgt

SEQ ID NO: 1699016 - DNA, 15 bp, Homo sapiens
taggttggttctgtg

SEQ ID NO: 1699017 - DNA, 15 bp, Homo sapiens
aggttggttctgtgg

SEQ ID NO: 1699018 - DNA, 15 bp, Homo sapiens
ggttggttctgtggt

SEQ ID NO: 1699019 - DNA, 15 bp, Homo sapiens
gttggttctgtggtt

SEQ ID NO: 1699020 - DNA, 15 bp, Homo sapiens
ttggttctgtggttc

SEQ ID NO: 1699021 - DNA, 15 bp, Homo sapiens
tggttctgtggttcc

SEQ ID NO: 1699022 - DNA, 15 bp, Homo sapiens
ggttctgtggttcca

SEQ ID NO: 1699023 - DNA, 15 bp, Homo sapiens
gttctgtggttccaa

SEQ ID NO: 1699024 - DNA, 15 bp, Homo sapiens
ttctgtggttccaat

SEQ ID NO: 1699025 - DNA, 15 bp, Homo sapiens
tctgtggttccaatt

SEQ ID NO: 1699026 - DNA, 15 bp, Homo sapiens
ctgtggttccaatta

SEQ ID NO: 1699027 - DNA, 15 bp, Homo sapiens
tgtggttccaattac

SEQ ID NO: 1699028 - DNA, 15 bp, Homo sapiens
gtggttccaattaca

SEQ ID NO: 1699029 - DNA, 15 bp, Homo sapiens
tggttccaattacag

SEQ ID NO: 1699030 - DNA, 15 bp, Homo sapiens
ggttccaattacagg

SEQ ID NO: 1699031 - DNA, 15 bp, Homo sapiens
gttccaattacagga

SEQ ID NO: 1699032 - DNA, 15 bp, Homo sapiens
ttccaattacaggaa

SEQ ID NO: 1699033 - DNA, 15 bp, Homo sapiens
tccaattacaggaac

SEQ ID NO: 1699034 - DNA, 15 bp, Homo sapiens
ccaattacaggaaca

SEQ ID NO: 1699035 - DNA, 15 bp, Homo sapiens
caattacaggaacag

SEQ ID NO: 1699036 - DNA, 15 bp, Homo sapiens
aattacaggaacaga

SEQ ID NO: 1699037 - DNA, 15 bp, Homo sapiens
attacaggaacagaa

SEQ ID NO: 1699038 - DNA, 15 bp, Homo sapiens
ttacaggaacagaac

SEQ ID NO: 1699039 - DNA, 15 bp, Homo sapiens
tacaggaacagaaca

SEQ ID NO: 1699040 - DNA, 15 bp, Homo sapiens
acaggaacagaacag

SEQ ID NO: 1699041 - DNA, 15 bp, Homo sapiens
caggaacagaacagg

SEQ ID NO: 1699042 - DNA, 15 bp, Homo sapiens
aggaacagaacaggt

SEQ ID NO: 1699043 - DNA, 15 bp, Homo sapiens
ggaacagaacaggtt

SEQ ID NO: 1699044 - DNA, 15 bp, Homo sapiens
gaacagaacaggttc

SEQ ID NO: 1699045 - DNA, 15 bp, Homo sapiens
aacagaacaggttct

SEQ ID NO: 1699046 - DNA, 15 bp, Homo sapiens
acagaacaggttcta

SEQ ID NO: 1699047 - DNA, 15 bp, Homo sapiens
cagaacaggttctat

SEQ ID NO: 1699048 - DNA, 15 bp, Homo sapiens
agaacaggttctatt

SEQ ID NO: 1699049 - DNA, 15 bp, Homo sapiens
gaacaggttctattt

SEQ ID NO: 1699050 - DNA, 15 bp, Homo sapiens
aacaggttctatttt

SEQ ID NO: 1699051 - DNA, 15 bp, Homo sapiens
acaggttctattttc

SEQ ID NO: 1699052 - DNA, 15 bp, Homo sapiens
caggttctattttcc

SEQ ID NO: 1699053 - DNA, 15 bp, Homo sapiens
aggttctattttccc

SEQ ID NO: 1699054 - DNA, 15 bp, Homo sapiens
ggttctattttcccc

SEQ ID NO: 1699055 - DNA, 15 bp, Homo sapiens
gttctattttccccc

SEQ ID NO: 1699056 - DNA, 15 bp, Homo sapiens
ttctattttccccca

SEQ ID NO: 1699057 - DNA, 15 bp, Homo sapiens
tctattttcccccaa

SEQ ID NO: 1699058 - DNA, 15 bp, Homo sapiens
ctattttcccccaat

SEQ ID NO: 1699059 - DNA, 15 bp, Homo sapiens
tattttcccccaatt

SEQ ID NO: 1699060 - DNA, 15 bp, Homo sapiens
attttcccccaatta

SEQ ID NO: 1699061 - DNA, 15 bp, Homo sapiens
ttttcccccaattac

SEQ ID NO: 1699062 - DNA, 15 bp, Homo sapiens
tttcccccaattaca

SEQ ID NO: 1699063 - DNA, 15 bp, Homo sapiens
ttcccccaattacag

SEQ ID NO: 1699064 - DNA, 15 bp, Homo sapiens
tcccccaattacagg

SEQ ID NO: 1699065 - DNA, 15 bp, Homo sapiens
cccccaattacagga

SEQ ID NO: 1699066 - DNA, 15 bp, Homo sapiens
ccccaattacaggaa

SEQ ID NO: 1699067 - DNA, 15 bp, Homo sapiens
cccaattacaggaaa

SEQ ID NO: 1699068 - DNA, 15 bp, Homo sapiens
ccaattacaggaaat

SEQ ID NO: 1699069 - DNA, 15 bp, Homo sapiens
caattacaggaaatt

SEQ ID NO: 1699070 - DNA, 15 bp, Homo sapiens
aattacaggaaattg

SEQ ID NO: 1699071 - DNA, 15 bp, Homo sapiens
attacaggaaattgg

SEQ ID NO: 1699072 - DNA, 15 bp, Homo sapiens
ttacaggaaattggc

SEQ ID NO: 1699073 - DNA, 15 bp, Homo sapiens
tacaggaaattggcc

SEQ ID NO: 1699074 - DNA, 15 bp, Homo sapiens
acaggaaattggcct

SEQ ID NO: 1699075 - DNA, 15 bp, Homo sapiens
caggaaattggcctt

SEQ ID NO: 1699076 - DNA, 15 bp, Homo sapiens
aggaaattggccttg

SEQ ID NO: 1699077 - DNA, 15 bp, Homo sapiens
ggaaattggccttgc

SEQ ID NO: 1699078 - DNA, 15 bp, Homo sapiens
gaaattggccttgcc

SEQ ID NO: 1699079 - DNA, 15 bp, Homo sapiens
aaattggccttgcct

SEQ ID NO: 1699080 - DNA, 15 bp, Homo sapiens
aattggccttgcctc

SEQ ID NO: 1699081 - DNA, 15 bp, Homo sapiens
attggccttgcctct

SEQ ID NO: 1699082 - DNA, 15 bp, Homo sapiens
ttggccttgcctctc

SEQ ID NO: 1699083 - DNA, 15 bp, Homo sapiens
tggccttgcctctct

SEQ ID NO: 1699084 - DNA, 15 bp, Homo sapiens
ggccttgcctctctg

SEQ ID NO: 1699085 - DNA, 15 bp, Homo sapiens
gccttgcctctctgg

SEQ ID NO: 1699086 - DNA, 15 bp, Homo sapiens
ccttgcctctctggg

SEQ ID NO: 1699087 - DNA, 15 bp, Homo sapiens
cttgcctctctgggt

SEQ ID NO: 1699088 - DNA, 15 bp, Homo sapiens
ttgcctctctgggtg

SEQ ID NO: 1699089 - DNA, 15 bp, Homo sapiens
tgcctctctgggtgc

SEQ ID NO: 1699090 - DNA, 15 bp, Homo sapiens
gcctctctgggtgca

SEQ ID NO: 1699091 - DNA, 15 bp, Homo sapiens
cctctctgggtgcac

SEQ ID NO: 1699092 - DNA, 15 bp, Homo sapiens
ctctctgggtgcacc

SEQ ID NO: 1699093 - DNA, 15 bp, Homo sapiens
tctctgggtgcacct

SEQ ID NO: 1699094 - DNA, 15 bp, Homo sapiens
ctctgggtgcacctg

SEQ ID NO: 1699095 - DNA, 15 bp, Homo sapiens
tctgggtgcacctga

SEQ ID NO: 1699096 - DNA, 15 bp, Homo sapiens
ctgggtgcacctgat

SEQ ID NO: 1699097 - DNA, 15 bp, Homo sapiens
tgggtgcacctgatg

SEQ ID NO: 1699098 - DNA, 15 bp, Homo sapiens
gggtgcacctgatga

SEQ ID NO: 1699099 - DNA, 15 bp, Homo sapiens
ggtgcacctgatgaa

SEQ ID NO: 1699100 - DNA, 15 bp, Homo sapiens
gtgcacctgatgaat

SEQ ID NO: 1699101 - DNA, 15 bp, Homo sapiens
tgcacctgatgaata

SEQ ID NO: 1699102 - DNA, 15 bp, Homo sapiens
gcacctgatgaatac

SEQ ID NO: 1699103 - DNA, 15 bp, Homo sapiens
cacctgatgaataca

SEQ ID NO: 1699104 - DNA, 15 bp, Homo sapiens
acctgatgaatacat

SEQ ID NO: 1699105 - DNA, 15 bp, Homo sapiens
cctgatgaatacatt

SEQ ID NO: 1699106 - DNA, 15 bp, Homo sapiens
ctgatgaatacattg

SEQ ID NO: 1699107 - DNA, 15 bp, Homo sapiens
tgatgaatacattga

SEQ ID NO: 1699108 - DNA, 15 bp, Homo sapiens
gatgaatacattgaa

SEQ ID NO: 1699109 - DNA, 15 bp, Homo sapiens
atgaatacattgaaa

SEQ ID NO: 1699110 - DNA, 15 bp, Homo sapiens
tgaatacattgaaaa

SEQ ID NO: 1699111 - DNA, 15 bp, Homo sapiens
gaatacattgaaaag

SEQ ID NO: 1699112 - DNA, 15 bp, Homo sapiens
aatacattgaaaagc

SEQ ID NO: 1699113 - DNA, 15 bp, Homo sapiens
atacattgaaaagct

SEQ ID NO: 1699114 - DNA, 15 bp, Homo sapiens
tacattgaaaagctc

SEQ ID NO: 1699115 - DNA, 15 bp, Homo sapiens
acattgaaaagctcg

SEQ ID NO: 1699116 - DNA, 15 bp, Homo sapiens
cattgaaaagctcgc

SEQ ID NO: 1699117 - DNA, 15 bp, Homo sapiens
attgaaaagctcgcc

SEQ ID NO: 1699118 - DNA, 15 bp, Homo sapiens
ttgaaaagctcgcca

SEQ ID NO: 1699119 - DNA, 15 bp, Homo sapiens
tgaaaagctcgccac

SEQ ID NO: 1699120 - DNA, 15 bp, Homo sapiens
gaaaagctcgccaca

SEQ ID NO: 1699121 - DNA, 15 bp, Homo sapiens
aaaagctcgccacag

SEQ ID NO: 1699122 - DNA, 15 bp, Homo sapiens
aaagctcgccacagt

SEQ ID NO: 1699123 - DNA, 15 bp, Homo sapiens
aagctcgccacagta

SEQ ID NO: 1699124 - DNA, 15 bp, Homo sapiens
agctcgccacagtaa

SEQ ID NO: 1699125 - DNA, 15 bp, Homo sapiens
gctcgccacagtaag

SEQ ID NO: 1699126 - DNA, 15 bp, Homo sapiens
ctcgccacagtaagt

SEQ ID NO: 1699127 - DNA, 15 bp, Homo sapiens
tcgccacagtaagtc

SEQ ID NO: 1699128 - DNA, 15 bp, Homo sapiens
cgccacagtaagtcc

SEQ ID NO: 1699129 - DNA, 15 bp, Homo sapiens
gccacagtaagtccc

SEQ ID NO: 1699130 - DNA, 15 bp, Homo sapiens
ccacagtaagtccct

SEQ ID NO: 1699131 - DNA, 15 bp, Homo sapiens
cacagtaagtccctt

SEQ ID NO: 1699132 - DNA, 15 bp, Homo sapiens
acagtaagtcccttc

SEQ ID NO: 1699133 - DNA, 15 bp, Homo sapiens
cagtaagtcccttct

SEQ ID NO: 1699134 - DNA, 15 bp, Homo sapiens
agtaagtcccttctc

SEQ ID NO: 1699135 - DNA, 15 bp, Homo sapiens
gtaagtcccttctct

SEQ ID NO: 1699136 - DNA, 15 bp, Homo sapiens
taagtcccttctctc

SEQ ID NO: 1699137 - DNA, 15 bp, Homo sapiens
aagtcccttctctcc

SEQ ID NO: 1699138 - DNA, 15 bp, Homo sapiens
agtcccttctctccc

SEQ ID NO: 1699139 - DNA, 15 bp, Homo sapiens
gtcccttctctccct

SEQ ID NO: 1699140 - DNA, 15 bp, Homo sapiens
tcccttctctccctg

SEQ ID NO: 1699141 - DNA, 15 bp, Homo sapiens
cccttctctccctgg

SEQ ID NO: 1699142 - DNA, 15 bp, Homo sapiens
ccttctctccctggg

SEQ ID NO: 1699143 - DNA, 15 bp, Homo sapiens
cttctctccctgggt

SEQ ID NO: 1699144 - DNA, 15 bp, Homo sapiens
ttctctccctgggtg

SEQ ID NO: 1699145 - DNA, 15 bp, Homo sapiens
tctctccctgggtgg

SEQ ID NO: 1699146 - DNA, 15 bp, Homo sapiens
ctctccctgggtgga

SEQ ID NO: 1699147 - DNA, 15 bp, Homo sapiens
tctccctgggtggat

SEQ ID NO: 1699148 - DNA, 15 bp, Homo sapiens
ctccctgggtggatg

SEQ ID NO: 1699149 - DNA, 15 bp, Homo sapiens
tccctgggtggatgg

SEQ ID NO: 1699150 - DNA, 15 bp, Homo sapiens
ccctgggtggatggt

SEQ ID NO: 1699151 - DNA, 15 bp, Homo sapiens
cctgggtggatggtg

SEQ ID NO: 1699152 - DNA, 15 bp, Homo sapiens
ctgggtggatggtgg

SEQ ID NO: 1699153 - DNA, 15 bp, Homo sapiens
tgggtggatggtgga

SEQ ID NO: 1699154 - DNA, 15 bp, Homo sapiens
gggtggatggtggag

SEQ ID NO: 1699155 - DNA, 15 bp, Homo sapiens
ggtggatggtggagt

SEQ ID NO: 1699156 - DNA, 15 bp, Homo sapiens
gtggatggtggagtg

SEQ ID NO: 1699157 - DNA, 15 bp, Homo sapiens
tggatggtggagtgc

SEQ ID NO: 1699158 - DNA, 15 bp, Homo sapiens
ggatggtggagtgct

SEQ ID NO: 1699159 - DNA, 15 bp, Homo sapiens
gatggtggagtgcta

SEQ ID NO: 1699160 - DNA, 15 bp, Homo sapiens
atggtggagtgctat

SEQ ID NO: 1699161 - DNA, 15 bp, Homo sapiens
tggtggagtgctata

SEQ ID NO: 1699162 - DNA, 15 bp, Homo sapiens
ggtggagtgctatag

SEQ ID NO: 1699163 - DNA, 15 bp, Homo sapiens
gtggagtgctatagg

SEQ ID NO: 1699164 - DNA, 15 bp, Homo sapiens
tggagtgctataggc

SEQ ID NO: 1699165 - DNA, 15 bp, Homo sapiens
ggagtgctataggct

SEQ ID NO: 1699166 - DNA, 15 bp, Homo sapiens
gagtgctataggcta

SEQ ID NO: 1699167 - DNA, 15 bp, Homo sapiens
agtgctataggctat

SEQ ID NO: 1699168 - DNA, 15 bp, Homo sapiens
gtgctataggctatg

SEQ ID NO: 1699169 - DNA, 15 bp, Homo sapiens
tgctataggctatgg

SEQ ID NO: 1699170 - DNA, 15 bp, Homo sapiens
gctataggctatggc

SEQ ID NO: 1699171 - DNA, 15 bp, Homo sapiens
ctataggctatggcc

SEQ ID NO: 1699172 - DNA, 15 bp, Homo sapiens
tataggctatggccc

SEQ ID NO: 1699173 - DNA, 15 bp, Homo sapiens
ataggctatggccct

SEQ ID NO: 1699174 - DNA, 15 bp, Homo sapiens
taggctatggccctc

SEQ ID NO: 1699175 - DNA, 15 bp, Homo sapiens
aggctatggccctca

SEQ ID NO: 1699176 - DNA, 15 bp, Homo sapiens
ggctatggccctcag

SEQ ID NO: 1699177 - DNA, 15 bp, Homo sapiens
gctatggccctcagg

SEQ ID NO: 1699178 - DNA, 15 bp, Homo sapiens
ctatggccctcaggt

SEQ ID NO: 1699179 - DNA, 15 bp, Homo sapiens
tatggccctcaggtc

SEQ ID NO: 1699180 - DNA, 15 bp, Homo sapiens
atggccctcaggtct

SEQ ID NO: 1699181 - DNA, 15 bp, Homo sapiens
tggccctcaggtctt

SEQ ID NO: 1699182 - DNA, 15 bp, Homo sapiens
ggccctcaggtcttt

SEQ ID NO: 1699183 - DNA, 15 bp, Homo sapiens
gccctcaggtctttg

SEQ ID NO: 1699184 - DNA, 15 bp, Homo sapiens
ccctcaggtctttga

SEQ ID NO: 1699185 - DNA, 15 bp, Homo sapiens
cctcaggtctttgaa

SEQ ID NO: 1699186 - DNA, 15 bp, Homo sapiens
ctcaggtctttgaaa

SEQ ID NO: 1699187 - DNA, 15 bp, Homo sapiens
tcaggtctttgaaac

SEQ ID NO: 1699188 - DNA, 15 bp, Homo sapiens
caggtctttgaaact

SEQ ID NO: 1699189 - DNA, 15 bp, Homo sapiens
aggtctttgaaactt

SEQ ID NO: 1699190 - DNA, 15 bp, Homo sapiens
ggtctttgaaacttt

SEQ ID NO: 1699191 - DNA, 15 bp, Homo sapiens
gtctttgaaactttc

SEQ ID NO: 1699192 - DNA, 15 bp, Homo sapiens
tctttgaaactttcc

SEQ ID NO: 1699193 - DNA, 15 bp, Homo sapiens
ctttgaaactttcct

SEQ ID NO: 1699194 - DNA, 15 bp, Homo sapiens
tttgaaactttccta

SEQ ID NO: 1699195 - DNA, 15 bp, Homo sapiens
ttgaaactttcctac

SEQ ID NO: 1699196 - DNA, 15 bp, Homo sapiens
tgaaactttcctact

SEQ ID NO: 1699197 - DNA, 15 bp, Homo sapiens
gaaactttcctactc

SEQ ID NO: 1699198 - DNA, 15 bp, Homo sapiens
aaactttcctactcc

SEQ ID NO: 1699199 - DNA, 15 bp, Homo sapiens
aactttcctactccc

SEQ ID NO: 1699200 - DNA, 15 bp, Homo sapiens
actttcctactcccc

SEQ ID NO: 1699201 - DNA, 15 bp, Homo sapiens
ctttcctactcccct

SEQ ID NO: 1699202 - DNA, 15 bp, Homo sapiens
tttcctactcccctg

SEQ ID NO: 1699203 - DNA, 15 bp, Homo sapiens
ttcctactcccctgg

SEQ ID NO: 1699204 - DNA, 15 bp, Homo sapiens
tcctactcccctgga

SEQ ID NO: 1699205 - DNA, 15 bp, Homo sapiens
cctactcccctggaa

SEQ ID NO: 1699206 - DNA, 15 bp, Homo sapiens
ctactcccctggaag

SEQ ID NO: 1699207 - DNA, 15 bp, Homo sapiens
tactcccctggaagc

SEQ ID NO: 1699208 - DNA, 15 bp, Homo sapiens
actcccctggaagcc

SEQ ID NO: 1699209 - DNA, 15 bp, Homo sapiens
ctcccctggaagcca

SEQ ID NO: 1699210 - DNA, 15 bp, Homo sapiens
tcccctggaagccag

SEQ ID NO: 1699211 - DNA, 15 bp, Homo sapiens
cccctggaagccagg

SEQ ID NO: 1699212 - DNA, 15 bp, Homo sapiens
ccctggaagccaggt

SEQ ID NO: 1699213 - DNA, 15 bp, Homo sapiens
cctggaagccaggtt

SEQ ID NO: 1699214 - DNA, 15 bp, Homo sapiens
ctggaagccaggtta

SEQ ID NO: 1699215 - DNA, 15 bp, Homo sapiens
tggaagccaggttat

SEQ ID NO: 1699216 - DNA, 15 bp, Homo sapiens
ggaagccaggttatc

SEQ ID NO: 1699217 - DNA, 15 bp, Homo sapiens
gaagccaggttatct

SEQ ID NO: 1699218 - DNA, 15 bp, Homo sapiens
aagccaggttatctg

SEQ ID NO: 1699219 - DNA, 15 bp, Homo sapiens
agccaggttatctgg

SEQ ID NO: 1699220 - DNA, 15 bp, Homo sapiens
gccaggttatctggg

SEQ ID NO: 1699221 - DNA, 15 bp, Homo sapiens
ccaggttatctgggg

SEQ ID NO: 1699222 - DNA, 15 bp, Homo sapiens
caggttatctgggga

SEQ ID NO: 1699223 - DNA, 15 bp, Homo sapiens
aggttatctggggaa

SEQ ID NO: 1699224 - DNA, 15 bp, Homo sapiens
ggttatctggggaaa

SEQ ID NO: 1699225 - DNA, 15 bp, Homo sapiens
gttatctggggaaaa

SEQ ID NO: 1699226 - DNA, 15 bp, Homo sapiens
ttatctggggaaaaa

SEQ ID NO: 1699227 - DNA, 15 bp, Homo sapiens
tatctggggaaaaaa

SEQ ID NO: 1699228 - DNA, 15 bp, Homo sapiens
atctggggaaaaaaa

SEQ ID NO: 1699229 - DNA, 15 bp, Homo sapiens
tctggggaaaaaaat

SEQ ID NO: 1699230 - DNA, 15 bp, Homo sapiens
ctggggaaaaaaatc

SEQ ID NO: 1699231 - DNA, 15 bp, Homo sapiens
tggggaaaaaaatca

SEQ ID NO: 1699232 - DNA, 15 bp, Homo sapiens
gaaaaaaatcagaat

SEQ ID NO: 1699233 - DNA, 15 bp, Homo sapiens
aaaaaaatcagaatg

SEQ ID NO: 1699234 - DNA, 15 bp, Homo sapiens
aaaaaatcagaatgt

SEQ ID NO: 1699235 - DNA, 15 bp, Homo sapiens
aaaaatcagaatgtg

SEQ ID NO: 1699236 - DNA, 15 bp, Homo sapiens
aaaatcagaatgtgg

SEQ ID NO: 1699237 - DNA, 15 bp, Homo sapiens
aaatcagaatgtggt

SEQ ID NO: 1699238 - DNA, 15 bp, Homo sapiens
aatcagaatgtggtg

SEQ ID NO: 1699239 - DNA, 15 bp, Homo sapiens
atcagaatgtggtgg

SEQ ID NO: 1699240 - DNA, 15 bp, Homo sapiens
tcagaatgtggtggg

SEQ ID NO: 1699241 - DNA, 15 bp, Homo sapiens
cagaatgtggtgggt

SEQ ID NO: 1699242 - DNA, 15 bp, Homo sapiens
agaatgtggtgggtt

SEQ ID NO: 1699243 - DNA, 15 bp, Homo sapiens
gaatgtggtgggtta

SEQ ID NO: 1699244 - DNA, 15 bp, Homo sapiens
aatgtggtgggttac

SEQ ID NO: 1699245 - DNA, 15 bp, Homo sapiens
atgtggtgggttaca

SEQ ID NO: 1699246 - DNA, 15 bp, Homo sapiens
tgtggtgggttacat

SEQ ID NO: 1699247 - DNA, 15 bp, Homo sapiens
gtggtgggttacatt

SEQ ID NO: 1699248 - DNA, 15 bp, Homo sapiens
tggtgggttacattt

SEQ ID NO: 1699249 - DNA, 15 bp, Homo sapiens
ggtgggttacatttg

SEQ ID NO: 1699250 - DNA, 15 bp, Homo sapiens
gtgggttacatttgc

SEQ ID NO: 1699251 - DNA, 15 bp, Homo sapiens
tgggttacatttgca

SEQ ID NO: 1699252 - DNA, 15 bp, Homo sapiens
gggttacatttgcac

SEQ ID NO: 1699253 - DNA, 15 bp, Homo sapiens
ggttacatttgcaca

SEQ ID NO: 1699254 - DNA, 15 bp, Homo sapiens
gttacatttgcacaa

SEQ ID NO: 1699255 - DNA, 15 bp, Homo sapiens
ttacatttgcacaag

SEQ ID NO: 1699256 - DNA, 15 bp, Homo sapiens
tacatttgcacaagt

SEQ ID NO: 1699257 - DNA, 15 bp, Homo sapiens
acatttgcacaagtg

SEQ ID NO: 1699258 - DNA, 15 bp, Homo sapiens
catttgcacaagtga

SEQ ID NO: 1699259 - DNA, 15 bp, Homo sapiens
atttgcacaagtgaa

SEQ ID NO: 1699260 - DNA, 15 bp, Homo sapiens
tttgcacaagtgaaa

SEQ ID NO: 1699261 - DNA, 15 bp, Homo sapiens
ttgcacaagtgaaac

SEQ ID NO: 1699262 - DNA, 15 bp, Homo sapiens
tgcacaagtgaaact

SEQ ID NO: 1699263 - DNA, 15 bp, Homo sapiens
gcacaagtgaaactt

SEQ ID NO: 1699264 - DNA, 15 bp, Homo sapiens
cacaagtgaaacttc

SEQ ID NO: 1699265 - DNA, 15 bp, Homo sapiens
acaagtgaaacttca

SEQ ID NO: 1699266 - DNA, 15 bp, Homo sapiens
caagtgaaacttcac

SEQ ID NO: 1699267 - DNA, 15 bp, Homo sapiens
aagtgaaacttcaca

SEQ ID NO: 1699268 - DNA, 15 bp, Homo sapiens
agtgaaacttcacat

SEQ ID NO: 1699269 - DNA, 15 bp, Homo sapiens
gtgaaacttcacatt

SEQ ID NO: 1699270 - DNA, 15 bp, Homo sapiens
tgaaacttcacattt

SEQ ID NO: 1699271 - DNA, 15 bp, Homo sapiens
gaaacttcacatttt

SEQ ID NO: 1699272 - DNA, 15 bp, Homo sapiens
aaacttcacattttg

SEQ ID NO: 1699273 - DNA, 15 bp, Homo sapiens
aacttcacattttga

SEQ ID NO: 1699274 - DNA, 15 bp, Homo sapiens
acttcacattttgat

SEQ ID NO: 1699275 - DNA, 15 bp, Homo sapiens
cttcacattttgata

SEQ ID NO: 1699276 - DNA, 15 bp, Homo sapiens
ttcacattttgatag

SEQ ID NO: 1699277 - DNA, 15 bp, Homo sapiens
tcacattttgataga

SEQ ID NO: 1699278 - DNA, 15 bp, Homo sapiens
cacattttgatagat

SEQ ID NO: 1699279 - DNA, 15 bp, Homo sapiens
acattttgatagatt

SEQ ID NO: 1699280 - DNA, 15 bp, Homo sapiens
cattttgatagattt

SEQ ID NO: 1699281 - DNA, 15 bp, Homo sapiens
attttgatagatttc

SEQ ID NO: 1699282 - DNA, 15 bp, Homo sapiens
ttttgatagatttct

SEQ ID NO: 1699283 - DNA, 15 bp, Homo sapiens
tttgatagatttctc

SEQ ID NO: 1699284 - DNA, 15 bp, Homo sapiens
ttgatagatttctcc

SEQ ID NO: 1699285 - DNA, 15 bp, Homo sapiens
tgatagatttctcct

SEQ ID NO: 1699286 - DNA, 15 bp, Homo sapiens
gatagatttctcctt

SEQ ID NO: 1699287 - DNA, 15 bp, Homo sapiens
atagatttctcctta

SEQ ID NO: 1699288 - DNA, 15 bp, Homo sapiens
tagatttctccttaa

SEQ ID NO: 1699289 - DNA, 15 bp, Homo sapiens
agatttctccttaat

SEQ ID NO: 1699290 - DNA, 15 bp, Homo sapiens
gatttctccttaata

SEQ ID NO: 1699291 - DNA, 15 bp, Homo sapiens
atttctccttaataa

SEQ ID NO: 1699292 - DNA, 15 bp, Homo sapiens
tttctccttaataat

SEQ ID NO: 1699293 - DNA, 15 bp, Homo sapiens
ttctccttaataatt

SEQ ID NO: 1699294 - DNA, 15 bp, Homo sapiens
tctccttaataattt

SEQ ID NO: 1699295 - DNA, 15 bp, Homo sapiens
ctccttaataatttg

SEQ ID NO: 1699296 - DNA, 15 bp, Homo sapiens
tccttaataatttga

SEQ ID NO: 1699297 - DNA, 15 bp, Homo sapiens
ccttaataatttgat

SEQ ID NO: 1699298 - DNA, 15 bp, Homo sapiens
cttaataatttgatt

SEQ ID NO: 1699299 - DNA, 15 bp, Homo sapiens
ttaataatttgattt

SEQ ID NO: 1699300 - DNA, 15 bp, Homo sapiens
taataatttgatttt

SEQ ID NO: 1699301 - DNA, 15 bp, Homo sapiens
aataatttgattttg

SEQ ID NO: 1699302 - DNA, 15 bp, Homo sapiens
ataatttgattttga

SEQ ID NO: 1699303 - DNA, 15 bp, Homo sapiens
taatttgattttgaa

SEQ ID NO: 1699304 - DNA, 15 bp, Homo sapiens
aatttgattttgaaa

SEQ ID NO: 1699305 - DNA, 15 bp, Homo sapiens
atttgattttgaaat

SEQ ID NO: 1699306 - DNA, 15 bp, Homo sapiens
tttgattttgaaatc

SEQ ID NO: 1699307 - DNA, 15 bp, Homo sapiens
ttgattttgaaatca

SEQ ID NO: 1699308 - DNA, 15 bp, Homo sapiens
tgattttgaaatcag

SEQ ID NO: 1699309 - DNA, 15 bp, Homo sapiens
gattttgaaatcagc

SEQ ID NO: 1699310 - DNA, 15 bp, Homo sapiens
attttgaaatcagct

SEQ ID NO: 1699311 - DNA, 15 bp, Homo sapiens
ttttgaaatcagcta

SEQ ID NO: 1699312 - DNA, 15 bp, Homo sapiens
tttgaaatcagctac

SEQ ID NO: 1699313 - DNA, 15 bp, Homo sapiens
ttgaaatcagctacc

SEQ ID NO: 1699314 - DNA, 15 bp, Homo sapiens
tgaaatcagctacct

SEQ ID NO: 1699315 - DNA, 15 bp, Homo sapiens
gaaatcagctaccta

SEQ ID NO: 1699316 - DNA, 15 bp, Homo sapiens
aaatcagctacctac

SEQ ID NO: 1699317 - DNA, 15 bp, Homo sapiens
aatcagctacctaca

SEQ ID NO: 1699318 - DNA, 15 bp, Homo sapiens
atcagctacctacag

SEQ ID NO: 1699319 - DNA, 15 bp, Homo sapiens
tcagctacctacaga

SEQ ID NO: 1699320 - DNA, 15 bp, Homo sapiens
cagctacctacagat

SEQ ID NO: 1699321 - DNA, 15 bp, Homo sapiens
agctacctacagatg

SEQ ID NO: 1699322 - DNA, 15 bp, Homo sapiens
gctacctacagatgt

SEQ ID NO: 1699323 - DNA, 15 bp, Homo sapiens
ctacctacagatgtt

SEQ ID NO: 1699324 - DNA, 15 bp, Homo sapiens
tacctacagatgttt

SEQ ID NO: 1699325 - DNA, 15 bp, Homo sapiens
acctacagatgttta

SEQ ID NO: 1699326 - DNA, 15 bp, Homo sapiens
cctacagatgtttac

SEQ ID NO: 1699327 - DNA, 15 bp, Homo sapiens
ctacagatgtttaca

SEQ ID NO: 1699328 - DNA, 15 bp, Homo sapiens
tacagatgtttacat

SEQ ID NO: 1699329 - DNA, 15 bp, Homo sapiens
acagatgtttacatc

SEQ ID NO: 1699330 - DNA, 15 bp, Homo sapiens
cagatgtttacatct

SEQ ID NO: 1699331 - DNA, 15 bp, Homo sapiens
agatgtttacatctc

SEQ ID NO: 1699332 - DNA, 15 bp, Homo sapiens
gatgtttacatctct

SEQ ID NO: 1699333 - DNA, 15 bp, Homo sapiens
atgtttacatctctt

SEQ ID NO: 1699334 - DNA, 15 bp, Homo sapiens
tgtttacatctctta

SEQ ID NO: 1699335 - DNA, 15 bp, Homo sapiens
gtttacatctcttaa

SEQ ID NO: 1699336 - DNA, 15 bp, Homo sapiens
tttacatctcttaaa

SEQ ID NO: 1699337 - DNA, 15 bp, Homo sapiens
ttacatctcttaaat

SEQ ID NO: 1699338 - DNA, 15 bp, Homo sapiens
tacatctcttaaatt

SEQ ID NO: 1699339 - DNA, 15 bp, Homo sapiens
acatctcttaaattt

SEQ ID NO: 1699340 - DNA, 15 bp, Homo sapiens
catctcttaaatttt

SEQ ID NO: 1699341 - DNA, 15 bp, Homo sapiens
atctcttaaatttta

SEQ ID NO: 1699342 - DNA, 15 bp, Homo sapiens
tctcttaaattttaa

SEQ ID NO: 1699343 - DNA, 15 bp, Homo sapiens
ctcttaaattttaag

SEQ ID NO: 1699344 - DNA, 15 bp, Homo sapiens
tcttaaattttaagc

SEQ ID NO: 1699345 - DNA, 15 bp, Homo sapiens
cttaaattttaagca

SEQ ID NO: 1699346 - DNA, 15 bp, Homo sapiens
ttaaattttaagcag

SEQ ID NO: 1699347 - DNA, 15 bp, Homo sapiens
taaattttaagcagt

SEQ ID NO: 1699348 - DNA, 15 bp, Homo sapiens
aaattttaagcagta

SEQ ID NO: 1699349 - DNA, 15 bp, Homo sapiens
aattttaagcagtat

SEQ ID NO: 1699350 - DNA, 15 bp, Homo sapiens
attttaagcagtatc

SEQ ID NO: 1699351 - DNA, 15 bp, Homo sapiens
ttttaagcagtatct

SEQ ID NO: 1699352 - DNA, 15 bp, Homo sapiens
tttaagcagtatctt

SEQ ID NO: 1699353 - DNA, 15 bp, Homo sapiens
ttaagcagtatcttg

SEQ ID NO: 1699354 - DNA, 15 bp, Homo sapiens
taagcagtatcttga

SEQ ID NO: 1699355 - DNA, 15 bp, Homo sapiens
aagcagtatcttgaa

SEQ ID NO: 1699356 - DNA, 15 bp, Homo sapiens
agcagtatcttgaac

SEQ ID NO: 1699357 - DNA, 15 bp, Homo sapiens
gcagtatcttgaacc

SEQ ID NO: 1699358 - DNA, 15 bp, Homo sapiens
cagtatcttgaaccc

SEQ ID NO: 1699359 - DNA, 15 bp, Homo sapiens
agtatcttgaaccca

SEQ ID NO: 1699360 - DNA, 15 bp, Homo sapiens
gtatcttgaacccac

SEQ ID NO: 1699361 - DNA, 15 bp, Homo sapiens
tatcttgaacccacc

SEQ ID NO: 1699362 - DNA, 15 bp, Homo sapiens
atcttgaacccacca

SEQ ID NO: 1699363 - DNA, 15 bp, Homo sapiens
tcttgaacccaccaa

SEQ ID NO: 1699364 - DNA, 15 bp, Homo sapiens
cttgaacccaccaac

SEQ ID NO: 1699365 - DNA, 15 bp, Homo sapiens
ttgaacccaccaaca

SEQ ID NO: 1699366 - DNA, 15 bp, Homo sapiens
tgaacccaccaacag

SEQ ID NO: 1699367 - DNA, 15 bp, Homo sapiens
gaacccaccaacagg

SEQ ID NO: 1699368 - DNA, 15 bp, Homo sapiens
aacccaccaacaggc

SEQ ID NO: 1699369 - DNA, 15 bp, Homo sapiens
acccaccaacaggct

SEQ ID NO: 1699370 - DNA, 15 bp, Homo sapiens
cccaccaacaggcta

SEQ ID NO: 1699371 - DNA, 15 bp, Homo sapiens
ccaccaacaggctat

SEQ ID NO: 1699372 - DNA, 15 bp, Homo sapiens
caccaacaggctata

SEQ ID NO: 1699373 - DNA, 15 bp, Homo sapiens
accaacaggctataa

SEQ ID NO: 1699374 - DNA, 15 bp, Homo sapiens
ccaacaggctataat

SEQ ID NO: 1699375 - DNA, 15 bp, Homo sapiens
caacaggctataata

SEQ ID NO: 1699376 - DNA, 15 bp, Homo sapiens
aacaggctataatag

SEQ ID NO: 1699377 - DNA, 15 bp, Homo sapiens
acaggctataatagt

SEQ ID NO: 1699378 - DNA, 15 bp, Homo sapiens
caggctataatagta

SEQ ID NO: 1699379 - DNA, 15 bp, Homo sapiens
aggctataatagtag

SEQ ID NO: 1699380 - DNA, 15 bp, Homo sapiens
ggctataatagtagc

SEQ ID NO: 1699381 - DNA, 15 bp, Homo sapiens
gctataatagtagcc

SEQ ID NO: 1699382 - DNA, 15 bp, Homo sapiens
ctataatagtagccc

SEQ ID NO: 1699383 - DNA, 15 bp, Homo sapiens
tataatagtagccct

SEQ ID NO: 1699384 - DNA, 15 bp, Homo sapiens
ataatagtagccctt

SEQ ID NO: 1699385 - DNA, 15 bp, Homo sapiens
taatagtagcccttg

SEQ ID NO: 1699386 - DNA, 15 bp, Homo sapiens
aatagtagcccttga

SEQ ID NO: 1699387 - DNA, 15 bp, Homo sapiens
atagtagcccttgaa

SEQ ID NO: 1699388 - DNA, 15 bp, Homo sapiens
tagtagcccttgaaa

SEQ ID NO: 1699389 - DNA, 15 bp, Homo sapiens
agtagcccttgaaaa

SEQ ID NO: 1699390 - DNA, 15 bp, Homo sapiens
gtagcccttgaaaac

SEQ ID NO: 1699391 - DNA, 15 bp, Homo sapiens
tagcccttgaaaacc

SEQ ID NO: 1699392 - DNA, 15 bp, Homo sapiens
agcccttgaaaaccc

SEQ ID NO: 1699393 - DNA, 15 bp, Homo sapiens
gcccttgaaaaccct

SEQ ID NO: 1699394 - DNA, 15 bp, Homo sapiens
cccttgaaaaccctt

SEQ ID NO: 1699395 - DNA, 15 bp, Homo sapiens
ccttgaaaacccttg

SEQ ID NO: 1699396 - DNA, 15 bp, Homo sapiens
cttgaaaacccttgg

SEQ ID NO: 1699397 - DNA, 15 bp, Homo sapiens
ttgaaaacccttggc

SEQ ID NO: 1699398 - DNA, 15 bp, Homo sapiens
tgaaaacccttggca

SEQ ID NO: 1699399 - DNA, 15 bp, Homo sapiens
gaaaacccttggcat

SEQ ID NO: 1699400 - DNA, 15 bp, Homo sapiens
aaaacccttggcata

SEQ ID NO: 1699401 - DNA, 15 bp, Homo sapiens
aaacccttggcataa

SEQ ID NO: 1699402 - DNA, 15 bp, Homo sapiens
aacccttggcataaa

SEQ ID NO: 1699403 - DNA, 15 bp, Homo sapiens
acccttggcataaag

SEQ ID NO: 1699404 - DNA, 15 bp, Homo sapiens
cccttggcataaagt

SEQ ID NO: 1699405 - DNA, 15 bp, Homo sapiens
ccttggcataaagtg

SEQ ID NO: 1699406 - DNA, 15 bp, Homo sapiens
cttggcataaagtgt

SEQ ID NO: 1699407 - DNA, 15 bp, Homo sapiens
ttggcataaagtgtg

SEQ ID NO: 1699408 - DNA, 15 bp, Homo sapiens
tggcataaagtgtgt

SEQ ID NO: 1699409 - DNA, 15 bp, Homo sapiens
ggcataaagtgtgtg

SEQ ID NO: 1699410 - DNA, 15 bp, Homo sapiens
gcataaagtgtgtgt

SEQ ID NO: 1699411 - DNA, 15 bp, Homo sapiens
cataaagtgtgtgta

SEQ ID NO: 1699412 - DNA, 15 bp, Homo sapiens
ataaagtgtgtgtat

SEQ ID NO: 1699413 - DNA, 15 bp, Homo sapiens
taaagtgtgtgtatg

SEQ ID NO: 1699414 - DNA, 15 bp, Homo sapiens
aaagtgtgtgtatga

SEQ ID NO: 1699415 - DNA, 15 bp, Homo sapiens
aagtgtgtgtatgaa

SEQ ID NO: 1699416 - DNA, 15 bp, Homo sapiens
agtgtgtgtatgaag

SEQ ID NO: 1699417 - DNA, 15 bp, Homo sapiens
gtgtgtgtatgaagt

SEQ ID NO: 1699418 - DNA, 15 bp, Homo sapiens
tgtgtgtatgaagta

SEQ ID NO: 1699419 - DNA, 15 bp, Homo sapiens
gtgtgtatgaagtaa

SEQ ID NO: 1699420 - DNA, 15 bp, Homo sapiens
tgtgtatgaagtaat

SEQ ID NO: 1699421 - DNA, 15 bp, Homo sapiens
gtgtatgaagtaatc

SEQ ID NO: 1699422 - DNA, 15 bp, Homo sapiens
tgtatgaagtaatct

SEQ ID NO: 1699423 - DNA, 15 bp, Homo sapiens
gtatgaagtaatctg

SEQ ID NO: 1699424 - DNA, 15 bp, Homo sapiens
tatgaagtaatctgg

SEQ ID NO: 1699425 - DNA, 15 bp, Homo sapiens
atgaagtaatctgga

SEQ ID NO: 1699426 - DNA, 15 bp, Homo sapiens
tgaagtaatctggat

SEQ ID NO: 1699427 - DNA, 15 bp, Homo sapiens
gaagtaatctggatc

SEQ ID NO: 1699428 - DNA, 15 bp, Homo sapiens
aagtaatctggatcc

SEQ ID NO: 1699429 - DNA, 15 bp, Homo sapiens
agtaatctggatcca

SEQ ID NO: 1699430 - DNA, 15 bp, Homo sapiens
gtaatctggatccag

SEQ ID NO: 1699431 - DNA, 15 bp, Homo sapiens
taatctggatccaga

SEQ ID NO: 1699432 - DNA, 15 bp, Homo sapiens
aatctggatccagag

SEQ ID NO: 1699433 - DNA, 15 bp, Homo sapiens
atctggatccagagc

SEQ ID NO: 1699434 - DNA, 15 bp, Homo sapiens
tctggatccagagct

SEQ ID NO: 1699435 - DNA, 15 bp, Homo sapiens
ctggatccagagctt

SEQ ID NO: 1699436 - DNA, 15 bp, Homo sapiens
tggatccagagcttt

SEQ ID NO: 1699437 - DNA, 15 bp, Homo sapiens
ggatccagagctttg

SEQ ID NO: 1699438 - DNA, 15 bp, Homo sapiens
gatccagagctttga

SEQ ID NO: 1699439 - DNA, 15 bp, Homo sapiens
atccagagctttgaa

SEQ ID NO: 1699440 - DNA, 15 bp, Homo sapiens
tccagagctttgaac

SEQ ID NO: 1699441 - DNA, 15 bp, Homo sapiens
ccagagctttgaaca

SEQ ID NO: 1699442 - DNA, 15 bp, Homo sapiens
cagagctttgaacat

SEQ ID NO: 1699443 - DNA, 15 bp, Homo sapiens
agagctttgaacatg

SEQ ID NO: 1699444 - DNA, 15 bp, Homo sapiens
gagctttgaacatgg

SEQ ID NO: 1699445 - DNA, 15 bp, Homo sapiens
agctttgaacatgga

SEQ ID NO: 1699446 - DNA, 15 bp, Homo sapiens
gctttgaacatggaa

SEQ ID NO: 1699447 - DNA, 15 bp, Homo sapiens
ctttgaacatggaat

SEQ ID NO: 1699448 - DNA, 15 bp, Homo sapiens
tttgaacatggaatg

SEQ ID NO: 1699449 - DNA, 15 bp, Homo sapiens
ttgaacatggaatgt

SEQ ID NO: 1699450 - DNA, 15 bp, Homo sapiens
tgaacatggaatgtt

SEQ ID NO: 1699451 - DNA, 15 bp, Homo sapiens
gaacatggaatgttt

SEQ ID NO: 1699452 - DNA, 15 bp, Homo sapiens
aacatggaatgttta

SEQ ID NO: 1699453 - DNA, 15 bp, Homo sapiens
acatggaatgtttac

SEQ ID NO: 1699454 - DNA, 15 bp, Homo sapiens
catggaatgtttaca

SEQ ID NO: 1699455 - DNA, 15 bp, Homo sapiens
atggaatgtttacat

SEQ ID NO: 1699456 - DNA, 15 bp, Homo sapiens
tggaatgtttacatc

SEQ ID NO: 1699457 - DNA, 15 bp, Homo sapiens
ggaatgtttacatct

SEQ ID NO: 1699458 - DNA, 15 bp, Homo sapiens
gaatgtttacatctc

SEQ ID NO: 1699459 - DNA, 15 bp, Homo sapiens
aatgtttacatctct

SEQ ID NO: 1699460 - DNA, 15 bp, Homo sapiens
atgtttacatctcta

SEQ ID NO: 1699461 - DNA, 15 bp, Homo sapiens
tgtttacatctctac

SEQ ID NO: 1699462 - DNA, 15 bp, Homo sapiens
gtttacatctctact

SEQ ID NO: 1699463 - DNA, 15 bp, Homo sapiens
tttacatctctactt

SEQ ID NO: 1699464 - DNA, 15 bp, Homo sapiens
ttacatctctacttt

SEQ ID NO: 1699465 - DNA, 15 bp, Homo sapiens
tacatctctactttt

SEQ ID NO: 1699466 - DNA, 15 bp, Homo sapiens
acatctctacttttc

SEQ ID NO: 1699467 - DNA, 15 bp, Homo sapiens
catctctacttttca

SEQ ID NO: 1699468 - DNA, 15 bp, Homo sapiens
atctctacttttcac

SEQ ID NO: 1699469 - DNA, 15 bp, Homo sapiens
tctctacttttcaca

SEQ ID NO: 1699470 - DNA, 15 bp, Homo sapiens
ctctacttttcacac

SEQ ID NO: 1699471 - DNA, 15 bp, Homo sapiens
tctacttttcacacc

SEQ ID NO: 1699472 - DNA, 15 bp, Homo sapiens
ctacttttcacacca

SEQ ID NO: 1699473 - DNA, 15 bp, Homo sapiens
tacttttcacaccag

SEQ ID NO: 1699474 - DNA, 15 bp, Homo sapiens
acttttcacaccaga

SEQ ID NO: 1699475 - DNA, 15 bp, Homo sapiens
cttttcacaccagag

SEQ ID NO: 1699476 - DNA, 15 bp, Homo sapiens
ttttcacaccagagc

SEQ ID NO: 1699477 - DNA, 15 bp, Homo sapiens
tttcacaccagagca

SEQ ID NO: 1699478 - DNA, 15 bp, Homo sapiens
ttcacaccagagcat

SEQ ID NO: 1699479 - DNA, 15 bp, Homo sapiens
tcacaccagagcata

SEQ ID NO: 1699480 - DNA, 15 bp, Homo sapiens
cacaccagagcatac

SEQ ID NO: 1699481 - DNA, 15 bp, Homo sapiens
acaccagagcataca

SEQ ID NO: 1699482 - DNA, 15 bp, Homo sapiens
caccagagcatacat

SEQ ID NO: 1699483 - DNA, 15 bp, Homo sapiens
accagagcatacatt

SEQ ID NO: 1699484 - DNA, 15 bp, Homo sapiens
ccagagcatacatta

SEQ ID NO: 1699485 - DNA, 15 bp, Homo sapiens
cagagcatacattag

SEQ ID NO: 1699486 - DNA, 15 bp, Homo sapiens
agagcatacattagg

SEQ ID NO: 1699487 - DNA, 15 bp, Homo sapiens
gagcatacattagga

SEQ ID NO: 1699488 - DNA, 15 bp, Homo sapiens
agcatacattaggat

SEQ ID NO: 1699489 - DNA, 15 bp, Homo sapiens
gcatacattaggatc

SEQ ID NO: 1699490 - DNA, 15 bp, Homo sapiens
catacattaggatct

SEQ ID NO: 1699491 - DNA, 15 bp, Homo sapiens
atacattaggatctt

SEQ ID NO: 1699492 - DNA, 15 bp, Homo sapiens
tacattaggatcttt

SEQ ID NO: 1699493 - DNA, 15 bp, Homo sapiens
acattaggatctttt

SEQ ID NO: 1699494 - DNA, 15 bp, Homo sapiens
cattaggatcttttc

SEQ ID NO: 1699495 - DNA, 15 bp, Homo sapiens
attaggatcttttct

SEQ ID NO: 1699496 - DNA, 15 bp, Homo sapiens
ttaggatcttttctt

SEQ ID NO: 1699497 - DNA, 15 bp, Homo sapiens
taggatcttttcttt

SEQ ID NO: 1699498 - DNA, 15 bp, Homo sapiens
aggatcttttctttc

SEQ ID NO: 1699499 - DNA, 15 bp, Homo sapiens
ggatcttttctttct

SEQ ID NO: 1699500 - DNA, 15 bp, Homo sapiens
gatcttttctttctc

SEQ ID NO: 1699501 - DNA, 15 bp, Homo sapiens
atcttttctttctca

SEQ ID NO: 1699502 - DNA, 15 bp, Homo sapiens
tcttttctttctcag

SEQ ID NO: 1699503 - DNA, 15 bp, Homo sapiens
cttttctttctcaga

SEQ ID NO: 1699504 - DNA, 15 bp, Homo sapiens
ttttctttctcagac

SEQ ID NO: 1699505 - DNA, 15 bp, Homo sapiens
tttctttctcagaca

SEQ ID NO: 1699506 - DNA, 15 bp, Homo sapiens
ttctttctcagacat

SEQ ID NO: 1699507 - DNA, 15 bp, Homo sapiens
tctttctcagacatg

SEQ ID NO: 1699508 - DNA, 15 bp, Homo sapiens
ctttctcagacatga

SEQ ID NO: 1699509 - DNA, 15 bp, Homo sapiens
tttctcagacatgag

SEQ ID NO: 1699510 - DNA, 15 bp, Homo sapiens
ttctcagacatgagg

SEQ ID NO: 1699511 - DNA, 15 bp, Homo sapiens
tctcagacatgaggg

SEQ ID NO: 1699512 - DNA, 15 bp, Homo sapiens
ctcagacatgaggga

SEQ ID NO: 1699513 - DNA, 15 bp, Homo sapiens
tcagacatgagggag

SEQ ID NO: 1699514 - DNA, 15 bp, Homo sapiens
cagacatgagggaga

SEQ ID NO: 1699515 - DNA, 15 bp, Homo sapiens
agacatgagggagaa

SEQ ID NO: 1699516 - DNA, 15 bp, Homo sapiens
gacatgagggagaaa

SEQ ID NO: 1699517 - DNA, 15 bp, Homo sapiens
acatgagggagaaat

SEQ ID NO: 1699518 - DNA, 15 bp, Homo sapiens
catgagggagaaatg

SEQ ID NO: 1699519 - DNA, 15 bp, Homo sapiens
atgagggagaaatgg

SEQ ID NO: 1699520 - DNA, 15 bp, Homo sapiens
tgagggagaaatggg

SEQ ID NO: 1699521 - DNA, 15 bp, Homo sapiens
gagggagaaatgggg

SEQ ID NO: 1699522 - DNA, 15 bp, Homo sapiens
agggagaaatggggg

SEQ ID NO: 1699523 - DNA, 15 bp, Homo sapiens
gggagaaatgggggt

SEQ ID NO: 1699524 - DNA, 15 bp, Homo sapiens
ggagaaatgggggtg

SEQ ID NO: 1699525 - DNA, 15 bp, Homo sapiens
gagaaatgggggtgg

SEQ ID NO: 1699526 - DNA, 15 bp, Homo sapiens
agaaatgggggtggg

SEQ ID NO: 1699527 - DNA, 15 bp, Homo sapiens
gaaatgggggtgggc

SEQ ID NO: 1699528 - DNA, 15 bp, Homo sapiens
aaatgggggtgggct

SEQ ID NO: 1699529 - DNA, 15 bp, Homo sapiens
aatgggggtgggctt

SEQ ID NO: 1699530 - DNA, 15 bp, Homo sapiens
atgggggtgggcttt

SEQ ID NO: 1699531 - DNA, 15 bp, Homo sapiens
tgggggtgggctttc

SEQ ID NO: 1699532 - DNA, 15 bp, Homo sapiens
gggggtgggctttcc

SEQ ID NO: 1699533 - DNA, 15 bp, Homo sapiens
ggggtgggctttccc

SEQ ID NO: 1699534 - DNA, 15 bp, Homo sapiens
gggtgggctttcccc

SEQ ID NO: 1699535 - DNA, 15 bp, Homo sapiens
ggtgggctttcccct

SEQ ID NO: 1699536 - DNA, 15 bp, Homo sapiens
gtgggctttcccctt

SEQ ID NO: 1699537 - DNA, 15 bp, Homo sapiens
tgggctttccccttc

SEQ ID NO: 1699538 - DNA, 15 bp, Homo sapiens
gggctttccccttct

SEQ ID NO: 1699539 - DNA, 15 bp, Homo sapiens
ggctttccccttctt

SEQ ID NO: 1699540 - DNA, 15 bp, Homo sapiens
gctttccccttcttg

SEQ ID NO: 1699541 - DNA, 15 bp, Homo sapiens
ctttccccttcttgc

SEQ ID NO: 1699542 - DNA, 15 bp, Homo sapiens
tttccccttcttgct

SEQ ID NO: 1699543 - DNA, 15 bp, Homo sapiens
ttccccttcttgctg

SEQ ID NO: 1699544 - DNA, 15 bp, Homo sapiens
tccccttcttgctga

SEQ ID NO: 1699545 - DNA, 15 bp, Homo sapiens
ccccttcttgctgaa

SEQ ID NO: 1699546 - DNA, 15 bp, Homo sapiens
cccttcttgctgaac

SEQ ID NO: 1699547 - DNA, 15 bp, Homo sapiens
ccttcttgctgaaca

SEQ ID NO: 1699548 - DNA, 15 bp, Homo sapiens
cttcttgctgaacac

SEQ ID NO: 1699549 - DNA, 15 bp, Homo sapiens
ttcttgctgaacact

SEQ ID NO: 1699550 - DNA, 15 bp, Homo sapiens
tcttgctgaacactt

SEQ ID NO: 1699551 - DNA, 15 bp, Homo sapiens
cttgctgaacacttt

SEQ ID NO: 1699552 - DNA, 15 bp, Homo sapiens
ttgctgaacactttc

SEQ ID NO: 1699553 - DNA, 15 bp, Homo sapiens
tgctgaacactttcc

SEQ ID NO: 1699554 - DNA, 15 bp, Homo sapiens
gctgaacactttcct

SEQ ID NO: 1699555 - DNA, 15 bp, Homo sapiens
ctgaacactttcctc

SEQ ID NO: 1699556 - DNA, 15 bp, Homo sapiens
tgaacactttcctct

SEQ ID NO: 1699557 - DNA, 15 bp, Homo sapiens
gaacactttcctctc

SEQ ID NO: 1699558 - DNA, 15 bp, Homo sapiens
aacactttcctctcc

SEQ ID NO: 1699559 - DNA, 15 bp, Homo sapiens
acactttcctctcct

SEQ ID NO: 1699560 - DNA, 15 bp, Homo sapiens
cactttcctctcctg

SEQ ID NO: 1699561 - DNA, 15 bp, Homo sapiens
actttcctctcctga

SEQ ID NO: 1699562 - DNA, 15 bp, Homo sapiens
ctttcctctcctgag

SEQ ID NO: 1699563 - DNA, 15 bp, Homo sapiens
tttcctctcctgagt

SEQ ID NO: 1699564 - DNA, 15 bp, Homo sapiens
ttcctctcctgagta

SEQ ID NO: 1699565 - DNA, 15 bp, Homo sapiens
tcctctcctgagtat

SEQ ID NO: 1699566 - DNA, 15 bp, Homo sapiens
cctctcctgagtata

SEQ ID NO: 1699567 - DNA, 15 bp, Homo sapiens
ctctcctgagtatat

SEQ ID NO: 1699568 - DNA, 15 bp, Homo sapiens
tctcctgagtatatc

SEQ ID NO: 1699569 - DNA, 15 bp, Homo sapiens
ctcctgagtatatct

SEQ ID NO: 1699570 - DNA, 15 bp, Homo sapiens
tcctgagtatatctg

SEQ ID NO: 1699571 - DNA, 15 bp, Homo sapiens
cctgagtatatctga

SEQ ID NO: 1699572 - DNA, 15 bp, Homo sapiens
ctgagtatatctgat

SEQ ID NO: 1699573 - DNA, 15 bp, Homo sapiens
tgagtatatctgatg

SEQ ID NO: 1699574 - DNA, 15 bp, Homo sapiens
gagtatatctgatga

SEQ ID NO: 1699575 - DNA, 15 bp, Homo sapiens
agtatatctgatgac

SEQ ID NO: 1699576 - DNA, 15 bp, Homo sapiens
gtatatctgatgaca

SEQ ID NO: 1699577 - DNA, 15 bp, Homo sapiens
tatatctgatgacac

SEQ ID NO: 1699578 - DNA, 15 bp, Homo sapiens
atatctgatgacact

SEQ ID NO: 1699579 - DNA, 15 bp, Homo sapiens
tatctgatgacactt

SEQ ID NO: 1699580 - DNA, 15 bp, Homo sapiens
atctgatgacacttg

SEQ ID NO: 1699581 - DNA, 15 bp, Homo sapiens
tctgatgacacttgt

SEQ ID NO: 1699582 - DNA, 15 bp, Homo sapiens
ctgatgacacttgtc

SEQ ID NO: 1699583 - DNA, 15 bp, Homo sapiens
tgatgacacttgtcc

SEQ ID NO: 1699584 - DNA, 15 bp, Homo sapiens
gatgacacttgtcca

SEQ ID NO: 1699585 - DNA, 15 bp, Homo sapiens
atgacacttgtccac

SEQ ID NO: 1699586 - DNA, 15 bp, Homo sapiens
tgacacttgtccact

SEQ ID NO: 1699587 - DNA, 15 bp, Homo sapiens
gacacttgtccactg

SEQ ID NO: 1699588 - DNA, 15 bp, Homo sapiens
acacttgtccactgg

SEQ ID NO: 1699589 - DNA, 15 bp, Homo sapiens
cacttgtccactggg

SEQ ID NO: 1699590 - DNA, 15 bp, Homo sapiens
acttgtccactgggg

SEQ ID NO: 1699591 - DNA, 15 bp, Homo sapiens
cttgtccactggggc

SEQ ID NO: 1699592 - DNA, 15 bp, Homo sapiens
ttgtccactggggct

SEQ ID NO: 1699593 - DNA, 15 bp, Homo sapiens
tgtccactggggcta

SEQ ID NO: 1699594 - DNA, 15 bp, Homo sapiens
gtccactggggctat

SEQ ID NO: 1699595 - DNA, 15 bp, Homo sapiens
tccactggggctata

SEQ ID NO: 1699596 - DNA, 15 bp, Homo sapiens
ccactggggctatag

SEQ ID NO: 1699597 - DNA, 15 bp, Homo sapiens
cactggggctataga

SEQ ID NO: 1699598 - DNA, 15 bp, Homo sapiens
actggggctatagaa

SEQ ID NO: 1699599 - DNA, 15 bp, Homo sapiens
ctggggctatagaag

SEQ ID NO: 1699600 - DNA, 15 bp, Homo sapiens
tggggctatagaagc

SEQ ID NO: 1699601 - DNA, 15 bp, Homo sapiens
ggggctatagaagca

SEQ ID NO: 1699602 - DNA, 15 bp, Homo sapiens
gggctatagaagcaa

SEQ ID NO: 1699603 - DNA, 15 bp, Homo sapiens
ggctatagaagcaat

SEQ ID NO: 1699604 - DNA, 15 bp, Homo sapiens
gctatagaagcaatt

SEQ ID NO: 1699605 - DNA, 15 bp, Homo sapiens
ctatagaagcaattc

SEQ ID NO: 1699606 - DNA, 15 bp, Homo sapiens
tatagaagcaattct

SEQ ID NO: 1699607 - DNA, 15 bp, Homo sapiens
atagaagcaattcta

SEQ ID NO: 1699608 - DNA, 15 bp, Homo sapiens
tagaagcaattctac

SEQ ID NO: 1699609 - DNA, 15 bp, Homo sapiens
agaagcaattctaca

SEQ ID NO: 1699610 - DNA, 15 bp, Homo sapiens
gaagcaattctacat

SEQ ID NO: 1699611 - DNA, 15 bp, Homo sapiens
aagcaattctacata

SEQ ID NO: 1699612 - DNA, 15 bp, Homo sapiens
agcaattctacatag

SEQ ID NO: 1699613 - DNA, 15 bp, Homo sapiens
gcaattctacatagc

SEQ ID NO: 1699614 - DNA, 15 bp, Homo sapiens
caattctacatagca

SEQ ID NO: 1699615 - DNA, 15 bp, Homo sapiens
aattctacatagcag

SEQ ID NO: 1699616 - DNA, 15 bp, Homo sapiens
attctacatagcagg

SEQ ID NO: 1699617 - DNA, 15 bp, Homo sapiens
ttctacatagcaggt

SEQ ID NO: 1699618 - DNA, 15 bp, Homo sapiens
tctacatagcaggtg

SEQ ID NO: 1699619 - DNA, 15 bp, Homo sapiens
ctacatagcaggtga

SEQ ID NO: 1699620 - DNA, 15 bp, Homo sapiens
tacatagcaggtgat

SEQ ID NO: 1699621 - DNA, 15 bp, Homo sapiens
acatagcaggtgatt

SEQ ID NO: 1699622 - DNA, 15 bp, Homo sapiens
catagcaggtgattt

SEQ ID NO: 1699623 - DNA, 15 bp, Homo sapiens
atagcaggtgatttc

SEQ ID NO: 1699624 - DNA, 15 bp, Homo sapiens
tagcaggtgatttcc

SEQ ID NO: 1699625 - DNA, 15 bp, Homo sapiens
agcaggtgatttcct

SEQ ID NO: 1699626 - DNA, 15 bp, Homo sapiens
gcaggtgatttcctt

SEQ ID NO: 1699627 - DNA, 15 bp, Homo sapiens
caggtgatttccttc

SEQ ID NO: 1699628 - DNA, 15 bp, Homo sapiens
aggtgatttccttcc

SEQ ID NO: 1699629 - DNA, 15 bp, Homo sapiens
ggtgatttccttcct

SEQ ID NO: 1699630 - DNA, 15 bp, Homo sapiens
gtgatttccttcctt

SEQ ID NO: 1699631 - DNA, 15 bp, Homo sapiens
tgatttccttccttc

SEQ ID NO: 1699632 - DNA, 15 bp, Homo sapiens
gatttccttccttca

SEQ ID NO: 1699633 - DNA, 15 bp, Homo sapiens
atttccttccttcat

SEQ ID NO: 1699634 - DNA, 15 bp, Homo sapiens
tttccttccttcata

SEQ ID NO: 1699635 - DNA, 15 bp, Homo sapiens
ttccttccttcatac

SEQ ID NO: 1699636 - DNA, 15 bp, Homo sapiens
tccttccttcatact

SEQ ID NO: 1699637 - DNA, 15 bp, Homo sapiens
ccttccttcatactc

SEQ ID NO: 1699638 - DNA, 15 bp, Homo sapiens
cttccttcatactcg

SEQ ID NO: 1699639 - DNA, 15 bp, Homo sapiens
ttccttcatactcgt

SEQ ID NO: 1699640 - DNA, 15 bp, Homo sapiens
tccttcatactcgtt

SEQ ID NO: 1699641 - DNA, 15 bp, Homo sapiens
ccttcatactcgttt

SEQ ID NO: 1699642 - DNA, 15 bp, Homo sapiens
cttcatactcgtttc

SEQ ID NO: 1699643 - DNA, 15 bp, Homo sapiens
ttcatactcgtttct

SEQ ID NO: 1699644 - DNA, 15 bp, Homo sapiens
tcatactcgtttcta

SEQ ID NO: 1699645 - DNA, 15 bp, Homo sapiens
catactcgtttctaa

SEQ ID NO: 1699646 - DNA, 15 bp, Homo sapiens
atactcgtttctaat

SEQ ID NO: 1699647 - DNA, 15 bp, Homo sapiens
tactcgtttctaatt

SEQ ID NO: 1699648 - DNA, 15 bp, Homo sapiens
actcgtttctaattt

SEQ ID NO: 1699649 - DNA, 15 bp, Homo sapiens
ctcgtttctaatttt

SEQ ID NO: 1699650 - DNA, 15 bp, Homo sapiens
tcgtttctaatttta

SEQ ID NO: 1699651 - DNA, 15 bp, Homo sapiens
cgtttctaattttag

SEQ ID NO: 1699652 - DNA, 15 bp, Homo sapiens
gtttctaattttagt

SEQ ID NO: 1699653 - DNA, 15 bp, Homo sapiens
tttctaattttagta

SEQ ID NO: 1699654 - DNA, 15 bp, Homo sapiens
ttctaattttagtac

SEQ ID NO: 1699655 - DNA, 15 bp, Homo sapiens
tctaattttagtaca

SEQ ID NO: 1699656 - DNA, 15 bp, Homo sapiens
ctaattttagtacat

SEQ ID NO: 1699657 - DNA, 15 bp, Homo sapiens
taattttagtacatc

SEQ ID NO: 1699658 - DNA, 15 bp, Homo sapiens
aattttagtacatcc

SEQ ID NO: 1699659 - DNA, 15 bp, Homo sapiens
attttagtacatccc

SEQ ID NO: 1699660 - DNA, 15 bp, Homo sapiens
ttttagtacatccca

SEQ ID NO: 1699661 - DNA, 15 bp, Homo sapiens
tttagtacatcccac

SEQ ID NO: 1699662 - DNA, 15 bp, Homo sapiens
ttagtacatcccacc

SEQ ID NO: 1699663 - DNA, 15 bp, Homo sapiens
tagtacatcccaccc

SEQ ID NO: 1699664 - DNA, 15 bp, Homo sapiens
agtacatcccacccc

SEQ ID NO: 1699665 - DNA, 15 bp, Homo sapiens
gtacatcccacccca

SEQ ID NO: 1699666 - DNA, 15 bp, Homo sapiens
tacatcccaccccag

SEQ ID NO: 1699667 - DNA, 15 bp, Homo sapiens
acatcccaccccagc

SEQ ID NO: 1699668 - DNA, 15 bp, Homo sapiens
catcccaccccagcc

SEQ ID NO: 1699669 - DNA, 15 bp, Homo sapiens
atcccaccccagcca

SEQ ID NO: 1699670 - DNA, 15 bp, Homo sapiens
tcccaccccagccac

SEQ ID NO: 1699671 - DNA, 15 bp, Homo sapiens
cccaccccagccact

SEQ ID NO: 1699672 - DNA, 15 bp, Homo sapiens
ccaccccagccacta

SEQ ID NO: 1699673 - DNA, 15 bp, Homo sapiens
caccccagccactag

SEQ ID NO: 1699674 - DNA, 15 bp, Homo sapiens
accccagccactagc

SEQ ID NO: 1699675 - DNA, 15 bp, Homo sapiens
ccccagccactagcc

SEQ ID NO: 1699676 - DNA, 15 bp, Homo sapiens
cccagccactagcca

SEQ ID NO: 1699677 - DNA, 15 bp, Homo sapiens
ccagccactagccac

SEQ ID NO: 1699678 - DNA, 15 bp, Homo sapiens
gccactagccacatt

SEQ ID NO: 1699679 - DNA, 15 bp, Homo sapiens
ccactagccacattg

SEQ ID NO: 1699680 - DNA, 15 bp, Homo sapiens
cactagccacattgc

SEQ ID NO: 1699681 - DNA, 15 bp, Homo sapiens
actagccacattgcc

SEQ ID NO: 1699682 - DNA, 15 bp, Homo sapiens
ctagccacattgcct

SEQ ID NO: 1699683 - DNA, 15 bp, Homo sapiens
tagccacattgcctg

SEQ ID NO: 1699684 - DNA, 15 bp, Homo sapiens
agccacattgcctgt

SEQ ID NO: 1699685 - DNA, 15 bp, Homo sapiens
gccacattgcctgtc

SEQ ID NO: 1699686 - DNA, 15 bp, Homo sapiens
ccacattgcctgtcc

SEQ ID NO: 1699687 - DNA, 15 bp, Homo sapiens
cacattgcctgtcct

SEQ ID NO: 1699688 - DNA, 15 bp, Homo sapiens
acattgcctgtcctg

SEQ ID NO: 1699689 - DNA, 15 bp, Homo sapiens
cattgcctgtcctgg

SEQ ID NO: 1699690 - DNA, 15 bp, Homo sapiens
attgcctgtcctgga

SEQ ID NO: 1699691 - DNA, 15 bp, Homo sapiens
ttgcctgtcctggaa

SEQ ID NO: 1699692 - DNA, 15 bp, Homo sapiens
tgcctgtcctggaag

SEQ ID NO: 1699693 - DNA, 15 bp, Homo sapiens
gcctgtcctggaagt

SEQ ID NO: 1699694 - DNA, 15 bp, Homo sapiens
cctgtcctggaagtt

SEQ ID NO: 1699695 - DNA, 15 bp, Homo sapiens
ctgtcctggaagttg

SEQ ID NO: 1699696 - DNA, 15 bp, Homo sapiens
tgtcctggaagttga

SEQ ID NO: 1699697 - DNA, 15 bp, Homo sapiens
gtcctggaagttgaa

SEQ ID NO: 1699698 - DNA, 15 bp, Homo sapiens
tcctggaagttgaaa

SEQ ID NO: 1699699 - DNA, 15 bp, Homo sapiens
cctggaagttgaaaa

SEQ ID NO: 1699700 - DNA, 15 bp, Homo sapiens
ctggaagttgaaaaa

SEQ ID NO: 1699701 - DNA, 15 bp, Homo sapiens
tggaagttgaaaaat

SEQ ID NO: 1699702 - DNA, 15 bp, Homo sapiens
ggaagttgaaaaata

SEQ ID NO: 1699703 - DNA, 15 bp, Homo sapiens
gaagttgaaaaataa

SEQ ID NO: 1699704 - DNA, 15 bp, Homo sapiens
aagttgaaaaataaa

SEQ ID NO: 1699705 - DNA, 15 bp, Homo sapiens
agttgaaaaataaac

SEQ ID NO: 1699706 - DNA, 15 bp, Homo sapiens
gttgaaaaataaaca

SEQ ID NO: 1699707 - DNA, 15 bp, Homo sapiens
ttgaaaaataaacat

SEQ ID NO: 1699708 - DNA, 15 bp, Homo sapiens
tgaaaaataaacatt

SEQ ID NO: 1699709 - DNA, 15 bp, Homo sapiens
gaaaaataaacattt

SEQ ID NO: 1699710 - DNA, 15 bp, Homo sapiens
aaaataaacatttat

SEQ ID NO: 1699711 - DNA, 15 bp, Homo sapiens
aaataaacatttata

SEQ ID NO: 1699712 - DNA, 15 bp, Homo sapiens
aataaacatttataa

SEQ ID NO: 1699713 - DNA, 15 bp, Homo sapiens
ataaacatttataat

SEQ ID NO: 1699714 - DNA, 15 bp, Homo sapiens
taaacatttataatt

SEQ ID NO: 1699715 - DNA, 15 bp, Homo sapiens
aaacatttataattg

SEQ ID NO: 1699716 - DNA, 15 bp, Homo sapiens
aacatttataattga

SEQ ID NO: 1699717 - DNA, 15 bp, Homo sapiens
acatttataattgaa

SEQ ID NO: 1699718 - DNA, 15 bp, Homo sapiens
catttataattgaat

SEQ ID NO: 1699719 - DNA, 15 bp, Homo sapiens
atttataattgaatt

SEQ ID NO: 1699720 - DNA, 15 bp, Homo sapiens
tttataattgaattg

SEQ ID NO: 1699721 - DNA, 15 bp, Homo sapiens
ttataattgaattgt

SEQ ID NO: 1699722 - DNA, 15 bp, Homo sapiens
tataattgaattgtg

SEQ ID NO: 1699723 - DNA, 15 bp, Homo sapiens
ataattgaattgtgg

SEQ ID NO: 1699724 - DNA, 15 bp, Homo sapiens
taattgaattgtgga

SEQ ID NO: 1699725 - DNA, 15 bp, Homo sapiens
aattgaattgtggac

SEQ ID NO: 1699726 - DNA, 15 bp, Homo sapiens
attgaattgtggact

SEQ ID NO: 1699727 - DNA, 15 bp, Homo sapiens
ttgaattgtggactg

SEQ ID NO: 1699728 - DNA, 15 bp, Homo sapiens
tgaattgtggactgc

SEQ ID NO: 1699729 - DNA, 15 bp, Homo sapiens
gaattgtggactgcc

SEQ ID NO: 1699730 - DNA, 15 bp, Homo sapiens
aattgtggactgcca

SEQ ID NO: 1699731 - DNA, 15 bp, Homo sapiens
attgtggactgccaa

SEQ ID NO: 1699732 - DNA, 15 bp, Homo sapiens
ttgtggactgccaat

SEQ ID NO: 1699733 - DNA, 15 bp, Homo sapiens
tgtggactgccaatg

SEQ ID NO: 1699734 - DNA, 15 bp, Homo sapiens
gtggactgccaatga

SEQ ID NO: 1699735 - DNA, 15 bp, Homo sapiens
tggactgccaatgag

SEQ ID NO: 1699736 - DNA, 15 bp, Homo sapiens
ggactgccaatgagt

SEQ ID NO: 1699737 - DNA, 15 bp, Homo sapiens
gactgccaatgagtg

SEQ ID NO: 1699738 - DNA, 15 bp, Homo sapiens
actgccaatgagtgc

SEQ ID NO: 1699739 - DNA, 15 bp, Homo sapiens
ctgccaatgagtgca

SEQ ID NO: 1699740 - DNA, 15 bp, Homo sapiens
tgccaatgagtgcaa

SEQ ID NO: 1699741 - DNA, 15 bp, Homo sapiens
gccaatgagtgcaaa

SEQ ID NO: 1699742 - DNA, 15 bp, Homo sapiens
ccaatgagtgcaaat

SEQ ID NO: 1699743 - DNA, 15 bp, Homo sapiens
caatgagtgcaaatc

SEQ ID NO: 1699744 - DNA, 15 bp, Homo sapiens
aatgagtgcaaatct

SEQ ID NO: 1699745 - DNA, 15 bp, Homo sapiens
atgagtgcaaatcta

SEQ ID NO: 1699746 - DNA, 15 bp, Homo sapiens
tgagtgcaaatctat

SEQ ID NO: 1699747 - DNA, 15 bp, Homo sapiens
gagtgcaaatctatt

SEQ ID NO: 1699748 - DNA, 15 bp, Homo sapiens
agtgcaaatctatta

SEQ ID NO: 1699749 - DNA, 15 bp, Homo sapiens
gtgcaaatctattat

SEQ ID NO: 1699750 - DNA, 15 bp, Homo sapiens
tgcaaatctattatt

SEQ ID NO: 1699751 - DNA, 15 bp, Homo sapiens
gcaaatctattatta

SEQ ID NO: 1699752 - DNA, 15 bp, Homo sapiens
caaatctattattaa

SEQ ID NO: 1699753 - DNA, 15 bp, Homo sapiens
aaatctattattaag

SEQ ID NO: 1699754 - DNA, 15 bp, Homo sapiens
aatctattattaaga

SEQ ID NO: 1699755 - DNA, 15 bp, Homo sapiens
atctattattaagat

SEQ ID NO: 1699756 - DNA, 15 bp, Homo sapiens
tctattattaagata

SEQ ID NO: 1699757 - DNA, 15 bp, Homo sapiens
ctattattaagatat

SEQ ID NO: 1699758 - DNA, 15 bp, Homo sapiens
tattattaagatata

SEQ ID NO: 1699759 - DNA, 15 bp, Homo sapiens
attattaagatatat

SEQ ID NO: 1699760 - DNA, 15 bp, Homo sapiens
ttattaagatatatc

SEQ ID NO: 1699761 - DNA, 15 bp, Homo sapiens
tattaagatatatca

SEQ ID NO: 1699762 - DNA, 15 bp, Homo sapiens
attaagatatatcag

SEQ ID NO: 1699763 - DNA, 15 bp, Homo sapiens
ttaagatatatcagt

SEQ ID NO: 1699764 - DNA, 15 bp, Homo sapiens
taagatatatcagtt

SEQ ID NO: 1699765 - DNA, 15 bp, Homo sapiens
aagatatatcagttt

SEQ ID NO: 1699766 - DNA, 15 bp, Homo sapiens
agatatatcagttta

SEQ ID NO: 1699767 - DNA, 15 bp, Homo sapiens
gatatatcagtttag

SEQ ID NO: 1699768 - DNA, 15 bp, Homo sapiens
atatatcagtttaga

SEQ ID NO: 1699769 - DNA, 15 bp, Homo sapiens
tatatcagtttagaa

SEQ ID NO: 1699770 - DNA, 15 bp, Homo sapiens
atatcagtttagaag

SEQ ID NO: 1699771 - DNA, 15 bp, Homo sapiens
tatcagtttagaagc

SEQ ID NO: 1699772 - DNA, 15 bp, Homo sapiens
atcagtttagaagct

SEQ ID NO: 1699773 - DNA, 15 bp, Homo sapiens
tcagtttagaagctt

SEQ ID NO: 1699774 - DNA, 15 bp, Homo sapiens
cagtttagaagctta

SEQ ID NO: 1699775 - DNA, 15 bp, Homo sapiens
agtttagaagcttat

SEQ ID NO: 1699776 - DNA, 15 bp, Homo sapiens
gtttagaagcttatg

SEQ ID NO: 1699777 - DNA, 15 bp, Homo sapiens
tttagaagcttatga

SEQ ID NO: 1699778 - DNA, 15 bp, Homo sapiens
ttagaagcttatgaa

SEQ ID NO: 1699779 - DNA, 15 bp, Homo sapiens
tagaagcttatgaac

SEQ ID NO: 1699780 - DNA, 15 bp, Homo sapiens
agaagcttatgaact

SEQ ID NO: 1699781 - DNA, 15 bp, Homo sapiens
gaagcttatgaactc

SEQ ID NO: 1699782 - DNA, 15 bp, Homo sapiens
aagcttatgaactcg

SEQ ID NO: 1699783 - DNA, 15 bp, Homo sapiens
agcttatgaactcgt

SEQ ID NO: 1699784 - DNA, 15 bp, Homo sapiens
gcttatgaactcgtt

SEQ ID NO: 1699785 - DNA, 15 bp, Homo sapiens
cttatgaactcgttc

SEQ ID NO: 1699786 - DNA, 15 bp, Homo sapiens
ttatgaactcgttcc

SEQ ID NO: 1699787 - DNA, 15 bp, Homo sapiens
tatgaactcgttcca

SEQ ID NO: 1699788 - DNA, 15 bp, Homo sapiens
atgaactcgttccat

SEQ ID NO: 1699789 - DNA, 15 bp, Homo sapiens
tgaactcgttccatc

SEQ ID NO: 1699790 - DNA, 15 bp, Homo sapiens
gaactcgttccatca

SEQ ID NO: 1699791 - DNA, 15 bp, Homo sapiens
aactcgttccatcaa

SEQ ID NO: 1699792 - DNA, 15 bp, Homo sapiens
actcgttccatcaaa

SEQ ID NO: 1699793 - DNA, 15 bp, Homo sapiens
ctcgttccatcaaaa

SEQ ID NO: 1699794 - DNA, 15 bp, Homo sapiens
tcgttccatcaaaag

SEQ ID NO: 1699795 - DNA, 15 bp, Homo sapiens
cgttccatcaaaagg

SEQ ID NO: 1699796 - DNA, 15 bp, Homo sapiens
gttccatcaaaaggc

SEQ ID NO: 1699797 - DNA, 15 bp, Homo sapiens
ttccatcaaaaggct

SEQ ID NO: 1699798 - DNA, 15 bp, Homo sapiens
tccatcaaaaggcta

SEQ ID NO: 1699799 - DNA, 15 bp, Homo sapiens
ccatcaaaaggctaa

SEQ ID NO: 1699800 - DNA, 15 bp, Homo sapiens
catcaaaaggctaaa

SEQ ID NO: 1699801 - DNA, 15 bp, Homo sapiens
atcaaaaggctaaaa

SEQ ID NO: 1699802 - DNA, 15 bp, Homo sapiens
tcaaaaggctaaaaa

SEQ ID NO: 1699803 - DNA, 15 bp, Homo sapiens
caaaaggctaaaaac

SEQ ID NO: 1699804 - DNA, 15 bp, Homo sapiens
aaaaggctaaaaact

SEQ ID NO: 1699805 - DNA, 15 bp, Homo sapiens
aaaggctaaaaactc

SEQ ID NO: 1699806 - DNA, 15 bp, Homo sapiens
aaggctaaaaactcc

SEQ ID NO: 1699807 - DNA, 15 bp, Homo sapiens
aggctaaaaactccc

SEQ ID NO: 1699808 - DNA, 15 bp, Homo sapiens
ggctaaaaactccca

SEQ ID NO: 1699809 - DNA, 15 bp, Homo sapiens
gctaaaaactcccag

SEQ ID NO: 1699810 - DNA, 15 bp, Homo sapiens
ctaaaaactcccaga

SEQ ID NO: 1699811 - DNA, 15 bp, Homo sapiens
taaaaactcccagaa

SEQ ID NO: 1699812 - DNA, 15 bp, Homo sapiens
aaaaactcccagaag

SEQ ID NO: 1699813 - DNA, 15 bp, Homo sapiens
aaaactcccagaagg

SEQ ID NO: 1699814 - DNA, 15 bp, Homo sapiens
aaactcccagaaggt

SEQ ID NO: 1699815 - DNA, 15 bp, Homo sapiens
aactcccagaaggtt

SEQ ID NO: 1699816 - DNA, 15 bp, Homo sapiens
actcccagaaggtta

SEQ ID NO: 1699817 - DNA, 15 bp, Homo sapiens
ctcccagaaggttat

SEQ ID NO: 1699818 - DNA, 15 bp, Homo sapiens
tcccagaaggttatc

SEQ ID NO: 1699819 - DNA, 15 bp, Homo sapiens
cccagaaggttatct

SEQ ID NO: 1699820 - DNA, 15 bp, Homo sapiens
ccagaaggttatctt

SEQ ID NO: 1699821 - DNA, 15 bp, Homo sapiens
cagaaggttatcttc

SEQ ID NO: 1699822 - DNA, 15 bp, Homo sapiens
agaaggttatcttct

SEQ ID NO: 1699823 - DNA, 15 bp, Homo sapiens
gaaggttatcttctc

SEQ ID NO: 1699824 - DNA, 15 bp, Homo sapiens
aaggttatcttctca

SEQ ID NO: 1699825 - DNA, 15 bp, Homo sapiens
aggttatcttctcac

SEQ ID NO: 1699826 - DNA, 15 bp, Homo sapiens
ggttatcttctcact

SEQ ID NO: 1699827 - DNA, 15 bp, Homo sapiens
gttatcttctcactg

SEQ ID NO: 1699828 - DNA, 15 bp, Homo sapiens
ttatcttctcactga

SEQ ID NO: 1699829 - DNA, 15 bp, Homo sapiens
tatcttctcactgac

SEQ ID NO: 1699830 - DNA, 15 bp, Homo sapiens
atcttctcactgaca

SEQ ID NO: 1699831 - DNA, 15 bp, Homo sapiens
tcttctcactgacag

SEQ ID NO: 1699832 - DNA, 15 bp, Homo sapiens
cttctcactgacagc

SEQ ID NO: 1699833 - DNA, 15 bp, Homo sapiens
ttctcactgacagct

SEQ ID NO: 1699834 - DNA, 15 bp, Homo sapiens
tctcactgacagctg

SEQ ID NO: 1699835 - DNA, 15 bp, Homo sapiens
ctcactgacagctgc

SEQ ID NO: 1699836 - DNA, 15 bp, Homo sapiens
tcactgacagctgct

SEQ ID NO: 1699837 - DNA, 15 bp, Homo sapiens
cactgacagctgctt

SEQ ID NO: 1699838 - DNA, 15 bp, Homo sapiens
actgacagctgcttt

SEQ ID NO: 1699839 - DNA, 15 bp, Homo sapiens
ctgacagctgctttc

SEQ ID NO: 1699840 - DNA, 15 bp, Homo sapiens
tgacagctgctttca

SEQ ID NO: 1699841 - DNA, 15 bp, Homo sapiens
gacagctgctttcag

SEQ ID NO: 1699842 - DNA, 15 bp, Homo sapiens
acagctgctttcagg

SEQ ID NO: 1699843 - DNA, 15 bp, Homo sapiens
cagctgctttcaggt

SEQ ID NO: 1699844 - DNA, 15 bp, Homo sapiens
agctgctttcaggtg

SEQ ID NO: 1699845 - DNA, 15 bp, Homo sapiens
gctgctttcaggtgc

SEQ ID NO: 1699846 - DNA, 15 bp, Homo sapiens
ctgctttcaggtgct

SEQ ID NO: 1699847 - DNA, 15 bp, Homo sapiens
tgctttcaggtgctg

SEQ ID NO: 1699848 - DNA, 15 bp, Homo sapiens
gctttcaggtgctgg

SEQ ID NO: 1699849 - DNA, 15 bp, Homo sapiens
ctttcaggtgctgga

SEQ ID NO: 1699850 - DNA, 15 bp, Homo sapiens
tttcaggtgctggac

SEQ ID NO: 1699851 - DNA, 15 bp, Homo sapiens
ttcaggtgctggaca

SEQ ID NO: 1699852 - DNA, 15 bp, Homo sapiens
tcaggtgctggacaa

SEQ ID NO: 1699853 - DNA, 15 bp, Homo sapiens
caggtgctggacaag

SEQ ID NO: 1699854 - DNA, 15 bp, Homo sapiens
aggtgctggacaagt

SEQ ID NO: 1699855 - DNA, 15 bp, Homo sapiens
ggtgctggacaagtg

SEQ ID NO: 1699856 - DNA, 15 bp, Homo sapiens
gtgctggacaagtgg

SEQ ID NO: 1699857 - DNA, 15 bp, Homo sapiens
tgctggacaagtggc

SEQ ID NO: 1699858 - DNA, 15 bp, Homo sapiens
gctggacaagtggct

SEQ ID NO: 1699859 - DNA, 15 bp, Homo sapiens
ctggacaagtggctt

SEQ ID NO: 1699860 - DNA, 15 bp, Homo sapiens
tggacaagtggcttt

SEQ ID NO: 1699861 - DNA, 15 bp, Homo sapiens
ggacaagtggctttt

SEQ ID NO: 1699862 - DNA, 15 bp, Homo sapiens
gacaagtggcttttt

SEQ ID NO: 1699863 - DNA, 15 bp, Homo sapiens
acaagtggctttttc

SEQ ID NO: 1699864 - DNA, 15 bp, Homo sapiens
caagtggctttttct

SEQ ID NO: 1699865 - DNA, 15 bp, Homo sapiens
aagtggctttttctt

SEQ ID NO: 1699866 - DNA, 15 bp, Homo sapiens
agtggctttttcttc

SEQ ID NO: 1699867 - DNA, 15 bp, Homo sapiens
gtggctttttcttcc

SEQ ID NO: 1699868 - DNA, 15 bp, Homo sapiens
tggctttttcttcct

SEQ ID NO: 1699869 - DNA, 15 bp, Homo sapiens
ggctttttcttcctc

SEQ ID NO: 1699870 - DNA, 15 bp, Homo sapiens
gctttttcttcctca

SEQ ID NO: 1699871 - DNA, 15 bp, Homo sapiens
ctttttcttcctcat

SEQ ID NO: 1699872 - DNA, 15 bp, Homo sapiens
tttttcttcctcatc

SEQ ID NO: 1699873 - DNA, 15 bp, Homo sapiens
ttttcttcctcatct

SEQ ID NO: 1699874 - DNA, 15 bp, Homo sapiens
tttcttcctcatctc

SEQ ID NO: 1699875 - DNA, 15 bp, Homo sapiens
ttcttcctcatctct

SEQ ID NO: 1699876 - DNA, 15 bp, Homo sapiens
tcttcctcatctcta

SEQ ID NO: 1699877 - DNA, 15 bp, Homo sapiens
cttcctcatctctaa

SEQ ID NO: 1699878 - DNA, 15 bp, Homo sapiens
ttcctcatctctaac

SEQ ID NO: 1699879 - DNA, 15 bp, Homo sapiens
tcctcatctctaaca

SEQ ID NO: 1699880 - DNA, 15 bp, Homo sapiens
cctcatctctaacaa

SEQ ID NO: 1699881 - DNA, 15 bp, Homo sapiens
ctcatctctaacaat

SEQ ID NO: 1699882 - DNA, 15 bp, Homo sapiens
tcatctctaacaatg

SEQ ID NO: 1699883 - DNA, 15 bp, Homo sapiens
catctctaacaatgg

SEQ ID NO: 1699884 - DNA, 15 bp, Homo sapiens
atctctaacaatggg

SEQ ID NO: 1699885 - DNA, 15 bp, Homo sapiens
tctctaacaatggga

SEQ ID NO: 1699886 - DNA, 15 bp, Homo sapiens
ctctaacaatgggat

SEQ ID NO: 1699887 - DNA, 15 bp, Homo sapiens
tctaacaatgggatg

SEQ ID NO: 1699888 - DNA, 15 bp, Homo sapiens
ctaacaatgggatgc

SEQ ID NO: 1699889 - DNA, 15 bp, Homo sapiens
taacaatgggatgca

SEQ ID NO: 1699890 - DNA, 15 bp, Homo sapiens
aacaatgggatgcaa

SEQ ID NO: 1699891 - DNA, 15 bp, Homo sapiens
acaatgggatgcaat

SEQ ID NO: 1699892 - DNA, 15 bp, Homo sapiens
caatgggatgcaata

SEQ ID NO: 1699893 - DNA, 15 bp, Homo sapiens
aatgggatgcaatag

SEQ ID NO: 1699894 - DNA, 15 bp, Homo sapiens
atgggatgcaatagc

SEQ ID NO: 1699895 - DNA, 15 bp, Homo sapiens
tgggatgcaatagct

SEQ ID NO: 1699896 - DNA, 15 bp, Homo sapiens
gggatgcaatagctc

SEQ ID NO: 1699897 - DNA, 15 bp, Homo sapiens
ggatgcaatagctca

SEQ ID NO: 1699898 - DNA, 15 bp, Homo sapiens
gatgcaatagctcat

SEQ ID NO: 1699899 - DNA, 15 bp, Homo sapiens
atgcaatagctcata

SEQ ID NO: 1699900 - DNA, 15 bp, Homo sapiens
tgcaatagctcatat

SEQ ID NO: 1699901 - DNA, 15 bp, Homo sapiens
gcaatagctcatatc

SEQ ID NO: 1699902 - DNA, 15 bp, Homo sapiens
caatagctcatatct

SEQ ID NO: 1699903 - DNA, 15 bp, Homo sapiens
aatagctcatatctt

SEQ ID NO: 1699904 - DNA, 15 bp, Homo sapiens
atagctcatatcttg

SEQ ID NO: 1699905 - DNA, 15 bp, Homo sapiens
tagctcatatcttgc

SEQ ID NO: 1699906 - DNA, 15 bp, Homo sapiens
agctcatatcttgcc

SEQ ID NO: 1699907 - DNA, 15 bp, Homo sapiens
gctcatatcttgccc

SEQ ID NO: 1699908 - DNA, 15 bp, Homo sapiens
ctcatatcttgccca

SEQ ID NO: 1699909 - DNA, 15 bp, Homo sapiens
tcatatcttgcccat

SEQ ID NO: 1699910 - DNA, 15 bp, Homo sapiens
catatcttgcccatc

SEQ ID NO: 1699911 - DNA, 15 bp, Homo sapiens
atatcttgcccatct

SEQ ID NO: 1699912 - DNA, 15 bp, Homo sapiens
tatcttgcccatctc

SEQ ID NO: 1699913 - DNA, 15 bp, Homo sapiens
atcttgcccatctca

SEQ ID NO: 1699914 - DNA, 15 bp, Homo sapiens
tcttgcccatctcaa

SEQ ID NO: 1699915 - DNA, 15 bp, Homo sapiens
cttgcccatctcaaa

SEQ ID NO: 1699916 - DNA, 15 bp, Homo sapiens
ttgcccatctcaaag

SEQ ID NO: 1699917 - DNA, 15 bp, Homo sapiens
tgcccatctcaaagg

SEQ ID NO: 1699918 - DNA, 15 bp, Homo sapiens
gcccatctcaaaggc

SEQ ID NO: 1699919 - DNA, 15 bp, Homo sapiens
cccatctcaaaggca

SEQ ID NO: 1699920 - DNA, 15 bp, Homo sapiens
ccatctcaaaggcaa

SEQ ID NO: 1699921 - DNA, 15 bp, Homo sapiens
catctcaaaggcaac

SEQ ID NO: 1699922 - DNA, 15 bp, Homo sapiens
atctcaaaggcaact

SEQ ID NO: 1699923 - DNA, 15 bp, Homo sapiens
tctcaaaggcaacta

SEQ ID NO: 1699924 - DNA, 15 bp, Homo sapiens
ctcaaaggcaactaa

SEQ ID NO: 1699925 - DNA, 15 bp, Homo sapiens
tcaaaggcaactaaa

SEQ ID NO: 1699926 - DNA, 15 bp, Homo sapiens
caaaggcaactaaaa

SEQ ID NO: 1699927 - DNA, 15 bp, Homo sapiens
aaaggcaactaaaaa

SEQ ID NO: 1699928 - DNA, 15 bp, Homo sapiens
aaggcaactaaaaat

SEQ ID NO: 1699929 - DNA, 15 bp, Homo sapiens
aggcaactaaaaatt

SEQ ID NO: 1699930 - DNA, 15 bp, Homo sapiens
ggcaactaaaaattt

SEQ ID NO: 1699931 - DNA, 15 bp, Homo sapiens
gcaactaaaaattta

SEQ ID NO: 1699932 - DNA, 15 bp, Homo sapiens
caactaaaaatttaa

SEQ ID NO: 1699933 - DNA, 15 bp, Homo sapiens
aactaaaaatttaac

SEQ ID NO: 1699934 - DNA, 15 bp, Homo sapiens
actaaaaatttaact

SEQ ID NO: 1699935 - DNA, 15 bp, Homo sapiens
ctaaaaatttaacta

SEQ ID NO: 1699936 - DNA, 15 bp, Homo sapiens
taaaaatttaactat

SEQ ID NO: 1699937 - DNA, 15 bp, Homo sapiens
aaaaatttaactatt

SEQ ID NO: 1699938 - DNA, 15 bp, Homo sapiens
aaaatttaactattt

SEQ ID NO: 1699939 - DNA, 15 bp, Homo sapiens
aaatttaactattta

SEQ ID NO: 1699940 - DNA, 15 bp, Homo sapiens
aatttaactatttaa

SEQ ID NO: 1699941 - DNA, 15 bp, Homo sapiens
atttaactatttaaa

SEQ ID NO: 1699942 - DNA, 15 bp, Homo sapiens
tttaactatttaaat

SEQ ID NO: 1699943 - DNA, 15 bp, Homo sapiens
ttaactatttaaatt

SEQ ID NO: 1699944 - DNA, 15 bp, Homo sapiens
taactatttaaattg

SEQ ID NO: 1699945 - DNA, 15 bp, Homo sapiens
aactatttaaattga

SEQ ID NO: 1699946 - DNA, 15 bp, Homo sapiens
actatttaaattgaa

SEQ ID NO: 1699947 - DNA, 15 bp, Homo sapiens
ctatttaaattgaat

SEQ ID NO: 1699948 - DNA, 15 bp, Homo sapiens
tatttaaattgaatt

SEQ ID NO: 1699949 - DNA, 15 bp, Homo sapiens
atttaaattgaatta

SEQ ID NO: 1699950 - DNA, 15 bp, Homo sapiens
tttaaattgaattat

SEQ ID NO: 1699951 - DNA, 15 bp, Homo sapiens
ttaaattgaattatt

SEQ ID NO: 1699952 - DNA, 15 bp, Homo sapiens
taaattgaattattt

SEQ ID NO: 1699953 - DNA, 15 bp, Homo sapiens
aaattgaattattta

SEQ ID NO: 1699954 - DNA, 15 bp, Homo sapiens
aattgaattatttaa

SEQ ID NO: 1699955 - DNA, 15 bp, Homo sapiens
attgaattatttaaa

SEQ ID NO: 1699956 - DNA, 15 bp, Homo sapiens
ttgaattatttaaat

SEQ ID NO: 1699957 - DNA, 15 bp, Homo sapiens
tgaattatttaaatt

SEQ ID NO: 1699958 - DNA, 15 bp, Homo sapiens
gaattatttaaattt

SEQ ID NO: 1699959 - DNA, 15 bp, Homo sapiens
aattatttaaatttt

SEQ ID NO: 1699960 - DNA, 15 bp, Homo sapiens
attatttaaattttt

SEQ ID NO: 1699961 - DNA, 15 bp, Homo sapiens
ttatttaaatttttg

SEQ ID NO: 1699962 - DNA, 15 bp, Homo sapiens
tatttaaatttttgt

SEQ ID NO: 1699963 - DNA, 15 bp, Homo sapiens
atttaaatttttgtg

SEQ ID NO: 1699964 - DNA, 15 bp, Homo sapiens
tttaaatttttgtga

SEQ ID NO: 1699965 - DNA, 15 bp, Homo sapiens
ttaaatttttgtgaa

SEQ ID NO: 1699966 - DNA, 15 bp, Homo sapiens
taaatttttgtgaac

SEQ ID NO: 1699967 - DNA, 15 bp, Homo sapiens
aaatttttgtgaaca

SEQ ID NO: 1699968 - DNA, 15 bp, Homo sapiens
aatttttgtgaacat

SEQ ID NO: 1699969 - DNA, 15 bp, Homo sapiens
atttttgtgaacatg

SEQ ID NO: 1699970 - DNA, 15 bp, Homo sapiens
tttttgtgaacatgg

SEQ ID NO: 1699971 - DNA, 15 bp, Homo sapiens
ttttgtgaacatggg

SEQ ID NO: 1699972 - DNA, 15 bp, Homo sapiens
tttgtgaacatgggt

SEQ ID NO: 1699973 - DNA, 15 bp, Homo sapiens
ttgtgaacatgggtt

SEQ ID NO: 1699974 - DNA, 15 bp, Homo sapiens
tgtgaacatgggttt

SEQ ID NO: 1699975 - DNA, 15 bp, Homo sapiens
gtgaacatgggtttt

SEQ ID NO: 1699976 - DNA, 15 bp, Homo sapiens
tgaacatgggttttt

SEQ ID NO: 1699977 - DNA, 15 bp, Homo sapiens
gaacatgggttttta

SEQ ID NO: 1699978 - DNA, 15 bp, Homo sapiens
aacatgggtttttaa

SEQ ID NO: 1699979 - DNA, 15 bp, Homo sapiens
acatgggtttttaaa

SEQ ID NO: 1699980 - DNA, 15 bp, Homo sapiens
catgggtttttaaat

SEQ ID NO: 1699981 - DNA, 15 bp, Homo sapiens
atgggtttttaaatg

SEQ ID NO: 1699982 - DNA, 15 bp, Homo sapiens
tgggtttttaaatgc

SEQ ID NO: 1699983 - DNA, 15 bp, Homo sapiens
gggtttttaaatgcc

SEQ ID NO: 1699984 - DNA, 15 bp, Homo sapiens
ggtttttaaatgcca

SEQ ID NO: 1699985 - DNA, 15 bp, Homo sapiens
gtttttaaatgccag

SEQ ID NO: 1699986 - DNA, 15 bp, Homo sapiens
tttttaaatgccaga

SEQ ID NO: 1699987 - DNA, 15 bp, Homo sapiens
ttttaaatgccagag

SEQ ID NO: 1699988 - DNA, 15 bp, Homo sapiens
tttaaatgccagagg

SEQ ID NO: 1699989 - DNA, 15 bp, Homo sapiens
ttaaatgccagaggc

SEQ ID NO: 1699990 - DNA, 15 bp, Homo sapiens
taaatgccagaggct

SEQ ID NO: 1699991 - DNA, 15 bp, Homo sapiens
aaatgccagaggcta

SEQ ID NO: 1699992 - DNA, 15 bp, Homo sapiens
aatgccagaggctac

SEQ ID NO: 1699993 - DNA, 15 bp, Homo sapiens
atgccagaggctaca

SEQ ID NO: 1699994 - DNA, 15 bp, Homo sapiens
tgccagaggctacag

SEQ ID NO: 1699995 - DNA, 15 bp, Homo sapiens
gccagaggctacaga

SEQ ID NO: 1699996 - DNA, 15 bp, Homo sapiens
ccagaggctacagag

SEQ ID NO: 1699997 - DNA, 15 bp, Homo sapiens
cagaggctacagaga

SEQ ID NO: 1699998 - DNA, 15 bp, Homo sapiens
agaggctacagagat

SEQ ID NO: 1699999 - DNA, 15 bp, Homo sapiens
gaggctacagagata

SEQ ID NO: 1700000 - DNA, 15 bp, Homo sapiens
aggctacagagatac

SEQ ID NO: 1700001 - DNA, 15 bp, Homo sapiens
ggctacagagataca

SEQ ID NO: 1700002 - DNA, 15 bp, Homo sapiens
gctacagagatacaa

SEQ ID NO: 1700003 - DNA, 15 bp, Homo sapiens
ctacagagatacaag

SEQ ID NO: 1700004 - DNA, 15 bp, Homo sapiens
tacagagatacaagg

SEQ ID NO: 1700005 - DNA, 15 bp, Homo sapiens
acagagatacaagga

SEQ ID NO: 1700006 - DNA, 15 bp, Homo sapiens
cagagatacaaggag

SEQ ID NO: 1700007 - DNA, 15 bp, Homo sapiens
agagatacaaggagc

SEQ ID NO: 1700008 - DNA, 15 bp, Homo sapiens
gagatacaaggagcg

SEQ ID NO: 1700009 - DNA, 15 bp, Homo sapiens
agatacaaggagcgg

SEQ ID NO: 1700010 - DNA, 15 bp, Homo sapiens
gatacaaggagcggc

SEQ ID NO: 1700011 - DNA, 15 bp, Homo sapiens
atacaaggagcggct

SEQ ID NO: 1700012 - DNA, 15 bp, Homo sapiens
tacaaggagcggctt

SEQ ID NO: 1700013 - DNA, 15 bp, Homo sapiens
acaaggagcggcttt

SEQ ID NO: 1700014 - DNA, 15 bp, Homo sapiens
caaggagcggctttc

SEQ ID NO: 1700015 - DNA, 15 bp, Homo sapiens
aaggagcggctttca

SEQ ID NO: 1700016 - DNA, 15 bp, Homo sapiens
aggagcggctttcaa

SEQ ID NO: 1700017 - DNA, 15 bp, Homo sapiens
ggagcggctttcaaa

SEQ ID NO: 1700018 - DNA, 15 bp, Homo sapiens
gagcggctttcaaag

SEQ ID NO: 1700019 - DNA, 15 bp, Homo sapiens
agcggctttcaaaga

SEQ ID NO: 1700020 - DNA, 15 bp, Homo sapiens
gcggctttcaaagaa

SEQ ID NO: 1700021 - DNA, 15 bp, Homo sapiens
cggctttcaaagaag

SEQ ID NO: 1700022 - DNA, 15 bp, Homo sapiens
ggctttcaaagaagt

SEQ ID NO: 1700023 - DNA, 15 bp, Homo sapiens
gctttcaaagaagtt

SEQ ID NO: 1700024 - DNA, 15 bp, Homo sapiens
ctttcaaagaagtta

SEQ ID NO: 1700025 - DNA, 15 bp, Homo sapiens
tttcaaagaagttac

SEQ ID NO: 1700026 - DNA, 15 bp, Homo sapiens
ttcaaagaagttaca

SEQ ID NO: 1700027 - DNA, 15 bp, Homo sapiens
tcaaagaagttacag

SEQ ID NO: 1700028 - DNA, 15 bp, Homo sapiens
caaagaagttacaga

SEQ ID NO: 1700029 - DNA, 15 bp, Homo sapiens
aaagaagttacagag

SEQ ID NO: 1700030 - DNA, 15 bp, Homo sapiens
aagaagttacagagc

SEQ ID NO: 1700031 - DNA, 15 bp, Homo sapiens
agaagttacagagct

SEQ ID NO: 1700032 - DNA, 15 bp, Homo sapiens
gaagttacagagcta

SEQ ID NO: 1700033 - DNA, 15 bp, Homo sapiens
aagttacagagctag

SEQ ID NO: 1700034 - DNA, 15 bp, Homo sapiens
agttacagagctaga

SEQ ID NO: 1700035 - DNA, 15 bp, Homo sapiens
gttacagagctagat

SEQ ID NO: 1700036 - DNA, 15 bp, Homo sapiens
ttacagagctagata

SEQ ID NO: 1700037 - DNA, 15 bp, Homo sapiens
tacagagctagatag

SEQ ID NO: 1700038 - DNA, 15 bp, Homo sapiens
acagagctagataga

SEQ ID NO: 1700039 - DNA, 15 bp, Homo sapiens
cagagctagatagaa

SEQ ID NO: 1700040 - DNA, 15 bp, Homo sapiens
agagctagatagaat

SEQ ID NO: 1700041 - DNA, 15 bp, Homo sapiens
gagctagatagaatt

SEQ ID NO: 1700042 - DNA, 15 bp, Homo sapiens
agctagatagaattt

SEQ ID NO: 1700043 - DNA, 15 bp, Homo sapiens
gctagatagaatttc

SEQ ID NO: 1700044 - DNA, 15 bp, Homo sapiens
ctagatagaatttct

SEQ ID NO: 1700045 - DNA, 15 bp, Homo sapiens
tagatagaatttctc

SEQ ID NO: 1700046 - DNA, 15 bp, Homo sapiens
agatagaatttctca

SEQ ID NO: 1700047 - DNA, 15 bp, Homo sapiens
gatagaatttctcat

SEQ ID NO: 1700048 - DNA, 15 bp, Homo sapiens
atagaatttctcatc

SEQ ID NO: 1700049 - DNA, 15 bp, Homo sapiens
tagaatttctcatct

SEQ ID NO: 1700050 - DNA, 15 bp, Homo sapiens
agaatttctcatctc

SEQ ID NO: 1700051 - DNA, 15 bp, Homo sapiens
gaatttctcatctct

SEQ ID NO: 1700052 - DNA, 15 bp, Homo sapiens
aatttctcatctcta

SEQ ID NO: 1700053 - DNA, 15 bp, Homo sapiens
atttctcatctctac

SEQ ID NO: 1700054 - DNA, 15 bp, Homo sapiens
tttctcatctctaca

SEQ ID NO: 1700055 - DNA, 15 bp, Homo sapiens
ttctcatctctacaa

SEQ ID NO: 1700056 - DNA, 15 bp, Homo sapiens
tctcatctctacaaa

SEQ ID NO: 1700057 - DNA, 15 bp, Homo sapiens
ctcatctctacaaag

SEQ ID NO: 1700058 - DNA, 15 bp, Homo sapiens
tcatctctacaaaga

SEQ ID NO: 1700059 - DNA, 15 bp, Homo sapiens
catctctacaaagaa

SEQ ID NO: 1700060 - DNA, 15 bp, Homo sapiens
atctctacaaagaaa

SEQ ID NO: 1700061 - DNA, 15 bp, Homo sapiens
tctctacaaagaaaa

SEQ ID NO: 1700062 - DNA, 15 bp, Homo sapiens
ctctacaaagaaaat

SEQ ID NO: 1700063 - DNA, 15 bp, Homo sapiens
tctacaaagaaaata

SEQ ID NO: 1700064 - DNA, 15 bp, Homo sapiens
ctacaaagaaaataa

SEQ ID NO: 1700065 - DNA, 15 bp, Homo sapiens
tacaaagaaaataaa

SEQ ID NO: 1700066 - DNA, 15 bp, Homo sapiens
caaagaaaataaact

SEQ ID NO: 1700067 - DNA, 15 bp, Homo sapiens
aaagaaaataaactt

SEQ ID NO: 1700068 - DNA, 15 bp, Homo sapiens
aagaaaataaacttg

SEQ ID NO: 1700069 - DNA, 15 bp, Homo sapiens
agaaaataaacttgg

SEQ ID NO: 1700070 - DNA, 15 bp, Homo sapiens
gaaaataaacttgga

SEQ ID NO: 1700071 - DNA, 15 bp, Homo sapiens
aaaataaacttggaa

SEQ ID NO: 1700072 - DNA, 15 bp, Homo sapiens
aaataaacttggaag

SEQ ID NO: 1700073 - DNA, 15 bp, Homo sapiens
aataaacttggaagt

SEQ ID NO: 1700074 - DNA, 15 bp, Homo sapiens
ataaacttggaagtc

SEQ ID NO: 1700075 - DNA, 15 bp, Homo sapiens
taaacttggaagtca

SEQ ID NO: 1700076 - DNA, 15 bp, Homo sapiens
aaacttggaagtcaa

SEQ ID NO: 1700077 - DNA, 15 bp, Homo sapiens
aacttggaagtcaaa

SEQ ID NO: 1700078 - DNA, 15 bp, Homo sapiens
acttggaagtcaaag

SEQ ID NO: 1700079 - DNA, 15 bp, Homo sapiens
cttggaagtcaaagc

SEQ ID NO: 1700080 - DNA, 15 bp, Homo sapiens
ttggaagtcaaagca

SEQ ID NO: 1700081 - DNA, 15 bp, Homo sapiens
tggaagtcaaagcat

SEQ ID NO: 1700082 - DNA, 15 bp, Homo sapiens
ggaagtcaaagcatc

SEQ ID NO: 1700083 - DNA, 15 bp, Homo sapiens
gaagtcaaagcatca

SEQ ID NO: 1700084 - DNA, 15 bp, Homo sapiens
aagtcaaagcatcat

SEQ ID NO: 1700085 - DNA, 15 bp, Homo sapiens
agtcaaagcatcatg

SEQ ID NO: 1700086 - DNA, 15 bp, Homo sapiens
gtcaaagcatcatgt

SEQ ID NO: 1700087 - DNA, 15 bp, Homo sapiens
tcaaagcatcatgtt

SEQ ID NO: 1700088 - DNA, 15 bp, Homo sapiens
caaagcatcatgtta

SEQ ID NO: 1700089 - DNA, 15 bp, Homo sapiens
aaagcatcatgttat

SEQ ID NO: 1700090 - DNA, 15 bp, Homo sapiens
aagcatcatgttatc

SEQ ID NO: 1700091 - DNA, 15 bp, Homo sapiens
agcatcatgttatct

SEQ ID NO: 1700092 - DNA, 15 bp, Homo sapiens
gcatcatgttatctg

SEQ ID NO: 1700093 - DNA, 15 bp, Homo sapiens
catcatgttatctgc

SEQ ID NO: 1700094 - DNA, 15 bp, Homo sapiens
atcatgttatctgcc

SEQ ID NO: 1700095 - DNA, 15 bp, Homo sapiens
tcatgttatctgcca

SEQ ID NO: 1700096 - DNA, 15 bp, Homo sapiens
catgttatctgccat

SEQ ID NO: 1700097 - DNA, 15 bp, Homo sapiens
atgttatctgccata

SEQ ID NO: 1700098 - DNA, 15 bp, Homo sapiens
tgttatctgccataa

SEQ ID NO: 1700099 - DNA, 15 bp, Homo sapiens
gttatctgccataac

SEQ ID NO: 1700100 - DNA, 15 bp, Homo sapiens
ttatctgccataaca

SEQ ID NO: 1700101 - DNA, 15 bp, Homo sapiens
tatctgccataacaa

SEQ ID NO: 1700102 - DNA, 15 bp, Homo sapiens
atctgccataacaat

SEQ ID NO: 1700103 - DNA, 15 bp, Homo sapiens
tctgccataacaata

SEQ ID NO: 1700104 - DNA, 15 bp, Homo sapiens
ctgccataacaatat

SEQ ID NO: 1700105 - DNA, 15 bp, Homo sapiens
tgccataacaatatt

SEQ ID NO: 1700106 - DNA, 15 bp, Homo sapiens
gccataacaatatta

SEQ ID NO: 1700107 - DNA, 15 bp, Homo sapiens
ccataacaatattaa

SEQ ID NO: 1700108 - DNA, 15 bp, Homo sapiens
cataacaatattaaa

SEQ ID NO: 1700109 - DNA, 15 bp, Homo sapiens
ataacaatattaaaa

SEQ ID NO: 1700110 - DNA, 15 bp, Homo sapiens
taacaatattaaaat

SEQ ID NO: 1700111 - DNA, 15 bp, Homo sapiens
aacaatattaaaatg

SEQ ID NO: 1700112 - DNA, 15 bp, Homo sapiens
acaatattaaaatga

SEQ ID NO: 1700113 - DNA, 15 bp, Homo sapiens
caatattaaaatgac

SEQ ID NO: 1700114 - DNA, 15 bp, Homo sapiens
aatattaaaatgact

SEQ ID NO: 1700115 - DNA, 15 bp, Homo sapiens
atattaaaatgactt

SEQ ID NO: 1700116 - DNA, 15 bp, Homo sapiens
tattaaaatgactta

SEQ ID NO: 1700117 - DNA, 15 bp, Homo sapiens
attaaaatgacttat

SEQ ID NO: 1700118 - DNA, 15 bp, Homo sapiens
ttaaaatgacttatc

SEQ ID NO: 1700119 - DNA, 15 bp, Homo sapiens
taaaatgacttatca

SEQ ID NO: 1700120 - DNA, 15 bp, Homo sapiens
aaaatgacttatcac

SEQ ID NO: 1700121 - DNA, 15 bp, Homo sapiens
aaatgacttatcacc

SEQ ID NO: 1700122 - DNA, 15 bp, Homo sapiens
aatgacttatcacca

SEQ ID NO: 1700123 - DNA, 15 bp, Homo sapiens
atgacttatcaccaa

SEQ ID NO: 1700124 - DNA, 15 bp, Homo sapiens
tgacttatcaccaat

SEQ ID NO: 1700125 - DNA, 15 bp, Homo sapiens
gacttatcaccaatg

SEQ ID NO: 1700126 - DNA, 15 bp, Homo sapiens
acttatcaccaatgc

SEQ ID NO: 1700127 - DNA, 15 bp, Homo sapiens
cttatcaccaatgcg

SEQ ID NO: 1700128 - DNA, 15 bp, Homo sapiens
ttatcaccaatgcga

SEQ ID NO: 1700129 - DNA, 15 bp, Homo sapiens
tatcaccaatgcgac

SEQ ID NO: 1700130 - DNA, 15 bp, Homo sapiens
atcaccaatgcgact

SEQ ID NO: 1700131 - DNA, 15 bp, Homo sapiens
tcaccaatgcgactt

SEQ ID NO: 1700132 - DNA, 15 bp, Homo sapiens
caccaatgcgacttt

SEQ ID NO: 1700133 - DNA, 15 bp, Homo sapiens
accaatgcgactttt

SEQ ID NO: 1700134 - DNA, 15 bp, Homo sapiens
ccaatgcgacttttc

SEQ ID NO: 1700135 - DNA, 15 bp, Homo sapiens
caatgcgacttttct

SEQ ID NO: 1700136 - DNA, 15 bp, Homo sapiens
aatgcgacttttcta

SEQ ID NO: 1700137 - DNA, 15 bp, Homo sapiens
atgcgacttttctaa

SEQ ID NO: 1700138 - DNA, 15 bp, Homo sapiens
tgcgacttttctaaa

SEQ ID NO: 1700139 - DNA, 15 bp, Homo sapiens
gcgacttttctaaaa

SEQ ID NO: 1700140 - DNA, 15 bp, Homo sapiens
cgacttttctaaaaa

SEQ ID NO: 1700141 - DNA, 15 bp, Homo sapiens
gacttttctaaaaaa

SEQ ID NO: 1700142 - DNA, 15 bp, Homo sapiens
acttttctaaaaaat

SEQ ID NO: 1700143 - DNA, 15 bp, Homo sapiens
cttttctaaaaaatt

SEQ ID NO: 1700144 - DNA, 15 bp, Homo sapiens
ttttctaaaaaattg

SEQ ID NO: 1700145 - DNA, 15 bp, Homo sapiens
tttctaaaaaattgt

SEQ ID NO: 1700146 - DNA, 15 bp, Homo sapiens
ttctaaaaaattgtt

SEQ ID NO: 1700147 - DNA, 15 bp, Homo sapiens
tctaaaaaattgtta

SEQ ID NO: 1700148 - DNA, 15 bp, Homo sapiens
ctaaaaaattgttac

SEQ ID NO: 1700149 - DNA, 15 bp, Homo sapiens
taaaaaattgttact

SEQ ID NO: 1700150 - DNA, 15 bp, Homo sapiens
aaaaaattgttactg

SEQ ID NO: 1700151 - DNA, 15 bp, Homo sapiens
aaaaattgttactga

SEQ ID NO: 1700152 - DNA, 15 bp, Homo sapiens
aaaattgttactgat

SEQ ID NO: 1700153 - DNA, 15 bp, Homo sapiens
aaattgttactgatt

SEQ ID NO: 1700154 - DNA, 15 bp, Homo sapiens
aattgttactgattg

SEQ ID NO: 1700155 - DNA, 15 bp, Homo sapiens
attgttactgattga

SEQ ID NO: 1700156 - DNA, 15 bp, Homo sapiens
ttgttactgattgaa

SEQ ID NO: 1700157 - DNA, 15 bp, Homo sapiens
tgttactgattgaaa

SEQ ID NO: 1700158 - DNA, 15 bp, Homo sapiens
gttactgattgaaaa

SEQ ID NO: 1700159 - DNA, 15 bp, Homo sapiens
ttactgattgaaaaa

SEQ ID NO: 1700160 - DNA, 15 bp, Homo sapiens
tactgattgaaaaaa

SEQ ID NO: 1700161 - DNA, 15 bp, Homo sapiens
actgattgaaaaaat

SEQ ID NO: 1700162 - DNA, 15 bp, Homo sapiens
ctgattgaaaaaatg

SEQ ID NO: 1700163 - DNA, 15 bp, Homo sapiens
tgattgaaaaaatgt

SEQ ID NO: 1700164 - DNA, 15 bp, Homo sapiens
gattgaaaaaatgtt

SEQ ID NO: 1700165 - DNA, 15 bp, Homo sapiens
attgaaaaaatgtta

SEQ ID NO: 1700166 - DNA, 15 bp, Homo sapiens
ttgaaaaaatgttac

SEQ ID NO: 1700167 - DNA, 15 bp, Homo sapiens
tgaaaaaatgttact

SEQ ID NO: 1700168 - DNA, 15 bp, Homo sapiens
gaaaaaatgttactg

SEQ ID NO: 1700169 - DNA, 15 bp, Homo sapiens
aaaaaatgttactga

SEQ ID NO: 1700170 - DNA, 15 bp, Homo sapiens
aaaaatgttactgat

SEQ ID NO: 1700171 - DNA, 15 bp, Homo sapiens
aaaatgttactgatt

SEQ ID NO: 1700172 - DNA, 15 bp, Homo sapiens
aaatgttactgattg

SEQ ID NO: 1700173 - DNA, 15 bp, Homo sapiens
aatgttactgattgg

SEQ ID NO: 1700174 - DNA, 15 bp, Homo sapiens
atgttactgattggt

SEQ ID NO: 1700175 - DNA, 15 bp, Homo sapiens
tgttactgattggtt

SEQ ID NO: 1700176 - DNA, 15 bp, Homo sapiens
gttactgattggttg

SEQ ID NO: 1700177 - DNA, 15 bp, Homo sapiens
ttactgattggttga

SEQ ID NO: 1700178 - DNA, 15 bp, Homo sapiens
tactgattggttgag

SEQ ID NO: 1700179 - DNA, 15 bp, Homo sapiens
actgattggttgagg

SEQ ID NO: 1700180 - DNA, 15 bp, Homo sapiens
ctgattggttgagga

SEQ ID NO: 1700181 - DNA, 15 bp, Homo sapiens
tgattggttgaggaa

SEQ ID NO: 1700182 - DNA, 15 bp, Homo sapiens
gattggttgaggaac

SEQ ID NO: 1700183 - DNA, 15 bp, Homo sapiens
attggttgaggaaca

SEQ ID NO: 1700184 - DNA, 15 bp, Homo sapiens
ttggttgaggaacag

SEQ ID NO: 1700185 - DNA, 15 bp, Homo sapiens
tggttgaggaacagt

SEQ ID NO: 1700186 - DNA, 15 bp, Homo sapiens
ggttgaggaacagtc

SEQ ID NO: 1700187 - DNA, 15 bp, Homo sapiens
gttgaggaacagtcc

SEQ ID NO: 1700188 - DNA, 15 bp, Homo sapiens
ttgaggaacagtcct

SEQ ID NO: 1700189 - DNA, 15 bp, Homo sapiens
tgaggaacagtcctg

SEQ ID NO: 1700190 - DNA, 15 bp, Homo sapiens
gaggaacagtcctgg

SEQ ID NO: 1700191 - DNA, 15 bp, Homo sapiens
aggaacagtcctgga

SEQ ID NO: 1700192 - DNA, 15 bp, Homo sapiens
ggaacagtcctggat

SEQ ID NO: 1700193 - DNA, 15 bp, Homo sapiens
gaacagtcctggatt

SEQ ID NO: 1700194 - DNA, 15 bp, Homo sapiens
aacagtcctggattc

SEQ ID NO: 1700195 - DNA, 15 bp, Homo sapiens
acagtcctggattct

SEQ ID NO: 1700196 - DNA, 15 bp, Homo sapiens
cagtcctggattctt

SEQ ID NO: 1700197 - DNA, 15 bp, Homo sapiens
agtcctggattcttg

SEQ ID NO: 1700198 - DNA, 15 bp, Homo sapiens
gtcctggattcttgc

SEQ ID NO: 1700199 - DNA, 15 bp, Homo sapiens
tcctggattcttgct

SEQ ID NO: 1700200 - DNA, 15 bp, Homo sapiens
cctggattcttgctg

SEQ ID NO: 1700201 - DNA, 15 bp, Homo sapiens
ctggattcttgctgc

SEQ ID NO: 1700202 - DNA, 15 bp, Homo sapiens
tggattcttgctgcc

SEQ ID NO: 1700203 - DNA, 15 bp, Homo sapiens
ggattcttgctgccc

SEQ ID NO: 1700204 - DNA, 15 bp, Homo sapiens
gattcttgctgccct

SEQ ID NO: 1700205 - DNA, 15 bp, Homo sapiens
attcttgctgccctt

SEQ ID NO: 1700206 - DNA, 15 bp, Homo sapiens
ttcttgctgccctta

SEQ ID NO: 1700207 - DNA, 15 bp, Homo sapiens
tcttgctgcccttaa

SEQ ID NO: 1700208 - DNA, 15 bp, Homo sapiens
cttgctgcccttaat

SEQ ID NO: 1700209 - DNA, 15 bp, Homo sapiens
ttgctgcccttaatt

SEQ ID NO: 1700210 - DNA, 15 bp, Homo sapiens
tgctgcccttaattt

SEQ ID NO: 1700211 - DNA, 15 bp, Homo sapiens
gctgcccttaatttg

SEQ ID NO: 1700212 - DNA, 15 bp, Homo sapiens
ctgcccttaatttgc

SEQ ID NO: 1700213 - DNA, 15 bp, Homo sapiens
tgcccttaatttgct

SEQ ID NO: 1700214 - DNA, 15 bp, Homo sapiens
gcccttaatttgctg

SEQ ID NO: 1700215 - DNA, 15 bp, Homo sapiens
cccttaatttgctgt

SEQ ID NO: 1700216 - DNA, 15 bp, Homo sapiens
ccttaatttgctgtg

SEQ ID NO: 1700217 - DNA, 15 bp, Homo sapiens
cttaatttgctgtgt

SEQ ID NO: 1700218 - DNA, 15 bp, Homo sapiens
ttaatttgctgtgta

SEQ ID NO: 1700219 - DNA, 15 bp, Homo sapiens
taatttgctgtgtaa

SEQ ID NO: 1700220 - DNA, 15 bp, Homo sapiens
aatttgctgtgtaac

SEQ ID NO: 1700221 - DNA, 15 bp, Homo sapiens
atttgctgtgtaact

SEQ ID NO: 1700222 - DNA, 15 bp, Homo sapiens
tttgctgtgtaacta

SEQ ID NO: 1700223 - DNA, 15 bp, Homo sapiens
ttgctgtgtaactac

SEQ ID NO: 1700224 - DNA, 15 bp, Homo sapiens
tgctgtgtaactaca

SEQ ID NO: 1700225 - DNA, 15 bp, Homo sapiens
gctgtgtaactacat

SEQ ID NO: 1700226 - DNA, 15 bp, Homo sapiens
ctgtgtaactacatg

SEQ ID NO: 1700227 - DNA, 15 bp, Homo sapiens
tgtgtaactacatgc

SEQ ID NO: 1700228 - DNA, 15 bp, Homo sapiens
gtgtaactacatgca

SEQ ID NO: 1700229 - DNA, 15 bp, Homo sapiens
tgtaactacatgcat

SEQ ID NO: 1700230 - DNA, 15 bp, Homo sapiens
gtaactacatgcatg

SEQ ID NO: 1700231 - DNA, 15 bp, Homo sapiens
taactacatgcatgt

SEQ ID NO: 1700232 - DNA, 15 bp, Homo sapiens
aactacatgcatgtt

SEQ ID NO: 1700233 - DNA, 15 bp, Homo sapiens
actacatgcatgttg

SEQ ID NO: 1700234 - DNA, 15 bp, Homo sapiens
ctacatgcatgttgc

SEQ ID NO: 1700235 - DNA, 15 bp, Homo sapiens
tacatgcatgttgcc

SEQ ID NO: 1700236 - DNA, 15 bp, Homo sapiens
acatgcatgttgcct

SEQ ID NO: 1700237 - DNA, 15 bp, Homo sapiens
catgcatgttgcctt

SEQ ID NO: 1700238 - DNA, 15 bp, Homo sapiens
atgcatgttgcctta

SEQ ID NO: 1700239 - DNA, 15 bp, Homo sapiens
tgcatgttgccttac

SEQ ID NO: 1700240 - DNA, 15 bp, Homo sapiens
gcatgttgccttacc

SEQ ID NO: 1700241 - DNA, 15 bp, Homo sapiens
catgttgccttacct

SEQ ID NO: 1700242 - DNA, 15 bp, Homo sapiens
atgttgccttacctt

SEQ ID NO: 1700243 - DNA, 15 bp, Homo sapiens
tgttgccttaccttc

SEQ ID NO: 1700244 - DNA, 15 bp, Homo sapiens
gttgccttaccttcc

SEQ ID NO: 1700245 - DNA, 15 bp, Homo sapiens
ttgccttaccttcct

SEQ ID NO: 1700246 - DNA, 15 bp, Homo sapiens
tgccttaccttcctg

SEQ ID NO: 1700247 - DNA, 15 bp, Homo sapiens
gccttaccttcctgg

SEQ ID NO: 1700248 - DNA, 15 bp, Homo sapiens
ccttaccttcctggg

SEQ ID NO: 1700249 - DNA, 15 bp, Homo sapiens
cttaccttcctgggc

SEQ ID NO: 1700250 - DNA, 15 bp, Homo sapiens
ttaccttcctgggct

SEQ ID NO: 1700251 - DNA, 15 bp, Homo sapiens
taccttcctgggctg

SEQ ID NO: 1700252 - DNA, 15 bp, Homo sapiens
accttcctgggctga

SEQ ID NO: 1700253 - DNA, 15 bp, Homo sapiens
ccttcctgggctgaa

SEQ ID NO: 1700254 - DNA, 15 bp, Homo sapiens
cttcctgggctgaag

SEQ ID NO: 1700255 - DNA, 15 bp, Homo sapiens
ttcctgggctgaaga

SEQ ID NO: 1700256 - DNA, 15 bp, Homo sapiens
tcctgggctgaagac

SEQ ID NO: 1700257 - DNA, 15 bp, Homo sapiens
cctgggctgaagact

SEQ ID NO: 1700258 - DNA, 15 bp, Homo sapiens
ctgggctgaagactc

SEQ ID NO: 1700259 - DNA, 15 bp, Homo sapiens
tgggctgaagactcc

SEQ ID NO: 1700260 - DNA, 15 bp, Homo sapiens
gggctgaagactcct

SEQ ID NO: 1700261 - DNA, 15 bp, Homo sapiens
ggctgaagactcctc

SEQ ID NO: 1700262 - DNA, 15 bp, Homo sapiens
gctgaagactcctca

SEQ ID NO: 1700263 - DNA, 15 bp, Homo sapiens
ctgaagactcctcac

SEQ ID NO: 1700264 - DNA, 15 bp, Homo sapiens
tgaagactcctcacc

SEQ ID NO: 1700265 - DNA, 15 bp, Homo sapiens
gaagactcctcacct

SEQ ID NO: 1700266 - DNA, 15 bp, Homo sapiens
aagactcctcacctg

SEQ ID NO: 1700267 - DNA, 15 bp, Homo sapiens
agactcctcacctgt

SEQ ID NO: 1700268 - DNA, 15 bp, Homo sapiens
gactcctcacctgta

SEQ ID NO: 1700269 - DNA, 15 bp, Homo sapiens
actcctcacctgtat

SEQ ID NO: 1700270 - DNA, 15 bp, Homo sapiens
ctcctcacctgtatg

SEQ ID NO: 1700271 - DNA, 15 bp, Homo sapiens
tcctcacctgtatgt

SEQ ID NO: 1700272 - DNA, 15 bp, Homo sapiens
cctcacctgtatgtg

SEQ ID NO: 1700273 - DNA, 15 bp, Homo sapiens
ctcacctgtatgtga

SEQ ID NO: 1700274 - DNA, 15 bp, Homo sapiens
tcacctgtatgtgag

SEQ ID NO: 1700275 - DNA, 15 bp, Homo sapiens
cacctgtatgtgagg

SEQ ID NO: 1700276 - DNA, 15 bp, Homo sapiens
acctgtatgtgagga

SEQ ID NO: 1700277 - DNA, 15 bp, Homo sapiens
cctgtatgtgaggag

SEQ ID NO: 1700278 - DNA, 15 bp, Homo sapiens
ctgtatgtgaggagg

SEQ ID NO: 1700279 - DNA, 15 bp, Homo sapiens
tgtatgtgaggaggt

SEQ ID NO: 1700280 - DNA, 15 bp, Homo sapiens
gtatgtgaggaggtc

SEQ ID NO: 1700281 - DNA, 15 bp, Homo sapiens
tatgtgaggaggtca

SEQ ID NO: 1700282 - DNA, 15 bp, Homo sapiens
atgtgaggaggtcag

SEQ ID NO: 1700283 - DNA, 15 bp, Homo sapiens
tgtgaggaggtcaga

SEQ ID NO: 1700284 - DNA, 15 bp, Homo sapiens
gtgaggaggtcagac

SEQ ID NO: 1700285 - DNA, 15 bp, Homo sapiens
tgaggaggtcagact

SEQ ID NO: 1700286 - DNA, 15 bp, Homo sapiens
gaggaggtcagactg

SEQ ID NO: 1700287 - DNA, 15 bp, Homo sapiens
aggaggtcagactga

SEQ ID NO: 1700288 - DNA, 15 bp, Homo sapiens
ggaggtcagactgac

SEQ ID NO: 1700289 - DNA, 15 bp, Homo sapiens
gaggtcagactgact

SEQ ID NO: 1700290 - DNA, 15 bp, Homo sapiens
aggtcagactgactg

SEQ ID NO: 1700291 - DNA, 15 bp, Homo sapiens
ggtcagactgactga

SEQ ID NO: 1700292 - DNA, 15 bp, Homo sapiens
gtcagactgactgag

SEQ ID NO: 1700293 - DNA, 15 bp, Homo sapiens
tcagactgactgagc

SEQ ID NO: 1700294 - DNA, 15 bp, Homo sapiens
cagactgactgagct

SEQ ID NO: 1700295 - DNA, 15 bp, Homo sapiens
agactgactgagctc

SEQ ID NO: 1700296 - DNA, 15 bp, Homo sapiens
gactgactgagctct

SEQ ID NO: 1700297 - DNA, 15 bp, Homo sapiens
actgactgagctctg

SEQ ID NO: 1700298 - DNA, 15 bp, Homo sapiens
ctgactgagctctga

SEQ ID NO: 1700299 - DNA, 15 bp, Homo sapiens
tgactgagctctgac

SEQ ID NO: 1700300 - DNA, 15 bp, Homo sapiens
gactgagctctgaca

SEQ ID NO: 1700301 - DNA, 15 bp, Homo sapiens
actgagctctgacag

SEQ ID NO: 1700302 - DNA, 15 bp, Homo sapiens
ctgagctctgacagc

SEQ ID NO: 1700303 - DNA, 15 bp, Homo sapiens
tgagctctgacagcc

SEQ ID NO: 1700304 - DNA, 15 bp, Homo sapiens
gagctctgacagccc

SEQ ID NO: 1700305 - DNA, 15 bp, Homo sapiens
agctctgacagccct

SEQ ID NO: 1700306 - DNA, 15 bp, Homo sapiens
gctctgacagccctc

SEQ ID NO: 1700307 - DNA, 15 bp, Homo sapiens
ctctgacagccctcc

SEQ ID NO: 1700308 - DNA, 15 bp, Homo sapiens
tctgacagccctccc

SEQ ID NO: 1700309 - DNA, 15 bp, Homo sapiens
ctgacagccctccca

SEQ ID NO: 1700310 - DNA, 15 bp, Homo sapiens
tgacagccctcccag

SEQ ID NO: 1700311 - DNA, 15 bp, Homo sapiens
gacagccctcccagg

SEQ ID NO: 1700312 - DNA, 15 bp, Homo sapiens
acagccctcccaggt

SEQ ID NO: 1700313 - DNA, 15 bp, Homo sapiens
cagccctcccaggtt

SEQ ID NO: 1700314 - DNA, 15 bp, Homo sapiens
agccctcccaggttt

SEQ ID NO: 1700315 - DNA, 15 bp, Homo sapiens
gccctcccaggttta

SEQ ID NO: 1700316 - DNA, 15 bp, Homo sapiens
ccctcccaggtttaa

SEQ ID NO: 1700317 - DNA, 15 bp, Homo sapiens
cctcccaggtttaac

SEQ ID NO: 1700318 - DNA, 15 bp, Homo sapiens
ctcccaggtttaaca

SEQ ID NO: 1700319 - DNA, 15 bp, Homo sapiens
tcccaggtttaacat

SEQ ID NO: 1700320 - DNA, 15 bp, Homo sapiens
cccaggtttaacatt

SEQ ID NO: 1700321 - DNA, 15 bp, Homo sapiens
ccaggtttaacattt

SEQ ID NO: 1700322 - DNA, 15 bp, Homo sapiens
caggtttaacatttt

SEQ ID NO: 1700323 - DNA, 15 bp, Homo sapiens
aggtttaacattttc

SEQ ID NO: 1700324 - DNA, 15 bp, Homo sapiens
ggtttaacattttct

SEQ ID NO: 1700325 - DNA, 15 bp, Homo sapiens
gtttaacattttcta

SEQ ID NO: 1700326 - DNA, 15 bp, Homo sapiens
tttaacattttctag

SEQ ID NO: 1700327 - DNA, 15 bp, Homo sapiens
ttaacattttctagt

SEQ ID NO: 1700328 - DNA, 15 bp, Homo sapiens
taacattttctagtc

SEQ ID NO: 1700329 - DNA, 15 bp, Homo sapiens
aacattttctagtcc

SEQ ID NO: 1700330 - DNA, 15 bp, Homo sapiens
acattttctagtcca

SEQ ID NO: 1700331 - DNA, 15 bp, Homo sapiens
cattttctagtccaa

SEQ ID NO: 1700332 - DNA, 15 bp, Homo sapiens
attttctagtccaat

SEQ ID NO: 1700333 - DNA, 15 bp, Homo sapiens
ttttctagtccaata

SEQ ID NO: 1700334 - DNA, 15 bp, Homo sapiens
tttctagtccaataa

SEQ ID NO: 1700335 - DNA, 15 bp, Homo sapiens
ttctagtccaataaa

SEQ ID NO: 1700336 - DNA, 15 bp, Homo sapiens
tctagtccaataaac

SEQ ID NO: 1700337 - DNA, 15 bp, Homo sapiens
ctagtccaataaaca

SEQ ID NO: 1700338 - DNA, 15 bp, Homo sapiens
tagtccaataaacag

SEQ ID NO: 1700339 - DNA, 15 bp, Homo sapiens
agtccaataaacaga

SEQ ID NO: 1700340 - DNA, 15 bp, Homo sapiens
gtccaataaacagat

SEQ ID NO: 1700341 - DNA, 15 bp, Homo sapiens
tccaataaacagatg

SEQ ID NO: 1700342 - DNA, 15 bp, Homo sapiens
ccaataaacagatgt

SEQ ID NO: 1700343 - DNA, 15 bp, Homo sapiens
caataaacagatgta

SEQ ID NO: 1700344 - DNA, 15 bp, Homo sapiens
aataaacagatgtaa

SEQ ID NO: 1700345 - DNA, 15 bp, Homo sapiens
ataaacagatgtaac

SEQ ID NO: 1700346 - DNA, 15 bp, Homo sapiens
taaacagatgtaact

SEQ ID NO: 1700347 - DNA, 15 bp, Homo sapiens
aaacagatgtaacta

SEQ ID NO: 1700348 - DNA, 15 bp, Homo sapiens
aacagatgtaactaa

SEQ ID NO: 1700349 - DNA, 15 bp, Homo sapiens
acagatgtaactaat

SEQ ID NO: 1700350 - DNA, 15 bp, Homo sapiens
cagatgtaactaata

SEQ ID NO: 1700351 - DNA, 15 bp, Homo sapiens
agatgtaactaataa

SEQ ID NO: 1700352 - DNA, 15 bp, Homo sapiens
gatgtaactaataac

SEQ ID NO: 1700353 - DNA, 15 bp, Homo sapiens
atgtaactaataacc

SEQ ID NO: 1700354 - DNA, 15 bp, Homo sapiens
tgtaactaataacct

SEQ ID NO: 1700355 - DNA, 15 bp, Homo sapiens
gtaactaataaccta

SEQ ID NO: 1700356 - DNA, 15 bp, Homo sapiens
taactaataacctac

SEQ ID NO: 1700357 - DNA, 15 bp, Homo sapiens
aactaataacctacc

SEQ ID NO: 1700358 - DNA, 15 bp, Homo sapiens
actaataacctaccc

SEQ ID NO: 1700359 - DNA, 15 bp, Homo sapiens
ctaataacctacccc

SEQ ID NO: 1700360 - DNA, 15 bp, Homo sapiens
taataacctacccct

SEQ ID NO: 1700361 - DNA, 15 bp, Homo sapiens
aataacctaccccta

SEQ ID NO: 1700362 - DNA, 15 bp, Homo sapiens
ataacctacccctaa

SEQ ID NO: 1700363 - DNA, 15 bp, Homo sapiens
taacctacccctaat

SEQ ID NO: 1700364 - DNA, 15 bp, Homo sapiens
aacctacccctaatt

SEQ ID NO: 1700365 - DNA, 15 bp, Homo sapiens
acctacccctaattc

SEQ ID NO: 1700366 - DNA, 15 bp, Homo sapiens
cctacccctaattct

SEQ ID NO: 1700367 - DNA, 15 bp, Homo sapiens
ctacccctaattctc

SEQ ID NO: 1700368 - DNA, 15 bp, Homo sapiens
tacccctaattctcc

SEQ ID NO: 1700369 - DNA, 15 bp, Homo sapiens
acccctaattctcca

SEQ ID NO: 1700370 - DNA, 15 bp, Homo sapiens
cccctaattctccaa

SEQ ID NO: 1700371 - DNA, 15 bp, Homo sapiens
ccctaattctccaaa

SEQ ID NO: 1700372 - DNA, 15 bp, Homo sapiens
cctaattctccaaaa

SEQ ID NO: 1700373 - DNA, 15 bp, Homo sapiens
ctaattctccaaaac

SEQ ID NO: 1700374 - DNA, 15 bp, Homo sapiens
taattctccaaaact

SEQ ID NO: 1700375 - DNA, 15 bp, Homo sapiens
aattctccaaaactg

SEQ ID NO: 1700376 - DNA, 15 bp, Homo sapiens
attctccaaaactgt

SEQ ID NO: 1700377 - DNA, 15 bp, Homo sapiens
ttctccaaaactgtg

SEQ ID NO: 1700378 - DNA, 15 bp, Homo sapiens
tctccaaaactgtga

SEQ ID NO: 1700379 - DNA, 15 bp, Homo sapiens
ctccaaaactgtgac

SEQ ID NO: 1700380 - DNA, 15 bp, Homo sapiens
tccaaaactgtgact

SEQ ID NO: 1700381 - DNA, 15 bp, Homo sapiens
ccaaaactgtgactg

SEQ ID NO: 1700382 - DNA, 15 bp, Homo sapiens
caaaactgtgactgt

SEQ ID NO: 1700383 - DNA, 15 bp, Homo sapiens
aaaactgtgactgtc

SEQ ID NO: 1700384 - DNA, 15 bp, Homo sapiens
aaactgtgactgtct

SEQ ID NO: 1700385 - DNA, 15 bp, Homo sapiens
aactgtgactgtctc

SEQ ID NO: 1700386 - DNA, 15 bp, Homo sapiens
actgtgactgtctcc

SEQ ID NO: 1700387 - DNA, 15 bp, Homo sapiens
ctgtgactgtctcca

SEQ ID NO: 1700388 - DNA, 15 bp, Homo sapiens
tgtgactgtctccag

SEQ ID NO: 1700389 - DNA, 15 bp, Homo sapiens
gtgactgtctccagc

SEQ ID NO: 1700390 - DNA, 15 bp, Homo sapiens
tgactgtctccagca

SEQ ID NO: 1700391 - DNA, 15 bp, Homo sapiens
gactgtctccagcag

SEQ ID NO: 1700392 - DNA, 15 bp, Homo sapiens
actgtctccagcagc

SEQ ID NO: 1700393 - DNA, 15 bp, Homo sapiens
ctgtctccagcagct

SEQ ID NO: 1700394 - DNA, 15 bp, Homo sapiens
tgtctccagcagcta

SEQ ID NO: 1700395 - DNA, 15 bp, Homo sapiens
gtctccagcagctaa

SEQ ID NO: 1700396 - DNA, 15 bp, Homo sapiens
tctccagcagctaac

SEQ ID NO: 1700397 - DNA, 15 bp, Homo sapiens
ctccagcagctaact

SEQ ID NO: 1700398 - DNA, 15 bp, Homo sapiens
tccagcagctaactg

SEQ ID NO: 1700399 - DNA, 15 bp, Homo sapiens
ccagcagctaactga

SEQ ID NO: 1700400 - DNA, 15 bp, Homo sapiens
cagcagctaactgag

SEQ ID NO: 1700401 - DNA, 15 bp, Homo sapiens
agcagctaactgagc

SEQ ID NO: 1700402 - DNA, 15 bp, Homo sapiens
gcagctaactgagct

SEQ ID NO: 1700403 - DNA, 15 bp, Homo sapiens
cagctaactgagctc

SEQ ID NO: 1700404 - DNA, 15 bp, Homo sapiens
agctaactgagctct

SEQ ID NO: 1700405 - DNA, 15 bp, Homo sapiens
gctaactgagctctg

SEQ ID NO: 1700406 - DNA, 15 bp, Homo sapiens
ctaactgagctctgg

SEQ ID NO: 1700407 - DNA, 15 bp, Homo sapiens
taactgagctctggg

SEQ ID NO: 1700408 - DNA, 15 bp, Homo sapiens
aactgagctctgggt

SEQ ID NO: 1700409 - DNA, 15 bp, Homo sapiens
actgagctctgggtt

SEQ ID NO: 1700410 - DNA, 15 bp, Homo sapiens
ctgagctctgggttc

SEQ ID NO: 1700411 - DNA, 15 bp, Homo sapiens
tgagctctgggttcc

SEQ ID NO: 1700412 - DNA, 15 bp, Homo sapiens
gagctctgggttcct

SEQ ID NO: 1700413 - DNA, 15 bp, Homo sapiens
agctctgggttcctc

SEQ ID NO: 1700414 - DNA, 15 bp, Homo sapiens
gctctgggttcctct

SEQ ID NO: 1700415 - DNA, 15 bp, Homo sapiens
ctctgggttcctctt

SEQ ID NO: 1700416 - DNA, 15 bp, Homo sapiens
tctgggttcctctta

SEQ ID NO: 1700417 - DNA, 15 bp, Homo sapiens
ctgggttcctcttag

SEQ ID NO: 1700418 - DNA, 15 bp, Homo sapiens
tgggttcctcttagc

SEQ ID NO: 1700419 - DNA, 15 bp, Homo sapiens
gggttcctcttagcc

SEQ ID NO: 1700420 - DNA, 15 bp, Homo sapiens
ggttcctcttagccc

SEQ ID NO: 1700421 - DNA, 15 bp, Homo sapiens
gttcctcttagcccc

SEQ ID NO: 1700422 - DNA, 15 bp, Homo sapiens
ttcctcttagcccca

SEQ ID NO: 1700423 - DNA, 15 bp, Homo sapiens
tcctcttagccccag

SEQ ID NO: 1700424 - DNA, 15 bp, Homo sapiens
cctcttagccccaga

SEQ ID NO: 1700425 - DNA, 15 bp, Homo sapiens
ctcttagccccagaa

SEQ ID NO: 1700426 - DNA, 15 bp, Homo sapiens
tcttagccccagaac

SEQ ID NO: 1700427 - DNA, 15 bp, Homo sapiens
cttagccccagaacc

SEQ ID NO: 1700428 - DNA, 15 bp, Homo sapiens
ttagccccagaaccc

SEQ ID NO: 1700429 - DNA, 15 bp, Homo sapiens
tagccccagaacccc

SEQ ID NO: 1700430 - DNA, 15 bp, Homo sapiens
agccccagaacccca

SEQ ID NO: 1700431 - DNA, 15 bp, Homo sapiens
gccccagaaccccaa

SEQ ID NO: 1700432 - DNA, 15 bp, Homo sapiens
ccccagaaccccaat

SEQ ID NO: 1700433 - DNA, 15 bp, Homo sapiens
cccagaaccccaata

SEQ ID NO: 1700434 - DNA, 15 bp, Homo sapiens
ccagaaccccaatat

SEQ ID NO: 1700435 - DNA, 15 bp, Homo sapiens
cagaaccccaatatt

SEQ ID NO: 1700436 - DNA, 15 bp, Homo sapiens
agaaccccaatattc

SEQ ID NO: 1700437 - DNA, 15 bp, Homo sapiens
gaaccccaatattct

SEQ ID NO: 1700438 - DNA, 15 bp, Homo sapiens
aaccccaatattctt

SEQ ID NO: 1700439 - DNA, 15 bp, Homo sapiens
accccaatattcttt

SEQ ID NO: 1700440 - DNA, 15 bp, Homo sapiens
ccccaatattctttt

SEQ ID NO: 1700441 - DNA, 15 bp, Homo sapiens
cccaatattcttttt

SEQ ID NO: 1700442 - DNA, 15 bp, Homo sapiens
ccaatattctttttt

SEQ ID NO: 1700443 - DNA, 15 bp, Homo sapiens
caatattcttttttt

SEQ ID NO: 1700444 - DNA, 15 bp, Homo sapiens
aatattctttttttc

SEQ ID NO: 1700445 - DNA, 15 bp, Homo sapiens
atattctttttttca

SEQ ID NO: 1700446 - DNA, 15 bp, Homo sapiens
tattctttttttcag

SEQ ID NO: 1700447 - DNA, 15 bp, Homo sapiens
attctttttttcagg

SEQ ID NO: 1700448 - DNA, 15 bp, Homo sapiens
ttctttttttcaggc

SEQ ID NO: 1700449 - DNA, 15 bp, Homo sapiens
tctttttttcaggcc

SEQ ID NO: 1700450 - DNA, 15 bp, Homo sapiens
ctttttttcaggcca

SEQ ID NO: 1700451 - DNA, 15 bp, Homo sapiens
tttttttcaggccaa

SEQ ID NO: 1700452 - DNA, 15 bp, Homo sapiens
ttttttcaggccaac

SEQ ID NO: 1700453 - DNA, 15 bp, Homo sapiens
tttttcaggccaact

SEQ ID NO: 1700454 - DNA, 15 bp, Homo sapiens
ttttcaggccaactc

SEQ ID NO: 1700455 - DNA, 15 bp, Homo sapiens
tttcaggccaactct

SEQ ID NO: 1700456 - DNA, 15 bp, Homo sapiens
ttcaggccaactctc

SEQ ID NO: 1700457 - DNA, 15 bp, Homo sapiens
tcaggccaactctct

SEQ ID NO: 1700458 - DNA, 15 bp, Homo sapiens
caggccaactctcta

SEQ ID NO: 1700459 - DNA, 15 bp, Homo sapiens
aggccaactctctag

SEQ ID NO: 1700460 - DNA, 15 bp, Homo sapiens
ggccaactctctagg

SEQ ID NO: 1700461 - DNA, 15 bp, Homo sapiens
gccaactctctagga

SEQ ID NO: 1700462 - DNA, 15 bp, Homo sapiens
ccaactctctaggac

SEQ ID NO: 1700463 - DNA, 15 bp, Homo sapiens
caactctctaggaca

SEQ ID NO: 1700464 - DNA, 15 bp, Homo sapiens
aactctctaggacat

SEQ ID NO: 1700465 - DNA, 15 bp, Homo sapiens
actctctaggacata

SEQ ID NO: 1700466 - DNA, 15 bp, Homo sapiens
ctctctaggacatat

SEQ ID NO: 1700467 - DNA, 15 bp, Homo sapiens
tctctaggacatatt

SEQ ID NO: 1700468 - DNA, 15 bp, Homo sapiens
ctctaggacatattg

SEQ ID NO: 1700469 - DNA, 15 bp, Homo sapiens
tctaggacatattga

SEQ ID NO: 1700470 - DNA, 15 bp, Homo sapiens
ctaggacatattgaa

SEQ ID NO: 1700471 - DNA, 15 bp, Homo sapiens
taggacatattgaac

SEQ ID NO: 1700472 - DNA, 15 bp, Homo sapiens
aggacatattgaact

SEQ ID NO: 1700473 - DNA, 15 bp, Homo sapiens
ggacatattgaactg

SEQ ID NO: 1700474 - DNA, 15 bp, Homo sapiens
gacatattgaactgt

SEQ ID NO: 1700475 - DNA, 15 bp, Homo sapiens
acatattgaactgtc

SEQ ID NO: 1700476 - DNA, 15 bp, Homo sapiens
catattgaactgtca

SEQ ID NO: 1700477 - DNA, 15 bp, Homo sapiens
atattgaactgtcag

SEQ ID NO: 1700478 - DNA, 15 bp, Homo sapiens
tattgaactgtcagt

SEQ ID NO: 1700479 - DNA, 15 bp, Homo sapiens
attgaactgtcagtt

SEQ ID NO: 1700480 - DNA, 15 bp, Homo sapiens
ttgaactgtcagtta

SEQ ID NO: 1700481 - DNA, 15 bp, Homo sapiens
tgaactgtcagttat

SEQ ID NO: 1700482 - DNA, 15 bp, Homo sapiens
gaactgtcagttatt

SEQ ID NO: 1700483 - DNA, 15 bp, Homo sapiens
aactgtcagttattg

SEQ ID NO: 1700484 - DNA, 15 bp, Homo sapiens
actgtcagttattga

SEQ ID NO: 1700485 - DNA, 15 bp, Homo sapiens
ctgtcagttattgaa

SEQ ID NO: 1700486 - DNA, 15 bp, Homo sapiens
tgtcagttattgaaa

SEQ ID NO: 1700487 - DNA, 15 bp, Homo sapiens
gtcagttattgaaag

SEQ ID NO: 1700488 - DNA, 15 bp, Homo sapiens
tcagttattgaaaga

SEQ ID NO: 1700489 - DNA, 15 bp, Homo sapiens
cagttattgaaagaa

SEQ ID NO: 1700490 - DNA, 15 bp, Homo sapiens
agttattgaaagaaa

SEQ ID NO: 1700491 - DNA, 15 bp, Homo sapiens
gttattgaaagaaaa

SEQ ID NO: 1700492 - DNA, 15 bp, Homo sapiens
ttattgaaagaaaag

SEQ ID NO: 1700493 - DNA, 15 bp, Homo sapiens
tattgaaagaaaagt

SEQ ID NO: 1700494 - DNA, 15 bp, Homo sapiens
attgaaagaaaagta

SEQ ID NO: 1700495 - DNA, 15 bp, Homo sapiens
ttgaaagaaaagtac

SEQ ID NO: 1700496 - DNA, 15 bp, Homo sapiens
tgaaagaaaagtact

SEQ ID NO: 1700497 - DNA, 15 bp, Homo sapiens
gaaagaaaagtactt

SEQ ID NO: 1700498 - DNA, 15 bp, Homo sapiens
aaagaaaagtacttg

SEQ ID NO: 1700499 - DNA, 15 bp, Homo sapiens
aagaaaagtacttgg

SEQ ID NO: 1700500 - DNA, 15 bp, Homo sapiens
agaaaagtacttggt

SEQ ID NO: 1700501 - DNA, 15 bp, Homo sapiens
gaaaagtacttggtt

SEQ ID NO: 1700502 - DNA, 15 bp, Homo sapiens
aaaagtacttggtta

SEQ ID NO: 1700503 - DNA, 15 bp, Homo sapiens
aaagtacttggttat

SEQ ID NO: 1700504 - DNA, 15 bp, Homo sapiens
aagtacttggttatt

SEQ ID NO: 1700505 - DNA, 15 bp, Homo sapiens
agtacttggttattt

SEQ ID NO: 1700506 - DNA, 15 bp, Homo sapiens
gtacttggttatttg

SEQ ID NO: 1700507 - DNA, 15 bp, Homo sapiens
tacttggttatttgc

SEQ ID NO: 1700508 - DNA, 15 bp, Homo sapiens
acttggttatttgca

SEQ ID NO: 1700509 - DNA, 15 bp, Homo sapiens
cttggttatttgcat

SEQ ID NO: 1700510 - DNA, 15 bp, Homo sapiens
ttggttatttgcata

SEQ ID NO: 1700511 - DNA, 15 bp, Homo sapiens
tggttatttgcataa

SEQ ID NO: 1700512 - DNA, 15 bp, Homo sapiens
ggttatttgcataaa

SEQ ID NO: 1700513 - DNA, 15 bp, Homo sapiens
gttatttgcataaat

SEQ ID NO: 1700514 - DNA, 15 bp, Homo sapiens
ttatttgcataaatg

SEQ ID NO: 1700515 - DNA, 15 bp, Homo sapiens
tatttgcataaatgc

SEQ ID NO: 1700516 - DNA, 15 bp, Homo sapiens
atttgcataaatgca

SEQ ID NO: 1700517 - DNA, 15 bp, Homo sapiens
tttgcataaatgcag

SEQ ID NO: 1700518 - DNA, 15 bp, Homo sapiens
ttgcataaatgcagt

SEQ ID NO: 1700519 - DNA, 15 bp, Homo sapiens
tgcataaatgcagta

SEQ ID NO: 1700520 - DNA, 15 bp, Homo sapiens
gcataaatgcagtag

SEQ ID NO: 1700521 - DNA, 15 bp, Homo sapiens
cataaatgcagtagt

SEQ ID NO: 1700522 - DNA, 15 bp, Homo sapiens
ataaatgcagtagtt

SEQ ID NO: 1700523 - DNA, 15 bp, Homo sapiens
taaatgcagtagttg

SEQ ID NO: 1700524 - DNA, 15 bp, Homo sapiens
aaatgcagtagttga

SEQ ID NO: 1700525 - DNA, 15 bp, Homo sapiens
aatgcagtagttgac

SEQ ID NO: 1700526 - DNA, 15 bp, Homo sapiens
atgcagtagttgact

SEQ ID NO: 1700527 - DNA, 15 bp, Homo sapiens
tgcagtagttgactt

SEQ ID NO: 1700528 - DNA, 15 bp, Homo sapiens
gcagtagttgacttc

SEQ ID NO: 1700529 - DNA, 15 bp, Homo sapiens
cagtagttgacttca

SEQ ID NO: 1700530 - DNA, 15 bp, Homo sapiens
agtagttgacttcag

SEQ ID NO: 1700531 - DNA, 15 bp, Homo sapiens
gtagttgacttcaga

SEQ ID NO: 1700532 - DNA, 15 bp, Homo sapiens
tagttgacttcagaa

SEQ ID NO: 1700533 - DNA, 15 bp, Homo sapiens
agttgacttcagaaa

SEQ ID NO: 1700534 - DNA, 15 bp, Homo sapiens
gttgacttcagaaac

SEQ ID NO: 1700535 - DNA, 15 bp, Homo sapiens
ttgacttcagaaaca

SEQ ID NO: 1700536 - DNA, 15 bp, Homo sapiens
tgacttcagaaacat

SEQ ID NO: 1700537 - DNA, 15 bp, Homo sapiens
gacttcagaaacatc

SEQ ID NO: 1700538 - DNA, 15 bp, Homo sapiens
acttcagaaacatcc

SEQ ID NO: 1700539 - DNA, 15 bp, Homo sapiens
cttcagaaacatccc

SEQ ID NO: 1700540 - DNA, 15 bp, Homo sapiens
ttcagaaacatcccc

SEQ ID NO: 1700541 - DNA, 15 bp, Homo sapiens
tcagaaacatcccca

SEQ ID NO: 1700542 - DNA, 15 bp, Homo sapiens
cagaaacatccccaa

SEQ ID NO: 1700543 - DNA, 15 bp, Homo sapiens
agaaacatccccaag

SEQ ID NO: 1700544 - DNA, 15 bp, Homo sapiens
gaaacatccccaagt

SEQ ID NO: 1700545 - DNA, 15 bp, Homo sapiens
aaacatccccaagtt

SEQ ID NO: 1700546 - DNA, 15 bp, Homo sapiens
aacatccccaagttt

SEQ ID NO: 1700547 - DNA, 15 bp, Homo sapiens
acatccccaagtttt

SEQ ID NO: 1700548 - DNA, 15 bp, Homo sapiens
catccccaagtttta

SEQ ID NO: 1700549 - DNA, 15 bp, Homo sapiens
atccccaagttttag

SEQ ID NO: 1700550 - DNA, 15 bp, Homo sapiens
tccccaagttttagc

SEQ ID NO: 1700551 - DNA, 15 bp, Homo sapiens
ccccaagttttagca

SEQ ID NO: 1700552 - DNA, 15 bp, Homo sapiens
cccaagttttagcat

SEQ ID NO: 1700553 - DNA, 15 bp, Homo sapiens
ccaagttttagcatg

SEQ ID NO: 1700554 - DNA, 15 bp, Homo sapiens
caagttttagcatgg

SEQ ID NO: 1700555 - DNA, 15 bp, Homo sapiens
aagttttagcatgga

SEQ ID NO: 1700556 - DNA, 15 bp, Homo sapiens
agttttagcatggat

SEQ ID NO: 1700557 - DNA, 15 bp, Homo sapiens
gttttagcatggatg

SEQ ID NO: 1700558 - DNA, 15 bp, Homo sapiens
ttttagcatggatga

SEQ ID NO: 1700559 - DNA, 15 bp, Homo sapiens
tttagcatggatgat

SEQ ID NO: 1700560 - DNA, 15 bp, Homo sapiens
ttagcatggatgatg

SEQ ID NO: 1700561 - DNA, 15 bp, Homo sapiens
tagcatggatgatgg

SEQ ID NO: 1700562 - DNA, 15 bp, Homo sapiens
agcatggatgatggg

SEQ ID NO: 1700563 - DNA, 15 bp, Homo sapiens
gcatggatgatggga

SEQ ID NO: 1700564 - DNA, 15 bp, Homo sapiens
catggatgatgggac

SEQ ID NO: 1700565 - DNA, 15 bp, Homo sapiens
atggatgatgggaca

SEQ ID NO: 1700566 - DNA, 15 bp, Homo sapiens
tggatgatgggacat

SEQ ID NO: 1700567 - DNA, 15 bp, Homo sapiens
ggatgatgggacatt

SEQ ID NO: 1700568 - DNA, 15 bp, Homo sapiens
gatgatgggacattc

SEQ ID NO: 1700569 - DNA, 15 bp, Homo sapiens
atgatgggacattct

SEQ ID NO: 1700570 - DNA, 15 bp, Homo sapiens
tgatgggacattctc

SEQ ID NO: 1700571 - DNA, 15 bp, Homo sapiens
gatgggacattctcc

SEQ ID NO: 1700572 - DNA, 15 bp, Homo sapiens
atgggacattctcct

SEQ ID NO: 1700573 - DNA, 15 bp, Homo sapiens
tgggacattctcctc

SEQ ID NO: 1700574 - DNA, 15 bp, Homo sapiens
gggacattctcctca

SEQ ID NO: 1700575 - DNA, 15 bp, Homo sapiens
ggacattctcctcac

SEQ ID NO: 1700576 - DNA, 15 bp, Homo sapiens
gacattctcctcact

SEQ ID NO: 1700577 - DNA, 15 bp, Homo sapiens
acattctcctcactg

SEQ ID NO: 1700578 - DNA, 15 bp, Homo sapiens
cattctcctcactga

SEQ ID NO: 1700579 - DNA, 15 bp, Homo sapiens
attctcctcactgat

SEQ ID NO: 1700580 - DNA, 15 bp, Homo sapiens
ttctcctcactgatt

SEQ ID NO: 1700581 - DNA, 15 bp, Homo sapiens
tctcctcactgattc

SEQ ID NO: 1700582 - DNA, 15 bp, Homo sapiens
ctcctcactgattct

SEQ ID NO: 1700583 - DNA, 15 bp, Homo sapiens
tcctcactgattcta

SEQ ID NO: 1700584 - DNA, 15 bp, Homo sapiens
cctcactgattctat

SEQ ID NO: 1700585 - DNA, 15 bp, Homo sapiens
ctcactgattctatc

SEQ ID NO: 1700586 - DNA, 15 bp, Homo sapiens
tcactgattctatca

SEQ ID NO: 1700587 - DNA, 15 bp, Homo sapiens
cactgattctatcac

SEQ ID NO: 1700588 - DNA, 15 bp, Homo sapiens
actgattctatcact

SEQ ID NO: 1700589 - DNA, 15 bp, Homo sapiens
ctgattctatcacta

SEQ ID NO: 1700590 - DNA, 15 bp, Homo sapiens
tgattctatcactac

SEQ ID NO: 1700591 - DNA, 15 bp, Homo sapiens
gattctatcactacc

SEQ ID NO: 1700592 - DNA, 15 bp, Homo sapiens
attctatcactaccc

SEQ ID NO: 1700593 - DNA, 15 bp, Homo sapiens
ttctatcactaccca

SEQ ID NO: 1700594 - DNA, 15 bp, Homo sapiens
tctatcactacccag

SEQ ID NO: 1700595 - DNA, 15 bp, Homo sapiens
ctatcactacccagt

SEQ ID NO: 1700596 - DNA, 15 bp, Homo sapiens
tatcactacccagtc

SEQ ID NO: 1700597 - DNA, 15 bp, Homo sapiens
atcactacccagtct

SEQ ID NO: 1700598 - DNA, 15 bp, Homo sapiens
tcactacccagtctg

SEQ ID NO: 1700599 - DNA, 15 bp, Homo sapiens
cactacccagtctgc

SEQ ID NO: 1700600 - DNA, 15 bp, Homo sapiens
actacccagtctgct

SEQ ID NO: 1700601 - DNA, 15 bp, Homo sapiens
ctacccagtctgcta

SEQ ID NO: 1700602 - DNA, 15 bp, Homo sapiens
tacccagtctgctac

SEQ ID NO: 1700603 - DNA, 15 bp, Homo sapiens
acccagtctgctacc

SEQ ID NO: 1700604 - DNA, 15 bp, Homo sapiens
cccagtctgctacct

SEQ ID NO: 1700605 - DNA, 15 bp, Homo sapiens
ccagtctgctacctc

SEQ ID NO: 1700606 - DNA, 15 bp, Homo sapiens
cagtctgctacctcc

SEQ ID NO: 1700607 - DNA, 15 bp, Homo sapiens
agtctgctacctccc

SEQ ID NO: 1700608 - DNA, 15 bp, Homo sapiens
gtctgctacctccca

SEQ ID NO: 1700609 - DNA, 15 bp, Homo sapiens
tctgctacctcccac

SEQ ID NO: 1700610 - DNA, 15 bp, Homo sapiens
ctgctacctcccact

SEQ ID NO: 1700611 - DNA, 15 bp, Homo sapiens
tgctacctcccactg

SEQ ID NO: 1700612 - DNA, 15 bp, Homo sapiens
gctacctcccactgt

SEQ ID NO: 1700613 - DNA, 15 bp, Homo sapiens
ctacctcccactgtt

SEQ ID NO: 1700614 - DNA, 15 bp, Homo sapiens
tacctcccactgttg

SEQ ID NO: 1700615 - DNA, 15 bp, Homo sapiens
acctcccactgttgt

SEQ ID NO: 1700616 - DNA, 15 bp, Homo sapiens
cctcccactgttgtg

SEQ ID NO: 1700617 - DNA, 15 bp, Homo sapiens
ctcccactgttgtgc

SEQ ID NO: 1700618 - DNA, 15 bp, Homo sapiens
tcccactgttgtgcc

SEQ ID NO: 1700619 - DNA, 15 bp, Homo sapiens
cccactgttgtgcct

SEQ ID NO: 1700620 - DNA, 15 bp, Homo sapiens
ccactgttgtgccta

SEQ ID NO: 1700621 - DNA, 15 bp, Homo sapiens
cactgttgtgcctaa

SEQ ID NO: 1700622 - DNA, 15 bp, Homo sapiens
actgttgtgcctaat

SEQ ID NO: 1700623 - DNA, 15 bp, Homo sapiens
ctgttgtgcctaatg

SEQ ID NO: 1700624 - DNA, 15 bp, Homo sapiens
tgttgtgcctaatga

SEQ ID NO: 1700625 - DNA, 15 bp, Homo sapiens
gttgtgcctaatgag

SEQ ID NO: 1700626 - DNA, 15 bp, Homo sapiens
ttgtgcctaatgagc

SEQ ID NO: 1700627 - DNA, 15 bp, Homo sapiens
tgtgcctaatgagct

SEQ ID NO: 1700628 - DNA, 15 bp, Homo sapiens
gtgcctaatgagctc

SEQ ID NO: 1700629 - DNA, 15 bp, Homo sapiens
tgcctaatgagctct

SEQ ID NO: 1700630 - DNA, 15 bp, Homo sapiens
gcctaatgagctctg

SEQ ID NO: 1700631 - DNA, 15 bp, Homo sapiens
cctaatgagctctgc

SEQ ID NO: 1700632 - DNA, 15 bp, Homo sapiens
ctaatgagctctgcc

SEQ ID NO: 1700633 - DNA, 15 bp, Homo sapiens
taatgagctctgcca

SEQ ID NO: 1700634 - DNA, 15 bp, Homo sapiens
aatgagctctgccag

SEQ ID NO: 1700635 - DNA, 15 bp, Homo sapiens
atgagctctgccagc

SEQ ID NO: 1700636 - DNA, 15 bp, Homo sapiens
tgagctctgccagct

SEQ ID NO: 1700637 - DNA, 15 bp, Homo sapiens
gagctctgccagctt

SEQ ID NO: 1700638 - DNA, 15 bp, Homo sapiens
agctctgccagcttc

SEQ ID NO: 1700639 - DNA, 15 bp, Homo sapiens
gctctgccagcttca

SEQ ID NO: 1700640 - DNA, 15 bp, Homo sapiens
ctctgccagcttcag

SEQ ID NO: 1700641 - DNA, 15 bp, Homo sapiens
tctgccagcttcaga

SEQ ID NO: 1700642 - DNA, 15 bp, Homo sapiens
ctgccagcttcagag

SEQ ID NO: 1700643 - DNA, 15 bp, Homo sapiens
tgccagcttcagagc

SEQ ID NO: 1700644 - DNA, 15 bp, Homo sapiens
gccagcttcagagca

SEQ ID NO: 1700645 - DNA, 15 bp, Homo sapiens
ccagcttcagagcat

SEQ ID NO: 1700646 - DNA, 15 bp, Homo sapiens
cagcttcagagcatc

SEQ ID NO: 1700647 - DNA, 15 bp, Homo sapiens
agcttcagagcatct

SEQ ID NO: 1700648 - DNA, 15 bp, Homo sapiens
gcttcagagcatctg

SEQ ID NO: 1700649 - DNA, 15 bp, Homo sapiens
cttcagagcatctga

SEQ ID NO: 1700650 - DNA, 15 bp, Homo sapiens
ttcagagcatctgag

SEQ ID NO: 1700651 - DNA, 15 bp, Homo sapiens
tcagagcatctgagg

SEQ ID NO: 1700652 - DNA, 15 bp, Homo sapiens
cagagcatctgagga

SEQ ID NO: 1700653 - DNA, 15 bp, Homo sapiens
agagcatctgaggaa

SEQ ID NO: 1700654 - DNA, 15 bp, Homo sapiens
gagcatctgaggaac

SEQ ID NO: 1700655 - DNA, 15 bp, Homo sapiens
agcatctgaggaaca

SEQ ID NO: 1700656 - DNA, 15 bp, Homo sapiens
gcatctgaggaacat

SEQ ID NO: 1700657 - DNA, 15 bp, Homo sapiens
catctgaggaacatc

SEQ ID NO: 1700658 - DNA, 15 bp, Homo sapiens
atctgaggaacatct

SEQ ID NO: 1700659 - DNA, 15 bp, Homo sapiens
tctgaggaacatctc

SEQ ID NO: 1700660 - DNA, 15 bp, Homo sapiens
ctgaggaacatctca

SEQ ID NO: 1700661 - DNA, 15 bp, Homo sapiens
tgaggaacatctcag

SEQ ID NO: 1700662 - DNA, 15 bp, Homo sapiens
gaggaacatctcagt

SEQ ID NO: 1700663 - DNA, 15 bp, Homo sapiens
aggaacatctcagtc

SEQ ID NO: 1700664 - DNA, 15 bp, Homo sapiens
ggaacatctcagtct

SEQ ID NO: 1700665 - DNA, 15 bp, Homo sapiens
gaacatctcagtcta

SEQ ID NO: 1700666 - DNA, 15 bp, Homo sapiens
aacatctcagtctag

SEQ ID NO: 1700667 - DNA, 15 bp, Homo sapiens
acatctcagtctagt

SEQ ID NO: 1700668 - DNA, 15 bp, Homo sapiens
catctcagtctagtt

SEQ ID NO: 1700669 - DNA, 15 bp, Homo sapiens
atctcagtctagttg

SEQ ID NO: 1700670 - DNA, 15 bp, Homo sapiens
tctcagtctagttga

SEQ ID NO: 1700671 - DNA, 15 bp, Homo sapiens
ctcagtctagttgac

SEQ ID NO: 1700672 - DNA, 15 bp, Homo sapiens
tcagtctagttgaca

SEQ ID NO: 1700673 - DNA, 15 bp, Homo sapiens
cagtctagttgacac

SEQ ID NO: 1700674 - DNA, 15 bp, Homo sapiens
agtctagttgacacc

SEQ ID NO: 1700675 - DNA, 15 bp, Homo sapiens
gtctagttgacacca

SEQ ID NO: 1700676 - DNA, 15 bp, Homo sapiens
tctagttgacaccac

SEQ ID NO: 1700677 - DNA, 15 bp, Homo sapiens
ctagttgacaccaca

SEQ ID NO: 1700678 - DNA, 15 bp, Homo sapiens
tagttgacaccacag

SEQ ID NO: 1700679 - DNA, 15 bp, Homo sapiens
agttgacaccacaga

SEQ ID NO: 1700680 - DNA, 15 bp, Homo sapiens
gttgacaccacagag

SEQ ID NO: 1700681 - DNA, 15 bp, Homo sapiens
ttgacaccacagaga

SEQ ID NO: 1700682 - DNA, 15 bp, Homo sapiens
tgacaccacagagaa

SEQ ID NO: 1700683 - DNA, 15 bp, Homo sapiens
gacaccacagagaaa

SEQ ID NO: 1700684 - DNA, 15 bp, Homo sapiens
acaccacagagaaaa

SEQ ID NO: 1700685 - DNA, 15 bp, Homo sapiens
caccacagagaaaaa

SEQ ID NO: 1700686 - DNA, 15 bp, Homo sapiens
accacagagaaaaaa

SEQ ID NO: 1700687 - DNA, 15 bp, Homo sapiens
ccacagagaaaaaaa

SEQ ID NO: 1700688 - DNA, 15 bp, Homo sapiens
cacagagaaaaaaac

SEQ ID NO: 1700689 - DNA, 15 bp, Homo sapiens
acagagaaaaaaaca

SEQ ID NO: 1700690 - DNA, 15 bp, Homo sapiens
cagagaaaaaaacaa

SEQ ID NO: 1700691 - DNA, 15 bp, Homo sapiens
agagaaaaaaacaaa

SEQ ID NO: 1700692 - DNA, 15 bp, Homo sapiens
gagaaaaaaacaaaa

SEQ ID NO: 1700693 - DNA, 15 bp, Homo sapiens
agaaaaaaacaaaag

SEQ ID NO: 1700694 - DNA, 15 bp, Homo sapiens
gaaaaaaacaaaaga

SEQ ID NO: 1700695 - DNA, 15 bp, Homo sapiens
aaaaaaacaaaagag

SEQ ID NO: 1700696 - DNA, 15 bp, Homo sapiens
aaaaaacaaaagaga

SEQ ID NO: 1700697 - DNA, 15 bp, Homo sapiens
aaaaacaaaagagat

SEQ ID NO: 1700698 - DNA, 15 bp, Homo sapiens
aaaacaaaagagatg

SEQ ID NO: 1700699 - DNA, 15 bp, Homo sapiens
aaacaaaagagatgg

SEQ ID NO: 1700700 - DNA, 15 bp, Homo sapiens
aacaaaagagatgga

SEQ ID NO: 1700701 - DNA, 15 bp, Homo sapiens
acaaaagagatggag

SEQ ID NO: 1700702 - DNA, 15 bp, Homo sapiens
caaaagagatggagg

SEQ ID NO: 1700703 - DNA, 15 bp, Homo sapiens
aaaagagatggagga

SEQ ID NO: 1700704 - DNA, 15 bp, Homo sapiens
aaagagatggaggag

SEQ ID NO: 1700705 - DNA, 15 bp, Homo sapiens
aagagatggaggagt

SEQ ID NO: 1700706 - DNA, 15 bp, Homo sapiens
agagatggaggagtt

SEQ ID NO: 1700707 - DNA, 15 bp, Homo sapiens
gagatggaggagttc

SEQ ID NO: 1700708 - DNA, 15 bp, Homo sapiens
agatggaggagttcc

SEQ ID NO: 1700709 - DNA, 15 bp, Homo sapiens
gatggaggagttcct

SEQ ID NO: 1700710 - DNA, 15 bp, Homo sapiens
atggaggagttcctg

SEQ ID NO: 1700711 - DNA, 15 bp, Homo sapiens
tggaggagttcctgt

SEQ ID NO: 1700712 - DNA, 15 bp, Homo sapiens
ggaggagttcctgtc

SEQ ID NO: 1700713 - DNA, 15 bp, Homo sapiens
gaggagttcctgtca

SEQ ID NO: 1700714 - DNA, 15 bp, Homo sapiens
aggagttcctgtcat

SEQ ID NO: 1700715 - DNA, 15 bp, Homo sapiens
ggagttcctgtcata

SEQ ID NO: 1700716 - DNA, 15 bp, Homo sapiens
gagttcctgtcatat

SEQ ID NO: 1700717 - DNA, 15 bp, Homo sapiens
agttcctgtcatatg

SEQ ID NO: 1700718 - DNA, 15 bp, Homo sapiens
gttcctgtcatatgg

SEQ ID NO: 1700719 - DNA, 15 bp, Homo sapiens
ttcctgtcatatgga

SEQ ID NO: 1700720 - DNA, 15 bp, Homo sapiens
tcctgtcatatggag

SEQ ID NO: 1700721 - DNA, 15 bp, Homo sapiens
cctgtcatatggaga

SEQ ID NO: 1700722 - DNA, 15 bp, Homo sapiens
ctgtcatatggagaa

SEQ ID NO: 1700723 - DNA, 15 bp, Homo sapiens
tgtcatatggagaac

SEQ ID NO: 1700724 - DNA, 15 bp, Homo sapiens
gtcatatggagaaca

SEQ ID NO: 1700725 - DNA, 15 bp, Homo sapiens
tcatatggagaacat

SEQ ID NO: 1700726 - DNA, 15 bp, Homo sapiens
catatggagaacata

SEQ ID NO: 1700727 - DNA, 15 bp, Homo sapiens
atatggagaacatat

SEQ ID NO: 1700728 - DNA, 15 bp, Homo sapiens
tatggagaacatatt

SEQ ID NO: 1700729 - DNA, 15 bp, Homo sapiens
atggagaacatattg

SEQ ID NO: 1700730 - DNA, 15 bp, Homo sapiens
tggagaacatattgt

SEQ ID NO: 1700731 - DNA, 15 bp, Homo sapiens
ggagaacatattgtt

SEQ ID NO: 1700732 - DNA, 15 bp, Homo sapiens
gagaacatattgttg

SEQ ID NO: 1700733 - DNA, 15 bp, Homo sapiens
agaacatattgttgg

SEQ ID NO: 1700734 - DNA, 15 bp, Homo sapiens
gaacatattgttggg

SEQ ID NO: 1700735 - DNA, 15 bp, Homo sapiens
aacatattgttggga

SEQ ID NO: 1700736 - DNA, 15 bp, Homo sapiens
acatattgttgggag

SEQ ID NO: 1700737 - DNA, 15 bp, Homo sapiens
catattgttgggagc

SEQ ID NO: 1700738 - DNA, 15 bp, Homo sapiens
atattgttgggagcc

SEQ ID NO: 1700739 - DNA, 15 bp, Homo sapiens
tattgttgggagcct

SEQ ID NO: 1700740 - DNA, 15 bp, Homo sapiens
attgttgggagcctc

SEQ ID NO: 1700741 - DNA, 15 bp, Homo sapiens
ttgttgggagcctcc

SEQ ID NO: 1700742 - DNA, 15 bp, Homo sapiens
tgttgggagcctcct

SEQ ID NO: 1700743 - DNA, 15 bp, Homo sapiens
gttgggagcctcctt

SEQ ID NO: 1700744 - DNA, 15 bp, Homo sapiens
ttgggagcctccttt

SEQ ID NO: 1700745 - DNA, 15 bp, Homo sapiens
tgggagcctcctttt

SEQ ID NO: 1700746 - DNA, 15 bp, Homo sapiens
gggagcctccttttg

SEQ ID NO: 1700747 - DNA, 15 bp, Homo sapiens
ggagcctccttttgg

SEQ ID NO: 1700748 - DNA, 15 bp, Homo sapiens
gagcctccttttggg

SEQ ID NO: 1700749 - DNA, 15 bp, Homo sapiens
agcctccttttgggg

SEQ ID NO: 1700750 - DNA, 15 bp, Homo sapiens
gcctccttttggggc

SEQ ID NO: 1700751 - DNA, 15 bp, Homo sapiens
cctccttttggggct

SEQ ID NO: 1700752 - DNA, 15 bp, Homo sapiens
ctccttttggggctt

SEQ ID NO: 1700753 - DNA, 15 bp, Homo sapiens
tccttttggggcttc

SEQ ID NO: 1700754 - DNA, 15 bp, Homo sapiens
ccttttggggcttct

SEQ ID NO: 1700755 - DNA, 15 bp, Homo sapiens
cttttggggcttctt

SEQ ID NO: 1700756 - DNA, 15 bp, Homo sapiens
ttttggggcttctta

SEQ ID NO: 1700757 - DNA, 15 bp, Homo sapiens
tttggggcttcttag

SEQ ID NO: 1700758 - DNA, 15 bp, Homo sapiens
ttggggcttcttagt

SEQ ID NO: 1700759 - DNA, 15 bp, Homo sapiens
tggggcttcttagta

SEQ ID NO: 1700760 - DNA, 15 bp, Homo sapiens
ggggcttcttagtac

SEQ ID NO: 1700761 - DNA, 15 bp, Homo sapiens
gggcttcttagtacc

SEQ ID NO: 1700762 - DNA, 15 bp, Homo sapiens
ggcttcttagtacct

SEQ ID NO: 1700763 - DNA, 15 bp, Homo sapiens
gcttcttagtacctc

SEQ ID NO: 1700764 - DNA, 15 bp, Homo sapiens
cttcttagtacctcc

SEQ ID NO: 1700765 - DNA, 15 bp, Homo sapiens
ttcttagtacctcct

SEQ ID NO: 1700766 - DNA, 15 bp, Homo sapiens
tcttagtacctcctg

SEQ ID NO: 1700767 - DNA, 15 bp, Homo sapiens
cttagtacctcctga

SEQ ID NO: 1700768 - DNA, 15 bp, Homo sapiens
ttagtacctcctgat

SEQ ID NO: 1700769 - DNA, 15 bp, Homo sapiens
tagtacctcctgata

SEQ ID NO: 1700770 - DNA, 15 bp, Homo sapiens
agtacctcctgatat

SEQ ID NO: 1700771 - DNA, 15 bp, Homo sapiens
gtacctcctgatatt

SEQ ID NO: 1700772 - DNA, 15 bp, Homo sapiens
tacctcctgatattt

SEQ ID NO: 1700773 - DNA, 15 bp, Homo sapiens
acctcctgatatttt

SEQ ID NO: 1700774 - DNA, 15 bp, Homo sapiens
cctcctgatattttc

SEQ ID NO: 1700775 - DNA, 15 bp, Homo sapiens
ctcctgatattttcc

SEQ ID NO: 1700776 - DNA, 15 bp, Homo sapiens
tcctgatattttcca

SEQ ID NO: 1700777 - DNA, 15 bp, Homo sapiens
cctgatattttccat

SEQ ID NO: 1700778 - DNA, 15 bp, Homo sapiens
ctgatattttccatc

SEQ ID NO: 1700779 - DNA, 15 bp, Homo sapiens
tgatattttccatca

SEQ ID NO: 1700780 - DNA, 15 bp, Homo sapiens
gatattttccatcat

SEQ ID NO: 1700781 - DNA, 15 bp, Homo sapiens
atattttccatcatg

SEQ ID NO: 1700782 - DNA, 15 bp, Homo sapiens
tattttccatcatgc

SEQ ID NO: 1700783 - DNA, 15 bp, Homo sapiens
attttccatcatgct

SEQ ID NO: 1700784 - DNA, 15 bp, Homo sapiens
ttttccatcatgctt

SEQ ID NO: 1700785 - DNA, 15 bp, Homo sapiens
tttccatcatgcttt

SEQ ID NO: 1700786 - DNA, 15 bp, Homo sapiens
ttccatcatgcttta

SEQ ID NO: 1700787 - DNA, 15 bp, Homo sapiens
tccatcatgctttac

SEQ ID NO: 1700788 - DNA, 15 bp, Homo sapiens
ccatcatgctttaca

SEQ ID NO: 1700789 - DNA, 15 bp, Homo sapiens
catcatgctttacat

SEQ ID NO: 1700790 - DNA, 15 bp, Homo sapiens
atcatgctttacatt

SEQ ID NO: 1700791 - DNA, 15 bp, Homo sapiens
tcatgctttacattc

SEQ ID NO: 1700792 - DNA, 15 bp, Homo sapiens
catgctttacattca

SEQ ID NO: 1700793 - DNA, 15 bp, Homo sapiens
atgctttacattcag

SEQ ID NO: 1700794 - DNA, 15 bp, Homo sapiens
tgctttacattcagc

SEQ ID NO: 1700795 - DNA, 15 bp, Homo sapiens
gctttacattcagcc

SEQ ID NO: 1700796 - DNA, 15 bp, Homo sapiens
ctttacattcagcca

SEQ ID NO: 1700797 - DNA, 15 bp, Homo sapiens
tttacattcagccag

SEQ ID NO: 1700798 - DNA, 15 bp, Homo sapiens
ttacattcagccagc

SEQ ID NO: 1700799 - DNA, 15 bp, Homo sapiens
tacattcagccagca

SEQ ID NO: 1700800 - DNA, 15 bp, Homo sapiens
acattcagccagcac

SEQ ID NO: 1700801 - DNA, 15 bp, Homo sapiens
cattcagccagcact

SEQ ID NO: 1700802 - DNA, 15 bp, Homo sapiens
attcagccagcactc

SEQ ID NO: 1700803 - DNA, 15 bp, Homo sapiens
ttcagccagcactca

SEQ ID NO: 1700804 - DNA, 15 bp, Homo sapiens
tcagccagcactcaa

SEQ ID NO: 1700805 - DNA, 15 bp, Homo sapiens
cagccagcactcaac

SEQ ID NO: 1700806 - DNA, 15 bp, Homo sapiens
agccagcactcaaca

SEQ ID NO: 1700807 - DNA, 15 bp, Homo sapiens
gccagcactcaacag

SEQ ID NO: 1700808 - DNA, 15 bp, Homo sapiens
ccagcactcaacagg

SEQ ID NO: 1700809 - DNA, 15 bp, Homo sapiens
cagcactcaacaggt

SEQ ID NO: 1700810 - DNA, 15 bp, Homo sapiens
agcactcaacaggtg

SEQ ID NO: 1700811 - DNA, 15 bp, Homo sapiens
gcactcaacaggtga

SEQ ID NO: 1700812 - DNA, 15 bp, Homo sapiens
cactcaacaggtgac

SEQ ID NO: 1700813 - DNA, 15 bp, Homo sapiens
actcaacaggtgact

SEQ ID NO: 1700814 - DNA, 15 bp, Homo sapiens
ctcaacaggtgacta

SEQ ID NO: 1700815 - DNA, 15 bp, Homo sapiens
tcaacaggtgactag

SEQ ID NO: 1700816 - DNA, 15 bp, Homo sapiens
caacaggtgactaga

SEQ ID NO: 1700817 - DNA, 15 bp, Homo sapiens
aacaggtgactagat

SEQ ID NO: 1700818 - DNA, 15 bp, Homo sapiens
acaggtgactagata

SEQ ID NO: 1700819 - DNA, 15 bp, Homo sapiens
caggtgactagatag

SEQ ID NO: 1700820 - DNA, 15 bp, Homo sapiens
aggtgactagataga

SEQ ID NO: 1700821 - DNA, 15 bp, Homo sapiens
ggtgactagatagag

SEQ ID NO: 1700822 - DNA, 15 bp, Homo sapiens
gtgactagatagagt

SEQ ID NO: 1700823 - DNA, 15 bp, Homo sapiens
tgactagatagagtg

SEQ ID NO: 1700824 - DNA, 15 bp, Homo sapiens
gactagatagagtga

SEQ ID NO: 1700825 - DNA, 15 bp, Homo sapiens
actagatagagtgag

SEQ ID NO: 1700826 - DNA, 15 bp, Homo sapiens
ctagatagagtgaga

SEQ ID NO: 1700827 - DNA, 15 bp, Homo sapiens
tagatagagtgagac

SEQ ID NO: 1700828 - DNA, 15 bp, Homo sapiens
agatagagtgagaca

SEQ ID NO: 1700829 - DNA, 15 bp, Homo sapiens
gatagagtgagacac

SEQ ID NO: 1700830 - DNA, 15 bp, Homo sapiens
atagagtgagacaca

SEQ ID NO: 1700831 - DNA, 15 bp, Homo sapiens
tagagtgagacacag

SEQ ID NO: 1700832 - DNA, 15 bp, Homo sapiens
agagtgagacacagg

SEQ ID NO: 1700833 - DNA, 15 bp, Homo sapiens
gagtgagacacagga

SEQ ID NO: 1700834 - DNA, 15 bp, Homo sapiens
agtgagacacaggac

SEQ ID NO: 1700835 - DNA, 15 bp, Homo sapiens
gtgagacacaggaca

SEQ ID NO: 1700836 - DNA, 15 bp, Homo sapiens
tgagacacaggacac

SEQ ID NO: 1700837 - DNA, 15 bp, Homo sapiens
gagacacaggacaca

SEQ ID NO: 1700838 - DNA, 15 bp, Homo sapiens
agacacaggacacag

SEQ ID NO: 1700839 - DNA, 15 bp, Homo sapiens
gacacaggacacaga

SEQ ID NO: 1700840 - DNA, 15 bp, Homo sapiens
acacaggacacagag

SEQ ID NO: 1700841 - DNA, 15 bp, Homo sapiens
cacaggacacagaga

SEQ ID NO: 1700842 - DNA, 15 bp, Homo sapiens
acaggacacagagac

SEQ ID NO: 1700843 - DNA, 15 bp, Homo sapiens
caggacacagagacg

SEQ ID NO: 1700844 - DNA, 15 bp, Homo sapiens
aggacacagagacgt

SEQ ID NO: 1700845 - DNA, 15 bp, Homo sapiens
ggacacagagacgtg

SEQ ID NO: 1700846 - DNA, 15 bp, Homo sapiens
gacacagagacgtga

SEQ ID NO: 1700847 - DNA, 15 bp, Homo sapiens
acacagagacgtgat

SEQ ID NO: 1700848 - DNA, 15 bp, Homo sapiens
cacagagacgtgatc

SEQ ID NO: 1700849 - DNA, 15 bp, Homo sapiens
acagagacgtgatca

SEQ ID NO: 1700850 - DNA, 15 bp, Homo sapiens
cagagacgtgatcac

SEQ ID NO: 1700851 - DNA, 15 bp, Homo sapiens
agagacgtgatcaca

SEQ ID NO: 1700852 - DNA, 15 bp, Homo sapiens
gagacgtgatcacag

SEQ ID NO: 1700853 - DNA, 15 bp, Homo sapiens
agacgtgatcacagg

SEQ ID NO: 1700854 - DNA, 15 bp, Homo sapiens
gacgtgatcacaggt

SEQ ID NO: 1700855 - DNA, 15 bp, Homo sapiens
acgtgatcacaggtc

SEQ ID NO: 1700856 - DNA, 15 bp, Homo sapiens
cgtgatcacaggtca

SEQ ID NO: 1700857 - DNA, 15 bp, Homo sapiens
gtgatcacaggtcat

SEQ ID NO: 1700858 - DNA, 15 bp, Homo sapiens
tgatcacaggtcatg

SEQ ID NO: 1700859 - DNA, 15 bp, Homo sapiens
gatcacaggtcatgc

SEQ ID NO: 1700860 - DNA, 15 bp, Homo sapiens
atcacaggtcatgct

SEQ ID NO: 1700861 - DNA, 15 bp, Homo sapiens
tcacaggtcatgctg

SEQ ID NO: 1700862 - DNA, 15 bp, Homo sapiens
cacaggtcatgctga

SEQ ID NO: 1700863 - DNA, 15 bp, Homo sapiens
acaggtcatgctgat

SEQ ID NO: 1700864 - DNA, 15 bp, Homo sapiens
caggtcatgctgatt

SEQ ID NO: 1700865 - DNA, 15 bp, Homo sapiens
aggtcatgctgattc

SEQ ID NO: 1700866 - DNA, 15 bp, Homo sapiens
ggtcatgctgattca

SEQ ID NO: 1700867 - DNA, 15 bp, Homo sapiens
gtcatgctgattcag

SEQ ID NO: 1700868 - DNA, 15 bp, Homo sapiens
tcatgctgattcaga

SEQ ID NO: 1700869 - DNA, 15 bp, Homo sapiens
catgctgattcagag

SEQ ID NO: 1700870 - DNA, 15 bp, Homo sapiens
atgctgattcagaga

SEQ ID NO: 1700871 - DNA, 15 bp, Homo sapiens
tgctgattcagagaa

SEQ ID NO: 1700872 - DNA, 15 bp, Homo sapiens
gctgattcagagaac

SEQ ID NO: 1700873 - DNA, 15 bp, Homo sapiens
ctgattcagagaaca

SEQ ID NO: 1700874 - DNA, 15 bp, Homo sapiens
tgattcagagaacaa

SEQ ID NO: 1700875 - DNA, 15 bp, Homo sapiens
gattcagagaacaaa

SEQ ID NO: 1700876 - DNA, 15 bp, Homo sapiens
attcagagaacaaac

SEQ ID NO: 1700877 - DNA, 15 bp, Homo sapiens
ttcagagaacaaacc

SEQ ID NO: 1700878 - DNA, 15 bp, Homo sapiens
tcagagaacaaacct

SEQ ID NO: 1700879 - DNA, 15 bp, Homo sapiens
cagagaacaaacctg

SEQ ID NO: 1700880 - DNA, 15 bp, Homo sapiens
agagaacaaacctgc

SEQ ID NO: 1700881 - DNA, 15 bp, Homo sapiens
gagaacaaacctgca

SEQ ID NO: 1700882 - DNA, 15 bp, Homo sapiens
agaacaaacctgcac

SEQ ID NO: 1700883 - DNA, 15 bp, Homo sapiens
gaacaaacctgcaca

SEQ ID NO: 1700884 - DNA, 15 bp, Homo sapiens
aacaaacctgcacag

SEQ ID NO: 1700885 - DNA, 15 bp, Homo sapiens
acaaacctgcacagg

SEQ ID NO: 1700886 - DNA, 15 bp, Homo sapiens
caaacctgcacaggc

SEQ ID NO: 1700887 - DNA, 15 bp, Homo sapiens
aaacctgcacaggct

SEQ ID NO: 1700888 - DNA, 15 bp, Homo sapiens
aacctgcacaggctt

SEQ ID NO: 1700889 - DNA, 15 bp, Homo sapiens
acctgcacaggcttc

SEQ ID NO: 1700890 - DNA, 15 bp, Homo sapiens
cctgcacaggcttct

SEQ ID NO: 1700891 - DNA, 15 bp, Homo sapiens
ctgcacaggcttcta

SEQ ID NO: 1700892 - DNA, 15 bp, Homo sapiens
tgcacaggcttctac

SEQ ID NO: 1700893 - DNA, 15 bp, Homo sapiens
gcacaggcttctacc

SEQ ID NO: 1700894 - DNA, 15 bp, Homo sapiens
cacaggcttctacct

SEQ ID NO: 1700895 - DNA, 15 bp, Homo sapiens
acaggcttctacctg

SEQ ID NO: 1700896 - DNA, 15 bp, Homo sapiens
caggcttctacctgg

SEQ ID NO: 1700897 - DNA, 15 bp, Homo sapiens
aggcttctacctggg

SEQ ID NO: 1700898 - DNA, 15 bp, Homo sapiens
ggcttctacctgggc

SEQ ID NO: 1700899 - DNA, 15 bp, Homo sapiens
gcttctacctgggca

SEQ ID NO: 1700900 - DNA, 15 bp, Homo sapiens
cttctacctgggcaa

SEQ ID NO: 1700901 - DNA, 15 bp, Homo sapiens
ttctacctgggcaat

SEQ ID NO: 1700902 - DNA, 15 bp, Homo sapiens
tctacctgggcaatc

SEQ ID NO: 1700903 - DNA, 15 bp, Homo sapiens
ctacctgggcaatcc

SEQ ID NO: 1700904 - DNA, 15 bp, Homo sapiens
tacctgggcaatcct

SEQ ID NO: 1700905 - DNA, 15 bp, Homo sapiens
acctgggcaatcctg

SEQ ID NO: 1700906 - DNA, 15 bp, Homo sapiens
cctgggcaatcctgt

SEQ ID NO: 1700907 - DNA, 15 bp, Homo sapiens
ctgggcaatcctgtc

SEQ ID NO: 1700908 - DNA, 15 bp, Homo sapiens
tgggcaatcctgtcc

SEQ ID NO: 1700909 - DNA, 15 bp, Homo sapiens
gggcaatcctgtcca

SEQ ID NO: 1700910 - DNA, 15 bp, Homo sapiens
ggcaatcctgtccat

SEQ ID NO: 1700911 - DNA, 15 bp, Homo sapiens
gcaatcctgtccatg

SEQ ID NO: 1700912 - DNA, 15 bp, Homo sapiens
caatcctgtccatgg

SEQ ID NO: 1700913 - DNA, 15 bp, Homo sapiens
aatcctgtccatggc

SEQ ID NO: 1700914 - DNA, 15 bp, Homo sapiens
atcctgtccatggca

SEQ ID NO: 1700915 - DNA, 15 bp, Homo sapiens
tcctgtccatggcac

SEQ ID NO: 1700916 - DNA, 15 bp, Homo sapiens
cctgtccatggcact

SEQ ID NO: 1700917 - DNA, 15 bp, Homo sapiens
ctgtccatggcactg

SEQ ID NO: 1700918 - DNA, 15 bp, Homo sapiens
tgtccatggcactgg

SEQ ID NO: 1700919 - DNA, 15 bp, Homo sapiens
gtccatggcactggg

SEQ ID NO: 1700920 - DNA, 15 bp, Homo sapiens
tccatggcactgggg

SEQ ID NO: 1700921 - DNA, 15 bp, Homo sapiens
ccatggcactggggc

SEQ ID NO: 1700922 - DNA, 15 bp, Homo sapiens
catggcactggggca

SEQ ID NO: 1700923 - DNA, 15 bp, Homo sapiens
atggcactggggcag

SEQ ID NO: 1700924 - DNA, 15 bp, Homo sapiens
tggcactggggcagt

SEQ ID NO: 1700925 - DNA, 15 bp, Homo sapiens
ggcactggggcagtt

SEQ ID NO: 1700926 - DNA, 15 bp, Homo sapiens
gcactggggcagttg

SEQ ID NO: 1700927 - DNA, 15 bp, Homo sapiens
cactggggcagttgc

SEQ ID NO: 1700928 - DNA, 15 bp, Homo sapiens
actggggcagttgct

SEQ ID NO: 1700929 - DNA, 15 bp, Homo sapiens
ctggggcagttgctg

SEQ ID NO: 1700930 - DNA, 15 bp, Homo sapiens
tggggcagttgctgc

SEQ ID NO: 1700931 - DNA, 15 bp, Homo sapiens
ggggcagttgctgcc

SEQ ID NO: 1700932 - DNA, 15 bp, Homo sapiens
gggcagttgctgcct

SEQ ID NO: 1700933 - DNA, 15 bp, Homo sapiens
ggcagttgctgcctt

SEQ ID NO: 1700934 - DNA, 15 bp, Homo sapiens
gcagttgctgccttc

SEQ ID NO: 1700935 - DNA, 15 bp, Homo sapiens
cagttgctgccttct

SEQ ID NO: 1700936 - DNA, 15 bp, Homo sapiens
agttgctgccttctc

SEQ ID NO: 1700937 - DNA, 15 bp, Homo sapiens
gttgctgccttctcc

SEQ ID NO: 1700938 - DNA, 15 bp, Homo sapiens
ttgctgccttctcct

SEQ ID NO: 1700939 - DNA, 15 bp, Homo sapiens
tgctgccttctcctt

SEQ ID NO: 1700940 - DNA, 15 bp, Homo sapiens
gctgccttctccttc

SEQ ID NO: 1700941 - DNA, 15 bp, Homo sapiens
ctgccttctccttct

SEQ ID NO: 1700942 - DNA, 15 bp, Homo sapiens
tgccttctccttctt

SEQ ID NO: 1700943 - DNA, 15 bp, Homo sapiens
gccttctccttcttt

SEQ ID NO: 1700944 - DNA, 15 bp, Homo sapiens
ccttctccttctttg

SEQ ID NO: 1700945 - DNA, 15 bp, Homo sapiens
cttctccttctttga

SEQ ID NO: 1700946 - DNA, 15 bp, Homo sapiens
ttctccttctttgag

SEQ ID NO: 1700947 - DNA, 15 bp, Homo sapiens
tctccttctttgagg

SEQ ID NO: 1700948 - DNA, 15 bp, Homo sapiens
ctccttctttgaggt

SEQ ID NO: 1700949 - DNA, 15 bp, Homo sapiens
tccttctttgaggtg

SEQ ID NO: 1700950 - DNA, 15 bp, Homo sapiens
ccttctttgaggtgt

SEQ ID NO: 1700951 - DNA, 15 bp, Homo sapiens
cttctttgaggtgtg

SEQ ID NO: 1700952 - DNA, 15 bp, Homo sapiens
ttctttgaggtgtgt

SEQ ID NO: 1700953 - DNA, 15 bp, Homo sapiens
tctttgaggtgtgta

SEQ ID NO: 1700954 - DNA, 15 bp, Homo sapiens
ctttgaggtgtgtac

SEQ ID NO: 1700955 - DNA, 15 bp, Homo sapiens
tttgaggtgtgtact

SEQ ID NO: 1700956 - DNA, 15 bp, Homo sapiens
ttgaggtgtgtacta

SEQ ID NO: 1700957 - DNA, 15 bp, Homo sapiens
tgaggtgtgtactag

SEQ ID NO: 1700958 - DNA, 15 bp, Homo sapiens
gaggtgtgtactagt

SEQ ID NO: 1700959 - DNA, 15 bp, Homo sapiens
aggtgtgtactagtc

SEQ ID NO: 1700960 - DNA, 15 bp, Homo sapiens
ggtgtgtactagtca

SEQ ID NO: 1700961 - DNA, 15 bp, Homo sapiens
gtgtgtactagtcaa

SEQ ID NO: 1700962 - DNA, 15 bp, Homo sapiens
tgtgtactagtcaaa

SEQ ID NO: 1700963 - DNA, 15 bp, Homo sapiens
gtgtactagtcaaag

SEQ ID NO: 1700964 - DNA, 15 bp, Homo sapiens
tgtactagtcaaaga

SEQ ID NO: 1700965 - DNA, 15 bp, Homo sapiens
gtactagtcaaagat

SEQ ID NO: 1700966 - DNA, 15 bp, Homo sapiens
tactagtcaaagatc

SEQ ID NO: 1700967 - DNA, 15 bp, Homo sapiens
actagtcaaagatct

SEQ ID NO: 1700968 - DNA, 15 bp, Homo sapiens
ctagtcaaagatctc

SEQ ID NO: 1700969 - DNA, 15 bp, Homo sapiens
tagtcaaagatctcc

SEQ ID NO: 1700970 - DNA, 15 bp, Homo sapiens
agtcaaagatctcca

SEQ ID NO: 1700971 - DNA, 15 bp, Homo sapiens
gtcaaagatctccag

SEQ ID NO: 1700972 - DNA, 15 bp, Homo sapiens
tcaaagatctccaga

SEQ ID NO: 1700973 - DNA, 15 bp, Homo sapiens
caaagatctccagag

SEQ ID NO: 1700974 - DNA, 15 bp, Homo sapiens
aaagatctccagaga

SEQ ID NO: 1700975 - DNA, 15 bp, Homo sapiens
aagatctccagagag

SEQ ID NO: 1700976 - DNA, 15 bp, Homo sapiens
agatctccagagaga

SEQ ID NO: 1700977 - DNA, 15 bp, Homo sapiens
gatctccagagagaa

SEQ ID NO: 1700978 - DNA, 15 bp, Homo sapiens
atctccagagagaaa

SEQ ID NO: 1700979 - DNA, 15 bp, Homo sapiens
tctccagagagaaag

SEQ ID NO: 1700980 - DNA, 15 bp, Homo sapiens
ctccagagagaaaga

SEQ ID NO: 1700981 - DNA, 15 bp, Homo sapiens
tccagagagaaagaa

SEQ ID NO: 1700982 - DNA, 15 bp, Homo sapiens
ccagagagaaagaac

SEQ ID NO: 1700983 - DNA, 15 bp, Homo sapiens
cagagagaaagaacc

SEQ ID NO: 1700984 - DNA, 15 bp, Homo sapiens
agagagaaagaacca

SEQ ID NO: 1700985 - DNA, 15 bp, Homo sapiens
gagagaaagaaccag

SEQ ID NO: 1700986 - DNA, 15 bp, Homo sapiens
agagaaagaaccagt

SEQ ID NO: 1700987 - DNA, 15 bp, Homo sapiens
gagaaagaaccagtg

SEQ ID NO: 1700988 - DNA, 15 bp, Homo sapiens
agaaagaaccagtga

SEQ ID NO: 1700989 - DNA, 15 bp, Homo sapiens
gaaagaaccagtgag

SEQ ID NO: 1700990 - DNA, 15 bp, Homo sapiens
aaagaaccagtgaga

SEQ ID NO: 1700991 - DNA, 15 bp, Homo sapiens
aagaaccagtgagat

SEQ ID NO: 1700992 - DNA, 15 bp, Homo sapiens
agaaccagtgagata

SEQ ID NO: 1700993 - DNA, 15 bp, Homo sapiens
gaaccagtgagatat

SEQ ID NO: 1700994 - DNA, 15 bp, Homo sapiens
aaccagtgagatata

SEQ ID NO: 1700995 - DNA, 15 bp, Homo sapiens
accagtgagatatat

SEQ ID NO: 1700996 - DNA, 15 bp, Homo sapiens
ccagtgagatatata

SEQ ID NO: 1700997 - DNA, 15 bp, Homo sapiens
cagtgagatatatat

SEQ ID NO: 1700998 - DNA, 15 bp, Homo sapiens
agtgagatatatata

SEQ ID NO: 1700999 - DNA, 15 bp, Homo sapiens
gtgagatatatatag

SEQ ID NO: 1701000 - DNA, 15 bp, Homo sapiens
tgagatatatataga

SEQ ID NO: 1701001 - DNA, 15 bp, Homo sapiens
gagatatatatagag

SEQ ID NO: 1701002 - DNA, 15 bp, Homo sapiens
agatatatatagaga

SEQ ID NO: 1701003 - DNA, 15 bp, Homo sapiens
gatatatatagagag

SEQ ID NO: 1701004 - DNA, 15 bp, Homo sapiens
atatatatagagaga

SEQ ID NO: 1701005 - DNA, 15 bp, Homo sapiens
tatatatagagagag

SEQ ID NO: 1701006 - DNA, 15 bp, Homo sapiens
atatatagagagaga

SEQ ID NO: 1701007 - DNA, 15 bp, Homo sapiens
tatatagagagagaa

SEQ ID NO: 1701008 - DNA, 15 bp, Homo sapiens
atatagagagagaaa

SEQ ID NO: 1701009 - DNA, 15 bp, Homo sapiens
tatagagagagaaag

SEQ ID NO: 1701010 - DNA, 15 bp, Homo sapiens
atagagagagaaaga

SEQ ID NO: 1701011 - DNA, 15 bp, Homo sapiens
tagagagagaaagag

SEQ ID NO: 1701012 - DNA, 15 bp, Homo sapiens
agaaagagagagagg

SEQ ID NO: 1701013 - DNA, 15 bp, Homo sapiens
gaaagagagagaggg

SEQ ID NO: 1701014 - DNA, 15 bp, Homo sapiens
aaagagagagaggga

SEQ ID NO: 1701015 - DNA, 15 bp, Homo sapiens
aagagagagagggaa

SEQ ID NO: 1701016 - DNA, 15 bp, Homo sapiens
agagagagagggaaa

SEQ ID NO: 1701017 - DNA, 15 bp, Homo sapiens
gagagagagggaaat

SEQ ID NO: 1701018 - DNA, 15 bp, Homo sapiens
agagagagggaaatc

SEQ ID NO: 1701019 - DNA, 15 bp, Homo sapiens
gagagagggaaatct

SEQ ID NO: 1701020 - DNA, 15 bp, Homo sapiens
agagagggaaatctg

SEQ ID NO: 1701021 - DNA, 15 bp, Homo sapiens
gagagggaaatctga

SEQ ID NO: 1701022 - DNA, 15 bp, Homo sapiens
agagggaaatctgag

SEQ ID NO: 1701023 - DNA, 15 bp, Homo sapiens
gagggaaatctgaga

SEQ ID NO: 1701024 - DNA, 15 bp, Homo sapiens
agggaaatctgagag

SEQ ID NO: 1701025 - DNA, 15 bp, Homo sapiens
gggaaatctgagagg

SEQ ID NO: 1701026 - DNA, 15 bp, Homo sapiens
ggaaatctgagaggg

SEQ ID NO: 1701027 - DNA, 15 bp, Homo sapiens
gaaatctgagagggg

SEQ ID NO: 1701028 - DNA, 15 bp, Homo sapiens
aaatctgagagggga

SEQ ID NO: 1701029 - DNA, 15 bp, Homo sapiens
aatctgagaggggac

SEQ ID NO: 1701030 - DNA, 15 bp, Homo sapiens
atctgagaggggact

SEQ ID NO: 1701031 - DNA, 15 bp, Homo sapiens
tctgagaggggactt

SEQ ID NO: 1701032 - DNA, 15 bp, Homo sapiens
ctgagaggggactta

SEQ ID NO: 1701033 - DNA, 15 bp, Homo sapiens
tgagaggggacttat

SEQ ID NO: 1701034 - DNA, 15 bp, Homo sapiens
gagaggggacttatt

SEQ ID NO: 1701035 - DNA, 15 bp, Homo sapiens
agaggggacttatta

SEQ ID NO: 1701036 - DNA, 15 bp, Homo sapiens
gaggggacttattag

SEQ ID NO: 1701037 - DNA, 15 bp, Homo sapiens
aggggacttattagg

SEQ ID NO: 1701038 - DNA, 15 bp, Homo sapiens
ggggacttattaggg

SEQ ID NO: 1701039 - DNA, 15 bp, Homo sapiens
gggacttattagggg

SEQ ID NO: 1701040 - DNA, 15 bp, Homo sapiens
ggacttattagggga

SEQ ID NO: 1701041 - DNA, 15 bp, Homo sapiens
gacttattaggggaa

SEQ ID NO: 1701042 - DNA, 15 bp, Homo sapiens
acttattaggggaat

SEQ ID NO: 1701043 - DNA, 15 bp, Homo sapiens
cttattaggggaatt

SEQ ID NO: 1701044 - DNA, 15 bp, Homo sapiens
ttattaggggaattg

SEQ ID NO: 1701045 - DNA, 15 bp, Homo sapiens
tattaggggaattgg

SEQ ID NO: 1701046 - DNA, 15 bp, Homo sapiens
attaggggaattggc

SEQ ID NO: 1701047 - DNA, 15 bp, Homo sapiens
ttaggggaattggct

SEQ ID NO: 1701048 - DNA, 15 bp, Homo sapiens
taggggaattggctt

SEQ ID NO: 1701049 - DNA, 15 bp, Homo sapiens
aggggaattggctta

SEQ ID NO: 1701050 - DNA, 15 bp, Homo sapiens
ggggaattggcttac

SEQ ID NO: 1701051 - DNA, 15 bp, Homo sapiens
gggaattggcttaca

SEQ ID NO: 1701052 - DNA, 15 bp, Homo sapiens
ggaattggcttacac

SEQ ID NO: 1701053 - DNA, 15 bp, Homo sapiens
gaattggcttacaca

SEQ ID NO: 1701054 - DNA, 15 bp, Homo sapiens
aattggcttacacag

SEQ ID NO: 1701055 - DNA, 15 bp, Homo sapiens
attggcttacacagt

SEQ ID NO: 1701056 - DNA, 15 bp, Homo sapiens
ttggcttacacagtt

SEQ ID NO: 1701057 - DNA, 15 bp, Homo sapiens
tggcttacacagtta

SEQ ID NO: 1701058 - DNA, 15 bp, Homo sapiens
ggcttacacagttat

SEQ ID NO: 1701059 - DNA, 15 bp, Homo sapiens
gcttacacagttatc

SEQ ID NO: 1701060 - DNA, 15 bp, Homo sapiens
cttacacagttatca

SEQ ID NO: 1701061 - DNA, 15 bp, Homo sapiens
ttacacagttatcaa

SEQ ID NO: 1701062 - DNA, 15 bp, Homo sapiens
tacacagttatcaag

SEQ ID NO: 1701063 - DNA, 15 bp, Homo sapiens
acacagttatcaagg

SEQ ID NO: 1701064 - DNA, 15 bp, Homo sapiens
cacagttatcaaggc

SEQ ID NO: 1701065 - DNA, 15 bp, Homo sapiens
acagttatcaaggct

SEQ ID NO: 1701066 - DNA, 15 bp, Homo sapiens
cagttatcaaggctg

SEQ ID NO: 1701067 - DNA, 15 bp, Homo sapiens
agttatcaaggctga

SEQ ID NO: 1701068 - DNA, 15 bp, Homo sapiens
gttatcaaggctgag

SEQ ID NO: 1701069 - DNA, 15 bp, Homo sapiens
ttatcaaggctgaga

SEQ ID NO: 1701070 - DNA, 15 bp, Homo sapiens
tatcaaggctgagag

SEQ ID NO: 1701071 - DNA, 15 bp, Homo sapiens
atcaaggctgagagg

SEQ ID NO: 1701072 - DNA, 15 bp, Homo sapiens
tcaaggctgagaggt

SEQ ID NO: 1701073 - DNA, 15 bp, Homo sapiens
caaggctgagaggtc

SEQ ID NO: 1701074 - DNA, 15 bp, Homo sapiens
aaggctgagaggtcc

SEQ ID NO: 1701075 - DNA, 15 bp, Homo sapiens
aggctgagaggtccc

SEQ ID NO: 1701076 - DNA, 15 bp, Homo sapiens
ggctgagaggtccca

SEQ ID NO: 1701077 - DNA, 15 bp, Homo sapiens
gctgagaggtcccac

SEQ ID NO: 1701078 - DNA, 15 bp, Homo sapiens
ctgagaggtcccacg

SEQ ID NO: 1701079 - DNA, 15 bp, Homo sapiens
tgagaggtcccacga

SEQ ID NO: 1701080 - DNA, 15 bp, Homo sapiens
gagaggtcccacgat

SEQ ID NO: 1701081 - DNA, 15 bp, Homo sapiens
agaggtcccacgata

SEQ ID NO: 1701082 - DNA, 15 bp, Homo sapiens
gaggtcccacgatat

SEQ ID NO: 1701083 - DNA, 15 bp, Homo sapiens
aggtcccacgatatg

SEQ ID NO: 1701084 - DNA, 15 bp, Homo sapiens
ggtcccacgatatgc

SEQ ID NO: 1701085 - DNA, 15 bp, Homo sapiens
gtcccacgatatgct

SEQ ID NO: 1701086 - DNA, 15 bp, Homo sapiens
tcccacgatatgctg

SEQ ID NO: 1701087 - DNA, 15 bp, Homo sapiens
cccacgatatgctgc

SEQ ID NO: 1701088 - DNA, 15 bp, Homo sapiens
ccacgatatgctgcc

SEQ ID NO: 1701089 - DNA, 15 bp, Homo sapiens
cacgatatgctgcct

SEQ ID NO: 1701090 - DNA, 15 bp, Homo sapiens
acgatatgctgcctg

SEQ ID NO: 1701091 - DNA, 15 bp, Homo sapiens
cgatatgctgcctgc

SEQ ID NO: 1701092 - DNA, 15 bp, Homo sapiens
gatatgctgcctgca

SEQ ID NO: 1701093 - DNA, 15 bp, Homo sapiens
atatgctgcctgcaa

SEQ ID NO: 1701094 - DNA, 15 bp, Homo sapiens
tatgctgcctgcaag

SEQ ID NO: 1701095 - DNA, 15 bp, Homo sapiens
atgctgcctgcaagc

SEQ ID NO: 1701096 - DNA, 15 bp, Homo sapiens
tgctgcctgcaagct

SEQ ID NO: 1701097 - DNA, 15 bp, Homo sapiens
gctgcctgcaagctg

SEQ ID NO: 1701098 - DNA, 15 bp, Homo sapiens
ctgcctgcaagctgg

SEQ ID NO: 1701099 - DNA, 15 bp, Homo sapiens
tgcctgcaagctgga

SEQ ID NO: 1701100 - DNA, 15 bp, Homo sapiens
gcctgcaagctggag

SEQ ID NO: 1701101 - DNA, 15 bp, Homo sapiens
cctgcaagctggaga

SEQ ID NO: 1701102 - DNA, 15 bp, Homo sapiens
ctgcaagctggagaa

SEQ ID NO: 1701103 - DNA, 15 bp, Homo sapiens
tgcaagctggagaac

SEQ ID NO: 1701104 - DNA, 15 bp, Homo sapiens
gcaagctggagaacc

SEQ ID NO: 1701105 - DNA, 15 bp, Homo sapiens
caagctggagaacct

SEQ ID NO: 1701106 - DNA, 15 bp, Homo sapiens
aagctggagaacctg

SEQ ID NO: 1701107 - DNA, 15 bp, Homo sapiens
agctggagaacctga

SEQ ID NO: 1701108 - DNA, 15 bp, Homo sapiens
gctggagaacctgaa

SEQ ID NO: 1701109 - DNA, 15 bp, Homo sapiens
ctggagaacctgaaa

SEQ ID NO: 1701110 - DNA, 15 bp, Homo sapiens
tggagaacctgaaaa

SEQ ID NO: 1701111 - DNA, 15 bp, Homo sapiens
ggagaacctgaaaag

SEQ ID NO: 1701112 - DNA, 15 bp, Homo sapiens
gagaacctgaaaagt

SEQ ID NO: 1701113 - DNA, 15 bp, Homo sapiens
agaacctgaaaagtc

SEQ ID NO: 1701114 - DNA, 15 bp, Homo sapiens
gaacctgaaaagtca

SEQ ID NO: 1701115 - DNA, 15 bp, Homo sapiens
aacctgaaaagtcag

SEQ ID NO: 1701116 - DNA, 15 bp, Homo sapiens
acctgaaaagtcagt

SEQ ID NO: 1701117 - DNA, 15 bp, Homo sapiens
cctgaaaagtcagtg

SEQ ID NO: 1701118 - DNA, 15 bp, Homo sapiens
ctgaaaagtcagtgg

SEQ ID NO: 1701119 - DNA, 15 bp, Homo sapiens
tgaaaagtcagtggc

SEQ ID NO: 1701120 - DNA, 15 bp, Homo sapiens
gaaaagtcagtggcg

SEQ ID NO: 1701121 - DNA, 15 bp, Homo sapiens
aaaagtcagtggcgt

SEQ ID NO: 1701122 - DNA, 15 bp, Homo sapiens
aaagtcagtggcgta

SEQ ID NO: 1701123 - DNA, 15 bp, Homo sapiens
aagtcagtggcgtag

SEQ ID NO: 1701124 - DNA, 15 bp, Homo sapiens
agtcagtggcgtaga

SEQ ID NO: 1701125 - DNA, 15 bp, Homo sapiens
gtcagtggcgtagat

SEQ ID NO: 1701126 - DNA, 15 bp, Homo sapiens
tcagtggcgtagatt

SEQ ID NO: 1701127 - DNA, 15 bp, Homo sapiens
cagtggcgtagatta

SEQ ID NO: 1701128 - DNA, 15 bp, Homo sapiens
agtggcgtagattag

SEQ ID NO: 1701129 - DNA, 15 bp, Homo sapiens
gtggcgtagattagt

SEQ ID NO: 1701130 - DNA, 15 bp, Homo sapiens
tggcgtagattagtc

SEQ ID NO: 1701131 - DNA, 15 bp, Homo sapiens
ggcgtagattagtca

SEQ ID NO: 1701132 - DNA, 15 bp, Homo sapiens
gcgtagattagtcaa

SEQ ID NO: 1701133 - DNA, 15 bp, Homo sapiens
cgtagattagtcaaa

SEQ ID NO: 1701134 - DNA, 15 bp, Homo sapiens
gtagattagtcaaag

SEQ ID NO: 1701135 - DNA, 15 bp, Homo sapiens
tagattagtcaaagt

SEQ ID NO: 1701136 - DNA, 15 bp, Homo sapiens
agattagtcaaagtt

SEQ ID NO: 1701137 - DNA, 15 bp, Homo sapiens
gattagtcaaagttc

SEQ ID NO: 1701138 - DNA, 15 bp, Homo sapiens
attagtcaaagttca

SEQ ID NO: 1701139 - DNA, 15 bp, Homo sapiens
ttagtcaaagttcaa

SEQ ID NO: 1701140 - DNA, 15 bp, Homo sapiens
tagtcaaagttcaaa

SEQ ID NO: 1701141 - DNA, 15 bp, Homo sapiens
agtcaaagttcaaaa

SEQ ID NO: 1701142 - DNA, 15 bp, Homo sapiens
gtcaaagttcaaaag

SEQ ID NO: 1701143 - DNA, 15 bp, Homo sapiens
tcaaagttcaaaagc

SEQ ID NO: 1701144 - DNA, 15 bp, Homo sapiens
caaagttcaaaagcc

SEQ ID NO: 1701145 - DNA, 15 bp, Homo sapiens
aaagttcaaaagcct

SEQ ID NO: 1701146 - DNA, 15 bp, Homo sapiens
aagttcaaaagcctc

SEQ ID NO: 1701147 - DNA, 15 bp, Homo sapiens
agttcaaaagcctca

SEQ ID NO: 1701148 - DNA, 15 bp, Homo sapiens
gttcaaaagcctcag

SEQ ID NO: 1701149 - DNA, 15 bp, Homo sapiens
ttcaaaagcctcaga

SEQ ID NO: 1701150 - DNA, 15 bp, Homo sapiens
tcaaaagcctcagaa

SEQ ID NO: 1701151 - DNA, 15 bp, Homo sapiens
caaaagcctcagaac

SEQ ID NO: 1701152 - DNA, 15 bp, Homo sapiens
aaaagcctcagaacc

SEQ ID NO: 1701153 - DNA, 15 bp, Homo sapiens
aaagcctcagaacca

SEQ ID NO: 1701154 - DNA, 15 bp, Homo sapiens
aagcctcagaaccat

SEQ ID NO: 1701155 - DNA, 15 bp, Homo sapiens
agcctcagaaccatg

SEQ ID NO: 1701156 - DNA, 15 bp, Homo sapiens
gcctcagaaccatgg

SEQ ID NO: 1701157 - DNA, 15 bp, Homo sapiens
cctcagaaccatgga

SEQ ID NO: 1701158 - DNA, 15 bp, Homo sapiens
ctcagaaccatggaa

SEQ ID NO: 1701159 - DNA, 15 bp, Homo sapiens
tcagaaccatggaag

SEQ ID NO: 1701160 - DNA, 15 bp, Homo sapiens
cagaaccatggaagt

SEQ ID NO: 1701161 - DNA, 15 bp, Homo sapiens
agaaccatggaagtt

SEQ ID NO: 1701162 - DNA, 15 bp, Homo sapiens
gaaccatggaagttg

SEQ ID NO: 1701163 - DNA, 15 bp, Homo sapiens
aaccatggaagttga

SEQ ID NO: 1701164 - DNA, 15 bp, Homo sapiens
accatggaagttgat

SEQ ID NO: 1701165 - DNA, 15 bp, Homo sapiens
ccatggaagttgatg

SEQ ID NO: 1701166 - DNA, 15 bp, Homo sapiens
catggaagttgatgg

SEQ ID NO: 1701167 - DNA, 15 bp, Homo sapiens
atggaagttgatggt

SEQ ID NO: 1701168 - DNA, 15 bp, Homo sapiens
tggaagttgatggta

SEQ ID NO: 1701169 - DNA, 15 bp, Homo sapiens
ggaagttgatggtat

SEQ ID NO: 1701170 - DNA, 15 bp, Homo sapiens
gaagttgatggtata

SEQ ID NO: 1701171 - DNA, 15 bp, Homo sapiens
aagttgatggtatag

SEQ ID NO: 1701172 - DNA, 15 bp, Homo sapiens
agttgatggtatagc

SEQ ID NO: 1701173 - DNA, 15 bp, Homo sapiens
gttgatggtatagct

SEQ ID NO: 1701174 - DNA, 15 bp, Homo sapiens
ttgatggtatagctc

SEQ ID NO: 1701175 - DNA, 15 bp, Homo sapiens
tgatggtatagctct

SEQ ID NO: 1701176 - DNA, 15 bp, Homo sapiens
gatggtatagctctc

SEQ ID NO: 1701177 - DNA, 15 bp, Homo sapiens
atggtatagctctca

SEQ ID NO: 1701178 - DNA, 15 bp, Homo sapiens
tggtatagctctcag

SEQ ID NO: 1701179 - DNA, 15 bp, Homo sapiens
ggtatagctctcagt

SEQ ID NO: 1701180 - DNA, 15 bp, Homo sapiens
gtatagctctcagtc

SEQ ID NO: 1701181 - DNA, 15 bp, Homo sapiens
tatagctctcagtct

SEQ ID NO: 1701182 - DNA, 15 bp, Homo sapiens
atagctctcagtctg

SEQ ID NO: 1701183 - DNA, 15 bp, Homo sapiens
tagctctcagtctga

SEQ ID NO: 1701184 - DNA, 15 bp, Homo sapiens
agctctcagtctgag

SEQ ID NO: 1701185 - DNA, 15 bp, Homo sapiens
gctctcagtctgaga

SEQ ID NO: 1701186 - DNA, 15 bp, Homo sapiens
ctctcagtctgagac

SEQ ID NO: 1701187 - DNA, 15 bp, Homo sapiens
tctcagtctgagacc

SEQ ID NO: 1701188 - DNA, 15 bp, Homo sapiens
ctcagtctgagacca

SEQ ID NO: 1701189 - DNA, 15 bp, Homo sapiens
tcagtctgagaccaa

SEQ ID NO: 1701190 - DNA, 15 bp, Homo sapiens
cagtctgagaccaaa

SEQ ID NO: 1701191 - DNA, 15 bp, Homo sapiens
agtctgagaccaaag

SEQ ID NO: 1701192 - DNA, 15 bp, Homo sapiens
gtctgagaccaaagg

SEQ ID NO: 1701193 - DNA, 15 bp, Homo sapiens
tctgagaccaaaggc

SEQ ID NO: 1701194 - DNA, 15 bp, Homo sapiens
ctgagaccaaaggcc

SEQ ID NO: 1701195 - DNA, 15 bp, Homo sapiens
tgagaccaaaggcct

SEQ ID NO: 1701196 - DNA, 15 bp, Homo sapiens
gagaccaaaggcctg

SEQ ID NO: 1701197 - DNA, 15 bp, Homo sapiens
agaccaaaggcctga

SEQ ID NO: 1701198 - DNA, 15 bp, Homo sapiens
gaccaaaggcctgag

SEQ ID NO: 1701199 - DNA, 15 bp, Homo sapiens
accaaaggcctgaga

SEQ ID NO: 1701200 - DNA, 15 bp, Homo sapiens
ccaaaggcctgagaa

SEQ ID NO: 1701201 - DNA, 15 bp, Homo sapiens
caaaggcctgagaac

SEQ ID NO: 1701202 - DNA, 15 bp, Homo sapiens
aaaggcctgagaacc

SEQ ID NO: 1701203 - DNA, 15 bp, Homo sapiens
aaggcctgagaaccc

SEQ ID NO: 1701204 - DNA, 15 bp, Homo sapiens
aggcctgagaacccc

SEQ ID NO: 1701205 - DNA, 15 bp, Homo sapiens
ggcctgagaacccct

SEQ ID NO: 1701206 - DNA, 15 bp, Homo sapiens
gcctgagaacccctg

SEQ ID NO: 1701207 - DNA, 15 bp, Homo sapiens
cctgagaacccctgg

SEQ ID NO: 1701208 - DNA, 15 bp, Homo sapiens
ctgagaacccctggg

SEQ ID NO: 1701209 - DNA, 15 bp, Homo sapiens
tgagaacccctgggt

SEQ ID NO: 1701210 - DNA, 15 bp, Homo sapiens
gagaacccctgggtg

SEQ ID NO: 1701211 - DNA, 15 bp, Homo sapiens
agaacccctgggtgg

SEQ ID NO: 1701212 - DNA, 15 bp, Homo sapiens
gaacccctgggtggt

SEQ ID NO: 1701213 - DNA, 15 bp, Homo sapiens
aacccctgggtggtg

SEQ ID NO: 1701214 - DNA, 15 bp, Homo sapiens
acccctgggtggtgg

SEQ ID NO: 1701215 - DNA, 15 bp, Homo sapiens
cccctgggtggtggt

SEQ ID NO: 1701216 - DNA, 15 bp, Homo sapiens
ccctgggtggtggtt

SEQ ID NO: 1701217 - DNA, 15 bp, Homo sapiens
cctgggtggtggttg

SEQ ID NO: 1701218 - DNA, 15 bp, Homo sapiens
ctgggtggtggttgg

SEQ ID NO: 1701219 - DNA, 15 bp, Homo sapiens
tgggtggtggttggg

SEQ ID NO: 1701220 - DNA, 15 bp, Homo sapiens
gggtggtggttgggt

SEQ ID NO: 1701221 - DNA, 15 bp, Homo sapiens
ggtggtggttgggtg

SEQ ID NO: 1701222 - DNA, 15 bp, Homo sapiens
gtggtggttgggtgc

SEQ ID NO: 1701223 - DNA, 15 bp, Homo sapiens
tggtggttgggtgcg

SEQ ID NO: 1701224 - DNA, 15 bp, Homo sapiens
ggtggttgggtgcga

SEQ ID NO: 1701225 - DNA, 15 bp, Homo sapiens
gtggttgggtgcgag

SEQ ID NO: 1701226 - DNA, 15 bp, Homo sapiens
tggttgggtgcgagt

SEQ ID NO: 1701227 - DNA, 15 bp, Homo sapiens
ggttgggtgcgagtc

SEQ ID NO: 1701228 - DNA, 15 bp, Homo sapiens
gttgggtgcgagtcc

SEQ ID NO: 1701229 - DNA, 15 bp, Homo sapiens
ttgggtgcgagtccc

SEQ ID NO: 1701230 - DNA, 15 bp, Homo sapiens
tgggtgcgagtccca

SEQ ID NO: 1701231 - DNA, 15 bp, Homo sapiens
gggtgcgagtcccag

SEQ ID NO: 1701232 - DNA, 15 bp, Homo sapiens
ggtgcgagtcccaga

SEQ ID NO: 1701233 - DNA, 15 bp, Homo sapiens
gtgcgagtcccagaa

SEQ ID NO: 1701234 - DNA, 15 bp, Homo sapiens
tgcgagtcccagaat

SEQ ID NO: 1701235 - DNA, 15 bp, Homo sapiens
gcgagtcccagaatc

SEQ ID NO: 1701236 - DNA, 15 bp, Homo sapiens
cgagtcccagaatcc

SEQ ID NO: 1701237 - DNA, 15 bp, Homo sapiens
gagtcccagaatcca

SEQ ID NO: 1701238 - DNA, 15 bp, Homo sapiens
agtcccagaatccaa

SEQ ID NO: 1701239 - DNA, 15 bp, Homo sapiens
gtcccagaatccaaa

SEQ ID NO: 1701240 - DNA, 15 bp, Homo sapiens
tcccagaatccaaag

SEQ ID NO: 1701241 - DNA, 15 bp, Homo sapiens
cccagaatccaaagg

SEQ ID NO: 1701242 - DNA, 15 bp, Homo sapiens
ccagaatccaaaggc

SEQ ID NO: 1701243 - DNA, 15 bp, Homo sapiens
cagaatccaaaggcc

SEQ ID NO: 1701244 - DNA, 15 bp, Homo sapiens
agaatccaaaggcca

SEQ ID NO: 1701245 - DNA, 15 bp, Homo sapiens
gaatccaaaggccag

SEQ ID NO: 1701246 - DNA, 15 bp, Homo sapiens
aatccaaaggccaga

SEQ ID NO: 1701247 - DNA, 15 bp, Homo sapiens
atccaaaggccagaa

SEQ ID NO: 1701248 - DNA, 15 bp, Homo sapiens
tccaaaggccagaaa

SEQ ID NO: 1701249 - DNA, 15 bp, Homo sapiens
ccaaaggccagaaag

SEQ ID NO: 1701250 - DNA, 15 bp, Homo sapiens
caaaggccagaaagc

SEQ ID NO: 1701251 - DNA, 15 bp, Homo sapiens
aaaggccagaaagcc

SEQ ID NO: 1701252 - DNA, 15 bp, Homo sapiens
aaggccagaaagcct

SEQ ID NO: 1701253 - DNA, 15 bp, Homo sapiens
aggccagaaagcctg

SEQ ID NO: 1701254 - DNA, 15 bp, Homo sapiens
ggccagaaagcctgg

SEQ ID NO: 1701255 - DNA, 15 bp, Homo sapiens
gccagaaagcctgga

SEQ ID NO: 1701256 - DNA, 15 bp, Homo sapiens
ccagaaagcctggag

SEQ ID NO: 1701257 - DNA, 15 bp, Homo sapiens
cagaaagcctggagt

SEQ ID NO: 1701258 - DNA, 15 bp, Homo sapiens
agaaagcctggagtt

SEQ ID NO: 1701259 - DNA, 15 bp, Homo sapiens
gaaagcctggagttc

SEQ ID NO: 1701260 - DNA, 15 bp, Homo sapiens
aaagcctggagttct

SEQ ID NO: 1701261 - DNA, 15 bp, Homo sapiens
aagcctggagttctg

SEQ ID NO: 1701262 - DNA, 15 bp, Homo sapiens
agcctggagttctga

SEQ ID NO: 1701263 - DNA, 15 bp, Homo sapiens
gcctggagttctgat

SEQ ID NO: 1701264 - DNA, 15 bp, Homo sapiens
cctggagttctgatg

SEQ ID NO: 1701265 - DNA, 15 bp, Homo sapiens
ctggagttctgatgt

SEQ ID NO: 1701266 - DNA, 15 bp, Homo sapiens
tggagttctgatgtc

SEQ ID NO: 1701267 - DNA, 15 bp, Homo sapiens
ggagttctgatgtct

SEQ ID NO: 1701268 - DNA, 15 bp, Homo sapiens
gagttctgatgtcta

SEQ ID NO: 1701269 - DNA, 15 bp, Homo sapiens
agttctgatgtctaa

SEQ ID NO: 1701270 - DNA, 15 bp, Homo sapiens
gttctgatgtctaag

SEQ ID NO: 1701271 - DNA, 15 bp, Homo sapiens
ttctgatgtctaagg

SEQ ID NO: 1701272 - DNA, 15 bp, Homo sapiens
tctgatgtctaaggg

SEQ ID NO: 1701273 - DNA, 15 bp, Homo sapiens
ctgatgtctaagggt

SEQ ID NO: 1701274 - DNA, 15 bp, Homo sapiens
tgatgtctaagggta

SEQ ID NO: 1701275 - DNA, 15 bp, Homo sapiens
gatgtctaagggtag

SEQ ID NO: 1701276 - DNA, 15 bp, Homo sapiens
atgtctaagggtagg

SEQ ID NO: 1701277 - DNA, 15 bp, Homo sapiens
tgtctaagggtagga

SEQ ID NO: 1701278 - DNA, 15 bp, Homo sapiens
gtctaagggtaggag

SEQ ID NO: 1701279 - DNA, 15 bp, Homo sapiens
tctaagggtaggaga

SEQ ID NO: 1701280 - DNA, 15 bp, Homo sapiens
ctaagggtaggagaa

SEQ ID NO: 1701281 - DNA, 15 bp, Homo sapiens
taagggtaggagaaa

SEQ ID NO: 1701282 - DNA, 15 bp, Homo sapiens
aagggtaggagaaac

SEQ ID NO: 1701283 - DNA, 15 bp, Homo sapiens
agggtaggagaaaca

SEQ ID NO: 1701284 - DNA, 15 bp, Homo sapiens
gggtaggagaaacag

SEQ ID NO: 1701285 - DNA, 15 bp, Homo sapiens
ggtaggagaaacagg

SEQ ID NO: 1701286 - DNA, 15 bp, Homo sapiens
gtaggagaaacaggg

SEQ ID NO: 1701287 - DNA, 15 bp, Homo sapiens
taggagaaacagggt

SEQ ID NO: 1701288 - DNA, 15 bp, Homo sapiens
aggagaaacagggtg

SEQ ID NO: 1701289 - DNA, 15 bp, Homo sapiens
ggagaaacagggtgt

SEQ ID NO: 1701290 - DNA, 15 bp, Homo sapiens
gagaaacagggtgtc

SEQ ID NO: 1701291 - DNA, 15 bp, Homo sapiens
agaaacagggtgtcc

SEQ ID NO: 1701292 - DNA, 15 bp, Homo sapiens
gaaacagggtgtcct

SEQ ID NO: 1701293 - DNA, 15 bp, Homo sapiens
aaacagggtgtcctg

SEQ ID NO: 1701294 - DNA, 15 bp, Homo sapiens
aacagggtgtcctgg

SEQ ID NO: 1701295 - DNA, 15 bp, Homo sapiens
acagggtgtcctggt

SEQ ID NO: 1701296 - DNA, 15 bp, Homo sapiens
cagggtgtcctggtt

SEQ ID NO: 1701297 - DNA, 15 bp, Homo sapiens
agggtgtcctggttc

SEQ ID NO: 1701298 - DNA, 15 bp, Homo sapiens
gggtgtcctggttcc

SEQ ID NO: 1701299 - DNA, 15 bp, Homo sapiens
ggtgtcctggttcca

SEQ ID NO: 1701300 - DNA, 15 bp, Homo sapiens
gtgtcctggttccaa

SEQ ID NO: 1701301 - DNA, 15 bp, Homo sapiens
tgtcctggttccaag

SEQ ID NO: 1701302 - DNA, 15 bp, Homo sapiens
gtcctggttccaaga

SEQ ID NO: 1701303 - DNA, 15 bp, Homo sapiens
tcctggttccaagag

SEQ ID NO: 1701304 - DNA, 15 bp, Homo sapiens
cctggttccaagaga

SEQ ID NO: 1701305 - DNA, 15 bp, Homo sapiens
ctggttccaagagag

SEQ ID NO: 1701306 - DNA, 15 bp, Homo sapiens
tggttccaagagaga

SEQ ID NO: 1701307 - DNA, 15 bp, Homo sapiens
ggttccaagagagat

SEQ ID NO: 1701308 - DNA, 15 bp, Homo sapiens
gttccaagagagata

SEQ ID NO: 1701309 - DNA, 15 bp, Homo sapiens
ttccaagagagatag

SEQ ID NO: 1701310 - DNA, 15 bp, Homo sapiens
tccaagagagataga

SEQ ID NO: 1701311 - DNA, 15 bp, Homo sapiens
ccaagagagatagaa

SEQ ID NO: 1701312 - DNA, 15 bp, Homo sapiens
caagagagatagaat

SEQ ID NO: 1701313 - DNA, 15 bp, Homo sapiens
aagagagatagaata

SEQ ID NO: 1701314 - DNA, 15 bp, Homo sapiens
agagagatagaatac

SEQ ID NO: 1701315 - DNA, 15 bp, Homo sapiens
gagagatagaatacg

SEQ ID NO: 1701316 - DNA, 15 bp, Homo sapiens
agagatagaatacgt

SEQ ID NO: 1701317 - DNA, 15 bp, Homo sapiens
gagatagaatacgta

SEQ ID NO: 1701318 - DNA, 15 bp, Homo sapiens
agatagaatacgtat

SEQ ID NO: 1701319 - DNA, 15 bp, Homo sapiens
gatagaatacgtatg

SEQ ID NO: 1701320 - DNA, 15 bp, Homo sapiens
atagaatacgtatgt

SEQ ID NO: 1701321 - DNA, 15 bp, Homo sapiens
tagaatacgtatgtg

SEQ ID NO: 1701322 - DNA, 15 bp, Homo sapiens
agaatacgtatgtgg

SEQ ID NO: 1701323 - DNA, 15 bp, Homo sapiens
gaatacgtatgtggc

SEQ ID NO: 1701324 - DNA, 15 bp, Homo sapiens
aatacgtatgtggct

SEQ ID NO: 1701325 - DNA, 15 bp, Homo sapiens
atacgtatgtggctt

SEQ ID NO: 1701326 - DNA, 15 bp, Homo sapiens
tacgtatgtggcttt

SEQ ID NO: 1701327 - DNA, 15 bp, Homo sapiens
acgtatgtggctttc

SEQ ID NO: 1701328 - DNA, 15 bp, Homo sapiens
cgtatgtggctttcc

SEQ ID NO: 1701329 - DNA, 15 bp, Homo sapiens
gtatgtggctttcct

SEQ ID NO: 1701330 - DNA, 15 bp, Homo sapiens
tatgtggctttcctc

SEQ ID NO: 1701331 - DNA, 15 bp, Homo sapiens
atgtggctttcctct

SEQ ID NO: 1701332 - DNA, 15 bp, Homo sapiens
tgtggctttcctctg

SEQ ID NO: 1701333 - DNA, 15 bp, Homo sapiens
gtggctttcctctgc

SEQ ID NO: 1701334 - DNA, 15 bp, Homo sapiens
tggctttcctctgcc

SEQ ID NO: 1701335 - DNA, 15 bp, Homo sapiens
ggctttcctctgcct

SEQ ID NO: 1701336 - DNA, 15 bp, Homo sapiens
gctttcctctgcctt

SEQ ID NO: 1701337 - DNA, 15 bp, Homo sapiens
ctttcctctgccttt

SEQ ID NO: 1701338 - DNA, 15 bp, Homo sapiens
tttcctctgcctttt

SEQ ID NO: 1701339 - DNA, 15 bp, Homo sapiens
ttcctctgccttttt

SEQ ID NO: 1701340 - DNA, 15 bp, Homo sapiens
tcctctgcctttttc

SEQ ID NO: 1701341 - DNA, 15 bp, Homo sapiens
cctctgcctttttct

SEQ ID NO: 1701342 - DNA, 15 bp, Homo sapiens
ctctgcctttttctt

SEQ ID NO: 1701343 - DNA, 15 bp, Homo sapiens
tctgcctttttcttc

SEQ ID NO: 1701344 - DNA, 15 bp, Homo sapiens
ctgcctttttcttcc

SEQ ID NO: 1701345 - DNA, 15 bp, Homo sapiens
tgcctttttcttcca

SEQ ID NO: 1701346 - DNA, 15 bp, Homo sapiens
gcctttttcttccat

SEQ ID NO: 1701347 - DNA, 15 bp, Homo sapiens
cctttttcttccatc

SEQ ID NO: 1701348 - DNA, 15 bp, Homo sapiens
ctttttcttccatct

SEQ ID NO: 1701349 - DNA, 15 bp, Homo sapiens
tttttcttccatctg

SEQ ID NO: 1701350 - DNA, 15 bp, Homo sapiens
ttttcttccatctgg

SEQ ID NO: 1701351 - DNA, 15 bp, Homo sapiens
tttcttccatctggg

SEQ ID NO: 1701352 - DNA, 15 bp, Homo sapiens
ttcttccatctggga

SEQ ID NO: 1701353 - DNA, 15 bp, Homo sapiens
tcttccatctgggat

SEQ ID NO: 1701354 - DNA, 15 bp, Homo sapiens
cttccatctgggatt

SEQ ID NO: 1701355 - DNA, 15 bp, Homo sapiens
ttccatctgggattc

SEQ ID NO: 1701356 - DNA, 15 bp, Homo sapiens
tccatctgggattcc

SEQ ID NO: 1701357 - DNA, 15 bp, Homo sapiens
ccatctgggattcca

SEQ ID NO: 1701358 - DNA, 15 bp, Homo sapiens
catctgggattccag

SEQ ID NO: 1701359 - DNA, 15 bp, Homo sapiens
atctgggattccagc

SEQ ID NO: 1701360 - DNA, 15 bp, Homo sapiens
tctgggattccagcc

SEQ ID NO: 1701361 - DNA, 15 bp, Homo sapiens
ctgggattccagccc

SEQ ID NO: 1701362 - DNA, 15 bp, Homo sapiens
tgggattccagccca

SEQ ID NO: 1701363 - DNA, 15 bp, Homo sapiens
gggattccagcccat

SEQ ID NO: 1701364 - DNA, 15 bp, Homo sapiens
ggattccagcccatt

SEQ ID NO: 1701365 - DNA, 15 bp, Homo sapiens
gattccagcccattg

SEQ ID NO: 1701366 - DNA, 15 bp, Homo sapiens
attccagcccattgg

SEQ ID NO: 1701367 - DNA, 15 bp, Homo sapiens
ttccagcccattggg

SEQ ID NO: 1701368 - DNA, 15 bp, Homo sapiens
tccagcccattgggt

SEQ ID NO: 1701369 - DNA, 15 bp, Homo sapiens
ccagcccattgggtg

SEQ ID NO: 1701370 - DNA, 15 bp, Homo sapiens
cagcccattgggtgg

SEQ ID NO: 1701371 - DNA, 15 bp, Homo sapiens
agcccattgggtggt

SEQ ID NO: 1701372 - DNA, 15 bp, Homo sapiens
gcccattgggtggtt

SEQ ID NO: 1701373 - DNA, 15 bp, Homo sapiens
cccattgggtggttc

SEQ ID NO: 1701374 - DNA, 15 bp, Homo sapiens
ccattgggtggttcc

SEQ ID NO: 1701375 - DNA, 15 bp, Homo sapiens
cattgggtggttccc

SEQ ID NO: 1701376 - DNA, 15 bp, Homo sapiens
attgggtggttcccg

SEQ ID NO: 1701377 - DNA, 15 bp, Homo sapiens
ttgggtggttcccgc

SEQ ID NO: 1701378 - DNA, 15 bp, Homo sapiens
tgggtggttcccgcc

SEQ ID NO: 1701379 - DNA, 15 bp, Homo sapiens
ggtggttcccgccca

SEQ ID NO: 1701380 - DNA, 15 bp, Homo sapiens
gtggttcccgcccac

SEQ ID NO: 1701381 - DNA, 15 bp, Homo sapiens
tggttcccgcccaca

SEQ ID NO: 1701382 - DNA, 15 bp, Homo sapiens
ggttcccgcccacaa

SEQ ID NO: 1701383 - DNA, 15 bp, Homo sapiens
gttcccgcccacaat

SEQ ID NO: 1701384 - DNA, 15 bp, Homo sapiens
ttcccgcccacaatg

SEQ ID NO: 1701385 - DNA, 15 bp, Homo sapiens
tcccgcccacaatga

SEQ ID NO: 1701386 - DNA, 15 bp, Homo sapiens
cccgcccacaatgag

SEQ ID NO: 1701387 - DNA, 15 bp, Homo sapiens
ccgcccacaatgagg

SEQ ID NO: 1701388 - DNA, 15 bp, Homo sapiens
cgcccacaatgagga

SEQ ID NO: 1701389 - DNA, 15 bp, Homo sapiens
gcccacaatgaggaa

SEQ ID NO: 1701390 - DNA, 15 bp, Homo sapiens
cccacaatgaggaaa

SEQ ID NO: 1701391 - DNA, 15 bp, Homo sapiens
ccacaatgaggaaag

SEQ ID NO: 1701392 - DNA, 15 bp, Homo sapiens
cacaatgaggaaaga

SEQ ID NO: 1701393 - DNA, 15 bp, Homo sapiens
acaatgaggaaagat

SEQ ID NO: 1701394 - DNA, 15 bp, Homo sapiens
caatgaggaaagatc

SEQ ID NO: 1701395 - DNA, 15 bp, Homo sapiens
aatgaggaaagatct

SEQ ID NO: 1701396 - DNA, 15 bp, Homo sapiens
atgaggaaagatctt

SEQ ID NO: 1701397 - DNA, 15 bp, Homo sapiens
tgaggaaagatcttc

SEQ ID NO: 1701398 - DNA, 15 bp, Homo sapiens
gaggaaagatcttcc

SEQ ID NO: 1701399 - DNA, 15 bp, Homo sapiens
aggaaagatcttccc

SEQ ID NO: 1701400 - DNA, 15 bp, Homo sapiens
ggaaagatcttcccc

SEQ ID NO: 1701401 - DNA, 15 bp, Homo sapiens
gaaagatcttcccca

SEQ ID NO: 1701402 - DNA, 15 bp, Homo sapiens
aaagatcttccccac

SEQ ID NO: 1701403 - DNA, 15 bp, Homo sapiens
aagatcttccccact

SEQ ID NO: 1701404 - DNA, 15 bp, Homo sapiens
agatcttccccactc

SEQ ID NO: 1701405 - DNA, 15 bp, Homo sapiens
gatcttccccactca

SEQ ID NO: 1701406 - DNA, 15 bp, Homo sapiens
atcttccccactcag

SEQ ID NO: 1701407 - DNA, 15 bp, Homo sapiens
tcttccccactcagt

SEQ ID NO: 1701408 - DNA, 15 bp, Homo sapiens
cttccccactcagtc

SEQ ID NO: 1701409 - DNA, 15 bp, Homo sapiens
ttccccactcagtcc

SEQ ID NO: 1701410 - DNA, 15 bp, Homo sapiens
tccccactcagtcca

SEQ ID NO: 1701411 - DNA, 15 bp, Homo sapiens
ccccactcagtccac

SEQ ID NO: 1701412 - DNA, 15 bp, Homo sapiens
cccactcagtccact

SEQ ID NO: 1701413 - DNA, 15 bp, Homo sapiens
ccactcagtccactg

SEQ ID NO: 1701414 - DNA, 15 bp, Homo sapiens
cactcagtccactga

SEQ ID NO: 1701415 - DNA, 15 bp, Homo sapiens
actcagtccactgac

SEQ ID NO: 1701416 - DNA, 15 bp, Homo sapiens
ctcagtccactgact

SEQ ID NO: 1701417 - DNA, 15 bp, Homo sapiens
tcagtccactgactc

SEQ ID NO: 1701418 - DNA, 15 bp, Homo sapiens
cagtccactgactca

SEQ ID NO: 1701419 - DNA, 15 bp, Homo sapiens
agtccactgactcac

SEQ ID NO: 1701420 - DNA, 15 bp, Homo sapiens
gtccactgactcaca

SEQ ID NO: 1701421 - DNA, 15 bp, Homo sapiens
tccactgactcacat

SEQ ID NO: 1701422 - DNA, 15 bp, Homo sapiens
ccactgactcacatg

SEQ ID NO: 1701423 - DNA, 15 bp, Homo sapiens
cactgactcacatgc

SEQ ID NO: 1701424 - DNA, 15 bp, Homo sapiens
actgactcacatgcc

SEQ ID NO: 1701425 - DNA, 15 bp, Homo sapiens
ctgactcacatgcca

SEQ ID NO: 1701426 - DNA, 15 bp, Homo sapiens
tgactcacatgccaa

SEQ ID NO: 1701427 - DNA, 15 bp, Homo sapiens
gactcacatgccaat

SEQ ID NO: 1701428 - DNA, 15 bp, Homo sapiens
actcacatgccaatc

SEQ ID NO: 1701429 - DNA, 15 bp, Homo sapiens
ctcacatgccaatcc

SEQ ID NO: 1701430 - DNA, 15 bp, Homo sapiens
tcacatgccaatccc

SEQ ID NO: 1701431 - DNA, 15 bp, Homo sapiens
cacatgccaatcccc

SEQ ID NO: 1701432 - DNA, 15 bp, Homo sapiens
acatgccaatcccct

SEQ ID NO: 1701433 - DNA, 15 bp, Homo sapiens
catgccaatcccctc

SEQ ID NO: 1701434 - DNA, 15 bp, Homo sapiens
atgccaatcccctcc

SEQ ID NO: 1701435 - DNA, 15 bp, Homo sapiens
tgccaatcccctcca

SEQ ID NO: 1701436 - DNA, 15 bp, Homo sapiens
gccaatcccctccag

SEQ ID NO: 1701437 - DNA, 15 bp, Homo sapiens
ccaatcccctccaga

SEQ ID NO: 1701438 - DNA, 15 bp, Homo sapiens
caatcccctccagaa

SEQ ID NO: 1701439 - DNA, 15 bp, Homo sapiens
aatcccctccagaaa

SEQ ID NO: 1701440 - DNA, 15 bp, Homo sapiens
atcccctccagaaac

SEQ ID NO: 1701441 - DNA, 15 bp, Homo sapiens
tcccctccagaaaca

SEQ ID NO: 1701442 - DNA, 15 bp, Homo sapiens
cccctccagaaacac

SEQ ID NO: 1701443 - DNA, 15 bp, Homo sapiens
ccctccagaaacacc

SEQ ID NO: 1701444 - DNA, 15 bp, Homo sapiens
cctccagaaacaccc

SEQ ID NO: 1701445 - DNA, 15 bp, Homo sapiens
ctccagaaacaccct

SEQ ID NO: 1701446 - DNA, 15 bp, Homo sapiens
tccagaaacaccctc

SEQ ID NO: 1701447 - DNA, 15 bp, Homo sapiens
ccagaaacaccctca

SEQ ID NO: 1701448 - DNA, 15 bp, Homo sapiens
cagaaacaccctcat

SEQ ID NO: 1701449 - DNA, 15 bp, Homo sapiens
agaaacaccctcata

SEQ ID NO: 1701450 - DNA, 15 bp, Homo sapiens
gaaacaccctcatag

SEQ ID NO: 1701451 - DNA, 15 bp, Homo sapiens
aaacaccctcataga

SEQ ID NO: 1701452 - DNA, 15 bp, Homo sapiens
aacaccctcatagac

SEQ ID NO: 1701453 - DNA, 15 bp, Homo sapiens
acaccctcatagaca

SEQ ID NO: 1701454 - DNA, 15 bp, Homo sapiens
caccctcatagacat

SEQ ID NO: 1701455 - DNA, 15 bp, Homo sapiens
accctcatagacata

SEQ ID NO: 1701456 - DNA, 15 bp, Homo sapiens
ccctcatagacatag

SEQ ID NO: 1701457 - DNA, 15 bp, Homo sapiens
cctcatagacataga

SEQ ID NO: 1701458 - DNA, 15 bp, Homo sapiens
ctcatagacatagac

SEQ ID NO: 1701459 - DNA, 15 bp, Homo sapiens
tcatagacatagaca

SEQ ID NO: 1701460 - DNA, 15 bp, Homo sapiens
catagacatagacac

SEQ ID NO: 1701461 - DNA, 15 bp, Homo sapiens
atagacatagacaca

SEQ ID NO: 1701462 - DNA, 15 bp, Homo sapiens
tagacatagacacac

SEQ ID NO: 1701463 - DNA, 15 bp, Homo sapiens
agacatagacacacc

SEQ ID NO: 1701464 - DNA, 15 bp, Homo sapiens
gacatagacacaccc

SEQ ID NO: 1701465 - DNA, 15 bp, Homo sapiens
acatagacacacccc

SEQ ID NO: 1701466 - DNA, 15 bp, Homo sapiens
catagacacacccca

SEQ ID NO: 1701467 - DNA, 15 bp, Homo sapiens
atagacacaccccaa

SEQ ID NO: 1701468 - DNA, 15 bp, Homo sapiens
tagacacaccccaaa

SEQ ID NO: 1701469 - DNA, 15 bp, Homo sapiens
agacacaccccaaaa

SEQ ID NO: 1701470 - DNA, 15 bp, Homo sapiens
gacacaccccaaaat

SEQ ID NO: 1701471 - DNA, 15 bp, Homo sapiens
acacaccccaaaata

SEQ ID NO: 1701472 - DNA, 15 bp, Homo sapiens
cacaccccaaaataa

SEQ ID NO: 1701473 - DNA, 15 bp, Homo sapiens
acaccccaaaataat

SEQ ID NO: 1701474 - DNA, 15 bp, Homo sapiens
caccccaaaataatg

SEQ ID NO: 1701475 - DNA, 15 bp, Homo sapiens
accccaaaataatgc

SEQ ID NO: 1701476 - DNA, 15 bp, Homo sapiens
ccccaaaataatgct

SEQ ID NO: 1701477 - DNA, 15 bp, Homo sapiens
cccaaaataatgctt

SEQ ID NO: 1701478 - DNA, 15 bp, Homo sapiens
ccaaaataatgcttt

SEQ ID NO: 1701479 - DNA, 15 bp, Homo sapiens
caaaataatgcttta

SEQ ID NO: 1701480 - DNA, 15 bp, Homo sapiens
aaaataatgctttac

SEQ ID NO: 1701481 - DNA, 15 bp, Homo sapiens
aaataatgctttact

SEQ ID NO: 1701482 - DNA, 15 bp, Homo sapiens
aataatgctttacta

SEQ ID NO: 1701483 - DNA, 15 bp, Homo sapiens
ataatgctttactat

SEQ ID NO: 1701484 - DNA, 15 bp, Homo sapiens
taatgctttactatc

SEQ ID NO: 1701485 - DNA, 15 bp, Homo sapiens
aatgctttactatct

SEQ ID NO: 1701486 - DNA, 15 bp, Homo sapiens
atgctttactatcta

SEQ ID NO: 1701487 - DNA, 15 bp, Homo sapiens
tgctttactatctat

SEQ ID NO: 1701488 - DNA, 15 bp, Homo sapiens
gctttactatctatt

SEQ ID NO: 1701489 - DNA, 15 bp, Homo sapiens
ctttactatctattc

SEQ ID NO: 1701490 - DNA, 15 bp, Homo sapiens
tttactatctattca

SEQ ID NO: 1701491 - DNA, 15 bp, Homo sapiens
ttactatctattcag

SEQ ID NO: 1701492 - DNA, 15 bp, Homo sapiens
tactatctattcagg

SEQ ID NO: 1701493 - DNA, 15 bp, Homo sapiens
actatctattcaggt

SEQ ID NO: 1701494 - DNA, 15 bp, Homo sapiens
ctatctattcaggta

SEQ ID NO: 1701495 - DNA, 15 bp, Homo sapiens
tatctattcaggtat

SEQ ID NO: 1701496 - DNA, 15 bp, Homo sapiens
atctattcaggtatc

SEQ ID NO: 1701497 - DNA, 15 bp, Homo sapiens
tctattcaggtatcc

SEQ ID NO: 1701498 - DNA, 15 bp, Homo sapiens
ctattcaggtatccc

SEQ ID NO: 1701499 - DNA, 15 bp, Homo sapiens
tattcaggtatccct

SEQ ID NO: 1701500 - DNA, 15 bp, Homo sapiens
attcaggtatccctt

SEQ ID NO: 1701501 - DNA, 15 bp, Homo sapiens
ttcaggtatcccttc

SEQ ID NO: 1701502 - DNA, 15 bp, Homo sapiens
tcaggtatcccttca

SEQ ID NO: 1701503 - DNA, 15 bp, Homo sapiens
caggtatcccttcat

SEQ ID NO: 1701504 - DNA, 15 bp, Homo sapiens
aggtatcccttcatc

SEQ ID NO: 1701505 - DNA, 15 bp, Homo sapiens
ggtatcccttcatcc

SEQ ID NO: 1701506 - DNA, 15 bp, Homo sapiens
gtatcccttcatcca

SEQ ID NO: 1701507 - DNA, 15 bp, Homo sapiens
tatcccttcatccag

SEQ ID NO: 1701508 - DNA, 15 bp, Homo sapiens
atcccttcatccagt

SEQ ID NO: 1701509 - DNA, 15 bp, Homo sapiens
tcccttcatccagtc

SEQ ID NO: 1701510 - DNA, 15 bp, Homo sapiens
cccttcatccagtca

SEQ ID NO: 1701511 - DNA, 15 bp, Homo sapiens
ccttcatccagtcaa

SEQ ID NO: 1701512 - DNA, 15 bp, Homo sapiens
cttcatccagtcaag

SEQ ID NO: 1701513 - DNA, 15 bp, Homo sapiens
ttcatccagtcaagg

SEQ ID NO: 1701514 - DNA, 15 bp, Homo sapiens
tcatccagtcaaggt

SEQ ID NO: 1701515 - DNA, 15 bp, Homo sapiens
catccagtcaaggtg

SEQ ID NO: 1701516 - DNA, 15 bp, Homo sapiens
atccagtcaaggtga

SEQ ID NO: 1701517 - DNA, 15 bp, Homo sapiens
tccagtcaaggtgac

SEQ ID NO: 1701518 - DNA, 15 bp, Homo sapiens
ccagtcaaggtgaca

SEQ ID NO: 1701519 - DNA, 15 bp, Homo sapiens
cagtcaaggtgacac

SEQ ID NO: 1701520 - DNA, 15 bp, Homo sapiens
agtcaaggtgacaca

SEQ ID NO: 1701521 - DNA, 15 bp, Homo sapiens
gtcaaggtgacacat

SEQ ID NO: 1701522 - DNA, 15 bp, Homo sapiens
tcaaggtgacacata

SEQ ID NO: 1701523 - DNA, 15 bp, Homo sapiens
caaggtgacacataa

SEQ ID NO: 1701524 - DNA, 15 bp, Homo sapiens
aaggtgacacataaa

SEQ ID NO: 1701525 - DNA, 15 bp, Homo sapiens
aggtgacacataaaa

SEQ ID NO: 1701526 - DNA, 15 bp, Homo sapiens
ggtgacacataaaat

SEQ ID NO: 1701527 - DNA, 15 bp, Homo sapiens
gtgacacataaaatt

SEQ ID NO: 1701528 - DNA, 15 bp, Homo sapiens
tgacacataaaatta

SEQ ID NO: 1701529 - DNA, 15 bp, Homo sapiens
gacacataaaattaa

SEQ ID NO: 1701530 - DNA, 15 bp, Homo sapiens
acacataaaattaac

SEQ ID NO: 1701531 - DNA, 15 bp, Homo sapiens
cacataaaattaacc

SEQ ID NO: 1701532 - DNA, 15 bp, Homo sapiens
acataaaattaacca

SEQ ID NO: 1701533 - DNA, 15 bp, Homo sapiens
cataaaattaaccat

SEQ ID NO: 1701534 - DNA, 15 bp, Homo sapiens
ataaaattaaccatc

SEQ ID NO: 1701535 - DNA, 15 bp, Homo sapiens
taaaattaaccatca

SEQ ID NO: 1701536 - DNA, 15 bp, Homo sapiens
aaaattaaccatcat

SEQ ID NO: 1701537 - DNA, 15 bp, Homo sapiens
aaattaaccatcata

SEQ ID NO: 1701538 - DNA, 15 bp, Homo sapiens
aattaaccatcatag

SEQ ID NO: 1701539 - DNA, 15 bp, Homo sapiens
attaaccatcataga

SEQ ID NO: 1701540 - DNA, 15 bp, Homo sapiens
ttaaccatcatagag

SEQ ID NO: 1701541 - DNA, 15 bp, Homo sapiens
taaccatcatagagt

SEQ ID NO: 1701542 - DNA, 15 bp, Homo sapiens
aaccatcatagagtg

SEQ ID NO: 1701543 - DNA, 15 bp, Homo sapiens
accatcatagagtgt

SEQ ID NO: 1701544 - DNA, 15 bp, Homo sapiens
ccatcatagagtgtg

SEQ ID NO: 1701545 - DNA, 15 bp, Homo sapiens
catcatagagtgtgc

SEQ ID NO: 1701546 - DNA, 15 bp, Homo sapiens
atcatagagtgtgct

SEQ ID NO: 1701547 - DNA, 15 bp, Homo sapiens
tcatagagtgtgctc

SEQ ID NO: 1701548 - DNA, 15 bp, Homo sapiens
catagagtgtgctct

SEQ ID NO: 1701549 - DNA, 15 bp, Homo sapiens
atagagtgtgctctc

SEQ ID NO: 1701550 - DNA, 15 bp, Homo sapiens
tagagtgtgctctca

SEQ ID NO: 1701551 - DNA, 15 bp, Homo sapiens
agagtgtgctctcag

SEQ ID NO: 1701552 - DNA, 15 bp, Homo sapiens
gagtgtgctctcaga

SEQ ID NO: 1701553 - DNA, 15 bp, Homo sapiens
agtgtgctctcagat

SEQ ID NO: 1701554 - DNA, 15 bp, Homo sapiens
gtgtgctctcagatt

SEQ ID NO: 1701555 - DNA, 15 bp, Homo sapiens
tgtgctctcagattg

SEQ ID NO: 1701556 - DNA, 15 bp, Homo sapiens
gtgctctcagattga

SEQ ID NO: 1701557 - DNA, 15 bp, Homo sapiens
tgctctcagattgac

SEQ ID NO: 1701558 - DNA, 15 bp, Homo sapiens
gctctcagattgact

SEQ ID NO: 1701559 - DNA, 15 bp, Homo sapiens
ctctcagattgactt

SEQ ID NO: 1701560 - DNA, 15 bp, Homo sapiens
tctcagattgacttt

SEQ ID NO: 1701561 - DNA, 15 bp, Homo sapiens
ctcagattgactttc

SEQ ID NO: 1701562 - DNA, 15 bp, Homo sapiens
tcagattgactttcc

SEQ ID NO: 1701563 - DNA, 15 bp, Homo sapiens
cagattgactttcca

SEQ ID NO: 1701564 - DNA, 15 bp, Homo sapiens
agattgactttccat

SEQ ID NO: 1701565 - DNA, 15 bp, Homo sapiens
gattgactttccatt

SEQ ID NO: 1701566 - DNA, 15 bp, Homo sapiens
attgactttccattc

SEQ ID NO: 1701567 - DNA, 15 bp, Homo sapiens
ttgactttccattcc

SEQ ID NO: 1701568 - DNA, 15 bp, Homo sapiens
tgactttccattcca

SEQ ID NO: 1701569 - DNA, 15 bp, Homo sapiens
gactttccattccag

SEQ ID NO: 1701570 - DNA, 15 bp, Homo sapiens
actttccattccaga

SEQ ID NO: 1701571 - DNA, 15 bp, Homo sapiens
ctttccattccagat

SEQ ID NO: 1701572 - DNA, 15 bp, Homo sapiens
tttccattccagatt

SEQ ID NO: 1701573 - DNA, 15 bp, Homo sapiens
ttccattccagattt

SEQ ID NO: 1701574 - DNA, 15 bp, Homo sapiens
tccattccagattta

SEQ ID NO: 1701575 - DNA, 15 bp, Homo sapiens
ccattccagatttac

SEQ ID NO: 1701576 - DNA, 15 bp, Homo sapiens
cattccagatttact

SEQ ID NO: 1701577 - DNA, 15 bp, Homo sapiens
attccagatttactg

SEQ ID NO: 1701578 - DNA, 15 bp, Homo sapiens
ttccagatttactgg

SEQ ID NO: 1701579 - DNA, 15 bp, Homo sapiens
tccagatttactggt

SEQ ID NO: 1701580 - DNA, 15 bp, Homo sapiens
ccagatttactggtt

SEQ ID NO: 1701581 - DNA, 15 bp, Homo sapiens
cagatttactggttt

SEQ ID NO: 1701582 - DNA, 15 bp, Homo sapiens
agatttactggttta

SEQ ID NO: 1701583 - DNA, 15 bp, Homo sapiens
gatttactggtttac

SEQ ID NO: 1701584 - DNA, 15 bp, Homo sapiens
atttactggtttact

SEQ ID NO: 1701585 - DNA, 15 bp, Homo sapiens
tttactggtttactg

SEQ ID NO: 1701586 - DNA, 15 bp, Homo sapiens
ttactggtttactgt

SEQ ID NO: 1701587 - DNA, 15 bp, Homo sapiens
tactggtttactgtg

SEQ ID NO: 1701588 - DNA, 15 bp, Homo sapiens
actggtttactgtgg

SEQ ID NO: 1701589 - DNA, 15 bp, Homo sapiens
ctggtttactgtgga

SEQ ID NO: 1701590 - DNA, 15 bp, Homo sapiens
tggtttactgtggag

SEQ ID NO: 1701591 - DNA, 15 bp, Homo sapiens
ggtttactgtggagt

SEQ ID NO: 1701592 - DNA, 15 bp, Homo sapiens
gtttactgtggagtt

SEQ ID NO: 1701593 - DNA, 15 bp, Homo sapiens
tttactgtggagttt

SEQ ID NO: 1701594 - DNA, 15 bp, Homo sapiens
ttactgtggagtttg

SEQ ID NO: 1701595 - DNA, 15 bp, Homo sapiens
tactgtggagtttgg

SEQ ID NO: 1701596 - DNA, 15 bp, Homo sapiens
actgtggagtttggg

SEQ ID NO: 1701597 - DNA, 15 bp, Homo sapiens
ctgtggagtttgggc

SEQ ID NO: 1701598 - DNA, 15 bp, Homo sapiens
tgtggagtttgggct

SEQ ID NO: 1701599 - DNA, 15 bp, Homo sapiens
gtggagtttgggctc

SEQ ID NO: 1701600 - DNA, 15 bp, Homo sapiens
tggagtttgggctct

SEQ ID NO: 1701601 - DNA, 15 bp, Homo sapiens
ggagtttgggctctg

SEQ ID NO: 1701602 - DNA, 15 bp, Homo sapiens
gagtttgggctctgc

SEQ ID NO: 1701603 - DNA, 15 bp, Homo sapiens
agtttgggctctgca

SEQ ID NO: 1701604 - DNA, 15 bp, Homo sapiens
gtttgggctctgcaa

SEQ ID NO: 1701605 - DNA, 15 bp, Homo sapiens
tttgggctctgcaaa

SEQ ID NO: 1701606 - DNA, 15 bp, Homo sapiens
ttgggctctgcaaac

SEQ ID NO: 1701607 - DNA, 15 bp, Homo sapiens
tgggctctgcaaaca

SEQ ID NO: 1701608 - DNA, 15 bp, Homo sapiens
gggctctgcaaacaa

SEQ ID NO: 1701609 - DNA, 15 bp, Homo sapiens
ggctctgcaaacaag

SEQ ID NO: 1701610 - DNA, 15 bp, Homo sapiens
gctctgcaaacaagg

SEQ ID NO: 1701611 - DNA, 15 bp, Homo sapiens
ctctgcaaacaagga

SEQ ID NO: 1701612 - DNA, 15 bp, Homo sapiens
tctgcaaacaaggag

SEQ ID NO: 1701613 - DNA, 15 bp, Homo sapiens
ctgcaaacaaggaga

SEQ ID NO: 1701614 - DNA, 15 bp, Homo sapiens
tgcaaacaaggagac

SEQ ID NO: 1701615 - DNA, 15 bp, Homo sapiens
gcaaacaaggagact

SEQ ID NO: 1701616 - DNA, 15 bp, Homo sapiens
caaacaaggagactc

SEQ ID NO: 1701617 - DNA, 15 bp, Homo sapiens
aaacaaggagactcc

SEQ ID NO: 1701618 - DNA, 15 bp, Homo sapiens
aacaaggagactcca

SEQ ID NO: 1701619 - DNA, 15 bp, Homo sapiens
acaaggagactccat

SEQ ID NO: 1701620 - DNA, 15 bp, Homo sapiens
caaggagactccata

SEQ ID NO: 1701621 - DNA, 15 bp, Homo sapiens
aaggagactccataa

SEQ ID NO: 1701622 - DNA, 15 bp, Homo sapiens
aggagactccataaa

SEQ ID NO: 1701623 - DNA, 15 bp, Homo sapiens
ggagactccataaag

SEQ ID NO: 1701624 - DNA, 15 bp, Homo sapiens
gagactccataaagg

SEQ ID NO: 1701625 - DNA, 15 bp, Homo sapiens
agactccataaaggc

SEQ ID NO: 1701626 - DNA, 15 bp, Homo sapiens
gactccataaaggca

SEQ ID NO: 1701627 - DNA, 15 bp, Homo sapiens
actccataaaggcat

SEQ ID NO: 1701628 - DNA, 15 bp, Homo sapiens
ctccataaaggcata

SEQ ID NO: 1701629 - DNA, 15 bp, Homo sapiens
tccataaaggcatat

SEQ ID NO: 1701630 - DNA, 15 bp, Homo sapiens
ccataaaggcatatg

SEQ ID NO: 1701631 - DNA, 15 bp, Homo sapiens
cataaaggcatatgg

SEQ ID NO: 1701632 - DNA, 15 bp, Homo sapiens
ataaaggcatatggt

SEQ ID NO: 1701633 - DNA, 15 bp, Homo sapiens
taaaggcatatggtg

SEQ ID NO: 1701634 - DNA, 15 bp, Homo sapiens
aaaggcatatggtgc

SEQ ID NO: 1701635 - DNA, 15 bp, Homo sapiens
aaggcatatggtgct

SEQ ID NO: 1701636 - DNA, 15 bp, Homo sapiens
aggcatatggtgctg

SEQ ID NO: 1701637 - DNA, 15 bp, Homo sapiens
ggcatatggtgctgg

SEQ ID NO: 1701638 - DNA, 15 bp, Homo sapiens
gcatatggtgctggg

SEQ ID NO: 1701639 - DNA, 15 bp, Homo sapiens
catatggtgctgggc

SEQ ID NO: 1701640 - DNA, 15 bp, Homo sapiens
atatggtgctgggct

SEQ ID NO: 1701641 - DNA, 15 bp, Homo sapiens
tatggtgctgggctc

SEQ ID NO: 1701642 - DNA, 15 bp, Homo sapiens
atggtgctgggctcc

SEQ ID NO: 1701643 - DNA, 15 bp, Homo sapiens
tggtgctgggctcct

SEQ ID NO: 1701644 - DNA, 15 bp, Homo sapiens
ggtgctgggctcctg

SEQ ID NO: 1701645 - DNA, 15 bp, Homo sapiens
gtgctgggctcctgt

SEQ ID NO: 1701646 - DNA, 15 bp, Homo sapiens
tgctgggctcctgtc

SEQ ID NO: 1701647 - DNA, 15 bp, Homo sapiens
gctgggctcctgtca

SEQ ID NO: 1701648 - DNA, 15 bp, Homo sapiens
ctgggctcctgtcat

SEQ ID NO: 1701649 - DNA, 15 bp, Homo sapiens
tgggctcctgtcatc

SEQ ID NO: 1701650 - DNA, 15 bp, Homo sapiens
gggctcctgtcatcc

SEQ ID NO: 1701651 - DNA, 15 bp, Homo sapiens
ggctcctgtcatcct

SEQ ID NO: 1701652 - DNA, 15 bp, Homo sapiens
gctcctgtcatcctt

SEQ ID NO: 1701653 - DNA, 15 bp, Homo sapiens
ctcctgtcatccttt

SEQ ID NO: 1701654 - DNA, 15 bp, Homo sapiens
tcctgtcatcctttg

SEQ ID NO: 1701655 - DNA, 15 bp, Homo sapiens
cctgtcatcctttgg

SEQ ID NO: 1701656 - DNA, 15 bp, Homo sapiens
ctgtcatcctttggt

SEQ ID NO: 1701657 - DNA, 15 bp, Homo sapiens
tgtcatcctttggtg

SEQ ID NO: 1701658 - DNA, 15 bp, Homo sapiens
gtcatcctttggtga

SEQ ID NO: 1701659 - DNA, 15 bp, Homo sapiens
tcatcctttggtgaa

SEQ ID NO: 1701660 - DNA, 15 bp, Homo sapiens
catcctttggtgaat

SEQ ID NO: 1701661 - DNA, 15 bp, Homo sapiens
atcctttggtgaatt

SEQ ID NO: 1701662 - DNA, 15 bp, Homo sapiens
tcctttggtgaatta

SEQ ID NO: 1701663 - DNA, 15 bp, Homo sapiens
cctttggtgaattac

SEQ ID NO: 1701664 - DNA, 15 bp, Homo sapiens
ctttggtgaattaca

SEQ ID NO: 1701665 - DNA, 15 bp, Homo sapiens
tttggtgaattacag

SEQ ID NO: 1701666 - DNA, 15 bp, Homo sapiens
ttggtgaattacagg

SEQ ID NO: 1701667 - DNA, 15 bp, Homo sapiens
tggtgaattacaggt

SEQ ID NO: 1701668 - DNA, 15 bp, Homo sapiens
ggtgaattacaggta

SEQ ID NO: 1701669 - DNA, 15 bp, Homo sapiens
gtgaattacaggtat

SEQ ID NO: 1701670 - DNA, 15 bp, Homo sapiens
tgaattacaggtatg

SEQ ID NO: 1701671 - DNA, 15 bp, Homo sapiens
gaattacaggtatga

SEQ ID NO: 1701672 - DNA, 15 bp, Homo sapiens
aattacaggtatgac

SEQ ID NO: 1701673 - DNA, 15 bp, Homo sapiens
attacaggtatgacc

SEQ ID NO: 1701674 - DNA, 15 bp, Homo sapiens
ttacaggtatgacct

SEQ ID NO: 1701675 - DNA, 15 bp, Homo sapiens
tacaggtatgacctt

SEQ ID NO: 1701676 - DNA, 15 bp, Homo sapiens
acaggtatgaccttc

SEQ ID NO: 1701677 - DNA, 15 bp, Homo sapiens
caggtatgaccttca

SEQ ID NO: 1701678 - DNA, 15 bp, Homo sapiens
aggtatgaccttcac

SEQ ID NO: 1701679 - DNA, 15 bp, Homo sapiens
ggtatgaccttcaca

SEQ ID NO: 1701680 - DNA, 15 bp, Homo sapiens
gtatgaccttcacag

SEQ ID NO: 1701681 - DNA, 15 bp, Homo sapiens
tatgaccttcacagg

SEQ ID NO: 1701682 - DNA, 15 bp, Homo sapiens
atgaccttcacagga

SEQ ID NO: 1701683 - DNA, 15 bp, Homo sapiens
tgaccttcacaggaa

SEQ ID NO: 1701684 - DNA, 15 bp, Homo sapiens
gaccttcacaggaac

SEQ ID NO: 1701685 - DNA, 15 bp, Homo sapiens
accttcacaggaacc

SEQ ID NO: 1701686 - DNA, 15 bp, Homo sapiens
ccttcacaggaacca

SEQ ID NO: 1701687 - DNA, 15 bp, Homo sapiens
cttcacaggaaccaa

SEQ ID NO: 1701688 - DNA, 15 bp, Homo sapiens
ttcacaggaaccaag

SEQ ID NO: 1701689 - DNA, 15 bp, Homo sapiens
tcacaggaaccaagg

SEQ ID NO: 1701690 - DNA, 15 bp, Homo sapiens
cacaggaaccaagga

SEQ ID NO: 1701691 - DNA, 15 bp, Homo sapiens
acaggaaccaaggat

SEQ ID NO: 1701692 - DNA, 15 bp, Homo sapiens
caggaaccaaggata

SEQ ID NO: 1701693 - DNA, 15 bp, Homo sapiens
aggaaccaaggatag

SEQ ID NO: 1701694 - DNA, 15 bp, Homo sapiens
ggaaccaaggataga

SEQ ID NO: 1701695 - DNA, 15 bp, Homo sapiens
gaaccaaggatagat

SEQ ID NO: 1701696 - DNA, 15 bp, Homo sapiens
aaccaaggatagatt

SEQ ID NO: 1701697 - DNA, 15 bp, Homo sapiens
accaaggatagattt

SEQ ID NO: 1701698 - DNA, 15 bp, Homo sapiens
ccaaggatagattta

SEQ ID NO: 1701699 - DNA, 15 bp, Homo sapiens
caaggatagatttaa

SEQ ID NO: 1701700 - DNA, 15 bp, Homo sapiens
aaggatagatttaaa

SEQ ID NO: 1701701 - DNA, 15 bp, Homo sapiens
aggatagatttaaaa

SEQ ID NO: 1701702 - DNA, 15 bp, Homo sapiens
ggatagatttaaaag

SEQ ID NO: 1701703 - DNA, 15 bp, Homo sapiens
gatagatttaaaagt

SEQ ID NO: 1701704 - DNA, 15 bp, Homo sapiens
atagatttaaaagtg

SEQ ID NO: 1701705 - DNA, 15 bp, Homo sapiens
tagatttaaaagtgg

SEQ ID NO: 1701706 - DNA, 15 bp, Homo sapiens
agatttaaaagtggt

SEQ ID NO: 1701707 - DNA, 15 bp, Homo sapiens
gatttaaaagtggtg

SEQ ID NO: 1701708 - DNA, 15 bp, Homo sapiens
atttaaaagtggtgg

SEQ ID NO: 1701709 - DNA, 15 bp, Homo sapiens
tttaaaagtggtggg

SEQ ID NO: 1701710 - DNA, 15 bp, Homo sapiens
ttaaaagtggtgggt

SEQ ID NO: 1701711 - DNA, 15 bp, Homo sapiens
taaaagtggtgggta

SEQ ID NO: 1701712 - DNA, 15 bp, Homo sapiens
aaaagtggtgggtac

SEQ ID NO: 1701713 - DNA, 15 bp, Homo sapiens
aaagtggtgggtaca

SEQ ID NO: 1701714 - DNA, 15 bp, Homo sapiens
aagtggtgggtacag

SEQ ID NO: 1701715 - DNA, 15 bp, Homo sapiens
agtggtgggtacaga

SEQ ID NO: 1701716 - DNA, 15 bp, Homo sapiens
gtggtgggtacagaa

SEQ ID NO: 1701717 - DNA, 15 bp, Homo sapiens
tggtgggtacagaaa

SEQ ID NO: 1701718 - DNA, 15 bp, Homo sapiens
ggtgggtacagaaaa

SEQ ID NO: 1701719 - DNA, 15 bp, Homo sapiens
gtgggtacagaaaac

SEQ ID NO: 1701720 - DNA, 15 bp, Homo sapiens
tgggtacagaaaacc

SEQ ID NO: 1701721 - DNA, 15 bp, Homo sapiens
gggtacagaaaacca

SEQ ID NO: 1701722 - DNA, 15 bp, Homo sapiens
ggtacagaaaaccat

SEQ ID NO: 1701723 - DNA, 15 bp, Homo sapiens
gtacagaaaaccatt

SEQ ID NO: 1701724 - DNA, 15 bp, Homo sapiens
tacagaaaaccatta

SEQ ID NO: 1701725 - DNA, 15 bp, Homo sapiens
acagaaaaccattat

SEQ ID NO: 1701726 - DNA, 15 bp, Homo sapiens
cagaaaaccattatt

SEQ ID NO: 1701727 - DNA, 15 bp, Homo sapiens
agaaaaccattattg

SEQ ID NO: 1701728 - DNA, 15 bp, Homo sapiens
gaaaaccattattgt

SEQ ID NO: 1701729 - DNA, 15 bp, Homo sapiens
aaaaccattattgtg

SEQ ID NO: 1701730 - DNA, 15 bp, Homo sapiens
aaaccattattgtgc

SEQ ID NO: 1701731 - DNA, 15 bp, Homo sapiens
aaccattattgtgct

SEQ ID NO: 1701732 - DNA, 15 bp, Homo sapiens
accattattgtgctt

SEQ ID NO: 1701733 - DNA, 15 bp, Homo sapiens
ccattattgtgcttt

SEQ ID NO: 1701734 - DNA, 15 bp, Homo sapiens
cattattgtgctttc

SEQ ID NO: 1701735 - DNA, 15 bp, Homo sapiens
attattgtgctttca

SEQ ID NO: 1701736 - DNA, 15 bp, Homo sapiens
ttattgtgctttcaa

SEQ ID NO: 1701737 - DNA, 15 bp, Homo sapiens
tattgtgctttcaat

SEQ ID NO: 1701738 - DNA, 15 bp, Homo sapiens
attgtgctttcaata

SEQ ID NO: 1701739 - DNA, 15 bp, Homo sapiens
ttgtgctttcaatat

SEQ ID NO: 1701740 - DNA, 15 bp, Homo sapiens
tgtgctttcaatatt

SEQ ID NO: 1701741 - DNA, 15 bp, Homo sapiens
gtgctttcaatattg

SEQ ID NO: 1701742 - DNA, 15 bp, Homo sapiens
tgctttcaatattgt

SEQ ID NO: 1701743 - DNA, 15 bp, Homo sapiens
gctttcaatattgtt

SEQ ID NO: 1701744 - DNA, 15 bp, Homo sapiens
ctttcaatattgttg

SEQ ID NO: 1701745 - DNA, 15 bp, Homo sapiens
tttcaatattgttga

SEQ ID NO: 1701746 - DNA, 15 bp, Homo sapiens
ttcaatattgttgaa

SEQ ID NO: 1701747 - DNA, 15 bp, Homo sapiens
tcaatattgttgaaa

SEQ ID NO: 1701748 - DNA, 15 bp, Homo sapiens
caatattgttgaaac

SEQ ID NO: 1701749 - DNA, 15 bp, Homo sapiens
aatattgttgaaacc

SEQ ID NO: 1701750 - DNA, 15 bp, Homo sapiens
atattgttgaaaccc

SEQ ID NO: 1701751 - DNA, 15 bp, Homo sapiens
tattgttgaaaccct

SEQ ID NO: 1701752 - DNA, 15 bp, Homo sapiens
attgttgaaacccta

SEQ ID NO: 1701753 - DNA, 15 bp, Homo sapiens
ttgttgaaaccctat

SEQ ID NO: 1701754 - DNA, 15 bp, Homo sapiens
tgttgaaaccctatt

SEQ ID NO: 1701755 - DNA, 15 bp, Homo sapiens
gttgaaaccctattt

SEQ ID NO: 1701756 - DNA, 15 bp, Homo sapiens
ttgaaaccctatttg

SEQ ID NO: 1701757 - DNA, 15 bp, Homo sapiens
tgaaaccctatttgt

SEQ ID NO: 1701758 - DNA, 15 bp, Homo sapiens
gaaaccctatttgta

SEQ ID NO: 1701759 - DNA, 15 bp, Homo sapiens
aaaccctatttgtat

SEQ ID NO: 1701760 - DNA, 15 bp, Homo sapiens
aaccctatttgtatc

SEQ ID NO: 1701761 - DNA, 15 bp, Homo sapiens
accctatttgtatcc

SEQ ID NO: 1701762 - DNA, 15 bp, Homo sapiens
ccctatttgtatccg

SEQ ID NO: 1701763 - DNA, 15 bp, Homo sapiens
cctatttgtatccgt

SEQ ID NO: 1701764 - DNA, 15 bp, Homo sapiens
ctatttgtatccgtt

SEQ ID NO: 1701765 - DNA, 15 bp, Homo sapiens
tatttgtatccgttt

SEQ ID NO: 1701766 - DNA, 15 bp, Homo sapiens
atttgtatccgtttt

SEQ ID NO: 1701767 - DNA, 15 bp, Homo sapiens
tttgtatccgttttg

SEQ ID NO: 1701768 - DNA, 15 bp, Homo sapiens
ttgtatccgttttga

SEQ ID NO: 1701769 - DNA, 15 bp, Homo sapiens
tgtatccgttttgat

SEQ ID NO: 1701770 - DNA, 15 bp, Homo sapiens
gtatccgttttgata

SEQ ID NO: 1701771 - DNA, 15 bp, Homo sapiens
tatccgttttgatat

SEQ ID NO: 1701772 - DNA, 15 bp, Homo sapiens
atccgttttgatatg

SEQ ID NO: 1701773 - DNA, 15 bp, Homo sapiens
tccgttttgatatgc

SEQ ID NO: 1701774 - DNA, 15 bp, Homo sapiens
ccgttttgatatgca

SEQ ID NO: 1701775 - DNA, 15 bp, Homo sapiens
cgttttgatatgcaa

SEQ ID NO: 1701776 - DNA, 15 bp, Homo sapiens
gttttgatatgcaac

SEQ ID NO: 1701777 - DNA, 15 bp, Homo sapiens
ttttgatatgcaacc

SEQ ID NO: 1701778 - DNA, 15 bp, Homo sapiens
tttgatatgcaacct

SEQ ID NO: 1701779 - DNA, 15 bp, Homo sapiens
ttgatatgcaacctg

SEQ ID NO: 1701780 - DNA, 15 bp, Homo sapiens
tgatatgcaacctgg

SEQ ID NO: 1701781 - DNA, 15 bp, Homo sapiens
gatatgcaacctggg

SEQ ID NO: 1701782 - DNA, 15 bp, Homo sapiens
atatgcaacctggga

SEQ ID NO: 1701783 - DNA, 15 bp, Homo sapiens
tatgcaacctgggaa

SEQ ID NO: 1701784 - DNA, 15 bp, Homo sapiens
atgcaacctgggaac

SEQ ID NO: 1701785 - DNA, 15 bp, Homo sapiens
tgcaacctgggaact

SEQ ID NO: 1701786 - DNA, 15 bp, Homo sapiens
gcaacctgggaactc

SEQ ID NO: 1701787 - DNA, 15 bp, Homo sapiens
caacctgggaactca

SEQ ID NO: 1701788 - DNA, 15 bp, Homo sapiens
aacctgggaactcat

SEQ ID NO: 1701789 - DNA, 15 bp, Homo sapiens
acctgggaactcatt

SEQ ID NO: 1701790 - DNA, 15 bp, Homo sapiens
cctgggaactcattc

SEQ ID NO: 1701791 - DNA, 15 bp, Homo sapiens
ctgggaactcattct

SEQ ID NO: 1701792 - DNA, 15 bp, Homo sapiens
tgggaactcattctc

SEQ ID NO: 1701793 - DNA, 15 bp, Homo sapiens
gggaactcattctcc

SEQ ID NO: 1701794 - DNA, 15 bp, Homo sapiens
ggaactcattctcca

SEQ ID NO: 1701795 - DNA, 15 bp, Homo sapiens
gaactcattctccag

SEQ ID NO: 1701796 - DNA, 15 bp, Homo sapiens
aactcattctccagt

SEQ ID NO: 1701797 - DNA, 15 bp, Homo sapiens
actcattctccagtg

SEQ ID NO: 1701798 - DNA, 15 bp, Homo sapiens
ctcattctccagtga

SEQ ID NO: 1701799 - DNA, 15 bp, Homo sapiens
tcattctccagtgat

SEQ ID NO: 1701800 - DNA, 15 bp, Homo sapiens
cattctccagtgatt

SEQ ID NO: 1701801 - DNA, 15 bp, Homo sapiens
attctccagtgattg

SEQ ID NO: 1701802 - DNA, 15 bp, Homo sapiens
ttctccagtgattgg

SEQ ID NO: 1701803 - DNA, 15 bp, Homo sapiens
tctccagtgattggt

SEQ ID NO: 1701804 - DNA, 15 bp, Homo sapiens
ctccagtgattggta

SEQ ID NO: 1701805 - DNA, 15 bp, Homo sapiens
tccagtgattggtac

SEQ ID NO: 1701806 - DNA, 15 bp, Homo sapiens
ccagtgattggtacc

SEQ ID NO: 1701807 - DNA, 15 bp, Homo sapiens
cagtgattggtacct

SEQ ID NO: 1701808 - DNA, 15 bp, Homo sapiens
agtgattggtacctt

SEQ ID NO: 1701809 - DNA, 15 bp, Homo sapiens
gtgattggtacctta

SEQ ID NO: 1701810 - DNA, 15 bp, Homo sapiens
tgattggtaccttag

SEQ ID NO: 1701811 - DNA, 15 bp, Homo sapiens
gattggtaccttagc

SEQ ID NO: 1701812 - DNA, 15 bp, Homo sapiens
attggtaccttagca

SEQ ID NO: 1701813 - DNA, 15 bp, Homo sapiens
ttggtaccttagcag

SEQ ID NO: 1701814 - DNA, 15 bp, Homo sapiens
tggtaccttagcagc

SEQ ID NO: 1701815 - DNA, 15 bp, Homo sapiens
ggtaccttagcagct

SEQ ID NO: 1701816 - DNA, 15 bp, Homo sapiens
gtaccttagcagcta

SEQ ID NO: 1701817 - DNA, 15 bp, Homo sapiens
taccttagcagctat

SEQ ID NO: 1701818 - DNA, 15 bp, Homo sapiens
accttagcagctatg

SEQ ID NO: 1701819 - DNA, 15 bp, Homo sapiens
ccttagcagctatga

SEQ ID NO: 1701820 - DNA, 15 bp, Homo sapiens
cttagcagctatgat

SEQ ID NO: 1701821 - DNA, 15 bp, Homo sapiens
ttagcagctatgatt

SEQ ID NO: 1701822 - DNA, 15 bp, Homo sapiens
tagcagctatgattt

SEQ ID NO: 1701823 - DNA, 15 bp, Homo sapiens
agcagctatgatttg

SEQ ID NO: 1701824 - DNA, 15 bp, Homo sapiens
gcagctatgatttga

SEQ ID NO: 1701825 - DNA, 15 bp, Homo sapiens
cagctatgatttgat

SEQ ID NO: 1701826 - DNA, 15 bp, Homo sapiens
agctatgatttgatg

SEQ ID NO: 1701827 - DNA, 15 bp, Homo sapiens
gctatgatttgatga

SEQ ID NO: 1701828 - DNA, 15 bp, Homo sapiens
ctatgatttgatgat

SEQ ID NO: 1701829 - DNA, 15 bp, Homo sapiens
tatgatttgatgatg

SEQ ID NO: 1701830 - DNA, 15 bp, Homo sapiens
atgatttgatgatgg

SEQ ID NO: 1701831 - DNA, 15 bp, Homo sapiens
tgatttgatgatggc

SEQ ID NO: 1701832 - DNA, 15 bp, Homo sapiens
gatttgatgatggct

SEQ ID NO: 1701833 - DNA, 15 bp, Homo sapiens
atttgatgatggctg

SEQ ID NO: 1701834 - DNA, 15 bp, Homo sapiens
tttgatgatggctgt

SEQ ID NO: 1701835 - DNA, 15 bp, Homo sapiens
ttgatgatggctgtg

SEQ ID NO: 1701836 - DNA, 15 bp, Homo sapiens
tgatgatggctgtgg

SEQ ID NO: 1701837 - DNA, 15 bp, Homo sapiens
gatgatggctgtggg

SEQ ID NO: 1701838 - DNA, 15 bp, Homo sapiens
atgatggctgtgggt

SEQ ID NO: 1701839 - DNA, 15 bp, Homo sapiens
tgatggctgtgggtt

SEQ ID NO: 1701840 - DNA, 15 bp, Homo sapiens
gatggctgtgggttt

SEQ ID NO: 1701841 - DNA, 15 bp, Homo sapiens
atggctgtgggtttt

SEQ ID NO: 1701842 - DNA, 15 bp, Homo sapiens
tggctgtgggtttta

SEQ ID NO: 1701843 - DNA, 15 bp, Homo sapiens
ggctgtgggttttac

SEQ ID NO: 1701844 - DNA, 15 bp, Homo sapiens
gctgtgggttttaca

SEQ ID NO: 1701845 - DNA, 15 bp, Homo sapiens
ctgtgggttttacag

SEQ ID NO: 1701846 - DNA, 15 bp, Homo sapiens
tgtgggttttacaga

SEQ ID NO: 1701847 - DNA, 15 bp, Homo sapiens
gtgggttttacagat

SEQ ID NO: 1701848 - DNA, 15 bp, Homo sapiens
tgggttttacagata

SEQ ID NO: 1701849 - DNA, 15 bp, Homo sapiens
gggttttacagatag

SEQ ID NO: 1701850 - DNA, 15 bp, Homo sapiens
ggttttacagataga

SEQ ID NO: 1701851 - DNA, 15 bp, Homo sapiens
gttttacagatagaa

SEQ ID NO: 1701852 - DNA, 15 bp, Homo sapiens
tttacagatagaaat

SEQ ID NO: 1701853 - DNA, 15 bp, Homo sapiens
ttacagatagaaatg

SEQ ID NO: 1701854 - DNA, 15 bp, Homo sapiens
tacagatagaaatgg

SEQ ID NO: 1701855 - DNA, 15 bp, Homo sapiens
acagatagaaatgga

SEQ ID NO: 1701856 - DNA, 15 bp, Homo sapiens
cagatagaaatggaa

SEQ ID NO: 1701857 - DNA, 15 bp, Homo sapiens
agatagaaatggaat

SEQ ID NO: 1701858 - DNA, 15 bp, Homo sapiens
gatagaaatggaatt

SEQ ID NO: 1701859 - DNA, 15 bp, Homo sapiens
atagaaatggaattg

SEQ ID NO: 1701860 - DNA, 15 bp, Homo sapiens
tagaaatggaattgc

SEQ ID NO: 1701861 - DNA, 15 bp, Homo sapiens
agaaatggaattgca

SEQ ID NO: 1701862 - DNA, 15 bp, Homo sapiens
gaaatggaattgcaa

SEQ ID NO: 1701863 - DNA, 15 bp, Homo sapiens
aaatggaattgcaag

SEQ ID NO: 1701864 - DNA, 15 bp, Homo sapiens
aatggaattgcaagt

SEQ ID NO: 1701865 - DNA, 15 bp, Homo sapiens
atggaattgcaagta

SEQ ID NO: 1701866 - DNA, 15 bp, Homo sapiens
tggaattgcaagtac

SEQ ID NO: 1701867 - DNA, 15 bp, Homo sapiens
ggaattgcaagtaca

SEQ ID NO: 1701868 - DNA, 15 bp, Homo sapiens
gaattgcaagtacac

SEQ ID NO: 1701869 - DNA, 15 bp, Homo sapiens
aattgcaagtacaca

SEQ ID NO: 1701870 - DNA, 15 bp, Homo sapiens
attgcaagtacacat

SEQ ID NO: 1701871 - DNA, 15 bp, Homo sapiens
ttgcaagtacacata

SEQ ID NO: 1701872 - DNA, 15 bp, Homo sapiens
tgcaagtacacatat

SEQ ID NO: 1701873 - DNA, 15 bp, Homo sapiens
gcaagtacacatatc

SEQ ID NO: 1701874 - DNA, 15 bp, Homo sapiens
caagtacacatatct

SEQ ID NO: 1701875 - DNA, 15 bp, Homo sapiens
aagtacacatatctc

SEQ ID NO: 1701876 - DNA, 15 bp, Homo sapiens
agtacacatatctct

SEQ ID NO: 1701877 - DNA, 15 bp, Homo sapiens
gtacacatatctctg

SEQ ID NO: 1701878 - DNA, 15 bp, Homo sapiens
tacacatatctctgg

SEQ ID NO: 1701879 - DNA, 15 bp, Homo sapiens
acacatatctctggg

SEQ ID NO: 1701880 - DNA, 15 bp, Homo sapiens
cacatatctctgggg

SEQ ID NO: 1701881 - DNA, 15 bp, Homo sapiens
acatatctctgggga

SEQ ID NO: 1701882 - DNA, 15 bp, Homo sapiens
catatctctggggag

SEQ ID NO: 1701883 - DNA, 15 bp, Homo sapiens
atatctctggggaga

SEQ ID NO: 1701884 - DNA, 15 bp, Homo sapiens
tatctctggggagaa

SEQ ID NO: 1701885 - DNA, 15 bp, Homo sapiens
atctctggggagaag

SEQ ID NO: 1701886 - DNA, 15 bp, Homo sapiens
tctctggggagaagg

SEQ ID NO: 1701887 - DNA, 15 bp, Homo sapiens
ctctggggagaaggg

SEQ ID NO: 1701888 - DNA, 15 bp, Homo sapiens
tctggggagaagggg

SEQ ID NO: 1701889 - DNA, 15 bp, Homo sapiens
ctggggagaaggggc

SEQ ID NO: 1701890 - DNA, 15 bp, Homo sapiens
tggggagaaggggcc

SEQ ID NO: 1701891 - DNA, 15 bp, Homo sapiens
ggggagaaggggcct

SEQ ID NO: 1701892 - DNA, 15 bp, Homo sapiens
gggagaaggggcctc

SEQ ID NO: 1701893 - DNA, 15 bp, Homo sapiens
ggagaaggggcctcc

SEQ ID NO: 1701894 - DNA, 15 bp, Homo sapiens
gagaaggggcctcct

SEQ ID NO: 1701895 - DNA, 15 bp, Homo sapiens
agaaggggcctcctg

SEQ ID NO: 1701896 - DNA, 15 bp, Homo sapiens
gaaggggcctcctga

SEQ ID NO: 1701897 - DNA, 15 bp, Homo sapiens
aaggggcctcctgat

SEQ ID NO: 1701898 - DNA, 15 bp, Homo sapiens
aggggcctcctgatt

SEQ ID NO: 1701899 - DNA, 15 bp, Homo sapiens
ggggcctcctgattc

SEQ ID NO: 1701900 - DNA, 15 bp, Homo sapiens
gggcctcctgattcc

SEQ ID NO: 1701901 - DNA, 15 bp, Homo sapiens
ggcctcctgattcca

SEQ ID NO: 1701902 - DNA, 15 bp, Homo sapiens
gcctcctgattccaa

SEQ ID NO: 1701903 - DNA, 15 bp, Homo sapiens
cctcctgattccaag

SEQ ID NO: 1701904 - DNA, 15 bp, Homo sapiens
ctcctgattccaagg

SEQ ID NO: 1701905 - DNA, 15 bp, Homo sapiens
tcctgattccaaggc

SEQ ID NO: 1701906 - DNA, 15 bp, Homo sapiens
cctgattccaaggct

SEQ ID NO: 1701907 - DNA, 15 bp, Homo sapiens
ctgattccaaggctg

SEQ ID NO: 1701908 - DNA, 15 bp, Homo sapiens
tgattccaaggctga

SEQ ID NO: 1701909 - DNA, 15 bp, Homo sapiens
gattccaaggctgac

SEQ ID NO: 1701910 - DNA, 15 bp, Homo sapiens
attccaaggctgacc

SEQ ID NO: 1701911 - DNA, 15 bp, Homo sapiens
ttccaaggctgacct

SEQ ID NO: 1701912 - DNA, 15 bp, Homo sapiens
tccaaggctgaccta

SEQ ID NO: 1701913 - DNA, 15 bp, Homo sapiens
ccaaggctgacctat

SEQ ID NO: 1701914 - DNA, 15 bp, Homo sapiens
caaggctgacctatg

SEQ ID NO: 1701915 - DNA, 15 bp, Homo sapiens
aaggctgacctatgc

SEQ ID NO: 1701916 - DNA, 15 bp, Homo sapiens
aggctgacctatgca

SEQ ID NO: 1701917 - DNA, 15 bp, Homo sapiens
ggctgacctatgcat

SEQ ID NO: 1701918 - DNA, 15 bp, Homo sapiens
gctgacctatgcatg

SEQ ID NO: 1701919 - DNA, 15 bp, Homo sapiens
ctgacctatgcatgc

SEQ ID NO: 1701920 - DNA, 15 bp, Homo sapiens
tgacctatgcatgca

SEQ ID NO: 1701921 - DNA, 15 bp, Homo sapiens
gacctatgcatgcag

SEQ ID NO: 1701922 - DNA, 15 bp, Homo sapiens
acctatgcatgcagc

SEQ ID NO: 1701923 - DNA, 15 bp, Homo sapiens
cctatgcatgcagcc

SEQ ID NO: 1701924 - DNA, 15 bp, Homo sapiens
ctatgcatgcagcct

SEQ ID NO: 1701925 - DNA, 15 bp, Homo sapiens
tatgcatgcagcctt

SEQ ID NO: 1701926 - DNA, 15 bp, Homo sapiens
atgcatgcagccttg

SEQ ID NO: 1701927 - DNA, 15 bp, Homo sapiens
tgcatgcagccttgt

SEQ ID NO: 1701928 - DNA, 15 bp, Homo sapiens
gcatgcagccttgtg

SEQ ID NO: 1701929 - DNA, 15 bp, Homo sapiens
catgcagccttgtga

SEQ ID NO: 1701930 - DNA, 15 bp, Homo sapiens
atgcagccttgtgag

SEQ ID NO: 1701931 - DNA, 15 bp, Homo sapiens
tgcagccttgtgagt

SEQ ID NO: 1701932 - DNA, 15 bp, Homo sapiens
gcagccttgtgagta

SEQ ID NO: 1701933 - DNA, 15 bp, Homo sapiens
cagccttgtgagtat

SEQ ID NO: 1701934 - DNA, 15 bp, Homo sapiens
agccttgtgagtatg

SEQ ID NO: 1701935 - DNA, 15 bp, Homo sapiens
gccttgtgagtatgc

SEQ ID NO: 1701936 - DNA, 15 bp, Homo sapiens
ccttgtgagtatgca

SEQ ID NO: 1701937 - DNA, 15 bp, Homo sapiens
cttgtgagtatgcaa

SEQ ID NO: 1701938 - DNA, 15 bp, Homo sapiens
ttgtgagtatgcaaa

SEQ ID NO: 1701939 - DNA, 15 bp, Homo sapiens
tgtgagtatgcaaac

SEQ ID NO: 1701940 - DNA, 15 bp, Homo sapiens
gtgagtatgcaaaca

SEQ ID NO: 1701941 - DNA, 15 bp, Homo sapiens
tgagtatgcaaacac

SEQ ID NO: 1701942 - DNA, 15 bp, Homo sapiens
gagtatgcaaacaca

SEQ ID NO: 1701943 - DNA, 15 bp, Homo sapiens
agtatgcaaacacat

SEQ ID NO: 1701944 - DNA, 15 bp, Homo sapiens
gtatgcaaacacatg

SEQ ID NO: 1701945 - DNA, 15 bp, Homo sapiens
tatgcaaacacatgc

SEQ ID NO: 1701946 - DNA, 15 bp, Homo sapiens
atgcaaacacatgcc

SEQ ID NO: 1701947 - DNA, 15 bp, Homo sapiens
tgcaaacacatgcca

SEQ ID NO: 1701948 - DNA, 15 bp, Homo sapiens
gcaaacacatgccag

SEQ ID NO: 1701949 - DNA, 15 bp, Homo sapiens
caaacacatgccaga

SEQ ID NO: 1701950 - DNA, 15 bp, Homo sapiens
aaacacatgccagaa

SEQ ID NO: 1701951 - DNA, 15 bp, Homo sapiens
aacacatgccagaaa

SEQ ID NO: 1701952 - DNA, 15 bp, Homo sapiens
acacatgccagaaag

SEQ ID NO: 1701953 - DNA, 15 bp, Homo sapiens
cacatgccagaaagt

SEQ ID NO: 1701954 - DNA, 15 bp, Homo sapiens
acatgccagaaagtg

SEQ ID NO: 1701955 - DNA, 15 bp, Homo sapiens
catgccagaaagtgt

SEQ ID NO: 1701956 - DNA, 15 bp, Homo sapiens
atgccagaaagtgtg

SEQ ID NO: 1701957 - DNA, 15 bp, Homo sapiens
tgccagaaagtgtgg

SEQ ID NO: 1701958 - DNA, 15 bp, Homo sapiens
gccagaaagtgtggt

SEQ ID NO: 1701959 - DNA, 15 bp, Homo sapiens
ccagaaagtgtggtt

SEQ ID NO: 1701960 - DNA, 15 bp, Homo sapiens
cagaaagtgtggttg

SEQ ID NO: 1701961 - DNA, 15 bp, Homo sapiens
agaaagtgtggttgg

SEQ ID NO: 1701962 - DNA, 15 bp, Homo sapiens
gaaagtgtggttggc

SEQ ID NO: 1701963 - DNA, 15 bp, Homo sapiens
aaagtgtggttggct

SEQ ID NO: 1701964 - DNA, 15 bp, Homo sapiens
aagtgtggttggctc

SEQ ID NO: 1701965 - DNA, 15 bp, Homo sapiens
agtgtggttggctcc

SEQ ID NO: 1701966 - DNA, 15 bp, Homo sapiens
gtgtggttggctccc

SEQ ID NO: 1701967 - DNA, 15 bp, Homo sapiens
tgtggttggctccca

SEQ ID NO: 1701968 - DNA, 15 bp, Homo sapiens
gtggttggctcccac

SEQ ID NO: 1701969 - DNA, 15 bp, Homo sapiens
tggttggctcccacg

SEQ ID NO: 1701970 - DNA, 15 bp, Homo sapiens
ggttggctcccacgt

SEQ ID NO: 1701971 - DNA, 15 bp, Homo sapiens
gttggctcccacgtc

SEQ ID NO: 1701972 - DNA, 15 bp, Homo sapiens
ttggctcccacgtca

SEQ ID NO: 1701973 - DNA, 15 bp, Homo sapiens
tggctcccacgtcat

SEQ ID NO: 1701974 - DNA, 15 bp, Homo sapiens
ggctcccacgtcatc

SEQ ID NO: 1701975 - DNA, 15 bp, Homo sapiens
gctcccacgtcatct

SEQ ID NO: 1701976 - DNA, 15 bp, Homo sapiens
ctcccacgtcatcta

SEQ ID NO: 1701977 - DNA, 15 bp, Homo sapiens
tcccacgtcatctat

SEQ ID NO: 1701978 - DNA, 15 bp, Homo sapiens
cccacgtcatctatt

SEQ ID NO: 1701979 - DNA, 15 bp, Homo sapiens
ccacgtcatctattg

SEQ ID NO: 1701980 - DNA, 15 bp, Homo sapiens
cacgtcatctattga

SEQ ID NO: 1701981 - DNA, 15 bp, Homo sapiens
acgtcatctattgac

SEQ ID NO: 1701982 - DNA, 15 bp, Homo sapiens
cgtcatctattgacc

SEQ ID NO: 1701983 - DNA, 15 bp, Homo sapiens
gtcatctattgacca

SEQ ID NO: 1701984 - DNA, 15 bp, Homo sapiens
tcatctattgaccac

SEQ ID NO: 1701985 - DNA, 15 bp, Homo sapiens
catctattgaccacc

SEQ ID NO: 1701986 - DNA, 15 bp, Homo sapiens
atctattgaccacct

SEQ ID NO: 1701987 - DNA, 15 bp, Homo sapiens
tctattgaccacctt

SEQ ID NO: 1701988 - DNA, 15 bp, Homo sapiens
ctattgaccacctta

SEQ ID NO: 1701989 - DNA, 15 bp, Homo sapiens
tattgaccaccttac

SEQ ID NO: 1701990 - DNA, 15 bp, Homo sapiens
attgaccaccttact

SEQ ID NO: 1701991 - DNA, 15 bp, Homo sapiens
ttgaccaccttactt

SEQ ID NO: 1701992 - DNA, 15 bp, Homo sapiens
tgaccaccttacttg

SEQ ID NO: 1701993 - DNA, 15 bp, Homo sapiens
gaccaccttacttga

SEQ ID NO: 1701994 - DNA, 15 bp, Homo sapiens
accaccttacttgaa

SEQ ID NO: 1701995 - DNA, 15 bp, Homo sapiens
ccaccttacttgaaa

SEQ ID NO: 1701996 - DNA, 15 bp, Homo sapiens
caccttacttgaaag

SEQ ID NO: 1701997 - DNA, 15 bp, Homo sapiens
accttacttgaaagt

SEQ ID NO: 1701998 - DNA, 15 bp, Homo sapiens
ccttacttgaaagta

SEQ ID NO: 1701999 - DNA, 15 bp, Homo sapiens
cttacttgaaagtaa

SEQ ID NO: 1702000 - DNA, 15 bp, Homo sapiens
ttacttgaaagtaat

SEQ ID NO: 1702001 - DNA, 15 bp, Homo sapiens
tacttgaaagtaatt

SEQ ID NO: 1702002 - DNA, 15 bp, Homo sapiens
acttgaaagtaattg

SEQ ID NO: 1702003 - DNA, 15 bp, Homo sapiens
cttgaaagtaattgg

SEQ ID NO: 1702004 - DNA, 15 bp, Homo sapiens
ttgaaagtaattgga

SEQ ID NO: 1702005 - DNA, 15 bp, Homo sapiens
tgaaagtaattggaa

SEQ ID NO: 1702006 - DNA, 15 bp, Homo sapiens
gaaagtaattggaat

SEQ ID NO: 1702007 - DNA, 15 bp, Homo sapiens
aaagtaattggaatg

SEQ ID NO: 1702008 - DNA, 15 bp, Homo sapiens
aagtaattggaatga

SEQ ID NO: 1702009 - DNA, 15 bp, Homo sapiens
agtaattggaatgaa

SEQ ID NO: 1702010 - DNA, 15 bp, Homo sapiens
gtaattggaatgaat

SEQ ID NO: 1702011 - DNA, 15 bp, Homo sapiens
taattggaatgaatt

SEQ ID NO: 1702012 - DNA, 15 bp, Homo sapiens
aattggaatgaatta

SEQ ID NO: 1702013 - DNA, 15 bp, Homo sapiens
attggaatgaattac

SEQ ID NO: 1702014 - DNA, 15 bp, Homo sapiens
ttggaatgaattact

SEQ ID NO: 1702015 - DNA, 15 bp, Homo sapiens
tggaatgaattactc

SEQ ID NO: 1702016 - DNA, 15 bp, Homo sapiens
ggaatgaattactcc

SEQ ID NO: 1702017 - DNA, 15 bp, Homo sapiens
gaatgaattactcct

SEQ ID NO: 1702018 - DNA, 15 bp, Homo sapiens
aatgaattactcctt

SEQ ID NO: 1702019 - DNA, 15 bp, Homo sapiens
atgaattactccttt

SEQ ID NO: 1702020 - DNA, 15 bp, Homo sapiens
tgaattactcctttc

SEQ ID NO: 1702021 - DNA, 15 bp, Homo sapiens
gaattactcctttct

SEQ ID NO: 1702022 - DNA, 15 bp, Homo sapiens
aattactcctttctc

SEQ ID NO: 1702023 - DNA, 15 bp, Homo sapiens
attactcctttctcc

SEQ ID NO: 1702024 - DNA, 15 bp, Homo sapiens
ttactcctttctccc

SEQ ID NO: 1702025 - DNA, 15 bp, Homo sapiens
tactcctttctccct

SEQ ID NO: 1702026 - DNA, 15 bp, Homo sapiens
actcctttctccctt

SEQ ID NO: 1702027 - DNA, 15 bp, Homo sapiens
ctcctttctcccttg

SEQ ID NO: 1702028 - DNA, 15 bp, Homo sapiens
tcctttctcccttgg

SEQ ID NO: 1702029 - DNA, 15 bp, Homo sapiens
cctttctcccttggc

SEQ ID NO: 1702030 - DNA, 15 bp, Homo sapiens
ctttctcccttggct

SEQ ID NO: 1702031 - DNA, 15 bp, Homo sapiens
tttctcccttggctg

SEQ ID NO: 1702032 - DNA, 15 bp, Homo sapiens
ttctcccttggctgt

SEQ ID NO: 1702033 - DNA, 15 bp, Homo sapiens
tctcccttggctgta

SEQ ID NO: 1702034 - DNA, 15 bp, Homo sapiens
ctcccttggctgtag

SEQ ID NO: 1702035 - DNA, 15 bp, Homo sapiens
tcccttggctgtagg

SEQ ID NO: 1702036 - DNA, 15 bp, Homo sapiens
cccttggctgtaggt

SEQ ID NO: 1702037 - DNA, 15 bp, Homo sapiens
ccttggctgtaggtt

SEQ ID NO: 1702038 - DNA, 15 bp, Homo sapiens
cttggctgtaggttt

SEQ ID NO: 1702039 - DNA, 15 bp, Homo sapiens
ttggctgtaggtttt

SEQ ID NO: 1702040 - DNA, 15 bp, Homo sapiens
tggctgtaggtttta

SEQ ID NO: 1702041 - DNA, 15 bp, Homo sapiens
ggctgtaggttttag

SEQ ID NO: 1702042 - DNA, 15 bp, Homo sapiens
gctgtaggttttaga

SEQ ID NO: 1702043 - DNA, 15 bp, Homo sapiens
ctgtaggttttagat

SEQ ID NO: 1702044 - DNA, 15 bp, Homo sapiens
tgtaggttttagatg

SEQ ID NO: 1702045 - DNA, 15 bp, Homo sapiens
gtaggttttagatga

SEQ ID NO: 1702046 - DNA, 15 bp, Homo sapiens
taggttttagatgag

SEQ ID NO: 1702047 - DNA, 15 bp, Homo sapiens
aggttttagatgagc

SEQ ID NO: 1702048 - DNA, 15 bp, Homo sapiens
ggttttagatgagct

SEQ ID NO: 1702049 - DNA, 15 bp, Homo sapiens
gttttagatgagcta

SEQ ID NO: 1702050 - DNA, 15 bp, Homo sapiens
ttttagatgagctat

SEQ ID NO: 1702051 - DNA, 15 bp, Homo sapiens
tttagatgagctatg

SEQ ID NO: 1702052 - DNA, 15 bp, Homo sapiens
ttagatgagctatga

SEQ ID NO: 1702053 - DNA, 15 bp, Homo sapiens
tagatgagctatgaa

SEQ ID NO: 1702054 - DNA, 15 bp, Homo sapiens
agatgagctatgaag

SEQ ID NO: 1702055 - DNA, 15 bp, Homo sapiens
gatgagctatgaagg

SEQ ID NO: 1702056 - DNA, 15 bp, Homo sapiens
atgagctatgaaggg

SEQ ID NO: 1702057 - DNA, 15 bp, Homo sapiens
tgagctatgaagggt

SEQ ID NO: 1702058 - DNA, 15 bp, Homo sapiens
gagctatgaagggta

SEQ ID NO: 1702059 - DNA, 15 bp, Homo sapiens
agctatgaagggtag

SEQ ID NO: 1702060 - DNA, 15 bp, Homo sapiens
gctatgaagggtaga

SEQ ID NO: 1702061 - DNA, 15 bp, Homo sapiens
ctatgaagggtagaa

SEQ ID NO: 1702062 - DNA, 15 bp, Homo sapiens
tatgaagggtagaac

SEQ ID NO: 1702063 - DNA, 15 bp, Homo sapiens
atgaagggtagaacc

SEQ ID NO: 1702064 - DNA, 15 bp, Homo sapiens
tgaagggtagaacct

SEQ ID NO: 1702065 - DNA, 15 bp, Homo sapiens
gaagggtagaaccta

SEQ ID NO: 1702066 - DNA, 15 bp, Homo sapiens
aagggtagaacctag

SEQ ID NO: 1702067 - DNA, 15 bp, Homo sapiens
agggtagaacctagt

SEQ ID NO: 1702068 - DNA, 15 bp, Homo sapiens
gggtagaacctagta

SEQ ID NO: 1702069 - DNA, 15 bp, Homo sapiens
ggtagaacctagtat

SEQ ID NO: 1702070 - DNA, 15 bp, Homo sapiens
gtagaacctagtatg

SEQ ID NO: 1702071 - DNA, 15 bp, Homo sapiens
tagaacctagtatgt

SEQ ID NO: 1702072 - DNA, 15 bp, Homo sapiens
agaacctagtatgtg

SEQ ID NO: 1702073 - DNA, 15 bp, Homo sapiens
gaacctagtatgtgc

SEQ ID NO: 1702074 - DNA, 15 bp, Homo sapiens
aacctagtatgtgca

SEQ ID NO: 1702075 - DNA, 15 bp, Homo sapiens
acctagtatgtgcaa

SEQ ID NO: 1702076 - DNA, 15 bp, Homo sapiens
cctagtatgtgcaaa

SEQ ID NO: 1702077 - DNA, 15 bp, Homo sapiens
ctagtatgtgcaaag

SEQ ID NO: 1702078 - DNA, 15 bp, Homo sapiens
tagtatgtgcaaagt

SEQ ID NO: 1702079 - DNA, 15 bp, Homo sapiens
agtatgtgcaaagta

SEQ ID NO: 1702080 - DNA, 15 bp, Homo sapiens
gtatgtgcaaagtaa

SEQ ID NO: 1702081 - DNA, 15 bp, Homo sapiens
tatgtgcaaagtaat

SEQ ID NO: 1702082 - DNA, 15 bp, Homo sapiens
atgtgcaaagtaatt

SEQ ID NO: 1702083 - DNA, 15 bp, Homo sapiens
tgtgcaaagtaattt

SEQ ID NO: 1702084 - DNA, 15 bp, Homo sapiens
gtgcaaagtaatttg

SEQ ID NO: 1702085 - DNA, 15 bp, Homo sapiens
tgcaaagtaatttgg

SEQ ID NO: 1702086 - DNA, 15 bp, Homo sapiens
gcaaagtaatttggc

SEQ ID NO: 1702087 - DNA, 15 bp, Homo sapiens
caaagtaatttggct

SEQ ID NO: 1702088 - DNA, 15 bp, Homo sapiens
aaagtaatttggctc

SEQ ID NO: 1702089 - DNA, 15 bp, Homo sapiens
aagtaatttggctca

SEQ ID NO: 1702090 - DNA, 15 bp, Homo sapiens
agtaatttggctcac

SEQ ID NO: 1702091 - DNA, 15 bp, Homo sapiens
gtaatttggctcaca

SEQ ID NO: 1702092 - DNA, 15 bp, Homo sapiens
taatttggctcacag

SEQ ID NO: 1702093 - DNA, 15 bp, Homo sapiens
aatttggctcacagc

SEQ ID NO: 1702094 - DNA, 15 bp, Homo sapiens
atttggctcacagca

SEQ ID NO: 1702095 - DNA, 15 bp, Homo sapiens
tttggctcacagcat

SEQ ID NO: 1702096 - DNA, 15 bp, Homo sapiens
ttggctcacagcatt

SEQ ID NO: 1702097 - DNA, 15 bp, Homo sapiens
tggctcacagcattt

SEQ ID NO: 1702098 - DNA, 15 bp, Homo sapiens
ggctcacagcatttg

SEQ ID NO: 1702099 - DNA, 15 bp, Homo sapiens
gctcacagcatttgg

SEQ ID NO: 1702100 - DNA, 15 bp, Homo sapiens
ctcacagcatttggg

SEQ ID NO: 1702101 - DNA, 15 bp, Homo sapiens
tcacagcatttgggc

SEQ ID NO: 1702102 - DNA, 15 bp, Homo sapiens
cacagcatttgggct

SEQ ID NO: 1702103 - DNA, 15 bp, Homo sapiens
acagcatttgggctg

SEQ ID NO: 1702104 - DNA, 15 bp, Homo sapiens
cagcatttgggctgt

SEQ ID NO: 1702105 - DNA, 15 bp, Homo sapiens
agcatttgggctgtg

SEQ ID NO: 1702106 - DNA, 15 bp, Homo sapiens
gcatttgggctgtga

SEQ ID NO: 1702107 - DNA, 15 bp, Homo sapiens
catttgggctgtgat

SEQ ID NO: 1702108 - DNA, 15 bp, Homo sapiens
atttgggctgtgatg

SEQ ID NO: 1702109 - DNA, 15 bp, Homo sapiens
tttgggctgtgatgt

SEQ ID NO: 1702110 - DNA, 15 bp, Homo sapiens
ttgggctgtgatgta

SEQ ID NO: 1702111 - DNA, 15 bp, Homo sapiens
tgggctgtgatgtag

SEQ ID NO: 1702112 - DNA, 15 bp, Homo sapiens
gggctgtgatgtaga

SEQ ID NO: 1702113 - DNA, 15 bp, Homo sapiens
ggctgtgatgtagaa

SEQ ID NO: 1702114 - DNA, 15 bp, Homo sapiens
gctgtgatgtagaag

SEQ ID NO: 1702115 - DNA, 15 bp, Homo sapiens
ctgtgatgtagaagg

SEQ ID NO: 1702116 - DNA, 15 bp, Homo sapiens
tgtgatgtagaagga

SEQ ID NO: 1702117 - DNA, 15 bp, Homo sapiens
gtgatgtagaaggaa

SEQ ID NO: 1702118 - DNA, 15 bp, Homo sapiens
tgatgtagaaggaat

SEQ ID NO: 1702119 - DNA, 15 bp, Homo sapiens
gatgtagaaggaatc

SEQ ID NO: 1702120 - DNA, 15 bp, Homo sapiens
atgtagaaggaatcg

SEQ ID NO: 1702121 - DNA, 15 bp, Homo sapiens
tgtagaaggaatcgg

SEQ ID NO: 1702122 - DNA, 15 bp, Homo sapiens
gtagaaggaatcggg

SEQ ID NO: 1702123 - DNA, 15 bp, Homo sapiens
tagaaggaatcgggg

SEQ ID NO: 1702124 - DNA, 15 bp, Homo sapiens
agaaggaatcggggt

SEQ ID NO: 1702125 - DNA, 15 bp, Homo sapiens
gaaggaatcggggtg

SEQ ID NO: 1702126 - DNA, 15 bp, Homo sapiens
aaggaatcggggtga

SEQ ID NO: 1702127 - DNA, 15 bp, Homo sapiens
aggaatcggggtgag

SEQ ID NO: 1702128 - DNA, 15 bp, Homo sapiens
ggaatcggggtgaga

SEQ ID NO: 1702129 - DNA, 15 bp, Homo sapiens
gaatcggggtgagat

SEQ ID NO: 1702130 - DNA, 15 bp, Homo sapiens
aatcggggtgagatg

SEQ ID NO: 1702131 - DNA, 15 bp, Homo sapiens
atcggggtgagatga

SEQ ID NO: 1702132 - DNA, 15 bp, Homo sapiens
tcggggtgagatgag

SEQ ID NO: 1702133 - DNA, 15 bp, Homo sapiens
cggggtgagatgaga

SEQ ID NO: 1702134 - DNA, 15 bp, Homo sapiens
ggggtgagatgagag

SEQ ID NO: 1702135 - DNA, 15 bp, Homo sapiens
gggtgagatgagaga

SEQ ID NO: 1702136 - DNA, 15 bp, Homo sapiens
ggtgagatgagagaa

SEQ ID NO: 1702137 - DNA, 15 bp, Homo sapiens
gtgagatgagagaag

SEQ ID NO: 1702138 - DNA, 15 bp, Homo sapiens
tgagatgagagaagg

SEQ ID NO: 1702139 - DNA, 15 bp, Homo sapiens
gagatgagagaaggg

SEQ ID NO: 1702140 - DNA, 15 bp, Homo sapiens
agatgagagaagggg

SEQ ID NO: 1702141 - DNA, 15 bp, Homo sapiens
gatgagagaaggggc

SEQ ID NO: 1702142 - DNA, 15 bp, Homo sapiens
atgagagaaggggca

SEQ ID NO: 1702143 - DNA, 15 bp, Homo sapiens
tgagagaaggggcac

SEQ ID NO: 1702144 - DNA, 15 bp, Homo sapiens
gagagaaggggcaca

SEQ ID NO: 1702145 - DNA, 15 bp, Homo sapiens
agagaaggggcacaa

SEQ ID NO: 1702146 - DNA, 15 bp, Homo sapiens
gagaaggggcacaaa

SEQ ID NO: 1702147 - DNA, 15 bp, Homo sapiens
agaaggggcacaaat

SEQ ID NO: 1702148 - DNA, 15 bp, Homo sapiens
gaaggggcacaaatg

SEQ ID NO: 1702149 - DNA, 15 bp, Homo sapiens
aaggggcacaaatgg

SEQ ID NO: 1702150 - DNA, 15 bp, Homo sapiens
aggggcacaaatggc

SEQ ID NO: 1702151 - DNA, 15 bp, Homo sapiens
ggggcacaaatggcc

SEQ ID NO: 1702152 - DNA, 15 bp, Homo sapiens
gggcacaaatggcct

SEQ ID NO: 1702153 - DNA, 15 bp, Homo sapiens
ggcacaaatggccta

SEQ ID NO: 1702154 - DNA, 15 bp, Homo sapiens
gcacaaatggcctat

SEQ ID NO: 1702155 - DNA, 15 bp, Homo sapiens
cacaaatggcctatg

SEQ ID NO: 1702156 - DNA, 15 bp, Homo sapiens
acaaatggcctatgg

SEQ ID NO: 1702157 - DNA, 15 bp, Homo sapiens
caaatggcctatggg

SEQ ID NO: 1702158 - DNA, 15 bp, Homo sapiens
aaatggcctatggga

SEQ ID NO: 1702159 - DNA, 15 bp, Homo sapiens
aatggcctatgggat

SEQ ID NO: 1702160 - DNA, 15 bp, Homo sapiens
atggcctatgggatg

SEQ ID NO: 1702161 - DNA, 15 bp, Homo sapiens
tggcctatgggatgc

SEQ ID NO: 1702162 - DNA, 15 bp, Homo sapiens
ggcctatgggatgca

SEQ ID NO: 1702163 - DNA, 15 bp, Homo sapiens
gcctatgggatgcag

SEQ ID NO: 1702164 - DNA, 15 bp, Homo sapiens
cctatgggatgcagc

SEQ ID NO: 1702165 - DNA, 15 bp, Homo sapiens
ctatgggatgcagca

SEQ ID NO: 1702166 - DNA, 15 bp, Homo sapiens
tatgggatgcagcag

SEQ ID NO: 1702167 - DNA, 15 bp, Homo sapiens
atgggatgcagcagg

SEQ ID NO: 1702168 - DNA, 15 bp, Homo sapiens
tgggatgcagcaggg

SEQ ID NO: 1702169 - DNA, 15 bp, Homo sapiens
gggatgcagcaggga

SEQ ID NO: 1702170 - DNA, 15 bp, Homo sapiens
ggatgcagcagggaa

SEQ ID NO: 1702171 - DNA, 15 bp, Homo sapiens
gatgcagcagggaat

SEQ ID NO: 1702172 - DNA, 15 bp, Homo sapiens
atgcagcagggaata

SEQ ID NO: 1702173 - DNA, 15 bp, Homo sapiens
tgcagcagggaatac

SEQ ID NO: 1702174 - DNA, 15 bp, Homo sapiens
gcagcagggaatact

SEQ ID NO: 1702175 - DNA, 15 bp, Homo sapiens
cagcagggaatactg

SEQ ID NO: 1702176 - DNA, 15 bp, Homo sapiens
agcagggaatactga

SEQ ID NO: 1702177 - DNA, 15 bp, Homo sapiens
gcagggaatactgat

SEQ ID NO: 1702178 - DNA, 15 bp, Homo sapiens
cagggaatactgatc

SEQ ID NO: 1702179 - DNA, 15 bp, Homo sapiens
agggaatactgatcc

SEQ ID NO: 1702180 - DNA, 15 bp, Homo sapiens
gggaatactgatcct

SEQ ID NO: 1702181 - DNA, 15 bp, Homo sapiens
ggaatactgatcctg

SEQ ID NO: 1702182 - DNA, 15 bp, Homo sapiens
gaatactgatcctga

SEQ ID NO: 1702183 - DNA, 15 bp, Homo sapiens
aatactgatcctgat

SEQ ID NO: 1702184 - DNA, 15 bp, Homo sapiens
atactgatcctgatt

SEQ ID NO: 1702185 - DNA, 15 bp, Homo sapiens
tactgatcctgattt

SEQ ID NO: 1702186 - DNA, 15 bp, Homo sapiens
actgatcctgattta

SEQ ID NO: 1702187 - DNA, 15 bp, Homo sapiens
ctgatcctgatttaa

SEQ ID NO: 1702188 - DNA, 15 bp, Homo sapiens
tgatcctgatttaac

SEQ ID NO: 1702189 - DNA, 15 bp, Homo sapiens
gatcctgatttaaca

SEQ ID NO: 1702190 - DNA, 15 bp, Homo sapiens
atcctgatttaacag

SEQ ID NO: 1702191 - DNA, 15 bp, Homo sapiens
tcctgatttaacagt

SEQ ID NO: 1702192 - DNA, 15 bp, Homo sapiens
cctgatttaacagtg

SEQ ID NO: 1702193 - DNA, 15 bp, Homo sapiens
ctgatttaacagtga

SEQ ID NO: 1702194 - DNA, 15 bp, Homo sapiens
aacacgtaagtttgt

SEQ ID NO: 1702195 - DNA, 15 bp, Homo sapiens
acacgtaagtttgtc

SEQ ID NO: 1702196 - DNA, 15 bp, Homo sapiens
cacgtaagtttgtcc

SEQ ID NO: 1702197 - DNA, 15 bp, Homo sapiens
acgtaagtttgtcct

SEQ ID NO: 1702198 - DNA, 15 bp, Homo sapiens
cgtaagtttgtcctt

SEQ ID NO: 1702199 - DNA, 15 bp, Homo sapiens
gtaagtttgtccttt

SEQ ID NO: 1702200 - DNA, 15 bp, Homo sapiens
taagtttgtcctttg

SEQ ID NO: 1702201 - DNA, 15 bp, Homo sapiens
aagtttgtcctttgg

SEQ ID NO: 1702202 - DNA, 15 bp, Homo sapiens
agtttgtcctttggt

SEQ ID NO: 1702203 - DNA, 15 bp, Homo sapiens
gtttgtcctttggtt

SEQ ID NO: 1702204 - DNA, 15 bp, Homo sapiens
tttgtcctttggttg

SEQ ID NO: 1702205 - DNA, 15 bp, Homo sapiens
ttgtcctttggttgc

SEQ ID NO: 1702206 - DNA, 15 bp, Homo sapiens
tgtcctttggttgcc

SEQ ID NO: 1702207 - DNA, 15 bp, Homo sapiens
gtcctttggttgcct

SEQ ID NO: 1702208 - DNA, 15 bp, Homo sapiens
tcctttggttgcctc

SEQ ID NO: 1702209 - DNA, 15 bp, Homo sapiens
cctttggttgcctca

SEQ ID NO: 1702210 - DNA, 15 bp, Homo sapiens
ctttggttgcctcat

SEQ ID NO: 1702211 - DNA, 15 bp, Homo sapiens
tttggttgcctcatt

SEQ ID NO: 1702212 - DNA, 15 bp, Homo sapiens
ttggttgcctcatta

SEQ ID NO: 1702213 - DNA, 15 bp, Homo sapiens
tggttgcctcattag

SEQ ID NO: 1702214 - DNA, 15 bp, Homo sapiens
ggttgcctcattagg

SEQ ID NO: 1702215 - DNA, 15 bp, Homo sapiens
gttgcctcattagga

SEQ ID NO: 1702216 - DNA, 15 bp, Homo sapiens
ttgcctcattaggag

SEQ ID NO: 1702217 - DNA, 15 bp, Homo sapiens
tgcctcattaggagt

SEQ ID NO: 1702218 - DNA, 15 bp, Homo sapiens
gcctcattaggagtg

SEQ ID NO: 1702219 - DNA, 15 bp, Homo sapiens
cctcattaggagtgg

SEQ ID NO: 1702220 - DNA, 15 bp, Homo sapiens
ctcattaggagtggg

SEQ ID NO: 1702221 - DNA, 15 bp, Homo sapiens
tcattaggagtgggg

SEQ ID NO: 1702222 - DNA, 15 bp, Homo sapiens
cattaggagtggggc

SEQ ID NO: 1702223 - DNA, 15 bp, Homo sapiens
attaggagtggggct

SEQ ID NO: 1702224 - DNA, 15 bp, Homo sapiens
ttaggagtggggctg

SEQ ID NO: 1702225 - DNA, 15 bp, Homo sapiens
taggagtggggctgg

SEQ ID NO: 1702226 - DNA, 15 bp, Homo sapiens
aggagtggggctgga

SEQ ID NO: 1702227 - DNA, 15 bp, Homo sapiens
ggagtggggctggat

SEQ ID NO: 1702228 - DNA, 15 bp, Homo sapiens
gagtggggctggata

SEQ ID NO: 1702229 - DNA, 15 bp, Homo sapiens
agtggggctggatac

SEQ ID NO: 1702230 - DNA, 15 bp, Homo sapiens
gtggggctggataca

SEQ ID NO: 1702231 - DNA, 15 bp, Homo sapiens
tggggctggatacag

SEQ ID NO: 1702232 - DNA, 15 bp, Homo sapiens
ggggctggatacagt

SEQ ID NO: 1702233 - DNA, 15 bp, Homo sapiens
gggctggatacagtt

SEQ ID NO: 1702234 - DNA, 15 bp, Homo sapiens
ggctggatacagtta

SEQ ID NO: 1702235 - DNA, 15 bp, Homo sapiens
gctggatacagttat

SEQ ID NO: 1702236 - DNA, 15 bp, Homo sapiens
ctggatacagttatc

SEQ ID NO: 1702237 - DNA, 15 bp, Homo sapiens
tggatacagttatca

SEQ ID NO: 1702238 - DNA, 15 bp, Homo sapiens
ggatacagttatcat

SEQ ID NO: 1702239 - DNA, 15 bp, Homo sapiens
gatacagttatcatt

SEQ ID NO: 1702240 - DNA, 15 bp, Homo sapiens
atacagttatcattg

SEQ ID NO: 1702241 - DNA, 15 bp, Homo sapiens
tacagttatcattgt

SEQ ID NO: 1702242 - DNA, 15 bp, Homo sapiens
acagttatcattgta

SEQ ID NO: 1702243 - DNA, 15 bp, Homo sapiens
cagttatcattgtat

SEQ ID NO: 1702244 - DNA, 15 bp, Homo sapiens
agttatcattgtata

SEQ ID NO: 1702245 - DNA, 15 bp, Homo sapiens
gttatcattgtatag

SEQ ID NO: 1702246 - DNA, 15 bp, Homo sapiens
ttatcattgtataga

SEQ ID NO: 1702247 - DNA, 15 bp, Homo sapiens
tatcattgtatagat

SEQ ID NO: 1702248 - DNA, 15 bp, Homo sapiens
atcattgtatagatt

SEQ ID NO: 1702249 - DNA, 15 bp, Homo sapiens
tcattgtatagattt

SEQ ID NO: 1702250 - DNA, 15 bp, Homo sapiens
cattgtatagatttg

SEQ ID NO: 1702251 - DNA, 15 bp, Homo sapiens
attgtatagatttgt

SEQ ID NO: 1702252 - DNA, 15 bp, Homo sapiens
ttgtatagatttgtg

SEQ ID NO: 1702253 - DNA, 15 bp, Homo sapiens
tgtatagatttgtgt

SEQ ID NO: 1702254 - DNA, 15 bp, Homo sapiens
gtatagatttgtgtc

SEQ ID NO: 1702255 - DNA, 15 bp, Homo sapiens
tatagatttgtgtct

SEQ ID NO: 1702256 - DNA, 15 bp, Homo sapiens
atagatttgtgtctt

SEQ ID NO: 1702257 - DNA, 15 bp, Homo sapiens
tagatttgtgtctta

SEQ ID NO: 1702258 - DNA, 15 bp, Homo sapiens
agatttgtgtcttat

SEQ ID NO: 1702259 - DNA, 15 bp, Homo sapiens
gatttgtgtcttata

SEQ ID NO: 1702260 - DNA, 15 bp, Homo sapiens
atttgtgtcttataa

SEQ ID NO: 1702261 - DNA, 15 bp, Homo sapiens
tttgtgtcttataat

SEQ ID NO: 1702262 - DNA, 15 bp, Homo sapiens
ttgtgtcttataatg

SEQ ID NO: 1702263 - DNA, 15 bp, Homo sapiens
tgtgtcttataatga

SEQ ID NO: 1702264 - DNA, 15 bp, Homo sapiens
gtgtcttataatgag

SEQ ID NO: 1702265 - DNA, 15 bp, Homo sapiens
tgtcttataatgagt

SEQ ID NO: 1702266 - DNA, 15 bp, Homo sapiens
gtcttataatgagtc

SEQ ID NO: 1702267 - DNA, 15 bp, Homo sapiens
tcttataatgagtcc

SEQ ID NO: 1702268 - DNA, 15 bp, Homo sapiens
cttataatgagtccc

SEQ ID NO: 1702269 - DNA, 15 bp, Homo sapiens
ttataatgagtccca

SEQ ID NO: 1702270 - DNA, 15 bp, Homo sapiens
tataatgagtcccat

SEQ ID NO: 1702271 - DNA, 15 bp, Homo sapiens
ataatgagtcccatt

SEQ ID NO: 1702272 - DNA, 15 bp, Homo sapiens
taatgagtcccatta

SEQ ID NO: 1702273 - DNA, 15 bp, Homo sapiens
aatgagtcccattaa

SEQ ID NO: 1702274 - DNA, 15 bp, Homo sapiens
atgagtcccattaat

SEQ ID NO: 1702275 - DNA, 15 bp, Homo sapiens
tgagtcccattaatt

SEQ ID NO: 1702276 - DNA, 15 bp, Homo sapiens
gagtcccattaattt

SEQ ID NO: 1702277 - DNA, 15 bp, Homo sapiens
agtcccattaatttc

SEQ ID NO: 1702278 - DNA, 15 bp, Homo sapiens
gtcccattaatttct

SEQ ID NO: 1702279 - DNA, 15 bp, Homo sapiens
tcccattaatttctc

SEQ ID NO: 1702280 - DNA, 15 bp, Homo sapiens
cccattaatttctcc

SEQ ID NO: 1702281 - DNA, 15 bp, Homo sapiens
ccattaatttctccc

SEQ ID NO: 1702282 - DNA, 15 bp, Homo sapiens
cattaatttctccct

SEQ ID NO: 1702283 - DNA, 15 bp, Homo sapiens
attaatttctccctc

SEQ ID NO: 1702284 - DNA, 15 bp, Homo sapiens
ttaatttctccctcc

SEQ ID NO: 1702285 - DNA, 15 bp, Homo sapiens
taatttctccctccc

SEQ ID NO: 1702286 - DNA, 15 bp, Homo sapiens
aatttctccctccct

SEQ ID NO: 1702287 - DNA, 15 bp, Homo sapiens
atttctccctccctt

SEQ ID NO: 1702288 - DNA, 15 bp, Homo sapiens
tttctccctcccttt

SEQ ID NO: 1702289 - DNA, 15 bp, Homo sapiens
ttctccctccctttc

SEQ ID NO: 1702290 - DNA, 15 bp, Homo sapiens
tctccctccctttct

SEQ ID NO: 1702291 - DNA, 15 bp, Homo sapiens
ctccctccctttctt

SEQ ID NO: 1702292 - DNA, 15 bp, Homo sapiens
tccctccctttcttc

SEQ ID NO: 1702293 - DNA, 15 bp, Homo sapiens
ccctccctttcttcg

SEQ ID NO: 1702294 - DNA, 15 bp, Homo sapiens
cctccctttcttcgt

SEQ ID NO: 1702295 - DNA, 15 bp, Homo sapiens
ctccctttcttcgtc

SEQ ID NO: 1702296 - DNA, 15 bp, Homo sapiens
tccctttcttcgtct

SEQ ID NO: 1702297 - DNA, 15 bp, Homo sapiens
ccctttcttcgtctt

SEQ ID NO: 1702298 - DNA, 15 bp, Homo sapiens
cctttcttcgtcttc

SEQ ID NO: 1702299 - DNA, 15 bp, Homo sapiens
ctttcttcgtcttct

SEQ ID NO: 1702300 - DNA, 15 bp, Homo sapiens
tttcttcgtcttctt

SEQ ID NO: 1702301 - DNA, 15 bp, Homo sapiens
ttcttcgtcttcttg

SEQ ID NO: 1702302 - DNA, 15 bp, Homo sapiens
tcttcgtcttcttgc

SEQ ID NO: 1702303 - DNA, 15 bp, Homo sapiens
cttcgtcttcttgca

SEQ ID NO: 1702304 - DNA, 15 bp, Homo sapiens
ttcgtcttcttgcag

SEQ ID NO: 1702305 - DNA, 15 bp, Homo sapiens
tcgtcttcttgcagc

SEQ ID NO: 1702306 - DNA, 15 bp, Homo sapiens
cgtcttcttgcagcg

SEQ ID NO: 1702307 - DNA, 15 bp, Homo sapiens
gtcttcttgcagcgg

SEQ ID NO: 1702308 - DNA, 15 bp, Homo sapiens
tcttcttgcagcgga

SEQ ID NO: 1702309 - DNA, 15 bp, Homo sapiens
cttcttgcagcggaa

SEQ ID NO: 1702310 - DNA, 15 bp, Homo sapiens
ttcttgcagcggaat

SEQ ID NO: 1702311 - DNA, 15 bp, Homo sapiens
tcttgcagcggaatt

SEQ ID NO: 1702312 - DNA, 15 bp, Homo sapiens
cttgcagcggaattt

SEQ ID NO: 1702313 - DNA, 15 bp, Homo sapiens
ttgcagcggaatttt

SEQ ID NO: 1702314 - DNA, 15 bp, Homo sapiens
tgcagcggaattttt

SEQ ID NO: 1702315 - DNA, 15 bp, Homo sapiens
gcagcggaatttttg

SEQ ID NO: 1702316 - DNA, 15 bp, Homo sapiens
cagcggaatttttga

SEQ ID NO: 1702317 - DNA, 15 bp, Homo sapiens
agcggaatttttgac

SEQ ID NO: 1702318 - DNA, 15 bp, Homo sapiens
gcggaatttttgaca

SEQ ID NO: 1702319 - DNA, 15 bp, Homo sapiens
cggaatttttgacaa

SEQ ID NO: 1702320 - DNA, 15 bp, Homo sapiens
ggaatttttgacaag

SEQ ID NO: 1702321 - DNA, 15 bp, Homo sapiens
gaatttttgacaaga

SEQ ID NO: 1702322 - DNA, 15 bp, Homo sapiens
aatttttgacaagaa

SEQ ID NO: 1702323 - DNA, 15 bp, Homo sapiens
atttttgacaagaat

SEQ ID NO: 1702324 - DNA, 15 bp, Homo sapiens
tttttgacaagaata

SEQ ID NO: 1702325 - DNA, 15 bp, Homo sapiens
ttttgacaagaataa

SEQ ID NO: 1702326 - DNA, 15 bp, Homo sapiens
tttgacaagaataaa

SEQ ID NO: 1702327 - DNA, 15 bp, Homo sapiens
ttgacaagaataaaa

SEQ ID NO: 1702328 - DNA, 15 bp, Homo sapiens
tgacaagaataaaat

SEQ ID NO: 1702329 - DNA, 15 bp, Homo sapiens
gacaagaataaaatt

SEQ ID NO: 1702330 - DNA, 15 bp, Homo sapiens
acaagaataaaatta

SEQ ID NO: 1702331 - DNA, 15 bp, Homo sapiens
caagaataaaattat

SEQ ID NO: 1702332 - DNA, 15 bp, Homo sapiens
aagaataaaattatt

SEQ ID NO: 1702333 - DNA, 15 bp, Homo sapiens
agaataaaattattt

SEQ ID NO: 1702334 - DNA, 15 bp, Homo sapiens
gaataaaattatttc

SEQ ID NO: 1702335 - DNA, 15 bp, Homo sapiens
aataaaattatttct

SEQ ID NO: 1702336 - DNA, 15 bp, Homo sapiens
ataaaattatttctg

SEQ ID NO: 1702337 - DNA, 15 bp, Homo sapiens
taaaattatttctga

SEQ ID NO: 1702338 - DNA, 15 bp, Homo sapiens
aaaattatttctgaa

SEQ ID NO: 1702339 - DNA, 15 bp, Homo sapiens
aaattatttctgaaa

SEQ ID NO: 1702340 - DNA, 15 bp, Homo sapiens
aattatttctgaaac

SEQ ID NO: 1702341 - DNA, 15 bp, Homo sapiens
attatttctgaaacc

SEQ ID NO: 1702342 - DNA, 15 bp, Homo sapiens
ttatttctgaaaccc

SEQ ID NO: 1702343 - DNA, 15 bp, Homo sapiens
tatttctgaaaccca

SEQ ID NO: 1702344 - DNA, 15 bp, Homo sapiens
atttctgaaacccac

SEQ ID NO: 1702345 - DNA, 15 bp, Homo sapiens
tttctgaaacccact

SEQ ID NO: 1702346 - DNA, 15 bp, Homo sapiens
ttctgaaacccactc

SEQ ID NO: 1702347 - DNA, 15 bp, Homo sapiens
tctgaaacccactcc

SEQ ID NO: 1702348 - DNA, 15 bp, Homo sapiens
ctgaaacccactcca

SEQ ID NO: 1702349 - DNA, 15 bp, Homo sapiens
tgaaacccactccaa

SEQ ID NO: 1702350 - DNA, 15 bp, Homo sapiens
gaaacccactccaaa

SEQ ID NO: 1702351 - DNA, 15 bp, Homo sapiens
aaacccactccaaac

SEQ ID NO: 1702352 - DNA, 15 bp, Homo sapiens
aacccactccaaaca

SEQ ID NO: 1702353 - DNA, 15 bp, Homo sapiens
acccactccaaacac

SEQ ID NO: 1702354 - DNA, 15 bp, Homo sapiens
cccactccaaacaca

SEQ ID NO: 1702355 - DNA, 15 bp, Homo sapiens
ccactccaaacacag

SEQ ID NO: 1702356 - DNA, 15 bp, Homo sapiens
cactccaaacacagt

SEQ ID NO: 1702357 - DNA, 15 bp, Homo sapiens
actccaaacacagtg

SEQ ID NO: 1702358 - DNA, 15 bp, Homo sapiens
ctccaaacacagtgc

SEQ ID NO: 1702359 - DNA, 15 bp, Homo sapiens
tccaaacacagtgca

SEQ ID NO: 1702360 - DNA, 15 bp, Homo sapiens
ccaaacacagtgcac

SEQ ID NO: 1702361 - DNA, 15 bp, Homo sapiens
caaacacagtgcact

SEQ ID NO: 1702362 - DNA, 15 bp, Homo sapiens
aaacacagtgcacta

SEQ ID NO: 1702363 - DNA, 15 bp, Homo sapiens
aacacagtgcactac

SEQ ID NO: 1702364 - DNA, 15 bp, Homo sapiens
acacagtgcactaca

SEQ ID NO: 1702365 - DNA, 15 bp, Homo sapiens
cacagtgcactacat

SEQ ID NO: 1702366 - DNA, 15 bp, Homo sapiens
acagtgcactacata

SEQ ID NO: 1702367 - DNA, 15 bp, Homo sapiens
cagtgcactacatac

SEQ ID NO: 1702368 - DNA, 15 bp, Homo sapiens
agtgcactacatact

SEQ ID NO: 1702369 - DNA, 15 bp, Homo sapiens
gtgcactacatactt

SEQ ID NO: 1702370 - DNA, 15 bp, Homo sapiens
tgcactacatactta

SEQ ID NO: 1702371 - DNA, 15 bp, Homo sapiens
gcactacatacttac

SEQ ID NO: 1702372 - DNA, 15 bp, Homo sapiens
cactacatacttacc

SEQ ID NO: 1702373 - DNA, 15 bp, Homo sapiens
actacatacttaccc

SEQ ID NO: 1702374 - DNA, 15 bp, Homo sapiens
ctacatacttaccca

SEQ ID NO: 1702375 - DNA, 15 bp, Homo sapiens
tacatacttacccac

SEQ ID NO: 1702376 - DNA, 15 bp, Homo sapiens
acatacttacccact

SEQ ID NO: 1702377 - DNA, 15 bp, Homo sapiens
catacttacccactt

SEQ ID NO: 1702378 - DNA, 15 bp, Homo sapiens
atacttacccacttc

SEQ ID NO: 1702379 - DNA, 15 bp, Homo sapiens
tacttacccacttca

SEQ ID NO: 1702380 - DNA, 15 bp, Homo sapiens
acttacccacttcaa

SEQ ID NO: 1702381 - DNA, 15 bp, Homo sapiens
cttacccacttcaag

SEQ ID NO: 1702382 - DNA, 15 bp, Homo sapiens
ttacccacttcaagg

SEQ ID NO: 1702383 - DNA, 15 bp, Homo sapiens
tacccacttcaaggg

SEQ ID NO: 1702384 - DNA, 15 bp, Homo sapiens
acccacttcaaggga

SEQ ID NO: 1702385 - DNA, 15 bp, Homo sapiens
cccacttcaagggat

SEQ ID NO: 1702386 - DNA, 15 bp, Homo sapiens
ccacttcaagggatt

SEQ ID NO: 1702387 - DNA, 15 bp, Homo sapiens
cacttcaagggattt

SEQ ID NO: 1702388 - DNA, 15 bp, Homo sapiens
acttcaagggatttt

SEQ ID NO: 1702389 - DNA, 15 bp, Homo sapiens
cttcaagggattttg

SEQ ID NO: 1702390 - DNA, 15 bp, Homo sapiens
ttcaagggattttgg

SEQ ID NO: 1702391 - DNA, 15 bp, Homo sapiens
tcaagggattttgga

SEQ ID NO: 1702392 - DNA, 15 bp, Homo sapiens
caagggattttggaa

SEQ ID NO: 1702393 - DNA, 15 bp, Homo sapiens
aagggattttggaac

SEQ ID NO: 1702394 - DNA, 15 bp, Homo sapiens
agggattttggaacg

SEQ ID NO: 1702395 - DNA, 15 bp, Homo sapiens
gggattttggaacgt

SEQ ID NO: 1702396 - DNA, 15 bp, Homo sapiens
ggattttggaacgtt

SEQ ID NO: 1702397 - DNA, 15 bp, Homo sapiens
gattttggaacgttg

SEQ ID NO: 1702398 - DNA, 15 bp, Homo sapiens
attttggaacgttgt

SEQ ID NO: 1702399 - DNA, 15 bp, Homo sapiens
ttttggaacgttgtg

SEQ ID NO: 1702400 - DNA, 15 bp, Homo sapiens
tttggaacgttgtga

SEQ ID NO: 1702401 - DNA, 15 bp, Homo sapiens
ttggaacgttgtgaa

SEQ ID NO: 1702402 - DNA, 15 bp, Homo sapiens
tggaacgttgtgaat

SEQ ID NO: 1702403 - DNA, 15 bp, Homo sapiens
ggaacgttgtgaata

SEQ ID NO: 1702404 - DNA, 15 bp, Homo sapiens
gaacgttgtgaataa

SEQ ID NO: 1702405 - DNA, 15 bp, Homo sapiens
aacgttgtgaataac

SEQ ID NO: 1702406 - DNA, 15 bp, Homo sapiens
acgttgtgaataaca

SEQ ID NO: 1702407 - DNA, 15 bp, Homo sapiens
cgttgtgaataacat

SEQ ID NO: 1702408 - DNA, 15 bp, Homo sapiens
gttgtgaataacatt

SEQ ID NO: 1702409 - DNA, 15 bp, Homo sapiens
ttgtgaataacattc

SEQ ID NO: 1702410 - DNA, 15 bp, Homo sapiens
tgtgaataacattcc

SEQ ID NO: 1702411 - DNA, 15 bp, Homo sapiens
gtgaataacattccc

SEQ ID NO: 1702412 - DNA, 15 bp, Homo sapiens
tgaataacattccct

SEQ ID NO: 1702413 - DNA, 15 bp, Homo sapiens
gaataacattccctt

SEQ ID NO: 1702414 - DNA, 15 bp, Homo sapiens
aataacattcccttc

SEQ ID NO: 1702415 - DNA, 15 bp, Homo sapiens
ataacattcccttcc

SEQ ID NO: 1702416 - DNA, 15 bp, Homo sapiens
taacattcccttcct

SEQ ID NO: 1702417 - DNA, 15 bp, Homo sapiens
aacattcccttcctt

SEQ ID NO: 1702418 - DNA, 15 bp, Homo sapiens
acattcccttccttc

SEQ ID NO: 1702419 - DNA, 15 bp, Homo sapiens
cattcccttccttcg

SEQ ID NO: 1702420 - DNA, 15 bp, Homo sapiens
attcccttccttcga

SEQ ID NO: 1702421 - DNA, 15 bp, Homo sapiens
ttcccttccttcgaa

SEQ ID NO: 1702422 - DNA, 15 bp, Homo sapiens
tcccttccttcgaaa

SEQ ID NO: 1702423 - DNA, 15 bp, Homo sapiens
cccttccttcgaaat

SEQ ID NO: 1702424 - DNA, 15 bp, Homo sapiens
ccttccttcgaaatg

SEQ ID NO: 1702425 - DNA, 15 bp, Homo sapiens
cttccttcgaaatgc

SEQ ID NO: 1702426 - DNA, 15 bp, Homo sapiens
ttccttcgaaatgca

SEQ ID NO: 1702427 - DNA, 15 bp, Homo sapiens
tccttcgaaatgcaa

SEQ ID NO: 1702428 - DNA, 15 bp, Homo sapiens
ccttcgaaatgcaat

SEQ ID NO: 1702429 - DNA, 15 bp, Homo sapiens
cttcgaaatgcaatt

SEQ ID NO: 1702430 - DNA, 15 bp, Homo sapiens
ttcgaaatgcaatta

SEQ ID NO: 1702431 - DNA, 15 bp, Homo sapiens
tcgaaatgcaattat

SEQ ID NO: 1702432 - DNA, 15 bp, Homo sapiens
cgaaatgcaattatg

SEQ ID NO: 1702433 - DNA, 15 bp, Homo sapiens
gaaatgcaattatga

SEQ ID NO: 1702434 - DNA, 15 bp, Homo sapiens
aaatgcaattatgag

SEQ ID NO: 1702435 - DNA, 15 bp, Homo sapiens
aatgcaattatgagt

SEQ ID NO: 1702436 - DNA, 15 bp, Homo sapiens
atgcaattatgagtt

SEQ ID NO: 1702437 - DNA, 15 bp, Homo sapiens
tgcaattatgagtta

SEQ ID NO: 1702438 - DNA, 15 bp, Homo sapiens
gcaattatgagttat

SEQ ID NO: 1702439 - DNA, 15 bp, Homo sapiens
caattatgagttatg

SEQ ID NO: 1702440 - DNA, 15 bp, Homo sapiens
aattatgagttatgt

SEQ ID NO: 1702441 - DNA, 15 bp, Homo sapiens
attatgagttatgtg

SEQ ID NO: 1702442 - DNA, 15 bp, Homo sapiens
ttatgagttatgtgt

SEQ ID NO: 1702443 - DNA, 15 bp, Homo sapiens
tatgagttatgtgtt

SEQ ID NO: 1702444 - DNA, 15 bp, Homo sapiens
atgagttatgtgttg

SEQ ID NO: 1702445 - DNA, 15 bp, Homo sapiens
tgagttatgtgttga

SEQ ID NO: 1702446 - DNA, 15 bp, Homo sapiens
gagttatgtgttgac

SEQ ID NO: 1702447 - DNA, 15 bp, Homo sapiens
agttatgtgttgaca

SEQ ID NO: 1702448 - DNA, 15 bp, Homo sapiens
gttatgtgttgacat

SEQ ID NO: 1702449 - DNA, 15 bp, Homo sapiens
ttatgtgttgacatg

SEQ ID NO: 1702450 - DNA, 15 bp, Homo sapiens
tatgtgttgacatgt

SEQ ID NO: 1702451 - DNA, 15 bp, Homo sapiens
atgtgttgacatgta

SEQ ID NO: 1702452 - DNA, 15 bp, Homo sapiens
tgtgttgacatgtaa

SEQ ID NO: 1702453 - DNA, 15 bp, Homo sapiens
gtgttgacatgtaag

SEQ ID NO: 1702454 - DNA, 15 bp, Homo sapiens
tgttgacatgtaagt

SEQ ID NO: 1702455 - DNA, 15 bp, Homo sapiens
gttgacatgtaagta

SEQ ID NO: 1702456 - DNA, 15 bp, Homo sapiens
ttgacatgtaagtac

SEQ ID NO: 1702457 - DNA, 15 bp, Homo sapiens
tgacatgtaagtaca

SEQ ID NO: 1702458 - DNA, 15 bp, Homo sapiens
gacatgtaagtacaa

SEQ ID NO: 1702459 - DNA, 15 bp, Homo sapiens
acatgtaagtacaag

SEQ ID NO: 1702460 - DNA, 15 bp, Homo sapiens
catgtaagtacaagt

SEQ ID NO: 1702461 - DNA, 15 bp, Homo sapiens
atgtaagtacaagtg

SEQ ID NO: 1702462 - DNA, 15 bp, Homo sapiens
tgtaagtacaagtgt

SEQ ID NO: 1702463 - DNA, 15 bp, Homo sapiens
gtaagtacaagtgtc

SEQ ID NO: 1702464 - DNA, 15 bp, Homo sapiens
taagtacaagtgtct

SEQ ID NO: 1702465 - DNA, 15 bp, Homo sapiens
aagtacaagtgtctt

SEQ ID NO: 1702466 - DNA, 15 bp, Homo sapiens
agtacaagtgtcttt

SEQ ID NO: 1702467 - DNA, 15 bp, Homo sapiens
gtacaagtgtctttc

SEQ ID NO: 1702468 - DNA, 15 bp, Homo sapiens
tacaagtgtctttct

SEQ ID NO: 1702469 - DNA, 15 bp, Homo sapiens
acaagtgtctttcta

SEQ ID NO: 1702470 - DNA, 15 bp, Homo sapiens
caagtgtctttctaa

SEQ ID NO: 1702471 - DNA, 15 bp, Homo sapiens
aagtgtctttctaag

SEQ ID NO: 1702472 - DNA, 15 bp, Homo sapiens
agtgtctttctaagg

SEQ ID NO: 1702473 - DNA, 15 bp, Homo sapiens
gtgtctttctaaggt

SEQ ID NO: 1702474 - DNA, 15 bp, Homo sapiens
tgtctttctaaggtt

SEQ ID NO: 1702475 - DNA, 15 bp, Homo sapiens
gtctttctaaggttt

SEQ ID NO: 1702476 - DNA, 15 bp, Homo sapiens
tctttctaaggtttt

SEQ ID NO: 1702477 - DNA, 15 bp, Homo sapiens
ctttctaaggttttt

SEQ ID NO: 1702478 - DNA, 15 bp, Homo sapiens
tttctaaggttttta

SEQ ID NO: 1702479 - DNA, 15 bp, Homo sapiens
ttctaaggtttttag

SEQ ID NO: 1702480 - DNA, 15 bp, Homo sapiens
tctaaggtttttagc

SEQ ID NO: 1702481 - DNA, 15 bp, Homo sapiens
ctaaggtttttagcc

SEQ ID NO: 1702482 - DNA, 15 bp, Homo sapiens
taaggtttttagcct

SEQ ID NO: 1702483 - DNA, 15 bp, Homo sapiens
aaggtttttagcctt

SEQ ID NO: 1702484 - DNA, 15 bp, Homo sapiens
aggtttttagccttc

SEQ ID NO: 1702485 - DNA, 15 bp, Homo sapiens
ggtttttagccttct

SEQ ID NO: 1702486 - DNA, 15 bp, Homo sapiens
gtttttagccttctc

SEQ ID NO: 1702487 - DNA, 15 bp, Homo sapiens
tttttagccttctca

SEQ ID NO: 1702488 - DNA, 15 bp, Homo sapiens
ttttagccttctcaa

SEQ ID NO: 1702489 - DNA, 15 bp, Homo sapiens
tttagccttctcaaa

SEQ ID NO: 1702490 - DNA, 15 bp, Homo sapiens
ttagccttctcaaag

SEQ ID NO: 1702491 - DNA, 15 bp, Homo sapiens
tagccttctcaaaga

SEQ ID NO: 1702492 - DNA, 15 bp, Homo sapiens
agccttctcaaagaa

SEQ ID NO: 1702493 - DNA, 15 bp, Homo sapiens
gccttctcaaagaaa

SEQ ID NO: 1702494 - DNA, 15 bp, Homo sapiens
ccttctcaaagaaaa

SEQ ID NO: 1702495 - DNA, 15 bp, Homo sapiens
cttctcaaagaaaaa

SEQ ID NO: 1702496 - DNA, 15 bp, Homo sapiens
ttctcaaagaaaaat

SEQ ID NO: 1702497 - DNA, 15 bp, Homo sapiens
tctcaaagaaaaata

SEQ ID NO: 1702498 - DNA, 15 bp, Homo sapiens
ctcaaagaaaaatat

SEQ ID NO: 1702499 - DNA, 15 bp, Homo sapiens
tcaaagaaaaatatg

SEQ ID NO: 1702500 - DNA, 15 bp, Homo sapiens
caaagaaaaatatgc

SEQ ID NO: 1702501 - DNA, 15 bp, Homo sapiens
aaagaaaaatatgct

SEQ ID NO: 1702502 - DNA, 15 bp, Homo sapiens
aagaaaaatatgctt

SEQ ID NO: 1702503 - DNA, 15 bp, Homo sapiens
agaaaaatatgcttt

SEQ ID NO: 1702504 - DNA, 15 bp, Homo sapiens
gaaaaatatgcttta

SEQ ID NO: 1702505 - DNA, 15 bp, Homo sapiens
aaaaatatgctttat

SEQ ID NO: 1702506 - DNA, 15 bp, Homo sapiens
aaaatatgctttata

SEQ ID NO: 1702507 - DNA, 15 bp, Homo sapiens
aaatatgctttataa

SEQ ID NO: 1702508 - DNA, 15 bp, Homo sapiens
aatatgctttataat

SEQ ID NO: 1702509 - DNA, 15 bp, Homo sapiens
atatgctttataata

SEQ ID NO: 1702510 - DNA, 15 bp, Homo sapiens
tatgctttataatac

SEQ ID NO: 1702511 - DNA, 15 bp, Homo sapiens
atgctttataatact

SEQ ID NO: 1702512 - DNA, 15 bp, Homo sapiens
tgctttataatactg

SEQ ID NO: 1702513 - DNA, 15 bp, Homo sapiens
gctttataatactgt

SEQ ID NO: 1702514 - DNA, 15 bp, Homo sapiens
ctttataatactgta

SEQ ID NO: 1702515 - DNA, 15 bp, Homo sapiens
tttataatactgtaa

SEQ ID NO: 1702516 - DNA, 15 bp, Homo sapiens
ttataatactgtaag

SEQ ID NO: 1702517 - DNA, 15 bp, Homo sapiens
tataatactgtaagc

SEQ ID NO: 1702518 - DNA, 15 bp, Homo sapiens
ataatactgtaagcc

SEQ ID NO: 1702519 - DNA, 15 bp, Homo sapiens
taatactgtaagcct

SEQ ID NO: 1702520 - DNA, 15 bp, Homo sapiens
aatactgtaagccta

SEQ ID NO: 1702521 - DNA, 15 bp, Homo sapiens
atactgtaagcctaa

SEQ ID NO: 1702522 - DNA, 15 bp, Homo sapiens
tactgtaagcctaat

SEQ ID NO: 1702523 - DNA, 15 bp, Homo sapiens
actgtaagcctaatc

SEQ ID NO: 1702524 - DNA, 15 bp, Homo sapiens
ctgtaagcctaatct

SEQ ID NO: 1702525 - DNA, 15 bp, Homo sapiens
tgtaagcctaatcta

SEQ ID NO: 1702526 - DNA, 15 bp, Homo sapiens
gtaagcctaatctaa

SEQ ID NO: 1702527 - DNA, 15 bp, Homo sapiens
taagcctaatctaaa

SEQ ID NO: 1702528 - DNA, 15 bp, Homo sapiens
aagcctaatctaaaa

SEQ ID NO: 1702529 - DNA, 15 bp, Homo sapiens
agcctaatctaaaaa

SEQ ID NO: 1702530 - DNA, 15 bp, Homo sapiens
gcctaatctaaaaac

SEQ ID NO: 1702531 - DNA, 15 bp, Homo sapiens
cctaatctaaaaaca

SEQ ID NO: 1702532 - DNA, 15 bp, Homo sapiens
ctaatctaaaaacat

SEQ ID NO: 1702533 - DNA, 15 bp, Homo sapiens
taatctaaaaacata

SEQ ID NO: 1702534 - DNA, 15 bp, Homo sapiens
aatctaaaaacatat

SEQ ID NO: 1702535 - DNA, 15 bp, Homo sapiens
atctaaaaacatatt

SEQ ID NO: 1702536 - DNA, 15 bp, Homo sapiens
tctaaaaacatattt

SEQ ID NO: 1702537 - DNA, 15 bp, Homo sapiens
ctaaaaacatatttc

SEQ ID NO: 1702538 - DNA, 15 bp, Homo sapiens
taaaaacatatttcc

SEQ ID NO: 1702539 - DNA, 15 bp, Homo sapiens
aaaaacatatttcca

SEQ ID NO: 1702540 - DNA, 15 bp, Homo sapiens
aaaacatatttccaa

SEQ ID NO: 1702541 - DNA, 15 bp, Homo sapiens
aaacatatttccaag

SEQ ID NO: 1702542 - DNA, 15 bp, Homo sapiens
aacatatttccaagc

SEQ ID NO: 1702543 - DNA, 15 bp, Homo sapiens
acatatttccaagct

SEQ ID NO: 1702544 - DNA, 15 bp, Homo sapiens
catatttccaagctt

SEQ ID NO: 1702545 - DNA, 15 bp, Homo sapiens
atatttccaagctta

SEQ ID NO: 1702546 - DNA, 15 bp, Homo sapiens
tatttccaagcttat

SEQ ID NO: 1702547 - DNA, 15 bp, Homo sapiens
atttccaagcttatc

SEQ ID NO: 1702548 - DNA, 15 bp, Homo sapiens
tttccaagcttatca

SEQ ID NO: 1702549 - DNA, 15 bp, Homo sapiens
ttccaagcttatcaa

SEQ ID NO: 1702550 - DNA, 15 bp, Homo sapiens
tccaagcttatcaaa

SEQ ID NO: 1702551 - DNA, 15 bp, Homo sapiens
ccaagcttatcaaaa

SEQ ID NO: 1702552 - DNA, 15 bp, Homo sapiens
caagcttatcaaaaa

SEQ ID NO: 1702553 - DNA, 15 bp, Homo sapiens
aagcttatcaaaaag

SEQ ID NO: 1702554 - DNA, 15 bp, Homo sapiens
agcttatcaaaaaga

SEQ ID NO: 1702555 - DNA, 15 bp, Homo sapiens
gcttatcaaaaagac

SEQ ID NO: 1702556 - DNA, 15 bp, Homo sapiens
cttatcaaaaagact

SEQ ID NO: 1702557 - DNA, 15 bp, Homo sapiens
ttatcaaaaagactt

SEQ ID NO: 1702558 - DNA, 15 bp, Homo sapiens
tatcaaaaagacttt

SEQ ID NO: 1702559 - DNA, 15 bp, Homo sapiens
atcaaaaagacttta

SEQ ID NO: 1702560 - DNA, 15 bp, Homo sapiens
tcaaaaagactttaa

SEQ ID NO: 1702561 - DNA, 15 bp, Homo sapiens
caaaaagactttaag

SEQ ID NO: 1702562 - DNA, 15 bp, Homo sapiens
aaaaagactttaaga

SEQ ID NO: 1702563 - DNA, 15 bp, Homo sapiens
aaaagactttaagat

SEQ ID NO: 1702564 - DNA, 15 bp, Homo sapiens
aaagactttaagata

SEQ ID NO: 1702565 - DNA, 15 bp, Homo sapiens
aagactttaagatag

SEQ ID NO: 1702566 - DNA, 15 bp, Homo sapiens
agactttaagatagc

SEQ ID NO: 1702567 - DNA, 15 bp, Homo sapiens
gactttaagatagct

SEQ ID NO: 1702568 - DNA, 15 bp, Homo sapiens
actttaagatagctt

SEQ ID NO: 1702569 - DNA, 15 bp, Homo sapiens
ctttaagatagcttt

SEQ ID NO: 1702570 - DNA, 15 bp, Homo sapiens
tttaagatagctttt

SEQ ID NO: 1702571 - DNA, 15 bp, Homo sapiens
ttaagatagctttta

SEQ ID NO: 1702572 - DNA, 15 bp, Homo sapiens
taagatagcttttaa

SEQ ID NO: 1702573 - DNA, 15 bp, Homo sapiens
aagatagcttttaag

SEQ ID NO: 1702574 - DNA, 15 bp, Homo sapiens
agatagcttttaagt

SEQ ID NO: 1702575 - DNA, 15 bp, Homo sapiens
gatagcttttaagtt

SEQ ID NO: 1702576 - DNA, 15 bp, Homo sapiens
atagcttttaagttt

SEQ ID NO: 1702577 - DNA, 15 bp, Homo sapiens
tagcttttaagtttg

SEQ ID NO: 1702578 - DNA, 15 bp, Homo sapiens
agcttttaagtttgc

SEQ ID NO: 1702579 - DNA, 15 bp, Homo sapiens
gcttttaagtttgcc

SEQ ID NO: 1702580 - DNA, 15 bp, Homo sapiens
cttttaagtttgcct

SEQ ID NO: 1702581 - DNA, 15 bp, Homo sapiens
ttttaagtttgcctt

SEQ ID NO: 1702582 - DNA, 15 bp, Homo sapiens
tttaagtttgccttc

SEQ ID NO: 1702583 - DNA, 15 bp, Homo sapiens
ttaagtttgccttcc

SEQ ID NO: 1702584 - DNA, 15 bp, Homo sapiens
taagtttgccttcca

SEQ ID NO: 1702585 - DNA, 15 bp, Homo sapiens
aagtttgccttccat

SEQ ID NO: 1702586 - DNA, 15 bp, Homo sapiens
agtttgccttccatc

SEQ ID NO: 1702587 - DNA, 15 bp, Homo sapiens
gtttgccttccatct

SEQ ID NO: 1702588 - DNA, 15 bp, Homo sapiens
tttgccttccatctt

SEQ ID NO: 1702589 - DNA, 15 bp, Homo sapiens
ttgccttccatctta

SEQ ID NO: 1702590 - DNA, 15 bp, Homo sapiens
tgccttccatcttaa

SEQ ID NO: 1702591 - DNA, 15 bp, Homo sapiens
gccttccatcttaat

SEQ ID NO: 1702592 - DNA, 15 bp, Homo sapiens
ccttccatcttaatc

SEQ ID NO: 1702593 - DNA, 15 bp, Homo sapiens
cttccatcttaatcg

SEQ ID NO: 1702594 - DNA, 15 bp, Homo sapiens
ttccatcttaatcgc

SEQ ID NO: 1702595 - DNA, 15 bp, Homo sapiens
tccatcttaatcgcc

SEQ ID NO: 1702596 - DNA, 15 bp, Homo sapiens
ccatcttaatcgcca

SEQ ID NO: 1702597 - DNA, 15 bp, Homo sapiens
catcttaatcgccaa

SEQ ID NO: 1702598 - DNA, 15 bp, Homo sapiens
atcttaatcgccaaa

SEQ ID NO: 1702599 - DNA, 15 bp, Homo sapiens
tcttaatcgccaaaa

SEQ ID NO: 1702600 - DNA, 15 bp, Homo sapiens
cttaatcgccaaaaa

SEQ ID NO: 1702601 - DNA, 15 bp, Homo sapiens
ttaatcgccaaaaat

SEQ ID NO: 1702602 - DNA, 15 bp, Homo sapiens
taatcgccaaaaata

SEQ ID NO: 1702603 - DNA, 15 bp, Homo sapiens
aatcgccaaaaatat

SEQ ID NO: 1702604 - DNA, 15 bp, Homo sapiens
atcgccaaaaatatt

SEQ ID NO: 1702605 - DNA, 15 bp, Homo sapiens
tcgccaaaaatattg

SEQ ID NO: 1702606 - DNA, 15 bp, Homo sapiens
cgccaaaaatattga

SEQ ID NO: 1702607 - DNA, 15 bp, Homo sapiens
gccaaaaatattgac

SEQ ID NO: 1702608 - DNA, 15 bp, Homo sapiens
ccaaaaatattgaca

SEQ ID NO: 1702609 - DNA, 15 bp, Homo sapiens
caaaaatattgacat

SEQ ID NO: 1702610 - DNA, 15 bp, Homo sapiens
aaaaatattgacatt

SEQ ID NO: 1702611 - DNA, 15 bp, Homo sapiens
aaaatattgacattt

SEQ ID NO: 1702612 - DNA, 15 bp, Homo sapiens
aaatattgacattta

SEQ ID NO: 1702613 - DNA, 15 bp, Homo sapiens
aatattgacatttag

SEQ ID NO: 1702614 - DNA, 15 bp, Homo sapiens
atattgacatttagt

SEQ ID NO: 1702615 - DNA, 15 bp, Homo sapiens
tattgacatttagtc

SEQ ID NO: 1702616 - DNA, 15 bp, Homo sapiens
attgacatttagtcc

SEQ ID NO: 1702617 - DNA, 15 bp, Homo sapiens
ttgacatttagtccc

SEQ ID NO: 1702618 - DNA, 15 bp, Homo sapiens
tgacatttagtccca

SEQ ID NO: 1702619 - DNA, 15 bp, Homo sapiens
gacatttagtcccat

SEQ ID NO: 1702620 - DNA, 15 bp, Homo sapiens
acatttagtcccatc

SEQ ID NO: 1702621 - DNA, 15 bp, Homo sapiens
catttagtcccatcc

SEQ ID NO: 1702622 - DNA, 15 bp, Homo sapiens
atttagtcccatcca

SEQ ID NO: 1702623 - DNA, 15 bp, Homo sapiens
tttagtcccatccag

SEQ ID NO: 1702624 - DNA, 15 bp, Homo sapiens
ttagtcccatccagt

SEQ ID NO: 1702625 - DNA, 15 bp, Homo sapiens
tagtcccatccagtt

SEQ ID NO: 1702626 - DNA, 15 bp, Homo sapiens
agtcccatccagttt

SEQ ID NO: 1702627 - DNA, 15 bp, Homo sapiens
gtcccatccagttta

SEQ ID NO: 1702628 - DNA, 15 bp, Homo sapiens
tcccatccagtttat

SEQ ID NO: 1702629 - DNA, 15 bp, Homo sapiens
cccatccagtttata

SEQ ID NO: 1702630 - DNA, 15 bp, Homo sapiens
ccatccagtttatac

SEQ ID NO: 1702631 - DNA, 15 bp, Homo sapiens
catccagtttataca

SEQ ID NO: 1702632 - DNA, 15 bp, Homo sapiens
atccagtttatacag

SEQ ID NO: 1702633 - DNA, 15 bp, Homo sapiens
tccagtttatacagt

SEQ ID NO: 1702634 - DNA, 15 bp, Homo sapiens
ccagtttatacagtc

SEQ ID NO: 1702635 - DNA, 15 bp, Homo sapiens
cagtttatacagtct

SEQ ID NO: 1702636 - DNA, 15 bp, Homo sapiens
agtttatacagtctg

SEQ ID NO: 1702637 - DNA, 15 bp, Homo sapiens
gtttatacagtctgc

SEQ ID NO: 1702638 - DNA, 15 bp, Homo sapiens
tttatacagtctgct

SEQ ID NO: 1702639 - DNA, 15 bp, Homo sapiens
ttatacagtctgctc

SEQ ID NO: 1702640 - DNA, 15 bp, Homo sapiens
tatacagtctgctca

SEQ ID NO: 1702641 - DNA, 15 bp, Homo sapiens
atacagtctgctcac

SEQ ID NO: 1702642 - DNA, 15 bp, Homo sapiens
tacagtctgctcaca

SEQ ID NO: 1702643 - DNA, 15 bp, Homo sapiens
acagtctgctcacaa

SEQ ID NO: 1702644 - DNA, 15 bp, Homo sapiens
cagtctgctcacaac

SEQ ID NO: 1702645 - DNA, 15 bp, Homo sapiens
agtctgctcacaact

SEQ ID NO: 1702646 - DNA, 15 bp, Homo sapiens
gtctgctcacaactc

SEQ ID NO: 1702647 - DNA, 15 bp, Homo sapiens
tctgctcacaactct

SEQ ID NO: 1702648 - DNA, 15 bp, Homo sapiens
ctgctcacaactctg

SEQ ID NO: 1702649 - DNA, 15 bp, Homo sapiens
tgctcacaactctgt

SEQ ID NO: 1702650 - DNA, 15 bp, Homo sapiens
gctcacaactctgta

SEQ ID NO: 1702651 - DNA, 15 bp, Homo sapiens
ctcacaactctgtat

SEQ ID NO: 1702652 - DNA, 15 bp, Homo sapiens
tcacaactctgtata

SEQ ID NO: 1702653 - DNA, 15 bp, Homo sapiens
cacaactctgtatac

SEQ ID NO: 1702654 - DNA, 15 bp, Homo sapiens
acaactctgtatacc

SEQ ID NO: 1702655 - DNA, 15 bp, Homo sapiens
caactctgtatacct

SEQ ID NO: 1702656 - DNA, 15 bp, Homo sapiens
aactctgtatacctc

SEQ ID NO: 1702657 - DNA, 15 bp, Homo sapiens
actctgtatacctct

SEQ ID NO: 1702658 - DNA, 15 bp, Homo sapiens
ctctgtatacctctt

SEQ ID NO: 1702659 - DNA, 15 bp, Homo sapiens
tctgtatacctcttc

SEQ ID NO: 1702660 - DNA, 15 bp, Homo sapiens
ctgtatacctcttct

SEQ ID NO: 1702661 - DNA, 15 bp, Homo sapiens
tgtatacctcttcta

SEQ ID NO: 1702662 - DNA, 15 bp, Homo sapiens
gtatacctcttctaa

SEQ ID NO: 1702663 - DNA, 15 bp, Homo sapiens
tatacctcttctaac

SEQ ID NO: 1702664 - DNA, 15 bp, Homo sapiens
atacctcttctaacc

SEQ ID NO: 1702665 - DNA, 15 bp, Homo sapiens
tacctcttctaacct

SEQ ID NO: 1702666 - DNA, 15 bp, Homo sapiens
acctcttctaacctt

SEQ ID NO: 1702667 - DNA, 15 bp, Homo sapiens
cctcttctaaccttt

SEQ ID NO: 1702668 - DNA, 15 bp, Homo sapiens
ctcttctaaccttta

SEQ ID NO: 1702669 - DNA, 15 bp, Homo sapiens
tcttctaacctttac

SEQ ID NO: 1702670 - DNA, 15 bp, Homo sapiens
cttctaacctttact

SEQ ID NO: 1702671 - DNA, 15 bp, Homo sapiens
ttctaacctttactg

SEQ ID NO: 1702672 - DNA, 15 bp, Homo sapiens
tctaacctttactgt

SEQ ID NO: 1702673 - DNA, 15 bp, Homo sapiens
ctaacctttactgtt

SEQ ID NO: 1702674 - DNA, 15 bp, Homo sapiens
taacctttactgttt

SEQ ID NO: 1702675 - DNA, 15 bp, Homo sapiens
aacctttactgtttg

SEQ ID NO: 1702676 - DNA, 15 bp, Homo sapiens
acctttactgtttgg

SEQ ID NO: 1702677 - DNA, 15 bp, Homo sapiens
cctttactgtttggt

SEQ ID NO: 1702678 - DNA, 15 bp, Homo sapiens
ctttactgtttggtc

SEQ ID NO: 1702679 - DNA, 15 bp, Homo sapiens
tttactgtttggtca

SEQ ID NO: 1702680 - DNA, 15 bp, Homo sapiens
ttactgtttggtcag

SEQ ID NO: 1702681 - DNA, 15 bp, Homo sapiens
tactgtttggtcagt

SEQ ID NO: 1702682 - DNA, 15 bp, Homo sapiens
actgtttggtcagtt

SEQ ID NO: 1702683 - DNA, 15 bp, Homo sapiens
ctgtttggtcagttt

SEQ ID NO: 1702684 - DNA, 15 bp, Homo sapiens
tgtttggtcagtttg

SEQ ID NO: 1702685 - DNA, 15 bp, Homo sapiens
gtttggtcagtttgt

SEQ ID NO: 1702686 - DNA, 15 bp, Homo sapiens
tttggtcagtttgtg

SEQ ID NO: 1702687 - DNA, 15 bp, Homo sapiens
ttggtcagtttgtgg

SEQ ID NO: 1702688 - DNA, 15 bp, Homo sapiens
tggtcagtttgtgga

SEQ ID NO: 1702689 - DNA, 15 bp, Homo sapiens
ggtcagtttgtggag

SEQ ID NO: 1702690 - DNA, 15 bp, Homo sapiens
gtcagtttgtggagg

SEQ ID NO: 1702691 - DNA, 15 bp, Homo sapiens
tcagtttgtggaggt

SEQ ID NO: 1702692 - DNA, 15 bp, Homo sapiens
cagtttgtggaggta

SEQ ID NO: 1702693 - DNA, 15 bp, Homo sapiens
agtttgtggaggtag

SEQ ID NO: 1702694 - DNA, 15 bp, Homo sapiens
gtttgtggaggtagc

SEQ ID NO: 1702695 - DNA, 15 bp, Homo sapiens
tttgtggaggtagca

SEQ ID NO: 1702696 - DNA, 15 bp, Homo sapiens
ttgtggaggtagcat

SEQ ID NO: 1702697 - DNA, 15 bp, Homo sapiens
tgtggaggtagcatg

SEQ ID NO: 1702698 - DNA, 15 bp, Homo sapiens
gtggaggtagcatgg

SEQ ID NO: 1702699 - DNA, 15 bp, Homo sapiens
tggaggtagcatggt

SEQ ID NO: 1702700 - DNA, 15 bp, Homo sapiens
ggaggtagcatggtc

SEQ ID NO: 1702701 - DNA, 15 bp, Homo sapiens
gaggtagcatggtcc

SEQ ID NO: 1702702 - DNA, 15 bp, Homo sapiens
aggtagcatggtcca

SEQ ID NO: 1702703 - DNA, 15 bp, Homo sapiens
ggtagcatggtccag

SEQ ID NO: 1702704 - DNA, 15 bp, Homo sapiens
gtagcatggtccagc

SEQ ID NO: 1702705 - DNA, 15 bp, Homo sapiens
tagcatggtccagct

SEQ ID NO: 1702706 - DNA, 15 bp, Homo sapiens
agcatggtccagctg

SEQ ID NO: 1702707 - DNA, 15 bp, Homo sapiens
gcatggtccagctgt

SEQ ID NO: 1702708 - DNA, 15 bp, Homo sapiens
catggtccagctgtt

SEQ ID NO: 1702709 - DNA, 15 bp, Homo sapiens
atggtccagctgttt

SEQ ID NO: 1702710 - DNA, 15 bp, Homo sapiens
tggtccagctgttta

SEQ ID NO: 1702711 - DNA, 15 bp, Homo sapiens
ggtccagctgtttat

SEQ ID NO: 1702712 - DNA, 15 bp, Homo sapiens
gtccagctgtttatt

SEQ ID NO: 1702713 - DNA, 15 bp, Homo sapiens
tccagctgtttattg

SEQ ID NO: 1702714 - DNA, 15 bp, Homo sapiens
ccagctgtttattga

SEQ ID NO: 1702715 - DNA, 15 bp, Homo sapiens
cagctgtttattgaa

SEQ ID NO: 1702716 - DNA, 15 bp, Homo sapiens
agctgtttattgaat

SEQ ID NO: 1702717 - DNA, 15 bp, Homo sapiens
gctgtttattgaatg

SEQ ID NO: 1702718 - DNA, 15 bp, Homo sapiens
ctgtttattgaatgc

SEQ ID NO: 1702719 - DNA, 15 bp, Homo sapiens
tgtttattgaatgcc

SEQ ID NO: 1702720 - DNA, 15 bp, Homo sapiens
gtttattgaatgccc

SEQ ID NO: 1702721 - DNA, 15 bp, Homo sapiens
tttattgaatgccca

SEQ ID NO: 1702722 - DNA, 15 bp, Homo sapiens
ttattgaatgcccat

SEQ ID NO: 1702723 - DNA, 15 bp, Homo sapiens
tattgaatgcccatg

SEQ ID NO: 1702724 - DNA, 15 bp, Homo sapiens
attgaatgcccatgg

SEQ ID NO: 1702725 - DNA, 15 bp, Homo sapiens
ttgaatgcccatggg

SEQ ID NO: 1702726 - DNA, 15 bp, Homo sapiens
tgaatgcccatgggc

SEQ ID NO: 1702727 - DNA, 15 bp, Homo sapiens
gaatgcccatgggcc

SEQ ID NO: 1702728 - DNA, 15 bp, Homo sapiens
aatgcccatgggcca

SEQ ID NO: 1702729 - DNA, 15 bp, Homo sapiens
atgcccatgggccac

SEQ ID NO: 1702730 - DNA, 15 bp, Homo sapiens
tgcccatgggccaca

SEQ ID NO: 1702731 - DNA, 15 bp, Homo sapiens
gcccatgggccacag

SEQ ID NO: 1702732 - DNA, 15 bp, Homo sapiens
cccatgggccacaga

SEQ ID NO: 1702733 - DNA, 15 bp, Homo sapiens
ccatgggccacagaa

SEQ ID NO: 1702734 - DNA, 15 bp, Homo sapiens
catgggccacagaat

SEQ ID NO: 1702735 - DNA, 15 bp, Homo sapiens
atgggccacagaatt

SEQ ID NO: 1702736 - DNA, 15 bp, Homo sapiens
tgggccacagaattg

SEQ ID NO: 1702737 - DNA, 15 bp, Homo sapiens
gggccacagaattgt

SEQ ID NO: 1702738 - DNA, 15 bp, Homo sapiens
ggccacagaattgtt

SEQ ID NO: 1702739 - DNA, 15 bp, Homo sapiens
gccacagaattgttc

SEQ ID NO: 1702740 - DNA, 15 bp, Homo sapiens
ccacagaattgttct

SEQ ID NO: 1702741 - DNA, 15 bp, Homo sapiens
cacagaattgttctg

SEQ ID NO: 1702742 - DNA, 15 bp, Homo sapiens
acagaattgttctga

SEQ ID NO: 1702743 - DNA, 15 bp, Homo sapiens
cagaattgttctgaa

SEQ ID NO: 1702744 - DNA, 15 bp, Homo sapiens
agaattgttctgaac

SEQ ID NO: 1702745 - DNA, 15 bp, Homo sapiens
gaattgttctgaaca

SEQ ID NO: 1702746 - DNA, 15 bp, Homo sapiens
aattgttctgaacat

SEQ ID NO: 1702747 - DNA, 15 bp, Homo sapiens
attgttctgaacatg

SEQ ID NO: 1702748 - DNA, 15 bp, Homo sapiens
ttgttctgaacatgt

SEQ ID NO: 1702749 - DNA, 15 bp, Homo sapiens
tgttctgaacatgta

SEQ ID NO: 1702750 - DNA, 15 bp, Homo sapiens
gttctgaacatgtag

SEQ ID NO: 1702751 - DNA, 15 bp, Homo sapiens
ttctgaacatgtagc

SEQ ID NO: 1702752 - DNA, 15 bp, Homo sapiens
tctgaacatgtagca

SEQ ID NO: 1702753 - DNA, 15 bp, Homo sapiens
ctgaacatgtagcac

SEQ ID NO: 1702754 - DNA, 15 bp, Homo sapiens
tgaacatgtagcacc

SEQ ID NO: 1702755 - DNA, 15 bp, Homo sapiens
gaacatgtagcaccc

SEQ ID NO: 1702756 - DNA, 15 bp, Homo sapiens
aacatgtagcaccca

SEQ ID NO: 1702757 - DNA, 15 bp, Homo sapiens
acatgtagcacccat

SEQ ID NO: 1702758 - DNA, 15 bp, Homo sapiens
catgtagcacccatt

SEQ ID NO: 1702759 - DNA, 15 bp, Homo sapiens
atgtagcacccatta

SEQ ID NO: 1702760 - DNA, 15 bp, Homo sapiens
tgtagcacccattaa

SEQ ID NO: 1702761 - DNA, 15 bp, Homo sapiens
gtagcacccattaaa

SEQ ID NO: 1702762 - DNA, 15 bp, Homo sapiens
tagcacccattaaaa

SEQ ID NO: 1702763 - DNA, 15 bp, Homo sapiens
agcacccattaaaat

SEQ ID NO: 1702764 - DNA, 15 bp, Homo sapiens
gcacccattaaaata

SEQ ID NO: 1702765 - DNA, 15 bp, Homo sapiens
cacccattaaaataa

SEQ ID NO: 1702766 - DNA, 15 bp, Homo sapiens
acccattaaaataaa

SEQ ID NO: 1702767 - DNA, 15 bp, Homo sapiens
cccattaaaataaat

SEQ ID NO: 1702768 - DNA, 15 bp, Homo sapiens
ccattaaaataaatt

SEQ ID NO: 1702769 - DNA, 15 bp, Homo sapiens
cattaaaataaattt

SEQ ID NO: 1702770 - DNA, 15 bp, Homo sapiens
attaaaataaatttg

SEQ ID NO: 1702771 - DNA, 15 bp, Homo sapiens
ttaaaataaatttgg

SEQ ID NO: 1702772 - DNA, 15 bp, Homo sapiens
taaaataaatttgga

SEQ ID NO: 1702773 - DNA, 15 bp, Homo sapiens
aaaataaatttggat

SEQ ID NO: 1702774 - DNA, 15 bp, Homo sapiens
aaataaatttggatt

SEQ ID NO: 1702775 - DNA, 15 bp, Homo sapiens
aataaatttggattt

SEQ ID NO: 1702776 - DNA, 15 bp, Homo sapiens
ataaatttggatttg

SEQ ID NO: 1702777 - DNA, 15 bp, Homo sapiens
taaatttggatttgg

SEQ ID NO: 1702778 - DNA, 15 bp, Homo sapiens
aaatttggatttgga

SEQ ID NO: 1702779 - DNA, 15 bp, Homo sapiens
aatttggatttggat

SEQ ID NO: 1702780 - DNA, 15 bp, Homo sapiens
atttggatttggatc

SEQ ID NO: 1702781 - DNA, 15 bp, Homo sapiens
tttggatttggatca

SEQ ID NO: 1702782 - DNA, 15 bp, Homo sapiens
ttggatttggatcag

SEQ ID NO: 1702783 - DNA, 15 bp, Homo sapiens
tggatttggatcagc

SEQ ID NO: 1702784 - DNA, 15 bp, Homo sapiens
ggatttggatcagca

SEQ ID NO: 1702785 - DNA, 15 bp, Homo sapiens
gatttggatcagcaa

SEQ ID NO: 1702786 - DNA, 15 bp, Homo sapiens
atttggatcagcaag

SEQ ID NO: 1702787 - DNA, 15 bp, Homo sapiens
tttggatcagcaaga

SEQ ID NO: 1702788 - DNA, 15 bp, Homo sapiens
ttggatcagcaagaa

SEQ ID NO: 1702789 - DNA, 15 bp, Homo sapiens
tggatcagcaagaaa

SEQ ID NO: 1702790 - DNA, 15 bp, Homo sapiens
ggatcagcaagaaaa

SEQ ID NO: 1702791 - DNA, 15 bp, Homo sapiens
gatcagcaagaaaat

SEQ ID NO: 1702792 - DNA, 15 bp, Homo sapiens
atcagcaagaaaata

SEQ ID NO: 1702793 - DNA, 15 bp, Homo sapiens
tcagcaagaaaataa

SEQ ID NO: 1702794 - DNA, 15 bp, Homo sapiens
cagcaagaaaataac

SEQ ID NO: 1702795 - DNA, 15 bp, Homo sapiens
agcaagaaaataact

SEQ ID NO: 1702796 - DNA, 15 bp, Homo sapiens
caagaaaataacttt

SEQ ID NO: 1702797 - DNA, 15 bp, Homo sapiens
aagaaaataactttc

SEQ ID NO: 1702798 - DNA, 15 bp, Homo sapiens
agaaaataactttcc

SEQ ID NO: 1702799 - DNA, 15 bp, Homo sapiens
gaaaataactttcca

SEQ ID NO: 1702800 - DNA, 15 bp, Homo sapiens
aaaataactttccat

SEQ ID NO: 1702801 - DNA, 15 bp, Homo sapiens
aaataactttccatg

SEQ ID NO: 1702802 - DNA, 15 bp, Homo sapiens
aataactttccatga

SEQ ID NO: 1702803 - DNA, 15 bp, Homo sapiens
ataactttccatgat

SEQ ID NO: 1702804 - DNA, 15 bp, Homo sapiens
taactttccatgatt

SEQ ID NO: 1702805 - DNA, 15 bp, Homo sapiens
aactttccatgattc

SEQ ID NO: 1702806 - DNA, 15 bp, Homo sapiens
actttccatgattct

SEQ ID NO: 1702807 - DNA, 15 bp, Homo sapiens
ctttccatgattcta

SEQ ID NO: 1702808 - DNA, 15 bp, Homo sapiens
tttccatgattctaa

SEQ ID NO: 1702809 - DNA, 15 bp, Homo sapiens
ttccatgattctaaa

SEQ ID NO: 1702810 - DNA, 15 bp, Homo sapiens
tccatgattctaaag

SEQ ID NO: 1702811 - DNA, 15 bp, Homo sapiens
ccatgattctaaagt

SEQ ID NO: 1702812 - DNA, 15 bp, Homo sapiens
catgattctaaagtg

SEQ ID NO: 1702813 - DNA, 15 bp, Homo sapiens
atgattctaaagtgg

SEQ ID NO: 1702814 - DNA, 15 bp, Homo sapiens
tgattctaaagtggg

SEQ ID NO: 1702815 - DNA, 15 bp, Homo sapiens
gattctaaagtgggt

SEQ ID NO: 1702816 - DNA, 15 bp, Homo sapiens
attctaaagtgggtg

SEQ ID NO: 1702817 - DNA, 15 bp, Homo sapiens
ttctaaagtgggtgc

SEQ ID NO: 1702818 - DNA, 15 bp, Homo sapiens
tctaaagtgggtgcc

SEQ ID NO: 1702819 - DNA, 15 bp, Homo sapiens
ctaaagtgggtgcca

SEQ ID NO: 1702820 - DNA, 15 bp, Homo sapiens
taaagtgggtgccat

SEQ ID NO: 1702821 - DNA, 15 bp, Homo sapiens
aaagtgggtgccata

SEQ ID NO: 1702822 - DNA, 15 bp, Homo sapiens
aagtgggtgccatac

SEQ ID NO: 1702823 - DNA, 15 bp, Homo sapiens
agtgggtgccatact

SEQ ID NO: 1702824 - DNA, 15 bp, Homo sapiens
gtgggtgccatactc

SEQ ID NO: 1702825 - DNA, 15 bp, Homo sapiens
tgggtgccatactca

SEQ ID NO: 1702826 - DNA, 15 bp, Homo sapiens
gggtgccatactcag

SEQ ID NO: 1702827 - DNA, 15 bp, Homo sapiens
ggtgccatactcagc

SEQ ID NO: 1702828 - DNA, 15 bp, Homo sapiens
gtgccatactcagcc

SEQ ID NO: 1702829 - DNA, 15 bp, Homo sapiens
tgccatactcagcca

SEQ ID NO: 1702830 - DNA, 15 bp, Homo sapiens
gccatactcagccat

SEQ ID NO: 1702831 - DNA, 15 bp, Homo sapiens
ccatactcagccatt

SEQ ID NO: 1702832 - DNA, 15 bp, Homo sapiens
catactcagccattc

SEQ ID NO: 1702833 - DNA, 15 bp, Homo sapiens
atactcagccattcc

SEQ ID NO: 1702834 - DNA, 15 bp, Homo sapiens
tactcagccattcct

SEQ ID NO: 1702835 - DNA, 15 bp, Homo sapiens
actcagccattcctt

SEQ ID NO: 1702836 - DNA, 15 bp, Homo sapiens
ctcagccattccttt

SEQ ID NO: 1702837 - DNA, 15 bp, Homo sapiens
tcagccattcctttc

SEQ ID NO: 1702838 - DNA, 15 bp, Homo sapiens
cagccattcctttca

SEQ ID NO: 1702839 - DNA, 15 bp, Homo sapiens
agccattcctttcat

SEQ ID NO: 1702840 - DNA, 15 bp, Homo sapiens
gccattcctttcata

SEQ ID NO: 1702841 - DNA, 15 bp, Homo sapiens
ccattcctttcatag

SEQ ID NO: 1702842 - DNA, 15 bp, Homo sapiens
cattcctttcatagg

SEQ ID NO: 1702843 - DNA, 15 bp, Homo sapiens
attcctttcataggc

SEQ ID NO: 1702844 - DNA, 15 bp, Homo sapiens
ttcctttcataggcc

SEQ ID NO: 1702845 - DNA, 15 bp, Homo sapiens
tcctttcataggcct

SEQ ID NO: 1702846 - DNA, 15 bp, Homo sapiens
cctttcataggcctc

SEQ ID NO: 1702847 - DNA, 15 bp, Homo sapiens
ctttcataggcctct

SEQ ID NO: 1702848 - DNA, 15 bp, Homo sapiens
tttcataggcctctt

SEQ ID NO: 1702849 - DNA, 15 bp, Homo sapiens
ttcataggcctcttg

SEQ ID NO: 1702850 - DNA, 15 bp, Homo sapiens
tcataggcctcttgg

SEQ ID NO: 1702851 - DNA, 15 bp, Homo sapiens
cataggcctcttgga

SEQ ID NO: 1702852 - DNA, 15 bp, Homo sapiens
ataggcctcttggat

SEQ ID NO: 1702853 - DNA, 15 bp, Homo sapiens
taggcctcttggata

SEQ ID NO: 1702854 - DNA, 15 bp, Homo sapiens
aggcctcttggatag

SEQ ID NO: 1702855 - DNA, 15 bp, Homo sapiens
ggcctcttggatagt

SEQ ID NO: 1702856 - DNA, 15 bp, Homo sapiens
gcctcttggatagtg

SEQ ID NO: 1702857 - DNA, 15 bp, Homo sapiens
cctcttggatagtga

SEQ ID NO: 1702858 - DNA, 15 bp, Homo sapiens
ctcttggatagtgag

SEQ ID NO: 1702859 - DNA, 15 bp, Homo sapiens
tcttggatagtgagc

SEQ ID NO: 1702860 - DNA, 15 bp, Homo sapiens
cttggatagtgagca

SEQ ID NO: 1702861 - DNA, 15 bp, Homo sapiens
ttggatagtgagcag

SEQ ID NO: 1702862 - DNA, 15 bp, Homo sapiens
tggatagtgagcaga

SEQ ID NO: 1702863 - DNA, 15 bp, Homo sapiens
ggatagtgagcagat

SEQ ID NO: 1702864 - DNA, 15 bp, Homo sapiens
gatagtgagcagatg

SEQ ID NO: 1702865 - DNA, 15 bp, Homo sapiens
atagtgagcagatgg

SEQ ID NO: 1702866 - DNA, 15 bp, Homo sapiens
tagtgagcagatggc

SEQ ID NO: 1702867 - DNA, 15 bp, Homo sapiens
agtgagcagatggct

SEQ ID NO: 1702868 - DNA, 15 bp, Homo sapiens
gtgagcagatggcta

SEQ ID NO: 1702869 - DNA, 15 bp, Homo sapiens
tgagcagatggctac

SEQ ID NO: 1702870 - DNA, 15 bp, Homo sapiens
gagcagatggctacc

SEQ ID NO: 1702871 - DNA, 15 bp, Homo sapiens
agcagatggctacct

SEQ ID NO: 1702872 - DNA, 15 bp, Homo sapiens
gcagatggctacctg

SEQ ID NO: 1702873 - DNA, 15 bp, Homo sapiens
cagatggctacctga

SEQ ID NO: 1702874 - DNA, 15 bp, Homo sapiens
agatggctacctgaa

SEQ ID NO: 1702875 - DNA, 15 bp, Homo sapiens
gatggctacctgaaa

SEQ ID NO: 1702876 - DNA, 15 bp, Homo sapiens
atggctacctgaaaa

SEQ ID NO: 1702877 - DNA, 15 bp, Homo sapiens
tggctacctgaaaaa

SEQ ID NO: 1702878 - DNA, 15 bp, Homo sapiens
ggctacctgaaaaat

SEQ ID NO: 1702879 - DNA, 15 bp, Homo sapiens
gctacctgaaaaatc

SEQ ID NO: 1702880 - DNA, 15 bp, Homo sapiens
ctacctgaaaaatca

SEQ ID NO: 1702881 - DNA, 15 bp, Homo sapiens
tacctgaaaaatcaa

SEQ ID NO: 1702882 - DNA, 15 bp, Homo sapiens
acctgaaaaatcaat

SEQ ID NO: 1702883 - DNA, 15 bp, Homo sapiens
cctgaaaaatcaata

SEQ ID NO: 1702884 - DNA, 15 bp, Homo sapiens
ctgaaaaatcaatat

SEQ ID NO: 1702885 - DNA, 15 bp, Homo sapiens
tgaaaaatcaatatt

SEQ ID NO: 1702886 - DNA, 15 bp, Homo sapiens
gaaaaatcaatattg

SEQ ID NO: 1702887 - DNA, 15 bp, Homo sapiens
aaaaatcaatattgc

SEQ ID NO: 1702888 - DNA, 15 bp, Homo sapiens
aaaatcaatattgcc

SEQ ID NO: 1702889 - DNA, 15 bp, Homo sapiens
aaatcaatattgcca

SEQ ID NO: 1702890 - DNA, 15 bp, Homo sapiens
aatcaatattgccag

SEQ ID NO: 1702891 - DNA, 15 bp, Homo sapiens
atcaatattgccaga

SEQ ID NO: 1702892 - DNA, 15 bp, Homo sapiens
tcaatattgccagat

SEQ ID NO: 1702893 - DNA, 15 bp, Homo sapiens
caatattgccagatt

SEQ ID NO: 1702894 - DNA, 15 bp, Homo sapiens
aatattgccagatta

SEQ ID NO: 1702895 - DNA, 15 bp, Homo sapiens
atattgccagattat

SEQ ID NO: 1702896 - DNA, 15 bp, Homo sapiens
tattgccagattata

SEQ ID NO: 1702897 - DNA, 15 bp, Homo sapiens
attgccagattataa

SEQ ID NO: 1702898 - DNA, 15 bp, Homo sapiens
ttgccagattataat

SEQ ID NO: 1702899 - DNA, 15 bp, Homo sapiens
tgccagattataatg

SEQ ID NO: 1702900 - DNA, 15 bp, Homo sapiens
gccagattataatgt

SEQ ID NO: 1702901 - DNA, 15 bp, Homo sapiens
ccagattataatgtg

SEQ ID NO: 1702902 - DNA, 15 bp, Homo sapiens
cagattataatgtgc

SEQ ID NO: 1702903 - DNA, 15 bp, Homo sapiens
agattataatgtgca

SEQ ID NO: 1702904 - DNA, 15 bp, Homo sapiens
gattataatgtgcag

SEQ ID NO: 1702905 - DNA, 15 bp, Homo sapiens
attataatgtgcaga

SEQ ID NO: 1702906 - DNA, 15 bp, Homo sapiens
ttataatgtgcagag

SEQ ID NO: 1702907 - DNA, 15 bp, Homo sapiens
tataatgtgcagagt

SEQ ID NO: 1702908 - DNA, 15 bp, Homo sapiens
ataatgtgcagagta

SEQ ID NO: 1702909 - DNA, 15 bp, Homo sapiens
taatgtgcagagtat

SEQ ID NO: 1702910 - DNA, 15 bp, Homo sapiens
aatgtgcagagtata

SEQ ID NO: 1702911 - DNA, 15 bp, Homo sapiens
atgtgcagagtatat

SEQ ID NO: 1702912 - DNA, 15 bp, Homo sapiens
tgtgcagagtatatg

SEQ ID NO: 1702913 - DNA, 15 bp, Homo sapiens
gtgcagagtatatgt

SEQ ID NO: 1702914 - DNA, 15 bp, Homo sapiens
tgcagagtatatgta

SEQ ID NO: 1702915 - DNA, 15 bp, Homo sapiens
gcagagtatatgtat

SEQ ID NO: 1702916 - DNA, 15 bp, Homo sapiens
cagagtatatgtatt

SEQ ID NO: 1702917 - DNA, 15 bp, Homo sapiens
agagtatatgtattt

SEQ ID NO: 1702918 - DNA, 15 bp, Homo sapiens
gagtatatgtatttt

SEQ ID NO: 1702919 - DNA, 15 bp, Homo sapiens
agtatatgtatttta

SEQ ID NO: 1702920 - DNA, 15 bp, Homo sapiens
gtatatgtattttat

SEQ ID NO: 1702921 - DNA, 15 bp, Homo sapiens
tatatgtattttatt

SEQ ID NO: 1702922 - DNA, 15 bp, Homo sapiens
atatgtattttatta

SEQ ID NO: 1702923 - DNA, 15 bp, Homo sapiens
tatgtattttattaa

SEQ ID NO: 1702924 - DNA, 15 bp, Homo sapiens
atgtattttattaaa

SEQ ID NO: 1702925 - DNA, 15 bp, Homo sapiens
tgtattttattaaag

SEQ ID NO: 1702926 - DNA, 15 bp, Homo sapiens
tattttattaaagat

SEQ ID NO: 1702927 - DNA, 15 bp, Homo sapiens
attttattaaagatg

SEQ ID NO: 1702928 - DNA, 15 bp, Homo sapiens
ttttattaaagatgt

SEQ ID NO: 1702929 - DNA, 15 bp, Homo sapiens
tttattaaagatgta

SEQ ID NO: 1702930 - DNA, 15 bp, Homo sapiens
ttattaaagatgtat

SEQ ID NO: 1702931 - DNA, 15 bp, Homo sapiens
tattaaagatgtatt

SEQ ID NO: 1702932 - DNA, 15 bp, Homo sapiens
attaaagatgtattt

SEQ ID NO: 1702933 - DNA, 15 bp, Homo sapiens
ttaaagatgtatttc

SEQ ID NO: 1702934 - DNA, 15 bp, Homo sapiens
taaagatgtatttca

SEQ ID NO: 1702935 - DNA, 15 bp, Homo sapiens
aaagatgtatttcaa

SEQ ID NO: 1702936 - DNA, 15 bp, Homo sapiens
aagatgtatttcaag

SEQ ID NO: 1702937 - DNA, 15 bp, Homo sapiens
agatgtatttcaagt

SEQ ID NO: 1702938 - DNA, 15 bp, Homo sapiens
gatgtatttcaagtg

SEQ ID NO: 1702939 - DNA, 15 bp, Homo sapiens
atgtatttcaagtgg

SEQ ID NO: 1702940 - DNA, 15 bp, Homo sapiens
tgtatttcaagtggc

SEQ ID NO: 1702941 - DNA, 15 bp, Homo sapiens
gtatttcaagtggcc

SEQ ID NO: 1702942 - DNA, 15 bp, Homo sapiens
tatttcaagtggcca

SEQ ID NO: 1702943 - DNA, 15 bp, Homo sapiens
atttcaagtggccat

SEQ ID NO: 1702944 - DNA, 15 bp, Homo sapiens
tttcaagtggccatt

SEQ ID NO: 1702945 - DNA, 15 bp, Homo sapiens
ttcaagtggccatta

SEQ ID NO: 1702946 - DNA, 15 bp, Homo sapiens
tcaagtggccattag

SEQ ID NO: 1702947 - DNA, 15 bp, Homo sapiens
caagtggccattaga

SEQ ID NO: 1702948 - DNA, 15 bp, Homo sapiens
aagtggccattagac

SEQ ID NO: 1702949 - DNA, 15 bp, Homo sapiens
agtggccattagact

SEQ ID NO: 1702950 - DNA, 15 bp, Homo sapiens
gtggccattagacta

SEQ ID NO: 1702951 - DNA, 15 bp, Homo sapiens
tggccattagactat

SEQ ID NO: 1702952 - DNA, 15 bp, Homo sapiens
ggccattagactata

SEQ ID NO: 1702953 - DNA, 15 bp, Homo sapiens
gccattagactataa

SEQ ID NO: 1702954 - DNA, 15 bp, Homo sapiens
ccattagactataaa

SEQ ID NO: 1702955 - DNA, 15 bp, Homo sapiens
cattagactataaag

SEQ ID NO: 1702956 - DNA, 15 bp, Homo sapiens
attagactataaagt

SEQ ID NO: 1702957 - DNA, 15 bp, Homo sapiens
ttagactataaagtg

SEQ ID NO: 1702958 - DNA, 15 bp, Homo sapiens
tagactataaagtgt

SEQ ID NO: 1702959 - DNA, 15 bp, Homo sapiens
agactataaagtgta

SEQ ID NO: 1702960 - DNA, 15 bp, Homo sapiens
gactataaagtgtag

SEQ ID NO: 1702961 - DNA, 15 bp, Homo sapiens
actataaagtgtagt

SEQ ID NO: 1702962 - DNA, 15 bp, Homo sapiens
ctataaagtgtagtt

SEQ ID NO: 1702963 - DNA, 15 bp, Homo sapiens
tataaagtgtagttg

SEQ ID NO: 1702964 - DNA, 15 bp, Homo sapiens
ataaagtgtagttgt

SEQ ID NO: 1702965 - DNA, 15 bp, Homo sapiens
taaagtgtagttgtt

SEQ ID NO: 1702966 - DNA, 15 bp, Homo sapiens
aaagtgtagttgttt

SEQ ID NO: 1702967 - DNA, 15 bp, Homo sapiens
aagtgtagttgttta

SEQ ID NO: 1702968 - DNA, 15 bp, Homo sapiens
agtgtagttgtttaa

SEQ ID NO: 1702969 - DNA, 15 bp, Homo sapiens
gtgtagttgtttaaa

SEQ ID NO: 1702970 - DNA, 15 bp, Homo sapiens
tgtagttgtttaaaa

SEQ ID NO: 1702971 - DNA, 15 bp, Homo sapiens
gtagttgtttaaaaa

SEQ ID NO: 1702972 - DNA, 15 bp, Homo sapiens
tagttgtttaaaaat

SEQ ID NO: 1702973 - DNA, 15 bp, Homo sapiens
agttgtttaaaaata

SEQ ID NO: 1702974 - DNA, 15 bp, Homo sapiens
gttgtttaaaaatag

SEQ ID NO: 1702975 - DNA, 15 bp, Homo sapiens
ttgtttaaaaataga

SEQ ID NO: 1702976 - DNA, 15 bp, Homo sapiens
tgtttaaaaatagat

SEQ ID NO: 1702977 - DNA, 15 bp, Homo sapiens
gtttaaaaatagatt

SEQ ID NO: 1702978 - DNA, 15 bp, Homo sapiens
tttaaaaatagattt

SEQ ID NO: 1702979 - DNA, 15 bp, Homo sapiens
ttaaaaatagatttt

SEQ ID NO: 1702980 - DNA, 15 bp, Homo sapiens
taaaaatagattttt

SEQ ID NO: 1702981 - DNA, 15 bp, Homo sapiens
aaaaatagatttttt

SEQ ID NO: 1702982 - DNA, 15 bp, Homo sapiens
aaaatagattttttt

SEQ ID NO: 1702983 - DNA, 15 bp, Homo sapiens
aaatagatttttttt

SEQ ID NO: 1702984 - DNA, 15 bp, Homo sapiens
aatagatttttttta

SEQ ID NO: 1702985 - DNA, 15 bp, Homo sapiens
atagattttttttat

SEQ ID NO: 1702986 - DNA, 15 bp, Homo sapiens
tagattttttttatt

SEQ ID NO: 1702987 - DNA, 15 bp, Homo sapiens
agattttttttattt

SEQ ID NO: 1702988 - DNA, 15 bp, Homo sapiens
gattttttttatttt

SEQ ID NO: 1702989 - DNA, 15 bp, Homo sapiens
attttttttattttg

SEQ ID NO: 1702990 - DNA, 15 bp, Homo sapiens
ttttttttattttgg

SEQ ID NO: 1702991 - DNA, 15 bp, Homo sapiens
tttttttattttgga

SEQ ID NO: 1702992 - DNA, 15 bp, Homo sapiens
ttttttattttggag

SEQ ID NO: 1702993 - DNA, 15 bp, Homo sapiens
tttttattttggagt

SEQ ID NO: 1702994 - DNA, 15 bp, Homo sapiens
ttttattttggagtt

SEQ ID NO: 1702995 - DNA, 15 bp, Homo sapiens
tttattttggagtta

SEQ ID NO: 1702996 - DNA, 15 bp, Homo sapiens
ttattttggagttac

SEQ ID NO: 1702997 - DNA, 15 bp, Homo sapiens
tattttggagttaca

SEQ ID NO: 1702998 - DNA, 15 bp, Homo sapiens
attttggagttacat

SEQ ID NO: 1702999 - DNA, 15 bp, Homo sapiens
ttttggagttacatt

SEQ ID NO: 1703000 - DNA, 15 bp, Homo sapiens
tttggagttacattc

SEQ ID NO: 1703001 - DNA, 15 bp, Homo sapiens
ttggagttacattca

SEQ ID NO: 1703002 - DNA, 15 bp, Homo sapiens
tggagttacattcaa

SEQ ID NO: 1703003 - DNA, 15 bp, Homo sapiens
ggagttacattcaac

SEQ ID NO: 1703004 - DNA, 15 bp, Homo sapiens
gagttacattcaacc

SEQ ID NO: 1703005 - DNA, 15 bp, Homo sapiens
agttacattcaacct

SEQ ID NO: 1703006 - DNA, 15 bp, Homo sapiens
gttacattcaacctc

SEQ ID NO: 1703007 - DNA, 15 bp, Homo sapiens
ttacattcaacctca

SEQ ID NO: 1703008 - DNA, 15 bp, Homo sapiens
tacattcaacctcag

SEQ ID NO: 1703009 - DNA, 15 bp, Homo sapiens
acattcaacctcagg

SEQ ID NO: 1703010 - DNA, 15 bp, Homo sapiens
cattcaacctcaggt

SEQ ID NO: 1703011 - DNA, 15 bp, Homo sapiens
attcaacctcaggtg

SEQ ID NO: 1703012 - DNA, 15 bp, Homo sapiens
ttcaacctcaggtgc

SEQ ID NO: 1703013 - DNA, 15 bp, Homo sapiens
tcaacctcaggtgcc

SEQ ID NO: 1703014 - DNA, 15 bp, Homo sapiens
caacctcaggtgcca

SEQ ID NO: 1703015 - DNA, 15 bp, Homo sapiens
aacctcaggtgccac

SEQ ID NO: 1703016 - DNA, 15 bp, Homo sapiens
acctcaggtgccact

SEQ ID NO: 1703017 - DNA, 15 bp, Homo sapiens
cctcaggtgccactt

SEQ ID NO: 1703018 - DNA, 15 bp, Homo sapiens
ctcaggtgccacttt

SEQ ID NO: 1703019 - DNA, 15 bp, Homo sapiens
tcaggtgccactttc

SEQ ID NO: 1703020 - DNA, 15 bp, Homo sapiens
caggtgccactttcc

SEQ ID NO: 1703021 - DNA, 15 bp, Homo sapiens
aggtgccactttcca

SEQ ID NO: 1703022 - DNA, 15 bp, Homo sapiens
ggtgccactttccac

SEQ ID NO: 1703023 - DNA, 15 bp, Homo sapiens
gtgccactttccaca

SEQ ID NO: 1703024 - DNA, 15 bp, Homo sapiens
tgccactttccacat

SEQ ID NO: 1703025 - DNA, 15 bp, Homo sapiens
gccactttccacatt

SEQ ID NO: 1703026 - DNA, 15 bp, Homo sapiens
ccactttccacattt

SEQ ID NO: 1703027 - DNA, 15 bp, Homo sapiens
cactttccacatttt

SEQ ID NO: 1703028 - DNA, 15 bp, Homo sapiens
actttccacatttta

SEQ ID NO: 1703029 - DNA, 15 bp, Homo sapiens
ctttccacattttac

SEQ ID NO: 1703030 - DNA, 15 bp, Homo sapiens
tttccacattttaca

SEQ ID NO: 1703031 - DNA, 15 bp, Homo sapiens
ttccacattttacaa

SEQ ID NO: 1703032 - DNA, 15 bp, Homo sapiens
tccacattttacaat

SEQ ID NO: 1703033 - DNA, 15 bp, Homo sapiens
ccacattttacaata

SEQ ID NO: 1703034 - DNA, 15 bp, Homo sapiens
cacattttacaataa

SEQ ID NO: 1703035 - DNA, 15 bp, Homo sapiens
acattttacaataaa

SEQ ID NO: 1703036 - DNA, 15 bp, Homo sapiens
cattttacaataaaa

SEQ ID NO: 1703037 - DNA, 15 bp, Homo sapiens
tttacaataaaaata

SEQ ID NO: 1703038 - DNA, 15 bp, Homo sapiens
ttacaataaaaataa

SEQ ID NO: 1703039 - DNA, 15 bp, Homo sapiens
tacaataaaaataat

SEQ ID NO: 1703040 - DNA, 15 bp, Homo sapiens
acaataaaaataatg

SEQ ID NO: 1703041 - DNA, 15 bp, Homo sapiens
caataaaaataatgg

SEQ ID NO: 1703042 - DNA, 15 bp, Homo sapiens
aataaaaataatggt

SEQ ID NO: 1703043 - DNA, 15 bp, Homo sapiens
ataaaaataatggtt

SEQ ID NO: 1703044 - DNA, 15 bp, Homo sapiens
taaaaataatggttg

SEQ ID NO: 1703045 - DNA, 15 bp, Homo sapiens
aaaaataatggttga

SEQ ID NO: 1703046 - DNA, 15 bp, Homo sapiens
aaaataatggttgat

SEQ ID NO: 1703047 - DNA, 15 bp, Homo sapiens
aaataatggttgatt

SEQ ID NO: 1703048 - DNA, 15 bp, Homo sapiens
aataatggttgattt

SEQ ID NO: 1703049 - DNA, 15 bp, Homo sapiens
ataatggttgattta

SEQ ID NO: 1703050 - DNA, 15 bp, Homo sapiens
taatggttgatttac

SEQ ID NO: 1703051 - DNA, 15 bp, Homo sapiens
aatggttgatttact

SEQ ID NO: 1703052 - DNA, 15 bp, Homo sapiens
atggttgatttactt

SEQ ID NO: 1703053 - DNA, 15 bp, Homo sapiens
tggttgatttactta

SEQ ID NO: 1703054 - DNA, 15 bp, Homo sapiens
ggttgatttacttaa

SEQ ID NO: 1703055 - DNA, 15 bp, Homo sapiens
gttgatttacttaac

SEQ ID NO: 1703056 - DNA, 15 bp, Homo sapiens
ttgatttacttaaca

SEQ ID NO: 1703057 - DNA, 15 bp, Homo sapiens
tgatttacttaacaa

SEQ ID NO: 1703058 - DNA, 15 bp, Homo sapiens
gatttacttaacaaa

SEQ ID NO: 1703059 - DNA, 15 bp, Homo sapiens
atttacttaacaaat

SEQ ID NO: 1703060 - DNA, 15 bp, Homo sapiens
tttacttaacaaatg

SEQ ID NO: 1703061 - DNA, 15 bp, Homo sapiens
ttacttaacaaatga

SEQ ID NO: 1703062 - DNA, 15 bp, Homo sapiens
tacttaacaaatgag

SEQ ID NO: 1703063 - DNA, 15 bp, Homo sapiens
acttaacaaatgaga

SEQ ID NO: 1703064 - DNA, 15 bp, Homo sapiens
cttaacaaatgagaa

SEQ ID NO: 1703065 - DNA, 15 bp, Homo sapiens
ttaacaaatgagaat

SEQ ID NO: 1703066 - DNA, 15 bp, Homo sapiens
taacaaatgagaata

SEQ ID NO: 1703067 - DNA, 15 bp, Homo sapiens
aacaaatgagaataa

SEQ ID NO: 1703068 - DNA, 15 bp, Homo sapiens
acaaatgagaataaa

SEQ ID NO: 1703069 - DNA, 15 bp, Homo sapiens
caaatgagaataaat

SEQ ID NO: 1703070 - DNA, 15 bp, Homo sapiens
aaatgagaataaata

SEQ ID NO: 1703071 - DNA, 15 bp, Homo sapiens
aatgagaataaataa

SEQ ID NO: 1703072 - DNA, 15 bp, Homo sapiens
atgagaataaataaa

SEQ ID NO: 1703073 - DNA, 15 bp, Homo sapiens
tgagaataaataaaa

SEQ ID NO: 1703074 - DNA, 15 bp, Homo sapiens
gagaataaataaaac

SEQ ID NO: 1703075 - DNA, 15 bp, Homo sapiens
agaataaataaaaca

SEQ ID NO: 1703076 - DNA, 15 bp, Homo sapiens
gaataaataaaacat

SEQ ID NO: 1703077 - DNA, 15 bp, Homo sapiens
aataaataaaacatt

SEQ ID NO: 1703078 - DNA, 15 bp, Homo sapiens
ataaataaaacattt

SEQ ID NO: 1703079 - DNA, 15 bp, Homo sapiens
taaataaaacatttt

SEQ ID NO: 1703080 - DNA, 15 bp, Homo sapiens
aaataaaacattttt

SEQ ID NO: 1703081 - DNA, 15 bp, Homo sapiens
aataaaacatttttt

SEQ ID NO: 1703082 - DNA, 15 bp, Homo sapiens
ataaaacattttttt

SEQ ID NO: 1703083 - DNA, 15 bp, Homo sapiens
taaaacatttttttc

SEQ ID NO: 1703084 - DNA, 15 bp, Homo sapiens
aaaacatttttttct

SEQ ID NO: 1703085 - DNA, 15 bp, Homo sapiens
aaacatttttttctt

SEQ ID NO: 1703086 - DNA, 15 bp, Homo sapiens
acatttttttctttg

SEQ ID NO: 1703087 - DNA, 15 bp, Homo sapiens
catttttttctttga

SEQ ID NO: 1703088 - DNA, 15 bp, Homo sapiens
atttttttctttgaa

SEQ ID NO: 1703089 - DNA, 15 bp, Homo sapiens
tttttttctttgaaa

SEQ ID NO: 1703090 - DNA, 15 bp, Homo sapiens
ttttttctttgaaaa

SEQ ID NO: 1703091 - DNA, 15 bp, Homo sapiens
tttttctttgaaaat

SEQ ID NO: 1703092 - DNA, 15 bp, Homo sapiens
ttttctttgaaaatt

SEQ ID NO: 1703093 - DNA, 15 bp, Homo sapiens
tttctttgaaaattt

SEQ ID NO: 1703094 - DNA, 15 bp, Homo sapiens
ttctttgaaaatttc

SEQ ID NO: 1703095 - DNA, 15 bp, Homo sapiens
tctttgaaaatttca

SEQ ID NO: 1703096 - DNA, 15 bp, Homo sapiens
ctttgaaaatttcag

SEQ ID NO: 1703097 - DNA, 15 bp, Homo sapiens
tttgaaaatttcagc

SEQ ID NO: 1703098 - DNA, 15 bp, Homo sapiens
ttgaaaatttcagcc

SEQ ID NO: 1703099 - DNA, 15 bp, Homo sapiens
tgaaaatttcagcca

SEQ ID NO: 1703100 - DNA, 15 bp, Homo sapiens
gaaaatttcagccag

SEQ ID NO: 1703101 - DNA, 15 bp, Homo sapiens
aaaatttcagccaga

SEQ ID NO: 1703102 - DNA, 15 bp, Homo sapiens
aaatttcagccagat

SEQ ID NO: 1703103 - DNA, 15 bp, Homo sapiens
aatttcagccagatc

SEQ ID NO: 1703104 - DNA, 15 bp, Homo sapiens
atttcagccagatca

SEQ ID NO: 1703105 - DNA, 15 bp, Homo sapiens
tttcagccagatcac

SEQ ID NO: 1703106 - DNA, 15 bp, Homo sapiens
ttcagccagatcaca

SEQ ID NO: 1703107 - DNA, 15 bp, Homo sapiens
tcagccagatcacat

SEQ ID NO: 1703108 - DNA, 15 bp, Homo sapiens
cagccagatcacatt

SEQ ID NO: 1703109 - DNA, 15 bp, Homo sapiens
agccagatcacattt

SEQ ID NO: 1703110 - DNA, 15 bp, Homo sapiens
gccagatcacatttg

SEQ ID NO: 1703111 - DNA, 15 bp, Homo sapiens
ccagatcacatttga

SEQ ID NO: 1703112 - DNA, 15 bp, Homo sapiens
cagatcacatttgat

SEQ ID NO: 1703113 - DNA, 15 bp, Homo sapiens
agatcacatttgatt

SEQ ID NO: 1703114 - DNA, 15 bp, Homo sapiens
gatcacatttgattg

SEQ ID NO: 1703115 - DNA, 15 bp, Homo sapiens
atcacatttgattga

SEQ ID NO: 1703116 - DNA, 15 bp, Homo sapiens
tcacatttgattgac

SEQ ID NO: 1703117 - DNA, 15 bp, Homo sapiens
cacatttgattgaca

SEQ ID NO: 1703118 - DNA, 15 bp, Homo sapiens
acatttgattgacag

SEQ ID NO: 1703119 - DNA, 15 bp, Homo sapiens
catttgattgacagt

SEQ ID NO: 1703120 - DNA, 15 bp, Homo sapiens
atttgattgacagtc

SEQ ID NO: 1703121 - DNA, 15 bp, Homo sapiens
tttgattgacagtcc

SEQ ID NO: 1703122 - DNA, 15 bp, Homo sapiens
ttgattgacagtcca

SEQ ID NO: 1703123 - DNA, 15 bp, Homo sapiens
tgattgacagtccac

SEQ ID NO: 1703124 - DNA, 15 bp, Homo sapiens
gattgacagtccacc

SEQ ID NO: 1703125 - DNA, 15 bp, Homo sapiens
attgacagtccacca

SEQ ID NO: 1703126 - DNA, 15 bp, Homo sapiens
ttgacagtccaccaa

SEQ ID NO: 1703127 - DNA, 15 bp, Homo sapiens
tgacagtccaccaac

SEQ ID NO: 1703128 - DNA, 15 bp, Homo sapiens
gacagtccaccaact

SEQ ID NO: 1703129 - DNA, 15 bp, Homo sapiens
acagtccaccaactt

SEQ ID NO: 1703130 - DNA, 15 bp, Homo sapiens
cagtccaccaactta

SEQ ID NO: 1703131 - DNA, 15 bp, Homo sapiens
agtccaccaacttac

SEQ ID NO: 1703132 - DNA, 15 bp, Homo sapiens
gtccaccaacttaca

SEQ ID NO: 1703133 - DNA, 15 bp, Homo sapiens
tccaccaacttacaa

SEQ ID NO: 1703134 - DNA, 15 bp, Homo sapiens
ccaccaacttacaat

SEQ ID NO: 1703135 - DNA, 15 bp, Homo sapiens
caccaacttacaatg

SEQ ID NO: 1703136 - DNA, 15 bp, Homo sapiens
accaacttacaatgc

SEQ ID NO: 1703137 - DNA, 15 bp, Homo sapiens
ccaacttacaatgct

SEQ ID NO: 1703138 - DNA, 15 bp, Homo sapiens
caacttacaatgctg

SEQ ID NO: 1703139 - DNA, 15 bp, Homo sapiens
aacttacaatgctga

SEQ ID NO: 1703140 - DNA, 15 bp, Homo sapiens
acttacaatgctgac

SEQ ID NO: 1703141 - DNA, 15 bp, Homo sapiens
cttacaatgctgact

SEQ ID NO: 1703142 - DNA, 15 bp, Homo sapiens
ttacaatgctgacta

SEQ ID NO: 1703143 - DNA, 15 bp, Homo sapiens
tacaatgctgactat

SEQ ID NO: 1703144 - DNA, 15 bp, Homo sapiens
acaatgctgactatg

SEQ ID NO: 1703145 - DNA, 15 bp, Homo sapiens
caatgctgactatgg

SEQ ID NO: 1703146 - DNA, 15 bp, Homo sapiens
aatgctgactatggc

SEQ ID NO: 1703147 - DNA, 15 bp, Homo sapiens
atgctgactatggct

SEQ ID NO: 1703148 - DNA, 15 bp, Homo sapiens
tgctgactatggcta

SEQ ID NO: 1703149 - DNA, 15 bp, Homo sapiens
gctgactatggctac

SEQ ID NO: 1703150 - DNA, 15 bp, Homo sapiens
ctgactatggctaca

SEQ ID NO: 1703151 - DNA, 15 bp, Homo sapiens
tgactatggctacaa

SEQ ID NO: 1703152 - DNA, 15 bp, Homo sapiens
gactatggctacaaa

SEQ ID NO: 1703153 - DNA, 15 bp, Homo sapiens
actatggctacaaaa

SEQ ID NO: 1703154 - DNA, 15 bp, Homo sapiens
ctatggctacaaaag

SEQ ID NO: 1703155 - DNA, 15 bp, Homo sapiens
tatggctacaaaagc

SEQ ID NO: 1703156 - DNA, 15 bp, Homo sapiens
atggctacaaaagct

SEQ ID NO: 1703157 - DNA, 15 bp, Homo sapiens
tggctacaaaagctg

SEQ ID NO: 1703158 - DNA, 15 bp, Homo sapiens
ggctacaaaagctgg

SEQ ID NO: 1703159 - DNA, 15 bp, Homo sapiens
gctacaaaagctggg

SEQ ID NO: 1703160 - DNA, 15 bp, Homo sapiens
ctacaaaagctggga

SEQ ID NO: 1703161 - DNA, 15 bp, Homo sapiens
tacaaaagctgggaa

SEQ ID NO: 1703162 - DNA, 15 bp, Homo sapiens
acaaaagctgggaag

SEQ ID NO: 1703163 - DNA, 15 bp, Homo sapiens
caaaagctgggaagc

SEQ ID NO: 1703164 - DNA, 15 bp, Homo sapiens
aaaagctgggaagcc

SEQ ID NO: 1703165 - DNA, 15 bp, Homo sapiens
aaagctgggaagcct

SEQ ID NO: 1703166 - DNA, 15 bp, Homo sapiens
aagctgggaagcctt

SEQ ID NO: 1703167 - DNA, 15 bp, Homo sapiens
agctgggaagccttc

SEQ ID NO: 1703168 - DNA, 15 bp, Homo sapiens
gctgggaagccttct

SEQ ID NO: 1703169 - DNA, 15 bp, Homo sapiens
ctgggaagccttctc

SEQ ID NO: 1703170 - DNA, 15 bp, Homo sapiens
tgggaagccttctct

SEQ ID NO: 1703171 - DNA, 15 bp, Homo sapiens
gggaagccttctcta

SEQ ID NO: 1703172 - DNA, 15 bp, Homo sapiens
ggaagccttctctaa

SEQ ID NO: 1703173 - DNA, 15 bp, Homo sapiens
gaagccttctctaac

SEQ ID NO: 1703174 - DNA, 15 bp, Homo sapiens
aagccttctctaacc

SEQ ID NO: 1703175 - DNA, 15 bp, Homo sapiens
agccttctctaacct

SEQ ID NO: 1703176 - DNA, 15 bp, Homo sapiens
gccttctctaacctc

SEQ ID NO: 1703177 - DNA, 15 bp, Homo sapiens
ttctctaacctctcc

SEQ ID NO: 1703178 - DNA, 15 bp, Homo sapiens
tctctaacctctcct

SEQ ID NO: 1703179 - DNA, 15 bp, Homo sapiens
ctctaacctctccta

SEQ ID NO: 1703180 - DNA, 15 bp, Homo sapiens
tctaacctctcctat

SEQ ID NO: 1703181 - DNA, 15 bp, Homo sapiens
ctaacctctcctatt

SEQ ID NO: 1703182 - DNA, 15 bp, Homo sapiens
taacctctcctatta

SEQ ID NO: 1703183 - DNA, 15 bp, Homo sapiens
aacctctcctattat

SEQ ID NO: 1703184 - DNA, 15 bp, Homo sapiens
acctctcctattata

SEQ ID NO: 1703185 - DNA, 15 bp, Homo sapiens
cctctcctattatac

SEQ ID NO: 1703186 - DNA, 15 bp, Homo sapiens
ctctcctattatact

SEQ ID NO: 1703187 - DNA, 15 bp, Homo sapiens
tctcctattatacta

SEQ ID NO: 1703188 - DNA, 15 bp, Homo sapiens
ctcctattatactag

SEQ ID NO: 1703189 - DNA, 15 bp, Homo sapiens
tcctattatactaga

SEQ ID NO: 1703190 - DNA, 15 bp, Homo sapiens
cctattatactagag

SEQ ID NO: 1703191 - DNA, 15 bp, Homo sapiens
ctattatactagagc

SEQ ID NO: 1703192 - DNA, 15 bp, Homo sapiens
tattatactagagcc

SEQ ID NO: 1703193 - DNA, 15 bp, Homo sapiens
attatactagagccc

SEQ ID NO: 1703194 - DNA, 15 bp, Homo sapiens
ttatactagagccct

SEQ ID NO: 1703195 - DNA, 15 bp, Homo sapiens
tatactagagccctt

SEQ ID NO: 1703196 - DNA, 15 bp, Homo sapiens
atactagagcccttc

SEQ ID NO: 1703197 - DNA, 15 bp, Homo sapiens
tactagagcccttcc

SEQ ID NO: 1703198 - DNA, 15 bp, Homo sapiens
actagagcccttcct

SEQ ID NO: 1703199 - DNA, 15 bp, Homo sapiens
tagagcccttcctcc

SEQ ID NO: 1703200 - DNA, 15 bp, Homo sapiens
agagcccttcctcct

SEQ ID NO: 1703201 - DNA, 15 bp, Homo sapiens
gagcccttcctcctg

SEQ ID NO: 1703202 - DNA, 15 bp, Homo sapiens
agcccttcctcctgt

SEQ ID NO: 1703203 - DNA, 15 bp, Homo sapiens
gcccttcctcctgtg

SEQ ID NO: 1703204 - DNA, 15 bp, Homo sapiens
cccttcctcctgtgc

SEQ ID NO: 1703205 - DNA, 15 bp, Homo sapiens
ccttcctcctgtgcc

SEQ ID NO: 1703206 - DNA, 15 bp, Homo sapiens
cttcctcctgtgcct

SEQ ID NO: 1703207 - DNA, 15 bp, Homo sapiens
ttcctcctgtgcctg

SEQ ID NO: 1703208 - DNA, 15 bp, Homo sapiens
tcctcctgtgcctga

SEQ ID NO: 1703209 - DNA, 15 bp, Homo sapiens
cctcctgtgcctgat

SEQ ID NO: 1703210 - DNA, 15 bp, Homo sapiens
ctcctgtgcctgatg

SEQ ID NO: 1703211 - DNA, 15 bp, Homo sapiens
tcctgtgcctgatga

SEQ ID NO: 1703212 - DNA, 15 bp, Homo sapiens
cctgtgcctgatgat

SEQ ID NO: 1703213 - DNA, 15 bp, Homo sapiens
ctgtgcctgatgatt

SEQ ID NO: 1703214 - DNA, 15 bp, Homo sapiens
tgtgcctgatgattg

SEQ ID NO: 1703215 - DNA, 15 bp, Homo sapiens
gtgcctgatgattgc

SEQ ID NO: 1703216 - DNA, 15 bp, Homo sapiens
tgcctgatgattgcc

SEQ ID NO: 1703217 - DNA, 15 bp, Homo sapiens
gcctgatgattgccc

SEQ ID NO: 1703218 - DNA, 15 bp, Homo sapiens
cctgatgattgcccg

SEQ ID NO: 1703219 - DNA, 15 bp, Homo sapiens
ctgatgattgcccga

SEQ ID NO: 1703220 - DNA, 15 bp, Homo sapiens
tgatgattgcccgac

SEQ ID NO: 1703221 - DNA, 15 bp, Homo sapiens
gatgattgcccgact

SEQ ID NO: 1703222 - DNA, 15 bp, Homo sapiens
atgattgcccgactc

SEQ ID NO: 1703223 - DNA, 15 bp, Homo sapiens
tgattgcccgactcc

SEQ ID NO: 1703224 - DNA, 15 bp, Homo sapiens
gattgcccgactccc

SEQ ID NO: 1703225 - DNA, 15 bp, Homo sapiens
attgcccgactccct

SEQ ID NO: 1703226 - DNA, 15 bp, Homo sapiens
ttgcccgactccctt

SEQ ID NO: 1703227 - DNA, 15 bp, Homo sapiens
tgcccgactcccttg

SEQ ID NO: 1703228 - DNA, 15 bp, Homo sapiens
gcccgactcccttgg

SEQ ID NO: 1703229 - DNA, 15 bp, Homo sapiens
cccgactcccttggg

SEQ ID NO: 1703230 - DNA, 15 bp, Homo sapiens
ccgactcccttgggt

SEQ ID NO: 1703231 - DNA, 15 bp, Homo sapiens
cgactcccttgggtg

SEQ ID NO: 1703232 - DNA, 15 bp, Homo sapiens
gactcccttgggtgt

SEQ ID NO: 1703233 - DNA, 15 bp, Homo sapiens
actcccttgggtgtc

SEQ ID NO: 1703234 - DNA, 15 bp, Homo sapiens
ctcccttgggtgtca

SEQ ID NO: 1703235 - DNA, 15 bp, Homo sapiens
tcccttgggtgtcaa

SEQ ID NO: 1703236 - DNA, 15 bp, Homo sapiens
cccttgggtgtcaaa

SEQ ID NO: 1703237 - DNA, 15 bp, Homo sapiens
ccttgggtgtcaaag

SEQ ID NO: 1703238 - DNA, 15 bp, Homo sapiens
cttgggtgtcaaagg

SEQ ID NO: 1703239 - DNA, 15 bp, Homo sapiens
ttgggtgtcaaaggt

SEQ ID NO: 1703240 - DNA, 15 bp, Homo sapiens
tgggtgtcaaaggtg

SEQ ID NO: 1703241 - DNA, 15 bp, Homo sapiens
gggtgtcaaaggtga

SEQ ID NO: 1703242 - DNA, 15 bp, Homo sapiens
ggtgtcaaaggtgag

SEQ ID NO: 1703243 - DNA, 15 bp, Homo sapiens
gtgtcaaaggtgagt

SEQ ID NO: 1703244 - DNA, 15 bp, Homo sapiens
tgtcaaaggtgagta

SEQ ID NO: 1703245 - DNA, 15 bp, Homo sapiens
gtcaaaggtgagtaa

SEQ ID NO: 1703246 - DNA, 15 bp, Homo sapiens
tcaaaggtgagtaag

SEQ ID NO: 1703247 - DNA, 15 bp, Homo sapiens
caaaggtgagtaaga

SEQ ID NO: 1703248 - DNA, 15 bp, Homo sapiens
aaaggtgagtaagaa

SEQ ID NO: 1703249 - DNA, 15 bp, Homo sapiens
aaggtgagtaagaag

SEQ ID NO: 1703250 - DNA, 15 bp, Homo sapiens
aggtgagtaagaaga

SEQ ID NO: 1703251 - DNA, 15 bp, Homo sapiens
ggtgagtaagaagaa

SEQ ID NO: 1703252 - DNA, 15 bp, Homo sapiens
gtgagtaagaagaat

SEQ ID NO: 1703253 - DNA, 15 bp, Homo sapiens
tgagtaagaagaatc

SEQ ID NO: 1703254 - DNA, 15 bp, Homo sapiens
gagtaagaagaatcc

SEQ ID NO: 1703255 - DNA, 15 bp, Homo sapiens
agtaagaagaatcca

SEQ ID NO: 1703256 - DNA, 15 bp, Homo sapiens
gtaagaagaatccat

SEQ ID NO: 1703257 - DNA, 15 bp, Homo sapiens
taagaagaatccatt

SEQ ID NO: 1703258 - DNA, 15 bp, Homo sapiens
aagaagaatccatta

SEQ ID NO: 1703259 - DNA, 15 bp, Homo sapiens
agaagaatccattag

SEQ ID NO: 1703260 - DNA, 15 bp, Homo sapiens
gaagaatccattaga

SEQ ID NO: 1703261 - DNA, 15 bp, Homo sapiens
aagaatccattagag

SEQ ID NO: 1703262 - DNA, 15 bp, Homo sapiens
agaatccattagaga

SEQ ID NO: 1703263 - DNA, 15 bp, Homo sapiens
gaatccattagagat

SEQ ID NO: 1703264 - DNA, 15 bp, Homo sapiens
aatccattagagatg

SEQ ID NO: 1703265 - DNA, 15 bp, Homo sapiens
atccattagagatgt

SEQ ID NO: 1703266 - DNA, 15 bp, Homo sapiens
tccattagagatgta

SEQ ID NO: 1703267 - DNA, 15 bp, Homo sapiens
ccattagagatgtat

SEQ ID NO: 1703268 - DNA, 15 bp, Homo sapiens
cattagagatgtatt

SEQ ID NO: 1703269 - DNA, 15 bp, Homo sapiens
attagagatgtatta

SEQ ID NO: 1703270 - DNA, 15 bp, Homo sapiens
ttagagatgtattaa

SEQ ID NO: 1703271 - DNA, 15 bp, Homo sapiens
tagagatgtattaac

SEQ ID NO: 1703272 - DNA, 15 bp, Homo sapiens
agagatgtattaact

SEQ ID NO: 1703273 - DNA, 15 bp, Homo sapiens
gagatgtattaacta

SEQ ID NO: 1703274 - DNA, 15 bp, Homo sapiens
agatgtattaactat

SEQ ID NO: 1703275 - DNA, 15 bp, Homo sapiens
gatgtattaactata

SEQ ID NO: 1703276 - DNA, 15 bp, Homo sapiens
atgtattaactataa

SEQ ID NO: 1703277 - DNA, 15 bp, Homo sapiens
tgtattaactataag

SEQ ID NO: 1703278 - DNA, 15 bp, Homo sapiens
gtattaactataaga

SEQ ID NO: 1703279 - DNA, 15 bp, Homo sapiens
tattaactataagac

SEQ ID NO: 1703280 - DNA, 15 bp, Homo sapiens
attaactataagacg

SEQ ID NO: 1703281 - DNA, 15 bp, Homo sapiens
ttaactataagacgg

SEQ ID NO: 1703282 - DNA, 15 bp, Homo sapiens
taactataagacggg

SEQ ID NO: 1703283 - DNA, 15 bp, Homo sapiens
aactataagacgggc

SEQ ID NO: 1703284 - DNA, 15 bp, Homo sapiens
actataagacgggct

SEQ ID NO: 1703285 - DNA, 15 bp, Homo sapiens
ctataagacgggctg

SEQ ID NO: 1703286 - DNA, 15 bp, Homo sapiens
tataagacgggctgc

SEQ ID NO: 1703287 - DNA, 15 bp, Homo sapiens
ataagacgggctgca

SEQ ID NO: 1703288 - DNA, 15 bp, Homo sapiens
taagacgggctgcat

SEQ ID NO: 1703289 - DNA, 15 bp, Homo sapiens
aagacgggctgcatt

SEQ ID NO: 1703290 - DNA, 15 bp, Homo sapiens
agacgggctgcattg

SEQ ID NO: 1703291 - DNA, 15 bp, Homo sapiens
gacgggctgcattgc

SEQ ID NO: 1703292 - DNA, 15 bp, Homo sapiens
acgggctgcattgct

SEQ ID NO: 1703293 - DNA, 15 bp, Homo sapiens
cgggctgcattgctg

SEQ ID NO: 1703294 - DNA, 15 bp, Homo sapiens
gggctgcattgctgc

SEQ ID NO: 1703295 - DNA, 15 bp, Homo sapiens
ggctgcattgctgcc

SEQ ID NO: 1703296 - DNA, 15 bp, Homo sapiens
gctgcattgctgcca

SEQ ID NO: 1703297 - DNA, 15 bp, Homo sapiens
ctgcattgctgccaa

SEQ ID NO: 1703298 - DNA, 15 bp, Homo sapiens
tgcattgctgccaaa

SEQ ID NO: 1703299 - DNA, 15 bp, Homo sapiens
gcattgctgccaaaa

SEQ ID NO: 1703300 - DNA, 15 bp, Homo sapiens
cattgctgccaaaaa

SEQ ID NO: 1703301 - DNA, 15 bp, Homo sapiens
attgctgccaaaaaa

SEQ ID NO: 1703302 - DNA, 15 bp, Homo sapiens
ttgctgccaaaaaaa

SEQ ID NO: 1703303 - DNA, 15 bp, Homo sapiens
tgctgccaaaaaaaa

SEQ ID NO: 1703304 - DNA, 15 bp, Homo sapiens
gctgccaaaaaaaaa

SEQ ID NO: 1703305 - DNA, 15 bp, Homo sapiens
gccaaaaaaaaaaat

SEQ ID NO: 1703306 - DNA, 15 bp, Homo sapiens
ccaaaaaaaaaaatt

SEQ ID NO: 1703307 - DNA, 15 bp, Homo sapiens
aaaaaaaaaaattga

SEQ ID NO: 1703308 - DNA, 15 bp, Homo sapiens
aaaaaaaaaattgac

SEQ ID NO: 1703309 - DNA, 15 bp, Homo sapiens
aaaaaaaaattgacc

SEQ ID NO: 1703310 - DNA, 15 bp, Homo sapiens
aaaaaaaattgacct

SEQ ID NO: 1703311 - DNA, 15 bp, Homo sapiens
aaaaaaattgacctt

SEQ ID NO: 1703312 - DNA, 15 bp, Homo sapiens
aaaaaattgacctta

SEQ ID NO: 1703313 - DNA, 15 bp, Homo sapiens
aaaaattgaccttag

SEQ ID NO: 1703314 - DNA, 15 bp, Homo sapiens
aaaattgaccttaga

SEQ ID NO: 1703315 - DNA, 15 bp, Homo sapiens
aaattgaccttagac

SEQ ID NO: 1703316 - DNA, 15 bp, Homo sapiens
aattgaccttagact

SEQ ID NO: 1703317 - DNA, 15 bp, Homo sapiens
attgaccttagacta

SEQ ID NO: 1703318 - DNA, 15 bp, Homo sapiens
ttgaccttagactac

SEQ ID NO: 1703319 - DNA, 15 bp, Homo sapiens
tgaccttagactacc

SEQ ID NO: 1703320 - DNA, 15 bp, Homo sapiens
gaccttagactacca

SEQ ID NO: 1703321 - DNA, 15 bp, Homo sapiens
accttagactaccat

SEQ ID NO: 1703322 - DNA, 15 bp, Homo sapiens
ccttagactaccatt

SEQ ID NO: 1703323 - DNA, 15 bp, Homo sapiens
cttagactaccattt

SEQ ID NO: 1703324 - DNA, 15 bp, Homo sapiens
ttagactaccattta

SEQ ID NO: 1703325 - DNA, 15 bp, Homo sapiens
tagactaccatttat

SEQ ID NO: 1703326 - DNA, 15 bp, Homo sapiens
agactaccatttatt

SEQ ID NO: 1703327 - DNA, 15 bp, Homo sapiens
gactaccatttattt

SEQ ID NO: 1703328 - DNA, 15 bp, Homo sapiens
actaccatttattta

SEQ ID NO: 1703329 - DNA, 15 bp, Homo sapiens
ctaccatttatttat

SEQ ID NO: 1703330 - DNA, 15 bp, Homo sapiens
taccatttatttatt

SEQ ID NO: 1703331 - DNA, 15 bp, Homo sapiens
accatttatttatta

SEQ ID NO: 1703332 - DNA, 15 bp, Homo sapiens
ccatttatttattaa

SEQ ID NO: 1703333 - DNA, 15 bp, Homo sapiens
catttatttattaac

SEQ ID NO: 1703334 - DNA, 15 bp, Homo sapiens
atttatttattaaca

SEQ ID NO: 1703335 - DNA, 15 bp, Homo sapiens
tttatttattaacaa

SEQ ID NO: 1703336 - DNA, 15 bp, Homo sapiens
ttatttattaacaaa

SEQ ID NO: 1703337 - DNA, 15 bp, Homo sapiens
tatttattaacaaaa

SEQ ID NO: 1703338 - DNA, 15 bp, Homo sapiens
atttattaacaaaag

SEQ ID NO: 1703339 - DNA, 15 bp, Homo sapiens
tttattaacaaaagc

SEQ ID NO: 1703340 - DNA, 15 bp, Homo sapiens
ttattaacaaaagca

SEQ ID NO: 1703341 - DNA, 15 bp, Homo sapiens
tattaacaaaagcag

SEQ ID NO: 1703342 - DNA, 15 bp, Homo sapiens
attaacaaaagcagt

SEQ ID NO: 1703343 - DNA, 15 bp, Homo sapiens
ttaacaaaagcagtt

SEQ ID NO: 1703344 - DNA, 15 bp, Homo sapiens
taacaaaagcagttt

SEQ ID NO: 1703345 - DNA, 15 bp, Homo sapiens
aacaaaagcagtttt

SEQ ID NO: 1703346 - DNA, 15 bp, Homo sapiens
acaaaagcagttttt

SEQ ID NO: 1703347 - DNA, 15 bp, Homo sapiens
caaaagcagttttta

SEQ ID NO: 1703348 - DNA, 15 bp, Homo sapiens
aaaagcagtttttac

SEQ ID NO: 1703349 - DNA, 15 bp, Homo sapiens
aaagcagtttttact

SEQ ID NO: 1703350 - DNA, 15 bp, Homo sapiens
aagcagtttttactt

SEQ ID NO: 1703351 - DNA, 15 bp, Homo sapiens
agcagtttttacttt

SEQ ID NO: 1703352 - DNA, 15 bp, Homo sapiens
gcagtttttactttt

SEQ ID NO: 1703353 - DNA, 15 bp, Homo sapiens
cagtttttactttta

SEQ ID NO: 1703354 - DNA, 15 bp, Homo sapiens
agtttttacttttag

SEQ ID NO: 1703355 - DNA, 15 bp, Homo sapiens
gtttttacttttagc

SEQ ID NO: 1703356 - DNA, 15 bp, Homo sapiens
tttttacttttagca

SEQ ID NO: 1703357 - DNA, 15 bp, Homo sapiens
ttttacttttagcat

SEQ ID NO: 1703358 - DNA, 15 bp, Homo sapiens
tttacttttagcatg

SEQ ID NO: 1703359 - DNA, 15 bp, Homo sapiens
ttacttttagcatgg

SEQ ID NO: 1703360 - DNA, 15 bp, Homo sapiens
tacttttagcatggt

SEQ ID NO: 1703361 - DNA, 15 bp, Homo sapiens
acttttagcatggtt

SEQ ID NO: 1703362 - DNA, 15 bp, Homo sapiens
cttttagcatggtta

SEQ ID NO: 1703363 - DNA, 15 bp, Homo sapiens
ttttagcatggttat

SEQ ID NO: 1703364 - DNA, 15 bp, Homo sapiens
tttagcatggttatc

SEQ ID NO: 1703365 - DNA, 15 bp, Homo sapiens
ttagcatggttatct

SEQ ID NO: 1703366 - DNA, 15 bp, Homo sapiens
tagcatggttatcta

SEQ ID NO: 1703367 - DNA, 15 bp, Homo sapiens
agcatggttatctat

SEQ ID NO: 1703368 - DNA, 15 bp, Homo sapiens
gcatggttatctatg

SEQ ID NO: 1703369 - DNA, 15 bp, Homo sapiens
catggttatctatgg

SEQ ID NO: 1703370 - DNA, 15 bp, Homo sapiens
atggttatctatggg

SEQ ID NO: 1703371 - DNA, 15 bp, Homo sapiens
tggttatctatgggt

SEQ ID NO: 1703372 - DNA, 15 bp, Homo sapiens
ggttatctatgggta

SEQ ID NO: 1703373 - DNA, 15 bp, Homo sapiens
gttatctatgggtat

SEQ ID NO: 1703374 - DNA, 15 bp, Homo sapiens
ttatctatgggtatt

SEQ ID NO: 1703375 - DNA, 15 bp, Homo sapiens
tatctatgggtattt

SEQ ID NO: 1703376 - DNA, 15 bp, Homo sapiens
atctatgggtatttt

SEQ ID NO: 1703377 - DNA, 15 bp, Homo sapiens
tctatgggtattttt

SEQ ID NO: 1703378 - DNA, 15 bp, Homo sapiens
ctatgggtatttttt

SEQ ID NO: 1703379 - DNA, 15 bp, Homo sapiens
tatgggtatttttta

SEQ ID NO: 1703380 - DNA, 15 bp, Homo sapiens
atgggtattttttaa

SEQ ID NO: 1703381 - DNA, 15 bp, Homo sapiens
tgggtattttttaaa

SEQ ID NO: 1703382 - DNA, 15 bp, Homo sapiens
gggtattttttaaag

SEQ ID NO: 1703383 - DNA, 15 bp, Homo sapiens
ggtattttttaaagt

SEQ ID NO: 1703384 - DNA, 15 bp, Homo sapiens
gtattttttaaagta

SEQ ID NO: 1703385 - DNA, 15 bp, Homo sapiens
tattttttaaagtat

SEQ ID NO: 1703386 - DNA, 15 bp, Homo sapiens
attttttaaagtatg

SEQ ID NO: 1703387 - DNA, 15 bp, Homo sapiens
ttttttaaagtatga

SEQ ID NO: 1703388 - DNA, 15 bp, Homo sapiens
tttttaaagtatgag

SEQ ID NO: 1703389 - DNA, 15 bp, Homo sapiens
ttttaaagtatgagt

SEQ ID NO: 1703390 - DNA, 15 bp, Homo sapiens
tttaaagtatgagtc

SEQ ID NO: 1703391 - DNA, 15 bp, Homo sapiens
ttaaagtatgagtct

SEQ ID NO: 1703392 - DNA, 15 bp, Homo sapiens
taaagtatgagtcta

SEQ ID NO: 1703393 - DNA, 15 bp, Homo sapiens
aaagtatgagtctat

SEQ ID NO: 1703394 - DNA, 15 bp, Homo sapiens
aagtatgagtctata

SEQ ID NO: 1703395 - DNA, 15 bp, Homo sapiens
agtatgagtctatat

SEQ ID NO: 1703396 - DNA, 15 bp, Homo sapiens
gtatgagtctatata

SEQ ID NO: 1703397 - DNA, 15 bp, Homo sapiens
tatgagtctatataa

SEQ ID NO: 1703398 - DNA, 15 bp, Homo sapiens
atgagtctatataaa

SEQ ID NO: 1703399 - DNA, 15 bp, Homo sapiens
tgagtctatataaac

SEQ ID NO: 1703400 - DNA, 15 bp, Homo sapiens
gagtctatataaact

SEQ ID NO: 1703401 - DNA, 15 bp, Homo sapiens
agtctatataaacta

SEQ ID NO: 1703402 - DNA, 15 bp, Homo sapiens
gtctatataaactat

SEQ ID NO: 1703403 - DNA, 15 bp, Homo sapiens
tctatataaactatt

SEQ ID NO: 1703404 - DNA, 15 bp, Homo sapiens
ctatataaactatta

SEQ ID NO: 1703405 - DNA, 15 bp, Homo sapiens
tatataaactattat

SEQ ID NO: 1703406 - DNA, 15 bp, Homo sapiens
atataaactattatg

SEQ ID NO: 1703407 - DNA, 15 bp, Homo sapiens
tataaactattatgt

SEQ ID NO: 1703408 - DNA, 15 bp, Homo sapiens
ataaactattatgta

SEQ ID NO: 1703409 - DNA, 15 bp, Homo sapiens
taaactattatgtaa

SEQ ID NO: 1703410 - DNA, 15 bp, Homo sapiens
aaactattatgtaaa

SEQ ID NO: 1703411 - DNA, 15 bp, Homo sapiens
aactattatgtaaaa

SEQ ID NO: 1703412 - DNA, 15 bp, Homo sapiens
actattatgtaaaag

SEQ ID NO: 1703413 - DNA, 15 bp, Homo sapiens
ctattatgtaaaagc

SEQ ID NO: 1703414 - DNA, 15 bp, Homo sapiens
tattatgtaaaagca

SEQ ID NO: 1703415 - DNA, 15 bp, Homo sapiens
attatgtaaaagcaa

SEQ ID NO: 1703416 - DNA, 15 bp, Homo sapiens
ttatgtaaaagcaaa

SEQ ID NO: 1703417 - DNA, 15 bp, Homo sapiens
tatgtaaaagcaaat

SEQ ID NO: 1703418 - DNA, 15 bp, Homo sapiens
atgtaaaagcaaatg

SEQ ID NO: 1703419 - DNA, 15 bp, Homo sapiens
tgtaaaagcaaatga

SEQ ID NO: 1703420 - DNA, 15 bp, Homo sapiens
gtaaaagcaaatgag

SEQ ID NO: 1703421 - DNA, 15 bp, Homo sapiens
taaaagcaaatgagc

SEQ ID NO: 1703422 - DNA, 15 bp, Homo sapiens
aaaagcaaatgagcg

SEQ ID NO: 1703423 - DNA, 15 bp, Homo sapiens
aaagcaaatgagcgt

SEQ ID NO: 1703424 - DNA, 15 bp, Homo sapiens
aagcaaatgagcgtc

SEQ ID NO: 1703425 - DNA, 15 bp, Homo sapiens
agcaaatgagcgtct

SEQ ID NO: 1703426 - DNA, 15 bp, Homo sapiens
gcaaatgagcgtctt

SEQ ID NO: 1703427 - DNA, 15 bp, Homo sapiens
caaatgagcgtcttg

SEQ ID NO: 1703428 - DNA, 15 bp, Homo sapiens
aaatgagcgtcttgg

SEQ ID NO: 1703429 - DNA, 15 bp, Homo sapiens
aatgagcgtcttggt

SEQ ID NO: 1703430 - DNA, 15 bp, Homo sapiens
atgagcgtcttggta

SEQ ID NO: 1703431 - DNA, 15 bp, Homo sapiens
tgagcgtcttggtat

SEQ ID NO: 1703432 - DNA, 15 bp, Homo sapiens
gagcgtcttggtata

SEQ ID NO: 1703433 - DNA, 15 bp, Homo sapiens
agcgtcttggtataa

SEQ ID NO: 1703434 - DNA, 15 bp, Homo sapiens
gcgtcttggtataat

SEQ ID NO: 1703435 - DNA, 15 bp, Homo sapiens
cgtcttggtataatg

SEQ ID NO: 1703436 - DNA, 15 bp, Homo sapiens
gtcttggtataatgt

SEQ ID NO: 1703437 - DNA, 15 bp, Homo sapiens
tcttggtataatgtc

SEQ ID NO: 1703438 - DNA, 15 bp, Homo sapiens
cttggtataatgtct

SEQ ID NO: 1703439 - DNA, 15 bp, Homo sapiens
ttggtataatgtctt

SEQ ID NO: 1703440 - DNA, 15 bp, Homo sapiens
tggtataatgtctta

SEQ ID NO: 1703441 - DNA, 15 bp, Homo sapiens
ggtataatgtcttaa

SEQ ID NO: 1703442 - DNA, 15 bp, Homo sapiens
gtataatgtcttaat

SEQ ID NO: 1703443 - DNA, 15 bp, Homo sapiens
tataatgtcttaata

SEQ ID NO: 1703444 - DNA, 15 bp, Homo sapiens
ataatgtcttaatat

SEQ ID NO: 1703445 - DNA, 15 bp, Homo sapiens
taatgtcttaatatt

SEQ ID NO: 1703446 - DNA, 15 bp, Homo sapiens
aatgtcttaatattt

SEQ ID NO: 1703447 - DNA, 15 bp, Homo sapiens
atgtcttaatatttt

SEQ ID NO: 1703448 - DNA, 15 bp, Homo sapiens
tgtcttaatattttc

SEQ ID NO: 1703449 - DNA, 15 bp, Homo sapiens
gtcttaatattttca

SEQ ID NO: 1703450 - DNA, 15 bp, Homo sapiens
tcttaatattttcaa

SEQ ID NO: 1703451 - DNA, 15 bp, Homo sapiens
cttaatattttcaaa

SEQ ID NO: 1703452 - DNA, 15 bp, Homo sapiens
ttaatattttcaaat

SEQ ID NO: 1703453 - DNA, 15 bp, Homo sapiens
taatattttcaaatt

SEQ ID NO: 1703454 - DNA, 15 bp, Homo sapiens
aatattttcaaatta

SEQ ID NO: 1703455 - DNA, 15 bp, Homo sapiens
atattttcaaattat

SEQ ID NO: 1703456 - DNA, 15 bp, Homo sapiens
tattttcaaattatt

SEQ ID NO: 1703457 - DNA, 15 bp, Homo sapiens
attttcaaattattt

SEQ ID NO: 1703458 - DNA, 15 bp, Homo sapiens
tttcaaattatttct

SEQ ID NO: 1703459 - DNA, 15 bp, Homo sapiens
ttcaaattatttctt

SEQ ID NO: 1703460 - DNA, 15 bp, Homo sapiens
tcaaattatttcttt

SEQ ID NO: 1703461 - DNA, 15 bp, Homo sapiens
caaattatttcttta

SEQ ID NO: 1703462 - DNA, 15 bp, Homo sapiens
aaattatttctttag

SEQ ID NO: 1703463 - DNA, 15 bp, Homo sapiens
aattatttctttaga

SEQ ID NO: 1703464 - DNA, 15 bp, Homo sapiens
attatttctttagaa

SEQ ID NO: 1703465 - DNA, 15 bp, Homo sapiens
ttatttctttagaaa

SEQ ID NO: 1703466 - DNA, 15 bp, Homo sapiens
tatttctttagaaat

SEQ ID NO: 1703467 - DNA, 15 bp, Homo sapiens
atttctttagaaatg

SEQ ID NO: 1703468 - DNA, 15 bp, Homo sapiens
tttctttagaaatga

SEQ ID NO: 1703469 - DNA, 15 bp, Homo sapiens
ttctttagaaatgaa

SEQ ID NO: 1703470 - DNA, 15 bp, Homo sapiens
tctttagaaatgaaa

SEQ ID NO: 1703471 - DNA, 15 bp, Homo sapiens
ctttagaaatgaaat

SEQ ID NO: 1703472 - DNA, 15 bp, Homo sapiens
tttagaaatgaaata

SEQ ID NO: 1703473 - DNA, 15 bp, Homo sapiens
ttagaaatgaaataa

SEQ ID NO: 1703474 - DNA, 15 bp, Homo sapiens
tagaaatgaaataat

SEQ ID NO: 1703475 - DNA, 15 bp, Homo sapiens
agaaatgaaataatt

SEQ ID NO: 1703476 - DNA, 15 bp, Homo sapiens
gaaatgaaataattc

SEQ ID NO: 1703477 - DNA, 15 bp, Homo sapiens
aaatgaaataattct

SEQ ID NO: 1703478 - DNA, 15 bp, Homo sapiens
aatgaaataattcta

SEQ ID NO: 1703479 - DNA, 15 bp, Homo sapiens
atgaaataattctaa

SEQ ID NO: 1703480 - DNA, 15 bp, Homo sapiens
tgaaataattctaat

SEQ ID NO: 1703481 - DNA, 15 bp, Homo sapiens
gaaataattctaatt

SEQ ID NO: 1703482 - DNA, 15 bp, Homo sapiens
aaataattctaatta

SEQ ID NO: 1703483 - DNA, 15 bp, Homo sapiens
aataattctaattaa

SEQ ID NO: 1703484 - DNA, 15 bp, Homo sapiens
ataattctaattaaa

SEQ ID NO: 1703485 - DNA, 15 bp, Homo sapiens
taattctaattaaaa

SEQ ID NO: 1703486 - DNA, 15 bp, Homo sapiens
aattctaattaaaat

SEQ ID NO: 1703487 - DNA, 15 bp, Homo sapiens
attctaattaaaata

SEQ ID NO: 1703488 - DNA, 15 bp, Homo sapiens
ttctaattaaaatag

SEQ ID NO: 1703489 - DNA, 15 bp, Homo sapiens
tctaattaaaataga

SEQ ID NO: 1703490 - DNA, 15 bp, Homo sapiens
ctaattaaaatagat

SEQ ID NO: 1703491 - DNA, 15 bp, Homo sapiens
taattaaaatagata

SEQ ID NO: 1703492 - DNA, 15 bp, Homo sapiens
aattaaaatagataa

SEQ ID NO: 1703493 - DNA, 15 bp, Homo sapiens
attaaaatagataaa

SEQ ID NO: 1703494 - DNA, 15 bp, Homo sapiens
ttaaaatagataaaa

SEQ ID NO: 1703495 - DNA, 15 bp, Homo sapiens
taaaatagataaaat

SEQ ID NO: 1703496 - DNA, 15 bp, Homo sapiens
aaaatagataaaatc

SEQ ID NO: 1703497 - DNA, 15 bp, Homo sapiens
aaatagataaaatca

SEQ ID NO: 1703498 - DNA, 15 bp, Homo sapiens
aatagataaaatcat

SEQ ID NO: 1703499 - DNA, 15 bp, Homo sapiens
atagataaaatcatt

SEQ ID NO: 1703500 - DNA, 15 bp, Homo sapiens
tagataaaatcattc

SEQ ID NO: 1703501 - DNA, 15 bp, Homo sapiens
agataaaatcattca

SEQ ID NO: 1703502 - DNA, 15 bp, Homo sapiens
gataaaatcattcag

SEQ ID NO: 1703503 - DNA, 15 bp, Homo sapiens
ataaaatcattcagt

SEQ ID NO: 1703504 - DNA, 15 bp, Homo sapiens
taaaatcattcagta

SEQ ID NO: 1703505 - DNA, 15 bp, Homo sapiens
aaaatcattcagtaa

SEQ ID NO: 1703506 - DNA, 15 bp, Homo sapiens
aaatcattcagtaag

SEQ ID NO: 1703507 - DNA, 15 bp, Homo sapiens
aatcattcagtaaga

SEQ ID NO: 1703508 - DNA, 15 bp, Homo sapiens
atcattcagtaagaa

SEQ ID NO: 1703509 - DNA, 15 bp, Homo sapiens
tcattcagtaagaag

SEQ ID NO: 1703510 - DNA, 15 bp, Homo sapiens
cattcagtaagaagt

SEQ ID NO: 1703511 - DNA, 15 bp, Homo sapiens
attcagtaagaagtt

SEQ ID NO: 1703512 - DNA, 15 bp, Homo sapiens
ttcagtaagaagttg

SEQ ID NO: 1703513 - DNA, 15 bp, Homo sapiens
tcagtaagaagttgt

SEQ ID NO: 1703514 - DNA, 15 bp, Homo sapiens
cagtaagaagttgtt

SEQ ID NO: 1703515 - DNA, 15 bp, Homo sapiens
agtaagaagttgttc

SEQ ID NO: 1703516 - DNA, 15 bp, Homo sapiens
gtaagaagttgttcc

SEQ ID NO: 1703517 - DNA, 15 bp, Homo sapiens
taagaagttgttcca

SEQ ID NO: 1703518 - DNA, 15 bp, Homo sapiens
aagaagttgttccac

SEQ ID NO: 1703519 - DNA, 15 bp, Homo sapiens
agaagttgttccacc

SEQ ID NO: 1703520 - DNA, 15 bp, Homo sapiens
gaagttgttccacca

SEQ ID NO: 1703521 - DNA, 15 bp, Homo sapiens
aagttgttccaccat

SEQ ID NO: 1703522 - DNA, 15 bp, Homo sapiens
agttgttccaccata

SEQ ID NO: 1703523 - DNA, 15 bp, Homo sapiens
gttgttccaccatat

SEQ ID NO: 1703524 - DNA, 15 bp, Homo sapiens
ttgttccaccatatc

SEQ ID NO: 1703525 - DNA, 15 bp, Homo sapiens
tgttccaccatatct

SEQ ID NO: 1703526 - DNA, 15 bp, Homo sapiens
gttccaccatatctt

SEQ ID NO: 1703527 - DNA, 15 bp, Homo sapiens
ttccaccatatctta

SEQ ID NO: 1703528 - DNA, 15 bp, Homo sapiens
tccaccatatcttag

SEQ ID NO: 1703529 - DNA, 15 bp, Homo sapiens
ccaccatatcttaga

SEQ ID NO: 1703530 - DNA, 15 bp, Homo sapiens
caccatatcttagaa

SEQ ID NO: 1703531 - DNA, 15 bp, Homo sapiens
accatatcttagaac

SEQ ID NO: 1703532 - DNA, 15 bp, Homo sapiens
ccatatcttagaact

SEQ ID NO: 1703533 - DNA, 15 bp, Homo sapiens
catatcttagaactg

SEQ ID NO: 1703534 - DNA, 15 bp, Homo sapiens
atatcttagaactgt

SEQ ID NO: 1703535 - DNA, 15 bp, Homo sapiens
tatcttagaactgtt

SEQ ID NO: 1703536 - DNA, 15 bp, Homo sapiens
atcttagaactgttg

SEQ ID NO: 1703537 - DNA, 15 bp, Homo sapiens
tcttagaactgttgt

SEQ ID NO: 1703538 - DNA, 15 bp, Homo sapiens
cttagaactgttgtt

SEQ ID NO: 1703539 - DNA, 15 bp, Homo sapiens
ttagaactgttgttt

SEQ ID NO: 1703540 - DNA, 15 bp, Homo sapiens
tagaactgttgttta

SEQ ID NO: 1703541 - DNA, 15 bp, Homo sapiens
agaactgttgtttat

SEQ ID NO: 1703542 - DNA, 15 bp, Homo sapiens
gaactgttgtttata

SEQ ID NO: 1703543 - DNA, 15 bp, Homo sapiens
aactgttgtttatat

SEQ ID NO: 1703544 - DNA, 15 bp, Homo sapiens
actgttgtttatatt

SEQ ID NO: 1703545 - DNA, 15 bp, Homo sapiens
ctgttgtttatatta

SEQ ID NO: 1703546 - DNA, 15 bp, Homo sapiens
tgttgtttatattat

SEQ ID NO: 1703547 - DNA, 15 bp, Homo sapiens
gttgtttatattatg

SEQ ID NO: 1703548 - DNA, 15 bp, Homo sapiens
ttgtttatattatga

SEQ ID NO: 1703549 - DNA, 15 bp, Homo sapiens
tgtttatattatgat

SEQ ID NO: 1703550 - DNA, 15 bp, Homo sapiens
gtttatattatgatc

SEQ ID NO: 1703551 - DNA, 15 bp, Homo sapiens
tttatattatgatcc

SEQ ID NO: 1703552 - DNA, 15 bp, Homo sapiens
ttatattatgatcct

SEQ ID NO: 1703553 - DNA, 15 bp, Homo sapiens
tatattatgatccta

SEQ ID NO: 1703554 - DNA, 15 bp, Homo sapiens
atattatgatcctat

SEQ ID NO: 1703555 - DNA, 15 bp, Homo sapiens
tattatgatcctatt

SEQ ID NO: 1703556 - DNA, 15 bp, Homo sapiens
attatgatcctattc

SEQ ID NO: 1703557 - DNA, 15 bp, Homo sapiens
ttatgatcctattca

SEQ ID NO: 1703558 - DNA, 15 bp, Homo sapiens
tatgatcctattcac

SEQ ID NO: 1703559 - DNA, 15 bp, Homo sapiens
atgatcctattcaca

SEQ ID NO: 1703560 - DNA, 15 bp, Homo sapiens
tgatcctattcacaa

SEQ ID NO: 1703561 - DNA, 15 bp, Homo sapiens
gatcctattcacaat

SEQ ID NO: 1703562 - DNA, 15 bp, Homo sapiens
atcctattcacaatt

SEQ ID NO: 1703563 - DNA, 15 bp, Homo sapiens
tcctattcacaattg

SEQ ID NO: 1703564 - DNA, 15 bp, Homo sapiens
cctattcacaattgt

SEQ ID NO: 1703565 - DNA, 15 bp, Homo sapiens
ctattcacaattgta

SEQ ID NO: 1703566 - DNA, 15 bp, Homo sapiens
tattcacaattgtaa

SEQ ID NO: 1703567 - DNA, 15 bp, Homo sapiens
attcacaattgtaat

SEQ ID NO: 1703568 - DNA, 15 bp, Homo sapiens
ttcacaattgtaatt

SEQ ID NO: 1703569 - DNA, 15 bp, Homo sapiens
tcacaattgtaattc

SEQ ID NO: 1703570 - DNA, 15 bp, Homo sapiens
cacaattgtaattct

SEQ ID NO: 1703571 - DNA, 15 bp, Homo sapiens
acaattgtaattctc

SEQ ID NO: 1703572 - DNA, 15 bp, Homo sapiens
caattgtaattctca

SEQ ID NO: 1703573 - DNA, 15 bp, Homo sapiens
aattgtaattctcat

SEQ ID NO: 1703574 - DNA, 15 bp, Homo sapiens
attgtaattctcata

SEQ ID NO: 1703575 - DNA, 15 bp, Homo sapiens
ttgtaattctcatat

SEQ ID NO: 1703576 - DNA, 15 bp, Homo sapiens
tgtaattctcatata

SEQ ID NO: 1703577 - DNA, 15 bp, Homo sapiens
gtaattctcatataa

SEQ ID NO: 1703578 - DNA, 15 bp, Homo sapiens
taattctcatataaa

SEQ ID NO: 1703579 - DNA, 15 bp, Homo sapiens
aattctcatataaat

SEQ ID NO: 1703580 - DNA, 15 bp, Homo sapiens
attctcatataaatg

SEQ ID NO: 1703581 - DNA, 15 bp, Homo sapiens
ttctcatataaatga

SEQ ID NO: 1703582 - DNA, 15 bp, Homo sapiens
tctcatataaatgaa

SEQ ID NO: 1703583 - DNA, 15 bp, Homo sapiens
ctcatataaatgaag

SEQ ID NO: 1703584 - DNA, 15 bp, Homo sapiens
tcatataaatgaaga

SEQ ID NO: 1703585 - DNA, 15 bp, Homo sapiens
catataaatgaagaa

SEQ ID NO: 1703586 - DNA, 15 bp, Homo sapiens
atataaatgaagaat

SEQ ID NO: 1703587 - DNA, 15 bp, Homo sapiens
tataaatgaagaatt

SEQ ID NO: 1703588 - DNA, 15 bp, Homo sapiens
ataaatgaagaattc

SEQ ID NO: 1703589 - DNA, 15 bp, Homo sapiens
taaatgaagaattct

SEQ ID NO: 1703590 - DNA, 15 bp, Homo sapiens
aaatgaagaattctt

SEQ ID NO: 1703591 - DNA, 15 bp, Homo sapiens
aatgaagaattcttg

SEQ ID NO: 1703592 - DNA, 15 bp, Homo sapiens
atgaagaattcttgg

SEQ ID NO: 1703593 - DNA, 15 bp, Homo sapiens
tgaagaattcttggt

SEQ ID NO: 1703594 - DNA, 15 bp, Homo sapiens
gaagaattcttggta

SEQ ID NO: 1703595 - DNA, 15 bp, Homo sapiens
aagaattcttggtag

SEQ ID NO: 1703596 - DNA, 15 bp, Homo sapiens
agaattcttggtaga

SEQ ID NO: 1703597 - DNA, 15 bp, Homo sapiens
gaattcttggtagat

SEQ ID NO: 1703598 - DNA, 15 bp, Homo sapiens
aattcttggtagatt

SEQ ID NO: 1703599 - DNA, 15 bp, Homo sapiens
attcttggtagattg

SEQ ID NO: 1703600 - DNA, 15 bp, Homo sapiens
ttcttggtagattga

SEQ ID NO: 1703601 - DNA, 15 bp, Homo sapiens
tcttggtagattgac

SEQ ID NO: 1703602 - DNA, 15 bp, Homo sapiens
cttggtagattgaca

SEQ ID NO: 1703603 - DNA, 15 bp, Homo sapiens
ttggtagattgacag

SEQ ID NO: 1703604 - DNA, 15 bp, Homo sapiens
tggtagattgacagt

SEQ ID NO: 1703605 - DNA, 15 bp, Homo sapiens
ggtagattgacagtc

SEQ ID NO: 1703606 - DNA, 15 bp, Homo sapiens
gtagattgacagtca

SEQ ID NO: 1703607 - DNA, 15 bp, Homo sapiens
tagattgacagtcac

SEQ ID NO: 1703608 - DNA, 15 bp, Homo sapiens
agattgacagtcacc

SEQ ID NO: 1703609 - DNA, 15 bp, Homo sapiens
gattgacagtcacca

SEQ ID NO: 1703610 - DNA, 15 bp, Homo sapiens
attgacagtcaccat

SEQ ID NO: 1703611 - DNA, 15 bp, Homo sapiens
ttgacagtcaccatc

SEQ ID NO: 1703612 - DNA, 15 bp, Homo sapiens
tgacagtcaccatct

SEQ ID NO: 1703613 - DNA, 15 bp, Homo sapiens
gacagtcaccatctc

SEQ ID NO: 1703614 - DNA, 15 bp, Homo sapiens
acagtcaccatctcc

SEQ ID NO: 1703615 - DNA, 15 bp, Homo sapiens
cagtcaccatctcct

SEQ ID NO: 1703616 - DNA, 15 bp, Homo sapiens
agtcaccatctcctt

SEQ ID NO: 1703617 - DNA, 15 bp, Homo sapiens
gtcaccatctccttt

SEQ ID NO: 1703618 - DNA, 15 bp, Homo sapiens
tcaccatctcctttc

SEQ ID NO: 1703619 - DNA, 15 bp, Homo sapiens
caccatctcctttct

SEQ ID NO: 1703620 - DNA, 15 bp, Homo sapiens
accatctcctttctt

SEQ ID NO: 1703621 - DNA, 15 bp, Homo sapiens
ccatctcctttcttg

SEQ ID NO: 1703622 - DNA, 15 bp, Homo sapiens
catctcctttcttga

SEQ ID NO: 1703623 - DNA, 15 bp, Homo sapiens
atctcctttcttgaa

SEQ ID NO: 1703624 - DNA, 15 bp, Homo sapiens
tctcctttcttgaat

SEQ ID NO: 1703625 - DNA, 15 bp, Homo sapiens
ctcctttcttgaata

SEQ ID NO: 1703626 - DNA, 15 bp, Homo sapiens
tcctttcttgaatac

SEQ ID NO: 1703627 - DNA, 15 bp, Homo sapiens
cctttcttgaataca

SEQ ID NO: 1703628 - DNA, 15 bp, Homo sapiens
ctttcttgaatacat

SEQ ID NO: 1703629 - DNA, 15 bp, Homo sapiens
tttcttgaatacata

SEQ ID NO: 1703630 - DNA, 15 bp, Homo sapiens
ttcttgaatacatag

SEQ ID NO: 1703631 - DNA, 15 bp, Homo sapiens
tcttgaatacataga

SEQ ID NO: 1703632 - DNA, 15 bp, Homo sapiens
cttgaatacatagat

SEQ ID NO: 1703633 - DNA, 15 bp, Homo sapiens
ttgaatacatagatg

SEQ ID NO: 1703634 - DNA, 15 bp, Homo sapiens
tgaatacatagatgg

SEQ ID NO: 1703635 - DNA, 15 bp, Homo sapiens
gaatacatagatgga

SEQ ID NO: 1703636 - DNA, 15 bp, Homo sapiens
aatacatagatggat

SEQ ID NO: 1703637 - DNA, 15 bp, Homo sapiens
atacatagatggatt

SEQ ID NO: 1703638 - DNA, 15 bp, Homo sapiens
tacatagatggattc

SEQ ID NO: 1703639 - DNA, 15 bp, Homo sapiens
acatagatggattct

SEQ ID NO: 1703640 - DNA, 15 bp, Homo sapiens
catagatggattctt

SEQ ID NO: 1703641 - DNA, 15 bp, Homo sapiens
atagatggattctta

SEQ ID NO: 1703642 - DNA, 15 bp, Homo sapiens
tagatggattcttac

SEQ ID NO: 1703643 - DNA, 15 bp, Homo sapiens
agatggattcttacc

SEQ ID NO: 1703644 - DNA, 15 bp, Homo sapiens
gatggattcttacct

SEQ ID NO: 1703645 - DNA, 15 bp, Homo sapiens
atggattcttacctt

SEQ ID NO: 1703646 - DNA, 15 bp, Homo sapiens
tggattcttacctta

SEQ ID NO: 1703647 - DNA, 15 bp, Homo sapiens
ggattcttaccttag

SEQ ID NO: 1703648 - DNA, 15 bp, Homo sapiens
gattcttaccttagc

SEQ ID NO: 1703649 - DNA, 15 bp, Homo sapiens
attcttaccttagct

SEQ ID NO: 1703650 - DNA, 15 bp, Homo sapiens
ttcttaccttagctt

SEQ ID NO: 1703651 - DNA, 15 bp, Homo sapiens
tcttaccttagcttt

SEQ ID NO: 1703652 - DNA, 15 bp, Homo sapiens
cttaccttagctttc

SEQ ID NO: 1703653 - DNA, 15 bp, Homo sapiens
ttaccttagctttct

SEQ ID NO: 1703654 - DNA, 15 bp, Homo sapiens
taccttagctttctc

SEQ ID NO: 1703655 - DNA, 15 bp, Homo sapiens
accttagctttctca

SEQ ID NO: 1703656 - DNA, 15 bp, Homo sapiens
ccttagctttctcat

SEQ ID NO: 1703657 - DNA, 15 bp, Homo sapiens
cttagctttctcatt

SEQ ID NO: 1703658 - DNA, 15 bp, Homo sapiens
ttagctttctcattt

SEQ ID NO: 1703659 - DNA, 15 bp, Homo sapiens
tagctttctcatttt

SEQ ID NO: 1703660 - DNA, 15 bp, Homo sapiens
agctttctcattttt

SEQ ID NO: 1703661 - DNA, 15 bp, Homo sapiens
gctttctcatttttc

SEQ ID NO: 1703662 - DNA, 15 bp, Homo sapiens
ctttctcatttttca

SEQ ID NO: 1703663 - DNA, 15 bp, Homo sapiens
tttctcatttttcag

SEQ ID NO: 1703664 - DNA, 15 bp, Homo sapiens
ttctcatttttcagg

SEQ ID NO: 1703665 - DNA, 15 bp, Homo sapiens
tctcatttttcaggt

SEQ ID NO: 1703666 - DNA, 15 bp, Homo sapiens
ctcatttttcaggta

SEQ ID NO: 1703667 - DNA, 15 bp, Homo sapiens
tcatttttcaggtaa

SEQ ID NO: 1703668 - DNA, 15 bp, Homo sapiens
catttttcaggtaaa

SEQ ID NO: 1703669 - DNA, 15 bp, Homo sapiens
atttttcaggtaaaa

SEQ ID NO: 1703670 - DNA, 15 bp, Homo sapiens
tttttcaggtaaaaa

SEQ ID NO: 1703671 - DNA, 15 bp, Homo sapiens
ttttcaggtaaaaag

SEQ ID NO: 1703672 - DNA, 15 bp, Homo sapiens
tttcaggtaaaaagc

SEQ ID NO: 1703673 - DNA, 15 bp, Homo sapiens
ttcaggtaaaaagca

SEQ ID NO: 1703674 - DNA, 15 bp, Homo sapiens
tcaggtaaaaagcag

SEQ ID NO: 1703675 - DNA, 15 bp, Homo sapiens
caggtaaaaagcagc

SEQ ID NO: 1703676 - DNA, 15 bp, Homo sapiens
aggtaaaaagcagct

SEQ ID NO: 1703677 - DNA, 15 bp, Homo sapiens
ggtaaaaagcagctt

SEQ ID NO: 1703678 - DNA, 15 bp, Homo sapiens
gtaaaaagcagcttc

SEQ ID NO: 1703679 - DNA, 15 bp, Homo sapiens
taaaaagcagcttcc

SEQ ID NO: 1703680 - DNA, 15 bp, Homo sapiens
aaaaagcagcttcct

SEQ ID NO: 1703681 - DNA, 15 bp, Homo sapiens
aaaagcagcttcctg

SEQ ID NO: 1703682 - DNA, 15 bp, Homo sapiens
aaagcagcttcctga

SEQ ID NO: 1703683 - DNA, 15 bp, Homo sapiens
aagcagcttcctgat

SEQ ID NO: 1703684 - DNA, 15 bp, Homo sapiens
agcagcttcctgatt

SEQ ID NO: 1703685 - DNA, 15 bp, Homo sapiens
gcagcttcctgattc

SEQ ID NO: 1703686 - DNA, 15 bp, Homo sapiens
cagcttcctgattca

SEQ ID NO: 1703687 - DNA, 15 bp, Homo sapiens
agcttcctgattcaa

SEQ ID NO: 1703688 - DNA, 15 bp, Homo sapiens
gcttcctgattcaaa

SEQ ID NO: 1703689 - DNA, 15 bp, Homo sapiens
cttcctgattcaaat

SEQ ID NO: 1703690 - DNA, 15 bp, Homo sapiens
ttcctgattcaaatg

SEQ ID NO: 1703691 - DNA, 15 bp, Homo sapiens
tcctgattcaaatga

SEQ ID NO: 1703692 - DNA, 15 bp, Homo sapiens
cctgattcaaatgag

SEQ ID NO: 1703693 - DNA, 15 bp, Homo sapiens
ctgattcaaatgaga

SEQ ID NO: 1703694 - DNA, 15 bp, Homo sapiens
tgattcaaatgagat

SEQ ID NO: 1703695 - DNA, 15 bp, Homo sapiens
gattcaaatgagatt

SEQ ID NO: 1703696 - DNA, 15 bp, Homo sapiens
attcaaatgagattg

SEQ ID NO: 1703697 - DNA, 15 bp, Homo sapiens
ttcaaatgagattgt

SEQ ID NO: 1703698 - DNA, 15 bp, Homo sapiens
tcaaatgagattgtg

SEQ ID NO: 1703699 - DNA, 15 bp, Homo sapiens
caaatgagattgtgg

SEQ ID NO: 1703700 - DNA, 15 bp, Homo sapiens
aaatgagattgtgga

SEQ ID NO: 1703701 - DNA, 15 bp, Homo sapiens
aatgagattgtggaa

SEQ ID NO: 1703702 - DNA, 15 bp, Homo sapiens
atgagattgtggaaa

SEQ ID NO: 1703703 - DNA, 15 bp, Homo sapiens
tgagattgtggaaaa

SEQ ID NO: 1703704 - DNA, 15 bp, Homo sapiens
gagattgtggaaaaa

SEQ ID NO: 1703705 - DNA, 15 bp, Homo sapiens
agattgtggaaaaat

SEQ ID NO: 1703706 - DNA, 15 bp, Homo sapiens
gattgtggaaaaatt

SEQ ID NO: 1703707 - DNA, 15 bp, Homo sapiens
attgtggaaaaattg

SEQ ID NO: 1703708 - DNA, 15 bp, Homo sapiens
ttgtggaaaaattgc

SEQ ID NO: 1703709 - DNA, 15 bp, Homo sapiens
tgtggaaaaattgct

SEQ ID NO: 1703710 - DNA, 15 bp, Homo sapiens
gtggaaaaattgctt

SEQ ID NO: 1703711 - DNA, 15 bp, Homo sapiens
tggaaaaattgcttc

SEQ ID NO: 1703712 - DNA, 15 bp, Homo sapiens
ggaaaaattgcttct

SEQ ID NO: 1703713 - DNA, 15 bp, Homo sapiens
gaaaaattgcttcta

SEQ ID NO: 1703714 - DNA, 15 bp, Homo sapiens
aaaaattgcttctaa

SEQ ID NO: 1703715 - DNA, 15 bp, Homo sapiens
aaaattgcttctaag

SEQ ID NO: 1703716 - DNA, 15 bp, Homo sapiens
aaattgcttctaaga

SEQ ID NO: 1703717 - DNA, 15 bp, Homo sapiens
aattgcttctaagaa

SEQ ID NO: 1703718 - DNA, 15 bp, Homo sapiens
attgcttctaagaag

SEQ ID NO: 1703719 - DNA, 15 bp, Homo sapiens
ttgcttctaagaaga

SEQ ID NO: 1703720 - DNA, 15 bp, Homo sapiens
tgcttctaagaagaa

SEQ ID NO: 1703721 - DNA, 15 bp, Homo sapiens
gcttctaagaagaaa

SEQ ID NO: 1703722 - DNA, 15 bp, Homo sapiens
cttctaagaagaaag

SEQ ID NO: 1703723 - DNA, 15 bp, Homo sapiens
ttctaagaagaaagt

SEQ ID NO: 1703724 - DNA, 15 bp, Homo sapiens
tctaagaagaaagtt

SEQ ID NO: 1703725 - DNA, 15 bp, Homo sapiens
ctaagaagaaagttc

SEQ ID NO: 1703726 - DNA, 15 bp, Homo sapiens
taagaagaaagttca

SEQ ID NO: 1703727 - DNA, 15 bp, Homo sapiens
aagaagaaagttcat

SEQ ID NO: 1703728 - DNA, 15 bp, Homo sapiens
agaagaaagttcatc

SEQ ID NO: 1703729 - DNA, 15 bp, Homo sapiens
gaagaaagttcatcc

SEQ ID NO: 1703730 - DNA, 15 bp, Homo sapiens
aagaaagttcatccc

SEQ ID NO: 1703731 - DNA, 15 bp, Homo sapiens
agaaagttcatccct

SEQ ID NO: 1703732 - DNA, 15 bp, Homo sapiens
gaaagttcatccctg

SEQ ID NO: 1703733 - DNA, 15 bp, Homo sapiens
aaagttcatccctga

SEQ ID NO: 1703734 - DNA, 15 bp, Homo sapiens
aagttcatccctgat

SEQ ID NO: 1703735 - DNA, 15 bp, Homo sapiens
agttcatccctgatc

SEQ ID NO: 1703736 - DNA, 15 bp, Homo sapiens
gttcatccctgatcc

SEQ ID NO: 1703737 - DNA, 15 bp, Homo sapiens
ttcatccctgatccc

SEQ ID NO: 1703738 - DNA, 15 bp, Homo sapiens
tcatccctgatcccc

SEQ ID NO: 1703739 - DNA, 15 bp, Homo sapiens
catccctgatcccca

SEQ ID NO: 1703740 - DNA, 15 bp, Homo sapiens
atccctgatccccag

SEQ ID NO: 1703741 - DNA, 15 bp, Homo sapiens
tccctgatccccagg

SEQ ID NO: 1703742 - DNA, 15 bp, Homo sapiens
ccctgatccccaggg

SEQ ID NO: 1703743 - DNA, 15 bp, Homo sapiens
cctgatccccagggc

SEQ ID NO: 1703744 - DNA, 15 bp, Homo sapiens
ctgatccccagggct

SEQ ID NO: 1703745 - DNA, 15 bp, Homo sapiens
tgatccccagggctc

SEQ ID NO: 1703746 - DNA, 15 bp, Homo sapiens
gatccccagggctca

SEQ ID NO: 1703747 - DNA, 15 bp, Homo sapiens
atccccagggctcaa

SEQ ID NO: 1703748 - DNA, 15 bp, Homo sapiens
tccccagggctcaaa

SEQ ID NO: 1703749 - DNA, 15 bp, Homo sapiens
ccccagggctcaaac

SEQ ID NO: 1703750 - DNA, 15 bp, Homo sapiens
cccagggctcaaaca

SEQ ID NO: 1703751 - DNA, 15 bp, Homo sapiens
ccagggctcaaacat

SEQ ID NO: 1703752 - DNA, 15 bp, Homo sapiens
cagggctcaaacatg

SEQ ID NO: 1703753 - DNA, 15 bp, Homo sapiens
agggctcaaacatga

SEQ ID NO: 1703754 - DNA, 15 bp, Homo sapiens
gggctcaaacatgat

SEQ ID NO: 1703755 - DNA, 15 bp, Homo sapiens
ggctcaaacatgatg

SEQ ID NO: 1703756 - DNA, 15 bp, Homo sapiens
gctcaaacatgatgt

SEQ ID NO: 1703757 - DNA, 15 bp, Homo sapiens
ctcaaacatgatgtt

SEQ ID NO: 1703758 - DNA, 15 bp, Homo sapiens
tcaaacatgatgttt

SEQ ID NO: 1703759 - DNA, 15 bp, Homo sapiens
caaacatgatgtttg

SEQ ID NO: 1703760 - DNA, 15 bp, Homo sapiens
aaacatgatgtttgc

SEQ ID NO: 1703761 - DNA, 15 bp, Homo sapiens
aacatgatgtttgca

SEQ ID NO: 1703762 - DNA, 15 bp, Homo sapiens
acatgatgtttgcat

SEQ ID NO: 1703763 - DNA, 15 bp, Homo sapiens
catgatgtttgcatt

SEQ ID NO: 1703764 - DNA, 15 bp, Homo sapiens
atgatgtttgcattc

SEQ ID NO: 1703765 - DNA, 15 bp, Homo sapiens
tgatgtttgcattct

SEQ ID NO: 1703766 - DNA, 15 bp, Homo sapiens
gatgtttgcattctt

SEQ ID NO: 1703767 - DNA, 15 bp, Homo sapiens
atgtttgcattcttt

SEQ ID NO: 1703768 - DNA, 15 bp, Homo sapiens
tgtttgcattctttg

SEQ ID NO: 1703769 - DNA, 15 bp, Homo sapiens
gtttgcattctttgc

SEQ ID NO: 1703770 - DNA, 15 bp, Homo sapiens
tttgcattctttgcc

SEQ ID NO: 1703771 - DNA, 15 bp, Homo sapiens
ttgcattctttgccc

SEQ ID NO: 1703772 - DNA, 15 bp, Homo sapiens
tgcattctttgccca

SEQ ID NO: 1703773 - DNA, 15 bp, Homo sapiens
gcattctttgcccag

SEQ ID NO: 1703774 - DNA, 15 bp, Homo sapiens
cattctttgcccagc

SEQ ID NO: 1703775 - DNA, 15 bp, Homo sapiens
attctttgcccagca

SEQ ID NO: 1703776 - DNA, 15 bp, Homo sapiens
ttctttgcccagcac

SEQ ID NO: 1703777 - DNA, 15 bp, Homo sapiens
tctttgcccagcact

SEQ ID NO: 1703778 - DNA, 15 bp, Homo sapiens
ctttgcccagcactt

SEQ ID NO: 1703779 - DNA, 15 bp, Homo sapiens
tttgcccagcacttc

SEQ ID NO: 1703780 - DNA, 15 bp, Homo sapiens
ttgcccagcacttca

SEQ ID NO: 1703781 - DNA, 15 bp, Homo sapiens
tgcccagcacttcac

SEQ ID NO: 1703782 - DNA, 15 bp, Homo sapiens
gcccagcacttcacg

SEQ ID NO: 1703783 - DNA, 15 bp, Homo sapiens
cccagcacttcacgc

SEQ ID NO: 1703784 - DNA, 15 bp, Homo sapiens
ccagcacttcacgca

SEQ ID NO: 1703785 - DNA, 15 bp, Homo sapiens
cagcacttcacgcat

SEQ ID NO: 1703786 - DNA, 15 bp, Homo sapiens
agcacttcacgcatc

SEQ ID NO: 1703787 - DNA, 15 bp, Homo sapiens
gcacttcacgcatca

SEQ ID NO: 1703788 - DNA, 15 bp, Homo sapiens
cacttcacgcatcag

SEQ ID NO: 1703789 - DNA, 15 bp, Homo sapiens
acttcacgcatcagt

SEQ ID NO: 1703790 - DNA, 15 bp, Homo sapiens
cttcacgcatcagtt

SEQ ID NO: 1703791 - DNA, 15 bp, Homo sapiens
ttcacgcatcagttt

SEQ ID NO: 1703792 - DNA, 15 bp, Homo sapiens
tcacgcatcagtttt

SEQ ID NO: 1703793 - DNA, 15 bp, Homo sapiens
cacgcatcagttttt

SEQ ID NO: 1703794 - DNA, 15 bp, Homo sapiens
acgcatcagtttttc

SEQ ID NO: 1703795 - DNA, 15 bp, Homo sapiens
cgcatcagtttttca

SEQ ID NO: 1703796 - DNA, 15 bp, Homo sapiens
gcatcagtttttcaa

SEQ ID NO: 1703797 - DNA, 15 bp, Homo sapiens
catcagtttttcaag

SEQ ID NO: 1703798 - DNA, 15 bp, Homo sapiens
atcagtttttcaaga

SEQ ID NO: 1703799 - DNA, 15 bp, Homo sapiens
tcagtttttcaagac

SEQ ID NO: 1703800 - DNA, 15 bp, Homo sapiens
cagtttttcaagaca

SEQ ID NO: 1703801 - DNA, 15 bp, Homo sapiens
agtttttcaagacag

SEQ ID NO: 1703802 - DNA, 15 bp, Homo sapiens
gtttttcaagacaga

SEQ ID NO: 1703803 - DNA, 15 bp, Homo sapiens
tttttcaagacagat

SEQ ID NO: 1703804 - DNA, 15 bp, Homo sapiens
ttttcaagacagatc

SEQ ID NO: 1703805 - DNA, 15 bp, Homo sapiens
tttcaagacagatca

SEQ ID NO: 1703806 - DNA, 15 bp, Homo sapiens
ttcaagacagatcat

SEQ ID NO: 1703807 - DNA, 15 bp, Homo sapiens
tcaagacagatcata

SEQ ID NO: 1703808 - DNA, 15 bp, Homo sapiens
caagacagatcataa

SEQ ID NO: 1703809 - DNA, 15 bp, Homo sapiens
aagacagatcataag

SEQ ID NO: 1703810 - DNA, 15 bp, Homo sapiens
agacagatcataagc

SEQ ID NO: 1703811 - DNA, 15 bp, Homo sapiens
gacagatcataagcg

SEQ ID NO: 1703812 - DNA, 15 bp, Homo sapiens
acagatcataagcga

SEQ ID NO: 1703813 - DNA, 15 bp, Homo sapiens
cagatcataagcgag

SEQ ID NO: 1703814 - DNA, 15 bp, Homo sapiens
agatcataagcgagg

SEQ ID NO: 1703815 - DNA, 15 bp, Homo sapiens
gatcataagcgaggg

SEQ ID NO: 1703816 - DNA, 15 bp, Homo sapiens
atcataagcgagggc

SEQ ID NO: 1703817 - DNA, 15 bp, Homo sapiens
tcataagcgagggcc

SEQ ID NO: 1703818 - DNA, 15 bp, Homo sapiens
cataagcgagggcca

SEQ ID NO: 1703819 - DNA, 15 bp, Homo sapiens
ataagcgagggccag

SEQ ID NO: 1703820 - DNA, 15 bp, Homo sapiens
taagcgagggccagc

SEQ ID NO: 1703821 - DNA, 15 bp, Homo sapiens
aagcgagggccagct

SEQ ID NO: 1703822 - DNA, 15 bp, Homo sapiens
agcgagggccagctt

SEQ ID NO: 1703823 - DNA, 15 bp, Homo sapiens
gcgagggccagcttt

SEQ ID NO: 1703824 - DNA, 15 bp, Homo sapiens
cgagggccagctttc

SEQ ID NO: 1703825 - DNA, 15 bp, Homo sapiens
gagggccagctttca

SEQ ID NO: 1703826 - DNA, 15 bp, Homo sapiens
agggccagctttcac

SEQ ID NO: 1703827 - DNA, 15 bp, Homo sapiens
gggccagctttcacc

SEQ ID NO: 1703828 - DNA, 15 bp, Homo sapiens
ggccagctttcacca

SEQ ID NO: 1703829 - DNA, 15 bp, Homo sapiens
gccagctttcaccaa

SEQ ID NO: 1703830 - DNA, 15 bp, Homo sapiens
ccagctttcaccaac

SEQ ID NO: 1703831 - DNA, 15 bp, Homo sapiens
cagctttcaccaacg

SEQ ID NO: 1703832 - DNA, 15 bp, Homo sapiens
agctttcaccaacgg

SEQ ID NO: 1703833 - DNA, 15 bp, Homo sapiens
gctttcaccaacggg

SEQ ID NO: 1703834 - DNA, 15 bp, Homo sapiens
ctttcaccaacgggc

SEQ ID NO: 1703835 - DNA, 15 bp, Homo sapiens
tttcaccaacgggct

SEQ ID NO: 1703836 - DNA, 15 bp, Homo sapiens
ttcaccaacgggctg

SEQ ID NO: 1703837 - DNA, 15 bp, Homo sapiens
tcaccaacgggctgg

SEQ ID NO: 1703838 - DNA, 15 bp, Homo sapiens
caccaacgggctggg

SEQ ID NO: 1703839 - DNA, 15 bp, Homo sapiens
accaacgggctgggc

SEQ ID NO: 1703840 - DNA, 15 bp, Homo sapiens
ccaacgggctgggcc

SEQ ID NO: 1703841 - DNA, 15 bp, Homo sapiens
caacgggctgggcca

SEQ ID NO: 1703842 - DNA, 15 bp, Homo sapiens
aacgggctgggccat

SEQ ID NO: 1703843 - DNA, 15 bp, Homo sapiens
acgggctgggccatg

SEQ ID NO: 1703844 - DNA, 15 bp, Homo sapiens
cgggctgggccatgg

SEQ ID NO: 1703845 - DNA, 15 bp, Homo sapiens
gggctgggccatggg

SEQ ID NO: 1703846 - DNA, 15 bp, Homo sapiens
ggctgggccatgggg

SEQ ID NO: 1703847 - DNA, 15 bp, Homo sapiens
gctgggccatggggt

SEQ ID NO: 1703848 - DNA, 15 bp, Homo sapiens
ctgggccatggggta

SEQ ID NO: 1703849 - DNA, 15 bp, Homo sapiens
tgggccatggggtaa

SEQ ID NO: 1703850 - DNA, 15 bp, Homo sapiens
gggccatggggtaag

SEQ ID NO: 1703851 - DNA, 15 bp, Homo sapiens
ggccatggggtaaga

SEQ ID NO: 1703852 - DNA, 15 bp, Homo sapiens
gccatggggtaagat

SEQ ID NO: 1703853 - DNA, 15 bp, Homo sapiens
ccatggggtaagata

SEQ ID NO: 1703854 - DNA, 15 bp, Homo sapiens
catggggtaagatag

SEQ ID NO: 1703855 - DNA, 15 bp, Homo sapiens
atggggtaagataga

SEQ ID NO: 1703856 - DNA, 15 bp, Homo sapiens
tggggtaagatagag

SEQ ID NO: 1703857 - DNA, 15 bp, Homo sapiens
ggggtaagatagagt

SEQ ID NO: 1703858 - DNA, 15 bp, Homo sapiens
gggtaagatagagtt

SEQ ID NO: 1703859 - DNA, 15 bp, Homo sapiens
ggtaagatagagtta

SEQ ID NO: 1703860 - DNA, 15 bp, Homo sapiens
gtaagatagagttaa

SEQ ID NO: 1703861 - DNA, 15 bp, Homo sapiens
taagatagagttaat

SEQ ID NO: 1703862 - DNA, 15 bp, Homo sapiens
aagatagagttaata

SEQ ID NO: 1703863 - DNA, 15 bp, Homo sapiens
agatagagttaatat

SEQ ID NO: 1703864 - DNA, 15 bp, Homo sapiens
gatagagttaatatc

SEQ ID NO: 1703865 - DNA, 15 bp, Homo sapiens
atagagttaatatct

SEQ ID NO: 1703866 - DNA, 15 bp, Homo sapiens
tagagttaatatctt

SEQ ID NO: 1703867 - DNA, 15 bp, Homo sapiens
agagttaatatctta

SEQ ID NO: 1703868 - DNA, 15 bp, Homo sapiens
gagttaatatcttag

SEQ ID NO: 1703869 - DNA, 15 bp, Homo sapiens
agttaatatcttaga

SEQ ID NO: 1703870 - DNA, 15 bp, Homo sapiens
gttaatatcttagag

SEQ ID NO: 1703871 - DNA, 15 bp, Homo sapiens
ttaatatcttagagt

SEQ ID NO: 1703872 - DNA, 15 bp, Homo sapiens
taatatcttagagtt

SEQ ID NO: 1703873 - DNA, 15 bp, Homo sapiens
aatatcttagagtta

SEQ ID NO: 1703874 - DNA, 15 bp, Homo sapiens
atatcttagagttag

SEQ ID NO: 1703875 - DNA, 15 bp, Homo sapiens
tatcttagagttagt

SEQ ID NO: 1703876 - DNA, 15 bp, Homo sapiens
atcttagagttagta

SEQ ID NO: 1703877 - DNA, 15 bp, Homo sapiens
tcttagagttagtaa

SEQ ID NO: 1703878 - DNA, 15 bp, Homo sapiens
cttagagttagtaaa

SEQ ID NO: 1703879 - DNA, 15 bp, Homo sapiens
ttagagttagtaaaa

SEQ ID NO: 1703880 - DNA, 15 bp, Homo sapiens
tagagttagtaaaat

SEQ ID NO: 1703881 - DNA, 15 bp, Homo sapiens
agagttagtaaaatt

SEQ ID NO: 1703882 - DNA, 15 bp, Homo sapiens
gagttagtaaaatta

SEQ ID NO: 1703883 - DNA, 15 bp, Homo sapiens
agttagtaaaattat

SEQ ID NO: 1703884 - DNA, 15 bp, Homo sapiens
gttagtaaaattata

SEQ ID NO: 1703885 - DNA, 15 bp, Homo sapiens
ttagtaaaattatac

SEQ ID NO: 1703886 - DNA, 15 bp, Homo sapiens
tagtaaaattatacc

SEQ ID NO: 1703887 - DNA, 15 bp, Homo sapiens
agtaaaattatacca

SEQ ID NO: 1703888 - DNA, 15 bp, Homo sapiens
gtaaaattataccaa

SEQ ID NO: 1703889 - DNA, 15 bp, Homo sapiens
taaaattataccaaa

SEQ ID NO: 1703890 - DNA, 15 bp, Homo sapiens
aaaattataccaaat

SEQ ID NO: 1703891 - DNA, 15 bp, Homo sapiens
aaattataccaaatc

SEQ ID NO: 1703892 - DNA, 15 bp, Homo sapiens
aattataccaaatca

SEQ ID NO: 1703893 - DNA, 15 bp, Homo sapiens
attataccaaatcat

SEQ ID NO: 1703894 - DNA, 15 bp, Homo sapiens
ttataccaaatcata

SEQ ID NO: 1703895 - DNA, 15 bp, Homo sapiens
tataccaaatcatag

SEQ ID NO: 1703896 - DNA, 15 bp, Homo sapiens
ataccaaatcatagt

SEQ ID NO: 1703897 - DNA, 15 bp, Homo sapiens
taccaaatcatagtc

SEQ ID NO: 1703898 - DNA, 15 bp, Homo sapiens
accaaatcatagtca

SEQ ID NO: 1703899 - DNA, 15 bp, Homo sapiens
ccaaatcatagtcaa

SEQ ID NO: 1703900 - DNA, 15 bp, Homo sapiens
caaatcatagtcaag

SEQ ID NO: 1703901 - DNA, 15 bp, Homo sapiens
aaatcatagtcaagg

SEQ ID NO: 1703902 - DNA, 15 bp, Homo sapiens
aatcatagtcaaggg

SEQ ID NO: 1703903 - DNA, 15 bp, Homo sapiens
atcatagtcaagggc

SEQ ID NO: 1703904 - DNA, 15 bp, Homo sapiens
tcatagtcaagggct

SEQ ID NO: 1703905 - DNA, 15 bp, Homo sapiens
catagtcaagggcta

SEQ ID NO: 1703906 - DNA, 15 bp, Homo sapiens
atagtcaagggctaa

SEQ ID NO: 1703907 - DNA, 15 bp, Homo sapiens
tagtcaagggctaac

SEQ ID NO: 1703908 - DNA, 15 bp, Homo sapiens
agtcaagggctaaca

SEQ ID NO: 1703909 - DNA, 15 bp, Homo sapiens
gtcaagggctaacat

SEQ ID NO: 1703910 - DNA, 15 bp, Homo sapiens
tcaagggctaacatt

SEQ ID NO: 1703911 - DNA, 15 bp, Homo sapiens
caagggctaacatta

SEQ ID NO: 1703912 - DNA, 15 bp, Homo sapiens
aagggctaacattaa

SEQ ID NO: 1703913 - DNA, 15 bp, Homo sapiens
agggctaacattaaa

SEQ ID NO: 1703914 - DNA, 15 bp, Homo sapiens
gggctaacattaaag

SEQ ID NO: 1703915 - DNA, 15 bp, Homo sapiens
ggctaacattaaagg

SEQ ID NO: 1703916 - DNA, 15 bp, Homo sapiens
gctaacattaaagga

SEQ ID NO: 1703917 - DNA, 15 bp, Homo sapiens
ctaacattaaaggag

SEQ ID NO: 1703918 - DNA, 15 bp, Homo sapiens
taacattaaaggaga

SEQ ID NO: 1703919 - DNA, 15 bp, Homo sapiens
aacattaaaggagat

SEQ ID NO: 1703920 - DNA, 15 bp, Homo sapiens
acattaaaggagata

SEQ ID NO: 1703921 - DNA, 15 bp, Homo sapiens
cattaaaggagatat

SEQ ID NO: 1703922 - DNA, 15 bp, Homo sapiens
attaaaggagatata

SEQ ID NO: 1703923 - DNA, 15 bp, Homo sapiens
ttaaaggagatatac

SEQ ID NO: 1703924 - DNA, 15 bp, Homo sapiens
taaaggagatataca

SEQ ID NO: 1703925 - DNA, 15 bp, Homo sapiens
aaaggagatatacag

SEQ ID NO: 1703926 - DNA, 15 bp, Homo sapiens
aaggagatatacaga

SEQ ID NO: 1703927 - DNA, 15 bp, Homo sapiens
aggagatatacagat

SEQ ID NO: 1703928 - DNA, 15 bp, Homo sapiens
ggagatatacagata

SEQ ID NO: 1703929 - DNA, 15 bp, Homo sapiens
gagatatacagatag

SEQ ID NO: 1703930 - DNA, 15 bp, Homo sapiens
agatatacagataga

SEQ ID NO: 1703931 - DNA, 15 bp, Homo sapiens
gatatacagatagat

SEQ ID NO: 1703932 - DNA, 15 bp, Homo sapiens
atatacagatagata

SEQ ID NO: 1703933 - DNA, 15 bp, Homo sapiens
tatacagatagatag

SEQ ID NO: 1703934 - DNA, 15 bp, Homo sapiens
atacagatagataga

SEQ ID NO: 1703935 - DNA, 15 bp, Homo sapiens
tacagatagatagat

SEQ ID NO: 1703936 - DNA, 15 bp, Homo sapiens
acagatagatagatc

SEQ ID NO: 1703937 - DNA, 15 bp, Homo sapiens
cagatagatagatcc

SEQ ID NO: 1703938 - DNA, 15 bp, Homo sapiens
agatagatagatcca

SEQ ID NO: 1703939 - DNA, 15 bp, Homo sapiens
gatagatagatccaa

SEQ ID NO: 1703940 - DNA, 15 bp, Homo sapiens
atagatagatccaaa

SEQ ID NO: 1703941 - DNA, 15 bp, Homo sapiens
tagatagatccaaat

SEQ ID NO: 1703942 - DNA, 15 bp, Homo sapiens
agatagatccaaata

SEQ ID NO: 1703943 - DNA, 15 bp, Homo sapiens
gatagatccaaataa

SEQ ID NO: 1703944 - DNA, 15 bp, Homo sapiens
atagatccaaataac

SEQ ID NO: 1703945 - DNA, 15 bp, Homo sapiens
tagatccaaataact

SEQ ID NO: 1703946 - DNA, 15 bp, Homo sapiens
agatccaaataactt

SEQ ID NO: 1703947 - DNA, 15 bp, Homo sapiens
gatccaaataactta

SEQ ID NO: 1703948 - DNA, 15 bp, Homo sapiens
atccaaataacttat

SEQ ID NO: 1703949 - DNA, 15 bp, Homo sapiens
tccaaataacttatc

SEQ ID NO: 1703950 - DNA, 15 bp, Homo sapiens
ccaaataacttatcc

SEQ ID NO: 1703951 - DNA, 15 bp, Homo sapiens
caaataacttatcca

SEQ ID NO: 1703952 - DNA, 15 bp, Homo sapiens
aaataacttatccac

SEQ ID NO: 1703953 - DNA, 15 bp, Homo sapiens
aataacttatccact

SEQ ID NO: 1703954 - DNA, 15 bp, Homo sapiens
ataacttatccactt

SEQ ID NO: 1703955 - DNA, 15 bp, Homo sapiens
taacttatccacttt

SEQ ID NO: 1703956 - DNA, 15 bp, Homo sapiens
aacttatccactttt

SEQ ID NO: 1703957 - DNA, 15 bp, Homo sapiens
acttatccacttttt

SEQ ID NO: 1703958 - DNA, 15 bp, Homo sapiens
cttatccactttttt

SEQ ID NO: 1703959 - DNA, 15 bp, Homo sapiens
ttatccacttttttt

SEQ ID NO: 1703960 - DNA, 15 bp, Homo sapiens
tatccacttttttta

SEQ ID NO: 1703961 - DNA, 15 bp, Homo sapiens
atccactttttttaa

SEQ ID NO: 1703962 - DNA, 15 bp, Homo sapiens
tccactttttttaaa

SEQ ID NO: 1703963 - DNA, 15 bp, Homo sapiens
ccactttttttaaaa

SEQ ID NO: 1703964 - DNA, 15 bp, Homo sapiens
cactttttttaaaaa

SEQ ID NO: 1703965 - DNA, 15 bp, Homo sapiens
actttttttaaaaag

SEQ ID NO: 1703966 - DNA, 15 bp, Homo sapiens
ctttttttaaaaaga

SEQ ID NO: 1703967 - DNA, 15 bp, Homo sapiens
tttttttaaaaagaa

SEQ ID NO: 1703968 - DNA, 15 bp, Homo sapiens
ttttttaaaaagaag

SEQ ID NO: 1703969 - DNA, 15 bp, Homo sapiens
tttttaaaaagaagt

SEQ ID NO: 1703970 - DNA, 15 bp, Homo sapiens
ttttaaaaagaagtc

SEQ ID NO: 1703971 - DNA, 15 bp, Homo sapiens
tttaaaaagaagtct

SEQ ID NO: 1703972 - DNA, 15 bp, Homo sapiens
ttaaaaagaagtctt

SEQ ID NO: 1703973 - DNA, 15 bp, Homo sapiens
taaaaagaagtctta

SEQ ID NO: 1703974 - DNA, 15 bp, Homo sapiens
aaaaagaagtcttat

SEQ ID NO: 1703975 - DNA, 15 bp, Homo sapiens
aaaagaagtcttatc

SEQ ID NO: 1703976 - DNA, 15 bp, Homo sapiens
aaagaagtcttatct

SEQ ID NO: 1703977 - DNA, 15 bp, Homo sapiens
aagaagtcttatcta

SEQ ID NO: 1703978 - DNA, 15 bp, Homo sapiens
agaagtcttatctat

SEQ ID NO: 1703979 - DNA, 15 bp, Homo sapiens
gaagtcttatctata

SEQ ID NO: 1703980 - DNA, 15 bp, Homo sapiens
aagtcttatctataa

SEQ ID NO: 1703981 - DNA, 15 bp, Homo sapiens
agtcttatctataaa

SEQ ID NO: 1703982 - DNA, 15 bp, Homo sapiens
gtcttatctataaaa

SEQ ID NO: 1703983 - DNA, 15 bp, Homo sapiens
tcttatctataaaaa

SEQ ID NO: 1703984 - DNA, 15 bp, Homo sapiens
cttatctataaaaac

SEQ ID NO: 1703985 - DNA, 15 bp, Homo sapiens
ttatctataaaaacc

SEQ ID NO: 1703986 - DNA, 15 bp, Homo sapiens
tatctataaaaacct

SEQ ID NO: 1703987 - DNA, 15 bp, Homo sapiens
atctataaaaacctt

SEQ ID NO: 1703988 - DNA, 15 bp, Homo sapiens
tctataaaaacctta

SEQ ID NO: 1703989 - DNA, 15 bp, Homo sapiens
ctataaaaaccttaa

SEQ ID NO: 1703990 - DNA, 15 bp, Homo sapiens
tataaaaaccttaaa

SEQ ID NO: 1703991 - DNA, 15 bp, Homo sapiens
ataaaaaccttaaag

SEQ ID NO: 1703992 - DNA, 15 bp, Homo sapiens
taaaaaccttaaagg

SEQ ID NO: 1703993 - DNA, 15 bp, Homo sapiens
aaaaaccttaaagga

SEQ ID NO: 1703994 - DNA, 15 bp, Homo sapiens
aaaaccttaaaggaa

SEQ ID NO: 1703995 - DNA, 15 bp, Homo sapiens
aaaccttaaaggaat

SEQ ID NO: 1703996 - DNA, 15 bp, Homo sapiens
aaccttaaaggaatt

SEQ ID NO: 1703997 - DNA, 15 bp, Homo sapiens
accttaaaggaattt

SEQ ID NO: 1703998 - DNA, 15 bp, Homo sapiens
ccttaaaggaatttt

SEQ ID NO: 1703999 - DNA, 15 bp, Homo sapiens
cttaaaggaattttc

SEQ ID NO: 1704000 - DNA, 15 bp, Homo sapiens
ttaaaggaattttcc

SEQ ID NO: 1704001 - DNA, 15 bp, Homo sapiens
taaaggaattttcca

SEQ ID NO: 1704002 - DNA, 15 bp, Homo sapiens
aaaggaattttccat

SEQ ID NO: 1704003 - DNA, 15 bp, Homo sapiens
aaggaattttccatt

SEQ ID NO: 1704004 - DNA, 15 bp, Homo sapiens
aggaattttccattt

SEQ ID NO: 1704005 - DNA, 15 bp, Homo sapiens
ggaattttccattta

SEQ ID NO: 1704006 - DNA, 15 bp, Homo sapiens
gaattttccatttac

SEQ ID NO: 1704007 - DNA, 15 bp, Homo sapiens
aattttccatttact

SEQ ID NO: 1704008 - DNA, 15 bp, Homo sapiens
attttccatttactt

SEQ ID NO: 1704009 - DNA, 15 bp, Homo sapiens
ttttccatttacttc

SEQ ID NO: 1704010 - DNA, 15 bp, Homo sapiens
tttccatttacttca

SEQ ID NO: 1704011 - DNA, 15 bp, Homo sapiens
ttccatttacttcac

SEQ ID NO: 1704012 - DNA, 15 bp, Homo sapiens
tccatttacttcact

SEQ ID NO: 1704013 - DNA, 15 bp, Homo sapiens
ccatttacttcactg

SEQ ID NO: 1704014 - DNA, 15 bp, Homo sapiens
catttacttcactgg

SEQ ID NO: 1704015 - DNA, 15 bp, Homo sapiens
atttacttcactggt

SEQ ID NO: 1704016 - DNA, 15 bp, Homo sapiens
tttacttcactggtc

SEQ ID NO: 1704017 - DNA, 15 bp, Homo sapiens
ttacttcactggtct

SEQ ID NO: 1704018 - DNA, 15 bp, Homo sapiens
tacttcactggtcta

SEQ ID NO: 1704019 - DNA, 15 bp, Homo sapiens
acttcactggtctag

SEQ ID NO: 1704020 - DNA, 15 bp, Homo sapiens
cttcactggtctagt

SEQ ID NO: 1704021 - DNA, 15 bp, Homo sapiens
ttcactggtctagta

SEQ ID NO: 1704022 - DNA, 15 bp, Homo sapiens
tcactggtctagtaa

SEQ ID NO: 1704023 - DNA, 15 bp, Homo sapiens
cactggtctagtaaa

SEQ ID NO: 1704024 - DNA, 15 bp, Homo sapiens
actggtctagtaaaa

SEQ ID NO: 1704025 - DNA, 15 bp, Homo sapiens
ctggtctagtaaaat

SEQ ID NO: 1704026 - DNA, 15 bp, Homo sapiens
tggtctagtaaaatt

SEQ ID NO: 1704027 - DNA, 15 bp, Homo sapiens
ggtctagtaaaatta

SEQ ID NO: 1704028 - DNA, 15 bp, Homo sapiens
gtctagtaaaattat

SEQ ID NO: 1704029 - DNA, 15 bp, Homo sapiens
tctagtaaaattata

SEQ ID NO: 1704030 - DNA, 15 bp, Homo sapiens
ctagtaaaattatac

SEQ ID NO: 1704031 - DNA, 15 bp, Homo sapiens
tagtaaaattataca

SEQ ID NO: 1704032 - DNA, 15 bp, Homo sapiens
agtaaaattatacac

SEQ ID NO: 1704033 - DNA, 15 bp, Homo sapiens
gtaaaattatacaca

SEQ ID NO: 1704034 - DNA, 15 bp, Homo sapiens
taaaattatacacac

SEQ ID NO: 1704035 - DNA, 15 bp, Homo sapiens
aaaattatacacaca

SEQ ID NO: 1704036 - DNA, 15 bp, Homo sapiens
aaattatacacacac

SEQ ID NO: 1704037 - DNA, 15 bp, Homo sapiens
aattatacacacaca

SEQ ID NO: 1704038 - DNA, 15 bp, Homo sapiens
attatacacacacac

SEQ ID NO: 1704039 - DNA, 15 bp, Homo sapiens
ttatacacacacaca

SEQ ID NO: 1704040 - DNA, 15 bp, Homo sapiens
tatacacacacacag

SEQ ID NO: 1704041 - DNA, 15 bp, Homo sapiens
atacacacacacaga

SEQ ID NO: 1704042 - DNA, 15 bp, Homo sapiens
tacacacacacagac

SEQ ID NO: 1704043 - DNA, 15 bp, Homo sapiens
cacacacacagacat

SEQ ID NO: 1704044 - DNA, 15 bp, Homo sapiens
acacacacagacatg

SEQ ID NO: 1704045 - DNA, 15 bp, Homo sapiens
cacacacagacatgc

SEQ ID NO: 1704046 - DNA, 15 bp, Homo sapiens
acacacagacatgca

SEQ ID NO: 1704047 - DNA, 15 bp, Homo sapiens
cacacagacatgcac

SEQ ID NO: 1704048 - DNA, 15 bp, Homo sapiens
acacagacatgcaca

SEQ ID NO: 1704049 - DNA, 15 bp, Homo sapiens
cacagacatgcacac

SEQ ID NO: 1704050 - DNA, 15 bp, Homo sapiens
acagacatgcacaca

SEQ ID NO: 1704051 - DNA, 15 bp, Homo sapiens
cagacatgcacacac

SEQ ID NO: 1704052 - DNA, 15 bp, Homo sapiens
agacatgcacacaca

SEQ ID NO: 1704053 - DNA, 15 bp, Homo sapiens
gacatgcacacacat

SEQ ID NO: 1704054 - DNA, 15 bp, Homo sapiens
catgcacacacatat

SEQ ID NO: 1704055 - DNA, 15 bp, Homo sapiens
atgcacacacatata

SEQ ID NO: 1704056 - DNA, 15 bp, Homo sapiens
tgcacacacatatat

SEQ ID NO: 1704057 - DNA, 15 bp, Homo sapiens
gcacacacatatata

SEQ ID NO: 1704058 - DNA, 15 bp, Homo sapiens
cacacacatatataa

SEQ ID NO: 1704059 - DNA, 15 bp, Homo sapiens
acacacatatataaa

SEQ ID NO: 1704060 - DNA, 15 bp, Homo sapiens
cacacatatataaac

SEQ ID NO: 1704061 - DNA, 15 bp, Homo sapiens
acacatatataaaca

SEQ ID NO: 1704062 - DNA, 15 bp, Homo sapiens
cacatatataaacat

SEQ ID NO: 1704063 - DNA, 15 bp, Homo sapiens
acatatataaacatt

SEQ ID NO: 1704064 - DNA, 15 bp, Homo sapiens
catatataaacattc

SEQ ID NO: 1704065 - DNA, 15 bp, Homo sapiens
atatataaacattca

SEQ ID NO: 1704066 - DNA, 15 bp, Homo sapiens
tatataaacattcac

SEQ ID NO: 1704067 - DNA, 15 bp, Homo sapiens
atataaacattcaca

SEQ ID NO: 1704068 - DNA, 15 bp, Homo sapiens
tataaacattcacac

SEQ ID NO: 1704069 - DNA, 15 bp, Homo sapiens
ataaacattcacaca

SEQ ID NO: 1704070 - DNA, 15 bp, Homo sapiens
taaacattcacacac

SEQ ID NO: 1704071 - DNA, 15 bp, Homo sapiens
aaacattcacacaca

SEQ ID NO: 1704072 - DNA, 15 bp, Homo sapiens
aacattcacacacat

SEQ ID NO: 1704073 - DNA, 15 bp, Homo sapiens
acattcacacacata

SEQ ID NO: 1704074 - DNA, 15 bp, Homo sapiens
cattcacacacatac

SEQ ID NO: 1704075 - DNA, 15 bp, Homo sapiens
attcacacacataca

SEQ ID NO: 1704076 - DNA, 15 bp, Homo sapiens
ttcacacacatacat

SEQ ID NO: 1704077 - DNA, 15 bp, Homo sapiens
tcacacacatacata

SEQ ID NO: 1704078 - DNA, 15 bp, Homo sapiens
cacacacatacatat

SEQ ID NO: 1704079 - DNA, 15 bp, Homo sapiens
acacacatacatatg

SEQ ID NO: 1704080 - DNA, 15 bp, Homo sapiens
cacacatacatatgt

SEQ ID NO: 1704081 - DNA, 15 bp, Homo sapiens
acacatacatatgta

SEQ ID NO: 1704082 - DNA, 15 bp, Homo sapiens
cacatacatatgtac

SEQ ID NO: 1704083 - DNA, 15 bp, Homo sapiens
acatacatatgtaca

SEQ ID NO: 1704084 - DNA, 15 bp, Homo sapiens
catacatatgtacag

SEQ ID NO: 1704085 - DNA, 15 bp, Homo sapiens
atacatatgtacagg

SEQ ID NO: 1704086 - DNA, 15 bp, Homo sapiens
tacatatgtacaggt

SEQ ID NO: 1704087 - DNA, 15 bp, Homo sapiens
acatatgtacaggta

SEQ ID NO: 1704088 - DNA, 15 bp, Homo sapiens
catatgtacaggtat

SEQ ID NO: 1704089 - DNA, 15 bp, Homo sapiens
atatgtacaggtatt

SEQ ID NO: 1704090 - DNA, 15 bp, Homo sapiens
tatgtacaggtattg

SEQ ID NO: 1704091 - DNA, 15 bp, Homo sapiens
atgtacaggtattgt

SEQ ID NO: 1704092 - DNA, 15 bp, Homo sapiens
tgtacaggtattgtt

SEQ ID NO: 1704093 - DNA, 15 bp, Homo sapiens
gtacaggtattgtta

SEQ ID NO: 1704094 - DNA, 15 bp, Homo sapiens
tacaggtattgttat

SEQ ID NO: 1704095 - DNA, 15 bp, Homo sapiens
acaggtattgttatt

SEQ ID NO: 1704096 - DNA, 15 bp, Homo sapiens
caggtattgttattt

SEQ ID NO: 1704097 - DNA, 15 bp, Homo sapiens
aggtattgttatttg

SEQ ID NO: 1704098 - DNA, 15 bp, Homo sapiens
ggtattgttatttgt

SEQ ID NO: 1704099 - DNA, 15 bp, Homo sapiens
gtattgttatttgta

SEQ ID NO: 1704100 - DNA, 15 bp, Homo sapiens
tattgttatttgtaa

SEQ ID NO: 1704101 - DNA, 15 bp, Homo sapiens
attgttatttgtaat

SEQ ID NO: 1704102 - DNA, 15 bp, Homo sapiens
ttgttatttgtaatt

SEQ ID NO: 1704103 - DNA, 15 bp, Homo sapiens
tgttatttgtaattt

SEQ ID NO: 1704104 - DNA, 15 bp, Homo sapiens
gttatttgtaatttg

SEQ ID NO: 1704105 - DNA, 15 bp, Homo sapiens
ttatttgtaatttga

SEQ ID NO: 1704106 - DNA, 15 bp, Homo sapiens
tatttgtaatttgac

SEQ ID NO: 1704107 - DNA, 15 bp, Homo sapiens
atttgtaatttgacc

SEQ ID NO: 1704108 - DNA, 15 bp, Homo sapiens
tttgtaatttgaccc

SEQ ID NO: 1704109 - DNA, 15 bp, Homo sapiens
ttgtaatttgaccct

SEQ ID NO: 1704110 - DNA, 15 bp, Homo sapiens
tgtaatttgaccctt

SEQ ID NO: 1704111 - DNA, 15 bp, Homo sapiens
gtaatttgacccttg

SEQ ID NO: 1704112 - DNA, 15 bp, Homo sapiens
taatttgacccttgt

SEQ ID NO: 1704113 - DNA, 15 bp, Homo sapiens
aatttgacccttgta

SEQ ID NO: 1704114 - DNA, 15 bp, Homo sapiens
atttgacccttgtat

SEQ ID NO: 1704115 - DNA, 15 bp, Homo sapiens
tttgacccttgtatt

SEQ ID NO: 1704116 - DNA, 15 bp, Homo sapiens
ttgacccttgtattt

SEQ ID NO: 1704117 - DNA, 15 bp, Homo sapiens
tgacccttgtatttt

SEQ ID NO: 1704118 - DNA, 15 bp, Homo sapiens
gacccttgtattttt

SEQ ID NO: 1704119 - DNA, 15 bp, Homo sapiens
acccttgtatttttt

SEQ ID NO: 1704120 - DNA, 15 bp, Homo sapiens
cccttgtatttttta

SEQ ID NO: 1704121 - DNA, 15 bp, Homo sapiens
ccttgtattttttag

SEQ ID NO: 1704122 - DNA, 15 bp, Homo sapiens
cttgtattttttagt

SEQ ID NO: 1704123 - DNA, 15 bp, Homo sapiens
ttgtattttttagtt

SEQ ID NO: 1704124 - DNA, 15 bp, Homo sapiens
tgtattttttagttt

SEQ ID NO: 1704125 - DNA, 15 bp, Homo sapiens
gtattttttagttta

SEQ ID NO: 1704126 - DNA, 15 bp, Homo sapiens
tattttttagtttaa

SEQ ID NO: 1704127 - DNA, 15 bp, Homo sapiens
attttttagtttaaa

SEQ ID NO: 1704128 - DNA, 15 bp, Homo sapiens
ttttttagtttaaaa

SEQ ID NO: 1704129 - DNA, 15 bp, Homo sapiens
tttttagtttaaaat

SEQ ID NO: 1704130 - DNA, 15 bp, Homo sapiens
ttttagtttaaaatg

SEQ ID NO: 1704131 - DNA, 15 bp, Homo sapiens
tttagtttaaaatgt

SEQ ID NO: 1704132 - DNA, 15 bp, Homo sapiens
ttagtttaaaatgtt

SEQ ID NO: 1704133 - DNA, 15 bp, Homo sapiens
tagtttaaaatgtta

SEQ ID NO: 1704134 - DNA, 15 bp, Homo sapiens
agtttaaaatgttag

SEQ ID NO: 1704135 - DNA, 15 bp, Homo sapiens
gtttaaaatgttagt

SEQ ID NO: 1704136 - DNA, 15 bp, Homo sapiens
tttaaaatgttagta

SEQ ID NO: 1704137 - DNA, 15 bp, Homo sapiens
ttaaaatgttagtac

SEQ ID NO: 1704138 - DNA, 15 bp, Homo sapiens
taaaatgttagtact

SEQ ID NO: 1704139 - DNA, 15 bp, Homo sapiens
aaaatgttagtactg

SEQ ID NO: 1704140 - DNA, 15 bp, Homo sapiens
aaatgttagtactgc

SEQ ID NO: 1704141 - DNA, 15 bp, Homo sapiens
aatgttagtactgca

SEQ ID NO: 1704142 - DNA, 15 bp, Homo sapiens
atgttagtactgcaa

SEQ ID NO: 1704143 - DNA, 15 bp, Homo sapiens
tgttagtactgcaaa

SEQ ID NO: 1704144 - DNA, 15 bp, Homo sapiens
gttagtactgcaaaa

SEQ ID NO: 1704145 - DNA, 15 bp, Homo sapiens
ttagtactgcaaaat

SEQ ID NO: 1704146 - DNA, 15 bp, Homo sapiens
tagtactgcaaaatg

SEQ ID NO: 1704147 - DNA, 15 bp, Homo sapiens
agtactgcaaaatgt

SEQ ID NO: 1704148 - DNA, 15 bp, Homo sapiens
gtactgcaaaatgtt

SEQ ID NO: 1704149 - DNA, 15 bp, Homo sapiens
tactgcaaaatgtta

SEQ ID NO: 1704150 - DNA, 15 bp, Homo sapiens
actgcaaaatgttat

SEQ ID NO: 1704151 - DNA, 15 bp, Homo sapiens
ctgcaaaatgttatg

SEQ ID NO: 1704152 - DNA, 15 bp, Homo sapiens
tgcaaaatgttatgt

SEQ ID NO: 1704153 - DNA, 15 bp, Homo sapiens
gcaaaatgttatgtc

SEQ ID NO: 1704154 - DNA, 15 bp, Homo sapiens
caaaatgttatgtcc

SEQ ID NO: 1704155 - DNA, 15 bp, Homo sapiens
aaaatgttatgtcct

SEQ ID NO: 1704156 - DNA, 15 bp, Homo sapiens
aaatgttatgtcctc

SEQ ID NO: 1704157 - DNA, 15 bp, Homo sapiens
aatgttatgtcctca

SEQ ID NO: 1704158 - DNA, 15 bp, Homo sapiens
atgttatgtcctcaa

SEQ ID NO: 1704159 - DNA, 15 bp, Homo sapiens
tgttatgtcctcaaa

SEQ ID NO: 1704160 - DNA, 15 bp, Homo sapiens
gttatgtcctcaaaa

SEQ ID NO: 1704161 - DNA, 15 bp, Homo sapiens
ttatgtcctcaaaaa

SEQ ID NO: 1704162 - DNA, 15 bp, Homo sapiens
tatgtcctcaaaaac

SEQ ID NO: 1704163 - DNA, 15 bp, Homo sapiens
atgtcctcaaaaaca

SEQ ID NO: 1704164 - DNA, 15 bp, Homo sapiens
tgtcctcaaaaacac

SEQ ID NO: 1704165 - DNA, 15 bp, Homo sapiens
gtcctcaaaaacaca

SEQ ID NO: 1704166 - DNA, 15 bp, Homo sapiens
tcctcaaaaacacat

SEQ ID NO: 1704167 - DNA, 15 bp, Homo sapiens
cctcaaaaacacatt

SEQ ID NO: 1704168 - DNA, 15 bp, Homo sapiens
ctcaaaaacacattg

SEQ ID NO: 1704169 - DNA, 15 bp, Homo sapiens
tcaaaaacacattgt

SEQ ID NO: 1704170 - DNA, 15 bp, Homo sapiens
caaaaacacattgta

SEQ ID NO: 1704171 - DNA, 15 bp, Homo sapiens
aaaaacacattgtac

SEQ ID NO: 1704172 - DNA, 15 bp, Homo sapiens
aaaacacattgtacc

SEQ ID NO: 1704173 - DNA, 15 bp, Homo sapiens
aaacacattgtacca

SEQ ID NO: 1704174 - DNA, 15 bp, Homo sapiens
aacacattgtaccat

SEQ ID NO: 1704175 - DNA, 15 bp, Homo sapiens
acacattgtaccatg

SEQ ID NO: 1704176 - DNA, 15 bp, Homo sapiens
cacattgtaccatga

SEQ ID NO: 1704177 - DNA, 15 bp, Homo sapiens
acattgtaccatgat

SEQ ID NO: 1704178 - DNA, 15 bp, Homo sapiens
cattgtaccatgatt

SEQ ID NO: 1704179 - DNA, 15 bp, Homo sapiens
attgtaccatgatta

SEQ ID NO: 1704180 - DNA, 15 bp, Homo sapiens
ttgtaccatgattat

SEQ ID NO: 1704181 - DNA, 15 bp, Homo sapiens
tgtaccatgattatg

SEQ ID NO: 1704182 - DNA, 15 bp, Homo sapiens
gtaccatgattatgc

SEQ ID NO: 1704183 - DNA, 15 bp, Homo sapiens
taccatgattatgcc

SEQ ID NO: 1704184 - DNA, 15 bp, Homo sapiens
accatgattatgccg

SEQ ID NO: 1704185 - DNA, 15 bp, Homo sapiens
ccatgattatgccgc

SEQ ID NO: 1704186 - DNA, 15 bp, Homo sapiens
catgattatgccgct

SEQ ID NO: 1704187 - DNA, 15 bp, Homo sapiens
atgattatgccgctt

SEQ ID NO: 1704188 - DNA, 15 bp, Homo sapiens
tgattatgccgcttt

SEQ ID NO: 1704189 - DNA, 15 bp, Homo sapiens
gattatgccgctttc

SEQ ID NO: 1704190 - DNA, 15 bp, Homo sapiens
attatgccgctttca

SEQ ID NO: 1704191 - DNA, 15 bp, Homo sapiens
ttatgccgctttcaa

SEQ ID NO: 1704192 - DNA, 15 bp, Homo sapiens
tatgccgctttcaat

SEQ ID NO: 1704193 - DNA, 15 bp, Homo sapiens
atgccgctttcaata

SEQ ID NO: 1704194 - DNA, 15 bp, Homo sapiens
tgccgctttcaatat

SEQ ID NO: 1704195 - DNA, 15 bp, Homo sapiens
gccgctttcaatatt

SEQ ID NO: 1704196 - DNA, 15 bp, Homo sapiens
ccgctttcaatattg

SEQ ID NO: 1704197 - DNA, 15 bp, Homo sapiens
cgctttcaatattgt

SEQ ID NO: 1704198 - DNA, 15 bp, Homo sapiens
gctttcaatattgta

SEQ ID NO: 1704199 - DNA, 15 bp, Homo sapiens
ctttcaatattgtaa

SEQ ID NO: 1704200 - DNA, 15 bp, Homo sapiens
tttcaatattgtaaa

SEQ ID NO: 1704201 - DNA, 15 bp, Homo sapiens
ttcaatattgtaaag

SEQ ID NO: 1704202 - DNA, 15 bp, Homo sapiens
tcaatattgtaaagt

SEQ ID NO: 1704203 - DNA, 15 bp, Homo sapiens
caatattgtaaagtg

SEQ ID NO: 1704204 - DNA, 15 bp, Homo sapiens
aatattgtaaagtga

SEQ ID NO: 1704205 - DNA, 15 bp, Homo sapiens
atattgtaaagtgag

SEQ ID NO: 1704206 - DNA, 15 bp, Homo sapiens
tattgtaaagtgagg

SEQ ID NO: 1704207 - DNA, 15 bp, Homo sapiens
attgtaaagtgaggt

SEQ ID NO: 1704208 - DNA, 15 bp, Homo sapiens
ttgtaaagtgaggtt

SEQ ID NO: 1704209 - DNA, 15 bp, Homo sapiens
tgtaaagtgaggttt

SEQ ID NO: 1704210 - DNA, 15 bp, Homo sapiens
gtaaagtgaggtttt

SEQ ID NO: 1704211 - DNA, 15 bp, Homo sapiens
taaagtgaggttttt

SEQ ID NO: 1704212 - DNA, 15 bp, Homo sapiens
aaagtgaggtttttg

SEQ ID NO: 1704213 - DNA, 15 bp, Homo sapiens
aagtgaggtttttgc

SEQ ID NO: 1704214 - DNA, 15 bp, Homo sapiens
agtgaggtttttgcc

SEQ ID NO: 1704215 - DNA, 15 bp, Homo sapiens
gtgaggtttttgccg

SEQ ID NO: 1704216 - DNA, 15 bp, Homo sapiens
tgaggtttttgccgc

SEQ ID NO: 1704217 - DNA, 15 bp, Homo sapiens
gaggtttttgccgca

SEQ ID NO: 1704218 - DNA, 15 bp, Homo sapiens
aggtttttgccgcat

SEQ ID NO: 1704219 - DNA, 15 bp, Homo sapiens
ggtttttgccgcatt

SEQ ID NO: 1704220 - DNA, 15 bp, Homo sapiens
gtttttgccgcatta

SEQ ID NO: 1704221 - DNA, 15 bp, Homo sapiens
tttttgccgcattat

SEQ ID NO: 1704222 - DNA, 15 bp, Homo sapiens
ttttgccgcattatt

SEQ ID NO: 1704223 - DNA, 15 bp, Homo sapiens
tttgccgcattatta

SEQ ID NO: 1704224 - DNA, 15 bp, Homo sapiens
ttgccgcattattat

SEQ ID NO: 1704225 - DNA, 15 bp, Homo sapiens
tgccgcattattatt

SEQ ID NO: 1704226 - DNA, 15 bp, Homo sapiens
gccgcattattattt

SEQ ID NO: 1704227 - DNA, 15 bp, Homo sapiens
ccgcattattatttt

SEQ ID NO: 1704228 - DNA, 15 bp, Homo sapiens
cgcattattattttt

SEQ ID NO: 1704229 - DNA, 15 bp, Homo sapiens
gcattattatttttt

SEQ ID NO: 1704230 - DNA, 15 bp, Homo sapiens
cattattattttttg

SEQ ID NO: 1704231 - DNA, 15 bp, Homo sapiens
attattattttttgg

SEQ ID NO: 1704232 - DNA, 15 bp, Homo sapiens
ttattattttttgga

SEQ ID NO: 1704233 - DNA, 15 bp, Homo sapiens
tattattttttggat

SEQ ID NO: 1704234 - DNA, 15 bp, Homo sapiens
attattttttggatt

SEQ ID NO: 1704235 - DNA, 15 bp, Homo sapiens
ttattttttggattt

SEQ ID NO: 1704236 - DNA, 15 bp, Homo sapiens
tattttttggatttc

SEQ ID NO: 1704237 - DNA, 15 bp, Homo sapiens
attttttggatttca

SEQ ID NO: 1704238 - DNA, 15 bp, Homo sapiens
ttttttggatttcaa

SEQ ID NO: 1704239 - DNA, 15 bp, Homo sapiens
tttttggatttcaat

SEQ ID NO: 1704240 - DNA, 15 bp, Homo sapiens
ttttggatttcaata

SEQ ID NO: 1704241 - DNA, 15 bp, Homo sapiens
tttggatttcaatag

SEQ ID NO: 1704242 - DNA, 15 bp, Homo sapiens
ttggatttcaatagc

SEQ ID NO: 1704243 - DNA, 15 bp, Homo sapiens
tggatttcaatagca

SEQ ID NO: 1704244 - DNA, 15 bp, Homo sapiens
ggatttcaatagcat

SEQ ID NO: 1704245 - DNA, 15 bp, Homo sapiens
gatttcaatagcata

SEQ ID NO: 1704246 - DNA, 15 bp, Homo sapiens
atttcaatagcatag

SEQ ID NO: 1704247 - DNA, 15 bp, Homo sapiens
tttcaatagcatagc

SEQ ID NO: 1704248 - DNA, 15 bp, Homo sapiens
ttcaatagcatagct

SEQ ID NO: 1704249 - DNA, 15 bp, Homo sapiens
tcaatagcatagctt

SEQ ID NO: 1704250 - DNA, 15 bp, Homo sapiens
caatagcatagcttc

SEQ ID NO: 1704251 - DNA, 15 bp, Homo sapiens
aatagcatagcttca

SEQ ID NO: 1704252 - DNA, 15 bp, Homo sapiens
atagcatagcttcaa

SEQ ID NO: 1704253 - DNA, 15 bp, Homo sapiens
tagcatagcttcaag

SEQ ID NO: 1704254 - DNA, 15 bp, Homo sapiens
agcatagcttcaagt

SEQ ID NO: 1704255 - DNA, 15 bp, Homo sapiens
gcatagcttcaagtt

SEQ ID NO: 1704256 - DNA, 15 bp, Homo sapiens
catagcttcaagtta

SEQ ID NO: 1704257 - DNA, 15 bp, Homo sapiens
atagcttcaagttat

SEQ ID NO: 1704258 - DNA, 15 bp, Homo sapiens
tagcttcaagttatt

SEQ ID NO: 1704259 - DNA, 15 bp, Homo sapiens
agcttcaagttattc

SEQ ID NO: 1704260 - DNA, 15 bp, Homo sapiens
gcttcaagttattcg

SEQ ID NO: 1704261 - DNA, 15 bp, Homo sapiens
cttcaagttattcgt

SEQ ID NO: 1704262 - DNA, 15 bp, Homo sapiens
ttcaagttattcgta

SEQ ID NO: 1704263 - DNA, 15 bp, Homo sapiens
tcaagttattcgtaa

SEQ ID NO: 1704264 - DNA, 15 bp, Homo sapiens
caagttattcgtaag

SEQ ID NO: 1704265 - DNA, 15 bp, Homo sapiens
aagttattcgtaaga

SEQ ID NO: 1704266 - DNA, 15 bp, Homo sapiens
agttattcgtaagaa

SEQ ID NO: 1704267 - DNA, 15 bp, Homo sapiens
gttattcgtaagaat

SEQ ID NO: 1704268 - DNA, 15 bp, Homo sapiens
ttattcgtaagaatt

SEQ ID NO: 1704269 - DNA, 15 bp, Homo sapiens
tattcgtaagaattt

SEQ ID NO: 1704270 - DNA, 15 bp, Homo sapiens
attcgtaagaatttt

SEQ ID NO: 1704271 - DNA, 15 bp, Homo sapiens
ttcgtaagaattttt

SEQ ID NO: 1704272 - DNA, 15 bp, Homo sapiens
tcgtaagaatttttt

SEQ ID NO: 1704273 - DNA, 15 bp, Homo sapiens
cgtaagaatttttta

SEQ ID NO: 1704274 - DNA, 15 bp, Homo sapiens
gtaagaattttttat

SEQ ID NO: 1704275 - DNA, 15 bp, Homo sapiens
taagaattttttata

SEQ ID NO: 1704276 - DNA, 15 bp, Homo sapiens
aagaattttttataa

SEQ ID NO: 1704277 - DNA, 15 bp, Homo sapiens
agaattttttataaa

SEQ ID NO: 1704278 - DNA, 15 bp, Homo sapiens
gaattttttataaat

SEQ ID NO: 1704279 - DNA, 15 bp, Homo sapiens
aattttttataaata

SEQ ID NO: 1704280 - DNA, 15 bp, Homo sapiens
attttttataaataa

SEQ ID NO: 1704281 - DNA, 15 bp, Homo sapiens
ttttttataaataat

SEQ ID NO: 1704282 - DNA, 15 bp, Homo sapiens
tttttataaataata

SEQ ID NO: 1704283 - DNA, 15 bp, Homo sapiens
ttttataaataatac

SEQ ID NO: 1704284 - DNA, 15 bp, Homo sapiens
tttataaataataca

SEQ ID NO: 1704285 - DNA, 15 bp, Homo sapiens
ttataaataatacat

SEQ ID NO: 1704286 - DNA, 15 bp, Homo sapiens
tataaataatacatt

SEQ ID NO: 1704287 - DNA, 15 bp, Homo sapiens
ataaataatacattt

SEQ ID NO: 1704288 - DNA, 15 bp, Homo sapiens
taaataatacatttt

SEQ ID NO: 1704289 - DNA, 15 bp, Homo sapiens
aaataatacattttt

SEQ ID NO: 1704290 - DNA, 15 bp, Homo sapiens
aataatacattttta

SEQ ID NO: 1704291 - DNA, 15 bp, Homo sapiens
ataatacatttttat

SEQ ID NO: 1704292 - DNA, 15 bp, Homo sapiens
taatacatttttata

SEQ ID NO: 1704293 - DNA, 15 bp, Homo sapiens
aatacatttttatac

SEQ ID NO: 1704294 - DNA, 15 bp, Homo sapiens
atacatttttatact

SEQ ID NO: 1704295 - DNA, 15 bp, Homo sapiens
tacatttttatactt

SEQ ID NO: 1704296 - DNA, 15 bp, Homo sapiens
acatttttatacttt

SEQ ID NO: 1704297 - DNA, 15 bp, Homo sapiens
catttttatactttt

SEQ ID NO: 1704298 - DNA, 15 bp, Homo sapiens
atttttatacttttt

SEQ ID NO: 1704299 - DNA, 15 bp, Homo sapiens
tttttatactttttt

SEQ ID NO: 1704300 - DNA, 15 bp, Homo sapiens
ttttatactttttta

SEQ ID NO: 1704301 - DNA, 15 bp, Homo sapiens
tttatacttttttat

SEQ ID NO: 1704302 - DNA, 15 bp, Homo sapiens
ttatacttttttata

SEQ ID NO: 1704303 - DNA, 15 bp, Homo sapiens
tatacttttttataa

SEQ ID NO: 1704304 - DNA, 15 bp, Homo sapiens
atacttttttataat

SEQ ID NO: 1704305 - DNA, 15 bp, Homo sapiens
tacttttttataatt

SEQ ID NO: 1704306 - DNA, 15 bp, Homo sapiens
acttttttataatta

SEQ ID NO: 1704307 - DNA, 15 bp, Homo sapiens
cttttttataattac

SEQ ID NO: 1704308 - DNA, 15 bp, Homo sapiens
ttttttataattacc

SEQ ID NO: 1704309 - DNA, 15 bp, Homo sapiens
tttttataattacca

SEQ ID NO: 1704310 - DNA, 15 bp, Homo sapiens
ttttataattaccat

SEQ ID NO: 1704311 - DNA, 15 bp, Homo sapiens
tttataattaccata

SEQ ID NO: 1704312 - DNA, 15 bp, Homo sapiens
ttataattaccatat

SEQ ID NO: 1704313 - DNA, 15 bp, Homo sapiens
tataattaccatatc

SEQ ID NO: 1704314 - DNA, 15 bp, Homo sapiens
ataattaccatatca

SEQ ID NO: 1704315 - DNA, 15 bp, Homo sapiens
taattaccatatcat

SEQ ID NO: 1704316 - DNA, 15 bp, Homo sapiens
aattaccatatcatc

SEQ ID NO: 1704317 - DNA, 15 bp, Homo sapiens
attaccatatcatca

SEQ ID NO: 1704318 - DNA, 15 bp, Homo sapiens
ttaccatatcatcat

SEQ ID NO: 1704319 - DNA, 15 bp, Homo sapiens
taccatatcatcata

SEQ ID NO: 1704320 - DNA, 15 bp, Homo sapiens
accatatcatcatag

SEQ ID NO: 1704321 - DNA, 15 bp, Homo sapiens
ccatatcatcatagt

SEQ ID NO: 1704322 - DNA, 15 bp, Homo sapiens
catatcatcatagtg

SEQ ID NO: 1704323 - DNA, 15 bp, Homo sapiens
atatcatcatagtga

SEQ ID NO: 1704324 - DNA, 15 bp, Homo sapiens
tatcatcatagtgaa

SEQ ID NO: 1704325 - DNA, 15 bp, Homo sapiens
atcatcatagtgaag

SEQ ID NO: 1704326 - DNA, 15 bp, Homo sapiens
tcatcatagtgaagt

SEQ ID NO: 1704327 - DNA, 15 bp, Homo sapiens
catcatagtgaagta

SEQ ID NO: 1704328 - DNA, 15 bp, Homo sapiens
atcatagtgaagtat

SEQ ID NO: 1704329 - DNA, 15 bp, Homo sapiens
tcatagtgaagtata

SEQ ID NO: 1704330 - DNA, 15 bp, Homo sapiens
catagtgaagtatat

SEQ ID NO: 1704331 - DNA, 15 bp, Homo sapiens
atagtgaagtatata

SEQ ID NO: 1704332 - DNA, 15 bp, Homo sapiens
tagtgaagtatataa

SEQ ID NO: 1704333 - DNA, 15 bp, Homo sapiens
agtgaagtatataat

SEQ ID NO: 1704334 - DNA, 15 bp, Homo sapiens
gtgaagtatataata

SEQ ID NO: 1704335 - DNA, 15 bp, Homo sapiens
tgaagtatataatat

SEQ ID NO: 1704336 - DNA, 15 bp, Homo sapiens
gaagtatataatata

SEQ ID NO: 1704337 - DNA, 15 bp, Homo sapiens
aagtatataatatat

SEQ ID NO: 1704338 - DNA, 15 bp, Homo sapiens
agtatataatatata

SEQ ID NO: 1704339 - DNA, 15 bp, Homo sapiens
gtatataatatatat

SEQ ID NO: 1704340 - DNA, 15 bp, Homo sapiens
tatataatatatatg

SEQ ID NO: 1704341 - DNA, 15 bp, Homo sapiens
atataatatatatga

SEQ ID NO: 1704342 - DNA, 15 bp, Homo sapiens
tataatatatatgat

SEQ ID NO: 1704343 - DNA, 15 bp, Homo sapiens
ataatatatatgata

SEQ ID NO: 1704344 - DNA, 15 bp, Homo sapiens
taatatatatgatat

SEQ ID NO: 1704345 - DNA, 15 bp, Homo sapiens
aatatatatgatata

SEQ ID NO: 1704346 - DNA, 15 bp, Homo sapiens
atatatatgatataa

SEQ ID NO: 1704347 - DNA, 15 bp, Homo sapiens
tatatatgatataag

SEQ ID NO: 1704348 - DNA, 15 bp, Homo sapiens
atatatgatataagc

SEQ ID NO: 1704349 - DNA, 15 bp, Homo sapiens
tatatgatataagct

SEQ ID NO: 1704350 - DNA, 15 bp, Homo sapiens
atatgatataagctc

SEQ ID NO: 1704351 - DNA, 15 bp, Homo sapiens
tatgatataagctca

SEQ ID NO: 1704352 - DNA, 15 bp, Homo sapiens
atgatataagctcaa

SEQ ID NO: 1704353 - DNA, 15 bp, Homo sapiens
tgatataagctcaat

SEQ ID NO: 1704354 - DNA, 15 bp, Homo sapiens
gatataagctcaata

SEQ ID NO: 1704355 - DNA, 15 bp, Homo sapiens
atataagctcaatat

SEQ ID NO: 1704356 - DNA, 15 bp, Homo sapiens
tataagctcaatata

SEQ ID NO: 1704357 - DNA, 15 bp, Homo sapiens
ataagctcaatatag

SEQ ID NO: 1704358 - DNA, 15 bp, Homo sapiens
taagctcaatatagt

SEQ ID NO: 1704359 - DNA, 15 bp, Homo sapiens
aagctcaatatagta

SEQ ID NO: 1704360 - DNA, 15 bp, Homo sapiens
agctcaatatagtat

SEQ ID NO: 1704361 - DNA, 15 bp, Homo sapiens
gctcaatatagtata

SEQ ID NO: 1704362 - DNA, 15 bp, Homo sapiens
ctcaatatagtatat

SEQ ID NO: 1704363 - DNA, 15 bp, Homo sapiens
tcaatatagtatatt

SEQ ID NO: 1704364 - DNA, 15 bp, Homo sapiens
caatatagtatatta

SEQ ID NO: 1704365 - DNA, 15 bp, Homo sapiens
aatatagtatattaa

SEQ ID NO: 1704366 - DNA, 15 bp, Homo sapiens
atatagtatattaat

SEQ ID NO: 1704367 - DNA, 15 bp, Homo sapiens
tatagtatattaatt

SEQ ID NO: 1704368 - DNA, 15 bp, Homo sapiens
atagtatattaattc

SEQ ID NO: 1704369 - DNA, 15 bp, Homo sapiens
tagtatattaattcc

SEQ ID NO: 1704370 - DNA, 15 bp, Homo sapiens
agtatattaattccg

SEQ ID NO: 1704371 - DNA, 15 bp, Homo sapiens
gtatattaattccgt

SEQ ID NO: 1704372 - DNA, 15 bp, Homo sapiens
tatattaattccgtt

SEQ ID NO: 1704373 - DNA, 15 bp, Homo sapiens
atattaattccgtta

SEQ ID NO: 1704374 - DNA, 15 bp, Homo sapiens
tattaattccgttaa

SEQ ID NO: 1704375 - DNA, 15 bp, Homo sapiens
attaattccgttaaa

SEQ ID NO: 1704376 - DNA, 15 bp, Homo sapiens
ttaattccgttaaac

SEQ ID NO: 1704377 - DNA, 15 bp, Homo sapiens
taattccgttaaaca

SEQ ID NO: 1704378 - DNA, 15 bp, Homo sapiens
aattccgttaaacac

SEQ ID NO: 1704379 - DNA, 15 bp, Homo sapiens
attccgttaaacaca

SEQ ID NO: 1704380 - DNA, 15 bp, Homo sapiens
ttccgttaaacacaa

SEQ ID NO: 1704381 - DNA, 15 bp, Homo sapiens
tccgttaaacacaaa

SEQ ID NO: 1704382 - DNA, 15 bp, Homo sapiens
ccgttaaacacaaag

SEQ ID NO: 1704383 - DNA, 15 bp, Homo sapiens
cgttaaacacaaaga

SEQ ID NO: 1704384 - DNA, 15 bp, Homo sapiens
gttaaacacaaagac

SEQ ID NO: 1704385 - DNA, 15 bp, Homo sapiens
ttaaacacaaagaca

SEQ ID NO: 1704386 - DNA, 15 bp, Homo sapiens
taaacacaaagacat

SEQ ID NO: 1704387 - DNA, 15 bp, Homo sapiens
aaacacaaagacata

SEQ ID NO: 1704388 - DNA, 15 bp, Homo sapiens
aacacaaagacatat

SEQ ID NO: 1704389 - DNA, 15 bp, Homo sapiens
acacaaagacatatc

SEQ ID NO: 1704390 - DNA, 15 bp, Homo sapiens
cacaaagacatatca

SEQ ID NO: 1704391 - DNA, 15 bp, Homo sapiens
acaaagacatatcag

SEQ ID NO: 1704392 - DNA, 15 bp, Homo sapiens
caaagacatatcagt

SEQ ID NO: 1704393 - DNA, 15 bp, Homo sapiens
aaagacatatcagtt

SEQ ID NO: 1704394 - DNA, 15 bp, Homo sapiens
aagacatatcagttt

SEQ ID NO: 1704395 - DNA, 15 bp, Homo sapiens
agacatatcagtttg

SEQ ID NO: 1704396 - DNA, 15 bp, Homo sapiens
gacatatcagtttgt

SEQ ID NO: 1704397 - DNA, 15 bp, Homo sapiens
acatatcagtttgta

SEQ ID NO: 1704398 - DNA, 15 bp, Homo sapiens
catatcagtttgtag

SEQ ID NO: 1704399 - DNA, 15 bp, Homo sapiens
atatcagtttgtagc

SEQ ID NO: 1704400 - DNA, 15 bp, Homo sapiens
tatcagtttgtagct

SEQ ID NO: 1704401 - DNA, 15 bp, Homo sapiens
atcagtttgtagctt

SEQ ID NO: 1704402 - DNA, 15 bp, Homo sapiens
tcagtttgtagcttt

SEQ ID NO: 1704403 - DNA, 15 bp, Homo sapiens
cagtttgtagctttg

SEQ ID NO: 1704404 - DNA, 15 bp, Homo sapiens
agtttgtagctttgg

SEQ ID NO: 1704405 - DNA, 15 bp, Homo sapiens
gtttgtagctttggt

SEQ ID NO: 1704406 - DNA, 15 bp, Homo sapiens
tttgtagctttggtg

SEQ ID NO: 1704407 - DNA, 15 bp, Homo sapiens
ttgtagctttggtgg

SEQ ID NO: 1704408 - DNA, 15 bp, Homo sapiens
tgtagctttggtgga

SEQ ID NO: 1704409 - DNA, 15 bp, Homo sapiens
gtagctttggtggat

SEQ ID NO: 1704410 - DNA, 15 bp, Homo sapiens
tagctttggtggata

SEQ ID NO: 1704411 - DNA, 15 bp, Homo sapiens
agctttggtggataa

SEQ ID NO: 1704412 - DNA, 15 bp, Homo sapiens
gctttggtggataaa

SEQ ID NO: 1704413 - DNA, 15 bp, Homo sapiens
ctttggtggataaac

SEQ ID NO: 1704414 - DNA, 15 bp, Homo sapiens
tttggtggataaaca

SEQ ID NO: 1704415 - DNA, 15 bp, Homo sapiens
ttggtggataaacaa

SEQ ID NO: 1704416 - DNA, 15 bp, Homo sapiens
tggtggataaacaaa

SEQ ID NO: 1704417 - DNA, 15 bp, Homo sapiens
ggtggataaacaaat

SEQ ID NO: 1704418 - DNA, 15 bp, Homo sapiens
gtggataaacaaatt

SEQ ID NO: 1704419 - DNA, 15 bp, Homo sapiens
tggataaacaaatta

SEQ ID NO: 1704420 - DNA, 15 bp, Homo sapiens
ggataaacaaattaa

SEQ ID NO: 1704421 - DNA, 15 bp, Homo sapiens
gataaacaaattaat

SEQ ID NO: 1704422 - DNA, 15 bp, Homo sapiens
ataaacaaattaatt

SEQ ID NO: 1704423 - DNA, 15 bp, Homo sapiens
taaacaaattaattt

SEQ ID NO: 1704424 - DNA, 15 bp, Homo sapiens
aaacaaattaattta

SEQ ID NO: 1704425 - DNA, 15 bp, Homo sapiens
aacaaattaatttag

SEQ ID NO: 1704426 - DNA, 15 bp, Homo sapiens
acaaattaatttagc

SEQ ID NO: 1704427 - DNA, 15 bp, Homo sapiens
caaattaatttagca

SEQ ID NO: 1704428 - DNA, 15 bp, Homo sapiens
aaattaatttagcaa

SEQ ID NO: 1704429 - DNA, 15 bp, Homo sapiens
aattaatttagcaat

SEQ ID NO: 1704430 - DNA, 15 bp, Homo sapiens
attaatttagcaatt

SEQ ID NO: 1704431 - DNA, 15 bp, Homo sapiens
ttaatttagcaattc

SEQ ID NO: 1704432 - DNA, 15 bp, Homo sapiens
taatttagcaattca

SEQ ID NO: 1704433 - DNA, 15 bp, Homo sapiens
aatttagcaattcat

SEQ ID NO: 1704434 - DNA, 15 bp, Homo sapiens
atttagcaattcatg

SEQ ID NO: 1704435 - DNA, 15 bp, Homo sapiens
tttagcaattcatgg

SEQ ID NO: 1704436 - DNA, 15 bp, Homo sapiens
ttagcaattcatggc

SEQ ID NO: 1704437 - DNA, 15 bp, Homo sapiens
tagcaattcatggct

SEQ ID NO: 1704438 - DNA, 15 bp, Homo sapiens
agcaattcatggcta

SEQ ID NO: 1704439 - DNA, 15 bp, Homo sapiens
gcaattcatggctat

SEQ ID NO: 1704440 - DNA, 15 bp, Homo sapiens
caattcatggctatg

SEQ ID NO: 1704441 - DNA, 15 bp, Homo sapiens
aattcatggctatga

SEQ ID NO: 1704442 - DNA, 15 bp, Homo sapiens
attcatggctatgaa

SEQ ID NO: 1704443 - DNA, 15 bp, Homo sapiens
ttcatggctatgaaa

SEQ ID NO: 1704444 - DNA, 15 bp, Homo sapiens
tcatggctatgaaaa

SEQ ID NO: 1704445 - DNA, 15 bp, Homo sapiens
catggctatgaaaaa

SEQ ID NO: 1704446 - DNA, 15 bp, Homo sapiens
atggctatgaaaaat

SEQ ID NO: 1704447 - DNA, 15 bp, Homo sapiens
tggctatgaaaaatg

SEQ ID NO: 1704448 - DNA, 15 bp, Homo sapiens
ggctatgaaaaatgt

SEQ ID NO: 1704449 - DNA, 15 bp, Homo sapiens
gctatgaaaaatgta

SEQ ID NO: 1704450 - DNA, 15 bp, Homo sapiens
ctatgaaaaatgtat

SEQ ID NO: 1704451 - DNA, 15 bp, Homo sapiens
tatgaaaaatgtata

SEQ ID NO: 1704452 - DNA, 15 bp, Homo sapiens
atgaaaaatgtatat

SEQ ID NO: 1704453 - DNA, 15 bp, Homo sapiens
tgaaaaatgtatatt

SEQ ID NO: 1704454 - DNA, 15 bp, Homo sapiens
gaaaaatgtatattt

SEQ ID NO: 1704455 - DNA, 15 bp, Homo sapiens
aaaaatgtatatttt

SEQ ID NO: 1704456 - DNA, 15 bp, Homo sapiens
aaaatgtatatttta

SEQ ID NO: 1704457 - DNA, 15 bp, Homo sapiens
aaatgtatattttat

SEQ ID NO: 1704458 - DNA, 15 bp, Homo sapiens
aatgtatattttatt

SEQ ID NO: 1704459 - DNA, 15 bp, Homo sapiens
atgtatattttattt

SEQ ID NO: 1704460 - DNA, 15 bp, Homo sapiens
tgtatattttattta

SEQ ID NO: 1704461 - DNA, 15 bp, Homo sapiens
gtatattttatttaa

SEQ ID NO: 1704462 - DNA, 15 bp, Homo sapiens
tatattttatttaaa

SEQ ID NO: 1704463 - DNA, 15 bp, Homo sapiens
atattttatttaaaa

SEQ ID NO: 1704464 - DNA, 15 bp, Homo sapiens
tattttatttaaaaa

SEQ ID NO: 1704465 - DNA, 15 bp, Homo sapiens
attttatttaaaaat

SEQ ID NO: 1704466 - DNA, 15 bp, Homo sapiens
ttttatttaaaaatt

SEQ ID NO: 1704467 - DNA, 15 bp, Homo sapiens
tttatttaaaaattt

SEQ ID NO: 1704468 - DNA, 15 bp, Homo sapiens
ttatttaaaaatttt

SEQ ID NO: 1704469 - DNA, 15 bp, Homo sapiens
tatttaaaaatttta

SEQ ID NO: 1704470 - DNA, 15 bp, Homo sapiens
ttaaaaattttaaag

SEQ ID NO: 1704471 - DNA, 15 bp, Homo sapiens
taaaaattttaaaga

SEQ ID NO: 1704472 - DNA, 15 bp, Homo sapiens
aaaaattttaaagaa

SEQ ID NO: 1704473 - DNA, 15 bp, Homo sapiens
aaaattttaaagaaa

SEQ ID NO: 1704474 - DNA, 15 bp, Homo sapiens
aaattttaaagaaag

SEQ ID NO: 1704475 - DNA, 15 bp, Homo sapiens
aattttaaagaaagc

SEQ ID NO: 1704476 - DNA, 15 bp, Homo sapiens
attttaaagaaagct

SEQ ID NO: 1704477 - DNA, 15 bp, Homo sapiens
ttttaaagaaagcta

SEQ ID NO: 1704478 - DNA, 15 bp, Homo sapiens
tttaaagaaagctaa

SEQ ID NO: 1704479 - DNA, 15 bp, Homo sapiens
ttaaagaaagctaaa

SEQ ID NO: 1704480 - DNA, 15 bp, Homo sapiens
taaagaaagctaaat

SEQ ID NO: 1704481 - DNA, 15 bp, Homo sapiens
aaagaaagctaaatg

SEQ ID NO: 1704482 - DNA, 15 bp, Homo sapiens
aagaaagctaaatga

SEQ ID NO: 1704483 - DNA, 15 bp, Homo sapiens
agaaagctaaatgat

SEQ ID NO: 1704484 - DNA, 15 bp, Homo sapiens
gaaagctaaatgatc

SEQ ID NO: 1704485 - DNA, 15 bp, Homo sapiens
aaagctaaatgatca

SEQ ID NO: 1704486 - DNA, 15 bp, Homo sapiens
aagctaaatgatcaa

SEQ ID NO: 1704487 - DNA, 15 bp, Homo sapiens
agctaaatgatcaaa

SEQ ID NO: 1704488 - DNA, 15 bp, Homo sapiens
gctaaatgatcaaat

SEQ ID NO: 1704489 - DNA, 15 bp, Homo sapiens
ctaaatgatcaaatt

SEQ ID NO: 1704490 - DNA, 15 bp, Homo sapiens
taaatgatcaaatta

SEQ ID NO: 1704491 - DNA, 15 bp, Homo sapiens
aaatgatcaaattat

SEQ ID NO: 1704492 - DNA, 15 bp, Homo sapiens
aatgatcaaattatt

SEQ ID NO: 1704493 - DNA, 15 bp, Homo sapiens
atgatcaaattattt

SEQ ID NO: 1704494 - DNA, 15 bp, Homo sapiens
tgatcaaattattta

SEQ ID NO: 1704495 - DNA, 15 bp, Homo sapiens
gatcaaattatttaa

SEQ ID NO: 1704496 - DNA, 15 bp, Homo sapiens
atcaaattatttaat

SEQ ID NO: 1704497 - DNA, 15 bp, Homo sapiens
tcaaattatttaatg

SEQ ID NO: 1704498 - DNA, 15 bp, Homo sapiens
caaattatttaatga

SEQ ID NO: 1704499 - DNA, 15 bp, Homo sapiens
aaattatttaatgat

SEQ ID NO: 1704500 - DNA, 15 bp, Homo sapiens
aattatttaatgatg

SEQ ID NO: 1704501 - DNA, 15 bp, Homo sapiens
attatttaatgatga

SEQ ID NO: 1704502 - DNA, 15 bp, Homo sapiens
ttatttaatgatgaa

SEQ ID NO: 1704503 - DNA, 15 bp, Homo sapiens
tatttaatgatgaat

SEQ ID NO: 1704504 - DNA, 15 bp, Homo sapiens
atttaatgatgaatt

SEQ ID NO: 1704505 - DNA, 15 bp, Homo sapiens
tttaatgatgaatta

SEQ ID NO: 1704506 - DNA, 15 bp, Homo sapiens
ttaatgatgaattat

SEQ ID NO: 1704507 - DNA, 15 bp, Homo sapiens
taatgatgaattata

SEQ ID NO: 1704508 - DNA, 15 bp, Homo sapiens
aatgatgaattatat

SEQ ID NO: 1704509 - DNA, 15 bp, Homo sapiens
atgatgaattatatg

SEQ ID NO: 1704510 - DNA, 15 bp, Homo sapiens
tgatgaattatatga

SEQ ID NO: 1704511 - DNA, 15 bp, Homo sapiens
gatgaattatatgat

SEQ ID NO: 1704512 - DNA, 15 bp, Homo sapiens
atgaattatatgata

SEQ ID NO: 1704513 - DNA, 15 bp, Homo sapiens
tgaattatatgatag

SEQ ID NO: 1704514 - DNA, 15 bp, Homo sapiens
gaattatatgataga

SEQ ID NO: 1704515 - DNA, 15 bp, Homo sapiens
aattatatgatagac

SEQ ID NO: 1704516 - DNA, 15 bp, Homo sapiens
attatatgatagaca

SEQ ID NO: 1704517 - DNA, 15 bp, Homo sapiens
ttatatgatagacac

SEQ ID NO: 1704518 - DNA, 15 bp, Homo sapiens
tatatgatagacact

SEQ ID NO: 1704519 - DNA, 15 bp, Homo sapiens
atatgatagacactt

SEQ ID NO: 1704520 - DNA, 15 bp, Homo sapiens
tatgatagacacttt

SEQ ID NO: 1704521 - DNA, 15 bp, Homo sapiens
atgatagacacttta

SEQ ID NO: 1704522 - DNA, 15 bp, Homo sapiens
tgatagacactttat

SEQ ID NO: 1704523 - DNA, 15 bp, Homo sapiens
gatagacactttata

SEQ ID NO: 1704524 - DNA, 15 bp, Homo sapiens
atagacactttatat

SEQ ID NO: 1704525 - DNA, 15 bp, Homo sapiens
tagacactttatata

SEQ ID NO: 1704526 - DNA, 15 bp, Homo sapiens
agacactttatataa

SEQ ID NO: 1704527 - DNA, 15 bp, Homo sapiens
gacactttatataag

SEQ ID NO: 1704528 - DNA, 15 bp, Homo sapiens
acactttatataaga

SEQ ID NO: 1704529 - DNA, 15 bp, Homo sapiens
cactttatataagaa

SEQ ID NO: 1704530 - DNA, 15 bp, Homo sapiens
actttatataagaaa

SEQ ID NO: 1704531 - DNA, 15 bp, Homo sapiens
ctttatataagaaaa

SEQ ID NO: 1704532 - DNA, 15 bp, Homo sapiens
tttatataagaaaaa

SEQ ID NO: 1704533 - DNA, 15 bp, Homo sapiens
ttatataagaaaaac

SEQ ID NO: 1704534 - DNA, 15 bp, Homo sapiens
tatataagaaaaact

SEQ ID NO: 1704535 - DNA, 15 bp, Homo sapiens
atataagaaaaactt

SEQ ID NO: 1704536 - DNA, 15 bp, Homo sapiens
tataagaaaaacttc

SEQ ID NO: 1704537 - DNA, 15 bp, Homo sapiens
ataagaaaaacttca

SEQ ID NO: 1704538 - DNA, 15 bp, Homo sapiens
taagaaaaacttcaa

SEQ ID NO: 1704539 - DNA, 15 bp, Homo sapiens
aagaaaaacttcaac

SEQ ID NO: 1704540 - DNA, 15 bp, Homo sapiens
agaaaaacttcaaca

SEQ ID NO: 1704541 - DNA, 15 bp, Homo sapiens
gaaaaacttcaacag

SEQ ID NO: 1704542 - DNA, 15 bp, Homo sapiens
aaaaacttcaacagc

SEQ ID NO: 1704543 - DNA, 15 bp, Homo sapiens
aaaacttcaacagca

SEQ ID NO: 1704544 - DNA, 15 bp, Homo sapiens
aaacttcaacagcaa

SEQ ID NO: 1704545 - DNA, 15 bp, Homo sapiens
aacttcaacagcaac

SEQ ID NO: 1704546 - DNA, 15 bp, Homo sapiens
acttcaacagcaaca

SEQ ID NO: 1704547 - DNA, 15 bp, Homo sapiens
cttcaacagcaacaa

SEQ ID NO: 1704548 - DNA, 15 bp, Homo sapiens
ttcaacagcaacaaa

SEQ ID NO: 1704549 - DNA, 15 bp, Homo sapiens
tcaacagcaacaaat

SEQ ID NO: 1704550 - DNA, 15 bp, Homo sapiens
caacagcaacaaatt

SEQ ID NO: 1704551 - DNA, 15 bp, Homo sapiens
aacagcaacaaatta

SEQ ID NO: 1704552 - DNA, 15 bp, Homo sapiens
acagcaacaaattaa

SEQ ID NO: 1704553 - DNA, 15 bp, Homo sapiens
cagcaacaaattaaa

SEQ ID NO: 1704554 - DNA, 15 bp, Homo sapiens
agcaacaaattaaaa

SEQ ID NO: 1704555 - DNA, 15 bp, Homo sapiens
gcaacaaattaaaat

SEQ ID NO: 1704556 - DNA, 15 bp, Homo sapiens
caacaaattaaaatt

SEQ ID NO: 1704557 - DNA, 15 bp, Homo sapiens
aacaaattaaaattt

SEQ ID NO: 1704558 - DNA, 15 bp, Homo sapiens
acaaattaaaatttt

SEQ ID NO: 1704559 - DNA, 15 bp, Homo sapiens
caaattaaaattttt

SEQ ID NO: 1704560 - DNA, 15 bp, Homo sapiens
aaattaaaatttttt

SEQ ID NO: 1704561 - DNA, 15 bp, Homo sapiens
aattaaaattttttc

SEQ ID NO: 1704562 - DNA, 15 bp, Homo sapiens
attaaaattttttca

SEQ ID NO: 1704563 - DNA, 15 bp, Homo sapiens
ttaaaattttttcat

SEQ ID NO: 1704564 - DNA, 15 bp, Homo sapiens
taaaattttttcatc

SEQ ID NO: 1704565 - DNA, 15 bp, Homo sapiens
aaaattttttcatca

SEQ ID NO: 1704566 - DNA, 15 bp, Homo sapiens
aaattttttcatcat

SEQ ID NO: 1704567 - DNA, 15 bp, Homo sapiens
aattttttcatcatt

SEQ ID NO: 1704568 - DNA, 15 bp, Homo sapiens
attttttcatcattt

SEQ ID NO: 1704569 - DNA, 15 bp, Homo sapiens
ttttttcatcatttt

SEQ ID NO: 1704570 - DNA, 15 bp, Homo sapiens
tttttcatcattttc

SEQ ID NO: 1704571 - DNA, 15 bp, Homo sapiens
ttttcatcattttct

SEQ ID NO: 1704572 - DNA, 15 bp, Homo sapiens
tttcatcattttcta

SEQ ID NO: 1704573 - DNA, 15 bp, Homo sapiens
tcatcattttctagg

SEQ ID NO: 1704574 - DNA, 15 bp, Homo sapiens
catcattttctaggt

SEQ ID NO: 1704575 - DNA, 15 bp, Homo sapiens
atcattttctaggtg

SEQ ID NO: 1704576 - DNA, 15 bp, Homo sapiens
tcattttctaggtgg

SEQ ID NO: 1704577 - DNA, 15 bp, Homo sapiens
cattttctaggtgga

SEQ ID NO: 1704578 - DNA, 15 bp, Homo sapiens
attttctaggtggac

SEQ ID NO: 1704579 - DNA, 15 bp, Homo sapiens
ttttctaggtggact

SEQ ID NO: 1704580 - DNA, 15 bp, Homo sapiens
tttctaggtggactt

SEQ ID NO: 1704581 - DNA, 15 bp, Homo sapiens
ttctaggtggactta

SEQ ID NO: 1704582 - DNA, 15 bp, Homo sapiens
tctaggtggacttaa

SEQ ID NO: 1704583 - DNA, 15 bp, Homo sapiens
ctaggtggacttaaa

SEQ ID NO: 1704584 - DNA, 15 bp, Homo sapiens
taggtggacttaaat

SEQ ID NO: 1704585 - DNA, 15 bp, Homo sapiens
aggtggacttaaatc

SEQ ID NO: 1704586 - DNA, 15 bp, Homo sapiens
ggtggacttaaatca

SEQ ID NO: 1704587 - DNA, 15 bp, Homo sapiens
gtggacttaaatcat

SEQ ID NO: 1704588 - DNA, 15 bp, Homo sapiens
tggacttaaatcata

SEQ ID NO: 1704589 - DNA, 15 bp, Homo sapiens
ggacttaaatcatat

SEQ ID NO: 1704590 - DNA, 15 bp, Homo sapiens
gacttaaatcatatt

SEQ ID NO: 1704591 - DNA, 15 bp, Homo sapiens
acttaaatcatattt

SEQ ID NO: 1704592 - DNA, 15 bp, Homo sapiens
cttaaatcatattta

SEQ ID NO: 1704593 - DNA, 15 bp, Homo sapiens
ttaaatcatatttac

SEQ ID NO: 1704594 - DNA, 15 bp, Homo sapiens
taaatcatatttacg

SEQ ID NO: 1704595 - DNA, 15 bp, Homo sapiens
aaatcatatttacgg

SEQ ID NO: 1704596 - DNA, 15 bp, Homo sapiens
aatcatatttacggt

SEQ ID NO: 1704597 - DNA, 15 bp, Homo sapiens
atcatatttacggtg

SEQ ID NO: 1704598 - DNA, 15 bp, Homo sapiens
tcatatttacggtga

SEQ ID NO: 1704599 - DNA, 15 bp, Homo sapiens
catatttacggtgaa

SEQ ID NO: 1704600 - DNA, 15 bp, Homo sapiens
atatttacggtgaaa

SEQ ID NO: 1704601 - DNA, 15 bp, Homo sapiens
tatttacggtgaaac

SEQ ID NO: 1704602 - DNA, 15 bp, Homo sapiens
atttacggtgaaact

SEQ ID NO: 1704603 - DNA, 15 bp, Homo sapiens
tttacggtgaaactc

SEQ ID NO: 1704604 - DNA, 15 bp, Homo sapiens
ttacggtgaaactct

SEQ ID NO: 1704605 - DNA, 15 bp, Homo sapiens
tacggtgaaactctg

SEQ ID NO: 1704606 - DNA, 15 bp, Homo sapiens
acggtgaaactctgg

SEQ ID NO: 1704607 - DNA, 15 bp, Homo sapiens
cggtgaaactctggc

SEQ ID NO: 1704608 - DNA, 15 bp, Homo sapiens
ggtgaaactctggct

SEQ ID NO: 1704609 - DNA, 15 bp, Homo sapiens
gtgaaactctggcta

SEQ ID NO: 1704610 - DNA, 15 bp, Homo sapiens
tgaaactctggctag

SEQ ID NO: 1704611 - DNA, 15 bp, Homo sapiens
gaaactctggctaga

SEQ ID NO: 1704612 - DNA, 15 bp, Homo sapiens
aaactctggctagac

SEQ ID NO: 1704613 - DNA, 15 bp, Homo sapiens
aactctggctagaca

SEQ ID NO: 1704614 - DNA, 15 bp, Homo sapiens
actctggctagacag

SEQ ID NO: 1704615 - DNA, 15 bp, Homo sapiens
ctctggctagacagc

SEQ ID NO: 1704616 - DNA, 15 bp, Homo sapiens
tctggctagacagcg

SEQ ID NO: 1704617 - DNA, 15 bp, Homo sapiens
ctggctagacagcgt

SEQ ID NO: 1704618 - DNA, 15 bp, Homo sapiens
tggctagacagcgta

SEQ ID NO: 1704619 - DNA, 15 bp, Homo sapiens
ggctagacagcgtaa

SEQ ID NO: 1704620 - DNA, 15 bp, Homo sapiens
gctagacagcgtaaa

SEQ ID NO: 1704621 - DNA, 15 bp, Homo sapiens
ctagacagcgtaaac

SEQ ID NO: 1704622 - DNA, 15 bp, Homo sapiens
tagacagcgtaaact

SEQ ID NO: 1704623 - DNA, 15 bp, Homo sapiens
agacagcgtaaactg

SEQ ID NO: 1704624 - DNA, 15 bp, Homo sapiens
gacagcgtaaactgc

SEQ ID NO: 1704625 - DNA, 15 bp, Homo sapiens
acagcgtaaactgcg

SEQ ID NO: 1704626 - DNA, 15 bp, Homo sapiens
cagcgtaaactgcgc

SEQ ID NO: 1704627 - DNA, 15 bp, Homo sapiens
agcgtaaactgcgcc

SEQ ID NO: 1704628 - DNA, 15 bp, Homo sapiens
gcgtaaactgcgcct

SEQ ID NO: 1704629 - DNA, 15 bp, Homo sapiens
cgtaaactgcgcctt

SEQ ID NO: 1704630 - DNA, 15 bp, Homo sapiens
gtaaactgcgccttt

SEQ ID NO: 1704631 - DNA, 15 bp, Homo sapiens
taaactgcgcctttt

SEQ ID NO: 1704632 - DNA, 15 bp, Homo sapiens
aaactgcgccttttc

SEQ ID NO: 1704633 - DNA, 15 bp, Homo sapiens
aactgcgccttttca

SEQ ID NO: 1704634 - DNA, 15 bp, Homo sapiens
actgcgccttttcaa

SEQ ID NO: 1704635 - DNA, 15 bp, Homo sapiens
ctgcgccttttcaag

SEQ ID NO: 1704636 - DNA, 15 bp, Homo sapiens
tgcgccttttcaagg

SEQ ID NO: 1704637 - DNA, 15 bp, Homo sapiens
gcgccttttcaagga

SEQ ID NO: 1704638 - DNA, 15 bp, Homo sapiens
cgccttttcaaggat

SEQ ID NO: 1704639 - DNA, 15 bp, Homo sapiens
gccttttcaaggatg

SEQ ID NO: 1704640 - DNA, 15 bp, Homo sapiens
ccttttcaaggatgg

SEQ ID NO: 1704641 - DNA, 15 bp, Homo sapiens
cttttcaaggatgga

SEQ ID NO: 1704642 - DNA, 15 bp, Homo sapiens
ttttcaaggatggaa

SEQ ID NO: 1704643 - DNA, 15 bp, Homo sapiens
tttcaaggatggaaa

SEQ ID NO: 1704644 - DNA, 15 bp, Homo sapiens
ttcaaggatggaaaa

SEQ ID NO: 1704645 - DNA, 15 bp, Homo sapiens
tcaaggatggaaaaa

SEQ ID NO: 1704646 - DNA, 15 bp, Homo sapiens
caaggatggaaaaat

SEQ ID NO: 1704647 - DNA, 15 bp, Homo sapiens
aaggatggaaaaatg

SEQ ID NO: 1704648 - DNA, 15 bp, Homo sapiens
aggatggaaaaatga

SEQ ID NO: 1704649 - DNA, 15 bp, Homo sapiens
ggatggaaaaatgaa

SEQ ID NO: 1704650 - DNA, 15 bp, Homo sapiens
gatggaaaaatgaaa

SEQ ID NO: 1704651 - DNA, 15 bp, Homo sapiens
atggaaaaatgaaat

SEQ ID NO: 1704652 - DNA, 15 bp, Homo sapiens
tggaaaaatgaaata

SEQ ID NO: 1704653 - DNA, 15 bp, Homo sapiens
ggaaaaatgaaatat

SEQ ID NO: 1704654 - DNA, 15 bp, Homo sapiens
gaaaaatgaaatatc

SEQ ID NO: 1704655 - DNA, 15 bp, Homo sapiens
aaaaatgaaatatca

SEQ ID NO: 1704656 - DNA, 15 bp, Homo sapiens
aaaatgaaatatcag

SEQ ID NO: 1704657 - DNA, 15 bp, Homo sapiens
aaatgaaatatcagg

SEQ ID NO: 1704658 - DNA, 15 bp, Homo sapiens
aatgaaatatcaggt

SEQ ID NO: 1704659 - DNA, 15 bp, Homo sapiens
atgaaatatcaggta

SEQ ID NO: 1704660 - DNA, 15 bp, Homo sapiens
tgaaatatcaggtat

SEQ ID NO: 1704661 - DNA, 15 bp, Homo sapiens
gaaatatcaggtatg

SEQ ID NO: 1704662 - DNA, 15 bp, Homo sapiens
aaatatcaggtatgc

SEQ ID NO: 1704663 - DNA, 15 bp, Homo sapiens
aatatcaggtatgct

SEQ ID NO: 1704664 - DNA, 15 bp, Homo sapiens
atatcaggtatgctt

SEQ ID NO: 1704665 - DNA, 15 bp, Homo sapiens
tatcaggtatgcttc

SEQ ID NO: 1704666 - DNA, 15 bp, Homo sapiens
atcaggtatgcttcc

SEQ ID NO: 1704667 - DNA, 15 bp, Homo sapiens
tcaggtatgcttcct

SEQ ID NO: 1704668 - DNA, 15 bp, Homo sapiens
caggtatgcttcctt

SEQ ID NO: 1704669 - DNA, 15 bp, Homo sapiens
aggtatgcttccttt

SEQ ID NO: 1704670 - DNA, 15 bp, Homo sapiens
ggtatgcttcctttg

SEQ ID NO: 1704671 - DNA, 15 bp, Homo sapiens
gtatgcttcctttga

SEQ ID NO: 1704672 - DNA, 15 bp, Homo sapiens
tatgcttcctttgac

SEQ ID NO: 1704673 - DNA, 15 bp, Homo sapiens
atgcttcctttgact

SEQ ID NO: 1704674 - DNA, 15 bp, Homo sapiens
tgcttcctttgacta

SEQ ID NO: 1704675 - DNA, 15 bp, Homo sapiens
gcttcctttgactat

SEQ ID NO: 1704676 - DNA, 15 bp, Homo sapiens
cttcctttgactatt

SEQ ID NO: 1704677 - DNA, 15 bp, Homo sapiens
ttcctttgactatta

SEQ ID NO: 1704678 - DNA, 15 bp, Homo sapiens
tcctttgactattaa

SEQ ID NO: 1704679 - DNA, 15 bp, Homo sapiens
cctttgactattaag

SEQ ID NO: 1704680 - DNA, 15 bp, Homo sapiens
ctttgactattaaga

SEQ ID NO: 1704681 - DNA, 15 bp, Homo sapiens
tttgactattaagac

SEQ ID NO: 1704682 - DNA, 15 bp, Homo sapiens
ttgactattaagact

SEQ ID NO: 1704683 - DNA, 15 bp, Homo sapiens
tgactattaagactt

SEQ ID NO: 1704684 - DNA, 15 bp, Homo sapiens
gactattaagactta

SEQ ID NO: 1704685 - DNA, 15 bp, Homo sapiens
actattaagacttag

SEQ ID NO: 1704686 - DNA, 15 bp, Homo sapiens
ctattaagacttagt

SEQ ID NO: 1704687 - DNA, 15 bp, Homo sapiens
tattaagacttagtt

SEQ ID NO: 1704688 - DNA, 15 bp, Homo sapiens
attaagacttagtta

SEQ ID NO: 1704689 - DNA, 15 bp, Homo sapiens
ttaagacttagttat

SEQ ID NO: 1704690 - DNA, 15 bp, Homo sapiens
taagacttagttatt

SEQ ID NO: 1704691 - DNA, 15 bp, Homo sapiens
aagacttagttatta

SEQ ID NO: 1704692 - DNA, 15 bp, Homo sapiens
agacttagttattac

SEQ ID NO: 1704693 - DNA, 15 bp, Homo sapiens
gacttagttattacc

SEQ ID NO: 1704694 - DNA, 15 bp, Homo sapiens
acttagttattaccg

SEQ ID NO: 1704695 - DNA, 15 bp, Homo sapiens
cttagttattaccgc

SEQ ID NO: 1704696 - DNA, 15 bp, Homo sapiens
ttagttattaccgct

SEQ ID NO: 1704697 - DNA, 15 bp, Homo sapiens
tagttattaccgctt

SEQ ID NO: 1704698 - DNA, 15 bp, Homo sapiens
agttattaccgctta

SEQ ID NO: 1704699 - DNA, 15 bp, Homo sapiens
gttattaccgcttat

SEQ ID NO: 1704700 - DNA, 15 bp, Homo sapiens
ttattaccgcttata

SEQ ID NO: 1704701 - DNA, 15 bp, Homo sapiens
tattaccgcttatac

SEQ ID NO: 1704702 - DNA, 15 bp, Homo sapiens
attaccgcttatacc

SEQ ID NO: 1704703 - DNA, 15 bp, Homo sapiens
ttaccgcttataccc

SEQ ID NO: 1704704 - DNA, 15 bp, Homo sapiens
taccgcttataccca

SEQ ID NO: 1704705 - DNA, 15 bp, Homo sapiens
accgcttatacccat

SEQ ID NO: 1704706 - DNA, 15 bp, Homo sapiens
ccgcttatacccata

SEQ ID NO: 1704707 - DNA, 15 bp, Homo sapiens
cgcttatacccatat

SEQ ID NO: 1704708 - DNA, 15 bp, Homo sapiens
gcttatacccatatt

SEQ ID NO: 1704709 - DNA, 15 bp, Homo sapiens
cttatacccatattt

SEQ ID NO: 1704710 - DNA, 15 bp, Homo sapiens
ttatacccatatttt

SEQ ID NO: 1704711 - DNA, 15 bp, Homo sapiens
tatacccatatttta

SEQ ID NO: 1704712 - DNA, 15 bp, Homo sapiens
atacccatattttaa

SEQ ID NO: 1704713 - DNA, 15 bp, Homo sapiens
tacccatattttaaa

SEQ ID NO: 1704714 - DNA, 15 bp, Homo sapiens
acccatattttaaaa

SEQ ID NO: 1704715 - DNA, 15 bp, Homo sapiens
cccatattttaaaat

SEQ ID NO: 1704716 - DNA, 15 bp, Homo sapiens
ccatattttaaaatc

SEQ ID NO: 1704717 - DNA, 15 bp, Homo sapiens
catattttaaaatcc

SEQ ID NO: 1704718 - DNA, 15 bp, Homo sapiens
atattttaaaatccc

SEQ ID NO: 1704719 - DNA, 15 bp, Homo sapiens
tattttaaaatccct

SEQ ID NO: 1704720 - DNA, 15 bp, Homo sapiens
attttaaaatcccta

SEQ ID NO: 1704721 - DNA, 15 bp, Homo sapiens
ttttaaaatccctaa

SEQ ID NO: 1704722 - DNA, 15 bp, Homo sapiens
tttaaaatccctaaa

SEQ ID NO: 1704723 - DNA, 15 bp, Homo sapiens
ttaaaatccctaaaa

SEQ ID NO: 1704724 - DNA, 15 bp, Homo sapiens
taaaatccctaaaaa

SEQ ID NO: 1704725 - DNA, 15 bp, Homo sapiens
aaaatccctaaaaat

SEQ ID NO: 1704726 - DNA, 15 bp, Homo sapiens
aaatccctaaaaatg

SEQ ID NO: 1704727 - DNA, 15 bp, Homo sapiens
aatccctaaaaatgt

SEQ ID NO: 1704728 - DNA, 15 bp, Homo sapiens
atccctaaaaatgtg

SEQ ID NO: 1704729 - DNA, 15 bp, Homo sapiens
tccctaaaaatgtgt

SEQ ID NO: 1704730 - DNA, 15 bp, Homo sapiens
ccctaaaaatgtgtt

SEQ ID NO: 1704731 - DNA, 15 bp, Homo sapiens
cctaaaaatgtgttc

SEQ ID NO: 1704732 - DNA, 15 bp, Homo sapiens
ctaaaaatgtgttcc

SEQ ID NO: 1704733 - DNA, 15 bp, Homo sapiens
taaaaatgtgttcct

SEQ ID NO: 1704734 - DNA, 15 bp, Homo sapiens
aaaaatgtgttcctt

SEQ ID NO: 1704735 - DNA, 15 bp, Homo sapiens
aaaatgtgttcctta

SEQ ID NO: 1704736 - DNA, 15 bp, Homo sapiens
aaatgtgttccttaa

SEQ ID NO: 1704737 - DNA, 15 bp, Homo sapiens
aatgtgttccttaac

SEQ ID NO: 1704738 - DNA, 15 bp, Homo sapiens
atgtgttccttaact

SEQ ID NO: 1704739 - DNA, 15 bp, Homo sapiens
tgtgttccttaactt

SEQ ID NO: 1704740 - DNA, 15 bp, Homo sapiens
gtgttccttaacttt

SEQ ID NO: 1704741 - DNA, 15 bp, Homo sapiens
tgttccttaactttt

SEQ ID NO: 1704742 - DNA, 15 bp, Homo sapiens
gttccttaacttttt

SEQ ID NO: 1704743 - DNA, 15 bp, Homo sapiens
ttccttaacttttta

SEQ ID NO: 1704744 - DNA, 15 bp, Homo sapiens
tccttaactttttaa

SEQ ID NO: 1704745 - DNA, 15 bp, Homo sapiens
ccttaactttttaac

SEQ ID NO: 1704746 - DNA, 15 bp, Homo sapiens
cttaactttttaact

SEQ ID NO: 1704747 - DNA, 15 bp, Homo sapiens
ttaactttttaactg

SEQ ID NO: 1704748 - DNA, 15 bp, Homo sapiens
taactttttaactga

SEQ ID NO: 1704749 - DNA, 15 bp, Homo sapiens
aactttttaactgat

SEQ ID NO: 1704750 - DNA, 15 bp, Homo sapiens
actttttaactgatg

SEQ ID NO: 1704751 - DNA, 15 bp, Homo sapiens
ctttttaactgatgt

SEQ ID NO: 1704752 - DNA, 15 bp, Homo sapiens
tttttaactgatgtt

SEQ ID NO: 1704753 - DNA, 15 bp, Homo sapiens
ttttaactgatgttt

SEQ ID NO: 1704754 - DNA, 15 bp, Homo sapiens
aaatgacaagatgtg

SEQ ID NO: 1704755 - DNA, 15 bp, Homo sapiens
aatgacaagatgtgg

SEQ ID NO: 1704756 - DNA, 15 bp, Homo sapiens
atgacaagatgtggt

SEQ ID NO: 1704757 - DNA, 15 bp, Homo sapiens
tgacaagatgtggta

SEQ ID NO: 1704758 - DNA, 15 bp, Homo sapiens
gacaagatgtggtaa

SEQ ID NO: 1704759 - DNA, 15 bp, Homo sapiens
acaagatgtggtaaa

SEQ ID NO: 1704760 - DNA, 15 bp, Homo sapiens
caagatgtggtaaat

SEQ ID NO: 1704761 - DNA, 15 bp, Homo sapiens
aagatgtggtaaatg

SEQ ID NO: 1704762 - DNA, 15 bp, Homo sapiens
agatgtggtaaatga

SEQ ID NO: 1704763 - DNA, 15 bp, Homo sapiens
gatgtggtaaatgaa

SEQ ID NO: 1704764 - DNA, 15 bp, Homo sapiens
atgtggtaaatgaaa

SEQ ID NO: 1704765 - DNA, 15 bp, Homo sapiens
tgtggtaaatgaaaa

SEQ ID NO: 1704766 - DNA, 15 bp, Homo sapiens
gtggtaaatgaaaac

SEQ ID NO: 1704767 - DNA, 15 bp, Homo sapiens
tggtaaatgaaaact

SEQ ID NO: 1704768 - DNA, 15 bp, Homo sapiens
ggtaaatgaaaactc

SEQ ID NO: 1704769 - DNA, 15 bp, Homo sapiens
gtaaatgaaaactca

SEQ ID NO: 1704770 - DNA, 15 bp, Homo sapiens
taaatgaaaactcac

SEQ ID NO: 1704771 - DNA, 15 bp, Homo sapiens
aaatgaaaactcaca

SEQ ID NO: 1704772 - DNA, 15 bp, Homo sapiens
aatgaaaactcacac

SEQ ID NO: 1704773 - DNA, 15 bp, Homo sapiens
atgaaaactcacaca

SEQ ID NO: 1704774 - DNA, 15 bp, Homo sapiens
tgaaaactcacacat

SEQ ID NO: 1704775 - DNA, 15 bp, Homo sapiens
gaaaactcacacatt

SEQ ID NO: 1704776 - DNA, 15 bp, Homo sapiens
aaaactcacacattc

SEQ ID NO: 1704777 - DNA, 15 bp, Homo sapiens
aaactcacacattct

SEQ ID NO: 1704778 - DNA, 15 bp, Homo sapiens
aactcacacattcta

SEQ ID NO: 1704779 - DNA, 15 bp, Homo sapiens
actcacacattctat

SEQ ID NO: 1704780 - DNA, 15 bp, Homo sapiens
ctcacacattctata

SEQ ID NO: 1704781 - DNA, 15 bp, Homo sapiens
tcacacattctatat

SEQ ID NO: 1704782 - DNA, 15 bp, Homo sapiens
cacacattctatata

SEQ ID NO: 1704783 - DNA, 15 bp, Homo sapiens
acacattctatatac

SEQ ID NO: 1704784 - DNA, 15 bp, Homo sapiens
cacattctatataca

SEQ ID NO: 1704785 - DNA, 15 bp, Homo sapiens
acattctatatacat

SEQ ID NO: 1704786 - DNA, 15 bp, Homo sapiens
cattctatatacatt

SEQ ID NO: 1704787 - DNA, 15 bp, Homo sapiens
attctatatacatta

SEQ ID NO: 1704788 - DNA, 15 bp, Homo sapiens
ttctatatacattaa

SEQ ID NO: 1704789 - DNA, 15 bp, Homo sapiens
tctatatacattaaa

SEQ ID NO: 1704790 - DNA, 15 bp, Homo sapiens
ctatatacattaaat

SEQ ID NO: 1704791 - DNA, 15 bp, Homo sapiens
tatatacattaaata

SEQ ID NO: 1704792 - DNA, 15 bp, Homo sapiens
atatacattaaatat

SEQ ID NO: 1704793 - DNA, 15 bp, Homo sapiens
tatacattaaatatg

SEQ ID NO: 1704794 - DNA, 15 bp, Homo sapiens
atacattaaatatgt

SEQ ID NO: 1704795 - DNA, 15 bp, Homo sapiens
tacattaaatatgta

SEQ ID NO: 1704796 - DNA, 15 bp, Homo sapiens
acattaaatatgtaa

SEQ ID NO: 1704797 - DNA, 15 bp, Homo sapiens
cattaaatatgtaag

SEQ ID NO: 1704798 - DNA, 15 bp, Homo sapiens
attaaatatgtaagc

SEQ ID NO: 1704799 - DNA, 15 bp, Homo sapiens
ttaaatatgtaagca

SEQ ID NO: 1704800 - DNA, 15 bp, Homo sapiens
taaatatgtaagcat

SEQ ID NO: 1704801 - DNA, 15 bp, Homo sapiens
aaatatgtaagcatg

SEQ ID NO: 1704802 - DNA, 15 bp, Homo sapiens
atatgtaagcatgac

SEQ ID NO: 1704803 - DNA, 15 bp, Homo sapiens
tatgtaagcatgact

SEQ ID NO: 1704804 - DNA, 15 bp, Homo sapiens
atgtaagcatgactg

SEQ ID NO: 1704805 - DNA, 15 bp, Homo sapiens
tgtaagcatgactga

SEQ ID NO: 1704806 - DNA, 15 bp, Homo sapiens
gtaagcatgactgat

SEQ ID NO: 1704807 - DNA, 15 bp, Homo sapiens
taagcatgactgata

SEQ ID NO: 1704808 - DNA, 15 bp, Homo sapiens
aagcatgactgataa

SEQ ID NO: 1704809 - DNA, 15 bp, Homo sapiens
agcatgactgataaa

SEQ ID NO: 1704810 - DNA, 15 bp, Homo sapiens
gcatgactgataaaa

SEQ ID NO: 1704811 - DNA, 15 bp, Homo sapiens
catgactgataaaat

SEQ ID NO: 1704812 - DNA, 15 bp, Homo sapiens
atgactgataaaata

SEQ ID NO: 1704813 - DNA, 15 bp, Homo sapiens
tgactgataaaatag

SEQ ID NO: 1704814 - DNA, 15 bp, Homo sapiens
gactgataaaatagc

SEQ ID NO: 1704815 - DNA, 15 bp, Homo sapiens
actgataaaatagct

SEQ ID NO: 1704816 - DNA, 15 bp, Homo sapiens
ctgataaaatagcta

SEQ ID NO: 1704817 - DNA, 15 bp, Homo sapiens
tgataaaatagctat

SEQ ID NO: 1704818 - DNA, 15 bp, Homo sapiens
gataaaatagctatc

SEQ ID NO: 1704819 - DNA, 15 bp, Homo sapiens
ataaaatagctatct

SEQ ID NO: 1704820 - DNA, 15 bp, Homo sapiens
taaaatagctatctt

SEQ ID NO: 1704821 - DNA, 15 bp, Homo sapiens
aaaatagctatcttt

SEQ ID NO: 1704822 - DNA, 15 bp, Homo sapiens
aaatagctatctttt

SEQ ID NO: 1704823 - DNA, 15 bp, Homo sapiens
aatagctatcttttg

SEQ ID NO: 1704824 - DNA, 15 bp, Homo sapiens
atagctatcttttga

SEQ ID NO: 1704825 - DNA, 15 bp, Homo sapiens
tagctatcttttgat

SEQ ID NO: 1704826 - DNA, 15 bp, Homo sapiens
agctatcttttgata

SEQ ID NO: 1704827 - DNA, 15 bp, Homo sapiens
gctatcttttgatac

SEQ ID NO: 1704828 - DNA, 15 bp, Homo sapiens
ctatcttttgatact

SEQ ID NO: 1704829 - DNA, 15 bp, Homo sapiens
tatcttttgatactg

SEQ ID NO: 1704830 - DNA, 15 bp, Homo sapiens
atcttttgatactga

SEQ ID NO: 1704831 - DNA, 15 bp, Homo sapiens
tcttttgatactgac

SEQ ID NO: 1704832 - DNA, 15 bp, Homo sapiens
cttttgatactgaca

SEQ ID NO: 1704833 - DNA, 15 bp, Homo sapiens
ttttgatactgacaa

SEQ ID NO: 1704834 - DNA, 15 bp, Homo sapiens
tttgatactgacaag

SEQ ID NO: 1704835 - DNA, 15 bp, Homo sapiens
ttgatactgacaagg

SEQ ID NO: 1704836 - DNA, 15 bp, Homo sapiens
tgatactgacaagga

SEQ ID NO: 1704837 - DNA, 15 bp, Homo sapiens
gatactgacaaggaa

SEQ ID NO: 1704838 - DNA, 15 bp, Homo sapiens
atactgacaaggaag

SEQ ID NO: 1704839 - DNA, 15 bp, Homo sapiens
tactgacaaggaaga

SEQ ID NO: 1704840 - DNA, 15 bp, Homo sapiens
actgacaaggaagaa

SEQ ID NO: 1704841 - DNA, 15 bp, Homo sapiens
ctgacaaggaagaaa

SEQ ID NO: 1704842 - DNA, 15 bp, Homo sapiens
tgacaaggaagaaaa

SEQ ID NO: 1704843 - DNA, 15 bp, Homo sapiens
gacaaggaagaaaac

SEQ ID NO: 1704844 - DNA, 15 bp, Homo sapiens
acaaggaagaaaaca

SEQ ID NO: 1704845 - DNA, 15 bp, Homo sapiens
caaggaagaaaacag

SEQ ID NO: 1704846 - DNA, 15 bp, Homo sapiens
aaggaagaaaacaga

SEQ ID NO: 1704847 - DNA, 15 bp, Homo sapiens
aggaagaaaacagaa

SEQ ID NO: 1704848 - DNA, 15 bp, Homo sapiens
ggaagaaaacagaaa

SEQ ID NO: 1704849 - DNA, 15 bp, Homo sapiens
gaagaaaacagaaat

SEQ ID NO: 1704850 - DNA, 15 bp, Homo sapiens
aagaaaacagaaatg

SEQ ID NO: 1704851 - DNA, 15 bp, Homo sapiens
agaaaacagaaatga

SEQ ID NO: 1704852 - DNA, 15 bp, Homo sapiens
gaaaacagaaatgaa

SEQ ID NO: 1704853 - DNA, 15 bp, Homo sapiens
aaaacagaaatgaag

SEQ ID NO: 1704854 - DNA, 15 bp, Homo sapiens
aaacagaaatgaagg

SEQ ID NO: 1704855 - DNA, 15 bp, Homo sapiens
aacagaaatgaagga

SEQ ID NO: 1704856 - DNA, 15 bp, Homo sapiens
acagaaatgaaggaa

SEQ ID NO: 1704857 - DNA, 15 bp, Homo sapiens
cagaaatgaaggaat

SEQ ID NO: 1704858 - DNA, 15 bp, Homo sapiens
agaaatgaaggaata

SEQ ID NO: 1704859 - DNA, 15 bp, Homo sapiens
gaaatgaaggaatag

SEQ ID NO: 1704860 - DNA, 15 bp, Homo sapiens
aaatgaaggaatagc

SEQ ID NO: 1704861 - DNA, 15 bp, Homo sapiens
aatgaaggaatagca

SEQ ID NO: 1704862 - DNA, 15 bp, Homo sapiens
atgaaggaatagcaa

SEQ ID NO: 1704863 - DNA, 15 bp, Homo sapiens
tgaaggaatagcaaa

SEQ ID NO: 1704864 - DNA, 15 bp, Homo sapiens
gaaggaatagcaaat

SEQ ID NO: 1704865 - DNA, 15 bp, Homo sapiens
aaggaatagcaaatt

SEQ ID NO: 1704866 - DNA, 15 bp, Homo sapiens
aggaatagcaaattt

SEQ ID NO: 1704867 - DNA, 15 bp, Homo sapiens
ggaatagcaaatttt

SEQ ID NO: 1704868 - DNA, 15 bp, Homo sapiens
gaatagcaaatttta

SEQ ID NO: 1704869 - DNA, 15 bp, Homo sapiens
aatagcaaattttaa

SEQ ID NO: 1704870 - DNA, 15 bp, Homo sapiens
atagcaaattttaaa

SEQ ID NO: 1704871 - DNA, 15 bp, Homo sapiens
tagcaaattttaaaa

SEQ ID NO: 1704872 - DNA, 15 bp, Homo sapiens
agcaaattttaaaaa

SEQ ID NO: 1704873 - DNA, 15 bp, Homo sapiens
gcaaattttaaaaat

SEQ ID NO: 1704874 - DNA, 15 bp, Homo sapiens
caaattttaaaaatt

SEQ ID NO: 1704875 - DNA, 15 bp, Homo sapiens
aaattttaaaaattg

SEQ ID NO: 1704876 - DNA, 15 bp, Homo sapiens
aattttaaaaattgc

SEQ ID NO: 1704877 - DNA, 15 bp, Homo sapiens
attttaaaaattgca

SEQ ID NO: 1704878 - DNA, 15 bp, Homo sapiens
ttttaaaaattgcat

SEQ ID NO: 1704879 - DNA, 15 bp, Homo sapiens
tttaaaaattgcatt

SEQ ID NO: 1704880 - DNA, 15 bp, Homo sapiens
ttaaaaattgcattc

SEQ ID NO: 1704881 - DNA, 15 bp, Homo sapiens
taaaaattgcattcc

SEQ ID NO: 1704882 - DNA, 15 bp, Homo sapiens
aaaaattgcattcca

SEQ ID NO: 1704883 - DNA, 15 bp, Homo sapiens
aaaattgcattccag

SEQ ID NO: 1704884 - DNA, 15 bp, Homo sapiens
aaattgcattccagt

SEQ ID NO: 1704885 - DNA, 15 bp, Homo sapiens
aattgcattccagtt

SEQ ID NO: 1704886 - DNA, 15 bp, Homo sapiens
attgcattccagttg

SEQ ID NO: 1704887 - DNA, 15 bp, Homo sapiens
ttgcattccagttgc

SEQ ID NO: 1704888 - DNA, 15 bp, Homo sapiens
tgcattccagttgct

SEQ ID NO: 1704889 - DNA, 15 bp, Homo sapiens
gcattccagttgctt

SEQ ID NO: 1704890 - DNA, 15 bp, Homo sapiens
cattccagttgcttg

SEQ ID NO: 1704891 - DNA, 15 bp, Homo sapiens
attccagttgcttga

SEQ ID NO: 1704892 - DNA, 15 bp, Homo sapiens
ttccagttgcttgaa

SEQ ID NO: 1704893 - DNA, 15 bp, Homo sapiens
tccagttgcttgaaa

SEQ ID NO: 1704894 - DNA, 15 bp, Homo sapiens
ccagttgcttgaaag

SEQ ID NO: 1704895 - DNA, 15 bp, Homo sapiens
cagttgcttgaaagc

SEQ ID NO: 1704896 - DNA, 15 bp, Homo sapiens
agttgcttgaaagct

SEQ ID NO: 1704897 - DNA, 15 bp, Homo sapiens
gttgcttgaaagctt

SEQ ID NO: 1704898 - DNA, 15 bp, Homo sapiens
ttgcttgaaagcttg

SEQ ID NO: 1704899 - DNA, 15 bp, Homo sapiens
tgcttgaaagcttgt

SEQ ID NO: 1704900 - DNA, 15 bp, Homo sapiens
gcttgaaagcttgtg

SEQ ID NO: 1704901 - DNA, 15 bp, Homo sapiens
cttgaaagcttgtga

SEQ ID NO: 1704902 - DNA, 15 bp, Homo sapiens
ttgaaagcttgtgat

SEQ ID NO: 1704903 - DNA, 15 bp, Homo sapiens
tgaaagcttgtgatc

SEQ ID NO: 1704904 - DNA, 15 bp, Homo sapiens
gaaagcttgtgatca

SEQ ID NO: 1704905 - DNA, 15 bp, Homo sapiens
aaagcttgtgatcag

SEQ ID NO: 1704906 - DNA, 15 bp, Homo sapiens
aagcttgtgatcaga

SEQ ID NO: 1704907 - DNA, 15 bp, Homo sapiens
agcttgtgatcagat

SEQ ID NO: 1704908 - DNA, 15 bp, Homo sapiens
gcttgtgatcagatg

SEQ ID NO: 1704909 - DNA, 15 bp, Homo sapiens
cttgtgatcagatgc

SEQ ID NO: 1704910 - DNA, 15 bp, Homo sapiens
ttgtgatcagatgca

SEQ ID NO: 1704911 - DNA, 15 bp, Homo sapiens
tgtgatcagatgcaa

SEQ ID NO: 1704912 - DNA, 15 bp, Homo sapiens
gtgatcagatgcaat

SEQ ID NO: 1704913 - DNA, 15 bp, Homo sapiens
tgatcagatgcaata

SEQ ID NO: 1704914 - DNA, 15 bp, Homo sapiens
gatcagatgcaataa

SEQ ID NO: 1704915 - DNA, 15 bp, Homo sapiens
atcagatgcaataaa

SEQ ID NO: 1704916 - DNA, 15 bp, Homo sapiens
tcagatgcaataaat

SEQ ID NO: 1704917 - DNA, 15 bp, Homo sapiens
cagatgcaataaatg

SEQ ID NO: 1704918 - DNA, 15 bp, Homo sapiens
agatgcaataaatgt

SEQ ID NO: 1704919 - DNA, 15 bp, Homo sapiens
gatgcaataaatgtt

SEQ ID NO: 1704920 - DNA, 15 bp, Homo sapiens
atgcaataaatgttt

SEQ ID NO: 1704921 - DNA, 15 bp, Homo sapiens
tgcaataaatgtttt

SEQ ID NO: 1704922 - DNA, 15 bp, Homo sapiens
gcaataaatgttttt

SEQ ID NO: 1704923 - DNA, 15 bp, Homo sapiens
caataaatgttttta

SEQ ID NO: 1704924 - DNA, 15 bp, Homo sapiens
aataaatgtttttat

SEQ ID NO: 1704925 - DNA, 15 bp, Homo sapiens
ataaatgtttttatt

SEQ ID NO: 1704926 - DNA, 15 bp, Homo sapiens
taaatgtttttatta

SEQ ID NO: 1704927 - DNA, 15 bp, Homo sapiens
aaatgtttttattat

SEQ ID NO: 1704928 - DNA, 15 bp, Homo sapiens
aatgtttttattatt

SEQ ID NO: 1704929 - DNA, 15 bp, Homo sapiens
atgtttttattattt

SEQ ID NO: 1704930 - DNA, 15 bp, Homo sapiens
tgtttttattattta

SEQ ID NO: 1704931 - DNA, 15 bp, Homo sapiens
gtttttattatttat

SEQ ID NO: 1704932 - DNA, 15 bp, Homo sapiens
tttttattatttatt

SEQ ID NO: 1704933 - DNA, 15 bp, Homo sapiens
ttttattatttattt

SEQ ID NO: 1704934 - DNA, 15 bp, Homo sapiens
tttattatttatttt

SEQ ID NO: 1704935 - DNA, 15 bp, Homo sapiens
ttattatttattttg

SEQ ID NO: 1704936 - DNA, 15 bp, Homo sapiens
tattatttattttgt

SEQ ID NO: 1704937 - DNA, 15 bp, Homo sapiens
attatttattttgtg

SEQ ID NO: 1704938 - DNA, 15 bp, Homo sapiens
ttatttattttgtgc

SEQ ID NO: 1704939 - DNA, 15 bp, Homo sapiens
tatttattttgtgca

SEQ ID NO: 1704940 - DNA, 15 bp, Homo sapiens
atttattttgtgcaa

SEQ ID NO: 1704941 - DNA, 15 bp, Homo sapiens
tttattttgtgcaaa

SEQ ID NO: 1704942 - DNA, 15 bp, Homo sapiens
ttattttgtgcaaat

SEQ ID NO: 1704943 - DNA, 15 bp, Homo sapiens
tattttgtgcaaata

SEQ ID NO: 1704944 - DNA, 15 bp, Homo sapiens
attttgtgcaaatag

SEQ ID NO: 1704945 - DNA, 15 bp, Homo sapiens
ttttgtgcaaatagg

SEQ ID NO: 1704946 - DNA, 15 bp, Homo sapiens
tttgtgcaaatagga

SEQ ID NO: 1704947 - DNA, 15 bp, Homo sapiens
ttgtgcaaataggag

SEQ ID NO: 1704948 - DNA, 15 bp, Homo sapiens
tgtgcaaataggaga

SEQ ID NO: 1704949 - DNA, 15 bp, Homo sapiens
gtgcaaataggagag

SEQ ID NO: 1704950 - DNA, 15 bp, Homo sapiens
tgcaaataggagaga

SEQ ID NO: 1704951 - DNA, 15 bp, Homo sapiens
gcaaataggagagac

SEQ ID NO: 1704952 - DNA, 15 bp, Homo sapiens
caaataggagagact

SEQ ID NO: 1704953 - DNA, 15 bp, Homo sapiens
aaataggagagacta

SEQ ID NO: 1704954 - DNA, 15 bp, Homo sapiens
aataggagagactat

SEQ ID NO: 1704955 - DNA, 15 bp, Homo sapiens
ataggagagactatt

SEQ ID NO: 1704956 - DNA, 15 bp, Homo sapiens
taggagagactatta

SEQ ID NO: 1704957 - DNA, 15 bp, Homo sapiens
aggagagactattaa

SEQ ID NO: 1704958 - DNA, 15 bp, Homo sapiens
ggagagactattaag

SEQ ID NO: 1704959 - DNA, 15 bp, Homo sapiens
gagagactattaaga

SEQ ID NO: 1704960 - DNA, 15 bp, Homo sapiens
agagactattaagat

SEQ ID NO: 1704961 - DNA, 15 bp, Homo sapiens
gagactattaagatt

SEQ ID NO: 1704962 - DNA, 15 bp, Homo sapiens
agactattaagattg

SEQ ID NO: 1704963 - DNA, 15 bp, Homo sapiens
gactattaagattgt

SEQ ID NO: 1704964 - DNA, 15 bp, Homo sapiens
actattaagattgtg

SEQ ID NO: 1704965 - DNA, 15 bp, Homo sapiens
ctattaagattgtga

SEQ ID NO: 1704966 - DNA, 15 bp, Homo sapiens
tattaagattgtgat

SEQ ID NO: 1704967 - DNA, 15 bp, Homo sapiens
attaagattgtgatt

SEQ ID NO: 1704968 - DNA, 15 bp, Homo sapiens
ttaagattgtgattg

SEQ ID NO: 1704969 - DNA, 15 bp, Homo sapiens
taagattgtgattga

SEQ ID NO: 1704970 - DNA, 15 bp, Homo sapiens
aagattgtgattgaa

SEQ ID NO: 1704971 - DNA, 15 bp, Homo sapiens
agattgtgattgaag

SEQ ID NO: 1704972 - DNA, 15 bp, Homo sapiens
gattgtgattgaaga

SEQ ID NO: 1704973 - DNA, 15 bp, Homo sapiens
attgtgattgaagat

SEQ ID NO: 1704974 - DNA, 15 bp, Homo sapiens
ttgtgattgaagatt

SEQ ID NO: 1704975 - DNA, 15 bp, Homo sapiens
tgtgattgaagatta

SEQ ID NO: 1704976 - DNA, 15 bp, Homo sapiens
gtgattgaagattat

SEQ ID NO: 1704977 - DNA, 15 bp, Homo sapiens
tgattgaagattatg

SEQ ID NO: 1704978 - DNA, 15 bp, Homo sapiens
gattgaagattatgt

SEQ ID NO: 1704979 - DNA, 15 bp, Homo sapiens
attgaagattatgtg

SEQ ID NO: 1704980 - DNA, 15 bp, Homo sapiens
ttgaagattatgtgc

SEQ ID NO: 1704981 - DNA, 15 bp, Homo sapiens
tgaagattatgtgca

SEQ ID NO: 1704982 - DNA, 15 bp, Homo sapiens
gaagattatgtgcaa

SEQ ID NO: 1704983 - DNA, 15 bp, Homo sapiens
aagattatgtgcaac

SEQ ID NO: 1704984 - DNA, 15 bp, Homo sapiens
agattatgtgcaaca

SEQ ID NO: 1704985 - DNA, 15 bp, Homo sapiens
gattatgtgcaacac

SEQ ID NO: 1704986 - DNA, 15 bp, Homo sapiens
attatgtgcaacact

SEQ ID NO: 1704987 - DNA, 15 bp, Homo sapiens
ttatgtgcaacactt

SEQ ID NO: 1704988 - DNA, 15 bp, Homo sapiens
tatgtgcaacacttg

SEQ ID NO: 1704989 - DNA, 15 bp, Homo sapiens
atgtgcaacacttga

SEQ ID NO: 1704990 - DNA, 15 bp, Homo sapiens
tgtgcaacacttgag

SEQ ID NO: 1704991 - DNA, 15 bp, Homo sapiens
gtgcaacacttgagt

SEQ ID NO: 1704992 - DNA, 15 bp, Homo sapiens
tgcaacacttgagtg

SEQ ID NO: 1704993 - DNA, 15 bp, Homo sapiens
gcaacacttgagtgg

SEQ ID NO: 1704994 - DNA, 15 bp, Homo sapiens
caacacttgagtggc

SEQ ID NO: 1704995 - DNA, 15 bp, Homo sapiens
aacacttgagtggct

SEQ ID NO: 1704996 - DNA, 15 bp, Homo sapiens
acacttgagtggcta

SEQ ID NO: 1704997 - DNA, 15 bp, Homo sapiens
cacttgagtggctat

SEQ ID NO: 1704998 - DNA, 15 bp, Homo sapiens
acttgagtggctatc

SEQ ID NO: 1704999 - DNA, 15 bp, Homo sapiens
cttgagtggctatca

SEQ ID NO: 1705000 - DNA, 15 bp, Homo sapiens
ttgagtggctatcac

SEQ ID NO: 1705001 - DNA, 15 bp, Homo sapiens
tgagtggctatcact

SEQ ID NO: 1705002 - DNA, 15 bp, Homo sapiens
gagtggctatcactt

SEQ ID NO: 1705003 - DNA, 15 bp, Homo sapiens
agtggctatcacttc

SEQ ID NO: 1705004 - DNA, 15 bp, Homo sapiens
gtggctatcacttca

SEQ ID NO: 1705005 - DNA, 15 bp, Homo sapiens
tggctatcacttcaa

SEQ ID NO: 1705006 - DNA, 15 bp, Homo sapiens
ggctatcacttcaaa

SEQ ID NO: 1705007 - DNA, 15 bp, Homo sapiens
gctatcacttcaaac

SEQ ID NO: 1705008 - DNA, 15 bp, Homo sapiens
ctatcacttcaaact

SEQ ID NO: 1705009 - DNA, 15 bp, Homo sapiens
tatcacttcaaactg

SEQ ID NO: 1705010 - DNA, 15 bp, Homo sapiens
atcacttcaaactga

SEQ ID NO: 1705011 - DNA, 15 bp, Homo sapiens
tcacttcaaactgaa

SEQ ID NO: 1705012 - DNA, 15 bp, Homo sapiens
cacttcaaactgaaa

SEQ ID NO: 1705013 - DNA, 15 bp, Homo sapiens
acttcaaactgaaat

SEQ ID NO: 1705014 - DNA, 15 bp, Homo sapiens
cttcaaactgaaatt

SEQ ID NO: 1705015 - DNA, 15 bp, Homo sapiens
ttcaaactgaaattt

SEQ ID NO: 1705016 - DNA, 15 bp, Homo sapiens
tcaaactgaaatttg

SEQ ID NO: 1705017 - DNA, 15 bp, Homo sapiens
caaactgaaatttga

SEQ ID NO: 1705018 - DNA, 15 bp, Homo sapiens
aaactgaaatttgac

SEQ ID NO: 1705019 - DNA, 15 bp, Homo sapiens
aactgaaatttgacc

SEQ ID NO: 1705020 - DNA, 15 bp, Homo sapiens
actgaaatttgaccc

SEQ ID NO: 1705021 - DNA, 15 bp, Homo sapiens
ctgaaatttgaccca

SEQ ID NO: 1705022 - DNA, 15 bp, Homo sapiens
tgaaatttgacccag

SEQ ID NO: 1705023 - DNA, 15 bp, Homo sapiens
gaaatttgacccaga

SEQ ID NO: 1705024 - DNA, 15 bp, Homo sapiens
aaatttgacccagaa

SEQ ID NO: 1705025 - DNA, 15 bp, Homo sapiens
aatttgacccagaac

SEQ ID NO: 1705026 - DNA, 15 bp, Homo sapiens
atttgacccagaact

SEQ ID NO: 1705027 - DNA, 15 bp, Homo sapiens
tttgacccagaacta

SEQ ID NO: 1705028 - DNA, 15 bp, Homo sapiens
ttgacccagaactac

SEQ ID NO: 1705029 - DNA, 15 bp, Homo sapiens
tgacccagaactact

SEQ ID NO: 1705030 - DNA, 15 bp, Homo sapiens
gacccagaactactt

SEQ ID NO: 1705031 - DNA, 15 bp, Homo sapiens
acccagaactacttt

SEQ ID NO: 1705032 - DNA, 15 bp, Homo sapiens
cccagaactactttt

SEQ ID NO: 1705033 - DNA, 15 bp, Homo sapiens
ccagaactacttttc

SEQ ID NO: 1705034 - DNA, 15 bp, Homo sapiens
cagaactacttttca

SEQ ID NO: 1705035 - DNA, 15 bp, Homo sapiens
agaactacttttcaa

SEQ ID NO: 1705036 - DNA, 15 bp, Homo sapiens
gaactacttttcaac

SEQ ID NO: 1705037 - DNA, 15 bp, Homo sapiens
aactacttttcaaca

SEQ ID NO: 1705038 - DNA, 15 bp, Homo sapiens
actacttttcaacaa

SEQ ID NO: 1705039 - DNA, 15 bp, Homo sapiens
ctacttttcaacaaa

SEQ ID NO: 1705040 - DNA, 15 bp, Homo sapiens
tacttttcaacaaac

SEQ ID NO: 1705041 - DNA, 15 bp, Homo sapiens
acttttcaacaaaca

SEQ ID NO: 1705042 - DNA, 15 bp, Homo sapiens
cttttcaacaaacaa

SEQ ID NO: 1705043 - DNA, 15 bp, Homo sapiens
ttttcaacaaacaat

SEQ ID NO: 1705044 - DNA, 15 bp, Homo sapiens
tttcaacaaacaatt

SEQ ID NO: 1705045 - DNA, 15 bp, Homo sapiens
ttcaacaaacaattc

SEQ ID NO: 1705046 - DNA, 15 bp, Homo sapiens
tcaacaaacaattcc

SEQ ID NO: 1705047 - DNA, 15 bp, Homo sapiens
caacaaacaattcca

SEQ ID NO: 1705048 - DNA, 15 bp, Homo sapiens
aacaaacaattccag

SEQ ID NO: 1705049 - DNA, 15 bp, Homo sapiens
acaaacaattccagt

SEQ ID NO: 1705050 - DNA, 15 bp, Homo sapiens
caaacaattccagta

SEQ ID NO: 1705051 - DNA, 15 bp, Homo sapiens
aaacaattccagtac

SEQ ID NO: 1705052 - DNA, 15 bp, Homo sapiens
aacaattccagtacc

SEQ ID NO: 1705053 - DNA, 15 bp, Homo sapiens
acaattccagtacca

SEQ ID NO: 1705054 - DNA, 15 bp, Homo sapiens
caattccagtaccaa

SEQ ID NO: 1705055 - DNA, 15 bp, Homo sapiens
aattccagtaccaaa

SEQ ID NO: 1705056 - DNA, 15 bp, Homo sapiens
attccagtaccaaaa

SEQ ID NO: 1705057 - DNA, 15 bp, Homo sapiens
ttccagtaccaaaat

SEQ ID NO: 1705058 - DNA, 15 bp, Homo sapiens
tccagtaccaaaatc

SEQ ID NO: 1705059 - DNA, 15 bp, Homo sapiens
ccagtaccaaaatcg

SEQ ID NO: 1705060 - DNA, 15 bp, Homo sapiens
cagtaccaaaatcgt

SEQ ID NO: 1705061 - DNA, 15 bp, Homo sapiens
agtaccaaaatcgta

SEQ ID NO: 1705062 - DNA, 15 bp, Homo sapiens
gtaccaaaatcgtat

SEQ ID NO: 1705063 - DNA, 15 bp, Homo sapiens
taccaaaatcgtatt

SEQ ID NO: 1705064 - DNA, 15 bp, Homo sapiens
accaaaatcgtattg

SEQ ID NO: 1705065 - DNA, 15 bp, Homo sapiens
ccaaaatcgtattgc

SEQ ID NO: 1705066 - DNA, 15 bp, Homo sapiens
caaaatcgtattgct

SEQ ID NO: 1705067 - DNA, 15 bp, Homo sapiens
aaaatcgtattgctg

SEQ ID NO: 1705068 - DNA, 15 bp, Homo sapiens
aaatcgtattgctgc

SEQ ID NO: 1705069 - DNA, 15 bp, Homo sapiens
aatcgtattgctgct

SEQ ID NO: 1705070 - DNA, 15 bp, Homo sapiens
atcgtattgctgctg

SEQ ID NO: 1705071 - DNA, 15 bp, Homo sapiens
tcgtattgctgctga

SEQ ID NO: 1705072 - DNA, 15 bp, Homo sapiens
cgtattgctgctgaa

SEQ ID NO: 1705073 - DNA, 15 bp, Homo sapiens
gtattgctgctgaat

SEQ ID NO: 1705074 - DNA, 15 bp, Homo sapiens
tattgctgctgaatt

SEQ ID NO: 1705075 - DNA, 15 bp, Homo sapiens
attgctgctgaattt

SEQ ID NO: 1705076 - DNA, 15 bp, Homo sapiens
ttgctgctgaattta

SEQ ID NO: 1705077 - DNA, 15 bp, Homo sapiens
tgctgctgaatttaa

SEQ ID NO: 1705078 - DNA, 15 bp, Homo sapiens
gctgctgaatttaac

SEQ ID NO: 1705079 - DNA, 15 bp, Homo sapiens
ctgctgaatttaaca

SEQ ID NO: 1705080 - DNA, 15 bp, Homo sapiens
tgctgaatttaacac

SEQ ID NO: 1705081 - DNA, 15 bp, Homo sapiens
gctgaatttaacacc

SEQ ID NO: 1705082 - DNA, 15 bp, Homo sapiens
ctgaatttaacaccc

SEQ ID NO: 1705083 - DNA, 15 bp, Homo sapiens
tgaatttaacaccct

SEQ ID NO: 1705084 - DNA, 15 bp, Homo sapiens
gaatttaacaccctc

SEQ ID NO: 1705085 - DNA, 15 bp, Homo sapiens
aatttaacaccctct

SEQ ID NO: 1705086 - DNA, 15 bp, Homo sapiens
atttaacaccctcta

SEQ ID NO: 1705087 - DNA, 15 bp, Homo sapiens
tttaacaccctctat

SEQ ID NO: 1705088 - DNA, 15 bp, Homo sapiens
ttaacaccctctatc

SEQ ID NO: 1705089 - DNA, 15 bp, Homo sapiens
taacaccctctatca

SEQ ID NO: 1705090 - DNA, 15 bp, Homo sapiens
aacaccctctatcac

SEQ ID NO: 1705091 - DNA, 15 bp, Homo sapiens
acaccctctatcact

SEQ ID NO: 1705092 - DNA, 15 bp, Homo sapiens
caccctctatcactg

SEQ ID NO: 1705093 - DNA, 15 bp, Homo sapiens
accctctatcactgg

SEQ ID NO: 1705094 - DNA, 15 bp, Homo sapiens
ccctctatcactggc

SEQ ID NO: 1705095 - DNA, 15 bp, Homo sapiens
cctctatcactggca

SEQ ID NO: 1705096 - DNA, 15 bp, Homo sapiens
ctctatcactggcat

SEQ ID NO: 1705097 - DNA, 15 bp, Homo sapiens
tctatcactggcatc

SEQ ID NO: 1705098 - DNA, 15 bp, Homo sapiens
ctatcactggcatcc

SEQ ID NO: 1705099 - DNA, 15 bp, Homo sapiens
tatcactggcatccc

SEQ ID NO: 1705100 - DNA, 15 bp, Homo sapiens
atcactggcatcccc

SEQ ID NO: 1705101 - DNA, 15 bp, Homo sapiens
tcactggcatcccct

SEQ ID NO: 1705102 - DNA, 15 bp, Homo sapiens
cactggcatcccctt

SEQ ID NO: 1705103 - DNA, 15 bp, Homo sapiens
actggcatccccttc

SEQ ID NO: 1705104 - DNA, 15 bp, Homo sapiens
ctggcatccccttct

SEQ ID NO: 1705105 - DNA, 15 bp, Homo sapiens
aataaatattttagg

SEQ ID NO: 1705106 - DNA, 15 bp, Homo sapiens
ataaatattttaggc

SEQ ID NO: 1705107 - DNA, 15 bp, Homo sapiens
taaatattttaggct

SEQ ID NO: 1705108 - DNA, 15 bp, Homo sapiens
aaatattttaggctt

SEQ ID NO: 1705109 - DNA, 15 bp, Homo sapiens
aatattttaggcttg

SEQ ID NO: 1705110 - DNA, 15 bp, Homo sapiens
atattttaggcttga

SEQ ID NO: 1705111 - DNA, 15 bp, Homo sapiens
tattttaggcttgaa

SEQ ID NO: 1705112 - DNA, 15 bp, Homo sapiens
attttaggcttgaat

SEQ ID NO: 1705113 - DNA, 15 bp, Homo sapiens
ttttaggcttgaata

SEQ ID NO: 1705114 - DNA, 15 bp, Homo sapiens
tttaggcttgaatac

SEQ ID NO: 1705115 - DNA, 15 bp, Homo sapiens
ttaggcttgaatact

SEQ ID NO: 1705116 - DNA, 15 bp, Homo sapiens
taggcttgaatacta

SEQ ID NO: 1705117 - DNA, 15 bp, Homo sapiens
aggcttgaatactag

SEQ ID NO: 1705118 - DNA, 15 bp, Homo sapiens
ggcttgaatactagt

SEQ ID NO: 1705119 - DNA, 15 bp, Homo sapiens
gcttgaatactagtg

SEQ ID NO: 1705120 - DNA, 15 bp, Homo sapiens
cttgaatactagtgt

SEQ ID NO: 1705121 - DNA, 15 bp, Homo sapiens
ttgaatactagtgtt

SEQ ID NO: 1705122 - DNA, 15 bp, Homo sapiens
tgaatactagtgtta

SEQ ID NO: 1705123 - DNA, 15 bp, Homo sapiens
gaatactagtgttat

SEQ ID NO: 1705124 - DNA, 15 bp, Homo sapiens
aatactagtgttatt

SEQ ID NO: 1705125 - DNA, 15 bp, Homo sapiens
atactagtgttattt

SEQ ID NO: 1705126 - DNA, 15 bp, Homo sapiens
tactagtgttatttt

SEQ ID NO: 1705127 - DNA, 15 bp, Homo sapiens
actagtgttattttt

SEQ ID NO: 1705128 - DNA, 15 bp, Homo sapiens
ctagtgttatttttg

SEQ ID NO: 1705129 - DNA, 15 bp, Homo sapiens
tagtgttatttttga

SEQ ID NO: 1705130 - DNA, 15 bp, Homo sapiens
agtgttatttttgaa

SEQ ID NO: 1705131 - DNA, 15 bp, Homo sapiens
gtgttatttttgaaa

SEQ ID NO: 1705132 - DNA, 15 bp, Homo sapiens
tgttatttttgaaat

SEQ ID NO: 1705133 - DNA, 15 bp, Homo sapiens
gttatttttgaaatg

SEQ ID NO: 1705134 - DNA, 15 bp, Homo sapiens
tatttttgaaatgta

SEQ ID NO: 1705135 - DNA, 15 bp, Homo sapiens
atttttgaaatgtaa

SEQ ID NO: 1705136 - DNA, 15 bp, Homo sapiens
tttttgaaatgtaaa

SEQ ID NO: 1705137 - DNA, 15 bp, Homo sapiens
ttttgaaatgtaaaa

SEQ ID NO: 1705138 - DNA, 15 bp, Homo sapiens
tttgaaatgtaaaaa

SEQ ID NO: 1705139 - DNA, 15 bp, Homo sapiens
ttgaaatgtaaaaag

SEQ ID NO: 1705140 - DNA, 15 bp, Homo sapiens
tgaaatgtaaaaagg

SEQ ID NO: 1705141 - DNA, 15 bp, Homo sapiens
gaaatgtaaaaaggc

SEQ ID NO: 1705142 - DNA, 15 bp, Homo sapiens
aaatgtaaaaaggca

SEQ ID NO: 1705143 - DNA, 15 bp, Homo sapiens
aatgtaaaaaggcaa

SEQ ID NO: 1705144 - DNA, 15 bp, Homo sapiens
atgtaaaaaggcaaa

SEQ ID NO: 1705145 - DNA, 15 bp, Homo sapiens
tgtaaaaaggcaaat

SEQ ID NO: 1705146 - DNA, 15 bp, Homo sapiens
gtaaaaaggcaaatt

SEQ ID NO: 1705147 - DNA, 15 bp, Homo sapiens
taaaaaggcaaatta

SEQ ID NO: 1705148 - DNA, 15 bp, Homo sapiens
aaaaaggcaaattag

SEQ ID NO: 1705149 - DNA, 15 bp, Homo sapiens
aaaaggcaaattagt

SEQ ID NO: 1705150 - DNA, 15 bp, Homo sapiens
aaaggcaaattagtt

SEQ ID NO: 1705151 - DNA, 15 bp, Homo sapiens
aaggcaaattagttc

SEQ ID NO: 1705152 - DNA, 15 bp, Homo sapiens
aggcaaattagttct

SEQ ID NO: 1705153 - DNA, 15 bp, Homo sapiens
ggcaaattagttcta

SEQ ID NO: 1705154 - DNA, 15 bp, Homo sapiens
gcaaattagttctag

SEQ ID NO: 1705155 - DNA, 15 bp, Homo sapiens
caaattagttctagg

SEQ ID NO: 1705156 - DNA, 15 bp, Homo sapiens
aaattagttctaggc

SEQ ID NO: 1705157 - DNA, 15 bp, Homo sapiens
aattagttctaggct

SEQ ID NO: 1705158 - DNA, 15 bp, Homo sapiens
attagttctaggctg

SEQ ID NO: 1705159 - DNA, 15 bp, Homo sapiens
ttagttctaggctgg

SEQ ID NO: 1705160 - DNA, 15 bp, Homo sapiens
tagttctaggctggt

SEQ ID NO: 1705161 - DNA, 15 bp, Homo sapiens
agttctaggctggtg

SEQ ID NO: 1705162 - DNA, 15 bp, Homo sapiens
gttctaggctggtgt

SEQ ID NO: 1705163 - DNA, 15 bp, Homo sapiens
ttctaggctggtgtc

SEQ ID NO: 1705164 - DNA, 15 bp, Homo sapiens
tctaggctggtgtcc

SEQ ID NO: 1705165 - DNA, 15 bp, Homo sapiens
ctaggctggtgtccc

SEQ ID NO: 1705166 - DNA, 15 bp, Homo sapiens
taggctggtgtccca

SEQ ID NO: 1705167 - DNA, 15 bp, Homo sapiens
aggctggtgtcccat

SEQ ID NO: 1705168 - DNA, 15 bp, Homo sapiens
ggctggtgtcccatt

SEQ ID NO: 1705169 - DNA, 15 bp, Homo sapiens
gctggtgtcccattg

SEQ ID NO: 1705170 - DNA, 15 bp, Homo sapiens
ctggtgtcccattga

SEQ ID NO: 1705171 - DNA, 15 bp, Homo sapiens
tggtgtcccattgaa

SEQ ID NO: 1705172 - DNA, 15 bp, Homo sapiens
ggtgtcccattgaat

SEQ ID NO: 1705173 - DNA, 15 bp, Homo sapiens
gtgtcccattgaatt

SEQ ID NO: 1705174 - DNA, 15 bp, Homo sapiens
tgtcccattgaattt

SEQ ID NO: 1705175 - DNA, 15 bp, Homo sapiens
gtcccattgaatttt

SEQ ID NO: 1705176 - DNA, 15 bp, Homo sapiens
tcccattgaatttta

SEQ ID NO: 1705177 - DNA, 15 bp, Homo sapiens
cccattgaattttaa

SEQ ID NO: 1705178 - DNA, 15 bp, Homo sapiens
ccattgaattttaag

SEQ ID NO: 1705179 - DNA, 15 bp, Homo sapiens
cattgaattttaagc

SEQ ID NO: 1705180 - DNA, 15 bp, Homo sapiens
attgaattttaagca

SEQ ID NO: 1705181 - DNA, 15 bp, Homo sapiens
ttgaattttaagcag

SEQ ID NO: 1705182 - DNA, 15 bp, Homo sapiens
tgaattttaagcaga

SEQ ID NO: 1705183 - DNA, 15 bp, Homo sapiens
gaattttaagcagag

SEQ ID NO: 1705184 - DNA, 15 bp, Homo sapiens
aattttaagcagagc

SEQ ID NO: 1705185 - DNA, 15 bp, Homo sapiens
attttaagcagagct

SEQ ID NO: 1705186 - DNA, 15 bp, Homo sapiens
ttttaagcagagctc

SEQ ID NO: 1705187 - DNA, 15 bp, Homo sapiens
tttaagcagagctcc

SEQ ID NO: 1705188 - DNA, 15 bp, Homo sapiens
ttaagcagagctcct

SEQ ID NO: 1705189 - DNA, 15 bp, Homo sapiens
taagcagagctcctg

SEQ ID NO: 1705190 - DNA, 15 bp, Homo sapiens
aagcagagctcctgt

SEQ ID NO: 1705191 - DNA, 15 bp, Homo sapiens
agcagagctcctgtt

SEQ ID NO: 1705192 - DNA, 15 bp, Homo sapiens
gcagagctcctgttg

SEQ ID NO: 1705193 - DNA, 15 bp, Homo sapiens
cagagctcctgttga

SEQ ID NO: 1705194 - DNA, 15 bp, Homo sapiens
agagctcctgttgaa

SEQ ID NO: 1705195 - DNA, 15 bp, Homo sapiens
gagctcctgttgaaa

SEQ ID NO: 1705196 - DNA, 15 bp, Homo sapiens
agctcctgttgaaat

SEQ ID NO: 1705197 - DNA, 15 bp, Homo sapiens
gctcctgttgaaatg

SEQ ID NO: 1705198 - DNA, 15 bp, Homo sapiens
ctcctgttgaaatgt

SEQ ID NO: 1705199 - DNA, 15 bp, Homo sapiens
tcctgttgaaatgta

SEQ ID NO: 1705200 - DNA, 15 bp, Homo sapiens
cctgttgaaatgtag

SEQ ID NO: 1705201 - DNA, 15 bp, Homo sapiens
ctgttgaaatgtagg

SEQ ID NO: 1705202 - DNA, 15 bp, Homo sapiens
tgttgaaatgtaggt

SEQ ID NO: 1705203 - DNA, 15 bp, Homo sapiens
gttgaaatgtaggta

SEQ ID NO: 1705204 - DNA, 15 bp, Homo sapiens
ttgaaatgtaggtaa

SEQ ID NO: 1705205 - DNA, 15 bp, Homo sapiens
tgaaatgtaggtaag

SEQ ID NO: 1705206 - DNA, 15 bp, Homo sapiens
gaaatgtaggtaagc

SEQ ID NO: 1705207 - DNA, 15 bp, Homo sapiens
aaatgtaggtaagca

SEQ ID NO: 1705208 - DNA, 15 bp, Homo sapiens
aatgtaggtaagcat

SEQ ID NO: 1705209 - DNA, 15 bp, Homo sapiens
atgtaggtaagcatc

SEQ ID NO: 1705210 - DNA, 15 bp, Homo sapiens
tgtaggtaagcatct

SEQ ID NO: 1705211 - DNA, 15 bp, Homo sapiens
gtaggtaagcatctt

SEQ ID NO: 1705212 - DNA, 15 bp, Homo sapiens
taggtaagcatcttt

SEQ ID NO: 1705213 - DNA, 15 bp, Homo sapiens
aggtaagcatctttc

SEQ ID NO: 1705214 - DNA, 15 bp, Homo sapiens
ggtaagcatctttcc

SEQ ID NO: 1705215 - DNA, 15 bp, Homo sapiens
gtaagcatctttcca

SEQ ID NO: 1705216 - DNA, 15 bp, Homo sapiens
taagcatctttccag

SEQ ID NO: 1705217 - DNA, 15 bp, Homo sapiens
aagcatctttccagc

SEQ ID NO: 1705218 - DNA, 15 bp, Homo sapiens
agcatctttccagca

SEQ ID NO: 1705219 - DNA, 15 bp, Homo sapiens
gcatctttccagcaa

SEQ ID NO: 1705220 - DNA, 15 bp, Homo sapiens
catctttccagcaaa

SEQ ID NO: 1705221 - DNA, 15 bp, Homo sapiens
atctttccagcaaat

SEQ ID NO: 1705222 - DNA, 15 bp, Homo sapiens
tctttccagcaaata

SEQ ID NO: 1705223 - DNA, 15 bp, Homo sapiens
ctttccagcaaataa

SEQ ID NO: 1705224 - DNA, 15 bp, Homo sapiens
tttccagcaaataaa

SEQ ID NO: 1705225 - DNA, 15 bp, Homo sapiens
ttccagcaaataaaa

SEQ ID NO: 1705226 - DNA, 15 bp, Homo sapiens
tccagcaaataaaaa

SEQ ID NO: 1705227 - DNA, 15 bp, Homo sapiens
ccagcaaataaaaat

SEQ ID NO: 1705228 - DNA, 15 bp, Homo sapiens
cagcaaataaaaatt

SEQ ID NO: 1705229 - DNA, 15 bp, Homo sapiens
agcaaataaaaattg

SEQ ID NO: 1705230 - DNA, 15 bp, Homo sapiens
gcaaataaaaattgt

SEQ ID NO: 1705231 - DNA, 15 bp, Homo sapiens
caaataaaaattgtc

SEQ ID NO: 1705232 - DNA, 15 bp, Homo sapiens
aaataaaaattgtct

SEQ ID NO: 1705233 - DNA, 15 bp, Homo sapiens
aataaaaattgtctc

SEQ ID NO: 1705234 - DNA, 15 bp, Homo sapiens
ataaaaattgtctcc

SEQ ID NO: 1705235 - DNA, 15 bp, Homo sapiens
taaaaattgtctccg

SEQ ID NO: 1705236 - DNA, 15 bp, Homo sapiens
aaaaattgtctccgc

SEQ ID NO: 1705237 - DNA, 15 bp, Homo sapiens
aaaattgtctccgct

SEQ ID NO: 1705238 - DNA, 15 bp, Homo sapiens
aaattgtctccgctg

SEQ ID NO: 1705239 - DNA, 15 bp, Homo sapiens
aattgtctccgctgg

SEQ ID NO: 1705240 - DNA, 15 bp, Homo sapiens
attgtctccgctggg

SEQ ID NO: 1705241 - DNA, 15 bp, Homo sapiens
ttgtctccgctggga

SEQ ID NO: 1705242 - DNA, 15 bp, Homo sapiens
tgtctccgctgggag

SEQ ID NO: 1705243 - DNA, 15 bp, Homo sapiens
gtctccgctgggagt

SEQ ID NO: 1705244 - DNA, 15 bp, Homo sapiens
tctccgctgggagtt

SEQ ID NO: 1705245 - DNA, 15 bp, Homo sapiens
ctccgctgggagttt

SEQ ID NO: 1705246 - DNA, 15 bp, Homo sapiens
tccgctgggagtttc

SEQ ID NO: 1705247 - DNA, 15 bp, Homo sapiens
ccgctgggagtttca

SEQ ID NO: 1705248 - DNA, 15 bp, Homo sapiens
cgctgggagtttcag

SEQ ID NO: 1705249 - DNA, 15 bp, Homo sapiens
gctgggagtttcagt

SEQ ID NO: 1705250 - DNA, 15 bp, Homo sapiens
ctgggagtttcagtt

SEQ ID NO: 1705251 - DNA, 15 bp, Homo sapiens
tgggagtttcagttt

SEQ ID NO: 1705252 - DNA, 15 bp, Homo sapiens
gggagtttcagtttt

SEQ ID NO: 1705253 - DNA, 15 bp, Homo sapiens
ggagtttcagtttta

SEQ ID NO: 1705254 - DNA, 15 bp, Homo sapiens
gagtttcagttttac

SEQ ID NO: 1705255 - DNA, 15 bp, Homo sapiens
agtttcagttttacc

SEQ ID NO: 1705256 - DNA, 15 bp, Homo sapiens
gtttcagttttacct

SEQ ID NO: 1705257 - DNA, 15 bp, Homo sapiens
tttcagttttacctg

SEQ ID NO: 1705258 - DNA, 15 bp, Homo sapiens
ttcagttttacctga

SEQ ID NO: 1705259 - DNA, 15 bp, Homo sapiens
tcagttttacctgat

SEQ ID NO: 1705260 - DNA, 15 bp, Homo sapiens
cagttttacctgatt

SEQ ID NO: 1705261 - DNA, 15 bp, Homo sapiens
agttttacctgattt

SEQ ID NO: 1705262 - DNA, 15 bp, Homo sapiens
gttttacctgatttg

SEQ ID NO: 1705263 - DNA, 15 bp, Homo sapiens
ttttacctgatttgt

SEQ ID NO: 1705264 - DNA, 15 bp, Homo sapiens
tttacctgatttgta

SEQ ID NO: 1705265 - DNA, 15 bp, Homo sapiens
ttacctgatttgtac

SEQ ID NO: 1705266 - DNA, 15 bp, Homo sapiens
tacctgatttgtacc

SEQ ID NO: 1705267 - DNA, 15 bp, Homo sapiens
acctgatttgtacct

SEQ ID NO: 1705268 - DNA, 15 bp, Homo sapiens
cctgatttgtaccta

SEQ ID NO: 1705269 - DNA, 15 bp, Homo sapiens
ctgatttgtacctaa

SEQ ID NO: 1705270 - DNA, 15 bp, Homo sapiens
tgatttgtacctaag

SEQ ID NO: 1705271 - DNA, 15 bp, Homo sapiens
gatttgtacctaagg

SEQ ID NO: 1705272 - DNA, 15 bp, Homo sapiens
atttgtacctaaggc

SEQ ID NO: 1705273 - DNA, 15 bp, Homo sapiens
tttgtacctaaggca

SEQ ID NO: 1705274 - DNA, 15 bp, Homo sapiens
ttgtacctaaggcaa

SEQ ID NO: 1705275 - DNA, 15 bp, Homo sapiens
tgtacctaaggcaag

SEQ ID NO: 1705276 - DNA, 15 bp, Homo sapiens
gtacctaaggcaagc

SEQ ID NO: 1705277 - DNA, 15 bp, Homo sapiens
tacctaaggcaagct

SEQ ID NO: 1705278 - DNA, 15 bp, Homo sapiens
acctaaggcaagctg

SEQ ID NO: 1705279 - DNA, 15 bp, Homo sapiens
cctaaggcaagctga

SEQ ID NO: 1705280 - DNA, 15 bp, Homo sapiens
ctaaggcaagctgaa

SEQ ID NO: 1705281 - DNA, 15 bp, Homo sapiens
taaggcaagctgaat

SEQ ID NO: 1705282 - DNA, 15 bp, Homo sapiens
aaggcaagctgaata

SEQ ID NO: 1705283 - DNA, 15 bp, Homo sapiens
aggcaagctgaatac

SEQ ID NO: 1705284 - DNA, 15 bp, Homo sapiens
ggcaagctgaataca

SEQ ID NO: 1705285 - DNA, 15 bp, Homo sapiens
gcaagctgaatacaa

SEQ ID NO: 1705286 - DNA, 15 bp, Homo sapiens
caagctgaatacaaa

SEQ ID NO: 1705287 - DNA, 15 bp, Homo sapiens
aagctgaatacaaac

SEQ ID NO: 1705288 - DNA, 15 bp, Homo sapiens
agctgaatacaaaca

SEQ ID NO: 1705289 - DNA, 15 bp, Homo sapiens
gctgaatacaaacag

SEQ ID NO: 1705290 - DNA, 15 bp, Homo sapiens
ctgaatacaaacagt

SEQ ID NO: 1705291 - DNA, 15 bp, Homo sapiens
tgaatacaaacagta

SEQ ID NO: 1705292 - DNA, 15 bp, Homo sapiens
gaatacaaacagtaa

SEQ ID NO: 1705293 - DNA, 15 bp, Homo sapiens
aatacaaacagtaaa

SEQ ID NO: 1705294 - DNA, 15 bp, Homo sapiens
atacaaacagtaaat

SEQ ID NO: 1705295 - DNA, 15 bp, Homo sapiens
tacaaacagtaaata

SEQ ID NO: 1705296 - DNA, 15 bp, Homo sapiens
acaaacagtaaatat

SEQ ID NO: 1705297 - DNA, 15 bp, Homo sapiens
caaacagtaaatatg

SEQ ID NO: 1705298 - DNA, 15 bp, Homo sapiens
aaacagtaaatatgc

SEQ ID NO: 1705299 - DNA, 15 bp, Homo sapiens
aacagtaaatatgcc

SEQ ID NO: 1705300 - DNA, 15 bp, Homo sapiens
acagtaaatatgcct

SEQ ID NO: 1705301 - DNA, 15 bp, Homo sapiens
cagtaaatatgccta

SEQ ID NO: 1705302 - DNA, 15 bp, Homo sapiens
agtaaatatgcctaa

SEQ ID NO: 1705303 - DNA, 15 bp, Homo sapiens
gtaaatatgcctaaa

SEQ ID NO: 1705304 - DNA, 15 bp, Homo sapiens
taaatatgcctaaaa

SEQ ID NO: 1705305 - DNA, 15 bp, Homo sapiens
aaatatgcctaaaat

SEQ ID NO: 1705306 - DNA, 15 bp, Homo sapiens
aatatgcctaaaatt

SEQ ID NO: 1705307 - DNA, 15 bp, Homo sapiens
atatgcctaaaattc

SEQ ID NO: 1705308 - DNA, 15 bp, Homo sapiens
tatgcctaaaattct

SEQ ID NO: 1705309 - DNA, 15 bp, Homo sapiens
atgcctaaaattctt

SEQ ID NO: 1705310 - DNA, 15 bp, Homo sapiens
tgcctaaaattcttg

SEQ ID NO: 1705311 - DNA, 15 bp, Homo sapiens
gcctaaaattcttgt

SEQ ID NO: 1705312 - DNA, 15 bp, Homo sapiens
cctaaaattcttgtt

SEQ ID NO: 1705313 - DNA, 15 bp, Homo sapiens
ctaaaattcttgttt

SEQ ID NO: 1705314 - DNA, 15 bp, Homo sapiens
taaaattcttgtttt

SEQ ID NO: 1705315 - DNA, 15 bp, Homo sapiens
aaaattcttgtttta

SEQ ID NO: 1705316 - DNA, 15 bp, Homo sapiens
aaattcttgttttac

SEQ ID NO: 1705317 - DNA, 15 bp, Homo sapiens
aattcttgttttaca

SEQ ID NO: 1705318 - DNA, 15 bp, Homo sapiens
attcttgttttacaa

SEQ ID NO: 1705319 - DNA, 15 bp, Homo sapiens
ttcttgttttacaac

SEQ ID NO: 1705320 - DNA, 15 bp, Homo sapiens
tcttgttttacaact

SEQ ID NO: 1705321 - DNA, 15 bp, Homo sapiens
cttgttttacaacta

SEQ ID NO: 1705322 - DNA, 15 bp, Homo sapiens
ttgttttacaactaa

SEQ ID NO: 1705323 - DNA, 15 bp, Homo sapiens
tgttttacaactaat

SEQ ID NO: 1705324 - DNA, 15 bp, Homo sapiens
gttttacaactaatt

SEQ ID NO: 1705325 - DNA, 15 bp, Homo sapiens
ttttacaactaattt

SEQ ID NO: 1705326 - DNA, 15 bp, Homo sapiens
tttacaactaatttt

SEQ ID NO: 1705327 - DNA, 15 bp, Homo sapiens
ttacaactaatttta

SEQ ID NO: 1705328 - DNA, 15 bp, Homo sapiens
tacaactaattttac

SEQ ID NO: 1705329 - DNA, 15 bp, Homo sapiens
acaactaattttact

SEQ ID NO: 1705330 - DNA, 15 bp, Homo sapiens
caactaattttactt

SEQ ID NO: 1705331 - DNA, 15 bp, Homo sapiens
aactaattttacttt

SEQ ID NO: 1705332 - DNA, 15 bp, Homo sapiens
actaattttactttc

SEQ ID NO: 1705333 - DNA, 15 bp, Homo sapiens
ctaattttactttcc

SEQ ID NO: 1705334 - DNA, 15 bp, Homo sapiens
aattttactttccac

SEQ ID NO: 1705335 - DNA, 15 bp, Homo sapiens
attttactttccaca

SEQ ID NO: 1705336 - DNA, 15 bp, Homo sapiens
ttttactttccacag

SEQ ID NO: 1705337 - DNA, 15 bp, Homo sapiens
tttactttccacagg

SEQ ID NO: 1705338 - DNA, 15 bp, Homo sapiens
ttactttccacaggt

SEQ ID NO: 1705339 - DNA, 15 bp, Homo sapiens
tactttccacaggtt

SEQ ID NO: 1705340 - DNA, 15 bp, Homo sapiens
actttccacaggttg

SEQ ID NO: 1705341 - DNA, 15 bp, Homo sapiens
ctttccacaggttgc

SEQ ID NO: 1705342 - DNA, 15 bp, Homo sapiens
tttccacaggttgct

SEQ ID NO: 1705343 - DNA, 15 bp, Homo sapiens
ttccacaggttgctg

SEQ ID NO: 1705344 - DNA, 15 bp, Homo sapiens
tccacaggttgctgg

SEQ ID NO: 1705345 - DNA, 15 bp, Homo sapiens
ccacaggttgctggt

SEQ ID NO: 1705346 - DNA, 15 bp, Homo sapiens
cacaggttgctggtg

SEQ ID NO: 1705347 - DNA, 15 bp, Homo sapiens
acaggttgctggtgg

SEQ ID NO: 1705348 - DNA, 15 bp, Homo sapiens
caggttgctggtggt

SEQ ID NO: 1705349 - DNA, 15 bp, Homo sapiens
aggttgctggtggta

SEQ ID NO: 1705350 - DNA, 15 bp, Homo sapiens
ggttgctggtggtag

SEQ ID NO: 1705351 - DNA, 15 bp, Homo sapiens
gttgctggtggtagg

SEQ ID NO: 1705352 - DNA, 15 bp, Homo sapiens
ttgctggtggtagga

SEQ ID NO: 1705353 - DNA, 15 bp, Homo sapiens
tgctggtggtaggaa

SEQ ID NO: 1705354 - DNA, 15 bp, Homo sapiens
gctggtggtaggaat

SEQ ID NO: 1705355 - DNA, 15 bp, Homo sapiens
ctggtggtaggaatg

SEQ ID NO: 1705356 - DNA, 15 bp, Homo sapiens
tggtggtaggaatgt

SEQ ID NO: 1705357 - DNA, 15 bp, Homo sapiens
ggtggtaggaatgtt

SEQ ID NO: 1705358 - DNA, 15 bp, Homo sapiens
gtggtaggaatgttc

SEQ ID NO: 1705359 - DNA, 15 bp, Homo sapiens
tggtaggaatgttcc

SEQ ID NO: 1705360 - DNA, 15 bp, Homo sapiens
ggtaggaatgttcca

SEQ ID NO: 1705361 - DNA, 15 bp, Homo sapiens
gtaggaatgttccac

SEQ ID NO: 1705362 - DNA, 15 bp, Homo sapiens
taggaatgttccacc

SEQ ID NO: 1705363 - DNA, 15 bp, Homo sapiens
aggaatgttccaccc

SEQ ID NO: 1705364 - DNA, 15 bp, Homo sapiens
ggaatgttccacccg

SEQ ID NO: 1705365 - DNA, 15 bp, Homo sapiens
gaatgttccacccgc

SEQ ID NO: 1705366 - DNA, 15 bp, Homo sapiens
aatgttccacccgca

SEQ ID NO: 1705367 - DNA, 15 bp, Homo sapiens
atgttccacccgcag

SEQ ID NO: 1705368 - DNA, 15 bp, Homo sapiens
tgttccacccgcagt

SEQ ID NO: 1705369 - DNA, 15 bp, Homo sapiens
gttccacccgcagta

SEQ ID NO: 1705370 - DNA, 15 bp, Homo sapiens
ttccacccgcagtac

SEQ ID NO: 1705371 - DNA, 15 bp, Homo sapiens
tccacccgcagtaca

SEQ ID NO: 1705372 - DNA, 15 bp, Homo sapiens
ccacccgcagtacag

SEQ ID NO: 1705373 - DNA, 15 bp, Homo sapiens
cacccgcagtacaga

SEQ ID NO: 1705374 - DNA, 15 bp, Homo sapiens
acccgcagtacagaa

SEQ ID NO: 1705375 - DNA, 15 bp, Homo sapiens
cccgcagtacagaaa

SEQ ID NO: 1705376 - DNA, 15 bp, Homo sapiens
ccgcagtacagaaag

SEQ ID NO: 1705377 - DNA, 15 bp, Homo sapiens
cgcagtacagaaagt

SEQ ID NO: 1705378 - DNA, 15 bp, Homo sapiens
gcagtacagaaagta

SEQ ID NO: 1705379 - DNA, 15 bp, Homo sapiens
cagtacagaaagtat

SEQ ID NO: 1705380 - DNA, 15 bp, Homo sapiens
agtacagaaagtatc

SEQ ID NO: 1705381 - DNA, 15 bp, Homo sapiens
gtacagaaagtatca

SEQ ID NO: 1705382 - DNA, 15 bp, Homo sapiens
tacagaaagtatcac

SEQ ID NO: 1705383 - DNA, 15 bp, Homo sapiens
acagaaagtatcaca

SEQ ID NO: 1705384 - DNA, 15 bp, Homo sapiens
cagaaagtatcacag

SEQ ID NO: 1705385 - DNA, 15 bp, Homo sapiens
agaaagtatcacagg

SEQ ID NO: 1705386 - DNA, 15 bp, Homo sapiens
gaaagtatcacaggc

SEQ ID NO: 1705387 - DNA, 15 bp, Homo sapiens
aaagtatcacaggct

SEQ ID NO: 1705388 - DNA, 15 bp, Homo sapiens
aagtatcacaggctt

SEQ ID NO: 1705389 - DNA, 15 bp, Homo sapiens
agtatcacaggcttc

SEQ ID NO: 1705390 - DNA, 15 bp, Homo sapiens
gtatcacaggcttcc

SEQ ID NO: 1705391 - DNA, 15 bp, Homo sapiens
tatcacaggcttcca

SEQ ID NO: 1705392 - DNA, 15 bp, Homo sapiens
atcacaggcttccat

SEQ ID NO: 1705393 - DNA, 15 bp, Homo sapiens
tcacaggcttccatt

SEQ ID NO: 1705394 - DNA, 15 bp, Homo sapiens
cacaggcttccattg

SEQ ID NO: 1705395 - DNA, 15 bp, Homo sapiens
acaggcttccattga

SEQ ID NO: 1705396 - DNA, 15 bp, Homo sapiens
caggcttccattgac

SEQ ID NO: 1705397 - DNA, 15 bp, Homo sapiens
aggcttccattgacc

SEQ ID NO: 1705398 - DNA, 15 bp, Homo sapiens
ggcttccattgacca

SEQ ID NO: 1705399 - DNA, 15 bp, Homo sapiens
gcttccattgaccag

SEQ ID NO: 1705400 - DNA, 15 bp, Homo sapiens
cttccattgaccaga

SEQ ID NO: 1705401 - DNA, 15 bp, Homo sapiens
ttccattgaccagag

SEQ ID NO: 1705402 - DNA, 15 bp, Homo sapiens
tccattgaccagagc

SEQ ID NO: 1705403 - DNA, 15 bp, Homo sapiens
ccattgaccagagca

SEQ ID NO: 1705404 - DNA, 15 bp, Homo sapiens
cattgaccagagcag

SEQ ID NO: 1705405 - DNA, 15 bp, Homo sapiens
attgaccagagcagg

SEQ ID NO: 1705406 - DNA, 15 bp, Homo sapiens
ttgaccagagcaggc

SEQ ID NO: 1705407 - DNA, 15 bp, Homo sapiens
tgaccagagcaggca

SEQ ID NO: 1705408 - DNA, 15 bp, Homo sapiens
gaccagagcaggcag

SEQ ID NO: 1705409 - DNA, 15 bp, Homo sapiens
accagagcaggcaga

SEQ ID NO: 1705410 - DNA, 15 bp, Homo sapiens
ccagagcaggcagat

SEQ ID NO: 1705411 - DNA, 15 bp, Homo sapiens
cagagcaggcagatg

SEQ ID NO: 1705412 - DNA, 15 bp, Homo sapiens
agagcaggcagatga

SEQ ID NO: 1705413 - DNA, 15 bp, Homo sapiens
gagcaggcagatgaa

SEQ ID NO: 1705414 - DNA, 15 bp, Homo sapiens
agcaggcagatgaaa

SEQ ID NO: 1705415 - DNA, 15 bp, Homo sapiens
gcaggcagatgaaat

SEQ ID NO: 1705416 - DNA, 15 bp, Homo sapiens
caggcagatgaaata

SEQ ID NO: 1705417 - DNA, 15 bp, Homo sapiens
aggcagatgaaatac

SEQ ID NO: 1705418 - DNA, 15 bp, Homo sapiens
ggcagatgaaatacc

SEQ ID NO: 1705419 - DNA, 15 bp, Homo sapiens
gcagatgaaatacca

SEQ ID NO: 1705420 - DNA, 15 bp, Homo sapiens
cagatgaaataccag

SEQ ID NO: 1705421 - DNA, 15 bp, Homo sapiens
agatgaaataccagt

SEQ ID NO: 1705422 - DNA, 15 bp, Homo sapiens
gatgaaataccagtc

SEQ ID NO: 1705423 - DNA, 15 bp, Homo sapiens
atgaaataccagtct

SEQ ID NO: 1705424 - DNA, 15 bp, Homo sapiens
tgaaataccagtctt

SEQ ID NO: 1705425 - DNA, 15 bp, Homo sapiens
gaaataccagtcttt

SEQ ID NO: 1705426 - DNA, 15 bp, Homo sapiens
aaataccagtctttt

SEQ ID NO: 1705427 - DNA, 15 bp, Homo sapiens
aataccagtctttta

SEQ ID NO: 1705428 - DNA, 15 bp, Homo sapiens
ataccagtcttttaa

SEQ ID NO: 1705429 - DNA, 15 bp, Homo sapiens
taccagtcttttaat

SEQ ID NO: 1705430 - DNA, 15 bp, Homo sapiens
accagtcttttaatg

SEQ ID NO: 1705431 - DNA, 15 bp, Homo sapiens
ccagtcttttaatga

SEQ ID NO: 1705432 - DNA, 15 bp, Homo sapiens
cagtcttttaatgag

SEQ ID NO: 1705433 - DNA, 15 bp, Homo sapiens
agtcttttaatgagt

SEQ ID NO: 1705434 - DNA, 15 bp, Homo sapiens
gtcttttaatgagta

SEQ ID NO: 1705435 - DNA, 15 bp, Homo sapiens
tcttttaatgagtac

SEQ ID NO: 1705436 - DNA, 15 bp, Homo sapiens
cttttaatgagtacc

SEQ ID NO: 1705437 - DNA, 15 bp, Homo sapiens
ttttaatgagtaccg

SEQ ID NO: 1705438 - DNA, 15 bp, Homo sapiens
tttaatgagtaccgc

SEQ ID NO: 1705439 - DNA, 15 bp, Homo sapiens
ttaatgagtaccgca

SEQ ID NO: 1705440 - DNA, 15 bp, Homo sapiens
taatgagtaccgcaa

SEQ ID NO: 1705441 - DNA, 15 bp, Homo sapiens
aatgagtaccgcaaa

SEQ ID NO: 1705442 - DNA, 15 bp, Homo sapiens
atgagtaccgcaaac

SEQ ID NO: 1705443 - DNA, 15 bp, Homo sapiens
tgagtaccgcaaacg

SEQ ID NO: 1705444 - DNA, 15 bp, Homo sapiens
gagtaccgcaaacgc

SEQ ID NO: 1705445 - DNA, 15 bp, Homo sapiens
agtaccgcaaacgct

SEQ ID NO: 1705446 - DNA, 15 bp, Homo sapiens
gtaccgcaaacgctt

SEQ ID NO: 1705447 - DNA, 15 bp, Homo sapiens
taccgcaaacgcttt

SEQ ID NO: 1705448 - DNA, 15 bp, Homo sapiens
accgcaaacgcttta

SEQ ID NO: 1705449 - DNA, 15 bp, Homo sapiens
ccgcaaacgctttat

SEQ ID NO: 1705450 - DNA, 15 bp, Homo sapiens
cgcaaacgctttatg

SEQ ID NO: 1705451 - DNA, 15 bp, Homo sapiens
gcaaacgctttatgc

SEQ ID NO: 1705452 - DNA, 15 bp, Homo sapiens
caaacgctttatgct

SEQ ID NO: 1705453 - DNA, 15 bp, Homo sapiens
aaacgctttatgctg

SEQ ID NO: 1705454 - DNA, 15 bp, Homo sapiens
aacgctttatgctga

SEQ ID NO: 1705455 - DNA, 15 bp, Homo sapiens
acgctttatgctgaa

SEQ ID NO: 1705456 - DNA, 15 bp, Homo sapiens
cgctttatgctgaag

SEQ ID NO: 1705457 - DNA, 15 bp, Homo sapiens
gctttatgctgaagc

SEQ ID NO: 1705458 - DNA, 15 bp, Homo sapiens
ctttatgctgaagcc

SEQ ID NO: 1705459 - DNA, 15 bp, Homo sapiens
tttatgctgaagccc

SEQ ID NO: 1705460 - DNA, 15 bp, Homo sapiens
ttatgctgaagccct

SEQ ID NO: 1705461 - DNA, 15 bp, Homo sapiens
tatgctgaagcccta

SEQ ID NO: 1705462 - DNA, 15 bp, Homo sapiens
atgctgaagccctat

SEQ ID NO: 1705463 - DNA, 15 bp, Homo sapiens
tgctgaagccctatg

SEQ ID NO: 1705464 - DNA, 15 bp, Homo sapiens
gctgaagccctatga

SEQ ID NO: 1705465 - DNA, 15 bp, Homo sapiens
ctgaagccctatgaa

SEQ ID NO: 1705466 - DNA, 15 bp, Homo sapiens
tgaagccctatgaat

SEQ ID NO: 1705467 - DNA, 15 bp, Homo sapiens
gaagccctatgaatc

SEQ ID NO: 1705468 - DNA, 15 bp, Homo sapiens
aagccctatgaatca

SEQ ID NO: 1705469 - DNA, 15 bp, Homo sapiens
agccctatgaatcat

SEQ ID NO: 1705470 - DNA, 15 bp, Homo sapiens
gccctatgaatcatt

SEQ ID NO: 1705471 - DNA, 15 bp, Homo sapiens
ccctatgaatcattt

SEQ ID NO: 1705472 - DNA, 15 bp, Homo sapiens
cctatgaatcatttg

SEQ ID NO: 1705473 - DNA, 15 bp, Homo sapiens
ctatgaatcatttga

SEQ ID NO: 1705474 - DNA, 15 bp, Homo sapiens
tatgaatcatttgaa

SEQ ID NO: 1705475 - DNA, 15 bp, Homo sapiens
atgaatcatttgaag

SEQ ID NO: 1705476 - DNA, 15 bp, Homo sapiens
tgaatcatttgaaga

SEQ ID NO: 1705477 - DNA, 15 bp, Homo sapiens
gaatcatttgaagaa

SEQ ID NO: 1705478 - DNA, 15 bp, Homo sapiens
aatcatttgaagaac

SEQ ID NO: 1705479 - DNA, 15 bp, Homo sapiens
atcatttgaagaact

SEQ ID NO: 1705480 - DNA, 15 bp, Homo sapiens
tcatttgaagaactt

SEQ ID NO: 1705481 - DNA, 15 bp, Homo sapiens
catttgaagaactta

SEQ ID NO: 1705482 - DNA, 15 bp, Homo sapiens
atttgaagaacttac

SEQ ID NO: 1705483 - DNA, 15 bp, Homo sapiens
tttgaagaacttaca

SEQ ID NO: 1705484 - DNA, 15 bp, Homo sapiens
ttgaagaacttacag

SEQ ID NO: 1705485 - DNA, 15 bp, Homo sapiens
tgaagaacttacagg

SEQ ID NO: 1705486 - DNA, 15 bp, Homo sapiens
gaagaacttacaggt

SEQ ID NO: 1705487 - DNA, 15 bp, Homo sapiens
aagaacttacaggta

SEQ ID NO: 1705488 - DNA, 15 bp, Homo sapiens
agaacttacaggtaa

SEQ ID NO: 1705489 - DNA, 15 bp, Homo sapiens
gaacttacaggtaag

SEQ ID NO: 1705490 - DNA, 15 bp, Homo sapiens
aacttacaggtaaga

SEQ ID NO: 1705491 - DNA, 15 bp, Homo sapiens
acttacaggtaagaa

SEQ ID NO: 1705492 - DNA, 15 bp, Homo sapiens
cttacaggtaagaaa

SEQ ID NO: 1705493 - DNA, 15 bp, Homo sapiens
ttacaggtaagaaac

SEQ ID NO: 1705494 - DNA, 15 bp, Homo sapiens
tacaggtaagaaaca

SEQ ID NO: 1705495 - DNA, 15 bp, Homo sapiens
acaggtaagaaacag

SEQ ID NO: 1705496 - DNA, 15 bp, Homo sapiens
caggtaagaaacagt

SEQ ID NO: 1705497 - DNA, 15 bp, Homo sapiens
aggtaagaaacagtt

SEQ ID NO: 1705498 - DNA, 15 bp, Homo sapiens
ggtaagaaacagttt

SEQ ID NO: 1705499 - DNA, 15 bp, Homo sapiens
gtaagaaacagtttc

SEQ ID NO: 1705500 - DNA, 15 bp, Homo sapiens
taagaaacagtttct

SEQ ID NO: 1705501 - DNA, 15 bp, Homo sapiens
aagaaacagtttcta

SEQ ID NO: 1705502 - DNA, 15 bp, Homo sapiens
agaaacagtttctaa

SEQ ID NO: 1705503 - DNA, 15 bp, Homo sapiens
gaaacagtttctaaa

SEQ ID NO: 1705504 - DNA, 15 bp, Homo sapiens
aaacagtttctaaac

SEQ ID NO: 1705505 - DNA, 15 bp, Homo sapiens
aacagtttctaaact

SEQ ID NO: 1705506 - DNA, 15 bp, Homo sapiens
acagtttctaaactt

SEQ ID NO: 1705507 - DNA, 15 bp, Homo sapiens
cagtttctaaacttc

SEQ ID NO: 1705508 - DNA, 15 bp, Homo sapiens
agtttctaaacttct

SEQ ID NO: 1705509 - DNA, 15 bp, Homo sapiens
gtttctaaacttctt

SEQ ID NO: 1705510 - DNA, 15 bp, Homo sapiens
tttctaaacttcttc

SEQ ID NO: 1705511 - DNA, 15 bp, Homo sapiens
ttctaaacttcttcg

SEQ ID NO: 1705512 - DNA, 15 bp, Homo sapiens
tctaaacttcttcgt

SEQ ID NO: 1705513 - DNA, 15 bp, Homo sapiens
ctaaacttcttcgtt

SEQ ID NO: 1705514 - DNA, 15 bp, Homo sapiens
taaacttcttcgttt

SEQ ID NO: 1705515 - DNA, 15 bp, Homo sapiens
aaacttcttcgtttt

SEQ ID NO: 1705516 - DNA, 15 bp, Homo sapiens
aacttcttcgttttt

SEQ ID NO: 1705517 - DNA, 15 bp, Homo sapiens
acttcttcgtttttt

SEQ ID NO: 1705518 - DNA, 15 bp, Homo sapiens
cttcttcgttttttg

SEQ ID NO: 1705519 - DNA, 15 bp, Homo sapiens
ttcttcgttttttgt

SEQ ID NO: 1705520 - DNA, 15 bp, Homo sapiens
tcttcgttttttgtt

SEQ ID NO: 1705521 - DNA, 15 bp, Homo sapiens
cttcgttttttgttt

SEQ ID NO: 1705522 - DNA, 15 bp, Homo sapiens
ttcgttttttgtttg

SEQ ID NO: 1705523 - DNA, 15 bp, Homo sapiens
tcgttttttgtttgt

SEQ ID NO: 1705524 - DNA, 15 bp, Homo sapiens
cgttttttgtttgtt

SEQ ID NO: 1705525 - DNA, 15 bp, Homo sapiens
tgtttgtttttgttg

SEQ ID NO: 1705526 - DNA, 15 bp, Homo sapiens
gtttgtttttgttgt

SEQ ID NO: 1705527 - DNA, 15 bp, Homo sapiens
tttgtttttgttgtt

SEQ ID NO: 1705528 - DNA, 15 bp, Homo sapiens
ttgtttttgttgttt

SEQ ID NO: 1705529 - DNA, 15 bp, Homo sapiens
tgtttttgttgtttt

SEQ ID NO: 1705530 - DNA, 15 bp, Homo sapiens
gtttttgttgttttt

SEQ ID NO: 1705531 - DNA, 15 bp, Homo sapiens
tttttgttgtttttg

SEQ ID NO: 1705532 - DNA, 15 bp, Homo sapiens
ttttgttgtttttgg

SEQ ID NO: 1705533 - DNA, 15 bp, Homo sapiens
tttgttgtttttggt

SEQ ID NO: 1705534 - DNA, 15 bp, Homo sapiens
ttgttgtttttggtt

SEQ ID NO: 1705535 - DNA, 15 bp, Homo sapiens
tgttgtttttggttt

SEQ ID NO: 1705536 - DNA, 15 bp, Homo sapiens
gttgtttttggtttt

SEQ ID NO: 1705537 - DNA, 15 bp, Homo sapiens
ttgtttttggttttc

SEQ ID NO: 1705538 - DNA, 15 bp, Homo sapiens
tgtttttggttttct

SEQ ID NO: 1705539 - DNA, 15 bp, Homo sapiens
gtttttggttttctt

SEQ ID NO: 1705540 - DNA, 15 bp, Homo sapiens
tttttggttttcttt

SEQ ID NO: 1705541 - DNA, 15 bp, Homo sapiens
ttttggttttctttt

SEQ ID NO: 1705542 - DNA, 15 bp, Homo sapiens
tttggttttcttttc

SEQ ID NO: 1705543 - DNA, 15 bp, Homo sapiens
ttggttttcttttcg

SEQ ID NO: 1705544 - DNA, 15 bp, Homo sapiens
tggttttcttttcga

SEQ ID NO: 1705545 - DNA, 15 bp, Homo sapiens
ggttttcttttcgag

SEQ ID NO: 1705546 - DNA, 15 bp, Homo sapiens
gttttcttttcgaga

SEQ ID NO: 1705547 - DNA, 15 bp, Homo sapiens
ttttcttttcgagat

SEQ ID NO: 1705548 - DNA, 15 bp, Homo sapiens
tttcttttcgagatg

SEQ ID NO: 1705549 - DNA, 15 bp, Homo sapiens
ttcttttcgagatgg

SEQ ID NO: 1705550 - DNA, 15 bp, Homo sapiens
tcttttcgagatgga

SEQ ID NO: 1705551 - DNA, 15 bp, Homo sapiens
cttttcgagatggag

SEQ ID NO: 1705552 - DNA, 15 bp, Homo sapiens
ttttcgagatggagc

SEQ ID NO: 1705553 - DNA, 15 bp, Homo sapiens
tttcgagatggagcc

SEQ ID NO: 1705554 - DNA, 15 bp, Homo sapiens
ttcgagatggagccg

SEQ ID NO: 1705555 - DNA, 15 bp, Homo sapiens
tcgagatggagccgc

SEQ ID NO: 1705556 - DNA, 15 bp, Homo sapiens
cgagatggagccgcc

SEQ ID NO: 1705557 - DNA, 15 bp, Homo sapiens
gagatggagccgccc

SEQ ID NO: 1705558 - DNA, 15 bp, Homo sapiens
agatggagccgccct

SEQ ID NO: 1705559 - DNA, 15 bp, Homo sapiens
gatggagccgccctc

SEQ ID NO: 1705560 - DNA, 15 bp, Homo sapiens
atggagccgccctct

SEQ ID NO: 1705561 - DNA, 15 bp, Homo sapiens
tggagccgccctctg

SEQ ID NO: 1705562 - DNA, 15 bp, Homo sapiens
ggagccgccctctgt

SEQ ID NO: 1705563 - DNA, 15 bp, Homo sapiens
gagccgccctctgtc

SEQ ID NO: 1705564 - DNA, 15 bp, Homo sapiens
agccgccctctgtca

SEQ ID NO: 1705565 - DNA, 15 bp, Homo sapiens
gccgccctctgtcac

SEQ ID NO: 1705566 - DNA, 15 bp, Homo sapiens
ccgccctctgtcacc

SEQ ID NO: 1705567 - DNA, 15 bp, Homo sapiens
cgccctctgtcaccc

SEQ ID NO: 1705568 - DNA, 15 bp, Homo sapiens
gccctctgtcaccca

SEQ ID NO: 1705569 - DNA, 15 bp, Homo sapiens
tctcctgcctcaact

SEQ ID NO: 1705570 - DNA, 15 bp, Homo sapiens
ctcctgcctcaactt

SEQ ID NO: 1705571 - DNA, 15 bp, Homo sapiens
tcctgcctcaacttc

SEQ ID NO: 1705572 - DNA, 15 bp, Homo sapiens
cctgcctcaacttcc

SEQ ID NO: 1705573 - DNA, 15 bp, Homo sapiens
ctgcctcaacttcct

SEQ ID NO: 1705574 - DNA, 15 bp, Homo sapiens
ctgggactacaggct

SEQ ID NO: 1705575 - DNA, 15 bp, Homo sapiens
tgggactacaggctc

SEQ ID NO: 1705576 - DNA, 15 bp, Homo sapiens
gggactacaggctca

SEQ ID NO: 1705577 - DNA, 15 bp, Homo sapiens
ggactacaggctcac

SEQ ID NO: 1705578 - DNA, 15 bp, Homo sapiens
gactacaggctcacg

SEQ ID NO: 1705579 - DNA, 15 bp, Homo sapiens
actacaggctcacgt

SEQ ID NO: 1705580 - DNA, 15 bp, Homo sapiens
ctacaggctcacgtc

SEQ ID NO: 1705581 - DNA, 15 bp, Homo sapiens
tacaggctcacgtcg

SEQ ID NO: 1705582 - DNA, 15 bp, Homo sapiens
acaggctcacgtcgc

SEQ ID NO: 1705583 - DNA, 15 bp, Homo sapiens
caggctcacgtcgca

SEQ ID NO: 1705584 - DNA, 15 bp, Homo sapiens
aggctcacgtcgcac

SEQ ID NO: 1705585 - DNA, 15 bp, Homo sapiens
ggctcacgtcgcacg

SEQ ID NO: 1705586 - DNA, 15 bp, Homo sapiens
gctcacgtcgcacgc

SEQ ID NO: 1705587 - DNA, 15 bp, Homo sapiens
ctcacgtcgcacgca

SEQ ID NO: 1705588 - DNA, 15 bp, Homo sapiens
tcacgtcgcacgcat

SEQ ID NO: 1705589 - DNA, 15 bp, Homo sapiens
cacgtcgcacgcatg

SEQ ID NO: 1705590 - DNA, 15 bp, Homo sapiens
acgtcgcacgcatgg

SEQ ID NO: 1705591 - DNA, 15 bp, Homo sapiens
cgtcgcacgcatgga

SEQ ID NO: 1705592 - DNA, 15 bp, Homo sapiens
gtcgcacgcatggat

SEQ ID NO: 1705593 - DNA, 15 bp, Homo sapiens
tcgcacgcatggata

SEQ ID NO: 1705594 - DNA, 15 bp, Homo sapiens
cgcacgcatggataa

SEQ ID NO: 1705595 - DNA, 15 bp, Homo sapiens
gcacgcatggataat

SEQ ID NO: 1705596 - DNA, 15 bp, Homo sapiens
cacgcatggataatt

SEQ ID NO: 1705597 - DNA, 15 bp, Homo sapiens
acgcatggataattt

SEQ ID NO: 1705598 - DNA, 15 bp, Homo sapiens
cgcatggataatttt

SEQ ID NO: 1705599 - DNA, 15 bp, Homo sapiens
gcatggataattttt

SEQ ID NO: 1705600 - DNA, 15 bp, Homo sapiens
catggataatttttt

SEQ ID NO: 1705601 - DNA, 15 bp, Homo sapiens
atggataattttttg

SEQ ID NO: 1705602 - DNA, 15 bp, Homo sapiens
tggataattttttgt

SEQ ID NO: 1705603 - DNA, 15 bp, Homo sapiens
ggataattttttgta

SEQ ID NO: 1705604 - DNA, 15 bp, Homo sapiens
gataattttttgtat

SEQ ID NO: 1705605 - DNA, 15 bp, Homo sapiens
ataattttttgtatt

SEQ ID NO: 1705606 - DNA, 15 bp, Homo sapiens
attttttgtattttc

SEQ ID NO: 1705607 - DNA, 15 bp, Homo sapiens
ttgtattttcagtat

SEQ ID NO: 1705608 - DNA, 15 bp, Homo sapiens
tgtattttcagtata

SEQ ID NO: 1705609 - DNA, 15 bp, Homo sapiens
gtattttcagtatag

SEQ ID NO: 1705610 - DNA, 15 bp, Homo sapiens
tattttcagtataga

SEQ ID NO: 1705611 - DNA, 15 bp, Homo sapiens
attttcagtatagac

SEQ ID NO: 1705612 - DNA, 15 bp, Homo sapiens
ttttcagtatagacg

SEQ ID NO: 1705613 - DNA, 15 bp, Homo sapiens
tttcagtatagacgg

SEQ ID NO: 1705614 - DNA, 15 bp, Homo sapiens
ttcagtatagacggg

SEQ ID NO: 1705615 - DNA, 15 bp, Homo sapiens
tcagtatagacgggg

SEQ ID NO: 1705616 - DNA, 15 bp, Homo sapiens
cagtatagacggggt

SEQ ID NO: 1705617 - DNA, 15 bp, Homo sapiens
agtatagacggggtt

SEQ ID NO: 1705618 - DNA, 15 bp, Homo sapiens
gtatagacggggttt

SEQ ID NO: 1705619 - DNA, 15 bp, Homo sapiens
tatagacggggtttc

SEQ ID NO: 1705620 - DNA, 15 bp, Homo sapiens
atagacggggtttca

SEQ ID NO: 1705621 - DNA, 15 bp, Homo sapiens
tagacggggtttcac

SEQ ID NO: 1705622 - DNA, 15 bp, Homo sapiens
ccgtgttagccaggc

SEQ ID NO: 1705623 - DNA, 15 bp, Homo sapiens
cgtgttagccaggct

SEQ ID NO: 1705624 - DNA, 15 bp, Homo sapiens
caaactcctgaccta

SEQ ID NO: 1705625 - DNA, 15 bp, Homo sapiens
aaactcctgacctag

SEQ ID NO: 1705626 - DNA, 15 bp, Homo sapiens
aactcctgacctagt

SEQ ID NO: 1705627 - DNA, 15 bp, Homo sapiens
actcctgacctagtg

SEQ ID NO: 1705628 - DNA, 15 bp, Homo sapiens
ctcctgacctagtga

SEQ ID NO: 1705629 - DNA, 15 bp, Homo sapiens
tcctgacctagtgat

SEQ ID NO: 1705630 - DNA, 15 bp, Homo sapiens
cctgacctagtgatc

SEQ ID NO: 1705631 - DNA, 15 bp, Homo sapiens
ctgacctagtgatcc

SEQ ID NO: 1705632 - DNA, 15 bp, Homo sapiens
tgacctagtgatccg

SEQ ID NO: 1705633 - DNA, 15 bp, Homo sapiens
gacctagtgatccgc

SEQ ID NO: 1705634 - DNA, 15 bp, Homo sapiens
acctagtgatccgcc

SEQ ID NO: 1705635 - DNA, 15 bp, Homo sapiens
cctagtgatccgccg

SEQ ID NO: 1705636 - DNA, 15 bp, Homo sapiens
ctagtgatccgccgg

SEQ ID NO: 1705637 - DNA, 15 bp, Homo sapiens
tagtgatccgccggc

SEQ ID NO: 1705638 - DNA, 15 bp, Homo sapiens
agtgatccgccggct

SEQ ID NO: 1705639 - DNA, 15 bp, Homo sapiens
gtgatccgccggctt

SEQ ID NO: 1705640 - DNA, 15 bp, Homo sapiens
tgatccgccggcttc

SEQ ID NO: 1705641 - DNA, 15 bp, Homo sapiens
gatccgccggcttcg

SEQ ID NO: 1705642 - DNA, 15 bp, Homo sapiens
atccgccggcttcgg

SEQ ID NO: 1705643 - DNA, 15 bp, Homo sapiens
tccgccggcttcggc

SEQ ID NO: 1705644 - DNA, 15 bp, Homo sapiens
ccgccggcttcggcc

SEQ ID NO: 1705645 - DNA, 15 bp, Homo sapiens
cgccggcttcggcct

SEQ ID NO: 1705646 - DNA, 15 bp, Homo sapiens
gccggcttcggcctc

SEQ ID NO: 1705647 - DNA, 15 bp, Homo sapiens
ccggcttcggcctcc

SEQ ID NO: 1705648 - DNA, 15 bp, Homo sapiens
cggcttcggcctccc

SEQ ID NO: 1705649 - DNA, 15 bp, Homo sapiens
ggcttcggcctcccg

SEQ ID NO: 1705650 - DNA, 15 bp, Homo sapiens
gcttcggcctcccga

SEQ ID NO: 1705651 - DNA, 15 bp, Homo sapiens
cttcggcctcccgaa

SEQ ID NO: 1705652 - DNA, 15 bp, Homo sapiens
ttcggcctcccgaag

SEQ ID NO: 1705653 - DNA, 15 bp, Homo sapiens
tcggcctcccgaagt

SEQ ID NO: 1705654 - DNA, 15 bp, Homo sapiens
cggcctcccgaagtg

SEQ ID NO: 1705655 - DNA, 15 bp, Homo sapiens
ggcctcccgaagtgc

SEQ ID NO: 1705656 - DNA, 15 bp, Homo sapiens
caccgcgcctggccc

SEQ ID NO: 1705657 - DNA, 15 bp, Homo sapiens
accgcgcctggcccc

SEQ ID NO: 1705658 - DNA, 15 bp, Homo sapiens
ccgcgcctggcccct

SEQ ID NO: 1705659 - DNA, 15 bp, Homo sapiens
cgcgcctggccccta

SEQ ID NO: 1705660 - DNA, 15 bp, Homo sapiens
gcgcctggcccctaa

SEQ ID NO: 1705661 - DNA, 15 bp, Homo sapiens
cgcctggcccctaaa

SEQ ID NO: 1705662 - DNA, 15 bp, Homo sapiens
gcctggcccctaaac

SEQ ID NO: 1705663 - DNA, 15 bp, Homo sapiens
cctggcccctaaact

SEQ ID NO: 1705664 - DNA, 15 bp, Homo sapiens
ctggcccctaaactt

SEQ ID NO: 1705665 - DNA, 15 bp, Homo sapiens
tggcccctaaacttc

SEQ ID NO: 1705666 - DNA, 15 bp, Homo sapiens
ggcccctaaacttct

SEQ ID NO: 1705667 - DNA, 15 bp, Homo sapiens
gcccctaaacttctt

SEQ ID NO: 1705668 - DNA, 15 bp, Homo sapiens
cccctaaacttctta

SEQ ID NO: 1705669 - DNA, 15 bp, Homo sapiens
ccctaaacttcttaa

SEQ ID NO: 1705670 - DNA, 15 bp, Homo sapiens
cctaaacttcttaaa

SEQ ID NO: 1705671 - DNA, 15 bp, Homo sapiens
ctaaacttcttaaaa

SEQ ID NO: 1705672 - DNA, 15 bp, Homo sapiens
taaacttcttaaaag

SEQ ID NO: 1705673 - DNA, 15 bp, Homo sapiens
aaacttcttaaaaga

SEQ ID NO: 1705674 - DNA, 15 bp, Homo sapiens
aacttcttaaaagaa

SEQ ID NO: 1705675 - DNA, 15 bp, Homo sapiens
acttcttaaaagaat

SEQ ID NO: 1705676 - DNA, 15 bp, Homo sapiens
cttcttaaaagaatc

SEQ ID NO: 1705677 - DNA, 15 bp, Homo sapiens
ttcttaaaagaatca

SEQ ID NO: 1705678 - DNA, 15 bp, Homo sapiens
tcttaaaagaatcag

SEQ ID NO: 1705679 - DNA, 15 bp, Homo sapiens
cttaaaagaatcagg

SEQ ID NO: 1705680 - DNA, 15 bp, Homo sapiens
ttaaaagaatcaggg

SEQ ID NO: 1705681 - DNA, 15 bp, Homo sapiens
taaaagaatcagggg

SEQ ID NO: 1705682 - DNA, 15 bp, Homo sapiens
aaaagaatcaggggt

SEQ ID NO: 1705683 - DNA, 15 bp, Homo sapiens
aaagaatcaggggtc

SEQ ID NO: 1705684 - DNA, 15 bp, Homo sapiens
aagaatcaggggtca

SEQ ID NO: 1705685 - DNA, 15 bp, Homo sapiens
agaatcaggggtcaa

SEQ ID NO: 1705686 - DNA, 15 bp, Homo sapiens
gaatcaggggtcaaa

SEQ ID NO: 1705687 - DNA, 15 bp, Homo sapiens
aatcaggggtcaaat

SEQ ID NO: 1705688 - DNA, 15 bp, Homo sapiens
atcaggggtcaaatg

SEQ ID NO: 1705689 - DNA, 15 bp, Homo sapiens
tcaggggtcaaatgg

SEQ ID NO: 1705690 - DNA, 15 bp, Homo sapiens
caggggtcaaatgga

SEQ ID NO: 1705691 - DNA, 15 bp, Homo sapiens
aggggtcaaatggaa

SEQ ID NO: 1705692 - DNA, 15 bp, Homo sapiens
ggggtcaaatggaaa

SEQ ID NO: 1705693 - DNA, 15 bp, Homo sapiens
gggtcaaatggaaac

SEQ ID NO: 1705694 - DNA, 15 bp, Homo sapiens
ggtcaaatggaaaca

SEQ ID NO: 1705695 - DNA, 15 bp, Homo sapiens
gtcaaatggaaacag

SEQ ID NO: 1705696 - DNA, 15 bp, Homo sapiens
tcaaatggaaacaga

SEQ ID NO: 1705697 - DNA, 15 bp, Homo sapiens
caaatggaaacagag

SEQ ID NO: 1705698 - DNA, 15 bp, Homo sapiens
aaatggaaacagaga

SEQ ID NO: 1705699 - DNA, 15 bp, Homo sapiens
aatggaaacagagaa

SEQ ID NO: 1705700 - DNA, 15 bp, Homo sapiens
atggaaacagagaag

SEQ ID NO: 1705701 - DNA, 15 bp, Homo sapiens
tggaaacagagaagt

SEQ ID NO: 1705702 - DNA, 15 bp, Homo sapiens
ggaaacagagaagtt

SEQ ID NO: 1705703 - DNA, 15 bp, Homo sapiens
gaaacagagaagttg

SEQ ID NO: 1705704 - DNA, 15 bp, Homo sapiens
aaacagagaagttgg

SEQ ID NO: 1705705 - DNA, 15 bp, Homo sapiens
aacagagaagttggc

SEQ ID NO: 1705706 - DNA, 15 bp, Homo sapiens
acagagaagttggca

SEQ ID NO: 1705707 - DNA, 15 bp, Homo sapiens
cagagaagttggcag

SEQ ID NO: 1705708 - DNA, 15 bp, Homo sapiens
agagaagttggcagc

SEQ ID NO: 1705709 - DNA, 15 bp, Homo sapiens
gagaagttggcagca

SEQ ID NO: 1705710 - DNA, 15 bp, Homo sapiens
agaagttggcagcaa

SEQ ID NO: 1705711 - DNA, 15 bp, Homo sapiens
gaagttggcagcaaa

SEQ ID NO: 1705712 - DNA, 15 bp, Homo sapiens
aagttggcagcaaat

SEQ ID NO: 1705713 - DNA, 15 bp, Homo sapiens
agttggcagcaaatt

SEQ ID NO: 1705714 - DNA, 15 bp, Homo sapiens
gttggcagcaaattg

SEQ ID NO: 1705715 - DNA, 15 bp, Homo sapiens
ttggcagcaaattga

SEQ ID NO: 1705716 - DNA, 15 bp, Homo sapiens
tggcagcaaattgag

SEQ ID NO: 1705717 - DNA, 15 bp, Homo sapiens
ggcagcaaattgagc

SEQ ID NO: 1705718 - DNA, 15 bp, Homo sapiens
gcagcaaattgagca

SEQ ID NO: 1705719 - DNA, 15 bp, Homo sapiens
cagcaaattgagcaa

SEQ ID NO: 1705720 - DNA, 15 bp, Homo sapiens
agcaaattgagcaaa

SEQ ID NO: 1705721 - DNA, 15 bp, Homo sapiens
gcaaattgagcaaaa

SEQ ID NO: 1705722 - DNA, 15 bp, Homo sapiens
caaattgagcaaaag

SEQ ID NO: 1705723 - DNA, 15 bp, Homo sapiens
aaattgagcaaaaga

SEQ ID NO: 1705724 - DNA, 15 bp, Homo sapiens
aattgagcaaaagaa

SEQ ID NO: 1705725 - DNA, 15 bp, Homo sapiens
attgagcaaaagaat

SEQ ID NO: 1705726 - DNA, 15 bp, Homo sapiens
ttgagcaaaagaatc

SEQ ID NO: 1705727 - DNA, 15 bp, Homo sapiens
tgagcaaaagaatca

SEQ ID NO: 1705728 - DNA, 15 bp, Homo sapiens
gagcaaaagaatcaa

SEQ ID NO: 1705729 - DNA, 15 bp, Homo sapiens
agcaaaagaatcaaa

SEQ ID NO: 1705730 - DNA, 15 bp, Homo sapiens
gcaaaagaatcaaac

SEQ ID NO: 1705731 - DNA, 15 bp, Homo sapiens
caaaagaatcaaact

SEQ ID NO: 1705732 - DNA, 15 bp, Homo sapiens
aaaagaatcaaactg

SEQ ID NO: 1705733 - DNA, 15 bp, Homo sapiens
aaagaatcaaactgt

SEQ ID NO: 1705734 - DNA, 15 bp, Homo sapiens
aagaatcaaactgtt

SEQ ID NO: 1705735 - DNA, 15 bp, Homo sapiens
agaatcaaactgttt

SEQ ID NO: 1705736 - DNA, 15 bp, Homo sapiens
gaatcaaactgtttt

SEQ ID NO: 1705737 - DNA, 15 bp, Homo sapiens
aatcaaactgttttt

SEQ ID NO: 1705738 - DNA, 15 bp, Homo sapiens
atcaaactgtttttt

SEQ ID NO: 1705739 - DNA, 15 bp, Homo sapiens
tcaaactgtttttta

SEQ ID NO: 1705740 - DNA, 15 bp, Homo sapiens
caaactgttttttat

SEQ ID NO: 1705741 - DNA, 15 bp, Homo sapiens
aaactgttttttatt

SEQ ID NO: 1705742 - DNA, 15 bp, Homo sapiens
aactgttttttattt

SEQ ID NO: 1705743 - DNA, 15 bp, Homo sapiens
actgttttttatttt

SEQ ID NO: 1705744 - DNA, 15 bp, Homo sapiens
ctgttttttattttg

SEQ ID NO: 1705745 - DNA, 15 bp, Homo sapiens
tgttttttattttgt

SEQ ID NO: 1705746 - DNA, 15 bp, Homo sapiens
gttttttattttgtg

SEQ ID NO: 1705747 - DNA, 15 bp, Homo sapiens
ttttttattttgtga

SEQ ID NO: 1705748 - DNA, 15 bp, Homo sapiens
tttttattttgtgaa

SEQ ID NO: 1705749 - DNA, 15 bp, Homo sapiens
ttttattttgtgaag

SEQ ID NO: 1705750 - DNA, 15 bp, Homo sapiens
tttattttgtgaagt

SEQ ID NO: 1705751 - DNA, 15 bp, Homo sapiens
ttattttgtgaagtt

SEQ ID NO: 1705752 - DNA, 15 bp, Homo sapiens
tattttgtgaagttt

SEQ ID NO: 1705753 - DNA, 15 bp, Homo sapiens
attttgtgaagtttg

SEQ ID NO: 1705754 - DNA, 15 bp, Homo sapiens
ttttgtgaagtttga

SEQ ID NO: 1705755 - DNA, 15 bp, Homo sapiens
tttgtgaagtttgac

SEQ ID NO: 1705756 - DNA, 15 bp, Homo sapiens
ttgtgaagtttgaca

SEQ ID NO: 1705757 - DNA, 15 bp, Homo sapiens
tgtgaagtttgacat

SEQ ID NO: 1705758 - DNA, 15 bp, Homo sapiens
gtgaagtttgacatt

SEQ ID NO: 1705759 - DNA, 15 bp, Homo sapiens
tgaagtttgacattg

SEQ ID NO: 1705760 - DNA, 15 bp, Homo sapiens
gaagtttgacattgg

SEQ ID NO: 1705761 - DNA, 15 bp, Homo sapiens
aagtttgacattggt

SEQ ID NO: 1705762 - DNA, 15 bp, Homo sapiens
agtttgacattggtt

SEQ ID NO: 1705763 - DNA, 15 bp, Homo sapiens
gtttgacattggttg

SEQ ID NO: 1705764 - DNA, 15 bp, Homo sapiens
tttgacattggttgt

SEQ ID NO: 1705765 - DNA, 15 bp, Homo sapiens
ttgacattggttgta

SEQ ID NO: 1705766 - DNA, 15 bp, Homo sapiens
tgacattggttgtat

SEQ ID NO: 1705767 - DNA, 15 bp, Homo sapiens
gacattggttgtatc

SEQ ID NO: 1705768 - DNA, 15 bp, Homo sapiens
acattggttgtatct

SEQ ID NO: 1705769 - DNA, 15 bp, Homo sapiens
cattggttgtatctc

SEQ ID NO: 1705770 - DNA, 15 bp, Homo sapiens
attggttgtatctct

SEQ ID NO: 1705771 - DNA, 15 bp, Homo sapiens
ttggttgtatctctg

SEQ ID NO: 1705772 - DNA, 15 bp, Homo sapiens
tggttgtatctctgt

SEQ ID NO: 1705773 - DNA, 15 bp, Homo sapiens
ggttgtatctctgtc

SEQ ID NO: 1705774 - DNA, 15 bp, Homo sapiens
gttgtatctctgtct

SEQ ID NO: 1705775 - DNA, 15 bp, Homo sapiens
ttgtatctctgtctt

SEQ ID NO: 1705776 - DNA, 15 bp, Homo sapiens
tgtatctctgtcttc

SEQ ID NO: 1705777 - DNA, 15 bp, Homo sapiens
gtatctctgtcttca

SEQ ID NO: 1705778 - DNA, 15 bp, Homo sapiens
tatctctgtcttcat

SEQ ID NO: 1705779 - DNA, 15 bp, Homo sapiens
atctctgtcttcatc

SEQ ID NO: 1705780 - DNA, 15 bp, Homo sapiens
tctctgtcttcatcg

SEQ ID NO: 1705781 - DNA, 15 bp, Homo sapiens
ctctgtcttcatcgc

SEQ ID NO: 1705782 - DNA, 15 bp, Homo sapiens
tctgtcttcatcgcc

SEQ ID NO: 1705783 - DNA, 15 bp, Homo sapiens
ctgtcttcatcgcct

SEQ ID NO: 1705784 - DNA, 15 bp, Homo sapiens
tgtcttcatcgcctt

SEQ ID NO: 1705785 - DNA, 15 bp, Homo sapiens
gtcttcatcgccttc

SEQ ID NO: 1705786 - DNA, 15 bp, Homo sapiens
tcttcatcgccttca

SEQ ID NO: 1705787 - DNA, 15 bp, Homo sapiens
cttcatcgccttcac

SEQ ID NO: 1705788 - DNA, 15 bp, Homo sapiens
ttcatcgccttcaca

SEQ ID NO: 1705789 - DNA, 15 bp, Homo sapiens
tcatcgccttcacag

SEQ ID NO: 1705790 - DNA, 15 bp, Homo sapiens
catcgccttcacagg

SEQ ID NO: 1705791 - DNA, 15 bp, Homo sapiens
atcgccttcacagga

SEQ ID NO: 1705792 - DNA, 15 bp, Homo sapiens
tcgccttcacaggag

SEQ ID NO: 1705793 - DNA, 15 bp, Homo sapiens
cgccttcacaggaga

SEQ ID NO: 1705794 - DNA, 15 bp, Homo sapiens
gccttcacaggagaa

SEQ ID NO: 1705795 - DNA, 15 bp, Homo sapiens
ccttcacaggagaaa

SEQ ID NO: 1705796 - DNA, 15 bp, Homo sapiens
cttcacaggagaaaa

SEQ ID NO: 1705797 - DNA, 15 bp, Homo sapiens
ttcacaggagaaaag

SEQ ID NO: 1705798 - DNA, 15 bp, Homo sapiens
tcacaggagaaaagg

SEQ ID NO: 1705799 - DNA, 15 bp, Homo sapiens
cacaggagaaaagga

SEQ ID NO: 1705800 - DNA, 15 bp, Homo sapiens
acaggagaaaaggaa

SEQ ID NO: 1705801 - DNA, 15 bp, Homo sapiens
caggagaaaaggaaa

SEQ ID NO: 1705802 - DNA, 15 bp, Homo sapiens
aggagaaaaggaaat

SEQ ID NO: 1705803 - DNA, 15 bp, Homo sapiens
ggagaaaaggaaatg

SEQ ID NO: 1705804 - DNA, 15 bp, Homo sapiens
gagaaaaggaaatgt

SEQ ID NO: 1705805 - DNA, 15 bp, Homo sapiens
agaaaaggaaatgtc

SEQ ID NO: 1705806 - DNA, 15 bp, Homo sapiens
gaaaaggaaatgtct

SEQ ID NO: 1705807 - DNA, 15 bp, Homo sapiens
aaaaggaaatgtctg

SEQ ID NO: 1705808 - DNA, 15 bp, Homo sapiens
aaaggaaatgtctgc

SEQ ID NO: 1705809 - DNA, 15 bp, Homo sapiens
aaggaaatgtctgca

SEQ ID NO: 1705810 - DNA, 15 bp, Homo sapiens
aggaaatgtctgcag

SEQ ID NO: 1705811 - DNA, 15 bp, Homo sapiens
ggaaatgtctgcaga

SEQ ID NO: 1705812 - DNA, 15 bp, Homo sapiens
gaaatgtctgcagag

SEQ ID NO: 1705813 - DNA, 15 bp, Homo sapiens
aaatgtctgcagagt

SEQ ID NO: 1705814 - DNA, 15 bp, Homo sapiens
aatgtctgcagagtt

SEQ ID NO: 1705815 - DNA, 15 bp, Homo sapiens
atgtctgcagagttg

SEQ ID NO: 1705816 - DNA, 15 bp, Homo sapiens
tgtctgcagagttgg

SEQ ID NO: 1705817 - DNA, 15 bp, Homo sapiens
gtctgcagagttgga

SEQ ID NO: 1705818 - DNA, 15 bp, Homo sapiens
tctgcagagttggaa

SEQ ID NO: 1705819 - DNA, 15 bp, Homo sapiens
ctgcagagttggaag

SEQ ID NO: 1705820 - DNA, 15 bp, Homo sapiens
tgcagagttggaagc

SEQ ID NO: 1705821 - DNA, 15 bp, Homo sapiens
gcagagttggaagca

SEQ ID NO: 1705822 - DNA, 15 bp, Homo sapiens
cagagttggaagcac

SEQ ID NO: 1705823 - DNA, 15 bp, Homo sapiens
agagttggaagcact

SEQ ID NO: 1705824 - DNA, 15 bp, Homo sapiens
gagttggaagcactc

SEQ ID NO: 1705825 - DNA, 15 bp, Homo sapiens
agttggaagcactct

SEQ ID NO: 1705826 - DNA, 15 bp, Homo sapiens
gttggaagcactcta

SEQ ID NO: 1705827 - DNA, 15 bp, Homo sapiens
ttggaagcactctat

SEQ ID NO: 1705828 - DNA, 15 bp, Homo sapiens
tggaagcactctatg

SEQ ID NO: 1705829 - DNA, 15 bp, Homo sapiens
ggaagcactctatgg

SEQ ID NO: 1705830 - DNA, 15 bp, Homo sapiens
gaagcactctatggt

SEQ ID NO: 1705831 - DNA, 15 bp, Homo sapiens
aagcactctatggtg

SEQ ID NO: 1705832 - DNA, 15 bp, Homo sapiens
agcactctatggtga

SEQ ID NO: 1705833 - DNA, 15 bp, Homo sapiens
gcactctatggtgac

SEQ ID NO: 1705834 - DNA, 15 bp, Homo sapiens
cactctatggtgaca

SEQ ID NO: 1705835 - DNA, 15 bp, Homo sapiens
actctatggtgacat

SEQ ID NO: 1705836 - DNA, 15 bp, Homo sapiens
ctctatggtgacatc

SEQ ID NO: 1705837 - DNA, 15 bp, Homo sapiens
tctatggtgacatcg

SEQ ID NO: 1705838 - DNA, 15 bp, Homo sapiens
ctatggtgacatcga

SEQ ID NO: 1705839 - DNA, 15 bp, Homo sapiens
tatggtgacatcgat

SEQ ID NO: 1705840 - DNA, 15 bp, Homo sapiens
atggtgacatcgatg

SEQ ID NO: 1705841 - DNA, 15 bp, Homo sapiens
tggtgacatcgatgc

SEQ ID NO: 1705842 - DNA, 15 bp, Homo sapiens
ggtgacatcgatgct

SEQ ID NO: 1705843 - DNA, 15 bp, Homo sapiens
gtgacatcgatgctg

SEQ ID NO: 1705844 - DNA, 15 bp, Homo sapiens
tgacatcgatgctgt

SEQ ID NO: 1705845 - DNA, 15 bp, Homo sapiens
gacatcgatgctgtg

SEQ ID NO: 1705846 - DNA, 15 bp, Homo sapiens
acatcgatgctgtgg

SEQ ID NO: 1705847 - DNA, 15 bp, Homo sapiens
catcgatgctgtgga

SEQ ID NO: 1705848 - DNA, 15 bp, Homo sapiens
atcgatgctgtggag

SEQ ID NO: 1705849 - DNA, 15 bp, Homo sapiens
tcgatgctgtggagc

SEQ ID NO: 1705850 - DNA, 15 bp, Homo sapiens
cgatgctgtggagct

SEQ ID NO: 1705851 - DNA, 15 bp, Homo sapiens
gatgctgtggagctg

SEQ ID NO: 1705852 - DNA, 15 bp, Homo sapiens
atgctgtggagctgt

SEQ ID NO: 1705853 - DNA, 15 bp, Homo sapiens
tgctgtggagctgta

SEQ ID NO: 1705854 - DNA, 15 bp, Homo sapiens
gctgtggagctgtat

SEQ ID NO: 1705855 - DNA, 15 bp, Homo sapiens
ctgtggagctgtatc

SEQ ID NO: 1705856 - DNA, 15 bp, Homo sapiens
tgtggagctgtatcc

SEQ ID NO: 1705857 - DNA, 15 bp, Homo sapiens
gtggagctgtatcct

SEQ ID NO: 1705858 - DNA, 15 bp, Homo sapiens
tggagctgtatcctg

SEQ ID NO: 1705859 - DNA, 15 bp, Homo sapiens
ggagctgtatcctgc

SEQ ID NO: 1705860 - DNA, 15 bp, Homo sapiens
gagctgtatcctgcc

SEQ ID NO: 1705861 - DNA, 15 bp, Homo sapiens
agctgtatcctgccc

SEQ ID NO: 1705862 - DNA, 15 bp, Homo sapiens
gctgtatcctgccct

SEQ ID NO: 1705863 - DNA, 15 bp, Homo sapiens
ctgtatcctgccctt

SEQ ID NO: 1705864 - DNA, 15 bp, Homo sapiens
tgtatcctgcccttc

SEQ ID NO: 1705865 - DNA, 15 bp, Homo sapiens
gtatcctgcccttct

SEQ ID NO: 1705866 - DNA, 15 bp, Homo sapiens
tatcctgcccttctg

SEQ ID NO: 1705867 - DNA, 15 bp, Homo sapiens
atcctgcccttctgg

SEQ ID NO: 1705868 - DNA, 15 bp, Homo sapiens
tcctgcccttctggt

SEQ ID NO: 1705869 - DNA, 15 bp, Homo sapiens
cctgcccttctggta

SEQ ID NO: 1705870 - DNA, 15 bp, Homo sapiens
ctgcccttctggtag

SEQ ID NO: 1705871 - DNA, 15 bp, Homo sapiens
tgcccttctggtaga

SEQ ID NO: 1705872 - DNA, 15 bp, Homo sapiens
gcccttctggtagaa

SEQ ID NO: 1705873 - DNA, 15 bp, Homo sapiens
cccttctggtagaaa

SEQ ID NO: 1705874 - DNA, 15 bp, Homo sapiens
ccttctggtagaaaa

SEQ ID NO: 1705875 - DNA, 15 bp, Homo sapiens
cttctggtagaaaag

SEQ ID NO: 1705876 - DNA, 15 bp, Homo sapiens
ttctggtagaaaagc

SEQ ID NO: 1705877 - DNA, 15 bp, Homo sapiens
tctggtagaaaagcc

SEQ ID NO: 1705878 - DNA, 15 bp, Homo sapiens
ctggtagaaaagcct

SEQ ID NO: 1705879 - DNA, 15 bp, Homo sapiens
tggtagaaaagcctc

SEQ ID NO: 1705880 - DNA, 15 bp, Homo sapiens
ggtagaaaagcctcg

SEQ ID NO: 1705881 - DNA, 15 bp, Homo sapiens
gtagaaaagcctcgg

SEQ ID NO: 1705882 - DNA, 15 bp, Homo sapiens
tagaaaagcctcggc

SEQ ID NO: 1705883 - DNA, 15 bp, Homo sapiens
agaaaagcctcggcc

SEQ ID NO: 1705884 - DNA, 15 bp, Homo sapiens
gaaaagcctcggcca

SEQ ID NO: 1705885 - DNA, 15 bp, Homo sapiens
aaaagcctcggccag

SEQ ID NO: 1705886 - DNA, 15 bp, Homo sapiens
aaagcctcggccaga

SEQ ID NO: 1705887 - DNA, 15 bp, Homo sapiens
aagcctcggccagat

SEQ ID NO: 1705888 - DNA, 15 bp, Homo sapiens
agcctcggccagatg

SEQ ID NO: 1705889 - DNA, 15 bp, Homo sapiens
gcctcggccagatgc

SEQ ID NO: 1705890 - DNA, 15 bp, Homo sapiens
cctcggccagatgcc

SEQ ID NO: 1705891 - DNA, 15 bp, Homo sapiens
ctcggccagatgcca

SEQ ID NO: 1705892 - DNA, 15 bp, Homo sapiens
tcggccagatgccat

SEQ ID NO: 1705893 - DNA, 15 bp, Homo sapiens
cggccagatgccatc

SEQ ID NO: 1705894 - DNA, 15 bp, Homo sapiens
ggccagatgccatct

SEQ ID NO: 1705895 - DNA, 15 bp, Homo sapiens
gccagatgccatctt

SEQ ID NO: 1705896 - DNA, 15 bp, Homo sapiens
ccagatgccatcttt

SEQ ID NO: 1705897 - DNA, 15 bp, Homo sapiens
cagatgccatctttg

SEQ ID NO: 1705898 - DNA, 15 bp, Homo sapiens
agatgccatctttgg

SEQ ID NO: 1705899 - DNA, 15 bp, Homo sapiens
gatgccatctttggt

SEQ ID NO: 1705900 - DNA, 15 bp, Homo sapiens
atgccatctttggtg

SEQ ID NO: 1705901 - DNA, 15 bp, Homo sapiens
tgccatctttggtga

SEQ ID NO: 1705902 - DNA, 15 bp, Homo sapiens
gccatctttggtgaa

SEQ ID NO: 1705903 - DNA, 15 bp, Homo sapiens
ccatctttggtgaaa

SEQ ID NO: 1705904 - DNA, 15 bp, Homo sapiens
catctttggtgaaac

SEQ ID NO: 1705905 - DNA, 15 bp, Homo sapiens
atctttggtgaaacc

SEQ ID NO: 1705906 - DNA, 15 bp, Homo sapiens
tctttggtgaaacca

SEQ ID NO: 1705907 - DNA, 15 bp, Homo sapiens
ctttggtgaaaccat

SEQ ID NO: 1705908 - DNA, 15 bp, Homo sapiens
tttggtgaaaccatg

SEQ ID NO: 1705909 - DNA, 15 bp, Homo sapiens
ttggtgaaaccatgg

SEQ ID NO: 1705910 - DNA, 15 bp, Homo sapiens
tggtgaaaccatggt

SEQ ID NO: 1705911 - DNA, 15 bp, Homo sapiens
ggtgaaaccatggta

SEQ ID NO: 1705912 - DNA, 15 bp, Homo sapiens
gtgaaaccatggtag

SEQ ID NO: 1705913 - DNA, 15 bp, Homo sapiens
tgaaaccatggtaga

SEQ ID NO: 1705914 - DNA, 15 bp, Homo sapiens
gaaaccatggtagaa

SEQ ID NO: 1705915 - DNA, 15 bp, Homo sapiens
aaaccatggtagaag

SEQ ID NO: 1705916 - DNA, 15 bp, Homo sapiens
aaccatggtagaagt

SEQ ID NO: 1705917 - DNA, 15 bp, Homo sapiens
accatggtagaagtt

SEQ ID NO: 1705918 - DNA, 15 bp, Homo sapiens
ccatggtagaagttg

SEQ ID NO: 1705919 - DNA, 15 bp, Homo sapiens
catggtagaagttgg

SEQ ID NO: 1705920 - DNA, 15 bp, Homo sapiens
atggtagaagttgga

SEQ ID NO: 1705921 - DNA, 15 bp, Homo sapiens
tggtagaagttggag

SEQ ID NO: 1705922 - DNA, 15 bp, Homo sapiens
ggtagaagttggagc

SEQ ID NO: 1705923 - DNA, 15 bp, Homo sapiens
gtagaagttggagca

SEQ ID NO: 1705924 - DNA, 15 bp, Homo sapiens
tagaagttggagcac

SEQ ID NO: 1705925 - DNA, 15 bp, Homo sapiens
agaagttggagcacc

SEQ ID NO: 1705926 - DNA, 15 bp, Homo sapiens
gaagttggagcacca

SEQ ID NO: 1705927 - DNA, 15 bp, Homo sapiens
aagttggagcaccat

SEQ ID NO: 1705928 - DNA, 15 bp, Homo sapiens
agttggagcaccatt

SEQ ID NO: 1705929 - DNA, 15 bp, Homo sapiens
gttggagcaccattc

SEQ ID NO: 1705930 - DNA, 15 bp, Homo sapiens
ttggagcaccattct

SEQ ID NO: 1705931 - DNA, 15 bp, Homo sapiens
tggagcaccattctc

SEQ ID NO: 1705932 - DNA, 15 bp, Homo sapiens
ggagcaccattctcc

SEQ ID NO: 1705933 - DNA, 15 bp, Homo sapiens
gagcaccattctcct

SEQ ID NO: 1705934 - DNA, 15 bp, Homo sapiens
agcaccattctcctt

SEQ ID NO: 1705935 - DNA, 15 bp, Homo sapiens
gcaccattctccttg

SEQ ID NO: 1705936 - DNA, 15 bp, Homo sapiens
caccattctccttga

SEQ ID NO: 1705937 - DNA, 15 bp, Homo sapiens
accattctccttgaa

SEQ ID NO: 1705938 - DNA, 15 bp, Homo sapiens
ccattctccttgaaa

SEQ ID NO: 1705939 - DNA, 15 bp, Homo sapiens
cattctccttgaaag

SEQ ID NO: 1705940 - DNA, 15 bp, Homo sapiens
attctccttgaaagg

SEQ ID NO: 1705941 - DNA, 15 bp, Homo sapiens
ttctccttgaaagga

SEQ ID NO: 1705942 - DNA, 15 bp, Homo sapiens
tctccttgaaaggac

SEQ ID NO: 1705943 - DNA, 15 bp, Homo sapiens
ctccttgaaaggact

SEQ ID NO: 1705944 - DNA, 15 bp, Homo sapiens
tccttgaaaggactt

SEQ ID NO: 1705945 - DNA, 15 bp, Homo sapiens
ccttgaaaggactta

SEQ ID NO: 1705946 - DNA, 15 bp, Homo sapiens
cttgaaaggacttat

SEQ ID NO: 1705947 - DNA, 15 bp, Homo sapiens
ttgaaaggacttatg

SEQ ID NO: 1705948 - DNA, 15 bp, Homo sapiens
tgaaaggacttatgg

SEQ ID NO: 1705949 - DNA, 15 bp, Homo sapiens
gaaaggacttatggg

SEQ ID NO: 1705950 - DNA, 15 bp, Homo sapiens
aaaggacttatgggt

SEQ ID NO: 1705951 - DNA, 15 bp, Homo sapiens
aaggacttatgggta

SEQ ID NO: 1705952 - DNA, 15 bp, Homo sapiens
aggacttatgggtaa

SEQ ID NO: 1705953 - DNA, 15 bp, Homo sapiens
ggacttatgggtaat

SEQ ID NO: 1705954 - DNA, 15 bp, Homo sapiens
gacttatgggtaatg

SEQ ID NO: 1705955 - DNA, 15 bp, Homo sapiens
acttatgggtaatgt

SEQ ID NO: 1705956 - DNA, 15 bp, Homo sapiens
cttatgggtaatgtt

SEQ ID NO: 1705957 - DNA, 15 bp, Homo sapiens
ttatgggtaatgtta

SEQ ID NO: 1705958 - DNA, 15 bp, Homo sapiens
tatgggtaatgttat

SEQ ID NO: 1705959 - DNA, 15 bp, Homo sapiens
atgggtaatgttata

SEQ ID NO: 1705960 - DNA, 15 bp, Homo sapiens
tgggtaatgttatat

SEQ ID NO: 1705961 - DNA, 15 bp, Homo sapiens
gggtaatgttatatg

SEQ ID NO: 1705962 - DNA, 15 bp, Homo sapiens
ggtaatgttatatgt

SEQ ID NO: 1705963 - DNA, 15 bp, Homo sapiens
gtaatgttatatgtt

SEQ ID NO: 1705964 - DNA, 15 bp, Homo sapiens
taatgttatatgttc

SEQ ID NO: 1705965 - DNA, 15 bp, Homo sapiens
aatgttatatgttct

SEQ ID NO: 1705966 - DNA, 15 bp, Homo sapiens
atgttatatgttctc

SEQ ID NO: 1705967 - DNA, 15 bp, Homo sapiens
tgttatatgttctcc

SEQ ID NO: 1705968 - DNA, 15 bp, Homo sapiens
gttatatgttctcct

SEQ ID NO: 1705969 - DNA, 15 bp, Homo sapiens
ttatatgttctcctg

SEQ ID NO: 1705970 - DNA, 15 bp, Homo sapiens
tatatgttctcctgc

SEQ ID NO: 1705971 - DNA, 15 bp, Homo sapiens
atatgttctcctgcc

SEQ ID NO: 1705972 - DNA, 15 bp, Homo sapiens
tatgttctcctgcct

SEQ ID NO: 1705973 - DNA, 15 bp, Homo sapiens
atgttctcctgccta

SEQ ID NO: 1705974 - DNA, 15 bp, Homo sapiens
tgttctcctgcctac

SEQ ID NO: 1705975 - DNA, 15 bp, Homo sapiens
gttctcctgcctact

SEQ ID NO: 1705976 - DNA, 15 bp, Homo sapiens
ttctcctgcctactg

SEQ ID NO: 1705977 - DNA, 15 bp, Homo sapiens
tctcctgcctactgg

SEQ ID NO: 1705978 - DNA, 15 bp, Homo sapiens
ctcctgcctactgga

SEQ ID NO: 1705979 - DNA, 15 bp, Homo sapiens
tcctgcctactggaa

SEQ ID NO: 1705980 - DNA, 15 bp, Homo sapiens
cctgcctactggaag

SEQ ID NO: 1705981 - DNA, 15 bp, Homo sapiens
ctgcctactggaagc

SEQ ID NO: 1705982 - DNA, 15 bp, Homo sapiens
tgcctactggaagcc

SEQ ID NO: 1705983 - DNA, 15 bp, Homo sapiens
gcctactggaagcca

SEQ ID NO: 1705984 - DNA, 15 bp, Homo sapiens
cctactggaagccaa

SEQ ID NO: 1705985 - DNA, 15 bp, Homo sapiens
ctactggaagccaag

SEQ ID NO: 1705986 - DNA, 15 bp, Homo sapiens
tactggaagccaagc

SEQ ID NO: 1705987 - DNA, 15 bp, Homo sapiens
actggaagccaagca

SEQ ID NO: 1705988 - DNA, 15 bp, Homo sapiens
ctggaagccaagcac

SEQ ID NO: 1705989 - DNA, 15 bp, Homo sapiens
tggaagccaagcact

SEQ ID NO: 1705990 - DNA, 15 bp, Homo sapiens
ggaagccaagcactt

SEQ ID NO: 1705991 - DNA, 15 bp, Homo sapiens
gaagccaagcacttt

SEQ ID NO: 1705992 - DNA, 15 bp, Homo sapiens
aagccaagcactttt

SEQ ID NO: 1705993 - DNA, 15 bp, Homo sapiens
agccaagcacttttg

SEQ ID NO: 1705994 - DNA, 15 bp, Homo sapiens
gccaagcacttttgg

SEQ ID NO: 1705995 - DNA, 15 bp, Homo sapiens
ccaagcacttttggt

SEQ ID NO: 1705996 - DNA, 15 bp, Homo sapiens
caagcacttttggtg

SEQ ID NO: 1705997 - DNA, 15 bp, Homo sapiens
aagcacttttggtgg

SEQ ID NO: 1705998 - DNA, 15 bp, Homo sapiens
agcacttttggtgga

SEQ ID NO: 1705999 - DNA, 15 bp, Homo sapiens
gcacttttggtggag

SEQ ID NO: 1706000 - DNA, 15 bp, Homo sapiens
cacttttggtggaga

SEQ ID NO: 1706001 - DNA, 15 bp, Homo sapiens
acttttggtggagaa

SEQ ID NO: 1706002 - DNA, 15 bp, Homo sapiens
cttttggtggagaag

SEQ ID NO: 1706003 - DNA, 15 bp, Homo sapiens
ttttggtggagaagt

SEQ ID NO: 1706004 - DNA, 15 bp, Homo sapiens
tttggtggagaagtg

SEQ ID NO: 1706005 - DNA, 15 bp, Homo sapiens
ttggtggagaagtgg

SEQ ID NO: 1706006 - DNA, 15 bp, Homo sapiens
tggtggagaagtggg

SEQ ID NO: 1706007 - DNA, 15 bp, Homo sapiens
ggtggagaagtgggt

SEQ ID NO: 1706008 - DNA, 15 bp, Homo sapiens
gtggagaagtgggtt

SEQ ID NO: 1706009 - DNA, 15 bp, Homo sapiens
tggagaagtgggttt

SEQ ID NO: 1706010 - DNA, 15 bp, Homo sapiens
ggagaagtgggtttt

SEQ ID NO: 1706011 - DNA, 15 bp, Homo sapiens
gagaagtgggttttc

SEQ ID NO: 1706012 - DNA, 15 bp, Homo sapiens
agaagtgggttttca

SEQ ID NO: 1706013 - DNA, 15 bp, Homo sapiens
gaagtgggttttcaa

SEQ ID NO: 1706014 - DNA, 15 bp, Homo sapiens
aagtgggttttcaaa

SEQ ID NO: 1706015 - DNA, 15 bp, Homo sapiens
agtgggttttcaaat

SEQ ID NO: 1706016 - DNA, 15 bp, Homo sapiens
gtgggttttcaaatc

SEQ ID NO: 1706017 - DNA, 15 bp, Homo sapiens
tgggttttcaaatca

SEQ ID NO: 1706018 - DNA, 15 bp, Homo sapiens
gggttttcaaatcat

SEQ ID NO: 1706019 - DNA, 15 bp, Homo sapiens
ggttttcaaatcatc

SEQ ID NO: 1706020 - DNA, 15 bp, Homo sapiens
gttttcaaatcatca

SEQ ID NO: 1706021 - DNA, 15 bp, Homo sapiens
ttttcaaatcatcaa

SEQ ID NO: 1706022 - DNA, 15 bp, Homo sapiens
tttcaaatcatcaac

SEQ ID NO: 1706023 - DNA, 15 bp, Homo sapiens
ttcaaatcatcaaca

SEQ ID NO: 1706024 - DNA, 15 bp, Homo sapiens
tcaaatcatcaacac

SEQ ID NO: 1706025 - DNA, 15 bp, Homo sapiens
caaatcatcaacact

SEQ ID NO: 1706026 - DNA, 15 bp, Homo sapiens
aaatcatcaacactg

SEQ ID NO: 1706027 - DNA, 15 bp, Homo sapiens
aatcatcaacactgc

SEQ ID NO: 1706028 - DNA, 15 bp, Homo sapiens
atcatcaacactgcc

SEQ ID NO: 1706029 - DNA, 15 bp, Homo sapiens
tcatcaacactgcct

SEQ ID NO: 1706030 - DNA, 15 bp, Homo sapiens
catcaacactgcctc

SEQ ID NO: 1706031 - DNA, 15 bp, Homo sapiens
atcaacactgcctca

SEQ ID NO: 1706032 - DNA, 15 bp, Homo sapiens
tcaacactgcctcaa

SEQ ID NO: 1706033 - DNA, 15 bp, Homo sapiens
caacactgcctcaat

SEQ ID NO: 1706034 - DNA, 15 bp, Homo sapiens
aacactgcctcaatt

SEQ ID NO: 1706035 - DNA, 15 bp, Homo sapiens
acactgcctcaattc

SEQ ID NO: 1706036 - DNA, 15 bp, Homo sapiens
cactgcctcaattca

SEQ ID NO: 1706037 - DNA, 15 bp, Homo sapiens
actgcctcaattcag

SEQ ID NO: 1706038 - DNA, 15 bp, Homo sapiens
ctgcctcaattcagt

SEQ ID NO: 1706039 - DNA, 15 bp, Homo sapiens
tgcctcaattcagtc

SEQ ID NO: 1706040 - DNA, 15 bp, Homo sapiens
gcctcaattcagtct

SEQ ID NO: 1706041 - DNA, 15 bp, Homo sapiens
cctcaattcagtctc

SEQ ID NO: 1706042 - DNA, 15 bp, Homo sapiens
ctcaattcagtctct

SEQ ID NO: 1706043 - DNA, 15 bp, Homo sapiens
tcaattcagtctctc

SEQ ID NO: 1706044 - DNA, 15 bp, Homo sapiens
caattcagtctctca

SEQ ID NO: 1706045 - DNA, 15 bp, Homo sapiens
aattcagtctctcat

SEQ ID NO: 1706046 - DNA, 15 bp, Homo sapiens
attcagtctctcatc

SEQ ID NO: 1706047 - DNA, 15 bp, Homo sapiens
ttcagtctctcatct

SEQ ID NO: 1706048 - DNA, 15 bp, Homo sapiens
tcagtctctcatctg

SEQ ID NO: 1706049 - DNA, 15 bp, Homo sapiens
cagtctctcatctgc

SEQ ID NO: 1706050 - DNA, 15 bp, Homo sapiens
agtctctcatctgca

SEQ ID NO: 1706051 - DNA, 15 bp, Homo sapiens
gtctctcatctgcaa

SEQ ID NO: 1706052 - DNA, 15 bp, Homo sapiens
tctctcatctgcaat

SEQ ID NO: 1706053 - DNA, 15 bp, Homo sapiens
ctctcatctgcaata

SEQ ID NO: 1706054 - DNA, 15 bp, Homo sapiens
tctcatctgcaataa

SEQ ID NO: 1706055 - DNA, 15 bp, Homo sapiens
ctcatctgcaataac

SEQ ID NO: 1706056 - DNA, 15 bp, Homo sapiens
tcatctgcaataacg

SEQ ID NO: 1706057 - DNA, 15 bp, Homo sapiens
catctgcaataacgt

SEQ ID NO: 1706058 - DNA, 15 bp, Homo sapiens
atctgcaataacgtg

SEQ ID NO: 1706059 - DNA, 15 bp, Homo sapiens
tctgcaataacgtga

SEQ ID NO: 1706060 - DNA, 15 bp, Homo sapiens
ctgcaataacgtgaa

SEQ ID NO: 1706061 - DNA, 15 bp, Homo sapiens
tgcaataacgtgaag

SEQ ID NO: 1706062 - DNA, 15 bp, Homo sapiens
gcaataacgtgaagg

SEQ ID NO: 1706063 - DNA, 15 bp, Homo sapiens
caataacgtgaaggg

SEQ ID NO: 1706064 - DNA, 15 bp, Homo sapiens
aataacgtgaagggc

SEQ ID NO: 1706065 - DNA, 15 bp, Homo sapiens
ataacgtgaagggct

SEQ ID NO: 1706066 - DNA, 15 bp, Homo sapiens
taacgtgaagggctg

SEQ ID NO: 1706067 - DNA, 15 bp, Homo sapiens
aacgtgaagggctgt

SEQ ID NO: 1706068 - DNA, 15 bp, Homo sapiens
acgtgaagggctgtc

SEQ ID NO: 1706069 - DNA, 15 bp, Homo sapiens
cgtgaagggctgtcc

SEQ ID NO: 1706070 - DNA, 15 bp, Homo sapiens
gtgaagggctgtccc

SEQ ID NO: 1706071 - DNA, 15 bp, Homo sapiens
tgaagggctgtccct

SEQ ID NO: 1706072 - DNA, 15 bp, Homo sapiens
gaagggctgtccctt

SEQ ID NO: 1706073 - DNA, 15 bp, Homo sapiens
aagggctgtcccttt

SEQ ID NO: 1706074 - DNA, 15 bp, Homo sapiens
agggctgtcccttta

SEQ ID NO: 1706075 - DNA, 15 bp, Homo sapiens
gggctgtccctttac

SEQ ID NO: 1706076 - DNA, 15 bp, Homo sapiens
ggctgtccctttact

SEQ ID NO: 1706077 - DNA, 15 bp, Homo sapiens
gctgtccctttactt

SEQ ID NO: 1706078 - DNA, 15 bp, Homo sapiens
ctgtccctttacttc

SEQ ID NO: 1706079 - DNA, 15 bp, Homo sapiens
tgtccctttacttca

SEQ ID NO: 1706080 - DNA, 15 bp, Homo sapiens
gtccctttacttcat

SEQ ID NO: 1706081 - DNA, 15 bp, Homo sapiens
tccctttacttcatt

SEQ ID NO: 1706082 - DNA, 15 bp, Homo sapiens
ccctttacttcattc

SEQ ID NO: 1706083 - DNA, 15 bp, Homo sapiens
cctttacttcattca

SEQ ID NO: 1706084 - DNA, 15 bp, Homo sapiens
ctttacttcattcag

SEQ ID NO: 1706085 - DNA, 15 bp, Homo sapiens
tttacttcattcagt

SEQ ID NO: 1706086 - DNA, 15 bp, Homo sapiens
ttacttcattcagtg

SEQ ID NO: 1706087 - DNA, 15 bp, Homo sapiens
tacttcattcagtgt

SEQ ID NO: 1706088 - DNA, 15 bp, Homo sapiens
acttcattcagtgtt

SEQ ID NO: 1706089 - DNA, 15 bp, Homo sapiens
cttcattcagtgttc

SEQ ID NO: 1706090 - DNA, 15 bp, Homo sapiens
ttcattcagtgttcc

SEQ ID NO: 1706091 - DNA, 15 bp, Homo sapiens
tcattcagtgttcca

SEQ ID NO: 1706092 - DNA, 15 bp, Homo sapiens
cattcagtgttccag

SEQ ID NO: 1706093 - DNA, 15 bp, Homo sapiens
attcagtgttccaga

SEQ ID NO: 1706094 - DNA, 15 bp, Homo sapiens
ttcagtgttccagat

SEQ ID NO: 1706095 - DNA, 15 bp, Homo sapiens
tcagtgttccagatc

SEQ ID NO: 1706096 - DNA, 15 bp, Homo sapiens
cagtgttccagatcc

SEQ ID NO: 1706097 - DNA, 15 bp, Homo sapiens
agtgttccagatcca

SEQ ID NO: 1706098 - DNA, 15 bp, Homo sapiens
gtgttccagatccag

SEQ ID NO: 1706099 - DNA, 15 bp, Homo sapiens
tgttccagatccaga

SEQ ID NO: 1706100 - DNA, 15 bp, Homo sapiens
gttccagatccagag

SEQ ID NO: 1706101 - DNA, 15 bp, Homo sapiens
ttccagatccagagc

SEQ ID NO: 1706102 - DNA, 15 bp, Homo sapiens
tccagatccagagct

SEQ ID NO: 1706103 - DNA, 15 bp, Homo sapiens
ccagatccagagctc

SEQ ID NO: 1706104 - DNA, 15 bp, Homo sapiens
cagatccagagctca

SEQ ID NO: 1706105 - DNA, 15 bp, Homo sapiens
agatccagagctcat

SEQ ID NO: 1706106 - DNA, 15 bp, Homo sapiens
gatccagagctcatt

SEQ ID NO: 1706107 - DNA, 15 bp, Homo sapiens
atccagagctcatta

SEQ ID NO: 1706108 - DNA, 15 bp, Homo sapiens
tccagagctcattaa

SEQ ID NO: 1706109 - DNA, 15 bp, Homo sapiens
ccagagctcattaaa

SEQ ID NO: 1706110 - DNA, 15 bp, Homo sapiens
cagagctcattaaaa

SEQ ID NO: 1706111 - DNA, 15 bp, Homo sapiens
agagctcattaaaac

SEQ ID NO: 1706112 - DNA, 15 bp, Homo sapiens
gagctcattaaaaca

SEQ ID NO: 1706113 - DNA, 15 bp, Homo sapiens
agctcattaaaacag

SEQ ID NO: 1706114 - DNA, 15 bp, Homo sapiens
gctcattaaaacagt

SEQ ID NO: 1706115 - DNA, 15 bp, Homo sapiens
ctcattaaaacagtc

SEQ ID NO: 1706116 - DNA, 15 bp, Homo sapiens
tcattaaaacagtca

SEQ ID NO: 1706117 - DNA, 15 bp, Homo sapiens
cattaaaacagtcac

SEQ ID NO: 1706118 - DNA, 15 bp, Homo sapiens
attaaaacagtcacc

SEQ ID NO: 1706119 - DNA, 15 bp, Homo sapiens
ttaaaacagtcacca

SEQ ID NO: 1706120 - DNA, 15 bp, Homo sapiens
taaaacagtcaccat

SEQ ID NO: 1706121 - DNA, 15 bp, Homo sapiens
aaaacagtcaccatc

SEQ ID NO: 1706122 - DNA, 15 bp, Homo sapiens
aaacagtcaccatca

SEQ ID NO: 1706123 - DNA, 15 bp, Homo sapiens
aacagtcaccatcaa

SEQ ID NO: 1706124 - DNA, 15 bp, Homo sapiens
acagtcaccatcaat

SEQ ID NO: 1706125 - DNA, 15 bp, Homo sapiens
cagtcaccatcaatg

SEQ ID NO: 1706126 - DNA, 15 bp, Homo sapiens
agtcaccatcaatgc

SEQ ID NO: 1706127 - DNA, 15 bp, Homo sapiens
gtcaccatcaatgca

SEQ ID NO: 1706128 - DNA, 15 bp, Homo sapiens
tcaccatcaatgcaa

SEQ ID NO: 1706129 - DNA, 15 bp, Homo sapiens
caccatcaatgcaag

SEQ ID NO: 1706130 - DNA, 15 bp, Homo sapiens
accatcaatgcaagt

SEQ ID NO: 1706131 - DNA, 15 bp, Homo sapiens
ccatcaatgcaagtt

SEQ ID NO: 1706132 - DNA, 15 bp, Homo sapiens
catcaatgcaagttc

SEQ ID NO: 1706133 - DNA, 15 bp, Homo sapiens
atcaatgcaagttct

SEQ ID NO: 1706134 - DNA, 15 bp, Homo sapiens
tcaatgcaagttctt

SEQ ID NO: 1706135 - DNA, 15 bp, Homo sapiens
caatgcaagttcttc

SEQ ID NO: 1706136 - DNA, 15 bp, Homo sapiens
aatgcaagttcttcc

SEQ ID NO: 1706137 - DNA, 15 bp, Homo sapiens
atgcaagttcttccc

SEQ ID NO: 1706138 - DNA, 15 bp, Homo sapiens
tgcaagttcttcccg

SEQ ID NO: 1706139 - DNA, 15 bp, Homo sapiens
gcaagttcttcccgc

SEQ ID NO: 1706140 - DNA, 15 bp, Homo sapiens
caagttcttcccgct

SEQ ID NO: 1706141 - DNA, 15 bp, Homo sapiens
aagttcttcccgctc

SEQ ID NO: 1706142 - DNA, 15 bp, Homo sapiens
agttcttcccgctcc

SEQ ID NO: 1706143 - DNA, 15 bp, Homo sapiens
gttcttcccgctccg

SEQ ID NO: 1706144 - DNA, 15 bp, Homo sapiens
ttcttcccgctccgg

SEQ ID NO: 1706145 - DNA, 15 bp, Homo sapiens
tcttcccgctccgga

SEQ ID NO: 1706146 - DNA, 15 bp, Homo sapiens
cttcccgctccggac

SEQ ID NO: 1706147 - DNA, 15 bp, Homo sapiens
ttcccgctccggact

SEQ ID NO: 1706148 - DNA, 15 bp, Homo sapiens
tcccgctccggacta

SEQ ID NO: 1706149 - DNA, 15 bp, Homo sapiens
cccgctccggactag

SEQ ID NO: 1706150 - DNA, 15 bp, Homo sapiens
ccgctccggactaga

SEQ ID NO: 1706151 - DNA, 15 bp, Homo sapiens
cgctccggactagat

SEQ ID NO: 1706152 - DNA, 15 bp, Homo sapiens
gctccggactagatg

SEQ ID NO: 1706153 - DNA, 15 bp, Homo sapiens
ctccggactagatga

SEQ ID NO: 1706154 - DNA, 15 bp, Homo sapiens
tccggactagatgat

SEQ ID NO: 1706155 - DNA, 15 bp, Homo sapiens
ccggactagatgata

SEQ ID NO: 1706156 - DNA, 15 bp, Homo sapiens
cggactagatgatat

SEQ ID NO: 1706157 - DNA, 15 bp, Homo sapiens
ggactagatgatatc

SEQ ID NO: 1706158 - DNA, 15 bp, Homo sapiens
gactagatgatatca

SEQ ID NO: 1706159 - DNA, 15 bp, Homo sapiens
actagatgatatcaa

SEQ ID NO: 1706160 - DNA, 15 bp, Homo sapiens
ctagatgatatcaat

SEQ ID NO: 1706161 - DNA, 15 bp, Homo sapiens
tagatgatatcaatc

SEQ ID NO: 1706162 - DNA, 15 bp, Homo sapiens
agatgatatcaatcc

SEQ ID NO: 1706163 - DNA, 15 bp, Homo sapiens
gatgatatcaatccc

SEQ ID NO: 1706164 - DNA, 15 bp, Homo sapiens
atgatatcaatccca

SEQ ID NO: 1706165 - DNA, 15 bp, Homo sapiens
tgatatcaatcccac

SEQ ID NO: 1706166 - DNA, 15 bp, Homo sapiens
gatatcaatcccaca

SEQ ID NO: 1706167 - DNA, 15 bp, Homo sapiens
atatcaatcccacag

SEQ ID NO: 1706168 - DNA, 15 bp, Homo sapiens
tatcaatcccacagt

SEQ ID NO: 1706169 - DNA, 15 bp, Homo sapiens
atcaatcccacagta

SEQ ID NO: 1706170 - DNA, 15 bp, Homo sapiens
tcaatcccacagtac

SEQ ID NO: 1706171 - DNA, 15 bp, Homo sapiens
caatcccacagtact

SEQ ID NO: 1706172 - DNA, 15 bp, Homo sapiens
aatcccacagtacta

SEQ ID NO: 1706173 - DNA, 15 bp, Homo sapiens
atcccacagtactac

SEQ ID NO: 1706174 - DNA, 15 bp, Homo sapiens
tcccacagtactact

SEQ ID NO: 1706175 - DNA, 15 bp, Homo sapiens
cccacagtactacta

SEQ ID NO: 1706176 - DNA, 15 bp, Homo sapiens
ccacagtactactaa

SEQ ID NO: 1706177 - DNA, 15 bp, Homo sapiens
cacagtactactaaa

SEQ ID NO: 1706178 - DNA, 15 bp, Homo sapiens
acagtactactaaaa

SEQ ID NO: 1706179 - DNA, 15 bp, Homo sapiens
cagtactactaaaag

SEQ ID NO: 1706180 - DNA, 15 bp, Homo sapiens
agtactactaaaaga

SEQ ID NO: 1706181 - DNA, 15 bp, Homo sapiens
gtactactaaaagaa

SEQ ID NO: 1706182 - DNA, 15 bp, Homo sapiens
tactactaaaagaac

SEQ ID NO: 1706183 - DNA, 15 bp, Homo sapiens
actactaaaagaacg

SEQ ID NO: 1706184 - DNA, 15 bp, Homo sapiens
ctactaaaagaacgt

SEQ ID NO: 1706185 - DNA, 15 bp, Homo sapiens
tactaaaagaacgtt

SEQ ID NO: 1706186 - DNA, 15 bp, Homo sapiens
actaaaagaacgttc

SEQ ID NO: 1706187 - DNA, 15 bp, Homo sapiens
ctaaaagaacgttcg

SEQ ID NO: 1706188 - DNA, 15 bp, Homo sapiens
taaaagaacgttcga

SEQ ID NO: 1706189 - DNA, 15 bp, Homo sapiens
aaaagaacgttcgac

SEQ ID NO: 1706190 - DNA, 15 bp, Homo sapiens
aaagaacgttcgact

SEQ ID NO: 1706191 - DNA, 15 bp, Homo sapiens
aagaacgttcgactg

SEQ ID NO: 1706192 - DNA, 15 bp, Homo sapiens
agaacgttcgactga

SEQ ID NO: 1706193 - DNA, 15 bp, Homo sapiens
gaacgttcgactgaa

SEQ ID NO: 1706194 - DNA, 15 bp, Homo sapiens
aacgttcgactgaac

SEQ ID NO: 1706195 - DNA, 15 bp, Homo sapiens
acgttcgactgaact

SEQ ID NO: 1706196 - DNA, 15 bp, Homo sapiens
cgttcgactgaactg

SEQ ID NO: 1706197 - DNA, 15 bp, Homo sapiens
gttcgactgaactgt

SEQ ID NO: 1706198 - DNA, 15 bp, Homo sapiens
ttcgactgaactgta

SEQ ID NO: 1706199 - DNA, 15 bp, Homo sapiens
tcgactgaactgtag

SEQ ID NO: 1706200 - DNA, 15 bp, Homo sapiens
cgactgaactgtaga

SEQ ID NO: 1706201 - DNA, 15 bp, Homo sapiens
gactgaactgtagaa

SEQ ID NO: 1706202 - DNA, 15 bp, Homo sapiens
actgaactgtagaag

SEQ ID NO: 1706203 - DNA, 15 bp, Homo sapiens
ctgaactgtagaagt

SEQ ID NO: 1706204 - DNA, 15 bp, Homo sapiens
tgaactgtagaagtc

SEQ ID NO: 1706205 - DNA, 15 bp, Homo sapiens
gaactgtagaagtct

SEQ ID NO: 1706206 - DNA, 15 bp, Homo sapiens
aactgtagaagtcta

SEQ ID NO: 1706207 - DNA, 15 bp, Homo sapiens
actgtagaagtctaa

SEQ ID NO: 1706208 - DNA, 15 bp, Homo sapiens
ctgtagaagtctaat

SEQ ID NO: 1706209 - DNA, 15 bp, Homo sapiens
tgtagaagtctaatg

SEQ ID NO: 1706210 - DNA, 15 bp, Homo sapiens
gtagaagtctaatga

SEQ ID NO: 1706211 - DNA, 15 bp, Homo sapiens
tagaagtctaatgat

SEQ ID NO: 1706212 - DNA, 15 bp, Homo sapiens
agaagtctaatgatc

SEQ ID NO: 1706213 - DNA, 15 bp, Homo sapiens
gaagtctaatgatca

SEQ ID NO: 1706214 - DNA, 15 bp, Homo sapiens
aagtctaatgatcat

SEQ ID NO: 1706215 - DNA, 15 bp, Homo sapiens
agtctaatgatcata

SEQ ID NO: 1706216 - DNA, 15 bp, Homo sapiens
gtctaatgatcatat

SEQ ID NO: 1706217 - DNA, 15 bp, Homo sapiens
tctaatgatcatatt

SEQ ID NO: 1706218 - DNA, 15 bp, Homo sapiens
ctaatgatcatattt

SEQ ID NO: 1706219 - DNA, 15 bp, Homo sapiens
taatgatcatattta

SEQ ID NO: 1706220 - DNA, 15 bp, Homo sapiens
aatgatcatatttat

SEQ ID NO: 1706221 - DNA, 15 bp, Homo sapiens
atgatcatatttatt

SEQ ID NO: 1706222 - DNA, 15 bp, Homo sapiens
tgatcatatttattt

SEQ ID NO: 1706223 - DNA, 15 bp, Homo sapiens
gatcatatttattta

SEQ ID NO: 1706224 - DNA, 15 bp, Homo sapiens
atcatatttatttat

SEQ ID NO: 1706225 - DNA, 15 bp, Homo sapiens
tcatatttatttatt

SEQ ID NO: 1706226 - DNA, 15 bp, Homo sapiens
catatttatttattt

SEQ ID NO: 1706227 - DNA, 15 bp, Homo sapiens
atatttatttattta

SEQ ID NO: 1706228 - DNA, 15 bp, Homo sapiens
ttatttatttatatg

SEQ ID NO: 1706229 - DNA, 15 bp, Homo sapiens
tatttatttatatga

SEQ ID NO: 1706230 - DNA, 15 bp, Homo sapiens
atttatttatatgaa

SEQ ID NO: 1706231 - DNA, 15 bp, Homo sapiens
tttatttatatgaac

SEQ ID NO: 1706232 - DNA, 15 bp, Homo sapiens
ttatttatatgaacc

SEQ ID NO: 1706233 - DNA, 15 bp, Homo sapiens
tatttatatgaacca

SEQ ID NO: 1706234 - DNA, 15 bp, Homo sapiens
atttatatgaaccat

SEQ ID NO: 1706235 - DNA, 15 bp, Homo sapiens
tttatatgaaccatg

SEQ ID NO: 1706236 - DNA, 15 bp, Homo sapiens
ttatatgaaccatgt

SEQ ID NO: 1706237 - DNA, 15 bp, Homo sapiens
tatatgaaccatgtc

SEQ ID NO: 1706238 - DNA, 15 bp, Homo sapiens
atatgaaccatgtct

SEQ ID NO: 1706239 - DNA, 15 bp, Homo sapiens
tatgaaccatgtcta

SEQ ID NO: 1706240 - DNA, 15 bp, Homo sapiens
atgaaccatgtctat

SEQ ID NO: 1706241 - DNA, 15 bp, Homo sapiens
tgaaccatgtctatt

SEQ ID NO: 1706242 - DNA, 15 bp, Homo sapiens
gaaccatgtctatta

SEQ ID NO: 1706243 - DNA, 15 bp, Homo sapiens
aaccatgtctattaa

SEQ ID NO: 1706244 - DNA, 15 bp, Homo sapiens
accatgtctattaat

SEQ ID NO: 1706245 - DNA, 15 bp, Homo sapiens
ccatgtctattaatt

SEQ ID NO: 1706246 - DNA, 15 bp, Homo sapiens
catgtctattaattt

SEQ ID NO: 1706247 - DNA, 15 bp, Homo sapiens
atgtctattaattta

SEQ ID NO: 1706248 - DNA, 15 bp, Homo sapiens
tgtctattaatttaa

SEQ ID NO: 1706249 - DNA, 15 bp, Homo sapiens
gtctattaatttaat

SEQ ID NO: 1706250 - DNA, 15 bp, Homo sapiens
ctattaatttaatta

SEQ ID NO: 1706251 - DNA, 15 bp, Homo sapiens
tattaatttaattat

SEQ ID NO: 1706252 - DNA, 15 bp, Homo sapiens
attaatttaattatt

SEQ ID NO: 1706253 - DNA, 15 bp, Homo sapiens
ttaatttaattattt

SEQ ID NO: 1706254 - DNA, 15 bp, Homo sapiens
taatttaattattta

SEQ ID NO: 1706255 - DNA, 15 bp, Homo sapiens
aatttaattatttaa

SEQ ID NO: 1706256 - DNA, 15 bp, Homo sapiens
atttaattatttaat

SEQ ID NO: 1706257 - DNA, 15 bp, Homo sapiens
tttaattatttaata

SEQ ID NO: 1706258 - DNA, 15 bp, Homo sapiens
ttaattatttaataa

SEQ ID NO: 1706259 - DNA, 15 bp, Homo sapiens
taattatttaataat

SEQ ID NO: 1706260 - DNA, 15 bp, Homo sapiens
aattatttaataata

SEQ ID NO: 1706261 - DNA, 15 bp, Homo sapiens
tttaataatatttat

SEQ ID NO: 1706262 - DNA, 15 bp, Homo sapiens
ttaataatatttata

SEQ ID NO: 1706263 - DNA, 15 bp, Homo sapiens
taataatatttatat

SEQ ID NO: 1706264 - DNA, 15 bp, Homo sapiens
aataatatttatatt

SEQ ID NO: 1706265 - DNA, 15 bp, Homo sapiens
ataatatttatatta

SEQ ID NO: 1706266 - DNA, 15 bp, Homo sapiens
taatatttatattaa

SEQ ID NO: 1706267 - DNA, 15 bp, Homo sapiens
aatatttatattaaa

SEQ ID NO: 1706268 - DNA, 15 bp, Homo sapiens
atatttatattaaac

SEQ ID NO: 1706269 - DNA, 15 bp, Homo sapiens
tatttatattaaact

SEQ ID NO: 1706270 - DNA, 15 bp, Homo sapiens
atttatattaaactc

SEQ ID NO: 1706271 - DNA, 15 bp, Homo sapiens
tttatattaaactcc

SEQ ID NO: 1706272 - DNA, 15 bp, Homo sapiens
ttatattaaactcct

SEQ ID NO: 1706273 - DNA, 15 bp, Homo sapiens
tatattaaactcctt

SEQ ID NO: 1706274 - DNA, 15 bp, Homo sapiens
atattaaactcctta

SEQ ID NO: 1706275 - DNA, 15 bp, Homo sapiens
tattaaactccttat

SEQ ID NO: 1706276 - DNA, 15 bp, Homo sapiens
attaaactccttatg

SEQ ID NO: 1706277 - DNA, 15 bp, Homo sapiens
ttaaactccttatgt

SEQ ID NO: 1706278 - DNA, 15 bp, Homo sapiens
taaactccttatgtt

SEQ ID NO: 1706279 - DNA, 15 bp, Homo sapiens
aaactccttatgtta

SEQ ID NO: 1706280 - DNA, 15 bp, Homo sapiens
aactccttatgttac

SEQ ID NO: 1706281 - DNA, 15 bp, Homo sapiens
actccttatgttact

SEQ ID NO: 1706282 - DNA, 15 bp, Homo sapiens
ctccttatgttactt

SEQ ID NO: 1706283 - DNA, 15 bp, Homo sapiens
tccttatgttactta

SEQ ID NO: 1706284 - DNA, 15 bp, Homo sapiens
ccttatgttacttaa

SEQ ID NO: 1706285 - DNA, 15 bp, Homo sapiens
cttatgttacttaac

SEQ ID NO: 1706286 - DNA, 15 bp, Homo sapiens
ttatgttacttaaca

SEQ ID NO: 1706287 - DNA, 15 bp, Homo sapiens
tatgttacttaacat

SEQ ID NO: 1706288 - DNA, 15 bp, Homo sapiens
atgttacttaacatc

SEQ ID NO: 1706289 - DNA, 15 bp, Homo sapiens
tgttacttaacatct

SEQ ID NO: 1706290 - DNA, 15 bp, Homo sapiens
gttacttaacatctt

SEQ ID NO: 1706291 - DNA, 15 bp, Homo sapiens
ttacttaacatcttc

SEQ ID NO: 1706292 - DNA, 15 bp, Homo sapiens
tacttaacatcttct

SEQ ID NO: 1706293 - DNA, 15 bp, Homo sapiens
acttaacatcttctg

SEQ ID NO: 1706294 - DNA, 15 bp, Homo sapiens
cttaacatcttctgt

SEQ ID NO: 1706295 - DNA, 15 bp, Homo sapiens
ttaacatcttctgta

SEQ ID NO: 1706296 - DNA, 15 bp, Homo sapiens
taacatcttctgtaa

SEQ ID NO: 1706297 - DNA, 15 bp, Homo sapiens
aacatcttctgtaac

SEQ ID NO: 1706298 - DNA, 15 bp, Homo sapiens
acatcttctgtaaca

SEQ ID NO: 1706299 - DNA, 15 bp, Homo sapiens
catcttctgtaacag

SEQ ID NO: 1706300 - DNA, 15 bp, Homo sapiens
atcttctgtaacaga

SEQ ID NO: 1706301 - DNA, 15 bp, Homo sapiens
tcttctgtaacagaa

SEQ ID NO: 1706302 - DNA, 15 bp, Homo sapiens
cttctgtaacagaag

SEQ ID NO: 1706303 - DNA, 15 bp, Homo sapiens
ttctgtaacagaagt

SEQ ID NO: 1706304 - DNA, 15 bp, Homo sapiens
tctgtaacagaagtc

SEQ ID NO: 1706305 - DNA, 15 bp, Homo sapiens
ctgtaacagaagtca

SEQ ID NO: 1706306 - DNA, 15 bp, Homo sapiens
tgtaacagaagtcag

SEQ ID NO: 1706307 - DNA, 15 bp, Homo sapiens
gtaacagaagtcagt

SEQ ID NO: 1706308 - DNA, 15 bp, Homo sapiens
taacagaagtcagta

SEQ ID NO: 1706309 - DNA, 15 bp, Homo sapiens
aacagaagtcagtac

SEQ ID NO: 1706310 - DNA, 15 bp, Homo sapiens
acagaagtcagtact

SEQ ID NO: 1706311 - DNA, 15 bp, Homo sapiens
cagaagtcagtactc
